United States Patent Application Publication US 2005/0244851 A1 - sequence listing, part 23

SEQ ID NO: 878644 - DNA, 25 bp, Homo sapien
ggaaacatattcttctgcaatcaat

SEQ ID NO: 878645 - DNA, 25 bp, Homo sapien
gttatatgaatccagggtaacttca

SEQ ID NO: 878646 - DNA, 25 bp, Homo sapien
tggcagccactagaaatagaagtcc

SEQ ID NO: 878647 - DNA, 25 bp, Homo sapien
cactggtttccaacgccagggaatg

SEQ ID NO: 878648 - DNA, 25 bp, Homo sapien
agggaatgaccctaactacataaag

SEQ ID NO: 878649 - DNA, 25 bp, Homo sapien
tattataaagaggaccatagcaaac

SEQ ID NO: 878650 - DNA, 25 bp, Homo sapien
tcttctgccacagtagaggaactcc

SEQ ID NO: 878651 - DNA, 25 bp, Homo sapien
atcagtcccccataaccagcaggtt

SEQ ID NO: 878652 - DNA, 25 bp, Homo sapien
gcaattggcttacatgcacccctct

SEQ ID NO: 878653 - DNA, 25 bp, Homo sapien
gctccaagagtatgcatcagtcccc

SEQ ID NO: 878654 - DNA, 25 bp, Homo sapien
gtctgaaacaaagatctactcagtc

SEQ ID NO: 878655 - DNA, 25 bp, Homo sapien
gcccacttgagggccactgactcag

SEQ ID NO: 878656 - DNA, 25 bp, Homo sapien
agtctgaaacaaagatctactcagt

SEQ ID NO: 878657 - DNA, 25 bp, Homo sapien
ggggcccacttgagggccactgact

SEQ ID NO: 878658 - DNA, 25 bp, Homo sapien
cattcttattggtgatagtcactgg

SEQ ID NO: 878659 - DNA, 25 bp, Homo sapien
tcttattggtgatagtcactggcat

SEQ ID NO: 878660 - DNA, 25 bp, Homo sapien
attcttattggtgatagtcactggc

SEQ ID NO: 878661 - DNA, 25 bp, Homo sapien
ttcttattggtgatagtcactggca

SEQ ID NO: 878662 - DNA, 25 bp, Homo sapien
tgcctagattccaccggaaaatatt

SEQ ID NO: 878663 - DNA, 25 bp, Homo sapien
ttttatggtgcctagattccaccgg

SEQ ID NO: 878664 - DNA, 25 bp, Homo sapien
agtcactcgcttacttggatagaaa

SEQ ID NO: 878665 - DNA, 25 bp, Homo sapien
aatatttagtcactcgcttacttgg

SEQ ID NO: 878666 - DNA, 25 bp, Homo sapien
tagggaaaccagcttacaggcaaca

SEQ ID NO: 878667 - DNA, 25 bp, Homo sapien
gaaaccacgttgacggtctgccaaa

SEQ ID NO: 878668 - DNA, 25 bp, Homo sapien
tcaattggcgggagcatctggaacc

SEQ ID NO: 878669 - DNA, 25 bp, Homo sapien
aatctcaggcttggccagaaatgcg

SEQ ID NO: 878670 - DNA, 25 bp, Homo sapien
gaacatcaagcaacggagagtttcc

SEQ ID NO: 878671 - DNA, 25 bp, Homo sapien
agcaacggagagtttccataatagc

SEQ ID NO: 878672 - DNA, 25 bp, Homo sapien
aagcagatgacaatgaagggacaag

SEQ ID NO: 878673 - DNA, 25 bp, Homo sapien
ttcaggtgaccaaatcggtacagca

SEQ ID NO: 878674 - DNA, 25 bp, Homo sapien
taatgaagcaaaccctcagaaggag

SEQ ID NO: 878675 - DNA, 25 bp, Homo sapien
gaaggagagtaacttgcgacagtgc

SEQ ID NO: 878676 - DNA, 25 bp, Homo sapien
ggtcaggataatgaagcaaaccctc

SEQ ID NO: 878677 - DNA, 25 bp, Homo sapien
aaatccaatggaagtcaaggtcagg

SEQ ID NO: 878678 - DNA, 25 bp, Homo sapien
tgaggcaggagtaaactactgtttg

SEQ ID NO: 878679 - DNA, 25 bp, Homo sapien
ctgaggcaggagtaaactactgttt

SEQ ID NO: 878680 - DNA, 25 bp, Homo sapien
gaggcaggagtaaactactgtttga

SEQ ID NO: 878681 - DNA, 25 bp, Homo sapien
ggcaggagtaaactactgtttgaac

SEQ ID NO: 878682 - DNA, 25 bp, Homo sapien
tagctcgttttcataggtttcccag

SEQ ID NO: 878683 - DNA, 25 bp, Homo sapien
gcatggtggcggtacttgcctttaa

SEQ ID NO: 878684 - DNA, 25 bp, Homo sapien
gatgatggtttacatttgcagcccc

SEQ ID NO: 878685 - DNA, 25 bp, Homo sapien
ggtttcccagtgcaaggatgatggt

SEQ ID NO: 878686 - DNA, 25 bp, Homo sapien
tagtttctctaaaaggtgcctgaca

SEQ ID NO: 878687 - DNA, 25 bp, Homo sapien
cactgtcttactcttgcatgggaaa

SEQ ID NO: 878688 - DNA, 25 bp, Homo sapien
caaaggaggtatcaaactcagtcac

SEQ ID NO: 878689 - DNA, 25 bp, Homo sapien
tttgcccacagatattataaagaag

SEQ ID NO: 878690 - DNA, 25 bp, Homo sapien
tacaactgtatatatctttaatagc

SEQ ID NO: 878691 - DNA, 25 bp, Homo sapien
ctgtatatatctttaatagctgaga

SEQ ID NO: 878692 - DNA, 25 bp, Homo sapien
gagaagggaacttctttgccggtga

SEQ ID NO: 878693 - DNA, 25 bp, Homo sapien
gctgtatctgcaaaggtctcttcat

SEQ ID NO: 878694 - DNA, 25 bp, Homo sapien
cccttaaatatgacagaaaacttat

SEQ ID NO: 878695 - DNA, 25 bp, Homo sapien
ccatcccggtcccttaaatatgaca

SEQ ID NO: 878696 - DNA, 25 bp, Homo sapien
tcttcactgagaccaagtcttggtt

SEQ ID NO: 878697 - DNA, 25 bp, Homo sapien
cactgagaccaagtcttggtttacc

SEQ ID NO: 878698 - DNA, 25 bp, Homo sapien
gatttctctagtgccaaccatcgag

SEQ ID NO: 878699 - DNA, 25 bp, Homo sapien
gtaaaccttagacccacttgtggca

SEQ ID NO: 878700 - DNA, 25 bp, Homo sapien
tccaacaagtcttagcaagcgaggt

SEQ ID NO: 878701 - DNA, 25 bp, Homo sapien
tcatttatgagtgcctaaccccagg

SEQ ID NO: 878702 - DNA, 25 bp, Homo sapien
gtgttaagccatatacaactttttc

SEQ ID NO: 878703 - DNA, 25 bp, Homo sapien
cactttgattggttcaaatgtatta

SEQ ID NO: 878704 - DNA, 25 bp, Homo sapien
attaatgggatgtgttaagccatat

SEQ ID NO: 878705 - DNA, 25 bp, Homo sapien
ctgcactttgattggttcaaatgta

SEQ ID NO: 878706 - DNA, 25 bp, Homo sapien
gaagataaatataaagatatgagat

SEQ ID NO: 878707 - DNA, 25 bp, Homo sapien
atataaagatatgagatttggcttc

SEQ ID NO: 878708 - DNA, 25 bp, Homo sapien
taaatataaagatatgagatttggc

SEQ ID NO: 878709 - DNA, 25 bp, Homo sapien
ctggaagataaatataaagatatga

SEQ ID NO: 878710 - DNA, 25 bp, Homo sapien
ttttgtctatgcaataacgatttct

SEQ ID NO: 878711 - DNA, 25 bp, Homo sapien
tttgtctatgcaataacgatttctg

SEQ ID NO: 878712 - DNA, 25 bp, Homo sapien
atttttgtctatgcaataacgattt

SEQ ID NO: 878713 - DNA, 25 bp, Homo sapien
ttgtctatgcaataacgatttctgc

SEQ ID NO: 878714 - DNA, 25 bp, Homo sapien
atcagttccaaaggaccaaggttat

SEQ ID NO: 878715 - DNA, 25 bp, Homo sapien
taggagtattaagaatcagttccaa

SEQ ID NO: 878716 - DNA, 25 bp, Homo sapien
tgaaccctatgatggctaggagtat

SEQ ID NO: 878717 - DNA, 25 bp, Homo sapien
ccaaaggaccaaggttattgatgac

SEQ ID NO: 878718 - DNA, 25 bp, Homo sapien
ccttgcttggatcgccagcttttat

SEQ ID NO: 878719 - DNA, 25 bp, Homo sapien
aagaacaaagctaccacaacgagga

SEQ ID NO: 878720 - DNA, 25 bp, Homo sapien
gaggaaaaggacaacagcttgccgc

SEQ ID NO: 878721 - DNA, 25 bp, Homo sapien
ttgccgctccttgcttggatcgcca

SEQ ID NO: 878722 - DNA, 25 bp, Homo sapien
aacagcatatactgaagggggtatg

SEQ ID NO: 878723 - DNA, 25 bp, Homo sapien
gatgaacagcatatactgaaggggg

SEQ ID NO: 878724 - DNA, 25 bp, Homo sapien
agatgaacagcatatactgaagggg

SEQ ID NO: 878725 - DNA, 25 bp, Homo sapien
tgaacagcatatactgaagggggta

SEQ ID NO: 878726 - DNA, 25 bp, Homo sapien
gaggacagactgtctcagtgctgtg

SEQ ID NO: 878727 - DNA, 25 bp, Homo sapien
ggtgtccggcccacataatattaac

SEQ ID NO: 878728 - DNA, 25 bp, Homo sapien
tcttcagaactatgatgtgtttggt

SEQ ID NO: 878729 - DNA, 25 bp, Homo sapien
cagtgctgtggataagttatagtct

SEQ ID NO: 878730 - DNA, 25 bp, Homo sapien
agcatttatcaaatcttcctgcaga

SEQ ID NO: 878731 - DNA, 25 bp, Homo sapien
gaatgagcatgtcttttggtatttg

SEQ ID NO: 878732 - DNA, 25 bp, Homo sapien
ctttgtcaatatctgagcagtaggg

SEQ ID NO: 878733 - DNA, 25 bp, Homo sapien
tctgctggtctctctagaatgagca

SEQ ID NO: 878734 - DNA, 25 bp, Homo sapien
tatggcatgggcaatctgagtgtat

SEQ ID NO: 878735 - DNA, 25 bp, Homo sapien
cactgtagagcagaaaaagtaggga

SEQ ID NO: 878736 - DNA, 25 bp, Homo sapien
tcagccccatactaaatacccagga

SEQ ID NO: 878737 - DNA, 25 bp, Homo sapien
gcaccactaacaaggctgtctaaga

SEQ ID NO: 878738 - DNA, 25 bp, Homo sapien
gccttggaagaaaacgtagatgacg

SEQ ID NO: 878739 - DNA, 25 bp, Homo sapien
tcttagagaagttagggcctgatgg

SEQ ID NO: 878740 - DNA, 25 bp, Homo sapien
gaaccctgttcaatgttaacaaatg

SEQ ID NO: 878741 - DNA, 25 bp, Homo sapien
gtcaacaatatcagttcagaagatg

SEQ ID NO: 878742 - DNA, 25 bp, Homo sapien
tctgcagtgcaattaccaatgaaaa

SEQ ID NO: 878743 - DNA, 25 bp, Homo sapien
tttcatataatgatctgcagtgcaa

SEQ ID NO: 878744 - DNA, 25 bp, Homo sapien
aatattgtgcaccataaactgaaca

SEQ ID NO: 878745 - DNA, 25 bp, Homo sapien
agcaatattgtgcaccataaactga

SEQ ID NO: 878746 - DNA, 25 bp, Homo sapien
gagggtctggctagcatttgtatcc

SEQ ID NO: 878747 - DNA, 25 bp, Homo sapien
tctccagagagtcgctgatggtttt

SEQ ID NO: 878748 - DNA, 25 bp, Homo sapien
ctgtgttggctcctcataaagctcc

SEQ ID NO: 878749 - DNA, 25 bp, Homo sapien
tgttggctcctcataaagctccctc

SEQ ID NO: 878750 - DNA, 25 bp, Homo sapien
ctgcctttacctgtctacaccaatg

SEQ ID NO: 878751 - DNA, 25 bp, Homo sapien
tcaaggccaccattactggtgtcat

SEQ ID NO: 878752 - DNA, 25 bp, Homo sapien
accaatgtctcaaggccaccattac

SEQ ID NO: 878753 - DNA, 25 bp, Homo sapien
gcctttacctgtctacaccaatgtc

SEQ ID NO: 878754 - DNA, 25 bp, Homo sapien
tcatgagtcctagaagaatgtccct

SEQ ID NO: 878755 - DNA, 25 bp, Homo sapien
tacaagtttatccagacagggttaa

SEQ ID NO: 878756 - DNA, 25 bp, Homo sapien
tgacagaggcaattccacacagttt

SEQ ID NO: 878757 - DNA, 25 bp, Homo sapien
aaattagggccactactctccaaag

SEQ ID NO: 878758 - DNA, 25 bp, Homo sapien
gccccaaaataatctgtacctctga

SEQ ID NO: 878759 - DNA, 25 bp, Homo sapien
gattttatccacgtttcaagtcaaa

SEQ ID NO: 878760 - DNA, 25 bp, Homo sapien
taatttcatgactattatgtacagc

SEQ ID NO: 878761 - DNA, 25 bp, Homo sapien
catgtagtgatatacgaatagatgg

SEQ ID NO: 878762 - DNA, 25 bp, Homo sapien
tatagccaaggtaggatgagacgga

SEQ ID NO: 878763 - DNA, 25 bp, Homo sapien
tatgttcttctcaaggtcctcagga

SEQ ID NO: 878764 - DNA, 25 bp, Homo sapien
caaagtttagacaaccacagtggca

SEQ ID NO: 878765 - DNA, 25 bp, Homo sapien
gaaatctgtgcgtactcaggcatac

SEQ ID NO: 878766 - DNA, 25 bp, Homo sapien
gacaattactccctgatagataact

SEQ ID NO: 878767 - DNA, 25 bp, Homo sapien
ccaataccactgtagatgcagaaac

SEQ ID NO: 878768 - DNA, 25 bp, Homo sapien
agacttagagagctaccccaccata

SEQ ID NO: 878769 - DNA, 25 bp, Homo sapien
aaagagctctaatgctgtgagactt

SEQ ID NO: 878770 - DNA, 25 bp, Homo sapien
ctttttctgcaggatatcggtgagt

SEQ ID NO: 878771 - DNA, 25 bp, Homo sapien
tttctgcaggatatcggtgagtata

SEQ ID NO: 878772 - DNA, 25 bp, Homo sapien
gatatcggtgagtataaaaataagc

SEQ ID NO: 878773 - DNA, 25 bp, Homo sapien
tctgcaggatatcggtgagtataaa

SEQ ID NO: 878774 - DNA, 25 bp, Homo sapien
ctgtgcttttttctgcaatttattt

SEQ ID NO: 878775 - DNA, 25 bp, Homo sapien
ctgcaatttatttcttagacataag

SEQ ID NO: 878776 - DNA, 25 bp, Homo sapien
tttttctgcaatttatttcttagac

SEQ ID NO: 878777 - DNA, 25 bp, Homo sapien
tgtgcttttttctgcaatttatttc

SEQ ID NO: 878778 - DNA, 25 bp, Homo sapien
aagtcaactcctaagaaggctgaat

SEQ ID NO: 878779 - DNA, 25 bp, Homo sapien
catgagccatacgatggaaccagta

SEQ ID NO: 878780 - DNA, 25 bp, Homo sapien
gaaccagtagtagccaaagtcaact

SEQ ID NO: 878781 - DNA, 25 bp, Homo sapien
gctgaataccaagtccatggagaat

SEQ ID NO: 878782 - DNA, 25 bp, Homo sapien
agaattgatgtcaaattcttccttt

SEQ ID NO: 878783 - DNA, 25 bp, Homo sapien
taagaattgatgtcaaattcttcct

SEQ ID NO: 878784 - DNA, 25 bp, Homo sapien
gaattgatgtcaaattcttcctttt

SEQ ID NO: 878785 - DNA, 25 bp, Homo sapien
aagaattgatgtcaaattcttcctt

SEQ ID NO: 878786 - DNA, 25 bp, Homo sapien
cttagcttcccactgggcggttaat

SEQ ID NO: 878787 - DNA, 25 bp, Homo sapien
aaacattccaaagcaatgagcacca

SEQ ID NO: 878788 - DNA, 25 bp, Homo sapien
ccaaagcaatgagcaccagtcagaa

SEQ ID NO: 878789 - DNA, 25 bp, Homo sapien
cactgggcggttaatagaaacattc

SEQ ID NO: 878790 - DNA, 25 bp, Homo sapien
ggtttccactggattcatattatgg

SEQ ID NO: 878791 - DNA, 25 bp, Homo sapien
atattatggaaatgcttggctgcaa

SEQ ID NO: 878792 - DNA, 25 bp, Homo sapien
cttggctgcaaacggggttgtacta

SEQ ID NO: 878793 - DNA, 25 bp, Homo sapien
gggtttccactggattcatattatg

SEQ ID NO: 878794 - DNA, 25 bp, Homo sapien
atggctacacccgagacagctattc

SEQ ID NO: 878795 - DNA, 25 bp, Homo sapien
ggaatggctacacccgagacagcta

SEQ ID NO: 878796 - DNA, 25 bp, Homo sapien
tacacccgagacagctattctttct

SEQ ID NO: 878797 - DNA, 25 bp, Homo sapien
acctgctctagggaatggctacacc

SEQ ID NO: 878798 - DNA, 25 bp, Homo sapien
gaagtcgagacagaacaccagctga

SEQ ID NO: 878799 - DNA, 25 bp, Homo sapien
caccagctgagattgacgttaaagc

SEQ ID NO: 878800 - DNA, 25 bp, Homo sapien
cgacctggtggctttcctttgagaa

SEQ ID NO: 878801 - DNA, 25 bp, Homo sapien
aaagcatcatccaggcgacctggtg

SEQ ID NO: 878802 - DNA, 25 bp, Homo sapien
ggtttcatcgtgtaaaacaacatgc

SEQ ID NO: 878803 - DNA, 25 bp, Homo sapien
acaacatgcgaaatccctgggaaac

SEQ ID NO: 878804 - DNA, 25 bp, Homo sapien
caggcacctcttctaatgtttggaa

SEQ ID NO: 878805 - DNA, 25 bp, Homo sapien
aagtttcactgggtttcatcgtgta

SEQ ID NO: 878806 - DNA, 25 bp, Homo sapien
ttaggattcaatgcttgaagcctga

SEQ ID NO: 878807 - DNA, 25 bp, Homo sapien
ccagctggagaatatttaggattca

SEQ ID NO: 878808 - DNA, 25 bp, Homo sapien
cccagctggagaatatttaggattc

SEQ ID NO: 878809 - DNA, 25 bp, Homo sapien
atatttaggattcaatgcttgaagc

SEQ ID NO: 878810 - DNA, 25 bp, Homo sapien
caaagaggacgagatgtgcagctca

SEQ ID NO: 878811 - DNA, 25 bp, Homo sapien
cagccgattctgtgtagagagacag

SEQ ID NO: 878812 - DNA, 25 bp, Homo sapien
acaagtacagagttcagtgggcgct

SEQ ID NO: 878813 - DNA, 25 bp, Homo sapien
catcataatagtgtctcggaaagaa

SEQ ID NO: 878814 - DNA, 25 bp, Homo sapien
tgaaaatcgaatatgcttggatcgg

SEQ ID NO: 878815 - DNA, 25 bp, Homo sapien
aatcgaatatgcttggatcgggtca

SEQ ID NO: 878816 - DNA, 25 bp, Homo sapien
aactgaaaatcgaatatgcttggat

SEQ ID NO: 878817 - DNA, 25 bp, Homo sapien
aaatcgaatatgcttggatcgggtc

SEQ ID NO: 878818 - DNA, 25 bp, Homo sapien
gaaggaaccgtagatgcactcaaac

SEQ ID NO: 878819 - DNA, 25 bp, Homo sapien
cagaatcaatattggttttgccgca

SEQ ID NO: 878820 - DNA, 25 bp, Homo sapien
taaactttttgcacggtctaatgac

SEQ ID NO: 878821 - DNA, 25 bp, Homo sapien
gataagtcataaatgtcagccagcc

SEQ ID NO: 878822 - DNA, 25 bp, Homo sapien
catacgcacgaccaaacacatctgg

SEQ ID NO: 878823 - DNA, 25 bp, Homo sapien
taaacgatatttgggtaaggcttgc

SEQ ID NO: 878824 - DNA, 25 bp, Homo sapien
taagtggcactttgtgtaaaccctc

SEQ ID NO: 878825 - DNA, 25 bp, Homo sapien
tcctgagaatggagctggtcctctg

SEQ ID NO: 878826 - DNA, 25 bp, Homo sapien
tatagagtcccctgtttgctggagg

SEQ ID NO: 878827 - DNA, 25 bp, Homo sapien
gctctgatgggagaagtgttccctt

SEQ ID NO: 878828 - DNA, 25 bp, Homo sapien
gcaccaattcccgacagctctgatg

SEQ ID NO: 878829 - DNA, 25 bp, Homo sapien
tcataagtgcgcatgctctgagctg

SEQ ID NO: 878830 - DNA, 25 bp, Homo sapien
atctcgtatcgcctcagtctggtga

SEQ ID NO: 878831 - DNA, 25 bp, Homo sapien
gataattatgatgggcaaattctgc

SEQ ID NO: 878832 - DNA, 25 bp, Homo sapien
ggtttgctgttgacttctgacttgt

SEQ ID NO: 878833 - DNA, 25 bp, Homo sapien
tcagtgagatccagattcactgcta

SEQ ID NO: 878834 - DNA, 25 bp, Homo sapien
tttattcaaacacatgcaatcatat

SEQ ID NO: 878835 - DNA, 25 bp, Homo sapien
acagcaagactgacggcagctcaac

SEQ ID NO: 878836 - DNA, 25 bp, Homo sapien
caggtactgcgctagacatggaaca

SEQ ID NO: 878837 - DNA, 25 bp, Homo sapien
caaatagagaccaaagacagcaaga

SEQ ID NO: 878838 - DNA, 25 bp, Homo sapien
tcaaacgtttagcaactggaccata

SEQ ID NO: 878839 - DNA, 25 bp, Homo sapien
taaaaagtggcatctcaatatagga

SEQ ID NO: 878840 - DNA, 25 bp, Homo sapien
taaaaaattttatgctcagactgag

SEQ ID NO: 878841 - DNA, 25 bp, Homo sapien
tcagactgagcgtatgtaaaagtat

SEQ ID NO: 878842 - DNA, 25 bp, Homo sapien
tagcagtatctaagtgagccagatg

SEQ ID NO: 878843 - DNA, 25 bp, Homo sapien
tgtttcactcactggtgcactggca

SEQ ID NO: 878844 - DNA, 25 bp, Homo sapien
gaggaccctgcataatggaaattca

SEQ ID NO: 878845 - DNA, 25 bp, Homo sapien
cattcactgaccacgtttctgggct

SEQ ID NO: 878846 - DNA, 25 bp, Homo sapien
tgacatgtcatgcacaggttgattg

SEQ ID NO: 878847 - DNA, 25 bp, Homo sapien
caccaaagtagtttgtgacatgtca

SEQ ID NO: 878848 - DNA, 25 bp, Homo sapien
caggtgagtgacataagagatgatg

SEQ ID NO: 878849 - DNA, 25 bp, Homo sapien
gtatgtggggctttatccagcacca

SEQ ID NO: 878850 - DNA, 25 bp, Homo sapien
tggaaactgacagtaaagccagcac

SEQ ID NO: 878851 - DNA, 25 bp, Homo sapien
caatttggatccctgctttgcctaa

SEQ ID NO: 878852 - DNA, 25 bp, Homo sapien
tcctttcagtcaagcaactctggaa

SEQ ID NO: 878853 - DNA, 25 bp, Homo sapien
gctattctggcattgtgtgaacaac

SEQ ID NO: 878854 - DNA, 25 bp, Homo sapien
cagtgactggatttaagctaaaatc

SEQ ID NO: 878855 - DNA, 25 bp, Homo sapien
tacaacaggaggtttatacagccag

SEQ ID NO: 878856 - DNA, 25 bp, Homo sapien
cactcattgtaactagaaatataca

SEQ ID NO: 878857 - DNA, 25 bp, Homo sapien
aatgggtctatatacacactcattg

SEQ ID NO: 878858 - DNA, 25 bp, Homo sapien
cataaaaatgccatggtgcttcagg

SEQ ID NO: 878859 - DNA, 25 bp, Homo sapien
ggactgaggttccagaactgaagag

SEQ ID NO: 878860 - DNA, 25 bp, Homo sapien
aatacggacctgagacaatagttta

SEQ ID NO: 878861 - DNA, 25 bp, Homo sapien
caatagtttattttggctgggactg

SEQ ID NO: 878862 - DNA, 25 bp, Homo sapien
tcctttttgacccataatatttaga

SEQ ID NO: 878863 - DNA, 25 bp, Homo sapien
cttggggctgctttaattagatccc

SEQ ID NO: 878864 - DNA, 25 bp, Homo sapien
cccacaaaattaacaatgttgtatt

SEQ ID NO: 878865 - DNA, 25 bp, Homo sapien
tctagacgagagattagacaattgt

SEQ ID NO: 878866 - DNA, 25 bp, Homo sapien
ttattgctgaaagcgcgcagctgaa

SEQ ID NO: 878867 - DNA, 25 bp, Homo sapien
ccttattgctgaaagcgcgcagctg

SEQ ID NO: 878868 - DNA, 25 bp, Homo sapien
cttattgctgaaagcgcgcagctga

SEQ ID NO: 878869 - DNA, 25 bp, Homo sapien
agcgcgcagctgaataatcctcaaa

SEQ ID NO: 878870 - DNA, 25 bp, Homo sapien
tccttgtagcattatgggattctct

SEQ ID NO: 878871 - DNA, 25 bp, Homo sapien
tcacgtaagataactgcgaatttgt

SEQ ID NO: 878872 - DNA, 25 bp, Homo sapien
gcattatgggattctcttgaagtgt

SEQ ID NO: 878873 - DNA, 25 bp, Homo sapien
cgtaagataactgcgaatttgtttt

SEQ ID NO: 878874 - DNA, 25 bp, Homo sapien
ccatttgatttgttcaatacttcac

SEQ ID NO: 878875 - DNA, 25 bp, Homo sapien
taaaattagtctaccagtccaagat

SEQ ID NO: 878876 - DNA, 25 bp, Homo sapien
tttagagccctcatgtaggtcaatg

SEQ ID NO: 878877 - DNA, 25 bp, Homo sapien
tacttcactttaatcttcaagatcc

SEQ ID NO: 878878 - DNA, 25 bp, Homo sapien
tagacagacataatttgacagcaaa

SEQ ID NO: 878879 - DNA, 25 bp, Homo sapien
tcatactgaatgaggttgataaggt

SEQ ID NO: 878880 - DNA, 25 bp, Homo sapien
ggaaatattacaatatcatactgaa

SEQ ID NO: 878881 - DNA, 25 bp, Homo sapien
gcatagtcaagcatatagacagaca

SEQ ID NO: 878882 - DNA, 25 bp, Homo sapien
ccctttgaagacgtggcagatgttg

SEQ ID NO: 878883 - DNA, 25 bp, Homo sapien
tgaagacgtggcagatgttggcttt

SEQ ID NO: 878884 - DNA, 25 bp, Homo sapien
ctttgaagacgtggcagatgttggc

SEQ ID NO: 878885 - DNA, 25 bp, Homo sapien
gagtccctttgaagacgtggcagat

SEQ ID NO: 878886 - DNA, 25 bp, Homo sapien
taaaagttagcttttgagaccgtga

SEQ ID NO: 878887 - DNA, 25 bp, Homo sapien
tgagagaagaatccatcctatagta

SEQ ID NO: 878888 - DNA, 25 bp, Homo sapien
catcctatagtaacgctgaagaaca

SEQ ID NO: 878889 - DNA, 25 bp, Homo sapien
ttttgagaccgtgagagaagaatcc

SEQ ID NO: 878890 - DNA, 25 bp, Homo sapien
gagctgtcgcttttcctcttgccgc

SEQ ID NO: 878891 - DNA, 25 bp, Homo sapien
ttctccgcctccgcaggtgacagtg

SEQ ID NO: 878892 - DNA, 25 bp, Homo sapien
tgacagtgcctggcggccgtagtcc

SEQ ID NO: 878893 - DNA, 25 bp, Homo sapien
ctcttgccgccgcttcgcttctccg

SEQ ID NO: 878894 - DNA, 25 bp, Homo sapien
ggcagaggctgtgccgagccgcact

SEQ ID NO: 878895 - DNA, 25 bp, Homo sapien
gcagaggctgtgccgagccgcactc

SEQ ID NO: 878896 - DNA, 25 bp, Homo sapien
aggctgtgccgagccgcactcggtg

SEQ ID NO: 878897 - DNA, 25 bp, Homo sapien
agaggctgtgccgagccgcactcgg

SEQ ID NO: 878898 - DNA, 25 bp, Homo sapien
cgggaggtgccagttggtttgcaga

SEQ ID NO: 878899 - DNA, 25 bp, Homo sapien
tgcgggaggtgccagttggtttgca

SEQ ID NO: 878900 - DNA, 25 bp, Homo sapien
ctgcgggaggtgccagttggtttgc

SEQ ID NO: 878901 - DNA, 25 bp, Homo sapien
gcgggaggtgccagttggtttgcag

SEQ ID NO: 878902 - DNA, 25 bp, Homo sapien
agaacgggtgcaagccttgcgccgt

SEQ ID NO: 878903 - DNA, 25 bp, Homo sapien
gggtatcccgcgattatgcaagatg

SEQ ID NO: 878904 - DNA, 25 bp, Homo sapien
ggcagccaaagagcgggtgttccat

SEQ ID NO: 878905 - DNA, 25 bp, Homo sapien
cagatcttccatggagggcgagaga

SEQ ID NO: 878906 - DNA, 25 bp, Homo sapien
gcggccagtctcctttacatatgaa

SEQ ID NO: 878907 - DNA, 25 bp, Homo sapien
tatgaacagtcggacctggaagagc

SEQ ID NO: 878908 - DNA, 25 bp, Homo sapien
ttaacctcccaaagcaatagcggtg

SEQ ID NO: 878909 - DNA, 25 bp, Homo sapien
ttctgcagagctcggataatcccgg

SEQ ID NO: 878910 - DNA, 25 bp, Homo sapien
ctcggggaaacgtgacttgtcagtg

SEQ ID NO: 878911 - DNA, 25 bp, Homo sapien
cagaaaagctagggatacgcctatc

SEQ ID NO: 878912 - DNA, 25 bp, Homo sapien
gacttgtcagtgtcatttgggaact

SEQ ID NO: 878913 - DNA, 25 bp, Homo sapien
aacgtgacttgtcagtgtcatttgg

SEQ ID NO: 878914 - DNA, 25 bp, Homo sapien
tttcgcagctggtttctgtcggtgg

SEQ ID NO: 878915 - DNA, 25 bp, Homo sapien
aataggctgggacgccagatctgag

SEQ ID NO: 878916 - DNA, 25 bp, Homo sapien
gttgttaataggctgggacgccaga

SEQ ID NO: 878917 - DNA, 25 bp, Homo sapien
gccgcagcgcgcctaggttttcgca

SEQ ID NO: 878918 - DNA, 25 bp, Homo sapien
taaaatagaaaactcgcctctagta

SEQ ID NO: 878919 - DNA, 25 bp, Homo sapien
ggcacttggttacaattttgcaccc

SEQ ID NO: 878920 - DNA, 25 bp, Homo sapien
cctctagtaagcatgcgagagcgag

SEQ ID NO: 878921 - DNA, 25 bp, Homo sapien
gctgctacttgcttggcgggcgaca

SEQ ID NO: 878922 - DNA, 25 bp, Homo sapien
tgtccagaagtttctctacaacctg

SEQ ID NO: 878923 - DNA, 25 bp, Homo sapien
ttaaacctgcccagtgactgtgctg

SEQ ID NO: 878924 - DNA, 25 bp, Homo sapien
cctctagaactgtggggccagaaac

SEQ ID NO: 878925 - DNA, 25 bp, Homo sapien
tgtgtcagatgttaacaacctgtcc

SEQ ID NO: 878926 - DNA, 25 bp, Homo sapien
ttcaattccggtatagtataatcaa

SEQ ID NO: 878927 - DNA, 25 bp, Homo sapien
tcaattccggtatagtataatcaat

SEQ ID NO: 878928 - DNA, 25 bp, Homo sapien
attcaattccggtatagtataatca

SEQ ID NO: 878929 - DNA, 25 bp, Homo sapien
ttttgaacataaactcaagatttta

SEQ ID NO: 878930 - DNA, 25 bp, Homo sapien
tttattgtcttcataataaaagatg

SEQ ID NO: 878931 - DNA, 25 bp, Homo sapien
ttgtcttcataataaaagatgacgc

SEQ ID NO: 878932 - DNA, 25 bp, Homo sapien
tattgtcttcataataaaagatgac

SEQ ID NO: 878933 - DNA, 25 bp, Homo sapien
aacgttaaccaggcttccgtgagtg

SEQ ID NO: 878934 - DNA, 25 bp, Homo sapien
gccgctttccatgggcatacagata

SEQ ID NO: 878935 - DNA, 25 bp, Homo sapien
tggaaaatcagcttggtttgcccac

SEQ ID NO: 878936 - DNA, 25 bp, Homo sapien
tctggaaaatcagcttggtttgccc

SEQ ID NO: 878937 - DNA, 25 bp, Homo sapien
aagcaaaagtagcaagacataggct

SEQ ID NO: 878938 - DNA, 25 bp, Homo sapien
caattggatgtgctatcttctgcca

SEQ ID NO: 878939 - DNA, 25 bp, Homo sapien
ttaagcactatgaggatgtattcca

SEQ ID NO: 878940 - DNA, 25 bp, Homo sapien
tagtgattatctgaatatgagtggc

SEQ ID NO: 878941 - DNA, 25 bp, Homo sapien
cagaacatagaattgcaagaggcat

SEQ ID NO: 878942 - DNA, 25 bp, Homo sapien
cctgctattgttttcgtcttggaat

SEQ ID NO: 878943 - DNA, 25 bp, Homo sapien
ttccatttgaacatcctgttacaag

SEQ ID NO: 878944 - DNA, 25 bp, Homo sapien
caagaatgtatactgccaaggatgt

SEQ ID NO: 878945 - DNA, 25 bp, Homo sapien
tctggacttaacttgacatttaagg

SEQ ID NO: 878946 - DNA, 25 bp, Homo sapien
tggctctttcacaaacattatgcaa

SEQ ID NO: 878947 - DNA, 25 bp, Homo sapien
catttggccagacatatatgtttcc

SEQ ID NO: 878948 - DNA, 25 bp, Homo sapien
acttctgaaaatctggacttaactt

SEQ ID NO: 878949 - DNA, 25 bp, Homo sapien
cactcaagacagctggctgcttggt

SEQ ID NO: 878950 - DNA, 25 bp, Homo sapien
taagagtttctatgaccaggagctg

SEQ ID NO: 878951 - DNA, 25 bp, Homo sapien
cctctccagatagtaaagcttgtgc

SEQ ID NO: 878952 - DNA, 25 bp, Homo sapien
tgcgatcagtggctgctactcccaa

SEQ ID NO: 878953 - DNA, 25 bp, Homo sapien
tccttgaggatgcatgttccctaag

SEQ ID NO: 878954 - DNA, 25 bp, Homo sapien
tttgctggcagtaggtccttgagga

SEQ ID NO: 878955 - DNA, 25 bp, Homo sapien
cccaatgatctatatttggtggtga

SEQ ID NO: 878956 - DNA, 25 bp, Homo sapien
ttcccaaagcaagttgacccaatga

SEQ ID NO: 878957 - DNA, 25 bp, Homo sapien
tccatggtctttgaaaggagcacac

SEQ ID NO: 878958 - DNA, 25 bp, Homo sapien
cagagagttaaagacggaatatccc

SEQ ID NO: 878959 - DNA, 25 bp, Homo sapien
gaaaaggaccaatggcatcagtggg

SEQ ID NO: 878960 - DNA, 25 bp, Homo sapien
tgggccgcattccagacctactgag

SEQ ID NO: 878961 - DNA, 25 bp, Homo sapien
ttccatataataccagaagagcaaa

SEQ ID NO: 878962 - DNA, 25 bp, Homo sapien
tccatataataccagaagagcaaat

SEQ ID NO: 878963 - DNA, 25 bp, Homo sapien
tacttccatataataccagaagagc

SEQ ID NO: 878964 - DNA, 25 bp, Homo sapien
aaatacttccatataataccagaag

SEQ ID NO: 878965 - DNA, 25 bp, Homo sapien
gtgaaacaaatatcaaacacccagt

SEQ ID NO: 878966 - DNA, 25 bp, Homo sapien
actcaacaacatgttcaactgctgc

SEQ ID NO: 878967 - DNA, 25 bp, Homo sapien
aatgaatgaatggtataaactcaac

SEQ ID NO: 878968 - DNA, 25 bp, Homo sapien
tatcaaacacccagtattttctgaa

SEQ ID NO: 878969 - DNA, 25 bp, Homo sapien
aatcatcagacggttcacactcggg

SEQ ID NO: 878970 - DNA, 25 bp, Homo sapien
gatactgagcttactagatccttca

SEQ ID NO: 878971 - DNA, 25 bp, Homo sapien
tttaccagtagcaggaaacaacttg

SEQ ID NO: 878972 - DNA, 25 bp, Homo sapien
actaaaacgaatgactggcacacaa

SEQ ID NO: 878973 - DNA, 25 bp, Homo sapien
aaactctttaatgagccttgggcat

SEQ ID NO: 878974 - DNA, 25 bp, Homo sapien
tcttttctaaccatgttcccctgag

SEQ ID NO: 878975 - DNA, 25 bp, Homo sapien
ccctggagccccatctggttttctt

SEQ ID NO: 878976 - DNA, 25 bp, Homo sapien
gcattgttcgacttgtgtggtggcc

SEQ ID NO: 878977 - DNA, 25 bp, Homo sapien
taatccaaaactgtagttctccttc

SEQ ID NO: 878978 - DNA, 25 bp, Homo sapien
ctaatccaaaactgtagttctcctt

SEQ ID NO: 878979 - DNA, 25 bp, Homo sapien
ggattccactagcaaacttgcacgg

SEQ ID NO: 878980 - DNA, 25 bp, Homo sapien
gcccctggctggtgtaagtgattga

SEQ ID NO: 878981 - DNA, 25 bp, Homo sapien
gggaaaagcacgtgtgcccatcaga

SEQ ID NO: 878982 - DNA, 25 bp, Homo sapien
aactgggtgctagacaggattccac

SEQ ID NO: 878983 - DNA, 25 bp, Homo sapien
tgaatcatgtcaagttttggtttct

SEQ ID NO: 878984 - DNA, 25 bp, Homo sapien
ctggatgaatcatgtcaagttttgg

SEQ ID NO: 878985 - DNA, 25 bp, Homo sapien
aatcatgtcaagttttggtttctcc

SEQ ID NO: 878986 - DNA, 25 bp, Homo sapien
ggatgaatcatgtcaagttttggtt

SEQ ID NO: 878987 - DNA, 25 bp, Homo sapien
caagaaacaggctccctatttcatg

SEQ ID NO: 878988 - DNA, 25 bp, Homo sapien
tcaccaagaaacaggctccctattt

SEQ ID NO: 878989 - DNA, 25 bp, Homo sapien
atattcaccaagaaacaggctccct

SEQ ID NO: 878990 - DNA, 25 bp, Homo sapien
acaggctccctatttcatgaatgtt

SEQ ID NO: 878991 - DNA, 25 bp, Homo sapien
gtgtagatgtgtgaggaggccaagc

SEQ ID NO: 878992 - DNA, 25 bp, Homo sapien
gtgtgaggaggccaagccaaagcct

SEQ ID NO: 878993 - DNA, 25 bp, Homo sapien
ccgagtgtagatgtgtgaggaggcc

SEQ ID NO: 878994 - DNA, 25 bp, Homo sapien
agatgtgtgaggaggccaagccaaa

SEQ ID NO: 878995 - DNA, 25 bp, Homo sapien
tatttccatacgcagcttcccctga

SEQ ID NO: 878996 - DNA, 25 bp, Homo sapien
ccaccagaaggttacccagtgcaca

SEQ ID NO: 878997 - DNA, 25 bp, Homo sapien
tgtggactgtccagataaggcatct

SEQ ID NO: 878998 - DNA, 25 bp, Homo sapien
taaggcatctgagctttgttcctat

SEQ ID NO: 878999 - DNA, 25 bp, Homo sapien
ctgcgtaactctgtgagcagtcctg

SEQ ID NO: 879000 - DNA, 25 bp, Homo sapien
tgagcagtcctgtgttcagcgccat

SEQ ID NO: 879001 - DNA, 25 bp, Homo sapien
tgcgtaactctgtgagcagtcctgt

SEQ ID NO: 879002 - DNA, 25 bp, Homo sapien
tctgtgagcagtcctgtgttcagcg

SEQ ID NO: 879003 - DNA, 25 bp, Homo sapien
gatttattgcttttttcagaccata

SEQ ID NO: 879004 - DNA, 25 bp, Homo sapien
tattgcttttttcagaccatagaag

SEQ ID NO: 879005 - DNA, 25 bp, Homo sapien
tgatttattgcttttttcagaccat

SEQ ID NO: 879006 - DNA, 25 bp, Homo sapien
tttattgcttttttcagaccataga

SEQ ID NO: 879007 - DNA, 25 bp, Homo sapien
tggatcatctgaatattgctcgtaa

SEQ ID NO: 879008 - DNA, 25 bp, Homo sapien
ggcattattgggccttctctcatat

SEQ ID NO: 879009 - DNA, 25 bp, Homo sapien
gatggctgcaggcattattgggcct

SEQ ID NO: 879010 - DNA, 25 bp, Homo sapien
catctacacatggatcatctgaata

SEQ ID NO: 879011 - DNA, 25 bp, Homo sapien
ctcaatacataacgggcaaaagtca

SEQ ID NO: 879012 - DNA, 25 bp, Homo sapien
tcctcaatacataacgggcaaaagt

SEQ ID NO: 879013 - DNA, 25 bp, Homo sapien
gctcttcctcaatacataacgggca

SEQ ID NO: 879014 - DNA, 25 bp, Homo sapien
gcatacgctcttcctcaatacataa

SEQ ID NO: 879015 - DNA, 25 bp, Homo sapien
tgaagtagagttttggtttggactc

SEQ ID NO: 879016 - DNA, 25 bp, Homo sapien
gtgtgttgtcttctccagcattgag

SEQ ID NO: 879017 - DNA, 25 bp, Homo sapien
ttggtttggactcaacttccaaaga

SEQ ID NO: 879018 - DNA, 25 bp, Homo sapien
aacttccaaagaatgtgtgttgtct

SEQ ID NO: 879019 - DNA, 25 bp, Homo sapien
ttttcacctacaactgcaccgcaat

SEQ ID NO: 879020 - DNA, 25 bp, Homo sapien
tttcatcacgttcaggattttcacc

SEQ ID NO: 879021 - DNA, 25 bp, Homo sapien
gcaccgcaataccagcatccagtta

SEQ ID NO: 879022 - DNA, 25 bp, Homo sapien
ctggttgattcaaacccttgctttc

SEQ ID NO: 879023 - DNA, 25 bp, Homo sapien
acaccattggaaggctgtaaacgtc

SEQ ID NO: 879024 - DNA, 25 bp, Homo sapien
tccctggaggtatggtgcataacac

SEQ ID NO: 879025 - DNA, 25 bp, Homo sapien
gattgccgccaaatgcaatggtgta

SEQ ID NO: 879026 - DNA, 25 bp, Homo sapien
cattgaaatgaactgtgtcgtctcc

SEQ ID NO: 879027 - DNA, 25 bp, Homo sapien
tatctcaataagactcaagtgtacg

SEQ ID NO: 879028 - DNA, 25 bp, Homo sapien
aaattatctcaataagactcaagtg

SEQ ID NO: 879029 - DNA, 25 bp, Homo sapien
gactcaagtgtacgtctgtaaggca

SEQ ID NO: 879030 - DNA, 25 bp, Homo sapien
tctgtaaggcaaaatgcagtcttca

SEQ ID NO: 879031 - DNA, 25 bp, Homo sapien
tgagcgcagatggaccaagtaaccg

SEQ ID NO: 879032 - DNA, 25 bp, Homo sapien
tgatcttcccacaggtagtagtagc

SEQ ID NO: 879033 - DNA, 25 bp, Homo sapien
tgaagtttctcaagggagacgcacc

SEQ ID NO: 879034 - DNA, 25 bp, Homo sapien
caagtaaccggagacgccaagagtc

SEQ ID NO: 879035 - DNA, 25 bp, Homo sapien
actcgggggaactcaggcatgagaa

SEQ ID NO: 879036 - DNA, 25 bp, Homo sapien
tactcgggggaactcaggcatgaga

SEQ ID NO: 879037 - DNA, 25 bp, Homo sapien
tttgtttgaattctttgtgtccctc

SEQ ID NO: 879038 - DNA, 25 bp, Homo sapien
tattgaagtttcagggaaagtctag

SEQ ID NO: 879039 - DNA, 25 bp, Homo sapien
gtttcagggaaagtctagcttctac

SEQ ID NO: 879040 - DNA, 25 bp, Homo sapien
tgaagtttcagggaaagtctagctt

SEQ ID NO: 879041 - DNA, 25 bp, Homo sapien
agtttcagggaaagtctagcttcta

SEQ ID NO: 879042 - DNA, 25 bp, Homo sapien
tctgagatcgagctggaagagcatc

SEQ ID NO: 879043 - DNA, 25 bp, Homo sapien
cctcttggtgggatgcacagggata

SEQ ID NO: 879044 - DNA, 25 bp, Homo sapien
ggctttctcatgaggatcatcagca

SEQ ID NO: 879045 - DNA, 25 bp, Homo sapien
taccttcgatgcaaggaaagtcttc

SEQ ID NO: 879046 - DNA, 25 bp, Homo sapien
gggagctgactcttacctgtaaatg

SEQ ID NO: 879047 - DNA, 25 bp, Homo sapien
tgatgaactcctaagacgactaact

SEQ ID NO: 879048 - DNA, 25 bp, Homo sapien
tcagacgtggcttatatatcagatg

SEQ ID NO: 879049 - DNA, 25 bp, Homo sapien
caaggtaactaagatccctgagctc

SEQ ID NO: 879050 - DNA, 25 bp, Homo sapien
gtacgtacatatatacgggtatata

SEQ ID NO: 879051 - DNA, 25 bp, Homo sapien
tatgtacgtacatatatacgggtat

SEQ ID NO: 879052 - DNA, 25 bp, Homo sapien
atgtacgtacatatatacgggtata

SEQ ID NO: 879053 - DNA, 25 bp, Homo sapien
caacttttatagtttccacgtgcag

SEQ ID NO: 879054 - DNA, 25 bp, Homo sapien
tgaaaacacttcatgcaacttttat

SEQ ID NO: 879055 - DNA, 25 bp, Homo sapien
tatagtgtatctttaactgaaaaca

SEQ ID NO: 879056 - DNA, 25 bp, Homo sapien
tccacaaggtagatattgtatagtg

SEQ ID NO: 879057 - DNA, 25 bp, Homo sapien
gaaagaatagctcaccccatcatta

SEQ ID NO: 879058 - DNA, 25 bp, Homo sapien
tagggatcttgagtaatatgtggca

SEQ ID NO: 879059 - DNA, 25 bp, Homo sapien
gataactaaccagggattgaccaga

SEQ ID NO: 879060 - DNA, 25 bp, Homo sapien
tgaccagaatcacctacgaaacttt

SEQ ID NO: 879061 - DNA, 25 bp, Homo sapien
gatagcaccttgccttaaactctcc

SEQ ID NO: 879062 - DNA, 25 bp, Homo sapien
tgatagcaccttgccttaaactctc

SEQ ID NO: 879063 - DNA, 25 bp, Homo sapien
aatgatagcaccttgccttaaactc

SEQ ID NO: 879064 - DNA, 25 bp, Homo sapien
atgatagcaccttgccttaaactct

SEQ ID NO: 879065 - DNA, 25 bp, Homo sapien
ttcatcaatgatgcaatccttttct

SEQ ID NO: 879066 - DNA, 25 bp, Homo sapien
tcatcaatgatgcaatccttttctt

SEQ ID NO: 879067 - DNA, 25 bp, Homo sapien
atcaatgatgcaatccttttcttca

SEQ ID NO: 879068 - DNA, 25 bp, Homo sapien
catcaatgatgcaatccttttcttc

SEQ ID NO: 879069 - DNA, 25 bp, Homo sapien
gagtccagctagaatgaagacgcct

SEQ ID NO: 879070 - DNA, 25 bp, Homo sapien
aatgaagacgccttggtgaacaccc

SEQ ID NO: 879071 - DNA, 25 bp, Homo sapien
gccttggtgaacacccatggctttc

SEQ ID NO: 879072 - DNA, 25 bp, Homo sapien
caggaggttaaatctgagtccagct

SEQ ID NO: 879073 - DNA, 25 bp, Homo sapien
gcacgtagtcatatctacatgtgga

SEQ ID NO: 879074 - DNA, 25 bp, Homo sapien
tggaactctgggtagacgagccttc

SEQ ID NO: 879075 - DNA, 25 bp, Homo sapien
caagtgaaaccaggtagtgtgaatc

SEQ ID NO: 879076 - DNA, 25 bp, Homo sapien
tctttggaagcgactctgaactgag

SEQ ID NO: 879077 - DNA, 25 bp, Homo sapien
agtgaggcaggagttctttggcctc

SEQ ID NO: 879078 - DNA, 25 bp, Homo sapien
tctttggcctctagaccttggccag

SEQ ID NO: 879079 - DNA, 25 bp, Homo sapien
tttggcctctagaccttggccaggc

SEQ ID NO: 879080 - DNA, 25 bp, Homo sapien
agttctttggcctctagaccttggc

SEQ ID NO: 879081 - DNA, 25 bp, Homo sapien
tgcccggtctccgaaggagtctttc

SEQ ID NO: 879082 - DNA, 25 bp, Homo sapien
caatttcaggaactgtcatgccata

SEQ ID NO: 879083 - DNA, 25 bp, Homo sapien
aatgtcattttctcttatagtttat

SEQ ID NO: 879084 - DNA, 25 bp, Homo sapien
aatttcaggaactgtcatgccataa

SEQ ID NO: 879085 - DNA, 25 bp, Homo sapien
tatattgtcacacatatgcattaca

SEQ ID NO: 879086 - DNA, 25 bp, Homo sapien
tgaggtgtaggacataggaaacgct

SEQ ID NO: 879087 - DNA, 25 bp, Homo sapien
tctctgccgacatgttttcagtgag

SEQ ID NO: 879088 - DNA, 25 bp, Homo sapien
ccctggcaggatctgttttatattg

SEQ ID NO: 879089 - DNA, 25 bp, Homo sapien
catggttggtcaggtttggcatgat

SEQ ID NO: 879090 - DNA, 25 bp, Homo sapien
agtgtcttagttttacctaggcaca

SEQ ID NO: 879091 - DNA, 25 bp, Homo sapien
tatagcatgttaacctttctgccac

SEQ ID NO: 879092 - DNA, 25 bp, Homo sapien
catgaggtgataactactttgtaca

SEQ ID NO: 879093 - DNA, 25 bp, Homo sapien
gcatatagaaggaatcaagtaggtg

SEQ ID NO: 879094 - DNA, 25 bp, Homo sapien
gttggccagatggaaaaatttgtcc

SEQ ID NO: 879095 - DNA, 25 bp, Homo sapien
gtgggtgacagtaaaagaatcatcc

SEQ ID NO: 879096 - DNA, 25 bp, Homo sapien
aaaacctgctaatctgggttagaga

SEQ ID NO: 879097 - DNA, 25 bp, Homo sapien
cagaaagcaaagttactagggctaa

SEQ ID NO: 879098 - DNA, 25 bp, Homo sapien
tatgccacaataccagatatcatgt

SEQ ID NO: 879099 - DNA, 25 bp, Homo sapien
ggttggtgccctagcttcacaagaa

SEQ ID NO: 879100 - DNA, 25 bp, Homo sapien
gaggagctgctcagtacatatttta

SEQ ID NO: 879101 - DNA, 25 bp, Homo sapien
gggagctaagcaagatttgtacaga

SEQ ID NO: 879102 - DNA, 25 bp, Homo sapien
gagccaccttatgcagaattctgta

SEQ ID NO: 879103 - DNA, 25 bp, Homo sapien
tgttaccagtaaggcatccggtcaa

SEQ ID NO: 879104 - DNA, 25 bp, Homo sapien
tttttgaagacctctgcttgactgg

SEQ ID NO: 879105 - DNA, 25 bp, Homo sapien
ggttcaatgccccaacccaatgttg

SEQ ID NO: 879106 - DNA, 25 bp, Homo sapien
taattcacaggagactttcatcagg

SEQ ID NO: 879107 - DNA, 25 bp, Homo sapien
agtatggcggtatatgctttagtca

SEQ ID NO: 879108 - DNA, 25 bp, Homo sapien
cagacagcagtttcaatgggtatca

SEQ ID NO: 879109 - DNA, 25 bp, Homo sapien
gttgaatcaacagaagccccagatg

SEQ ID NO: 879110 - DNA, 25 bp, Homo sapien
tagaaacaagtgtatcaggaaagcc

SEQ ID NO: 879111 - DNA, 25 bp, Homo sapien
taaataacctgacgttagcagcggt

SEQ ID NO: 879112 - DNA, 25 bp, Homo sapien
tctcaggtcatctcgtatggtcaag

SEQ ID NO: 879113 - DNA, 25 bp, Homo sapien
tttgtaatggcttgtggctctcagg

SEQ ID NO: 879114 - DNA, 25 bp, Homo sapien
ccaagtattagttataaaagtcatc

SEQ ID NO: 879115 - DNA, 25 bp, Homo sapien
gttaaatgtgaggaaatgcttacag

SEQ ID NO: 879116 - DNA, 25 bp, Homo sapien
cactgggtacattttaaggacttga

SEQ ID NO: 879117 - DNA, 25 bp, Homo sapien
cccacttatgaggaacactgggtac

SEQ ID NO: 879118 - DNA, 25 bp, Homo sapien
ggtcccataaccctaagaatctgct

SEQ ID NO: 879119 - DNA, 25 bp, Homo sapien
tgtctggtacagacattggcagctt

SEQ ID NO: 879120 - DNA, 25 bp, Homo sapien
gtttcatggcaagaaatccagtctt

SEQ ID NO: 879121 - DNA, 25 bp, Homo sapien
aataggctcctagtcttaaaggtca

SEQ ID NO: 879122 - DNA, 25 bp, Homo sapien
tctgagagctgggagaaggttctca

SEQ ID NO: 879123 - DNA, 25 bp, Homo sapien
ccgtattgattaggataaaaccaag

SEQ ID NO: 879124 - DNA, 25 bp, Homo sapien
gataaaaccaagtcatcccgaacat

SEQ ID NO: 879125 - DNA, 25 bp, Homo sapien
tgcaacaagtccgtattgattagga

SEQ ID NO: 879126 - DNA, 25 bp, Homo sapien
gccatatcctggatagcagtgcttc

SEQ ID NO: 879127 - DNA, 25 bp, Homo sapien
ccacttatgaggacaggcggtgttt

SEQ ID NO: 879128 - DNA, 25 bp, Homo sapien
cccaaactgagattaaggaacgctt

SEQ ID NO: 879129 - DNA, 25 bp, Homo sapien
gtttccacatagatggtttccagct

SEQ ID NO: 879130 - DNA, 25 bp, Homo sapien
tgatccaatcttgtcatctaattca

SEQ ID NO: 879131 - DNA, 25 bp, Homo sapien
ctgtttgggttgagctgatccaatc

SEQ ID NO: 879132 - DNA, 25 bp, Homo sapien
ggttgagctgatccaatcttgtcat

SEQ ID NO: 879133 - DNA, 25 bp, Homo sapien
gagctgatccaatcttgtcatctaa

SEQ ID NO: 879134 - DNA, 25 bp, Homo sapien
tcattgttctgaagttgggtctgca

SEQ ID NO: 879135 - DNA, 25 bp, Homo sapien
cattgttctgaagttgggtctgcat

SEQ ID NO: 879136 - DNA, 25 bp, Homo sapien
tgtaagctctccagtctttccccat

SEQ ID NO: 879137 - DNA, 25 bp, Homo sapien
tttgtaagctctccagtctttcccc

SEQ ID NO: 879138 - DNA, 25 bp, Homo sapien
gctttgtaagctctccagtctttcc

SEQ ID NO: 879139 - DNA, 25 bp, Homo sapien
ctttgtttgctttgtaagctctcca

SEQ ID NO: 879140 - DNA, 25 bp, Homo sapien
catctggctgaaatacgttgtttaa

SEQ ID NO: 879141 - DNA, 25 bp, Homo sapien
ttataaaatatctctttgcatctgg

SEQ ID NO: 879142 - DNA, 25 bp, Homo sapien
aactacccaactaattgatgccagg

SEQ ID NO: 879143 - DNA, 25 bp, Homo sapien
tatgtaatacgtagtctgcatttgc

SEQ ID NO: 879144 - DNA, 25 bp, Homo sapien
gatgttggtaaataagccacagtaa

SEQ ID NO: 879145 - DNA, 25 bp, Homo sapien
tggtaaataagccacagtaaaattc

SEQ ID NO: 879146 - DNA, 25 bp, Homo sapien
tgttggtaaataagccacagtaaaa

SEQ ID NO: 879147 - DNA, 25 bp, Homo sapien
ggatgttggtaaataagccacagta

SEQ ID NO: 879148 - DNA, 25 bp, Homo sapien
tccactttgagtgtaccctcataga

SEQ ID NO: 879149 - DNA, 25 bp, Homo sapien
aagctactttctgcaaaggcccaag

SEQ ID NO: 879150 - DNA, 25 bp, Homo sapien
taccctcatagaatgcgccaatgac

SEQ ID NO: 879151 - DNA, 25 bp, Homo sapien
gacgctgagttgaagtaacaaaaat

SEQ ID NO: 879152 - DNA, 25 bp, Homo sapien
ttccaggtctgggaaaagaccatgt

SEQ ID NO: 879153 - DNA, 25 bp, Homo sapien
tgggaaagtgcaggtttccaggtct

SEQ ID NO: 879154 - DNA, 25 bp, Homo sapien
tgttcctgcatagcccaagtttctg

SEQ ID NO: 879155 - DNA, 25 bp, Homo sapien
gtctgggaaaagaccatgttcctgc

SEQ ID NO: 879156 - DNA, 25 bp, Homo sapien
tgagggagtacattaaatagatgac

SEQ ID NO: 879157 - DNA, 25 bp, Homo sapien
tagatgactattaaatacatagttc

SEQ ID NO: 879158 - DNA, 25 bp, Homo sapien
gaacaacgagaacaaatgtatggtg

SEQ ID NO: 879159 - DNA, 25 bp, Homo sapien
ttatagtcagaacaacgagaacaaa

SEQ ID NO: 879160 - DNA, 25 bp, Homo sapien
acctctcaggagttcttgtgcaaga

SEQ ID NO: 879161 - DNA, 25 bp, Homo sapien
aaaagtgactttgcttctacggacg

SEQ ID NO: 879162 - DNA, 25 bp, Homo sapien
cggccagatctgtagacttctaaaa

SEQ ID NO: 879163 - DNA, 25 bp, Homo sapien
caaaacattggaatgacgtgacaca

SEQ ID NO: 879164 - DNA, 25 bp, Homo sapien
gaagtggtgttatgacagatagcag

SEQ ID NO: 879165 - DNA, 25 bp, Homo sapien
aattttctgtgagaagtgtggcaag

SEQ ID NO: 879166 - DNA, 25 bp, Homo sapien
caatagcattcccacaaacgtggtg

SEQ ID NO: 879167 - DNA, 25 bp, Homo sapien
ccccatgaagtgacacagggcaaga

SEQ ID NO: 879168 - DNA, 25 bp, Homo sapien
tgtatgtctcctagatctgcagtcg

SEQ ID NO: 879169 - DNA, 25 bp, Homo sapien
tggacacagagtaaatgcggacctt

SEQ ID NO: 879170 - DNA, 25 bp, Homo sapien
tgcaggtctgccaattagtgccatc

SEQ ID NO: 879171 - DNA, 25 bp, Homo sapien
aaacagtgttctgctaaccgacagc

SEQ ID NO: 879172 - DNA, 25 bp, Homo sapien
tctgactgggaggtactaatttaaa

SEQ ID NO: 879173 - DNA, 25 bp, Homo sapien
ttctctaatctgcattaggttttcc

SEQ ID NO: 879174 - DNA, 25 bp, Homo sapien
attctctaatctgcattaggttttc

SEQ ID NO: 879175 - DNA, 25 bp, Homo sapien
cattttctgactgggaggtactaat

SEQ ID NO: 879176 - DNA, 25 bp, Homo sapien
tgtagccattacttgagttgcaatt

SEQ ID NO: 879177 - DNA, 25 bp, Homo sapien
ctgcaagtcatcacaaagcacctcg

SEQ ID NO: 879178 - DNA, 25 bp, Homo sapien
tcacaaagcacctcgttgtagaaga

SEQ ID NO: 879179 - DNA, 25 bp, Homo sapien
aagcacctcgttgtagaagacagca

SEQ ID NO: 879180 - DNA, 25 bp, Homo sapien
gatttgctccatcctatggatacag

SEQ ID NO: 879181 - DNA, 25 bp, Homo sapien
cactaagtcagcctatgcaatggga

SEQ ID NO: 879182 - DNA, 25 bp, Homo sapien
tccagactactggagccaataaagc

SEQ ID NO: 879183 - DNA, 25 bp, Homo sapien
aatattgggagtttccctccagact

SEQ ID NO: 879184 - DNA, 25 bp, Homo sapien
tgtactaccattaagaaaagaagtc

SEQ ID NO: 879185 - DNA, 25 bp, Homo sapien
gagccacagctgtactaccattaag

SEQ ID NO: 879186 - DNA, 25 bp, Homo sapien
tccgatttgggtgcctgtagagcca

SEQ ID NO: 879187 - DNA, 25 bp, Homo sapien
tatctgataggctaaatttgaaagg

SEQ ID NO: 879188 - DNA, 25 bp, Homo sapien
aagaaggaagcataagtttgagaaa

SEQ ID NO: 879189 - DNA, 25 bp, Homo sapien
agtttgagaaaaatctgcattaatt

SEQ ID NO: 879190 - DNA, 25 bp, Homo sapien
caagcatgctcagtaacttctgggt

SEQ ID NO: 879191 - DNA, 25 bp, Homo sapien
gactactctcttcaagcatgctcag

SEQ ID NO: 879192 - DNA, 25 bp, Homo sapien
tataaaatgcaaagactactctctt

SEQ ID NO: 879193 - DNA, 25 bp, Homo sapien
caacaacaacaggatataaaatgca

SEQ ID NO: 879194 - DNA, 25 bp, Homo sapien
attcacacaaacaaaattgtagcat

SEQ ID NO: 879195 - DNA, 25 bp, Homo sapien
cacacaaacaaaattgtagcattga

SEQ ID NO: 879196 - DNA, 25 bp, Homo sapien
tcacacaaacaaaattgtagcattg

SEQ ID NO: 879197 - DNA, 25 bp, Homo sapien
acacaaacaaaattgtagcattgat

SEQ ID NO: 879198 - DNA, 25 bp, Homo sapien
tgctgaagatgtctgccagcatgac

SEQ ID NO: 879199 - DNA, 25 bp, Homo sapien
aaatattgcttatggcttattttct

SEQ ID NO: 879200 - DNA, 25 bp, Homo sapien
cacccttaggcctgggtactgtggc

SEQ ID NO: 879201 - DNA, 25 bp, Homo sapien
caggagacacggaaatcccgggtag

SEQ ID NO: 879202 - DNA, 25 bp, Homo sapien
tcccactcaaatgctgctttttggc

SEQ ID NO: 879203 - DNA, 25 bp, Homo sapien
ctgatacaaacaggagacacggaaa

SEQ ID NO: 879204 - DNA, 25 bp, Homo sapien
ccttcaattaactgatgcagcctga

SEQ ID NO: 879205 - DNA, 25 bp, Homo sapien
ggcttgacggtaggaccacagagaa

SEQ ID NO: 879206 - DNA, 25 bp, Homo sapien
ccggacaccgaacaagaactctggt

SEQ ID NO: 879207 - DNA, 25 bp, Homo sapien
cactcgtcagtaaatcctccacatt

SEQ ID NO: 879208 - DNA, 25 bp, Homo sapien
taacaactcatgtatccagtacagc

SEQ ID NO: 879209 - DNA, 25 bp, Homo sapien
cagcactgaagtatgggaactaaca

SEQ ID NO: 879210 - DNA, 25 bp, Homo sapien
cgaagaacttgggaatactgtgccc

SEQ ID NO: 879211 - DNA, 25 bp, Homo sapien
cattgaaaacgtactgcatgccaga

SEQ ID NO: 879212 - DNA, 25 bp, Homo sapien
taggaaacagagctaacatccaaag

SEQ ID NO: 879213 - DNA, 25 bp, Homo sapien
tgcaagcagtctgataacagagcct

SEQ ID NO: 879214 - DNA, 25 bp, Homo sapien
tacacagctaatgggcatggtggag

SEQ ID NO: 879215 - DNA, 25 bp, Homo sapien
ctcacccagcaactttagaacatag

SEQ ID NO: 879216 - DNA, 25 bp, Homo sapien
tatcaaactcagtctttgaatactt

SEQ ID NO: 879217 - DNA, 25 bp, Homo sapien
tcaaactcagtctttgaatacttac

SEQ ID NO: 879218 - DNA, 25 bp, Homo sapien
atcaaactcagtctttgaatactta

SEQ ID NO: 879219 - DNA, 25 bp, Homo sapien
agaagatgacctacatgtttgttat

SEQ ID NO: 879220 - DNA, 25 bp, Homo sapien
atgacctacatgtttgttatcttct

SEQ ID NO: 879221 - DNA, 25 bp, Homo sapien
aagatgacctacatgtttgttatct

SEQ ID NO: 879222 - DNA, 25 bp, Homo sapien
gatgacctacatgtttgttatcttc

SEQ ID NO: 879223 - DNA, 25 bp, Homo sapien
actacacaaatctcttgggaaattc

SEQ ID NO: 879224 - DNA, 25 bp, Homo sapien
aactacacaaatctcttgggaaatt

SEQ ID NO: 879225 - DNA, 25 bp, Homo sapien
ctacacaaatctcttgggaaattct

SEQ ID NO: 879226 - DNA, 25 bp, Homo sapien
taagagaagacacggaggcttttcc

SEQ ID NO: 879227 - DNA, 25 bp, Homo sapien
tccaagtggaggaagtaagagaaga

SEQ ID NO: 879228 - DNA, 25 bp, Homo sapien
tacttctttcaaggagttgatggta

SEQ ID NO: 879229 - DNA, 25 bp, Homo sapien
aagaattagaattcaagccatctcc

SEQ ID NO: 879230 - DNA, 25 bp, Homo sapien
tgaacattggatctcttggtatata

SEQ ID NO: 879231 - DNA, 25 bp, Homo sapien
ttccttgaacattggatctcttggt

SEQ ID NO: 879232 - DNA, 25 bp, Homo sapien
cttggtatatagaaagtatactgtc

SEQ ID NO: 879233 - DNA, 25 bp, Homo sapien
tctcttggtatatagaaagtatact

SEQ ID NO: 879234 - DNA, 25 bp, Homo sapien
caggcatgtgacatcttgtctccgg

SEQ ID NO: 879235 - DNA, 25 bp, Homo sapien
aaggaccaggcatgtgacatcttgt

SEQ ID NO: 879236 - DNA, 25 bp, Homo sapien
tagaactaaaagtaaggaccaggca

SEQ ID NO: 879237 - DNA, 25 bp, Homo sapien
catgtgacatcttgtctccggcaca

SEQ ID NO: 879238 - DNA, 25 bp, Homo sapien
tgtaccgacacgacactgttaaggg

SEQ ID NO: 879239 - DNA, 25 bp, Homo sapien
aaatcagagaccttggcctacaggc

SEQ ID NO: 879240 - DNA, 25 bp, Homo sapien
tcctcaaagtgtaccagaagcatca

SEQ ID NO: 879241 - DNA, 25 bp, Homo sapien
cttgtgttgaggacacgaccgacca

SEQ ID NO: 879242 - DNA, 25 bp, Homo sapien
ctgacagtcataaggccaaacatac

SEQ ID NO: 879243 - DNA, 25 bp, Homo sapien
actgacagtcataaggccaaacata

SEQ ID NO: 879244 - DNA, 25 bp, Homo sapien
catagagatctcgtttgtaggtcac

SEQ ID NO: 879245 - DNA, 25 bp, Homo sapien
cagccgcatagagatctcgtttgta

SEQ ID NO: 879246 - DNA, 25 bp, Homo sapien
tcgattcagccgcatagagatctcg

SEQ ID NO: 879247 - DNA, 25 bp, Homo sapien
ccttaataatcgattcagccgcata

SEQ ID NO: 879248 - DNA, 25 bp, Homo sapien
ttttagggccaattgcaaacactca

SEQ ID NO: 879249 - DNA, 25 bp, Homo sapien
ccttctacaagtttggctttagtgc

SEQ ID NO: 879250 - DNA, 25 bp, Homo sapien
aggtgatccttctacaagtttggct

SEQ ID NO: 879251 - DNA, 25 bp, Homo sapien
tttagggccaattgcaaacactcag

SEQ ID NO: 879252 - DNA, 25 bp, Homo sapien
gcacagagttgctcattatactcct

SEQ ID NO: 879253 - DNA, 25 bp, Homo sapien
agttactaagtttttaggcacagag

SEQ ID NO: 879254 - DNA, 25 bp, Homo sapien
tttcaatgaactggtccatttcacc

SEQ ID NO: 879255 - DNA, 25 bp, Homo sapien
atctataataatgtccgtgctttca

SEQ ID NO: 879256 - DNA, 25 bp, Homo sapien
cttcactgcctcctcaactgaagtt

SEQ ID NO: 879257 - DNA, 25 bp, Homo sapien
tgcctcctcaactgaagtttttcct

SEQ ID NO: 879258 - DNA, 25 bp, Homo sapien
aagtttttcctttatgtagatccat

SEQ ID NO: 879259 - DNA, 25 bp, Homo sapien
tcactgcctcctcaactgaagtttt

SEQ ID NO: 879260 - DNA, 25 bp, Homo sapien
agccagatctgcagctataagcaaa

SEQ ID NO: 879261 - DNA, 25 bp, Homo sapien
aacagtcctgtgtataaccctcagt

SEQ ID NO: 879262 - DNA, 25 bp, Homo sapien
ccctttcagcataggatccaggaga

SEQ ID NO: 879263 - DNA, 25 bp, Homo sapien
taaccctcagtaaagggccaagcac

SEQ ID NO: 879264 - DNA, 25 bp, Homo sapien
gacatgaggtttcccctgaggctct

SEQ ID NO: 879265 - DNA, 25 bp, Homo sapien
cctaaaactcaatgtgacatgaggt

SEQ ID NO: 879266 - DNA, 25 bp, Homo sapien
tcaatgtgacatgaggtttcccctg

SEQ ID NO: 879267 - DNA, 25 bp, Homo sapien
gtgccccctatcctaaaactcaatg

SEQ ID NO: 879268 - DNA, 25 bp, Homo sapien
caagaggtcgaatggctcctgctgc

SEQ ID NO: 879269 - DNA, 25 bp, Homo sapien
tctgtgtctggcacgttctagcgag

SEQ ID NO: 879270 - DNA, 25 bp, Homo sapien
tagtctaagcaaccatcagcagatg

SEQ ID NO: 879271 - DNA, 25 bp, Homo sapien
tcagcagatggactgacgacagtag

SEQ ID NO: 879272 - DNA, 25 bp, Homo sapien
gacctatatcattggcacgtgattg

SEQ ID NO: 879273 - DNA, 25 bp, Homo sapien
tgtgacaaatgatcgacataagtga

SEQ ID NO: 879274 - DNA, 25 bp, Homo sapien
gacacgtgatcgtcaagtgatcgac

SEQ ID NO: 879275 - DNA, 25 bp, Homo sapien
cgattgacatgattggcacatgacc

SEQ ID NO: 879276 - DNA, 25 bp, Homo sapien
aacgtgtgacacgtggccgacgcat

SEQ ID NO: 879277 - DNA, 25 bp, Homo sapien
gagcaacacgtgaccaacatgactg

SEQ ID NO: 879278 - DNA, 25 bp, Homo sapien
gtgactgacccgatcgacacatgat

SEQ ID NO: 879279 - DNA, 25 bp, Homo sapien
gacgcatgaccagtgacacgtgagc

SEQ ID NO: 879280 - DNA, 25 bp, Homo sapien
tcggcaacgtgtatgacatgactgt

SEQ ID NO: 879281 - DNA, 25 bp, Homo sapien
cgtgattggcacgtgatcggcaacg

SEQ ID NO: 879282 - DNA, 25 bp, Homo sapien
gacatgtgactgactcgcgaatgac

SEQ ID NO: 879283 - DNA, 25 bp, Homo sapien
gattgacacgtgactgacgcatttg

SEQ ID NO: 879284 - DNA, 25 bp, Homo sapien
ctgacacgattgaaacatggttggc

SEQ ID NO: 879285 - DNA, 25 bp, Homo sapien
tgtccaacacgtggctgacacaaga

SEQ ID NO: 879286 - DNA, 25 bp, Homo sapien
ccaacatggttgacacgtgattgac

SEQ ID NO: 879287 - DNA, 25 bp, Homo sapien
tggagtgtgatacatgaccaacacg

SEQ ID NO: 879288 - DNA, 25 bp, Homo sapien
gaacgacacgactggcacatgattg

SEQ ID NO: 879289 - DNA, 25 bp, Homo sapien
gaccaacatgtataacacccgaacg

SEQ ID NO: 879290 - DNA, 25 bp, Homo sapien
gattgacactactgacacgtcgaca

SEQ ID NO: 879291 - DNA, 25 bp, Homo sapien
tgaccgacacctgattgacccatga

SEQ ID NO: 879292 - DNA, 25 bp, Homo sapien
tgaaaattgacctgtggcgggtcac

SEQ ID NO: 879293 - DNA, 25 bp, Homo sapien
cttcctcaacaaatggtctcacagc

SEQ ID NO: 879294 - DNA, 25 bp, Homo sapien
tgagatgcgtttatgctgatacttc

SEQ ID NO: 879295 - DNA, 25 bp, Homo sapien
tccagcttcgaccagtgagatgcgt

SEQ ID NO: 879296 - DNA, 25 bp, Homo sapien
gttactgccacaacaatgtccttta

SEQ ID NO: 879297 - DNA, 25 bp, Homo sapien
tactgccacaacaatgtcctttatc

SEQ ID NO: 879298 - DNA, 25 bp, Homo sapien
cagttactgccacaacaatgtcctt

SEQ ID NO: 879299 - DNA, 25 bp, Homo sapien
tccagttactgccacaacaatgtcc

SEQ ID NO: 879300 - DNA, 25 bp, Homo sapien
gtaattagcgcagcctgtctcacag

SEQ ID NO: 879301 - DNA, 25 bp, Homo sapien
attagcgcagcctgtctcacagaag

SEQ ID NO: 879302 - DNA, 25 bp, Homo sapien
aattagcgcagcctgtctcacagaa

SEQ ID NO: 879303 - DNA, 25 bp, Homo sapien
ctagtaattagcgcagcctgtctca

SEQ ID NO: 879304 - DNA, 25 bp, Homo sapien
gaccgcgagactatccgcacagctt

SEQ ID NO: 879305 - DNA, 25 bp, Homo sapien
aacttcagtgtgcacgtacaactca

SEQ ID NO: 879306 - DNA, 25 bp, Homo sapien
tccacgcatgcgcggaggcagagcc

SEQ ID NO: 879307 - DNA, 25 bp, Homo sapien
caggaccgcgagactatccgcacag

SEQ ID NO: 879308 - DNA, 25 bp, Homo sapien
gggagctgcagctttcgtgcccatc

SEQ ID NO: 879309 - DNA, 25 bp, Homo sapien
tctgcttggggacgtaaagggctct

SEQ ID NO: 879310 - DNA, 25 bp, Homo sapien
ccatctgttaaaggccagaacttcc

SEQ ID NO: 879311 - DNA, 25 bp, Homo sapien
tttcgtgcccatctgttaaaggcca

SEQ ID NO: 879312 - DNA, 25 bp, Homo sapien
cagggaggcggaagccgtgtggtcc

SEQ ID NO: 879313 - DNA, 25 bp, Homo sapien
ggtgtagctgatgagcggcctctcc

SEQ ID NO: 879314 - DNA, 25 bp, Homo sapien
tgaccactcaggcaaggacccggct

SEQ ID NO: 879315 - DNA, 25 bp, Homo sapien
tctccagggcctgtagggtgtagct

SEQ ID NO: 879316 - DNA, 25 bp, Homo sapien
ccccgctagcctcgggccgatgcga

SEQ ID NO: 879317 - DNA, 25 bp, Homo sapien
ggctgcgggcggaacggcgagcccc

SEQ ID NO: 879318 - DNA, 25 bp, Homo sapien
cagagcgcgcaagcagaaggcgccc

SEQ ID NO: 879319 - DNA, 25 bp, Homo sapien
accacggagagggacgcagagcgcg

SEQ ID NO: 879320 - DNA, 25 bp, Homo sapien
gaacgccctacatatctaaagatcg

SEQ ID NO: 879321 - DNA, 25 bp, Homo sapien
taaagatcgcagatactcaagggcc

SEQ ID NO: 879322 - DNA, 25 bp, Homo sapien
tcaagggccatgagtatgcaggaga

SEQ ID NO: 879323 - DNA, 25 bp, Homo sapien
cagctgtcgccgcaagtggaaatgt

SEQ ID NO: 879324 - DNA, 25 bp, Homo sapien
aaatgtgtcggccagaaataatgga

SEQ ID NO: 879325 - DNA, 25 bp, Homo sapien
ggagacttctccctgcttacaaatc

SEQ ID NO: 879326 - DNA, 25 bp, Homo sapien
tataggagacttctccctgcttaca

SEQ ID NO: 879327 - DNA, 25 bp, Homo sapien
agagcataagtaaatgtgtcggcca

SEQ ID NO: 879328 - DNA, 25 bp, Homo sapien
tcatggtgtcactttcacttttgcc

SEQ ID NO: 879329 - DNA, 25 bp, Homo sapien
tttgccattgcctgctgtattccag

SEQ ID NO: 879330 - DNA, 25 bp, Homo sapien
tgctgtattccagcttctgattcca

SEQ ID NO: 879331 - DNA, 25 bp, Homo sapien
tcacttttgccattgcctgctgtat

SEQ ID NO: 879332 - DNA, 25 bp, Homo sapien
ctattacaaagggatcccagccaac

SEQ ID NO: 879333 - DNA, 25 bp, Homo sapien
tgtgggacatttcccatggtgggaa

SEQ ID NO: 879334 - DNA, 25 bp, Homo sapien
ctgcatggcccagcatcgacaggaa

SEQ ID NO: 879335 - DNA, 25 bp, Homo sapien
atggcttgtgggacatttcccatgg

SEQ ID NO: 879336 - DNA, 25 bp, Homo sapien
ccagcatcgacaggaaggtgcagct

SEQ ID NO: 879337 - DNA, 25 bp, Homo sapien
ataattactaaggagtctttcgtgc

SEQ ID NO: 879338 - DNA, 25 bp, Homo sapien
tttggtggtataacagttagcatta

SEQ ID NO: 879339 - DNA, 25 bp, Homo sapien
tacatgtgattttcagactagcaat

SEQ ID NO: 879340 - DNA, 25 bp, Homo sapien
aatattcttgtttagcttagtatac

SEQ ID NO: 879341 - DNA, 25 bp, Homo sapien
ctttatacatgttagaggcaacaac

SEQ ID NO: 879342 - DNA, 25 bp, Homo sapien
cctttatacatgttagaggcaacaa

SEQ ID NO: 879343 - DNA, 25 bp, Homo sapien
tatgcgaccgtaaagagctacaggg

SEQ ID NO: 879344 - DNA, 25 bp, Homo sapien
ggcattccattccaagcgagggtca

SEQ ID NO: 879345 - DNA, 25 bp, Homo sapien
caaaggaagatcactcatggctgct

SEQ ID NO: 879346 - DNA, 25 bp, Homo sapien
aactattcccaaagaaggtcctgat

SEQ ID NO: 879347 - DNA, 25 bp, Homo sapien
tgtgactggactcgttgtgctgccg

SEQ ID NO: 879348 - DNA, 25 bp, Homo sapien
gattttgtaggtgcgtgtgctgcca

SEQ ID NO: 879349 - DNA, 25 bp, Homo sapien
tctgtgatgctggactggcttggca

SEQ ID NO: 879350 - DNA, 25 bp, Homo sapien
gccgggtgtacctcttgcacttgca

SEQ ID NO: 879351 - DNA, 25 bp, Homo sapien
tcctgcagctgcctcaggaatgcac

SEQ ID NO: 879352 - DNA, 25 bp, Homo sapien
ttcctgcagctgcctcaggaatgca

SEQ ID NO: 879353 - DNA, 25 bp, Homo sapien
cttcctgcagctgcctcaggaatgc

SEQ ID NO: 879354 - DNA, 25 bp, Homo sapien
gaaataattttgtctcgtcaagctt

SEQ ID NO: 879355 - DNA, 25 bp, Homo sapien
ttttgtctcgtcaagctttctgttc

SEQ ID NO: 879356 - DNA, 25 bp, Homo sapien
taattttgtctcgtcaagctttctg

SEQ ID NO: 879357 - DNA, 25 bp, Homo sapien
gccagaaataattttgtctcgtcaa

SEQ ID NO: 879358 - DNA, 25 bp, Homo sapien
cttttcattaggatgcatgcaaggg

SEQ ID NO: 879359 - DNA, 25 bp, Homo sapien
ccgatccagtccagtgttactgaaa

SEQ ID NO: 879360 - DNA, 25 bp, Homo sapien
ggtgtgctggaacaggtttaaccac

SEQ ID NO: 879361 - DNA, 25 bp, Homo sapien
catgtgaataaaggatttctgtggc

SEQ ID NO: 879362 - DNA, 25 bp, Homo sapien
cttgactgaagagctggttaattct

SEQ ID NO: 879363 - DNA, 25 bp, Homo sapien
tatatccatagaggtttggcgttca

SEQ ID NO: 879364 - DNA, 25 bp, Homo sapien
tggcgttcattcaggtgtaaagttg

SEQ ID NO: 879365 - DNA, 25 bp, Homo sapien
taaagttgtgtagagcttcagagtg

SEQ ID NO: 879366 - DNA, 25 bp, Homo sapien
tgcagactgggtgtggacaccttgg

SEQ ID NO: 879367 - DNA, 25 bp, Homo sapien
catggtaagcacattccttgatgat

SEQ ID NO: 879368 - DNA, 25 bp, Homo sapien
ccttggctgtaaccaatggggaatg

SEQ ID NO: 879369 - DNA, 25 bp, Homo sapien
taaccaatggggaatgattgctcat

SEQ ID NO: 879370 - DNA, 25 bp, Homo sapien
actgtctgtagggacctccccagtg

SEQ ID NO: 879371 - DNA, 25 bp, Homo sapien
tgccttggtcctactggacaaaact

SEQ ID NO: 879372 - DNA, 25 bp, Homo sapien
tccccagtgccttggtcctactgga

SEQ ID NO: 879373 - DNA, 25 bp, Homo sapien
tcactgtctgtagggacctccccag

SEQ ID NO: 879374 - DNA, 25 bp, Homo sapien
ggcctacagcctttcgagaatttat

SEQ ID NO: 879375 - DNA, 25 bp, Homo sapien
ttgatccagtgaaatcatcgtatga

SEQ ID NO: 879376 - DNA, 25 bp, Homo sapien
tatgattcaaaacaaggcctacagc

SEQ ID NO: 879377 - DNA, 25 bp, Homo sapien
ttggcacagtttcaggattcccgct

SEQ ID NO: 879378 - DNA, 25 bp, Homo sapien
cagtaggatatctcccaaaattcac

SEQ ID NO: 879379 - DNA, 25 bp, Homo sapien
acagtaggatatctcccaaaattca

SEQ ID NO: 879380 - DNA, 25 bp, Homo sapien
cacagtaggatatctcccaaaattc

SEQ ID NO: 879381 - DNA, 25 bp, Homo sapien
cactattgactattaaggcctggga

SEQ ID NO: 879382 - DNA, 25 bp, Homo sapien
cattggtgcaacctgaaaatatgga

SEQ ID NO: 879383 - DNA, 25 bp, Homo sapien
ggaggaatcaacatcctttggtcac

SEQ ID NO: 879384 - DNA, 25 bp, Homo sapien
ggcctgggaacaatggagcttcttc

SEQ ID NO: 879385 - DNA, 25 bp, Homo sapien
tgtgatcacagatgcttcatgcact

SEQ ID NO: 879386 - DNA, 25 bp, Homo sapien
tgaattctctcaagtcctcataggt

SEQ ID NO: 879387 - DNA, 25 bp, Homo sapien
taccagagtatgttagtccaggccc

SEQ ID NO: 879388 - DNA, 25 bp, Homo sapien
tattttcttgtcacgctgtgatcac

SEQ ID NO: 879389 - DNA, 25 bp, Homo sapien
cagaataagcagctggtctattaga

SEQ ID NO: 879390 - DNA, 25 bp, Homo sapien
gctagagcacacagaataagcagct

SEQ ID NO: 879391 - DNA, 25 bp, Homo sapien
agcagctggtctattagatctaaag

SEQ ID NO: 879392 - DNA, 25 bp, Homo sapien
atcagctagagcacacagaataagc

SEQ ID NO: 879393 - DNA, 25 bp, Homo sapien
cagagacctgagaactaggaatgct

SEQ ID NO: 879394 - DNA, 25 bp, Homo sapien
gatggatgtcctaactccagaagca

SEQ ID NO: 879395 - DNA, 25 bp, Homo sapien
aatgtagtttagtccaagcccagag

SEQ ID NO: 879396 - DNA, 25 bp, Homo sapien
ggataatatccacccctgttggcga

SEQ ID NO: 879397 - DNA, 25 bp, Homo sapien
gggcaaaacgctaatccattctcag

SEQ ID NO: 879398 - DNA, 25 bp, Homo sapien
gaaaatagcctgaagggcaaaacgc

SEQ ID NO: 879399 - DNA, 25 bp, Homo sapien
tatgaggagaattgccaaggactgc

SEQ ID NO: 879400 - DNA, 25 bp, Homo sapien
ccttccattggcatttatgaggaga

SEQ ID NO: 879401 - DNA, 25 bp, Homo sapien
tgtggctgatggcttttattaactc

SEQ ID NO: 879402 - DNA, 25 bp, Homo sapien
gaatccacatgtgtcaaagacccac

SEQ ID NO: 879403 - DNA, 25 bp, Homo sapien
aatcagaatccacatgtgtcaaaga

SEQ ID NO: 879404 - DNA, 25 bp, Homo sapien
catgtgtcaaagacccactttgtgg

SEQ ID NO: 879405 - DNA, 25 bp, Homo sapien
tcctcctttcgagagagggtctcca

SEQ ID NO: 879406 - DNA, 25 bp, Homo sapien
acagggagttcctcctttcgagaga

SEQ ID NO: 879407 - DNA, 25 bp, Homo sapien
caggaatcagccttgggaacaggga

SEQ ID NO: 879408 - DNA, 25 bp, Homo sapien
ttccaggaatcagccttgggaacag

SEQ ID NO: 879409 - DNA, 25 bp, Homo sapien
aatcctcctatctgattattgacag

SEQ ID NO: 879410 - DNA, 25 bp, Homo sapien
cttccacaggccgttctctataggc

SEQ ID NO: 879411 - DNA, 25 bp, Homo sapien
caggccgttctctataggcttttaa

SEQ ID NO: 879412 - DNA, 25 bp, Homo sapien
ctcctatctgattattgacagctga

SEQ ID NO: 879413 - DNA, 25 bp, Homo sapien
gacatagaccattcttctctccact

SEQ ID NO: 879414 - DNA, 25 bp, Homo sapien
ggcctaagtctcaggttataaataa

SEQ ID NO: 879415 - DNA, 25 bp, Homo sapien
tcttcagttccccggtggagtggaa

SEQ ID NO: 879416 - DNA, 25 bp, Homo sapien
gggagctgggagtagtctgagctgc

SEQ ID NO: 879417 - DNA, 25 bp, Homo sapien
ctgctgtgattccagtttggacatg

SEQ ID NO: 879418 - DNA, 25 bp, Homo sapien
gctgtgattccagtttggacatggg

SEQ ID NO: 879419 - DNA, 25 bp, Homo sapien
tcaggagacagtcggggtcactgag

SEQ ID NO: 879420 - DNA, 25 bp, Homo sapien
ctgtgattccagtttggacatgggc

SEQ ID NO: 879421 - DNA, 25 bp, Homo sapien
gctgcttgtggtggatggcatacac

SEQ ID NO: 879422 - DNA, 25 bp, Homo sapien
ggcagcatgcctgtcagggcccctg

SEQ ID NO: 879423 - DNA, 25 bp, Homo sapien
gtccactgcccaggtgtggagccac

SEQ ID NO: 879424 - DNA, 25 bp, Homo sapien
tggtacagattctgctgtggctgtc

SEQ ID NO: 879425 - DNA, 25 bp, Homo sapien
caggctggttcccagtaggtgtgat

SEQ ID NO: 879426 - DNA, 25 bp, Homo sapien
tggttcccagtaggtgtgatagccg

SEQ ID NO: 879427 - DNA, 25 bp, Homo sapien
ttcccagtaggtgtgatagccggct

SEQ ID NO: 879428 - DNA, 25 bp, Homo sapien
ccagtaggtgtgatagccggctgca

SEQ ID NO: 879429 - DNA, 25 bp, Homo sapien
tagtttgggtaagcctggtgagcag

SEQ ID NO: 879430 - DNA, 25 bp, Homo sapien
ggtaagcctggtgagcagtgacata

SEQ ID NO: 879431 - DNA, 25 bp, Homo sapien
taagcctggtgagcagtgacataaa

SEQ ID NO: 879432 - DNA, 25 bp, Homo sapien
agcctggtgagcagtgacataaagg

SEQ ID NO: 879433 - DNA, 25 bp, Homo sapien
ctgtggtagcagggagccttttgct

SEQ ID NO: 879434 - DNA, 25 bp, Homo sapien
gccctgctgcccagacactgaattg

SEQ ID NO: 879435 - DNA, 25 bp, Homo sapien
cctgctgcccagacactgaattgga

SEQ ID NO: 879436 - DNA, 25 bp, Homo sapien
gcccagacactgaattggatacagg

SEQ ID NO: 879437 - DNA, 25 bp, Homo sapien
cagacactgaattggatacagggta

SEQ ID NO: 879438 - DNA, 25 bp, Homo sapien
tgccgtcagcactgggatagaggga

SEQ ID NO: 879439 - DNA, 25 bp, Homo sapien
gcctgccgtcagcactgggatagag

SEQ ID NO: 879440 - DNA, 25 bp, Homo sapien
gccgtcagcactgggatagagggag

SEQ ID NO: 879441 - DNA, 25 bp, Homo sapien
cctgccgtcagcactgggatagagg

SEQ ID NO: 879442 - DNA, 25 bp, Homo sapien
gcagaggctttgtgggattgaactc

SEQ ID NO: 879443 - DNA, 25 bp, Homo sapien
agcagaggctttgtgggattgaact

SEQ ID NO: 879444 - DNA, 25 bp, Homo sapien
gctgaagattaaactgggccccaca

SEQ ID NO: 879445 - DNA, 25 bp, Homo sapien
tgaagattaaactgggccccacact

SEQ ID NO: 879446 - DNA, 25 bp, Homo sapien
ctgaagattaaactgggccccacac

SEQ ID NO: 879447 - DNA, 25 bp, Homo sapien
atccagggttctcccaggttccgtg

SEQ ID NO: 879448 - DNA, 25 bp, Homo sapien
tcagctatctgagccagctactggg

SEQ ID NO: 879449 - DNA, 25 bp, Homo sapien
agggactttctcagctatctgagcc

SEQ ID NO: 879450 - DNA, 25 bp, Homo sapien
gactttctcagctatctgagccagc

SEQ ID NO: 879451 - DNA, 25 bp, Homo sapien
gttggcactgctaagccgatgggaa

SEQ ID NO: 879452 - DNA, 25 bp, Homo sapien
cactgctaagccgatgggaagctca

SEQ ID NO: 879453 - DNA, 25 bp, Homo sapien
tggcactgctaagccgatgggaagc

SEQ ID NO: 879454 - DNA, 25 bp, Homo sapien
ctgctaagccgatgggaagctcagg

SEQ ID NO: 879455 - DNA, 25 bp, Homo sapien
ctaaggccaggctgactgcccagag

SEQ ID NO: 879456 - DNA, 25 bp, Homo sapien
gggccacgaggtgacaaattgctaa

SEQ ID NO: 879457 - DNA, 25 bp, Homo sapien
ggtgacaaattgctaaggccaggct

SEQ ID NO: 879458 - DNA, 25 bp, Homo sapien
aattgctaaggccaggctgactgcc

SEQ ID NO: 879459 - DNA, 25 bp, Homo sapien
accttcctggactcgttgaggcaga

SEQ ID NO: 879460 - DNA, 25 bp, Homo sapien
gattcaatctctggagccaactggg

SEQ ID NO: 879461 - DNA, 25 bp, Homo sapien
gatatacttccccttcctggatgcc

SEQ ID NO: 879462 - DNA, 25 bp, Homo sapien
gagggatgatatacttccccttcct

SEQ ID NO: 879463 - DNA, 25 bp, Homo sapien
gagaaagactgctgtcataggtggt

SEQ ID NO: 879464 - DNA, 25 bp, Homo sapien
ctaagggcaccgtataaggagaaag

SEQ ID NO: 879465 - DNA, 25 bp, Homo sapien
ctgctgtcataggtggtcttcacac

SEQ ID NO: 879466 - DNA, 25 bp, Homo sapien
agggcaccgtataaggagaaagact

SEQ ID NO: 879467 - DNA, 25 bp, Homo sapien
tgttggactcgaggtcgtagttgtc

SEQ ID NO: 879468 - DNA, 25 bp, Homo sapien
tggactcgaggtcgtagttgtcgct

SEQ ID NO: 879469 - DNA, 25 bp, Homo sapien
gacatgttggactcgaggtcgtagt

SEQ ID NO: 879470 - DNA, 25 bp, Homo sapien
attggacatgttggactcgaggtcg

SEQ ID NO: 879471 - DNA, 25 bp, Homo sapien
ttgtctttagtagcgtagttgaagt

SEQ ID NO: 879472 - DNA, 25 bp, Homo sapien
cttgtctttagtagcgtagttgaag

SEQ ID NO: 879473 - DNA, 25 bp, Homo sapien
tctgctagttcaaaatgtgagctca

SEQ ID NO: 879474 - DNA, 25 bp, Homo sapien
ttctggtgtacaatatcctctgcta

SEQ ID NO: 879475 - DNA, 25 bp, Homo sapien
tgctagttcaaaatgtgagctcagc

SEQ ID NO: 879476 - DNA, 25 bp, Homo sapien
ctagttcaaaatgtgagctcagcgt

SEQ ID NO: 879477 - DNA, 25 bp, Homo sapien
cagctgtaaggaagtgcagcattct

SEQ ID NO: 879478 - DNA, 25 bp, Homo sapien
acctttacatcacaagtggagccca

SEQ ID NO: 879479 - DNA, 25 bp, Homo sapien
ttcataggtggtgccatttttcacc

SEQ ID NO: 879480 - DNA, 25 bp, Homo sapien
caagtggagcccacaacagctgtaa

SEQ ID NO: 879481 - DNA, 25 bp, Homo sapien
agcggcccccggcctctcgtggtgc

SEQ ID NO: 879482 - DNA, 25 bp, Homo sapien
ggcccccggcctctcgtggtgctgc

SEQ ID NO: 879483 - DNA, 25 bp, Homo sapien
gcggcccccggcctctcgtggtgct

SEQ ID NO: 879484 - DNA, 25 bp, Homo sapien
cggcccccggcctctcgtggtgctg

SEQ ID NO: 879485 - DNA, 25 bp, Homo sapien
ctgcgtggtcaagatgctttcggct

SEQ ID NO: 879486 - DNA, 25 bp, Homo sapien
gctccccgcagccgaaggccccagg

SEQ ID NO: 879487 - DNA, 25 bp, Homo sapien
tcaagatgctttcggctccccagcg

SEQ ID NO: 879488 - DNA, 25 bp, Homo sapien
tggtcaagatgctttcggctcccca

SEQ ID NO: 879489 - DNA, 25 bp, Homo sapien
gtcgcggtggagctgcgtaggaggc

SEQ ID NO: 879490 - DNA, 25 bp, Homo sapien
ctgcgggaggtcgcggtggagctgc

SEQ ID NO: 879491 - DNA, 25 bp, Homo sapien
gaggtcgcggtggagctgcgtagga

SEQ ID NO: 879492 - DNA, 25 bp, Homo sapien
cgggaggtcgcggtggagctgcgta

SEQ ID NO: 879493 - DNA, 25 bp, Homo sapien
tatcccaagggcagttgtgctcctt

SEQ ID NO: 879494 - DNA, 25 bp, Homo sapien
tggaatccagcaaatctagcttagc

SEQ ID NO: 879495 - DNA, 25 bp, Homo sapien
tatgtagatctacagagggtttggc

SEQ ID NO: 879496 - DNA, 25 bp, Homo sapien
tcaagtgctaggtagactgtctttc

SEQ ID NO: 879497 - DNA, 25 bp, Homo sapien
tatacaaccagcacttcgaaccagg

SEQ ID NO: 879498 - DNA, 25 bp, Homo sapien
tcaaagtttgtagggaagccagaac

SEQ ID NO: 879499 - DNA, 25 bp, Homo sapien
gaaccaggctagagctacctttggg

SEQ ID NO: 879500 - DNA, 25 bp, Homo sapien
tgttgctacgtggaaccctgggtcc

SEQ ID NO: 879501 - DNA, 25 bp, Homo sapien
gacaactcaaagccgggaacttcca

SEQ ID NO: 879502 - DNA, 25 bp, Homo sapien
tgtgctgtgaggaggaatctctcag

SEQ ID NO: 879503 - DNA, 25 bp, Homo sapien
tttattgtgctgtgaggaggaatct

SEQ ID NO: 879504 - DNA, 25 bp, Homo sapien
tattgtgctgtgaggaggaatctct

SEQ ID NO: 879505 - DNA, 25 bp, Homo sapien
ttgaaaagcgagtcacaatatacag

SEQ ID NO: 879506 - DNA, 25 bp, Homo sapien
cagtcagattgaaaagcgagtcaca

SEQ ID NO: 879507 - DNA, 25 bp, Homo sapien
ataatcagaggttagtccttaaatc

SEQ ID NO: 879508 - DNA, 25 bp, Homo sapien
gaaatttgaactgccattgttaatt

SEQ ID NO: 879509 - DNA, 25 bp, Homo sapien
tggattcgacagctcaaataagcgt

SEQ ID NO: 879510 - DNA, 25 bp, Homo sapien
ccaagtgtggactctgtcagagccc

SEQ ID NO: 879511 - DNA, 25 bp, Homo sapien
gctcaaataagcgtttcctctctgt

SEQ ID NO: 879512 - DNA, 25 bp, Homo sapien
tctctgtatccctgtctcgctggtg

SEQ ID NO: 879513 - DNA, 25 bp, Homo sapien
atttcagggatagagtaactttcac

SEQ ID NO: 879514 - DNA, 25 bp, Homo sapien
tacaatcagctctaggtaccagaag

SEQ ID NO: 879515 - DNA, 25 bp, Homo sapien
cttctggctgcagggatactacagt

SEQ ID NO: 879516 - DNA, 25 bp, Homo sapien
caagcaccagctctacaattttgga

SEQ ID NO: 879517 - DNA, 25 bp, Homo sapien
caggagtttcaggacccttcgccaa

SEQ ID NO: 879518 - DNA, 25 bp, Homo sapien
caattactacaggaagataaggcct

SEQ ID NO: 879519 - DNA, 25 bp, Homo sapien
gaatcgctgccttttctgaacgtgg

SEQ ID NO: 879520 - DNA, 25 bp, Homo sapien
gcaaaccagaagcagagactccttg

SEQ ID NO: 879521 - DNA, 25 bp, Homo sapien
gaatatcaccgcaggactacgtcaa

SEQ ID NO: 879522 - DNA, 25 bp, Homo sapien
catatgctaaaaaccgacgccagga

SEQ ID NO: 879523 - DNA, 25 bp, Homo sapien
gctgaactatggcaaaggtccttga

SEQ ID NO: 879524 - DNA, 25 bp, Homo sapien
taatgcatacgctgagagaaccgtc

SEQ ID NO: 879525 - DNA, 25 bp, Homo sapien
tcaataggaaattagggcatggtca

SEQ ID NO: 879526 - DNA, 25 bp, Homo sapien
tgccatggtgccacgcaggtataac

SEQ ID NO: 879527 - DNA, 25 bp, Homo sapien
tgaggatcatccacactggcacttg

SEQ ID NO: 879528 - DNA, 25 bp, Homo sapien
ggtataacaaggtgaggacaatgca

SEQ ID NO: 879529 - DNA, 25 bp, Homo sapien
ttccaactcagcttcgctttcaaga

SEQ ID NO: 879530 - DNA, 25 bp, Homo sapien
ccggaatcttcaggattggaatcct

SEQ ID NO: 879531 - DNA, 25 bp, Homo sapien
tccaactcagcttcgctttcaagag

SEQ ID NO: 879532 - DNA, 25 bp, Homo sapien
ccttccccggaatcttcaggattgg

SEQ ID NO: 879533 - DNA, 25 bp, Homo sapien
tatctcaacccagtagtaaagcgga

SEQ ID NO: 879534 - DNA, 25 bp, Homo sapien
tgggagtgcccattctactgacaat

SEQ ID NO: 879535 - DNA, 25 bp, Homo sapien
agcatttgaactcaggccgctggct

SEQ ID NO: 879536 - DNA, 25 bp, Homo sapien
tggtatcagaataaccgaggcatct

SEQ ID NO: 879537 - DNA, 25 bp, Homo sapien
tttcttatgagtaaaccagtgtgtt

SEQ ID NO: 879538 - DNA, 25 bp, Homo sapien
tccaactgttgcttttcgtaaatgt

SEQ ID NO: 879539 - DNA, 25 bp, Homo sapien
ttttcgtaaatgtccttcagattct

SEQ ID NO: 879540 - DNA, 25 bp, Homo sapien
tcttatgagtaaaccagtgtgtttt

SEQ ID NO: 879541 - DNA, 25 bp, Homo sapien
ggcaggtttgatcacaatatattac

SEQ ID NO: 879542 - DNA, 25 bp, Homo sapien
ctgtggtaggcccttatacatatat

SEQ ID NO: 879543 - DNA, 25 bp, Homo sapien
ggtaggcccttatacatatattgta

SEQ ID NO: 879544 - DNA, 25 bp, Homo sapien
catacactttctcacatgatttcaa

SEQ ID NO: 879545 - DNA, 25 bp, Homo sapien
tcattcatccttgcattcatacact

SEQ ID NO: 879546 - DNA, 25 bp, Homo sapien
acaggtagtgcaaaattccacatcc

SEQ ID NO: 879547 - DNA, 25 bp, Homo sapien
gacggagaatgcagtgggatcagaa

SEQ ID NO: 879548 - DNA, 25 bp, Homo sapien
tggcttgggtaaggacggagaatgc

SEQ ID NO: 879549 - DNA, 25 bp, Homo sapien
caggtagtgcaaaattccacatcca

SEQ ID NO: 879550 - DNA, 25 bp, Homo sapien
ccatggaaacactacagaggtatca

SEQ ID NO: 879551 - DNA, 25 bp, Homo sapien
cattaaggctatagattacacaggc

SEQ ID NO: 879552 - DNA, 25 bp, Homo sapien
ggataattcagtaagcccatagcgt

SEQ ID NO: 879553 - DNA, 25 bp, Homo sapien
cccatagcgtttcagatttaggaca

SEQ ID NO: 879554 - DNA, 25 bp, Homo sapien
tcccaggaaggtaaaaggtcagcaa

SEQ ID NO: 879555 - DNA, 25 bp, Homo sapien
gaaatcccacataacaggtactgct

SEQ ID NO: 879556 - DNA, 25 bp, Homo sapien
gcatatgagaacctacacagctaag

SEQ ID NO: 879557 - DNA, 25 bp, Homo sapien
caaccatttgtgagtgctggaaatc

SEQ ID NO: 879558 - DNA, 25 bp, Homo sapien
tacatttcaacatagcgacgtcctg

SEQ ID NO: 879559 - DNA, 25 bp, Homo sapien
taattcatatagctacaagtgtaca

SEQ ID NO: 879560 - DNA, 25 bp, Homo sapien
tttgagattgttaccaggaaccaca

SEQ ID NO: 879561 - DNA, 25 bp, Homo sapien
cgacgtcctgtttatgaaactatga

SEQ ID NO: 879562 - DNA, 25 bp, Homo sapien
ttactgatagagtcaacttaggtaa

SEQ ID NO: 879563 - DNA, 25 bp, Homo sapien
agagaacttgcctttaacaatacaa

SEQ ID NO: 879564 - DNA, 25 bp, Homo sapien
ttgcctttaacaatacaataggtgg

SEQ ID NO: 879565 - DNA, 25 bp, Homo sapien
gatagagtcaacttaggtaagagga

SEQ ID NO: 879566 - DNA, 25 bp, Homo sapien
gctgctggaggagtgtagcttcaca

SEQ ID NO: 879567 - DNA, 25 bp, Homo sapien
gatcttttcttgatacactggaaag

SEQ ID NO: 879568 - DNA, 25 bp, Homo sapien
caatgcttcgaaccagctgctggag

SEQ ID NO: 879569 - DNA, 25 bp, Homo sapien
ccatcagaagctcggccttttaaca

SEQ ID NO: 879570 - DNA, 25 bp, Homo sapien
tataaacgacatagtaaaaagagta

SEQ ID NO: 879571 - DNA, 25 bp, Homo sapien
tgtattttataaacgacatagtaaa

SEQ ID NO: 879572 - DNA, 25 bp, Homo sapien
gtgtattttataaacgacatagtaa

SEQ ID NO: 879573 - DNA, 25 bp, Homo sapien
cagcagaggattctcatttacaagc

SEQ ID NO: 879574 - DNA, 25 bp, Homo sapien
caaggtgtccagtttattctctcca

SEQ ID NO: 879575 - DNA, 25 bp, Homo sapien
gcttatgtaatgcatcttcatagcc

SEQ ID NO: 879576 - DNA, 25 bp, Homo sapien
catttctgaaagatacagcttatgt

SEQ ID NO: 879577 - DNA, 25 bp, Homo sapien
tgataattttgtgcagcgggcctgc

SEQ ID NO: 879578 - DNA, 25 bp, Homo sapien
tgacaggatgaagattcgttgtggt

SEQ ID NO: 879579 - DNA, 25 bp, Homo sapien
gattatggtcacacaatcatgttga

SEQ ID NO: 879580 - DNA, 25 bp, Homo sapien
tgtaataatccagtctctctcgagg

SEQ ID NO: 879581 - DNA, 25 bp, Homo sapien
tgcctgcttgtgcttggtcctggga

SEQ ID NO: 879582 - DNA, 25 bp, Homo sapien
cttgatcctgccgacaacaggtgac

SEQ ID NO: 879583 - DNA, 25 bp, Homo sapien
agtggttccccctgggtagcctgca

SEQ ID NO: 879584 - DNA, 25 bp, Homo sapien
cctggatctccggaggagacttctt

SEQ ID NO: 879585 - DNA, 25 bp, Homo sapien
tcatacacatttctaaatttcccca

SEQ ID NO: 879586 - DNA, 25 bp, Homo sapien
ttcatacacatttctaaatttcccc

SEQ ID NO: 879587 - DNA, 25 bp, Homo sapien
catacacatttctaaatttccccac

SEQ ID NO: 879588 - DNA, 25 bp, Homo sapien
ttcataacccacttgcattagattt

SEQ ID NO: 879589 - DNA, 25 bp, Homo sapien
cccacttgcattagatttgcttggt

SEQ ID NO: 879590 - DNA, 25 bp, Homo sapien
cttgcattagatttgcttggttgaa

SEQ ID NO: 879591 - DNA, 25 bp, Homo sapien
cataacccacttgcattagatttgc

SEQ ID NO: 879592 - DNA, 25 bp, Homo sapien
tgatccaggaccctatcagctttac

SEQ ID NO: 879593 - DNA, 25 bp, Homo sapien
ttccactgatccaggaccctatcag

SEQ ID NO: 879594 - DNA, 25 bp, Homo sapien
ttcttcttccactgatccaggaccc

SEQ ID NO: 879595 - DNA, 25 bp, Homo sapien
ttcttccactgatccaggaccctat

SEQ ID NO: 879596 - DNA, 25 bp, Homo sapien
cagaacaaggtacgtatggggatcc

SEQ ID NO: 879597 - DNA, 25 bp, Homo sapien
caaggtacgtatggggatccagcaa

SEQ ID NO: 879598 - DNA, 25 bp, Homo sapien
gaggtacagaacaaggtacgtatgg

SEQ ID NO: 879599 - DNA, 25 bp, Homo sapien
aggtacagaacaaggtacgtatggg

SEQ ID NO: 879600 - DNA, 25 bp, Homo sapien
taagggagagctaactgaactgtgg

SEQ ID NO: 879601 - DNA, 25 bp, Homo sapien
catggagtatcatatagctgttgaa

SEQ ID NO: 879602 - DNA, 25 bp, Homo sapien
aatgaattacacctactgagatggg

SEQ ID NO: 879603 - DNA, 25 bp, Homo sapien
gaactgtggaacatctatatcatgg

SEQ ID NO: 879604 - DNA, 25 bp, Homo sapien
cagcttctaacattacccatgtgat

SEQ ID NO: 879605 - DNA, 25 bp, Homo sapien
gcttctaacattacccatgtgatgt

SEQ ID NO: 879606 - DNA, 25 bp, Homo sapien
agcttctaacattacccatgtgatg

SEQ ID NO: 879607 - DNA, 25 bp, Homo sapien
ccagcttctaacattacccatgtga

SEQ ID NO: 879608 - DNA, 25 bp, Homo sapien
tatggtatatcctacaaatgaaaat

SEQ ID NO: 879609 - DNA, 25 bp, Homo sapien
tggtatatcctacaaatgaaaatgt

SEQ ID NO: 879610 - DNA, 25 bp, Homo sapien
atttatggtatatcctacaaatgaa

SEQ ID NO: 879611 - DNA, 25 bp, Homo sapien
taagacatataatacagatttttag

SEQ ID NO: 879612 - DNA, 25 bp, Homo sapien
gagggctgtgtatccatgttcatgc

SEQ ID NO: 879613 - DNA, 25 bp, Homo sapien
catcggctccatgtcgcagtagtaa

SEQ ID NO: 879614 - DNA, 25 bp, Homo sapien
gctgatgacaatttacatcggctcc

SEQ ID NO: 879615 - DNA, 25 bp, Homo sapien
gctgcatgcattagaggagtcattc

SEQ ID NO: 879616 - DNA, 25 bp, Homo sapien
ctcgtccaaacagttgacacgaaca

SEQ ID NO: 879617 - DNA, 25 bp, Homo sapien
gaacattcttgctggataataatgt

SEQ ID NO: 879618 - DNA, 25 bp, Homo sapien
cattcttgctggataataatgttcc

SEQ ID NO: 879619 - DNA, 25 bp, Homo sapien
aaacagttgacacgaacattcttgc

SEQ ID NO: 879620 - DNA, 25 bp, Homo sapien
tgtaaaccttaaggtcactcctctg

SEQ ID NO: 879621 - DNA, 25 bp, Homo sapien
tattatcattagtacaagccagcca

SEQ ID NO: 879622 - DNA, 25 bp, Homo sapien
tttggaaagaagctataattgggcc

SEQ ID NO: 879623 - DNA, 25 bp, Homo sapien
aatgacagaagcatacttgcaggag

SEQ ID NO: 879624 - DNA, 25 bp, Homo sapien
cacaatcacactaaggttagccttt

SEQ ID NO: 879625 - DNA, 25 bp, Homo sapien
ccacaatcacactaaggttagcctt

SEQ ID NO: 879626 - DNA, 25 bp, Homo sapien
aatcacactaaggttagccttttga

SEQ ID NO: 879627 - DNA, 25 bp, Homo sapien
ggactccggggaaatatggcttctg

SEQ ID NO: 879628 - DNA, 25 bp, Homo sapien
cagggaactcctctgggacgtccac

SEQ ID NO: 879629 - DNA, 25 bp, Homo sapien
aactcctctgggacgtccactcggg

SEQ ID NO: 879630 - DNA, 25 bp, Homo sapien
gccaggtaacgggactcggcaggga

SEQ ID NO: 879631 - DNA, 25 bp, Homo sapien
ctcctgggtcagctcgcctttcttt

SEQ ID NO: 879632 - DNA, 25 bp, Homo sapien
tcctgggtcagctcgcctttcttta

SEQ ID NO: 879633 - DNA, 25 bp, Homo sapien
gaaacgatgcgtctgtattgggaac

SEQ ID NO: 879634 - DNA, 25 bp, Homo sapien
tgaggcaacttgagaccaagacact

SEQ ID NO: 879635 - DNA, 25 bp, Homo sapien
tcccgccagcttgaaggttattccc

SEQ ID NO: 879636 - DNA, 25 bp, Homo sapien
gaacgccagccgcaatgaggcaact

SEQ ID NO: 879637 - DNA, 25 bp, Homo sapien
gtagcgagagatcgccattggagca

SEQ ID NO: 879638 - DNA, 25 bp, Homo sapien
cgcggaaacgcttcgcttctctcct

SEQ ID NO: 879639 - DNA, 25 bp, Homo sapien
ctcgggcgagccaggcggacggtct

SEQ ID NO: 879640 - DNA, 25 bp, Homo sapien
gtcattggccctgccgaggaggagg

SEQ ID NO: 879641 - DNA, 25 bp, Homo sapien
tcccctatcctgtccggttcaaata

SEQ ID NO: 879642 - DNA, 25 bp, Homo sapien
tatgtgctcagcgacggctttctgg

SEQ ID NO: 879643 - DNA, 25 bp, Homo sapien
tccggttcaaatatttcgccacatg

SEQ ID NO: 879644 - DNA, 25 bp, Homo sapien
tcgccacatgtaatattgaaaattc

SEQ ID NO: 879645 - DNA, 25 bp, Homo sapien
tgtcaatgtgtctgtccttcactcc

SEQ ID NO: 879646 - DNA, 25 bp, Homo sapien
gctgctgctgcacgaatcgccgcag

SEQ ID NO: 879647 - DNA, 25 bp, Homo sapien
tgtctatgtcaatgtgtctgtcctt

SEQ ID NO: 879648 - DNA, 25 bp, Homo sapien
tcctccattgtctgccgccactgct

SEQ ID NO: 879649 - DNA, 25 bp, Homo sapien
gcaaggggcgccgtgagggttgcga

SEQ ID NO: 879650 - DNA, 25 bp, Homo sapien
gcgccgtgagggttgcgagagtagc

SEQ ID NO: 879651 - DNA, 25 bp, Homo sapien
ccggggtttccatcgggcaggagct

SEQ ID NO: 879652 - DNA, 25 bp, Homo sapien
gggttgcgagagtagcgactgccgc

SEQ ID NO: 879653 - DNA, 25 bp, Homo sapien
ttaaaataatatagagactggctgg

SEQ ID NO: 879654 - DNA, 25 bp, Homo sapien
tctaagtggttatatctttaacacc

SEQ ID NO: 879655 - DNA, 25 bp, Homo sapien
catcgttgtctaagtggttatatct

SEQ ID NO: 879656 - DNA, 25 bp, Homo sapien
tccccatcacatcgttgtctaagtg

SEQ ID NO: 879657 - DNA, 25 bp, Homo sapien
gtggttatatctttaacaccttcat

SEQ ID NO: 879658 - DNA, 25 bp, Homo sapien
gatcatatttgttcccctaggtcat

SEQ ID NO: 879659 - DNA, 25 bp, Homo sapien
tctacctgctatattcttgaatgaa

SEQ ID NO: 879660 - DNA, 25 bp, Homo sapien
cagtgtgagcctgtttaactataca

SEQ ID NO: 879661 - DNA, 25 bp, Homo sapien
gagtttctattacctacttctgtgt

SEQ ID NO: 879662 - DNA, 25 bp, Homo sapien
tgtatacttaactctcttgcatgca

SEQ ID NO: 879663 - DNA, 25 bp, Homo sapien
ttgaagactgttgtattccgtgagc

SEQ ID NO: 879664 - DNA, 25 bp, Homo sapien
ggcaagagaatctaaaagtttacca

SEQ ID NO: 879665 - DNA, 25 bp, Homo sapien
ttccgtgagctcagaaaagtatata

SEQ ID NO: 879666 - DNA, 25 bp, Homo sapien
tgcccggctccttctgcttttgaag

SEQ ID NO: 879667 - DNA, 25 bp, Homo sapien
cataaaaagccttgtgatgcttgta

SEQ ID NO: 879668 - DNA, 25 bp, Homo sapien
gatgcttgtagatgccaggatgtca

SEQ ID NO: 879669 - DNA, 25 bp, Homo sapien
ttctccaagcaagaatttgtacatt

SEQ ID NO: 879670 - DNA, 25 bp, Homo sapien
tcagagctgatcctcctccagaagg

SEQ ID NO: 879671 - DNA, 25 bp, Homo sapien
ttataaaggtatccatccacgtgcc

SEQ ID NO: 879672 - DNA, 25 bp, Homo sapien
tcaggaatactgctacgacaacatc

SEQ ID NO: 879673 - DNA, 25 bp, Homo sapien
gcaagtgacggcttttactctccac

SEQ ID NO: 879674 - DNA, 25 bp, Homo sapien
tttacacatatggagtagtgtcttc

SEQ ID NO: 879675 - DNA, 25 bp, Homo sapien
tacacatatggagtagtgtcttctc

SEQ ID NO: 879676 - DNA, 25 bp, Homo sapien
tgtttgtcataaggaacgtagtgct

SEQ ID NO: 879677 - DNA, 25 bp, Homo sapien
ttctgtggattccttttgtttgtca

SEQ ID NO: 879678 - DNA, 25 bp, Homo sapien
gtgtatatgcttctagcagcctaga

SEQ ID NO: 879679 - DNA, 25 bp, Homo sapien
tcagagaatagagagtaacacaggt

SEQ ID NO: 879680 - DNA, 25 bp, Homo sapien
taggagagtaccaggctaactagct

SEQ ID NO: 879681 - DNA, 25 bp, Homo sapien
acacaggtgctacagagtagggaaa

SEQ ID NO: 879682 - DNA, 25 bp, Homo sapien
ctgacaagccacatggaaaaagaag

SEQ ID NO: 879683 - DNA, 25 bp, Homo sapien
aagagaaattgctggccagagggca

SEQ ID NO: 879684 - DNA, 25 bp, Homo sapien
gaagaagagaaattgctggccagag

SEQ ID NO: 879685 - DNA, 25 bp, Homo sapien
aagaagaagagaaattgctggccag

SEQ ID NO: 879686 - DNA, 25 bp, Homo sapien
tacctcatgagcaactatttcctca

SEQ ID NO: 879687 - DNA, 25 bp, Homo sapien
tcaatactgagatattcactttctg

SEQ ID NO: 879688 - DNA, 25 bp, Homo sapien
acacatacagtgtttctacctcatg

SEQ ID NO: 879689 - DNA, 25 bp, Homo sapien
tactgagatattcactttctgacac

SEQ ID NO: 879690 - DNA, 25 bp, Homo sapien
tgtcgcagtctcttcctttcgttca

SEQ ID NO: 879691 - DNA, 25 bp, Homo sapien
ggcgccggcgcttgtcgcagtctct

SEQ ID NO: 879692 - DNA, 25 bp, Homo sapien
gggaccgggcgccggcgcttgtcgc

SEQ ID NO: 879693 - DNA, 25 bp, Homo sapien
ggcgcttgtcgcagtctcttccttt

SEQ ID NO: 879694 - DNA, 25 bp, Homo sapien
acattttgttggtatagtccttctg

SEQ ID NO: 879695 - DNA, 25 bp, Homo sapien
gagagccactgaacctgcctacctt

SEQ ID NO: 879696 - DNA, 25 bp, Homo sapien
aacttctctgttgcgttagtgctaa

SEQ ID NO: 879697 - DNA, 25 bp, Homo sapien
aaatttgcttgccttccactaccat

SEQ ID NO: 879698 - DNA, 25 bp, Homo sapien
gatttccagtctccgagtggtcggc

SEQ ID NO: 879699 - DNA, 25 bp, Homo sapien
cgtggtcattgcagtgggcatcttc

SEQ ID NO: 879700 - DNA, 25 bp, Homo sapien
cctgattgctttagtgggtctgatt

SEQ ID NO: 879701 - DNA, 25 bp, Homo sapien
tatttgtaagagactacgtaggtgc

SEQ ID NO: 879702 - DNA, 25 bp, Homo sapien
gcagcaggttggagccggacaccat

SEQ ID NO: 879703 - DNA, 25 bp, Homo sapien
tctcttgttccctttgcattagtgc

SEQ ID NO: 879704 - DNA, 25 bp, Homo sapien
gccggacaccatcaggtgttgccat

SEQ ID NO: 879705 - DNA, 25 bp, Homo sapien
cctttgcattagtgcagcaggttgg

SEQ ID NO: 879706 - DNA, 25 bp, Homo sapien
tggtctctgaagctcggtggcacct

SEQ ID NO: 879707 - DNA, 25 bp, Homo sapien
aaaaactttgtatggtaccactgtg

SEQ ID NO: 879708 - DNA, 25 bp, Homo sapien
taccactgtgttggttatatggtga

SEQ ID NO: 879709 - DNA, 25 bp, Homo sapien
tgtattcattgtcgggcactgtcca

SEQ ID NO: 879710 - DNA, 25 bp, Homo sapien
ccatcagaatggaacgagttttgag

SEQ ID NO: 879711 - DNA, 25 bp, Homo sapien
agttagtattaatgcgttggcccac

SEQ ID NO: 879712 - DNA, 25 bp, Homo sapien
gaaatcgtattgtgtggctctgtat

SEQ ID NO: 879713 - DNA, 25 bp, Homo sapien
gttggcccacgtagcaaaaagatat

SEQ ID NO: 879714 - DNA, 25 bp, Homo sapien
gattacaaggtcaattcccaggatt

SEQ ID NO: 879715 - DNA, 25 bp, Homo sapien
tgtaccttagagttcctggccagag

SEQ ID NO: 879716 - DNA, 25 bp, Homo sapien
ccctgagagcattaggttgggcaaa

SEQ ID NO: 879717 - DNA, 25 bp, Homo sapien
tccagtactttaggaccttgacaga

SEQ ID NO: 879718 - DNA, 25 bp, Homo sapien
tcagtgtgttcactatgcttccaca

SEQ ID NO: 879719 - DNA, 25 bp, Homo sapien
cctgacagacagaagggcttggaga

SEQ ID NO: 879720 - DNA, 25 bp, Homo sapien
ggtttcaagtctcaaggcctgacag

SEQ ID NO: 879721 - DNA, 25 bp, Homo sapien
tcatggctcactatggtagtataca

SEQ ID NO: 879722 - DNA, 25 bp, Homo sapien
aattcagtcttcagcaacttgagag

SEQ ID NO: 879723 - DNA, 25 bp, Homo sapien
agtcttcagcaacttgagagctttc

SEQ ID NO: 879724 - DNA, 25 bp, Homo sapien
ttacaattcagtcttcagcaacttg

SEQ ID NO: 879725 - DNA, 25 bp, Homo sapien
ttcagtcttcagcaacttgagagct

SEQ ID NO: 879726 - DNA, 25 bp, Homo sapien
gggataaaagcaggagagtcaagac

SEQ ID NO: 879727 - DNA, 25 bp, Homo sapien
aagacaccatcgtgcgttatatcga

SEQ ID NO: 879728 - DNA, 25 bp, Homo sapien
ccaaacttggatgctcaattcatta

SEQ ID NO: 879729 - DNA, 25 bp, Homo sapien
gttatatcgatataataaaccccaa

SEQ ID NO: 879730 - DNA, 25 bp, Homo sapien
gaggcgtccctaagcctagctctct

SEQ ID NO: 879731 - DNA, 25 bp, Homo sapien
gaaagagtgtgatttgcctgaagat

SEQ ID NO: 879732 - DNA, 25 bp, Homo sapien
ttagggtcaaactgagtccgaggcg

SEQ ID NO: 879733 - DNA, 25 bp, Homo sapien
gatgcaaggctagttagggtcaaac

SEQ ID NO: 879734 - DNA, 25 bp, Homo sapien
tgttcaactcttgggcaacatccga

SEQ ID NO: 879735 - DNA, 25 bp, Homo sapien
tagtcccatcactacagcaatagag

SEQ ID NO: 879736 - DNA, 25 bp, Homo sapien
ctacagcaatagaggtgttcaactc

SEQ ID NO: 879737 - DNA, 25 bp, Homo sapien
catccgaattgaaggtcacacttac

SEQ ID NO: 879738 - DNA, 25 bp, Homo sapien
tcggctctaactgtcagagatgggt

SEQ ID NO: 879739 - DNA, 25 bp, Homo sapien
catagagacgatttgaatatcttcc

SEQ ID NO: 879740 - DNA, 25 bp, Homo sapien
tatcttccagtgatatcggctctaa

SEQ ID NO: 879741 - DNA, 25 bp, Homo sapien
ctgcaggttcgtaagcatagagacg

SEQ ID NO: 879742 - DNA, 25 bp, Homo sapien
agataaatgaagcaaaagggaatgg

SEQ ID NO: 879743 - DNA, 25 bp, Homo sapien
gggaatggagtgtgtctgcactcac

SEQ ID NO: 879744 - DNA, 25 bp, Homo sapien
gtgagggaatggagtgtgtctgcac

SEQ ID NO: 879745 - DNA, 25 bp, Homo sapien
cctgtatttattgccccggggagct

SEQ ID NO: 879746 - DNA, 25 bp, Homo sapien
gctgtgcagtgctatttgtggaaaa

SEQ ID NO: 879747 - DNA, 25 bp, Homo sapien
gcccctggcagttagtagcaaatgc

SEQ ID NO: 879748 - DNA, 25 bp, Homo sapien
tcaacagctgtgcagtgctatttgt

SEQ ID NO: 879749 - DNA, 25 bp, Homo sapien
tgaacccttctgttctatctatggc

SEQ ID NO: 879750 - DNA, 25 bp, Homo sapien
catccaatgctagttttcaaaacga

SEQ ID NO: 879751 - DNA, 25 bp, Homo sapien
gagagatctggaaaccttgccttga

SEQ ID NO: 879752 - DNA, 25 bp, Homo sapien
taatcgaaagaacctaggacacgtg

SEQ ID NO: 879753 - DNA, 25 bp, Homo sapien
tccaaaagggaagcgtgaggataca

SEQ ID NO: 879754 - DNA, 25 bp, Homo sapien
taaaatgcccttccacagggatgct

SEQ ID NO: 879755 - DNA, 25 bp, Homo sapien
cagggatgctgtacaaagaattcct

SEQ ID NO: 879756 - DNA, 25 bp, Homo sapien
tagtgctttagttcagccttcttcc

SEQ ID NO: 879757 - DNA, 25 bp, Homo sapien
gaattcctgtacaaggtatgaacag

SEQ ID NO: 879758 - DNA, 25 bp, Homo sapien
tggattgtccttaaatcagtatgac

SEQ ID NO: 879759 - DNA, 25 bp, Homo sapien
ttaaacacatattgatggagagcct

SEQ ID NO: 879760 - DNA, 25 bp, Homo sapien
tttaatgaattacacaggtgaatca

SEQ ID NO: 879761 - DNA, 25 bp, Homo sapien
gcctactgcagggtcacgttgggaa

SEQ ID NO: 879762 - DNA, 25 bp, Homo sapien
tgtgtggaaataggtaaaagctcac

SEQ ID NO: 879763 - DNA, 25 bp, Homo sapien
ctagagcttagtgatgacattggcc

SEQ ID NO: 879764 - DNA, 25 bp, Homo sapien
gacattggccatggcaacgtggcaa

SEQ ID NO: 879765 - DNA, 25 bp, Homo sapien
gcagcactagtatgtgtttccgagt

SEQ ID NO: 879766 - DNA, 25 bp, Homo sapien
aacaaacataatcctggggacatac

SEQ ID NO: 879767 - DNA, 25 bp, Homo sapien
caacaaacataatcctggggacata

SEQ ID NO: 879768 - DNA, 25 bp, Homo sapien
catcaggagaaaggtgtttgtcagt

SEQ ID NO: 879769 - DNA, 25 bp, Homo sapien
caggagaaaggtgtttgtcagttgt

SEQ ID NO: 879770 - DNA, 25 bp, Homo sapien
attgaggaggacaaactgctctgcc

SEQ ID NO: 879771 - DNA, 25 bp, Homo sapien
cagattgaggaggacaaactgctct

SEQ ID NO: 879772 - DNA, 25 bp, Homo sapien
tattttcagcaaacactttctttaa

SEQ ID NO: 879773 - DNA, 25 bp, Homo sapien
ctgctctgccaatttctggatttct

SEQ ID NO: 879774 - DNA, 25 bp, Homo sapien
atgaataatcatcaagggtttgttg

SEQ ID NO: 879775 - DNA, 25 bp, Homo sapien
gtcttggatttatatagagcttctt

SEQ ID NO: 879776 - DNA, 25 bp, Homo sapien
tgtcttggatttatatagagcttct

SEQ ID NO: 879777 - DNA, 25 bp, Homo sapien
ttgtcttggatttatatagagcttc

SEQ ID NO: 879778 - DNA, 25 bp, Homo sapien
cttgtcttggatttatatagagctt

SEQ ID NO: 879779 - DNA, 25 bp, Homo sapien
gttggaagccaacaagaagctgact

SEQ ID NO: 879780 - DNA, 25 bp, Homo sapien
gaaatcttttccaattaagtagcag

SEQ ID NO: 879781 - DNA, 25 bp, Homo sapien
gaagccaacaagaagctgactccta

SEQ ID NO: 879782 - DNA, 25 bp, Homo sapien
ttccaattaagtagcagttggaagc

SEQ ID NO: 879783 - DNA, 25 bp, Homo sapien
gcagtttgggtcgagagtcctttgt

SEQ ID NO: 879784 - DNA, 25 bp, Homo sapien
gggccacaaggagcaagaatgctga

SEQ ID NO: 879785 - DNA, 25 bp, Homo sapien
tgtggtatctctggccagagtgtag

SEQ ID NO: 879786 - DNA, 25 bp, Homo sapien
ggccagagtgtaggagagggccaca

SEQ ID NO: 879787 - DNA, 25 bp, Homo sapien
aaaggaaagtacatggcaagataag

SEQ ID NO: 879788 - DNA, 25 bp, Homo sapien
gcaaagtgagttgctctagcaagtc

SEQ ID NO: 879789 - DNA, 25 bp, Homo sapien
tctggtatgccacagttgattccca

SEQ ID NO: 879790 - DNA, 25 bp, Homo sapien
gcaagtcactaaggttgtccacggg

SEQ ID NO: 879791 - DNA, 25 bp, Homo sapien
gaactaactcgggaacgtcacactg

SEQ ID NO: 879792 - DNA, 25 bp, Homo sapien
ctttatatagcaatcagaggcccga

SEQ ID NO: 879793 - DNA, 25 bp, Homo sapien
tgtgccagctctagccaaagaaagg

SEQ ID NO: 879794 - DNA, 25 bp, Homo sapien
gaggcccgaattcactccagcaagt

SEQ ID NO: 879795 - DNA, 25 bp, Homo sapien
aatcccacccactagtgctgcattt

SEQ ID NO: 879796 - DNA, 25 bp, Homo sapien
tacttgttgctaactcagaaacgaa

SEQ ID NO: 879797 - DNA, 25 bp, Homo sapien
gagtctctatttatgcaccagggca

SEQ ID NO: 879798 - DNA, 25 bp, Homo sapien
gcggtccaagcttctgagtgtgcca

SEQ ID NO: 879799 - DNA, 25 bp, Homo sapien
tcatagtcctcagcaataggtcagc

SEQ ID NO: 879800 - DNA, 25 bp, Homo sapien
aacttttttctcatagtcctcagca

SEQ ID NO: 879801 - DNA, 25 bp, Homo sapien
gtttgcaagtgttttccatatgact

SEQ ID NO: 879802 - DNA, 25 bp, Homo sapien
tttgcaagtgttttccatatgactc

SEQ ID NO: 879803 - DNA, 25 bp, Homo sapien
acttttacagattctctgaaggatc

SEQ ID NO: 879804 - DNA, 25 bp, Homo sapien
ggtacttttacagattctctgaagg

SEQ ID NO: 879805 - DNA, 25 bp, Homo sapien
ctaaggtacttttacagattctctg

SEQ ID NO: 879806 - DNA, 25 bp, Homo sapien
taaggtacttttacagattctctga

SEQ ID NO: 879807 - DNA, 25 bp, Homo sapien
attgctagctttgcccatcccgaaa

SEQ ID NO: 879808 - DNA, 25 bp, Homo sapien
ctagctttgcccatcccgaaagggc

SEQ ID NO: 879809 - DNA, 25 bp, Homo sapien
tttgcccatcccgaaagggccagta

SEQ ID NO: 879810 - DNA, 25 bp, Homo sapien
ttcattgctagctttgcccatcccg

SEQ ID NO: 879811 - DNA, 25 bp, Homo sapien
ctttggtgctgctatccaggaagga

SEQ ID NO: 879812 - DNA, 25 bp, Homo sapien
ttggtgctgctatccaggaaggact

SEQ ID NO: 879813 - DNA, 25 bp, Homo sapien
tttggtgctgctatccaggaaggac

SEQ ID NO: 879814 - DNA, 25 bp, Homo sapien
tggtgctgctatccaggaaggactc

SEQ ID NO: 879815 - DNA, 25 bp, Homo sapien
gttgatctagcaacatcctctttgg

SEQ ID NO: 879816 - DNA, 25 bp, Homo sapien
ggaaaacatcttatgtaacgtctgg

SEQ ID NO: 879817 - DNA, 25 bp, Homo sapien
caattgacggtcattggaaaacatc

SEQ ID NO: 879818 - DNA, 25 bp, Homo sapien
tctcttgtgatcttgcttggttggg

SEQ ID NO: 879819 - DNA, 25 bp, Homo sapien
cagtgtaatttgacatcttgttctc

SEQ ID NO: 879820 - DNA, 25 bp, Homo sapien
tcagcatcagtgtaatttgacatct

SEQ ID NO: 879821 - DNA, 25 bp, Homo sapien
tcttgttctcctaattcatcgtggc

SEQ ID NO: 879822 - DNA, 25 bp, Homo sapien
ctttgagaagcttgactcagcatca

SEQ ID NO: 879823 - DNA, 25 bp, Homo sapien
gatctagcaggctctaaaataaggc

SEQ ID NO: 879824 - DNA, 25 bp, Homo sapien
gccagtgttagcatccattgttacc

SEQ ID NO: 879825 - DNA, 25 bp, Homo sapien
cattgttacctcgaaagtatatgta

SEQ ID NO: 879826 - DNA, 25 bp, Homo sapien
tttccctcgggtaattgtcttcaca

SEQ ID NO: 879827 - DNA, 25 bp, Homo sapien
gtcatgtacttcaagaggaagctga

SEQ ID NO: 879828 - DNA, 25 bp, Homo sapien
tggtcatgtacttcaagaggaagct

SEQ ID NO: 879829 - DNA, 25 bp, Homo sapien
cctttatgcattggtcatgtacttc

SEQ ID NO: 879830 - DNA, 25 bp, Homo sapien
tcctttatgcattggtcatgtactt

SEQ ID NO: 879831 - DNA, 25 bp, Homo sapien
tgtcccatagctcggcagtggtgca

SEQ ID NO: 879832 - DNA, 25 bp, Homo sapien
taatgtgcttcccataatgtcatca

SEQ ID NO: 879833 - DNA, 25 bp, Homo sapien
gcttcccataatgtcatcactctgt

SEQ ID NO: 879834 - DNA, 25 bp, Homo sapien
gctgctttggagaaggttaatgtgc

SEQ ID NO: 879835 - DNA, 25 bp, Homo sapien
tccatatagatcttcatgccccgtg

SEQ ID NO: 879836 - DNA, 25 bp, Homo sapien
ccataacttgtaacctctctcaggg

SEQ ID NO: 879837 - DNA, 25 bp, Homo sapien
gccccgtgagtaggcatgaagcctc

SEQ ID NO: 879838 - DNA, 25 bp, Homo sapien
cagtgcagtgtctcgaaggtggctc

SEQ ID NO: 879839 - DNA, 25 bp, Homo sapien
gtccatataccagttaatctaattt

SEQ ID NO: 879840 - DNA, 25 bp, Homo sapien
gctgtccatataccagttaatctaa

SEQ ID NO: 879841 - DNA, 25 bp, Homo sapien
gacagcttgctgtccatataccagt

SEQ ID NO: 879842 - DNA, 25 bp, Homo sapien
cttgctgtccatataccagttaatc

SEQ ID NO: 879843 - DNA, 25 bp, Homo sapien
agttatgttgtatttgagtttggcc

SEQ ID NO: 879844 - DNA, 25 bp, Homo sapien
gagtttggccacacctaacagatca

SEQ ID NO: 879845 - DNA, 25 bp, Homo sapien
gtgcaggcctcttccgagttctacc

SEQ ID NO: 879846 - DNA, 25 bp, Homo sapien
tacctggctgtcaatccgcagagtc

SEQ ID NO: 879847 - DNA, 25 bp, Homo sapien
agcacacaaatgatgacagaattgc

SEQ ID NO: 879848 - DNA, 25 bp, Homo sapien
caaatgatgacagaattgcacatgt

SEQ ID NO: 879849 - DNA, 25 bp, Homo sapien
tattggagcacacaaatgatgacag

SEQ ID NO: 879850 - DNA, 25 bp, Homo sapien
ctattggagcacacaaatgatgaca

SEQ ID NO: 879851 - DNA, 25 bp, Homo sapien
tccaggggcacgctgaggggtcggg

SEQ ID NO: 879852 - DNA, 25 bp, Homo sapien
tgcgggggatccaggggcacgctga

SEQ ID NO: 879853 - DNA, 25 bp, Homo sapien
ccactgcgggggatccaggggcacg

SEQ ID NO: 879854 - DNA, 25 bp, Homo sapien
ctaggccactgcgggggatccaggg

SEQ ID NO: 879855 - DNA, 25 bp, Homo sapien
agggaggagtcggggtgctgatgag

SEQ ID NO: 879856 - DNA, 25 bp, Homo sapien
gagggaggagtcggggtgctgatga

SEQ ID NO: 879857 - DNA, 25 bp, Homo sapien
gggaggagtcggggtgctgatgagg

SEQ ID NO: 879858 - DNA, 25 bp, Homo sapien
cagcctcgcgccctgagtggggtct

SEQ ID NO: 879859 - DNA, 25 bp, Homo sapien
ctccaacgtcaaatcccagtggctt

SEQ ID NO: 879860 - DNA, 25 bp, Homo sapien
aaatcccagtggcttcagcctcgcg

SEQ ID NO: 879861 - DNA, 25 bp, Homo sapien
agtggcttcagcctcgcgccctgag

SEQ ID NO: 879862 - DNA, 25 bp, Homo sapien
aaggaacccagtcatattgggttag

SEQ ID NO: 879863 - DNA, 25 bp, Homo sapien
aggaacccagtcatattgggttagg

SEQ ID NO: 879864 - DNA, 25 bp, Homo sapien
cagtctatctttggatccacaatat

SEQ ID NO: 879865 - DNA, 25 bp, Homo sapien
gatatatcgtaccactagactgtga

SEQ ID NO: 879866 - DNA, 25 bp, Homo sapien
cagtgatatatcgtaccactagact

SEQ ID NO: 879867 - DNA, 25 bp, Homo sapien
ctatctttggatccacaatatcaaa

SEQ ID NO: 879868 - DNA, 25 bp, Homo sapien
tagtaatattacaaaatctatatac

SEQ ID NO: 879869 - DNA, 25 bp, Homo sapien
aatgtgccagaggttttcttcatga

SEQ ID NO: 879870 - DNA, 25 bp, Homo sapien
gtcaatgtgccagaggttttcttca

SEQ ID NO: 879871 - DNA, 25 bp, Homo sapien
tgtcaatgtgccagaggttttcttc

SEQ ID NO: 879872 - DNA, 25 bp, Homo sapien
tctgactgaataagtcttaatgctt

SEQ ID NO: 879873 - DNA, 25 bp, Homo sapien
tagctctgactgaataagtcttaat

SEQ ID NO: 879874 - DNA, 25 bp, Homo sapien
gctctgactgaataagtcttaatgc

SEQ ID NO: 879875 - DNA, 25 bp, Homo sapien
gactgaataagtcttaatgctttct

SEQ ID NO: 879876 - DNA, 25 bp, Homo sapien
tatagttgataatgaatgttgtaaa

SEQ ID NO: 879877 - DNA, 25 bp, Homo sapien
gcttataggcattaaagaaagatga

SEQ ID NO: 879878 - DNA, 25 bp, Homo sapien
ggtaagactgtacctccttgcttat

SEQ ID NO: 879879 - DNA, 25 bp, Homo sapien
cacagttgtcttattaaatatagtt

SEQ ID NO: 879880 - DNA, 25 bp, Homo sapien
tcagctctaactgttaaagaagggt

SEQ ID NO: 879881 - DNA, 25 bp, Homo sapien
aatcccgaggctcatatgtgtacaa

SEQ ID NO: 879882 - DNA, 25 bp, Homo sapien
gtacaatctgttagagtatcttcca

SEQ ID NO: 879883 - DNA, 25 bp, Homo sapien
gagtatcttccagctatgtcagctc

SEQ ID NO: 879884 - DNA, 25 bp, Homo sapien
tgtcaatctagtctggggcactgtg

SEQ ID NO: 879885 - DNA, 25 bp, Homo sapien
atgtcagttcatgaattaacctgaa

SEQ ID NO: 879886 - DNA, 25 bp, Homo sapien
ctccttttagtgtgtcataggtctc

SEQ ID NO: 879887 - DNA, 25 bp, Homo sapien
tacattgggatatagatttaatagc

SEQ ID NO: 879888 - DNA, 25 bp, Homo sapien
ctacaaacatgattctaggcacata

SEQ ID NO: 879889 - DNA, 25 bp, Homo sapien
gcccatcaggtgataaattcttatc

SEQ ID NO: 879890 - DNA, 25 bp, Homo sapien
catgattctaggcacatattgccca

SEQ ID NO: 879891 - DNA, 25 bp, Homo sapien
gcacatattgcccatcaggtgataa

SEQ ID NO: 879892 - DNA, 25 bp, Homo sapien
ttagcatgatgaacttattctgagc

SEQ ID NO: 879893 - DNA, 25 bp, Homo sapien
catgatgaacttattctgagccatt

SEQ ID NO: 879894 - DNA, 25 bp, Homo sapien
aggtttagcatgatgaacttattct

SEQ ID NO: 879895 - DNA, 25 bp, Homo sapien
tagcatgatgaacttattctgagcc

SEQ ID NO: 879896 - DNA, 25 bp, Homo sapien
agtattgacaatcctccaggtgatg

SEQ ID NO: 879897 - DNA, 25 bp, Homo sapien
tcctccaggtgatgaataaccatta

SEQ ID NO: 879898 - DNA, 25 bp, Homo sapien
gagagtattgacaatcctccaggtg

SEQ ID NO: 879899 - DNA, 25 bp, Homo sapien
cttgagagtattgacaatcctccag

SEQ ID NO: 879900 - DNA, 25 bp, Homo sapien
tgacagaagagttagtttttcgtga

SEQ ID NO: 879901 - DNA, 25 bp, Homo sapien
tttttcgtgatgaaagactacagga

SEQ ID NO: 879902 - DNA, 25 bp, Homo sapien
gatgaaagactacaggaacggagaa

SEQ ID NO: 879903 - DNA, 25 bp, Homo sapien
acaggaacggagaattaacaaactg

SEQ ID NO: 879904 - DNA, 25 bp, Homo sapien
gctctgtgtcctgtgcgggttcacc

SEQ ID NO: 879905 - DNA, 25 bp, Homo sapien
tgtgtcctgtgcgggttcacccaga

SEQ ID NO: 879906 - DNA, 25 bp, Homo sapien
tgtcctgtgcgggttcacccagaga

SEQ ID NO: 879907 - DNA, 25 bp, Homo sapien
tctgtgtcctgtgcgggttcaccca

SEQ ID NO: 879908 - DNA, 25 bp, Homo sapien
gtaggcagaagtcaggaaaaagtgc

SEQ ID NO: 879909 - DNA, 25 bp, Homo sapien
aggcagaagtcaggaaaaagtgctt

SEQ ID NO: 879910 - DNA, 25 bp, Homo sapien
cagaagtcaggaaaaagtgcttttg

SEQ ID NO: 879911 - DNA, 25 bp, Homo sapien
ctggtaggcagaagtcaggaaaaag

SEQ ID NO: 879912 - DNA, 25 bp, Homo sapien
attagaaaccactgcggtgtgtgcg

SEQ ID NO: 879913 - DNA, 25 bp, Homo sapien
ttagaaaccactgcggtgtgtgcga

SEQ ID NO: 879914 - DNA, 25 bp, Homo sapien
cactgcggtgtgtgcgagggtcaaa

SEQ ID NO: 879915 - DNA, 25 bp, Homo sapien
tgtgtgcgagggtcaaaaacttgat

SEQ ID NO: 879916 - DNA, 25 bp, Homo sapien
gtaaagagcgtgtattccagtcacc

SEQ ID NO: 879917 - DNA, 25 bp, Homo sapien
aattaaataagtctcctggcatgtg

SEQ ID NO: 879918 - DNA, 25 bp, Homo sapien
aagtctcctggcatgtgtgacattt

SEQ ID NO: 879919 - DNA, 25 bp, Homo sapien
tataaattaaataagtctcctggca

SEQ ID NO: 879920 - DNA, 25 bp, Homo sapien
aaataagtctcctggcatgtgtgac

SEQ ID NO: 879921 - DNA, 25 bp, Homo sapien
acaagtatgtatcctgttcatattc

SEQ ID NO: 879922 - DNA, 25 bp, Homo sapien
tcaacaagtatgtatcctgttcata

SEQ ID NO: 879923 - DNA, 25 bp, Homo sapien
caacaagtatgtatcctgttcatat

SEQ ID NO: 879924 - DNA, 25 bp, Homo sapien
gttcaacaagtatgtatcctgttca

SEQ ID NO: 879925 - DNA, 25 bp, Homo sapien
gagaaacgtctttgccaccagtagc

SEQ ID NO: 879926 - DNA, 25 bp, Homo sapien
gctgtttattgcacttctcatatca

SEQ ID NO: 879927 - DNA, 25 bp, Homo sapien
ttccccaaagctcggaagagaaaca

SEQ ID NO: 879928 - DNA, 25 bp, Homo sapien
ttgattttgacagcgtagcatttga

SEQ ID NO: 879929 - DNA, 25 bp, Homo sapien
cattcttgttagcctctatagtcac

SEQ ID NO: 879930 - DNA, 25 bp, Homo sapien
ccattcttgttagcctctatagtca

SEQ ID NO: 879931 - DNA, 25 bp, Homo sapien
tccattcttgttagcctctatagtc

SEQ ID NO: 879932 - DNA, 25 bp, Homo sapien
ctaatatttgaggtagaatgctctt

SEQ ID NO: 879933 - DNA, 25 bp, Homo sapien
ttgaggtagaatgctcttcccgaat

SEQ ID NO: 879934 - DNA, 25 bp, Homo sapien
gaggtagaatgctcttcccgaattt

SEQ ID NO: 879935 - DNA, 25 bp, Homo sapien
aatatttgaggtagaatgctcttcc

SEQ ID NO: 879936 - DNA, 25 bp, Homo sapien
ttaccactgagactgtcacagatta

SEQ ID NO: 879937 - DNA, 25 bp, Homo sapien
taccactgagactgtcacagattat

SEQ ID NO: 879938 - DNA, 25 bp, Homo sapien
aaggatatcgaccaatcttcacata

SEQ ID NO: 879939 - DNA, 25 bp, Homo sapien
atataaaaggatatcgaccaatctt

SEQ ID NO: 879940 - DNA, 25 bp, Homo sapien
tcagatgatctccaagcatttgtaa

SEQ ID NO: 879941 - DNA, 25 bp, Homo sapien
tcttatcagttctcagatgatctcc

SEQ ID NO: 879942 - DNA, 25 bp, Homo sapien
gaattatcttcttatcagttctcag

SEQ ID NO: 879943 - DNA, 25 bp, Homo sapien
agatgatctccaagcatttgtaact

SEQ ID NO: 879944 - DNA, 25 bp, Homo sapien
gtagaaactctttgcaaactgctat

SEQ ID NO: 879945 - DNA, 25 bp, Homo sapien
tcttagtagaaactctttgcaaact

SEQ ID NO: 879946 - DNA, 25 bp, Homo sapien
tgctcttagtagaaactctttgcaa

SEQ ID NO: 879947 - DNA, 25 bp, Homo sapien
ttgttgctcttagtagaaactcttt

SEQ ID NO: 879948 - DNA, 25 bp, Homo sapien
gattcagtatgaaacatttccttga

SEQ ID NO: 879949 - DNA, 25 bp, Homo sapien
tgatagcgtttttttggtcgttgtc

SEQ ID NO: 879950 - DNA, 25 bp, Homo sapien
agcttgattcagtatgaaacatttc

SEQ ID NO: 879951 - DNA, 25 bp, Homo sapien
ccattctcctttgatagcgtttttt

SEQ ID NO: 879952 - DNA, 25 bp, Homo sapien
caattatcttttcatgcacagccaa

SEQ ID NO: 879953 - DNA, 25 bp, Homo sapien
tcaattatcttttcatgcacagcca

SEQ ID NO: 879954 - DNA, 25 bp, Homo sapien
gacagatttcctatttttctagctg

SEQ ID NO: 879955 - DNA, 25 bp, Homo sapien
ccatatatctgttctaaggaagaca

SEQ ID NO: 879956 - DNA, 25 bp, Homo sapien
ttatatttatctacccatggttcat

SEQ ID NO: 879957 - DNA, 25 bp, Homo sapien
cattttcagacagatagtcttttga

SEQ ID NO: 879958 - DNA, 25 bp, Homo sapien
acctaatgatgtggcagtaatagta

SEQ ID NO: 879959 - DNA, 25 bp, Homo sapien
cacacctaatgatgtggcagtaata

SEQ ID NO: 879960 - DNA, 25 bp, Homo sapien
tcacacctaatgatgtggcagtaat

SEQ ID NO: 879961 - DNA, 25 bp, Homo sapien
ttattcacacctaatgatgtggcag

SEQ ID NO: 879962 - DNA, 25 bp, Homo sapien
aaatcattgaatgatgggtcaatcc

SEQ ID NO: 879963 - DNA, 25 bp, Homo sapien
aatcattgaatgatgggtcaatcca

SEQ ID NO: 879964 - DNA, 25 bp, Homo sapien
tcattgaatgatgggtcaatccagt

SEQ ID NO: 879965 - DNA, 25 bp, Homo sapien
attgaatgatgggtcaatccagtct

SEQ ID NO: 879966 - DNA, 25 bp, Homo sapien
taagtttgtacccaagtgatgtcat

SEQ ID NO: 879967 - DNA, 25 bp, Homo sapien
tcttcataagtttgtacccaagtga

SEQ ID NO: 879968 - DNA, 25 bp, Homo sapien
ccttcttcataagtttgtacccaag

SEQ ID NO: 879969 - DNA, 25 bp, Homo sapien
tcataagtttgtacccaagtgatgt

SEQ ID NO: 879970 - DNA, 25 bp, Homo sapien
tgtgacgagtaagaggcagagaccc

SEQ ID NO: 879971 - DNA, 25 bp, Homo sapien
aggttggaagaaactgtgacgagta

SEQ ID NO: 879972 - DNA, 25 bp, Homo sapien
ctcttgagagtgtctgaggaggcct

SEQ ID NO: 879973 - DNA, 25 bp, Homo sapien
tccttttttattgcaatggcaaggt

SEQ ID NO: 879974 - DNA, 25 bp, Homo sapien
cttctagagactctctcagaagaag

SEQ ID NO: 879975 - DNA, 25 bp, Homo sapien
tcttctagagactctctcagaagaa

SEQ ID NO: 879976 - DNA, 25 bp, Homo sapien
gtcttctagagactctctcagaaga

SEQ ID NO: 879977 - DNA, 25 bp, Homo sapien
tttgcccttcagtttatgatacagc

SEQ ID NO: 879978 - DNA, 25 bp, Homo sapien
gcccttcagtttatgatacagctct

SEQ ID NO: 879979 - DNA, 25 bp, Homo sapien
cagacttttgcccttcagtttatga

SEQ ID NO: 879980 - DNA, 25 bp, Homo sapien
tcagtttatgatacagctctttata

SEQ ID NO: 879981 - DNA, 25 bp, Homo sapien
gacttggccagtgctcttgttggaa

SEQ ID NO: 879982 - DNA, 25 bp, Homo sapien
cttgttggaaatgtattctggatgt

SEQ ID NO: 879983 - DNA, 25 bp, Homo sapien
gctcttgttggaaatgtattctgga

SEQ ID NO: 879984 - DNA, 25 bp, Homo sapien
ctgacttggccagtgctcttgttgg

SEQ ID NO: 879985 - DNA, 25 bp, Homo sapien
tgggtgtggatttatagacacacac

SEQ ID NO: 879986 - DNA, 25 bp, Homo sapien
cacacacacctgacctacaacctca

SEQ ID NO: 879987 - DNA, 25 bp, Homo sapien
aatgggtgtggatttatagacacac

SEQ ID NO: 879988 - DNA, 25 bp, Homo sapien
taaaaatgggtgtggatttatagac

SEQ ID NO: 879989 - DNA, 25 bp, Homo sapien
gaacagaaagcggttccattccaaa

SEQ ID NO: 879990 - DNA, 25 bp, Homo sapien
tcaagtaacatcttgggagactgta

SEQ ID NO: 879991 - DNA, 25 bp, Homo sapien
tacaggccacttggtggtgctcatg

SEQ ID NO: 879992 - DNA, 25 bp, Homo sapien
agactgtaggagctgtacaggccac

SEQ ID NO: 879993 - DNA, 25 bp, Homo sapien
gttgcttatccttgcagtccaattc

SEQ ID NO: 879994 - DNA, 25 bp, Homo sapien
ttctgtcttacgtacttcgaatgag

SEQ ID NO: 879995 - DNA, 25 bp, Homo sapien
tgcagtccaattcgtatacatataa

SEQ ID NO: 879996 - DNA, 25 bp, Homo sapien
cgtacttcgaatgagagatgacacc

SEQ ID NO: 879997 - DNA, 25 bp, Homo sapien
taagtaataagttcagtcactagac

SEQ ID NO: 879998 - DNA, 25 bp, Homo sapien
cattttaagggataccgctagcacc

SEQ ID NO: 879999 - DNA, 25 bp, Homo sapien
cgctagcaccaaacagataccattt

SEQ ID NO: 880000 - DNA, 25 bp, Homo sapien
tttactctgcaaagactgatggaag

SEQ ID NO: 880001 - DNA, 25 bp, Homo sapien
aagcccactgttgtagtcctaaagg

SEQ ID NO: 880002 - DNA, 25 bp, Homo sapien
cccactgttgtagtcctaaaggtgc

SEQ ID NO: 880003 - DNA, 25 bp, Homo sapien
actgttgtagtcctaaaggtgcctt

SEQ ID NO: 880004 - DNA, 25 bp, Homo sapien
ccactgttgtagtcctaaaggtgcc

SEQ ID NO: 880005 - DNA, 25 bp, Homo sapien
agggtgaagattacggcaccgccag

SEQ ID NO: 880006 - DNA, 25 bp, Homo sapien
tacaatttggacttagaggtttggc

SEQ ID NO: 880007 - DNA, 25 bp, Homo sapien
caccgccagtaggatctttggtccc

SEQ ID NO: 880008 - DNA, 25 bp, Homo sapien
gaggtttggcagcttcaactgtctc

SEQ ID NO: 880009 - DNA, 25 bp, Homo sapien
cacaatccagaagtgaattagggaa

SEQ ID NO: 880010 - DNA, 25 bp, Homo sapien
tacaactgattggtgaacatctggt

SEQ ID NO: 880011 - DNA, 25 bp, Homo sapien
gagcaccattttggatggctccaag

SEQ ID NO: 880012 - DNA, 25 bp, Homo sapien
gctccaagaagtgattccagaagtg

SEQ ID NO: 880013 - DNA, 25 bp, Homo sapien
ctgtcagtgatgtgctgttgctgag

SEQ ID NO: 880014 - DNA, 25 bp, Homo sapien
ttgcatcatgctatggggcccctca

SEQ ID NO: 880015 - DNA, 25 bp, Homo sapien
cttttgcatcatgctatggggcccc

SEQ ID NO: 880016 - DNA, 25 bp, Homo sapien
tgtcagtgatgtgctgttgctgagc

SEQ ID NO: 880017 - DNA, 25 bp, Homo sapien
atgtgcccaatcatagcagatatca

SEQ ID NO: 880018 - DNA, 25 bp, Homo sapien
gaataggacttgtaactctatttca

SEQ ID NO: 880019 - DNA, 25 bp, Homo sapien
caagcaaaggggataggaccaagat

SEQ ID NO: 880020 - DNA, 25 bp, Homo sapien
catagcagatatcatctgaaggcat

SEQ ID NO: 880021 - DNA, 25 bp, Homo sapien
ttattcactgctgtcctcttgggtc

SEQ ID NO: 880022 - DNA, 25 bp, Homo sapien
gttgtgacttattcactgctgtcct

SEQ ID NO: 880023 - DNA, 25 bp, Homo sapien
tcttgggtcctgagctcttcctcat

SEQ ID NO: 880024 - DNA, 25 bp, Homo sapien
catctgttgtgacttattcactgct

SEQ ID NO: 880025 - DNA, 25 bp, Homo sapien
tttcccctcgtaatcaacatttcat

SEQ ID NO: 880026 - DNA, 25 bp, Homo sapien
cccctcgtaatcaacatttcatcct

SEQ ID NO: 880027 - DNA, 25 bp, Homo sapien
ttcccctcgtaatcaacatttcatc

SEQ ID NO: 880028 - DNA, 25 bp, Homo sapien
ttttcccctcgtaatcaacatttca

SEQ ID NO: 880029 - DNA, 25 bp, Homo sapien
taatagggccgcattcttcgccttt

SEQ ID NO: 880030 - DNA, 25 bp, Homo sapien
tcttcaattatacaggactcccatg

SEQ ID NO: 880031 - DNA, 25 bp, Homo sapien
tgggctaacacaatccatgcagggt

SEQ ID NO: 880032 - DNA, 25 bp, Homo sapien
taagttattcaagcattcacctgcc

SEQ ID NO: 880033 - DNA, 25 bp, Homo sapien
gaacaatcaagtgccactgctgtct

SEQ ID NO: 880034 - DNA, 25 bp, Homo sapien
ctgagcagtatgaacaatcaagtgc

SEQ ID NO: 880035 - DNA, 25 bp, Homo sapien
tatgaacaatcaagtgccactgctg

SEQ ID NO: 880036 - DNA, 25 bp, Homo sapien
gcagtatgaacaatcaagtgccact

SEQ ID NO: 880037 - DNA, 25 bp, Homo sapien
gggtggaagctgcatcctgcactgt

SEQ ID NO: 880038 - DNA, 25 bp, Homo sapien
ggtggaagctgcatcctgcactgtg

SEQ ID NO: 880039 - DNA, 25 bp, Homo sapien
tggaagctgcatcctgcactgtgtg

SEQ ID NO: 880040 - DNA, 25 bp, Homo sapien
gaagctgcatcctgcactgtgtgac

SEQ ID NO: 880041 - DNA, 25 bp, Homo sapien
tatgcttctagaacaattctcagct

SEQ ID NO: 880042 - DNA, 25 bp, Homo sapien
cagctctggagattgacaaattcat

SEQ ID NO: 880043 - DNA, 25 bp, Homo sapien
ctcagctctggagattgacaaattc

SEQ ID NO: 880044 - DNA, 25 bp, Homo sapien
aattctcagctctggagattgacaa

SEQ ID NO: 880045 - DNA, 25 bp, Homo sapien
ctacagttgatacttctaaggaata

SEQ ID NO: 880046 - DNA, 25 bp, Homo sapien
tctctacagttgatacttctaagga

SEQ ID NO: 880047 - DNA, 25 bp, Homo sapien
ctctacagttgatacttctaaggaa

SEQ ID NO: 880048 - DNA, 25 bp, Homo sapien
gtctctacagttgatacttctaagg

SEQ ID NO: 880049 - DNA, 25 bp, Homo sapien
gctttcaggatgaggtccacatttc

SEQ ID NO: 880050 - DNA, 25 bp, Homo sapien
ctttcaggatgaggtccacatttct

SEQ ID NO: 880051 - DNA, 25 bp, Homo sapien
tctccaacggactcttcataggatt

SEQ ID NO: 880052 - DNA, 25 bp, Homo sapien
gactctccaacggactcttcatagg

SEQ ID NO: 880053 - DNA, 25 bp, Homo sapien
ccaacggactcttcataggattctg

SEQ ID NO: 880054 - DNA, 25 bp, Homo sapien
ctgagactctccaacggactcttca

SEQ ID NO: 880055 - DNA, 25 bp, Homo sapien
gacagctgagagtcatttcctcatc

SEQ ID NO: 880056 - DNA, 25 bp, Homo sapien
catctttattccaaacgaagctgga

SEQ ID NO: 880057 - DNA, 25 bp, Homo sapien
tggacagctgagagtcatttcctca

SEQ ID NO: 880058 - DNA, 25 bp, Homo sapien
gaagctggacactcccttttcattt

SEQ ID NO: 880059 - DNA, 25 bp, Homo sapien
cagccagcatgtttacccactgggc

SEQ ID NO: 880060 - DNA, 25 bp, Homo sapien
agccagcatgtttacccactgggct

SEQ ID NO: 880061 - DNA, 25 bp, Homo sapien
cgctcggccgaaaattcttttatat

SEQ ID NO: 880062 - DNA, 25 bp, Homo sapien
actgcgctcggccgaaaattctttt

SEQ ID NO: 880063 - DNA, 25 bp, Homo sapien
ctgcgctcggccgaaaattctttta

SEQ ID NO: 880064 - DNA, 25 bp, Homo sapien
tgcgctcggccgaaaattcttttat

SEQ ID NO: 880065 - DNA, 25 bp, Homo sapien
acaaactgaatcctaacaaatacag

SEQ ID NO: 880066 - DNA, 25 bp, Homo sapien
aacatgggtgtaatggctgacactc

SEQ ID NO: 880067 - DNA, 25 bp, Homo sapien
tctgacaaataagcggtaagaggca

SEQ ID NO: 880068 - DNA, 25 bp, Homo sapien
gcatccttgtgcagctatgtcacaa

SEQ ID NO: 880069 - DNA, 25 bp, Homo sapien
tcaatcctgcttactggaacatggg

SEQ ID NO: 880070 - DNA, 25 bp, Homo sapien
caattgttggcattgttgctgtgtc

SEQ ID NO: 880071 - DNA, 25 bp, Homo sapien
tgtgtctttccgaggccagatcagc

SEQ ID NO: 880072 - DNA, 25 bp, Homo sapien
cagcaaaggttgttcccttcgatgc

SEQ ID NO: 880073 - DNA, 25 bp, Homo sapien
cctacttgaggagtaaaggacatca

SEQ ID NO: 880074 - DNA, 25 bp, Homo sapien
catggttatgtgtaatgaacaagct

SEQ ID NO: 880075 - DNA, 25 bp, Homo sapien
tgctctagcgtggaaacacaaaacc

SEQ ID NO: 880076 - DNA, 25 bp, Homo sapien
caaaaccttatttgtgataatgaga

SEQ ID NO: 880077 - DNA, 25 bp, Homo sapien
tctgaatgtaattggcataaacagt

SEQ ID NO: 880078 - DNA, 25 bp, Homo sapien
aagattgaagcactggcagacccac

SEQ ID NO: 880079 - DNA, 25 bp, Homo sapien
ttctgctgtatgtaacaaagactgc

SEQ ID NO: 880080 - DNA, 25 bp, Homo sapien
gattgaagcactggcagacccacag

SEQ ID NO: 880081 - DNA, 25 bp, Homo sapien
acccacagcaggtgatcaggagcca

SEQ ID NO: 880082 - DNA, 25 bp, Homo sapien
taataattatgtctcaaatttttag

SEQ ID NO: 880083 - DNA, 25 bp, Homo sapien
ataattatgtctcaaatttttagac

SEQ ID NO: 880084 - DNA, 25 bp, Homo sapien
aataattatgtctcaaatttttaga

SEQ ID NO: 880085 - DNA, 25 bp, Homo sapien
gtgttcgttgccctcctagtccaac

SEQ ID NO: 880086 - DNA, 25 bp, Homo sapien
gttgtgttcgttgccctcctagtcc

SEQ ID NO: 880087 - DNA, 25 bp, Homo sapien
tgttgtgttcgttgccctcctagtc

SEQ ID NO: 880088 - DNA, 25 bp, Homo sapien
tgtgttcgttgccctcctagtccaa

SEQ ID NO: 880089 - DNA, 25 bp, Homo sapien
cactgctacctaggccagtctctga

SEQ ID NO: 880090 - DNA, 25 bp, Homo sapien
gctccgactccaagacaggcactgg

SEQ ID NO: 880091 - DNA, 25 bp, Homo sapien
cagtctctgacacaggctggtcaac

SEQ ID NO: 880092 - DNA, 25 bp, Homo sapien
gtcaacaggtaccagctgatgagga

SEQ ID NO: 880093 - DNA, 25 bp, Homo sapien
gagaagagtgtggctttctgctctt

SEQ ID NO: 880094 - DNA, 25 bp, Homo sapien
aagagaagagtgtggctttctgctc

SEQ ID NO: 880095 - DNA, 25 bp, Homo sapien
tgctcttagtgtagtaggttgattc

SEQ ID NO: 880096 - DNA, 25 bp, Homo sapien
caagagaagagtgtggctttctgct

SEQ ID NO: 880097 - DNA, 25 bp, Homo sapien
catttctttcgttgtgctgtgacac

SEQ ID NO: 880098 - DNA, 25 bp, Homo sapien
tccatttctttcgttgtgctgtgac

SEQ ID NO: 880099 - DNA, 25 bp, Homo sapien
tatggaggtattcatatctccattt

SEQ ID NO: 880100 - DNA, 25 bp, Homo sapien
tttcgttgtgctgtgacacacttcc

SEQ ID NO: 880101 - DNA, 25 bp, Homo sapien
attcagcatgtggctgacactttca

SEQ ID NO: 880102 - DNA, 25 bp, Homo sapien
catcgcaaaggaagagtagaaaaca

SEQ ID NO: 880103 - DNA, 25 bp, Homo sapien
cacaatgttgggcatggcatcctcc

SEQ ID NO: 880104 - DNA, 25 bp, Homo sapien
ttgctgccacatcgcaaaggaagag

SEQ ID NO: 880105 - DNA, 25 bp, Homo sapien
tcctcttctaaagtcttgactaaga

SEQ ID NO: 880106 - DNA, 25 bp, Homo sapien
actccttaggtttctgcttcaaatg

SEQ ID NO: 880107 - DNA, 25 bp, Homo sapien
gactaagatgttagtaaaggttctc

SEQ ID NO: 880108 - DNA, 25 bp, Homo sapien
ttctgcttcaaatgggaaaggcttc

SEQ ID NO: 880109 - DNA, 25 bp, Homo sapien
caaggaagagatgccatgtttactc

SEQ ID NO: 880110 - DNA, 25 bp, Homo sapien
ccgttaagctcattattccagacta

SEQ ID NO: 880111 - DNA, 25 bp, Homo sapien
aatccaaggaagagatgccatgttt

SEQ ID NO: 880112 - DNA, 25 bp, Homo sapien
taaccaaagctttccgttaagctca

SEQ ID NO: 880113 - DNA, 25 bp, Homo sapien
caggaacagatactgtactgacacc

SEQ ID NO: 880114 - DNA, 25 bp, Homo sapien
ggaacagatactgtactgacaccat

SEQ ID NO: 880115 - DNA, 25 bp, Homo sapien
agatactgtactgacaccatcccag

SEQ ID NO: 880116 - DNA, 25 bp, Homo sapien
aacagatactgtactgacaccatcc

SEQ ID NO: 880117 - DNA, 25 bp, Homo sapien
tgctacaatacagcagagtatcagc

SEQ ID NO: 880118 - DNA, 25 bp, Homo sapien
tacaatacagcagagtatcagcaga

SEQ ID NO: 880119 - DNA, 25 bp, Homo sapien
aatacagcagagtatcagcagagtc

SEQ ID NO: 880120 - DNA, 25 bp, Homo sapien
caatacagcagagtatcagcagagt

SEQ ID NO: 880121 - DNA, 25 bp, Homo sapien
caggaggctaaagaaatcggcttcc

SEQ ID NO: 880122 - DNA, 25 bp, Homo sapien
gccttgtgttaatgcactgtccttg

SEQ ID NO: 880123 - DNA, 25 bp, Homo sapien
catgcacttgatctttgcacctcca

SEQ ID NO: 880124 - DNA, 25 bp, Homo sapien
gaggtcaggtcgctgctcctctcct

SEQ ID NO: 880125 - DNA, 25 bp, Homo sapien
acctccacagccttgtgttaatgca

SEQ ID NO: 880126 - DNA, 25 bp, Homo sapien
tggcattgggcaaagcttaggctcc

SEQ ID NO: 880127 - DNA, 25 bp, Homo sapien
gaagcatatcctctgtcaagccaag

SEQ ID NO: 880128 - DNA, 25 bp, Homo sapien
tgggtgataggaaaaccaggtctgt

SEQ ID NO: 880129 - DNA, 25 bp, Homo sapien
gttacacaagagtcccaaagaagtc

SEQ ID NO: 880130 - DNA, 25 bp, Homo sapien
ttagccatgcactacatcaattata

SEQ ID NO: 880131 - DNA, 25 bp, Homo sapien
caattataggaataatagctatgaa

SEQ ID NO: 880132 - DNA, 25 bp, Homo sapien
tataggaataatagctatgaaagac

SEQ ID NO: 880133 - DNA, 25 bp, Homo sapien
catgcactacatcaattataggaat

SEQ ID NO: 880134 - DNA, 25 bp, Homo sapien
gcatcacataacaagagagtacagg

SEQ ID NO: 880135 - DNA, 25 bp, Homo sapien
gcagagccgtcatgaccttgtaaag

SEQ ID NO: 880136 - DNA, 25 bp, Homo sapien
cacattcaaattgtagcagggccta

SEQ ID NO: 880137 - DNA, 25 bp, Homo sapien
tgatctattcatgattgcagagccg

SEQ ID NO: 880138 - DNA, 25 bp, Homo sapien
gagacccatagaggatttcagttga

SEQ ID NO: 880139 - DNA, 25 bp, Homo sapien
tctggagacccatagaggatttcag

SEQ ID NO: 880140 - DNA, 25 bp, Homo sapien
ggagtctggagacccatagaggatt

SEQ ID NO: 880141 - DNA, 25 bp, Homo sapien
gagtatttatcagtgtacatttgag

SEQ ID NO: 880142 - DNA, 25 bp, Homo sapien
gactcactagtgttgttttcgatga

SEQ ID NO: 880143 - DNA, 25 bp, Homo sapien
caatcatgtaaaatagtctcatgca

SEQ ID NO: 880144 - DNA, 25 bp, Homo sapien
tctgttgagacataccacgtgataa

SEQ ID NO: 880145 - DNA, 25 bp, Homo sapien
gaaactgcgataattcttcttggga

SEQ ID NO: 880146 - DNA, 25 bp, Homo sapien
cagtttggactttgtactttgaatt

SEQ ID NO: 880147 - DNA, 25 bp, Homo sapien
caagtatctgataaaatggcaccat

SEQ ID NO: 880148 - DNA, 25 bp, Homo sapien
tcaagtatctgataaaatggcacca

SEQ ID NO: 880149 - DNA, 25 bp, Homo sapien
tgctttaagattttccatccaggac

SEQ ID NO: 880150 - DNA, 25 bp, Homo sapien
ttttagaaagaggacacatttcact

SEQ ID NO: 880151 - DNA, 25 bp, Homo sapien
atcaggactcagatagccagggcta

SEQ ID NO: 880152 - DNA, 25 bp, Homo sapien
cagggctataggaaaatgctttaag

SEQ ID NO: 880153 - DNA, 25 bp, Homo sapien
gggtgtcaggtgtattaacatacgc

SEQ ID NO: 880154 - DNA, 25 bp, Homo sapien
cacattcatgtactttgcacctcat

SEQ ID NO: 880155 - DNA, 25 bp, Homo sapien
taacatacgcaattgatctatacca

SEQ ID NO: 880156 - DNA, 25 bp, Homo sapien
ggtgtattaacatacgcaattgatc

SEQ ID NO: 880157 - DNA, 25 bp, Homo sapien
tgctagacagtcagtcagcccatga

SEQ ID NO: 880158 - DNA, 25 bp, Homo sapien
ggtaggtatccacgctagacatgga

SEQ ID NO: 880159 - DNA, 25 bp, Homo sapien
aaactcgtgtctcaagcatggtagg

SEQ ID NO: 880160 - DNA, 25 bp, Homo sapien
cccatgatggtgtagatcgtatctc

SEQ ID NO: 880161 - DNA, 25 bp, Homo sapien
gatggtggcccacttggagttttca

SEQ ID NO: 880162 - DNA, 25 bp, Homo sapien
atggtggcccacttggagttttcat

SEQ ID NO: 880163 - DNA, 25 bp, Homo sapien
tttctatttgatggccaaaacttgg

SEQ ID NO: 880164 - DNA, 25 bp, Homo sapien
acttggatctatgggctcctgagtc

SEQ ID NO: 880165 - DNA, 25 bp, Homo sapien
caaaacttggatctatgggctcctg

SEQ ID NO: 880166 - DNA, 25 bp, Homo sapien
tggccaaaacttggatctatgggct

SEQ ID NO: 880167 - DNA, 25 bp, Homo sapien
tcctgataggttttggctcaccatg

SEQ ID NO: 880168 - DNA, 25 bp, Homo sapien
catgtcaaattctggcaacttaggg

SEQ ID NO: 880169 - DNA, 25 bp, Homo sapien
tatctagagtgtgccagaaacaatc

SEQ ID NO: 880170 - DNA, 25 bp, Homo sapien
cagtgcctcttaaaaactatcgagc

SEQ ID NO: 880171 - DNA, 25 bp, Homo sapien
tagcttgagattctggagctctctc

SEQ ID NO: 880172 - DNA, 25 bp, Homo sapien
tccattagtacacagctggaaggcc

SEQ ID NO: 880173 - DNA, 25 bp, Homo sapien
tccacttggtacaaatggcaaggtt

SEQ ID NO: 880174 - DNA, 25 bp, Homo sapien
gttttaagcacctctttagcttgag

SEQ ID NO: 880175 - DNA, 25 bp, Homo sapien
gggctactagttggtaccatatgta

SEQ ID NO: 880176 - DNA, 25 bp, Homo sapien
tatagaagctaatagaggtgaggat

SEQ ID NO: 880177 - DNA, 25 bp, Homo sapien
tacataacttacactgtcgctggta

SEQ ID NO: 880178 - DNA, 25 bp, Homo sapien
aaataataatgctagccttagacac

SEQ ID NO: 880179 - DNA, 25 bp, Homo sapien
ccttttacgaagtatttgacacctg

SEQ ID NO: 880180 - DNA, 25 bp, Homo sapien
cacctgtccacagctctattttgac

SEQ ID NO: 880181 - DNA, 25 bp, Homo sapien
tgtccagagtcagtgacataaggca

SEQ ID NO: 880182 - DNA, 25 bp, Homo sapien
ggcacactggttccaataaagcctt

SEQ ID NO: 880183 - DNA, 25 bp, Homo sapien
gtgaattgccactgatccgcagact

SEQ ID NO: 880184 - DNA, 25 bp, Homo sapien
tgccatggtcgctgtgaagagtgaa

SEQ ID NO: 880185 - DNA, 25 bp, Homo sapien
tgctgatcagtagtgccatggtcgc

SEQ ID NO: 880186 - DNA, 25 bp, Homo sapien
ggtcgctgtgaagagtgaattgcca

SEQ ID NO: 880187 - DNA, 25 bp, Homo sapien
acttgggtccatagctttgcgagta

SEQ ID NO: 880188 - DNA, 25 bp, Homo sapien
ttgggtccatagctttgcgagtacc

SEQ ID NO: 880189 - DNA, 25 bp, Homo sapien
gacttgggtccatagctttgcgagt

SEQ ID NO: 880190 - DNA, 25 bp, Homo sapien
cttgggtccatagctttgcgagtac

SEQ ID NO: 880191 - DNA, 25 bp, Homo sapien
tggcaataagacatttaggaccaag

SEQ ID NO: 880192 - DNA, 25 bp, Homo sapien
ttaggaccaagattccgaacaattc

SEQ ID NO: 880193 - DNA, 25 bp, Homo sapien
ccaagattccgaacaattcatgcat

SEQ ID NO: 880194 - DNA, 25 bp, Homo sapien
gcaataagacatttaggaccaagat

SEQ ID NO: 880195 - DNA, 25 bp, Homo sapien
catttgcacacatggttctctctgc

SEQ ID NO: 880196 - DNA, 25 bp, Homo sapien
tatactgatgccattgaattgtata

SEQ ID NO: 880197 - DNA, 25 bp, Homo sapien
catgtgttggtatacaatgctgata

SEQ ID NO: 880198 - DNA, 25 bp, Homo sapien
aggaaatgagccttttagagataca

SEQ ID NO: 880199 - DNA, 25 bp, Homo sapien
tgtaatgtgccctccactaccacta

SEQ ID NO: 880200 - DNA, 25 bp, Homo sapien
cttcacctccaatatactctaactg

SEQ ID NO: 880201 - DNA, 25 bp, Homo sapien
caatatactctaactgcaagtgtcc

SEQ ID NO: 880202 - DNA, 25 bp, Homo sapien
taccactaacaacttcacctccaat

SEQ ID NO: 880203 - DNA, 25 bp, Homo sapien
aaagatcctacaacacagaaatgta

SEQ ID NO: 880204 - DNA, 25 bp, Homo sapien
gagcttcctcgttcacaagggtaaa

SEQ ID NO: 880205 - DNA, 25 bp, Homo sapien
gggtatctctcatccctgagtcaaa

SEQ ID NO: 880206 - DNA, 25 bp, Homo sapien
ttagaccagtttccgtattaacagc

SEQ ID NO: 880207 - DNA, 25 bp, Homo sapien
gaagagatgcgcacagttgactctc

SEQ ID NO: 880208 - DNA, 25 bp, Homo sapien
tacatactatgtccaatttcaagct

SEQ ID NO: 880209 - DNA, 25 bp, Homo sapien
gctatcaacatgacataaccaatca

SEQ ID NO: 880210 - DNA, 25 bp, Homo sapien
catgaggtaaattcttgtctggatg

SEQ ID NO: 880211 - DNA, 25 bp, Homo sapien
tccatgacaccgtccaatcccctgg

SEQ ID NO: 880212 - DNA, 25 bp, Homo sapien
catttccatgacaccgtccaatccc

SEQ ID NO: 880213 - DNA, 25 bp, Homo sapien
ttccatgacaccgtccaatcccctg

SEQ ID NO: 880214 - DNA, 25 bp, Homo sapien
atttccatgacaccgtccaatcccc

SEQ ID NO: 880215 - DNA, 25 bp, Homo sapien
tctggaattagtaccgatagcttcg

SEQ ID NO: 880216 - DNA, 25 bp, Homo sapien
gcacaggacctgtaatcgataaata

SEQ ID NO: 880217 - DNA, 25 bp, Homo sapien
taacaaacacctagggatggacaca

SEQ ID NO: 880218 - DNA, 25 bp, Homo sapien
tgcgctaatgtaggtacaccaagct

SEQ ID NO: 880219 - DNA, 25 bp, Homo sapien
ttctcaagaacataatttcaaaaga

SEQ ID NO: 880220 - DNA, 25 bp, Homo sapien
tctcaagaacataatttcaaaagac

SEQ ID NO: 880221 - DNA, 25 bp, Homo sapien
ctttctcaagaacataatttcaaaa

SEQ ID NO: 880222 - DNA, 25 bp, Homo sapien
tcaagaacataatttcaaaagacac

SEQ ID NO: 880223 - DNA, 25 bp, Homo sapien
ttagtggtggatactttggaagtga

SEQ ID NO: 880224 - DNA, 25 bp, Homo sapien
ttacaatttagagaagaccacaacc

SEQ ID NO: 880225 - DNA, 25 bp, Homo sapien
tatcccatgacaagtggttcacaac

SEQ ID NO: 880226 - DNA, 25 bp, Homo sapien
tgtttcttctgcgattccaggttta

SEQ ID NO: 880227 - DNA, 25 bp, Homo sapien
gagcacttagtgtaattctcctgtt

SEQ ID NO: 880228 - DNA, 25 bp, Homo sapien
taggaaagtaatgagcacttagtgt

SEQ ID NO: 880229 - DNA, 25 bp, Homo sapien
ggaaagtaatgagcacttagtgtaa

SEQ ID NO: 880230 - DNA, 25 bp, Homo sapien
aagtaatgagcacttagtgtaattc

SEQ ID NO: 880231 - DNA, 25 bp, Homo sapien
agccttagtgacagactgagactcc

SEQ ID NO: 880232 - DNA, 25 bp, Homo sapien
ccagccttagtgacagactgagact

SEQ ID NO: 880233 - DNA, 25 bp, Homo sapien
gccttagtgacagactgagactcca

SEQ ID NO: 880234 - DNA, 25 bp, Homo sapien
cagccttagtgacagactgagactc

SEQ ID NO: 880235 - DNA, 25 bp, Homo sapien
atcttgttaatgcagttcttactga

SEQ ID NO: 880236 - DNA, 25 bp, Homo sapien
tcttgttaatgcagttcttactgaa

SEQ ID NO: 880237 - DNA, 25 bp, Homo sapien
acagcattcctagtgtctcagtaat

SEQ ID NO: 880238 - DNA, 25 bp, Homo sapien
catggtgttgcaagctaaaagaaac

SEQ ID NO: 880239 - DNA, 25 bp, Homo sapien
gttcacagcattcctagtgtctcag

SEQ ID NO: 880240 - DNA, 25 bp, Homo sapien
ttttcatggtgttgcaagctaaaag

SEQ ID NO: 880241 - DNA, 25 bp, Homo sapien
cagtctagctacaataagtttgcct

SEQ ID NO: 880242 - DNA, 25 bp, Homo sapien
ggtgaagttaagctcaatatttggc

SEQ ID NO: 880243 - DNA, 25 bp, Homo sapien
gatatactttgtacagtctagctac

SEQ ID NO: 880244 - DNA, 25 bp, Homo sapien
aacaggtgaagttaagctcaatatt

SEQ ID NO: 880245 - DNA, 25 bp, Homo sapien
acgtcatcacgtgccgggatgaggg

SEQ ID NO: 880246 - DNA, 25 bp, Homo sapien
tacgtcatcacgtgccgggatgagg

SEQ ID NO: 880247 - DNA, 25 bp, Homo sapien
gtcctacgtcatcacgtgccgggat

SEQ ID NO: 880248 - DNA, 25 bp, Homo sapien
cctacgtcatcacgtgccgggatga

SEQ ID NO: 880249 - DNA, 25 bp, Homo sapien
cggaagccggtgcagaaaacgtgag

SEQ ID NO: 880250 - DNA, 25 bp, Homo sapien
ggctgcggaagcctgcgtgagccga

SEQ ID NO: 880251 - DNA, 25 bp, Homo sapien
tacgccagtcgcaagcggcggaagc

SEQ ID NO: 880252 - DNA, 25 bp, Homo sapien
ccactgtcccgagaggacgcaggtg

SEQ ID NO: 880253 - DNA, 25 bp, Homo sapien
ttgcagtcaaaaacctgagagcctg

SEQ ID NO: 880254 - DNA, 25 bp, Homo sapien
aaccttgggtctcctggtacttgag

SEQ ID NO: 880255 - DNA, 25 bp, Homo sapien
gtcttctggcatgtacaccaatgag

SEQ ID NO: 880256 - DNA, 25 bp, Homo sapien
gaatcaccattgtttatcctaagag

SEQ ID NO: 880257 - DNA, 25 bp, Homo sapien
actgtcactgttggacgtcagcaag

SEQ ID NO: 880258 - DNA, 25 bp, Homo sapien
caagttcacatggaggcattgatgc

SEQ ID NO: 880259 - DNA, 25 bp, Homo sapien
cacggagtggtgaggtaccgtctac

SEQ ID NO: 880260 - DNA, 25 bp, Homo sapien
gctactggattcttattagttcccc

SEQ ID NO: 880261 - DNA, 25 bp, Homo sapien
aaaagtccataccttatatatgcac

SEQ ID NO: 880262 - DNA, 25 bp, Homo sapien
ggagtgttaagattgcagatagcaa

SEQ ID NO: 880263 - DNA, 25 bp, Homo sapien
cagatagcaaggtttggtgcaaagt

SEQ ID NO: 880264 - DNA, 25 bp, Homo sapien
tataaatttcgcttcttagaacagt

SEQ ID NO: 880265 - DNA, 25 bp, Homo sapien
caagtaatgaatccaactgcttaaa

SEQ ID NO: 880266 - DNA, 25 bp, Homo sapien
ataaaaagacaaccacatagttcgt

SEQ ID NO: 880267 - DNA, 25 bp, Homo sapien
tactgatcttcattaccaataggca

SEQ ID NO: 880268 - DNA, 25 bp, Homo sapien
caataggcaaattaatcaccctacc

SEQ ID NO: 880269 - DNA, 25 bp, Homo sapien
ttgaaaatctgatggaatcccaaac

SEQ ID NO: 880270 - DNA, 25 bp, Homo sapien
aagagcttagacacattttgcatgt

SEQ ID NO: 880271 - DNA, 25 bp, Homo sapien
tctttagatatgagagctgaagagc

SEQ ID NO: 880272 - DNA, 25 bp, Homo sapien
ggaatcccaaactgagatgtattaa

SEQ ID NO: 880273 - DNA, 25 bp, Homo sapien
tgatgtgcacatctaaggatatgga

SEQ ID NO: 880274 - DNA, 25 bp, Homo sapien
gccaaacaaaggatacttagtgcac

SEQ ID NO: 880275 - DNA, 25 bp, Homo sapien
cttagtgcactgctacattgtggga

SEQ ID NO: 880276 - DNA, 25 bp, Homo sapien
tggcttcggacaaaatatctctgag

SEQ ID NO: 880277 - DNA, 25 bp, Homo sapien
agggaagtcgcgctgtgccaaaggg

SEQ ID NO: 880278 - DNA, 25 bp, Homo sapien
tctcgggcgaggttcactggtccgc

SEQ ID NO: 880279 - DNA, 25 bp, Homo sapien
caaaggggcagcacgcttttatgga

SEQ ID NO: 880280 - DNA, 25 bp, Homo sapien
tattgagctctcgggcgaggttcac

SEQ ID NO: 880281 - DNA, 25 bp, Homo sapien
tagcttgtgttaacctgctactctc

SEQ ID NO: 880282 - DNA, 25 bp, Homo sapien
ctctcactagcttgtgttaacctgc

SEQ ID NO: 880283 - DNA, 25 bp, Homo sapien
cactagcttgtgttaacctgctact

SEQ ID NO: 880284 - DNA, 25 bp, Homo sapien
cttgtgttaacctgctactctccac

SEQ ID NO: 880285 - DNA, 25 bp, Homo sapien
taactgtgccaatcaaataagactc

SEQ ID NO: 880286 - DNA, 25 bp, Homo sapien
ggtaccagtgccctgttaactgtgc

SEQ ID NO: 880287 - DNA, 25 bp, Homo sapien
tcatctgccatgactagcgggtacc

SEQ ID NO: 880288 - DNA, 25 bp, Homo sapien
aataagactccccttcatttactgc

SEQ ID NO: 880289 - DNA, 25 bp, Homo sapien
gcgattaacgttcaacttcttgtta

SEQ ID NO: 880290 - DNA, 25 bp, Homo sapien
cctattgtcttggcgattaacgttc

SEQ ID NO: 880291 - DNA, 25 bp, Homo sapien
tcttggcgattaacgttcaacttct

SEQ ID NO: 880292 - DNA, 25 bp, Homo sapien
tattgtcttggcgattaacgttcaa

SEQ ID NO: 880293 - DNA, 25 bp, Homo sapien
cattatggaataataaggtctgagt

SEQ ID NO: 880294 - DNA, 25 bp, Homo sapien
tgcacacgatcagaaagagttgagg

SEQ ID NO: 880295 - DNA, 25 bp, Homo sapien
gggagcccaagtggtcattatggaa

SEQ ID NO: 880296 - DNA, 25 bp, Homo sapien
gactggtatgttttctacttgcaca

SEQ ID NO: 880297 - DNA, 25 bp, Homo sapien
acatacagaggtgagtctcataacg

SEQ ID NO: 880298 - DNA, 25 bp, Homo sapien
gaggtgagtctcataacgatattca

SEQ ID NO: 880299 - DNA, 25 bp, Homo sapien
ataacgatattcagggtggccccaa

SEQ ID NO: 880300 - DNA, 25 bp, Homo sapien
gagtctcataacgatattcagggtg

SEQ ID NO: 880301 - DNA, 25 bp, Homo sapien
ttaaaagctaaagatcgccagattg

SEQ ID NO: 880302 - DNA, 25 bp, Homo sapien
cagcaaagtaagtactctaattaaa

SEQ ID NO: 880303 - DNA, 25 bp, Homo sapien
tgtataacatgcaaccaatatgaaa

SEQ ID NO: 880304 - DNA, 25 bp, Homo sapien
gaaatgtcagcaaagtaagtactct

SEQ ID NO: 880305 - DNA, 25 bp, Homo sapien
gacacttggaaaactatgtaggcaa

SEQ ID NO: 880306 - DNA, 25 bp, Homo sapien
gggccaccaagggttcacaacacat

SEQ ID NO: 880307 - DNA, 25 bp, Homo sapien
tagttttgactctatgggccaccaa

SEQ ID NO: 880308 - DNA, 25 bp, Homo sapien
ttccaactacttctctagggtcagg

SEQ ID NO: 880309 - DNA, 25 bp, Homo sapien
gccaagttaagtatagaatgcccag

SEQ ID NO: 880310 - DNA, 25 bp, Homo sapien
ggtaacacagaagtctcccggatca

SEQ ID NO: 880311 - DNA, 25 bp, Homo sapien
tgtgggactccagctataaatagct

SEQ ID NO: 880312 - DNA, 25 bp, Homo sapien
ggatcacttcacaaggcggtacacc

SEQ ID NO: 880313 - DNA, 25 bp, Homo sapien
caagtgtatccatcttgctcttgga

SEQ ID NO: 880314 - DNA, 25 bp, Homo sapien
ggcatttgtgggtcttggctgcatt

SEQ ID NO: 880315 - DNA, 25 bp, Homo sapien
gctcttggatataagagttcccaga

SEQ ID NO: 880316 - DNA, 25 bp, Homo sapien
ttttcaatccaagtgtatccatctt

SEQ ID NO: 880317 - DNA, 25 bp, Homo sapien
ttgtagtttgaggtggcttttgtta

SEQ ID NO: 880318 - DNA, 25 bp, Homo sapien
aaattgtagtttgaggtggcttttg

SEQ ID NO: 880319 - DNA, 25 bp, Homo sapien
taattttaaacgttttgcatgagaa

SEQ ID NO: 880320 - DNA, 25 bp, Homo sapien
ctgaaaattgtagtttgaggtggct

SEQ ID NO: 880321 - DNA, 25 bp, Homo sapien
ttattggaaactcgactcctggcac

SEQ ID NO: 880322 - DNA, 25 bp, Homo sapien
gaagttattggaaactcgactcctg

SEQ ID NO: 880323 - DNA, 25 bp, Homo sapien
gaaactcgactcctggcactatttg

SEQ ID NO: 880324 - DNA, 25 bp, Homo sapien
tcgactcctggcactatttgtgtgt

SEQ ID NO: 880325 - DNA, 25 bp, Homo sapien
tttacagccacttgatacaacagag

SEQ ID NO: 880326 - DNA, 25 bp, Homo sapien
ttacagccacttgatacaacagagg

SEQ ID NO: 880327 - DNA, 25 bp, Homo sapien
gatgatgccacacaacctgcaacgt

SEQ ID NO: 880328 - DNA, 25 bp, Homo sapien
gaccgccgaggaactcatgtggaaa

SEQ ID NO: 880329 - DNA, 25 bp, Homo sapien
tggaaatatactctgctgggcaagg

SEQ ID NO: 880330 - DNA, 25 bp, Homo sapien
tgttgagacaagctgggatgatgcc

SEQ ID NO: 880331 - DNA, 25 bp, Homo sapien
taatttaggttgttagtttgagatc

SEQ ID NO: 880332 - DNA, 25 bp, Homo sapien
ttttcatgatattcaaagaacttct

SEQ ID NO: 880333 - DNA, 25 bp, Homo sapien
tccacactttcttagctgtgtccca

SEQ ID NO: 880334 - DNA, 25 bp, Homo sapien
gttgacttatccttgcttctttaat

SEQ ID NO: 880335 - DNA, 25 bp, Homo sapien
gaagctttcagttgacccagggtgc

SEQ ID NO: 880336 - DNA, 25 bp, Homo sapien
gagggaagcaaactccaatccaagg

SEQ ID NO: 880337 - DNA, 25 bp, Homo sapien
ccagggagttgccaagttgccacgg

SEQ ID NO: 880338 - DNA, 25 bp, Homo sapien
tagctcctggaaagaagtctatgga

SEQ ID NO: 880339 - DNA, 25 bp, Homo sapien
tcccaagggttgcaaagatctgtca

SEQ ID NO: 880340 - DNA, 25 bp, Homo sapien
ggtagactgcgttcacaaggatatc

SEQ ID NO: 880341 - DNA, 25 bp, Homo sapien
tgtctccgtgtttctcccagatggg

SEQ ID NO: 880342 - DNA, 25 bp, Homo sapien
tctgagtggttgctctgccaagact

SEQ ID NO: 880343 - DNA, 25 bp, Homo sapien
cacttgttgggcttatcttcggcaa

SEQ ID NO: 880344 - DNA, 25 bp, Homo sapien
tattcacaatggcaagctgagctca

SEQ ID NO: 880345 - DNA, 25 bp, Homo sapien
aattttatagggctcgtggaggctc

SEQ ID NO: 880346 - DNA, 25 bp, Homo sapien
tccgaaagccctacaggaagacctg

SEQ ID NO: 880347 - DNA, 25 bp, Homo sapien
atgtgttgtcaaatggccatcctcc

SEQ ID NO: 880348 - DNA, 25 bp, Homo sapien
tgtgttgtcaaatggccatcctcca

SEQ ID NO: 880349 - DNA, 25 bp, Homo sapien
ggtagtttgactgggtggttctgac

SEQ ID NO: 880350 - DNA, 25 bp, Homo sapien
gttactctgagttaagatgccaggg

SEQ ID NO: 880351 - DNA, 25 bp, Homo sapien
tctgactcagggtaggtatctcttg

SEQ ID NO: 880352 - DNA, 25 bp, Homo sapien
cagggtaggtatctcttgaggttgc

SEQ ID NO: 880353 - DNA, 25 bp, Homo sapien
aggctgatgggaaggttcagaaata

SEQ ID NO: 880354 - DNA, 25 bp, Homo sapien
ggccaattctatcagagacaaggct

SEQ ID NO: 880355 - DNA, 25 bp, Homo sapien
ggctgatgggaaggttcagaaataa

SEQ ID NO: 880356 - DNA, 25 bp, Homo sapien
tttcccaatcacttcttcacgaacc

SEQ ID NO: 880357 - DNA, 25 bp, Homo sapien
tcccaatcacttcttcacgaacctc

SEQ ID NO: 880358 - DNA, 25 bp, Homo sapien
caaccaagacttgctctctttccca

SEQ ID NO: 880359 - DNA, 25 bp, Homo sapien
ccaaccaagacttgctctctttccc

SEQ ID NO: 880360 - DNA, 25 bp, Homo sapien
tgaaatatcaggtcctccggaaaag

SEQ ID NO: 880361 - DNA, 25 bp, Homo sapien
gaacagtcgtttctccaaaactgaa

SEQ ID NO: 880362 - DNA, 25 bp, Homo sapien
tattttcccctggtgcaaagaacag

SEQ ID NO: 880363 - DNA, 25 bp, Homo sapien
gtaatttctgcattagcgtgctctc

SEQ ID NO: 880364 - DNA, 25 bp, Homo sapien
gtcttttctggacttgacactctgc

SEQ ID NO: 880365 - DNA, 25 bp, Homo sapien
cttttctggacttgacactctgcca

SEQ ID NO: 880366 - DNA, 25 bp, Homo sapien
tcttttctggacttgacactctgcc

SEQ ID NO: 880367 - DNA, 25 bp, Homo sapien
ttggtgaatcccagtactttcctag

SEQ ID NO: 880368 - DNA, 25 bp, Homo sapien
ctatgggaggaagcataagaacaat

SEQ ID NO: 880369 - DNA, 25 bp, Homo sapien
ccagtactttcctaggaatctggaa

SEQ ID NO: 880370 - DNA, 25 bp, Homo sapien
gaggaagcataagaacaatgcagct

SEQ ID NO: 880371 - DNA, 25 bp, Homo sapien
tacattttcagtatagtagttcccc

SEQ ID NO: 880372 - DNA, 25 bp, Homo sapien
gaaacagcagacttcttcaatgaaa

SEQ ID NO: 880373 - DNA, 25 bp, Homo sapien
taatttcccattccagaaacagcag

SEQ ID NO: 880374 - DNA, 25 bp, Homo sapien
tttccacagtttcagctacccagga

SEQ ID NO: 880375 - DNA, 25 bp, Homo sapien
tgccagaacgaaatgggtatgtccc

SEQ ID NO: 880376 - DNA, 25 bp, Homo sapien
cagaagtgcttcatcccagccagaa

SEQ ID NO: 880377 - DNA, 25 bp, Homo sapien
tggtagggtccgtaaagcagctgta

SEQ ID NO: 880378 - DNA, 25 bp, Homo sapien
cttcagagctgagattagggcatgc

SEQ ID NO: 880379 - DNA, 25 bp, Homo sapien
ttctcaataatgtttatgaagggga

SEQ ID NO: 880380 - DNA, 25 bp, Homo sapien
tcaataatgtttatgaaggggattt

SEQ ID NO: 880381 - DNA, 25 bp, Homo sapien
tctcaataatgtttatgaaggggat

SEQ ID NO: 880382 - DNA, 25 bp, Homo sapien
aataatgtttatgaaggggattttg

SEQ ID NO: 880383 - DNA, 25 bp, Homo sapien
tctgaaactctgcatgtagttgtgc

SEQ ID NO: 880384 - DNA, 25 bp, Homo sapien
actctgcatgtagttgtgcttcctg

SEQ ID NO: 880385 - DNA, 25 bp, Homo sapien
gagcttcttgacagggacaacacac

SEQ ID NO: 880386 - DNA, 25 bp, Homo sapien
ggcataaggatagagatagagagct

SEQ ID NO: 880387 - DNA, 25 bp, Homo sapien
ctgaaagagacgcctgagaaggtgc

SEQ ID NO: 880388 - DNA, 25 bp, Homo sapien
tgaaagagacgcctgagaaggtgct

SEQ ID NO: 880389 - DNA, 25 bp, Homo sapien
gaaagagacgcctgagaaggtgctg

SEQ ID NO: 880390 - DNA, 25 bp, Homo sapien
aggcagcaaggtcaacaggtgccac

SEQ ID NO: 880391 - DNA, 25 bp, Homo sapien
gcagcaaggtcaacaggtgccacct

SEQ ID NO: 880392 - DNA, 25 bp, Homo sapien
ggcaggcagcaaggtcaacaggtgc

SEQ ID NO: 880393 - DNA, 25 bp, Homo sapien
agcaaggtcaacaggtgccacctta

SEQ ID NO: 880394 - DNA, 25 bp, Homo sapien
atatcttttgcatcaaatcccaatg

SEQ ID NO: 880395 - DNA, 25 bp, Homo sapien
tatcttttgcatcaaatcccaatgt

SEQ ID NO: 880396 - DNA, 25 bp, Homo sapien
ctacacattgggataaggagctgga

SEQ ID NO: 880397 - DNA, 25 bp, Homo sapien
cacaagagcgagaagaggattccta

SEQ ID NO: 880398 - DNA, 25 bp, Homo sapien
catattagctttgagacacaagagc

SEQ ID NO: 880399 - DNA, 25 bp, Homo sapien
tccaaggtcctccagttggctatag

SEQ ID NO: 880400 - DNA, 25 bp, Homo sapien
cagttggctatagtgacagtaacca

SEQ ID NO: 880401 - DNA, 25 bp, Homo sapien
aagctctgggaatccaacttcctat

SEQ ID NO: 880402 - DNA, 25 bp, Homo sapien
tttcccggtctctcatagctatagg

SEQ ID NO: 880403 - DNA, 25 bp, Homo sapien
tagctataggcactgtctgcctttt

SEQ ID NO: 880404 - DNA, 25 bp, Homo sapien
ggtgccagccaataccaaagctctg

SEQ ID NO: 880405 - DNA, 25 bp, Homo sapien
tgggagccacactaccaaaagcctc

SEQ ID NO: 880406 - DNA, 25 bp, Homo sapien
cgcctccaaggtgtatagctcataa

SEQ ID NO: 880407 - DNA, 25 bp, Homo sapien
caaaagcctcaatgcgggagcaaca

SEQ ID NO: 880408 - DNA, 25 bp, Homo sapien
tttgatgatagggagcaggcacccc

SEQ ID NO: 880409 - DNA, 25 bp, Homo sapien
tattttctgtttgggaggactacca

SEQ ID NO: 880410 - DNA, 25 bp, Homo sapien
tacactaactggacaccaccctgtg

SEQ ID NO: 880411 - DNA, 25 bp, Homo sapien
caaaggtagtcaagttcatgggtta

SEQ ID NO: 880412 - DNA, 25 bp, Homo sapien
ggctgggcagcacttcttatactta

SEQ ID NO: 880413 - DNA, 25 bp, Homo sapien
tacaatgccgcagctatttgcaatg

SEQ ID NO: 880414 - DNA, 25 bp, Homo sapien
tagtcgttggcaagatactctgcat

SEQ ID NO: 880415 - DNA, 25 bp, Homo sapien
tgatacctgcccatgtcgccatcaa

SEQ ID NO: 880416 - DNA, 25 bp, Homo sapien
ccagagccaaacaaggtcaatgagt

SEQ ID NO: 880417 - DNA, 25 bp, Homo sapien
catggtgaggtctttcaaacaaata

SEQ ID NO: 880418 - DNA, 25 bp, Homo sapien
gatataaattatgagtcccctctgc

SEQ ID NO: 880419 - DNA, 25 bp, Homo sapien
tatttttcgatgcaatatcctctca

SEQ ID NO: 880420 - DNA, 25 bp, Homo sapien
tagtttcatcttcgtaactgtctga

SEQ ID NO: 880421 - DNA, 25 bp, Homo sapien
gtttttatagctgcttgttgatgca

SEQ ID NO: 880422 - DNA, 25 bp, Homo sapien
tagtttttatagctgcttgttgatg

SEQ ID NO: 880423 - DNA, 25 bp, Homo sapien
gttgatgcaactgccacatcagctg

SEQ ID NO: 880424 - DNA, 25 bp, Homo sapien
gcttgttgatgcaactgccacatca

SEQ ID NO: 880425 - DNA, 25 bp, Homo sapien
tgaagagttaacaacaggaataagc

SEQ ID NO: 880426 - DNA, 25 bp, Homo sapien
tggaaggtgaagagttaacaacagg

SEQ ID NO: 880427 - DNA, 25 bp, Homo sapien
ggtgaagagttaacaacaggaataa

SEQ ID NO: 880428 - DNA, 25 bp, Homo sapien
gaaggtgaagagttaacaacaggaa

SEQ ID NO: 880429 - DNA, 25 bp, Homo sapien
aatcaaaagcacaaggaggtactac

SEQ ID NO: 880430 - DNA, 25 bp, Homo sapien
tgcaggaatctcactactaggtatc

SEQ ID NO: 880431 - DNA, 25 bp, Homo sapien
aaggaggtactacctcactcctgca

SEQ ID NO: 880432 - DNA, 25 bp, Homo sapien
tcaaaaactaatagatgctggtggg

SEQ ID NO: 880433 - DNA, 25 bp, Homo sapien
accctgagcatagcaattcaggctc

SEQ ID NO: 880434 - DNA, 25 bp, Homo sapien
acatattggattggtgacatgaccc

SEQ ID NO: 880435 - DNA, 25 bp, Homo sapien
caattcaggctctgaccaaacagag

SEQ ID NO: 880436 - DNA, 25 bp, Homo sapien
gagttcagctgcacatattggattg

SEQ ID NO: 880437 - DNA, 25 bp, Homo sapien
ctgccaagaaagccaacatttttcc

SEQ ID NO: 880438 - DNA, 25 bp, Homo sapien
atctgccaagaaagccaacattttt

SEQ ID NO: 880439 - DNA, 25 bp, Homo sapien
tctgccaagaaagccaacatttttc

SEQ ID NO: 880440 - DNA, 25 bp, Homo sapien
tttctttctagcttagataatgtga

SEQ ID NO: 880441 - DNA, 25 bp, Homo sapien
taagcttttctagatcccacttgta

SEQ ID NO: 880442 - DNA, 25 bp, Homo sapien
taaactcattaagcttttctagatc

SEQ ID NO: 880443 - DNA, 25 bp, Homo sapien
tctagatcccacttgtatctcattc

SEQ ID NO: 880444 - DNA, 25 bp, Homo sapien
tccaaacctagcactaaccatcaat

SEQ ID NO: 880445 - DNA, 25 bp, Homo sapien
gcactaaccatcaattcttggttct

SEQ ID NO: 880446 - DNA, 25 bp, Homo sapien
aacctagcactaaccatcaattctt

SEQ ID NO: 880447 - DNA, 25 bp, Homo sapien
cctagcactaaccatcaattcttgg

SEQ ID NO: 880448 - DNA, 25 bp, Homo sapien
ccttgatgcgggcacaccatgtatg

SEQ ID NO: 880449 - DNA, 25 bp, Homo sapien
cagtgctgcctccatagaattctgc

SEQ ID NO: 880450 - DNA, 25 bp, Homo sapien
tgatgcgggcacaccatgtatgtgt

SEQ ID NO: 880451 - DNA, 25 bp, Homo sapien
tctgccttgatgcgggcacaccatg

SEQ ID NO: 880452 - DNA, 25 bp, Homo sapien
ttggttcataaactgcctgtgccat

SEQ ID NO: 880453 - DNA, 25 bp, Homo sapien
cttggttcataaactgcctgtgcca

SEQ ID NO: 880454 - DNA, 25 bp, Homo sapien
ttaccgctgccatgtcccttaaata

SEQ ID NO: 880455 - DNA, 25 bp, Homo sapien
tttaccgctgccatgtcccttaaat

SEQ ID NO: 880456 - DNA, 25 bp, Homo sapien
ctttaccgctgccatgtcccttaaa

SEQ ID NO: 880457 - DNA, 25 bp, Homo sapien
tcctctagtgctgtcccataaacct

SEQ ID NO: 880458 - DNA, 25 bp, Homo sapien
taaataacttctctatactgacttc

SEQ ID NO: 880459 - DNA, 25 bp, Homo sapien
tctgaggctgtcactttcctctagt

SEQ ID NO: 880460 - DNA, 25 bp, Homo sapien
caattccgtgggacgaaaatcttat

SEQ ID NO: 880461 - DNA, 25 bp, Homo sapien
gtgaatacagcaactttggcttttt

SEQ ID NO: 880462 - DNA, 25 bp, Homo sapien
tagaaatccatgtcgtttctctgga

SEQ ID NO: 880463 - DNA, 25 bp, Homo sapien
gaaatccatgtcgtttctctggaat

SEQ ID NO: 880464 - DNA, 25 bp, Homo sapien
tcttagtagaaatccatgtcgtttc

SEQ ID NO: 880465 - DNA, 25 bp, Homo sapien
tagtagaaatccatgtcgtttctct

SEQ ID NO: 880466 - DNA, 25 bp, Homo sapien
tcatccataactggcccgtagtagc

SEQ ID NO: 880467 - DNA, 25 bp, Homo sapien
aactggcccgtagtagcattcagta

SEQ ID NO: 880468 - DNA, 25 bp, Homo sapien
tttacatcatccataactggcccgt

SEQ ID NO: 880469 - DNA, 25 bp, Homo sapien
ggttactgcctctctttgccaccac

SEQ ID NO: 880470 - DNA, 25 bp, Homo sapien
tttcaggcgaagaacagaggaagtc

SEQ ID NO: 880471 - DNA, 25 bp, Homo sapien
cttagaggatgagactgggtttttc

SEQ ID NO: 880472 - DNA, 25 bp, Homo sapien
tcaagaagagtagcagcgtgtaaac

SEQ ID NO: 880473 - DNA, 25 bp, Homo sapien
catttaactatcttagaggatgaga

SEQ ID NO: 880474 - DNA, 25 bp, Homo sapien
ttgtctcgttaagcagtgcaagcag

SEQ ID NO: 880475 - DNA, 25 bp, Homo sapien
cttgtctcgttaagcagtgcaagca

SEQ ID NO: 880476 - DNA, 25 bp, Homo sapien
ctttttcatggtgacatcgcgatca

SEQ ID NO: 880477 - DNA, 25 bp, Homo sapien
tccactttttcatggtgacatcgcg

SEQ ID NO: 880478 - DNA, 25 bp, Homo sapien
agtttccactttttcatggtgacat

SEQ ID NO: 880479 - DNA, 25 bp, Homo sapien
tcatggtgacatcgcgatcaaccag

SEQ ID NO: 880480 - DNA, 25 bp, Homo sapien
caccaaagtcggcttggatctcaca

SEQ ID NO: 880481 - DNA, 25 bp, Homo sapien
tgctgagtaacctccgctgtttcct

SEQ ID NO: 880482 - DNA, 25 bp, Homo sapien
agtaacctccgctgtttcctctctg

SEQ ID NO: 880483 - DNA, 25 bp, Homo sapien
tctcaagaacaaatcctccaccaaa

SEQ ID NO: 880484 - DNA, 25 bp, Homo sapien
tcatgacgatgcaaaagcaatacgc

SEQ ID NO: 880485 - DNA, 25 bp, Homo sapien
caagctggtttacacaagctgtaga

SEQ ID NO: 880486 - DNA, 25 bp, Homo sapien
catttaacagctaggagactaccca

SEQ ID NO: 880487 - DNA, 25 bp, Homo sapien
cagcaacaagctgcacaagctggtt

SEQ ID NO: 880488 - DNA, 25 bp, Homo sapien
aatgtctgtcatttgattagtccag

SEQ ID NO: 880489 - DNA, 25 bp, Homo sapien
tttaatgcacatttttgaacgctca

SEQ ID NO: 880490 - DNA, 25 bp, Homo sapien
ttttaacatagggtcaatgcattca

SEQ ID NO: 880491 - DNA, 25 bp, Homo sapien
ctctgaagaagcaggagtaggtttt

SEQ ID NO: 880492 - DNA, 25 bp, Homo sapien
taagaatcccatacctgtagcccat

SEQ ID NO: 880493 - DNA, 25 bp, Homo sapien
cttatcttgcgtatttctgagccca

SEQ ID NO: 880494 - DNA, 25 bp, Homo sapien
aaacttctcttatcgaggctgtaac

SEQ ID NO: 880495 - DNA, 25 bp, Homo sapien
tacaaggcatttgactaaagtccaa

SEQ ID NO: 880496 - DNA, 25 bp, Homo sapien
ccacgcctggccttggagattatta

SEQ ID NO: 880497 - DNA, 25 bp, Homo sapien
accacgcctggccttggagattatt

SEQ ID NO: 880498 - DNA, 25 bp, Homo sapien
tgtgcacagatgatgtaccctgccc

SEQ ID NO: 880499 - DNA, 25 bp, Homo sapien
tccatgactgcagcccaaaagaagt

SEQ ID NO: 880500 - DNA, 25 bp, Homo sapien
tataagttgtaagctgactcgtggc

SEQ ID NO: 880501 - DNA, 25 bp, Homo sapien
gaatcctagaatgggcacacctgag

SEQ ID NO: 880502 - DNA, 25 bp, Homo sapien
aatatcaggtatttggacatccatc

SEQ ID NO: 880503 - DNA, 25 bp, Homo sapien
tagttcagtgtttcacagcctcagt

SEQ ID NO: 880504 - DNA, 25 bp, Homo sapien
caattgtccttaaactggtgaatgg

SEQ ID NO: 880505 - DNA, 25 bp, Homo sapien
gcaatgtcccagttgtgaccaccaa

SEQ ID NO: 880506 - DNA, 25 bp, Homo sapien
caacctggaacttgaattggttgat

SEQ ID NO: 880507 - DNA, 25 bp, Homo sapien
tcaacctggaacttgaattggttga

SEQ ID NO: 880508 - DNA, 25 bp, Homo sapien
acctggaacttgaattggttgatat

SEQ ID NO: 880509 - DNA, 25 bp, Homo sapien
aacctggaacttgaattggttgata

SEQ ID NO: 880510 - DNA, 25 bp, Homo sapien
ttttcacatgtacacgttagggtct

SEQ ID NO: 880511 - DNA, 25 bp, Homo sapien
taaggctaaccaagtgcatccattg

SEQ ID NO: 880512 - DNA, 25 bp, Homo sapien
tttccctaattgatggccagtgctc

SEQ ID NO: 880513 - DNA, 25 bp, Homo sapien
ggatgcagcaacaacggaatgtaag

SEQ ID NO: 880514 - DNA, 25 bp, Homo sapien
tatgtacactgtcatagaattagga

SEQ ID NO: 880515 - DNA, 25 bp, Homo sapien
gagcaaaacacagcccttaaagcac

SEQ ID NO: 880516 - DNA, 25 bp, Homo sapien
cataaaattgagtaccctaagagca

SEQ ID NO: 880517 - DNA, 25 bp, Homo sapien
cctaaggcatgtctagatcacacaa

SEQ ID NO: 880518 - DNA, 25 bp, Homo sapien
caaaactgtaattcaggtataaggt

SEQ ID NO: 880519 - DNA, 25 bp, Homo sapien
acaaaactgtaattcaggtataagg

SEQ ID NO: 880520 - DNA, 25 bp, Homo sapien
ggctaatccacaatatatcaaaatg

SEQ ID NO: 880521 - DNA, 25 bp, Homo sapien
caaggatcattcacctggctaatcc

SEQ ID NO: 880522 - DNA, 25 bp, Homo sapien
aaatgctgacagacctacaaaatca

SEQ ID NO: 880523 - DNA, 25 bp, Homo sapien
tcgtacattgcacagtctccaactg

SEQ ID NO: 880524 - DNA, 25 bp, Homo sapien
gatctgtccataccattagtcctgg

SEQ ID NO: 880525 - DNA, 25 bp, Homo sapien
ttttgagacactaaaagactggtgc

SEQ ID NO: 880526 - DNA, 25 bp, Homo sapien
gaaaccaacgccattcttgcttgag

SEQ ID NO: 880527 - DNA, 25 bp, Homo sapien
tatttgagttaagccccagaagatc

SEQ ID NO: 880528 - DNA, 25 bp, Homo sapien
gaatacctttccgtgttgtctcagc

SEQ ID NO: 880529 - DNA, 25 bp, Homo sapien
gaccgtgaatgcagtttgttgaaaa

SEQ ID NO: 880530 - DNA, 25 bp, Homo sapien
tttctgcaaagaaggcgcttgagta

SEQ ID NO: 880531 - DNA, 25 bp, Homo sapien
ttgtctcagccccaataatgtgctt

SEQ ID NO: 880532 - DNA, 25 bp, Homo sapien
aaaaccgatggtgctgtgactaaga

SEQ ID NO: 880533 - DNA, 25 bp, Homo sapien
tgatctacaaaaacccctggcatag

SEQ ID NO: 880534 - DNA, 25 bp, Homo sapien
tataaagcggtgatgttaacagtcc

SEQ ID NO: 880535 - DNA, 25 bp, Homo sapien
cacttaatgcaaaagctactgggag

SEQ ID NO: 880536 - DNA, 25 bp, Homo sapien
tggaacagcctctgctaaaatgcca

SEQ ID NO: 880537 - DNA, 25 bp, Homo sapien
gcaagtaatttcgtttttcctgcta

SEQ ID NO: 880538 - DNA, 25 bp, Homo sapien
tgctactcttgttctcattcgaata

SEQ ID NO: 880539 - DNA, 25 bp, Homo sapien
ttttatctctgcatggaacagcctc

SEQ ID NO: 880540 - DNA, 25 bp, Homo sapien
tgtagcctgagagcctattcaactt

SEQ ID NO: 880541 - DNA, 25 bp, Homo sapien
cagcaatgggctgagtgctaggcac

SEQ ID NO: 880542 - DNA, 25 bp, Homo sapien
gaggaggcgctcagtattttttgta

SEQ ID NO: 880543 - DNA, 25 bp, Homo sapien
tgtactttcctcaagggactgcatc

SEQ ID NO: 880544 - DNA, 25 bp, Homo sapien
gagtcggctacttgttcaggtgaag

SEQ ID NO: 880545 - DNA, 25 bp, Homo sapien
tccagtcaacatggtcaactatttt

SEQ ID NO: 880546 - DNA, 25 bp, Homo sapien
tacttgttcaggtgaagtcatccag

SEQ ID NO: 880547 - DNA, 25 bp, Homo sapien
gaaacgtttcactgagtcggctact

SEQ ID NO: 880548 - DNA, 25 bp, Homo sapien
agtcgaatacttcatccatgagaag

SEQ ID NO: 880549 - DNA, 25 bp, Homo sapien
taccctaagtggaatattgtcatcc

SEQ ID NO: 880550 - DNA, 25 bp, Homo sapien
gatattccttcgcaaccactgattt

SEQ ID NO: 880551 - DNA, 25 bp, Homo sapien
taatagtatcgccatatgtagctct

SEQ ID NO: 880552 - DNA, 25 bp, Homo sapien
tcagggtctgaatcagtcttaggaa

SEQ ID NO: 880553 - DNA, 25 bp, Homo sapien
tgagccgaaactcggcgatgttcag

SEQ ID NO: 880554 - DNA, 25 bp, Homo sapien
cggcgatgttcagggtctgaatcag

SEQ ID NO: 880555 - DNA, 25 bp, Homo sapien
ttatcgtcaagttgagccgaaactc

SEQ ID NO: 880556 - DNA, 25 bp, Homo sapien
attttagtcattccctctgccaagc

SEQ ID NO: 880557 - DNA, 25 bp, Homo sapien
tatgtcttgacctaatctttctgac

SEQ ID NO: 880558 - DNA, 25 bp, Homo sapien
cattgaattgcgaagtggatttaca

SEQ ID NO: 880559 - DNA, 25 bp, Homo sapien
tctgccaagctatcaggaagggatt

SEQ ID NO: 880560 - DNA, 25 bp, Homo sapien
catacacatagtgagctaaagcggg

SEQ ID NO: 880561 - DNA, 25 bp, Homo sapien
caaggaaatcatacacatagtgagc

SEQ ID NO: 880562 - DNA, 25 bp, Homo sapien
tgttctcaaggaaatcatacacata

SEQ ID NO: 880563 - DNA, 25 bp, Homo sapien
ggaaatcatacacatagtgagctaa

SEQ ID NO: 880564 - DNA, 25 bp, Homo sapien
atatgcatttagatccttttttctc

SEQ ID NO: 880565 - DNA, 25 bp, Homo sapien
tatgcatttagatccttttttctct

SEQ ID NO: 880566 - DNA, 25 bp, Homo sapien
gcgccggtgtacagtgatggcatat

SEQ ID NO: 880567 - DNA, 25 bp, Homo sapien
tttccacatctcctcactgtttagg

SEQ ID NO: 880568 - DNA, 25 bp, Homo sapien
cactataacgacgataggttttcca

SEQ ID NO: 880569 - DNA, 25 bp, Homo sapien
ggaagtcatggaagtcactataacg

SEQ ID NO: 880570 - DNA, 25 bp, Homo sapien
gcatatgggtcatagtcagcatata

SEQ ID NO: 880571 - DNA, 25 bp, Homo sapien
cacagcatatgggtcatagtcagca

SEQ ID NO: 880572 - DNA, 25 bp, Homo sapien
ctgccacagcatatgggtcatagtc

SEQ ID NO: 880573 - DNA, 25 bp, Homo sapien
gccacagcatatgggtcatagtcag

SEQ ID NO: 880574 - DNA, 25 bp, Homo sapien
cattgaacagtgtcaagtgtcacca

SEQ ID NO: 880575 - DNA, 25 bp, Homo sapien
taagactgccatctccaagttcaca

SEQ ID NO: 880576 - DNA, 25 bp, Homo sapien
tcaggataggatgcaagctgggctt

SEQ ID NO: 880577 - DNA, 25 bp, Homo sapien
cctgggctagggaagcgttcacatt

SEQ ID NO: 880578 - DNA, 25 bp, Homo sapien
gaagttgtactgagtcatcagaaga

SEQ ID NO: 880579 - DNA, 25 bp, Homo sapien
catgaagttgtactgagtcatcaga

SEQ ID NO: 880580 - DNA, 25 bp, Homo sapien
taggcatgaagttgtactgagtcat

SEQ ID NO: 880581 - DNA, 25 bp, Homo sapien
ggcatgaagttgtactgagtcatca

SEQ ID NO: 880582 - DNA, 25 bp, Homo sapien
gcttcctgtaggagacccattaaaa

SEQ ID NO: 880583 - DNA, 25 bp, Homo sapien
cttcctgtaggagacccattaaaag

SEQ ID NO: 880584 - DNA, 25 bp, Homo sapien
ttcctgtaggagacccattaaaaga

SEQ ID NO: 880585 - DNA, 25 bp, Homo sapien
gcaacactactattcctacaaggag

SEQ ID NO: 880586 - DNA, 25 bp, Homo sapien
gaatttcacctaggattatcccttg

SEQ ID NO: 880587 - DNA, 25 bp, Homo sapien
gaggcagctgatattgccttccaaa

SEQ ID NO: 880588 - DNA, 25 bp, Homo sapien
cagtttaatatatggtttcgagcac

SEQ ID NO: 880589 - DNA, 25 bp, Homo sapien
tagttgagaaaggtaaaccagtggc

SEQ ID NO: 880590 - DNA, 25 bp, Homo sapien
aatcagctgtacattaatccctagg

SEQ ID NO: 880591 - DNA, 25 bp, Homo sapien
gagagatagtaagcacaagcaagcc

SEQ ID NO: 880592 - DNA, 25 bp, Homo sapien
caccagaggatacagtactatacca

SEQ ID NO: 880593 - DNA, 25 bp, Homo sapien
aaaatctttcatctcgtagcatcaa

SEQ ID NO: 880594 - DNA, 25 bp, Homo sapien
tgcgcacataaagtgcattctgtct

SEQ ID NO: 880595 - DNA, 25 bp, Homo sapien
gatcttttaacatgtcaagctcagc

SEQ ID NO: 880596 - DNA, 25 bp, Homo sapien
tcatcggatcctctgaaactaggat

SEQ ID NO: 880597 - DNA, 25 bp, Homo sapien
gatttcaggggttggatcttcatga

SEQ ID NO: 880598 - DNA, 25 bp, Homo sapien
catcaacagtaactcttggagatgc

SEQ ID NO: 880599 - DNA, 25 bp, Homo sapien
tgtcatcaaagatttcaggggttgg

SEQ ID NO: 880600 - DNA, 25 bp, Homo sapien
tcaaagtatctgctaattttgctac

SEQ ID NO: 880601 - DNA, 25 bp, Homo sapien
ctcatagcaggctggcaaacaaaca

SEQ ID NO: 880602 - DNA, 25 bp, Homo sapien
gcaggctggcaaacaaacacggatt

SEQ ID NO: 880603 - DNA, 25 bp, Homo sapien
acaaacacggatttaaatctcaact

SEQ ID NO: 880604 - DNA, 25 bp, Homo sapien
ggctggcaaacaaacacggatttaa

SEQ ID NO: 880605 - DNA, 25 bp, Homo sapien
taaaacttctagctgctgttgggcg

SEQ ID NO: 880606 - DNA, 25 bp, Homo sapien
gcagctgctcttaaaagacctttgg

SEQ ID NO: 880607 - DNA, 25 bp, Homo sapien
tactgttcataaattccaacagcag

SEQ ID NO: 880608 - DNA, 25 bp, Homo sapien
tccatctctctgacgacttaataaa

SEQ ID NO: 880609 - DNA, 25 bp, Homo sapien
gaatagatgtgcttgacctccagtt

SEQ ID NO: 880610 - DNA, 25 bp, Homo sapien
ccaaaagaatagatgtgcttgacct

SEQ ID NO: 880611 - DNA, 25 bp, Homo sapien
aaagaatagatgtgcttgacctcca

SEQ ID NO: 880612 - DNA, 25 bp, Homo sapien
aagaatagatgtgcttgacctccag

SEQ ID NO: 880613 - DNA, 25 bp, Homo sapien
tccacctccacaacaagtgcaatgg

SEQ ID NO: 880614 - DNA, 25 bp, Homo sapien
ccagctcttagcacaactgcagcta

SEQ ID NO: 880615 - DNA, 25 bp, Homo sapien
taaaggctggactgaatttggcatg

SEQ ID NO: 880616 - DNA, 25 bp, Homo sapien
gtgtgaagcaccagaattctatctc

SEQ ID NO: 880617 - DNA, 25 bp, Homo sapien
caccacatcttaattgatgcacaaa

SEQ ID NO: 880618 - DNA, 25 bp, Homo sapien
tgtatctgaaaaatcccacagtgaa

SEQ ID NO: 880619 - DNA, 25 bp, Homo sapien
aggaacagaaggctactatctcaaa

SEQ ID NO: 880620 - DNA, 25 bp, Homo sapien
ccaaagatggttgaacatacaaaaa

SEQ ID NO: 880621 - DNA, 25 bp, Homo sapien
acaagaatgctgtccagggggactg

SEQ ID NO: 880622 - DNA, 25 bp, Homo sapien
caagaatgctgtccagggggactgt

SEQ ID NO: 880623 - DNA, 25 bp, Homo sapien
tacaagaatgctgtccagggggact

SEQ ID NO: 880624 - DNA, 25 bp, Homo sapien
ctacaagaatgctgtccagggggac

SEQ ID NO: 880625 - DNA, 25 bp, Homo sapien
ccttctttacgaatagtaagctatt

SEQ ID NO: 880626 - DNA, 25 bp, Homo sapien
gcaatcgctgtattcttgagtcaca

SEQ ID NO: 880627 - DNA, 25 bp, Homo sapien
tttgcctgactgcaatcgctgtatt

SEQ ID NO: 880628 - DNA, 25 bp, Homo sapien
gagtcacataccttctttacgaata

SEQ ID NO: 880629 - DNA, 25 bp, Homo sapien
catagttgcagttagaatcacggat

SEQ ID NO: 880630 - DNA, 25 bp, Homo sapien
gactgcttctagctctccaatattg

SEQ ID NO: 880631 - DNA, 25 bp, Homo sapien
caccagctgtatctagagatctaag

SEQ ID NO: 880632 - DNA, 25 bp, Homo sapien
ttaataatgttcataaaggcctcat

SEQ ID NO: 880633 - DNA, 25 bp, Homo sapien
gatacactcccactctctattgctg

SEQ ID NO: 880634 - DNA, 25 bp, Homo sapien
ttcctaatcggatatatggcttgca

SEQ ID NO: 880635 - DNA, 25 bp, Homo sapien
ccataatgattagggatgttgcaca

SEQ ID NO: 880636 - DNA, 25 bp, Homo sapien
tatagggtaccttttcactctggtg

SEQ ID NO: 880637 - DNA, 25 bp, Homo sapien
tactgcttaaacaccctatctccca

SEQ ID NO: 880638 - DNA, 25 bp, Homo sapien
attactgcttaaacaccctatctcc

SEQ ID NO: 880639 - DNA, 25 bp, Homo sapien
taaattactgcttaaacaccctatc

SEQ ID NO: 880640 - DNA, 25 bp, Homo sapien
aaattactgcttaaacaccctatct

SEQ ID NO: 880641 - DNA, 25 bp, Homo sapien
gaagaagaattcctcgtgcaaggat

SEQ ID NO: 880642 - DNA, 25 bp, Homo sapien
gaagaattcctcgtgcaaggatttc

SEQ ID NO: 880643 - DNA, 25 bp, Homo sapien
atggaagaagaattcctcgtgcaag

SEQ ID NO: 880644 - DNA, 25 bp, Homo sapien
actgagttgatttattaatggaaga

SEQ ID NO: 880645 - DNA, 25 bp, Homo sapien
cgttacgcattcaaccaggacatgt

SEQ ID NO: 880646 - DNA, 25 bp, Homo sapien
gcacctaactatcagccagagactt

SEQ ID NO: 880647 - DNA, 25 bp, Homo sapien
caggacatgttcttgtgtagctagc

SEQ ID NO: 880648 - DNA, 25 bp, Homo sapien
tactcagggaataacaagtccaaga

SEQ ID NO: 880649 - DNA, 25 bp, Homo sapien
cctgacaaagtatcgcatgatcttg

SEQ ID NO: 880650 - DNA, 25 bp, Homo sapien
catgatcttgttctggaaatctcca

SEQ ID NO: 880651 - DNA, 25 bp, Homo sapien
aatctccaggaggtagcaataaata

SEQ ID NO: 880652 - DNA, 25 bp, Homo sapien
aagacctcacacaaatcccttagga

SEQ ID NO: 880653 - DNA, 25 bp, Homo sapien
aatataaagtctacacttcctcttg

SEQ ID NO: 880654 - DNA, 25 bp, Homo sapien
tattttagtaattagtacacatcag

SEQ ID NO: 880655 - DNA, 25 bp, Homo sapien
gaaaaagtagctatcataacattag

SEQ ID NO: 880656 - DNA, 25 bp, Homo sapien
tctacacttcctcttgatatataag

SEQ ID NO: 880657 - DNA, 25 bp, Homo sapien
gctacctgccctaagtaagaataat

SEQ ID NO: 880658 - DNA, 25 bp, Homo sapien
gaccagttaattattaaagatgacc

SEQ ID NO: 880659 - DNA, 25 bp, Homo sapien
ttttcactggttctgctaacttgac

SEQ ID NO: 880660 - DNA, 25 bp, Homo sapien
gactctagccagctactattgtcaa

SEQ ID NO: 880661 - DNA, 25 bp, Homo sapien
gggaagtgcacactagatcacggca

SEQ ID NO: 880662 - DNA, 25 bp, Homo sapien
ggaagtgcacactagatcacggcaa

SEQ ID NO: 880663 - DNA, 25 bp, Homo sapien
aagtgcacactagatcacggcaaac

SEQ ID NO: 880664 - DNA, 25 bp, Homo sapien
gggggaagtgcacactagatcacgg

SEQ ID NO: 880665 - DNA, 25 bp, Homo sapien
cttcaaagaaggtatctacaagatc

SEQ ID NO: 880666 - DNA, 25 bp, Homo sapien
agaaggtatctacaagatcttctgc

SEQ ID NO: 880667 - DNA, 25 bp, Homo sapien
gaaggtatctacaagatcttctgct

SEQ ID NO: 880668 - DNA, 25 bp, Homo sapien
caaagaaggtatctacaagatcttc

SEQ ID NO: 880669 - DNA, 25 bp, Homo sapien
gaatactcgtaagtgtgtgccaaag

SEQ ID NO: 880670 - DNA, 25 bp, Homo sapien
ccaaagtcatctacaatgcgtgtag

SEQ ID NO: 880671 - DNA, 25 bp, Homo sapien
tgttgagcctttctgaatactcgta

SEQ ID NO: 880672 - DNA, 25 bp, Homo sapien
tgcgtgtagtaaaataaggttgcca

SEQ ID NO: 880673 - DNA, 25 bp, Homo sapien
tactcatgaaaaaggtgattactaa

SEQ ID NO: 880674 - DNA, 25 bp, Homo sapien
ttttaagaagtcacctagtactcta

SEQ ID NO: 880675 - DNA, 25 bp, Homo sapien
taaaagcctttagaatactcatgaa

SEQ ID NO: 880676 - DNA, 25 bp, Homo sapien
gcctgggaacagagctatctcatca

SEQ ID NO: 880677 - DNA, 25 bp, Homo sapien
taaacattcgatcaaaagagggagc

SEQ ID NO: 880678 - DNA, 25 bp, Homo sapien
tgataagcatacaactccaagggtg

SEQ ID NO: 880679 - DNA, 25 bp, Homo sapien
ttaacggtgtcaaaaactcaggctg

SEQ ID NO: 880680 - DNA, 25 bp, Homo sapien
tctggaaaacgcactggactgacac

SEQ ID NO: 880681 - DNA, 25 bp, Homo sapien
tgacaaaccgctctcaataccacag

SEQ ID NO: 880682 - DNA, 25 bp, Homo sapien
ggtctcaactccgttcaggtcttca

SEQ ID NO: 880683 - DNA, 25 bp, Homo sapien
gccagcttatagaggcacagagtca

SEQ ID NO: 880684 - DNA, 25 bp, Homo sapien
tgtggttcactctatcgctacatga

SEQ ID NO: 880685 - DNA, 25 bp, Homo sapien
cattttttagcctcaaagcagcctc

SEQ ID NO: 880686 - DNA, 25 bp, Homo sapien
cactagataacattagactaaccac

SEQ ID NO: 880687 - DNA, 25 bp, Homo sapien
tcactaagcttgatagcactgaatg

SEQ ID NO: 880688 - DNA, 25 bp, Homo sapien
gaacaatttgattctaactcactag

SEQ ID NO: 880689 - DNA, 25 bp, Homo sapien
catcagtaaaattatgggtgttgga

SEQ ID NO: 880690 - DNA, 25 bp, Homo sapien
cctcatcagtaaaattatgggtgtt

SEQ ID NO: 880691 - DNA, 25 bp, Homo sapien
tcatcagtaaaattatgggtgttgg

SEQ ID NO: 880692 - DNA, 25 bp, Homo sapien
cagtaaaattatgggtgttggatgg

SEQ ID NO: 880693 - DNA, 25 bp, Homo sapien
ctggttggtacaaagtatgcccaaa

SEQ ID NO: 880694 - DNA, 25 bp, Homo sapien
tggttggtacaaagtatgcccaaaa

SEQ ID NO: 880695 - DNA, 25 bp, Homo sapien
taagatgaattttgatcctgacaat

SEQ ID NO: 880696 - DNA, 25 bp, Homo sapien
aagatgaattttgatcctgacaatt

SEQ ID NO: 880697 - DNA, 25 bp, Homo sapien
tacctagcagggcaatctttgcgtg

SEQ ID NO: 880698 - DNA, 25 bp, Homo sapien
tctgcatctgtaattctggctggct

SEQ ID NO: 880699 - DNA, 25 bp, Homo sapien
tgctcacagtcccatagctagaggt

SEQ ID NO: 880700 - DNA, 25 bp, Homo sapien
tcttgctcctaatcacgagggatga

SEQ ID NO: 880701 - DNA, 25 bp, Homo sapien
tccactgacttatgttcctttggtc

SEQ ID NO: 880702 - DNA, 25 bp, Homo sapien
tcataattaggagaagggttacagc

SEQ ID NO: 880703 - DNA, 25 bp, Homo sapien
ggacttccaatagatatgtgtcata

SEQ ID NO: 880704 - DNA, 25 bp, Homo sapien
tttggtcccttctcgtccaagagga

SEQ ID NO: 880705 - DNA, 25 bp, Homo sapien
ttgtaaaatcttggagttatcccac

SEQ ID NO: 880706 - DNA, 25 bp, Homo sapien
tggagaagagcagttacactgaaac

SEQ ID NO: 880707 - DNA, 25 bp, Homo sapien
gttatcccacagtaataatctgctg

SEQ ID NO: 880708 - DNA, 25 bp, Homo sapien
cacataaaacagagggtctagggaa

SEQ ID NO: 880709 - DNA, 25 bp, Homo sapien
gaagaaaagattcatcatcgcttag

SEQ ID NO: 880710 - DNA, 25 bp, Homo sapien
tactggacataatccctcaaggaaa

SEQ ID NO: 880711 - DNA, 25 bp, Homo sapien
gagtgcgttttgaagagtctgccta

SEQ ID NO: 880712 - DNA, 25 bp, Homo sapien
tagtgtataataccaatactggaca

SEQ ID NO: 880713 - DNA, 25 bp, Homo sapien
caattatattggcacccgtcaatct

SEQ ID NO: 880714 - DNA, 25 bp, Homo sapien
aatcttctatcaatcttaatagtcc

SEQ ID NO: 880715 - DNA, 25 bp, Homo sapien
ggcacccgtcaatcttctatcaatc

SEQ ID NO: 880716 - DNA, 25 bp, Homo sapien
ggttcatcaattatattggcacccg

SEQ ID NO: 880717 - DNA, 25 bp, Homo sapien
gatactgcataatctaattacaagc

SEQ ID NO: 880718 - DNA, 25 bp, Homo sapien
caactgcacaagaattgaaggcact

SEQ ID NO: 880719 - DNA, 25 bp, Homo sapien
gataagacagcaggaaaaataccca

SEQ ID NO: 880720 - DNA, 25 bp, Homo sapien
agttgttattagcatcaactccagg

SEQ ID NO: 880721 - DNA, 25 bp, Homo sapien
aatgagtgttcacactgttctaggt

SEQ ID NO: 880722 - DNA, 25 bp, Homo sapien
tccaaacaggagagtaaccactaaa

SEQ ID NO: 880723 - DNA, 25 bp, Homo sapien
cttaggaaccccaggtgatgttgga

SEQ ID NO: 880724 - DNA, 25 bp, Homo sapien
ggaagaaatgagtgttcacactgtt

SEQ ID NO: 880725 - DNA, 25 bp, Homo sapien
gaaaaaggacaatgccaaggcttcc

SEQ ID NO: 880726 - DNA, 25 bp, Homo sapien
ttccccatccccatatggatagact

SEQ ID NO: 880727 - DNA, 25 bp, Homo sapien
cagaaaaaggacaatgccaaggctt

SEQ ID NO: 880728 - DNA, 25 bp, Homo sapien
cccatccccatatggatagactggc

SEQ ID NO: 880729 - DNA, 25 bp, Homo sapien
agaattagtatttcatcttgaaact

SEQ ID NO: 880730 - DNA, 25 bp, Homo sapien
catcttgaaactagctcccaatata

SEQ ID NO: 880731 - DNA, 25 bp, Homo sapien
ttcatcttgaaactagctcccaata

SEQ ID NO: 880732 - DNA, 25 bp, Homo sapien
agtatttcatcttgaaactagctcc

SEQ ID NO: 880733 - DNA, 25 bp, Homo sapien
ttgcactgtgaggtagtacacaaag

SEQ ID NO: 880734 - DNA, 25 bp, Homo sapien
cttgcactgtgaggtagtacacaaa

SEQ ID NO: 880735 - DNA, 25 bp, Homo sapien
gccgtcaaggagcatagagaagaat

SEQ ID NO: 880736 - DNA, 25 bp, Homo sapien
ccgtcaaggagcatagagaagaatc

SEQ ID NO: 880737 - DNA, 25 bp, Homo sapien
gtcaaggagcatagagaagaatctc

SEQ ID NO: 880738 - DNA, 25 bp, Homo sapien
cgtcaaggagcatagagaagaatct

SEQ ID NO: 880739 - DNA, 25 bp, Homo sapien
gataccataagggataaaacatacc

SEQ ID NO: 880740 - DNA, 25 bp, Homo sapien
tagtggggataccataagggataaa

SEQ ID NO: 880741 - DNA, 25 bp, Homo sapien
aagcacagctcaaggtagtggggat

SEQ ID NO: 880742 - DNA, 25 bp, Homo sapien
gcttcctacgtgccaagcacagctc

SEQ ID NO: 880743 - DNA, 25 bp, Homo sapien
catcttggccacttttatcttttaa

SEQ ID NO: 880744 - DNA, 25 bp, Homo sapien
gcctgctaacgaagtttctgctctg

SEQ ID NO: 880745 - DNA, 25 bp, Homo sapien
tcttttacgtccctcagagttatac

SEQ ID NO: 880746 - DNA, 25 bp, Homo sapien
gagttatacaactcttattcctttg

SEQ ID NO: 880747 - DNA, 25 bp, Homo sapien
cttttactaggtttgagaggctctc

SEQ ID NO: 880748 - DNA, 25 bp, Homo sapien
tactaatgttgtggctctgaaagac

SEQ ID NO: 880749 - DNA, 25 bp, Homo sapien
tgctggcaaatgtactggagcacca

SEQ ID NO: 880750 - DNA, 25 bp, Homo sapien
tctgacttccttctaagagcgggta

SEQ ID NO: 880751 - DNA, 25 bp, Homo sapien
acattctcccaaacagagtcagtct

SEQ ID NO: 880752 - DNA, 25 bp, Homo sapien
tacattctcccaaacagagtcagtc

SEQ ID NO: 880753 - DNA, 25 bp, Homo sapien
tgagcatgccgcgagcattagcacc

SEQ ID NO: 880754 - DNA, 25 bp, Homo sapien
gagatatccatgctgactggtccca

SEQ ID NO: 880755 - DNA, 25 bp, Homo sapien
gccacagaggttgggaactgctact

SEQ ID NO: 880756 - DNA, 25 bp, Homo sapien
caggctgcagaccattaggaactgg

SEQ ID NO: 880757 - DNA, 25 bp, Homo sapien
tgaaaattactaactagacaagtga

SEQ ID NO: 880758 - DNA, 25 bp, Homo sapien
aggaccttaaagtgttcctcctcag

SEQ ID NO: 880759 - DNA, 25 bp, Homo sapien
ctaactagacaagtgaaatgaggga

SEQ ID NO: 880760 - DNA, 25 bp, Homo sapien
ccttaaagtgttcctcctcagtctc

SEQ ID NO: 880761 - DNA, 25 bp, Homo sapien
cctatgattagtttatagtgcagca

SEQ ID NO: 880762 - DNA, 25 bp, Homo sapien
gatacaatgctatatactcctatga

SEQ ID NO: 880763 - DNA, 25 bp, Homo sapien
tactcctatgattagtttatagtgc

SEQ ID NO: 880764 - DNA, 25 bp, Homo sapien
gatggcttcagatacaatgctatat

SEQ ID NO: 880765 - DNA, 25 bp, Homo sapien
tatgaaactaagtaatgagccttag

SEQ ID NO: 880766 - DNA, 25 bp, Homo sapien
gggtatgtgctaggccttaacgata

SEQ ID NO: 880767 - DNA, 25 bp, Homo sapien
ctattgttactaggtgggtatgtgc

SEQ ID NO: 880768 - DNA, 25 bp, Homo sapien
ctattttatgtgtgggtatgagtac

SEQ ID NO: 880769 - DNA, 25 bp, Homo sapien
tatttttgagaaggtttgaatgaac

SEQ ID NO: 880770 - DNA, 25 bp, Homo sapien
tttttgagaaggtttgaatgaactc

SEQ ID NO: 880771 - DNA, 25 bp, Homo sapien
tttgagaaggtttgaatgaactctt

SEQ ID NO: 880772 - DNA, 25 bp, Homo sapien
atatttttgagaaggtttgaatgaa

SEQ ID NO: 880773 - DNA, 25 bp, Homo sapien
tgtacactatgacaaattttttgcc

SEQ ID NO: 880774 - DNA, 25 bp, Homo sapien
tagaagcaggaagtcctaacaggag

SEQ ID NO: 880775 - DNA, 25 bp, Homo sapien
gaagcaggaagtcctaacaggagca

SEQ ID NO: 880776 - DNA, 25 bp, Homo sapien
ccaagtatagcaggagtcacattag

SEQ ID NO: 880777 - DNA, 25 bp, Homo sapien
cttccgtacagatgatgttctctga

SEQ ID NO: 880778 - DNA, 25 bp, Homo sapien
tgatgttctctgacgggctggcgcc

SEQ ID NO: 880779 - DNA, 25 bp, Homo sapien
tcacaggtaaacactggccaccgtc

SEQ ID NO: 880780 - DNA, 25 bp, Homo sapien
ccatttcacaggtaaacactggcca

SEQ ID NO: 880781 - DNA, 25 bp, Homo sapien
cagcagcgaaaactgctcgggccgc

SEQ ID NO: 880782 - DNA, 25 bp, Homo sapien
tcgcctcatggcaacagccgtagca

SEQ ID NO: 880783 - DNA, 25 bp, Homo sapien
aacagccgtagcagcagcgaaaact

SEQ ID NO: 880784 - DNA, 25 bp, Homo sapien
ggcggttttactcggcttcgctggc

SEQ ID NO: 880785 - DNA, 25 bp, Homo sapien
gtcgctcgcgacggacgcgccgcca

SEQ ID NO: 880786 - DNA, 25 bp, Homo sapien
gctcgcgacggacgcgccgccatct

SEQ ID NO: 880787 - DNA, 25 bp, Homo sapien
cggtcgctcgcgacggacgcgccgc

SEQ ID NO: 880788 - DNA, 25 bp, Homo sapien
tcgctcgcgacggacgcgccgccat

SEQ ID NO: 880789 - DNA, 25 bp, Homo sapien
ggggctgctggcgtctcgtgaccgt

SEQ ID NO: 880790 - DNA, 25 bp, Homo sapien
gctgctggcgtctcgtgaccgtctc

SEQ ID NO: 880791 - DNA, 25 bp, Homo sapien
gctggcgtctcgtgaccgtctccat

SEQ ID NO: 880792 - DNA, 25 bp, Homo sapien
gcaggggctgctggcgtctcgtgac

SEQ ID NO: 880793 - DNA, 25 bp, Homo sapien
tcggcttggcgctgacttgtaggac

SEQ ID NO: 880794 - DNA, 25 bp, Homo sapien
gtaggctgtcggcagtcggcttggc

SEQ ID NO: 880795 - DNA, 25 bp, Homo sapien
ccggcgcgcggagaagcggaggtag

SEQ ID NO: 880796 - DNA, 25 bp, Homo sapien
gcgctgacttgtaggaccccgggac

SEQ ID NO: 880797 - DNA, 25 bp, Homo sapien
aacttgggaccgctgggagtgcaga

SEQ ID NO: 880798 - DNA, 25 bp, Homo sapien
ctgggccaacttgggaccgctggga

SEQ ID NO: 880799 - DNA, 25 bp, Homo sapien
tccgggaatggacgtgcgcgccctt

SEQ ID NO: 880800 - DNA, 25 bp, Homo sapien
cagcgcccgagccttccgggaatgg

SEQ ID NO: 880801 - DNA, 25 bp, Homo sapien
caacaaggaacctggaaaaagatag

SEQ ID NO: 880802 - DNA, 25 bp, Homo sapien
caaggaacctggaaaaagatagtgt

SEQ ID NO: 880803 - DNA, 25 bp, Homo sapien
gaacctggaaaaagatagtgttcca

SEQ ID NO: 880804 - DNA, 25 bp, Homo sapien
ctagagacaacaaggaacctggaaa

SEQ ID NO: 880805 - DNA, 25 bp, Homo sapien
tggctgaaacttgaaatagttgtca

SEQ ID NO: 880806 - DNA, 25 bp, Homo sapien
cattaattgccagctcgtttccttc

SEQ ID NO: 880807 - DNA, 25 bp, Homo sapien
tctttgacattctcacatttgtttg

SEQ ID NO: 880808 - DNA, 25 bp, Homo sapien
ttatccattaattgccagctcgttt

SEQ ID NO: 880809 - DNA, 25 bp, Homo sapien
gattttaagaaacaaggtatcatac

SEQ ID NO: 880810 - DNA, 25 bp, Homo sapien
gaagattttaagaaacaaggtatca

SEQ ID NO: 880811 - DNA, 25 bp, Homo sapien
cagagtctaaagaagattttaagaa

SEQ ID NO: 880812 - DNA, 25 bp, Homo sapien
tcagagtctaaagaagattttaaga

SEQ ID NO: 880813 - DNA, 25 bp, Homo sapien
tgacactagttaagtccaggccttt

SEQ ID NO: 880814 - DNA, 25 bp, Homo sapien
gatactgccgaaaggtcgcaggctc

SEQ ID NO: 880815 - DNA, 25 bp, Homo sapien
cacagaacctgcagtgtaatgacac

SEQ ID NO: 880816 - DNA, 25 bp, Homo sapien
tcgcaggctcattgcagacgatctg

SEQ ID NO: 880817 - DNA, 25 bp, Homo sapien
ctcatcgataagctgaagggtgtca

SEQ ID NO: 880818 - DNA, 25 bp, Homo sapien
attggtccaacctagtaatgccacg

SEQ ID NO: 880819 - DNA, 25 bp, Homo sapien
tcgaggacatcaaggattggtccaa

SEQ ID NO: 880820 - DNA, 25 bp, Homo sapien
tcattaagatgaaattcgaggacat

SEQ ID NO: 880821 - DNA, 25 bp, Homo sapien
ggcatgatcctggaatctctgtagt

SEQ ID NO: 880822 - DNA, 25 bp, Homo sapien
agtttgccgagagccctgcgggcaa

SEQ ID NO: 880823 - DNA, 25 bp, Homo sapien
gatcctggaatctctgtagtttgcc

SEQ ID NO: 880824 - DNA, 25 bp, Homo sapien
gaatctctgtagtttgccgagagcc

SEQ ID NO: 880825 - DNA, 25 bp, Homo sapien
accagtccctggctttcttctttgc

SEQ ID NO: 880826 - DNA, 25 bp, Homo sapien
cagaccagtccctggctttcttctt

SEQ ID NO: 880827 - DNA, 25 bp, Homo sapien
cagtccctggctttcttctttgccc

SEQ ID NO: 880828 - DNA, 25 bp, Homo sapien
gtccctggctttcttctttgcccat

SEQ ID NO: 880829 - DNA, 25 bp, Homo sapien
tcatgtctgcatgaaggtttaaagc

SEQ ID NO: 880830 - DNA, 25 bp, Homo sapien
tgcatgaaggtttaaagcgtttccc

SEQ ID NO: 880831 - DNA, 25 bp, Homo sapien
tctgcatgaaggtttaaagcgtttc

SEQ ID NO: 880832 - DNA, 25 bp, Homo sapien
tgtctgcatgaaggtttaaagcgtt

SEQ ID NO: 880833 - DNA, 25 bp, Homo sapien
tagccctctttgcttgtctagggtt

SEQ ID NO: 880834 - DNA, 25 bp, Homo sapien
agccctctttgcttgtctagggttt

SEQ ID NO: 880835 - DNA, 25 bp, Homo sapien
cctctttgcttgtctagggtttctt

SEQ ID NO: 880836 - DNA, 25 bp, Homo sapien
gccctctttgcttgtctagggtttc

SEQ ID NO: 880837 - DNA, 25 bp, Homo sapien
cacttccttgttagtagttgttggc

SEQ ID NO: 880838 - DNA, 25 bp, Homo sapien
gggcactagaattctccctcgagta

SEQ ID NO: 880839 - DNA, 25 bp, Homo sapien
tcgagtacccaccagtgaataggtc

SEQ ID NO: 880840 - DNA, 25 bp, Homo sapien
tattccatgtccataggtctgcagt

SEQ ID NO: 880841 - DNA, 25 bp, Homo sapien
gctctcattagcactcttaaaggtt

SEQ ID NO: 880842 - DNA, 25 bp, Homo sapien
ttagcactcttaaaggttctttggc

SEQ ID NO: 880843 - DNA, 25 bp, Homo sapien
cattagcactcttaaaggttctttg

SEQ ID NO: 880844 - DNA, 25 bp, Homo sapien
tctcattagcactcttaaaggttct

SEQ ID NO: 880845 - DNA, 25 bp, Homo sapien
ccttctgcattagcttctcctccct

SEQ ID NO: 880846 - DNA, 25 bp, Homo sapien
tctgcattagcttctcctccctcat

SEQ ID NO: 880847 - DNA, 25 bp, Homo sapien
tctccttctgcattagcttctcctc

SEQ ID NO: 880848 - DNA, 25 bp, Homo sapien
ctctccttctgcattagcttctcct

SEQ ID NO: 880849 - DNA, 25 bp, Homo sapien
caccattgttcttttccctcaaact

SEQ ID NO: 880850 - DNA, 25 bp, Homo sapien
ccattgttcttttccctcaaacttg

SEQ ID NO: 880851 - DNA, 25 bp, Homo sapien
tgttcttttccctcaaacttgaggc

SEQ ID NO: 880852 - DNA, 25 bp, Homo sapien
attgttcttttccctcaaacttgag

SEQ ID NO: 880853 - DNA, 25 bp, Homo sapien
tcctgggcatatatggaaacccgtg

SEQ ID NO: 880854 - DNA, 25 bp, Homo sapien
ccacagaacctgaactttagtgtca

SEQ ID NO: 880855 - DNA, 25 bp, Homo sapien
aagtttatggctggtagagactagc

SEQ ID NO: 880856 - DNA, 25 bp, Homo sapien
gaaatgattcttcccatggcaccta

SEQ ID NO: 880857 - DNA, 25 bp, Homo sapien
agactctcgccgtagcccaccactt

SEQ ID NO: 880858 - DNA, 25 bp, Homo sapien
tatatggaaaggattactattgtaa

SEQ ID NO: 880859 - DNA, 25 bp, Homo sapien
tcttctattggttatatggaaagga

SEQ ID NO: 880860 - DNA, 25 bp, Homo sapien
tctctcttcagactctcgccgtagc

SEQ ID NO: 880861 - DNA, 25 bp, Homo sapien
tactgctggcagtttgtcaaactca

SEQ ID NO: 880862 - DNA, 25 bp, Homo sapien
tctgaagcctactgctggcagtttg

SEQ ID NO: 880863 - DNA, 25 bp, Homo sapien
aagcctactgctggcagtttgtcaa

SEQ ID NO: 880864 - DNA, 25 bp, Homo sapien
gcctactgctggcagtttgtcaaac

SEQ ID NO: 880865 - DNA, 25 bp, Homo sapien
gcacagagctgatagaatatagaga

SEQ ID NO: 880866 - DNA, 25 bp, Homo sapien
cgcagtctaaatgggtacaagggca

SEQ ID NO: 880867 - DNA, 25 bp, Homo sapien
gaggatcagagggtgacaacccaag

SEQ ID NO: 880868 - DNA, 25 bp, Homo sapien
tatagagaagaaggcgaatcaaagg

SEQ ID NO: 880869 - DNA, 25 bp, Homo sapien
gcctgcttttgttaggattggttga

SEQ ID NO: 880870 - DNA, 25 bp, Homo sapien
gattggttgagaagctagcaagttt

SEQ ID NO: 880871 - DNA, 25 bp, Homo sapien
ccaggttgcagattcaaaggttttg

SEQ ID NO: 880872 - DNA, 25 bp, Homo sapien
aaacagagggcatatggaaccacca

SEQ ID NO: 880873 - DNA, 25 bp, Homo sapien
tcccatttaactcgaagagactttg

SEQ ID NO: 880874 - DNA, 25 bp, Homo sapien
ccatttaactcgaagagactttgat

SEQ ID NO: 880875 - DNA, 25 bp, Homo sapien
gagggtcccatttaactcgaagaga

SEQ ID NO: 880876 - DNA, 25 bp, Homo sapien
gatgttgagggtcccatttaactcg

SEQ ID NO: 880877 - DNA, 25 bp, Homo sapien
gtttccttacaagtctagggcacat

SEQ ID NO: 880878 - DNA, 25 bp, Homo sapien
ggtttccttacaagtctagggcaca

SEQ ID NO: 880879 - DNA, 25 bp, Homo sapien
gatggtgacagatcaatcttcctcc

SEQ ID NO: 880880 - DNA, 25 bp, Homo sapien
aattaattttgtggtggctcagggc

SEQ ID NO: 880881 - DNA, 25 bp, Homo sapien
gctgcaactgagcatcgaacttgga

SEQ ID NO: 880882 - DNA, 25 bp, Homo sapien
agatcccaatggctgctcaagctga

SEQ ID NO: 880883 - DNA, 25 bp, Homo sapien
gccagatgagacaacccagtcagga

SEQ ID NO: 880884 - DNA, 25 bp, Homo sapien
gttaaagctgctgggctaacaaaat

SEQ ID NO: 880885 - DNA, 25 bp, Homo sapien
gaagccagatgagacaacccagtca

SEQ ID NO: 880886 - DNA, 25 bp, Homo sapien
gctgggctaacaaaatcatcaaaga

SEQ ID NO: 880887 - DNA, 25 bp, Homo sapien
aagttacactggagcaagctggatc

SEQ ID NO: 880888 - DNA, 25 bp, Homo sapien
aaagttacactggagcaagctggat

SEQ ID NO: 880889 - DNA, 25 bp, Homo sapien
gaaagttacactggagcaagctgga

SEQ ID NO: 880890 - DNA, 25 bp, Homo sapien
aaatagcataacctagaagttattc

SEQ ID NO: 880891 - DNA, 25 bp, Homo sapien
atagcataacctagaagttattctg

SEQ ID NO: 880892 - DNA, 25 bp, Homo sapien
taaaatagcataacctagaagttat

SEQ ID NO: 880893 - DNA, 25 bp, Homo sapien
ttaaaatagcataacctagaagtta

SEQ ID NO: 880894 - DNA, 25 bp, Homo sapien
tatgatccgcacctgctatagagag

SEQ ID NO: 880895 - DNA, 25 bp, Homo sapien
tgccatgtcatctacaaggatagcc

SEQ ID NO: 880896 - DNA, 25 bp, Homo sapien
gctgcgaggcagattgtaacacaag

SEQ ID NO: 880897 - DNA, 25 bp, Homo sapien
tctggcgagacaataatgcagttct

SEQ ID NO: 880898 - DNA, 25 bp, Homo sapien
tagactgtcgttgatttcgccacaa

SEQ ID NO: 880899 - DNA, 25 bp, Homo sapien
gtcgagcgatccagctgccgctgag

SEQ ID NO: 880900 - DNA, 25 bp, Homo sapien
gaagtgaagcacagactctaatggc

SEQ ID NO: 880901 - DNA, 25 bp, Homo sapien
ccgctgaggctggaacggaagtgaa

SEQ ID NO: 880902 - DNA, 25 bp, Homo sapien
taccagaggcactccgtcgagcgat

SEQ ID NO: 880903 - DNA, 25 bp, Homo sapien
tagcgtctgtttactttggtctctg

SEQ ID NO: 880904 - DNA, 25 bp, Homo sapien
tactttggtctctgtaggttgagag

SEQ ID NO: 880905 - DNA, 25 bp, Homo sapien
caaggggatttagcgtctgtttact

SEQ ID NO: 880906 - DNA, 25 bp, Homo sapien
ctggtctattgcaaggggatttagc

SEQ ID NO: 880907 - DNA, 25 bp, Homo sapien
caatagggtagggatctgcaaaatc

SEQ ID NO: 880908 - DNA, 25 bp, Homo sapien
tctaaagagttcatggttccgtcgg

SEQ ID NO: 880909 - DNA, 25 bp, Homo sapien
acggtgtggcctaaagaatgtcaac

SEQ ID NO: 880910 - DNA, 25 bp, Homo sapien
aaaatcgaaagcaggacggtgtggc

SEQ ID NO: 880911 - DNA, 25 bp, Homo sapien
ttgaagccgttatccccttgtccgc

SEQ ID NO: 880912 - DNA, 25 bp, Homo sapien
cctgagcgcctagcaggctgcgttt

SEQ ID NO: 880913 - DNA, 25 bp, Homo sapien
ccttgtccgcaatgagaggtgctgg

SEQ ID NO: 880914 - DNA, 25 bp, Homo sapien
tctccagatccgaggcgcggttgtc

SEQ ID NO: 880915 - DNA, 25 bp, Homo sapien
agcagtaagtgaagtttccaggggg

SEQ ID NO: 880916 - DNA, 25 bp, Homo sapien
aagcagtaagtgaagtttccagggg

SEQ ID NO: 880917 - DNA, 25 bp, Homo sapien
agtgctacaattgctgttgggttcc

SEQ ID NO: 880918 - DNA, 25 bp, Homo sapien
gtgctacaattgctgttgggttcca

SEQ ID NO: 880919 - DNA, 25 bp, Homo sapien
cagtgctacaattgctgttgggttc

SEQ ID NO: 880920 - DNA, 25 bp, Homo sapien
acatagttaagtaggcatagttgcc

SEQ ID NO: 880921 - DNA, 25 bp, Homo sapien
tgtgacttctatcttgctgcatgac

SEQ ID NO: 880922 - DNA, 25 bp, Homo sapien
aaaggatatttcaggcattgactca

SEQ ID NO: 880923 - DNA, 25 bp, Homo sapien
catggaaccactaatgagcttggga

SEQ ID NO: 880924 - DNA, 25 bp, Homo sapien
ttgtagagcttgctggttgttgaga

SEQ ID NO: 880925 - DNA, 25 bp, Homo sapien
tagtgttgctcatacatatgcattg

SEQ ID NO: 880926 - DNA, 25 bp, Homo sapien
tgctggttgttgagaaatcgaagac

SEQ ID NO: 880927 - DNA, 25 bp, Homo sapien
gagaaatcgaagactctttgtgggt

SEQ ID NO: 880928 - DNA, 25 bp, Homo sapien
gccagtgtgtcccagtgatgttatt

SEQ ID NO: 880929 - DNA, 25 bp, Homo sapien
tcttcagacaatgagtagcttccaa

SEQ ID NO: 880930 - DNA, 25 bp, Homo sapien
cttcattgtgccagtgtgtcccagt

SEQ ID NO: 880931 - DNA, 25 bp, Homo sapien
cctttgctcccaagtcacagcaatt

SEQ ID NO: 880932 - DNA, 25 bp, Homo sapien
agatatattcagtccctccagggca

SEQ ID NO: 880933 - DNA, 25 bp, Homo sapien
taatcagagggacaactggtcagag

SEQ ID NO: 880934 - DNA, 25 bp, Homo sapien
caagtgtgtggcgtaaaccgatagc

SEQ ID NO: 880935 - DNA, 25 bp, Homo sapien
cattatatgatgctgagggagcctc

SEQ ID NO: 880936 - DNA, 25 bp, Homo sapien
agtcacacattctgttccctgtacc

SEQ ID NO: 880937 - DNA, 25 bp, Homo sapien
tctccttttcgtgatctgccctgat

SEQ ID NO: 880938 - DNA, 25 bp, Homo sapien
ctctccttttcgtgatctgccctga

SEQ ID NO: 880939 - DNA, 25 bp, Homo sapien
aaataataactggacatcaattttg

SEQ ID NO: 880940 - DNA, 25 bp, Homo sapien
aataataactggacatcaattttgc

SEQ ID NO: 880941 - DNA, 25 bp, Homo sapien
ataataactggacatcaattttgct

SEQ ID NO: 880942 - DNA, 25 bp, Homo sapien
aaaataataactggacatcaatttt

SEQ ID NO: 880943 - DNA, 25 bp, Homo sapien
tgccagccagtgtgttacccaatag

SEQ ID NO: 880944 - DNA, 25 bp, Homo sapien
cctgaaagagtatcgtgtggtagcc

SEQ ID NO: 880945 - DNA, 25 bp, Homo sapien
gggacagcaccctttcatgggagag

SEQ ID NO: 880946 - DNA, 25 bp, Homo sapien
cctgaatggaggaaagactatctgg

SEQ ID NO: 880947 - DNA, 25 bp, Homo sapien
ctggtgacagtttttcggtctgctg

SEQ ID NO: 880948 - DNA, 25 bp, Homo sapien
agtttttcggtctgctgttactgga

SEQ ID NO: 880949 - DNA, 25 bp, Homo sapien
gccagactgttatcttgaacctctg

SEQ ID NO: 880950 - DNA, 25 bp, Homo sapien
aatgggaaaagccagactgttatct

SEQ ID NO: 880951 - DNA, 25 bp, Homo sapien
tgtcttctctaataggcttagcttt

SEQ ID NO: 880952 - DNA, 25 bp, Homo sapien
tcttctctaataggcttagcttttt

SEQ ID NO: 880953 - DNA, 25 bp, Homo sapien
ctctaataggcttagctttttgagg

SEQ ID NO: 880954 - DNA, 25 bp, Homo sapien
gttgtcttctctaataggcttagct

SEQ ID NO: 880955 - DNA, 25 bp, Homo sapien
tatggttgctctcttagttaagtaa

SEQ ID NO: 880956 - DNA, 25 bp, Homo sapien
tgaagcagttggcagctgtatttat

SEQ ID NO: 880957 - DNA, 25 bp, Homo sapien
gtgtatatagagtgaagcagttggc

SEQ ID NO: 880958 - DNA, 25 bp, Homo sapien
gctgtatttatggttgctctcttag

SEQ ID NO: 880959 - DNA, 25 bp, Homo sapien
gccagatttggtagtagtcatgcac

SEQ ID NO: 880960 - DNA, 25 bp, Homo sapien
tagtagtcatgcaccctgggaaaat

SEQ ID NO: 880961 - DNA, 25 bp, Homo sapien
cactggcaaagcagtggagtggaaa

SEQ ID NO: 880962 - DNA, 25 bp, Homo sapien
gagtggaaaggaatcatgggtattt

SEQ ID NO: 880963 - DNA, 25 bp, Homo sapien
catcagggaatagtcccaaatggca

SEQ ID NO: 880964 - DNA, 25 bp, Homo sapien
gtttgaagcagttacagcatcaggg

SEQ ID NO: 880965 - DNA, 25 bp, Homo sapien
cgatgagcctgatttttcctgatgg

SEQ ID NO: 880966 - DNA, 25 bp, Homo sapien
gagtatcggccatgtaacttattgt

SEQ ID NO: 880967 - DNA, 25 bp, Homo sapien
cttctggtgagtgtttctctttcct

SEQ ID NO: 880968 - DNA, 25 bp, Homo sapien
tctttccttcttttctcttgcttta

SEQ ID NO: 880969 - DNA, 25 bp, Homo sapien
tccttcttttctcttgctttagcat

SEQ ID NO: 880970 - DNA, 25 bp, Homo sapien
tttccttcttttctcttgctttagc

SEQ ID NO: 880971 - DNA, 25 bp, Homo sapien
tttcttttccttgtaagatgagtta

SEQ ID NO: 880972 - DNA, 25 bp, Homo sapien
tcctgtttcacactggtattctgaa

SEQ ID NO: 880973 - DNA, 25 bp, Homo sapien
tttccttgtaagatgagttattttc

SEQ ID NO: 880974 - DNA, 25 bp, Homo sapien
ctgaaaccaatattagtatatttct

SEQ ID NO: 880975 - DNA, 25 bp, Homo sapien
ccaaagctatgtatgagctttcaat

SEQ ID NO: 880976 - DNA, 25 bp, Homo sapien
tttctccaaagctatgtatgagctt

SEQ ID NO: 880977 - DNA, 25 bp, Homo sapien
atgcatactgaagcgtgtgtccaca

SEQ ID NO: 880978 - DNA, 25 bp, Homo sapien
gttttgaaagctcatgcatactgaa

SEQ ID NO: 880979 - DNA, 25 bp, Homo sapien
aaggatagatatagatgccatgtct

SEQ ID NO: 880980 - DNA, 25 bp, Homo sapien
cacacttacatactgtctctcataa

SEQ ID NO: 880981 - DNA, 25 bp, Homo sapien
atgtcttttgccacacacgtgtgca

SEQ ID NO: 880982 - DNA, 25 bp, Homo sapien
ggcataaaaggatagatatagatgc

SEQ ID NO: 880983 - DNA, 25 bp, Homo sapien
atccaagatattagatagcaatatt

SEQ ID NO: 880984 - DNA, 25 bp, Homo sapien
aaatccaagatattagatagcaata

SEQ ID NO: 880985 - DNA, 25 bp, Homo sapien
aatccaagatattagatagcaatat

SEQ ID NO: 880986 - DNA, 25 bp, Homo sapien
ttccactggtgcaggttggtcccgc

SEQ ID NO: 880987 - DNA, 25 bp, Homo sapien
tccactggtgcaggttggtcccgca

SEQ ID NO: 880988 - DNA, 25 bp, Homo sapien
ccactggtgcaggttggtcccgcat

SEQ ID NO: 880989 - DNA, 25 bp, Homo sapien
tttccactggtgcaggttggtcccg

SEQ ID NO: 880990 - DNA, 25 bp, Homo sapien
tcacccgtagatcagcgtcattgac

SEQ ID NO: 880991 - DNA, 25 bp, Homo sapien
aagctgaccaaggactttgtgaaaa

SEQ ID NO: 880992 - DNA, 25 bp, Homo sapien
catcaggggccataggtttcgtttt

SEQ ID NO: 880993 - DNA, 25 bp, Homo sapien
ttcgttttgatgtacataaaagctg

SEQ ID NO: 880994 - DNA, 25 bp, Homo sapien
tgtgtcagattttcctggatcccat

SEQ ID NO: 880995 - DNA, 25 bp, Homo sapien
ctgtgtcagattttcctggatccca

SEQ ID NO: 880996 - DNA, 25 bp, Homo sapien
caggaatatttattcgggattgttc

SEQ ID NO: 880997 - DNA, 25 bp, Homo sapien
taatccctagggataccttctcata

SEQ ID NO: 880998 - DNA, 25 bp, Homo sapien
cttctcatatgtatacaaagggaca

SEQ ID NO: 880999 - DNA, 25 bp, Homo sapien
ggacccagaaattctatgggaagta

SEQ ID NO: 881000 - DNA, 25 bp, Homo sapien
gttaccatggttcaattagtccctc

SEQ ID NO: 881001 - DNA, 25 bp, Homo sapien
catgaccatgcttcctaagaaaaaa

SEQ ID NO: 881002 - DNA, 25 bp, Homo sapien
tgttttggtacctaggaggatcagc

SEQ ID NO: 881003 - DNA, 25 bp, Homo sapien
tccctctctatccagtctagtggta

SEQ ID NO: 881004 - DNA, 25 bp, Homo sapien
tgtattcccaatatcaagattacca

SEQ ID NO: 881005 - DNA, 25 bp, Homo sapien
tcttcttgtgtattcccaatatcaa

SEQ ID NO: 881006 - DNA, 25 bp, Homo sapien
ccttggaagtgcaaaagtacttgaa

SEQ ID NO: 881007 - DNA, 25 bp, Homo sapien
ttccttggaagtgcaaaagtacttg

SEQ ID NO: 881008 - DNA, 25 bp, Homo sapien
tctagaagacgtgaacaaattgact

SEQ ID NO: 881009 - DNA, 25 bp, Homo sapien
ttctagaagacgtgaacaaattgac

SEQ ID NO: 881010 - DNA, 25 bp, Homo sapien
tactttctagaagacgtgaacaaat

SEQ ID NO: 881011 - DNA, 25 bp, Homo sapien
ctttctagaagacgtgaacaaattg

SEQ ID NO: 881012 - DNA, 25 bp, Homo sapien
gcaggcagtaattgcttaagggttt

SEQ ID NO: 881013 - DNA, 25 bp, Homo sapien
cgaggaaggtaacctgagccaagat

SEQ ID NO: 881014 - DNA, 25 bp, Homo sapien
taatatagagtgagtaaagagtgca

SEQ ID NO: 881015 - DNA, 25 bp, Homo sapien
tttgagggactaactggaacgagga

SEQ ID NO: 881016 - DNA, 25 bp, Homo sapien
ttgcttgtgctattttggatttgcg

SEQ ID NO: 881017 - DNA, 25 bp, Homo sapien
ctcctttttgcttgtgctattttgg

SEQ ID NO: 881018 - DNA, 25 bp, Homo sapien
tgtgctattttggatttgcgaaaca

SEQ ID NO: 881019 - DNA, 25 bp, Homo sapien
gctattttggatttgcgaaacaccc

SEQ ID NO: 881020 - DNA, 25 bp, Homo sapien
ccctcatgcagccatctcccctggt

SEQ ID NO: 881021 - DNA, 25 bp, Homo sapien
ctcatgcagccatctcccctggtca

SEQ ID NO: 881022 - DNA, 25 bp, Homo sapien
actccctcatgcagccatctcccct

SEQ ID NO: 881023 - DNA, 25 bp, Homo sapien
tcatgcagccatctcccctggtcat

SEQ ID NO: 881024 - DNA, 25 bp, Homo sapien
attgaaaggatctaattctatagac

SEQ ID NO: 881025 - DNA, 25 bp, Homo sapien
gatctaattctatagacagacgcag

SEQ ID NO: 881026 - DNA, 25 bp, Homo sapien
cttagcaagagattattatttccat

SEQ ID NO: 881027 - DNA, 25 bp, Homo sapien
tagacagacgcagaatgttttttgt

SEQ ID NO: 881028 - DNA, 25 bp, Homo sapien
gccgacattcgagaacaggattgaa

SEQ ID NO: 881029 - DNA, 25 bp, Homo sapien
aagcagacagtcatggataatagta

SEQ ID NO: 881030 - DNA, 25 bp, Homo sapien
gatcatgctgattgccgattggcag

SEQ ID NO: 881031 - DNA, 25 bp, Homo sapien
ggataatagtaagccgacattcgag

SEQ ID NO: 881032 - DNA, 25 bp, Homo sapien
cttcagcaggtaggacggtgaccca

SEQ ID NO: 881033 - DNA, 25 bp, Homo sapien
tggcttcttcagcaggtaggacggt

SEQ ID NO: 881034 - DNA, 25 bp, Homo sapien
caacaatcttaggtcctaatcttgt

SEQ ID NO: 881035 - DNA, 25 bp, Homo sapien
caatcttaggtcctaatcttgtggc

SEQ ID NO: 881036 - DNA, 25 bp, Homo sapien
ttcctttttgattgctcattgccat

SEQ ID NO: 881037 - DNA, 25 bp, Homo sapien
ggttcctttttgattgctcattgcc

SEQ ID NO: 881038 - DNA, 25 bp, Homo sapien
gttcctttttgattgctcattgcca

SEQ ID NO: 881039 - DNA, 25 bp, Homo sapien
gttccaaggtttcatcaggcccaca

SEQ ID NO: 881040 - DNA, 25 bp, Homo sapien
ccaaatgggattgtttgcatccgtg

SEQ ID NO: 881041 - DNA, 25 bp, Homo sapien
ggatgattgaggaggtgtgcgctca

SEQ ID NO: 881042 - DNA, 25 bp, Homo sapien
ccatcatctccaaatgggattgttt

SEQ ID NO: 881043 - DNA, 25 bp, Homo sapien
tgtttgcatccgtgtaactgctgct

SEQ ID NO: 881044 - DNA, 25 bp, Homo sapien
acaaaccttgccagttgctccgcag

SEQ ID NO: 881045 - DNA, 25 bp, Homo sapien
gctccgcagcaataatcgaagtatg

SEQ ID NO: 881046 - DNA, 25 bp, Homo sapien
tagtccagaactcgcgcatcatgtc

SEQ ID NO: 881047 - DNA, 25 bp, Homo sapien
caatttaacgatatgtaggtgcaca

SEQ ID NO: 881048 - DNA, 25 bp, Homo sapien
accaagccctgctgatctaccaaga

SEQ ID NO: 881049 - DNA, 25 bp, Homo sapien
gagcttctcaaacctccaaaccagg

SEQ ID NO: 881050 - DNA, 25 bp, Homo sapien
aaaccaagccctgctgatctaccaa

SEQ ID NO: 881051 - DNA, 25 bp, Homo sapien
gcttctcaaacctccaaaccaggac

SEQ ID NO: 881052 - DNA, 25 bp, Homo sapien
taaaggatcagttagaacttcctgg

SEQ ID NO: 881053 - DNA, 25 bp, Homo sapien
aaggtatcttatttccacatagatg

SEQ ID NO: 881054 - DNA, 25 bp, Homo sapien
ttgcagctggctcttactcaagaaa

SEQ ID NO: 881055 - DNA, 25 bp, Homo sapien
tcagggcagaatcgctcctgttgct

SEQ ID NO: 881056 - DNA, 25 bp, Homo sapien
taaccctcttgggtctggcctttca

SEQ ID NO: 881057 - DNA, 25 bp, Homo sapien
cagctcatcagtgtttttatgtctt

SEQ ID NO: 881058 - DNA, 25 bp, Homo sapien
aaccctcttgggtctggcctttcat

SEQ ID NO: 881059 - DNA, 25 bp, Homo sapien
ctcccgcaatgtggcagctcatcag

SEQ ID NO: 881060 - DNA, 25 bp, Homo sapien
gaagattgccagtctcagatctgcc

SEQ ID NO: 881061 - DNA, 25 bp, Homo sapien
agatctgcctagttctgctgataga

SEQ ID NO: 881062 - DNA, 25 bp, Homo sapien
gattgccagtctcagatctgcctag

SEQ ID NO: 881063 - DNA, 25 bp, Homo sapien
gctgatagataaggaatatggagct

SEQ ID NO: 881064 - DNA, 25 bp, Homo sapien
cttccatgtaagtctgaagccccaa

SEQ ID NO: 881065 - DNA, 25 bp, Homo sapien
tgtgtagctttcagagcccccatcc

SEQ ID NO: 881066 - DNA, 25 bp, Homo sapien
gtctgaagccccaatattgttttgt

SEQ ID NO: 881067 - DNA, 25 bp, Homo sapien
tgccatgactccctgagaggttctc

SEQ ID NO: 881068 - DNA, 25 bp, Homo sapien
taacctcaatgcctcagcagaactg

SEQ ID NO: 881069 - DNA, 25 bp, Homo sapien
aattgtgctcaacaacctgcattgg

SEQ ID NO: 881070 - DNA, 25 bp, Homo sapien
acaatctggtgttacctgcctctgg

SEQ ID NO: 881071 - DNA, 25 bp, Homo sapien
gagctagggtatactgtggtgatca

SEQ ID NO: 881072 - DNA, 25 bp, Homo sapien
agaagcatctgtaacccacagtgaa

SEQ ID NO: 881073 - DNA, 25 bp, Homo sapien
tttgttacttgcaatcgatctcccc

SEQ ID NO: 881074 - DNA, 25 bp, Homo sapien
tgaattaggagttcaacaaatccct

SEQ ID NO: 881075 - DNA, 25 bp, Homo sapien
agtccttatcaccaactagcaaggc

SEQ ID NO: 881076 - DNA, 25 bp, Homo sapien
gctgtattcctagcgcctagaccaa

SEQ ID NO: 881077 - DNA, 25 bp, Homo sapien
tgaagcgaaagtttcattaagtaaa

SEQ ID NO: 881078 - DNA, 25 bp, Homo sapien
gtgagtcattgttcctcacctcaaa

SEQ ID NO: 881079 - DNA, 25 bp, Homo sapien
cacatacaaataattgaagcgaaag

SEQ ID NO: 881080 - DNA, 25 bp, Homo sapien
tgagtcattgttcctcacctcaaat

SEQ ID NO: 881081 - DNA, 25 bp, Homo sapien
ttcaaacgcatcttctgcaccttcc

SEQ ID NO: 881082 - DNA, 25 bp, Homo sapien
catccttctgggcaagtactggttg

SEQ ID NO: 881083 - DNA, 25 bp, Homo sapien
gtgtcctgaataaaacaggtatcca

SEQ ID NO: 881084 - DNA, 25 bp, Homo sapien
caagtactggttgaagtgtcctgaa

SEQ ID NO: 881085 - DNA, 25 bp, Homo sapien
tcaaagtcagagcaacctacagatg

SEQ ID NO: 881086 - DNA, 25 bp, Homo sapien
tttctacccctatgtataagagtgg

SEQ ID NO: 881087 - DNA, 25 bp, Homo sapien
cctacagatgatagatgactaccaa

SEQ ID NO: 881088 - DNA, 25 bp, Homo sapien
cctgtgcccggctgggacttacata

SEQ ID NO: 881089 - DNA, 25 bp, Homo sapien
ctaggctgaactgtggtagccacac

SEQ ID NO: 881090 - DNA, 25 bp, Homo sapien
taggctgaactgtggtagccacaca

SEQ ID NO: 881091 - DNA, 25 bp, Homo sapien
ggctgaactgtggtagccacacact

SEQ ID NO: 881092 - DNA, 25 bp, Homo sapien
gctgaactgtggtagccacacactc

SEQ ID NO: 881093 - DNA, 25 bp, Homo sapien
ctaagaatgtggcccaaggataaca

SEQ ID NO: 881094 - DNA, 25 bp, Homo sapien
tccaggatacgtcagtaagaacaca

SEQ ID NO: 881095 - DNA, 25 bp, Homo sapien
taagaacacatacgcgtatgacact

SEQ ID NO: 881096 - DNA, 25 bp, Homo sapien
tggcagcaggaacattgtccaggat

SEQ ID NO: 881097 - DNA, 25 bp, Homo sapien
cacccaaacagagtggcccagcatg

SEQ ID NO: 881098 - DNA, 25 bp, Homo sapien
gcccagcatggtcctaaatccaagc

SEQ ID NO: 881099 - DNA, 25 bp, Homo sapien
aaatccaagccataggataaggatc

SEQ ID NO: 881100 - DNA, 25 bp, Homo sapien
tgtccttgattagctgccacccaaa

SEQ ID NO: 881101 - DNA, 25 bp, Homo sapien
ttgttatgttttccgtaaagcttca

SEQ ID NO: 881102 - DNA, 25 bp, Homo sapien
tgttatgttttccgtaaagcttcat

SEQ ID NO: 881103 - DNA, 25 bp, Homo sapien
tcaagcaaggcctgctgtagtgtca

SEQ ID NO: 881104 - DNA, 25 bp, Homo sapien
cagggaatccactgccttagtaaca

SEQ ID NO: 881105 - DNA, 25 bp, Homo sapien
tgcctaacagagctcggaaggatct

SEQ ID NO: 881106 - DNA, 25 bp, Homo sapien
gatcttgtggtggtcagtgaccaga

SEQ ID NO: 881107 - DNA, 25 bp, Homo sapien
tcagtcaggagcctctgtaactctg

SEQ ID NO: 881108 - DNA, 25 bp, Homo sapien
gatggaaaagatcatattctgcttg

SEQ ID NO: 881109 - DNA, 25 bp, Homo sapien
tgtgctctgcactttctctgcaaaa

SEQ ID NO: 881110 - DNA, 25 bp, Homo sapien
tgtaactctgagtgtgctctgcact

SEQ ID NO: 881111 - DNA, 25 bp, Homo sapien
tgttgttatgatcataggaaaatcc

SEQ ID NO: 881112 - DNA, 25 bp, Homo sapien
cctttctttggaagcgaatcgccag

SEQ ID NO: 881113 - DNA, 25 bp, Homo sapien
gaatcgccagtatggaaacacagtg

SEQ ID NO: 881114 - DNA, 25 bp, Homo sapien
aatagaacaccaggattgctgtgcg

SEQ ID NO: 881115 - DNA, 25 bp, Homo sapien
gaaaagcttctagtgctacagccaa

SEQ ID NO: 881116 - DNA, 25 bp, Homo sapien
agctgggtcttaaaataacctgaag

SEQ ID NO: 881117 - DNA, 25 bp, Homo sapien
taacctgaagaaattatagttctga

SEQ ID NO: 881118 - DNA, 25 bp, Homo sapien
ttctcctaataaagccatgagaatg

SEQ ID NO: 881119 - DNA, 25 bp, Homo sapien
aagtgaaggacttagaacattctcc

SEQ ID NO: 881120 - DNA, 25 bp, Homo sapien
tgacagagtatcttagcttctacat

SEQ ID NO: 881121 - DNA, 25 bp, Homo sapien
ccagtttctttccaagcatataact

SEQ ID NO: 881122 - DNA, 25 bp, Homo sapien
agtttctttccaagcatataactgg

SEQ ID NO: 881123 - DNA, 25 bp, Homo sapien
ttctacatcataaagctcaattgtt

SEQ ID NO: 881124 - DNA, 25 bp, Homo sapien
gcttacttgactcttaagttcttgc

SEQ ID NO: 881125 - DNA, 25 bp, Homo sapien
tctgcatacgatttctggcttactt

SEQ ID NO: 881126 - DNA, 25 bp, Homo sapien
tttctggcttacttgactcttaagt

SEQ ID NO: 881127 - DNA, 25 bp, Homo sapien
tttctgcatacgatttctggcttac

SEQ ID NO: 881128 - DNA, 25 bp, Homo sapien
ttctcagattcactagctcaaccag

SEQ ID NO: 881129 - DNA, 25 bp, Homo sapien
actttagcctcaaatggtctcgatt

SEQ ID NO: 881130 - DNA, 25 bp, Homo sapien
tcaatgtaatgacgttttcttcaca

SEQ ID NO: 881131 - DNA, 25 bp, Homo sapien
ggtctcgattcagtaattatcaatg

SEQ ID NO: 881132 - DNA, 25 bp, Homo sapien
caatgtatttaaggtgtttagcaca

SEQ ID NO: 881133 - DNA, 25 bp, Homo sapien
tagagaatagtctcaaaacatggca

SEQ ID NO: 881134 - DNA, 25 bp, Homo sapien
gcacctgtcaccatctctagttatc

SEQ ID NO: 881135 - DNA, 25 bp, Homo sapien
cttataacccctacaggcagaatta

SEQ ID NO: 881136 - DNA, 25 bp, Homo sapien
atgtagtaggtttgtactctaggac

SEQ ID NO: 881137 - DNA, 25 bp, Homo sapien
tcagaggagtgtagtggatgtagta

SEQ ID NO: 881138 - DNA, 25 bp, Homo sapien
tggatgtagtaggtttgtactctag

SEQ ID NO: 881139 - DNA, 25 bp, Homo sapien
tgtagtggatgtagtaggtttgtac

SEQ ID NO: 881140 - DNA, 25 bp, Homo sapien
ggaataagcccaagtgaaccgccta

SEQ ID NO: 881141 - DNA, 25 bp, Homo sapien
ttgaaccttggctttgagtatgtcc

SEQ ID NO: 881142 - DNA, 25 bp, Homo sapien
ataagcccaagtgaaccgcctacgt

SEQ ID NO: 881143 - DNA, 25 bp, Homo sapien
cagcatgccaaatttatctcgaggg

SEQ ID NO: 881144 - DNA, 25 bp, Homo sapien
tctctgtctgatataacccaatggg

SEQ ID NO: 881145 - DNA, 25 bp, Homo sapien
cagtctttacctgtgaatcagtaga

SEQ ID NO: 881146 - DNA, 25 bp, Homo sapien
tcttttataatgcacagggaaccta

SEQ ID NO: 881147 - DNA, 25 bp, Homo sapien
gattcacagattggagagtacagcc

SEQ ID NO: 881148 - DNA, 25 bp, Homo sapien
ctttatccgggcagtcatccagaga

SEQ ID NO: 881149 - DNA, 25 bp, Homo sapien
gactaaatagaaggtgtttaactga

SEQ ID NO: 881150 - DNA, 25 bp, Homo sapien
cgatgcctttatccgggcagtcatc

SEQ ID NO: 881151 - DNA, 25 bp, Homo sapien
tgtgaaatttgtttgcgatgccttt

SEQ ID NO: 881152 - DNA, 25 bp, Homo sapien
tactctgcgatgcttccaatgactt

SEQ ID NO: 881153 - DNA, 25 bp, Homo sapien
tgcttccaatgacttggtagttctc

SEQ ID NO: 881154 - DNA, 25 bp, Homo sapien
tgcgatgcttccaatgacttggtag

SEQ ID NO: 881155 - DNA, 25 bp, Homo sapien
atcctactctgcgatgcttccaatg

SEQ ID NO: 881156 - DNA, 25 bp, Homo sapien
cccaacttgaaggtgcggtccaggt

SEQ ID NO: 881157 - DNA, 25 bp, Homo sapien
tcaaggcataactagggaacaccaa

SEQ ID NO: 881158 - DNA, 25 bp, Homo sapien
gactgggcagacctatgaatgctgg

SEQ ID NO: 881159 - DNA, 25 bp, Homo sapien
agaagcagccccttactcaggcgga

SEQ ID NO: 881160 - DNA, 25 bp, Homo sapien
ctcctataggcagttggtcctcctg

SEQ ID NO: 881161 - DNA, 25 bp, Homo sapien
cctataggcagttggtcctcctgtt

SEQ ID NO: 881162 - DNA, 25 bp, Homo sapien
tctcctataggcagttggtcctcct

SEQ ID NO: 881163 - DNA, 25 bp, Homo sapien
tcctataggcagttggtcctcctgt

SEQ ID NO: 881164 - DNA, 25 bp, Homo sapien
ctagtgaacagtaaaacaaatccat

SEQ ID NO: 881165 - DNA, 25 bp, Homo sapien
gttgaattgttctcccacgttgtgt

SEQ ID NO: 881166 - DNA, 25 bp, Homo sapien
gaattaggcctcactggcagtttga

SEQ ID NO: 881167 - DNA, 25 bp, Homo sapien
ttctggggctgtattcaaaacgttg

SEQ ID NO: 881168 - DNA, 25 bp, Homo sapien
tgttctcccacgttgtgtggcagtt

SEQ ID NO: 881169 - DNA, 25 bp, Homo sapien
gatctctgcatagccagtgatctgc

SEQ ID NO: 881170 - DNA, 25 bp, Homo sapien
ttgtgtacccttgatcacagaatgg

SEQ ID NO: 881171 - DNA, 25 bp, Homo sapien
gaaaagcacgtgaagcagtgaagga

SEQ ID NO: 881172 - DNA, 25 bp, Homo sapien
tcagggaagtgcagctacttgtgta

SEQ ID NO: 881173 - DNA, 25 bp, Homo sapien
gtagatctggtatgtattcctggcc

SEQ ID NO: 881174 - DNA, 25 bp, Homo sapien
taccgccaaatacttgagagaccaa

SEQ ID NO: 881175 - DNA, 25 bp, Homo sapien
taattcagttgcaattaccgccaaa

SEQ ID NO: 881176 - DNA, 25 bp, Homo sapien
ctctgttcttctctattccgcaggg

SEQ ID NO: 881177 - DNA, 25 bp, Homo sapien
ctcccatgggagatgttgagtacct

SEQ ID NO: 881178 - DNA, 25 bp, Homo sapien
aatataaatattgcctggacaggtg

SEQ ID NO: 881179 - DNA, 25 bp, Homo sapien
tcccaggttggaacaggccttggag

SEQ ID NO: 881180 - DNA, 25 bp, Homo sapien
gagattactgaattgtcccatggga

SEQ ID NO: 881181 - DNA, 25 bp, Homo sapien
tatttccaacagtattctctgacaa

SEQ ID NO: 881182 - DNA, 25 bp, Homo sapien
ctatttccaacagtattctctgaca

SEQ ID NO: 881183 - DNA, 25 bp, Homo sapien
acctttgaggcttggggcaaagaat

SEQ ID NO: 881184 - DNA, 25 bp, Homo sapien
gacctttgaggcttggggcaaagaa

SEQ ID NO: 881185 - DNA, 25 bp, Homo sapien
aggtcctcgggccattggctgacta

SEQ ID NO: 881186 - DNA, 25 bp, Homo sapien
acaaccacacaaatgcactgaatag

SEQ ID NO: 881187 - DNA, 25 bp, Homo sapien
cattggctgactagaggctttctca

SEQ ID NO: 881188 - DNA, 25 bp, Homo sapien
gaggctttctcaaacaaccacacaa

SEQ ID NO: 881189 - DNA, 25 bp, Homo sapien
tgttgaatttcaccgttacgcacat

SEQ ID NO: 881190 - DNA, 25 bp, Homo sapien
cagtgttgaatttcaccgttacgca

SEQ ID NO: 881191 - DNA, 25 bp, Homo sapien
gtgttgaatttcaccgttacgcaca

SEQ ID NO: 881192 - DNA, 25 bp, Homo sapien
agtgttgaatttcaccgttacgcac

SEQ ID NO: 881193 - DNA, 25 bp, Homo sapien
tttgaggtatctttcatgtgcgtaa

SEQ ID NO: 881194 - DNA, 25 bp, Homo sapien
cccatgtgcttaactgagctagttg

SEQ ID NO: 881195 - DNA, 25 bp, Homo sapien
gcgtaaagctgccttacaagtagct

SEQ ID NO: 881196 - DNA, 25 bp, Homo sapien
aagtagctgactttctcccatgtgc

SEQ ID NO: 881197 - DNA, 25 bp, Homo sapien
ctttctccgatttcttcagtccagc

SEQ ID NO: 881198 - DNA, 25 bp, Homo sapien
tctttctccgatttcttcagtccag

SEQ ID NO: 881199 - DNA, 25 bp, Homo sapien
tctgtatactgatattcttcaagtt

SEQ ID NO: 881200 - DNA, 25 bp, Homo sapien
tcacacctcttcggttccagttaaa

SEQ ID NO: 881201 - DNA, 25 bp, Homo sapien
gaaagggtggttctgtatactgata

SEQ ID NO: 881202 - DNA, 25 bp, Homo sapien
ccagttaaaactggcagaaagggtg

SEQ ID NO: 881203 - DNA, 25 bp, Homo sapien
cagacacgaagtatctatttgaaga

SEQ ID NO: 881204 - DNA, 25 bp, Homo sapien
aactaggaaataggagacctgcgtt

SEQ ID NO: 881205 - DNA, 25 bp, Homo sapien
gagacctgcgttctacagacacgaa

SEQ ID NO: 881206 - DNA, 25 bp, Homo sapien
gaagaattgatgtcttcagtcgtca

SEQ ID NO: 881207 - DNA, 25 bp, Homo sapien
tatggagagcataactcttccactg

SEQ ID NO: 881208 - DNA, 25 bp, Homo sapien
tcttccactgtaaggtcttgagccc

SEQ ID NO: 881209 - DNA, 25 bp, Homo sapien
ccactgtaaggtcttgagccctgcc

SEQ ID NO: 881210 - DNA, 25 bp, Homo sapien
ctcctggaaggtcatattgtttatg

SEQ ID NO: 881211 - DNA, 25 bp, Homo sapien
tgctctccctatagccaaacatgaa

SEQ ID NO: 881212 - DNA, 25 bp, Homo sapien
tacttgctctccctatagccaaaca

SEQ ID NO: 881213 - DNA, 25 bp, Homo sapien
cctatagccaaacatgaacttgatg

SEQ ID NO: 881214 - DNA, 25 bp, Homo sapien
aagttacttgctctccctatagcca

SEQ ID NO: 881215 - DNA, 25 bp, Homo sapien
tgcattttcttgggatgacggaagc

SEQ ID NO: 881216 - DNA, 25 bp, Homo sapien
tcgttaggccatacccaaacacctg

SEQ ID NO: 881217 - DNA, 25 bp, Homo sapien
ttagtcgttaggccatacccaaaca

SEQ ID NO: 881218 - DNA, 25 bp, Homo sapien
cattttcttgggatgacggaagcag

SEQ ID NO: 881219 - DNA, 25 bp, Homo sapien
agactgccacatgctacccgaattt

SEQ ID NO: 881220 - DNA, 25 bp, Homo sapien
tgccacatgctacccgaatttctct

SEQ ID NO: 881221 - DNA, 25 bp, Homo sapien
actgccacatgctacccgaatttct

SEQ ID NO: 881222 - DNA, 25 bp, Homo sapien
gcctcacaatacatgagactgccac

SEQ ID NO: 881223 - DNA, 25 bp, Homo sapien
ctgggtagccacactcggctggcat

SEQ ID NO: 881224 - DNA, 25 bp, Homo sapien
gacttcttggaattgtggatggctc

SEQ ID NO: 881225 - DNA, 25 bp, Homo sapien
ggctgaatctgggtaatggaatatc

SEQ ID NO: 881226 - DNA, 25 bp, Homo sapien
tatgagctaatgtctaaggaaaaga

SEQ ID NO: 881227 - DNA, 25 bp, Homo sapien
aaagattatcatgtaatgggaaagc

SEQ ID NO: 881228 - DNA, 25 bp, Homo sapien
tctgagtcgctttgcatgttgcagg

SEQ ID NO: 881229 - DNA, 25 bp, Homo sapien
ttcattagcatggagagtcaggtct

SEQ ID NO: 881230 - DNA, 25 bp, Homo sapien
cgttccacaatatctttgactctga

SEQ ID NO: 881231 - DNA, 25 bp, Homo sapien
tgactctgacaactgaaccctttct

SEQ ID NO: 881232 - DNA, 25 bp, Homo sapien
ttggtcagtcattaggaagcagttc

SEQ ID NO: 881233 - DNA, 25 bp, Homo sapien
ggtcagtcattaggaagcagttctt

SEQ ID NO: 881234 - DNA, 25 bp, Homo sapien
ctcttggtcagtcattaggaagcag

SEQ ID NO: 881235 - DNA, 25 bp, Homo sapien
tcagtcattaggaagcagttcttca

SEQ ID NO: 881236 - DNA, 25 bp, Homo sapien
ctctagaggcagctcgctttccaga

SEQ ID NO: 881237 - DNA, 25 bp, Homo sapien
tcttcattagcagcaagtttttact

SEQ ID NO: 881238 - DNA, 25 bp, Homo sapien
taccacctctagaggcagctcgctt

SEQ ID NO: 881239 - DNA, 25 bp, Homo sapien
tcactaccacctctagaggcagctc

SEQ ID NO: 881240 - DNA, 25 bp, Homo sapien
cctgaactatgcttcaaccataaga

SEQ ID NO: 881241 - DNA, 25 bp, Homo sapien
ttaagtgctgcccattaatatgcac

SEQ ID NO: 881242 - DNA, 25 bp, Homo sapien
tcaaccataagaccataggtggtgg

SEQ ID NO: 881243 - DNA, 25 bp, Homo sapien
tccacagctgttaagtgctgcccat

SEQ ID NO: 881244 - DNA, 25 bp, Homo sapien
tcaaagcccacaaaggaaactgttg

SEQ ID NO: 881245 - DNA, 25 bp, Homo sapien
aagcccacaaaggaaactgttggct

SEQ ID NO: 881246 - DNA, 25 bp, Homo sapien
gcccacaaaggaaactgttggctgt

SEQ ID NO: 881247 - DNA, 25 bp, Homo sapien
ccacaaaggaaactgttggctgtac

SEQ ID NO: 881248 - DNA, 25 bp, Homo sapien
tacttttatttggactgcgtttata

SEQ ID NO: 881249 - DNA, 25 bp, Homo sapien
cagctcctgaactggccattcttaa

SEQ ID NO: 881250 - DNA, 25 bp, Homo sapien
tcaacgatgtgcaattcatcatagg

SEQ ID NO: 881251 - DNA, 25 bp, Homo sapien
tttatttggactgcgtttatatttc

SEQ ID NO: 881252 - DNA, 25 bp, Homo sapien
ttaattttgaggccttagagggctc

SEQ ID NO: 881253 - DNA, 25 bp, Homo sapien
taattttgaggccttagagggctca

SEQ ID NO: 881254 - DNA, 25 bp, Homo sapien
cctgagctagtctgttatcctgtgg

SEQ ID NO: 881255 - DNA, 25 bp, Homo sapien
gtataaatatccctgagctagtctg

SEQ ID NO: 881256 - DNA, 25 bp, Homo sapien
agctagtctgttatcctgtggcatc

SEQ ID NO: 881257 - DNA, 25 bp, Homo sapien
ccgtgtataaatatccctgagctag

SEQ ID NO: 881258 - DNA, 25 bp, Homo sapien
gatgtgttatcagacttaggcctaa

SEQ ID NO: 881259 - DNA, 25 bp, Homo sapien
tcaatggcctttgaataaaagcagc

SEQ ID NO: 881260 - DNA, 25 bp, Homo sapien
taaaagcagctgtgtctcatggctt

SEQ ID NO: 881261 - DNA, 25 bp, Homo sapien
gatttgcaaggtaggagtttggcct

SEQ ID NO: 881262 - DNA, 25 bp, Homo sapien
ggacactgattttggtatacccaga

SEQ ID NO: 881263 - DNA, 25 bp, Homo sapien
tgaatctttgccaccagataccgtg

SEQ ID NO: 881264 - DNA, 25 bp, Homo sapien
gttcaacttagctccaactccaggg

SEQ ID NO: 881265 - DNA, 25 bp, Homo sapien
tagaggataatcatcaggaggacag

SEQ ID NO: 881266 - DNA, 25 bp, Homo sapien
ttggcgctactgtgacaacaaagtg

SEQ ID NO: 881267 - DNA, 25 bp, Homo sapien
catgtgacaatgagcaagccacttg

SEQ ID NO: 881268 - DNA, 25 bp, Homo sapien
ggaatttcaccaggaatgacatggc

SEQ ID NO: 881269 - DNA, 25 bp, Homo sapien
tgacatggcacatcactagaattgc

SEQ ID NO: 881270 - DNA, 25 bp, Homo sapien
ttcttggcgattaagagaactggtt

SEQ ID NO: 881271 - DNA, 25 bp, Homo sapien
tataatatcctctaccgaccccagt

SEQ ID NO: 881272 - DNA, 25 bp, Homo sapien
tatgtggtacctaattttcttggcg

SEQ ID NO: 881273 - DNA, 25 bp, Homo sapien
taccgtaaagataacaaccattgtc

SEQ ID NO: 881274 - DNA, 25 bp, Homo sapien
caaattagatcaggtcctccatgct

SEQ ID NO: 881275 - DNA, 25 bp, Homo sapien
gcattactccacaggacataagtga

SEQ ID NO: 881276 - DNA, 25 bp, Homo sapien
tagccttttattgtgggtgtggagt

SEQ ID NO: 881277 - DNA, 25 bp, Homo sapien
tgaaaaatattcaccgaccactaac

SEQ ID NO: 881278 - DNA, 25 bp, Homo sapien
tttcaattctcataaccgtgagggc

SEQ ID NO: 881279 - DNA, 25 bp, Homo sapien
ccgtgagggcaagtaagggattatt

SEQ ID NO: 881280 - DNA, 25 bp, Homo sapien
tctactgagagctagggctatgaga

SEQ ID NO: 881281 - DNA, 25 bp, Homo sapien
gaagataatgccacctctactgaga

SEQ ID NO: 881282 - DNA, 25 bp, Homo sapien
cacgtgactgtctctggaattccag

SEQ ID NO: 881283 - DNA, 25 bp, Homo sapien
catgtggattccttacatctgtgac

SEQ ID NO: 881284 - DNA, 25 bp, Homo sapien
agatcctccaccacagagacatgtg

SEQ ID NO: 881285 - DNA, 25 bp, Homo sapien
catctgtgacctctgagacatttcc

SEQ ID NO: 881286 - DNA, 25 bp, Homo sapien
ggattataacaataaacacgtatgt

SEQ ID NO: 881287 - DNA, 25 bp, Homo sapien
ttataacaataaacacgtatgttta

SEQ ID NO: 881288 - DNA, 25 bp, Homo sapien
attataacaataaacacgtatgttt

SEQ ID NO: 881289 - DNA, 25 bp, Homo sapien
ggggtcgctcttctcaagtaatgtc

SEQ ID NO: 881290 - DNA, 25 bp, Homo sapien
ggtcgctcttctcaagtaatgtctt

SEQ ID NO: 881291 - DNA, 25 bp, Homo sapien
ttggggtcgctcttctcaagtaatg

SEQ ID NO: 881292 - DNA, 25 bp, Homo sapien
cgctcttctcaagtaatgtctttgt

SEQ ID NO: 881293 - DNA, 25 bp, Homo sapien
tattgtgcttgctgccaataagctt

SEQ ID NO: 881294 - DNA, 25 bp, Homo sapien
catattgtgcttgctgccaataagc

SEQ ID NO: 881295 - DNA, 25 bp, Homo sapien
ttgtgcttgctgccaataagctttt

SEQ ID NO: 881296 - DNA, 25 bp, Homo sapien
tcatattgtgcttgctgccaataag

SEQ ID NO: 881297 - DNA, 25 bp, Homo sapien
ttgcctctggaagtcatctccacat

SEQ ID NO: 881298 - DNA, 25 bp, Homo sapien
agccaattgaagaatgccagaccca

SEQ ID NO: 881299 - DNA, 25 bp, Homo sapien
aaaggcagccaattgaagaatgcca

SEQ ID NO: 881300 - DNA, 25 bp, Homo sapien
agacaaaaggcagccaattgaagaa

SEQ ID NO: 881301 - DNA, 25 bp, Homo sapien
ttgaagaatgccagacccaaatgac

SEQ ID NO: 881302 - DNA, 25 bp, Homo sapien
cgtttgcatttagtttgacgacaat

SEQ ID NO: 881303 - DNA, 25 bp, Homo sapien
tgacgacaatatagataaatcctcc

SEQ ID NO: 881304 - DNA, 25 bp, Homo sapien
agcattcaagagaccaatacagtgg

SEQ ID NO: 881305 - DNA, 25 bp, Homo sapien
agataaatcctccatttggtgccat

SEQ ID NO: 881306 - DNA, 25 bp, Homo sapien
aacatattgggcttcgagtccttca

SEQ ID NO: 881307 - DNA, 25 bp, Homo sapien
gaaaccacttgtcttaggagggaga

SEQ ID NO: 881308 - DNA, 25 bp, Homo sapien
aaatgagtagttctggtacccaggc

SEQ ID NO: 881309 - DNA, 25 bp, Homo sapien
cagagtttatcagaagaacggtccc

SEQ ID NO: 881310 - DNA, 25 bp, Homo sapien
cagcttttcagcttcacggtggagc

SEQ ID NO: 881311 - DNA, 25 bp, Homo sapien
cagtaattgagtcgcgagggttatt

SEQ ID NO: 881312 - DNA, 25 bp, Homo sapien
ctgcagggagctttcggaaagacat

SEQ ID NO: 881313 - DNA, 25 bp, Homo sapien
tggagctcgcagtaattgagtcgcg

SEQ ID NO: 881314 - DNA, 25 bp, Homo sapien
ggccttccacgcaaaccgaaggaga

SEQ ID NO: 881315 - DNA, 25 bp, Homo sapien
ctaccgctgacacttggcaccgccg

SEQ ID NO: 881316 - DNA, 25 bp, Homo sapien
gccgcctcctagcagcggccagacg

SEQ ID NO: 881317 - DNA, 25 bp, Homo sapien
ccgaaggagatacggacatcgtcat

SEQ ID NO: 881318 - DNA, 25 bp, Homo sapien
gaacctgtaactgtgcgtgaattat

SEQ ID NO: 881319 - DNA, 25 bp, Homo sapien
aggggaacctgtaactgtgcgtgaa

SEQ ID NO: 881320 - DNA, 25 bp, Homo sapien
ctgtaactgtgcgtgaattatcatc

SEQ ID NO: 881321 - DNA, 25 bp, Homo sapien
taactgtgcgtgaattatcatctgg

SEQ ID NO: 881322 - DNA, 25 bp, Homo sapien
ttctcagcagtcatggccagctcca

SEQ ID NO: 881323 - DNA, 25 bp, Homo sapien
agctccatcctggtgtaccttaaga

SEQ ID NO: 881324 - DNA, 25 bp, Homo sapien
ccagctccatcctggtgtaccttaa

SEQ ID NO: 881325 - DNA, 25 bp, Homo sapien
ctccatcctggtgtaccttaagaaa

SEQ ID NO: 881326 - DNA, 25 bp, Homo sapien
taactgactatggttttgcaggcca

SEQ ID NO: 881327 - DNA, 25 bp, Homo sapien
cagtggctgattggcacgacctctt

SEQ ID NO: 881328 - DNA, 25 bp, Homo sapien
tatgaatgcatttagacaccggatc

SEQ ID NO: 881329 - DNA, 25 bp, Homo sapien
tcagacttctatcagaatgcagagg

SEQ ID NO: 881330 - DNA, 25 bp, Homo sapien
taggtctccggccctgctgaggggg

SEQ ID NO: 881331 - DNA, 25 bp, Homo sapien
ggtctccggccctgctgagggggtg

SEQ ID NO: 881332 - DNA, 25 bp, Homo sapien
ctgagggggtggggggctccgcctg

SEQ ID NO: 881333 - DNA, 25 bp, Homo sapien
tgctgagggggtggggggctccgcc

SEQ ID NO: 881334 - DNA, 25 bp, Homo sapien
agcttgagggtctgaatcttgctca

SEQ ID NO: 881335 - DNA, 25 bp, Homo sapien
tcctccagaccgagaaggcgtagct

SEQ ID NO: 881336 - DNA, 25 bp, Homo sapien
gcagctcctcgtaagactgcggact

SEQ ID NO: 881337 - DNA, 25 bp, Homo sapien
cgtgagccacatagctgcagcttgc

SEQ ID NO: 881338 - DNA, 25 bp, Homo sapien
gccggcgagactggcgagctggaca

SEQ ID NO: 881339 - DNA, 25 bp, Homo sapien
ttgctcaggctgtcgtcggccggcg

SEQ ID NO: 881340 - DNA, 25 bp, Homo sapien
ggctgctgccggtctggctcttcct

SEQ ID NO: 881341 - DNA, 25 bp, Homo sapien
gcccgcagacttcttgccgcgcttg

SEQ ID NO: 881342 - DNA, 25 bp, Homo sapien
gggagttgggcgagagctgcagact

SEQ ID NO: 881343 - DNA, 25 bp, Homo sapien
caaaaagaaagcgcccaacggctgg

SEQ ID NO: 881344 - DNA, 25 bp, Homo sapien
tcctggaaacggtgccggtgctgca

SEQ ID NO: 881345 - DNA, 25 bp, Homo sapien
ggacggtgtggatggccccgaggtc

SEQ ID NO: 881346 - DNA, 25 bp, Homo sapien
gagttttgtgcaccgcgctggagta

SEQ ID NO: 881347 - DNA, 25 bp, Homo sapien
caattaattgagcaaagcgcccctt

SEQ ID NO: 881348 - DNA, 25 bp, Homo sapien
tggagtaccctgcacataaggtccg

SEQ ID NO: 881349 - DNA, 25 bp, Homo sapien
tcatgggcttctcagtacggactcg

SEQ ID NO: 881350 - DNA, 25 bp, Homo sapien
gccttatgtcctgctgctattgttt

SEQ ID NO: 881351 - DNA, 25 bp, Homo sapien
gaagccttatgtcctgctgctattg

SEQ ID NO: 881352 - DNA, 25 bp, Homo sapien
cttatgtcctgctgctattgtttgg

SEQ ID NO: 881353 - DNA, 25 bp, Homo sapien
ctgaagccttatgtcctgctgctat

SEQ ID NO: 881354 - DNA, 25 bp, Homo sapien
ccataacagctgctttgaggtcatc

SEQ ID NO: 881355 - DNA, 25 bp, Homo sapien
aaaactgtccataacagctgctttg

SEQ ID NO: 881356 - DNA, 25 bp, Homo sapien
actgtccataacagctgctttgagg

SEQ ID NO: 881357 - DNA, 25 bp, Homo sapien
tgtccataacagctgctttgaggtc

SEQ ID NO: 881358 - DNA, 25 bp, Homo sapien
ctttctggtattttattcctgtcag

SEQ ID NO: 881359 - DNA, 25 bp, Homo sapien
ggtattttattcctgtcagtttgca

SEQ ID NO: 881360 - DNA, 25 bp, Homo sapien
tttctggtattttattcctgtcagt

SEQ ID NO: 881361 - DNA, 25 bp, Homo sapien
ctggtattttattcctgtcagtttg

SEQ ID NO: 881362 - DNA, 25 bp, Homo sapien
gaagctcttaggagcagcctgaacg

SEQ ID NO: 881363 - DNA, 25 bp, Homo sapien
ctgaccccgacttcacttagggcgg

SEQ ID NO: 881364 - DNA, 25 bp, Homo sapien
tctgccatttgcgaggagggttcac

SEQ ID NO: 881365 - DNA, 25 bp, Homo sapien
tagggcggtcgcgtagatatgaact

SEQ ID NO: 881366 - DNA, 25 bp, Homo sapien
gaggaagggcagactctccacacca

SEQ ID NO: 881367 - DNA, 25 bp, Homo sapien
ggaagggcagactctccacaccagg

SEQ ID NO: 881368 - DNA, 25 bp, Homo sapien
accccagcactaccagacgaggaag

SEQ ID NO: 881369 - DNA, 25 bp, Homo sapien
agcactaccagacgaggaagggcag

SEQ ID NO: 881370 - DNA, 25 bp, Homo sapien
tcgttgaggttgaacatccgcttcc

SEQ ID NO: 881371 - DNA, 25 bp, Homo sapien
ttttctcgtaagcaaacgtgggcac

SEQ ID NO: 881372 - DNA, 25 bp, Homo sapien
tctccaagagctcggtcatgaagga

SEQ ID NO: 881373 - DNA, 25 bp, Homo sapien
catgaaggagatatagacgatggcc

SEQ ID NO: 881374 - DNA, 25 bp, Homo sapien
tgggcgtaggtgatcacccttttcc

SEQ ID NO: 881375 - DNA, 25 bp, Homo sapien
ggtcttccctctcggagcgcaaggg

SEQ ID NO: 881376 - DNA, 25 bp, Homo sapien
ttcaaaccgcgccatcctcctgggt

SEQ ID NO: 881377 - DNA, 25 bp, Homo sapien
aatagggagacacctcttccgcgct

SEQ ID NO: 881378 - DNA, 25 bp, Homo sapien
tggtccacttcgcactcctcttctt

SEQ ID NO: 881379 - DNA, 25 bp, Homo sapien
aagtccagcaccgtagtgtccacgc

SEQ ID NO: 881380 - DNA, 25 bp, Homo sapien
cagggacaggtctgcgacgaagtcc

SEQ ID NO: 881381 - DNA, 25 bp, Homo sapien
tgtccacgcagctctccggataggc

SEQ ID NO: 881382 - DNA, 25 bp, Homo sapien
cgaagtcgcagaggagagggcgtct

SEQ ID NO: 881383 - DNA, 25 bp, Homo sapien
gctggtggggattcttaacagcctt

SEQ ID NO: 881384 - DNA, 25 bp, Homo sapien
tgcctctcatcggttttccgcaggg

SEQ ID NO: 881385 - DNA, 25 bp, Homo sapien
gccctgcctctcatcggttttccgc

SEQ ID NO: 881386 - DNA, 25 bp, Homo sapien
tctcatcggttttccgcagggaggg

SEQ ID NO: 881387 - DNA, 25 bp, Homo sapien
ggattattatactctagatttgatc

SEQ ID NO: 881388 - DNA, 25 bp, Homo sapien
ctggattattatactctagatttga

SEQ ID NO: 881389 - DNA, 25 bp, Homo sapien
tggattattatactctagatttgat

SEQ ID NO: 881390 - DNA, 25 bp, Homo sapien
tatggcttactggattaccctttac

SEQ ID NO: 881391 - DNA, 25 bp, Homo sapien
ctatggttgtatgaaagctctgatc

SEQ ID NO: 881392 - DNA, 25 bp, Homo sapien
tctgatctgaaatcctatggcttac

SEQ ID NO: 881393 - DNA, 25 bp, Homo sapien
gatctgaaatcctatggcttactgg

SEQ ID NO: 881394 - DNA, 25 bp, Homo sapien
ccatgatttgtactggcccacacat

SEQ ID NO: 881395 - DNA, 25 bp, Homo sapien
catcatcatggttttcggtcttcaa

SEQ ID NO: 881396 - DNA, 25 bp, Homo sapien
aaggtctcccctggtcatcatcaca

SEQ ID NO: 881397 - DNA, 25 bp, Homo sapien
ccaatcccatatactctttgcagag

SEQ ID NO: 881398 - DNA, 25 bp, Homo sapien
tgctactctggccccttttatatgt

SEQ ID NO: 881399 - DNA, 25 bp, Homo sapien
tgaatcttgattcaataaacctaaa

SEQ ID NO: 881400 - DNA, 25 bp, Homo sapien
tgaatgatataagtactctgaagtc

SEQ ID NO: 881401 - DNA, 25 bp, Homo sapien
gacagagaaggaagtacaatgcttg

SEQ ID NO: 881402 - DNA, 25 bp, Homo sapien
gactggcagcacaccaattctagag

SEQ ID NO: 881403 - DNA, 25 bp, Homo sapien
tacagaagtcattcttggaaccctg

SEQ ID NO: 881404 - DNA, 25 bp, Homo sapien
ttccatgcgtttttctgagaccaca

SEQ ID NO: 881405 - DNA, 25 bp, Homo sapien
ttgtgaatccttaatgactggcagc

SEQ ID NO: 881406 - DNA, 25 bp, Homo sapien
ttcaatttactactcctttcttctg

SEQ ID NO: 881407 - DNA, 25 bp, Homo sapien
ttcttcttctttcaatttactactc

SEQ ID NO: 881408 - DNA, 25 bp, Homo sapien
tcaatttactactcctttcttctgt

SEQ ID NO: 881409 - DNA, 25 bp, Homo sapien
cttcttctttcaatttactactcct

SEQ ID NO: 881410 - DNA, 25 bp, Homo sapien
ccctgaacagccaaattttgagttc

SEQ ID NO: 881411 - DNA, 25 bp, Homo sapien
taaccatgatcaagcaggctttcct

SEQ ID NO: 881412 - DNA, 25 bp, Homo sapien
gagttccaaaatggaatcgttaata

SEQ ID NO: 881413 - DNA, 25 bp, Homo sapien
tagaaacaaaaactatacgattatc

SEQ ID NO: 881414 - DNA, 25 bp, Homo sapien
tccatatcccaatgaatcagggaag

SEQ ID NO: 881415 - DNA, 25 bp, Homo sapien
ccatatcccaatgaatcagggaagg

SEQ ID NO: 881416 - DNA, 25 bp, Homo sapien
gcccattctctgaggatcatattcc

SEQ ID NO: 881417 - DNA, 25 bp, Homo sapien
gagcccattctctgaggatcatatt

SEQ ID NO: 881418 - DNA, 25 bp, Homo sapien
aatgttatgttcataggatccttag

SEQ ID NO: 881419 - DNA, 25 bp, Homo sapien
catagagcacaattcatactcctcc

SEQ ID NO: 881420 - DNA, 25 bp, Homo sapien
ctttggttctttccatagagcacaa

SEQ ID NO: 881421 - DNA, 25 bp, Homo sapien
ggtcatattaagcttattattccca

SEQ ID NO: 881422 - DNA, 25 bp, Homo sapien
tctttccatagagcacaattcatac

SEQ ID NO: 881423 - DNA, 25 bp, Homo sapien
ctacagtgtatttgtgatttcatgg

SEQ ID NO: 881424 - DNA, 25 bp, Homo sapien
cagtgtatttgtgatttcatggata

SEQ ID NO: 881425 - DNA, 25 bp, Homo sapien
ggatattgtgaacatcacagatcca

SEQ ID NO: 881426 - DNA, 25 bp, Homo sapien
gatattgtgaacatcacagatccac

SEQ ID NO: 881427 - DNA, 25 bp, Homo sapien
tcatgcagctctgaagcgggtcttg

SEQ ID NO: 881428 - DNA, 25 bp, Homo sapien
catgcagctctgaagcgggtcttgc

SEQ ID NO: 881429 - DNA, 25 bp, Homo sapien
ttcatgcagctctgaagcgggtctt

SEQ ID NO: 881430 - DNA, 25 bp, Homo sapien
atgcagctctgaagcgggtcttgca

SEQ ID NO: 881431 - DNA, 25 bp, Homo sapien
ttaggctgctgcagtcatatccttg

SEQ ID NO: 881432 - DNA, 25 bp, Homo sapien
catatccttgagatactctgtgtga

SEQ ID NO: 881433 - DNA, 25 bp, Homo sapien
aagttggcccttacgtgtagaatca

SEQ ID NO: 881434 - DNA, 25 bp, Homo sapien
tactcaaaagaaaaccgaacatcag

SEQ ID NO: 881435 - DNA, 25 bp, Homo sapien
agacaagagataggttgggaagtga

SEQ ID NO: 881436 - DNA, 25 bp, Homo sapien
taaatgggtaaaagacaagagatag

SEQ ID NO: 881437 - DNA, 25 bp, Homo sapien
ctaaatgggtaaaagacaagagata

SEQ ID NO: 881438 - DNA, 25 bp, Homo sapien
caagagataggttgggaagtgagga

SEQ ID NO: 881439 - DNA, 25 bp, Homo sapien
aaattttggcctgccatcttgttag

SEQ ID NO: 881440 - DNA, 25 bp, Homo sapien
taaagccatgaaggaattacagaga

SEQ ID NO: 881441 - DNA, 25 bp, Homo sapien
tgttagcccacaaagagcattggct

SEQ ID NO: 881442 - DNA, 25 bp, Homo sapien
cagtggctcacatgcttcgttcagt

SEQ ID NO: 881443 - DNA, 25 bp, Homo sapien
tctgtgagaatgttgctattctgtc

SEQ ID NO: 881444 - DNA, 25 bp, Homo sapien
gagaatgttgctattctgtccattc

SEQ ID NO: 881445 - DNA, 25 bp, Homo sapien
ctgtccattctgcttttctgtggag

SEQ ID NO: 881446 - DNA, 25 bp, Homo sapien
aatgttgctattctgtccattctgc

SEQ ID NO: 881447 - DNA, 25 bp, Homo sapien
tatatgttttagcagaaagtgtgtg

SEQ ID NO: 881448 - DNA, 25 bp, Homo sapien
ttggctccaattggcaatagagtca

SEQ ID NO: 881449 - DNA, 25 bp, Homo sapien
gatctttgctatatttgttatagcc

SEQ ID NO: 881450 - DNA, 25 bp, Homo sapien
gctccaattggcaatagagtcaaag

SEQ ID NO: 881451 - DNA, 25 bp, Homo sapien
agatgctacacagatctttgctata

SEQ ID NO: 881452 - DNA, 25 bp, Homo sapien
tattcatctccacatgactgtgcca

SEQ ID NO: 881453 - DNA, 25 bp, Homo sapien
tcatattcatctccacatgactgtg

SEQ ID NO: 881454 - DNA, 25 bp, Homo sapien
catattcatctccacatgactgtgc

SEQ ID NO: 881455 - DNA, 25 bp, Homo sapien
catcatattcatctccacatgactg

SEQ ID NO: 881456 - DNA, 25 bp, Homo sapien
agagagttagtctgttgcattacca

SEQ ID NO: 881457 - DNA, 25 bp, Homo sapien
attgtcagctgttagagagttagtc

SEQ ID NO: 881458 - DNA, 25 bp, Homo sapien
gtggtttctcattgtcagctgttag

SEQ ID NO: 881459 - DNA, 25 bp, Homo sapien
ttaccagaactagagatcctgtggg

SEQ ID NO: 881460 - DNA, 25 bp, Homo sapien
ttcctgattggtcctacttccagag

SEQ ID NO: 881461 - DNA, 25 bp, Homo sapien
ttcctttcctgattggtcctacttc

SEQ ID NO: 881462 - DNA, 25 bp, Homo sapien
gattggtcctacttccagagtcttc

SEQ ID NO: 881463 - DNA, 25 bp, Homo sapien
ctgattggtcctacttccagagtct

SEQ ID NO: 881464 - DNA, 25 bp, Homo sapien
attttattcgcaaattcttgccatt

SEQ ID NO: 881465 - DNA, 25 bp, Homo sapien
aattttattcgcaaattcttgccat

SEQ ID NO: 881466 - DNA, 25 bp, Homo sapien
gaaaggcaatcacaaactggcctgg

SEQ ID NO: 881467 - DNA, 25 bp, Homo sapien
aaggcaatcacaaactggcctggaa

SEQ ID NO: 881468 - DNA, 25 bp, Homo sapien
gtgaaaggcaatcacaaactggcct

SEQ ID NO: 881469 - DNA, 25 bp, Homo sapien
cctggaatcaattgatagggagaat

SEQ ID NO: 881470 - DNA, 25 bp, Homo sapien
ttgggatgcggctgctcggcagcag

SEQ ID NO: 881471 - DNA, 25 bp, Homo sapien
gtcttagcaatttgggtccgctcat

SEQ ID NO: 881472 - DNA, 25 bp, Homo sapien
gcagcagtcttagcaatttgggtcc

SEQ ID NO: 881473 - DNA, 25 bp, Homo sapien
tgctcggcagcagtcttagcaattt

SEQ ID NO: 881474 - DNA, 25 bp, Homo sapien
taacaaagcttgtgcgtgtttgtac

SEQ ID NO: 881475 - DNA, 25 bp, Homo sapien
gtagctgtgggagtcccgagaatcc

SEQ ID NO: 881476 - DNA, 25 bp, Homo sapien
ttgtacagctggactggtagctgtg

SEQ ID NO: 881477 - DNA, 25 bp, Homo sapien
gtgggagtcccgagaatcccacagc

SEQ ID NO: 881478 - DNA, 25 bp, Homo sapien
cataataataagtgcccaaaggtca

SEQ ID NO: 881479 - DNA, 25 bp, Homo sapien
catctgtagagcatattaaaggcaa

SEQ ID NO: 881480 - DNA, 25 bp, Homo sapien
aacagtgggtagagatctctgaggc

SEQ ID NO: 881481 - DNA, 25 bp, Homo sapien
aaatatctgaggaaggatgttgcca

SEQ ID NO: 881482 - DNA, 25 bp, Homo sapien
gacattcagactgatttaggatgag

SEQ ID NO: 881483 - DNA, 25 bp, Homo sapien
tgccttgttgctgatcatagtatgc

SEQ ID NO: 881484 - DNA, 25 bp, Homo sapien
tatatgaaagcatgtaatccattct

SEQ ID NO: 881485 - DNA, 25 bp, Homo sapien
taaaaaggcaaatggagcttacttc

SEQ ID NO: 881486 - DNA, 25 bp, Homo sapien
tacaactcgtcttattaatttattg

SEQ ID NO: 881487 - DNA, 25 bp, Homo sapien
caccaggattaacagggtatttgca

SEQ ID NO: 881488 - DNA, 25 bp, Homo sapien
gttgatgtggctagcagtctttcag

SEQ ID NO: 881489 - DNA, 25 bp, Homo sapien
cttccaaagtattggttgatgtggc

SEQ ID NO: 881490 - DNA, 25 bp, Homo sapien
taaagacattcctgatcactatggc

SEQ ID NO: 881491 - DNA, 25 bp, Homo sapien
tagccctacatgtcccatatttgtc

SEQ ID NO: 881492 - DNA, 25 bp, Homo sapien
aagacagatttcaggttcagttacc

SEQ ID NO: 881493 - DNA, 25 bp, Homo sapien
aacatcagtggtagtccctctagcc

SEQ ID NO: 881494 - DNA, 25 bp, Homo sapien
atatggagctgtttagtttgggccc

SEQ ID NO: 881495 - DNA, 25 bp, Homo sapien
gatgcataataaggtactccacaga

SEQ ID NO: 881496 - DNA, 25 bp, Homo sapien
gcttaagctgtcattcactgacggg

SEQ ID NO: 881497 - DNA, 25 bp, Homo sapien
ttcttctacactctttaaatgatgc

SEQ ID NO: 881498 - DNA, 25 bp, Homo sapien
tgaagggtttcaataagatcagttt

SEQ ID NO: 881499 - DNA, 25 bp, Homo sapien
tggtttaggctgaagggtttcaata

SEQ ID NO: 881500 - DNA, 25 bp, Homo sapien
ttaggctgaagggtttcaataagat

SEQ ID NO: 881501 - DNA, 25 bp, Homo sapien
tcagaaggaaccatgtttttgatta

SEQ ID NO: 881502 - DNA, 25 bp, Homo sapien
aatgaattccaagtattctctgcta

SEQ ID NO: 881503 - DNA, 25 bp, Homo sapien
gaatgaattccaagtattctctgct

SEQ ID NO: 881504 - DNA, 25 bp, Homo sapien
tagaatgaattccaagtattctctg

SEQ ID NO: 881505 - DNA, 25 bp, Homo sapien
atgaattccaagtattctctgctac

SEQ ID NO: 881506 - DNA, 25 bp, Homo sapien
gcaggtgctgctgattagaccctag

SEQ ID NO: 881507 - DNA, 25 bp, Homo sapien
gctttatgcctgcatctagctccaa

SEQ ID NO: 881508 - DNA, 25 bp, Homo sapien
gctgattagaccctagctttatgcc

SEQ ID NO: 881509 - DNA, 25 bp, Homo sapien
tctggctcatactgcaggtgctgct

SEQ ID NO: 881510 - DNA, 25 bp, Homo sapien
taaggtaggaggtaagatcctcttc

SEQ ID NO: 881511 - DNA, 25 bp, Homo sapien
gtgtaaggtaggaggtaagatcctc

SEQ ID NO: 881512 - DNA, 25 bp, Homo sapien
ataaggcagttgaagcatagggaag

SEQ ID NO: 881513 - DNA, 25 bp, Homo sapien
aaggcagttgaagcatagggaagtt

SEQ ID NO: 881514 - DNA, 25 bp, Homo sapien
ctaggttttcatccaaggtgaccat

SEQ ID NO: 881515 - DNA, 25 bp, Homo sapien
gaaacagctgtacttgttatcacac

SEQ ID NO: 881516 - DNA, 25 bp, Homo sapien
ttttatagaaacagctgtacttgtt

SEQ ID NO: 881517 - DNA, 25 bp, Homo sapien
cagctgtacttgttatcacactctg

SEQ ID NO: 881518 - DNA, 25 bp, Homo sapien
gtacttgttatcacactctgccaca

SEQ ID NO: 881519 - DNA, 25 bp, Homo sapien
ggtgcatgataatgctgacaagcat

SEQ ID NO: 881520 - DNA, 25 bp, Homo sapien
caagggtgcatgataatgctgacaa

SEQ ID NO: 881521 - DNA, 25 bp, Homo sapien
aagaaacaagggtgcatgataatgc

SEQ ID NO: 881522 - DNA, 25 bp, Homo sapien
aacaagggtgcatgataatgctgac

SEQ ID NO: 881523 - DNA, 25 bp, Homo sapien
caaaactgtggctgagttgaagtgg

SEQ ID NO: 881524 - DNA, 25 bp, Homo sapien
aaactgtggctgagttgaagtggat

SEQ ID NO: 881525 - DNA, 25 bp, Homo sapien
aggccaaaggcacaccaaaccacac

SEQ ID NO: 881526 - DNA, 25 bp, Homo sapien
tatattaattccagacacccggtgg

SEQ ID NO: 881527 - DNA, 25 bp, Homo sapien
actgactggcaacttgtagaaaata

SEQ ID NO: 881528 - DNA, 25 bp, Homo sapien
ttaagttggcataaactgactggca

SEQ ID NO: 881529 - DNA, 25 bp, Homo sapien
cataaactgactggcaacttgtaga

SEQ ID NO: 881530 - DNA, 25 bp, Homo sapien
tggcataaactgactggcaacttgt

SEQ ID NO: 881531 - DNA, 25 bp, Homo sapien
tggctcttgccctttggaagtatta

SEQ ID NO: 881532 - DNA, 25 bp, Homo sapien
tgccctttggaagtattaaacttga

SEQ ID NO: 881533 - DNA, 25 bp, Homo sapien
ctttggaagtattaaacttgacttg

SEQ ID NO: 881534 - DNA, 25 bp, Homo sapien
gctcttgccctttggaagtattaaa

SEQ ID NO: 881535 - DNA, 25 bp, Homo sapien
cacctctctgagcaaagatttttat

SEQ ID NO: 881536 - DNA, 25 bp, Homo sapien
ctctgtgaatggcagttacaccatt

SEQ ID NO: 881537 - DNA, 25 bp, Homo sapien
catgtgcgagtgattatggcattcc

SEQ ID NO: 881538 - DNA, 25 bp, Homo sapien
cagtagttttgagatgataaacatc

SEQ ID NO: 881539 - DNA, 25 bp, Homo sapien
gataacttggcttcttcgcacagca

SEQ ID NO: 881540 - DNA, 25 bp, Homo sapien
cttcgcacagcagtagtcttctaaa

SEQ ID NO: 881541 - DNA, 25 bp, Homo sapien
ttggcttcttcgcacagcagtagtc

SEQ ID NO: 881542 - DNA, 25 bp, Homo sapien
tttagtgataacttggcttcttcgc

SEQ ID NO: 881543 - DNA, 25 bp, Homo sapien
tttgctactggtgaccacccagaca

SEQ ID NO: 881544 - DNA, 25 bp, Homo sapien
tactggtgaccacccagacacagtc

SEQ ID NO: 881545 - DNA, 25 bp, Homo sapien
tcctttgctactggtgaccacccag

SEQ ID NO: 881546 - DNA, 25 bp, Homo sapien
ctggtgaccacccagacacagtcat

SEQ ID NO: 881547 - DNA, 25 bp, Homo sapien
caaacagtgaagtattctaagaaca

SEQ ID NO: 881548 - DNA, 25 bp, Homo sapien
tacgaatacatagttgtctaaaaga

SEQ ID NO: 881549 - DNA, 25 bp, Homo sapien
tactataagaccatgatattacatc

SEQ ID NO: 881550 - DNA, 25 bp, Homo sapien
tccaaggcaatgttgtaggactcta

SEQ ID NO: 881551 - DNA, 25 bp, Homo sapien
cttcaagtgcaatagttccttcttc

SEQ ID NO: 881552 - DNA, 25 bp, Homo sapien
aatcataactcttcttagttgtcag

SEQ ID NO: 881553 - DNA, 25 bp, Homo sapien
gccctcttttactctgatgattgta

SEQ ID NO: 881554 - DNA, 25 bp, Homo sapien
tcccattggaatggaccaggatacc

SEQ ID NO: 881555 - DNA, 25 bp, Homo sapien
tgctgtttagtctgatgcgcttccc

SEQ ID NO: 881556 - DNA, 25 bp, Homo sapien
tgccgagagatctgctgtttagtct

SEQ ID NO: 881557 - DNA, 25 bp, Homo sapien
gatctgctgtttagtctgatgcgct

SEQ ID NO: 881558 - DNA, 25 bp, Homo sapien
tctgctgtttagtctgatgcgcttc

SEQ ID NO: 881559 - DNA, 25 bp, Homo sapien
caaaggattcactgttaaatactat

SEQ ID NO: 881560 - DNA, 25 bp, Homo sapien
tagttaaggcataattccagccctc

SEQ ID NO: 881561 - DNA, 25 bp, Homo sapien
ccctcaggaaacttatttggtcaag

SEQ ID NO: 881562 - DNA, 25 bp, Homo sapien
taagagacaagctttacaaacaggt

SEQ ID NO: 881563 - DNA, 25 bp, Homo sapien
ttctccaagggtcaaaatgctgctc

SEQ ID NO: 881564 - DNA, 25 bp, Homo sapien
gactaggttagtgcagcatgtgcca

SEQ ID NO: 881565 - DNA, 25 bp, Homo sapien
tcaagttcagcatgccgttccctgt

SEQ ID NO: 881566 - DNA, 25 bp, Homo sapien
cggtaagcccttaagagcagaaact

SEQ ID NO: 881567 - DNA, 25 bp, Homo sapien
cttatgacatgccacaagggaagga

SEQ ID NO: 881568 - DNA, 25 bp, Homo sapien
caacaaaactagaatggctgaggca

SEQ ID NO: 881569 - DNA, 25 bp, Homo sapien
aaagaggttggcctgcatccttcca

SEQ ID NO: 881570 - DNA, 25 bp, Homo sapien
tggacaagctacatttccagggctc

SEQ ID NO: 881571 - DNA, 25 bp, Homo sapien
accactggagtcactgccttggaaa

SEQ ID NO: 881572 - DNA, 25 bp, Homo sapien
ttggtaaccactggagtcactgcct

SEQ ID NO: 881573 - DNA, 25 bp, Homo sapien
tggtcctgaacttcctggtgctttt

SEQ ID NO: 881574 - DNA, 25 bp, Homo sapien
cctggtcctgaacttcctggtgctt

SEQ ID NO: 881575 - DNA, 25 bp, Homo sapien
cattattagtattctgcagggctga

SEQ ID NO: 881576 - DNA, 25 bp, Homo sapien
tcccagatgccattcgcattattag

SEQ ID NO: 881577 - DNA, 25 bp, Homo sapien
gctagctttgtggtaccactgtcca

SEQ ID NO: 881578 - DNA, 25 bp, Homo sapien
cactgtccacttcatatgtctctgg

SEQ ID NO: 881579 - DNA, 25 bp, Homo sapien
catgtactaaacagccaatgtggct

SEQ ID NO: 881580 - DNA, 25 bp, Homo sapien
gcagcatctgagtctaaacgaaata

SEQ ID NO: 881581 - DNA, 25 bp, Homo sapien
ggaggcattgaaacacccatgtact

SEQ ID NO: 881582 - DNA, 25 bp, Homo sapien
tctccatggtttgccactgctcagc

SEQ ID NO: 881583 - DNA, 25 bp, Homo sapien
catcactttagaataccactgggtt

SEQ ID NO: 881584 - DNA, 25 bp, Homo sapien
taaaacttaccacatgtcatgccaa

SEQ ID NO: 881585 - DNA, 25 bp, Homo sapien
aacacatccacaaagttaaaaggtg

SEQ ID NO: 881586 - DNA, 25 bp, Homo sapien
tgtcatgccaaaacatcactttaga

SEQ ID NO: 881587 - DNA, 25 bp, Homo sapien
aagctctcccacaactttgatgtta

SEQ ID NO: 881588 - DNA, 25 bp, Homo sapien
gttatcatatgcaatagggacacct

SEQ ID NO: 881589 - DNA, 25 bp, Homo sapien
ttatcatatgcaatagggacaccta

SEQ ID NO: 881590 - DNA, 25 bp, Homo sapien
tatcatatgcaatagggacacctaa

SEQ ID NO: 881591 - DNA, 25 bp, Homo sapien
tgagtagcgactgttcaccagcgca

SEQ ID NO: 881592 - DNA, 25 bp, Homo sapien
ctcagaatagcgaaggagctccgca

SEQ ID NO: 881593 - DNA, 25 bp, Homo sapien
cacaagcagcggcataagtcggcaa

SEQ ID NO: 881594 - DNA, 25 bp, Homo sapien
gaatgccggtgcgtttcctgttaag

SEQ ID NO: 881595 - DNA, 25 bp, Homo sapien
gcgcctctgagcaacctgcagccat

SEQ ID NO: 881596 - DNA, 25 bp, Homo sapien
cgcggcgcctctgagcaacctgcag

SEQ ID NO: 881597 - DNA, 25 bp, Homo sapien
gagacccatcagaagccgccgctgg

SEQ ID NO: 881598 - DNA, 25 bp, Homo sapien
tgccctaccagagacccatcagaag

SEQ ID NO: 881599 - DNA, 25 bp, Homo sapien
gcatgaattcaggaggaccatacac

SEQ ID NO: 881600 - DNA, 25 bp, Homo sapien
tcttccaagggtaggctcatactaa

SEQ ID NO: 881601 - DNA, 25 bp, Homo sapien
tctaaaaaagaatcgccgcacatcc

SEQ ID NO: 881602 - DNA, 25 bp, Homo sapien
ggtagtcacttaaaacattccagca

SEQ ID NO: 881603 - DNA, 25 bp, Homo sapien
ttccattaaatatcagctgtggtcc

SEQ ID NO: 881604 - DNA, 25 bp, Homo sapien
gagaaaccagtgaggcaatatattt

SEQ ID NO: 881605 - DNA, 25 bp, Homo sapien
tagtcctttggtgtctcattgcctc

SEQ ID NO: 881606 - DNA, 25 bp, Homo sapien
gaataattttagtggatgctcagga

SEQ ID NO: 881607 - DNA, 25 bp, Homo sapien
taaaaagtgataggatatgaagccc

SEQ ID NO: 881608 - DNA, 25 bp, Homo sapien
tgaacaagcctatttgcaacagagc

SEQ ID NO: 881609 - DNA, 25 bp, Homo sapien
tattctacaggaaaatgtgtggcct

SEQ ID NO: 881610 - DNA, 25 bp, Homo sapien
agtgccaatgcattctagaggtgac

SEQ ID NO: 881611 - DNA, 25 bp, Homo sapien
ggctttctgcaaatgggccatagta

SEQ ID NO: 881612 - DNA, 25 bp, Homo sapien
taccgtattagtgtccaactttggc

SEQ ID NO: 881613 - DNA, 25 bp, Homo sapien
caatgtgactatttgcaaatgggct

SEQ ID NO: 881614 - DNA, 25 bp, Homo sapien
taaatttgggctggaccaatgtgac

SEQ ID NO: 881615 - DNA, 25 bp, Homo sapien
ggtgtcgggggcaccaccgggcagc

SEQ ID NO: 881616 - DNA, 25 bp, Homo sapien
tggtgtcgggggcaccaccgggcag

SEQ ID NO: 881617 - DNA, 25 bp, Homo sapien
taatgtggccattaccttagtgagt

SEQ ID NO: 881618 - DNA, 25 bp, Homo sapien
tactagatccagtaggagaaaccga

SEQ ID NO: 881619 - DNA, 25 bp, Homo sapien
taatatctgcactgatagacaaggc

SEQ ID NO: 881620 - DNA, 25 bp, Homo sapien
gattgtacacaaaatggaaacgcta

SEQ ID NO: 881621 - DNA, 25 bp, Homo sapien
ctagtcgacaagtgagccaggaaga

SEQ ID NO: 881622 - DNA, 25 bp, Homo sapien
catcctcctctgttcataactggct

SEQ ID NO: 881623 - DNA, 25 bp, Homo sapien
cgatcccaatgcacgcgagagacat

SEQ ID NO: 881624 - DNA, 25 bp, Homo sapien
taactggctagtcgacaagtgagcc

SEQ ID NO: 881625 - DNA, 25 bp, Homo sapien
ttctttgtgactgcccggaggaact

SEQ ID NO: 881626 - DNA, 25 bp, Homo sapien
tgcagtgggtatagggaggaagttt

SEQ ID NO: 881627 - DNA, 25 bp, Homo sapien
tcaggatgcccccaataagtccaca

SEQ ID NO: 881628 - DNA, 25 bp, Homo sapien
taagtccacagatacagcaggctga

SEQ ID NO: 881629 - DNA, 25 bp, Homo sapien
ccagcaagcctctgagatagtaaca

SEQ ID NO: 881630 - DNA, 25 bp, Homo sapien
ctaaatttaggcaccaaacccagat

SEQ ID NO: 881631 - DNA, 25 bp, Homo sapien
taccgtgtgctaccatgctaggaac

SEQ ID NO: 881632 - DNA, 25 bp, Homo sapien
gtagacagagggagtataccacagt

SEQ ID NO: 881633 - DNA, 25 bp, Homo sapien
gggttactcattcccacatcagtga

SEQ ID NO: 881634 - DNA, 25 bp, Homo sapien
caactatcataggatccctggcaga

SEQ ID NO: 881635 - DNA, 25 bp, Homo sapien
ggactcctatgaactgacccctata

SEQ ID NO: 881636 - DNA, 25 bp, Homo sapien
cattcttctcgggaacacagactta

SEQ ID NO: 881637 - DNA, 25 bp, Homo sapien
atattccacaaatgccacaaagaag

SEQ ID NO: 881638 - DNA, 25 bp, Homo sapien
tcttgttcatacttatctccattag

SEQ ID NO: 881639 - DNA, 25 bp, Homo sapien
ggagtcagtgtcttgttcatactta

SEQ ID NO: 881640 - DNA, 25 bp, Homo sapien
cttgtcaggagtcagtgtcttgttc

SEQ ID NO: 881641 - DNA, 25 bp, Homo sapien
gtcaggagtcagtgtcttgttcata

SEQ ID NO: 881642 - DNA, 25 bp, Homo sapien
cagattgtgtcgatgctccaagaaa

SEQ ID NO: 881643 - DNA, 25 bp, Homo sapien
tcagattgtgtcgatgctccaagaa

SEQ ID NO: 881644 - DNA, 25 bp, Homo sapien
gatgccaaaattggtgtagaaagcc

SEQ ID NO: 881645 - DNA, 25 bp, Homo sapien
acttccaaacaggtagaaacctctg

SEQ ID NO: 881646 - DNA, 25 bp, Homo sapien
tcctgttcagttttgggtagtggcc

SEQ ID NO: 881647 - DNA, 25 bp, Homo sapien
aatgttcactgcttgataaatgagc

SEQ ID NO: 881648 - DNA, 25 bp, Homo sapien
cagttctgcaattttagcatagcgt

SEQ ID NO: 881649 - DNA, 25 bp, Homo sapien
agtggtcttggctttcagctttccc

SEQ ID NO: 881650 - DNA, 25 bp, Homo sapien
tcctcagtggtcttggctttcagct

SEQ ID NO: 881651 - DNA, 25 bp, Homo sapien
tctgcaattttagcatagcgtacat

SEQ ID NO: 881652 - DNA, 25 bp, Homo sapien
tcaaactagggttgatgaaaggtgt

SEQ ID NO: 881653 - DNA, 25 bp, Homo sapien
gagccagagcatcactagtggactc

SEQ ID NO: 881654 - DNA, 25 bp, Homo sapien
gaatgggtcaaactagggttgatga

SEQ ID NO: 881655 - DNA, 25 bp, Homo sapien
tgaaaggtgtgggagaaatattgag

SEQ ID NO: 881656 - DNA, 25 bp, Homo sapien
taactatgacagtttctctgagcag

SEQ ID NO: 881657 - DNA, 25 bp, Homo sapien
tgttgagtctgacatctgacctaga

SEQ ID NO: 881658 - DNA, 25 bp, Homo sapien
gcagttaggtactctgtaagcagaa

SEQ ID NO: 881659 - DNA, 25 bp, Homo sapien
ctggtgtaccttgggcattattgcc

SEQ ID NO: 881660 - DNA, 25 bp, Homo sapien
gacgagtctccgagctgcggcttgt

SEQ ID NO: 881661 - DNA, 25 bp, Homo sapien
gagcaccaagaggctcccaataatc

SEQ ID NO: 881662 - DNA, 25 bp, Homo sapien
agccctatctccagcacggagagca

SEQ ID NO: 881663 - DNA, 25 bp, Homo sapien
ccaataatctgaccgctggtgcaca

SEQ ID NO: 881664 - DNA, 25 bp, Homo sapien
tcagagagggaaatcaaccatctac

SEQ ID NO: 881665 - DNA, 25 bp, Homo sapien
gatcagagagggaaatcaaccatct

SEQ ID NO: 881666 - DNA, 25 bp, Homo sapien
agatcagagagggaaatcaaccatc

SEQ ID NO: 881667 - DNA, 25 bp, Homo sapien
atcagagagggaaatcaaccatcta

SEQ ID NO: 881668 - DNA, 25 bp, Homo sapien
tcttcaagagcgaggcattatccac

SEQ ID NO: 881669 - DNA, 25 bp, Homo sapien
tagaaggatcttcctgggttcggtg

SEQ ID NO: 881670 - DNA, 25 bp, Homo sapien
cctggcacgttcagatagggatcgt

SEQ ID NO: 881671 - DNA, 25 bp, Homo sapien
tgcgaagattgcacaccggtaccgg

SEQ ID NO: 881672 - DNA, 25 bp, Homo sapien
ggagctttgcttcccggagatccaa

SEQ ID NO: 881673 - DNA, 25 bp, Homo sapien
agatccaaagggaaccgctccgagt

SEQ ID NO: 881674 - DNA, 25 bp, Homo sapien
gcctactagaccctttcacagggtc

SEQ ID NO: 881675 - DNA, 25 bp, Homo sapien
ttattgccgaggagaggagctttgc

SEQ ID NO: 881676 - DNA, 25 bp, Homo sapien
agagcgggcggatgatattcagcac

SEQ ID NO: 881677 - DNA, 25 bp, Homo sapien
caggcagagcgggcggatgatattc

SEQ ID NO: 881678 - DNA, 25 bp, Homo sapien
tcgtggcaatgcgaagtgcttctgc

SEQ ID NO: 881679 - DNA, 25 bp, Homo sapien
tgttttcgtggcaatgcgaagtgct

SEQ ID NO: 881680 - DNA, 25 bp, Homo sapien
tgcagttgctttgtcgccagaaaaa

SEQ ID NO: 881681 - DNA, 25 bp, Homo sapien
agaaaaagcgaccttgtctgatggc

SEQ ID NO: 881682 - DNA, 25 bp, Homo sapien
tcctcctttctctcgagctgattct

SEQ ID NO: 881683 - DNA, 25 bp, Homo sapien
cacgctccttgcagttgctttgtcg

SEQ ID NO: 881684 - DNA, 25 bp, Homo sapien
ttggctggcctttgatccgccccgc

SEQ ID NO: 881685 - DNA, 25 bp, Homo sapien
caggaccagtactcttggctggcct

SEQ ID NO: 881686 - DNA, 25 bp, Homo sapien
tgtagatccaggaccagtactcttg

SEQ ID NO: 881687 - DNA, 25 bp, Homo sapien
aatgtatttgtagatccaggaccag

SEQ ID NO: 881688 - DNA, 25 bp, Homo sapien
cacacctccacggtgattttgttcc

SEQ ID NO: 881689 - DNA, 25 bp, Homo sapien
cgaagaagcagttgatgggggccac

SEQ ID NO: 881690 - DNA, 25 bp, Homo sapien
ggccacacctccacggtgattttgt

SEQ ID NO: 881691 - DNA, 25 bp, Homo sapien
ttccgtgtcgtagggcgaagaagca

SEQ ID NO: 881692 - DNA, 25 bp, Homo sapien
gctgcaaaagcactcacaacttgaa

SEQ ID NO: 881693 - DNA, 25 bp, Homo sapien
gcactcacaacttgaagttgcaaga

SEQ ID NO: 881694 - DNA, 25 bp, Homo sapien
tgaccgaggagccaaaaagtcggat

SEQ ID NO: 881695 - DNA, 25 bp, Homo sapien
aaaaagtcggatataaggctgcaaa

SEQ ID NO: 881696 - DNA, 25 bp, Homo sapien
cagtttgagcttcacaaaaatcatt

SEQ ID NO: 881697 - DNA, 25 bp, Homo sapien
ttgttcagtttgagcttcacaaaaa

SEQ ID NO: 881698 - DNA, 25 bp, Homo sapien
tttgagcttcacaaaaatcatttga

SEQ ID NO: 881699 - DNA, 25 bp, Homo sapien
atttgttcagtttgagcttcacaaa

SEQ ID NO: 881700 - DNA, 25 bp, Homo sapien
tttataagacaaaaggccctgagcc

SEQ ID NO: 881701 - DNA, 25 bp, Homo sapien
caaacaaagatagatccttcgggaa

SEQ ID NO: 881702 - DNA, 25 bp, Homo sapien
gaagagcacatggtatagacgtaga

SEQ ID NO: 881703 - DNA, 25 bp, Homo sapien
tgagggttgggcactacaacaagaa

SEQ ID NO: 881704 - DNA, 25 bp, Homo sapien
acagcagtggtgttagtgacctaag

SEQ ID NO: 881705 - DNA, 25 bp, Homo sapien
gcagtggtgttagtgacctaagtaa

SEQ ID NO: 881706 - DNA, 25 bp, Homo sapien
taagcaccgacttcgtagaaaccag

SEQ ID NO: 881707 - DNA, 25 bp, Homo sapien
gtggtgttagtgacctaagtaagca

SEQ ID NO: 881708 - DNA, 25 bp, Homo sapien
agagaggatgatgatcagataatca

SEQ ID NO: 881709 - DNA, 25 bp, Homo sapien
gatgatgatcagataatcatttcag

SEQ ID NO: 881710 - DNA, 25 bp, Homo sapien
gaggatgatgatcagataatcattt

SEQ ID NO: 881711 - DNA, 25 bp, Homo sapien
gagaggatgatgatcagataatcat

SEQ ID NO: 881712 - DNA, 25 bp, Homo sapien
aagatgttgaagataagccaaatat

SEQ ID NO: 881713 - DNA, 25 bp, Homo sapien
tgtgttaactttggagttatctgat

SEQ ID NO: 881714 - DNA, 25 bp, Homo sapien
tgttaactttggagttatctgatgg

SEQ ID NO: 881715 - DNA, 25 bp, Homo sapien
ttaactttggagttatctgatggta

SEQ ID NO: 881716 - DNA, 25 bp, Homo sapien
ataggctgtacaggaaagatgactg

SEQ ID NO: 881717 - DNA, 25 bp, Homo sapien
ctgagacttggcattttataaagaa

SEQ ID NO: 881718 - DNA, 25 bp, Homo sapien
gttccataggctgtacaggaaagat

SEQ ID NO: 881719 - DNA, 25 bp, Homo sapien
tacaggaaagatgactgggggagcc

SEQ ID NO: 881720 - DNA, 25 bp, Homo sapien
gtcatattcaactgctctgaacttg

SEQ ID NO: 881721 - DNA, 25 bp, Homo sapien
gagttcagtgtatcttgtatggcac

SEQ ID NO: 881722 - DNA, 25 bp, Homo sapien
gaacttgctgttcaaggattgatag

SEQ ID NO: 881723 - DNA, 25 bp, Homo sapien
caaggattgatagtctctgtagatt

SEQ ID NO: 881724 - DNA, 25 bp, Homo sapien
acagtcctccttgtgagacagacct

SEQ ID NO: 881725 - DNA, 25 bp, Homo sapien
tagatgtcatgtgttgctccaagga

SEQ ID NO: 881726 - DNA, 25 bp, Homo sapien
tagagttctagatgtcatgtgttgc

SEQ ID NO: 881727 - DNA, 25 bp, Homo sapien
gaccttggaccatgtagagttctag

SEQ ID NO: 881728 - DNA, 25 bp, Homo sapien
tatcagtgtcttcacattctcgtac

SEQ ID NO: 881729 - DNA, 25 bp, Homo sapien
cacaagtaccatctttctcagtatc

SEQ ID NO: 881730 - DNA, 25 bp, Homo sapien
atcagtgtcttcacattctcgtaca

SEQ ID NO: 881731 - DNA, 25 bp, Homo sapien
cattctcgtacacaagtaccatctt

SEQ ID NO: 881732 - DNA, 25 bp, Homo sapien
ctgttaatatcactcttagcaacat

SEQ ID NO: 881733 - DNA, 25 bp, Homo sapien
tatcactcttagcaacattggagga

SEQ ID NO: 881734 - DNA, 25 bp, Homo sapien
ttaatatcactcttagcaacattgg

SEQ ID NO: 881735 - DNA, 25 bp, Homo sapien
tcttagcaacattggaggattgttc

SEQ ID NO: 881736 - DNA, 25 bp, Homo sapien
caactgtatgacacagtggagcggc

SEQ ID NO: 881737 - DNA, 25 bp, Homo sapien
tgatgaaagtaattacatctgatcc

SEQ ID NO: 881738 - DNA, 25 bp, Homo sapien
agtaattacatctgatcctccagaa

SEQ ID NO: 881739 - DNA, 25 bp, Homo sapien
ctgtatgacacagtggagcggcagc

SEQ ID NO: 881740 - DNA, 25 bp, Homo sapien
cctctgagggatggggagtctccat

SEQ ID NO: 881741 - DNA, 25 bp, Homo sapien
atcctctgagggatggggagtctcc

SEQ ID NO: 881742 - DNA, 25 bp, Homo sapien
tcctctgagggatggggagtctcca

SEQ ID NO: 881743 - DNA, 25 bp, Homo sapien
aaatcctctgagggatggggagtct

SEQ ID NO: 881744 - DNA, 25 bp, Homo sapien
gactgctgactgattatggttgtgg

SEQ ID NO: 881745 - DNA, 25 bp, Homo sapien
cagagatgttgtgggctcagttcac

SEQ ID NO: 881746 - DNA, 25 bp, Homo sapien
taatcaactacaggcacgactcaga

SEQ ID NO: 881747 - DNA, 25 bp, Homo sapien
ccaaggtggcagtggcaatttctta

SEQ ID NO: 881748 - DNA, 25 bp, Homo sapien
ttatgctgaacagatggcaatgccc

SEQ ID NO: 881749 - DNA, 25 bp, Homo sapien
tacttatggacttgataacaggagc

SEQ ID NO: 881750 - DNA, 25 bp, Homo sapien
ttgaaagaaatcatcccaggttgct

SEQ ID NO: 881751 - DNA, 25 bp, Homo sapien
ccattacagaataagggccagaaca

SEQ ID NO: 881752 - DNA, 25 bp, Homo sapien
cggttcatatctttattttgttact

SEQ ID NO: 881753 - DNA, 25 bp, Homo sapien
ttcatatctttattttgttacttga

SEQ ID NO: 881754 - DNA, 25 bp, Homo sapien
gttcatatctttattttgttacttg

SEQ ID NO: 881755 - DNA, 25 bp, Homo sapien
gacggttcatatctttattttgtta

SEQ ID NO: 881756 - DNA, 25 bp, Homo sapien
aaatgggttttcacagatacggagc

SEQ ID NO: 881757 - DNA, 25 bp, Homo sapien
aaatcatgccaccttattccatggg

SEQ ID NO: 881758 - DNA, 25 bp, Homo sapien
gatacggagctgcagcttaacgtta

SEQ ID NO: 881759 - DNA, 25 bp, Homo sapien
gacaagggtatttagcaatccaggg

SEQ ID NO: 881760 - DNA, 25 bp, Homo sapien
ctgaaatcatctgataccatccacg

SEQ ID NO: 881761 - DNA, 25 bp, Homo sapien
tgttggctcagtcagagaatgcaat

SEQ ID NO: 881762 - DNA, 25 bp, Homo sapien
accatccacgaagggggtctagaga

SEQ ID NO: 881763 - DNA, 25 bp, Homo sapien
tggctcagtcagagaatgcaatgga

SEQ ID NO: 881764 - DNA, 25 bp, Homo sapien
tgtctgtaacttgctacaggcttcc

SEQ ID NO: 881765 - DNA, 25 bp, Homo sapien
acttgcccgctatgatctagacttg

SEQ ID NO: 881766 - DNA, 25 bp, Homo sapien
tcatttgcaaggtagctttctgcca

SEQ ID NO: 881767 - DNA, 25 bp, Homo sapien
catacataactgcaaaaaatgggac

SEQ ID NO: 881768 - DNA, 25 bp, Homo sapien
cccaaggttagttaaggcaggcaat

SEQ ID NO: 881769 - DNA, 25 bp, Homo sapien
gagatgatgcattagctcgccagta

SEQ ID NO: 881770 - DNA, 25 bp, Homo sapien
atggtgcaagcttgatgtgttgagc

SEQ ID NO: 881771 - DNA, 25 bp, Homo sapien
gactgataaagatagtgcttgatgg

SEQ ID NO: 881772 - DNA, 25 bp, Homo sapien
cctgttgtgtgttggactgggcata

SEQ ID NO: 881773 - DNA, 25 bp, Homo sapien
ataccagtcttttgggtttgtccag

SEQ ID NO: 881774 - DNA, 25 bp, Homo sapien
ttccaagagagtatcgacaagtctg

SEQ ID NO: 881775 - DNA, 25 bp, Homo sapien
ggtttaaggtatgctgaaatcgatg

SEQ ID NO: 881776 - DNA, 25 bp, Homo sapien
tttgtccagggaacatgtagccaag

SEQ ID NO: 881777 - DNA, 25 bp, Homo sapien
ggtctctcatgttcaagggatcctt

SEQ ID NO: 881778 - DNA, 25 bp, Homo sapien
ccatatctagctatttttgggggag

SEQ ID NO: 881779 - DNA, 25 bp, Homo sapien
ttggtctctcatgttcaagggatcc

SEQ ID NO: 881780 - DNA, 25 bp, Homo sapien
cagccttggtctctcatgttcaagg

SEQ ID NO: 881781 - DNA, 25 bp, Homo sapien
taccataatccttggaaacagacat

SEQ ID NO: 881782 - DNA, 25 bp, Homo sapien
ttaccataatccttggaaacagaca

SEQ ID NO: 881783 - DNA, 25 bp, Homo sapien
cttaccataatccttggaaacagac

SEQ ID NO: 881784 - DNA, 25 bp, Homo sapien
ctaactaactcatgttggacctgga

SEQ ID NO: 881785 - DNA, 25 bp, Homo sapien
acctgccatggtgcgtaagatttac

SEQ ID NO: 881786 - DNA, 25 bp, Homo sapien
tctaactctagggtcaacctgggtc

SEQ ID NO: 881787 - DNA, 25 bp, Homo sapien
ttcctggagcaagcctgaagattcc

SEQ ID NO: 881788 - DNA, 25 bp, Homo sapien
tcttggtcatttaaaagggtgtggc

SEQ ID NO: 881789 - DNA, 25 bp, Homo sapien
ggatggttgaaagcgtttggatcct

SEQ ID NO: 881790 - DNA, 25 bp, Homo sapien
tgtctctcagcaatggtaagctctc

SEQ ID NO: 881791 - DNA, 25 bp, Homo sapien
tgctgtcttcgtgatagtgtgtgag

SEQ ID NO: 881792 - DNA, 25 bp, Homo sapien
ggtttgtagctttcttgctatgggt

SEQ ID NO: 881793 - DNA, 25 bp, Homo sapien
aaggtttgtagctttcttgctatgg

SEQ ID NO: 881794 - DNA, 25 bp, Homo sapien
aggtttgtagctttcttgctatggg

SEQ ID NO: 881795 - DNA, 25 bp, Homo sapien
ccaaagggaagttcagttccatatc

SEQ ID NO: 881796 - DNA, 25 bp, Homo sapien
tgccaaagggaagttcagttccata

SEQ ID NO: 881797 - DNA, 25 bp, Homo sapien
aaagggaagttcagttccatatctc

SEQ ID NO: 881798 - DNA, 25 bp, Homo sapien
tttgccaaagggaagttcagttcca

SEQ ID NO: 881799 - DNA, 25 bp, Homo sapien
ctcccagatctttaaacacgggtat

SEQ ID NO: 881800 - DNA, 25 bp, Homo sapien
cagcctcctttgataattcctctgc

SEQ ID NO: 881801 - DNA, 25 bp, Homo sapien
gatctttaaacacgggtatgtttca

SEQ ID NO: 881802 - DNA, 25 bp, Homo sapien
tgcagctttaaatgtgaccactaac

SEQ ID NO: 881803 - DNA, 25 bp, Homo sapien
gaggtaccgccctgatggtcttgaa

SEQ ID NO: 881804 - DNA, 25 bp, Homo sapien
tacattctcgcaaacatacagtctc

SEQ ID NO: 881805 - DNA, 25 bp, Homo sapien
tctccgttaaaaaccatgtagagct

SEQ ID NO: 881806 - DNA, 25 bp, Homo sapien
gtggagtgatactagcacccctgtg

SEQ ID NO: 881807 - DNA, 25 bp, Homo sapien
cactatggctgctctatgggcaata

SEQ ID NO: 881808 - DNA, 25 bp, Homo sapien
tagaaggctagtgttataatccaga

SEQ ID NO: 881809 - DNA, 25 bp, Homo sapien
tgtccaccaagtagaagaccattcc

SEQ ID NO: 881810 - DNA, 25 bp, Homo sapien
ggcatttaagcagagatttcaagga

SEQ ID NO: 881811 - DNA, 25 bp, Homo sapien
cacattaagcactctaagagccgag

SEQ ID NO: 881812 - DNA, 25 bp, Homo sapien
cattaagcactctaagagccgagat

SEQ ID NO: 881813 - DNA, 25 bp, Homo sapien
tgccctttcggccggaaccgccatc

SEQ ID NO: 881814 - DNA, 25 bp, Homo sapien
taagcactctaagagccgagatagc

SEQ ID NO: 881815 - DNA, 25 bp, Homo sapien
ggttcaactaaagcgccagcctact

SEQ ID NO: 881816 - DNA, 25 bp, Homo sapien
tgggttcaactaaagcgccagccta

SEQ ID NO: 881817 - DNA, 25 bp, Homo sapien
ctgaaacgtgtgaaggaaaatgatc

SEQ ID NO: 881818 - DNA, 25 bp, Homo sapien
gtacctgggttcaactaaagcgcca

SEQ ID NO: 881819 - DNA, 25 bp, Homo sapien
cagtcactgatgaaccacataaatg

SEQ ID NO: 881820 - DNA, 25 bp, Homo sapien
gccgtacatttaatctatagtcatg

SEQ ID NO: 881821 - DNA, 25 bp, Homo sapien
aatagttaaataggcttctctctca

SEQ ID NO: 881822 - DNA, 25 bp, Homo sapien
cagttttctcctttagccgtacatt

SEQ ID NO: 881823 - DNA, 25 bp, Homo sapien
tacattaattagagtaggctgtctg

SEQ ID NO: 881824 - DNA, 25 bp, Homo sapien
tgttgacttgaaaggtataatggac

SEQ ID NO: 881825 - DNA, 25 bp, Homo sapien
taaaagggctcctgattagtggatg

SEQ ID NO: 881826 - DNA, 25 bp, Homo sapien
gccatcttcagcatattccaagatt

SEQ ID NO: 881827 - DNA, 25 bp, Homo sapien
ttattctgaagtggctttctctttg

SEQ ID NO: 881828 - DNA, 25 bp, Homo sapien
ttctctttgccagataagaaaaggc

SEQ ID NO: 881829 - DNA, 25 bp, Homo sapien
ctttctctttgccagataagaaaag

SEQ ID NO: 881830 - DNA, 25 bp, Homo sapien
ctctttgccagataagaaaaggcat

SEQ ID NO: 881831 - DNA, 25 bp, Homo sapien
ttgtcaaagtctaagttcaacaatg

SEQ ID NO: 881832 - DNA, 25 bp, Homo sapien
cttgtcaaagtctaagttcaacaat

SEQ ID NO: 881833 - DNA, 25 bp, Homo sapien
tgtcaaagtctaagttcaacaatgt

SEQ ID NO: 881834 - DNA, 25 bp, Homo sapien
aaagttgtgcaggtcaagaagcgat

SEQ ID NO: 881835 - DNA, 25 bp, Homo sapien
actcatcaaatcagaaagttgtgca

SEQ ID NO: 881836 - DNA, 25 bp, Homo sapien
cagaaagttgtgcaggtcaagaagc

SEQ ID NO: 881837 - DNA, 25 bp, Homo sapien
caaatcagaaagttgtgcaggtcaa

SEQ ID NO: 881838 - DNA, 25 bp, Homo sapien
gaataaagctattgtgtcaaacatt

SEQ ID NO: 881839 - DNA, 25 bp, Homo sapien
ttgtaatgcatatcctcatagtaat

SEQ ID NO: 881840 - DNA, 25 bp, Homo sapien
tatattgtttcgtttctaagatcac

SEQ ID NO: 881841 - DNA, 25 bp, Homo sapien
tatttagccaatctcttattttacc

SEQ ID NO: 881842 - DNA, 25 bp, Homo sapien
taaccattgatgttgggcctagagg

SEQ ID NO: 881843 - DNA, 25 bp, Homo sapien
tggcaaaacaaccagcattgtctgc

SEQ ID NO: 881844 - DNA, 25 bp, Homo sapien
caagcacagactcttagtgaaagct

SEQ ID NO: 881845 - DNA, 25 bp, Homo sapien
aaaacctaagacatcaactgttgag

SEQ ID NO: 881846 - DNA, 25 bp, Homo sapien
taaacaccaaccaacttcgcagaat

SEQ ID NO: 881847 - DNA, 25 bp, Homo sapien
tgaatgcattcaggattgagcacca

SEQ ID NO: 881848 - DNA, 25 bp, Homo sapien
taatgtctccggtgagatcatggca

SEQ ID NO: 881849 - DNA, 25 bp, Homo sapien
gtcaaattgctctgtgatgaatgca

SEQ ID NO: 881850 - DNA, 25 bp, Homo sapien
taaggagatcgcagagaagctcctg

SEQ ID NO: 881851 - DNA, 25 bp, Homo sapien
ctaaggagatcgcagagaagctcct

SEQ ID NO: 881852 - DNA, 25 bp, Homo sapien
cattgcttcttctatttgctctttg

SEQ ID NO: 881853 - DNA, 25 bp, Homo sapien
ctatttgctctttgtctttctccat

SEQ ID NO: 881854 - DNA, 25 bp, Homo sapien
ttctatttgctctttgtctttctcc

SEQ ID NO: 881855 - DNA, 25 bp, Homo sapien
gcttcttctatttgctctttgtctt

SEQ ID NO: 881856 - DNA, 25 bp, Homo sapien
tttaatctactggatatgcccatag

SEQ ID NO: 881857 - DNA, 25 bp, Homo sapien
gatatgcccatagagtttgcaggaa

SEQ ID NO: 881858 - DNA, 25 bp, Homo sapien
ttgcaggaataacggctggttctgg

SEQ ID NO: 881859 - DNA, 25 bp, Homo sapien
gagtttgcaggaataacggctggtt

SEQ ID NO: 881860 - DNA, 25 bp, Homo sapien
agacagtgacgtaaccctctgctca

SEQ ID NO: 881861 - DNA, 25 bp, Homo sapien
gacgtaaccctctgctcaaggctga

SEQ ID NO: 881862 - DNA, 25 bp, Homo sapien
ttagctctctaagagaagctgcctt

SEQ ID NO: 881863 - DNA, 25 bp, Homo sapien
taaccctctgctcaaggctgacttc

SEQ ID NO: 881864 - DNA, 25 bp, Homo sapien
ctaagcacttgtgcctttttctcca

SEQ ID NO: 881865 - DNA, 25 bp, Homo sapien
aagcacttgtgcctttttctccaac

SEQ ID NO: 881866 - DNA, 25 bp, Homo sapien
taagcacttgtgcctttttctccaa

SEQ ID NO: 881867 - DNA, 25 bp, Homo sapien
gctgggaagttggaggagcatggat

SEQ ID NO: 881868 - DNA, 25 bp, Homo sapien
agttggaggagcatggatctcttgt

SEQ ID NO: 881869 - DNA, 25 bp, Homo sapien
ggagcatggatctcttgtgggaaga

SEQ ID NO: 881870 - DNA, 25 bp, Homo sapien
gaagttggaggagcatggatctctt

SEQ ID NO: 881871 - DNA, 25 bp, Homo sapien
gtccctggctttgttacagctatat

SEQ ID NO: 881872 - DNA, 25 bp, Homo sapien
ctttgttacagctatatcatcatgg

SEQ ID NO: 881873 - DNA, 25 bp, Homo sapien
tacagctatatcatcatggtactta

SEQ ID NO: 881874 - DNA, 25 bp, Homo sapien
tatatcatcatggtacttattagcc

SEQ ID NO: 881875 - DNA, 25 bp, Homo sapien
ggcctttcccacagagtctgagaaa

SEQ ID NO: 881876 - DNA, 25 bp, Homo sapien
gactggattgccgtaattaaaacaa

SEQ ID NO: 881877 - DNA, 25 bp, Homo sapien
ctgccattgactggattgccgtaat

SEQ ID NO: 881878 - DNA, 25 bp, Homo sapien
gaagagcctgccattgactggattg

SEQ ID NO: 881879 - DNA, 25 bp, Homo sapien
agaaagaagagcctgccattgactg

SEQ ID NO: 881880 - DNA, 25 bp, Homo sapien
ccataaatgctaattgatgggttag

SEQ ID NO: 881881 - DNA, 25 bp, Homo sapien
ctgggttgacaccaattagtgctcc

SEQ ID NO: 881882 - DNA, 25 bp, Homo sapien
tatccacgtgaagtcactgtcatgc

SEQ ID NO: 881883 - DNA, 25 bp, Homo sapien
gatgggttagttgataactgcaaaa

SEQ ID NO: 881884 - DNA, 25 bp, Homo sapien
tctccctcttgcaagttaaagctat

SEQ ID NO: 881885 - DNA, 25 bp, Homo sapien
tgtgcagataaacaagcttaatact

SEQ ID NO: 881886 - DNA, 25 bp, Homo sapien
aactagctgttaggtttatgtaaag

SEQ ID NO: 881887 - DNA, 25 bp, Homo sapien
ctttgtccttcccataaactagctg

SEQ ID NO: 881888 - DNA, 25 bp, Homo sapien
tttcccagatgcttggctcagtgtg

SEQ ID NO: 881889 - DNA, 25 bp, Homo sapien
tctgggtgatccaagcctccccttg

SEQ ID NO: 881890 - DNA, 25 bp, Homo sapien
tgggtgatccaagcctccccttgtt

SEQ ID NO: 881891 - DNA, 25 bp, Homo sapien
atttcccagatgcttggctcagtgt

SEQ ID NO: 881892 - DNA, 25 bp, Homo sapien
ggcagttccagctgcgtagttctat

SEQ ID NO: 881893 - DNA, 25 bp, Homo sapien
ctacaccaatgttgtttaccattag

SEQ ID NO: 881894 - DNA, 25 bp, Homo sapien
gtttgactctttatcatgcctgaat

SEQ ID NO: 881895 - DNA, 25 bp, Homo sapien
ttcccataagcagagtttgactctt

SEQ ID NO: 881896 - DNA, 25 bp, Homo sapien
tcaatccgtggctttggaatgtccc

SEQ ID NO: 881897 - DNA, 25 bp, Homo sapien
tccgtggctttggaatgtccctcat

SEQ ID NO: 881898 - DNA, 25 bp, Homo sapien
gtatttcagatcaatccgtggcttt

SEQ ID NO: 881899 - DNA, 25 bp, Homo sapien
cagatcaatccgtggctttggaatg

SEQ ID NO: 881900 - DNA, 25 bp, Homo sapien
gagcaggagcactgttactcttgga

SEQ ID NO: 881901 - DNA, 25 bp, Homo sapien
actgagtgtctctgagtgttgctga

SEQ ID NO: 881902 - DNA, 25 bp, Homo sapien
cctttatggtaacaacatggctgca

SEQ ID NO: 881903 - DNA, 25 bp, Homo sapien
taggtcaggcgatcattgcaccact

SEQ ID NO: 881904 - DNA, 25 bp, Homo sapien
tccttagaaagaacatccgatcacc

SEQ ID NO: 881905 - DNA, 25 bp, Homo sapien
ggcagaggataaaacgtgatacgtc

SEQ ID NO: 881906 - DNA, 25 bp, Homo sapien
catgaacaagttaaatgccccagta

SEQ ID NO: 881907 - DNA, 25 bp, Homo sapien
tacttccagtcacaaaagggcagag

SEQ ID NO: 881908 - DNA, 25 bp, Homo sapien
tgagaagctcctagtgaaaccaatg

SEQ ID NO: 881909 - DNA, 25 bp, Homo sapien
aaatgcaagtgatcaggccagaccc

SEQ ID NO: 881910 - DNA, 25 bp, Homo sapien
tgagaaattctggtggtcgagccca

SEQ ID NO: 881911 - DNA, 25 bp, Homo sapien
gaaccactgccgtaatgattgcctg

SEQ ID NO: 881912 - DNA, 25 bp, Homo sapien
cactaaaccatacagcagcatgtgg

SEQ ID NO: 881913 - DNA, 25 bp, Homo sapien
gctgtggaccagtaaatacatatgc

SEQ ID NO: 881914 - DNA, 25 bp, Homo sapien
tatgttctacattacaggccatgaa

SEQ ID NO: 881915 - DNA, 25 bp, Homo sapien
taaaaaccctccagtgacatcattg

SEQ ID NO: 881916 - DNA, 25 bp, Homo sapien
ccagcataccaaatatcccagggtg

SEQ ID NO: 881917 - DNA, 25 bp, Homo sapien
taccattgccagcataccaaatatc

SEQ ID NO: 881918 - DNA, 25 bp, Homo sapien
gattattcttaaacgccaatttgaa

SEQ ID NO: 881919 - DNA, 25 bp, Homo sapien
cggccaagattattcttaaacgcca

SEQ ID NO: 881920 - DNA, 25 bp, Homo sapien
caaccagaggattgaacagaggagt

SEQ ID NO: 881921 - DNA, 25 bp, Homo sapien
ttatatctcgtagcatcacagcctc

SEQ ID NO: 881922 - DNA, 25 bp, Homo sapien
tagcatttatactgacccagggtcc

SEQ ID NO: 881923 - DNA, 25 bp, Homo sapien
agtgctttgtgggatcaccgcttac

SEQ ID NO: 881924 - DNA, 25 bp, Homo sapien
cccaagatgctgaagggagctgatg

SEQ ID NO: 881925 - DNA, 25 bp, Homo sapien
tcaagagacgatgaaaaagagtagc

SEQ ID NO: 881926 - DNA, 25 bp, Homo sapien
cacttaaaatgaaacggcaactgtt

SEQ ID NO: 881927 - DNA, 25 bp, Homo sapien
tgaaaacactaggtccatgcatgca

SEQ ID NO: 881928 - DNA, 25 bp, Homo sapien
tgactggccacagggtgtgtgcttg

SEQ ID NO: 881929 - DNA, 25 bp, Homo sapien
ccccactgatgaactgaagaggtca

SEQ ID NO: 881930 - DNA, 25 bp, Homo sapien
tggaaagcgggcagccgtgactggc

SEQ ID NO: 881931 - DNA, 25 bp, Homo sapien
ggctatgtagcctcagacgttctct

SEQ ID NO: 881932 - DNA, 25 bp, Homo sapien
ttatcagttaggctgtgctttcatc

SEQ ID NO: 881933 - DNA, 25 bp, Homo sapien
atcagttaggctgtgctttcatcag

SEQ ID NO: 881934 - DNA, 25 bp, Homo sapien
gataaaacccatcttggttatcagt

SEQ ID NO: 881935 - DNA, 25 bp, Homo sapien
gaggataaaacccatcttggttatc

SEQ ID NO: 881936 - DNA, 25 bp, Homo sapien
acacacacaccattacctcattttc

SEQ ID NO: 881937 - DNA, 25 bp, Homo sapien
gactgaaggtcttgtaacacatctc

SEQ ID NO: 881938 - DNA, 25 bp, Homo sapien
gtggagaatgcagttactctcaaaa

SEQ ID NO: 881939 - DNA, 25 bp, Homo sapien
tatacttcctcagaagtggagaatg

SEQ ID NO: 881940 - DNA, 25 bp, Homo sapien
ttagtcacagggtttttcattctgt

SEQ ID NO: 881941 - DNA, 25 bp, Homo sapien
tagtatcatggctacttgacatggc

SEQ ID NO: 881942 - DNA, 25 bp, Homo sapien
tttgatagtatcatggctacttgac

SEQ ID NO: 881943 - DNA, 25 bp, Homo sapien
aatttttgatagtatcatggctact

SEQ ID NO: 881944 - DNA, 25 bp, Homo sapien
cttgaggcttggtaaagatttaatt

SEQ ID NO: 881945 - DNA, 25 bp, Homo sapien
ccatttgttgctttgtgagtcgtac

SEQ ID NO: 881946 - DNA, 25 bp, Homo sapien
tcctcgatgaggaatttcatatgcc

SEQ ID NO: 881947 - DNA, 25 bp, Homo sapien
taacttttcagctagttccctccag

SEQ ID NO: 881948 - DNA, 25 bp, Homo sapien
gcttcttggatgagacgtgcgacta

SEQ ID NO: 881949 - DNA, 25 bp, Homo sapien
acccaggacatcagctaaaactttc

SEQ ID NO: 881950 - DNA, 25 bp, Homo sapien
acagatgtgagtaacccaggacatc

SEQ ID NO: 881951 - DNA, 25 bp, Homo sapien
actttccaatcataaactttttctg

SEQ ID NO: 881952 - DNA, 25 bp, Homo sapien
tctttgtctgcttgaatttgatcaa

SEQ ID NO: 881953 - DNA, 25 bp, Homo sapien
taaaggcaggacaatctgttcaaga

SEQ ID NO: 881954 - DNA, 25 bp, Homo sapien
gagagctattgtgtcccctttgaaa

SEQ ID NO: 881955 - DNA, 25 bp, Homo sapien
tctggttgtaaagacactatctgac

SEQ ID NO: 881956 - DNA, 25 bp, Homo sapien
tacaagtccaatcttacctctgagg

SEQ ID NO: 881957 - DNA, 25 bp, Homo sapien
caactggttcaccattgggaggctc

SEQ ID NO: 881958 - DNA, 25 bp, Homo sapien
tgggaggctccacttgaacacaaaa

SEQ ID NO: 881959 - DNA, 25 bp, Homo sapien
aaatagcctggcagattcgagagtc

SEQ ID NO: 881960 - DNA, 25 bp, Homo sapien
cagggttaccccatagttgctaaag

SEQ ID NO: 881961 - DNA, 25 bp, Homo sapien
tattcaaatcaaggcaggagcgggc

SEQ ID NO: 881962 - DNA, 25 bp, Homo sapien
tccgcaagttgtgtctgggcccatc

SEQ ID NO: 881963 - DNA, 25 bp, Homo sapien
gatttccaacaacgggctcacagtg

SEQ ID NO: 881964 - DNA, 25 bp, Homo sapien
actttgcaagctatggtgacctccg

SEQ ID NO: 881965 - DNA, 25 bp, Homo sapien
gttatttcttagttgagttatgtca

SEQ ID NO: 881966 - DNA, 25 bp, Homo sapien
aaatgggttagaagcagacagttga

SEQ ID NO: 881967 - DNA, 25 bp, Homo sapien
gacagttgattccagaatggatttg

SEQ ID NO: 881968 - DNA, 25 bp, Homo sapien
tcttagttgagttatgtcatccaaa

SEQ ID NO: 881969 - DNA, 25 bp, Homo sapien
caattgtgaagcaagtctgggtcct

SEQ ID NO: 881970 - DNA, 25 bp, Homo sapien
aaagcatccggccaattgtgaagca

SEQ ID NO: 881971 - DNA, 25 bp, Homo sapien
taccacgaagggtgaaagcatccgg

SEQ ID NO: 881972 - DNA, 25 bp, Homo sapien
gaagcattattaccacgaagggtga

SEQ ID NO: 881973 - DNA, 25 bp, Homo sapien
tcacaacagttataaattcccatac

SEQ ID NO: 881974 - DNA, 25 bp, Homo sapien
atcacaacagttataaattcccata

SEQ ID NO: 881975 - DNA, 25 bp, Homo sapien
aatcacaacagttataaattcccat

SEQ ID NO: 881976 - DNA, 25 bp, Homo sapien
actttgtgcaattcttcctgaccga

SEQ ID NO: 881977 - DNA, 25 bp, Homo sapien
gcaattcttcctgaccgaaaatgtt

SEQ ID NO: 881978 - DNA, 25 bp, Homo sapien
atactttgtgcaattcttcctgacc

SEQ ID NO: 881979 - DNA, 25 bp, Homo sapien
ttgtgcaattcttcctgaccgaaaa

SEQ ID NO: 881980 - DNA, 25 bp, Homo sapien
atctcgttcacctgtgacccctcct

SEQ ID NO: 881981 - DNA, 25 bp, Homo sapien
cacatctcgttcacctgtgacccct

SEQ ID NO: 881982 - DNA, 25 bp, Homo sapien
gaccacatctcgttcacctgtgacc

SEQ ID NO: 881983 - DNA, 25 bp, Homo sapien
acatctcgttcacctgtgacccctc

SEQ ID NO: 881984 - DNA, 25 bp, Homo sapien
taaagtcttagggacattatatgcc

SEQ ID NO: 881985 - DNA, 25 bp, Homo sapien
gaacttaaggatactagatactagc

SEQ ID NO: 881986 - DNA, 25 bp, Homo sapien
accagtctttgaacttaaggatact

SEQ ID NO: 881987 - DNA, 25 bp, Homo sapien
caagattataaagctactaagtagc

SEQ ID NO: 881988 - DNA, 25 bp, Homo sapien
tttgcatatcatctgacaaggctac

SEQ ID NO: 881989 - DNA, 25 bp, Homo sapien
catgagcagcaatctcaattgtgcc

SEQ ID NO: 881990 - DNA, 25 bp, Homo sapien
tgagaaaccccaagattaacaacat

SEQ ID NO: 881991 - DNA, 25 bp, Homo sapien
gtgtcccgagaccacttttattcag

SEQ ID NO: 881992 - DNA, 25 bp, Homo sapien
tttgttggatttaaacatgagcagc

SEQ ID NO: 881993 - DNA, 25 bp, Homo sapien
cccctgatatgtgtgatgtcttcct

SEQ ID NO: 881994 - DNA, 25 bp, Homo sapien
tcccctgatatgtgtgatgtcttcc

SEQ ID NO: 881995 - DNA, 25 bp, Homo sapien
cctgatatgtgtgatgtcttcctca

SEQ ID NO: 881996 - DNA, 25 bp, Homo sapien
ccctgatatgtgtgatgtcttcctc

SEQ ID NO: 881997 - DNA, 25 bp, Homo sapien
ctacttgcacttctgaggtgtctca

SEQ ID NO: 881998 - DNA, 25 bp, Homo sapien
tacttgcacttctgaggtgtctcag

SEQ ID NO: 881999 - DNA, 25 bp, Homo sapien
acttgcacttctgaggtgtctcagg

SEQ ID NO: 882000 - DNA, 25 bp, Homo sapien
gatgggtgccaagcaataggtgctt

SEQ ID NO: 882001 - DNA, 25 bp, Homo sapien
agtctggaaatgcaacctggcccta

SEQ ID NO: 882002 - DNA, 25 bp, Homo sapien
ggatgaagtgtgttttgcagcagtc

SEQ ID NO: 882003 - DNA, 25 bp, Homo sapien
tttgcagcagtctggaaatgcaacc

SEQ ID NO: 882004 - DNA, 25 bp, Homo sapien
ttggaactgatgaggaggtgctgct

SEQ ID NO: 882005 - DNA, 25 bp, Homo sapien
ctggaaccagggaacagtcgcacta

SEQ ID NO: 882006 - DNA, 25 bp, Homo sapien
gcttacaggtgctggtatagccaag

SEQ ID NO: 882007 - DNA, 25 bp, Homo sapien
cactacgggcactgaaattgccgga

SEQ ID NO: 882008 - DNA, 25 bp, Homo sapien
tagcttcaagttgttgtggaaggag

SEQ ID NO: 882009 - DNA, 25 bp, Homo sapien
tcaagttgttgtggaaggaggccca

SEQ ID NO: 882010 - DNA, 25 bp, Homo sapien
ccatagcttcaagttgttgtggaag

SEQ ID NO: 882011 - DNA, 25 bp, Homo sapien
aagttgttgtggaaggaggcccaga

SEQ ID NO: 882012 - DNA, 25 bp, Homo sapien
atgaatggcaaagtaaaacccttag

SEQ ID NO: 882013 - DNA, 25 bp, Homo sapien
atttaggtaaggtttgtggccagcg

SEQ ID NO: 882014 - DNA, 25 bp, Homo sapien
ccagcggttctctgatctgcggtga

SEQ ID NO: 882015 - DNA, 25 bp, Homo sapien
gatctgcggtgactcctcacttgct

SEQ ID NO: 882016 - DNA, 25 bp, Homo sapien
tttgtccaggctccaccctttgatt

SEQ ID NO: 882017 - DNA, 25 bp, Homo sapien
cctggtccaagcctccattctggag

SEQ ID NO: 882018 - DNA, 25 bp, Homo sapien
tatcttgataagctcctggtctgcc

SEQ ID NO: 882019 - DNA, 25 bp, Homo sapien
tctcagcctcgcctataatttcttc

SEQ ID NO: 882020 - DNA, 25 bp, Homo sapien
taccaatttactggtcataacgaca

SEQ ID NO: 882021 - DNA, 25 bp, Homo sapien
tcctaccaatttactggtcataacg

SEQ ID NO: 882022 - DNA, 25 bp, Homo sapien
tatttcctaccaatttactggtcat

SEQ ID NO: 882023 - DNA, 25 bp, Homo sapien
accaatttactggtcataacgacaa

SEQ ID NO: 882024 - DNA, 25 bp, Homo sapien
gctatatcccacaatgtagccccag

SEQ ID NO: 882025 - DNA, 25 bp, Homo sapien
tagccccagaacctcttaatggatg

SEQ ID NO: 882026 - DNA, 25 bp, Homo sapien
agatctgcctcctattatgtgtgta

SEQ ID NO: 882027 - DNA, 25 bp, Homo sapien
tagtcacctgtaagaatcatttccc

SEQ ID NO: 882028 - DNA, 25 bp, Homo sapien
atagaagtcactctaccaaacccgg

SEQ ID NO: 882029 - DNA, 25 bp, Homo sapien
tggaagtgagcccaagcttcttcag

SEQ ID NO: 882030 - DNA, 25 bp, Homo sapien
cagttcagacacatggttttagtga

SEQ ID NO: 882031 - DNA, 25 bp, Homo sapien
tttagtgaatagaagtcactctacc

SEQ ID NO: 882032 - DNA, 25 bp, Homo sapien
tccaaggcatagttttgtccctaag

SEQ ID NO: 882033 - DNA, 25 bp, Homo sapien
gtccctaagtcccatgaatatgtaa

SEQ ID NO: 882034 - DNA, 25 bp, Homo sapien
gcctttgtatcaacttctttggagc

SEQ ID NO: 882035 - DNA, 25 bp, Homo sapien
tagaattgccactatcaaaccaaga

SEQ ID NO: 882036 - DNA, 25 bp, Homo sapien
ttggattttgccgttccacagaaaa

SEQ ID NO: 882037 - DNA, 25 bp, Homo sapien
ctttggattttgccgttccacagaa

SEQ ID NO: 882038 - DNA, 25 bp, Homo sapien
cacagaaaagccttctttagagtat

SEQ ID NO: 882039 - DNA, 25 bp, Homo sapien
gattttgccgttccacagaaaagcc

SEQ ID NO: 882040 - DNA, 25 bp, Homo sapien
agaataatgaatgccccactgagga

SEQ ID NO: 882041 - DNA, 25 bp, Homo sapien
gtcagaaacgtctgcactaatgctg

SEQ ID NO: 882042 - DNA, 25 bp, Homo sapien
acaaaagtcagaaacgtctgcacta

SEQ ID NO: 882043 - DNA, 25 bp, Homo sapien
ggtgtttcctctctgtactgacatc

SEQ ID NO: 882044 - DNA, 25 bp, Homo sapien
ccttctattccttctacttctaatg

SEQ ID NO: 882045 - DNA, 25 bp, Homo sapien
ccttctacttctaatggcaatcctt

SEQ ID NO: 882046 - DNA, 25 bp, Homo sapien
tctattccttctacttctaatggca

SEQ ID NO: 882047 - DNA, 25 bp, Homo sapien
tccttctacttctaatggcaatcct

SEQ ID NO: 882048 - DNA, 25 bp, Homo sapien
tccaagtctgatagccctgccaaat

SEQ ID NO: 882049 - DNA, 25 bp, Homo sapien
cctctctccaagtctgatagccctg

SEQ ID NO: 882050 - DNA, 25 bp, Homo sapien
tgatagccctgccaaatcatctagc

SEQ ID NO: 882051 - DNA, 25 bp, Homo sapien
gccctgccaaatcatctagcttttg

SEQ ID NO: 882052 - DNA, 25 bp, Homo sapien
attcaaatccttcccattcttccaa

SEQ ID NO: 882053 - DNA, 25 bp, Homo sapien
tcattcaaatccttcccattcttcc

SEQ ID NO: 882054 - DNA, 25 bp, Homo sapien
caaatccttcccattcttccaaatt

SEQ ID NO: 882055 - DNA, 25 bp, Homo sapien
atccttcccattcttccaaatttag

SEQ ID NO: 882056 - DNA, 25 bp, Homo sapien
gtgtaaccacatggctgctgaagat

SEQ ID NO: 882057 - DNA, 25 bp, Homo sapien
tgtcctgattacttctgcagtggtg

SEQ ID NO: 882058 - DNA, 25 bp, Homo sapien
gaatgaagctgacatgttctctgac

SEQ ID NO: 882059 - DNA, 25 bp, Homo sapien
cctgcttggtctttggagtgcatcc

SEQ ID NO: 882060 - DNA, 25 bp, Homo sapien
gtgtagctctatctccttgccagca

SEQ ID NO: 882061 - DNA, 25 bp, Homo sapien
cagagacaaccaatctctggacatg

SEQ ID NO: 882062 - DNA, 25 bp, Homo sapien
gtagcagtggagtatcattttcaag

SEQ ID NO: 882063 - DNA, 25 bp, Homo sapien
gttgagtcccaccagttgtagcagt

SEQ ID NO: 882064 - DNA, 25 bp, Homo sapien
tctcatggcatttttgttggactca

SEQ ID NO: 882065 - DNA, 25 bp, Homo sapien
agccatttgcaatatcaaaaaatta

SEQ ID NO: 882066 - DNA, 25 bp, Homo sapien
gactcagtaacaatggagccaactt

SEQ ID NO: 882067 - DNA, 25 bp, Homo sapien
gagccaactttgactatcctaattt

SEQ ID NO: 882068 - DNA, 25 bp, Homo sapien
aaataagacaataaggatggcttct

SEQ ID NO: 882069 - DNA, 25 bp, Homo sapien
ccttttgagaatcaataattcatac

SEQ ID NO: 882070 - DNA, 25 bp, Homo sapien
caattacaactaatatccttttgag

SEQ ID NO: 882071 - DNA, 25 bp, Homo sapien
ataagacaataaggatggcttcttc

SEQ ID NO: 882072 - DNA, 25 bp, Homo sapien
ggagccccatgggtttcttaattgc

SEQ ID NO: 882073 - DNA, 25 bp, Homo sapien
aatcaaccacgggtttcttatgagc

SEQ ID NO: 882074 - DNA, 25 bp, Homo sapien
ttatgagcatctataggattcccac

SEQ ID NO: 882075 - DNA, 25 bp, Homo sapien
caaccacgggtttcttatgagcatc

SEQ ID NO: 882076 - DNA, 25 bp, Homo sapien
cgggtttcttatgagcatctatagg

SEQ ID NO: 882077 - DNA, 25 bp, Homo sapien
gaagcctggagccaactggcatggg

SEQ ID NO: 882078 - DNA, 25 bp, Homo sapien
tatactgcctgttgctaactgtaac

SEQ ID NO: 882079 - DNA, 25 bp, Homo sapien
tactgcctgttgctaactgtaacaa

SEQ ID NO: 882080 - DNA, 25 bp, Homo sapien
actgcctgttgctaactgtaacaac

SEQ ID NO: 882081 - DNA, 25 bp, Homo sapien
tattgtcccgactttcattcttctt

SEQ ID NO: 882082 - DNA, 25 bp, Homo sapien
caatctttagccatttttgtattgt

SEQ ID NO: 882083 - DNA, 25 bp, Homo sapien
ttttgtattgtcccgactttcattc

SEQ ID NO: 882084 - DNA, 25 bp, Homo sapien
tcaatctttagccatttttgtattg

SEQ ID NO: 882085 - DNA, 25 bp, Homo sapien
tattctttctgaccgccttttcttc

SEQ ID NO: 882086 - DNA, 25 bp, Homo sapien
tgcagcccctctattagaagttcgg

SEQ ID NO: 882087 - DNA, 25 bp, Homo sapien
ttatattctttctgaccgccttttc

SEQ ID NO: 882088 - DNA, 25 bp, Homo sapien
ttagaagttcggcattttgctccaa

SEQ ID NO: 882089 - DNA, 25 bp, Homo sapien
tttgttttcgcttctctatgatgct

SEQ ID NO: 882090 - DNA, 25 bp, Homo sapien
tctatgatgctgggtgtgtatacag

SEQ ID NO: 882091 - DNA, 25 bp, Homo sapien
gttttcgcttctctatgatgctggg

SEQ ID NO: 882092 - DNA, 25 bp, Homo sapien
tgttttcgcttctctatgatgctgg

SEQ ID NO: 882093 - DNA, 25 bp, Homo sapien
agcaatgaggtactcggttttcacg

SEQ ID NO: 882094 - DNA, 25 bp, Homo sapien
ccccagcaatgaggtactcggtttt

SEQ ID NO: 882095 - DNA, 25 bp, Homo sapien
gaaggttgaaggttctcaaccagga

SEQ ID NO: 882096 - DNA, 25 bp, Homo sapien
caaccaggaattaaagaaatagtgt

SEQ ID NO: 882097 - DNA, 25 bp, Homo sapien
gtcctctgctcttagtctgccatat

SEQ ID NO: 882098 - DNA, 25 bp, Homo sapien
ctctgctcttagtctgccatattct

SEQ ID NO: 882099 - DNA, 25 bp, Homo sapien
tagtcctctgctcttagtctgccat

SEQ ID NO: 882100 - DNA, 25 bp, Homo sapien
atagtcctctgctcttagtctgcca

SEQ ID NO: 882101 - DNA, 25 bp, Homo sapien
ttagaattcttcaggtaatatgacg

SEQ ID NO: 882102 - DNA, 25 bp, Homo sapien
attagaattcttcaggtaatatgac

SEQ ID NO: 882103 - DNA, 25 bp, Homo sapien
tagaattcttcaggtaatatgacga

SEQ ID NO: 882104 - DNA, 25 bp, Homo sapien
aaaaagggtgagttatggtgaccag

SEQ ID NO: 882105 - DNA, 25 bp, Homo sapien
ttgtaaataactggcaggggtcaca

SEQ ID NO: 882106 - DNA, 25 bp, Homo sapien
tcctgggccactagttgtatttact

SEQ ID NO: 882107 - DNA, 25 bp, Homo sapien
aaaccctaaagatgatttgcagtct

SEQ ID NO: 882108 - DNA, 25 bp, Homo sapien
tatttcgacaaccagagttacagcc

SEQ ID NO: 882109 - DNA, 25 bp, Homo sapien
caaaatttcccgaaacagacttctg

SEQ ID NO: 882110 - DNA, 25 bp, Homo sapien
gctacatggttgttctggattagta

SEQ ID NO: 882111 - DNA, 25 bp, Homo sapien
cattttattcctcttgctacatggt

SEQ ID NO: 882112 - DNA, 25 bp, Homo sapien
gctttgcagatccagggctcgttta

SEQ ID NO: 882113 - DNA, 25 bp, Homo sapien
gcttaactaatcctgtgcaccccgt

SEQ ID NO: 882114 - DNA, 25 bp, Homo sapien
ggatcacggctttggtctcgcgaag

SEQ ID NO: 882115 - DNA, 25 bp, Homo sapien
tatgttgctaaggttgggatcacgg

SEQ ID NO: 882116 - DNA, 25 bp, Homo sapien
gagaggtcaaactcctcgaatggga

SEQ ID NO: 882117 - DNA, 25 bp, Homo sapien
ctgcctctaagaggcgggtgttgta

SEQ ID NO: 882118 - DNA, 25 bp, Homo sapien
gctggactggtctgctgcctctaag

SEQ ID NO: 882119 - DNA, 25 bp, Homo sapien
gtattaaaatgagaggtcaaactcc

SEQ ID NO: 882120 - DNA, 25 bp, Homo sapien
ggtgacgcttaagatcaaaagaccc

SEQ ID NO: 882121 - DNA, 25 bp, Homo sapien
tgacgcttaagatcaaaagacccac

SEQ ID NO: 882122 - DNA, 25 bp, Homo sapien
gggaaggtgacgcttaagatcaaaa

SEQ ID NO: 882123 - DNA, 25 bp, Homo sapien
tttactgggaaggtgacgcttaaga

SEQ ID NO: 882124 - DNA, 25 bp, Homo sapien
cagcgagaaatctcggccagtcgct

SEQ ID NO: 882125 - DNA, 25 bp, Homo sapien
gcccctgcagactggtccaactctc

SEQ ID NO: 882126 - DNA, 25 bp, Homo sapien
gtcgctccgggaacagcccctgcag

SEQ ID NO: 882127 - DNA, 25 bp, Homo sapien
gcagagaaggagcagcgagaaatct

SEQ ID NO: 882128 - DNA, 25 bp, Homo sapien
gaggacgagctcctaactgcaagca

SEQ ID NO: 882129 - DNA, 25 bp, Homo sapien
tatctccgaacaaagcggcgagcag

SEQ ID NO: 882130 - DNA, 25 bp, Homo sapien
tccactttgtatgcagcagctgcgg

SEQ ID NO: 882131 - DNA, 25 bp, Homo sapien
agattggggtttgctcgcagctgcc

SEQ ID NO: 882132 - DNA, 25 bp, Homo sapien
atgtcccgcccacgctgctccgagc

SEQ ID NO: 882133 - DNA, 25 bp, Homo sapien
aatgtcccgcccacgctgctccgag

SEQ ID NO: 882134 - DNA, 25 bp, Homo sapien
caatgtcccgcccacgctgctccga

SEQ ID NO: 882135 - DNA, 25 bp, Homo sapien
gtcccgcccacgctgctccgagctg

SEQ ID NO: 882136 - DNA, 25 bp, Homo sapien
ctgctcctgcccgggctgcagccgc

SEQ ID NO: 882137 - DNA, 25 bp, Homo sapien
ttactgctgctcctgcccgggctgc

SEQ ID NO: 882138 - DNA, 25 bp, Homo sapien
actgctgctcctgcccgggctgcag

SEQ ID NO: 882139 - DNA, 25 bp, Homo sapien
gctcctgcccgggctgcagccgcgc

SEQ ID NO: 882140 - DNA, 25 bp, Homo sapien
ctctgccctgagtgcacccggctac

SEQ ID NO: 882141 - DNA, 25 bp, Homo sapien
ggtagcgtggggaggtttcctagca

SEQ ID NO: 882142 - DNA, 25 bp, Homo sapien
cgaggcgctccggtagcgtggggag

SEQ ID NO: 882143 - DNA, 25 bp, Homo sapien
tctctgccctgagtgcacccggcta

SEQ ID NO: 882144 - DNA, 25 bp, Homo sapien
gcctctctcgcatcctagccgtgtg

SEQ ID NO: 882145 - DNA, 25 bp, Homo sapien
tagccgtgtgcaccccagagcgcgc

SEQ ID NO: 882146 - DNA, 25 bp, Homo sapien
tggactgcgggacgcctgagccgcg

SEQ ID NO: 882147 - DNA, 25 bp, Homo sapien
cagcaactcgggctctggactgcgg

SEQ ID NO: 882148 - DNA, 25 bp, Homo sapien
ctgagatgccgagcggtgcccgggc

SEQ ID NO: 882149 - DNA, 25 bp, Homo sapien
cttttctttgtcccggagcaggctg

SEQ ID NO: 882150 - DNA, 25 bp, Homo sapien
gagaccgcgggacccgccgtgccga

SEQ ID NO: 882151 - DNA, 25 bp, Homo sapien
cgaaggaggtgcttctcgcggagac

SEQ ID NO: 882152 - DNA, 25 bp, Homo sapien
tgcaccgcttgctccgagccgcggg

SEQ ID NO: 882153 - DNA, 25 bp, Homo sapien
gagccgcggggtccgcctgctaggc

SEQ ID NO: 882154 - DNA, 25 bp, Homo sapien
tccgagccgcggggtccgcctgcta

SEQ ID NO: 882155 - DNA, 25 bp, Homo sapien
ctgcaccgcttgctccgagccgcgg

SEQ ID NO: 882156 - DNA, 25 bp, Homo sapien
tgcggaaaacgtcctagcgacactc

SEQ ID NO: 882157 - DNA, 25 bp, Homo sapien
cggaaaacgtcctagcgacactcgg

SEQ ID NO: 882158 - DNA, 25 bp, Homo sapien
acgtcctagcgacactcggcccgcg

SEQ ID NO: 882159 - DNA, 25 bp, Homo sapien
gaaaacgtcctagcgacactcggcc

SEQ ID NO: 882160 - DNA, 25 bp, Homo sapien
tcatcaatgagccaaccatcactgc

SEQ ID NO: 882161 - DNA, 25 bp, Homo sapien
catatagggtcttataaagtggcct

SEQ ID NO: 882162 - DNA, 25 bp, Homo sapien
ttagacgtgcgctatctctgcctgg

SEQ ID NO: 882163 - DNA, 25 bp, Homo sapien
ggacagaatctgttgctattccaga

SEQ ID NO: 882164 - DNA, 25 bp, Homo sapien
ctggttatagacttgtctgggcaga

SEQ ID NO: 882165 - DNA, 25 bp, Homo sapien
tccggggctgacagttggctacttg

SEQ ID NO: 882166 - DNA, 25 bp, Homo sapien
tgtctgggcagagattgacttttgg

SEQ ID NO: 882167 - DNA, 25 bp, Homo sapien
ctgatgccagaactcacttgcctga

SEQ ID NO: 882168 - DNA, 25 bp, Homo sapien
tatcagccaaattgtgtacattaca

SEQ ID NO: 882169 - DNA, 25 bp, Homo sapien
ttgtgtacattacacaataggtaat

SEQ ID NO: 882170 - DNA, 25 bp, Homo sapien
tattgtttctatcagccaaattgtg

SEQ ID NO: 882171 - DNA, 25 bp, Homo sapien
ggctcttattgtttctatcagccaa

SEQ ID NO: 882172 - DNA, 25 bp, Homo sapien
tgaacatagtgtcgaaattaacctg

SEQ ID NO: 882173 - DNA, 25 bp, Homo sapien
cacaggagtatgcatttgtaggctg

SEQ ID NO: 882174 - DNA, 25 bp, Homo sapien
tatggtcggtcccaaattatagtca

SEQ ID NO: 882175 - DNA, 25 bp, Homo sapien
catgtttagccattgggcattggcc

SEQ ID NO: 882176 - DNA, 25 bp, Homo sapien
tgctaatcagcttcttaagagactg

SEQ ID NO: 882177 - DNA, 25 bp, Homo sapien
ggaattccttcgcaccatagcctgt

SEQ ID NO: 882178 - DNA, 25 bp, Homo sapien
gcttgagaccttgatacacgggcca

SEQ ID NO: 882179 - DNA, 25 bp, Homo sapien
catagcctgtatgaacagtgttccc

SEQ ID NO: 882180 - DNA, 25 bp, Homo sapien
ataattgttcagctatctgggcagc

SEQ ID NO: 882181 - DNA, 25 bp, Homo sapien
catgtcttgtatcaatggcaggaga

SEQ ID NO: 882182 - DNA, 25 bp, Homo sapien
tgattatcagctcagatcccgcata

SEQ ID NO: 882183 - DNA, 25 bp, Homo sapien
gagtcacgcacaactcaacatggag

SEQ ID NO: 882184 - DNA, 25 bp, Homo sapien
gaacctgctatagaattctggaccc

SEQ ID NO: 882185 - DNA, 25 bp, Homo sapien
taacacataagactgtggcctgggt

SEQ ID NO: 882186 - DNA, 25 bp, Homo sapien
tctggacccctcaagccatggagga

SEQ ID NO: 882187 - DNA, 25 bp, Homo sapien
gaaccatgaggagctttgaaacgtg

SEQ ID NO: 882188 - DNA, 25 bp, Homo sapien
cctgctaagcatcatatggttgaaa

SEQ ID NO: 882189 - DNA, 25 bp, Homo sapien
taaataacaagtaggagaaatgtct

SEQ ID NO: 882190 - DNA, 25 bp, Homo sapien
cagggagatgactttagttagacga

SEQ ID NO: 882191 - DNA, 25 bp, Homo sapien
gaagtggaagaaacccttacatgct

SEQ ID NO: 882192 - DNA, 25 bp, Homo sapien
ggttccaagtgaatcatcattccag

SEQ ID NO: 882193 - DNA, 25 bp, Homo sapien
caggattgctttgccattacaagaa

SEQ ID NO: 882194 - DNA, 25 bp, Homo sapien
tggatcaaaggatatatgcaccttc

SEQ ID NO: 882195 - DNA, 25 bp, Homo sapien
tactctaacaatgtttggttccaag

SEQ ID NO: 882196 - DNA, 25 bp, Homo sapien
aagagggcagatcatagcgtttatc

SEQ ID NO: 882197 - DNA, 25 bp, Homo sapien
gaatcccatcgactttcacaagata

SEQ ID NO: 882198 - DNA, 25 bp, Homo sapien
ccaggccctgccaattcaatattca

SEQ ID NO: 882199 - DNA, 25 bp, Homo sapien
gcatcagcatccaaaacagtgcctg

SEQ ID NO: 882200 - DNA, 25 bp, Homo sapien
ttttctggctaacaaactcctgtcc

SEQ ID NO: 882201 - DNA, 25 bp, Homo sapien
catcttcaacatccagcaatcccat

SEQ ID NO: 882202 - DNA, 25 bp, Homo sapien
cttttctggctaacaaactcctgtc

SEQ ID NO: 882203 - DNA, 25 bp, Homo sapien
tcctgtccatcttcaacatccagca

SEQ ID NO: 882204 - DNA, 25 bp, Homo sapien
ggtgcttcactgatttggcctaagg

SEQ ID NO: 882205 - DNA, 25 bp, Homo sapien
ggcctaaggctatcattggctcctc

SEQ ID NO: 882206 - DNA, 25 bp, Homo sapien
taacgacttagcattcttgaccctc

SEQ ID NO: 882207 - DNA, 25 bp, Homo sapien
cacagtccccattggtggtgcttca

SEQ ID NO: 882208 - DNA, 25 bp, Homo sapien
gcttccatgatgacccagtaccttc

SEQ ID NO: 882209 - DNA, 25 bp, Homo sapien
gcccctctcgggcttccatgatgac

SEQ ID NO: 882210 - DNA, 25 bp, Homo sapien
gggatactggaaataacatggatca

SEQ ID NO: 882211 - DNA, 25 bp, Homo sapien
atactggaaataacatggatcaatc

SEQ ID NO: 882212 - DNA, 25 bp, Homo sapien
ctggaaataacatggatcaatcttt

SEQ ID NO: 882213 - DNA, 25 bp, Homo sapien
gaaataacatggatcaatctttcct

SEQ ID NO: 882214 - DNA, 25 bp, Homo sapien
agtttttgctctggctttaagtaga

SEQ ID NO: 882215 - DNA, 25 bp, Homo sapien
cagtttttgctctggctttaagtag

SEQ ID NO: 882216 - DNA, 25 bp, Homo sapien
gtttttgctctggctttaagtagaa

SEQ ID NO: 882217 - DNA, 25 bp, Homo sapien
tttattactggacacccttcaggag

SEQ ID NO: 882218 - DNA, 25 bp, Homo sapien
gacataagtgccttggaagacgcta

SEQ ID NO: 882219 - DNA, 25 bp, Homo sapien
taaaagagtatgttctctactctgg

SEQ ID NO: 882220 - DNA, 25 bp, Homo sapien
gttctctactctggtaatagctgtg

SEQ ID NO: 882221 - DNA, 25 bp, Homo sapien
atcgaggaccatagagaacactgtg

SEQ ID NO: 882222 - DNA, 25 bp, Homo sapien
gcaccaggtgagctaggaactgcac

SEQ ID NO: 882223 - DNA, 25 bp, Homo sapien
ccaagtcatggaccgaggaggaaat

SEQ ID NO: 882224 - DNA, 25 bp, Homo sapien
cagaagagccaagtcatggaccgag

SEQ ID NO: 882225 - DNA, 25 bp, Homo sapien
gactgacaccgcccaattgcctcgg

SEQ ID NO: 882226 - DNA, 25 bp, Homo sapien
tgacaccgcccaattgcctcggaag

SEQ ID NO: 882227 - DNA, 25 bp, Homo sapien
tgaagactgacaccgcccaattgcc

SEQ ID NO: 882228 - DNA, 25 bp, Homo sapien
ctgaagactgacaccgcccaattgc

SEQ ID NO: 882229 - DNA, 25 bp, Homo sapien
tcacatgcaggaatccgatcgcaat

SEQ ID NO: 882230 - DNA, 25 bp, Homo sapien
catggggcatcccataagacaagct

SEQ ID NO: 882231 - DNA, 25 bp, Homo sapien
caggaatccgatcgcaatccatggg

SEQ ID NO: 882232 - DNA, 25 bp, Homo sapien
tgcaggaatccgatcgcaatccatg

SEQ ID NO: 882233 - DNA, 25 bp, Homo sapien
ccagctagtgggtattcatcatcca

SEQ ID NO: 882234 - DNA, 25 bp, Homo sapien
tgagacaagcatgccccagctagtg

SEQ ID NO: 882235 - DNA, 25 bp, Homo sapien
tccaaggcccaggaattagacgaca

SEQ ID NO: 882236 - DNA, 25 bp, Homo sapien
ttagacgacatgtgaagcccagtga

SEQ ID NO: 882237 - DNA, 25 bp, Homo sapien
gatactggcacataatacacttctt

SEQ ID NO: 882238 - DNA, 25 bp, Homo sapien
ctggagatactggcacataatacac

SEQ ID NO: 882239 - DNA, 25 bp, Homo sapien
gagatactggcacataatacacttc

SEQ ID NO: 882240 - DNA, 25 bp, Homo sapien
tagttatattcagatgaggggatca

SEQ ID NO: 882241 - DNA, 25 bp, Homo sapien
tcataacgagataagtgtgcgcgca

SEQ ID NO: 882242 - DNA, 25 bp, Homo sapien
aacattgataccttgttggctgctg

SEQ ID NO: 882243 - DNA, 25 bp, Homo sapien
gataccaggaagtgttccagccagt

SEQ ID NO: 882244 - DNA, 25 bp, Homo sapien
cgagataagtgtgcgcgcactgata

SEQ ID NO: 882245 - DNA, 25 bp, Homo sapien
ctgacacgtggccattttagctgca

SEQ ID NO: 882246 - DNA, 25 bp, Homo sapien
ggcttccagggaaatcagagttaac

SEQ ID NO: 882247 - DNA, 25 bp, Homo sapien
gaggaactaactcacatcgtggtaa

SEQ ID NO: 882248 - DNA, 25 bp, Homo sapien
tgtcaaaaactagaccatggatggc

SEQ ID NO: 882249 - DNA, 25 bp, Homo sapien
tgccctcatctgacctggtattggt

SEQ ID NO: 882250 - DNA, 25 bp, Homo sapien
tcagtgccctcatctgacctggtat

SEQ ID NO: 882251 - DNA, 25 bp, Homo sapien
tcatcagtgccctcatctgacctgg

SEQ ID NO: 882252 - DNA, 25 bp, Homo sapien
cctcatctgacctggtattggtcat

SEQ ID NO: 882253 - DNA, 25 bp, Homo sapien
catgtctttactaattttttgatcg

SEQ ID NO: 882254 - DNA, 25 bp, Homo sapien
ttctatgtcatagccacactgatct

SEQ ID NO: 882255 - DNA, 25 bp, Homo sapien
aattttttgatcgtactccaatcca

SEQ ID NO: 882256 - DNA, 25 bp, Homo sapien
ctatagtaccttcttaagcatgtct

SEQ ID NO: 882257 - DNA, 25 bp, Homo sapien
gattcttcctaatcctttggtgaaa

SEQ ID NO: 882258 - DNA, 25 bp, Homo sapien
gcagattcttcctaatcctttggtg

SEQ ID NO: 882259 - DNA, 25 bp, Homo sapien
gcagcggactggctcgcactgcaga

SEQ ID NO: 882260 - DNA, 25 bp, Homo sapien
ggctcgcactgcagattcttcctaa

SEQ ID NO: 882261 - DNA, 25 bp, Homo sapien
tgcattggcttcttagggaggaact

SEQ ID NO: 882262 - DNA, 25 bp, Homo sapien
ggctgaaactgctggaaaaccacat

SEQ ID NO: 882263 - DNA, 25 bp, Homo sapien
gcagcacttctctaggagagggacg

SEQ ID NO: 882264 - DNA, 25 bp, Homo sapien
tgagagccgcaagtcctgatgaagc

SEQ ID NO: 882265 - DNA, 25 bp, Homo sapien
caaattgccctaaacccgtggagct

SEQ ID NO: 882266 - DNA, 25 bp, Homo sapien
tgtctactcacttgaagactataag

SEQ ID NO: 882267 - DNA, 25 bp, Homo sapien
attctgtctgcacatagccatgctg

SEQ ID NO: 882268 - DNA, 25 bp, Homo sapien
tgcacatagccatgctgtctactca

SEQ ID NO: 882269 - DNA, 25 bp, Homo sapien
tagtacaacgtctggtgtctgctga

SEQ ID NO: 882270 - DNA, 25 bp, Homo sapien
tgtaaatctcttcaacaggtgcttg

SEQ ID NO: 882271 - DNA, 25 bp, Homo sapien
aatatagctagtacaacgtctggtg

SEQ ID NO: 882272 - DNA, 25 bp, Homo sapien
gggaatttacgccaatcataccaaa

SEQ ID NO: 882273 - DNA, 25 bp, Homo sapien
tgtgttctccctaatacgactcttc

SEQ ID NO: 882274 - DNA, 25 bp, Homo sapien
tttctcctggatctatacaccgctg

SEQ ID NO: 882275 - DNA, 25 bp, Homo sapien
cactgtagcggctgtccactttctg

SEQ ID NO: 882276 - DNA, 25 bp, Homo sapien
ctgtagtgtatgtgttctccctaat

SEQ ID NO: 882277 - DNA, 25 bp, Homo sapien
tccctttcccgtaggaagatcacca

SEQ ID NO: 882278 - DNA, 25 bp, Homo sapien
tcatggagattatgcgattttcaac

SEQ ID NO: 882279 - DNA, 25 bp, Homo sapien
ctactggtaagaggtccctgcctgt

SEQ ID NO: 882280 - DNA, 25 bp, Homo sapien
tgtgctccttgcaaaccgcaacttc

SEQ ID NO: 882281 - DNA, 25 bp, Homo sapien
tagcagcatctgtgtattctaccca

SEQ ID NO: 882282 - DNA, 25 bp, Homo sapien
taccgtgcaatgtggcgtgtttagc

SEQ ID NO: 882283 - DNA, 25 bp, Homo sapien
tttgttgtgggctctgtaccgtgca

SEQ ID NO: 882284 - DNA, 25 bp, Homo sapien
aactgtggacataaagtgatgcagc

SEQ ID NO: 882285 - DNA, 25 bp, Homo sapien
tgcattcctaaaactatgcccttgt

SEQ ID NO: 882286 - DNA, 25 bp, Homo sapien
tatccaaaccgttctcatttctcta

SEQ ID NO: 882287 - DNA, 25 bp, Homo sapien
catgagataattcaccttgcattcc

SEQ ID NO: 882288 - DNA, 25 bp, Homo sapien
tttctgcatgaacagtccatcctat

SEQ ID NO: 882289 - DNA, 25 bp, Homo sapien
tcttcaagattgaaaacttttgctt

SEQ ID NO: 882290 - DNA, 25 bp, Homo sapien
tctttaggattgcttatagattaga

SEQ ID NO: 882291 - DNA, 25 bp, Homo sapien
gcaaatcacgtacttaataatatcc

SEQ ID NO: 882292 - DNA, 25 bp, Homo sapien
tatttaacaagtaaaactggatatc

SEQ ID NO: 882293 - DNA, 25 bp, Homo sapien
tccccgtcatgtgtctagcagagaa

SEQ ID NO: 882294 - DNA, 25 bp, Homo sapien
tgttcttgttcagggcgtccattag

SEQ ID NO: 882295 - DNA, 25 bp, Homo sapien
ggtggcaattgaacatcctgggtct

SEQ ID NO: 882296 - DNA, 25 bp, Homo sapien
caaggtgggtgtacagtctgatgct

SEQ ID NO: 882297 - DNA, 25 bp, Homo sapien
taagcctgagtacaaaagaacagtg

SEQ ID NO: 882298 - DNA, 25 bp, Homo sapien
aaatttaggtcactgttacttagca

SEQ ID NO: 882299 - DNA, 25 bp, Homo sapien
tactccaaatcgaagctctcatgtg

SEQ ID NO: 882300 - DNA, 25 bp, Homo sapien
catgatatggataagcatcttggtg

SEQ ID NO: 882301 - DNA, 25 bp, Homo sapien
ctccggacctcgtgaccagcccgcc

SEQ ID NO: 882302 - DNA, 25 bp, Homo sapien
tgatctccggacctcgtgaccagcc

SEQ ID NO: 882303 - DNA, 25 bp, Homo sapien
gtcttgatctccggacctcgtgacc

SEQ ID NO: 882304 - DNA, 25 bp, Homo sapien
cttgatctccggacctcgtgaccag

SEQ ID NO: 882305 - DNA, 25 bp, Homo sapien
tgatgacagcgcagtgggaattccc

SEQ ID NO: 882306 - DNA, 25 bp, Homo sapien
tattcaccttctgaggcccattacg

SEQ ID NO: 882307 - DNA, 25 bp, Homo sapien
tcttttagcattgagcgtacgaggg

SEQ ID NO: 882308 - DNA, 25 bp, Homo sapien
cgtacgagggaaattctgttcttga

SEQ ID NO: 882309 - DNA, 25 bp, Homo sapien
ctgtgctaaagaatgactgggacat

SEQ ID NO: 882310 - DNA, 25 bp, Homo sapien
tctgtgctaaagaatgactgggaca

SEQ ID NO: 882311 - DNA, 25 bp, Homo sapien
cctctgtgctaaagaatgactggga

SEQ ID NO: 882312 - DNA, 25 bp, Homo sapien
ccctctgtgctaaagaatgactggg

SEQ ID NO: 882313 - DNA, 25 bp, Homo sapien
tggaggacgctgcactttgacgtcg

SEQ ID NO: 882314 - DNA, 25 bp, Homo sapien
tatggaggacgctgcactttgacgt

SEQ ID NO: 882315 - DNA, 25 bp, Homo sapien
atggaggacgctgcactttgacgtc

SEQ ID NO: 882316 - DNA, 25 bp, Homo sapien
gaagaatctgagtctgtccacgccg

SEQ ID NO: 882317 - DNA, 25 bp, Homo sapien
gagaaagctgaacaagttcaggaag

SEQ ID NO: 882318 - DNA, 25 bp, Homo sapien
acgggcagaaagatcaagcgcggca

SEQ ID NO: 882319 - DNA, 25 bp, Homo sapien
atgggacagattccccgggctccga

SEQ ID NO: 882320 - DNA, 25 bp, Homo sapien
ttcagaaccgctctttccgaatccc

SEQ ID NO: 882321 - DNA, 25 bp, Homo sapien
ttccgaatccctcagcattgcaact

SEQ ID NO: 882322 - DNA, 25 bp, Homo sapien
gctctttccgaatccctcagcattg

SEQ ID NO: 882323 - DNA, 25 bp, Homo sapien
agaaccgctctttccgaatccctca

SEQ ID NO: 882324 - DNA, 25 bp, Homo sapien
tcaaagtatggctcaggaacaccca

SEQ ID NO: 882325 - DNA, 25 bp, Homo sapien
gatgctatgagctaaatctactggt

SEQ ID NO: 882326 - DNA, 25 bp, Homo sapien
taaatactaatgcaatcaatggcca

SEQ ID NO: 882327 - DNA, 25 bp, Homo sapien
tgatcttccaatgtaaggcttggcc

SEQ ID NO: 882328 - DNA, 25 bp, Homo sapien
gagaaagattgctccccgttagagg

SEQ ID NO: 882329 - DNA, 25 bp, Homo sapien
catattcgagcaaaactaggccccg

SEQ ID NO: 882330 - DNA, 25 bp, Homo sapien
ccgaaagtgcgtttgtggctctgca

SEQ ID NO: 882331 - DNA, 25 bp, Homo sapien
ggtactatacaattgacggccggac

SEQ ID NO: 882332 - DNA, 25 bp, Homo sapien
ctccagtggccgttccctctaaaag

SEQ ID NO: 882333 - DNA, 25 bp, Homo sapien
gcccgggacagcgatgcgtgttact

SEQ ID NO: 882334 - DNA, 25 bp, Homo sapien
gttccggctgcaacgggttcaggca

SEQ ID NO: 882335 - DNA, 25 bp, Homo sapien
agttgaagtccggacagacagggcc

SEQ ID NO: 882336 - DNA, 25 bp, Homo sapien
gttcaggcagcgttacccgtggaaa

SEQ ID NO: 882337 - DNA, 25 bp, Homo sapien
cgccgccgccactgtgcgtcttcac

SEQ ID NO: 882338 - DNA, 25 bp, Homo sapien
cgctgtcggtgtcgctgcccttctt

SEQ ID NO: 882339 - DNA, 25 bp, Homo sapien
tcactctaggccgttgcggtgcccg

SEQ ID NO: 882340 - DNA, 25 bp, Homo sapien
cgcggcgctgtgctcgctgtcggtg

SEQ ID NO: 882341 - DNA, 25 bp, Homo sapien
tgctgaaggccgagtgactcaggcc

SEQ ID NO: 882342 - DNA, 25 bp, Homo sapien
ccttgaggtgcgaagtcttgccgta

SEQ ID NO: 882343 - DNA, 25 bp, Homo sapien
ggtgcgagggcttaaaccacgactc

SEQ ID NO: 882344 - DNA, 25 bp, Homo sapien
tcaggcccgagtaatccgagttgta

SEQ ID NO: 882345 - DNA, 25 bp, Homo sapien
aaaacagagtagtcgttggcgaagg

SEQ ID NO: 882346 - DNA, 25 bp, Homo sapien
ctggaaaacagagtagtcgttggcg

SEQ ID NO: 882347 - DNA, 25 bp, Homo sapien
ggaaaacagagtagtcgttggcgaa

SEQ ID NO: 882348 - DNA, 25 bp, Homo sapien
cagagtagtcgttggcgaagggcga

SEQ ID NO: 882349 - DNA, 25 bp, Homo sapien
ggagaaggcgctggagccaggcgag

SEQ ID NO: 882350 - DNA, 25 bp, Homo sapien
agggagaaggcgctggagccaggcg

SEQ ID NO: 882351 - DNA, 25 bp, Homo sapien
ggtgagggagaaggcgctggagcca

SEQ ID NO: 882352 - DNA, 25 bp, Homo sapien
gaggtgagggagaaggcgctggagc

SEQ ID NO: 882353 - DNA, 25 bp, Homo sapien
gtggaagcctttgccgaaggaagaa

SEQ ID NO: 882354 - DNA, 25 bp, Homo sapien
cccactacgttgcagctggcggaag

SEQ ID NO: 882355 - DNA, 25 bp, Homo sapien
gaagaggacgaggagcgtttccagg

SEQ ID NO: 882356 - DNA, 25 bp, Homo sapien
gacacgccgaagcttgagagactgg

SEQ ID NO: 882357 - DNA, 25 bp, Homo sapien
aggagtcgatcccaacctcggttct

SEQ ID NO: 882358 - DNA, 25 bp, Homo sapien
cagaggagtcgatcccaacctcggt

SEQ ID NO: 882359 - DNA, 25 bp, Homo sapien
ggccagaggagtcgatcccaacctc

SEQ ID NO: 882360 - DNA, 25 bp, Homo sapien
agaggagtcgatcccaacctcggtt

SEQ ID NO: 882361 - DNA, 25 bp, Homo sapien
gtctgattcgggagcaagcaccacg

SEQ ID NO: 882362 - DNA, 25 bp, Homo sapien
gacaagtttggctgccggcgtctga

SEQ ID NO: 882363 - DNA, 25 bp, Homo sapien
ccggcgtctgattcgggagcaagca

SEQ ID NO: 882364 - DNA, 25 bp, Homo sapien
tcctactctacaggaggggacaagt

SEQ ID NO: 882365 - DNA, 25 bp, Homo sapien
tggacgcaggtctcccgggcaggga

SEQ ID NO: 882366 - DNA, 25 bp, Homo sapien
gcgctgcgcggtggcttgtctaaat

SEQ ID NO: 882367 - DNA, 25 bp, Homo sapien
gcttgtctaaatgcccttcgaacct

SEQ ID NO: 882368 - DNA, 25 bp, Homo sapien
cccgaaatcggtgcctgtaaaatgg

SEQ ID NO: 882369 - DNA, 25 bp, Homo sapien
tcctctcagaggatcttttttatat

SEQ ID NO: 882370 - DNA, 25 bp, Homo sapien
tatattgataaatcagaggcagtgt

SEQ ID NO: 882371 - DNA, 25 bp, Homo sapien
tgataaatcagaggcagtgtttttt

SEQ ID NO: 882372 - DNA, 25 bp, Homo sapien
tctcagaggatcttttttatattga

SEQ ID NO: 882373 - DNA, 25 bp, Homo sapien
tagaggtgtgcaatacaatgatcag

SEQ ID NO: 882374 - DNA, 25 bp, Homo sapien
acaatgatcagttccgcccattcca

SEQ ID NO: 882375 - DNA, 25 bp, Homo sapien
tagctccctctccggctttgaagtg

SEQ ID NO: 882376 - DNA, 25 bp, Homo sapien
tctccggctttgaagtgccgcggag

SEQ ID NO: 882377 - DNA, 25 bp, Homo sapien
tgtttctttgatgccgtggcttttt

SEQ ID NO: 882378 - DNA, 25 bp, Homo sapien
ttttttccctgaggtggaattctgc

SEQ ID NO: 882379 - DNA, 25 bp, Homo sapien
gcctgcgcgcccatgagttgtttct

SEQ ID NO: 882380 - DNA, 25 bp, Homo sapien
tcccggctctccaacgaaatagtag

SEQ ID NO: 882381 - DNA, 25 bp, Homo sapien
gatggatagtctcccagattaattt

SEQ ID NO: 882382 - DNA, 25 bp, Homo sapien
cagcttttgggacctaatttacatc

SEQ ID NO: 882383 - DNA, 25 bp, Homo sapien
tgtttcttcgatttggacaacagct

SEQ ID NO: 882384 - DNA, 25 bp, Homo sapien
cggtgatgatggatagtctcccaga

SEQ ID NO: 882385 - DNA, 25 bp, Homo sapien
caagcccctcgctggtggcagattg

SEQ ID NO: 882386 - DNA, 25 bp, Homo sapien
ggaagagatcagtcggccagagccc

SEQ ID NO: 882387 - DNA, 25 bp, Homo sapien
tcctgggaagagaggtaatacaagc

SEQ ID NO: 882388 - DNA, 25 bp, Homo sapien
gcagattgttgagccgtaggtggga

SEQ ID NO: 882389 - DNA, 25 bp, Homo sapien
agcactgaacagatgtccccattta

SEQ ID NO: 882390 - DNA, 25 bp, Homo sapien
catttaagccgttcttttcccacat

SEQ ID NO: 882391 - DNA, 25 bp, Homo sapien
agcagcactgaacagatgtccccat

SEQ ID NO: 882392 - DNA, 25 bp, Homo sapien
gcagcactgaacagatgtccccatt

SEQ ID NO: 882393 - DNA, 25 bp, Homo sapien
cacgaacaaaatcgcgtgctttaga

SEQ ID NO: 882394 - DNA, 25 bp, Homo sapien
tcggcccagtgaacacgaacaaaat

SEQ ID NO: 882395 - DNA, 25 bp, Homo sapien
ggccataatggccacgttatttcgg

SEQ ID NO: 882396 - DNA, 25 bp, Homo sapien
ttagaatcattcgactctgagtcca

SEQ ID NO: 882397 - DNA, 25 bp, Homo sapien
agtgggccgcacattcgcagttttc

SEQ ID NO: 882398 - DNA, 25 bp, Homo sapien
caaagatcttgtcccagtgggccgc

SEQ ID NO: 882399 - DNA, 25 bp, Homo sapien
acatttttcacgactgagttcaggg

SEQ ID NO: 882400 - DNA, 25 bp, Homo sapien
gttttgcaggacttcacaaagatct

SEQ ID NO: 882401 - DNA, 25 bp, Homo sapien
ctgctaagaaaacatcgacggtttt

SEQ ID NO: 882402 - DNA, 25 bp, Homo sapien
gctaagaaaacatcgacggttttgc

SEQ ID NO: 882403 - DNA, 25 bp, Homo sapien
aaaacatcgacggttttgctgctga

SEQ ID NO: 882404 - DNA, 25 bp, Homo sapien
taagaaaacatcgacggttttgctg

SEQ ID NO: 882405 - DNA, 25 bp, Homo sapien
cctttaaatagagaggcattggccg

SEQ ID NO: 882406 - DNA, 25 bp, Homo sapien
tttaaatagagaggcattggccgcc

SEQ ID NO: 882407 - DNA, 25 bp, Homo sapien
attggccgccttaggctccccctgc

SEQ ID NO: 882408 - DNA, 25 bp, Homo sapien
cccctttaaatagagaggcattggc

SEQ ID NO: 882409 - DNA, 25 bp, Homo sapien
cgcgatggtccaacgaacttcggaa

SEQ ID NO: 882410 - DNA, 25 bp, Homo sapien
gaagtgctcctgcttccggtttcac

SEQ ID NO: 882411 - DNA, 25 bp, Homo sapien
ggagccttgaggagctgcgcttccc

SEQ ID NO: 882412 - DNA, 25 bp, Homo sapien
tatacctgggatgcgttgccataca

SEQ ID NO: 882413 - DNA, 25 bp, Homo sapien
acacctgctgggcagcctgcgcggc

SEQ ID NO: 882414 - DNA, 25 bp, Homo sapien
tgacacctgctgggcagcctgcgcg

SEQ ID NO: 882415 - DNA, 25 bp, Homo sapien
gacacctgctgggcagcctgcgcgg

SEQ ID NO: 882416 - DNA, 25 bp, Homo sapien
ctgacacctgctgggcagcctgcgc

SEQ ID NO: 882417 - DNA, 25 bp, Homo sapien
gctctgcattgaatacgtactggat

SEQ ID NO: 882418 - DNA, 25 bp, Homo sapien
cagggatcccaaagacagtgctagt

SEQ ID NO: 882419 - DNA, 25 bp, Homo sapien
cagtgctagtgctctcattgccaag

SEQ ID NO: 882420 - DNA, 25 bp, Homo sapien
tctcgatagaagtttgaccatatgc

SEQ ID NO: 882421 - DNA, 25 bp, Homo sapien
ttactgatctcataatgtctcttca

SEQ ID NO: 882422 - DNA, 25 bp, Homo sapien
aaacaggaggaatatgggatctcct

SEQ ID NO: 882423 - DNA, 25 bp, Homo sapien
gaatatgggatctccttactgatct

SEQ ID NO: 882424 - DNA, 25 bp, Homo sapien
cagatactggaacgccatgaaaagg

SEQ ID NO: 882425 - DNA, 25 bp, Homo sapien
taaggctagttaagtgatgcagtgg

SEQ ID NO: 882426 - DNA, 25 bp, Homo sapien
gagaaggaacaaagaaatctgtgac

SEQ ID NO: 882427 - DNA, 25 bp, Homo sapien
gagtggagaaggaacaaagaaatct

SEQ ID NO: 882428 - DNA, 25 bp, Homo sapien
aaggaacaaagaaatctgtgactgg

SEQ ID NO: 882429 - DNA, 25 bp, Homo sapien
gtaatcaatttgttataaacaccac

SEQ ID NO: 882430 - DNA, 25 bp, Homo sapien
ggttgtaatcaatttgttataaaca

SEQ ID NO: 882431 - DNA, 25 bp, Homo sapien
gtgactggttgtaatcaatttgtta

SEQ ID NO: 882432 - DNA, 25 bp, Homo sapien
gactggttgtaatcaatttgttata

SEQ ID NO: 882433 - DNA, 25 bp, Homo sapien
agcattgaatcggaacctgaatttt

SEQ ID NO: 882434 - DNA, 25 bp, Homo sapien
cattgaatcggaacctgaattttct

SEQ ID NO: 882435 - DNA, 25 bp, Homo sapien
agagcattgaatcggaacctgaatt

SEQ ID NO: 882436 - DNA, 25 bp, Homo sapien
caagagcattgaatcggaacctgaa

SEQ ID NO: 882437 - DNA, 25 bp, Homo sapien
tggctacagtcaagaaagggaaact

SEQ ID NO: 882438 - DNA, 25 bp, Homo sapien
cttctttccagcgttcaagatgtgg

SEQ ID NO: 882439 - DNA, 25 bp, Homo sapien
gataatgcagtggtcatagtgggca

SEQ ID NO: 882440 - DNA, 25 bp, Homo sapien
tgaacttccggatttctgtgggtct

SEQ ID NO: 882441 - DNA, 25 bp, Homo sapien
gtatagtgtatggtgagtgcatcat

SEQ ID NO: 882442 - DNA, 25 bp, Homo sapien
tgtatagtgtatggtgagtgcatca

SEQ ID NO: 882443 - DNA, 25 bp, Homo sapien
ctgtatagtgtatggtgagtgcatc

SEQ ID NO: 882444 - DNA, 25 bp, Homo sapien
gacagcaattaccatgagcttcttg

SEQ ID NO: 882445 - DNA, 25 bp, Homo sapien
gtcctcaaggccaaccccttcagct

SEQ ID NO: 882446 - DNA, 25 bp, Homo sapien
cagtgcctccaatcctagaggaatg

SEQ ID NO: 882447 - DNA, 25 bp, Homo sapien
gaggaatgacagcaattaccatgag

SEQ ID NO: 882448 - DNA, 25 bp, Homo sapien
gtcaatatgcatcagtggttgacaa

SEQ ID NO: 882449 - DNA, 25 bp, Homo sapien
caatatgcatcagtggttgacaata

SEQ ID NO: 882450 - DNA, 25 bp, Homo sapien
tcaatatgcatcagtggttgacaat

SEQ ID NO: 882451 - DNA, 25 bp, Homo sapien
tgagaccactggtgaattgtagtca

SEQ ID NO: 882452 - DNA, 25 bp, Homo sapien
taaaggtgctatatttagactgcat

SEQ ID NO: 882453 - DNA, 25 bp, Homo sapien
tagtcataaaggtgctatatttaga

SEQ ID NO: 882454 - DNA, 25 bp, Homo sapien
ccactggtgaattgtagtcataaag

SEQ ID NO: 882455 - DNA, 25 bp, Homo sapien
ttaagactggtcatagaccatcgac

SEQ ID NO: 882456 - DNA, 25 bp, Homo sapien
taaagaggaagtcgttaggcctgag

SEQ ID NO: 882457 - DNA, 25 bp, Homo sapien
catagaccatcgacatgctggcagc

SEQ ID NO: 882458 - DNA, 25 bp, Homo sapien
ttaaagaggaagtcgttaggcctga

SEQ ID NO: 882459 - DNA, 25 bp, Homo sapien
ttcctgaagtgtggaagggtctgtt

SEQ ID NO: 882460 - DNA, 25 bp, Homo sapien
tatgaagtttcaccaaatgtagaaa

SEQ ID NO: 882461 - DNA, 25 bp, Homo sapien
tactccttcaaacttctgcccgagg

SEQ ID NO: 882462 - DNA, 25 bp, Homo sapien
gaagaaagacagtgcacgattaaac

SEQ ID NO: 882463 - DNA, 25 bp, Homo sapien
gaaactgtaagggtcagtgatcttc

SEQ ID NO: 882464 - DNA, 25 bp, Homo sapien
taatttcctggtgcacttcagtgct

SEQ ID NO: 882465 - DNA, 25 bp, Homo sapien
ttcagtgctccttcatcacacaaga

SEQ ID NO: 882466 - DNA, 25 bp, Homo sapien
gtcagtgatcttcggcgccaccact

SEQ ID NO: 882467 - DNA, 25 bp, Homo sapien
cttactctaatcagtcttgtctgcc

SEQ ID NO: 882468 - DNA, 25 bp, Homo sapien
actgagaggttcattgttatatgca

SEQ ID NO: 882469 - DNA, 25 bp, Homo sapien
aggttcattgttatatgcagctgtc

SEQ ID NO: 882470 - DNA, 25 bp, Homo sapien
tcaatatctttgtggtatttagtga

SEQ ID NO: 882471 - DNA, 25 bp, Homo sapien
gccttcagtacaatgcattaagtag

SEQ ID NO: 882472 - DNA, 25 bp, Homo sapien
catgtcagttttaaagagaacatct

SEQ ID NO: 882473 - DNA, 25 bp, Homo sapien
catgaaatgttgctggcgcaagggc

SEQ ID NO: 882474 - DNA, 25 bp, Homo sapien
caaatctggcctgattagcgaacat

SEQ ID NO: 882475 - DNA, 25 bp, Homo sapien
ggatcctgcgctgtttaagtcaaac

SEQ ID NO: 882476 - DNA, 25 bp, Homo sapien
cctgcgctgtttaagtcaaacaggt

SEQ ID NO: 882477 - DNA, 25 bp, Homo sapien
gtgagggatcctgcgctgtttaagt

SEQ ID NO: 882478 - DNA, 25 bp, Homo sapien
ctgatggtgagggatcctgcgctgt

SEQ ID NO: 882479 - DNA, 25 bp, Homo sapien
tgtaattccaaccagtcctcaggag

SEQ ID NO: 882480 - DNA, 25 bp, Homo sapien
aacagctttcgacataaatctggag

SEQ ID NO: 882481 - DNA, 25 bp, Homo sapien
cagagacactgtacctcacactgta

SEQ ID NO: 882482 - DNA, 25 bp, Homo sapien
taatgaaataggctctggtcagaga

SEQ ID NO: 882483 - DNA, 25 bp, Homo sapien
gttgtaattttcctgatgaaccacc

SEQ ID NO: 882484 - DNA, 25 bp, Homo sapien
ctttggacagactagtgagtgtgac

SEQ ID NO: 882485 - DNA, 25 bp, Homo sapien
cagcaacggggatggtacttttaca

SEQ ID NO: 882486 - DNA, 25 bp, Homo sapien
caaggtttggtggtgattgcttcat

SEQ ID NO: 882487 - DNA, 25 bp, Homo sapien
tttatgatctcccaagaaagctggg

SEQ ID NO: 882488 - DNA, 25 bp, Homo sapien
tagagctcaatctttatttctcggc

SEQ ID NO: 882489 - DNA, 25 bp, Homo sapien
tcagccatttttggcggcagttttg

SEQ ID NO: 882490 - DNA, 25 bp, Homo sapien
tctcggcacctgttgctcattctac

SEQ ID NO: 882491 - DNA, 25 bp, Homo sapien
gagagtctttgctcctacaaggcaa

SEQ ID NO: 882492 - DNA, 25 bp, Homo sapien
caaagttcggtgatcaaataccaca

SEQ ID NO: 882493 - DNA, 25 bp, Homo sapien
atttttctctggctcggatagtggg

SEQ ID NO: 882494 - DNA, 25 bp, Homo sapien
aaggcatacaactgtgtcgtgctca

SEQ ID NO: 882495 - DNA, 25 bp, Homo sapien
ccttgtaatgtctgtttgggcccac

SEQ ID NO: 882496 - DNA, 25 bp, Homo sapien
ctattgcttccttgtaatgtctgtt

SEQ ID NO: 882497 - DNA, 25 bp, Homo sapien
ttccttgtaatgtctgtttgggccc

SEQ ID NO: 882498 - DNA, 25 bp, Homo sapien
gcttccttgtaatgtctgtttgggc

SEQ ID NO: 882499 - DNA, 25 bp, Homo sapien
cagaggctgctgtaaattttgtctg

SEQ ID NO: 882500 - DNA, 25 bp, Homo sapien
ttgtctgagtcagggcaattctgat

SEQ ID NO: 882501 - DNA, 25 bp, Homo sapien
cagggcaattctgattgatctctga

SEQ ID NO: 882502 - DNA, 25 bp, Homo sapien
tgtaaaatcgataagaagacactgt

SEQ ID NO: 882503 - DNA, 25 bp, Homo sapien
cactgacagacaaatctgagaaacg

SEQ ID NO: 882504 - DNA, 25 bp, Homo sapien
ttttagccatcccaacattttccac

SEQ ID NO: 882505 - DNA, 25 bp, Homo sapien
tttcttcggttcctttgcctcctga

SEQ ID NO: 882506 - DNA, 25 bp, Homo sapien
tttgcctcctgatctggagatttca

SEQ ID NO: 882507 - DNA, 25 bp, Homo sapien
tcagtcacataaaattggttcagtc

SEQ ID NO: 882508 - DNA, 25 bp, Homo sapien
ggagcttaatccctttttacagcca

SEQ ID NO: 882509 - DNA, 25 bp, Homo sapien
ccatctgagtttacagggtgccata

SEQ ID NO: 882510 - DNA, 25 bp, Homo sapien
tttacagccaacatgattctcagtc

SEQ ID NO: 882511 - DNA, 25 bp, Homo sapien
acaggtaacattccactgtagtcct

SEQ ID NO: 882512 - DNA, 25 bp, Homo sapien
atcagtaagtagatctgaattgctg

SEQ ID NO: 882513 - DNA, 25 bp, Homo sapien
aggtaacattccactgtagtcctcc

SEQ ID NO: 882514 - DNA, 25 bp, Homo sapien
gaagacatggaagtatgagtcagga

SEQ ID NO: 882515 - DNA, 25 bp, Homo sapien
tggataaacccagcgagaagctgag

SEQ ID NO: 882516 - DNA, 25 bp, Homo sapien
cagcgagaagctgagagttcatttg

SEQ ID NO: 882517 - DNA, 25 bp, Homo sapien
tggagagaggctagagtcagatgct

SEQ ID NO: 882518 - DNA, 25 bp, Homo sapien
ttgcacatgacgcactggataaacc

SEQ ID NO: 882519 - DNA, 25 bp, Homo sapien
catctagagataccagtcagctctt

SEQ ID NO: 882520 - DNA, 25 bp, Homo sapien
atctagagataccagtcagctcttc

SEQ ID NO: 882521 - DNA, 25 bp, Homo sapien
tcatctagagataccagtcagctct

SEQ ID NO: 882522 - DNA, 25 bp, Homo sapien
ctgtggaggtaaatcttgggagacc

SEQ ID NO: 882523 - DNA, 25 bp, Homo sapien
acctgtggaggtctttggataggct

SEQ ID NO: 882524 - DNA, 25 bp, Homo sapien
tgtcttcagatatgccatcagtgca

SEQ ID NO: 882525 - DNA, 25 bp, Homo sapien
gagcaatgccaactctgcgtaattt

SEQ ID NO: 882526 - DNA, 25 bp, Homo sapien
tttgagctggaaattcaatacttct

SEQ ID NO: 882527 - DNA, 25 bp, Homo sapien
tctagtgttgactttgggtaaacta

SEQ ID NO: 882528 - DNA, 25 bp, Homo sapien
ctcttaccatcaatctagtgttgac

SEQ ID NO: 882529 - DNA, 25 bp, Homo sapien
ccatcaatctagtgttgactttggg

SEQ ID NO: 882530 - DNA, 25 bp, Homo sapien
caatctagtgttgactttgggtaaa

SEQ ID NO: 882531 - DNA, 25 bp, Homo sapien
cgtgacttgtcatagcctcttgcct

SEQ ID NO: 882532 - DNA, 25 bp, Homo sapien
tgacttgtcatagcctcttgcctca

SEQ ID NO: 882533 - DNA, 25 bp, Homo sapien
gatccaggcggggtcaggatgcttc

SEQ ID NO: 882534 - DNA, 25 bp, Homo sapien
ctcagctgccctcgcctcgatccag

SEQ ID NO: 882535 - DNA, 25 bp, Homo sapien
tccactttgtttaattgcagcaaag

SEQ ID NO: 882536 - DNA, 25 bp, Homo sapien
caaacaggatgcataataaataagc

SEQ ID NO: 882537 - DNA, 25 bp, Homo sapien
tagtgactgatctgggagagatgct

SEQ ID NO: 882538 - DNA, 25 bp, Homo sapien
agctccactttgtttaattgcagca

SEQ ID NO: 882539 - DNA, 25 bp, Homo sapien
ctcattagcacaagaggcatttgtg

SEQ ID NO: 882540 - DNA, 25 bp, Homo sapien
aattgactgacgctgatactgctgg

SEQ ID NO: 882541 - DNA, 25 bp, Homo sapien
agtctgctgatttttgtgagtgctc

SEQ ID NO: 882542 - DNA, 25 bp, Homo sapien
cctgaattagttctgcaagcaatga

SEQ ID NO: 882543 - DNA, 25 bp, Homo sapien
tggcggctgaacctcccagccaggg

SEQ ID NO: 882544 - DNA, 25 bp, Homo sapien
ggttaatggcggctgaacctcccag

SEQ ID NO: 882545 - DNA, 25 bp, Homo sapien
gaaaggacattcaggccagaaggct

SEQ ID NO: 882546 - DNA, 25 bp, Homo sapien
gaaggcagccgcagagaaaggacat

SEQ ID NO: 882547 - DNA, 25 bp, Homo sapien
ctctggggtgcagcggatcagaggt

SEQ ID NO: 882548 - DNA, 25 bp, Homo sapien
ctattgtgtgttccactcctgggaa

SEQ ID NO: 882549 - DNA, 25 bp, Homo sapien
tattgtgtgttccactcctgggaag

SEQ ID NO: 882550 - DNA, 25 bp, Homo sapien
gtgcagcggatcagaggtagagcaa

SEQ ID NO: 882551 - DNA, 25 bp, Homo sapien
ctgggtcacagaggactgttccagg

SEQ ID NO: 882552 - DNA, 25 bp, Homo sapien
cgagtttaggaaaaacgcactctga

SEQ ID NO: 882553 - DNA, 25 bp, Homo sapien
aatccaaatggtggtgtttctaact

SEQ ID NO: 882554 - DNA, 25 bp, Homo sapien
gcgagtttaggaaaaacgcactctg

SEQ ID NO: 882555 - DNA, 25 bp, Homo sapien
ggcaaaaacccattagcattgacta

SEQ ID NO: 882556 - DNA, 25 bp, Homo sapien
tttgcagattagaagaattaagggc

SEQ ID NO: 882557 - DNA, 25 bp, Homo sapien
agcaatgtcatttgtgaagtgatgt

SEQ ID NO: 882558 - DNA, 25 bp, Homo sapien
cgttggcttataccaagcaatgtca

SEQ ID NO: 882559 - DNA, 25 bp, Homo sapien
aacaggtgcttcgaaggcagggctc

SEQ ID NO: 882560 - DNA, 25 bp, Homo sapien
taacctgttttccatcgagtgggct

SEQ ID NO: 882561 - DNA, 25 bp, Homo sapien
tgcttcgaaggcagggctctcatgt

SEQ ID NO: 882562 - DNA, 25 bp, Homo sapien
agtgggcttctattatgtcgattca

SEQ ID NO: 882563 - DNA, 25 bp, Homo sapien
gcttcatccgtgtgtcttcttttgg

SEQ ID NO: 882564 - DNA, 25 bp, Homo sapien
agcagcttcatccgtgtgtcttctt

SEQ ID NO: 882565 - DNA, 25 bp, Homo sapien
cttcttttggcacatttttaattgg

SEQ ID NO: 882566 - DNA, 25 bp, Homo sapien
ttcttttggcacatttttaattggc

SEQ ID NO: 882567 - DNA, 25 bp, Homo sapien
ggccaagcagagtgttcctgttgca

SEQ ID NO: 882568 - DNA, 25 bp, Homo sapien
gcttctggcctggttacacagtggc

SEQ ID NO: 882569 - DNA, 25 bp, Homo sapien
tgttgcaggtaccaccatccactct

SEQ ID NO: 882570 - DNA, 25 bp, Homo sapien
gtgcccctaagaaacgatggcctga

SEQ ID NO: 882571 - DNA, 25 bp, Homo sapien
tgccgtttccacagtgagagattct

SEQ ID NO: 882572 - DNA, 25 bp, Homo sapien
tgtgactgtacttttgagggagcat

SEQ ID NO: 882573 - DNA, 25 bp, Homo sapien
cgattattaatgaagcactgccata

SEQ ID NO: 882574 - DNA, 25 bp, Homo sapien
acagcttcaggaggctgccgtttcc

SEQ ID NO: 882575 - DNA, 25 bp, Homo sapien
tcatcctgtttactggctgtgcaga

SEQ ID NO: 882576 - DNA, 25 bp, Homo sapien
tgcagagccatccggctgtacaaag

SEQ ID NO: 882577 - DNA, 25 bp, Homo sapien
ctgtgcagagccatccggctgtaca

SEQ ID NO: 882578 - DNA, 25 bp, Homo sapien
catcctgtttactggctgtgcagag

SEQ ID NO: 882579 - DNA, 25 bp, Homo sapien
ccattacagtcgattggaatgtcat

SEQ ID NO: 882580 - DNA, 25 bp, Homo sapien
gcaaatcatgctcgtcatcttctgt

SEQ ID NO: 882581 - DNA, 25 bp, Homo sapien
gtgcatccaataccattcttgttcc

SEQ ID NO: 882582 - DNA, 25 bp, Homo sapien
tctgatatctgctccctaacccgaa

SEQ ID NO: 882583 - DNA, 25 bp, Homo sapien
tactgcaggccctttgttgtcactt

SEQ ID NO: 882584 - DNA, 25 bp, Homo sapien
ctttgttgtcactttgcccaaactc

SEQ ID NO: 882585 - DNA, 25 bp, Homo sapien
ttgttgtcactttgcccaaactcat

SEQ ID NO: 882586 - DNA, 25 bp, Homo sapien
ggaccccagtactgcaggccctttg

SEQ ID NO: 882587 - DNA, 25 bp, Homo sapien
gttggtccactgggaaatggctgct

SEQ ID NO: 882588 - DNA, 25 bp, Homo sapien
cctttgaagcatggcaagtgtccca

SEQ ID NO: 882589 - DNA, 25 bp, Homo sapien
gctgctgataatgcaggtatgaacc

SEQ ID NO: 882590 - DNA, 25 bp, Homo sapien
tccttttggaaagcttgtggctcct

SEQ ID NO: 882591 - DNA, 25 bp, Homo sapien
gcagagaagaaagtaacttggacat

SEQ ID NO: 882592 - DNA, 25 bp, Homo sapien
atgcagagaagaaagtaacttggac

SEQ ID NO: 882593 - DNA, 25 bp, Homo sapien
tgcagagaagaaagtaacttggaca

SEQ ID NO: 882594 - DNA, 25 bp, Homo sapien
atctgctggctagagtgatcaaggc

SEQ ID NO: 882595 - DNA, 25 bp, Homo sapien
gagcttctataccagagccagtcag

SEQ ID NO: 882596 - DNA, 25 bp, Homo sapien
tccaattgtgtcttgcaagcactgg

SEQ ID NO: 882597 - DNA, 25 bp, Homo sapien
gaaggcaccatagtgaatgtccagc

SEQ ID NO: 882598 - DNA, 25 bp, Homo sapien
gaattctgatcctgttccaaacctg

SEQ ID NO: 882599 - DNA, 25 bp, Homo sapien
tccagtcccacttggcaatcaacgg

SEQ ID NO: 882600 - DNA, 25 bp, Homo sapien
tgcatccaccaaatgctggatgaac

SEQ ID NO: 882601 - DNA, 25 bp, Homo sapien
gaactctctctaatgacagctggct

SEQ ID NO: 882602 - DNA, 25 bp, Homo sapien
caaatacctcctcttaacgggactg

SEQ ID NO: 882603 - DNA, 25 bp, Homo sapien
cctcttaacgggactgaatcttggg

SEQ ID NO: 882604 - DNA, 25 bp, Homo sapien
gggtctctacccactacttgactta

SEQ ID NO: 882605 - DNA, 25 bp, Homo sapien
aagaacagcataaggataaccaccc

SEQ ID NO: 882606 - DNA, 25 bp, Homo sapien
ctgatatgcatccttattaactagg

SEQ ID NO: 882607 - DNA, 25 bp, Homo sapien
cctgttaaaaggctagatgtattac

SEQ ID NO: 882608 - DNA, 25 bp, Homo sapien
tgccattccttaaagttgggatcac

SEQ ID NO: 882609 - DNA, 25 bp, Homo sapien
atgtattacatgacttcaaagctct

SEQ ID NO: 882610 - DNA, 25 bp, Homo sapien
tcaccttgtttggcatatctgggca

SEQ ID NO: 882611 - DNA, 25 bp, Homo sapien
caccttgtttggcatatctgggcat

SEQ ID NO: 882612 - DNA, 25 bp, Homo sapien
gtcaccttgtttggcatatctgggc

SEQ ID NO: 882613 - DNA, 25 bp, Homo sapien
catgtgcacatatcttgtcaccttg

SEQ ID NO: 882614 - DNA, 25 bp, Homo sapien
ctgaggtgatcacccaaaagtagcg

SEQ ID NO: 882615 - DNA, 25 bp, Homo sapien
ggtgatcacccaaaagtagcggctg

SEQ ID NO: 882616 - DNA, 25 bp, Homo sapien
cacccaaaagtagcggctgcttgtt

SEQ ID NO: 882617 - DNA, 25 bp, Homo sapien
gatcacccaaaagtagcggctgctt

SEQ ID NO: 882618 - DNA, 25 bp, Homo sapien
acctcactccatatcataagacatg

SEQ ID NO: 882619 - DNA, 25 bp, Homo sapien
ttccagaaccacgttctcctctgag

SEQ ID NO: 882620 - DNA, 25 bp, Homo sapien
atcataagacatgtctgcattctgg

SEQ ID NO: 882621 - DNA, 25 bp, Homo sapien
cacgttctcctctgaggaggatgaa

SEQ ID NO: 882622 - DNA, 25 bp, Homo sapien
ccaaaatcacaatcctagacacatg

SEQ ID NO: 882623 - DNA, 25 bp, Homo sapien
gcttagctgaccctgcaattttggc

SEQ ID NO: 882624 - DNA, 25 bp, Homo sapien
aagtgcctactaaatcccctccatt

SEQ ID NO: 882625 - DNA, 25 bp, Homo sapien
ttggctttagacctagcggatgctc

SEQ ID NO: 882626 - DNA, 25 bp, Homo sapien
agaggccaattagcagtgctacctt

SEQ ID NO: 882627 - DNA, 25 bp, Homo sapien
ggccaattagcagtgctaccttcgc

SEQ ID NO: 882628 - DNA, 25 bp, Homo sapien
tgtccacaggtcagttttgttacag

SEQ ID NO: 882629 - DNA, 25 bp, Homo sapien
caggtcagttttgttacagaggcca

SEQ ID NO: 882630 - DNA, 25 bp, Homo sapien
taaagcaggcatcggacaattttca

SEQ ID NO: 882631 - DNA, 25 bp, Homo sapien
tcgctgtcagtggaaagagcctgcc

SEQ ID NO: 882632 - DNA, 25 bp, Homo sapien
gatcagaccaggcacattggatttg

SEQ ID NO: 882633 - DNA, 25 bp, Homo sapien
gtacactgtgctcccttgcatgagg

SEQ ID NO: 882634 - DNA, 25 bp, Homo sapien
ccaagatggtaggaacttctggggc

SEQ ID NO: 882635 - DNA, 25 bp, Homo sapien
agatggtaggaacttctggggcagt

SEQ ID NO: 882636 - DNA, 25 bp, Homo sapien
tggtaggaacttctggggcagtcat

SEQ ID NO: 882637 - DNA, 25 bp, Homo sapien
caagatggtaggaacttctggggca

SEQ ID NO: 882638 - DNA, 25 bp, Homo sapien
tctcaaggacaaacatcagtagcaa

SEQ ID NO: 882639 - DNA, 25 bp, Homo sapien
tgttacaggaagaagggaactaata

SEQ ID NO: 882640 - DNA, 25 bp, Homo sapien
agtggactacttataagactttcag

SEQ ID NO: 882641 - DNA, 25 bp, Homo sapien
caatgagattcctgctgttagcgca

SEQ ID NO: 882642 - DNA, 25 bp, Homo sapien
cagatagcgtgtatgaagtgctact

SEQ ID NO: 882643 - DNA, 25 bp, Homo sapien
gacattttttaagtgcagatagcgt

SEQ ID NO: 882644 - DNA, 25 bp, Homo sapien
taagtgcagatagcgtgtatgaagt

SEQ ID NO: 882645 - DNA, 25 bp, Homo sapien
ttttaagtgcagatagcgtgtatga

SEQ ID NO: 882646 - DNA, 25 bp, Homo sapien
ccagtcggatgcattcacaggaagt

SEQ ID NO: 882647 - DNA, 25 bp, Homo sapien
agtcatcatgaagatactggtttcc

SEQ ID NO: 882648 - DNA, 25 bp, Homo sapien
caccagttttgtgctggtaagagtc

SEQ ID NO: 882649 - DNA, 25 bp, Homo sapien
cccttgtggctagatttctgaatgc

SEQ ID NO: 882650 - DNA, 25 bp, Homo sapien
agagacagacgtagtgttggtggca

SEQ ID NO: 882651 - DNA, 25 bp, Homo sapien
acaccttcctgattgtggcggagca

SEQ ID NO: 882652 - DNA, 25 bp, Homo sapien
tccagtgaaattcagtggattttac

SEQ ID NO: 882653 - DNA, 25 bp, Homo sapien
tggattttacaccttcctgattgtg

SEQ ID NO: 882654 - DNA, 25 bp, Homo sapien
caatgggccaatagagaggtgtcat

SEQ ID NO: 882655 - DNA, 25 bp, Homo sapien
gaccacaatgggccaatagagaggt

SEQ ID NO: 882656 - DNA, 25 bp, Homo sapien
cacaatgggccaatagagaggtgtc

SEQ ID NO: 882657 - DNA, 25 bp, Homo sapien
ccacaatgggccaatagagaggtgt

SEQ ID NO: 882658 - DNA, 25 bp, Homo sapien
ccataatggtgaacttagtgccgac

SEQ ID NO: 882659 - DNA, 25 bp, Homo sapien
tggtgaacttagtgccgacccctga

SEQ ID NO: 882660 - DNA, 25 bp, Homo sapien
tcacaggtgtcacccctctacttat

SEQ ID NO: 882661 - DNA, 25 bp, Homo sapien
agtgccgacccctgaccagcatagt

SEQ ID NO: 882662 - DNA, 25 bp, Homo sapien
gccccagcttctccctgtacagggt

SEQ ID NO: 882663 - DNA, 25 bp, Homo sapien
atgaccaggtttgccggcttcaggg

SEQ ID NO: 882664 - DNA, 25 bp, Homo sapien
tccctttgatgaccaggtttgccgg

SEQ ID NO: 882665 - DNA, 25 bp, Homo sapien
tgatgaccaggtttgccggcttcag

SEQ ID NO: 882666 - DNA, 25 bp, Homo sapien
agctcctcgttgtagagagaccgtg

SEQ ID NO: 882667 - DNA, 25 bp, Homo sapien
accagctcctcgttgtagagagacc

SEQ ID NO: 882668 - DNA, 25 bp, Homo sapien
ggcatcaattggctcataatcacca

SEQ ID NO: 882669 - DNA, 25 bp, Homo sapien
aatcaccatgcacgttcatgctcac

SEQ ID NO: 882670 - DNA, 25 bp, Homo sapien
ctcccagccgaggatgtacacctgg

SEQ ID NO: 882671 - DNA, 25 bp, Homo sapien
cagccgaggatgtacacctggtcct

SEQ ID NO: 882672 - DNA, 25 bp, Homo sapien
tgtacacctggtccttgaagaggga

SEQ ID NO: 882673 - DNA, 25 bp, Homo sapien
acacctggtccttgaagagggacac

SEQ ID NO: 882674 - DNA, 25 bp, Homo sapien
agtccatggtgaaggtctcgatgtc

SEQ ID NO: 882675 - DNA, 25 bp, Homo sapien
tactttcctttccactcgctcctgg

SEQ ID NO: 882676 - DNA, 25 bp, Homo sapien
aaaccagtatacaccagctcagcac

SEQ ID NO: 882677 - DNA, 25 bp, Homo sapien
tctcgatgtctaaatgagcgtggta

SEQ ID NO: 882678 - DNA, 25 bp, Homo sapien
tcattccaatgaagcagttctccac

SEQ ID NO: 882679 - DNA, 25 bp, Homo sapien
cttcattccaatgaagcagttctcc

SEQ ID NO: 882680 - DNA, 25 bp, Homo sapien
ttcattccaatgaagcagttctcca

SEQ ID NO: 882681 - DNA, 25 bp, Homo sapien
atacggcccacgcagtgctttcccg

SEQ ID NO: 882682 - DNA, 25 bp, Homo sapien
acggcccacgcagtgctttcccgtg

SEQ ID NO: 882683 - DNA, 25 bp, Homo sapien
tacggcccacgcagtgctttcccgt

SEQ ID NO: 882684 - DNA, 25 bp, Homo sapien
aatacggcccacgcagtgctttccc

SEQ ID NO: 882685 - DNA, 25 bp, Homo sapien
ggccagtcctgggtcttcgggtaga

SEQ ID NO: 882686 - DNA, 25 bp, Homo sapien
ccagtcctgggtcttcgggtagaga

SEQ ID NO: 882687 - DNA, 25 bp, Homo sapien
tggccagtcctgggtcttcgggtag

SEQ ID NO: 882688 - DNA, 25 bp, Homo sapien
cactgcagcccttgaagtggttgta

SEQ ID NO: 882689 - DNA, 25 bp, Homo sapien
tgagtagcaggtgagctcaaaccag

SEQ ID NO: 882690 - DNA, 25 bp, Homo sapien
agtagcaggtgagctcaaaccagac

SEQ ID NO: 882691 - DNA, 25 bp, Homo sapien
agtgagtagcaggtgagctcaaacc

SEQ ID NO: 882692 - DNA, 25 bp, Homo sapien
ctggggggccagtgagtagcaggtg

SEQ ID NO: 882693 - DNA, 25 bp, Homo sapien
gccgtcctcatacagtgagctggac

SEQ ID NO: 882694 - DNA, 25 bp, Homo sapien
cggtgcagggcctggtgtgagaggt

SEQ ID NO: 882695 - DNA, 25 bp, Homo sapien
gcgggcggtgcagggcctggtgtga

SEQ ID NO: 882696 - DNA, 25 bp, Homo sapien
aggtagccgtcctcatacagtgagc

SEQ ID NO: 882697 - DNA, 25 bp, Homo sapien
tttggtcccaagctttggtgccttc

SEQ ID NO: 882698 - DNA, 25 bp, Homo sapien
gccttcttccttgcttcctcgaagt

SEQ ID NO: 882699 - DNA, 25 bp, Homo sapien
ggtgccttcttccttgcttcctcga

SEQ ID NO: 882700 - DNA, 25 bp, Homo sapien
tcttccttgcttcctcgaagtcttc

SEQ ID NO: 882701 - DNA, 25 bp, Homo sapien
tacctgccaactattctctgatacc

SEQ ID NO: 882702 - DNA, 25 bp, Homo sapien
cagagcagggctatatgcaattttt

SEQ ID NO: 882703 - DNA, 25 bp, Homo sapien
ttttttacctgccaactattctctg

SEQ ID NO: 882704 - DNA, 25 bp, Homo sapien
acagagcagggctatatgcaatttt

SEQ ID NO: 882705 - DNA, 25 bp, Homo sapien
agaatgattatagctcatatagaca

SEQ ID NO: 882706 - DNA, 25 bp, Homo sapien
gcctgaatccgcaagtggagccagt

SEQ ID NO: 882707 - DNA, 25 bp, Homo sapien
ctgtgtgagcctgaatccgcaagtg

SEQ ID NO: 882708 - DNA, 25 bp, Homo sapien
tgattatagctcatatagacatatg

SEQ ID NO: 882709 - DNA, 25 bp, Homo sapien
ctccttctttgttaaaattctgctc

SEQ ID NO: 882710 - DNA, 25 bp, Homo sapien
tccttctttgttaaaattctgctct

SEQ ID NO: 882711 - DNA, 25 bp, Homo sapien
aaaattctgctctttgaacccatct

SEQ ID NO: 882712 - DNA, 25 bp, Homo sapien
gctctttgaacccatctctccaggt

SEQ ID NO: 882713 - DNA, 25 bp, Homo sapien
taatcattatggtgtagagaattcc

SEQ ID NO: 882714 - DNA, 25 bp, Homo sapien
gagaattccatttatcatgagcttc

SEQ ID NO: 882715 - DNA, 25 bp, Homo sapien
tcatgagcttcaggggcaatttctt

SEQ ID NO: 882716 - DNA, 25 bp, Homo sapien
cccagatattgttaaggactctaat

SEQ ID NO: 882717 - DNA, 25 bp, Homo sapien
ttatgccatttccaagaaactgtta

SEQ ID NO: 882718 - DNA, 25 bp, Homo sapien
tatgccatttccaagaaactgttac

SEQ ID NO: 882719 - DNA, 25 bp, Homo sapien
tggtaacagtctgacaaaatggagc

SEQ ID NO: 882720 - DNA, 25 bp, Homo sapien
gctggaattctcgattagtggtaac

SEQ ID NO: 882721 - DNA, 25 bp, Homo sapien
tatacacagtccaaatagcaacatg

SEQ ID NO: 882722 - DNA, 25 bp, Homo sapien
aacttcagttcgttggtgtgcttga

SEQ ID NO: 882723 - DNA, 25 bp, Homo sapien
cttcttcattggtgcgtagttccat

SEQ ID NO: 882724 - DNA, 25 bp, Homo sapien
ccttcttcattggtgcgtagttcca

SEQ ID NO: 882725 - DNA, 25 bp, Homo sapien
tttggctaatttgtctgggtgtccc

SEQ ID NO: 882726 - DNA, 25 bp, Homo sapien
gaatgtgaacgcagggttttggcta

SEQ ID NO: 882727 - DNA, 25 bp, Homo sapien
tgaacgcagggttttggctaatttg

SEQ ID NO: 882728 - DNA, 25 bp, Homo sapien
gctaatttgtctgggtgtccccaga

SEQ ID NO: 882729 - DNA, 25 bp, Homo sapien
tctccagattctacatccaagggcc

SEQ ID NO: 882730 - DNA, 25 bp, Homo sapien
gcttgcttacattcagtgcagagct

SEQ ID NO: 882731 - DNA, 25 bp, Homo sapien
ttacattcagtgcagagctctggaa

SEQ ID NO: 882732 - DNA, 25 bp, Homo sapien
tgcttgcttacattcagtgcagagc

SEQ ID NO: 882733 - DNA, 25 bp, Homo sapien
aaatgcttgcttacattcagtgcag

SEQ ID NO: 882734 - DNA, 25 bp, Homo sapien
aatgactagggacatttcaatttca

SEQ ID NO: 882735 - DNA, 25 bp, Homo sapien
gaaatgactagggacatttcaattt

SEQ ID NO: 882736 - DNA, 25 bp, Homo sapien
aagaaatgactagggacatttcaat

SEQ ID NO: 882737 - DNA, 25 bp, Homo sapien
aaatgactagggacatttcaatttc

SEQ ID NO: 882738 - DNA, 25 bp, Homo sapien
gatgccagatggcctggatcaccaa

SEQ ID NO: 882739 - DNA, 25 bp, Homo sapien
ccaggcctgccatttgattggatgc

SEQ ID NO: 882740 - DNA, 25 bp, Homo sapien
ctccctttatcttcccggcactgac

SEQ ID NO: 882741 - DNA, 25 bp, Homo sapien
ccctttatcttcccggcactgactc

SEQ ID NO: 882742 - DNA, 25 bp, Homo sapien
accacgatgcctggccaagacatca

SEQ ID NO: 882743 - DNA, 25 bp, Homo sapien
gatgcctggccaagacatcatgtct

SEQ ID NO: 882744 - DNA, 25 bp, Homo sapien
acgatgcctggccaagacatcatgt

SEQ ID NO: 882745 - DNA, 25 bp, Homo sapien
gaaccacgatgcctggccaagacat

SEQ ID NO: 882746 - DNA, 25 bp, Homo sapien
ctcagttataagctttccagacagg

SEQ ID NO: 882747 - DNA, 25 bp, Homo sapien
tgcagcagatcagtccagtgaaatc

SEQ ID NO: 882748 - DNA, 25 bp, Homo sapien
gatcagtccagtgaaatcgaaactg

SEQ ID NO: 882749 - DNA, 25 bp, Homo sapien
tccagacagggcttgagctacacag

SEQ ID NO: 882750 - DNA, 25 bp, Homo sapien
agtttgccatttgtcaatactaaca

SEQ ID NO: 882751 - DNA, 25 bp, Homo sapien
tttgccatttgtcaatactaacatg

SEQ ID NO: 882752 - DNA, 25 bp, Homo sapien
agccacattggatgaattatggttt

SEQ ID NO: 882753 - DNA, 25 bp, Homo sapien
gccacattggatgaattatggtttt

SEQ ID NO: 882754 - DNA, 25 bp, Homo sapien
ctgcccagtagaaatagcccaacca

SEQ ID NO: 882755 - DNA, 25 bp, Homo sapien
tgcccagtagaaatagcccaaccat

SEQ ID NO: 882756 - DNA, 25 bp, Homo sapien
tctatcttagtacggaaatgactca

SEQ ID NO: 882757 - DNA, 25 bp, Homo sapien
tgatatagaagaagatataaagcct

SEQ ID NO: 882758 - DNA, 25 bp, Homo sapien
cacccagcctccgtaagttattgaa

SEQ ID NO: 882759 - DNA, 25 bp, Homo sapien
gactcaagccttatggtgctaccat

SEQ ID NO: 882760 - DNA, 25 bp, Homo sapien
ctttgtttagcctggtatcaatccc

SEQ ID NO: 882761 - DNA, 25 bp, Homo sapien
ttctggacaactgcttatggataca

SEQ ID NO: 882762 - DNA, 25 bp, Homo sapien
ctgcttatggatacagtatggaaca

SEQ ID NO: 882763 - DNA, 25 bp, Homo sapien
ttagcctggtatcaatcccctcatc

SEQ ID NO: 882764 - DNA, 25 bp, Homo sapien
ggtgtattctcaggttaccatgtca

SEQ ID NO: 882765 - DNA, 25 bp, Homo sapien
atggcctttcttgttgccacctttc

SEQ ID NO: 882766 - DNA, 25 bp, Homo sapien
ggttaccatgtcattgatggaagaa

SEQ ID NO: 882767 - DNA, 25 bp, Homo sapien
ggcctttcttgttgccacctttctg

SEQ ID NO: 882768 - DNA, 25 bp, Homo sapien
agcagcagagttctgtagccttcat

SEQ ID NO: 882769 - DNA, 25 bp, Homo sapien
gcagcagagttctgtagccttcatc

SEQ ID NO: 882770 - DNA, 25 bp, Homo sapien
aagccaggagcaccttttgcttgtc

SEQ ID NO: 882771 - DNA, 25 bp, Homo sapien
gccaggagcaccttttgcttgtctt

SEQ ID NO: 882772 - DNA, 25 bp, Homo sapien
gaagccaggagcaccttttgcttgt

SEQ ID NO: 882773 - DNA, 25 bp, Homo sapien
ttctgggttgtataacttctcctgt

SEQ ID NO: 882774 - DNA, 25 bp, Homo sapien
caggtgatacgcccctttggaggga

SEQ ID NO: 882775 - DNA, 25 bp, Homo sapien
tcaggtgatacgcccctttggaggg

SEQ ID NO: 882776 - DNA, 25 bp, Homo sapien
ggtccggatgcgcctcaggaaagcc

SEQ ID NO: 882777 - DNA, 25 bp, Homo sapien
gtccggatgcgcctcaggaaagcca

SEQ ID NO: 882778 - DNA, 25 bp, Homo sapien
cgcccgggtccggatgcgcctcagg

SEQ ID NO: 882779 - DNA, 25 bp, Homo sapien
ccgggtccggatgcgcctcaggaaa

SEQ ID NO: 882780 - DNA, 25 bp, Homo sapien
agtgataaacaacgtggctgccgga

SEQ ID NO: 882781 - DNA, 25 bp, Homo sapien
catctctacaggatttgcagggtca

SEQ ID NO: 882782 - DNA, 25 bp, Homo sapien
tatactcacagctgctaacaggaca

SEQ ID NO: 882783 - DNA, 25 bp, Homo sapien
ggagtgactctagctttgccagtga

SEQ ID NO: 882784 - DNA, 25 bp, Homo sapien
gcaaagctagcatagagttcgcata

SEQ ID NO: 882785 - DNA, 25 bp, Homo sapien
tgtaaacttcttgtataaccacagt

SEQ ID NO: 882786 - DNA, 25 bp, Homo sapien
ccacagtaccttatgagaattaaga

SEQ ID NO: 882787 - DNA, 25 bp, Homo sapien
caccaagcttcccttattgtaaact

SEQ ID NO: 882788 - DNA, 25 bp, Homo sapien
cttccagtgattgtacctcagttca

SEQ ID NO: 882789 - DNA, 25 bp, Homo sapien
tgtgaatctggccacgacaaattta

SEQ ID NO: 882790 - DNA, 25 bp, Homo sapien
tactgtcttatatgttggcttcgtc

SEQ ID NO: 882791 - DNA, 25 bp, Homo sapien
ggcttcgtcagaatgtttcatatta

SEQ ID NO: 882792 - DNA, 25 bp, Homo sapien
tatttatcatggtaaaactccagtg

SEQ ID NO: 882793 - DNA, 25 bp, Homo sapien
catttatcacactctcatgagagca

SEQ ID NO: 882794 - DNA, 25 bp, Homo sapien
catgtcactaagttgtcatcccaca

SEQ ID NO: 882795 - DNA, 25 bp, Homo sapien
cataaattgatgtgcagcatagggt

SEQ ID NO: 882796 - DNA, 25 bp, Homo sapien
aatagttgatggtaaaatgtaaatg

SEQ ID NO: 882797 - DNA, 25 bp, Homo sapien
gaaatagttgatggtaaaatgtaaa

SEQ ID NO: 882798 - DNA, 25 bp, Homo sapien
aaatagttgatggtaaaatgtaaat

SEQ ID NO: 882799 - DNA, 25 bp, Homo sapien
ttcctcgtattgagatctggtcacc

SEQ ID NO: 882800 - DNA, 25 bp, Homo sapien
cattggccaccgttcgtaattcctc

SEQ ID NO: 882801 - DNA, 25 bp, Homo sapien
cgtaattcctcgtattgagatctgg

SEQ ID NO: 882802 - DNA, 25 bp, Homo sapien
ccgttcgtaattcctcgtattgaga

SEQ ID NO: 882803 - DNA, 25 bp, Homo sapien
agtttgtatctgaccgagaatcccg

SEQ ID NO: 882804 - DNA, 25 bp, Homo sapien
cagcagctgcaggttagtttcctaa

SEQ ID NO: 882805 - DNA, 25 bp, Homo sapien
gagaatcccgcgttgagcctgttcg

SEQ ID NO: 882806 - DNA, 25 bp, Homo sapien
cttgtgtttagcttcgccgcctcgg

SEQ ID NO: 882807 - DNA, 25 bp, Homo sapien
aacagtcaaagtgcattttattgcc

SEQ ID NO: 882808 - DNA, 25 bp, Homo sapien
gttcaaatctgacgggcaaagccag

SEQ ID NO: 882809 - DNA, 25 bp, Homo sapien
cctcctgaccttggccagtatttgg

SEQ ID NO: 882810 - DNA, 25 bp, Homo sapien
tattgccaacagaacacttcaggag

SEQ ID NO: 882811 - DNA, 25 bp, Homo sapien
tgttagagacttagaggcagccaca

SEQ ID NO: 882812 - DNA, 25 bp, Homo sapien
ttcccagtgtcctcacgtacgcagg

SEQ ID NO: 882813 - DNA, 25 bp, Homo sapien
tactccctgattgacagttctcttc

SEQ ID NO: 882814 - DNA, 25 bp, Homo sapien
cctcttagaccttactccctgattg

SEQ ID NO: 882815 - DNA, 25 bp, Homo sapien
aggactccgacagaatcccttgtgt

SEQ ID NO: 882816 - DNA, 25 bp, Homo sapien
ctcaggactccgacagaatcccttg

SEQ ID NO: 882817 - DNA, 25 bp, Homo sapien
gagtttctgtgacctactgtcatag

SEQ ID NO: 882818 - DNA, 25 bp, Homo sapien
tactgtcatagccagatgtcacagc

SEQ ID NO: 882819 - DNA, 25 bp, Homo sapien
gaccagtagtttcccctgggatgga

SEQ ID NO: 882820 - DNA, 25 bp, Homo sapien
agagtaaataatgccgctggtaagg

SEQ ID NO: 882821 - DNA, 25 bp, Homo sapien
tgccgctggtaaggggtacatctgc

SEQ ID NO: 882822 - DNA, 25 bp, Homo sapien
agcctcatgaggagggaccagtagt

SEQ ID NO: 882823 - DNA, 25 bp, Homo sapien
aaagaacgcctggtgaacggcatcc

SEQ ID NO: 882824 - DNA, 25 bp, Homo sapien
caaaagcctacaatgggattggccg

SEQ ID NO: 882825 - DNA, 25 bp, Homo sapien
tcagattctcaacctccagtgaggg

SEQ ID NO: 882826 - DNA, 25 bp, Homo sapien
gattggccgactcacagctggatta

SEQ ID NO: 882827 - DNA, 25 bp, Homo sapien
tgtaagagccagcatttcaacctgt

SEQ ID NO: 882828 - DNA, 25 bp, Homo sapien
tgagtcactattacatgcaaggcat

SEQ ID NO: 882829 - DNA, 25 bp, Homo sapien
tatgatcaatcacgtcagatgcttg

SEQ ID NO: 882830 - DNA, 25 bp, Homo sapien
gctccataccttgtaccatgctgct

SEQ ID NO: 882831 - DNA, 25 bp, Homo sapien
gatggcaatagaatcccctgagttg

SEQ ID NO: 882832 - DNA, 25 bp, Homo sapien
taacgttttcagtgtgtctttcggc

SEQ ID NO: 882833 - DNA, 25 bp, Homo sapien
tttgcaagcctgagattcctctgcc

SEQ ID NO: 882834 - DNA, 25 bp, Homo sapien
taacacaatgttagagccttcagct

SEQ ID NO: 882835 - DNA, 25 bp, Homo sapien
agtcctagctactcaaggtgtagag

SEQ ID NO: 882836 - DNA, 25 bp, Homo sapien
cccaagaggtcaagggtgcaatgag

SEQ ID NO: 882837 - DNA, 25 bp, Homo sapien
cctagctactcaaggtgtagaggtg

SEQ ID NO: 882838 - DNA, 25 bp, Homo sapien
caagaggtcaagggtgcaatgagcc

SEQ ID NO: 882839 - DNA, 25 bp, Homo sapien
tgcccaattgtgaggagccgagaag

SEQ ID NO: 882840 - DNA, 25 bp, Homo sapien
cagagtcaggcaagtatctcaggca

SEQ ID NO: 882841 - DNA, 25 bp, Homo sapien
gaagaggttcatctgtccctagcct

SEQ ID NO: 882842 - DNA, 25 bp, Homo sapien
gaacttaatataggtccgggcacag

SEQ ID NO: 882843 - DNA, 25 bp, Homo sapien
caacttacttgatcattatcattag

SEQ ID NO: 882844 - DNA, 25 bp, Homo sapien
tgccacacaattgcaaccgctgtgt

SEQ ID NO: 882845 - DNA, 25 bp, Homo sapien
tttattgcatcaaacaacttacttg

SEQ ID NO: 882846 - DNA, 25 bp, Homo sapien
cattatcattagtagcaagctgcca

SEQ ID NO: 882847 - DNA, 25 bp, Homo sapien
tctagaagcgtaaggtaacactggc

SEQ ID NO: 882848 - DNA, 25 bp, Homo sapien
tgttgaagcccgtctcaaggagctg

SEQ ID NO: 882849 - DNA, 25 bp, Homo sapien
cgagtgccctgtgtatagaaccaaa

SEQ ID NO: 882850 - DNA, 25 bp, Homo sapien
tactagaaactaactcagggctgag

SEQ ID NO: 882851 - DNA, 25 bp, Homo sapien
taaactgtggtcactcgtgctaagg

SEQ ID NO: 882852 - DNA, 25 bp, Homo sapien
agtgagttactgtttgggaagccaa

SEQ ID NO: 882853 - DNA, 25 bp, Homo sapien
taacaaagttcagcatacagacagg

SEQ ID NO: 882854 - DNA, 25 bp, Homo sapien
caggttaaacgatgtgtgtggtcta

SEQ ID NO: 882855 - DNA, 25 bp, Homo sapien
tcttgttggagtactctatggtgag

SEQ ID NO: 882856 - DNA, 25 bp, Homo sapien
caatggtatgcatgtcttgttggag

SEQ ID NO: 882857 - DNA, 25 bp, Homo sapien
tatggtgaggtggctggttctgttt

SEQ ID NO: 882858 - DNA, 25 bp, Homo sapien
tatgcatgtcttgttggagtactct

SEQ ID NO: 882859 - DNA, 25 bp, Homo sapien
ttaattgtcttctaccagctccttt

SEQ ID NO: 882860 - DNA, 25 bp, Homo sapien
ttgtcttctaccagctccttttgta

SEQ ID NO: 882861 - DNA, 25 bp, Homo sapien
aattgtcttctaccagctccttttg

SEQ ID NO: 882862 - DNA, 25 bp, Homo sapien
gtcttctaccagctccttttgtaag

SEQ ID NO: 882863 - DNA, 25 bp, Homo sapien
tagggaaaatatcaggcctgagctt

SEQ ID NO: 882864 - DNA, 25 bp, Homo sapien
tatataagtaagtaagtcacacggg

SEQ ID NO: 882865 - DNA, 25 bp, Homo sapien
tctagcaaaggagaagattccctaa

SEQ ID NO: 882866 - DNA, 25 bp, Homo sapien
gtcacacgggaaggcaacaactact

SEQ ID NO: 882867 - DNA, 25 bp, Homo sapien
cgcttccgacagtagctgcaattgc

SEQ ID NO: 882868 - DNA, 25 bp, Homo sapien
aattgcagatcccacgacagggggg

SEQ ID NO: 882869 - DNA, 25 bp, Homo sapien
gatcccacgacaggggggacacacc

SEQ ID NO: 882870 - DNA, 25 bp, Homo sapien
acagcggccgtcacgcttccgacag

SEQ ID NO: 882871 - DNA, 25 bp, Homo sapien
gggtccagcaatgccgatctgacat

SEQ ID NO: 882872 - DNA, 25 bp, Homo sapien
tcttttgtcgacactgatggcacgt

SEQ ID NO: 882873 - DNA, 25 bp, Homo sapien
atagcggttccgcaggcatggtcca

SEQ ID NO: 882874 - DNA, 25 bp, Homo sapien
cacactgtcttggtgtcgatggtct

SEQ ID NO: 882875 - DNA, 25 bp, Homo sapien
tctaagtcctcttcggtgatatcct

SEQ ID NO: 882876 - DNA, 25 bp, Homo sapien
gacgtcgtctgtactcccggcattt

SEQ ID NO: 882877 - DNA, 25 bp, Homo sapien
tccactggccgaaaagaagatatac

SEQ ID NO: 882878 - DNA, 25 bp, Homo sapien
tatctcgaacagttatggcaacatt

SEQ ID NO: 882879 - DNA, 25 bp, Homo sapien
gagacagtgaagttctctagagcaa

SEQ ID NO: 882880 - DNA, 25 bp, Homo sapien
cgtgatctgtccctccgagaaggcc

SEQ ID NO: 882881 - DNA, 25 bp, Homo sapien
tccgcaaatttagcggctgagacag

SEQ ID NO: 882882 - DNA, 25 bp, Homo sapien
cgcgcactccgggttgggttcatac

SEQ ID NO: 882883 - DNA, 25 bp, Homo sapien
gttcgtactgggaagaaatctggca

SEQ ID NO: 882884 - DNA, 25 bp, Homo sapien
gaagaaatctggcatcgagttcaat

SEQ ID NO: 882885 - DNA, 25 bp, Homo sapien
tcaattccgccaataactgggcaag

SEQ ID NO: 882886 - DNA, 25 bp, Homo sapien
gcatcgagttcaattccgccaataa

SEQ ID NO: 882887 - DNA, 25 bp, Homo sapien
agaatcttccctttgtatcacctgt

SEQ ID NO: 882888 - DNA, 25 bp, Homo sapien
tcctggctctcatcccgagagtcat

SEQ ID NO: 882889 - DNA, 25 bp, Homo sapien
ctccttgatgttcatggtccttttc

SEQ ID NO: 882890 - DNA, 25 bp, Homo sapien
tctcatcccgagagtcatcctcaga

SEQ ID NO: 882891 - DNA, 25 bp, Homo sapien
tcttctagacctgcttcttctaggg

SEQ ID NO: 882892 - DNA, 25 bp, Homo sapien
tgaaaggctactcgaagaccaatac

SEQ ID NO: 882893 - DNA, 25 bp, Homo sapien
ttctcattctgtaagcgtgcgctag

SEQ ID NO: 882894 - DNA, 25 bp, Homo sapien
ctagaaaacaactgctcggaagaac

SEQ ID NO: 882895 - DNA, 25 bp, Homo sapien
cggtgacgaccatcaaccccaaact

SEQ ID NO: 882896 - DNA, 25 bp, Homo sapien
gacccaggatcagttcagggactct

SEQ ID NO: 882897 - DNA, 25 bp, Homo sapien
agaacacggaatggcaccgatacgg

SEQ ID NO: 882898 - DNA, 25 bp, Homo sapien
aatggcaccgatacggacccaggat

SEQ ID NO: 882899 - DNA, 25 bp, Homo sapien
tttaccagatgtggaacagctcact

SEQ ID NO: 882900 - DNA, 25 bp, Homo sapien
tcctcatcatcgacaggcctctctt

SEQ ID NO: 882901 - DNA, 25 bp, Homo sapien
cagatgtggaacagctcactacaga

SEQ ID NO: 882902 - DNA, 25 bp, Homo sapien
atgtggaacagctcactacagaggc

SEQ ID NO: 882903 - DNA, 25 bp, Homo sapien
cacatcccttcctgttgtaattatt

SEQ ID NO: 882904 - DNA, 25 bp, Homo sapien
acgttaccacccacatcccttcctg

SEQ ID NO: 882905 - DNA, 25 bp, Homo sapien
catcccttcctgttgtaattattac

SEQ ID NO: 882906 - DNA, 25 bp, Homo sapien
ttaccacccacatcccttcctgttg

SEQ ID NO: 882907 - DNA, 25 bp, Homo sapien
actctgcgtaaatcctgcaaaatcc

SEQ ID NO: 882908 - DNA, 25 bp, Homo sapien
tcagatcactctgcgtaaatcctgc

SEQ ID NO: 882909 - DNA, 25 bp, Homo sapien
gtctttccattcagatcactctgcg

SEQ ID NO: 882910 - DNA, 25 bp, Homo sapien
tctgggttagtctttccattcagat

SEQ ID NO: 882911 - DNA, 25 bp, Homo sapien
gaagtatttggaatgaaagcgcaca

SEQ ID NO: 882912 - DNA, 25 bp, Homo sapien
tgaagtatttggaatgaaagcgcac

SEQ ID NO: 882913 - DNA, 25 bp, Homo sapien
ctgtgaagtatttggaatgaaagcg

SEQ ID NO: 882914 - DNA, 25 bp, Homo sapien
agtatttggaatgaaagcgcacatc

SEQ ID NO: 882915 - DNA, 25 bp, Homo sapien
cagcctttcaaagccggagtctcct

SEQ ID NO: 882916 - DNA, 25 bp, Homo sapien
ggagtctcctccaagtgggtgagca

SEQ ID NO: 882917 - DNA, 25 bp, Homo sapien
tgccaaagctggcaaccagacacgt

SEQ ID NO: 882918 - DNA, 25 bp, Homo sapien
gaacaaccatggctaggtggcaagt

SEQ ID NO: 882919 - DNA, 25 bp, Homo sapien
tgctcggccctttagacatgttctg

SEQ ID NO: 882920 - DNA, 25 bp, Homo sapien
tacaaaaggagtcatcatagcagca

SEQ ID NO: 882921 - DNA, 25 bp, Homo sapien
caaatgctcctcaaggtggatccaa

SEQ ID NO: 882922 - DNA, 25 bp, Homo sapien
tctgtttcttaatgcccggtgcctg

SEQ ID NO: 882923 - DNA, 25 bp, Homo sapien
cggaggtcaatcctataacagatcc

SEQ ID NO: 882924 - DNA, 25 bp, Homo sapien
tgagcattcgggtaagagctacgag

SEQ ID NO: 882925 - DNA, 25 bp, Homo sapien
tcctagtaggaagggatgagcattc

SEQ ID NO: 882926 - DNA, 25 bp, Homo sapien
taagagctacgagggctacggcagc

SEQ ID NO: 882927 - DNA, 25 bp, Homo sapien
gagagagaagacaagctccacaaaa

SEQ ID NO: 882928 - DNA, 25 bp, Homo sapien
gagaagtgagtttcagatctccctt

SEQ ID NO: 882929 - DNA, 25 bp, Homo sapien
tagcaaccaggaccagtccaactgg

SEQ ID NO: 882930 - DNA, 25 bp, Homo sapien
gagggaaggccaagaacaaaagatg

SEQ ID NO: 882931 - DNA, 25 bp, Homo sapien
gaacatccaaaccaagattcaggcc

SEQ ID NO: 882932 - DNA, 25 bp, Homo sapien
cagatgaacacatctgcttggaagg

SEQ ID NO: 882933 - DNA, 25 bp, Homo sapien
gattcaggcctccagatgaacacat

SEQ ID NO: 882934 - DNA, 25 bp, Homo sapien
aaaccaagattcaggcctccagatg

SEQ ID NO: 882935 - DNA, 25 bp, Homo sapien
catgggaacatcatctcggaagcca

SEQ ID NO: 882936 - DNA, 25 bp, Homo sapien
cagctctcctctgacgagagggttt

SEQ ID NO: 882937 - DNA, 25 bp, Homo sapien
gagtcaaaactatcgcagctctcct

SEQ ID NO: 882938 - DNA, 25 bp, Homo sapien
actgggggcgttaaagatgtcagcc

SEQ ID NO: 882939 - DNA, 25 bp, Homo sapien
tttttaccagccacacgtagtgcag

SEQ ID NO: 882940 - DNA, 25 bp, Homo sapien
tgggataccccaagttcagtgatgc

SEQ ID NO: 882941 - DNA, 25 bp, Homo sapien
tacgcaaggaaaacacccagactag

SEQ ID NO: 882942 - DNA, 25 bp, Homo sapien
attcgccctcatggacccgtgaaag

SEQ ID NO: 882943 - DNA, 25 bp, Homo sapien
ctgctggcccagaagcttcttttaa

SEQ ID NO: 882944 - DNA, 25 bp, Homo sapien
taaatggtttaaaggaggaggagca

SEQ ID NO: 882945 - DNA, 25 bp, Homo sapien
ctggcccagaagcttcttttaacat

SEQ ID NO: 882946 - DNA, 25 bp, Homo sapien
tacaaaattcaaacagccctgctgg

SEQ ID NO: 882947 - DNA, 25 bp, Homo sapien
tacagtcagggtgtcagtgagaccc

SEQ ID NO: 882948 - DNA, 25 bp, Homo sapien
cacaggtactagaatggaatccaca

SEQ ID NO: 882949 - DNA, 25 bp, Homo sapien
tgcacggtggaactcatagggctct

SEQ ID NO: 882950 - DNA, 25 bp, Homo sapien
tctttaacacaccacgaagggcgag

SEQ ID NO: 882951 - DNA, 25 bp, Homo sapien
gaaaaagagctatataggagtagaa

SEQ ID NO: 882952 - DNA, 25 bp, Homo sapien
ggtatcattcaaaccagattgctat

SEQ ID NO: 882953 - DNA, 25 bp, Homo sapien
gaatttttgtatgtcgctgaagtga

SEQ ID NO: 882954 - DNA, 25 bp, Homo sapien
tctgttcatggatacacaacacata

SEQ ID NO: 882955 - DNA, 25 bp, Homo sapien
gatgacttccaaactatgcctgcga

SEQ ID NO: 882956 - DNA, 25 bp, Homo sapien
cctgatgacttccaaactatgcctg

SEQ ID NO: 882957 - DNA, 25 bp, Homo sapien
cagccctgatgacttccaaactatg

SEQ ID NO: 882958 - DNA, 25 bp, Homo sapien
aaagaaccagccctgatgacttcca

SEQ ID NO: 882959 - DNA, 25 bp, Homo sapien
acagcgtgctcctgcctatttacaa

SEQ ID NO: 882960 - DNA, 25 bp, Homo sapien
aacagcgtgctcctgcctatttaca

SEQ ID NO: 882961 - DNA, 25 bp, Homo sapien
tgcctatttacaagaacatttagca

SEQ ID NO: 882962 - DNA, 25 bp, Homo sapien
tatttacaagaacatttagcatcat

SEQ ID NO: 882963 - DNA, 25 bp, Homo sapien
gatttgggatcttgcagcttgttta

SEQ ID NO: 882964 - DNA, 25 bp, Homo sapien
cttaacgcgtaattggggtcgtgct

SEQ ID NO: 882965 - DNA, 25 bp, Homo sapien
gctgtgcatatgatttgggatcttg

SEQ ID NO: 882966 - DNA, 25 bp, Homo sapien
ttaactcggcccaatgacgttacca

SEQ ID NO: 882967 - DNA, 25 bp, Homo sapien
caagggccacgtttccagcccaagg

SEQ ID NO: 882968 - DNA, 25 bp, Homo sapien
cagcaggaccgggtggcaaagggaa

SEQ ID NO: 882969 - DNA, 25 bp, Homo sapien
ggctgggcgcgccagatccccagtg

SEQ ID NO: 882970 - DNA, 25 bp, Homo sapien
agtcaaactgtgggtgcgtccggac

SEQ ID NO: 882971 - DNA, 25 bp, Homo sapien
ggactcaccacggcccggcgcacca

SEQ ID NO: 882972 - DNA, 25 bp, Homo sapien
ggcgcaccaagaacgccccgcgccc

SEQ ID NO: 882973 - DNA, 25 bp, Homo sapien
gcacgcggccacgggagcccggact

SEQ ID NO: 882974 - DNA, 25 bp, Homo sapien
gctccagtctcctcccagcacgcgg

SEQ ID NO: 882975 - DNA, 25 bp, Homo sapien
gctaagattactggtgcgagccagc

SEQ ID NO: 882976 - DNA, 25 bp, Homo sapien
tgcccaggatggtaagtgctaagat

SEQ ID NO: 882977 - DNA, 25 bp, Homo sapien
cctaactgaacttagccctgaagtt

SEQ ID NO: 882978 - DNA, 25 bp, Homo sapien
tgggaggacaacaggtatgcatcac

SEQ ID NO: 882979 - DNA, 25 bp, Homo sapien
ctgagggcagagttaccccagatat

SEQ ID NO: 882980 - DNA, 25 bp, Homo sapien
ccagatatagttccctggtttccca

SEQ ID NO: 882981 - DNA, 25 bp, Homo sapien
ctcggtagttaaagagatctgagct

SEQ ID NO: 882982 - DNA, 25 bp, Homo sapien
tggtcctgctcggtagttaaagaga

SEQ ID NO: 882983 - DNA, 25 bp, Homo sapien
ctggtaaggccattaagattttggc

SEQ ID NO: 882984 - DNA, 25 bp, Homo sapien
tggtaaggccattaagattttggca

SEQ ID NO: 882985 - DNA, 25 bp, Homo sapien
taaggccattaagattttggcaaag

SEQ ID NO: 882986 - DNA, 25 bp, Homo sapien
ggtaaggccattaagattttggcaa

SEQ ID NO: 882987 - DNA, 25 bp, Homo sapien
gatagccttaggctgtcaatggaaa

SEQ ID NO: 882988 - DNA, 25 bp, Homo sapien
agccttagactgatagcctttgctt

SEQ ID NO: 882989 - DNA, 25 bp, Homo sapien
cttagactgatagcctttgcttggt

SEQ ID NO: 882990 - DNA, 25 bp, Homo sapien
tacaagccacagctttgtttactga

SEQ ID NO: 882991 - DNA, 25 bp, Homo sapien
tcacacatatacctccatgatgtct

SEQ ID NO: 882992 - DNA, 25 bp, Homo sapien
cccctcacacatatacctccatgat

SEQ ID NO: 882993 - DNA, 25 bp, Homo sapien
cacacatatacctccatgatgtctg

SEQ ID NO: 882994 - DNA, 25 bp, Homo sapien
cctcacacatatacctccatgatgt

SEQ ID NO: 882995 - DNA, 25 bp, Homo sapien
ctctcttcaggatggtatcaccatc

SEQ ID NO: 882996 - DNA, 25 bp, Homo sapien
tcttcaggatggtatcaccatcatc

SEQ ID NO: 882997 - DNA, 25 bp, Homo sapien
cctctcttcaggatggtatcaccat

SEQ ID NO: 882998 - DNA, 25 bp, Homo sapien
ttcaggatggtatcaccatcatcac

SEQ ID NO: 882999 - DNA, 25 bp, Homo sapien
ttgtcatcatacaggacacagccaa

SEQ ID NO: 883000 - DNA, 25 bp, Homo sapien
gtcatcatacaggacacagccaagc

SEQ ID NO: 883001 - DNA, 25 bp, Homo sapien
cgttgtcatcatacaggacacagcc

SEQ ID NO: 883002 - DNA, 25 bp, Homo sapien
ctgcgttgtcatcatacaggacaca

SEQ ID NO: 883003 - DNA, 25 bp, Homo sapien
ctttgaaagcgtcatagatgcttct

SEQ ID NO: 883004 - DNA, 25 bp, Homo sapien
tgcctttcaaccctgatgtctgctc

SEQ ID NO: 883005 - DNA, 25 bp, Homo sapien
acaggctgtgctgggagtcatcagg

SEQ ID NO: 883006 - DNA, 25 bp, Homo sapien
ccatcacagcaacaggctttgtcca

SEQ ID NO: 883007 - DNA, 25 bp, Homo sapien
tgggacgatgtgacaggagcaccaa

SEQ ID NO: 883008 - DNA, 25 bp, Homo sapien
gaagctcttcaatcgtgtcccacca

SEQ ID NO: 883009 - DNA, 25 bp, Homo sapien
gtgtatctaccacctgagcaagagg

SEQ ID NO: 883010 - DNA, 25 bp, Homo sapien
tgatgaccgcaagatgacaaggcct

SEQ ID NO: 883011 - DNA, 25 bp, Homo sapien
cccaaatcgtggtgatgatgaccgc

SEQ ID NO: 883012 - DNA, 25 bp, Homo sapien
gcaacttgacgtttcctggaaatct

SEQ ID NO: 883013 - DNA, 25 bp, Homo sapien
ctctttgtgctcaagtattagtaac

SEQ ID NO: 883014 - DNA, 25 bp, Homo sapien
tctcctacttctagtctgtcctgtt

SEQ ID NO: 883015 - DNA, 25 bp, Homo sapien
tgttccaagtgtttcgtctctttgt

SEQ ID NO: 883016 - DNA, 25 bp, Homo sapien
gaagacctaaaagactgtgtcacat

SEQ ID NO: 883017 - DNA, 25 bp, Homo sapien
aggtaccagggcttttgccacataa

SEQ ID NO: 883018 - DNA, 25 bp, Homo sapien
actgggctgggattgtcaaggtacc

SEQ ID NO: 883019 - DNA, 25 bp, Homo sapien
gcatgagaggtctatctggaaacat

SEQ ID NO: 883020 - DNA, 25 bp, Homo sapien
gctgacaaatgtttcgcttctcccc

SEQ ID NO: 883021 - DNA, 25 bp, Homo sapien
ataatgatgaagtggctggcttctg

SEQ ID NO: 883022 - DNA, 25 bp, Homo sapien
tccttataatttaggcaagacttaa

SEQ ID NO: 883023 - DNA, 25 bp, Homo sapien
agtgaaggatcccagaaaccctcag

SEQ ID NO: 883024 - DNA, 25 bp, Homo sapien
tatcatcatcccttggctatggagg

SEQ ID NO: 883025 - DNA, 25 bp, Homo sapien
tatggaggacggtcccaacaccagt

SEQ ID NO: 883026 - DNA, 25 bp, Homo sapien
ggtcccaacaccagtgcattcttca

SEQ ID NO: 883027 - DNA, 25 bp, Homo sapien
tcttcaggtcctccgccagagcagt

SEQ ID NO: 883028 - DNA, 25 bp, Homo sapien
tatggtagcaacgattattaaacac

SEQ ID NO: 883029 - DNA, 25 bp, Homo sapien
tcctgaatcccggttttgggacgca

SEQ ID NO: 883030 - DNA, 25 bp, Homo sapien
gaacgacctcacctttacttcacta

SEQ ID NO: 883031 - DNA, 25 bp, Homo sapien
ggattaggaaccctactcagctcca

SEQ ID NO: 883032 - DNA, 25 bp, Homo sapien
ctcagctgatttgtggtcactactg

SEQ ID NO: 883033 - DNA, 25 bp, Homo sapien
gtggtcactactgggctctcgttgt

SEQ ID NO: 883034 - DNA, 25 bp, Homo sapien
tctcgttgtcttcttgaagtctcac

SEQ ID NO: 883035 - DNA, 25 bp, Homo sapien
gatgaaaaagttggactgttggctt

SEQ ID NO: 883036 - DNA, 25 bp, Homo sapien
tcctgccaatcagacagcctcaaag

SEQ ID NO: 883037 - DNA, 25 bp, Homo sapien
ggatctgagtcaagcagtaatcaga

SEQ ID NO: 883038 - DNA, 25 bp, Homo sapien
cccagtgtcgggcagtttggatctg

SEQ ID NO: 883039 - DNA, 25 bp, Homo sapien
agcggttaggcttagtcagtattct

SEQ ID NO: 883040 - DNA, 25 bp, Homo sapien
gccctgaaggcatgataatcttggg

SEQ ID NO: 883041 - DNA, 25 bp, Homo sapien
aagtggctgggcacccttgcgagat

SEQ ID NO: 883042 - DNA, 25 bp, Homo sapien
gggcacccttgcgagatgagaacca

SEQ ID NO: 883043 - DNA, 25 bp, Homo sapien
gatggcgctgaatcctcaataagaa

SEQ ID NO: 883044 - DNA, 25 bp, Homo sapien
tacctgcttagttctagccgcacag

SEQ ID NO: 883045 - DNA, 25 bp, Homo sapien
tttggagaccttaagaatgatgtcc

SEQ ID NO: 883046 - DNA, 25 bp, Homo sapien
agccgcacaggacatcccagctgta

SEQ ID NO: 883047 - DNA, 25 bp, Homo sapien
gatttaccttcgagatcttacctgc

SEQ ID NO: 883048 - DNA, 25 bp, Homo sapien
aatccgtgctctgtccatcatgttg

SEQ ID NO: 883049 - DNA, 25 bp, Homo sapien
caaaccaggacgagtggtcaaccta

SEQ ID NO: 883050 - DNA, 25 bp, Homo sapien
taagaacttagctgagctcaagaag

SEQ ID NO: 883051 - DNA, 25 bp, Homo sapien
ggacctggctgtatccctcagaaaa

SEQ ID NO: 883052 - DNA, 25 bp, Homo sapien
acatgccattttcctgcctcagcct

SEQ ID NO: 883053 - DNA, 25 bp, Homo sapien
tacaggtgtctgccaccacgcccgg

SEQ ID NO: 883054 - DNA, 25 bp, Homo sapien
tgcaactccgcctcccgggtacatg

SEQ ID NO: 883055 - DNA, 25 bp, Homo sapien
gcaactccgcctcccgggtacatgc

SEQ ID NO: 883056 - DNA, 25 bp, Homo sapien
gaaaacatgggttcctctagcgcca

SEQ ID NO: 883057 - DNA, 25 bp, Homo sapien
aaatggaagcactgtttggagacaa

SEQ ID NO: 883058 - DNA, 25 bp, Homo sapien
tcagccgcaggcaaatgggtatttt

SEQ ID NO: 883059 - DNA, 25 bp, Homo sapien
caacagtcaagctttgggtccaaac

SEQ ID NO: 883060 - DNA, 25 bp, Homo sapien
cacctctgcgtagtaaacggcgtct

SEQ ID NO: 883061 - DNA, 25 bp, Homo sapien
tcaggaatgtgttggaattgctgcc

SEQ ID NO: 883062 - DNA, 25 bp, Homo sapien
aacggcgtctttcctgggtctatga

SEQ ID NO: 883063 - DNA, 25 bp, Homo sapien
gctctgtgatatgacaatgctgctg

SEQ ID NO: 883064 - DNA, 25 bp, Homo sapien
tggaactgaatgtctgggaccacct

SEQ ID NO: 883065 - DNA, 25 bp, Homo sapien
gaccacctcgaagcttgtttcaaag

SEQ ID NO: 883066 - DNA, 25 bp, Homo sapien
gaatgtgcattgtgcaccaggctga

SEQ ID NO: 883067 - DNA, 25 bp, Homo sapien
tcttctggaaaggaaggcccgaatg

SEQ ID NO: 883068 - DNA, 25 bp, Homo sapien
gacaatgcttggagcttggacctgg

SEQ ID NO: 883069 - DNA, 25 bp, Homo sapien
gccccatgaggtggttgccctctga

SEQ ID NO: 883070 - DNA, 25 bp, Homo sapien
gcatcgaagttgctccacatggctg

SEQ ID NO: 883071 - DNA, 25 bp, Homo sapien
tattgagcaagtattcatccagcac

SEQ ID NO: 883072 - DNA, 25 bp, Homo sapien
taagctcacggatttccctacttcc

SEQ ID NO: 883073 - DNA, 25 bp, Homo sapien
cctggtggaagtcaccatggtattt

SEQ ID NO: 883074 - DNA, 25 bp, Homo sapien
gaagtcaccatggtatttgcttgta

SEQ ID NO: 883075 - DNA, 25 bp, Homo sapien
gcttgtattattgcaataagctcac

SEQ ID NO: 883076 - DNA, 25 bp, Homo sapien
gaattcagataagagatgggggcag

SEQ ID NO: 883077 - DNA, 25 bp, Homo sapien
tagcaggtgcaatcggctgcaggaa

SEQ ID NO: 883078 - DNA, 25 bp, Homo sapien
ttacttttcacacaaccttgtgagg

SEQ ID NO: 883079 - DNA, 25 bp, Homo sapien
tgaaagagtagcaggtgcaatcggc

SEQ ID NO: 883080 - DNA, 25 bp, Homo sapien
tattaacaaggagcactcaagcccc

SEQ ID NO: 883081 - DNA, 25 bp, Homo sapien
gaaatcctgtgttggaccactgcgg

SEQ ID NO: 883082 - DNA, 25 bp, Homo sapien
cagaaacaatgtcaggatggcctta

SEQ ID NO: 883083 - DNA, 25 bp, Homo sapien
gaaaagcctggattggctgcgccat

SEQ ID NO: 883084 - DNA, 25 bp, Homo sapien
gcccatgctattgttagtaactgcg

SEQ ID NO: 883085 - DNA, 25 bp, Homo sapien
ctttggagggtttgctcagcccagc

SEQ ID NO: 883086 - DNA, 25 bp, Homo sapien
tgtgggccacattccatgacggcag

SEQ ID NO: 883087 - DNA, 25 bp, Homo sapien
ggaagtctgctctccggttctcacg

SEQ ID NO: 883088 - DNA, 25 bp, Homo sapien
tctgaatggaccagccctggaggat

SEQ ID NO: 883089 - DNA, 25 bp, Homo sapien
tggaccagccctggaggatgccctt

SEQ ID NO: 883090 - DNA, 25 bp, Homo sapien
ttctctgaatggaccagccctggag

SEQ ID NO: 883091 - DNA, 25 bp, Homo sapien
aatggaccagccctggaggatgccc

SEQ ID NO: 883092 - DNA, 25 bp, Homo sapien
catgctgggccaaactaagtctctc

SEQ ID NO: 883093 - DNA, 25 bp, Homo sapien
cattccatagtgtgggcaaggagcc

SEQ ID NO: 883094 - DNA, 25 bp, Homo sapien
tcaaaaagcattggacacgcctcag

SEQ ID NO: 883095 - DNA, 25 bp, Homo sapien
caaggtgacaagtatctagcaggca

SEQ ID NO: 883096 - DNA, 25 bp, Homo sapien
tctgccttcttgtcccgagagtagc

SEQ ID NO: 883097 - DNA, 25 bp, Homo sapien
tgtcccgagagtagcatggagaaac

SEQ ID NO: 883098 - DNA, 25 bp, Homo sapien
ccttcttgtcccgagagtagcatgg

SEQ ID NO: 883099 - DNA, 25 bp, Homo sapien
ccttctgccttcttgtcccgagagt

SEQ ID NO: 883100 - DNA, 25 bp, Homo sapien
atagacattcccgtagctcaaagtg

SEQ ID NO: 883101 - DNA, 25 bp, Homo sapien
aaagcaacgtgcttggcatagacat

SEQ ID NO: 883102 - DNA, 25 bp, Homo sapien
tggtggctgacatcacttcctgaac

SEQ ID NO: 883103 - DNA, 25 bp, Homo sapien
tcctgaacacgctttggctggcttt

SEQ ID NO: 883104 - DNA, 25 bp, Homo sapien
ctgcagatacaggggaggtgaggca

SEQ ID NO: 883105 - DNA, 25 bp, Homo sapien
tacaggggaggtgaggcagtggggc

SEQ ID NO: 883106 - DNA, 25 bp, Homo sapien
gcagatacaggggaggtgaggcagt

SEQ ID NO: 883107 - DNA, 25 bp, Homo sapien
gatacaggggaggtgaggcagtggg

SEQ ID NO: 883108 - DNA, 25 bp, Homo sapien
ggctcgatcctgtgtgagagctcaa

SEQ ID NO: 883109 - DNA, 25 bp, Homo sapien
gatcctgtgtgagagctcaaacaga

SEQ ID NO: 883110 - DNA, 25 bp, Homo sapien
ctcgatcctgtgtgagagctcaaac

SEQ ID NO: 883111 - DNA, 25 bp, Homo sapien
ccgaggctcgatcctgtgtgagagc

SEQ ID NO: 883112 - DNA, 25 bp, Homo sapien
tgatgctcttttggagacaggtcac

SEQ ID NO: 883113 - DNA, 25 bp, Homo sapien
cttgatgctcttttggagacaggtc

SEQ ID NO: 883114 - DNA, 25 bp, Homo sapien
ctcttgatgctcttttggagacagg

SEQ ID NO: 883115 - DNA, 25 bp, Homo sapien
ctttaactcttgatgctcttttgga

SEQ ID NO: 883116 - DNA, 25 bp, Homo sapien
tgtggttaacagacgaaatagcttc

SEQ ID NO: 883117 - DNA, 25 bp, Homo sapien
tggactaaagtctacccagagaagg

SEQ ID NO: 883118 - DNA, 25 bp, Homo sapien
cactcacatatctagggcagtcaag

SEQ ID NO: 883119 - DNA, 25 bp, Homo sapien
tccgtgctgataaggaaccaggatg

SEQ ID NO: 883120 - DNA, 25 bp, Homo sapien
taagacctgtatgacatgggtggct

SEQ ID NO: 883121 - DNA, 25 bp, Homo sapien
tggataacacgatgctacaaaggta

SEQ ID NO: 883122 - DNA, 25 bp, Homo sapien
caaggcttcctggttttagcaagta

SEQ ID NO: 883123 - DNA, 25 bp, Homo sapien
gatggcacaatgaatggttctaacc

SEQ ID NO: 883124 - DNA, 25 bp, Homo sapien
caatatgaagctgtactcatcagca

SEQ ID NO: 883125 - DNA, 25 bp, Homo sapien
tccttggttaagtgagactgatatc

SEQ ID NO: 883126 - DNA, 25 bp, Homo sapien
caccttcctgtctatacttggagca

SEQ ID NO: 883127 - DNA, 25 bp, Homo sapien
acacagagggttgctctctgatgag

SEQ ID NO: 883128 - DNA, 25 bp, Homo sapien
tgattttgagccaatggacaagcaa

SEQ ID NO: 883129 - DNA, 25 bp, Homo sapien
tcttcacagcataaacttgctgcca

SEQ ID NO: 883130 - DNA, 25 bp, Homo sapien
gggataataatctgccatatcttgt

SEQ ID NO: 883131 - DNA, 25 bp, Homo sapien
tgctaaactcaccagtgattttgag

SEQ ID NO: 883132 - DNA, 25 bp, Homo sapien
tggtaccaacgtagagtcaatttac

SEQ ID NO: 883133 - DNA, 25 bp, Homo sapien
tacttgtgaccacagttggtaccaa

SEQ ID NO: 883134 - DNA, 25 bp, Homo sapien
ccaacatgcagtgaggaaacaaaga

SEQ ID NO: 883135 - DNA, 25 bp, Homo sapien
aattgattaccacccaatacttgtg

SEQ ID NO: 883136 - DNA, 25 bp, Homo sapien
tctcagggttcggacagtgtctgcg

SEQ ID NO: 883137 - DNA, 25 bp, Homo sapien
cagggttcggacagtgtctgcgatc

SEQ ID NO: 883138 - DNA, 25 bp, Homo sapien
ttcggacagtgtctgcgatcatatg

SEQ ID NO: 883139 - DNA, 25 bp, Homo sapien
agtgtctcagggttcggacagtgtc

SEQ ID NO: 883140 - DNA, 25 bp, Homo sapien
cacctggccggcaaaagtcttctta

SEQ ID NO: 883141 - DNA, 25 bp, Homo sapien
gagtgagctgtctctaccactttta

SEQ ID NO: 883142 - DNA, 25 bp, Homo sapien
cttttgtacttgcaagagtgagctg

SEQ ID NO: 883143 - DNA, 25 bp, Homo sapien
tacagctgctttggacaagatccca

SEQ ID NO: 883144 - DNA, 25 bp, Homo sapien
gaggcttctgctggattactggaga

SEQ ID NO: 883145 - DNA, 25 bp, Homo sapien
ccagccctatggttagttggcagtc

SEQ ID NO: 883146 - DNA, 25 bp, Homo sapien
cactggttcactttagggaggtcaa

SEQ ID NO: 883147 - DNA, 25 bp, Homo sapien
ccacagatgctggtcagaaggaagg

SEQ ID NO: 883148 - DNA, 25 bp, Homo sapien
ttttcaaaattgacaagattatcca

SEQ ID NO: 883149 - DNA, 25 bp, Homo sapien
cagcttttcaaaattgacaagatta

SEQ ID NO: 883150 - DNA, 25 bp, Homo sapien
caaaattgacaagattatccaaaaa

SEQ ID NO: 883151 - DNA, 25 bp, Homo sapien
aattgacaagattatccaaaaaagt

SEQ ID NO: 883152 - DNA, 25 bp, Homo sapien
agtggcttagtccatttcccctgca

SEQ ID NO: 883153 - DNA, 25 bp, Homo sapien
tgaaggtctggcctctactaactct

SEQ ID NO: 883154 - DNA, 25 bp, Homo sapien
gtgtagcaaatgcaaacctgtgcac

SEQ ID NO: 883155 - DNA, 25 bp, Homo sapien
ccgtgacacggtattcagaaaagag

SEQ ID NO: 883156 - DNA, 25 bp, Homo sapien
aattatgtgattaaaaaagcctaag

SEQ ID NO: 883157 - DNA, 25 bp, Homo sapien
aaagcctaagaattaatgttgtata

SEQ ID NO: 883158 - DNA, 25 bp, Homo sapien
cagtaactttaagtacaatgaagta

SEQ ID NO: 883159 - DNA, 25 bp, Homo sapien
ccaaaatgtctcatcttaggcataa

SEQ ID NO: 883160 - DNA, 25 bp, Homo sapien
gaggctggatgaaagagtattccta

SEQ ID NO: 883161 - DNA, 25 bp, Homo sapien
gctgcacgatgtacggcaactcaca

SEQ ID NO: 883162 - DNA, 25 bp, Homo sapien
gaatattttcggcttggatgacgca

SEQ ID NO: 883163 - DNA, 25 bp, Homo sapien
gaagactcagtgagtagctgcacga

SEQ ID NO: 883164 - DNA, 25 bp, Homo sapien
atctttttgaatgcatctctgtagg

SEQ ID NO: 883165 - DNA, 25 bp, Homo sapien
caataagggcatgaaagggattttt

SEQ ID NO: 883166 - DNA, 25 bp, Homo sapien
ctttaagcaataagggcatgaaagg

SEQ ID NO: 883167 - DNA, 25 bp, Homo sapien
catctctgtaggctttgtgatttag

SEQ ID NO: 883168 - DNA, 25 bp, Homo sapien
ttcaagttcagagaaaagtttctta

SEQ ID NO: 883169 - DNA, 25 bp, Homo sapien
tgttaaactttcaagttcagagaaa

SEQ ID NO: 883170 - DNA, 25 bp, Homo sapien
ctttcaagttcagagaaaagtttct

SEQ ID NO: 883171 - DNA, 25 bp, Homo sapien
tcaagttcagagaaaagtttcttaa

SEQ ID NO: 883172 - DNA, 25 bp, Homo sapien
gactgacagaagcagtgttgagacc

SEQ ID NO: 883173 - DNA, 25 bp, Homo sapien
tcccaggtctgcgacagtcgactga

SEQ ID NO: 883174 - DNA, 25 bp, Homo sapien
agtgttgagacccatcacaatggca

SEQ ID NO: 883175 - DNA, 25 bp, Homo sapien
ggtctgcgacagtcgactgacagaa

SEQ ID NO: 883176 - DNA, 25 bp, Homo sapien
tcctctaaagcctcaacagacttag

SEQ ID NO: 883177 - DNA, 25 bp, Homo sapien
aacgttttcctgatcctgcttccca

SEQ ID NO: 883178 - DNA, 25 bp, Homo sapien
acacccttggggtatgagctctcgc

SEQ ID NO: 883179 - DNA, 25 bp, Homo sapien
gcctcaacagacttagatcttcttc

SEQ ID NO: 883180 - DNA, 25 bp, Homo sapien
cagctgcactcgcttgcccagctgg

SEQ ID NO: 883181 - DNA, 25 bp, Homo sapien
ccagctgcactcgcttgcccagctg

SEQ ID NO: 883182 - DNA, 25 bp, Homo sapien
gctgaacgtgaagtagatcagctct

SEQ ID NO: 883183 - DNA, 25 bp, Homo sapien
agctggacctcattgcatctctgga

SEQ ID NO: 883184 - DNA, 25 bp, Homo sapien
ctgctgaacgtgaagtagatcagct

SEQ ID NO: 883185 - DNA, 25 bp, Homo sapien
ctccgtggccacccaaagctggacc

SEQ ID NO: 883186 - DNA, 25 bp, Homo sapien
gaatagactccaatcaaaattcatt

SEQ ID NO: 883187 - DNA, 25 bp, Homo sapien
aaaatcctcatcgacctttgctgtg

SEQ ID NO: 883188 - DNA, 25 bp, Homo sapien
gagcaagatcccaagtgttcattcc

SEQ ID NO: 883189 - DNA, 25 bp, Homo sapien
ttcattaattccagagcaagatccc

SEQ ID NO: 883190 - DNA, 25 bp, Homo sapien
gttgcaaacttctaagctggtctca

SEQ ID NO: 883191 - DNA, 25 bp, Homo sapien
atgatgagatcacaactcattgcag

SEQ ID NO: 883192 - DNA, 25 bp, Homo sapien
gacaaggtcctaccctatcacctgg

SEQ ID NO: 883193 - DNA, 25 bp, Homo sapien
agcacacacctagggacaacaggtg

SEQ ID NO: 883194 - DNA, 25 bp, Homo sapien
tatattcgaccagatgcctcgaggg

SEQ ID NO: 883195 - DNA, 25 bp, Homo sapien
tccggtagacatatattcgaccaga

SEQ ID NO: 883196 - DNA, 25 bp, Homo sapien
cgagggatttggagatgactaagtc

SEQ ID NO: 883197 - DNA, 25 bp, Homo sapien
caaagtgtccgccaggtctttccgg

SEQ ID NO: 883198 - DNA, 25 bp, Homo sapien
aatagaaggcttatctagagtacaa

SEQ ID NO: 883199 - DNA, 25 bp, Homo sapien
catgcctctctattcagttcttggg

SEQ ID NO: 883200 - DNA, 25 bp, Homo sapien
ggaggaaattcagtatcccacagta

SEQ ID NO: 883201 - DNA, 25 bp, Homo sapien
ccacagtacccaactgttgtcatgg

SEQ ID NO: 883202 - DNA, 25 bp, Homo sapien
cccagagaatgtgatggccaccaga

SEQ ID NO: 883203 - DNA, 25 bp, Homo sapien
agagaatgtgatggccaccagagcc

SEQ ID NO: 883204 - DNA, 25 bp, Homo sapien
ccccagagaatgtgatggccaccag

SEQ ID NO: 883205 - DNA, 25 bp, Homo sapien
cagagaatgtgatggccaccagagc

SEQ ID NO: 883206 - DNA, 25 bp, Homo sapien
atcttttctgccacgacttttagga

SEQ ID NO: 883207 - DNA, 25 bp, Homo sapien
tggatcttttctgccacgactttta

SEQ ID NO: 883208 - DNA, 25 bp, Homo sapien
gatcttttctgccacgacttttagg

SEQ ID NO: 883209 - DNA, 25 bp, Homo sapien
tcttttctgccacgacttttaggat

SEQ ID NO: 883210 - DNA, 25 bp, Homo sapien
cttgggctatactggaaacttttgc

SEQ ID NO: 883211 - DNA, 25 bp, Homo sapien
acttttgccttcacactgacatagg

SEQ ID NO: 883212 - DNA, 25 bp, Homo sapien
gccttcacactgacataggagtgct

SEQ ID NO: 883213 - DNA, 25 bp, Homo sapien
ctcttgggctatactggaaactttt

SEQ ID NO: 883214 - DNA, 25 bp, Homo sapien
ggatgacacttaatatgagccaaca

SEQ ID NO: 883215 - DNA, 25 bp, Homo sapien
tgagccaacagaaccatgtatcagc

SEQ ID NO: 883216 - DNA, 25 bp, Homo sapien
tggccttgcaggagcttctaccgta

SEQ ID NO: 883217 - DNA, 25 bp, Homo sapien
tctttcacttggtacggatgacact

SEQ ID NO: 883218 - DNA, 25 bp, Homo sapien
agttcctctatgctggagccagttc

SEQ ID NO: 883219 - DNA, 25 bp, Homo sapien
tcagtcacagttcctctatgctgga

SEQ ID NO: 883220 - DNA, 25 bp, Homo sapien
ccttaagactgaattggtggaaaag

SEQ ID NO: 883221 - DNA, 25 bp, Homo sapien
tctccttaagactgaattggtggaa

SEQ ID NO: 883222 - DNA, 25 bp, Homo sapien
ttgtggtgaatattcatctacagtg

SEQ ID NO: 883223 - DNA, 25 bp, Homo sapien
ttttgtggtgaatattcatctacag

SEQ ID NO: 883224 - DNA, 25 bp, Homo sapien
ttttttgtggtgaatattcatctac

SEQ ID NO: 883225 - DNA, 25 bp, Homo sapien
ctttttttgtggtgaatattcatct

SEQ ID NO: 883226 - DNA, 25 bp, Homo sapien
tcttactctagaatctaaagctatt

SEQ ID NO: 883227 - DNA, 25 bp, Homo sapien
aatcttactctagaatctaaagcta

SEQ ID NO: 883228 - DNA, 25 bp, Homo sapien
gaatcttactctagaatctaaagct

SEQ ID NO: 883229 - DNA, 25 bp, Homo sapien
cttactctagaatctaaagctattt

SEQ ID NO: 883230 - DNA, 25 bp, Homo sapien
tattatttaccatttttgtgtagct

SEQ ID NO: 883231 - DNA, 25 bp, Homo sapien
ttattatttaccatttttgtgtagc

SEQ ID NO: 883232 - DNA, 25 bp, Homo sapien
attatttaccatttttgtgtagctt

SEQ ID NO: 883233 - DNA, 25 bp, Homo sapien
tgtttacgaaatagaaactgcactg

SEQ ID NO: 883234 - DNA, 25 bp, Homo sapien
gactgcaataaaagaagaccaccag

SEQ ID NO: 883235 - DNA, 25 bp, Homo sapien
ggtttgctacctcagattaatttgc

SEQ ID NO: 883236 - DNA, 25 bp, Homo sapien
gattgaggactatacacatggtttg

SEQ ID NO: 883237 - DNA, 25 bp, Homo sapien
taaagttgggtgttgccaatctgaa

SEQ ID NO: 883238 - DNA, 25 bp, Homo sapien
aaagattaatgacagatacctaggg

SEQ ID NO: 883239 - DNA, 25 bp, Homo sapien
ctcagggaacccataaaattgagct

SEQ ID NO: 883240 - DNA, 25 bp, Homo sapien
gggacacttagacatgccaagagtc

SEQ ID NO: 883241 - DNA, 25 bp, Homo sapien
cctccccattccatagagatagtta

SEQ ID NO: 883242 - DNA, 25 bp, Homo sapien
cccattccatagagatagttacaag

SEQ ID NO: 883243 - DNA, 25 bp, Homo sapien
ttccatagagatagttacaagcccc

SEQ ID NO: 883244 - DNA, 25 bp, Homo sapien
ccatagagatagttacaagccccaa

SEQ ID NO: 883245 - DNA, 25 bp, Homo sapien
cggtgcattccaagtatcttttgaa

SEQ ID NO: 883246 - DNA, 25 bp, Homo sapien
tgacgacggtgcattccaagtatct

SEQ ID NO: 883247 - DNA, 25 bp, Homo sapien
taaacatcatccagtacattcctat

SEQ ID NO: 883248 - DNA, 25 bp, Homo sapien
tctttttcaagtattggatattcat

SEQ ID NO: 883249 - DNA, 25 bp, Homo sapien
aacaagatgcaagactttacgtttc

SEQ ID NO: 883250 - DNA, 25 bp, Homo sapien
acagagcaatccactgggaaacaag

SEQ ID NO: 883251 - DNA, 25 bp, Homo sapien
ttgtacagagcaatccactgggaaa

SEQ ID NO: 883252 - DNA, 25 bp, Homo sapien
aaacaagatgcaagactttacgttt

SEQ ID NO: 883253 - DNA, 25 bp, Homo sapien
ctacgcggaacgtctgagttttcct

SEQ ID NO: 883254 - DNA, 25 bp, Homo sapien
tacgcggaacgtctgagttttcctc

SEQ ID NO: 883255 - DNA, 25 bp, Homo sapien
acgcggaacgtctgagttttcctct

SEQ ID NO: 883256 - DNA, 25 bp, Homo sapien
aacaatttatctaggccaaccatgg

SEQ ID NO: 883257 - DNA, 25 bp, Homo sapien
tagggaatgctatgacatcaaacac

SEQ ID NO: 883258 - DNA, 25 bp, Homo sapien
tgtctccaaaatgataagctgagtg

SEQ ID NO: 883259 - DNA, 25 bp, Homo sapien
aaatgactaggaatgcaacagcagc

SEQ ID NO: 883260 - DNA, 25 bp, Homo sapien
cttcttttcctgtgaatataatacc

SEQ ID NO: 883261 - DNA, 25 bp, Homo sapien
ccttaaacaaatgttcttctcttct

SEQ ID NO: 883262 - DNA, 25 bp, Homo sapien
tcttttcctgtgaatataatacctt

SEQ ID NO: 883263 - DNA, 25 bp, Homo sapien
ttttcctgtgaatataataccttca

SEQ ID NO: 883264 - DNA, 25 bp, Homo sapien
catctgtctgagaggaagtggacac

SEQ ID NO: 883265 - DNA, 25 bp, Homo sapien
gggacatctgtctgagaggaagtgg

SEQ ID NO: 883266 - DNA, 25 bp, Homo sapien
gtgggacatctgtctgagaggaagt

SEQ ID NO: 883267 - DNA, 25 bp, Homo sapien
gacatctgtctgagaggaagtggac

SEQ ID NO: 883268 - DNA, 25 bp, Homo sapien
agcagcctgaagataatgaaggata

SEQ ID NO: 883269 - DNA, 25 bp, Homo sapien
gcagcctgaagataatgaaggatat

SEQ ID NO: 883270 - DNA, 25 bp, Homo sapien
gtcatgaagacagtgtacgtgagaa

SEQ ID NO: 883271 - DNA, 25 bp, Homo sapien
acagtgtacgtgagaaggaagtcat

SEQ ID NO: 883272 - DNA, 25 bp, Homo sapien
tgaagacagtgtacgtgagaaggaa

SEQ ID NO: 883273 - DNA, 25 bp, Homo sapien
aagtcatcagttgtcatgaagacag

SEQ ID NO: 883274 - DNA, 25 bp, Homo sapien
gaattttagccaggaaagacattat

SEQ ID NO: 883275 - DNA, 25 bp, Homo sapien
ccccagaaccatgtgcatggcagaa

SEQ ID NO: 883276 - DNA, 25 bp, Homo sapien
ggataagaagagcagctgcttatct

SEQ ID NO: 883277 - DNA, 25 bp, Homo sapien
ggagggattaggagaattttagcca

SEQ ID NO: 883278 - DNA, 25 bp, Homo sapien
tactgatgtcatataggacttttcc

SEQ ID NO: 883279 - DNA, 25 bp, Homo sapien
tcaataaatttttgggactatcctc

SEQ ID NO: 883280 - DNA, 25 bp, Homo sapien
ttttgaatacaagaaacatccttgc

SEQ ID NO: 883281 - DNA, 25 bp, Homo sapien
ggacttttccctatcatctgctact

SEQ ID NO: 883282 - DNA, 25 bp, Homo sapien
ttggtccatgaggtaaaagcagaag

SEQ ID NO: 883283 - DNA, 25 bp, Homo sapien
tcagggcccaggaaatcaagttcaa

SEQ ID NO: 883284 - DNA, 25 bp, Homo sapien
tgtgtgacgggcaagtgtgctcttc

SEQ ID NO: 883285 - DNA, 25 bp, Homo sapien
ttatgctagtgtccatcagggccca

SEQ ID NO: 883286 - DNA, 25 bp, Homo sapien
ggtaaaaggctgatatccttatcaa

SEQ ID NO: 883287 - DNA, 25 bp, Homo sapien
cagttacttgccttggataaagcga

SEQ ID NO: 883288 - DNA, 25 bp, Homo sapien
gcgattttcacagtttaagatggta

SEQ ID NO: 883289 - DNA, 25 bp, Homo sapien
tgaaaaagactaagtagcagcccag

SEQ ID NO: 883290 - DNA, 25 bp, Homo sapien
tgtatccctggcatttagaacagtg

SEQ ID NO: 883291 - DNA, 25 bp, Homo sapien
gaattgccaggaaatggctagtaga

SEQ ID NO: 883292 - DNA, 25 bp, Homo sapien
tttcaccactgagggaaaattgctg

SEQ ID NO: 883293 - DNA, 25 bp, Homo sapien
cagtgcctatgcatttggaggtcaa

SEQ ID NO: 883294 - DNA, 25 bp, Homo sapien
ttaacattctaacagctctacgagg

SEQ ID NO: 883295 - DNA, 25 bp, Homo sapien
atttcctaagccctcgtgcaagggc

SEQ ID NO: 883296 - DNA, 25 bp, Homo sapien
gcagtaacatgaagttagaccaaat

SEQ ID NO: 883297 - DNA, 25 bp, Homo sapien
tgcaagggctatgtgatggtgtttt

SEQ ID NO: 883298 - DNA, 25 bp, Homo sapien
aaatatagatccctttgaatcaaag

SEQ ID NO: 883299 - DNA, 25 bp, Homo sapien
tccctaaggtagacctgtcgtaaca

SEQ ID NO: 883300 - DNA, 25 bp, Homo sapien
gcaaaacacactttatcctctctag

SEQ ID NO: 883301 - DNA, 25 bp, Homo sapien
cagaaatcatcgttcactacagaag

SEQ ID NO: 883302 - DNA, 25 bp, Homo sapien
agaaagggttaactagctacagtca

SEQ ID NO: 883303 - DNA, 25 bp, Homo sapien
tgcccagtgatgtttgcccaatttc

SEQ ID NO: 883304 - DNA, 25 bp, Homo sapien
cctcatgcccagtgatgtttgccca

SEQ ID NO: 883305 - DNA, 25 bp, Homo sapien
aaagctccagaaacaatttgatttt

SEQ ID NO: 883306 - DNA, 25 bp, Homo sapien
ttctctcatgtaaacctcatgccca

SEQ ID NO: 883307 - DNA, 25 bp, Homo sapien
ctcagggagtgttattgctaactta

SEQ ID NO: 883308 - DNA, 25 bp, Homo sapien
tgaagaactatcagacaaaagaaga

SEQ ID NO: 883309 - DNA, 25 bp, Homo sapien
ccaggttcacaaatatctagttacc

SEQ ID NO: 883310 - DNA, 25 bp, Homo sapien
tctagttaccagactcatagttttc

SEQ ID NO: 883311 - DNA, 25 bp, Homo sapien
aatcttattaacagaaaccacatgg

SEQ ID NO: 883312 - DNA, 25 bp, Homo sapien
ccaagtgccgttcttgaagtttgga

SEQ ID NO: 883313 - DNA, 25 bp, Homo sapien
gacttccacttaggcatctctttta

SEQ ID NO: 883314 - DNA, 25 bp, Homo sapien
gaattaggtgaggtgaccccaacca

SEQ ID NO: 883315 - DNA, 25 bp, Homo sapien
tcttccccacttaggttggtgctag

SEQ ID NO: 883316 - DNA, 25 bp, Homo sapien
cttcttccccacttaggttggtgct

SEQ ID NO: 883317 - DNA, 25 bp, Homo sapien
cttccccacttaggttggtgctagg

SEQ ID NO: 883318 - DNA, 25 bp, Homo sapien
ttcttccccacttaggttggtgcta

SEQ ID NO: 883319 - DNA, 25 bp, Homo sapien
tcaagccatgaagtcctggtccgct

SEQ ID NO: 883320 - DNA, 25 bp, Homo sapien
tcctggtccgcttggctttgtgagc

SEQ ID NO: 883321 - DNA, 25 bp, Homo sapien
cctgagggtactgacaagggcatca

SEQ ID NO: 883322 - DNA, 25 bp, Homo sapien
gggaacctgtgagcacctgagccat

SEQ ID NO: 883323 - DNA, 25 bp, Homo sapien
aatgaaatgaagctaggcctgggca

SEQ ID NO: 883324 - DNA, 25 bp, Homo sapien
caaaatgcaggctacagtcagaggc

SEQ ID NO: 883325 - DNA, 25 bp, Homo sapien
ggtgcaagtcattcaaaaggtgctc

SEQ ID NO: 883326 - DNA, 25 bp, Homo sapien
caagtcattcaaaaggtgctccaaa

SEQ ID NO: 883327 - DNA, 25 bp, Homo sapien
tgcaagtcattcaaaaggtgctcca

SEQ ID NO: 883328 - DNA, 25 bp, Homo sapien
ccaggtgcaagtcattcaaaaggtg

SEQ ID NO: 883329 - DNA, 25 bp, Homo sapien
catcctcggtggaagactgcgagcg

SEQ ID NO: 883330 - DNA, 25 bp, Homo sapien
gagcggctgctccattcatcgtcct

SEQ ID NO: 883331 - DNA, 25 bp, Homo sapien
taaggcacatcgaaggtaggcaagg

SEQ ID NO: 883332 - DNA, 25 bp, Homo sapien
gagagtccactgagtcatcctcggt

SEQ ID NO: 883333 - DNA, 25 bp, Homo sapien
ggcatcccctaaatgctaaaagatc

SEQ ID NO: 883334 - DNA, 25 bp, Homo sapien
tctggctgctaagagctctgcagtc

SEQ ID NO: 883335 - DNA, 25 bp, Homo sapien
gtccatctggctgctaagagctctg

SEQ ID NO: 883336 - DNA, 25 bp, Homo sapien
tgctaaaagatcttgccatccctgt

SEQ ID NO: 883337 - DNA, 25 bp, Homo sapien
aaacgggagcgcgtgcctctgtggc

SEQ ID NO: 883338 - DNA, 25 bp, Homo sapien
gaaacgggagcgcgtgcctctgtgg

SEQ ID NO: 883339 - DNA, 25 bp, Homo sapien
aaaggaaacgggagcgcgtgcctct

SEQ ID NO: 883340 - DNA, 25 bp, Homo sapien
aggaaacgggagcgcgtgcctctgt

SEQ ID NO: 883341 - DNA, 25 bp, Homo sapien
atggctctccgcactcccagctgtg

SEQ ID NO: 883342 - DNA, 25 bp, Homo sapien
tgaacagtcgtcacttcatcatctt

SEQ ID NO: 883343 - DNA, 25 bp, Homo sapien
ggacgctctggtcttgctctttaac

SEQ ID NO: 883344 - DNA, 25 bp, Homo sapien
gctctttaacctgaacagtcgtcac

SEQ ID NO: 883345 - DNA, 25 bp, Homo sapien
tatcaatagcatctatgtcattgtg

SEQ ID NO: 883346 - DNA, 25 bp, Homo sapien
tgatgtactatcaatagcatctatg

SEQ ID NO: 883347 - DNA, 25 bp, Homo sapien
gcatctatgtcattgtgatagtttt

SEQ ID NO: 883348 - DNA, 25 bp, Homo sapien
tcatattgatgtactatcaatagca

SEQ ID NO: 883349 - DNA, 25 bp, Homo sapien
gtgccaaccagacccgaatcagtga

SEQ ID NO: 883350 - DNA, 25 bp, Homo sapien
tgtctatgcaacttggaacacagag

SEQ ID NO: 883351 - DNA, 25 bp, Homo sapien
tataagctgcctcgggcctgatggg

SEQ ID NO: 883352 - DNA, 25 bp, Homo sapien
gaagagagctaaacacggcagggac

SEQ ID NO: 883353 - DNA, 25 bp, Homo sapien
tcgccaagaagtgtacacctctaga

SEQ ID NO: 883354 - DNA, 25 bp, Homo sapien
gaagtgtacacctctagagaccaaa

SEQ ID NO: 883355 - DNA, 25 bp, Homo sapien
ccgcaaatctcactcgccaagaagt

SEQ ID NO: 883356 - DNA, 25 bp, Homo sapien
tcactcgccaagaagtgtacacctc

SEQ ID NO: 883357 - DNA, 25 bp, Homo sapien
tgaagtgagccagctggaatgccac

SEQ ID NO: 883358 - DNA, 25 bp, Homo sapien
agggtgactgacgatctgcaaaggc

SEQ ID NO: 883359 - DNA, 25 bp, Homo sapien
tctgcagagactcggaggtacatcc

SEQ ID NO: 883360 - DNA, 25 bp, Homo sapien
caaacaaggtgtgatgccagccacg

SEQ ID NO: 883361 - DNA, 25 bp, Homo sapien
acctgcatgctgtggaccagggctc

SEQ ID NO: 883362 - DNA, 25 bp, Homo sapien
ctgcatgctgtggaccagggctcct

SEQ ID NO: 883363 - DNA, 25 bp, Homo sapien
ttagaaggcccgagggaataggtga

SEQ ID NO: 883364 - DNA, 25 bp, Homo sapien
agaaggcccgagggaataggtgaag

SEQ ID NO: 883365 - DNA, 25 bp, Homo sapien
gggccaaagaaggtcaaaatcctca

SEQ ID NO: 883366 - DNA, 25 bp, Homo sapien
caaagaaggtcaaaatcctcacgta

SEQ ID NO: 883367 - DNA, 25 bp, Homo sapien
tggagggccaaagaaggtcaaaatc

SEQ ID NO: 883368 - DNA, 25 bp, Homo sapien
gaaggtcaaaatcctcacgtacaaa

SEQ ID NO: 883369 - DNA, 25 bp, Homo sapien
ccacaacctgtgatccattaaagtc

SEQ ID NO: 883370 - DNA, 25 bp, Homo sapien
cagggatggattcttccaaagactt

SEQ ID NO: 883371 - DNA, 25 bp, Homo sapien
taaagtctgaacgtctgcatccact

SEQ ID NO: 883372 - DNA, 25 bp, Homo sapien
tccactctttaccagggatggattc

SEQ ID NO: 883373 - DNA, 25 bp, Homo sapien
tattataatctcattggccgtgact

SEQ ID NO: 883374 - DNA, 25 bp, Homo sapien
gtgtagatttctatagttacagatt

SEQ ID NO: 883375 - DNA, 25 bp, Homo sapien
aggacacaggaagtgtagatttcta

SEQ ID NO: 883376 - DNA, 25 bp, Homo sapien
cgtgactacttataatattctggac

SEQ ID NO: 883377 - DNA, 25 bp, Homo sapien
gaaagccacccaagcaggatcataa

SEQ ID NO: 883378 - DNA, 25 bp, Homo sapien
tcccacttggtgagagcatctataa

SEQ ID NO: 883379 - DNA, 25 bp, Homo sapien
tttcaggaggaccaagcggaacgtc

SEQ ID NO: 883380 - DNA, 25 bp, Homo sapien
tgtgtggcacaagaaagtggtccca

SEQ ID NO: 883381 - DNA, 25 bp, Homo sapien
tgtccgtctgcaaaaactgatagtt

SEQ ID NO: 883382 - DNA, 25 bp, Homo sapien
ttgccagcttctggactagttcaat

SEQ ID NO: 883383 - DNA, 25 bp, Homo sapien
caattcgtccgatttcatctctttc

SEQ ID NO: 883384 - DNA, 25 bp, Homo sapien
tgttcttttttgtccgtctgcaaaa

SEQ ID NO: 883385 - DNA, 25 bp, Homo sapien
aagcgaagatatacttaaaaccaca

SEQ ID NO: 883386 - DNA, 25 bp, Homo sapien
tatacttaaaaccacagtcccagga

SEQ ID NO: 883387 - DNA, 25 bp, Homo sapien
cttaagagttggagaaaaagcgaag

SEQ ID NO: 883388 - DNA, 25 bp, Homo sapien
gttggagaaaaagcgaagatatact

SEQ ID NO: 883389 - DNA, 25 bp, Homo sapien
gacaccaccgcaaagttcaccttat

SEQ ID NO: 883390 - DNA, 25 bp, Homo sapien
tattataacctaagagcaccatgcc

SEQ ID NO: 883391 - DNA, 25 bp, Homo sapien
tgcgtatcaccctactttaagaggg

SEQ ID NO: 883392 - DNA, 25 bp, Homo sapien
ttaaagttgagtctgcgtatcaccc

SEQ ID NO: 883393 - DNA, 25 bp, Homo sapien
taggcgacctacaggatcttccagg

SEQ ID NO: 883394 - DNA, 25 bp, Homo sapien
gggacaaagacttaggcgacctaca

SEQ ID NO: 883395 - DNA, 25 bp, Homo sapien
ggtttacagccactaaggaacatcc

SEQ ID NO: 883396 - DNA, 25 bp, Homo sapien
tactgtctagcatagtggggacacc

SEQ ID NO: 883397 - DNA, 25 bp, Homo sapien
actccacccacatgtgacagcatta

SEQ ID NO: 883398 - DNA, 25 bp, Homo sapien
catgtgacagcattaaaacagggag

SEQ ID NO: 883399 - DNA, 25 bp, Homo sapien
gtgacagcattaaaacagggagttt

SEQ ID NO: 883400 - DNA, 25 bp, Homo sapien
cccacatgtgacagcattaaaacag

SEQ ID NO: 883401 - DNA, 25 bp, Homo sapien
cactttcggcttctgttacagctac

SEQ ID NO: 883402 - DNA, 25 bp, Homo sapien
ctgagaatctggaacactttcggct

SEQ ID NO: 883403 - DNA, 25 bp, Homo sapien
ctggaacactttcggcttctgttac

SEQ ID NO: 883404 - DNA, 25 bp, Homo sapien
gaatctggaacactttcggcttctg

SEQ ID NO: 883405 - DNA, 25 bp, Homo sapien
aaactgcactgcttgactatgccta

SEQ ID NO: 883406 - DNA, 25 bp, Homo sapien
catggagcctacctataatgctgtg

SEQ ID NO: 883407 - DNA, 25 bp, Homo sapien
tgctaactggcatgaacaatgtatc

SEQ ID NO: 883408 - DNA, 25 bp, Homo sapien
gactatgcctacttatataataagc

SEQ ID NO: 883409 - DNA, 25 bp, Homo sapien
caacaatactccaaccacattcagc

SEQ ID NO: 883410 - DNA, 25 bp, Homo sapien
ttggaggcccttcaacaatactcca

SEQ ID NO: 883411 - DNA, 25 bp, Homo sapien
tggaggcccttcaacaatactccaa

SEQ ID NO: 883412 - DNA, 25 bp, Homo sapien
ctcaatctctccctaaatcctgtca

SEQ ID NO: 883413 - DNA, 25 bp, Homo sapien
aatctctccctaaatcctgtcactt

SEQ ID NO: 883414 - DNA, 25 bp, Homo sapien
tctccctaaatcctgtcacttctac

SEQ ID NO: 883415 - DNA, 25 bp, Homo sapien
ctctccctaaatcctgtcacttcta

SEQ ID NO: 883416 - DNA, 25 bp, Homo sapien
gaatgattccacctgtcatcctctc

SEQ ID NO: 883417 - DNA, 25 bp, Homo sapien
tctggaatgattccacctgtcatcc

SEQ ID NO: 883418 - DNA, 25 bp, Homo sapien
tggaatgattccacctgtcatcctc

SEQ ID NO: 883419 - DNA, 25 bp, Homo sapien
atgattccacctgtcatcctctctg

SEQ ID NO: 883420 - DNA, 25 bp, Homo sapien
acatctcatgtaggctgctacggca

SEQ ID NO: 883421 - DNA, 25 bp, Homo sapien
tctcatgtaggctgctacggcatgg

SEQ ID NO: 883422 - DNA, 25 bp, Homo sapien
ggtcacatctcatgtaggctgctac

SEQ ID NO: 883423 - DNA, 25 bp, Homo sapien
ggctgctacggcatggcctctccct

SEQ ID NO: 883424 - DNA, 25 bp, Homo sapien
caaaggtagtcaattcagacagtaa

SEQ ID NO: 883425 - DNA, 25 bp, Homo sapien
taacatcatgaaaggcatccaggaa

SEQ ID NO: 883426 - DNA, 25 bp, Homo sapien
tggcaataatcctcgtctcagagat

SEQ ID NO: 883427 - DNA, 25 bp, Homo sapien
tgcatccagacatgacaggccagac

SEQ ID NO: 883428 - DNA, 25 bp, Homo sapien
tataccagtgatgttgtaaggcagg

SEQ ID NO: 883429 - DNA, 25 bp, Homo sapien
gaatacctcagtcattacacaagct

SEQ ID NO: 883430 - DNA, 25 bp, Homo sapien
caactagtctataggctggtggcgt

SEQ ID NO: 883431 - DNA, 25 bp, Homo sapien
taggccttgagcaatgacattatgc

SEQ ID NO: 883432 - DNA, 25 bp, Homo sapien
tctgtaaggcctctcacacagaggg

SEQ ID NO: 883433 - DNA, 25 bp, Homo sapien
acttgcacttagttctacctccgga

SEQ ID NO: 883434 - DNA, 25 bp, Homo sapien
cagcagcgcagggaagcttgctttc

SEQ ID NO: 883435 - DNA, 25 bp, Homo sapien
taggcataagtgataaacgcgtgtc

SEQ ID NO: 883436 - DNA, 25 bp, Homo sapien
ttcccatcacctttatagcttccag

SEQ ID NO: 883437 - DNA, 25 bp, Homo sapien
tttatagcttccagtctctatgtcc

SEQ ID NO: 883438 - DNA, 25 bp, Homo sapien
gcttccagtctctatgtcctcaaca

SEQ ID NO: 883439 - DNA, 25 bp, Homo sapien
caatacccaagattgctattccttg

SEQ ID NO: 883440 - DNA, 25 bp, Homo sapien
ttccttgctttcaaagcaataacag

SEQ ID NO: 883441 - DNA, 25 bp, Homo sapien
tccttgctttcaaagcaataacagc

SEQ ID NO: 883442 - DNA, 25 bp, Homo sapien
tcacaaaatagccttgacattcagt

SEQ ID NO: 883443 - DNA, 25 bp, Homo sapien
cagagtcagtcttatgtccagcatt

SEQ ID NO: 883444 - DNA, 25 bp, Homo sapien
ttttcctctggcagtttagtagtgc

SEQ ID NO: 883445 - DNA, 25 bp, Homo sapien
gtcttaaaatccaaaggctcccaga

SEQ ID NO: 883446 - DNA, 25 bp, Homo sapien
gaagccctaactgctgatctacctg

SEQ ID NO: 883447 - DNA, 25 bp, Homo sapien
gctgctcttacaacctctgattggt

SEQ ID NO: 883448 - DNA, 25 bp, Homo sapien
tcagttttcaaagctgctcttacaa

SEQ ID NO: 883449 - DNA, 25 bp, Homo sapien
tcttttcaaaagagcaggtgtatct

SEQ ID NO: 883450 - DNA, 25 bp, Homo sapien
aacaagtgaagcctcctagaagacc

SEQ ID NO: 883451 - DNA, 25 bp, Homo sapien
gaaattctacgcataaaaactgcta

SEQ ID NO: 883452 - DNA, 25 bp, Homo sapien
actcagattagcgaagactgtttcc

SEQ ID NO: 883453 - DNA, 25 bp, Homo sapien
gactgtttccagctagaaattctac

SEQ ID NO: 883454 - DNA, 25 bp, Homo sapien
taatatattcttgtgcatagtttca

SEQ ID NO: 883455 - DNA, 25 bp, Homo sapien
tgctctgttatctactaagatataa

SEQ ID NO: 883456 - DNA, 25 bp, Homo sapien
catgattggcataggatctattaag

SEQ ID NO: 883457 - DNA, 25 bp, Homo sapien
catattagtattataggtaagagga

SEQ ID NO: 883458 - DNA, 25 bp, Homo sapien
cctgaggccggattgtaactgtagc

SEQ ID NO: 883459 - DNA, 25 bp, Homo sapien
gacaataatgccctcgtgcttccta

SEQ ID NO: 883460 - DNA, 25 bp, Homo sapien
gctgctggagtgctacaaggataaa

SEQ ID NO: 883461 - DNA, 25 bp, Homo sapien
tgatatggcgtcacttctccctagc

SEQ ID NO: 883462 - DNA, 25 bp, Homo sapien
tgcagaacatgtggtgaggagatac

SEQ ID NO: 883463 - DNA, 25 bp, Homo sapien
tgttcagctgaattgagatgagttc

SEQ ID NO: 883464 - DNA, 25 bp, Homo sapien
caatgtggctatctgttcagctgaa

SEQ ID NO: 883465 - DNA, 25 bp, Homo sapien
tcaatgaaaccaagatagccaacag

SEQ ID NO: 883466 - DNA, 25 bp, Homo sapien
ggcttagtgaccacagtcagctttt

SEQ ID NO: 883467 - DNA, 25 bp, Homo sapien
gcttagtgaccacagtcagcttttc

SEQ ID NO: 883468 - DNA, 25 bp, Homo sapien
aaggcttagtgaccacagtcagctt

SEQ ID NO: 883469 - DNA, 25 bp, Homo sapien
tcaaggcttagtgaccacagtcagc

SEQ ID NO: 883470 - DNA, 25 bp, Homo sapien
ctaggcaggaaaattgcatggtctt

SEQ ID NO: 883471 - DNA, 25 bp, Homo sapien
aggcaggaaaattgcatggtcttac

SEQ ID NO: 883472 - DNA, 25 bp, Homo sapien
taggcaggaaaattgcatggtctta

SEQ ID NO: 883473 - DNA, 25 bp, Homo sapien
tagacgcacaagaatttcatcactg

SEQ ID NO: 883474 - DNA, 25 bp, Homo sapien
gatgttagacgcacaagaatttcat

SEQ ID NO: 883475 - DNA, 25 bp, Homo sapien
cgcagatgttagacgcacaagaatt

SEQ ID NO: 883476 - DNA, 25 bp, Homo sapien
atcactgctttcttcggagtcttca

SEQ ID NO: 883477 - DNA, 25 bp, Homo sapien
tccaaaccttcaaggattttcctca

SEQ ID NO: 883478 - DNA, 25 bp, Homo sapien
tctagaattcggaaatgctcttcct

SEQ ID NO: 883479 - DNA, 25 bp, Homo sapien
agagctctagaattcggaaatgctc

SEQ ID NO: 883480 - DNA, 25 bp, Homo sapien
tcaaggattttcctcacttgcccac

SEQ ID NO: 883481 - DNA, 25 bp, Homo sapien
ccgctgcaccagcacgcaactgtcc

SEQ ID NO: 883482 - DNA, 25 bp, Homo sapien
cgctgcaccagcacgcaactgtccc

SEQ ID NO: 883483 - DNA, 25 bp, Homo sapien
aaggcaggactggtagcaacaggca

SEQ ID NO: 883484 - DNA, 25 bp, Homo sapien
ggactggtagcaacaggcaacagcg

SEQ ID NO: 883485 - DNA, 25 bp, Homo sapien
catgaaggcaggactggtagcaaca

SEQ ID NO: 883486 - DNA, 25 bp, Homo sapien
aaaggaaggtcatgaaggcaggact

SEQ ID NO: 883487 - DNA, 25 bp, Homo sapien
agtgctgagtcctggtgctctaggc

SEQ ID NO: 883488 - DNA, 25 bp, Homo sapien
gggagagtgctgagtcctggtgctc

SEQ ID NO: 883489 - DNA, 25 bp, Homo sapien
gtcctggtgctctaggcagatgtct

SEQ ID NO: 883490 - DNA, 25 bp, Homo sapien
aatgccccaagccagacctggtaac

SEQ ID NO: 883491 - DNA, 25 bp, Homo sapien
tctaaatatctaccacttatgtagc

SEQ ID NO: 883492 - DNA, 25 bp, Homo sapien
ggtggaagccctgatcattgatcta

SEQ ID NO: 883493 - DNA, 25 bp, Homo sapien
tttcacccatgagttacttcaaagt

SEQ ID NO: 883494 - DNA, 25 bp, Homo sapien
tctatcgatattcctctaagtattg

SEQ ID NO: 883495 - DNA, 25 bp, Homo sapien
accaaacactccttgtctatcatct

SEQ ID NO: 883496 - DNA, 25 bp, Homo sapien
aaccaaacactccttgtctatcatc

SEQ ID NO: 883497 - DNA, 25 bp, Homo sapien
tcagtagatgcctggtaagtaagtc

SEQ ID NO: 883498 - DNA, 25 bp, Homo sapien
taagtaagtcgctccacagagtgct

SEQ ID NO: 883499 - DNA, 25 bp, Homo sapien
ggccaaacacggaagcttaagatca

SEQ ID NO: 883500 - DNA, 25 bp, Homo sapien
gctggtgacaagtggttgtcttttc

SEQ ID NO: 883501 - DNA, 25 bp, Homo sapien
gctgaagaacgccagtcccaaacag

SEQ ID NO: 883502 - DNA, 25 bp, Homo sapien
ggagctgctgaagaacgccagtccc

SEQ ID NO: 883503 - DNA, 25 bp, Homo sapien
aggagctgctgaagaacgccagtcc

SEQ ID NO: 883504 - DNA, 25 bp, Homo sapien
gaacgccagtcccaaacagtcactg

SEQ ID NO: 883505 - DNA, 25 bp, Homo sapien
atagagaatggggtacctatcctct

SEQ ID NO: 883506 - DNA, 25 bp, Homo sapien
atcatagagaatggggtacctatcc

SEQ ID NO: 883507 - DNA, 25 bp, Homo sapien
cacacctccccactagtccccaatt

SEQ ID NO: 883508 - DNA, 25 bp, Homo sapien
tgttgtgctatcaaagagtgggcct

SEQ ID NO: 883509 - DNA, 25 bp, Homo sapien
atgagaggcacaagttgcagtaaaa

SEQ ID NO: 883510 - DNA, 25 bp, Homo sapien
gtaaaagcttgacaccattttgcca

SEQ ID NO: 883511 - DNA, 25 bp, Homo sapien
tcacagatgccacctctggcaggaa

SEQ ID NO: 883512 - DNA, 25 bp, Homo sapien
tgcagtaaaagcttgacaccatttt

SEQ ID NO: 883513 - DNA, 25 bp, Homo sapien
gtatcttgaaagtatagatgctggt

SEQ ID NO: 883514 - DNA, 25 bp, Homo sapien
tatcttgaaagtatagatgctggtc

SEQ ID NO: 883515 - DNA, 25 bp, Homo sapien
ggacgaaaggacagtgttctagaag

SEQ ID NO: 883516 - DNA, 25 bp, Homo sapien
cataattcccatgtccagtaggagt

SEQ ID NO: 883517 - DNA, 25 bp, Homo sapien
tatggccatagatctgcactggacg

SEQ ID NO: 883518 - DNA, 25 bp, Homo sapien
gagttgccagactcctatggccata

SEQ ID NO: 883519 - DNA, 25 bp, Homo sapien
actcaaggaggaggcccactctcac

SEQ ID NO: 883520 - DNA, 25 bp, Homo sapien
ctctcatatctctgtcaaggtagac

SEQ ID NO: 883521 - DNA, 25 bp, Homo sapien
tcaagttttctaagtgaccatgccc

SEQ ID NO: 883522 - DNA, 25 bp, Homo sapien
cttggtccagctgtactttaaaact

SEQ ID NO: 883523 - DNA, 25 bp, Homo sapien
gagcatgtctctgcccaagacatcc

SEQ ID NO: 883524 - DNA, 25 bp, Homo sapien
agagcatgtctctgcccaagacatc

SEQ ID NO: 883525 - DNA, 25 bp, Homo sapien
tagagcatgtctctgcccaagacat

SEQ ID NO: 883526 - DNA, 25 bp, Homo sapien
agcatgtctctgcccaagacatcct

SEQ ID NO: 883527 - DNA, 25 bp, Homo sapien
tattgtccacctctctttgatcaag

SEQ ID NO: 883528 - DNA, 25 bp, Homo sapien
caaaatatcacatctcagaggaagc

SEQ ID NO: 883529 - DNA, 25 bp, Homo sapien
ggaaattccataccctaacttcaga

SEQ ID NO: 883530 - DNA, 25 bp, Homo sapien
taacttcagaacaggagtcaaactg

SEQ ID NO: 883531 - DNA, 25 bp, Homo sapien
caggtcagctgcttgaacgataata

SEQ ID NO: 883532 - DNA, 25 bp, Homo sapien
gcttgaacgataataatattcctca

SEQ ID NO: 883533 - DNA, 25 bp, Homo sapien
gctgcttgaacgataataatattcc

SEQ ID NO: 883534 - DNA, 25 bp, Homo sapien
tttatcaggtcagctgcttgaacga

SEQ ID NO: 883535 - DNA, 25 bp, Homo sapien
cacaagaagaattctctccataaat

SEQ ID NO: 883536 - DNA, 25 bp, Homo sapien
ctgcacaagaagaattctctccata

SEQ ID NO: 883537 - DNA, 25 bp, Homo sapien
tgcacaagaagaattctctccataa

SEQ ID NO: 883538 - DNA, 25 bp, Homo sapien
gcacaagaagaattctctccataaa

SEQ ID NO: 883539 - DNA, 25 bp, Homo sapien
gttcaaggtacggattagatattct

SEQ ID NO: 883540 - DNA, 25 bp, Homo sapien
caaggtacggattagatattcttct

SEQ ID NO: 883541 - DNA, 25 bp, Homo sapien
gaaggcgtatgttcaaggtacggat

SEQ ID NO: 883542 - DNA, 25 bp, Homo sapien
gcgtatgttcaaggtacggattaga

SEQ ID NO: 883543 - DNA, 25 bp, Homo sapien
ttccatcttcctcaatgcttcccag

SEQ ID NO: 883544 - DNA, 25 bp, Homo sapien
gttaaaagccttccatcttcctcaa

SEQ ID NO: 883545 - DNA, 25 bp, Homo sapien
tcatgttaaaagccttccatcttcc

SEQ ID NO: 883546 - DNA, 25 bp, Homo sapien
atcttcctcaatgcttcccagaatc

SEQ ID NO: 883547 - DNA, 25 bp, Homo sapien
cctgctggggtacgctcctctttag

SEQ ID NO: 883548 - DNA, 25 bp, Homo sapien
cagactcgaagtccagttttgtgga

SEQ ID NO: 883549 - DNA, 25 bp, Homo sapien
ggagtcggctcctgcatgaagttcc

SEQ ID NO: 883550 - DNA, 25 bp, Homo sapien
ggtacgctcctctttagagctctgt

SEQ ID NO: 883551 - DNA, 25 bp, Homo sapien
ccatttgccccaaggaatccataag

SEQ ID NO: 883552 - DNA, 25 bp, Homo sapien
tggcagcttatactgctttgctttc

SEQ ID NO: 883553 - DNA, 25 bp, Homo sapien
gtgtgtccatttgccccaaggaatc

SEQ ID NO: 883554 - DNA, 25 bp, Homo sapien
ggctggcagcttatactgctttgct

SEQ ID NO: 883555 - DNA, 25 bp, Homo sapien
aggctaggcttgaggacaactggca

SEQ ID NO: 883556 - DNA, 25 bp, Homo sapien
taggcttgaggacaactggcaccat

SEQ ID NO: 883557 - DNA, 25 bp, Homo sapien
caaggctaggcttgaggacaactgg

SEQ ID NO: 883558 - DNA, 25 bp, Homo sapien
gctaggcttgaggacaactggcacc

SEQ ID NO: 883559 - DNA, 25 bp, Homo sapien
gtgggtggggcatctacttccattt

SEQ ID NO: 883560 - DNA, 25 bp, Homo sapien
caatgaaggtggagacctggcactg

SEQ ID NO: 883561 - DNA, 25 bp, Homo sapien
gctgactgggcaatgaaggtggaga

SEQ ID NO: 883562 - DNA, 25 bp, Homo sapien
ggtgggtggggcatctacttccatt

SEQ ID NO: 883563 - DNA, 25 bp, Homo sapien
taccagggtattccgcactagaacc

SEQ ID NO: 883564 - DNA, 25 bp, Homo sapien
ctagactggaggtgaaaacaagatg

SEQ ID NO: 883565 - DNA, 25 bp, Homo sapien
aaacaagatggatttgcgggaacca

SEQ ID NO: 883566 - DNA, 25 bp, Homo sapien
ccctgaccagggcttggattctctt

SEQ ID NO: 883567 - DNA, 25 bp, Homo sapien
gaagccaaagcctgagctctatgtt

SEQ ID NO: 883568 - DNA, 25 bp, Homo sapien
ggaagttgccaaagcttggagcttc

SEQ ID NO: 883569 - DNA, 25 bp, Homo sapien
aagccaaagcctgagctctatgttg

SEQ ID NO: 883570 - DNA, 25 bp, Homo sapien
aagttgccaaagcttggagcttcca

SEQ ID NO: 883571 - DNA, 25 bp, Homo sapien
gtgggcaaggttcagaggcccaagg

SEQ ID NO: 883572 - DNA, 25 bp, Homo sapien
atgtgtgggcaaggttcagaggccc

SEQ ID NO: 883573 - DNA, 25 bp, Homo sapien
catcaagggtcctctagaaaacagc

SEQ ID NO: 883574 - DNA, 25 bp, Homo sapien
atcaagggtcctctagaaaacagcc

SEQ ID NO: 883575 - DNA, 25 bp, Homo sapien
ggactcaggatggacaaacagaata

SEQ ID NO: 883576 - DNA, 25 bp, Homo sapien
gcagcctccacggtgcagaccagaa

SEQ ID NO: 883577 - DNA, 25 bp, Homo sapien
gaggactcaggatggacaaacagaa

SEQ ID NO: 883578 - DNA, 25 bp, Homo sapien
cacggtgcagaccagaacagggaag

SEQ ID NO: 883579 - DNA, 25 bp, Homo sapien
ctggaatccctcagatctgcaattt

SEQ ID NO: 883580 - DNA, 25 bp, Homo sapien
atttcaggcactgatgatgatgaca

SEQ ID NO: 883581 - DNA, 25 bp, Homo sapien
taatttctaccaatataaccagtaa

SEQ ID NO: 883582 - DNA, 25 bp, Homo sapien
tcagctcttcagagagactaactct

SEQ ID NO: 883583 - DNA, 25 bp, Homo sapien
tctctgacagacacatagggttgct

SEQ ID NO: 883584 - DNA, 25 bp, Homo sapien
caagagcagtgggaaatttgaatgc

SEQ ID NO: 883585 - DNA, 25 bp, Homo sapien
tagggttgctgccactaagtactct

SEQ ID NO: 883586 - DNA, 25 bp, Homo sapien
aaaccacctggtaagatctctgaca

SEQ ID NO: 883587 - DNA, 25 bp, Homo sapien
aagaggcaaacagctcgtcttcagc

SEQ ID NO: 883588 - DNA, 25 bp, Homo sapien
cctgcaaacagggatgccgctcgtg

SEQ ID NO: 883589 - DNA, 25 bp, Homo sapien
acacacgtcgcatgcgtcctgcaaa

SEQ ID NO: 883590 - DNA, 25 bp, Homo sapien
aagagcttccgactcctgggtctgc

SEQ ID NO: 883591 - DNA, 25 bp, Homo sapien
agcccgctccgcagcagcgcgggca

SEQ ID NO: 883592 - DNA, 25 bp, Homo sapien
ctcgcacggcggctgcatcttgacg

SEQ ID NO: 883593 - DNA, 25 bp, Homo sapien
gcatcttgacggagcccacggccat

SEQ ID NO: 883594 - DNA, 25 bp, Homo sapien
gcttcctccgcagcgtgagcccgct

SEQ ID NO: 883595 - DNA, 25 bp, Homo sapien
cggcgccgggggctcctctccaccg

SEQ ID NO: 883596 - DNA, 25 bp, Homo sapien
gctcgcctccgcgcgccgtccgcgc

SEQ ID NO: 883597 - DNA, 25 bp, Homo sapien
ctctccaccgcgctcgcctccgcgc

SEQ ID NO: 883598 - DNA, 25 bp, Homo sapien
cgcgctcgcctccgcgcgccgtccg

SEQ ID NO: 883599 - DNA, 25 bp, Homo sapien
tagaacacgtgttccgtctcctggt

SEQ ID NO: 883600 - DNA, 25 bp, Homo sapien
agtagaacacgtgttccgtctcctg

SEQ ID NO: 883601 - DNA, 25 bp, Homo sapien
cgtgttccgtctcctggtccaggtt

SEQ ID NO: 883602 - DNA, 25 bp, Homo sapien
aacacgtgttccgtctcctggtcca

SEQ ID NO: 883603 - DNA, 25 bp, Homo sapien
accagcgtgtacaagaagggctctc

SEQ ID NO: 883604 - DNA, 25 bp, Homo sapien
ccagcgtgtacaagaagggctctct

SEQ ID NO: 883605 - DNA, 25 bp, Homo sapien
caaaaccagcgtgtacaagaagggc

SEQ ID NO: 883606 - DNA, 25 bp, Homo sapien
aaaccagcgtgtacaagaagggctc

SEQ ID NO: 883607 - DNA, 25 bp, Homo sapien
ctttattaaagcaactgaacttgtc

SEQ ID NO: 883608 - DNA, 25 bp, Homo sapien
aataggcctctagactgtaataggg

SEQ ID NO: 883609 - DNA, 25 bp, Homo sapien
ttgtctcctatctcacagtcataga

SEQ ID NO: 883610 - DNA, 25 bp, Homo sapien
tctcacagtcatagaaacacaagct

SEQ ID NO: 883611 - DNA, 25 bp, Homo sapien
cagaaatgtgctaggtaagagggag

SEQ ID NO: 883612 - DNA, 25 bp, Homo sapien
agcagaaatgtgctaggtaagaggg

SEQ ID NO: 883613 - DNA, 25 bp, Homo sapien
aagcagaaatgtgctaggtaagagg

SEQ ID NO: 883614 - DNA, 25 bp, Homo sapien
gcagaaatgtgctaggtaagaggga

SEQ ID NO: 883615 - DNA, 25 bp, Homo sapien
caggcaaagaaggtctaagtcacag

SEQ ID NO: 883616 - DNA, 25 bp, Homo sapien
caaagaaggtctaagtcacagtagg

SEQ ID NO: 883617 - DNA, 25 bp, Homo sapien
gaaggtctaagtcacagtagggaga

SEQ ID NO: 883618 - DNA, 25 bp, Homo sapien
cacagtagggagagtataggaaagc

SEQ ID NO: 883619 - DNA, 25 bp, Homo sapien
acccaggagcacttccatggagaag

SEQ ID NO: 883620 - DNA, 25 bp, Homo sapien
agaagtagagctcagaacccaggag

SEQ ID NO: 883621 - DNA, 25 bp, Homo sapien
cagaacccaggagcacttccatgga

SEQ ID NO: 883622 - DNA, 25 bp, Homo sapien
gaacccaggagcacttccatggaga

SEQ ID NO: 883623 - DNA, 25 bp, Homo sapien
gtggaagacagcagcccatgggctc

SEQ ID NO: 883624 - DNA, 25 bp, Homo sapien
gacagcagcccatgggctcagcatg

SEQ ID NO: 883625 - DNA, 25 bp, Homo sapien
agtagtagaggtggaagacagcagc

SEQ ID NO: 883626 - DNA, 25 bp, Homo sapien
agtagaggtggaagacagcagccca

SEQ ID NO: 883627 - DNA, 25 bp, Homo sapien
ggataatcaaaagatctggctgccc

SEQ ID NO: 883628 - DNA, 25 bp, Homo sapien
tggataatcaaaagatctggctgcc

SEQ ID NO: 883629 - DNA, 25 bp, Homo sapien
ctctagatttttgcctgctgtggat

SEQ ID NO: 883630 - DNA, 25 bp, Homo sapien
tctcattgaactctagatttttgcc

SEQ ID NO: 883631 - DNA, 25 bp, Homo sapien
tcctgcttcttgttatagacgtgcc

SEQ ID NO: 883632 - DNA, 25 bp, Homo sapien
cttgctggctgacttcctgatcggt

SEQ ID NO: 883633 - DNA, 25 bp, Homo sapien
gagtcacccggctgcaactgttgag

SEQ ID NO: 883634 - DNA, 25 bp, Homo sapien
tcctgatcggttggtgggcccagtc

SEQ ID NO: 883635 - DNA, 25 bp, Homo sapien
tccaatgctgtgctccaaagcctcg

SEQ ID NO: 883636 - DNA, 25 bp, Homo sapien
tggattagcacaacacatatggact

SEQ ID NO: 883637 - DNA, 25 bp, Homo sapien
tatcatgtctgatcctcgtgtcggg

SEQ ID NO: 883638 - DNA, 25 bp, Homo sapien
tgccggatccatgttgacagagcag

SEQ ID NO: 883639 - DNA, 25 bp, Homo sapien
aggtcaggaagttgatcctaccatg

SEQ ID NO: 883640 - DNA, 25 bp, Homo sapien
caaagtcagtcaacgcaatgagaca

SEQ ID NO: 883641 - DNA, 25 bp, Homo sapien
taagtcaattcaggcccaaagtcag

SEQ ID NO: 883642 - DNA, 25 bp, Homo sapien
tgatcatagcccaacagagcaattg

SEQ ID NO: 883643 - DNA, 25 bp, Homo sapien
cagtcagttggcatcatatgaagca

SEQ ID NO: 883644 - DNA, 25 bp, Homo sapien
aatgcggcctgactgctcataggac

SEQ ID NO: 883645 - DNA, 25 bp, Homo sapien
gcctgactgctcataggacatttca

SEQ ID NO: 883646 - DNA, 25 bp, Homo sapien
agcaaatgcggcctgactgctcata

SEQ ID NO: 883647 - DNA, 25 bp, Homo sapien
cgttcctgccagcaaatgcggcctg

SEQ ID NO: 883648 - DNA, 25 bp, Homo sapien
gataattgcatcaaagggattcaac

SEQ ID NO: 883649 - DNA, 25 bp, Homo sapien
catcaaagggattcaacttcctgga

SEQ ID NO: 883650 - DNA, 25 bp, Homo sapien
aaagggattcaacttcctggatgac

SEQ ID NO: 883651 - DNA, 25 bp, Homo sapien
acaaaaggccaaggatgcagagata

SEQ ID NO: 883652 - DNA, 25 bp, Homo sapien
gaagccggctttccgtgtctgtacc

SEQ ID NO: 883653 - DNA, 25 bp, Homo sapien
gcccagataagcatcccagggttct

SEQ ID NO: 883654 - DNA, 25 bp, Homo sapien
agataagcatcccagggttctggca

SEQ ID NO: 883655 - DNA, 25 bp, Homo sapien
cggctttccgtgtctgtaccgcctt

SEQ ID NO: 883656 - DNA, 25 bp, Homo sapien
gtggccatcaagtcatgatgcccca

SEQ ID NO: 883657 - DNA, 25 bp, Homo sapien
tgtggccatcaagtcatgatgcccc

SEQ ID NO: 883658 - DNA, 25 bp, Homo sapien
tggccatcaagtcatgatgccccat

SEQ ID NO: 883659 - DNA, 25 bp, Homo sapien
ctgtggccatcaagtcatgatgccc

SEQ ID NO: 883660 - DNA, 25 bp, Homo sapien
cacgaagctggtgagtgtcaaaacg

SEQ ID NO: 883661 - DNA, 25 bp, Homo sapien
taaaagcaagttcaagctcaagtcc

SEQ ID NO: 883662 - DNA, 25 bp, Homo sapien
tgcacgatacgcaccgtgggcagag

SEQ ID NO: 883663 - DNA, 25 bp, Homo sapien
ttttctgtaggctcagcaccaaggg

SEQ ID NO: 883664 - DNA, 25 bp, Homo sapien
tactctctttggctaaaaccaggat

SEQ ID NO: 883665 - DNA, 25 bp, Homo sapien
ttactcagccactaaaaaccggata

SEQ ID NO: 883666 - DNA, 25 bp, Homo sapien
ctcagccactaaaaaccggatactc

SEQ ID NO: 883667 - DNA, 25 bp, Homo sapien
cactaaaaaccggatactctctttg

SEQ ID NO: 883668 - DNA, 25 bp, Homo sapien
ggcctgcaagttgggcctcaaggac

SEQ ID NO: 883669 - DNA, 25 bp, Homo sapien
ctggcctgcaagttgggcctcaagg

SEQ ID NO: 883670 - DNA, 25 bp, Homo sapien
ctgtcctattaggccctgacggcag

SEQ ID NO: 883671 - DNA, 25 bp, Homo sapien
cctattaggccctgacggcaggcct

SEQ ID NO: 883672 - DNA, 25 bp, Homo sapien
ggatggtggagtggctgagctgtca

SEQ ID NO: 883673 - DNA, 25 bp, Homo sapien
ggggatggtggagtggctgagctgt

SEQ ID NO: 883674 - DNA, 25 bp, Homo sapien
gaggtggggatggtggagtggctga

SEQ ID NO: 883675 - DNA, 25 bp, Homo sapien
atggtggagtggctgagctgtcagc

SEQ ID NO: 883676 - DNA, 25 bp, Homo sapien
gagtcacgctcagggctttagttaa

SEQ ID NO: 883677 - DNA, 25 bp, Homo sapien
gtgtgatataaggaagccagagacc

SEQ ID NO: 883678 - DNA, 25 bp, Homo sapien
atctgtgtgatataaggaagccaga

SEQ ID NO: 883679 - DNA, 25 bp, Homo sapien
cacagagtcacgctcagggctttag

SEQ ID NO: 883680 - DNA, 25 bp, Homo sapien
gagggagcttctagacttttctgca

SEQ ID NO: 883681 - DNA, 25 bp, Homo sapien
gaagaatttggacaatgatgccggt

SEQ ID NO: 883682 - DNA, 25 bp, Homo sapien
tgatgccggtttcagtttaaagggc

SEQ ID NO: 883683 - DNA, 25 bp, Homo sapien
ggcagggttggcattgggaacaggg

SEQ ID NO: 883684 - DNA, 25 bp, Homo sapien
cctcgtcttgtcagccagtcgtgct

SEQ ID NO: 883685 - DNA, 25 bp, Homo sapien
cagtcgtgctgggatctgccggcag

SEQ ID NO: 883686 - DNA, 25 bp, Homo sapien
ggcagctataaatactcctcttggc

SEQ ID NO: 883687 - DNA, 25 bp, Homo sapien
ccggcagccttgtgagaaccgggca

SEQ ID NO: 883688 - DNA, 25 bp, Homo sapien
cggaggccagcgggaagcacctgca

SEQ ID NO: 883689 - DNA, 25 bp, Homo sapien
gcggaggccagcgggaagcacctgc

SEQ ID NO: 883690 - DNA, 25 bp, Homo sapien
ggaggccagcgggaagcacctgcac

SEQ ID NO: 883691 - DNA, 25 bp, Homo sapien
cagtccctggagattgcttttttgc

SEQ ID NO: 883692 - DNA, 25 bp, Homo sapien
ataccagtccctggagattgctttt

SEQ ID NO: 883693 - DNA, 25 bp, Homo sapien
cctggagattgcttttttgctgagc

SEQ ID NO: 883694 - DNA, 25 bp, Homo sapien
tccctggagattgcttttttgctga

SEQ ID NO: 883695 - DNA, 25 bp, Homo sapien
gtaagtccagatgagccattccaat

SEQ ID NO: 883696 - DNA, 25 bp, Homo sapien
cattccaataagttgttagggttag

SEQ ID NO: 883697 - DNA, 25 bp, Homo sapien
gttaggcttacttctaagaacacca

SEQ ID NO: 883698 - DNA, 25 bp, Homo sapien
tattgtaagtccagatgagccattc

SEQ ID NO: 883699 - DNA, 25 bp, Homo sapien
tccgagctatttgcactttagttag

SEQ ID NO: 883700 - DNA, 25 bp, Homo sapien
gaggttggggactcctgtttgacac

SEQ ID NO: 883701 - DNA, 25 bp, Homo sapien
ccatgctgtttcctccgagctattt

SEQ ID NO: 883702 - DNA, 25 bp, Homo sapien
gcctctcagcatgtcagacccatgg

SEQ ID NO: 883703 - DNA, 25 bp, Homo sapien
cttataaacttcttatttgattttg

SEQ ID NO: 883704 - DNA, 25 bp, Homo sapien
ttataaacttcttatttgattttgc

SEQ ID NO: 883705 - DNA, 25 bp, Homo sapien
ataaacttcttatttgattttgcat

SEQ ID NO: 883706 - DNA, 25 bp, Homo sapien
tataaacttcttatttgattttgca

SEQ ID NO: 883707 - DNA, 25 bp, Homo sapien
gttacaggtcatttttccgagatgc

SEQ ID NO: 883708 - DNA, 25 bp, Homo sapien
ggattacaccatgtgctctcttttc

SEQ ID NO: 883709 - DNA, 25 bp, Homo sapien
tttccgagatgctcagaattctgag

SEQ ID NO: 883710 - DNA, 25 bp, Homo sapien
ggctctgctgcggtagtttgattct

SEQ ID NO: 883711 - DNA, 25 bp, Homo sapien
aggtggaatctgtgtcttgagtgct

SEQ ID NO: 883712 - DNA, 25 bp, Homo sapien
ggaatctgtgtcttgagtgctgaaa

SEQ ID NO: 883713 - DNA, 25 bp, Homo sapien
ttatacaaacgagtaagtggaatga

SEQ ID NO: 883714 - DNA, 25 bp, Homo sapien
gtggaatctgtgtcttgagtgctga

SEQ ID NO: 883715 - DNA, 25 bp, Homo sapien
gcctctgtaggctagatcacaccag

SEQ ID NO: 883716 - DNA, 25 bp, Homo sapien
tgcatcactccaggctagaggttcc

SEQ ID NO: 883717 - DNA, 25 bp, Homo sapien
agaggttccacagactcccgagtgc

SEQ ID NO: 883718 - DNA, 25 bp, Homo sapien
cacaccaggagttgcagtctggagc

SEQ ID NO: 883719 - DNA, 25 bp, Homo sapien
gttgagaatcaactccaaaggcaga

SEQ ID NO: 883720 - DNA, 25 bp, Homo sapien
tgagaatcaactccaaaggcagaag

SEQ ID NO: 883721 - DNA, 25 bp, Homo sapien
gctgtatgttgagaatcaactccaa

SEQ ID NO: 883722 - DNA, 25 bp, Homo sapien
ccccgaggctgtatgttgagaatca

SEQ ID NO: 883723 - DNA, 25 bp, Homo sapien
caagttcctgtagccatgagttcaa

SEQ ID NO: 883724 - DNA, 25 bp, Homo sapien
tggacagctcccattccagtggtga

SEQ ID NO: 883725 - DNA, 25 bp, Homo sapien
gtgtgactggtagcatctgagcatc

SEQ ID NO: 883726 - DNA, 25 bp, Homo sapien
tgtcatcgtatacagggtgctgctg

SEQ ID NO: 883727 - DNA, 25 bp, Homo sapien
gagacgcaagtcatgggttccacct

SEQ ID NO: 883728 - DNA, 25 bp, Homo sapien
tcaaagccacatagggagagactgc

SEQ ID NO: 883729 - DNA, 25 bp, Homo sapien
caagggaacctaatgagggcacgca

SEQ ID NO: 883730 - DNA, 25 bp, Homo sapien
gaatccgtttctgagatcactcgtg

SEQ ID NO: 883731 - DNA, 25 bp, Homo sapien
gactgtaagtggaagcgaatgcaca

SEQ ID NO: 883732 - DNA, 25 bp, Homo sapien
aactggaattctgagtacagcctga

SEQ ID NO: 883733 - DNA, 25 bp, Homo sapien
gaagcaggtggctacactaagcaga

SEQ ID NO: 883734 - DNA, 25 bp, Homo sapien
catctaggagaagttcatgcctgcc

SEQ ID NO: 883735 - DNA, 25 bp, Homo sapien
ccccaggaaggtgtccgtaaagctg

SEQ ID NO: 883736 - DNA, 25 bp, Homo sapien
atgatgacatcccacactctcggac

SEQ ID NO: 883737 - DNA, 25 bp, Homo sapien
tgatgacatcccacactctcggact

SEQ ID NO: 883738 - DNA, 25 bp, Homo sapien
ggtgtccgtaaagctgtactcccca

SEQ ID NO: 883739 - DNA, 25 bp, Homo sapien
ctccaaccacatctgaaacaggtgg

SEQ ID NO: 883740 - DNA, 25 bp, Homo sapien
gagcaactgccccatccacatggcc

SEQ ID NO: 883741 - DNA, 25 bp, Homo sapien
gtggcagaggataccttcccagatt

SEQ ID NO: 883742 - DNA, 25 bp, Homo sapien
tggccaggctattgtcccagtcctc

SEQ ID NO: 883743 - DNA, 25 bp, Homo sapien
tctctccatgtcaaagagtcactca

SEQ ID NO: 883744 - DNA, 25 bp, Homo sapien
ctctccatgtcaaagagtcactcac

SEQ ID NO: 883745 - DNA, 25 bp, Homo sapien
gaatagatgtcacagccaacagagc

SEQ ID NO: 883746 - DNA, 25 bp, Homo sapien
agatggaatagatgtcacagccaac

SEQ ID NO: 883747 - DNA, 25 bp, Homo sapien
ccagagacacataaatctccattct

SEQ ID NO: 883748 - DNA, 25 bp, Homo sapien
ttcccagagacacataaatctccat

SEQ ID NO: 883749 - DNA, 25 bp, Homo sapien
ggacaattgctgctatcacacctgg

SEQ ID NO: 883750 - DNA, 25 bp, Homo sapien
gggtgaattacttccctcagaagag

SEQ ID NO: 883751 - DNA, 25 bp, Homo sapien
caatgccaagagagtgatggaaacc

SEQ ID NO: 883752 - DNA, 25 bp, Homo sapien
tctgaagggcagtcaaattcatcag

SEQ ID NO: 883753 - DNA, 25 bp, Homo sapien
aatgcaaaagcacaggtctttttag

SEQ ID NO: 883754 - DNA, 25 bp, Homo sapien
tgcaaatgcaaaagcacaggtcttt

SEQ ID NO: 883755 - DNA, 25 bp, Homo sapien
gcaaaagcacaggtctttttagcat

SEQ ID NO: 883756 - DNA, 25 bp, Homo sapien
ctgcaaatgcaaaagcacaggtctt

SEQ ID NO: 883757 - DNA, 25 bp, Homo sapien
caaataatcgttgtcttctaaattt

SEQ ID NO: 883758 - DNA, 25 bp, Homo sapien
ttcttcttggtttgtgatgtctttt

SEQ ID NO: 883759 - DNA, 25 bp, Homo sapien
tgtcttctaaatttctcctaggctt

SEQ ID NO: 883760 - DNA, 25 bp, Homo sapien
ttctcctaggcttcattttccaaat

SEQ ID NO: 883761 - DNA, 25 bp, Homo sapien
ttctataaaatagtatggcttcagc

SEQ ID NO: 883762 - DNA, 25 bp, Homo sapien
tataaaatagtatggcttcagccac

SEQ ID NO: 883763 - DNA, 25 bp, Homo sapien
aattctataaaatagtatggcttca

SEQ ID NO: 883764 - DNA, 25 bp, Homo sapien
tctataaaatagtatggcttcagcc

SEQ ID NO: 883765 - DNA, 25 bp, Homo sapien
gaagatgtgaattgccagtatgttt

SEQ ID NO: 883766 - DNA, 25 bp, Homo sapien
ggaatggtgagttgtgctgaattaa

SEQ ID NO: 883767 - DNA, 25 bp, Homo sapien
tgtttggaagatgtgaattgccagt

SEQ ID NO: 883768 - DNA, 25 bp, Homo sapien
ccttgtttggaagatgtgaattgcc

SEQ ID NO: 883769 - DNA, 25 bp, Homo sapien
tccttgtcagttgcgcgtccagcgc

SEQ ID NO: 883770 - DNA, 25 bp, Homo sapien
tgaccgtgagtctcagctgccgctg

SEQ ID NO: 883771 - DNA, 25 bp, Homo sapien
ctgagcctccagagcgcgaagcctc

SEQ ID NO: 883772 - DNA, 25 bp, Homo sapien
actcctcgccgtagcttgaccgtga

SEQ ID NO: 883773 - DNA, 25 bp, Homo sapien
cagggcaccctggctattcccttgc

SEQ ID NO: 883774 - DNA, 25 bp, Homo sapien
agggcaccctggctattcccttgct

SEQ ID NO: 883775 - DNA, 25 bp, Homo sapien
cctggctattcccttgctccatgct

SEQ ID NO: 883776 - DNA, 25 bp, Homo sapien
gcaccctggctattcccttgctcca

SEQ ID NO: 883777 - DNA, 25 bp, Homo sapien
caccaagaggtggcaccaaacctgc

SEQ ID NO: 883778 - DNA, 25 bp, Homo sapien
tgtgtgccacccatctgctcttctg

SEQ ID NO: 883779 - DNA, 25 bp, Homo sapien
agcaactccatgttggtggttatgg

SEQ ID NO: 883780 - DNA, 25 bp, Homo sapien
ctgtgtgccacccatctgctcttct

SEQ ID NO: 883781 - DNA, 25 bp, Homo sapien
catgttagaatttactgacagagtt

SEQ ID NO: 883782 - DNA, 25 bp, Homo sapien
tcttctgcctgtgcaaaggggccac

SEQ ID NO: 883783 - DNA, 25 bp, Homo sapien
gccctcagtgcgctggtctctgtct

SEQ ID NO: 883784 - DNA, 25 bp, Homo sapien
tcagtggcccgaccatggtgctcat

SEQ ID NO: 883785 - DNA, 25 bp, Homo sapien
tggtctattctgttccttacaagca

SEQ ID NO: 883786 - DNA, 25 bp, Homo sapien
ggtcctacccgatcctgctggtgac

SEQ ID NO: 883787 - DNA, 25 bp, Homo sapien
agcactagccactgtggtgaccatg

SEQ ID NO: 883788 - DNA, 25 bp, Homo sapien
tagccactgtggtgaccatgggtcc

SEQ ID NO: 883789 - DNA, 25 bp, Homo sapien
tgaccatgggtcctacccgatcctg

SEQ ID NO: 883790 - DNA, 25 bp, Homo sapien
tctggcaaatttaacttgatattgg

SEQ ID NO: 883791 - DNA, 25 bp, Homo sapien
tctggcccagagtgacaattctggc

SEQ ID NO: 883792 - DNA, 25 bp, Homo sapien
ttctggcaaatttaacttgatattg

SEQ ID NO: 883793 - DNA, 25 bp, Homo sapien
atctcctcaggagctaggctgatca

SEQ ID NO: 883794 - DNA, 25 bp, Homo sapien
atcatgaatggaccccgcacagtct

SEQ ID NO: 883795 - DNA, 25 bp, Homo sapien
gagctaggctgatcatgaatggacc

SEQ ID NO: 883796 - DNA, 25 bp, Homo sapien
taggctgatcatgaatggaccccgc

SEQ ID NO: 883797 - DNA, 25 bp, Homo sapien
gtcctgataatctcccccagtgaac

SEQ ID NO: 883798 - DNA, 25 bp, Homo sapien
taaagtcctgataatctcccccagt

SEQ ID NO: 883799 - DNA, 25 bp, Homo sapien
aagtcctgataatctcccccagtga

SEQ ID NO: 883800 - DNA, 25 bp, Homo sapien
aaagtcctgataatctcccccagtg

SEQ ID NO: 883801 - DNA, 25 bp, Homo sapien
cttaaaactgccacacgcaaaaaag

SEQ ID NO: 883802 - DNA, 25 bp, Homo sapien
gaaggttttacgatgcattgttatc

SEQ ID NO: 883803 - DNA, 25 bp, Homo sapien
tgtgacaaatttttggtccagttgt

SEQ ID NO: 883804 - DNA, 25 bp, Homo sapien
cagttgtttccattaaaaagtactg

SEQ ID NO: 883805 - DNA, 25 bp, Homo sapien
cagttctgagaccattcttccacca

SEQ ID NO: 883806 - DNA, 25 bp, Homo sapien
gaccattcttccaccactgattaag

SEQ ID NO: 883807 - DNA, 25 bp, Homo sapien
tctgagaccattcttccaccactga

SEQ ID NO: 883808 - DNA, 25 bp, Homo sapien
caccactgattaagagtggggtggc

SEQ ID NO: 883809 - DNA, 25 bp, Homo sapien
tgagctttctgggcagacttggtga

SEQ ID NO: 883810 - DNA, 25 bp, Homo sapien
cttctgagctttctgggcagacttg

SEQ ID NO: 883811 - DNA, 25 bp, Homo sapien
tctgagctttctgggcagacttggt

SEQ ID NO: 883812 - DNA, 25 bp, Homo sapien
agctttctgggcagacttggtgacc

SEQ ID NO: 883813 - DNA, 25 bp, Homo sapien
ttgccagctccagcagccttcttgt

SEQ ID NO: 883814 - DNA, 25 bp, Homo sapien
ccagctccagcagccttcttgtcca

SEQ ID NO: 883815 - DNA, 25 bp, Homo sapien
tgccagctccagcagccttcttgtc

SEQ ID NO: 883816 - DNA, 25 bp, Homo sapien
agctccagcagccttcttgtccact

SEQ ID NO: 883817 - DNA, 25 bp, Homo sapien
acgaacagcaaagcgacccaaaggt

SEQ ID NO: 883818 - DNA, 25 bp, Homo sapien
tatcacgaacagcaaagcgacccaa

SEQ ID NO: 883819 - DNA, 25 bp, Homo sapien
aaaggtggatagtctgagaagctct

SEQ ID NO: 883820 - DNA, 25 bp, Homo sapien
tcacgaacagcaaagcgacccaaag

SEQ ID NO: 883821 - DNA, 25 bp, Homo sapien
cttcaagaatttagggccatcttcc

SEQ ID NO: 883822 - DNA, 25 bp, Homo sapien
gaatttagggccatcttccagcttt

SEQ ID NO: 883823 - DNA, 25 bp, Homo sapien
aatttagggccatcttccagctttt

SEQ ID NO: 883824 - DNA, 25 bp, Homo sapien
ttagggccatcttccagctttttac

SEQ ID NO: 883825 - DNA, 25 bp, Homo sapien
tacaggggcatagccggtgcttatt

SEQ ID NO: 883826 - DNA, 25 bp, Homo sapien
ccaatacaggggcatagccggtgct

SEQ ID NO: 883827 - DNA, 25 bp, Homo sapien
atagccggtgcttatttggcctgga

SEQ ID NO: 883828 - DNA, 25 bp, Homo sapien
catagccggtgcttatttggcctgg

SEQ ID NO: 883829 - DNA, 25 bp, Homo sapien
gcgacgttgccacgacgaacatcct

SEQ ID NO: 883830 - DNA, 25 bp, Homo sapien
tgtcaccagcgacgttgccacgacg

SEQ ID NO: 883831 - DNA, 25 bp, Homo sapien
tcaccagcgacgttgccacgacgaa

SEQ ID NO: 883832 - DNA, 25 bp, Homo sapien
cagcgacgttgccacgacgaacatc

SEQ ID NO: 883833 - DNA, 25 bp, Homo sapien
tcgacagattttacttccgttgtaa

SEQ ID NO: 883834 - DNA, 25 bp, Homo sapien
atttcgacagattttacttccgttg

SEQ ID NO: 883835 - DNA, 25 bp, Homo sapien
tacttccgttgtaacgttgactgga

SEQ ID NO: 883836 - DNA, 25 bp, Homo sapien
gtgcatttcgacagattttacttcc

SEQ ID NO: 883837 - DNA, 25 bp, Homo sapien
cctggagaggcaggcgcaagggctt

SEQ ID NO: 883838 - DNA, 25 bp, Homo sapien
tggcattgccatccttacgggtgac

SEQ ID NO: 883839 - DNA, 25 bp, Homo sapien
catccttacgggtgactttccatcc

SEQ ID NO: 883840 - DNA, 25 bp, Homo sapien
tctccactcggccaacaggaacagt

SEQ ID NO: 883841 - DNA, 25 bp, Homo sapien
tgtgtcggggttgtagccaattttc

SEQ ID NO: 883842 - DNA, 25 bp, Homo sapien
ctgtgtcggggttgtagccaatttt

SEQ ID NO: 883843 - DNA, 25 bp, Homo sapien
aatttcctcatatctcttctggctg

SEQ ID NO: 883844 - DNA, 25 bp, Homo sapien
acaccgacaattagttgtttcacac

SEQ ID NO: 883845 - DNA, 25 bp, Homo sapien
cattttgttaacaccgacaattagt

SEQ ID NO: 883846 - DNA, 25 bp, Homo sapien
ttaacaccgacaattagttgtttca

SEQ ID NO: 883847 - DNA, 25 bp, Homo sapien
catgctctcgggtctgcccattctt

SEQ ID NO: 883848 - DNA, 25 bp, Homo sapien
gccagaagggcatgctctcgggtct

SEQ ID NO: 883849 - DNA, 25 bp, Homo sapien
agaagggcatgctctcgggtctgcc

SEQ ID NO: 883850 - DNA, 25 bp, Homo sapien
tttttgatgaagtccctgtgtcctg

SEQ ID NO: 883851 - DNA, 25 bp, Homo sapien
taccacgttcacgctcagctttcag

SEQ ID NO: 883852 - DNA, 25 bp, Homo sapien
atatcaatggtgataccacgttcac

SEQ ID NO: 883853 - DNA, 25 bp, Homo sapien
atttccacaaggagatatcaatggt

SEQ ID NO: 883854 - DNA, 25 bp, Homo sapien
tcaatggtgataccacgttcacgct

SEQ ID NO: 883855 - DNA, 25 bp, Homo sapien
gtcgatgccaccgcatttatagatc

SEQ ID NO: 883856 - DNA, 25 bp, Homo sapien
ttgtcgatgccaccgcatttataga

SEQ ID NO: 883857 - DNA, 25 bp, Homo sapien
ttttgtcgatgccaccgcatttata

SEQ ID NO: 883858 - DNA, 25 bp, Homo sapien
cgatgccaccgcatttatagatcag

SEQ ID NO: 883859 - DNA, 25 bp, Homo sapien
acgacacctgtgttctggcggcaaa

SEQ ID NO: 883860 - DNA, 25 bp, Homo sapien
acctgtgttctggcggcaaacccgt

SEQ ID NO: 883861 - DNA, 25 bp, Homo sapien
gacacctgtgttctggcggcaaacc

SEQ ID NO: 883862 - DNA, 25 bp, Homo sapien
ttttcacgacacctgtgttctggcg

SEQ ID NO: 883863 - DNA, 25 bp, Homo sapien
ctccatggctgcacttgattcctgc

SEQ ID NO: 883864 - DNA, 25 bp, Homo sapien
gctgcacttgattcctgcgctctga

SEQ ID NO: 883865 - DNA, 25 bp, Homo sapien
catggctgcacttgattcctgcgct

SEQ ID NO: 883866 - DNA, 25 bp, Homo sapien
tggctgcacttgattcctgcgctct

SEQ ID NO: 883867 - DNA, 25 bp, Homo sapien
tggcactgcccaaatatgtctatcg

SEQ ID NO: 883868 - DNA, 25 bp, Homo sapien
aaatatgtacggctgtagcccgtcc

SEQ ID NO: 883869 - DNA, 25 bp, Homo sapien
tcaaactatctcgacggtcaggccc

SEQ ID NO: 883870 - DNA, 25 bp, Homo sapien
ggtaccaagcacagcctcaaactat

SEQ ID NO: 883871 - DNA, 25 bp, Homo sapien
tgcttggcacctgagcgtaggtacg

SEQ ID NO: 883872 - DNA, 25 bp, Homo sapien
cacctgagcgtaggtacgatactca

SEQ ID NO: 883873 - DNA, 25 bp, Homo sapien
gggcagcggtgcttggcacctgagc

SEQ ID NO: 883874 - DNA, 25 bp, Homo sapien
gtaggtacgatactcagcaaggcac

SEQ ID NO: 883875 - DNA, 25 bp, Homo sapien
ccaaaacaccgcccagaagtgggcg

SEQ ID NO: 883876 - DNA, 25 bp, Homo sapien
aacaccgcccagaagtgggcggtga

SEQ ID NO: 883877 - DNA, 25 bp, Homo sapien
acaggtggcagccaccttcagagcg

SEQ ID NO: 883878 - DNA, 25 bp, Homo sapien
ccagggaaatggcagtgacacaggt

SEQ ID NO: 883879 - DNA, 25 bp, Homo sapien
ggctggataaatcctggactcagag

SEQ ID NO: 883880 - DNA, 25 bp, Homo sapien
caagaggaaatgcaccagcatgacc

SEQ ID NO: 883881 - DNA, 25 bp, Homo sapien
gaatcatcacagaacccacatgtct

SEQ ID NO: 883882 - DNA, 25 bp, Homo sapien
agcatgaccaggaattgccagcaat

SEQ ID NO: 883883 - DNA, 25 bp, Homo sapien
aaggtggcagcaccggcatacaaat

SEQ ID NO: 883884 - DNA, 25 bp, Homo sapien
cagagggcaagtccacgtttattcc

SEQ ID NO: 883885 - DNA, 25 bp, Homo sapien
tattccaacctgtgtcaacagtctc

SEQ ID NO: 883886 - DNA, 25 bp, Homo sapien
agcacaaggtggcagcaccggcata

SEQ ID NO: 883887 - DNA, 25 bp, Homo sapien
gaagagaaacgtccttgagcctgca

SEQ ID NO: 883888 - DNA, 25 bp, Homo sapien
aagtggaaatcggagaagcagagcc

SEQ ID NO: 883889 - DNA, 25 bp, Homo sapien
ccagattccgcagactccataaggg

SEQ ID NO: 883890 - DNA, 25 bp, Homo sapien
tcttgaccgcatggaattctaagcg

SEQ ID NO: 883891 - DNA, 25 bp, Homo sapien
tagcctatggggatctctgctgagc

SEQ ID NO: 883892 - DNA, 25 bp, Homo sapien
ctgctgagcactaaaaccacgggct

SEQ ID NO: 883893 - DNA, 25 bp, Homo sapien
ggtgctaagactttttagcctatgg

SEQ ID NO: 883894 - DNA, 25 bp, Homo sapien
gggtgaacatcatcggtgctaagac

SEQ ID NO: 883895 - DNA, 25 bp, Homo sapien
taattttcactgtcgagggctagct

SEQ ID NO: 883896 - DNA, 25 bp, Homo sapien
cctcatcaaaaagggtgtcagcaca

SEQ ID NO: 883897 - DNA, 25 bp, Homo sapien
gcgctccgaaattactcgcttggct

SEQ ID NO: 883898 - DNA, 25 bp, Homo sapien
agctttgagtcagatcctttcacct

SEQ ID NO: 883899 - DNA, 25 bp, Homo sapien
tctctccaggctctgctcacaggca

SEQ ID NO: 883900 - DNA, 25 bp, Homo sapien
tccaggctctgctcacaggcactca

SEQ ID NO: 883901 - DNA, 25 bp, Homo sapien
ctcagagatctctccaggctctgct

SEQ ID NO: 883902 - DNA, 25 bp, Homo sapien
tctccaggctctgctcacaggcact

SEQ ID NO: 883903 - DNA, 25 bp, Homo sapien
ccagtgcatacaggtgaatgttggt

SEQ ID NO: 883904 - DNA, 25 bp, Homo sapien
ttggaccagctttaagaatgggctg

SEQ ID NO: 883905 - DNA, 25 bp, Homo sapien
tcctggaattaagccatgagtggtt

SEQ ID NO: 883906 - DNA, 25 bp, Homo sapien
caggccgatggaagaatgttggacc

SEQ ID NO: 883907 - DNA, 25 bp, Homo sapien
caaggctctatctacttttttccct

SEQ ID NO: 883908 - DNA, 25 bp, Homo sapien
caaacagtgtcatccggtgtcctga

SEQ ID NO: 883909 - DNA, 25 bp, Homo sapien
gacatgcggccccaatggactgatc

SEQ ID NO: 883910 - DNA, 25 bp, Homo sapien
ggtggcttcaaaactggacggcttc

SEQ ID NO: 883911 - DNA, 25 bp, Homo sapien
catagagagtgcctaaagatgagtc

SEQ ID NO: 883912 - DNA, 25 bp, Homo sapien
tcaacccaatgtgagtacagccaga

SEQ ID NO: 883913 - DNA, 25 bp, Homo sapien
gatatgccagaaggctccaggttga

SEQ ID NO: 883914 - DNA, 25 bp, Homo sapien
tacagtagctgcttaacatgaggca

SEQ ID NO: 883915 - DNA, 25 bp, Homo sapien
gccagattagtgcatcatggagccc

SEQ ID NO: 883916 - DNA, 25 bp, Homo sapien
ggcaattccatctagtcctatgaga

SEQ ID NO: 883917 - DNA, 25 bp, Homo sapien
tgcagattccgctggcaattccatc

SEQ ID NO: 883918 - DNA, 25 bp, Homo sapien
tcagctacgtgatgaatgaatccag

SEQ ID NO: 883919 - DNA, 25 bp, Homo sapien
tactgacgtggatgttgttctcgag

SEQ ID NO: 883920 - DNA, 25 bp, Homo sapien
ggtctcaacttgcaacactgaggtc

SEQ ID NO: 883921 - DNA, 25 bp, Homo sapien
catagtgcttagttctgagaggtaa

SEQ ID NO: 883922 - DNA, 25 bp, Homo sapien
ggtaagctctgttcaccgatgcagg

SEQ ID NO: 883923 - DNA, 25 bp, Homo sapien
tgttgacagagatggtcatagtgct

SEQ ID NO: 883924 - DNA, 25 bp, Homo sapien
atgtactccctgaataaggacactt

SEQ ID NO: 883925 - DNA, 25 bp, Homo sapien
tctttcaggtcttgccagtgctctg

SEQ ID NO: 883926 - DNA, 25 bp, Homo sapien
ggatcacaaaatgtgtagtcacact

SEQ ID NO: 883927 - DNA, 25 bp, Homo sapien
caaaatgtgtagtcacacttacggg

SEQ ID NO: 883928 - DNA, 25 bp, Homo sapien
cacttacgggtgttatcttttcata

SEQ ID NO: 883929 - DNA, 25 bp, Homo sapien
cacacttacgggtgttatcttttca

SEQ ID NO: 883930 - DNA, 25 bp, Homo sapien
tctctgaccccgcattttatgggtt

SEQ ID NO: 883931 - DNA, 25 bp, Homo sapien
tgtacgttttgtcctctcttgcagt

SEQ ID NO: 883932 - DNA, 25 bp, Homo sapien
catggttaccatgaggcatacataa

SEQ ID NO: 883933 - DNA, 25 bp, Homo sapien
tgataacagcttcacttcagttgca

SEQ ID NO: 883934 - DNA, 25 bp, Homo sapien
catcatatggacagtggttggcaca

SEQ ID NO: 883935 - DNA, 25 bp, Homo sapien
tgtctcagggctcaggtacttgcag

SEQ ID NO: 883936 - DNA, 25 bp, Homo sapien
tctaggccgaaacagaatctgaggc

SEQ ID NO: 883937 - DNA, 25 bp, Homo sapien
tacaagtccagcgtggtttggccaa

SEQ ID NO: 883938 - DNA, 25 bp, Homo sapien
tctggtcaaattgcccacagtcaga

SEQ ID NO: 883939 - DNA, 25 bp, Homo sapien
tttaaataatccatatccaccacag

SEQ ID NO: 883940 - DNA, 25 bp, Homo sapien
gcttcttactaagcagttcaggact

SEQ ID NO: 883941 - DNA, 25 bp, Homo sapien
tcaagatgaactttaaataatccat

SEQ ID NO: 883942 - DNA, 25 bp, Homo sapien
cactggaaaaatgttcctttcttct

SEQ ID NO: 883943 - DNA, 25 bp, Homo sapien
tcactggaaaaatgttcctttcttc

SEQ ID NO: 883944 - DNA, 25 bp, Homo sapien
caaggagccactggaaccttgggaa

SEQ ID NO: 883945 - DNA, 25 bp, Homo sapien
tcaaggagccactggaaccttggga

SEQ ID NO: 883946 - DNA, 25 bp, Homo sapien
gagccactggaaccttgggaaccca

SEQ ID NO: 883947 - DNA, 25 bp, Homo sapien
tatttggcaggactggaaactgagg

SEQ ID NO: 883948 - DNA, 25 bp, Homo sapien
agcttgaaacatgatccagccttag

SEQ ID NO: 883949 - DNA, 25 bp, Homo sapien
cagagttagaggtctcttcaggaca

SEQ ID NO: 883950 - DNA, 25 bp, Homo sapien
cagcttgaaacatgatccagcctta

SEQ ID NO: 883951 - DNA, 25 bp, Homo sapien
tattcaaagtgtagtccataaacag

SEQ ID NO: 883952 - DNA, 25 bp, Homo sapien
agcaggcactatctagatgcttatt

SEQ ID NO: 883953 - DNA, 25 bp, Homo sapien
atcttctaagtccttgttattcaaa

SEQ ID NO: 883954 - DNA, 25 bp, Homo sapien
tgctgatctatatgaagctctttgt

SEQ ID NO: 883955 - DNA, 25 bp, Homo sapien
gtcaaaaaatgatttctggcatgga

SEQ ID NO: 883956 - DNA, 25 bp, Homo sapien
ggaattaagcaaacccaaagcacac

SEQ ID NO: 883957 - DNA, 25 bp, Homo sapien
tgatcttcctgttgtcaaaaaatga

SEQ ID NO: 883958 - DNA, 25 bp, Homo sapien
cctagcaattgttgcacctttccca

SEQ ID NO: 883959 - DNA, 25 bp, Homo sapien
tttccttgtttcttggcaacagagc

SEQ ID NO: 883960 - DNA, 25 bp, Homo sapien
gaatttcaaatcaagagccttggcc

SEQ ID NO: 883961 - DNA, 25 bp, Homo sapien
tctcttattaacactgaatttcaaa

SEQ ID NO: 883962 - DNA, 25 bp, Homo sapien
catttgttgacttgtgacctgggca

SEQ ID NO: 883963 - DNA, 25 bp, Homo sapien
caagcagcagtaaccaagatctgtc

SEQ ID NO: 883964 - DNA, 25 bp, Homo sapien
gccaagactatggagaagaaccgtc

SEQ ID NO: 883965 - DNA, 25 bp, Homo sapien
tccatgcctgtggaccatatagagg

SEQ ID NO: 883966 - DNA, 25 bp, Homo sapien
cttttaagtctgttagatattccat

SEQ ID NO: 883967 - DNA, 25 bp, Homo sapien
caccttttaagtctgttagatattc

SEQ ID NO: 883968 - DNA, 25 bp, Homo sapien
cttcaccttttaagtctgttagata

SEQ ID NO: 883969 - DNA, 25 bp, Homo sapien
tccttcaccttttaagtctgttaga

SEQ ID NO: 883970 - DNA, 25 bp, Homo sapien
gattgttcatttgtttgttttatca

SEQ ID NO: 883971 - DNA, 25 bp, Homo sapien
tgattgttcatttgtttgttttatc

SEQ ID NO: 883972 - DNA, 25 bp, Homo sapien
ctgattgttcatttgtttgttttat

SEQ ID NO: 883973 - DNA, 25 bp, Homo sapien
tctgattgttcatttgtttgtttta

SEQ ID NO: 883974 - DNA, 25 bp, Homo sapien
gatattggcaagtcatcacctcaca

SEQ ID NO: 883975 - DNA, 25 bp, Homo sapien
gccatagtcctaaatgccaagagta

SEQ ID NO: 883976 - DNA, 25 bp, Homo sapien
gaccactatgtttggcttaggccaa

SEQ ID NO: 883977 - DNA, 25 bp, Homo sapien
tataagtaggcaaccaatggcgtct

SEQ ID NO: 883978 - DNA, 25 bp, Homo sapien
ccaatcaagtttagcattctctcct

SEQ ID NO: 883979 - DNA, 25 bp, Homo sapien
agcattctctcctgtgcttgtgatg

SEQ ID NO: 883980 - DNA, 25 bp, Homo sapien
ctgtgagctcccaatcaagtttagc

SEQ ID NO: 883981 - DNA, 25 bp, Homo sapien
agtttagcattctctcctgtgcttg

SEQ ID NO: 883982 - DNA, 25 bp, Homo sapien
tcaacatctgatgcaactcttagtg

SEQ ID NO: 883983 - DNA, 25 bp, Homo sapien
gactgttccacagagtcaatctaga

SEQ ID NO: 883984 - DNA, 25 bp, Homo sapien
gctggcctcgggaacacttgttagc

SEQ ID NO: 883985 - DNA, 25 bp, Homo sapien
tctagaaactgctctatagggaaac

SEQ ID NO: 883986 - DNA, 25 bp, Homo sapien
catgtcagaagtataccaatcgtga

SEQ ID NO: 883987 - DNA, 25 bp, Homo sapien
gatgactaagaagattgcactgaaa

SEQ ID NO: 883988 - DNA, 25 bp, Homo sapien
tagttggaaccacacaaagtagaac

SEQ ID NO: 883989 - DNA, 25 bp, Homo sapien
caatcgtgatcagtttcccctgtca

SEQ ID NO: 883990 - DNA, 25 bp, Homo sapien
gagcagcgggtcgtcttccagaaga

SEQ ID NO: 883991 - DNA, 25 bp, Homo sapien
gcctgggtagtctcgaaagtcgcca

SEQ ID NO: 883992 - DNA, 25 bp, Homo sapien
ccaaaccagaggacgcagaaatgcc

SEQ ID NO: 883993 - DNA, 25 bp, Homo sapien
tcgtggcccgcagtgatgaggcggc

SEQ ID NO: 883994 - DNA, 25 bp, Homo sapien
taggggaggcttccctgaggaagtg

SEQ ID NO: 883995 - DNA, 25 bp, Homo sapien
ggaggcttccctgaggaagtgagac

SEQ ID NO: 883996 - DNA, 25 bp, Homo sapien
ggggaggcttccctgaggaagtgag

SEQ ID NO: 883997 - DNA, 25 bp, Homo sapien
gggaggcttccctgaggaagtgaga

SEQ ID NO: 883998 - DNA, 25 bp, Homo sapien
gctctcagggaccatagaacattgg

SEQ ID NO: 883999 - DNA, 25 bp, Homo sapien
ggaccatagaacattggcgtctttt

SEQ ID NO: 884000 - DNA, 25 bp, Homo sapien
tcattaagggcccaaaaggcgagtg

SEQ ID NO: 884001 - DNA, 25 bp, Homo sapien
cattaagggcccaaaaggcgagtgg

SEQ ID NO: 884002 - DNA, 25 bp, Homo sapien
gccgaccaggaatatcttcaactgc

SEQ ID NO: 884003 - DNA, 25 bp, Homo sapien
ttcaactgcccaaaccctgtcttgg

SEQ ID NO: 884004 - DNA, 25 bp, Homo sapien
cccaaaccctgtcttggaagcagct

SEQ ID NO: 884005 - DNA, 25 bp, Homo sapien
tcagccgaccaggaatatcttcaac

SEQ ID NO: 884006 - DNA, 25 bp, Homo sapien
tcggatagtccctaatatcacaatg

SEQ ID NO: 884007 - DNA, 25 bp, Homo sapien
gtccctaatatcacaatgccaactt

SEQ ID NO: 884008 - DNA, 25 bp, Homo sapien
gatagtccctaatatcacaatgcca

SEQ ID NO: 884009 - DNA, 25 bp, Homo sapien
cttatctcggatagtccctaatatc

SEQ ID NO: 884010 - DNA, 25 bp, Homo sapien
agagtaaacttatgatccaagaagc

SEQ ID NO: 884011 - DNA, 25 bp, Homo sapien
tcctcgtccttttcactcagggccc

SEQ ID NO: 884012 - DNA, 25 bp, Homo sapien
cattctgttacagttaagagtaaac

SEQ ID NO: 884013 - DNA, 25 bp, Homo sapien
taggagaagtgacgttctgtcattc

SEQ ID NO: 884014 - DNA, 25 bp, Homo sapien
ctggtgtcttcagtagtttcactgg

SEQ ID NO: 884015 - DNA, 25 bp, Homo sapien
tgtcttcagtagtttcactgggccc

SEQ ID NO: 884016 - DNA, 25 bp, Homo sapien
ggtgtcttcagtagtttcactgggc

SEQ ID NO: 884017 - DNA, 25 bp, Homo sapien
tcttcagtagtttcactgggcccat

SEQ ID NO: 884018 - DNA, 25 bp, Homo sapien
gaagcagattcagagcctagagccg

SEQ ID NO: 884019 - DNA, 25 bp, Homo sapien
tacatagacggatcacagtgcacgg

SEQ ID NO: 884020 - DNA, 25 bp, Homo sapien
caatcggtgaagaatggatgacctc

SEQ ID NO: 884021 - DNA, 25 bp, Homo sapien
taagaaattcttgggtgccgacgcg

SEQ ID NO: 884022 - DNA, 25 bp, Homo sapien
gagtagtattctccccctttctgcc

SEQ ID NO: 884023 - DNA, 25 bp, Homo sapien
gggagagggagcgataaacacaaac

SEQ ID NO: 884024 - DNA, 25 bp, Homo sapien
ccccaacaaagaggtgagtagtatt

SEQ ID NO: 884025 - DNA, 25 bp, Homo sapien
cctttctgccctgaaccaagtgggc

SEQ ID NO: 884026 - DNA, 25 bp, Homo sapien
aactgcacgaaatttgaggatggcc

SEQ ID NO: 884027 - DNA, 25 bp, Homo sapien
gagacgccttgaagtaactgcacga

SEQ ID NO: 884028 - DNA, 25 bp, Homo sapien
caggcagttctacaacagccgctca

SEQ ID NO: 884029 - DNA, 25 bp, Homo sapien
gcaggtgccccagtgaaacagtggt

SEQ ID NO: 884030 - DNA, 25 bp, Homo sapien
cttcagaacgaattgacaaacaaat

SEQ ID NO: 884031 - DNA, 25 bp, Homo sapien
ctcttcagaacgaattgacaaacaa

SEQ ID NO: 884032 - DNA, 25 bp, Homo sapien
attgacaaacaaattcggtacatcc

SEQ ID NO: 884033 - DNA, 25 bp, Homo sapien
tgacaaacaaattcggtacatcctc

SEQ ID NO: 884034 - DNA, 25 bp, Homo sapien
taaggagaacgtgtgagcattctca

SEQ ID NO: 884035 - DNA, 25 bp, Homo sapien
cttatttaaggagaacgtgtgagca

SEQ ID NO: 884036 - DNA, 25 bp, Homo sapien
tatttaaggagaacgtgtgagcatt

SEQ ID NO: 884037 - DNA, 25 bp, Homo sapien
gaacgtgtgagcattctcaatgaac

SEQ ID NO: 884038 - DNA, 25 bp, Homo sapien
gattcattgtactaggtcagtgcca

SEQ ID NO: 884039 - DNA, 25 bp, Homo sapien
tgtaatgatttgtcgggccaggcaa

SEQ ID NO: 884040 - DNA, 25 bp, Homo sapien
gcaatgcatgctgtttgaccgatga

SEQ ID NO: 884041 - DNA, 25 bp, Homo sapien
tctggatcgcctaacaggtcaggtg

SEQ ID NO: 884042 - DNA, 25 bp, Homo sapien
ggtagtacggccatttacacaacat

SEQ ID NO: 884043 - DNA, 25 bp, Homo sapien
cggccatttacacaacattgattct

SEQ ID NO: 884044 - DNA, 25 bp, Homo sapien
tagtacggccatttacacaacattg

SEQ ID NO: 884045 - DNA, 25 bp, Homo sapien
tttgggtagtacggccatttacaca

SEQ ID NO: 884046 - DNA, 25 bp, Homo sapien
gaatgatgctcattcctgaaggtgt

SEQ ID NO: 884047 - DNA, 25 bp, Homo sapien
aatgatgctcattcctgaaggtgtg

SEQ ID NO: 884048 - DNA, 25 bp, Homo sapien
tctgtcttcagtctttaagaactca

SEQ ID NO: 884049 - DNA, 25 bp, Homo sapien
atttttctccagagaatagtctgtc

SEQ ID NO: 884050 - DNA, 25 bp, Homo sapien
tttctccagagaatagtctgtcttc

SEQ ID NO: 884051 - DNA, 25 bp, Homo sapien
tccagagaatagtctgtcttcagtc

SEQ ID NO: 884052 - DNA, 25 bp, Homo sapien
tgggggacgtgcggcagcacccgca

SEQ ID NO: 884053 - DNA, 25 bp, Homo sapien
tggcgttgtccttgggcacgcatcg

SEQ ID NO: 884054 - DNA, 25 bp, Homo sapien
gctttggtgggggacgtgcggcagc

SEQ ID NO: 884055 - DNA, 25 bp, Homo sapien
taatggcgttgtccttgggcacgca

SEQ ID NO: 884056 - DNA, 25 bp, Homo sapien
tgcatccgcaacacaggtttagggt

SEQ ID NO: 884057 - DNA, 25 bp, Homo sapien
gaagccaaccatatagatatctggg

SEQ ID NO: 884058 - DNA, 25 bp, Homo sapien
caagatgacatttaggcagactgga

SEQ ID NO: 884059 - DNA, 25 bp, Homo sapien
tggtcatgacacaagaacctggatt

SEQ ID NO: 884060 - DNA, 25 bp, Homo sapien
gcttaaatagcacctaggtacacac

SEQ ID NO: 884061 - DNA, 25 bp, Homo sapien
gaagtaacagcttggtttgtcacaa

SEQ ID NO: 884062 - DNA, 25 bp, Homo sapien
tacctcggaatatcctagaaggagt

SEQ ID NO: 884063 - DNA, 25 bp, Homo sapien
tccatatgttaggtcaatgggcagg

SEQ ID NO: 884064 - DNA, 25 bp, Homo sapien
tacagatgcgtctgtgaagagcctt

SEQ ID NO: 884065 - DNA, 25 bp, Homo sapien
tctgctacagatgcgtctgtgaaga

SEQ ID NO: 884066 - DNA, 25 bp, Homo sapien
tccactctgctacagatgcgtctgt

SEQ ID NO: 884067 - DNA, 25 bp, Homo sapien
gctacagatgcgtctgtgaagagcc

SEQ ID NO: 884068 - DNA, 25 bp, Homo sapien
aataaaaatcttctagacataacct

SEQ ID NO: 884069 - DNA, 25 bp, Homo sapien
ctaaaatgtttgtgaagagaagaaa

SEQ ID NO: 884070 - DNA, 25 bp, Homo sapien
tgaagagaagaaagaaattaaattc

SEQ ID NO: 884071 - DNA, 25 bp, Homo sapien
ttccgaaataaaaatcttctagaca

SEQ ID NO: 884072 - DNA, 25 bp, Homo sapien
aaaatcctgcatacccttgtcagag

SEQ ID NO: 884073 - DNA, 25 bp, Homo sapien
cttgtcagagcgatataaaaggttg

SEQ ID NO: 884074 - DNA, 25 bp, Homo sapien
gataaagctccatttcaaggcctgc

SEQ ID NO: 884075 - DNA, 25 bp, Homo sapien
tgtaaaccgcaactggaaaacatat

SEQ ID NO: 884076 - DNA, 25 bp, Homo sapien
ttggttcaggcattccgggatctgc

SEQ ID NO: 884077 - DNA, 25 bp, Homo sapien
caaaacagttggttcaggcattccg

SEQ ID NO: 884078 - DNA, 25 bp, Homo sapien
aaacagttggttcaggcattccggg

SEQ ID NO: 884079 - DNA, 25 bp, Homo sapien
ggttcaggcattccgggatctgcac

SEQ ID NO: 884080 - DNA, 25 bp, Homo sapien
cagtggtactttcacgaggtgtctc

SEQ ID NO: 884081 - DNA, 25 bp, Homo sapien
gaacaggactctttccacttaggac

SEQ ID NO: 884082 - DNA, 25 bp, Homo sapien
gaggtgtctcgattccctgaacagg

SEQ ID NO: 884083 - DNA, 25 bp, Homo sapien
cacttaggaccacatggagcggtga

SEQ ID NO: 884084 - DNA, 25 bp, Homo sapien
tgcacggcagtgtcccctatttttc

SEQ ID NO: 884085 - DNA, 25 bp, Homo sapien
cccgacggccaaaaatggggctgct

SEQ ID NO: 884086 - DNA, 25 bp, Homo sapien
tgctgtctccgccaccctcttccct

SEQ ID NO: 884087 - DNA, 25 bp, Homo sapien
ggccgtgcacggcagtgtcccctat

SEQ ID NO: 884088 - DNA, 25 bp, Homo sapien
agcgaatggcaaactggctcccctt

SEQ ID NO: 884089 - DNA, 25 bp, Homo sapien
agagggataaagccccagcgaatgg

SEQ ID NO: 884090 - DNA, 25 bp, Homo sapien
taaagccccagcgaatggcaaactg

SEQ ID NO: 884091 - DNA, 25 bp, Homo sapien
gccccagcgaatggcaaactggctc

SEQ ID NO: 884092 - DNA, 25 bp, Homo sapien
acggccgtgtggcgcagggaggacc

SEQ ID NO: 884093 - DNA, 25 bp, Homo sapien
cgacggccgtgtggcgcagggagga

SEQ ID NO: 884094 - DNA, 25 bp, Homo sapien
ggcgacggccgtgtggcgcagggag

SEQ ID NO: 884095 - DNA, 25 bp, Homo sapien
cggccgtgtggcgcagggaggaccc

SEQ ID NO: 884096 - DNA, 25 bp, Homo sapien
atccgaaagggaaaggaggtgcgca

SEQ ID NO: 884097 - DNA, 25 bp, Homo sapien
aagggaaaggaggtgcgcaggcgcc

SEQ ID NO: 884098 - DNA, 25 bp, Homo sapien
aaaggaggtgcgcaggcgccacaca

SEQ ID NO: 884099 - DNA, 25 bp, Homo sapien
aaggaggtgcgcaggcgccacacac

SEQ ID NO: 884100 - DNA, 25 bp, Homo sapien
ggcaggagtcgtgagcgtcgccagc

SEQ ID NO: 884101 - DNA, 25 bp, Homo sapien
ccagcagaggtcgtaattcatcgcc

SEQ ID NO: 884102 - DNA, 25 bp, Homo sapien
gaggtcgtaattcatcgcctttaac

SEQ ID NO: 884103 - DNA, 25 bp, Homo sapien
tgagcgtcgccagcagaggtcgtaa

SEQ ID NO: 884104 - DNA, 25 bp, Homo sapien
ctcgccggcagtagtaggcgcatgc

SEQ ID NO: 884105 - DNA, 25 bp, Homo sapien
ttccgcctcgccggcagtagtaggc

SEQ ID NO: 884106 - DNA, 25 bp, Homo sapien
taggcgcatgcgtggttgcgatcat

SEQ ID NO: 884107 - DNA, 25 bp, Homo sapien
ctgctcttccgcctcgccggcagta

SEQ ID NO: 884108 - DNA, 25 bp, Homo sapien
gaaaaatacgtataagcaattccta

SEQ ID NO: 884109 - DNA, 25 bp, Homo sapien
cgaaaaatacgtataagcaattcct

SEQ ID NO: 884110 - DNA, 25 bp, Homo sapien
acaataaaggtagatagatctttaa

SEQ ID NO: 884111 - DNA, 25 bp, Homo sapien
tattgtctttacgacaaaagattaa

SEQ ID NO: 884112 - DNA, 25 bp, Homo sapien
ctctttattgtctttacgacaaaag

SEQ ID NO: 884113 - DNA, 25 bp, Homo sapien
cacacatatgtatctagataaatat

SEQ ID NO: 884114 - DNA, 25 bp, Homo sapien
gttcacatcctttaacgggagccag

SEQ ID NO: 884115 - DNA, 25 bp, Homo sapien
tcattctaagcatgcagcactccag

SEQ ID NO: 884116 - DNA, 25 bp, Homo sapien
tatttgcgggccgtggccatcattc

SEQ ID NO: 884117 - DNA, 25 bp, Homo sapien
gccagtcttctgctacgtaattaga

SEQ ID NO: 884118 - DNA, 25 bp, Homo sapien
gagcgttattacagcacagggcccg

SEQ ID NO: 884119 - DNA, 25 bp, Homo sapien
tggagccgacgcctacagtaagttg

SEQ ID NO: 884120 - DNA, 25 bp, Homo sapien
aggctgcccctagagaacgtttgtc

SEQ ID NO: 884121 - DNA, 25 bp, Homo sapien
gggttagcaaacacacggaggtcat

SEQ ID NO: 884122 - DNA, 25 bp, Homo sapien
tctttgtggctagcataggtaccac

SEQ ID NO: 884123 - DNA, 25 bp, Homo sapien
aaataatctttgtggctagcatagg

SEQ ID NO: 884124 - DNA, 25 bp, Homo sapien
tgagtcaacaaataatctttgtggc

SEQ ID NO: 884125 - DNA, 25 bp, Homo sapien
caacaaataatctttgtggctagca

SEQ ID NO: 884126 - DNA, 25 bp, Homo sapien
ctccagccaagttgtctctgagctt

SEQ ID NO: 884127 - DNA, 25 bp, Homo sapien
tagtgcctcctcccaggggacccac

SEQ ID NO: 884128 - DNA, 25 bp, Homo sapien
ctagtgcctcctcccaggggaccca

SEQ ID NO: 884129 - DNA, 25 bp, Homo sapien
gataatgtgctttgtcctccagtgt

SEQ ID NO: 884130 - DNA, 25 bp, Homo sapien
caccagccaggcgttttgttccagg

SEQ ID NO: 884131 - DNA, 25 bp, Homo sapien
tgtaaaggcctcctggttgcctctg

SEQ ID NO: 884132 - DNA, 25 bp, Homo sapien
tccacatggatgtcctgatcaggtc

SEQ ID NO: 884133 - DNA, 25 bp, Homo sapien
tcatacatgcatattgcctcaaaag

SEQ ID NO: 884134 - DNA, 25 bp, Homo sapien
gactagaagtgcaagtcaaatgccc

SEQ ID NO: 884135 - DNA, 25 bp, Homo sapien
tcagtttcgtgcaattaaagactag

SEQ ID NO: 884136 - DNA, 25 bp, Homo sapien
tctgggtcacgacagcagaagtcag

SEQ ID NO: 884137 - DNA, 25 bp, Homo sapien
gaatcccgtgccacatatgacctgc

SEQ ID NO: 884138 - DNA, 25 bp, Homo sapien
cacatatgacctgctgttcaccggt

SEQ ID NO: 884139 - DNA, 25 bp, Homo sapien
aagctgcagaatcccgtgccacata

SEQ ID NO: 884140 - DNA, 25 bp, Homo sapien
ttcaccggttcttgccaggatcaca

SEQ ID NO: 884141 - DNA, 25 bp, Homo sapien
ccctaagctgggtgaagagaacggt

SEQ ID NO: 884142 - DNA, 25 bp, Homo sapien
ggatgctaagcagggagtctccaac

SEQ ID NO: 884143 - DNA, 25 bp, Homo sapien
agttgtgaccaagccatagtgcccc

SEQ ID NO: 884144 - DNA, 25 bp, Homo sapien
cattagacagcctaaatggagctgg

SEQ ID NO: 884145 - DNA, 25 bp, Homo sapien
aagtcagtgcctgttcatctcccct

SEQ ID NO: 884146 - DNA, 25 bp, Homo sapien
tcaaccatccccagtctcatctgct

SEQ ID NO: 884147 - DNA, 25 bp, Homo sapien
aaaacctgtgtttgtggtctgttct

SEQ ID NO: 884148 - DNA, 25 bp, Homo sapien
tgtagacgaatccatcattaatttc

SEQ ID NO: 884149 - DNA, 25 bp, Homo sapien
gaatagacaatgattataagcagat

SEQ ID NO: 884150 - DNA, 25 bp, Homo sapien
cagtcttccaggatagaatagacaa

SEQ ID NO: 884151 - DNA, 25 bp, Homo sapien
gagccccaggaaacagtgatagata

SEQ ID NO: 884152 - DNA, 25 bp, Homo sapien
aatgccacatgcttggaactcagtc

SEQ ID NO: 884153 - DNA, 25 bp, Homo sapien
tcagtacccagggcggtaccactca

SEQ ID NO: 884154 - DNA, 25 bp, Homo sapien
cagtacccagggcggtaccactcac

SEQ ID NO: 884155 - DNA, 25 bp, Homo sapien
agctggcctctgttgtcacccgtca

SEQ ID NO: 884156 - DNA, 25 bp, Homo sapien
gtcagctcacgatccagtccctctg

SEQ ID NO: 884157 - DNA, 25 bp, Homo sapien
ggtcagcgccgtgccggccaggttt

SEQ ID NO: 884158 - DNA, 25 bp, Homo sapien
tggatggtgacggtcagcgccgtgc

SEQ ID NO: 884159 - DNA, 25 bp, Homo sapien
tgcaacaggcggtgacggaggcgtt

SEQ ID NO: 884160 - DNA, 25 bp, Homo sapien
gacagtgcaacaggcggtgacggag

SEQ ID NO: 884161 - DNA, 25 bp, Homo sapien
caggacagtgcaacaggcggtgacg

SEQ ID NO: 884162 - DNA, 25 bp, Homo sapien
agcacaagcatcaggacagtgcaac

SEQ ID NO: 884163 - DNA, 25 bp, Homo sapien
cttttcaatccaatcaccaattaag

SEQ ID NO: 884164 - DNA, 25 bp, Homo sapien
tattaatacatatccagccaccact

SEQ ID NO: 884165 - DNA, 25 bp, Homo sapien
aatacatatccagccaccactaagc

SEQ ID NO: 884166 - DNA, 25 bp, Homo sapien
tccaatcaccaattaagaccccaaa

SEQ ID NO: 884167 - DNA, 25 bp, Homo sapien
tccggtgcccgtggctttagtctgt

SEQ ID NO: 884168 - DNA, 25 bp, Homo sapien
tcatccggtgcccgtggctttagtc

SEQ ID NO: 884169 - DNA, 25 bp, Homo sapien
tgcccgtggctttagtctgtttctc

SEQ ID NO: 884170 - DNA, 25 bp, Homo sapien
attttcagtgtcatttagttctccc

SEQ ID NO: 884171 - DNA, 25 bp, Homo sapien
aggctggcaaggctcctcttgctat

SEQ ID NO: 884172 - DNA, 25 bp, Homo sapien
gtcgtggtaactggagggctcagca

SEQ ID NO: 884173 - DNA, 25 bp, Homo sapien
ggctggcaaggctcctcttgctatt

SEQ ID NO: 884174 - DNA, 25 bp, Homo sapien
ctggaaagcgctgtagtcgtggtaa

SEQ ID NO: 884175 - DNA, 25 bp, Homo sapien
gccaggcatttgagaaactcactcc

SEQ ID NO: 884176 - DNA, 25 bp, Homo sapien
cactccccgtttgctgtatttacca

SEQ ID NO: 884177 - DNA, 25 bp, Homo sapien
acagccaggcatttgagaaactcac

SEQ ID NO: 884178 - DNA, 25 bp, Homo sapien
gagaaactcactccccgtttgctgt

SEQ ID NO: 884179 - DNA, 25 bp, Homo sapien
tgccgtccacacctttaaggtccaa

SEQ ID NO: 884180 - DNA, 25 bp, Homo sapien
tatgccgtccacacctttaaggtcc

SEQ ID NO: 884181 - DNA, 25 bp, Homo sapien
ttatgccgtccacacctttaaggtc

SEQ ID NO: 884182 - DNA, 25 bp, Homo sapien
atgccgtccacacctttaaggtcca

SEQ ID NO: 884183 - DNA, 25 bp, Homo sapien
gagagttcgtagcataacctgccag

SEQ ID NO: 884184 - DNA, 25 bp, Homo sapien
cagtaggttgtaaagacctagagag

SEQ ID NO: 884185 - DNA, 25 bp, Homo sapien
ctgagtggcagtaggttgtaaagac

SEQ ID NO: 884186 - DNA, 25 bp, Homo sapien
tgccagtacgtaccctagggttgag

SEQ ID NO: 884187 - DNA, 25 bp, Homo sapien
tctgtggagggagagacatagcaca

SEQ ID NO: 884188 - DNA, 25 bp, Homo sapien
ttctctagttaactaagcaagtcaa

SEQ ID NO: 884189 - DNA, 25 bp, Homo sapien
atagcacagaacctcccaaccccat

SEQ ID NO: 884190 - DNA, 25 bp, Homo sapien
ctgcttctctagttaactaagcaag

SEQ ID NO: 884191 - DNA, 25 bp, Homo sapien
tggggacaaatactgaaattggacc

SEQ ID NO: 884192 - DNA, 25 bp, Homo sapien
gaaattggacctgtgcgatggccat

SEQ ID NO: 884193 - DNA, 25 bp, Homo sapien
ttgtgtaggctggttttgttttggc

SEQ ID NO: 884194 - DNA, 25 bp, Homo sapien
aaacaggggccttgtaaatgagagc

SEQ ID NO: 884195 - DNA, 25 bp, Homo sapien
ttgtaaatgagagcaacattgtgta

SEQ ID NO: 884196 - DNA, 25 bp, Homo sapien
tgagagcaacattgtgtaggctggt

SEQ ID NO: 884197 - DNA, 25 bp, Homo sapien
gggattagttccacacggctcccca

SEQ ID NO: 884198 - DNA, 25 bp, Homo sapien
acacaggtttcacattcaattgaga

SEQ ID NO: 884199 - DNA, 25 bp, Homo sapien
acacccatgtgtcccatagaactca

SEQ ID NO: 884200 - DNA, 25 bp, Homo sapien
tgtcagccttgcagaacctgcatat

SEQ ID NO: 884201 - DNA, 25 bp, Homo sapien
gattcaacagaagcactcacaaggc

SEQ ID NO: 884202 - DNA, 25 bp, Homo sapien
gaatcagccaatacctccaggaaag

SEQ ID NO: 884203 - DNA, 25 bp, Homo sapien
caagtgcgattggtttaaaggccct

SEQ ID NO: 884204 - DNA, 25 bp, Homo sapien
tctgccagggatgctcgttagagtc

SEQ ID NO: 884205 - DNA, 25 bp, Homo sapien
tctgacacacaaccaaatcaaggtg

SEQ ID NO: 884206 - DNA, 25 bp, Homo sapien
ttgagcatagatcccaaagccctac

SEQ ID NO: 884207 - DNA, 25 bp, Homo sapien
aggtttccatgcttcactcacagtg

SEQ ID NO: 884208 - DNA, 25 bp, Homo sapien
taatgcaggctgtctttagaccaca

SEQ ID NO: 884209 - DNA, 25 bp, Homo sapien
tatgacaaataatccgccactggtg

SEQ ID NO: 884210 - DNA, 25 bp, Homo sapien
tgggactactactcaccacacatgg

SEQ ID NO: 884211 - DNA, 25 bp, Homo sapien
ccactggtgcatggcccatagagct

SEQ ID NO: 884212 - DNA, 25 bp, Homo sapien
tgggctcgagtgaacctcctgagta

SEQ ID NO: 884213 - DNA, 25 bp, Homo sapien
tataaagtactacatatggagaaca

SEQ ID NO: 884214 - DNA, 25 bp, Homo sapien
tagccttaagaaggtagggaacaca

SEQ ID NO: 884215 - DNA, 25 bp, Homo sapien
gttgtataaagtactacatatggag

SEQ ID NO: 884216 - DNA, 25 bp, Homo sapien
tatttccatagccttaagaaggtag

SEQ ID NO: 884217 - DNA, 25 bp, Homo sapien
tacttaggagatctgtgaccatcag

SEQ ID NO: 884218 - DNA, 25 bp, Homo sapien
gcagtatataaaagggtggcacccc

SEQ ID NO: 884219 - DNA, 25 bp, Homo sapien
catttgccctgggtagtctgggaca

SEQ ID NO: 884220 - DNA, 25 bp, Homo sapien
tagtggtatacaaaggactccaggg

SEQ ID NO: 884221 - DNA, 25 bp, Homo sapien
caagaactggacagctccttaggtc

SEQ ID NO: 884222 - DNA, 25 bp, Homo sapien
gcaaccatagccaaaaggaccacgg

SEQ ID NO: 884223 - DNA, 25 bp, Homo sapien
tggtgactacagcaagggactatga

SEQ ID NO: 884224 - DNA, 25 bp, Homo sapien
taggtcttcctcaacggtcaactga

SEQ ID NO: 884225 - DNA, 25 bp, Homo sapien
tataaaacagttcccatacatgcag

SEQ ID NO: 884226 - DNA, 25 bp, Homo sapien
gactccctttgactctgaaggccaa

SEQ ID NO: 884227 - DNA, 25 bp, Homo sapien
tcctgaccaggagctagagaattcc

SEQ ID NO: 884228 - DNA, 25 bp, Homo sapien
tccaaagtccagcagtagggtaaat

SEQ ID NO: 884229 - DNA, 25 bp, Homo sapien
ttgtcactgacaatcttagggcaac

SEQ ID NO: 884230 - DNA, 25 bp, Homo sapien
cccagggtactttcataaagaagca

SEQ ID NO: 884231 - DNA, 25 bp, Homo sapien
gaatacggatgaaagacccagggta

SEQ ID NO: 884232 - DNA, 25 bp, Homo sapien
ttcagaatttaagacatcagggctc

SEQ ID NO: 884233 - DNA, 25 bp, Homo sapien
tgctaatactaggaggtctctgctg

SEQ ID NO: 884234 - DNA, 25 bp, Homo sapien
taatctgtggacagagtaatgctaa

SEQ ID NO: 884235 - DNA, 25 bp, Homo sapien
atctgtggacagagtaatgctaata

SEQ ID NO: 884236 - DNA, 25 bp, Homo sapien
gtaatgctaatactaggaggtctct

SEQ ID NO: 884237 - DNA, 25 bp, Homo sapien
ctgtttgataaacccgactggctgg

SEQ ID NO: 884238 - DNA, 25 bp, Homo sapien
tacaagcggaaaacctattggcatc

SEQ ID NO: 884239 - DNA, 25 bp, Homo sapien
gatttactaaatacagtcgctgcgg

SEQ ID NO: 884240 - DNA, 25 bp, Homo sapien
gggactgtgacaccactgacttgtt

SEQ ID NO: 884241 - DNA, 25 bp, Homo sapien
ttttagaactccaaacataagcaga

SEQ ID NO: 884242 - DNA, 25 bp, Homo sapien
tgccataaaccataccccattaagt

SEQ ID NO: 884243 - DNA, 25 bp, Homo sapien
gaaatatcacgcagtaaaactaggg

SEQ ID NO: 884244 - DNA, 25 bp, Homo sapien
aaaatttttgtgactgtgcaactgc

SEQ ID NO: 884245 - DNA, 25 bp, Homo sapien
tggagtgcagttataaagtgctctg

SEQ ID NO: 884246 - DNA, 25 bp, Homo sapien
cttggagtgcagttataaagtgctc

SEQ ID NO: 884247 - DNA, 25 bp, Homo sapien
ttggagtgcagttataaagtgctct

SEQ ID NO: 884248 - DNA, 25 bp, Homo sapien
tgcactctgccaggtgagtttattc

SEQ ID NO: 884249 - DNA, 25 bp, Homo sapien
gcactctgccaggtgagtttattcc

SEQ ID NO: 884250 - DNA, 25 bp, Homo sapien
tcagttctaggatctgtggctgttt

SEQ ID NO: 884251 - DNA, 25 bp, Homo sapien
atttttgcctcctgatctctggcaa

SEQ ID NO: 884252 - DNA, 25 bp, Homo sapien
agatttttgcctcctgatctctggc

SEQ ID NO: 884253 - DNA, 25 bp, Homo sapien
ctcagttctaggatctgtggctgtt

SEQ ID NO: 884254 - DNA, 25 bp, Homo sapien
tctctctccggccacatttgtgaca

SEQ ID NO: 884255 - DNA, 25 bp, Homo sapien
aatctcaggaatgacaaggatgccc

SEQ ID NO: 884256 - DNA, 25 bp, Homo sapien
ggatgcccaattcagtagcatcatt

SEQ ID NO: 884257 - DNA, 25 bp, Homo sapien
tatgctgagcatcaatctctcctag

SEQ ID NO: 884258 - DNA, 25 bp, Homo sapien
aagataatatggtgaccacctgaat

SEQ ID NO: 884259 - DNA, 25 bp, Homo sapien
tcttaggcaaatgttcaaggatcta

SEQ ID NO: 884260 - DNA, 25 bp, Homo sapien
tgatagcaccagagacaatagggtc

SEQ ID NO: 884261 - DNA, 25 bp, Homo sapien
caattcacgttctgcattttttcac

SEQ ID NO: 884262 - DNA, 25 bp, Homo sapien
tatgaccccttattgacatgctggt

SEQ ID NO: 884263 - DNA, 25 bp, Homo sapien
actgcatttcttgatattcgagagg

SEQ ID NO: 884264 - DNA, 25 bp, Homo sapien
cgagaggaagttggtgtgatttcaa

SEQ ID NO: 884265 - DNA, 25 bp, Homo sapien
tgtcttttccacctatgacccctta

SEQ ID NO: 884266 - DNA, 25 bp, Homo sapien
ttcatgggaccatgaggcaatgaag

SEQ ID NO: 884267 - DNA, 25 bp, Homo sapien
tcatgggaccatgaggcaatgaagc

SEQ ID NO: 884268 - DNA, 25 bp, Homo sapien
cagcaatggctctggatataattct

SEQ ID NO: 884269 - DNA, 25 bp, Homo sapien
tctggatataattctagctgggctc

SEQ ID NO: 884270 - DNA, 25 bp, Homo sapien
agtgctttttgagctagatcccatt

SEQ ID NO: 884271 - DNA, 25 bp, Homo sapien
ctgggctctgtatataatatcatcc

SEQ ID NO: 884272 - DNA, 25 bp, Homo sapien
gaagaaactggtatcctgctactta

SEQ ID NO: 884273 - DNA, 25 bp, Homo sapien
aataaatccctgttaacatttgcac

SEQ ID NO: 884274 - DNA, 25 bp, Homo sapien
tcttacatgttgtcgaggatatcca

SEQ ID NO: 884275 - DNA, 25 bp, Homo sapien
tgaatcctgaagaaactggtatcct

SEQ ID NO: 884276 - DNA, 25 bp, Homo sapien
tgagctatcgcatccggccctttat

SEQ ID NO: 884277 - DNA, 25 bp, Homo sapien
taggtatgtaccagactagcaatca

SEQ ID NO: 884278 - DNA, 25 bp, Homo sapien
ggtaggctgagctttacattaactt

SEQ ID NO: 884279 - DNA, 25 bp, Homo sapien
gactatcaattatagggaactttcc

SEQ ID NO: 884280 - DNA, 25 bp, Homo sapien
tgaacaaatttgacacagtgactga

SEQ ID NO: 884281 - DNA, 25 bp, Homo sapien
taaggcagcattgtaacacaacaaa

SEQ ID NO: 884282 - DNA, 25 bp, Homo sapien
cttgaacaaatttgacacagtgact

SEQ ID NO: 884283 - DNA, 25 bp, Homo sapien
aacactgggcatgtaagttaaggca

SEQ ID NO: 884284 - DNA, 25 bp, Homo sapien
attaacaaatctttagaattctaag

SEQ ID NO: 884285 - DNA, 25 bp, Homo sapien
tattaacaaatctttagaattctaa

SEQ ID NO: 884286 - DNA, 25 bp, Homo sapien
aagaatattaacaaatctttagaat

SEQ ID NO: 884287 - DNA, 25 bp, Homo sapien
gaatattaacaaatctttagaattc

SEQ ID NO: 884288 - DNA, 25 bp, Homo sapien
ggtccactgtataccacttttgaca

SEQ ID NO: 884289 - DNA, 25 bp, Homo sapien
tgaggatgaggtccactgtatacca

SEQ ID NO: 884290 - DNA, 25 bp, Homo sapien
ttttgacaaaccatgctgggatagt

SEQ ID NO: 884291 - DNA, 25 bp, Homo sapien
ccatgctgggatagtgcactctcag

SEQ ID NO: 884292 - DNA, 25 bp, Homo sapien
tacagatggtttggataaagatgga

SEQ ID NO: 884293 - DNA, 25 bp, Homo sapien
tggaatcgtaaaactcaatactttg

SEQ ID NO: 884294 - DNA, 25 bp, Homo sapien
ttcatggtatacagatggtttggat

SEQ ID NO: 884295 - DNA, 25 bp, Homo sapien
ggataaagatggaatcgtaaaactc

SEQ ID NO: 884296 - DNA, 25 bp, Homo sapien
aaaagcagttgcacaggttatatat

SEQ ID NO: 884297 - DNA, 25 bp, Homo sapien
acaaacactagctttattaaaatga

SEQ ID NO: 884298 - DNA, 25 bp, Homo sapien
tgaaaagcagttgcacaggttatat

SEQ ID NO: 884299 - DNA, 25 bp, Homo sapien
aaatgaaaagcagttgcacaggtta

SEQ ID NO: 884300 - DNA, 25 bp, Homo sapien
cagcgtaaattgaagcaactgctcc

SEQ ID NO: 884301 - DNA, 25 bp, Homo sapien
gagcttcaatgcatccactgctatg

SEQ ID NO: 884302 - DNA, 25 bp, Homo sapien
gagactgcaaggtagcaccaaatta

SEQ ID NO: 884303 - DNA, 25 bp, Homo sapien
tccactgcgatagaattcaaagagc

SEQ ID NO: 884304 - DNA, 25 bp, Homo sapien
gactcccctggatctagaaccctat

SEQ ID NO: 884305 - DNA, 25 bp, Homo sapien
tgtaaccatgattaattggccctgg

SEQ ID NO: 884306 - DNA, 25 bp, Homo sapien
tcagataggcaaggtaagaccctct

SEQ ID NO: 884307 - DNA, 25 bp, Homo sapien
ggctaaataactacagactcccctg

SEQ ID NO: 884308 - DNA, 25 bp, Homo sapien
gaacactactattcaggaaccagca

SEQ ID NO: 884309 - DNA, 25 bp, Homo sapien
taatgagaacctagtcaccatgtgt

SEQ ID NO: 884310 - DNA, 25 bp, Homo sapien
tctagtggtaacaggcacatgactc

SEQ ID NO: 884311 - DNA, 25 bp, Homo sapien
caaagaggctatccactatgaccaa

SEQ ID NO: 884312 - DNA, 25 bp, Homo sapien
tacaagatccaagtgagtgattagc

SEQ ID NO: 884313 - DNA, 25 bp, Homo sapien
cacgaaactaacatgcaagaccaga

SEQ ID NO: 884314 - DNA, 25 bp, Homo sapien
aaaactggtccatcatcactagtag

SEQ ID NO: 884315 - DNA, 25 bp, Homo sapien
caatgcttcggaaagtgtggtcctg

SEQ ID NO: 884316 - DNA, 25 bp, Homo sapien
ccactgcatggaatattcttttacc

SEQ ID NO: 884317 - DNA, 25 bp, Homo sapien
tattaccttcaaactaaatgggcag

SEQ ID NO: 884318 - DNA, 25 bp, Homo sapien
ctgggaaaggcactagccgggctaa

SEQ ID NO: 884319 - DNA, 25 bp, Homo sapien
aaacttgtgcttatccgtagactgg

SEQ ID NO: 884320 - DNA, 25 bp, Homo sapien
tgtctttcaaatttgtggcataatt

SEQ ID NO: 884321 - DNA, 25 bp, Homo sapien
cctggataactttatagagagatga

SEQ ID NO: 884322 - DNA, 25 bp, Homo sapien
cataatttggtaaagatgtttctgg

SEQ ID NO: 884323 - DNA, 25 bp, Homo sapien
tagagagatgaaactaaagaactct

SEQ ID NO: 884324 - DNA, 25 bp, Homo sapien
ggcaagcaaatgtggactatttgga

SEQ ID NO: 884325 - DNA, 25 bp, Homo sapien
tactgcaactgcttacataaagacg

SEQ ID NO: 884326 - DNA, 25 bp, Homo sapien
caaaagatctcgaggcaacattcca

SEQ ID NO: 884327 - DNA, 25 bp, Homo sapien
cgtcatttgatcaagagtaacctaa

SEQ ID NO: 884328 - DNA, 25 bp, Homo sapien
catcttaaagaatggatagctgtcg

SEQ ID NO: 884329 - DNA, 25 bp, Homo sapien
gaatggatagctgtcgacatttgct

SEQ ID NO: 884330 - DNA, 25 bp, Homo sapien
tacaacccaccctttaacatgctct

SEQ ID NO: 884331 - DNA, 25 bp, Homo sapien
ctgtcgacatttgcttttgcatatt

SEQ ID NO: 884332 - DNA, 25 bp, Homo sapien
catagaaggatgctcaattcatggc

SEQ ID NO: 884333 - DNA, 25 bp, Homo sapien
aaagtctgcccagctattcatcagg

SEQ ID NO: 884334 - DNA, 25 bp, Homo sapien
gacagataaggccagctattaaaat

SEQ ID NO: 884335 - DNA, 25 bp, Homo sapien
ggtgcttttcctaaatacacactgc

SEQ ID NO: 884336 - DNA, 25 bp, Homo sapien
tgaatcactgatggtcgctggagaa

SEQ ID NO: 884337 - DNA, 25 bp, Homo sapien
gccactgggttagccaactagagaa

SEQ ID NO: 884338 - DNA, 25 bp, Homo sapien
cattgttggtcaccccagttccact

SEQ ID NO: 884339 - DNA, 25 bp, Homo sapien
catacaccccttatatagccactgg

SEQ ID NO: 884340 - DNA, 25 bp, Homo sapien
taaactctgacaaccattcctccac

SEQ ID NO: 884341 - DNA, 25 bp, Homo sapien
cttaaactctgacaaccattcctcc

SEQ ID NO: 884342 - DNA, 25 bp, Homo sapien
ttaaactctgacaaccattcctcca

SEQ ID NO: 884343 - DNA, 25 bp, Homo sapien
aaactctgacaaccattcctccaca

SEQ ID NO: 884344 - DNA, 25 bp, Homo sapien
ttccacatctgttctaaaccttcaa

SEQ ID NO: 884345 - DNA, 25 bp, Homo sapien
ttttccacatctgttctaaaccttc

SEQ ID NO: 884346 - DNA, 25 bp, Homo sapien
tccacatctgttctaaaccttcaac

SEQ ID NO: 884347 - DNA, 25 bp, Homo sapien
tttccacatctgttctaaaccttca

SEQ ID NO: 884348 - DNA, 25 bp, Homo sapien
ctgaaaattaacatagaaaaatgtt

SEQ ID NO: 884349 - DNA, 25 bp, Homo sapien
tgaaaattaacatagaaaaatgtta

SEQ ID NO: 884350 - DNA, 25 bp, Homo sapien
ctatagtaattaagccagtggtggc

SEQ ID NO: 884351 - DNA, 25 bp, Homo sapien
ggacaaaaagaaccatgaccctaga

SEQ ID NO: 884352 - DNA, 25 bp, Homo sapien
acaaaagcactaatcacaaggaggg

SEQ ID NO: 884353 - DNA, 25 bp, Homo sapien
gaccctagagatcatgctgtatgca

SEQ ID NO: 884354 - DNA, 25 bp, Homo sapien
caacgccctgagtctgggcccttat

SEQ ID NO: 884355 - DNA, 25 bp, Homo sapien
aacgccctgagtctgggcccttatt

SEQ ID NO: 884356 - DNA, 25 bp, Homo sapien
tgtgcagtactaaaccacttaggca

SEQ ID NO: 884357 - DNA, 25 bp, Homo sapien
gattctgtgcagtactaaaccactt

SEQ ID NO: 884358 - DNA, 25 bp, Homo sapien
tgccaggcttgtgatagtgtatttc

SEQ ID NO: 884359 - DNA, 25 bp, Homo sapien
agagcagattctgtgcagtactaaa

SEQ ID NO: 884360 - DNA, 25 bp, Homo sapien
gggtcgacagtgaccattgtggcca

SEQ ID NO: 884361 - DNA, 25 bp, Homo sapien
aggctggactgctcctcgccgggaa

SEQ ID NO: 884362 - DNA, 25 bp, Homo sapien
aaggaaagacccgagtcgcgcgcac

SEQ ID NO: 884363 - DNA, 25 bp, Homo sapien
attgtggccaccagaccggacggac

SEQ ID NO: 884364 - DNA, 25 bp, Homo sapien
tgcaggacctcgactcgtgaggctc

SEQ ID NO: 884365 - DNA, 25 bp, Homo sapien
ttcctagcagaacgggtcccggtga

SEQ ID NO: 884366 - DNA, 25 bp, Homo sapien
gctctcagcgacagcgacggaggct

SEQ ID NO: 884367 - DNA, 25 bp, Homo sapien
tgactgacaacccagccgggagagc

SEQ ID NO: 884368 - DNA, 25 bp, Homo sapien
caaaggaggcctggttattcttcgt

SEQ ID NO: 884369 - DNA, 25 bp, Homo sapien
tgttacccgttgttacccagtgtga

SEQ ID NO: 884370 - DNA, 25 bp, Homo sapien
tcattgagcatagggggcttgttca

SEQ ID NO: 884371 - DNA, 25 bp, Homo sapien
tgctctggtacctgagattctctcc

SEQ ID NO: 884372 - DNA, 25 bp, Homo sapien
tgtttgctgcccacctgctccctct

SEQ ID NO: 884373 - DNA, 25 bp, Homo sapien
cacctgctccctctccccatgattc

SEQ ID NO: 884374 - DNA, 25 bp, Homo sapien
tgctccctctccccatgattcctct

SEQ ID NO: 884375 - DNA, 25 bp, Homo sapien
cctgctccctctccccatgattcct

SEQ ID NO: 884376 - DNA, 25 bp, Homo sapien
tgctggcgcaagcacacgtgtgcgt

SEQ ID NO: 884377 - DNA, 25 bp, Homo sapien
tccttgagcagaatatccaagatag

SEQ ID NO: 884378 - DNA, 25 bp, Homo sapien
agatagtggtttgctggcgcaagca

SEQ ID NO: 884379 - DNA, 25 bp, Homo sapien
tgagcagaatatccaagatagtggt

SEQ ID NO: 884380 - DNA, 25 bp, Homo sapien
atgacaccgaacaaagccaacccga

SEQ ID NO: 884381 - DNA, 25 bp, Homo sapien
accgaacaaagccaacccgacagat

SEQ ID NO: 884382 - DNA, 25 bp, Homo sapien
taacaaatgacaccgaacaaagcca

SEQ ID NO: 884383 - DNA, 25 bp, Homo sapien
tcagaataacaaatgacaccgaaca

SEQ ID NO: 884384 - DNA, 25 bp, Homo sapien
acttgagcaccattaaatggatttt

SEQ ID NO: 884385 - DNA, 25 bp, Homo sapien
gaaagttcccacatgtcccctgtgg

SEQ ID NO: 884386 - DNA, 25 bp, Homo sapien
taggaatcctgacaaacacatccag

SEQ ID NO: 884387 - DNA, 25 bp, Homo sapien
tgatattcacaaggtagataccctg

SEQ ID NO: 884388 - DNA, 25 bp, Homo sapien
gggtttgctcccaatacaagtcagg

SEQ ID NO: 884389 - DNA, 25 bp, Homo sapien
ggtgcatatactaaagccaaatcca

SEQ ID NO: 884390 - DNA, 25 bp, Homo sapien
cttgtacttatcttgctcagggtat

SEQ ID NO: 884391 - DNA, 25 bp, Homo sapien
tcagggtataacttggtgcatatac

SEQ ID NO: 884392 - DNA, 25 bp, Homo sapien
taacttggtgcatatactaaagcca

SEQ ID NO: 884393 - DNA, 25 bp, Homo sapien
gagagcagacaatgtgagcttataa

SEQ ID NO: 884394 - DNA, 25 bp, Homo sapien
ccaagagagcagacaatgtgagctt

SEQ ID NO: 884395 - DNA, 25 bp, Homo sapien
agcagacaatgtgagcttataaggg

SEQ ID NO: 884396 - DNA, 25 bp, Homo sapien
gccttgggtgagtctccaaccccta

SEQ ID NO: 884397 - DNA, 25 bp, Homo sapien
agccattagcaaacatctctcttcc

SEQ ID NO: 884398 - DNA, 25 bp, Homo sapien
caatttcagccattagcaaacatct

SEQ ID NO: 884399 - DNA, 25 bp, Homo sapien
cattagcaaacatctctcttcccat

SEQ ID NO: 884400 - DNA, 25 bp, Homo sapien
tttcagccattagcaaacatctctc

SEQ ID NO: 884401 - DNA, 25 bp, Homo sapien
tcatccgtagcaggtgagatcataa

SEQ ID NO: 884402 - DNA, 25 bp, Homo sapien
catccgtagcaggtgagatcataag

SEQ ID NO: 884403 - DNA, 25 bp, Homo sapien
atccgtagcaggtgagatcataagc

SEQ ID NO: 884404 - DNA, 25 bp, Homo sapien
ggtgcacctgcagattcttcttgct

SEQ ID NO: 884405 - DNA, 25 bp, Homo sapien
aggtgcacctgcagattcttcttgc

SEQ ID NO: 884406 - DNA, 25 bp, Homo sapien
ggagtcaaaccatgtagttctggtt

SEQ ID NO: 884407 - DNA, 25 bp, Homo sapien
tcattctttctgattctagtgtgca

SEQ ID NO: 884408 - DNA, 25 bp, Homo sapien
cttccaaagttaatactgaaaggag

SEQ ID NO: 884409 - DNA, 25 bp, Homo sapien
gaaaggagactctctagcccagagg

SEQ ID NO: 884410 - DNA, 25 bp, Homo sapien
ggtacttgatctccgtcactttctt

SEQ ID NO: 884411 - DNA, 25 bp, Homo sapien
tacttgatctccgtcactttctttt

SEQ ID NO: 884412 - DNA, 25 bp, Homo sapien
acttgatctccgtcactttcttttt

SEQ ID NO: 884413 - DNA, 25 bp, Homo sapien
aggtacttgatctccgtcactttct

SEQ ID NO: 884414 - DNA, 25 bp, Homo sapien
ggactgaaatcctttcatagaagga

SEQ ID NO: 884415 - DNA, 25 bp, Homo sapien
tggactgaaatcctttcatagaagg

SEQ ID NO: 884416 - DNA, 25 bp, Homo sapien
gcagaattaaatgccttggactgaa

SEQ ID NO: 884417 - DNA, 25 bp, Homo sapien
tcatctagcaaatctgaagcagaat

SEQ ID NO: 884418 - DNA, 25 bp, Homo sapien
taagcttggataatccccagacccc

SEQ ID NO: 884419 - DNA, 25 bp, Homo sapien
gaacacattgctaggcccacagctt

SEQ ID NO: 884420 - DNA, 25 bp, Homo sapien
tccagtagaactgctgcacacaagc

SEQ ID NO: 884421 - DNA, 25 bp, Homo sapien
cacatacaccgtccaaattggctgg

SEQ ID NO: 884422 - DNA, 25 bp, Homo sapien
caatgtctattctacagcccatgga

SEQ ID NO: 884423 - DNA, 25 bp, Homo sapien
gccaagactgggaagctaggcctct

SEQ ID NO: 884424 - DNA, 25 bp, Homo sapien
ttttggagcaccatgaaccgagccc

SEQ ID NO: 884425 - DNA, 25 bp, Homo sapien
gaacaacgatacctagctggcagca

SEQ ID NO: 884426 - DNA, 25 bp, Homo sapien
ctgcctttgaatcacggatccttca

SEQ ID NO: 884427 - DNA, 25 bp, Homo sapien
cccaaggccttagagttagaagaca

SEQ ID NO: 884428 - DNA, 25 bp, Homo sapien
atctcccaaggccttagagttagaa

SEQ ID NO: 884429 - DNA, 25 bp, Homo sapien
gcctttgaatcacggatccttcatc

SEQ ID NO: 884430 - DNA, 25 bp, Homo sapien
gggcacacaaaagagcaggcgcgac

SEQ ID NO: 884431 - DNA, 25 bp, Homo sapien
agcgacagggaatccggccgcacct

SEQ ID NO: 884432 - DNA, 25 bp, Homo sapien
tgcagtctcattgctcggaacggcg

SEQ ID NO: 884433 - DNA, 25 bp, Homo sapien
ggcaaaattcactcagcgcgggaca

SEQ ID NO: 884434 - DNA, 25 bp, Homo sapien
gcttagcacctccaaagctgaattt

SEQ ID NO: 884435 - DNA, 25 bp, Homo sapien
tcaaggtagttgatgccacactttc

SEQ ID NO: 884436 - DNA, 25 bp, Homo sapien
tagttgatgccacactttccggtat

SEQ ID NO: 884437 - DNA, 25 bp, Homo sapien
ttggaatggatttagttagcttagc

SEQ ID NO: 884438 - DNA, 25 bp, Homo sapien
cccacagggaccactatggccctta

SEQ ID NO: 884439 - DNA, 25 bp, Homo sapien
ccacagggaccactatggcccttac

SEQ ID NO: 884440 - DNA, 25 bp, Homo sapien
agtatttgaaatttctaggccttgc

SEQ ID NO: 884441 - DNA, 25 bp, Homo sapien
ggcacatgaatgaacgtccagatgt

SEQ ID NO: 884442 - DNA, 25 bp, Homo sapien
gatgtttgtgcagtagcccaccctt

SEQ ID NO: 884443 - DNA, 25 bp, Homo sapien
agagccttccagagtgtggtatgct

SEQ ID NO: 884444 - DNA, 25 bp, Homo sapien
cacccttatctgcaggatacgttcc

SEQ ID NO: 884445 - DNA, 25 bp, Homo sapien
gacaacataggagccagacacagtg

SEQ ID NO: 884446 - DNA, 25 bp, Homo sapien
tctcacaattcaggaagccagcact

SEQ ID NO: 884447 - DNA, 25 bp, Homo sapien
cagcactcctaaatcaagttgtcag

SEQ ID NO: 884448 - DNA, 25 bp, Homo sapien
tctgtcttcgcatgggctttttccc

SEQ ID NO: 884449 - DNA, 25 bp, Homo sapien
aagaacaaggtttcggccagacgcg

SEQ ID NO: 884450 - DNA, 25 bp, Homo sapien
gtttatctgaagctctacacctgga

SEQ ID NO: 884451 - DNA, 25 bp, Homo sapien
cagaggagctgtggtgtgtctcacc

SEQ ID NO: 884452 - DNA, 25 bp, Homo sapien
tagacagtctcaaccggcattctgg

SEQ ID NO: 884453 - DNA, 25 bp, Homo sapien
cagcagcattgaggagtagaactac

SEQ ID NO: 884454 - DNA, 25 bp, Homo sapien
tatcttagcaagaatcaaggcagag

SEQ ID NO: 884455 - DNA, 25 bp, Homo sapien
tccctgaggcccttttaggagttgc

SEQ ID NO: 884456 - DNA, 25 bp, Homo sapien
tgttaacccttgaccctgagtacgc

SEQ ID NO: 884457 - DNA, 25 bp, Homo sapien
gaagcatatgtaagaatccagcagt

SEQ ID NO: 884458 - DNA, 25 bp, Homo sapien
tcagtcagaacaacatattgcaaca

SEQ ID NO: 884459 - DNA, 25 bp, Homo sapien
tccaatacgtgtctgtgtgaatgcc

SEQ ID NO: 884460 - DNA, 25 bp, Homo sapien
tggctgaaagtccattctacatgca

SEQ ID NO: 884461 - DNA, 25 bp, Homo sapien
taaagattccgattgattcctcact

SEQ ID NO: 884462 - DNA, 25 bp, Homo sapien
tacattagggcattagttcttctct

SEQ ID NO: 884463 - DNA, 25 bp, Homo sapien
tctactgcaataacagatgagctct

SEQ ID NO: 884464 - DNA, 25 bp, Homo sapien
tgttttggcaaaaccgatgaggtct

SEQ ID NO: 884465 - DNA, 25 bp, Homo sapien
tagactgggtattctataaaggtcc

SEQ ID NO: 884466 - DNA, 25 bp, Homo sapien
gatctacttcgagtattagactggg

SEQ ID NO: 884467 - DNA, 25 bp, Homo sapien
taatttatcagccagagataatcac

SEQ ID NO: 884468 - DNA, 25 bp, Homo sapien
gataaatgcagatctacccttatag

SEQ ID NO: 884469 - DNA, 25 bp, Homo sapien
caacatttatgtcgccaggtaagtg

SEQ ID NO: 884470 - DNA, 25 bp, Homo sapien
gatttggcagcagtcaagcagcaac

SEQ ID NO: 884471 - DNA, 25 bp, Homo sapien
ggtttcaaattacaagcctgaatcg

SEQ ID NO: 884472 - DNA, 25 bp, Homo sapien
caggagtttcgtagaagtacatagc

SEQ ID NO: 884473 - DNA, 25 bp, Homo sapien
ttggatcacctggattttcaggact

SEQ ID NO: 884474 - DNA, 25 bp, Homo sapien
gaagcctgaagtcacatcggctgca

SEQ ID NO: 884475 - DNA, 25 bp, Homo sapien
tgcagcctctaccagttcaggtatc

SEQ ID NO: 884476 - DNA, 25 bp, Homo sapien
cctgctggttttgggagttccccag

SEQ ID NO: 884477 - DNA, 25 bp, Homo sapien
ggaatgacaagccacgtctggcctc

SEQ ID NO: 884478 - DNA, 25 bp, Homo sapien
gagacctgccgagtcctcaggacaa

SEQ ID NO: 884479 - DNA, 25 bp, Homo sapien
tagcccttctatgagctagatggaa

SEQ ID NO: 884480 - DNA, 25 bp, Homo sapien
tctgttcccactggacgagacctgc

SEQ ID NO: 884481 - DNA, 25 bp, Homo sapien
gcccagccccatagacgttcagtgt

SEQ ID NO: 884482 - DNA, 25 bp, Homo sapien
ggccctggtgtgttcctgccagaaa

SEQ ID NO: 884483 - DNA, 25 bp, Homo sapien
gcagaagccacatgttccgctcagg

SEQ ID NO: 884484 - DNA, 25 bp, Homo sapien
gaaacccaattccttcggcagaagc

SEQ ID NO: 884485 - DNA, 25 bp, Homo sapien
gcttactatcattagcatttgatga

SEQ ID NO: 884486 - DNA, 25 bp, Homo sapien
taagatttaaagaagcatgtgctat

SEQ ID NO: 884487 - DNA, 25 bp, Homo sapien
gaaatcctcagaaaaggtacaaata

SEQ ID NO: 884488 - DNA, 25 bp, Homo sapien
tctttgctagtatttaagatcatta

SEQ ID NO: 884489 - DNA, 25 bp, Homo sapien
tgcattcgatctaacacagtgtctg

SEQ ID NO: 884490 - DNA, 25 bp, Homo sapien
gaagagctactgaactcgaatggcc

SEQ ID NO: 884491 - DNA, 25 bp, Homo sapien
aatatgcagggtcgtgattccatgc

SEQ ID NO: 884492 - DNA, 25 bp, Homo sapien
tcgaatggcctgcacaaacaatcct

SEQ ID NO: 884493 - DNA, 25 bp, Homo sapien
ccaaatttttgtacagtcgctgcac

SEQ ID NO: 884494 - DNA, 25 bp, Homo sapien
tcccgagagtaaggagagaagctac

SEQ ID NO: 884495 - DNA, 25 bp, Homo sapien
gatggaacaataacaggcccaagcc

SEQ ID NO: 884496 - DNA, 25 bp, Homo sapien
tagtaggatagaaacactgtgtccc

SEQ ID NO: 884497 - DNA, 25 bp, Homo sapien
tggagggcgcagtggatcctgcctg

SEQ ID NO: 884498 - DNA, 25 bp, Homo sapien
ggagggcgcagtggatcctgcctgt

SEQ ID NO: 884499 - DNA, 25 bp, Homo sapien
catggagggcgcagtggatcctgcc

SEQ ID NO: 884500 - DNA, 25 bp, Homo sapien
atggagggcgcagtggatcctgcct

SEQ ID NO: 884501 - DNA, 25 bp, Homo sapien
tcatcacagggcaaagtatagcaat

SEQ ID NO: 884502 - DNA, 25 bp, Homo sapien
aacagaaggtagtatctgcagcccc

SEQ ID NO: 884503 - DNA, 25 bp, Homo sapien
taggtgggtaccaaatgctgactga

SEQ ID NO: 884504 - DNA, 25 bp, Homo sapien
aaaccacctggctttttgcagtaca

SEQ ID NO: 884505 - DNA, 25 bp, Homo sapien
tcttgtgcacggtacgatgtttagc

SEQ ID NO: 884506 - DNA, 25 bp, Homo sapien
tattacctaattgagaaatgctgct

SEQ ID NO: 884507 - DNA, 25 bp, Homo sapien
catagggcaacatgggccagatgac

SEQ ID NO: 884508 - DNA, 25 bp, Homo sapien
gcagtagccagcatccattttgcac

SEQ ID NO: 884509 - DNA, 25 bp, Homo sapien
aaaaatttattctgcgtcaaggtat

SEQ ID NO: 884510 - DNA, 25 bp, Homo sapien
agcgtggccttggagaccacccaca

SEQ ID NO: 884511 - DNA, 25 bp, Homo sapien
caacacaattgtacgtactgggctt

SEQ ID NO: 884512 - DNA, 25 bp, Homo sapien
aatcatgaatgctaggagaatccag

SEQ ID NO: 884513 - DNA, 25 bp, Homo sapien
aaatctcctgcgaccactttgttag

SEQ ID NO: 884514 - DNA, 25 bp, Homo sapien
cagcgcccatctgttggttaagcaa

SEQ ID NO: 884515 - DNA, 25 bp, Homo sapien
gaggctcatgacagtgctggcccca

SEQ ID NO: 884516 - DNA, 25 bp, Homo sapien
caactggctaggtaaaaacttgtgc

SEQ ID NO: 884517 - DNA, 25 bp, Homo sapien
tgaggtggtccactttgcagagcct

SEQ ID NO: 884518 - DNA, 25 bp, Homo sapien
ggtggtccactttgcagagccttct

SEQ ID NO: 884519 - DNA, 25 bp, Homo sapien
gtggtccactttgcagagccttctg

SEQ ID NO: 884520 - DNA, 25 bp, Homo sapien
gactgaggtggtccactttgcagag

SEQ ID NO: 884521 - DNA, 25 bp, Homo sapien
tagtcagtttgctagtagtctctga

SEQ ID NO: 884522 - DNA, 25 bp, Homo sapien
tactagtcagtttgctagtagtctc

SEQ ID NO: 884523 - DNA, 25 bp, Homo sapien
acatactagtcagtttgctagtagt

SEQ ID NO: 884524 - DNA, 25 bp, Homo sapien
gtcagtttgctagtagtctctgaaa

SEQ ID NO: 884525 - DNA, 25 bp, Homo sapien
tgggagaattgcttccacgtgagaa

SEQ ID NO: 884526 - DNA, 25 bp, Homo sapien
gcatcaaacaaccttaactaattct

SEQ ID NO: 884527 - DNA, 25 bp, Homo sapien
aaagggagatgaaaagtcttaagca

SEQ ID NO: 884528 - DNA, 25 bp, Homo sapien
taattctatcaggtaggagcacctg

SEQ ID NO: 884529 - DNA, 25 bp, Homo sapien
gagggacaacaacttctgcacttga

SEQ ID NO: 884530 - DNA, 25 bp, Homo sapien
ttctcatcaggtgtctggtcacgag

SEQ ID NO: 884531 - DNA, 25 bp, Homo sapien
tggtcacgagggacaacaacttctg

SEQ ID NO: 884532 - DNA, 25 bp, Homo sapien
catcaggtgtctggtcacgagggac

SEQ ID NO: 884533 - DNA, 25 bp, Homo sapien
gatggcactctgatatgagcttcaa

SEQ ID NO: 884534 - DNA, 25 bp, Homo sapien
cagcagcaaaggatggcactctgat

SEQ ID NO: 884535 - DNA, 25 bp, Homo sapien
cactctgatatgagcttcaagtttc

SEQ ID NO: 884536 - DNA, 25 bp, Homo sapien
caaaggatggcactctgatatgagc

SEQ ID NO: 884537 - DNA, 25 bp, Homo sapien
atttttccataaattcttccctgag

SEQ ID NO: 884538 - DNA, 25 bp, Homo sapien
tttttccataaattcttccctgagc

SEQ ID NO: 884539 - DNA, 25 bp, Homo sapien
atagcacatactctagagcacatac

SEQ ID NO: 884540 - DNA, 25 bp, Homo sapien
tggacatagcacatactctagagca

SEQ ID NO: 884541 - DNA, 25 bp, Homo sapien
acatagcacatactctagagcacat

SEQ ID NO: 884542 - DNA, 25 bp, Homo sapien
ctgtggacatagcacatactctaga

SEQ ID NO: 884543 - DNA, 25 bp, Homo sapien
gcatctggtgcttccgctggagcaa

SEQ ID NO: 884544 - DNA, 25 bp, Homo sapien
tgaactgagcctctggtggtccagt

SEQ ID NO: 884545 - DNA, 25 bp, Homo sapien
tttagcatctggtgcttccgctgga

SEQ ID NO: 884546 - DNA, 25 bp, Homo sapien
tgataatcaccatcctcactttagc

SEQ ID NO: 884547 - DNA, 25 bp, Homo sapien
cagttatctattacggcagacacca

SEQ ID NO: 884548 - DNA, 25 bp, Homo sapien
tcctctcctactggctgggcaacag

SEQ ID NO: 884549 - DNA, 25 bp, Homo sapien
acttcgtctggccaagttctgggca

SEQ ID NO: 884550 - DNA, 25 bp, Homo sapien
gcacagagaagttagcctccttggt

SEQ ID NO: 884551 - DNA, 25 bp, Homo sapien
gccgatgatggcaccgactgataga

SEQ ID NO: 884552 - DNA, 25 bp, Homo sapien
taattgaagctccagcaaagcgaga

SEQ ID NO: 884553 - DNA, 25 bp, Homo sapien
gccctgcttgccgatgatggcaccg

SEQ ID NO: 884554 - DNA, 25 bp, Homo sapien
gcaccgactgatagagctgggataa

SEQ ID NO: 884555 - DNA, 25 bp, Homo sapien
caggcttttgttaacattagcttta

SEQ ID NO: 884556 - DNA, 25 bp, Homo sapien
ggaaggacaccttctcatgcagtag

SEQ ID NO: 884557 - DNA, 25 bp, Homo sapien
aatcaggcttttgttaacattagct

SEQ ID NO: 884558 - DNA, 25 bp, Homo sapien
taggaaggacaccttctcatgcagt

SEQ ID NO: 884559 - DNA, 25 bp, Homo sapien
aacccagtatgtatacccaatcagc

SEQ ID NO: 884560 - DNA, 25 bp, Homo sapien
tgtatacccaatcagcaaatgtttc

SEQ ID NO: 884561 - DNA, 25 bp, Homo sapien
catgcaccatgggtgagccgaagca

SEQ ID NO: 884562 - DNA, 25 bp, Homo sapien
attagaagatattttgtcgggaggg

SEQ ID NO: 884563 - DNA, 25 bp, Homo sapien
ggaaacccatcacgtgcagacacac

SEQ ID NO: 884564 - DNA, 25 bp, Homo sapien
acccatcacgtgcagacacacacat

SEQ ID NO: 884565 - DNA, 25 bp, Homo sapien
gcatttctgaaaggcgcgtttcctg

SEQ ID NO: 884566 - DNA, 25 bp, Homo sapien
cactatcattttggagacttctgag

SEQ ID NO: 884567 - DNA, 25 bp, Homo sapien
gcagcccttgggattacttctgcca

SEQ ID NO: 884568 - DNA, 25 bp, Homo sapien
tccagctaaggcgacacgcactatg

SEQ ID NO: 884569 - DNA, 25 bp, Homo sapien
atcgcaacgcctggttgttatcatt

SEQ ID NO: 884570 - DNA, 25 bp, Homo sapien
tcggctcatcgcaacgcctggttgt

SEQ ID NO: 884571 - DNA, 25 bp, Homo sapien
tcatcgcaacgcctggttgttatca

SEQ ID NO: 884572 - DNA, 25 bp, Homo sapien
ggctcatcgcaacgcctggttgtta

SEQ ID NO: 884573 - DNA, 25 bp, Homo sapien
tatttcctacgagttgggatggcag

SEQ ID NO: 884574 - DNA, 25 bp, Homo sapien
caacatcccacagaggtttttggca

SEQ ID NO: 884575 - DNA, 25 bp, Homo sapien
aaacagacataacggcaacatccca

SEQ ID NO: 884576 - DNA, 25 bp, Homo sapien
tagaacagaagttcttagctgggcg

SEQ ID NO: 884577 - DNA, 25 bp, Homo sapien
ggcgttcagatttaatccaggaatt

SEQ ID NO: 884578 - DNA, 25 bp, Homo sapien
cagacccaaggcgttcagatttaat

SEQ ID NO: 884579 - DNA, 25 bp, Homo sapien
caaggcgttcagatttaatccagga

SEQ ID NO: 884580 - DNA, 25 bp, Homo sapien
ggtgggaacagacccaaggcgttca

SEQ ID NO: 884581 - DNA, 25 bp, Homo sapien
gattccagaacatttggagccaagc

SEQ ID NO: 884582 - DNA, 25 bp, Homo sapien
ccaagcagtgagaattgaagcaggt

SEQ ID NO: 884583 - DNA, 25 bp, Homo sapien
gtttcagatgactggcccaattgaa

SEQ ID NO: 884584 - DNA, 25 bp, Homo sapien
gaagcaggttggcaagaagtcacgt

SEQ ID NO: 884585 - DNA, 25 bp, Homo sapien
ctggattatacagcgtcaattcctg

SEQ ID NO: 884586 - DNA, 25 bp, Homo sapien
cgttctggattatacagcgtcaatt

SEQ ID NO: 884587 - DNA, 25 bp, Homo sapien
ttctggattatacagcgtcaattcc

SEQ ID NO: 884588 - DNA, 25 bp, Homo sapien
gtgcgttctggattatacagcgtca

SEQ ID NO: 884589 - DNA, 25 bp, Homo sapien
tttagtgtctgtgtcttgctcaatt

SEQ ID NO: 884590 - DNA, 25 bp, Homo sapien
taaaatcttcaaggggatctcttct

SEQ ID NO: 884591 - DNA, 25 bp, Homo sapien
tgattttagtgtctgtgtcttgctc

SEQ ID NO: 884592 - DNA, 25 bp, Homo sapien
ggagatatcgtgattttagtgtctg

SEQ ID NO: 884593 - DNA, 25 bp, Homo sapien
ccaatgagctccgagtaaaggatga

SEQ ID NO: 884594 - DNA, 25 bp, Homo sapien
gaagaaatagagttcccgcctgcat

SEQ ID NO: 884595 - DNA, 25 bp, Homo sapien
tgtacgctaaacgtggcacagaacc

SEQ ID NO: 884596 - DNA, 25 bp, Homo sapien
gattctactttcagtgcagcgctgt

SEQ ID NO: 884597 - DNA, 25 bp, Homo sapien
tgcataatctccagaatagacttac

SEQ ID NO: 884598 - DNA, 25 bp, Homo sapien
cttccttatgcataatctccagaat

SEQ ID NO: 884599 - DNA, 25 bp, Homo sapien
ttttatatcttgagcttccttatgc

SEQ ID NO: 884600 - DNA, 25 bp, Homo sapien
aattttatatcttgagcttccttat

SEQ ID NO: 884601 - DNA, 25 bp, Homo sapien
gatagtaatcgacttctcagcagcc

SEQ ID NO: 884602 - DNA, 25 bp, Homo sapien
cagaggtgccttcaggagtagagag

SEQ ID NO: 884603 - DNA, 25 bp, Homo sapien
caggagtagagaggatagtaatcga

SEQ ID NO: 884604 - DNA, 25 bp, Homo sapien
attttctttacggtggacatcgatt

SEQ ID NO: 884605 - DNA, 25 bp, Homo sapien
ggaaaacgagagcagtaagcgtgta

SEQ ID NO: 884606 - DNA, 25 bp, Homo sapien
cacagtggagtctgtaattaccaaa

SEQ ID NO: 884607 - DNA, 25 bp, Homo sapien
gcagtaagcgtgtattcacagtgga

SEQ ID NO: 884608 - DNA, 25 bp, Homo sapien
tgatagtgggcgcaagcagagagga

SEQ ID NO: 884609 - DNA, 25 bp, Homo sapien
tcttccagcaacacattagcatccc

SEQ ID NO: 884610 - DNA, 25 bp, Homo sapien
tccagcaacacattagcatccctct

SEQ ID NO: 884611 - DNA, 25 bp, Homo sapien
tgtcttccagcaacacattagcatc

SEQ ID NO: 884612 - DNA, 25 bp, Homo sapien
ttccagcaacacattagcatccctc

SEQ ID NO: 884613 - DNA, 25 bp, Homo sapien
tgatgttccgaatggtggcaccttc

SEQ ID NO: 884614 - DNA, 25 bp, Homo sapien
cagaggcaaatcacatggtttctgc

SEQ ID NO: 884615 - DNA, 25 bp, Homo sapien
taccccttgcagacttctaatacca

SEQ ID NO: 884616 - DNA, 25 bp, Homo sapien
atccagaactagaacacaccagggc

SEQ ID NO: 884617 - DNA, 25 bp, Homo sapien
caaatcttgagcataaatttcagtg

SEQ ID NO: 884618 - DNA, 25 bp, Homo sapien
tctaataccatagattaattctgcc

SEQ ID NO: 884619 - DNA, 25 bp, Homo sapien
gtcacacatgacaaatcctctcatg

SEQ ID NO: 884620 - DNA, 25 bp, Homo sapien
gactggcttatctcaacatctctgg

SEQ ID NO: 884621 - DNA, 25 bp, Homo sapien
taggtgagcctctctcgctctgagg

SEQ ID NO: 884622 - DNA, 25 bp, Homo sapien
gagtaatgtctgtccttgactggct

SEQ ID NO: 884623 - DNA, 25 bp, Homo sapien
cacgttaaaactagctgcctggctc

SEQ ID NO: 884624 - DNA, 25 bp, Homo sapien
gctttaactaacagaggcagctaca

SEQ ID NO: 884625 - DNA, 25 bp, Homo sapien
cagccgtatttgaggactcttctta

SEQ ID NO: 884626 - DNA, 25 bp, Homo sapien
aacttttgagctctaccttacaggt

SEQ ID NO: 884627 - DNA, 25 bp, Homo sapien
tatacacatttccatcttcttctca

SEQ ID NO: 884628 - DNA, 25 bp, Homo sapien
tacacatttccatcttcttctcagt

SEQ ID NO: 884629 - DNA, 25 bp, Homo sapien
cttatacacatttccatcttcttct

SEQ ID NO: 884630 - DNA, 25 bp, Homo sapien
acacatttccatcttcttctcagtc

SEQ ID NO: 884631 - DNA, 25 bp, Homo sapien
ggcacgattacagggtcaaattttg

SEQ ID NO: 884632 - DNA, 25 bp, Homo sapien
aaagaaaggcacgattacagggtca

SEQ ID NO: 884633 - DNA, 25 bp, Homo sapien
ctaccagcccttctcagttgagaaa

SEQ ID NO: 884634 - DNA, 25 bp, Homo sapien
gagaaatccgcaaaatatgttactg

SEQ ID NO: 884635 - DNA, 25 bp, Homo sapien
gtctagcttggtccttactggaata

SEQ ID NO: 884636 - DNA, 25 bp, Homo sapien
tactggaataggttacatttacaac

SEQ ID NO: 884637 - DNA, 25 bp, Homo sapien
actgcagtttccgagtcagtgttca

SEQ ID NO: 884638 - DNA, 25 bp, Homo sapien
catttacaactgcagtttccgagtc

SEQ ID NO: 884639 - DNA, 25 bp, Homo sapien
ttgctcacagctctccaccactcca

SEQ ID NO: 884640 - DNA, 25 bp, Homo sapien
catactggactagtaaactatccag

SEQ ID NO: 884641 - DNA, 25 bp, Homo sapien
actggactagtaaactatccagcac

SEQ ID NO: 884642 - DNA, 25 bp, Homo sapien
caccactccatactggactagtaaa

SEQ ID NO: 884643 - DNA, 25 bp, Homo sapien
tcccatcactcctgggctatctgaa

SEQ ID NO: 884644 - DNA, 25 bp, Homo sapien
gtcccatcactcctgggctatctga

SEQ ID NO: 884645 - DNA, 25 bp, Homo sapien
agtcccatcactcctgggctatctg

SEQ ID NO: 884646 - DNA, 25 bp, Homo sapien
aacatgtactcttttatacctcacc

SEQ ID NO: 884647 - DNA, 25 bp, Homo sapien
catgtactcttttatacctcaccct

SEQ ID NO: 884648 - DNA, 25 bp, Homo sapien
cccaacatgtactcttttatacctc

SEQ ID NO: 884649 - DNA, 25 bp, Homo sapien
caacatgtactcttttatacctcac

SEQ ID NO: 884650 - DNA, 25 bp, Homo sapien
taggcaggttaagagctttattaac

SEQ ID NO: 884651 - DNA, 25 bp, Homo sapien
tccataggcaggttaagagctttat

SEQ ID NO: 884652 - DNA, 25 bp, Homo sapien
atcaaatctgtccataggcaggtta

SEQ ID NO: 884653 - DNA, 25 bp, Homo sapien
tctgtccataggcaggttaagagct

SEQ ID NO: 884654 - DNA, 25 bp, Homo sapien
cctattgcgaatgaactgggactag

SEQ ID NO: 884655 - DNA, 25 bp, Homo sapien
ccaatttggatagcacctattgcga

SEQ ID NO: 884656 - DNA, 25 bp, Homo sapien
caggtagttctacaaggcaaaccaa

SEQ ID NO: 884657 - DNA, 25 bp, Homo sapien
cacaagtactgcttttggtccagaa

SEQ ID NO: 884658 - DNA, 25 bp, Homo sapien
tttctaatgaaattacttatctaag

SEQ ID NO: 884659 - DNA, 25 bp, Homo sapien
tccagcctatttggatcctaataca

SEQ ID NO: 884660 - DNA, 25 bp, Homo sapien
ttgaacagacttcatggtttatgag

SEQ ID NO: 884661 - DNA, 25 bp, Homo sapien
taagatatttgaacagacttcatgg

SEQ ID NO: 884662 - DNA, 25 bp, Homo sapien
ccaccctcaaggagatagagcgtaa

SEQ ID NO: 884663 - DNA, 25 bp, Homo sapien
taatttatgtagacggtccaccctc

SEQ ID NO: 884664 - DNA, 25 bp, Homo sapien
taaatatccacaagccaaatgactg

SEQ ID NO: 884665 - DNA, 25 bp, Homo sapien
caatgatggagtgaccaaagggaca

SEQ ID NO: 884666 - DNA, 25 bp, Homo sapien
cacacaagttccaactgagggtcat

SEQ ID NO: 884667 - DNA, 25 bp, Homo sapien
acaatgaaatagtgtcccagacagg

SEQ ID NO: 884668 - DNA, 25 bp, Homo sapien
ccagacaggatcatggaacagataa

SEQ ID NO: 884669 - DNA, 25 bp, Homo sapien
tcctagaaagtccataaacccagtc

SEQ ID NO: 884670 - DNA, 25 bp, Homo sapien
ttatgcagatgagtggtcttctcca

SEQ ID NO: 884671 - DNA, 25 bp, Homo sapien
cagtccaagaacattccccaaggga

SEQ ID NO: 884672 - DNA, 25 bp, Homo sapien
tacaagtgggtcctcacaaaagcaa

SEQ ID NO: 884673 - DNA, 25 bp, Homo sapien
ccaagggaggagatttttagcagcc

SEQ ID NO: 884674 - DNA, 25 bp, Homo sapien
taaaatctcagttgtaaggttactg

SEQ ID NO: 884675 - DNA, 25 bp, Homo sapien
gtaaggttactgacatagccacaac

SEQ ID NO: 884676 - DNA, 25 bp, Homo sapien
cagttgtaaggttactgacatagcc

SEQ ID NO: 884677 - DNA, 25 bp, Homo sapien
gttactgacatagccacaacccatc

SEQ ID NO: 884678 - DNA, 25 bp, Homo sapien
gattgtgtagcaataaacctagttt

SEQ ID NO: 884679 - DNA, 25 bp, Homo sapien
attgtgtagcaataaacctagtttt

SEQ ID NO: 884680 - DNA, 25 bp, Homo sapien
agattgtgtagcaataaacctagtt

SEQ ID NO: 884681 - DNA, 25 bp, Homo sapien
gctagtggataaggcatacatggta

SEQ ID NO: 884682 - DNA, 25 bp, Homo sapien
ttccccaacattggaacaagttgtc

SEQ ID NO: 884683 - DNA, 25 bp, Homo sapien
cattggaacaagttgtcatatcttt

SEQ ID NO: 884684 - DNA, 25 bp, Homo sapien
cccactgagccatatgagccagttt

SEQ ID NO: 884685 - DNA, 25 bp, Homo sapien
ggaacataccgtcattttgggtgac

SEQ ID NO: 884686 - DNA, 25 bp, Homo sapien
aaaagagactgctgatggtaaaggc

SEQ ID NO: 884687 - DNA, 25 bp, Homo sapien
gatagagaccatatcatgacaagac

SEQ ID NO: 884688 - DNA, 25 bp, Homo sapien
cacacttgtactgcatgacttccta

SEQ ID NO: 884689 - DNA, 25 bp, Homo sapien
tcagtcattaccattagccagagta

SEQ ID NO: 884690 - DNA, 25 bp, Homo sapien
tacctggacacatgtgagagtctag

SEQ ID NO: 884691 - DNA, 25 bp, Homo sapien
aaaagaggttcgcatattgctctgc

SEQ ID NO: 884692 - DNA, 25 bp, Homo sapien
tcataatcgacacaacccacatgtg

SEQ ID NO: 884693 - DNA, 25 bp, Homo sapien
tggaaaaattgaacacgcatttctt

SEQ ID NO: 884694 - DNA, 25 bp, Homo sapien
cacgcatttcttttaagagggtaag

SEQ ID NO: 884695 - DNA, 25 bp, Homo sapien
gtgctgagtcacatggaaaaattga

SEQ ID NO: 884696 - DNA, 25 bp, Homo sapien
acatctctagtgctgagtcacatgg

SEQ ID NO: 884697 - DNA, 25 bp, Homo sapien
caagaggttcccctgactcaacctc

SEQ ID NO: 884698 - DNA, 25 bp, Homo sapien
tgcaggtcccgtccttcagttggta

SEQ ID NO: 884699 - DNA, 25 bp, Homo sapien
tacctcaggcaaaacaggatggatg

SEQ ID NO: 884700 - DNA, 25 bp, Homo sapien
taccaggtcctgtctgtcagtcagc

SEQ ID NO: 884701 - DNA, 25 bp, Homo sapien
gatatgcggtccagagaacttgagg

SEQ ID NO: 884702 - DNA, 25 bp, Homo sapien
tcagccggcgtcactgaatcagcag

SEQ ID NO: 884703 - DNA, 25 bp, Homo sapien
gcagttggttacagcctctagctcc

SEQ ID NO: 884704 - DNA, 25 bp, Homo sapien
gattctccctggtgaaataccgagt

SEQ ID NO: 884705 - DNA, 25 bp, Homo sapien
gctcccatggctcagaaatctaagt

SEQ ID NO: 884706 - DNA, 25 bp, Homo sapien
ctgttcagagatcccataactagat

SEQ ID NO: 884707 - DNA, 25 bp, Homo sapien
ctaggacataattccaagtctgacc

SEQ ID NO: 884708 - DNA, 25 bp, Homo sapien
aatgagaaagtagtggagctaggac

SEQ ID NO: 884709 - DNA, 25 bp, Homo sapien
taactagatcacacaatgagaaagt

SEQ ID NO: 884710 - DNA, 25 bp, Homo sapien
ttcaactactggtgtctcagattct

SEQ ID NO: 884711 - DNA, 25 bp, Homo sapien
attcaattgtgctaaatagtttgtg

SEQ ID NO: 884712 - DNA, 25 bp, Homo sapien
gcatattacacaatcagtgcagtgc

SEQ ID NO: 884713 - DNA, 25 bp, Homo sapien
tgctgacacaggctattcaattgtg

SEQ ID NO: 884714 - DNA, 25 bp, Homo sapien
gatatttcgtatctgaagtttccga

SEQ ID NO: 884715 - DNA, 25 bp, Homo sapien
gggatatttcgtatctgaagtttcc

SEQ ID NO: 884716 - DNA, 25 bp, Homo sapien
atatttcgtatctgaagtttccgaa

SEQ ID NO: 884717 - DNA, 25 bp, Homo sapien
atttcgtatctgaagtttccgaatc

SEQ ID NO: 884718 - DNA, 25 bp, Homo sapien
tctttatctcagggctttctccaaa

SEQ ID NO: 884719 - DNA, 25 bp, Homo sapien
cttacacaaggctgcttctttatct

SEQ ID NO: 884720 - DNA, 25 bp, Homo sapien
tatctcagggctttctccaaagtct

SEQ ID NO: 884721 - DNA, 25 bp, Homo sapien
aggctgcttctttatctcagggctt

SEQ ID NO: 884722 - DNA, 25 bp, Homo sapien
gatccttgatcccttttagtcagaa

SEQ ID NO: 884723 - DNA, 25 bp, Homo sapien
tctttggccagcaaaacggcttctt

SEQ ID NO: 884724 - DNA, 25 bp, Homo sapien
taatcagccttatcagcatggatcc

SEQ ID NO: 884725 - DNA, 25 bp, Homo sapien
gggacctgacattgcccaaagacaa

SEQ ID NO: 884726 - DNA, 25 bp, Homo sapien
tatcctcctaaccatactctagtcg

SEQ ID NO: 884727 - DNA, 25 bp, Homo sapien
ctctagtcggtcttactgatttcac

SEQ ID NO: 884728 - DNA, 25 bp, Homo sapien
tcacttataatccaaccaacagcat

SEQ ID NO: 884729 - DNA, 25 bp, Homo sapien
tctggccacagattctatcctccta

SEQ ID NO: 884730 - DNA, 25 bp, Homo sapien
atgggctttccaacccgccacttgg

SEQ ID NO: 884731 - DNA, 25 bp, Homo sapien
cacaaggttcggatttggactggta

SEQ ID NO: 884732 - DNA, 25 bp, Homo sapien
gctgtgccgaactaaacctatgtcc

SEQ ID NO: 884733 - DNA, 25 bp, Homo sapien
ggctcaaagcagtctagcatgggct

SEQ ID NO: 884734 - DNA, 25 bp, Homo sapien
gatgaaaacttgactgacgccatga

SEQ ID NO: 884735 - DNA, 25 bp, Homo sapien
tctgacagccagacgtgcatggatg

SEQ ID NO: 884736 - DNA, 25 bp, Homo sapien
tctctcttatggattggtggccact

SEQ ID NO: 884737 - DNA, 25 bp, Homo sapien
ttaacagggcgagtctcaaaggcaa

SEQ ID NO: 884738 - DNA, 25 bp, Homo sapien
gaggaggaacactcaaagccaggag

SEQ ID NO: 884739 - DNA, 25 bp, Homo sapien
aggagttggtgaccagtttgagcaa

SEQ ID NO: 884740 - DNA, 25 bp, Homo sapien
ccagcaatctgaggccgaaggagga

SEQ ID NO: 884741 - DNA, 25 bp, Homo sapien
cagtgaggtagttgggttcggtggc

SEQ ID NO: 884742 - DNA, 25 bp, Homo sapien
tgccttcagaataccaccacgttaa

SEQ ID NO: 884743 - DNA, 25 bp, Homo sapien
tttccctctgtgctgaatcattgcc

SEQ ID NO: 884744 - DNA, 25 bp, Homo sapien
tccactagttgtaagatatccccag

SEQ ID NO: 884745 - DNA, 25 bp, Homo sapien
taaagctgctcgtctaaaatgaagc

SEQ ID NO: 884746 - DNA, 25 bp, Homo sapien
ggaattgcataaaatcctcacttgc

SEQ ID NO: 884747 - DNA, 25 bp, Homo sapien
cctcacttgctcttgttatgatgta

SEQ ID NO: 884748 - DNA, 25 bp, Homo sapien
ggctaatatgccatggaattgcata

SEQ ID NO: 884749 - DNA, 25 bp, Homo sapien
gaatacctgatacaggccgggcgtg

SEQ ID NO: 884750 - DNA, 25 bp, Homo sapien
tcctccgcaagaaactactgttagt

SEQ ID NO: 884751 - DNA, 25 bp, Homo sapien
ctccgcaagaaactactgttagttt

SEQ ID NO: 884752 - DNA, 25 bp, Homo sapien
cctccgcaagaaactactgttagtt

SEQ ID NO: 884753 - DNA, 25 bp, Homo sapien
tgccatcagccttcaagcaaaattc

SEQ ID NO: 884754 - DNA, 25 bp, Homo sapien
tcagaccatgatacattacaccctt

SEQ ID NO: 884755 - DNA, 25 bp, Homo sapien
aatacttgccaaacagcaatttcag

SEQ ID NO: 884756 - DNA, 25 bp, Homo sapien
tctggcaatccaagccaatttgtaa

SEQ ID NO: 884757 - DNA, 25 bp, Homo sapien
cttggtcattgctaccacactgcca

SEQ ID NO: 884758 - DNA, 25 bp, Homo sapien
ttggtcattgctaccacactgccac

SEQ ID NO: 884759 - DNA, 25 bp, Homo sapien
gtcattgctaccacactgccacctc

SEQ ID NO: 884760 - DNA, 25 bp, Homo sapien
cccttggtcattgctaccacactgc

SEQ ID NO: 884761 - DNA, 25 bp, Homo sapien
aaactcagctaagaatagcacagct

SEQ ID NO: 884762 - DNA, 25 bp, Homo sapien
tagcacagctaaccatctcgtcttt

SEQ ID NO: 884763 - DNA, 25 bp, Homo sapien
caaccaccagagttactgaatggat

SEQ ID NO: 884764 - DNA, 25 bp, Homo sapien
caacagttgataaaggaaactcagc

SEQ ID NO: 884765 - DNA, 25 bp, Homo sapien
tcacagatatccaatgcaatcttct

SEQ ID NO: 884766 - DNA, 25 bp, Homo sapien
tatttagaatagagagtgcaacact

SEQ ID NO: 884767 - DNA, 25 bp, Homo sapien
agtaactgctataatcttccccaac

SEQ ID NO: 884768 - DNA, 25 bp, Homo sapien
tatacttcggagtcaaagtcttcat

SEQ ID NO: 884769 - DNA, 25 bp, Homo sapien
tctcggagacgagaaatccccgtcc

SEQ ID NO: 884770 - DNA, 25 bp, Homo sapien
tccttaagtagtacgaatcttcctg

SEQ ID NO: 884771 - DNA, 25 bp, Homo sapien
ttaagtagtacgaatcttcctgtct

SEQ ID NO: 884772 - DNA, 25 bp, Homo sapien
atgatctcggagacgagaaatcccc

SEQ ID NO: 884773 - DNA, 25 bp, Homo sapien
gggaatcatccgctgcttcccaagc

SEQ ID NO: 884774 - DNA, 25 bp, Homo sapien
gttccaatacccctggcgagctcac

SEQ ID NO: 884775 - DNA, 25 bp, Homo sapien
cagcgtttacgcacgcgttccaata

SEQ ID NO: 884776 - DNA, 25 bp, Homo sapien
ggaacctgtagaacttcggagtgac

SEQ ID NO: 884777 - DNA, 25 bp, Homo sapien
ctttgcctttttgggaccgagtgct

SEQ ID NO: 884778 - DNA, 25 bp, Homo sapien
cttctatgggtttcccgtgcagttc

SEQ ID NO: 884779 - DNA, 25 bp, Homo sapien
ggaccgagtgctcaacttctatggg

SEQ ID NO: 884780 - DNA, 25 bp, Homo sapien
tatgggtttcccgtgcagttctatt

SEQ ID NO: 884781 - DNA, 25 bp, Homo sapien
gcaggggagaccacgaacgggagaa

SEQ ID NO: 884782 - DNA, 25 bp, Homo sapien
agcccagacccgccgggaacactca

SEQ ID NO: 884783 - DNA, 25 bp, Homo sapien
cgccctggacacgctccacagggca

SEQ ID NO: 884784 - DNA, 25 bp, Homo sapien
tggcgagaaagggtcggggacggca

SEQ ID NO: 884785 - DNA, 25 bp, Homo sapien
ctggcagaggcgcagctcggcacag

SEQ ID NO: 884786 - DNA, 25 bp, Homo sapien
tggcagaggcgcagctcggcacagg

SEQ ID NO: 884787 - DNA, 25 bp, Homo sapien
cctatcgctcgtcggaccaggggag

SEQ ID NO: 884788 - DNA, 25 bp, Homo sapien
tgtgcgaggcaccagcctcgcggtc

SEQ ID NO: 884789 - DNA, 25 bp, Homo sapien
tggcggagccatacccggaggccgc

SEQ ID NO: 884790 - DNA, 25 bp, Homo sapien
gtggcggcgactcccttccaggcga

SEQ ID NO: 884791 - DNA, 25 bp, Homo sapien
cagcgccgtaaataacgaccgagga

SEQ ID NO: 884792 - DNA, 25 bp, Homo sapien
ggtcgaggccactttccgttctcca

SEQ ID NO: 884793 - DNA, 25 bp, Homo sapien
cacggtcgaggccactttccgttct

SEQ ID NO: 884794 - DNA, 25 bp, Homo sapien
agcacagacagcgccgtaaataacg

SEQ ID NO: 884795 - DNA, 25 bp, Homo sapien
tgaagatactttctaggtccgaggg

SEQ ID NO: 884796 - DNA, 25 bp, Homo sapien
gcggcgttctcgctgaggtttccga

SEQ ID NO: 884797 - DNA, 25 bp, Homo sapien
gtccgggcagtccacgaacgcgtag

SEQ ID NO: 884798 - DNA, 25 bp, Homo sapien
tgaaagcgcctcgatggccttgagg

SEQ ID NO: 884799 - DNA, 25 bp, Homo sapien
taagaaccaagcacaagaacgagga

SEQ ID NO: 884800 - DNA, 25 bp, Homo sapien
aaacgcatccaccagtcttcctaag

SEQ ID NO: 884801 - DNA, 25 bp, Homo sapien
cacccacggtgatggatggatccag

SEQ ID NO: 884802 - DNA, 25 bp, Homo sapien
ggagtgaaaaatcagatccgaggct

SEQ ID NO: 884803 - DNA, 25 bp, Homo sapien
ggcattagaagtgtaaccccagcaa

SEQ ID NO: 884804 - DNA, 25 bp, Homo sapien
aaaaccagagtcacaatcccgaact

SEQ ID NO: 884805 - DNA, 25 bp, Homo sapien
cctggtggctttaatggcattagaa

SEQ ID NO: 884806 - DNA, 25 bp, Homo sapien
aaagccgcaggcacgtttctaaggc

SEQ ID NO: 884807 - DNA, 25 bp, Homo sapien
agagaagtcaaagtgggaaaagtcg

SEQ ID NO: 884808 - DNA, 25 bp, Homo sapien
ggcctgggccgctggaggagagaag

SEQ ID NO: 884809 - DNA, 25 bp, Homo sapien
gggcctgggccgctggaggagagaa

SEQ ID NO: 884810 - DNA, 25 bp, Homo sapien
gaggagagaagtcaaagtgggaaaa

SEQ ID NO: 884811 - DNA, 25 bp, Homo sapien
agtggagtaggctggtacttttatt

SEQ ID NO: 884812 - DNA, 25 bp, Homo sapien
gagtggagtaggctggtacttttat

SEQ ID NO: 884813 - DNA, 25 bp, Homo sapien
gaggagtggagtaggctggtacttt

SEQ ID NO: 884814 - DNA, 25 bp, Homo sapien
tggagtaggctggtacttttattta

SEQ ID NO: 884815 - DNA, 25 bp, Homo sapien
gatttgggcccggtggagccttgtg

SEQ ID NO: 884816 - DNA, 25 bp, Homo sapien
ccctaggtggtattcgcatttgaaa

SEQ ID NO: 884817 - DNA, 25 bp, Homo sapien
taatgagtacaatggtggttgtcgg

SEQ ID NO: 884818 - DNA, 25 bp, Homo sapien
attttctctatatgtaatgagtaca

SEQ ID NO: 884819 - DNA, 25 bp, Homo sapien
gagctcagccttgaaagaacgtttt

SEQ ID NO: 884820 - DNA, 25 bp, Homo sapien
gaaccggaaggtgtcagatcatcca

SEQ ID NO: 884821 - DNA, 25 bp, Homo sapien
cgagcaatacggaaacgaaggcagt

SEQ ID NO: 884822 - DNA, 25 bp, Homo sapien
tcttcggtaattgatacagccttgc

SEQ ID NO: 884823 - DNA, 25 bp, Homo sapien
gctcctaattaatgtgaactccacg

SEQ ID NO: 884824 - DNA, 25 bp, Homo sapien
gggactcctgttaacctaatctgtg

SEQ ID NO: 884825 - DNA, 25 bp, Homo sapien
tcaaagagagaggtggatacagtcc

SEQ ID NO: 884826 - DNA, 25 bp, Homo sapien
tcaactggttataggctacttcagc

SEQ ID NO: 884827 - DNA, 25 bp, Homo sapien
cagtctgtttactctttggacagct

SEQ ID NO: 884828 - DNA, 25 bp, Homo sapien
cagttaccgttgctgtacccacacg

SEQ ID NO: 884829 - DNA, 25 bp, Homo sapien
accgttgctgtacccacacgtcagg

SEQ ID NO: 884830 - DNA, 25 bp, Homo sapien
ttagaaggccagttaccgttgctgt

SEQ ID NO: 884831 - DNA, 25 bp, Homo sapien
tggagtctcaagccgaaacccctca

SEQ ID NO: 884832 - DNA, 25 bp, Homo sapien
ccctcacgcgggtgggcacacaatg

SEQ ID NO: 884833 - DNA, 25 bp, Homo sapien
aatgcccggcgtgtcgcctgggcct

SEQ ID NO: 884834 - DNA, 25 bp, Homo sapien
ttgggaccagcctggagtctcaagc

SEQ ID NO: 884835 - DNA, 25 bp, Homo sapien
cctcctggactctgatctgtttaaa

SEQ ID NO: 884836 - DNA, 25 bp, Homo sapien
atggtgccccgggagagaagatggg

SEQ ID NO: 884837 - DNA, 25 bp, Homo sapien
tctgccccgagaaagagggcgggat

SEQ ID NO: 884838 - DNA, 25 bp, Homo sapien
aataagtgataacctggatctgccc

SEQ ID NO: 884839 - DNA, 25 bp, Homo sapien
ggcctggaccactggaccgcccttc

SEQ ID NO: 884840 - DNA, 25 bp, Homo sapien
ggtctttcgtcggccgccggctcgc

SEQ ID NO: 884841 - DNA, 25 bp, Homo sapien
gggctgcgtccgtatgcgcggagcg

SEQ ID NO: 884842 - DNA, 25 bp, Homo sapien
gcgggaccgcgggcttctggctcct

SEQ ID NO: 884843 - DNA, 25 bp, Homo sapien
cccagggatgcttggtacccacggg

SEQ ID NO: 884844 - DNA, 25 bp, Homo sapien
ggccggcttgccgagtccaagttga

SEQ ID NO: 884845 - DNA, 25 bp, Homo sapien
tgtggcgcgaaaataaccctttgct

SEQ ID NO: 884846 - DNA, 25 bp, Homo sapien
tccaagttgagcaaccggcgtcgag

SEQ ID NO: 884847 - DNA, 25 bp, Homo sapien
cagcgcccggaggttctggatttgc

SEQ ID NO: 884848 - DNA, 25 bp, Homo sapien
cgcccggaggttctggatttgcgcc

SEQ ID NO: 884849 - DNA, 25 bp, Homo sapien
gtccagcgcccggaggttctggatt

SEQ ID NO: 884850 - DNA, 25 bp, Homo sapien
cccggaggttctggatttgcgccat

SEQ ID NO: 884851 - DNA, 25 bp, Homo sapien
tcttgcagaggctgagagtcccccc

SEQ ID NO: 884852 - DNA, 25 bp, Homo sapien
ttcaggcctggttcgctacaacaat

SEQ ID NO: 884853 - DNA, 25 bp, Homo sapien
tgtggtaagtgaccgagatgctgcc

SEQ ID NO: 884854 - DNA, 25 bp, Homo sapien
catttagatgtaacaaacctagtag

SEQ ID NO: 884855 - DNA, 25 bp, Homo sapien
ggagaaggaacgaagaaatctataa

SEQ ID NO: 884856 - DNA, 25 bp, Homo sapien
gaacgaagaaatctataactggttg

SEQ ID NO: 884857 - DNA, 25 bp, Homo sapien
aggaacgaagaaatctataactggt

SEQ ID NO: 884858 - DNA, 25 bp, Homo sapien
aaacaccactgcactcagaccggcc

SEQ ID NO: 884859 - DNA, 25 bp, Homo sapien
cccagcctattgtgacatgtttgca

SEQ ID NO: 884860 - DNA, 25 bp, Homo sapien
tctgacattatcagggatcccagtg

SEQ ID NO: 884861 - DNA, 25 bp, Homo sapien
cctttgttagggttgtcacgattat

SEQ ID NO: 884862 - DNA, 25 bp, Homo sapien
tattttcagcctagatcccttctgt

SEQ ID NO: 884863 - DNA, 25 bp, Homo sapien
tgggcttttaattgccacagcaaag

SEQ ID NO: 884864 - DNA, 25 bp, Homo sapien
gacatcagggataggaatacattaa

SEQ ID NO: 884865 - DNA, 25 bp, Homo sapien
gttgctgtgcaattcaaactgttct

SEQ ID NO: 884866 - DNA, 25 bp, Homo sapien
taaaaatatgcactagttttgacca

SEQ ID NO: 884867 - DNA, 25 bp, Homo sapien
tgataacctgcttatccactgtccc

SEQ ID NO: 884868 - DNA, 25 bp, Homo sapien
cagcgaattatacaactgctctagg

SEQ ID NO: 884869 - DNA, 25 bp, Homo sapien
gaattctatgctatgtgataacctg

SEQ ID NO: 884870 - DNA, 25 bp, Homo sapien
tgctctaggtaataaataagggttg

SEQ ID NO: 884871 - DNA, 25 bp, Homo sapien
tgtccttaattgcaaccattccgtt

SEQ ID NO: 884872 - DNA, 25 bp, Homo sapien
actacttcatgtgttactttcccaa

SEQ ID NO: 884873 - DNA, 25 bp, Homo sapien
tacagcatgttttacaggagttcac

SEQ ID NO: 884874 - DNA, 25 bp, Homo sapien
aacctgacatgactgaactacttca

SEQ ID NO: 884875 - DNA, 25 bp, Homo sapien
ttgggctgtaggaacgagatcttga

SEQ ID NO: 884876 - DNA, 25 bp, Homo sapien
gatcgtgatctatatcgactataat

SEQ ID NO: 884877 - DNA, 25 bp, Homo sapien
agatcttgatcgtgatctatatcga

SEQ ID NO: 884878 - DNA, 25 bp, Homo sapien
tatatcgactataataaggagaagg

SEQ ID NO: 884879 - DNA, 25 bp, Homo sapien
gtcatacccacgatcatatcctcta

SEQ ID NO: 884880 - DNA, 25 bp, Homo sapien
ttcatatctgtcatacccacgatca

SEQ ID NO: 884881 - DNA, 25 bp, Homo sapien
tagtcttcatatctgtcatacccac

SEQ ID NO: 884882 - DNA, 25 bp, Homo sapien
ctgtatcggtaatcatagtcttcat

SEQ ID NO: 884883 - DNA, 25 bp, Homo sapien
acctccacctccaccgccgccgcct

SEQ ID NO: 884884 - DNA, 25 bp, Homo sapien
gccgccgcctcctccaccaccccca

SEQ ID NO: 884885 - DNA, 25 bp, Homo sapien
gcctcctccaccacccccaccacta

SEQ ID NO: 884886 - DNA, 25 bp, Homo sapien
accacctccacctccaccgccgccg

SEQ ID NO: 884887 - DNA, 25 bp, Homo sapien
gaataaaaggtgtatccctgtgact

SEQ ID NO: 884888 - DNA, 25 bp, Homo sapien
caaattgaaacgatgaagcactgtg

SEQ ID NO: 884889 - DNA, 25 bp, Homo sapien
gctaagatgcattcctactgctaaa

SEQ ID NO: 884890 - DNA, 25 bp, Homo sapien
gcttttctactaatgcactgcccaa

SEQ ID NO: 884891 - DNA, 25 bp, Homo sapien
tttctggtggatttcatagtttagc

SEQ ID NO: 884892 - DNA, 25 bp, Homo sapien
tgttgccccttgccagaatcaattc

SEQ ID NO: 884893 - DNA, 25 bp, Homo sapien
ttctggtggatttcatagtttagct

SEQ ID NO: 884894 - DNA, 25 bp, Homo sapien
tgccccttgccagaatcaattctaa

SEQ ID NO: 884895 - DNA, 25 bp, Homo sapien
gttatagaataatccacccgaattc

SEQ ID NO: 884896 - DNA, 25 bp, Homo sapien
tgtgcgctctcttggttatagaata

SEQ ID NO: 884897 - DNA, 25 bp, Homo sapien
agttggtctgcccatgtagatgcct

SEQ ID NO: 884898 - DNA, 25 bp, Homo sapien
acccgaattcttctaccatccagct

SEQ ID NO: 884899 - DNA, 25 bp, Homo sapien
aattctagacctcaacaatgtccag

SEQ ID NO: 884900 - DNA, 25 bp, Homo sapien
actgattaagactcagtgagcagcc

SEQ ID NO: 884901 - DNA, 25 bp, Homo sapien
tccatgagatcaacaaagagtagtt

SEQ ID NO: 884902 - DNA, 25 bp, Homo sapien
taaagaacaggcacaaaaagtcacg

SEQ ID NO: 884903 - DNA, 25 bp, Homo sapien
aagaactttacatcacataaatgtc

SEQ ID NO: 884904 - DNA, 25 bp, Homo sapien
aaaagaactttacatcacataaatg

SEQ ID NO: 884905 - DNA, 25 bp, Homo sapien
ttaaaaagaactttacatcacataa

SEQ ID NO: 884906 - DNA, 25 bp, Homo sapien
taaaaagaactttacatcacataaa

SEQ ID NO: 884907 - DNA, 25 bp, Homo sapien
gttcgctgatcataaaccacattga

SEQ ID NO: 884908 - DNA, 25 bp, Homo sapien
cctttgagtcatctattctctcaaa

SEQ ID NO: 884909 - DNA, 25 bp, Homo sapien
aaagcaaatcctcgagatcgcccag

SEQ ID NO: 884910 - DNA, 25 bp, Homo sapien
caatggtccatatcgagaaaatact

SEQ ID NO: 884911 - DNA, 25 bp, Homo sapien
cctggttgaaacctagactgctagt

SEQ ID NO: 884912 - DNA, 25 bp, Homo sapien
tgtgggagaagcatagtacagcatg

SEQ ID NO: 884913 - DNA, 25 bp, Homo sapien
tctaagaactttagagcccggctgc

SEQ ID NO: 884914 - DNA, 25 bp, Homo sapien
tataacataacttgcctcacagaaa

SEQ ID NO: 884915 - DNA, 25 bp, Homo sapien
ggtgtatatgatctacttcgagatc

SEQ ID NO: 884916 - DNA, 25 bp, Homo sapien
gagaatggcttcggctccttcgccg

SEQ ID NO: 884917 - DNA, 25 bp, Homo sapien
ttcgccgccggtattctggtgtata

SEQ ID NO: 884918 - DNA, 25 bp, Homo sapien
tatatgatctacttcgagatcgtct

SEQ ID NO: 884919 - DNA, 25 bp, Homo sapien
cgagtgtaacgtctatgagaatgtc

SEQ ID NO: 884920 - DNA, 25 bp, Homo sapien
ggatctggatcgagtgtaacgtcta

SEQ ID NO: 884921 - DNA, 25 bp, Homo sapien
gatcgagtgtaacgtctatgagaat

SEQ ID NO: 884922 - DNA, 25 bp, Homo sapien
tctggatcgagtgtaacgtctatga

SEQ ID NO: 884923 - DNA, 25 bp, Homo sapien
aagtaatcaagcaccgggctagacc

SEQ ID NO: 884924 - DNA, 25 bp, Homo sapien
gaaaacagtatggttgctaacccca

SEQ ID NO: 884925 - DNA, 25 bp, Homo sapien
aatgacaaggacgtaagctaactgg

SEQ ID NO: 884926 - DNA, 25 bp, Homo sapien
ctgttatccatggtggtgggactcc

SEQ ID NO: 884927 - DNA, 25 bp, Homo sapien
gaaacccttgatggactacgagatc

SEQ ID NO: 884928 - DNA, 25 bp, Homo sapien
gacctgctctccgattttacacgag

SEQ ID NO: 884929 - DNA, 25 bp, Homo sapien
caggagttcccgttggagattttga

SEQ ID NO: 884930 - DNA, 25 bp, Homo sapien
gatcttgatcgagaatgggattcag

SEQ ID NO: 884931 - DNA, 25 bp, Homo sapien
aaatggcactggtcatgtagatgcc

SEQ ID NO: 884932 - DNA, 25 bp, Homo sapien
cactggtcatgtagatgcctaacac

SEQ ID NO: 884933 - DNA, 25 bp, Homo sapien
gcactggtcatgtagatgcctaaca

SEQ ID NO: 884934 - DNA, 25 bp, Homo sapien
tggcactggtcatgtagatgcctaa

SEQ ID NO: 884935 - DNA, 25 bp, Homo sapien
tacttgaaccagatcaccaattctc

SEQ ID NO: 884936 - DNA, 25 bp, Homo sapien
caacttgatcatacagacactggaa

SEQ ID NO: 884937 - DNA, 25 bp, Homo sapien
gctaactgtcctcaataattcccta

SEQ ID NO: 884938 - DNA, 25 bp, Homo sapien
aaatggttagacaacaccctccaga

SEQ ID NO: 884939 - DNA, 25 bp, Homo sapien
cactcttgctttctacttctcttca

SEQ ID NO: 884940 - DNA, 25 bp, Homo sapien
tttcatacttcgtgtattcttcccc

SEQ ID NO: 884941 - DNA, 25 bp, Homo sapien
acttcgtgtattcttccccaattca

SEQ ID NO: 884942 - DNA, 25 bp, Homo sapien
aaatattcaagtgcttctatctgac

SEQ ID NO: 884943 - DNA, 25 bp, Homo sapien
ccccattcaattttaattttctgat

SEQ ID NO: 884944 - DNA, 25 bp, Homo sapien
cccattcaattttaattttctgatc

SEQ ID NO: 884945 - DNA, 25 bp, Homo sapien
tctgttcaattttttcccccattca

SEQ ID NO: 884946 - DNA, 25 bp, Homo sapien
ccattcaattttaattttctgatct

SEQ ID NO: 884947 - DNA, 25 bp, Homo sapien
tatcttgatttatcttccacattct

SEQ ID NO: 884948 - DNA, 25 bp, Homo sapien
actcttcaatttcttcacgaacatt

SEQ ID NO: 884949 - DNA, 25 bp, Homo sapien
cttcaatttcttcacgaacattaac

SEQ ID NO: 884950 - DNA, 25 bp, Homo sapien
tcttttatcttgatttatcttccac

SEQ ID NO: 884951 - DNA, 25 bp, Homo sapien
tggagcaggcatagcaatctgggct

SEQ ID NO: 884952 - DNA, 25 bp, Homo sapien
taaatcccagttttggagtagcaac

SEQ ID NO: 884953 - DNA, 25 bp, Homo sapien
tatagttagagcaaggcatcccagg

SEQ ID NO: 884954 - DNA, 25 bp, Homo sapien
caaaagtcttaaataggcctccagt

SEQ ID NO: 884955 - DNA, 25 bp, Homo sapien
cagacccctatgaagttaaagcaac

SEQ ID NO: 884956 - DNA, 25 bp, Homo sapien
gagcagatcaacatccttcagtgaa

SEQ ID NO: 884957 - DNA, 25 bp, Homo sapien
gttttctgccagtcaagttctagga

SEQ ID NO: 884958 - DNA, 25 bp, Homo sapien
gggtgagcacccactgatactatca

SEQ ID NO: 884959 - DNA, 25 bp, Homo sapien
cactgggatgctgtatgaaaattgc

SEQ ID NO: 884960 - DNA, 25 bp, Homo sapien
caggcctgggttttgatagtcatca

SEQ ID NO: 884961 - DNA, 25 bp, Homo sapien
cagggcctgtaggagtctctcaaaa

SEQ ID NO: 884962 - DNA, 25 bp, Homo sapien
ggaattacaagataggtccctaaca

SEQ ID NO: 884963 - DNA, 25 bp, Homo sapien
aaaaagggcatctccagacaagctt

SEQ ID NO: 884964 - DNA, 25 bp, Homo sapien
ttaaaaagggcatctccagacaagc

SEQ ID NO: 884965 - DNA, 25 bp, Homo sapien
tttaaaaagggcatctccagacaag

SEQ ID NO: 884966 - DNA, 25 bp, Homo sapien
taaaaagggcatctccagacaagct

SEQ ID NO: 884967 - DNA, 25 bp, Homo sapien
aataaacatctacacaacagcccgg

SEQ ID NO: 884968 - DNA, 25 bp, Homo sapien
gatgtttgtatttctccgaccccaa

SEQ ID NO: 884969 - DNA, 25 bp, Homo sapien
aacagcccggaacgtgttgcatggg

SEQ ID NO: 884970 - DNA, 25 bp, Homo sapien
caaacgttccagtacatttaagctg

SEQ ID NO: 884971 - DNA, 25 bp, Homo sapien
gggctccttgcgtagtttcccctca

SEQ ID NO: 884972 - DNA, 25 bp, Homo sapien
cagctctcgtcttaagaacgcttaa

SEQ ID NO: 884973 - DNA, 25 bp, Homo sapien
cccaacatcgaggaattagaaaaat

SEQ ID NO: 884974 - DNA, 25 bp, Homo sapien
tccacattcatttcgaagtgaaagg

SEQ ID NO: 884975 - DNA, 25 bp, Homo sapien
gttccaacagagacgcggccgctca

SEQ ID NO: 884976 - DNA, 25 bp, Homo sapien
ttcgcctttttagacgcaacgccgc

SEQ ID NO: 884977 - DNA, 25 bp, Homo sapien
aacgccgccggttccaacagagacg

SEQ ID NO: 884978 - DNA, 25 bp, Homo sapien
cttcaacctcaaggctttcgccttt

SEQ ID NO: 884979 - DNA, 25 bp, Homo sapien
ctgaaatagagagccaaggagacac

SEQ ID NO: 884980 - DNA, 25 bp, Homo sapien
gaaatagagagccaaggagacacag

SEQ ID NO: 884981 - DNA, 25 bp, Homo sapien
agagccaaggagacacaggccccag

SEQ ID NO: 884982 - DNA, 25 bp, Homo sapien
agagagccaaggagacacaggcccc

SEQ ID NO: 884983 - DNA, 25 bp, Homo sapien
tttcgatcccgagaccctctacgat

SEQ ID NO: 884984 - DNA, 25 bp, Homo sapien
gaaatgccaccgcaggaagcaccta

SEQ ID NO: 884985 - DNA, 25 bp, Homo sapien
cctctacgatgctcggggtcgccag

SEQ ID NO: 884986 - DNA, 25 bp, Homo sapien
gaaagcagccccgcgcactttcgat

SEQ ID NO: 884987 - DNA, 25 bp, Homo sapien
acacctcggagcagacataaggaag

SEQ ID NO: 884988 - DNA, 25 bp, Homo sapien
tgggaggaatcaatcgcgatggctc

SEQ ID NO: 884989 - DNA, 25 bp, Homo sapien
ggagcagacataaggaagcctcagg

SEQ ID NO: 884990 - DNA, 25 bp, Homo sapien
cagaggttgctcctcgcgggactac

SEQ ID NO: 884991 - DNA, 25 bp, Homo sapien
gcttgttcccgtgaaaccccgagca

SEQ ID NO: 884992 - DNA, 25 bp, Homo sapien
tgaaaccccgagcattgggccgccg

SEQ ID NO: 884993 - DNA, 25 bp, Homo sapien
ccgtgaaaccccgagcattgggccg

SEQ ID NO: 884994 - DNA, 25 bp, Homo sapien
tgttcccgtgaaaccccgagcattg

SEQ ID NO: 884995 - DNA, 25 bp, Homo sapien
gaagttgttttcctccacatcactc

SEQ ID NO: 884996 - DNA, 25 bp, Homo sapien
tctgccctcgaagttgttttcctcc

SEQ ID NO: 884997 - DNA, 25 bp, Homo sapien
agttgttttcctccacatcactcat

SEQ ID NO: 884998 - DNA, 25 bp, Homo sapien
tcgaagttgttttcctccacatcac

SEQ ID NO: 884999 - DNA, 25 bp, Homo sapien
gacaagtctcggctcgagggccgat

SEQ ID NO: 885000 - DNA, 25 bp, Homo sapien
ctaaataagagacaagtctcggctc

SEQ ID NO: 885001 - DNA, 25 bp, Homo sapien
aataagagacaagtctcggctcgag

SEQ ID NO: 885002 - DNA, 25 bp, Homo sapien
agagacaagtctcggctcgagggcc

SEQ ID NO: 885003 - DNA, 25 bp, Homo sapien
ctcggtcgcaggctccagcaaaatg

SEQ ID NO: 885004 - DNA, 25 bp, Homo sapien
ggcgccgccagaaatctcctggcct

SEQ ID NO: 885005 - DNA, 25 bp, Homo sapien
ggaagaggaaagagtcggcaaccac

SEQ ID NO: 885006 - DNA, 25 bp, Homo sapien
aattaacccgctgactggaccgtgg

SEQ ID NO: 885007 - DNA, 25 bp, Homo sapien
gagccttatatgaccttagcccctt

SEQ ID NO: 885008 - DNA, 25 bp, Homo sapien
agcccctttaaatattgtccaagtg

SEQ ID NO: 885009 - DNA, 25 bp, Homo sapien
ctttgaagacttttcagtcgccaga

SEQ ID NO: 885010 - DNA, 25 bp, Homo sapien
tcggacgcgtcaacctctttgaaga

SEQ ID NO: 885011 - DNA, 25 bp, Homo sapien
agaaataggaggtgtctccagttcc

SEQ ID NO: 885012 - DNA, 25 bp, Homo sapien
gagaggatcctgcatgaggagcaat

SEQ ID NO: 885013 - DNA, 25 bp, Homo sapien
aaataggaggtgtctccagttccct

SEQ ID NO: 885014 - DNA, 25 bp, Homo sapien
catgaggagcaatattagaaatagg

SEQ ID NO: 885015 - DNA, 25 bp, Homo sapien
tcactgaagtaaaagggacaggaac

SEQ ID NO: 885016 - DNA, 25 bp, Homo sapien
gtggcaaacacagaaagatgcatat

SEQ ID NO: 885017 - DNA, 25 bp, Homo sapien
gagaaaatgattctacagccgtcat

SEQ ID NO: 885018 - DNA, 25 bp, Homo sapien
gaattaacgtcttcattagtggcaa

SEQ ID NO: 885019 - DNA, 25 bp, Homo sapien
tgtggtctatagtggtttggatctc

SEQ ID NO: 885020 - DNA, 25 bp, Homo sapien
taatttatttgtggtctatagtggt

SEQ ID NO: 885021 - DNA, 25 bp, Homo sapien
ttatttgtggtctatagtggtttgg

SEQ ID NO: 885022 - DNA, 25 bp, Homo sapien
gatctcttctgaatgtagtttcaag

SEQ ID NO: 885023 - DNA, 25 bp, Homo sapien
agtcacaaattgtggatgtgtataa

SEQ ID NO: 885024 - DNA, 25 bp, Homo sapien
atgatgacatgatccgctagatagg

SEQ ID NO: 885025 - DNA, 25 bp, Homo sapien
ggaacaccatcgaaaatgatgacat

SEQ ID NO: 885026 - DNA, 25 bp, Homo sapien
ttttgcatgaagtatgaaacgtttg

SEQ ID NO: 885027 - DNA, 25 bp, Homo sapien
caattgctagctcaaactctcccat

SEQ ID NO: 885028 - DNA, 25 bp, Homo sapien
cagctacaattgctagctcaaactc

SEQ ID NO: 885029 - DNA, 25 bp, Homo sapien
aaactctccagctacaattgctagc

SEQ ID NO: 885030 - DNA, 25 bp, Homo sapien
ttcagaatctgtaaactctccagct

SEQ ID NO: 885031 - DNA, 25 bp, Homo sapien
catctaggtaacgagaagtctcacc

SEQ ID NO: 885032 - DNA, 25 bp, Homo sapien
ggctttaaatgctgtttgacatcta

SEQ ID NO: 885033 - DNA, 25 bp, Homo sapien
cctagatcatattccactacaacga

SEQ ID NO: 885034 - DNA, 25 bp, Homo sapien
tcgttctgttaggtgggttaattca

SEQ ID NO: 885035 - DNA, 25 bp, Homo sapien
gctgacatacaattgcctgtgtctt

SEQ ID NO: 885036 - DNA, 25 bp, Homo sapien
ctgctgacatacaattgcctgtgtc

SEQ ID NO: 885037 - DNA, 25 bp, Homo sapien
ctgtgtctttgtttcatcttttcag

SEQ ID NO: 885038 - DNA, 25 bp, Homo sapien
cttttcagtccaaaatagatcccac

SEQ ID NO: 885039 - DNA, 25 bp, Homo sapien
cttaggaatctggtctacatattga

SEQ ID NO: 885040 - DNA, 25 bp, Homo sapien
aattgtcaattgatagggcgccaaa

SEQ ID NO: 885041 - DNA, 25 bp, Homo sapien
gttaatttagatgacattggcacaa

SEQ ID NO: 885042 - DNA, 25 bp, Homo sapien
ggataggcaacctgttaatttagat

SEQ ID NO: 885043 - DNA, 25 bp, Homo sapien
ggcaacctgttaatttagatgacat

SEQ ID NO: 885044 - DNA, 25 bp, Homo sapien
aatttgtctgctagaactgtgcgaa

SEQ ID NO: 885045 - DNA, 25 bp, Homo sapien
ctagaactgtgcgaaagaatatcca

SEQ ID NO: 885046 - DNA, 25 bp, Homo sapien
ttaatttgtctgctagaactgtgcg

SEQ ID NO: 885047 - DNA, 25 bp, Homo sapien
tgtctgctagaactgtgcgaaagaa

SEQ ID NO: 885048 - DNA, 25 bp, Homo sapien
gtctttacttttcagtcacacagca

SEQ ID NO: 885049 - DNA, 25 bp, Homo sapien
tctttacttttcagtcacacagcat

SEQ ID NO: 885050 - DNA, 25 bp, Homo sapien
ttatccttgggatttatcaaacaca

SEQ ID NO: 885051 - DNA, 25 bp, Homo sapien
gattcattagaaacgtctgtcacag

SEQ ID NO: 885052 - DNA, 25 bp, Homo sapien
gaaacgtctgtcacagctattcctt

SEQ ID NO: 885053 - DNA, 25 bp, Homo sapien
aaagatgattcattagaaacgtctg

SEQ ID NO: 885054 - DNA, 25 bp, Homo sapien
aactcctggccaaaagccatccttc

SEQ ID NO: 885055 - DNA, 25 bp, Homo sapien
catccttctgccccagtctcccaaa

SEQ ID NO: 885056 - DNA, 25 bp, Homo sapien
ccaccatgcccggcctattcggaga

SEQ ID NO: 885057 - DNA, 25 bp, Homo sapien
gtgttggaattacaggcatgagcca

SEQ ID NO: 885058 - DNA, 25 bp, Homo sapien
aacttccatgaagggtcaggcactc

SEQ ID NO: 885059 - DNA, 25 bp, Homo sapien
tcatggttaacaggcctctctcaca

SEQ ID NO: 885060 - DNA, 25 bp, Homo sapien
gactcctccatatgaaaccttttgg

SEQ ID NO: 885061 - DNA, 25 bp, Homo sapien
gagttcccagcacaaggcatagaga

SEQ ID NO: 885062 - DNA, 25 bp, Homo sapien
gaaagtgtgtagatggaatagcatt

SEQ ID NO: 885063 - DNA, 25 bp, Homo sapien
ggcgggtcaaatgaagcatgttatt

SEQ ID NO: 885064 - DNA, 25 bp, Homo sapien
tggaaagtgtgtagatggaatagca

SEQ ID NO: 885065 - DNA, 25 bp, Homo sapien
gtgtgtagatggaatagcattatgt

SEQ ID NO: 885066 - DNA, 25 bp, Homo sapien
acaggtatatagagaagcagcagga

SEQ ID NO: 885067 - DNA, 25 bp, Homo sapien
tggctcagcccaaaggcgggagaag

SEQ ID NO: 885068 - DNA, 25 bp, Homo sapien
caaggtcagccgctgagctggttca

SEQ ID NO: 885069 - DNA, 25 bp, Homo sapien
ccaaggtcagccgctgagctggttc

SEQ ID NO: 885070 - DNA, 25 bp, Homo sapien
aggtcagccgctgagctggttcata

SEQ ID NO: 885071 - DNA, 25 bp, Homo sapien
ggtcagccgctgagctggttcatac

SEQ ID NO: 885072 - DNA, 25 bp, Homo sapien
ccgcagcggtttgcagttctcacga

SEQ ID NO: 885073 - DNA, 25 bp, Homo sapien
tgatgtgttctcatcccaatccagg

SEQ ID NO: 885074 - DNA, 25 bp, Homo sapien
gtttgcagttctcacgaacatagcg

SEQ ID NO: 885075 - DNA, 25 bp, Homo sapien
tcaatcagatcgaagagctggtggt

SEQ ID NO: 885076 - DNA, 25 bp, Homo sapien
catccgggaagggataggacccaag

SEQ ID NO: 885077 - DNA, 25 bp, Homo sapien
gggataggacccaagatcctttcca

SEQ ID NO: 885078 - DNA, 25 bp, Homo sapien
cttgtctttcggatcatccgggaag

SEQ ID NO: 885079 - DNA, 25 bp, Homo sapien
ctttcggatcatccgggaagggata

SEQ ID NO: 885080 - DNA, 25 bp, Homo sapien
aaagatgatgcagcctatactccac

SEQ ID NO: 885081 - DNA, 25 bp, Homo sapien
gatgcagcctatactccacacatca

SEQ ID NO: 885082 - DNA, 25 bp, Homo sapien
gatgatgcagcctatactccacaca

SEQ ID NO: 885083 - DNA, 25 bp, Homo sapien
agatgatgcagcctatactccacac

SEQ ID NO: 885084 - DNA, 25 bp, Homo sapien
ctgtgaccaacccaactcaaggatg

SEQ ID NO: 885085 - DNA, 25 bp, Homo sapien
cttctctaggttgtaggtgagctca

SEQ ID NO: 885086 - DNA, 25 bp, Homo sapien
ggaaatcgaaggtgctaaggcccag

SEQ ID NO: 885087 - DNA, 25 bp, Homo sapien
caggcttgaggtctgtatgtgtcag

SEQ ID NO: 885088 - DNA, 25 bp, Homo sapien
tgatctcaagtcgagctgcttcctt

SEQ ID NO: 885089 - DNA, 25 bp, Homo sapien
cgagccccacgcctgcgatggtcaa

SEQ ID NO: 885090 - DNA, 25 bp, Homo sapien
agccccacgcctgcgatggtcaaca

SEQ ID NO: 885091 - DNA, 25 bp, Homo sapien
gccccacgcctgcgatggtcaacac

SEQ ID NO: 885092 - DNA, 25 bp, Homo sapien
ctcgagccccacgcctgcgatggtc

SEQ ID NO: 885093 - DNA, 25 bp, Homo sapien
acgatttcatatcgctcttgtagcc

SEQ ID NO: 885094 - DNA, 25 bp, Homo sapien
ctgcgaagacgagcggctaaatgtc

SEQ ID NO: 885095 - DNA, 25 bp, Homo sapien
ctccagccccgttctcgggctctgc

SEQ ID NO: 885096 - DNA, 25 bp, Homo sapien
caggaacggcttcttcgttgcttgt

SEQ ID NO: 885097 - DNA, 25 bp, Homo sapien
tctccttaactgtcggcctgtttcc

SEQ ID NO: 885098 - DNA, 25 bp, Homo sapien
tgaggcatctttctggcggccaggc

SEQ ID NO: 885099 - DNA, 25 bp, Homo sapien
agaatctcgctcagtcaccaggttg

SEQ ID NO: 885100 - DNA, 25 bp, Homo sapien
cagaatctcgctcagtcaccaggtt

SEQ ID NO: 885101 - DNA, 25 bp, Homo sapien
gacagaatctcgctcagtcaccagg

SEQ ID NO: 885102 - DNA, 25 bp, Homo sapien
acagaatctcgctcagtcaccaggt

SEQ ID NO: 885103 - DNA, 25 bp, Homo sapien
cagctatatttgatggcccattctc

SEQ ID NO: 885104 - DNA, 25 bp, Homo sapien
tatgaaacgttacaacaggtctcac

SEQ ID NO: 885105 - DNA, 25 bp, Homo sapien
ttttctgggactccaaccagctata

SEQ ID NO: 885106 - DNA, 25 bp, Homo sapien
gatgggtttatgaaacgttacaaca

SEQ ID NO: 885107 - DNA, 25 bp, Homo sapien
ggcgggctcatcttccaacacagaa

SEQ ID NO: 885108 - DNA, 25 bp, Homo sapien
tgcgtcgttctgacccagggtaggt

SEQ ID NO: 885109 - DNA, 25 bp, Homo sapien
ttaaggccgagggtatgcctctggc

SEQ ID NO: 885110 - DNA, 25 bp, Homo sapien
agcgcctgcagcgagttaaggccga

SEQ ID NO: 885111 - DNA, 25 bp, Homo sapien
gaatagcacttttctccgaagatct

SEQ ID NO: 885112 - DNA, 25 bp, Homo sapien
tatgtctgtggctagggagaaacca

SEQ ID NO: 885113 - DNA, 25 bp, Homo sapien
gcataatggagcttggaatagcact

SEQ ID NO: 885114 - DNA, 25 bp, Homo sapien
aaagtggagtggacatgttaatgcc

SEQ ID NO: 885115 - DNA, 25 bp, Homo sapien
gttcagtttgtatgatttctccaga

SEQ ID NO: 885116 - DNA, 25 bp, Homo sapien
tcagtttgtatgatttctccagacc

SEQ ID NO: 885117 - DNA, 25 bp, Homo sapien
aaacaccaccatatcagatcattac

SEQ ID NO: 885118 - DNA, 25 bp, Homo sapien
catatcagatcattactattcctgt

SEQ ID NO: 885119 - DNA, 25 bp, Homo sapien
tttcagactacttggaagatgaact

SEQ ID NO: 885120 - DNA, 25 bp, Homo sapien
aagatgaactgttctcatcagcaac

SEQ ID NO: 885121 - DNA, 25 bp, Homo sapien
ctcgtctcctttcagactacttgga

SEQ ID NO: 885122 - DNA, 25 bp, Homo sapien
tggaagatgaactgttctcatcagc

SEQ ID NO: 885123 - DNA, 25 bp, Homo sapien
tcaacaaccaagacatcaaagcagt

SEQ ID NO: 885124 - DNA, 25 bp, Homo sapien
atttgtggcttacctcaagttacca

SEQ ID NO: 885125 - DNA, 25 bp, Homo sapien
cgtgagcaaatactagacttaagca

SEQ ID NO: 885126 - DNA, 25 bp, Homo sapien
caaagcagtgtcaagttacgtgagc

SEQ ID NO: 885127 - DNA, 25 bp, Homo sapien
tccccagtgagtatgaggccatccc

SEQ ID NO: 885128 - DNA, 25 bp, Homo sapien
ccaccacactgtcagtggagagtac

SEQ ID NO: 885129 - DNA, 25 bp, Homo sapien
gagtcaggacattcatcatccccag

SEQ ID NO: 885130 - DNA, 25 bp, Homo sapien
tccacatggcagtaacgaactgttc

SEQ ID NO: 885131 - DNA, 25 bp, Homo sapien
gtggatagaagtgggcatgggagac

SEQ ID NO: 885132 - DNA, 25 bp, Homo sapien
ccgccctatccaggaggtgaggagc

SEQ ID NO: 885133 - DNA, 25 bp, Homo sapien
gaggtgtgcctagcgactcattggg

SEQ ID NO: 885134 - DNA, 25 bp, Homo sapien
ccatccgggaggagaggggcgcttc

SEQ ID NO: 885135 - DNA, 25 bp, Homo sapien
ctctgggatctcgaaggacttttta

SEQ ID NO: 885136 - DNA, 25 bp, Homo sapien
tctcgaaggactttttatctgctgt

SEQ ID NO: 885137 - DNA, 25 bp, Homo sapien
actgctggggctatctctgggatct

SEQ ID NO: 885138 - DNA, 25 bp, Homo sapien
ggctatctctgggatctcgaaggac

SEQ ID NO: 885139 - DNA, 25 bp, Homo sapien
tgaaaacgccaatactggaaacagg

SEQ ID NO: 885140 - DNA, 25 bp, Homo sapien
aaagtgaacccagatacccaggact

SEQ ID NO: 885141 - DNA, 25 bp, Homo sapien
tttacaagaagactcgccggtccag

SEQ ID NO: 885142 - DNA, 25 bp, Homo sapien
gaaacaggccgacagttaaggagag

SEQ ID NO: 885143 - DNA, 25 bp, Homo sapien
cttccccaccggcaatggagcggtt

SEQ ID NO: 885144 - DNA, 25 bp, Homo sapien
tggtccgcagggaagcctttggctt

SEQ ID NO: 885145 - DNA, 25 bp, Homo sapien
caatggagcggttgacgttgcctct

SEQ ID NO: 885146 - DNA, 25 bp, Homo sapien
ggcgggtcgggcttcgaggtcagct

SEQ ID NO: 885147 - DNA, 25 bp, Homo sapien
ccgccgctccgaggggccaggatcc

SEQ ID NO: 885148 - DNA, 25 bp, Homo sapien
tggagtaccggaggtgaggctgtgg

SEQ ID NO: 885149 - DNA, 25 bp, Homo sapien
ccccgccgctccgaggggccaggat

SEQ ID NO: 885150 - DNA, 25 bp, Homo sapien
ctggagtaccggaggtgaggctgtg

SEQ ID NO: 885151 - DNA, 25 bp, Homo sapien
tattgtagggccacgcggttctatg

SEQ ID NO: 885152 - DNA, 25 bp, Homo sapien
gaaaacaggcacatcgagtactcgg

SEQ ID NO: 885153 - DNA, 25 bp, Homo sapien
tctatgcagtgatgagtcttccaat

SEQ ID NO: 885154 - DNA, 25 bp, Homo sapien
tctagattgatacagaggtccagct

SEQ ID NO: 885155 - DNA, 25 bp, Homo sapien
ttaggagaaaggcaccgactggtgt

SEQ ID NO: 885156 - DNA, 25 bp, Homo sapien
agtcaaccgtgaacttctgaacgcg

SEQ ID NO: 885157 - DNA, 25 bp, Homo sapien
cgaaactggaaacggagtcgctcct

SEQ ID NO: 885158 - DNA, 25 bp, Homo sapien
cctttggcctgaggacgcggttcat

SEQ ID NO: 885159 - DNA, 25 bp, Homo sapien
tacaagcggaggggagacgctccag

SEQ ID NO: 885160 - DNA, 25 bp, Homo sapien
aagcggaggggagacgctccaggct

SEQ ID NO: 885161 - DNA, 25 bp, Homo sapien
agggaggccggagcgagcgacaggg

SEQ ID NO: 885162 - DNA, 25 bp, Homo sapien
cagggaggccggagcgagcgacagg

SEQ ID NO: 885163 - DNA, 25 bp, Homo sapien
cactgtgcctagctgttcccatata

SEQ ID NO: 885164 - DNA, 25 bp, Homo sapien
acccaggctcttgtcaccaggagtg

SEQ ID NO: 885165 - DNA, 25 bp, Homo sapien
tgttaatagtatattctggcctcca

SEQ ID NO: 885166 - DNA, 25 bp, Homo sapien
ttcccatatatgtttgtcagaggtg

SEQ ID NO: 885167 - DNA, 25 bp, Homo sapien
tctgtctgagagtacagtaaatgtt

SEQ ID NO: 885168 - DNA, 25 bp, Homo sapien
tattttatatgagtctgtctgagag

SEQ ID NO: 885169 - DNA, 25 bp, Homo sapien
gggttttggacaaacatatgagcca

SEQ ID NO: 885170 - DNA, 25 bp, Homo sapien
ttactgtataaatgtcttttgggat

SEQ ID NO: 885171 - DNA, 25 bp, Homo sapien
tattaccccggaatatatgtacagc

SEQ ID NO: 885172 - DNA, 25 bp, Homo sapien
taaagggtccatacaaactaagagc

SEQ ID NO: 885173 - DNA, 25 bp, Homo sapien
tatgtacagcatcccagcaacagtg

SEQ ID NO: 885174 - DNA, 25 bp, Homo sapien
taccctgctacttagagacagccag

SEQ ID NO: 885175 - DNA, 25 bp, Homo sapien
atgtaaatacaagccaagccctgtg

SEQ ID NO: 885176 - DNA, 25 bp, Homo sapien
tgtaaatacaagccaagccctgtgg

SEQ ID NO: 885177 - DNA, 25 bp, Homo sapien
ggagcaaatgacacaataaggatat

SEQ ID NO: 885178 - DNA, 25 bp, Homo sapien
gagcaaatgacacaataaggatatt

SEQ ID NO: 885179 - DNA, 25 bp, Homo sapien
cccttgggtccttcagtagaggcat

SEQ ID NO: 885180 - DNA, 25 bp, Homo sapien
tgatgttttcaccagtaaaggactg

SEQ ID NO: 885181 - DNA, 25 bp, Homo sapien
tagggtcacatcatccttacagtag

SEQ ID NO: 885182 - DNA, 25 bp, Homo sapien
cagagcaactgtgccatctagattg

SEQ ID NO: 885183 - DNA, 25 bp, Homo sapien
ccctgtaggcagtctttgagtgatg

SEQ ID NO: 885184 - DNA, 25 bp, Homo sapien
taagtcagctctatctaggcaatgg

SEQ ID NO: 885185 - DNA, 25 bp, Homo sapien
caagaagaacctgttgggctgttac

SEQ ID NO: 885186 - DNA, 25 bp, Homo sapien
gacgtatgtcaccaaaagaagagga

SEQ ID NO: 885187 - DNA, 25 bp, Homo sapien
cactaagagttataagtctttgtcc

SEQ ID NO: 885188 - DNA, 25 bp, Homo sapien
agtctttgtcctagagagtcttcag

SEQ ID NO: 885189 - DNA, 25 bp, Homo sapien
agaacactggatagatgctgaaggc

SEQ ID NO: 885190 - DNA, 25 bp, Homo sapien
ttcagtatggttgttgaggcaaggc

SEQ ID NO: 885191 - DNA, 25 bp, Homo sapien
gcaatccttaggcagtcagttcagt

SEQ ID NO: 885192 - DNA, 25 bp, Homo sapien
taaaacctgggcttttatgagctca

SEQ ID NO: 885193 - DNA, 25 bp, Homo sapien
tactggcagagctcggtgcaatcct

SEQ ID NO: 885194 - DNA, 25 bp, Homo sapien
gaagtgcatgcattttccaccctgt

SEQ ID NO: 885195 - DNA, 25 bp, Homo sapien
cctgagcactctgcatttgtggcat

SEQ ID NO: 885196 - DNA, 25 bp, Homo sapien
tcatgactgttgagagggatggatt

SEQ ID NO: 885197 - DNA, 25 bp, Homo sapien
tgtttgcttgtaactgccaccgagc

SEQ ID NO: 885198 - DNA, 25 bp, Homo sapien
ttcaccttctgtgtaagaagcattc

SEQ ID NO: 885199 - DNA, 25 bp, Homo sapien
ggagcatttaatgaacccacatagg

SEQ ID NO: 885200 - DNA, 25 bp, Homo sapien
tgttctctgacaaagtggcagtgga

SEQ ID NO: 885201 - DNA, 25 bp, Homo sapien
caccagccctttgatatggcagcta

SEQ ID NO: 885202 - DNA, 25 bp, Homo sapien
tcctcacgtaggtctatgggagcat

SEQ ID NO: 885203 - DNA, 25 bp, Homo sapien
tctttctccacctcatggaagggca

SEQ ID NO: 885204 - DNA, 25 bp, Homo sapien
tttgcatccaagcttggaggagctg

SEQ ID NO: 885205 - DNA, 25 bp, Homo sapien
catggaagggcagaaccgtgctgct

SEQ ID NO: 885206 - DNA, 25 bp, Homo sapien
gacagggccacagacacaagtgaaa

SEQ ID NO: 885207 - DNA, 25 bp, Homo sapien
cccaggggttgcttggttgagccat

SEQ ID NO: 885208 - DNA, 25 bp, Homo sapien
gcccaggggttgcttggttgagcca

SEQ ID NO: 885209 - DNA, 25 bp, Homo sapien
tcagacataatttgccaacatggag

SEQ ID NO: 885210 - DNA, 25 bp, Homo sapien
ggagtcataacaagattcgagggag

SEQ ID NO: 885211 - DNA, 25 bp, Homo sapien
taatttgccaacatggagtcataac

SEQ ID NO: 885212 - DNA, 25 bp, Homo sapien
gacataatttgccaacatggagtca

SEQ ID NO: 885213 - DNA, 25 bp, Homo sapien
tccacacggccccacaaccatgtag

SEQ ID NO: 885214 - DNA, 25 bp, Homo sapien
acacggccccacaaccatgtagctc

SEQ ID NO: 885215 - DNA, 25 bp, Homo sapien
acggccccacaaccatgtagctctt

SEQ ID NO: 885216 - DNA, 25 bp, Homo sapien
ggccccacaaccatgtagctcttgg

SEQ ID NO: 885217 - DNA, 25 bp, Homo sapien
gagtcctttggctccctttatcact

SEQ ID NO: 885218 - DNA, 25 bp, Homo sapien
tcgatggaaggtatcatagacctgg

SEQ ID NO: 885219 - DNA, 25 bp, Homo sapien
ctactttgttgaggatcgatggaag

SEQ ID NO: 885220 - DNA, 25 bp, Homo sapien
ctgggaaggagcctcgagtcctttg

SEQ ID NO: 885221 - DNA, 25 bp, Homo sapien
ggagttgtgaatctagtgaggtcat

SEQ ID NO: 885222 - DNA, 25 bp, Homo sapien
aggagttgtgaatctagtgaggtca

SEQ ID NO: 885223 - DNA, 25 bp, Homo sapien
gaacggttttggctgtaacgatgaa

SEQ ID NO: 885224 - DNA, 25 bp, Homo sapien
gcaaggaacaggcaaacccacttta

SEQ ID NO: 885225 - DNA, 25 bp, Homo sapien
taacgatgaagagtgggcaaggaac

SEQ ID NO: 885226 - DNA, 25 bp, Homo sapien
cactttaaacatgggtgggccttct

SEQ ID NO: 885227 - DNA, 25 bp, Homo sapien
tccgggaccttaaagctgtccataa

SEQ ID NO: 885228 - DNA, 25 bp, Homo sapien
tccataaccaaggtgaggacagtga

SEQ ID NO: 885229 - DNA, 25 bp, Homo sapien
cctggcttccgggaccttaaagctg

SEQ ID NO: 885230 - DNA, 25 bp, Homo sapien
aagctgtccataaccaaggtgagga

SEQ ID NO: 885231 - DNA, 25 bp, Homo sapien
caaagagtcggaccagacagcattg

SEQ ID NO: 885232 - DNA, 25 bp, Homo sapien
agcattgacaaagagtcggaccaga

SEQ ID NO: 885233 - DNA, 25 bp, Homo sapien
tcggaccagacagcattgatagtgc

SEQ ID NO: 885234 - DNA, 25 bp, Homo sapien
ttgacaaagagtcggaccagacagc

SEQ ID NO: 885235 - DNA, 25 bp, Homo sapien
catttgtcttccagcctagctttat

SEQ ID NO: 885236 - DNA, 25 bp, Homo sapien
ataaagatggtatttggtgctccat

SEQ ID NO: 885237 - DNA, 25 bp, Homo sapien
agggagtcagccaggccatttgtct

SEQ ID NO: 885238 - DNA, 25 bp, Homo sapien
aggagaattgtagtaaagatggcag

SEQ ID NO: 885239 - DNA, 25 bp, Homo sapien
tgtagtaaagatggcagtctggctg

SEQ ID NO: 885240 - DNA, 25 bp, Homo sapien
taaagatggcagtctggctggtcca

SEQ ID NO: 885241 - DNA, 25 bp, Homo sapien
gcactgactggcttcagccagtcag

SEQ ID NO: 885242 - DNA, 25 bp, Homo sapien
tggagaacagtttgtggtcctaggt

SEQ ID NO: 885243 - DNA, 25 bp, Homo sapien
tcctaggtggtgattgctcccttgg

SEQ ID NO: 885244 - DNA, 25 bp, Homo sapien
tgtggtcctaggtggtgattgctcc

SEQ ID NO: 885245 - DNA, 25 bp, Homo sapien
aacagtttgtggtcctaggtggtga

SEQ ID NO: 885246 - DNA, 25 bp, Homo sapien
gtgccccattgactacactttcttc

SEQ ID NO: 885247 - DNA, 25 bp, Homo sapien
tcttccttcacccaaacagtgggtc

SEQ ID NO: 885248 - DNA, 25 bp, Homo sapien
tgagattgtggttgaagtgcagatg

SEQ ID NO: 885249 - DNA, 25 bp, Homo sapien
cagtgccccattgactacactttct

SEQ ID NO: 885250 - DNA, 25 bp, Homo sapien
aactcttgtgtcagttaactggaaa

SEQ ID NO: 885251 - DNA, 25 bp, Homo sapien
cctgaactctatagccaggtgctaa

SEQ ID NO: 885252 - DNA, 25 bp, Homo sapien
tctgtgcctgaactctatagccagg

SEQ ID NO: 885253 - DNA, 25 bp, Homo sapien
tgtgcctgaactctatagccaggtg

SEQ ID NO: 885254 - DNA, 25 bp, Homo sapien
actctatagccaggtgctaaaccta

SEQ ID NO: 885255 - DNA, 25 bp, Homo sapien
tcaaagatgactcatttggtacagt

SEQ ID NO: 885256 - DNA, 25 bp, Homo sapien
cactggtggtagcataaaggccttg

SEQ ID NO: 885257 - DNA, 25 bp, Homo sapien
tttcccccccgggatgagcatgctg

SEQ ID NO: 885258 - DNA, 25 bp, Homo sapien
tgagcctgtgctttagtctccccag

SEQ ID NO: 885259 - DNA, 25 bp, Homo sapien
tgtgtgagcacttgagcttgcactg

SEQ ID NO: 885260 - DNA, 25 bp, Homo sapien
tgatatatgtgtgagcacttgagct

SEQ ID NO: 885261 - DNA, 25 bp, Homo sapien
gagcacttgagcttgcactgttgtt

SEQ ID NO: 885262 - DNA, 25 bp, Homo sapien
tatatgtgtgagcacttgagcttgc

SEQ ID NO: 885263 - DNA, 25 bp, Homo sapien
tatgatgggaacactcacgattgtg

SEQ ID NO: 885264 - DNA, 25 bp, Homo sapien
agacagctgttcagatttgtgctgc

SEQ ID NO: 885265 - DNA, 25 bp, Homo sapien
ctgttcagatttgtgctgcttatga

SEQ ID NO: 885266 - DNA, 25 bp, Homo sapien
aacactcacgattgtgagtcacttg

SEQ ID NO: 885267 - DNA, 25 bp, Homo sapien
ctcttctaattggtaagtgtatttg

SEQ ID NO: 885268 - DNA, 25 bp, Homo sapien
tcttctaattggtaagtgtatttgt

SEQ ID NO: 885269 - DNA, 25 bp, Homo sapien
cttctaattggtaagtgtatttgtt

SEQ ID NO: 885270 - DNA, 25 bp, Homo sapien
tctcttctaattggtaagtgtattt

SEQ ID NO: 885271 - DNA, 25 bp, Homo sapien
tgagtgatttaagcctacagccatg

SEQ ID NO: 885272 - DNA, 25 bp, Homo sapien
gatttaagcctacagccatgttgag

SEQ ID NO: 885273 - DNA, 25 bp, Homo sapien
tattattgagtgatttaagcctaca

SEQ ID NO: 885274 - DNA, 25 bp, Homo sapien
ttattattattgagtgatttaagcc

SEQ ID NO: 885275 - DNA, 25 bp, Homo sapien
actgctggcctatccctattcttaa

SEQ ID NO: 885276 - DNA, 25 bp, Homo sapien
tcagcaagcacgataaattgctaat

SEQ ID NO: 885277 - DNA, 25 bp, Homo sapien
tggcctatccctattcttaagttat

SEQ ID NO: 885278 - DNA, 25 bp, Homo sapien
gcacgataaattgctaatgactgct

SEQ ID NO: 885279 - DNA, 25 bp, Homo sapien
cattgccgttgcttggtgttgttgc

SEQ ID NO: 885280 - DNA, 25 bp, Homo sapien
accttgcccgcaagtttgtgagaca

SEQ ID NO: 885281 - DNA, 25 bp, Homo sapien
tggattccgggcatcattgccgttg

SEQ ID NO: 885282 - DNA, 25 bp, Homo sapien
cacgtcactacttactgggatccct

SEQ ID NO: 885283 - DNA, 25 bp, Homo sapien
ctccacatcttcctgtattcctcca

SEQ ID NO: 885284 - DNA, 25 bp, Homo sapien
tcctgtattcctccaggtaactcat

SEQ ID NO: 885285 - DNA, 25 bp, Homo sapien
tctccacatcttcctgtattcctcc

SEQ ID NO: 885286 - DNA, 25 bp, Homo sapien
catcttcctgtattcctccaggtaa

SEQ ID NO: 885287 - DNA, 25 bp, Homo sapien
gctgtagttgcctacttactggaat

SEQ ID NO: 885288 - DNA, 25 bp, Homo sapien
ccttcatctctgagggatcagaacc

SEQ ID NO: 885289 - DNA, 25 bp, Homo sapien
tctggtcgttttgcccttgttggac

SEQ ID NO: 885290 - DNA, 25 bp, Homo sapien
gactgtggttgctgtagttgcctac

SEQ ID NO: 885291 - DNA, 25 bp, Homo sapien
caattgagggccctaaagtccatcc

SEQ ID NO: 885292 - DNA, 25 bp, Homo sapien
gaatctacaattgagggccctaaag

SEQ ID NO: 885293 - DNA, 25 bp, Homo sapien
ctgcttgtggtggaatctacaattg

SEQ ID NO: 885294 - DNA, 25 bp, Homo sapien
tggtggaatctacaattgagggccc

SEQ ID NO: 885295 - DNA, 25 bp, Homo sapien
gcatttcatatctaggtcttgagga

SEQ ID NO: 885296 - DNA, 25 bp, Homo sapien
cagtttataatccttgccagcagtc

SEQ ID NO: 885297 - DNA, 25 bp, Homo sapien
acaggtggaggtgactggtttctca

SEQ ID NO: 885298 - DNA, 25 bp, Homo sapien
gcccagcaccaagggttgaaagatt

SEQ ID NO: 885299 - DNA, 25 bp, Homo sapien
tgctctgatttttctcccccgatta

SEQ ID NO: 885300 - DNA, 25 bp, Homo sapien
gtgagtgaccgctggtgccctgctt

SEQ ID NO: 885301 - DNA, 25 bp, Homo sapien
gatttgatggtaggtgtgctctgaa

SEQ ID NO: 885302 - DNA, 25 bp, Homo sapien
tgctctgaagaccagaggaatgcag

SEQ ID NO: 885303 - DNA, 25 bp, Homo sapien
cggccaaataagtggagggcattta

SEQ ID NO: 885304 - DNA, 25 bp, Homo sapien
ggtgacggccaaataagtggagggc

SEQ ID NO: 885305 - DNA, 25 bp, Homo sapien
gacggccaaataagtggagggcatt

SEQ ID NO: 885306 - DNA, 25 bp, Homo sapien
caaataagtggagggcatttagaca

SEQ ID NO: 885307 - DNA, 25 bp, Homo sapien
tcatctgttaagattgctaccaggg

SEQ ID NO: 885308 - DNA, 25 bp, Homo sapien
ttgaacctacggcaaaaggcatccc

SEQ ID NO: 885309 - DNA, 25 bp, Homo sapien
aatgcagcttgggacgtcatgggct

SEQ ID NO: 885310 - DNA, 25 bp, Homo sapien
tagtgtgcttgaacctacggcaaaa

SEQ ID NO: 885311 - DNA, 25 bp, Homo sapien
attttttccagaagattccatgtct

SEQ ID NO: 885312 - DNA, 25 bp, Homo sapien
cagaagattccatgtctgatctgca

SEQ ID NO: 885313 - DNA, 25 bp, Homo sapien
cgagggtcttctgatattttttcca

SEQ ID NO: 885314 - DNA, 25 bp, Homo sapien
gagggtcttctgatattttttccag

SEQ ID NO: 885315 - DNA, 25 bp, Homo sapien
agcaggtatggaggcatctgggaag

SEQ ID NO: 885316 - DNA, 25 bp, Homo sapien
tgggaagcaggttgccgaaaatagt

SEQ ID NO: 885317 - DNA, 25 bp, Homo sapien
caggtatggaggcatctgggaagca

SEQ ID NO: 885318 - DNA, 25 bp, Homo sapien
gcatctgggaagcaggttgccgaaa

SEQ ID NO: 885319 - DNA, 25 bp, Homo sapien
tttctgccaggctagctttcagagg

SEQ ID NO: 885320 - DNA, 25 bp, Homo sapien
caggaaatttctgccaggctagctt

SEQ ID NO: 885321 - DNA, 25 bp, Homo sapien
gccatagagcgctgacaaggtgtct

SEQ ID NO: 885322 - DNA, 25 bp, Homo sapien
gctgggtacatttgctagtgggtat

SEQ ID NO: 885323 - DNA, 25 bp, Homo sapien
ggagaaaagtcttctagagcaagct

SEQ ID NO: 885324 - DNA, 25 bp, Homo sapien
gagaaaagtcttctagagcaagctg

SEQ ID NO: 885325 - DNA, 25 bp, Homo sapien
tgttcccagaaatttttctgggaga

SEQ ID NO: 885326 - DNA, 25 bp, Homo sapien
gggagaaaagtcttctagagcaagc

SEQ ID NO: 885327 - DNA, 25 bp, Homo sapien
tcagtagttattgctgacagaactc

SEQ ID NO: 885328 - DNA, 25 bp, Homo sapien
ctcatggagaggtagaaagaccatg

SEQ ID NO: 885329 - DNA, 25 bp, Homo sapien
ttgctgacagaactcatggagaggt

SEQ ID NO: 885330 - DNA, 25 bp, Homo sapien
tagttattgctgacagaactcatgg

SEQ ID NO: 885331 - DNA, 25 bp, Homo sapien
tacaagttctggtatgaatatcaac

SEQ ID NO: 885332 - DNA, 25 bp, Homo sapien
tccattgccaagagtgaggtgaaag

SEQ ID NO: 885333 - DNA, 25 bp, Homo sapien
gccatgctagtctggtaagcagtac

SEQ ID NO: 885334 - DNA, 25 bp, Homo sapien
tgaggtgaaagccatgctagtctgg

SEQ ID NO: 885335 - DNA, 25 bp, Homo sapien
gcattggtcaaccagaccatttcct

SEQ ID NO: 885336 - DNA, 25 bp, Homo sapien
ggcttgcattggtcaaccagaccat

SEQ ID NO: 885337 - DNA, 25 bp, Homo sapien
ttgcattggtcaaccagaccatttc

SEQ ID NO: 885338 - DNA, 25 bp, Homo sapien
ccttctttctcatccacgtccctca

SEQ ID NO: 885339 - DNA, 25 bp, Homo sapien
ctgaggtctttctatgaccctctgg

SEQ ID NO: 885340 - DNA, 25 bp, Homo sapien
catgtctgtgcttggggctcacctc

SEQ ID NO: 885341 - DNA, 25 bp, Homo sapien
taatatggagagtttgtcccagaat

SEQ ID NO: 885342 - DNA, 25 bp, Homo sapien
ggtctttctatgaccctctgggttg

SEQ ID NO: 885343 - DNA, 25 bp, Homo sapien
cacttatgacattgactgggccctg

SEQ ID NO: 885344 - DNA, 25 bp, Homo sapien
tgctgctgggaccatcgtgataccg

SEQ ID NO: 885345 - DNA, 25 bp, Homo sapien
gttgaccatgccagatctagcttgc

SEQ ID NO: 885346 - DNA, 25 bp, Homo sapien
ccctgagaataaatgcctgagaatg

SEQ ID NO: 885347 - DNA, 25 bp, Homo sapien
catttaggctccaacacctgctgtt

SEQ ID NO: 885348 - DNA, 25 bp, Homo sapien
ctgttcatgttcctcctcaatggag

SEQ ID NO: 885349 - DNA, 25 bp, Homo sapien
gacgctccagatgcttgccttgctt

SEQ ID NO: 885350 - DNA, 25 bp, Homo sapien
gaggagccccgttcatcccatttag

SEQ ID NO: 885351 - DNA, 25 bp, Homo sapien
atgtcaacagtaatcgttgtatttt

SEQ ID NO: 885352 - DNA, 25 bp, Homo sapien
aatgtcaacagtaatcgttgtattt

SEQ ID NO: 885353 - DNA, 25 bp, Homo sapien
cattcccttgactgttaagcccaaa

SEQ ID NO: 885354 - DNA, 25 bp, Homo sapien
caattgattctatgcagaatgcagc

SEQ ID NO: 885355 - DNA, 25 bp, Homo sapien
gaagtatgtccctaatgcagcaaac

SEQ ID NO: 885356 - DNA, 25 bp, Homo sapien
tgaagacatcataaagtcacgatcc

SEQ ID NO: 885357 - DNA, 25 bp, Homo sapien
gtttaaatcctggtggcttcatgag

SEQ ID NO: 885358 - DNA, 25 bp, Homo sapien
ttcccaagttgttgttagacacagc

SEQ ID NO: 885359 - DNA, 25 bp, Homo sapien
gcatgcgtttctggtgtttaaatcc

SEQ ID NO: 885360 - DNA, 25 bp, Homo sapien
tagacacagcaccacccttttgtgg

SEQ ID NO: 885361 - DNA, 25 bp, Homo sapien
cagattggaaagcatgaaccagggt

SEQ ID NO: 885362 - DNA, 25 bp, Homo sapien
gagcagtgctcaagagccagattgg

SEQ ID NO: 885363 - DNA, 25 bp, Homo sapien
ctggagcagtgctcaagagccagat

SEQ ID NO: 885364 - DNA, 25 bp, Homo sapien
cagggttatgcaatgacgtgcctgg

SEQ ID NO: 885365 - DNA, 25 bp, Homo sapien
ccatatttgcatggtaggtcacaca

SEQ ID NO: 885366 - DNA, 25 bp, Homo sapien
cactgtatagctttttccaatccag

SEQ ID NO: 885367 - DNA, 25 bp, Homo sapien
tatttgcatggtaggtcacacactg

SEQ ID NO: 885368 - DNA, 25 bp, Homo sapien
taggtcacacactgtatagcttttt

SEQ ID NO: 885369 - DNA, 25 bp, Homo sapien
gatttttctgtgtgaggcgctagct

SEQ ID NO: 885370 - DNA, 25 bp, Homo sapien
catgaagggagtgcggtgctgacac

SEQ ID NO: 885371 - DNA, 25 bp, Homo sapien
tgctaacatgaagggagtgcggtgc

SEQ ID NO: 885372 - DNA, 25 bp, Homo sapien
gtcacgctttgaaaggtcacagatt

SEQ ID NO: 885373 - DNA, 25 bp, Homo sapien
ggcatgtattatgggcaggacatga

SEQ ID NO: 885374 - DNA, 25 bp, Homo sapien
gggtagaacgttctcatctaataca

SEQ ID NO: 885375 - DNA, 25 bp, Homo sapien
tcaagaaattgaggtaggcatgtat

SEQ ID NO: 885376 - DNA, 25 bp, Homo sapien
cttgggaggagagtcatgtatttgg

SEQ ID NO: 885377 - DNA, 25 bp, Homo sapien
atcaccaagcagagtgacagctgag

SEQ ID NO: 885378 - DNA, 25 bp, Homo sapien
ggtttgcatttagagcacccgagct

SEQ ID NO: 885379 - DNA, 25 bp, Homo sapien
tgggacacaggggtttaggagcttc

SEQ ID NO: 885380 - DNA, 25 bp, Homo sapien
caccaagcagagtgacagctgaggg

SEQ ID NO: 885381 - DNA, 25 bp, Homo sapien
cctgccacgtggacagttatttatg

SEQ ID NO: 885382 - DNA, 25 bp, Homo sapien
ggaacagaacatacatcagcaagca

SEQ ID NO: 885383 - DNA, 25 bp, Homo sapien
cagatgccaaagaagccgtgaggtg

SEQ ID NO: 885384 - DNA, 25 bp, Homo sapien
tgtggaagtgagaccaaatcctgcc

SEQ ID NO: 885385 - DNA, 25 bp, Homo sapien
taattcttggattacccctgagaag

SEQ ID NO: 885386 - DNA, 25 bp, Homo sapien
ggatcacacacagccttaagagtgg

SEQ ID NO: 885387 - DNA, 25 bp, Homo sapien
tcccaggattacaccgtggatcaca

SEQ ID NO: 885388 - DNA, 25 bp, Homo sapien
tggacccaggtaactcattgccctt

SEQ ID NO: 885389 - DNA, 25 bp, Homo sapien
agatggggtattttgaggatgttgt

SEQ ID NO: 885390 - DNA, 25 bp, Homo sapien
gaagatggggtattttgaggatgtt

SEQ ID NO: 885391 - DNA, 25 bp, Homo sapien
ttggattttgactccacccttccat

SEQ ID NO: 885392 - DNA, 25 bp, Homo sapien
tgttggattttgactccacccttcc

SEQ ID NO: 885393 - DNA, 25 bp, Homo sapien
ggtcagacgtgcttcattctactcg

SEQ ID NO: 885394 - DNA, 25 bp, Homo sapien
ccttctcagacaacgggattccaaa

SEQ ID NO: 885395 - DNA, 25 bp, Homo sapien
taagccgccattaaggttatgaacg

SEQ ID NO: 885396 - DNA, 25 bp, Homo sapien
taagggtcagagagtttaagccgcc

SEQ ID NO: 885397 - DNA, 25 bp, Homo sapien
catggagacaaaagagattcttcaa

SEQ ID NO: 885398 - DNA, 25 bp, Homo sapien
ctcctggagctatttcatggagaca

SEQ ID NO: 885399 - DNA, 25 bp, Homo sapien
ctgtctcctggagctatttcatgga

SEQ ID NO: 885400 - DNA, 25 bp, Homo sapien
agtggctatggggagtgaactattt

SEQ ID NO: 885401 - DNA, 25 bp, Homo sapien
tgaactgtcatgtctcagagatgtg

SEQ ID NO: 885402 - DNA, 25 bp, Homo sapien
gcgctagagtagatggaatgctgca

SEQ ID NO: 885403 - DNA, 25 bp, Homo sapien
gatgagctggccctctattaatggc

SEQ ID NO: 885404 - DNA, 25 bp, Homo sapien
aatggcctttgggactgaactgtca

SEQ ID NO: 885405 - DNA, 25 bp, Homo sapien
tgaaatccgccttcataccttttcc

SEQ ID NO: 885406 - DNA, 25 bp, Homo sapien
agtgaaatccgccttcatacctttt

SEQ ID NO: 885407 - DNA, 25 bp, Homo sapien
caacagtgaaatccgccttcatacc

SEQ ID NO: 885408 - DNA, 25 bp, Homo sapien
gtcaacagtgaaatccgccttcata

SEQ ID NO: 885409 - DNA, 25 bp, Homo sapien
taggcaacctttctgtctccccttg

SEQ ID NO: 885410 - DNA, 25 bp, Homo sapien
gaccaccctctaggcaacctttctg

SEQ ID NO: 885411 - DNA, 25 bp, Homo sapien
caccctctaggcaacctttctgtct

SEQ ID NO: 885412 - DNA, 25 bp, Homo sapien
cctctaggcaacctttctgtctccc

SEQ ID NO: 885413 - DNA, 25 bp, Homo sapien
gctgccattgctttgcacagtctgg

SEQ ID NO: 885414 - DNA, 25 bp, Homo sapien
ctgccattgctttgcacagtctggg

SEQ ID NO: 885415 - DNA, 25 bp, Homo sapien
agctgccattgctttgcacagtctg

SEQ ID NO: 885416 - DNA, 25 bp, Homo sapien
tccctcatgtgagccaggaaagcta

SEQ ID NO: 885417 - DNA, 25 bp, Homo sapien
ttggccagggcaccgtagtttctgc

SEQ ID NO: 885418 - DNA, 25 bp, Homo sapien
agggcaccgtagtttctgcctccct

SEQ ID NO: 885419 - DNA, 25 bp, Homo sapien
ctatctcggtaggacattacttccc

SEQ ID NO: 885420 - DNA, 25 bp, Homo sapien
caggcctcgtgatactgaagagcaa

SEQ ID NO: 885421 - DNA, 25 bp, Homo sapien
ctcgtgatactgaagagcaaacaaa

SEQ ID NO: 885422 - DNA, 25 bp, Homo sapien
cacaggcctcgtgatactgaagagc

SEQ ID NO: 885423 - DNA, 25 bp, Homo sapien
ttagcacaggcctcgtgatactgaa

SEQ ID NO: 885424 - DNA, 25 bp, Homo sapien
acctggtgcccgacctctgctaggg

SEQ ID NO: 885425 - DNA, 25 bp, Homo sapien
tgtcataaccatagggtagtttacc

SEQ ID NO: 885426 - DNA, 25 bp, Homo sapien
ccctgcacactctgtatgactgtca

SEQ ID NO: 885427 - DNA, 25 bp, Homo sapien
gcctgcactcttggaagttctcttg

SEQ ID NO: 885428 - DNA, 25 bp, Homo sapien
ctgcacaaggttgtagcaggaattt

SEQ ID NO: 885429 - DNA, 25 bp, Homo sapien
tccatgaagcttaaaggcagaaatc

SEQ ID NO: 885430 - DNA, 25 bp, Homo sapien
tatccatgaagcttaaaggcagaaa

SEQ ID NO: 885431 - DNA, 25 bp, Homo sapien
attatccatgaagcttaaaggcaga

SEQ ID NO: 885432 - DNA, 25 bp, Homo sapien
catgaagcttaaaggcagaaatccc

SEQ ID NO: 885433 - DNA, 25 bp, Homo sapien
tgaactacattgagcaggtatcgcc

SEQ ID NO: 885434 - DNA, 25 bp, Homo sapien
gcaggtatcgccttgcagacaaaga

SEQ ID NO: 885435 - DNA, 25 bp, Homo sapien
gaaacttatacaagcccgaaggcac

SEQ ID NO: 885436 - DNA, 25 bp, Homo sapien
tcaaatttcttaagtccctgctatg

SEQ ID NO: 885437 - DNA, 25 bp, Homo sapien
tccacatggtgttgactgaggtcag

SEQ ID NO: 885438 - DNA, 25 bp, Homo sapien
ctcttaaagtctaggcccagaagcc

SEQ ID NO: 885439 - DNA, 25 bp, Homo sapien
tgctagtgcttcagctaggatggct

SEQ ID NO: 885440 - DNA, 25 bp, Homo sapien
tctctatgtggtaggctggatccca

SEQ ID NO: 885441 - DNA, 25 bp, Homo sapien
ggagatcagtgttcctaggcatttg

SEQ ID NO: 885442 - DNA, 25 bp, Homo sapien
taacctcagagggacactcaaagca

SEQ ID NO: 885443 - DNA, 25 bp, Homo sapien
tgaggcaggaactttaacctcagag

SEQ ID NO: 885444 - DNA, 25 bp, Homo sapien
ggcatttgagagcatcttactccaa

SEQ ID NO: 885445 - DNA, 25 bp, Homo sapien
gcttcatcatttccccagtctttgg

SEQ ID NO: 885446 - DNA, 25 bp, Homo sapien
ctattgcttcatcatttccccagtc

SEQ ID NO: 885447 - DNA, 25 bp, Homo sapien
tgcttcatcatttccccagtctttg

SEQ ID NO: 885448 - DNA, 25 bp, Homo sapien
attgcttcatcatttccccagtctt

SEQ ID NO: 885449 - DNA, 25 bp, Homo sapien
tttgtcaggcatgaagttggtgatt

SEQ ID NO: 885450 - DNA, 25 bp, Homo sapien
agcaacagagaaaccgttgtcccat

SEQ ID NO: 885451 - DNA, 25 bp, Homo sapien
tgtcaggcatgaagttggtgattaa

SEQ ID NO: 885452 - DNA, 25 bp, Homo sapien
gagaaaccgttgtcccatcttgcag

SEQ ID NO: 885453 - DNA, 25 bp, Homo sapien
gccaattaacatccttggaaactgc

SEQ ID NO: 885454 - DNA, 25 bp, Homo sapien
ggccaattaacatccttggaaactg

SEQ ID NO: 885455 - DNA, 25 bp, Homo sapien
cggccaattaacatccttggaaact

SEQ ID NO: 885456 - DNA, 25 bp, Homo sapien
tcatcccaatccaaaagctttcagg

SEQ ID NO: 885457 - DNA, 25 bp, Homo sapien
gggcctatgtcagctccagctactc

SEQ ID NO: 885458 - DNA, 25 bp, Homo sapien
gcaggaccacggtaatatccaaagg

SEQ ID NO: 885459 - DNA, 25 bp, Homo sapien
gtatcatttgggatcaacttgcctg

SEQ ID NO: 885460 - DNA, 25 bp, Homo sapien
ttcagcccagtaggagttccatcat

SEQ ID NO: 885461 - DNA, 25 bp, Homo sapien
tgccacccatgaatgaattttacat

SEQ ID NO: 885462 - DNA, 25 bp, Homo sapien
ccagtaggagttccatcatttcttc

SEQ ID NO: 885463 - DNA, 25 bp, Homo sapien
ttgccacccatgaatgaattttaca

SEQ ID NO: 885464 - DNA, 25 bp, Homo sapien
acaaactttaaggaaggcatatctc

SEQ ID NO: 885465 - DNA, 25 bp, Homo sapien
gactattgatcagtttccatggtgc

SEQ ID NO: 885466 - DNA, 25 bp, Homo sapien
ctcgtatattgatctctatgtctga

SEQ ID NO: 885467 - DNA, 25 bp, Homo sapien
tatgtctgacttctgactattgatc

SEQ ID NO: 885468 - DNA, 25 bp, Homo sapien
cgtatattgatctctatgtctgact

SEQ ID NO: 885469 - DNA, 25 bp, Homo sapien
tcaacatcgtggaatgctgctcagc

SEQ ID NO: 885470 - DNA, 25 bp, Homo sapien
cttactacataataaagctggcagg

SEQ ID NO: 885471 - DNA, 25 bp, Homo sapien
tgatgtttgcccaagacgcctgtca

SEQ ID NO: 885472 - DNA, 25 bp, Homo sapien
tcttcggctcctttgatacatacag

SEQ ID NO: 885473 - DNA, 25 bp, Homo sapien
gaatgacactttagctgcatacagt

SEQ ID NO: 885474 - DNA, 25 bp, Homo sapien
ccagcctccactgttgatcttgaga

SEQ ID NO: 885475 - DNA, 25 bp, Homo sapien
tccttcagtagttcttcaagacagg

SEQ ID NO: 885476 - DNA, 25 bp, Homo sapien
cacttcatatctctgctagcttgga

SEQ ID NO: 885477 - DNA, 25 bp, Homo sapien
gtggtccagccagcactctgagctg

SEQ ID NO: 885478 - DNA, 25 bp, Homo sapien
gctagagggacactgtgcccttcaa

SEQ ID NO: 885479 - DNA, 25 bp, Homo sapien
tcaatcctctgctagagggacactg

SEQ ID NO: 885480 - DNA, 25 bp, Homo sapien
ttcaactgagcacacgtggtccagc

SEQ ID NO: 885481 - DNA, 25 bp, Homo sapien
cactgagctaaccccaaagagcagc

SEQ ID NO: 885482 - DNA, 25 bp, Homo sapien
tgttctgggcagtaatcaccttccc

SEQ ID NO: 885483 - DNA, 25 bp, Homo sapien
cacctgttgcctctataccatatcg

SEQ ID NO: 885484 - DNA, 25 bp, Homo sapien
tctgtctggtaaaagggcctctact

SEQ ID NO: 885485 - DNA, 25 bp, Homo sapien
cagtggctggtggtgtgaggcccat

SEQ ID NO: 885486 - DNA, 25 bp, Homo sapien
tcctgggaccccagtggctggtggt

SEQ ID NO: 885487 - DNA, 25 bp, Homo sapien
ggaccccagtggctggtggtgtgag

SEQ ID NO: 885488 - DNA, 25 bp, Homo sapien
gtgtttcaggagagcctcctgggac

SEQ ID NO: 885489 - DNA, 25 bp, Homo sapien
atgacatgcatacagccatgtcata

SEQ ID NO: 885490 - DNA, 25 bp, Homo sapien
tgacatgcatacagccatgtcatag

SEQ ID NO: 885491 - DNA, 25 bp, Homo sapien
gacatgcatacagccatgtcataga

SEQ ID NO: 885492 - DNA, 25 bp, Homo sapien
tttcagagacgctgcatgtgggtga

SEQ ID NO: 885493 - DNA, 25 bp, Homo sapien
ctttcagagacgctgcatgtgggtg

SEQ ID NO: 885494 - DNA, 25 bp, Homo sapien
cctactttcagagacgctgcatgtg

SEQ ID NO: 885495 - DNA, 25 bp, Homo sapien
gttgagaacctaatgatctgatttt

SEQ ID NO: 885496 - DNA, 25 bp, Homo sapien
cacgagagtggaaagttgagaacct

SEQ ID NO: 885497 - DNA, 25 bp, Homo sapien
aagagatgtgggcaactgtagcagc

SEQ ID NO: 885498 - DNA, 25 bp, Homo sapien
gagatgtgggcaactgtagcagcca

SEQ ID NO: 885499 - DNA, 25 bp, Homo sapien
ctgtagaataggaagatcctcacct

SEQ ID NO: 885500 - DNA, 25 bp, Homo sapien
aataggaagatcctcacctaaccct

SEQ ID NO: 885501 - DNA, 25 bp, Homo sapien
tagaataggaagatcctcacctaac

SEQ ID NO: 885502 - DNA, 25 bp, Homo sapien
ggaagatcctcacctaaccctttca

SEQ ID NO: 885503 - DNA, 25 bp, Homo sapien
tgtctattctctacaaatctaaact

SEQ ID NO: 885504 - DNA, 25 bp, Homo sapien
tcagaggattctgggccttttcatt

SEQ ID NO: 885505 - DNA, 25 bp, Homo sapien
ctattctctacaaatctaaactctc

SEQ ID NO: 885506 - DNA, 25 bp, Homo sapien
ttggcttctgtaatcagaggattct

SEQ ID NO: 885507 - DNA, 25 bp, Homo sapien
gcaaaacccgataactttctgttca

SEQ ID NO: 885508 - DNA, 25 bp, Homo sapien
tttctgttcactgttgagcaacaag

SEQ ID NO: 885509 - DNA, 25 bp, Homo sapien
aagcaaagaatatgcttcttttctc

SEQ ID NO: 885510 - DNA, 25 bp, Homo sapien
acaagctggaatccatcacgcaaaa

SEQ ID NO: 885511 - DNA, 25 bp, Homo sapien
gattttcctgacagcgccaaatgga

SEQ ID NO: 885512 - DNA, 25 bp, Homo sapien
tgcgcagaccaaataggagaagttc

SEQ ID NO: 885513 - DNA, 25 bp, Homo sapien
caggtaagccaatttaacacaacca

SEQ ID NO: 885514 - DNA, 25 bp, Homo sapien
caaccaatttccacttttgcgcaga

SEQ ID NO: 885515 - DNA, 25 bp, Homo sapien
tacagaaaatttgtaaagatagttc

SEQ ID NO: 885516 - DNA, 25 bp, Homo sapien
tttgggagcaattttacagttacag

SEQ ID NO: 885517 - DNA, 25 bp, Homo sapien
atttgtaaagatagttcacagttct

SEQ ID NO: 885518 - DNA, 25 bp, Homo sapien
gctgaaactatcagcgagttttaag

SEQ ID NO: 885519 - DNA, 25 bp, Homo sapien
ggcactcataaactgtctgtgacct

SEQ ID NO: 885520 - DNA, 25 bp, Homo sapien
ctcataaactgtctgtgaccttcct

SEQ ID NO: 885521 - DNA, 25 bp, Homo sapien
gccctgtagacctcagatgctatct

SEQ ID NO: 885522 - DNA, 25 bp, Homo sapien
cacaggcagccctgtagacctcaga

SEQ ID NO: 885523 - DNA, 25 bp, Homo sapien
tggggatgaatagtgcataatctaa

SEQ ID NO: 885524 - DNA, 25 bp, Homo sapien
caaaatggatttgccagcttttggt

SEQ ID NO: 885525 - DNA, 25 bp, Homo sapien
ctttggggatgaatagtgcataatc

SEQ ID NO: 885526 - DNA, 25 bp, Homo sapien
ttcatctttggggatgaatagtgca

SEQ ID NO: 885527 - DNA, 25 bp, Homo sapien
taggtgggctgtggttctatgtcca

SEQ ID NO: 885528 - DNA, 25 bp, Homo sapien
gcagagaacatagaaccccttcact

SEQ ID NO: 885529 - DNA, 25 bp, Homo sapien
tgacctccccatactgtctaggaag

SEQ ID NO: 885530 - DNA, 25 bp, Homo sapien
caattggcagtttctcaagcacctc

SEQ ID NO: 885531 - DNA, 25 bp, Homo sapien
tcactaagcctctggtgacagagcc

SEQ ID NO: 885532 - DNA, 25 bp, Homo sapien
gacagagccttgatcgttttagcac

SEQ ID NO: 885533 - DNA, 25 bp, Homo sapien
ttgtagtcagagcttagctgcccag

SEQ ID NO: 885534 - DNA, 25 bp, Homo sapien
tttagcacctggacaaagtgatcac

SEQ ID NO: 885535 - DNA, 25 bp, Homo sapien
ctgtcatgcacaatagagccagtgc

SEQ ID NO: 885536 - DNA, 25 bp, Homo sapien
gcagcctgagacaggcttggccaca

SEQ ID NO: 885537 - DNA, 25 bp, Homo sapien
catgcacaatagagccagtgctgca

SEQ ID NO: 885538 - DNA, 25 bp, Homo sapien
ggcttggccacaggaggccactgcc

SEQ ID NO: 885539 - DNA, 25 bp, Homo sapien
ttctgtagcagcaacatagtaaagc

SEQ ID NO: 885540 - DNA, 25 bp, Homo sapien
tttctgtagcagcaacatagtaaag

SEQ ID NO: 885541 - DNA, 25 bp, Homo sapien
ttttcacctaagagaacctgtctcg

SEQ ID NO: 885542 - DNA, 25 bp, Homo sapien
tcagcaatgggatttgcatcttgta

SEQ ID NO: 885543 - DNA, 25 bp, Homo sapien
tcacctaagagaacctgtctcgcac

SEQ ID NO: 885544 - DNA, 25 bp, Homo sapien
aatgggatttgcatcttgtaaattc

SEQ ID NO: 885545 - DNA, 25 bp, Homo sapien
taggccagaccgaaccaaattctct

SEQ ID NO: 885546 - DNA, 25 bp, Homo sapien
cccctcaatgcacagagaagcattc

SEQ ID NO: 885547 - DNA, 25 bp, Homo sapien
attccataggccagaccgaaccaaa

SEQ ID NO: 885548 - DNA, 25 bp, Homo sapien
cacagagaagcattccataggccag

SEQ ID NO: 885549 - DNA, 25 bp, Homo sapien
tctcaactcccttgctttctcacct

SEQ ID NO: 885550 - DNA, 25 bp, Homo sapien
aactcccttgctttctcacctctac

SEQ ID NO: 885551 - DNA, 25 bp, Homo sapien
ctttctgacattctctcaactccct

SEQ ID NO: 885552 - DNA, 25 bp, Homo sapien
cccttgctttctcacctctacccat

SEQ ID NO: 885553 - DNA, 25 bp, Homo sapien
tgctgggacccctagatttttacga

SEQ ID NO: 885554 - DNA, 25 bp, Homo sapien
gatattctcacatcatgcttcccaa

SEQ ID NO: 885555 - DNA, 25 bp, Homo sapien
tcatgagccaggtatttaatatttt

SEQ ID NO: 885556 - DNA, 25 bp, Homo sapien
ttcagcccagatgtatcccttgaac

SEQ ID NO: 885557 - DNA, 25 bp, Homo sapien
gacctatacaagttgaccctgatat

SEQ ID NO: 885558 - DNA, 25 bp, Homo sapien
gcttttcctgagctcctctgtgtcc

SEQ ID NO: 885559 - DNA, 25 bp, Homo sapien
cctcacaggctctcaagaacctttg

SEQ ID NO: 885560 - DNA, 25 bp, Homo sapien
ttcattggtccatgtgattggcagc

SEQ ID NO: 885561 - DNA, 25 bp, Homo sapien
gggtttccctcgaatctttgatcat

SEQ ID NO: 885562 - DNA, 25 bp, Homo sapien
ctgtttgggggccacattcccaggg

SEQ ID NO: 885563 - DNA, 25 bp, Homo sapien
tgtttgggggccacattcccaggga

SEQ ID NO: 885564 - DNA, 25 bp, Homo sapien
gccacattcccagggagggtgggga

SEQ ID NO: 885565 - DNA, 25 bp, Homo sapien
tgagcacaggacttctcctaaaagc

SEQ ID NO: 885566 - DNA, 25 bp, Homo sapien
ttgttctgttggtgagtgagacctc

SEQ ID NO: 885567 - DNA, 25 bp, Homo sapien
tggttgcagacatttgccccagtca

SEQ ID NO: 885568 - DNA, 25 bp, Homo sapien
tagtctctgaactgatgaccacagg

SEQ ID NO: 885569 - DNA, 25 bp, Homo sapien
cggagaacacactagttctgtttat

SEQ ID NO: 885570 - DNA, 25 bp, Homo sapien
cctccggagaacacactagttctgt

SEQ ID NO: 885571 - DNA, 25 bp, Homo sapien
catctggcacttctcaaggccaggt

SEQ ID NO: 885572 - DNA, 25 bp, Homo sapien
ccaggtgaaggggataatgggatcc

SEQ ID NO: 885573 - DNA, 25 bp, Homo sapien
gagtgaccagccaagtatagtggca

SEQ ID NO: 885574 - DNA, 25 bp, Homo sapien
tgtcaggggcattaggcacagatgc

SEQ ID NO: 885575 - DNA, 25 bp, Homo sapien
aaagcaatggcacattcactgtggc

SEQ ID NO: 885576 - DNA, 25 bp, Homo sapien
cattcctgaaggtcgctgtgtgacc

SEQ ID NO: 885577 - DNA, 25 bp, Homo sapien
gggaagaagagtagtgaggttcagc

SEQ ID NO: 885578 - DNA, 25 bp, Homo sapien
aagagtagtgaggttcagcagcatc

SEQ ID NO: 885579 - DNA, 25 bp, Homo sapien
gaagaagagtagtgaggttcagcag

SEQ ID NO: 885580 - DNA, 25 bp, Homo sapien
tgaggttcagcagcatcacatggtc

SEQ ID NO: 885581 - DNA, 25 bp, Homo sapien
agcgcaatagtacacatgaggaaca

SEQ ID NO: 885582 - DNA, 25 bp, Homo sapien
gcgcaatagtacacatgaggaacac

SEQ ID NO: 885583 - DNA, 25 bp, Homo sapien
cagcgcaatagtacacatgaggaac

SEQ ID NO: 885584 - DNA, 25 bp, Homo sapien
ttctgggaacacccagttgttgtca

SEQ ID NO: 885585 - DNA, 25 bp, Homo sapien
gggaacacccagttgttgtcaggtg

SEQ ID NO: 885586 - DNA, 25 bp, Homo sapien
ctgggaacacccagttgttgtcagg

SEQ ID NO: 885587 - DNA, 25 bp, Homo sapien
cagttgttgtcaggtggactggaga

SEQ ID NO: 885588 - DNA, 25 bp, Homo sapien
gcactgggccagcaaaaggtcggtc

SEQ ID NO: 885589 - DNA, 25 bp, Homo sapien
ctgggccagcaaaaggtcggtctga

SEQ ID NO: 885590 - DNA, 25 bp, Homo sapien
gccagcaaaaggtcggtctgagtgt

SEQ ID NO: 885591 - DNA, 25 bp, Homo sapien
aaaggtcggtctgagtgtgtactgg

SEQ ID NO: 885592 - DNA, 25 bp, Homo sapien
ctccaggggtgactgaggcctggag

SEQ ID NO: 885593 - DNA, 25 bp, Homo sapien
caggggtgactgaggcctggagaca

SEQ ID NO: 885594 - DNA, 25 bp, Homo sapien
ttatcctccaggggtgactgaggcc

SEQ ID NO: 885595 - DNA, 25 bp, Homo sapien
tatcctccaggggtgactgaggcct

SEQ ID NO: 885596 - DNA, 25 bp, Homo sapien
tatcttctccaacacgctccatctt

SEQ ID NO: 885597 - DNA, 25 bp, Homo sapien
attaattcaactctccgtagccctg

SEQ ID NO: 885598 - DNA, 25 bp, Homo sapien
tgcattccccgtctggaattgttgg

SEQ ID NO: 885599 - DNA, 25 bp, Homo sapien
aattgttgggtcagtcattaattca

SEQ ID NO: 885600 - DNA, 25 bp, Homo sapien
tcttctccaacaaactcaatcttct

SEQ ID NO: 885601 - DNA, 25 bp, Homo sapien
taagtgctggcaaggtataacagaa

SEQ ID NO: 885602 - DNA, 25 bp, Homo sapien
ccattttgaattattgagtcaatca

SEQ ID NO: 885603 - DNA, 25 bp, Homo sapien
taattatcttctccaacaaactcaa

SEQ ID NO: 885604 - DNA, 25 bp, Homo sapien
tcacctgtcgaaggacaactgggtt

SEQ ID NO: 885605 - DNA, 25 bp, Homo sapien
tccactttgttgtatatgtcagtag

SEQ ID NO: 885606 - DNA, 25 bp, Homo sapien
catgtataggttttgcatgcattat

SEQ ID NO: 885607 - DNA, 25 bp, Homo sapien
tgcacaggagtacaattgatgggtc

SEQ ID NO: 885608 - DNA, 25 bp, Homo sapien
tattcgataatcagtagcagtgatc

SEQ ID NO: 885609 - DNA, 25 bp, Homo sapien
aatcaggctttcattacaattggtg

SEQ ID NO: 885610 - DNA, 25 bp, Homo sapien
caaaggacatcactctaacaagtgt

SEQ ID NO: 885611 - DNA, 25 bp, Homo sapien
caatgctgctaaacccaatgatcaa

SEQ ID NO: 885612 - DNA, 25 bp, Homo sapien
gaatcccttcaaaccgcagtctgaa

SEQ ID NO: 885613 - DNA, 25 bp, Homo sapien
tggcagaaactgtcagaatcccttc

SEQ ID NO: 885614 - DNA, 25 bp, Homo sapien
gaactaattccacacagggacttag

SEQ ID NO: 885615 - DNA, 25 bp, Homo sapien
cgcagtctgaacttcatacaagggc

SEQ ID NO: 885616 - DNA, 25 bp, Homo sapien
tcctccgtaaaaccaccactatgga

SEQ ID NO: 885617 - DNA, 25 bp, Homo sapien
ctccgtaaaaccaccactatggact

SEQ ID NO: 885618 - DNA, 25 bp, Homo sapien
acttaacatgcggtagagccaacat

SEQ ID NO: 885619 - DNA, 25 bp, Homo sapien
tccatggcattcagattcagcactg

SEQ ID NO: 885620 - DNA, 25 bp, Homo sapien
gagctgatctgaatcaactccatgg

SEQ ID NO: 885621 - DNA, 25 bp, Homo sapien
cactgatagacttaacatgcggtag

SEQ ID NO: 885622 - DNA, 25 bp, Homo sapien
agaattcccgttcaacagcctgccg

SEQ ID NO: 885623 - DNA, 25 bp, Homo sapien
tgaagaattcccgttcaacagcctg

SEQ ID NO: 885624 - DNA, 25 bp, Homo sapien
cagcatgataagctccaaattgctt

SEQ ID NO: 885625 - DNA, 25 bp, Homo sapien
ctagatgaagaattcccgttcaaca

SEQ ID NO: 885626 - DNA, 25 bp, Homo sapien
tggactggaccctctggtgacagct

SEQ ID NO: 885627 - DNA, 25 bp, Homo sapien
tcaagctggactggaccctctggtg

SEQ ID NO: 885628 - DNA, 25 bp, Homo sapien
aagctggactggaccctctggtgac

SEQ ID NO: 885629 - DNA, 25 bp, Homo sapien
gctggactggaccctctggtgacag

SEQ ID NO: 885630 - DNA, 25 bp, Homo sapien
gaataatacagctgaggagtggctg

SEQ ID NO: 885631 - DNA, 25 bp, Homo sapien
gactgtggcatcacctctaggaagg

SEQ ID NO: 885632 - DNA, 25 bp, Homo sapien
cattcctcatggctttatgcttata

SEQ ID NO: 885633 - DNA, 25 bp, Homo sapien
cagccgggatcgtgagaactgaaca

SEQ ID NO: 885634 - DNA, 25 bp, Homo sapien
gcatgtctgaaagcccctgcaatct

SEQ ID NO: 885635 - DNA, 25 bp, Homo sapien
gtctgaaagcccctgcaatctcgtc

SEQ ID NO: 885636 - DNA, 25 bp, Homo sapien
aaagcccctgcaatctcgtctgtca

SEQ ID NO: 885637 - DNA, 25 bp, Homo sapien
tgaaagcccctgcaatctcgtctgt

SEQ ID NO: 885638 - DNA, 25 bp, Homo sapien
catgcctagagtgatactggactgg

SEQ ID NO: 885639 - DNA, 25 bp, Homo sapien
tagagtgatactggactggaaacgg

SEQ ID NO: 885640 - DNA, 25 bp, Homo sapien
ctggactggaaacggctgaaggcct

SEQ ID NO: 885641 - DNA, 25 bp, Homo sapien
aattccatgcctagagtgatactgg

SEQ ID NO: 885642 - DNA, 25 bp, Homo sapien
gagacctttagctgaggtctgttgg

SEQ ID NO: 885643 - DNA, 25 bp, Homo sapien
tgtcggagatagcttgactcatagc

SEQ ID NO: 885644 - DNA, 25 bp, Homo sapien
ggtctgttggggaacactagccact

SEQ ID NO: 885645 - DNA, 25 bp, Homo sapien
cctacagagacgcatgaagctaccc

SEQ ID NO: 885646 - DNA, 25 bp, Homo sapien
tataacttcggtttcatagcttaga

SEQ ID NO: 885647 - DNA, 25 bp, Homo sapien
aacatcaccaaatgtgttggacaca

SEQ ID NO: 885648 - DNA, 25 bp, Homo sapien
gaattgtatgtagacacatttatca

SEQ ID NO: 885649 - DNA, 25 bp, Homo sapien
catagcttagaaattcctctactac

SEQ ID NO: 885650 - DNA, 25 bp, Homo sapien
cattgcgcataggacaaagccactc

SEQ ID NO: 885651 - DNA, 25 bp, Homo sapien
gacaaagccactccacaaggtgctc

SEQ ID NO: 885652 - DNA, 25 bp, Homo sapien
ccacaaggtgctccctccactcact

SEQ ID NO: 885653 - DNA, 25 bp, Homo sapien
tccactcactgtctttcatctgcat

SEQ ID NO: 885654 - DNA, 25 bp, Homo sapien
tccaaacagggaagctttgactgtc

SEQ ID NO: 885655 - DNA, 25 bp, Homo sapien
ggtcccgtaggcagtaaggagacag

SEQ ID NO: 885656 - DNA, 25 bp, Homo sapien
tgtaaatggggtcccgtaggcagta

SEQ ID NO: 885657 - DNA, 25 bp, Homo sapien
cattgtgaatgaccttgtaaatggg

SEQ ID NO: 885658 - DNA, 25 bp, Homo sapien
gtgtccagggagtgtctggcaaagc

SEQ ID NO: 885659 - DNA, 25 bp, Homo sapien
tgtccagggagtgtctggcaaagcc

SEQ ID NO: 885660 - DNA, 25 bp, Homo sapien
tgtgtccagggagtgtctggcaaag

SEQ ID NO: 885661 - DNA, 25 bp, Homo sapien
tgaaggacacagtcagcgccgtaga

SEQ ID NO: 885662 - DNA, 25 bp, Homo sapien
tccatgcatttcctcgggtgtgaat

SEQ ID NO: 885663 - DNA, 25 bp, Homo sapien
cgggagcctcggtgctatgaaaaga

SEQ ID NO: 885664 - DNA, 25 bp, Homo sapien
cacactgcccggtcgggcctttggg

SEQ ID NO: 885665 - DNA, 25 bp, Homo sapien
gccaaatacacatcagatccagtgg

SEQ ID NO: 885666 - DNA, 25 bp, Homo sapien
aaatacacatcagatccagtggagt

SEQ ID NO: 885667 - DNA, 25 bp, Homo sapien
ccaaatacacatcagatccagtgga

SEQ ID NO: 885668 - DNA, 25 bp, Homo sapien
caaatacacatcagatccagtggag

SEQ ID NO: 885669 - DNA, 25 bp, Homo sapien
ctgacagacagctgcgacttcggcc

SEQ ID NO: 885670 - DNA, 25 bp, Homo sapien
agacagctgcgacttcggcccagga

SEQ ID NO: 885671 - DNA, 25 bp, Homo sapien
cagctgcgacttcggcccaggagac

SEQ ID NO: 885672 - DNA, 25 bp, Homo sapien
gtccgaccagccctctctcgcgggc

SEQ ID NO: 885673 - DNA, 25 bp, Homo sapien
ggcggcgttgctgtgactgacacct

SEQ ID NO: 885674 - DNA, 25 bp, Homo sapien
gctacttccgaggtacgagactcca

SEQ ID NO: 885675 - DNA, 25 bp, Homo sapien
cgttcgctgctgagatcgtgctcgc

SEQ ID NO: 885676 - DNA, 25 bp, Homo sapien
gactccagttgtttggccaaagtgg

SEQ ID NO: 885677 - DNA, 25 bp, Homo sapien
agactttacaattgggcttgaccat

SEQ ID NO: 885678 - DNA, 25 bp, Homo sapien
ggagactttacaattgggcttgacc

SEQ ID NO: 885679 - DNA, 25 bp, Homo sapien
ggggagactttacaattgggcttga

SEQ ID NO: 885680 - DNA, 25 bp, Homo sapien
tctgttacttgtatctgaccactgg

SEQ ID NO: 885681 - DNA, 25 bp, Homo sapien
ttcttttctactaatgaatattcag

SEQ ID NO: 885682 - DNA, 25 bp, Homo sapien
cttttctactaatgaatattcaggc

SEQ ID NO: 885683 - DNA, 25 bp, Homo sapien
tttctactaatgaatattcaggcat

SEQ ID NO: 885684 - DNA, 25 bp, Homo sapien
tctcttgcatactcttccctcctct

SEQ ID NO: 885685 - DNA, 25 bp, Homo sapien
gtttccctggagactaatgatattg

SEQ ID NO: 885686 - DNA, 25 bp, Homo sapien
tatctgtttagattctttgcccatg

SEQ ID NO: 885687 - DNA, 25 bp, Homo sapien
gaactgccggactgttatccatagt

SEQ ID NO: 885688 - DNA, 25 bp, Homo sapien
tgcccatgtttaaattgagtcatat

SEQ ID NO: 885689 - DNA, 25 bp, Homo sapien
gattcacctccatcaagcccagaaa

SEQ ID NO: 885690 - DNA, 25 bp, Homo sapien
taatcagttattaccagtagatgcc

SEQ ID NO: 885691 - DNA, 25 bp, Homo sapien
tgttggaggcccatgatattgtggc

SEQ ID NO: 885692 - DNA, 25 bp, Homo sapien
catcaaagtgttatgattcacctcc

SEQ ID NO: 885693 - DNA, 25 bp, Homo sapien
aaatgaattactagccaccttctga

SEQ ID NO: 885694 - DNA, 25 bp, Homo sapien
tctgatttaacatcagggtcaaggt

SEQ ID NO: 885695 - DNA, 25 bp, Homo sapien
tgcataagcatagtgtattcctgtg

SEQ ID NO: 885696 - DNA, 25 bp, Homo sapien
ctcagctagtgtcatggaaaatctc

SEQ ID NO: 885697 - DNA, 25 bp, Homo sapien
taaagcacagtatcaaggtgatgcc

SEQ ID NO: 885698 - DNA, 25 bp, Homo sapien
aggtgatgccctatgacaatgtttc

SEQ ID NO: 885699 - DNA, 25 bp, Homo sapien
tgattctagatttcatggccagaac

SEQ ID NO: 885700 - DNA, 25 bp, Homo sapien
caaattcacgtttcttgtcctagga

SEQ ID NO: 885701 - DNA, 25 bp, Homo sapien
cgcccggccagcacatagattcttt

SEQ ID NO: 885702 - DNA, 25 bp, Homo sapien
cccggccagcacatagattctttct

SEQ ID NO: 885703 - DNA, 25 bp, Homo sapien
gcccggccagcacatagattctttc

SEQ ID NO: 885704 - DNA, 25 bp, Homo sapien
tcacctttcctacgttttcttgagc

SEQ ID NO: 885705 - DNA, 25 bp, Homo sapien
tctatggaatcagggacacagggag

SEQ ID NO: 885706 - DNA, 25 bp, Homo sapien
gatatgtttccaacaactgctaccc

SEQ ID NO: 885707 - DNA, 25 bp, Homo sapien
agcatttccataaagagtctcattt

SEQ ID NO: 885708 - DNA, 25 bp, Homo sapien
cacagggagccagtccaagctattt

SEQ ID NO: 885709 - DNA, 25 bp, Homo sapien
aatagccttggccagtaacacgtac

SEQ ID NO: 885710 - DNA, 25 bp, Homo sapien
tgctggaacctaactcagatgctgg

SEQ ID NO: 885711 - DNA, 25 bp, Homo sapien
caaaacgtagcctcttgtgtgcaga

SEQ ID NO: 885712 - DNA, 25 bp, Homo sapien
aaatgcatatagctagggtcccaag

SEQ ID NO: 885713 - DNA, 25 bp, Homo sapien
aagcagtgggaagactttagagtcc

SEQ ID NO: 885714 - DNA, 25 bp, Homo sapien
tcatgaatgttctctgcctaaagca

SEQ ID NO: 885715 - DNA, 25 bp, Homo sapien
agcacagagtccattcagggttata

SEQ ID NO: 885716 - DNA, 25 bp, Homo sapien
tcagggttatacaaagaagcagtgg

SEQ ID NO: 885717 - DNA, 25 bp, Homo sapien
ggtcttcaagatcagatactccatc

SEQ ID NO: 885718 - DNA, 25 bp, Homo sapien
gcacaatcccaaacctttctgtatc

SEQ ID NO: 885719 - DNA, 25 bp, Homo sapien
ctgaggcaaacaagcgctgcacaat

SEQ ID NO: 885720 - DNA, 25 bp, Homo sapien
aggttgggtcttcaagatcagatac

SEQ ID NO: 885721 - DNA, 25 bp, Homo sapien
caatgtgttcttcaccgaggtcact

SEQ ID NO: 885722 - DNA, 25 bp, Homo sapien
tatttaaccctaagctgctcgtgag

SEQ ID NO: 885723 - DNA, 25 bp, Homo sapien
cgaggtcactttggatgctgctcta

SEQ ID NO: 885724 - DNA, 25 bp, Homo sapien
gggaccttgtctgccgtgcctacaa

SEQ ID NO: 885725 - DNA, 25 bp, Homo sapien
cacctggtggatgagagctgtgcag

SEQ ID NO: 885726 - DNA, 25 bp, Homo sapien
acctggtggatgagagctgtgcagc

SEQ ID NO: 885727 - DNA, 25 bp, Homo sapien
gagagctgtgcagcattcggctttc

SEQ ID NO: 885728 - DNA, 25 bp, Homo sapien
gtttccataaccagactgtgccacc

SEQ ID NO: 885729 - DNA, 25 bp, Homo sapien
tttcaagtagttccatttttgcagt

SEQ ID NO: 885730 - DNA, 25 bp, Homo sapien
caagcatgcatgttcctctgggcct

SEQ ID NO: 885731 - DNA, 25 bp, Homo sapien
cagtggacaagcatgcatgttcctc

SEQ ID NO: 885732 - DNA, 25 bp, Homo sapien
tcagggtcctgtctaggcagtctgc

SEQ ID NO: 885733 - DNA, 25 bp, Homo sapien
gctccttggaatgatgccatgctgc

SEQ ID NO: 885734 - DNA, 25 bp, Homo sapien
tgtctttgctatgcacaaaggcacc

SEQ ID NO: 885735 - DNA, 25 bp, Homo sapien
tcggtgttcccagagtagatgtata

SEQ ID NO: 885736 - DNA, 25 bp, Homo sapien
taagagttggagtcgaaagacaagg

SEQ ID NO: 885737 - DNA, 25 bp, Homo sapien
gaagagctgttgtggtaagtcctag

SEQ ID NO: 885738 - DNA, 25 bp, Homo sapien
gaagtcctggacctgctaacaagtt

SEQ ID NO: 885739 - DNA, 25 bp, Homo sapien
ttaccggctgctggatgtctacccc

SEQ ID NO: 885740 - DNA, 25 bp, Homo sapien
agcagagctgctgcgctatctggca

SEQ ID NO: 885741 - DNA, 25 bp, Homo sapien
ctggagtttgcagcaagtgcccagc

SEQ ID NO: 885742 - DNA, 25 bp, Homo sapien
caagtggcacagtgtgggaatgatc

SEQ ID NO: 885743 - DNA, 25 bp, Homo sapien
cacagtgtgggaatgatctggagtt

SEQ ID NO: 885744 - DNA, 25 bp, Homo sapien
tgtggcctagcgtatccagctgagc

SEQ ID NO: 885745 - DNA, 25 bp, Homo sapien
tcagcacatagagttgggacaggca

SEQ ID NO: 885746 - DNA, 25 bp, Homo sapien
ttagcaagagcacaaatggaagggc

SEQ ID NO: 885747 - DNA, 25 bp, Homo sapien
tatgtgtcaactgcgtggcctgctg

SEQ ID NO: 885748 - DNA, 25 bp, Homo sapien
cggacacccaccctgtaagctgcac

SEQ ID NO: 885749 - DNA, 25 bp, Homo sapien
gcactgaccaagaagtaggctgtca

SEQ ID NO: 885750 - DNA, 25 bp, Homo sapien
taggctgtcataaacagctgcttgc

SEQ ID NO: 885751 - DNA, 25 bp, Homo sapien
ctgcgagggcactgaccaagaagta

SEQ ID NO: 885752 - DNA, 25 bp, Homo sapien
agaggccgctgaccaggtcatcgca

SEQ ID NO: 885753 - DNA, 25 bp, Homo sapien
tggctacatttcactgacgggacag

SEQ ID NO: 885754 - DNA, 25 bp, Homo sapien
gaactgtggcatagaaccttccagg

SEQ ID NO: 885755 - DNA, 25 bp, Homo sapien
tctgaaattgctaatccttggtggc

SEQ ID NO: 885756 - DNA, 25 bp, Homo sapien
gaggaaagtacgacccgcagctctt

SEQ ID NO: 885757 - DNA, 25 bp, Homo sapien
cagttcggaccaccccgccaattct

SEQ ID NO: 885758 - DNA, 25 bp, Homo sapien
ctgctggagagccagttcggaccac

SEQ ID NO: 885759 - DNA, 25 bp, Homo sapien
ggaccaccccgccaattctgcacca

SEQ ID NO: 885760 - DNA, 25 bp, Homo sapien
tggagagccagttcggaccaccccg

SEQ ID NO: 885761 - DNA, 25 bp, Homo sapien
accagccgggcagcttgcttctcca

SEQ ID NO: 885762 - DNA, 25 bp, Homo sapien
tgtccagatccgatcatctgaaagc

SEQ ID NO: 885763 - DNA, 25 bp, Homo sapien
cttggtgtccagatccgatcatctg

SEQ ID NO: 885764 - DNA, 25 bp, Homo sapien
atctgaaagcttgaccccaccctcg

SEQ ID NO: 885765 - DNA, 25 bp, Homo sapien
tgtgtggctctcaccatttgtacaa

SEQ ID NO: 885766 - DNA, 25 bp, Homo sapien
gcttgtgtggctctcaccatttgta

SEQ ID NO: 885767 - DNA, 25 bp, Homo sapien
tgtggctctcaccatttgtacaact

SEQ ID NO: 885768 - DNA, 25 bp, Homo sapien
ggctctcaccatttgtacaactaag

SEQ ID NO: 885769 - DNA, 25 bp, Homo sapien
catgagccaggaacactaggagcca

SEQ ID NO: 885770 - DNA, 25 bp, Homo sapien
gactttatagattccaccacacgac

SEQ ID NO: 885771 - DNA, 25 bp, Homo sapien
tgttacctggaacctaagaacgtga

SEQ ID NO: 885772 - DNA, 25 bp, Homo sapien
gagtagtggcccaccaacatatgtt

SEQ ID NO: 885773 - DNA, 25 bp, Homo sapien
gagtagttcatcatcaaataggacc

SEQ ID NO: 885774 - DNA, 25 bp, Homo sapien
ctggttccaggaccatgagtagttc

SEQ ID NO: 885775 - DNA, 25 bp, Homo sapien
gtagttcatcatcaaataggaccgc

SEQ ID NO: 885776 - DNA, 25 bp, Homo sapien
ggaccatgagtagttcatcatcaaa

SEQ ID NO: 885777 - DNA, 25 bp, Homo sapien
ggctcaggcagctccgcaaatggat

SEQ ID NO: 885778 - DNA, 25 bp, Homo sapien
aggcagctccgcaaatggatggaaa

SEQ ID NO: 885779 - DNA, 25 bp, Homo sapien
gctcaggcagctccgcaaatggatg

SEQ ID NO: 885780 - DNA, 25 bp, Homo sapien
tcaggcagctccgcaaatggatgga

SEQ ID NO: 885781 - DNA, 25 bp, Homo sapien
tgcttccctcggagaaggcagaact

SEQ ID NO: 885782 - DNA, 25 bp, Homo sapien
gaatgcaaactctcgaaagaccagg

SEQ ID NO: 885783 - DNA, 25 bp, Homo sapien
taatggtccatcctgggaagatatc

SEQ ID NO: 885784 - DNA, 25 bp, Homo sapien
gaagatatcccatgcgcagcatctg

SEQ ID NO: 885785 - DNA, 25 bp, Homo sapien
taagctgcgggggagtgacacattc

SEQ ID NO: 885786 - DNA, 25 bp, Homo sapien
ctggccatcagtaagactggacagg

SEQ ID NO: 885787 - DNA, 25 bp, Homo sapien
cacattcaccactggccatcagtaa

SEQ ID NO: 885788 - DNA, 25 bp, Homo sapien
ttcaccactggccatcagtaagact

SEQ ID NO: 885789 - DNA, 25 bp, Homo sapien
tgaacacctaaagtgagcagacacg

SEQ ID NO: 885790 - DNA, 25 bp, Homo sapien
gaacacaacctcttctcattgggaa

SEQ ID NO: 885791 - DNA, 25 bp, Homo sapien
cagctgggtctctgcgctttgaaca

SEQ ID NO: 885792 - DNA, 25 bp, Homo sapien
tcatgtccctaaggagcggtcacac

SEQ ID NO: 885793 - DNA, 25 bp, Homo sapien
gatcagcagaggaaagtcaagttca

SEQ ID NO: 885794 - DNA, 25 bp, Homo sapien
agcatgtctggcttcatacttgtgg

SEQ ID NO: 885795 - DNA, 25 bp, Homo sapien
tctggcttcatacttgtggagagga

SEQ ID NO: 885796 - DNA, 25 bp, Homo sapien
catgtctggcttcatacttgtggag

SEQ ID NO: 885797 - DNA, 25 bp, Homo sapien
ccctctactgtgctggtggaacttt

SEQ ID NO: 885798 - DNA, 25 bp, Homo sapien
tgccccacaccaatgttggaggaga

SEQ ID NO: 885799 - DNA, 25 bp, Homo sapien
tcataggacatcatggcaccggggt

SEQ ID NO: 885800 - DNA, 25 bp, Homo sapien
ggcgcttcataggcctcatctcatt

SEQ ID NO: 885801 - DNA, 25 bp, Homo sapien
gacaatctacgctcttcagacctct

SEQ ID NO: 885802 - DNA, 25 bp, Homo sapien
cccacagtctccaaagcagtcgagt

SEQ ID NO: 885803 - DNA, 25 bp, Homo sapien
acagtctccaaagcagtcgagtcct

SEQ ID NO: 885804 - DNA, 25 bp, Homo sapien
gggaccatgtcttgggacaatctac

SEQ ID NO: 885805 - DNA, 25 bp, Homo sapien
atccctcagcacccataggaggtgg

SEQ ID NO: 885806 - DNA, 25 bp, Homo sapien
ctggaaagcagtcaagtccctctgc

SEQ ID NO: 885807 - DNA, 25 bp, Homo sapien
ccctcagcacccataggaggtggca

SEQ ID NO: 885808 - DNA, 25 bp, Homo sapien
tggaaagcagtcaagtccctctgct

SEQ ID NO: 885809 - DNA, 25 bp, Homo sapien
cgaactggccgtccagtttcacgta

SEQ ID NO: 885810 - DNA, 25 bp, Homo sapien
accacgttggagtccttggtgacat

SEQ ID NO: 885811 - DNA, 25 bp, Homo sapien
tttcacgtataactcaatgacaccg

SEQ ID NO: 885812 - DNA, 25 bp, Homo sapien
aatgacaccgtaggcaatggtggtg

SEQ ID NO: 885813 - DNA, 25 bp, Homo sapien
aagctgctctgttccccactgcagc

SEQ ID NO: 885814 - DNA, 25 bp, Homo sapien
tccaagctgctctgttccccactgc

SEQ ID NO: 885815 - DNA, 25 bp, Homo sapien
tgcactcgggctctccaagctgctc

SEQ ID NO: 885816 - DNA, 25 bp, Homo sapien
ctgtgggcaaaagcgcacactccca

SEQ ID NO: 885817 - DNA, 25 bp, Homo sapien
tgagaggctctagggattcttttgc

SEQ ID NO: 885818 - DNA, 25 bp, Homo sapien
gatttgcagcagctaattccaagta

SEQ ID NO: 885819 - DNA, 25 bp, Homo sapien
tgccctaactcaacccacaaaggat

SEQ ID NO: 885820 - DNA, 25 bp, Homo sapien
gctaattccaagtaatcactgtgag

SEQ ID NO: 885821 - DNA, 25 bp, Homo sapien
gtcttggtctggatgcccacgatgc

SEQ ID NO: 885822 - DNA, 25 bp, Homo sapien
tgcaccgtcttggtctggatgccca

SEQ ID NO: 885823 - DNA, 25 bp, Homo sapien
atgccaccacacttctcctcgacct

SEQ ID NO: 885824 - DNA, 25 bp, Homo sapien
tgtgctcagagatcacacacttctg

SEQ ID NO: 885825 - DNA, 25 bp, Homo sapien
gtcaaaacgcacaggacctcattcc

SEQ ID NO: 885826 - DNA, 25 bp, Homo sapien
cgtcgtgatcttctgtgtcaaaacg

SEQ ID NO: 885827 - DNA, 25 bp, Homo sapien
gatcttctgtgtcaaaacgcacagg

SEQ ID NO: 885828 - DNA, 25 bp, Homo sapien
ttctgtgtcaaaacgcacaggacct

SEQ ID NO: 885829 - DNA, 25 bp, Homo sapien
cacagggtttctcagatttattgtt

SEQ ID NO: 885830 - DNA, 25 bp, Homo sapien
agcacagggtttctcagatttattg

SEQ ID NO: 885831 - DNA, 25 bp, Homo sapien
ctggagcacagggtttctcagattt

SEQ ID NO: 885832 - DNA, 25 bp, Homo sapien
ggagcacagggtttctcagatttat

SEQ ID NO: 885833 - DNA, 25 bp, Homo sapien
gcttagtgcctcaggggacattggt

SEQ ID NO: 885834 - DNA, 25 bp, Homo sapien
ggacattggtgtagtgtgaatttcc

SEQ ID NO: 885835 - DNA, 25 bp, Homo sapien
aaacggatgtgagtggcttagtgcc

SEQ ID NO: 885836 - DNA, 25 bp, Homo sapien
gtagtgtgaatttcctcttgcacag

SEQ ID NO: 885837 - DNA, 25 bp, Homo sapien
gacagccaggctttgttgatttcct

SEQ ID NO: 885838 - DNA, 25 bp, Homo sapien
cagccaggctttgttgatttcctca

SEQ ID NO: 885839 - DNA, 25 bp, Homo sapien
gaggagtgagcaggtgacagccagg

SEQ ID NO: 885840 - DNA, 25 bp, Homo sapien
ctgaggagtgagcaggtgacagcca

SEQ ID NO: 885841 - DNA, 25 bp, Homo sapien
gcaactgcctgctgtatccgatgac

SEQ ID NO: 885842 - DNA, 25 bp, Homo sapien
gcagtcctgagacgcttgctgagtc

SEQ ID NO: 885843 - DNA, 25 bp, Homo sapien
agccatctacgcaggtgggcaggca

SEQ ID NO: 885844 - DNA, 25 bp, Homo sapien
tgctgagtcgctgccttcaaaaggt

SEQ ID NO: 885845 - DNA, 25 bp, Homo sapien
cacagcgcaggaacagaagctcgcc

SEQ ID NO: 885846 - DNA, 25 bp, Homo sapien
agaagctcgcccagggacggagact

SEQ ID NO: 885847 - DNA, 25 bp, Homo sapien
cagaaacgtgtcacacagccacagc

SEQ ID NO: 885848 - DNA, 25 bp, Homo sapien
caaggctaggattcgggtgaccaga

SEQ ID NO: 885849 - DNA, 25 bp, Homo sapien
catccacctagcagcaaacacttcc

SEQ ID NO: 885850 - DNA, 25 bp, Homo sapien
tctttaccaaagcataaaggaggtc

SEQ ID NO: 885851 - DNA, 25 bp, Homo sapien
agctattactgcctggctgtaggaa

SEQ ID NO: 885852 - DNA, 25 bp, Homo sapien
gggatggccctgatcacctagatct

SEQ ID NO: 885853 - DNA, 25 bp, Homo sapien
aaaaggattctaaggctgagtgtgg

SEQ ID NO: 885854 - DNA, 25 bp, Homo sapien
ttatctagctctgggcagaaactca

SEQ ID NO: 885855 - DNA, 25 bp, Homo sapien
gaacacgggttgcatgcaagaacca

SEQ ID NO: 885856 - DNA, 25 bp, Homo sapien
tgcacgtggaaacgccaaggacttc

SEQ ID NO: 885857 - DNA, 25 bp, Homo sapien
ttcactggaggtggtcagtcgctcc

SEQ ID NO: 885858 - DNA, 25 bp, Homo sapien
cacggtggagttcagaatggtgacc

SEQ ID NO: 885859 - DNA, 25 bp, Homo sapien
taaaaacctatatcgagaaatgtga

SEQ ID NO: 885860 - DNA, 25 bp, Homo sapien
gaaataacgagactgcaaagcgcat

SEQ ID NO: 885861 - DNA, 25 bp, Homo sapien
tacacctgaatcatggtgtttaaaa

SEQ ID NO: 885862 - DNA, 25 bp, Homo sapien
cttgaaatagaaataacgagactgc

SEQ ID NO: 885863 - DNA, 25 bp, Homo sapien
gacagagcatttttaccgttcgcat

SEQ ID NO: 885864 - DNA, 25 bp, Homo sapien
gatcggcagagatcaaatctgtcgc

SEQ ID NO: 885865 - DNA, 25 bp, Homo sapien
ttgaaagtgcttcccaagtctcccc

SEQ ID NO: 885866 - DNA, 25 bp, Homo sapien
tgtatttaccgaaagccaaacaatg

SEQ ID NO: 885867 - DNA, 25 bp, Homo sapien
tccactcacgtggtttgcaaacttg

SEQ ID NO: 885868 - DNA, 25 bp, Homo sapien
gcaaacttgccctcgtatttcacaa

SEQ ID NO: 885869 - DNA, 25 bp, Homo sapien
tgaagactggctctctacgcggctg

SEQ ID NO: 885870 - DNA, 25 bp, Homo sapien
tatttcacaaagtccgactccacga

SEQ ID NO: 885871 - DNA, 25 bp, Homo sapien
taaaaactggtacttgggtctctgc

SEQ ID NO: 885872 - DNA, 25 bp, Homo sapien
ggtcttctatgagtacatcgccaag

SEQ ID NO: 885873 - DNA, 25 bp, Homo sapien
gctgtaacttatcagagtcattcag

SEQ ID NO: 885874 - DNA, 25 bp, Homo sapien
gatttgatactgcaatcaggtcacc

SEQ ID NO: 885875 - DNA, 25 bp, Homo sapien
atcccattcactattctggacagag

SEQ ID NO: 885876 - DNA, 25 bp, Homo sapien
acctgcctgcgtctcgaggacagcg

SEQ ID NO: 885877 - DNA, 25 bp, Homo sapien
atccctttcattatcccattcacta

SEQ ID NO: 885878 - DNA, 25 bp, Homo sapien
tcgaggacagcgaccgcaagccatc

SEQ ID NO: 885879 - DNA, 25 bp, Homo sapien
gaggcgaggggagcgacgggacctg

SEQ ID NO: 885880 - DNA, 25 bp, Homo sapien
gttggggcgggacgcggtgatggga

SEQ ID NO: 885881 - DNA, 25 bp, Homo sapien
agcgacgggacctgccgttccggcg

SEQ ID NO: 885882 - DNA, 25 bp, Homo sapien
cgggcagccaatcgattcgtctccc

SEQ ID NO: 885883 - DNA, 25 bp, Homo sapien
cctgcgctggcggagtcggaggagc

SEQ ID NO: 885884 - DNA, 25 bp, Homo sapien
gccccctgcgctggcggagtcggag

SEQ ID NO: 885885 - DNA, 25 bp, Homo sapien
cgggcgcttggggagggcggagaga

SEQ ID NO: 885886 - DNA, 25 bp, Homo sapien
cgctggcggagtcggaggagcctgc

SEQ ID NO: 885887 - DNA, 25 bp, Homo sapien
agtgtggactgacaccgcggcctca

SEQ ID NO: 885888 - DNA, 25 bp, Homo sapien
accaggaaagtccaaggcctgtcca

SEQ ID NO: 885889 - DNA, 25 bp, Homo sapien
cggcctcacggttcaaccaggaaag

SEQ ID NO: 885890 - DNA, 25 bp, Homo sapien
tcgcctcttcgctgcgcgggaccgt

SEQ ID NO: 885891 - DNA, 25 bp, Homo sapien
tgcctggagtagtatctgggtgtgt

SEQ ID NO: 885892 - DNA, 25 bp, Homo sapien
ctgtgggagcccctaatgcccgtgc

SEQ ID NO: 885893 - DNA, 25 bp, Homo sapien
ggagcccctaatgcccgtgcctgga

SEQ ID NO: 885894 - DNA, 25 bp, Homo sapien
cccctaatgcccgtgcctggagtag

SEQ ID NO: 885895 - DNA, 25 bp, Homo sapien
tagtgacttctcaatgtgtccacac

SEQ ID NO: 885896 - DNA, 25 bp, Homo sapien
gatcctgcttcctagttcatagata

SEQ ID NO: 885897 - DNA, 25 bp, Homo sapien
agatgaaggcatcagcagattcgat

SEQ ID NO: 885898 - DNA, 25 bp, Homo sapien
gattcgatgtctggtgagatcctgc

SEQ ID NO: 885899 - DNA, 25 bp, Homo sapien
tgtactccagcctgggtgacagaaa

SEQ ID NO: 885900 - DNA, 25 bp, Homo sapien
gtgagctgtgatcgtgccactgtac

SEQ ID NO: 885901 - DNA, 25 bp, Homo sapien
ctgagcctgggaagttgagggtgca

SEQ ID NO: 885902 - DNA, 25 bp, Homo sapien
cacctgagcctgggaagttgagggt

SEQ ID NO: 885903 - DNA, 25 bp, Homo sapien
gaactaagtttcacagcccaggaca

SEQ ID NO: 885904 - DNA, 25 bp, Homo sapien
ccaggttctcacagggaatatcaga

SEQ ID NO: 885905 - DNA, 25 bp, Homo sapien
tgaactgtaactgatgaactgctgg

SEQ ID NO: 885906 - DNA, 25 bp, Homo sapien
ccattgcttgcatgggaaaccctga

SEQ ID NO: 885907 - DNA, 25 bp, Homo sapien
aagagtgtcaagactgtcctgggag

SEQ ID NO: 885908 - DNA, 25 bp, Homo sapien
ccagagagcttggaaaagagtgtca

SEQ ID NO: 885909 - DNA, 25 bp, Homo sapien
ttacagaagggtaccccagagagct

SEQ ID NO: 885910 - DNA, 25 bp, Homo sapien
gaagggtaccccagagagcttggaa

SEQ ID NO: 885911 - DNA, 25 bp, Homo sapien
gctccacactcacttgatgtgaaaa

SEQ ID NO: 885912 - DNA, 25 bp, Homo sapien
tgcaaaactgctcccgtacctgcct

SEQ ID NO: 885913 - DNA, 25 bp, Homo sapien
acttgatgtgaaaaggtcccagatg

SEQ ID NO: 885914 - DNA, 25 bp, Homo sapien
cactcacttgatgtgaaaaggtccc

SEQ ID NO: 885915 - DNA, 25 bp, Homo sapien
cagtctgagcgatgagggactccca

SEQ ID NO: 885916 - DNA, 25 bp, Homo sapien
tcatggctgctccaaagaagtcatc

SEQ ID NO: 885917 - DNA, 25 bp, Homo sapien
gaagtcatctctttccacgtcattt

SEQ ID NO: 885918 - DNA, 25 bp, Homo sapien
gagagactcctgtatcagtacagtc

SEQ ID NO: 885919 - DNA, 25 bp, Homo sapien
tagttgctcagtcagagttccaaag

SEQ ID NO: 885920 - DNA, 25 bp, Homo sapien
tgtggctgaagatctgagatccccc

SEQ ID NO: 885921 - DNA, 25 bp, Homo sapien
agttgctcagtcagagttccaaagc

SEQ ID NO: 885922 - DNA, 25 bp, Homo sapien
gtatgtggctgaagatctgagatcc

SEQ ID NO: 885923 - DNA, 25 bp, Homo sapien
taagaacgtaattttcaggctggtg

SEQ ID NO: 885924 - DNA, 25 bp, Homo sapien
cctttgataagaacgtaattttcag

SEQ ID NO: 885925 - DNA, 25 bp, Homo sapien
tccatcccttttttgctgtacaaac

SEQ ID NO: 885926 - DNA, 25 bp, Homo sapien
tcccttttttgctgtacaaacagca

SEQ ID NO: 885927 - DNA, 25 bp, Homo sapien
cccatcacttccagtaacctggtgt

SEQ ID NO: 885928 - DNA, 25 bp, Homo sapien
acctggtgtgttcctccttgaaaga

SEQ ID NO: 885929 - DNA, 25 bp, Homo sapien
tgttcccttttagcagccaaataac

SEQ ID NO: 885930 - DNA, 25 bp, Homo sapien
aagagttcaggcatgggtcctgttc

SEQ ID NO: 885931 - DNA, 25 bp, Homo sapien
tcacattcaactagctacatgaggg

SEQ ID NO: 885932 - DNA, 25 bp, Homo sapien
tctgcggagattctgtagtagccag

SEQ ID NO: 885933 - DNA, 25 bp, Homo sapien
tactcataactaaaaggtctgcgga

SEQ ID NO: 885934 - DNA, 25 bp, Homo sapien
gatatttacatgacgcaggtttcca

SEQ ID NO: 885935 - DNA, 25 bp, Homo sapien
cccaggaagtctcacaggaagcaca

SEQ ID NO: 885936 - DNA, 25 bp, Homo sapien
cagtcacgtgcagattccagaaggc

SEQ ID NO: 885937 - DNA, 25 bp, Homo sapien
gacagtgctacgtccattcaggctg

SEQ ID NO: 885938 - DNA, 25 bp, Homo sapien
cagggtggttacctgcacaaagtcc

SEQ ID NO: 885939 - DNA, 25 bp, Homo sapien
ggacattccatactcaacagggagg

SEQ ID NO: 885940 - DNA, 25 bp, Homo sapien
taaacttgggtagcttacgcatggg

SEQ ID NO: 885941 - DNA, 25 bp, Homo sapien
tacgcatgggtgagtaaccctggga

SEQ ID NO: 885942 - DNA, 25 bp, Homo sapien
tcatctggacagaagttggacatgc

SEQ ID NO: 885943 - DNA, 25 bp, Homo sapien
tctttttttaacccacacatgaaca

SEQ ID NO: 885944 - DNA, 25 bp, Homo sapien
tgtaaagaaacgcactgaggaaaat

SEQ ID NO: 885945 - DNA, 25 bp, Homo sapien
agaaatgtcaaggtgttctacattc

SEQ ID NO: 885946 - DNA, 25 bp, Homo sapien
cacaagtgatcatcctagagtatct

SEQ ID NO: 885947 - DNA, 25 bp, Homo sapien
taaagagttacaatgctaagctaag

SEQ ID NO: 885948 - DNA, 25 bp, Homo sapien
gttccaaataggtgccgttgctcac

SEQ ID NO: 885949 - DNA, 25 bp, Homo sapien
agttccaaataggtgccgttgctca

SEQ ID NO: 885950 - DNA, 25 bp, Homo sapien
taaatgaagcttgaatatttcagga

SEQ ID NO: 885951 - DNA, 25 bp, Homo sapien
gaaattttggccagttgattttcca

SEQ ID NO: 885952 - DNA, 25 bp, Homo sapien
cagtaaatcaactgatcagtctgtt

SEQ ID NO: 885953 - DNA, 25 bp, Homo sapien
gtgtttatctattaactgatcagta

SEQ ID NO: 885954 - DNA, 25 bp, Homo sapien
tataccgagtccttcaacagatccc

SEQ ID NO: 885955 - DNA, 25 bp, Homo sapien
tgaagggttgaagatctctcatacc

SEQ ID NO: 885956 - DNA, 25 bp, Homo sapien
aacaatgaaaagacactggtggccc

SEQ ID NO: 885957 - DNA, 25 bp, Homo sapien
tctactcagttataggaggagatgg

SEQ ID NO: 885958 - DNA, 25 bp, Homo sapien
tgtctgaagtcagcaagagggagag

SEQ ID NO: 885959 - DNA, 25 bp, Homo sapien
cctgtctgaagtcagcaagagggag

SEQ ID NO: 885960 - DNA, 25 bp, Homo sapien
agctcctctgcaaactcactggctg

SEQ ID NO: 885961 - DNA, 25 bp, Homo sapien
gatttaataagctggcctggtgctg

SEQ ID NO: 885962 - DNA, 25 bp, Homo sapien
tctctctgcagttgttcaatcctct

SEQ ID NO: 885963 - DNA, 25 bp, Homo sapien
tctctgcagttgttcaatcctctgc

SEQ ID NO: 885964 - DNA, 25 bp, Homo sapien
tgaaaaaccgaggctggtgctccac

SEQ ID NO: 885965 - DNA, 25 bp, Homo sapien
tctgcagttgttcaatcctctgctt

SEQ ID NO: 885966 - DNA, 25 bp, Homo sapien
tatattactgaactgccctttatgg

SEQ ID NO: 885967 - DNA, 25 bp, Homo sapien
aatagccacataatatccagttgcg

SEQ ID NO: 885968 - DNA, 25 bp, Homo sapien
caacttgcatgtgtccacgactgga

SEQ ID NO: 885969 - DNA, 25 bp, Homo sapien
gacaatgccgcaataaatgaccttg

SEQ ID NO: 885970 - DNA, 25 bp, Homo sapien
tctcccataacctcaaagtgtataa

SEQ ID NO: 885971 - DNA, 25 bp, Homo sapien
cttattatgattaaggctgagcatc

SEQ ID NO: 885972 - DNA, 25 bp, Homo sapien
ttgggatgtcgacatgatttttaaa

SEQ ID NO: 885973 - DNA, 25 bp, Homo sapien
caatctgataggttaaaaattggga

SEQ ID NO: 885974 - DNA, 25 bp, Homo sapien
caggaaagatgaaaagacctaccat

SEQ ID NO: 885975 - DNA, 25 bp, Homo sapien
tgagcagcaacctagaatcagcagt

SEQ ID NO: 885976 - DNA, 25 bp, Homo sapien
cacacatggatcctagttgggcccc

SEQ ID NO: 885977 - DNA, 25 bp, Homo sapien
gataataaaggccatgccacacatg

SEQ ID NO: 885978 - DNA, 25 bp, Homo sapien
ctctggtggcctaaggattgttaat

SEQ ID NO: 885979 - DNA, 25 bp, Homo sapien
ggtggcctaaggattgttaataaga

SEQ ID NO: 885980 - DNA, 25 bp, Homo sapien
tggcctaaggattgttaataagact

SEQ ID NO: 885981 - DNA, 25 bp, Homo sapien
ctggtggcctaaggattgttaataa

SEQ ID NO: 885982 - DNA, 25 bp, Homo sapien
tcatttaattccagcgcaaactgtg

SEQ ID NO: 885983 - DNA, 25 bp, Homo sapien
tagtattgctcgtagcctttcggca

SEQ ID NO: 885984 - DNA, 25 bp, Homo sapien
tctggtctggcctaaatcgagtgtc

SEQ ID NO: 885985 - DNA, 25 bp, Homo sapien
cagtaggtggcaataaagactttga

SEQ ID NO: 885986 - DNA, 25 bp, Homo sapien
atttcccaaacagccgatgaaccgc

SEQ ID NO: 885987 - DNA, 25 bp, Homo sapien
gatgaaccgcttttccactcctgtc

SEQ ID NO: 885988 - DNA, 25 bp, Homo sapien
aacactgtgccttcaatctcatggg

SEQ ID NO: 885989 - DNA, 25 bp, Homo sapien
gagccgccgccacagtagatgcttt

SEQ ID NO: 885990 - DNA, 25 bp, Homo sapien
ggcttagtcctttagcatcagctta

SEQ ID NO: 885991 - DNA, 25 bp, Homo sapien
aaggactgtaagagtggctccatac

SEQ ID NO: 885992 - DNA, 25 bp, Homo sapien
ggctccatactgcatattagtttgc

SEQ ID NO: 885993 - DNA, 25 bp, Homo sapien
ctaggattcaaatgagttgttggct

SEQ ID NO: 885994 - DNA, 25 bp, Homo sapien
ggaatcatcatgcaggttcttgatg

SEQ ID NO: 885995 - DNA, 25 bp, Homo sapien
cctctgcccgcttaagatgttatgg

SEQ ID NO: 885996 - DNA, 25 bp, Homo sapien
taaaattcactttgcagtagcagga

SEQ ID NO: 885997 - DNA, 25 bp, Homo sapien
caatctctccatagtgctcaatcca

SEQ ID NO: 885998 - DNA, 25 bp, Homo sapien
cacatgggttgtgccaattggaaca

SEQ ID NO: 885999 - DNA, 25 bp, Homo sapien
atggatttgccccagaatttgtttt

SEQ ID NO: 886000 - DNA, 25 bp, Homo sapien
agagtcacatgggttgtgccaattg

SEQ ID NO: 886001 - DNA, 25 bp, Homo sapien
aatttccatggatttgccccagaat

SEQ ID NO: 886002 - DNA, 25 bp, Homo sapien
caaaatttctagactcagcatgaca

SEQ ID NO: 886003 - DNA, 25 bp, Homo sapien
tctagactcagcatgacacgcagag

SEQ ID NO: 886004 - DNA, 25 bp, Homo sapien
gactcagcatgacacgcagagatag

SEQ ID NO: 886005 - DNA, 25 bp, Homo sapien
catgacacgcagagataggcggatg

SEQ ID NO: 886006 - DNA, 25 bp, Homo sapien
ggtagagacaaagacgtaaatcatg

SEQ ID NO: 886007 - DNA, 25 bp, Homo sapien
cgtaaatcatgtaggcatctttcag

SEQ ID NO: 886008 - DNA, 25 bp, Homo sapien
tgtgggccaaagaaaggtagagaca

SEQ ID NO: 886009 - DNA, 25 bp, Homo sapien
tgggccaaagaaaggtagagacaaa

SEQ ID NO: 886010 - DNA, 25 bp, Homo sapien
tttccaactcagactgttgtctaga

SEQ ID NO: 886011 - DNA, 25 bp, Homo sapien
ctcagactgttgtctagaaaactca

SEQ ID NO: 886012 - DNA, 25 bp, Homo sapien
gcttggagatacaatttccatcatt

SEQ ID NO: 886013 - DNA, 25 bp, Homo sapien
aagcttggagatacaatttccatca

SEQ ID NO: 886014 - DNA, 25 bp, Homo sapien
ggtagtagctagatgcatacgctga

SEQ ID NO: 886015 - DNA, 25 bp, Homo sapien
gaaccggattaaatggcttgcttcc

SEQ ID NO: 886016 - DNA, 25 bp, Homo sapien
tcatatgtttctccaagaaccggat

SEQ ID NO: 886017 - DNA, 25 bp, Homo sapien
catacgctgatatggcaaaggctgc

SEQ ID NO: 886018 - DNA, 25 bp, Homo sapien
tgttcttgaaacctgggtgtctgtt

SEQ ID NO: 886019 - DNA, 25 bp, Homo sapien
ctgcctgtgttcttgaaacctgggt

SEQ ID NO: 886020 - DNA, 25 bp, Homo sapien
gaaacctgggtgtctgttcctcttc

SEQ ID NO: 886021 - DNA, 25 bp, Homo sapien
cctgtgttcttgaaacctgggtgtc

SEQ ID NO: 886022 - DNA, 25 bp, Homo sapien
caagtgccacggagaagcaccccaa

SEQ ID NO: 886023 - DNA, 25 bp, Homo sapien
ggcacatcggaacaatcagccagaa

SEQ ID NO: 886024 - DNA, 25 bp, Homo sapien
cctggatgagaaaaacagctcgaga

SEQ ID NO: 886025 - DNA, 25 bp, Homo sapien
aagaggaagcacaaacccacagaac

SEQ ID NO: 886026 - DNA, 25 bp, Homo sapien
aaggtgactggaaacagccaggcgg

SEQ ID NO: 886027 - DNA, 25 bp, Homo sapien
ggtgactggaaacagccaggcggag

SEQ ID NO: 886028 - DNA, 25 bp, Homo sapien
tgactggaaacagccaggcggagga

SEQ ID NO: 886029 - DNA, 25 bp, Homo sapien
ctggaaacagccaggcggaggaagc

SEQ ID NO: 886030 - DNA, 25 bp, Homo sapien
gcttggggaccgaggctggacagtg

SEQ ID NO: 886031 - DNA, 25 bp, Homo sapien
ctgtttacggaacaatcaaaatgaa

SEQ ID NO: 886032 - DNA, 25 bp, Homo sapien
ctggacagtggcaagggaaggctga

SEQ ID NO: 886033 - DNA, 25 bp, Homo sapien
ggccccgtgaatggcctcgtggctt

SEQ ID NO: 886034 - DNA, 25 bp, Homo sapien
cctctgcagcgtgttcaggggctcg

SEQ ID NO: 886035 - DNA, 25 bp, Homo sapien
ttcccgaccactatcaaggacaggc

SEQ ID NO: 886036 - DNA, 25 bp, Homo sapien
aatctgcgcggccttgtccaggagc

SEQ ID NO: 886037 - DNA, 25 bp, Homo sapien
gcaggcacgttcttctccgggactt

SEQ ID NO: 886038 - DNA, 25 bp, Homo sapien
aagattatcacttatgtcactgaca

SEQ ID NO: 886039 - DNA, 25 bp, Homo sapien
tctaaatcattactgagattatcta

SEQ ID NO: 886040 - DNA, 25 bp, Homo sapien
tgacatatgagtcatcatcagaaat

SEQ ID NO: 886041 - DNA, 25 bp, Homo sapien
gattatctaaggaaagattatcact

SEQ ID NO: 886042 - DNA, 25 bp, Homo sapien
tgagttatgggagaactctcagaac

SEQ ID NO: 886043 - DNA, 25 bp, Homo sapien
cataatgactacaaagggcaactga

SEQ ID NO: 886044 - DNA, 25 bp, Homo sapien
aacaagagagatttttgaggcacca

SEQ ID NO: 886045 - DNA, 25 bp, Homo sapien
tgaacagattaatcagcaaagcaac

SEQ ID NO: 886046 - DNA, 25 bp, Homo sapien
tagaaagctgatgaactagagctcg

SEQ ID NO: 886047 - DNA, 25 bp, Homo sapien
gcttggagataacagaacttcctga

SEQ ID NO: 886048 - DNA, 25 bp, Homo sapien
tttctgaagagcttggagataacag

SEQ ID NO: 886049 - DNA, 25 bp, Homo sapien
tagagctcggttttcatctctggag

SEQ ID NO: 886050 - DNA, 25 bp, Homo sapien
caagtcccattgaagtcgatatgaa

SEQ ID NO: 886051 - DNA, 25 bp, Homo sapien
tataacaaccactacaagcattctg

SEQ ID NO: 886052 - DNA, 25 bp, Homo sapien
taaagttcgcccaaataacattgca

SEQ ID NO: 886053 - DNA, 25 bp, Homo sapien
tggacgtggcccctattaacttgct

SEQ ID NO: 886054 - DNA, 25 bp, Homo sapien
actcggcatggattctgcgtaagcg

SEQ ID NO: 886055 - DNA, 25 bp, Homo sapien
gcgtaagcgttctttaagatctgtg

SEQ ID NO: 886056 - DNA, 25 bp, Homo sapien
gagtcgaggagcagagactcggcat

SEQ ID NO: 886057 - DNA, 25 bp, Homo sapien
ttgtcacccgacttggcgacagcgg

SEQ ID NO: 886058 - DNA, 25 bp, Homo sapien
tgatgaaactcttagtgacgtggtc

SEQ ID NO: 886059 - DNA, 25 bp, Homo sapien
tgacgtggtctgacagcgcactttc

SEQ ID NO: 886060 - DNA, 25 bp, Homo sapien
gagcgatctctaagagcttgatgaa

SEQ ID NO: 886061 - DNA, 25 bp, Homo sapien
gggccctgcaggagcgatctctaag

SEQ ID NO: 886062 - DNA, 25 bp, Homo sapien
gcatgcagattcagcctatatgtct

SEQ ID NO: 886063 - DNA, 25 bp, Homo sapien
gaccgacctgctgaaagcatagaag

SEQ ID NO: 886064 - DNA, 25 bp, Homo sapien
ttctgactcttttctaagaagctct

SEQ ID NO: 886065 - DNA, 25 bp, Homo sapien
acgatcagctccacgggtgctcgca

SEQ ID NO: 886066 - DNA, 25 bp, Homo sapien
ctgcagagcatatgggttatttgaa

SEQ ID NO: 886067 - DNA, 25 bp, Homo sapien
atatgggttatttgaaaatccttga

SEQ ID NO: 886068 - DNA, 25 bp, Homo sapien
cagagcatatgggttatttgaaaat

SEQ ID NO: 886069 - DNA, 25 bp, Homo sapien
tgcagagcatatgggttatttgaaa

SEQ ID NO: 886070 - DNA, 25 bp, Homo sapien
gatgacagggcgttcttcagaccaa

SEQ ID NO: 886071 - DNA, 25 bp, Homo sapien
cagaccaatgacctgagcagacggg

SEQ ID NO: 886072 - DNA, 25 bp, Homo sapien
tctctccgctgacatgatattaaaa

SEQ ID NO: 886073 - DNA, 25 bp, Homo sapien
gatattaaaagctgaccttaaagtg

SEQ ID NO: 886074 - DNA, 25 bp, Homo sapien
ctagtgttgacaaattaggattgga

SEQ ID NO: 886075 - DNA, 25 bp, Homo sapien
gagtgtagtcttactgggccagaaa

SEQ ID NO: 886076 - DNA, 25 bp, Homo sapien
tatgggcaatatgacacagatcttc

SEQ ID NO: 886077 - DNA, 25 bp, Homo sapien
aaaactctgatgaggtttcagagcc

SEQ ID NO: 886078 - DNA, 25 bp, Homo sapien
catctttgccaatagctctggaccg

SEQ ID NO: 886079 - DNA, 25 bp, Homo sapien
tctttgccaatagctctggaccgcc

SEQ ID NO: 886080 - DNA, 25 bp, Homo sapien
acctcctgtgcgatcttttttcctt

SEQ ID NO: 886081 - DNA, 25 bp, Homo sapien
tttgccaatagctctggaccgccac

SEQ ID NO: 886082 - DNA, 25 bp, Homo sapien
ccgacaaggataaatgcatagcaaa

SEQ ID NO: 886083 - DNA, 25 bp, Homo sapien
ttgactttggctgaagcaactgacc

SEQ ID NO: 886084 - DNA, 25 bp, Homo sapien
ccaccaaaccgacaaggataaatgc

SEQ ID NO: 886085 - DNA, 25 bp, Homo sapien
gcacagacagtaaagtccaccaaac

SEQ ID NO: 886086 - DNA, 25 bp, Homo sapien
taccaggtaggcatgacagtgcgcc

SEQ ID NO: 886087 - DNA, 25 bp, Homo sapien
cgttgatagctggtgccgagtatgt

SEQ ID NO: 886088 - DNA, 25 bp, Homo sapien
catgctttgcaggagctggctcatt

SEQ ID NO: 886089 - DNA, 25 bp, Homo sapien
tatgtccgatgcaggacgtccatgc

SEQ ID NO: 886090 - DNA, 25 bp, Homo sapien
gggaaaagaggacagtgctcacaat

SEQ ID NO: 886091 - DNA, 25 bp, Homo sapien
agaggacagtgctcacaatgctcca

SEQ ID NO: 886092 - DNA, 25 bp, Homo sapien
gaaaagaggacagtgctcacaatgc

SEQ ID NO: 886093 - DNA, 25 bp, Homo sapien
tgggggaaaagaggacagtgctcac

SEQ ID NO: 886094 - DNA, 25 bp, Homo sapien
gacctgagaggacataagaggactc

SEQ ID NO: 886095 - DNA, 25 bp, Homo sapien
atgtttctgctgaagaatacaggcc

SEQ ID NO: 886096 - DNA, 25 bp, Homo sapien
cagtcgctaactcaaaagatagtcc

SEQ ID NO: 886097 - DNA, 25 bp, Homo sapien
tgcctgaggaccataataagcctct

SEQ ID NO: 886098 - DNA, 25 bp, Homo sapien
gaagactgtaaccataatggaactc

SEQ ID NO: 886099 - DNA, 25 bp, Homo sapien
gactgtaaccataatggaactcgtg

SEQ ID NO: 886100 - DNA, 25 bp, Homo sapien
aaccataatggaactcgtgtctcac

SEQ ID NO: 886101 - DNA, 25 bp, Homo sapien
aactcgtgtctcaccaccacaagaa

SEQ ID NO: 886102 - DNA, 25 bp, Homo sapien
gccccaactaatagatgcttgtctg

SEQ ID NO: 886103 - DNA, 25 bp, Homo sapien
taattaaataccagcccaagcctac

SEQ ID NO: 886104 - DNA, 25 bp, Homo sapien
tcttggttctgactcagtgggcaaa

SEQ ID NO: 886105 - DNA, 25 bp, Homo sapien
caggataaagctagttcattcagag

SEQ ID NO: 886106 - DNA, 25 bp, Homo sapien
tgaaatggagtcaaacaccccagat

SEQ ID NO: 886107 - DNA, 25 bp, Homo sapien
tacattctgtggtggcgaagtttcg

SEQ ID NO: 886108 - DNA, 25 bp, Homo sapien
gtcaaacaccccagatgaagagtct

SEQ ID NO: 886109 - DNA, 25 bp, Homo sapien
tcgatacccactcatcaaagacttc

SEQ ID NO: 886110 - DNA, 25 bp, Homo sapien
gacatcactgagagcccgacatcaa

SEQ ID NO: 886111 - DNA, 25 bp, Homo sapien
actgagagcccgacatcaatgcagc

SEQ ID NO: 886112 - DNA, 25 bp, Homo sapien
cactgagagcccgacatcaatgcag

SEQ ID NO: 886113 - DNA, 25 bp, Homo sapien
atcactgagagcccgacatcaatgc

SEQ ID NO: 886114 - DNA, 25 bp, Homo sapien
atcggtttggctcttggcatatttc

SEQ ID NO: 886115 - DNA, 25 bp, Homo sapien
gctcttggcatatttcaagattcct

SEQ ID NO: 886116 - DNA, 25 bp, Homo sapien
ttcctttgtccagatagaagaatct

SEQ ID NO: 886117 - DNA, 25 bp, Homo sapien
ttggctcttggcatatttcaagatt

SEQ ID NO: 886118 - DNA, 25 bp, Homo sapien
attaaggcattcaatttaggtgccc

SEQ ID NO: 886119 - DNA, 25 bp, Homo sapien
tattaattaaggcattcaatttagg

SEQ ID NO: 886120 - DNA, 25 bp, Homo sapien
taaggcattcaatttaggtgccctt

SEQ ID NO: 886121 - DNA, 25 bp, Homo sapien
taattaaggcattcaatttaggtgc

SEQ ID NO: 886122 - DNA, 25 bp, Homo sapien
ggtggctcctgggtgtaattcatct

SEQ ID NO: 886123 - DNA, 25 bp, Homo sapien
tggtggctcctgggtgtaattcatc

SEQ ID NO: 886124 - DNA, 25 bp, Homo sapien
tggctcctgggtgtaattcatctcc

SEQ ID NO: 886125 - DNA, 25 bp, Homo sapien
ggctcctgggtgtaattcatctccc

SEQ ID NO: 886126 - DNA, 25 bp, Homo sapien
tctgtcacatattatagcatactgc

SEQ ID NO: 886127 - DNA, 25 bp, Homo sapien
ctgtcacatattatagcatactgca

SEQ ID NO: 886128 - DNA, 25 bp, Homo sapien
tgtcacatattatagcatactgcat

SEQ ID NO: 886129 - DNA, 25 bp, Homo sapien
gagtgcacgaattgaaagcacttcc

SEQ ID NO: 886130 - DNA, 25 bp, Homo sapien
catttattcatgctcatgcgctggc

SEQ ID NO: 886131 - DNA, 25 bp, Homo sapien
cagtctggtgctgtcatctggcatt

SEQ ID NO: 886132 - DNA, 25 bp, Homo sapien
tgaatgtctgaaaagtgccaaagat

SEQ ID NO: 886133 - DNA, 25 bp, Homo sapien
aaaatcactttaaatgcttaagcaa

SEQ ID NO: 886134 - DNA, 25 bp, Homo sapien
tgtaaatgatttacaatgagcaatc

SEQ ID NO: 886135 - DNA, 25 bp, Homo sapien
ttctagctaaaggaatagtggagcc

SEQ ID NO: 886136 - DNA, 25 bp, Homo sapien
ggcagcagggtttcatagatcattc

SEQ ID NO: 886137 - DNA, 25 bp, Homo sapien
cacagctaaaaacacggcaatcttt

SEQ ID NO: 886138 - DNA, 25 bp, Homo sapien
caagcaagggcaaggcttagcagga

SEQ ID NO: 886139 - DNA, 25 bp, Homo sapien
aaatcatttaccacccaagcaaggg

SEQ ID NO: 886140 - DNA, 25 bp, Homo sapien
tgtgcagctactaccaagagataga

SEQ ID NO: 886141 - DNA, 25 bp, Homo sapien
gagagctttaaagatctgcttgccc

SEQ ID NO: 886142 - DNA, 25 bp, Homo sapien
cagggtgagcgcagagaaagaatac

SEQ ID NO: 886143 - DNA, 25 bp, Homo sapien
gccaggctcactactggaaatctga

SEQ ID NO: 886144 - DNA, 25 bp, Homo sapien
taagtatctccatggatcagaacca

SEQ ID NO: 886145 - DNA, 25 bp, Homo sapien
gaccactttggtcataaattcagct

SEQ ID NO: 886146 - DNA, 25 bp, Homo sapien
gactctgggtgatttctcaggccag

SEQ ID NO: 886147 - DNA, 25 bp, Homo sapien
caggtgctgaaaaggctcagagacc

SEQ ID NO: 886148 - DNA, 25 bp, Homo sapien
gcagcaggtgctgaaaaggctcaga

SEQ ID NO: 886149 - DNA, 25 bp, Homo sapien
gaaggtgataccaatttttgggaca

SEQ ID NO: 886150 - DNA, 25 bp, Homo sapien
ttgaaggtgataccaatttttggga

SEQ ID NO: 886151 - DNA, 25 bp, Homo sapien
tgaaggtgataccaatttttgggac

SEQ ID NO: 886152 - DNA, 25 bp, Homo sapien
aatgccatcagatgacaagggagcc

SEQ ID NO: 886153 - DNA, 25 bp, Homo sapien
caagggagccgagagtatggaagtc

SEQ ID NO: 886154 - DNA, 25 bp, Homo sapien
ggagccgagagtatggaagtcccca

SEQ ID NO: 886155 - DNA, 25 bp, Homo sapien
agagtatggaagtccccagtggcag

SEQ ID NO: 886156 - DNA, 25 bp, Homo sapien
tccatagttggaaacgactttcatg

SEQ ID NO: 886157 - DNA, 25 bp, Homo sapien
gactttcatgaaggccagatggcat

SEQ ID NO: 886158 - DNA, 25 bp, Homo sapien
tgcactcagacacttggccatgttt

SEQ ID NO: 886159 - DNA, 25 bp, Homo sapien
tccataatgcgagtgtgaacagact

SEQ ID NO: 886160 - DNA, 25 bp, Homo sapien
gataccgatcggtgatcccggacct

SEQ ID NO: 886161 - DNA, 25 bp, Homo sapien
cccggacctctgaagtgctgtccat

SEQ ID NO: 886162 - DNA, 25 bp, Homo sapien
taatcacaacttcagataccgatcg

SEQ ID NO: 886163 - DNA, 25 bp, Homo sapien
ggtgatcccggacctctgaagtgct

SEQ ID NO: 886164 - DNA, 25 bp, Homo sapien
ggccttcacaatccacttcttcagg

SEQ ID NO: 886165 - DNA, 25 bp, Homo sapien
cttcaggggacatcagattgctcag

SEQ ID NO: 886166 - DNA, 25 bp, Homo sapien
cagagcccaatccagcaacagaaat

SEQ ID NO: 886167 - DNA, 25 bp, Homo sapien
cctggtgcatatttgaagcgtgcgg

SEQ ID NO: 886168 - DNA, 25 bp, Homo sapien
acaatggtatctggctgtcagttta

SEQ ID NO: 886169 - DNA, 25 bp, Homo sapien
ggacaatggtatctggctgtcagtt

SEQ ID NO: 886170 - DNA, 25 bp, Homo sapien
ctggacaatggtatctggctgtcag

SEQ ID NO: 886171 - DNA, 25 bp, Homo sapien
atggtatctggctgtcagtttaggc

SEQ ID NO: 886172 - DNA, 25 bp, Homo sapien
tcaagcggacttttcagaagtctga

SEQ ID NO: 886173 - DNA, 25 bp, Homo sapien
ggacttttcagaagtctgacatctt

SEQ ID NO: 886174 - DNA, 25 bp, Homo sapien
gacttttcagaagtctgacatcttc

SEQ ID NO: 886175 - DNA, 25 bp, Homo sapien
agcggacttttcagaagtctgacat

SEQ ID NO: 886176 - DNA, 25 bp, Homo sapien
gcaggcatcatcacggagcaggtag

SEQ ID NO: 886177 - DNA, 25 bp, Homo sapien
gaggttccatcactggaggcctagg

SEQ ID NO: 886178 - DNA, 25 bp, Homo sapien
catctgcatagtgagtcattctggg

SEQ ID NO: 886179 - DNA, 25 bp, Homo sapien
actggaggcctaggcatcattggca

SEQ ID NO: 886180 - DNA, 25 bp, Homo sapien
gggatggccacttataggaggtgca

SEQ ID NO: 886181 - DNA, 25 bp, Homo sapien
ggatggccacttataggaggtgcag

SEQ ID NO: 886182 - DNA, 25 bp, Homo sapien
gatggccacttataggaggtgcagg

SEQ ID NO: 886183 - DNA, 25 bp, Homo sapien
caaagaggagccgggagacttgcga

SEQ ID NO: 886184 - DNA, 25 bp, Homo sapien
agacttgcgaggaggtgggatcatt

SEQ ID NO: 886185 - DNA, 25 bp, Homo sapien
gccgggagacttgcgaggaggtggg

SEQ ID NO: 886186 - DNA, 25 bp, Homo sapien
aggagccgggagacttgcgaggagg

SEQ ID NO: 886187 - DNA, 25 bp, Homo sapien
cattgtttcgtccatcaggctctga

SEQ ID NO: 886188 - DNA, 25 bp, Homo sapien
ttgaagtgcagccattgtttcgtcc

SEQ ID NO: 886189 - DNA, 25 bp, Homo sapien
gtttcgtccatcaggctctgagctg

SEQ ID NO: 886190 - DNA, 25 bp, Homo sapien
gaggaacctttccttgttgaagtgc

SEQ ID NO: 886191 - DNA, 25 bp, Homo sapien
gtagatatcactgtagagtatcttt

SEQ ID NO: 886192 - DNA, 25 bp, Homo sapien
tttgtagatatcactgtagagtatc

SEQ ID NO: 886193 - DNA, 25 bp, Homo sapien
ctttgtagatatcactgtagagtat

SEQ ID NO: 886194 - DNA, 25 bp, Homo sapien
gatatcactgtagagtatcttttgc

SEQ ID NO: 886195 - DNA, 25 bp, Homo sapien
tctctccagtagagtgtatagatca

SEQ ID NO: 886196 - DNA, 25 bp, Homo sapien
gtagagtgtatagatcaaaagcaat

SEQ ID NO: 886197 - DNA, 25 bp, Homo sapien
ccagtagagtgtatagatcaaaagc

SEQ ID NO: 886198 - DNA, 25 bp, Homo sapien
ttattctctccagtagagtgtatag

SEQ ID NO: 886199 - DNA, 25 bp, Homo sapien
tactggcagccactaagacgtcttc

SEQ ID NO: 886200 - DNA, 25 bp, Homo sapien
tgctctaaggtgaaagaatctgcct

SEQ ID NO: 886201 - DNA, 25 bp, Homo sapien
gaagtgtagaaacctcccgataatg

SEQ ID NO: 886202 - DNA, 25 bp, Homo sapien
ccgacaccatcatctagtagggaag

SEQ ID NO: 886203 - DNA, 25 bp, Homo sapien
ccatcttttgtatcactcccctaaa

SEQ ID NO: 886204 - DNA, 25 bp, Homo sapien
catcttttgtatcactcccctaaaa

SEQ ID NO: 886205 - DNA, 25 bp, Homo sapien
ttgtatcactcccctaaaacacaac

SEQ ID NO: 886206 - DNA, 25 bp, Homo sapien
aaactaccatcttttgtatcactcc

SEQ ID NO: 886207 - DNA, 25 bp, Homo sapien
gcttctgttgtttcctggatttaga

SEQ ID NO: 886208 - DNA, 25 bp, Homo sapien
gcactaagtgcacttgtagccagga

SEQ ID NO: 886209 - DNA, 25 bp, Homo sapien
ggatttagatccttcacgggcctct

SEQ ID NO: 886210 - DNA, 25 bp, Homo sapien
gtcatggtaatccatgcattccacg

SEQ ID NO: 886211 - DNA, 25 bp, Homo sapien
caggaatccaataaaggtttgctgt

SEQ ID NO: 886212 - DNA, 25 bp, Homo sapien
ggcttgtgctcaaaacgaaaaggat

SEQ ID NO: 886213 - DNA, 25 bp, Homo sapien
ttcttgccgctttcatgtctttaaa

SEQ ID NO: 886214 - DNA, 25 bp, Homo sapien
cgaaaaggataagcattattgttca

SEQ ID NO: 886215 - DNA, 25 bp, Homo sapien
tattaaagtcacattaatctacact

SEQ ID NO: 886216 - DNA, 25 bp, Homo sapien
ctattaaagtcacattaatctacac

SEQ ID NO: 886217 - DNA, 25 bp, Homo sapien
actattaaagtcacattaatctaca

SEQ ID NO: 886218 - DNA, 25 bp, Homo sapien
aaagatgtgaagtctaggtgaccac

SEQ ID NO: 886219 - DNA, 25 bp, Homo sapien
taatttgatcccaacaaaactcaaa

SEQ ID NO: 886220 - DNA, 25 bp, Homo sapien
tgtgaagtctaggtgaccaccagtc

SEQ ID NO: 886221 - DNA, 25 bp, Homo sapien
caccagtcaccaggggtgacttcac

SEQ ID NO: 886222 - DNA, 25 bp, Homo sapien
atctgactgcctatgcacaaggacc

SEQ ID NO: 886223 - DNA, 25 bp, Homo sapien
tggctgagtgcgcatctgactgcct

SEQ ID NO: 886224 - DNA, 25 bp, Homo sapien
agcctccaccaagaatccggccaac

SEQ ID NO: 886225 - DNA, 25 bp, Homo sapien
gagtgcgcatctgactgcctatgca

SEQ ID NO: 886226 - DNA, 25 bp, Homo sapien
gctccctgtccagccagaatgttgt

SEQ ID NO: 886227 - DNA, 25 bp, Homo sapien
cagaatgttgtcttgcccttgtttc

SEQ ID NO: 886228 - DNA, 25 bp, Homo sapien
cctggctaagtctcacacaagtcat

SEQ ID NO: 886229 - DNA, 25 bp, Homo sapien
cccttcacatccattgacacctggc

SEQ ID NO: 886230 - DNA, 25 bp, Homo sapien
tgccacaaacaagtggggcttccag

SEQ ID NO: 886231 - DNA, 25 bp, Homo sapien
ttccaggcccttaatcaaggaacaa

SEQ ID NO: 886232 - DNA, 25 bp, Homo sapien
ctggatgccacaaacaagtggggct

SEQ ID NO: 886233 - DNA, 25 bp, Homo sapien
ggcttccaggcccttaatcaaggaa

SEQ ID NO: 886234 - DNA, 25 bp, Homo sapien
gcaagggataacactgttttcacct

SEQ ID NO: 886235 - DNA, 25 bp, Homo sapien
cctacagctgcaagggataacactg

SEQ ID NO: 886236 - DNA, 25 bp, Homo sapien
agctgcaagggataacactgttttc

SEQ ID NO: 886237 - DNA, 25 bp, Homo sapien
ataacactgttttcacctttgctca

SEQ ID NO: 886238 - DNA, 25 bp, Homo sapien
tgtctcgctcttgtcgtctagggag

SEQ ID NO: 886239 - DNA, 25 bp, Homo sapien
ctcgctcttgtcgtctagggagtgc

SEQ ID NO: 886240 - DNA, 25 bp, Homo sapien
tctcgctcttgtcgtctagggagtg

SEQ ID NO: 886241 - DNA, 25 bp, Homo sapien
ggtgtctcgctcttgtcgtctaggg

SEQ ID NO: 886242 - DNA, 25 bp, Homo sapien
gcaatagaggccgaaagacctgact

SEQ ID NO: 886243 - DNA, 25 bp, Homo sapien
ccacttgctgtgtgcgtgatcatag

SEQ ID NO: 886244 - DNA, 25 bp, Homo sapien
ccctgtccagctcaaagaggcagtg

SEQ ID NO: 886245 - DNA, 25 bp, Homo sapien
gggtctctaatcaagggcttggcaa

SEQ ID NO: 886246 - DNA, 25 bp, Homo sapien
cctttcataccagaggaatccttta

SEQ ID NO: 886247 - DNA, 25 bp, Homo sapien
tacaaacaatgtggctaagaacaag

SEQ ID NO: 886248 - DNA, 25 bp, Homo sapien
tagcttaaataagcccaggaatgat

SEQ ID NO: 886249 - DNA, 25 bp, Homo sapien
gaatgatattggaaggctacagcct

SEQ ID NO: 886250 - DNA, 25 bp, Homo sapien
ttaacaaggaattctgttacttcga

SEQ ID NO: 886251 - DNA, 25 bp, Homo sapien
tgatgatggcatattcgttgtttca

SEQ ID NO: 886252 - DNA, 25 bp, Homo sapien
ggaattctgttacttcgacataaaa

SEQ ID NO: 886253 - DNA, 25 bp, Homo sapien
ggcatattcgttgtttcatcataaa

SEQ ID NO: 886254 - DNA, 25 bp, Homo sapien
gagtgcataagtccctaagaccctg

SEQ ID NO: 886255 - DNA, 25 bp, Homo sapien
gacaacgttcagacagagtgcataa

SEQ ID NO: 886256 - DNA, 25 bp, Homo sapien
taagaccctgaactaagacgctgca

SEQ ID NO: 886257 - DNA, 25 bp, Homo sapien
ccaggaaaggaccaatgtgagagac

SEQ ID NO: 886258 - DNA, 25 bp, Homo sapien
ctagccccggcgtagcgcctccccg

SEQ ID NO: 886259 - DNA, 25 bp, Homo sapien
aggacagctccgcgcgccgcgtcct

SEQ ID NO: 886260 - DNA, 25 bp, Homo sapien
ctgcccaggacagctccgcgcgccg

SEQ ID NO: 886261 - DNA, 25 bp, Homo sapien
ggcgtagcgcctccccgctgcccag

SEQ ID NO: 886262 - DNA, 25 bp, Homo sapien
ctcctcctggcggtcaatcctctga

SEQ ID NO: 886263 - DNA, 25 bp, Homo sapien
cctggcggtcaatcctctgagccgt

SEQ ID NO: 886264 - DNA, 25 bp, Homo sapien
tctgagccgtccctcgagggaaggt

SEQ ID NO: 886265 - DNA, 25 bp, Homo sapien
tggcggtcaatcctctgagccgtcc

SEQ ID NO: 886266 - DNA, 25 bp, Homo sapien
tgcagccggagacgctccctagttc

SEQ ID NO: 886267 - DNA, 25 bp, Homo sapien
gctccggggttagcgcacagaaccg

SEQ ID NO: 886268 - DNA, 25 bp, Homo sapien
ccgggctccggggttagcgcacaga

SEQ ID NO: 886269 - DNA, 25 bp, Homo sapien
tggccacttgcagacagactgcggg

SEQ ID NO: 886270 - DNA, 25 bp, Homo sapien
cggccgcgaagcgctcaagtcccct

SEQ ID NO: 886271 - DNA, 25 bp, Homo sapien
gccgcgaagcgctcaagtcccctct

SEQ ID NO: 886272 - DNA, 25 bp, Homo sapien
aagcgctcaagtcccctctcccggg

SEQ ID NO: 886273 - DNA, 25 bp, Homo sapien
gcgaagcgctcaagtcccctctccc

SEQ ID NO: 886274 - DNA, 25 bp, Homo sapien
gggcgccaccagcacgcggccagtt

SEQ ID NO: 886275 - DNA, 25 bp, Homo sapien
gcgggcgccaccagcacgcggccag

SEQ ID NO: 886276 - DNA, 25 bp, Homo sapien
ctggcgggcgccaccagcacgcggc

SEQ ID NO: 886277 - DNA, 25 bp, Homo sapien
gcgccaccagcacgcggccagttct

SEQ ID NO: 886278 - DNA, 25 bp, Homo sapien
agccagcggattccatgacgcggcg

SEQ ID NO: 886279 - DNA, 25 bp, Homo sapien
gcgatgtcctcggaagaagccagcg

SEQ ID NO: 886280 - DNA, 25 bp, Homo sapien
tcctcggaagaagccagcggattcc

SEQ ID NO: 886281 - DNA, 25 bp, Homo sapien
tcagaagtcgcctttcgggaaggag

SEQ ID NO: 886282 - DNA, 25 bp, Homo sapien
ccggggtgattttgttctgtgcagt

SEQ ID NO: 886283 - DNA, 25 bp, Homo sapien
gcaccgtcgttactattaaatctcc

SEQ ID NO: 886284 - DNA, 25 bp, Homo sapien
gggagagcaccgtcgttactattaa

SEQ ID NO: 886285 - DNA, 25 bp, Homo sapien
cagaggcagtcgtgcagattcgtgc

SEQ ID NO: 886286 - DNA, 25 bp, Homo sapien
gggactgtctgtttcggatctggca

SEQ ID NO: 886287 - DNA, 25 bp, Homo sapien
gatttcaaatcgaatgactccgcgg

SEQ ID NO: 886288 - DNA, 25 bp, Homo sapien
cacgtcggcacacggagaagcttat

SEQ ID NO: 886289 - DNA, 25 bp, Homo sapien
gctgccgagcaaatccactgtcatg

SEQ ID NO: 886290 - DNA, 25 bp, Homo sapien
ctggacgggtagtggaaggacgcgt

SEQ ID NO: 886291 - DNA, 25 bp, Homo sapien
ggcgcgcggaccgtccaaggaggca

SEQ ID NO: 886292 - DNA, 25 bp, Homo sapien
caggcgcgcggaccgtccaaggagg

SEQ ID NO: 886293 - DNA, 25 bp, Homo sapien
gcgcgcggaccgtccaaggaggcac

SEQ ID NO: 886294 - DNA, 25 bp, Homo sapien
tggcaggcgcgcggaccgtccaagg

SEQ ID NO: 886295 - DNA, 25 bp, Homo sapien
tctccgcctgtttctttagcattgg

SEQ ID NO: 886296 - DNA, 25 bp, Homo sapien
cagtccctttcctcgttcaagctat

SEQ ID NO: 886297 - DNA, 25 bp, Homo sapien
tccttccgtctttctgtaatttctc

SEQ ID NO: 886298 - DNA, 25 bp, Homo sapien
tctctctgagagaggcttgctctgt

SEQ ID NO: 886299 - DNA, 25 bp, Homo sapien
ttttctatcaatttttcatacaagg

SEQ ID NO: 886300 - DNA, 25 bp, Homo sapien
ccccaacctctgtacaaatatccat

SEQ ID NO: 886301 - DNA, 25 bp, Homo sapien
cttcttcatatggccagtcgcctct

SEQ ID NO: 886302 - DNA, 25 bp, Homo sapien
tggccagtcgcctctccaggacaat

SEQ ID NO: 886303 - DNA, 25 bp, Homo sapien
gtgagttaaccctctgagagactgg

SEQ ID NO: 886304 - DNA, 25 bp, Homo sapien
tcccaagataggacaggcaatgctg

SEQ ID NO: 886305 - DNA, 25 bp, Homo sapien
ggcaatgctgagtgttcacatccag

SEQ ID NO: 886306 - DNA, 25 bp, Homo sapien
gtcctggtctggagaatctttgttt

SEQ ID NO: 886307 - DNA, 25 bp, Homo sapien
catggaagggttgagagattgagga

SEQ ID NO: 886308 - DNA, 25 bp, Homo sapien
gcagtggtctggtgttgattagtca

SEQ ID NO: 886309 - DNA, 25 bp, Homo sapien
tgcagggggtgccatagcacagttc

SEQ ID NO: 886310 - DNA, 25 bp, Homo sapien
tgctgtctgcctcatgtggggcagt

SEQ ID NO: 886311 - DNA, 25 bp, Homo sapien
acagttctgtcacatcagccctttg

SEQ ID NO: 886312 - DNA, 25 bp, Homo sapien
ccacatctaggaggcatttgtccat

SEQ ID NO: 886313 - DNA, 25 bp, Homo sapien
ctcccacatctaggaggcatttgtc

SEQ ID NO: 886314 - DNA, 25 bp, Homo sapien
cttcatctcccacatctaggaggca

SEQ ID NO: 886315 - DNA, 25 bp, Homo sapien
ttcatctcccacatctaggaggcat

SEQ ID NO: 886316 - DNA, 25 bp, Homo sapien
agctgggtatttgcataggccacga

SEQ ID NO: 886317 - DNA, 25 bp, Homo sapien
aaggagtcactccagtgagggacta

SEQ ID NO: 886318 - DNA, 25 bp, Homo sapien
tcactccagtgagggactagctggg

SEQ ID NO: 886319 - DNA, 25 bp, Homo sapien
cacgattccacttctttgtctacat

SEQ ID NO: 886320 - DNA, 25 bp, Homo sapien
gggagactagttataagactatagc

SEQ ID NO: 886321 - DNA, 25 bp, Homo sapien
caggagcatctttggcctctaacca

SEQ ID NO: 886322 - DNA, 25 bp, Homo sapien
cttaatatgggaggtagggagacta

SEQ ID NO: 886323 - DNA, 25 bp, Homo sapien
ggtgctattgatgttttgggccaga

SEQ ID NO: 886324 - DNA, 25 bp, Homo sapien
gcatatcagagacctttgtggcagc

SEQ ID NO: 886325 - DNA, 25 bp, Homo sapien
gtgctgtgcagcctaagtacttggt

SEQ ID NO: 886326 - DNA, 25 bp, Homo sapien
caggcctgcaggcataggaagaaaa

SEQ ID NO: 886327 - DNA, 25 bp, Homo sapien
caaggtacagctcagacttcagagg

SEQ ID NO: 886328 - DNA, 25 bp, Homo sapien
gactggttaacactgctgcactgac

SEQ ID NO: 886329 - DNA, 25 bp, Homo sapien
taaacgccacaactagccaagatgg

SEQ ID NO: 886330 - DNA, 25 bp, Homo sapien
catgtaggtggcatctgaatacccc

SEQ ID NO: 886331 - DNA, 25 bp, Homo sapien
tatgtaccccgacagtgcctagaag

SEQ ID NO: 886332 - DNA, 25 bp, Homo sapien
aattatctttagtcttgtgatcaca

SEQ ID NO: 886333 - DNA, 25 bp, Homo sapien
atctttagtcttgtgatcacacata

SEQ ID NO: 886334 - DNA, 25 bp, Homo sapien
ttatctttagtcttgtgatcacaca

SEQ ID NO: 886335 - DNA, 25 bp, Homo sapien
taattatctttagtcttgtgatcac

SEQ ID NO: 886336 - DNA, 25 bp, Homo sapien
tcccaatcaaatacacagttctaca

SEQ ID NO: 886337 - DNA, 25 bp, Homo sapien
gtgtatatctccgttactttaatcc

SEQ ID NO: 886338 - DNA, 25 bp, Homo sapien
ttctgaatggctgtttaaagacaat

SEQ ID NO: 886339 - DNA, 25 bp, Homo sapien
aaaagcatgtgaccttatagatctg

SEQ ID NO: 886340 - DNA, 25 bp, Homo sapien
gataccatttactgaattggagtta

SEQ ID NO: 886341 - DNA, 25 bp, Homo sapien
ggatggtacacataaaaaagtcatg

SEQ ID NO: 886342 - DNA, 25 bp, Homo sapien
agaggcaaatgaacatgaacacaaa

SEQ ID NO: 886343 - DNA, 25 bp, Homo sapien
gcttggttctaagacagtgaagcaa

SEQ ID NO: 886344 - DNA, 25 bp, Homo sapien
tccttcttcttaatgccgacaaaga

SEQ ID NO: 886345 - DNA, 25 bp, Homo sapien
aagctattaagtctgccctttcttc

SEQ ID NO: 886346 - DNA, 25 bp, Homo sapien
tcttccttcttcttaatgccgacaa

SEQ ID NO: 886347 - DNA, 25 bp, Homo sapien
agctattaagtctgccctttcttcc

SEQ ID NO: 886348 - DNA, 25 bp, Homo sapien
cggtgtggcactgggaacacttcat

SEQ ID NO: 886349 - DNA, 25 bp, Homo sapien
ggcactgggaacacttcataataaa

SEQ ID NO: 886350 - DNA, 25 bp, Homo sapien
ttcttattggcggctgtgtaagagt

SEQ ID NO: 886351 - DNA, 25 bp, Homo sapien
cttattggcggctgtgtaagagtat

SEQ ID NO: 886352 - DNA, 25 bp, Homo sapien
cacgaggtcacccgtccaggtcggt

SEQ ID NO: 886353 - DNA, 25 bp, Homo sapien
ccttctaggatgtcagaacgactga

SEQ ID NO: 886354 - DNA, 25 bp, Homo sapien
atgtgcccacgaaaagaactggccc

SEQ ID NO: 886355 - DNA, 25 bp, Homo sapien
ccaggtcggtttcaaggtgattgat

SEQ ID NO: 886356 - DNA, 25 bp, Homo sapien
ctccgccgcacctcaagccgttact

SEQ ID NO: 886357 - DNA, 25 bp, Homo sapien
caagccgttactcgcccagctcggt

SEQ ID NO: 886358 - DNA, 25 bp, Homo sapien
tgtccctagttagggctccgccgca

SEQ ID NO: 886359 - DNA, 25 bp, Homo sapien
cccagctcggtctgaccacagtcca

SEQ ID NO: 886360 - DNA, 25 bp, Homo sapien
gccggacgtccccactctctaagtc

SEQ ID NO: 886361 - DNA, 25 bp, Homo sapien
gcacaacgaacactcccgctccgaa

SEQ ID NO: 886362 - DNA, 25 bp, Homo sapien
gaagccggacgtccccactctctaa

SEQ ID NO: 886363 - DNA, 25 bp, Homo sapien
ctctaagtccaaggacacgccggtc

SEQ ID NO: 886364 - DNA, 25 bp, Homo sapien
tgtaagtgcaaccaaactcgctccg

SEQ ID NO: 886365 - DNA, 25 bp, Homo sapien
ggtgtacggcgtgcgtgcccttctt

SEQ ID NO: 886366 - DNA, 25 bp, Homo sapien
agctggcggctacgcagtaacgtcg

SEQ ID NO: 886367 - DNA, 25 bp, Homo sapien
gacaggcctttggtcgtacgacaac

SEQ ID NO: 886368 - DNA, 25 bp, Homo sapien
cctactaccacggctggcgccaaca

SEQ ID NO: 886369 - DNA, 25 bp, Homo sapien
tgtcctactaccacggctggcgcca

SEQ ID NO: 886370 - DNA, 25 bp, Homo sapien
gtcctactaccacggctggcgccaa

SEQ ID NO: 886371 - DNA, 25 bp, Homo sapien
ctgtcctactaccacggctggcgcc

SEQ ID NO: 886372 - DNA, 25 bp, Homo sapien
gctctccgcttgatggacgccccaa

SEQ ID NO: 886373 - DNA, 25 bp, Homo sapien
cgccccaagactgaggaaggtgctg

SEQ ID NO: 886374 - DNA, 25 bp, Homo sapien
acgccccaagactgaggaaggtgct

SEQ ID NO: 886375 - DNA, 25 bp, Homo sapien
cacattccagctctccgcttgatgg

SEQ ID NO: 886376 - DNA, 25 bp, Homo sapien
ccagttgctaattaaggccattgct

SEQ ID NO: 886377 - DNA, 25 bp, Homo sapien
tatagtttttagaggtgtccatccc

SEQ ID NO: 886378 - DNA, 25 bp, Homo sapien
gacattgttgctccgatttccccag

SEQ ID NO: 886379 - DNA, 25 bp, Homo sapien
ctcaatcagaaggttaagggtaagc

SEQ ID NO: 886380 - DNA, 25 bp, Homo sapien
tttttggtgaaacaatgatgtaaac

SEQ ID NO: 886381 - DNA, 25 bp, Homo sapien
gggacagtgttctcatttttattaa

SEQ ID NO: 886382 - DNA, 25 bp, Homo sapien
tgtaaactttgttgtacacattgct

SEQ ID NO: 886383 - DNA, 25 bp, Homo sapien
ccttgtataatctgaagatgagaga

SEQ ID NO: 886384 - DNA, 25 bp, Homo sapien
caaggtccttgtggtttaatctaga

SEQ ID NO: 886385 - DNA, 25 bp, Homo sapien
tccaaccagatactaacttaaattc

SEQ ID NO: 886386 - DNA, 25 bp, Homo sapien
taacatcaccttttctgggttcctc

SEQ ID NO: 886387 - DNA, 25 bp, Homo sapien
ccagcaatacgaaggaaattctgtt

SEQ ID NO: 886388 - DNA, 25 bp, Homo sapien
gatttatggaaacgcttttgtgcac

SEQ ID NO: 886389 - DNA, 25 bp, Homo sapien
ggaattatggccatagaattggtgc

SEQ ID NO: 886390 - DNA, 25 bp, Homo sapien
tatccctgaggtctttatggtcttc

SEQ ID NO: 886391 - DNA, 25 bp, Homo sapien
gaattggtgcttcatccccgaatgc

SEQ ID NO: 886392 - DNA, 25 bp, Homo sapien
aaagagttcttaagctccagcaggt

SEQ ID NO: 886393 - DNA, 25 bp, Homo sapien
ttttccatattcaagaacaactctt

SEQ ID NO: 886394 - DNA, 25 bp, Homo sapien
tctaggaatccaaccaagaacaggt

SEQ ID NO: 886395 - DNA, 25 bp, Homo sapien
tgaggtttggtcactccagctctag

SEQ ID NO: 886396 - DNA, 25 bp, Homo sapien
cgtcggttctgaattaatcgggcaa

SEQ ID NO: 886397 - DNA, 25 bp, Homo sapien
caattcgtccttccaacggtctggg

SEQ ID NO: 886398 - DNA, 25 bp, Homo sapien
tggtttttatgggtcacaccggctg

SEQ ID NO: 886399 - DNA, 25 bp, Homo sapien
caccggctggtatgttatcactaag

SEQ ID NO: 886400 - DNA, 25 bp, Homo sapien
taggtcaaaagtcatacccattttc

SEQ ID NO: 886401 - DNA, 25 bp, Homo sapien
ggatattgccacaaatggtaggtca

SEQ ID NO: 886402 - DNA, 25 bp, Homo sapien
caaatggtaggtcaaaagtcatacc

SEQ ID NO: 886403 - DNA, 25 bp, Homo sapien
aaaaattgatcagggatattgccac

SEQ ID NO: 886404 - DNA, 25 bp, Homo sapien
atcctatctttcgtgttaactctgc

SEQ ID NO: 886405 - DNA, 25 bp, Homo sapien
tgctaccatcttttcatggtaatca

SEQ ID NO: 886406 - DNA, 25 bp, Homo sapien
tcgtgttaactctgctaccatcttt

SEQ ID NO: 886407 - DNA, 25 bp, Homo sapien
atctttcgtgttaactctgctacca

SEQ ID NO: 886408 - DNA, 25 bp, Homo sapien
tacgaagtgagccagtgggacctct

SEQ ID NO: 886409 - DNA, 25 bp, Homo sapien
gcttctttggcagagcaaatagggt

SEQ ID NO: 886410 - DNA, 25 bp, Homo sapien
caagatttctttgtatgttggcttc

SEQ ID NO: 886411 - DNA, 25 bp, Homo sapien
caaatagggtcccatgaatttaaag

SEQ ID NO: 886412 - DNA, 25 bp, Homo sapien
gcactgctacccctataaaccttta

SEQ ID NO: 886413 - DNA, 25 bp, Homo sapien
ggctccagacgaacatatcctcttg

SEQ ID NO: 886414 - DNA, 25 bp, Homo sapien
taatcatggtaaaaggcactgctac

SEQ ID NO: 886415 - DNA, 25 bp, Homo sapien
gggcctaagggttatgctgttcata

SEQ ID NO: 886416 - DNA, 25 bp, Homo sapien
tatggccacttaaggatgagtgtgg

SEQ ID NO: 886417 - DNA, 25 bp, Homo sapien
ggtaagatgactcctttctaaagga

SEQ ID NO: 886418 - DNA, 25 bp, Homo sapien
taaaggaggtccctgcatgatcacc

SEQ ID NO: 886419 - DNA, 25 bp, Homo sapien
tgtgggcatccagttatttggtaag

SEQ ID NO: 886420 - DNA, 25 bp, Homo sapien
acactgttaacatgaagccccggga

SEQ ID NO: 886421 - DNA, 25 bp, Homo sapien
aaaactgggccagtccaaagaggca

SEQ ID NO: 886422 - DNA, 25 bp, Homo sapien
gagaggccccgaatagagtgataag

SEQ ID NO: 886423 - DNA, 25 bp, Homo sapien
tctgatctcagtagctgctcaaggc

SEQ ID NO: 886424 - DNA, 25 bp, Homo sapien
tcataaattgggcagtcgccaaacc

SEQ ID NO: 886425 - DNA, 25 bp, Homo sapien
ccaggtggtggaagaaggtttatgg

SEQ ID NO: 886426 - DNA, 25 bp, Homo sapien
atcaatcagttcatatctataagga

SEQ ID NO: 886427 - DNA, 25 bp, Homo sapien
tcaatcagttcatatctataaggat

SEQ ID NO: 886428 - DNA, 25 bp, Homo sapien
caatcagttcatatctataaggatt

SEQ ID NO: 886429 - DNA, 25 bp, Homo sapien
tatcaatcagttcatatctataagg

SEQ ID NO: 886430 - DNA, 25 bp, Homo sapien
cataagccttggttggcaccgtggg

SEQ ID NO: 886431 - DNA, 25 bp, Homo sapien
aaaactgttgaatcataagccttgg

SEQ ID NO: 886432 - DNA, 25 bp, Homo sapien
ccgtgtagaggtcctcaggtgacgt

SEQ ID NO: 886433 - DNA, 25 bp, Homo sapien
gtgcgggctttaatgcccgtgtaga

SEQ ID NO: 886434 - DNA, 25 bp, Homo sapien
ggcgccgcgacagatgtgtgtgtgg

SEQ ID NO: 886435 - DNA, 25 bp, Homo sapien
ggtgttcaattggatatggcaagca

SEQ ID NO: 886436 - DNA, 25 bp, Homo sapien
gccgcgacagatgtgtgtgtggtag

SEQ ID NO: 886437 - DNA, 25 bp, Homo sapien
taggggtgttcaattggatatggca

SEQ ID NO: 886438 - DNA, 25 bp, Homo sapien
ctgttgaattaggcggcttgggtat

SEQ ID NO: 886439 - DNA, 25 bp, Homo sapien
actgttgaattaggcggcttgggta

SEQ ID NO: 886440 - DNA, 25 bp, Homo sapien
tactgttgaattaggcggcttgggt

SEQ ID NO: 886441 - DNA, 25 bp, Homo sapien
tcatttccatagacatcactttttt

SEQ ID NO: 886442 - DNA, 25 bp, Homo sapien
gcctacattgttgaagtgactccct

SEQ ID NO: 886443 - DNA, 25 bp, Homo sapien
tcctttgcccatgacacgaggaggc

SEQ ID NO: 886444 - DNA, 25 bp, Homo sapien
ggagtgaaatcggtattatcccacc

SEQ ID NO: 886445 - DNA, 25 bp, Homo sapien
atactctctttcagcgccccaagga

SEQ ID NO: 886446 - DNA, 25 bp, Homo sapien
aaatagagttgaattttgaactata

SEQ ID NO: 886447 - DNA, 25 bp, Homo sapien
agaattctagaacttggggcatgta

SEQ ID NO: 886448 - DNA, 25 bp, Homo sapien
ttagaagagttgatatagaattcta

SEQ ID NO: 886449 - DNA, 25 bp, Homo sapien
gatcttaggggctgagaaaatagag

SEQ ID NO: 886450 - DNA, 25 bp, Homo sapien
cctctgaggcagttgggcgagtaac

SEQ ID NO: 886451 - DNA, 25 bp, Homo sapien
tggacagtatgtcagctccttcaag

SEQ ID NO: 886452 - DNA, 25 bp, Homo sapien
tgtgcaattcattagagtaaaaggt

SEQ ID NO: 886453 - DNA, 25 bp, Homo sapien
aacagtagggcctgccgtgaatgac

SEQ ID NO: 886454 - DNA, 25 bp, Homo sapien
tcttcattcaacaaaataagcgctg

SEQ ID NO: 886455 - DNA, 25 bp, Homo sapien
tcagtagtgcagcacgaacgggacc

SEQ ID NO: 886456 - DNA, 25 bp, Homo sapien
ccctttgcagatggtggagtcagta

SEQ ID NO: 886457 - DNA, 25 bp, Homo sapien
taagcgctgtcctaaagccttcggg

SEQ ID NO: 886458 - DNA, 25 bp, Homo sapien
cgaggaattttgaggtcgtccgcac

SEQ ID NO: 886459 - DNA, 25 bp, Homo sapien
gctggcggccttcgcgggccgagga

SEQ ID NO: 886460 - DNA, 25 bp, Homo sapien
gccgaggaattttgaggtcgtccgc

SEQ ID NO: 886461 - DNA, 25 bp, Homo sapien
ccttcgcgggccgaggaattttgag

SEQ ID NO: 886462 - DNA, 25 bp, Homo sapien
gagctggcaggcaggggcgggggcg

SEQ ID NO: 886463 - DNA, 25 bp, Homo sapien
gctggcaggcaggggcgggggcggg

SEQ ID NO: 886464 - DNA, 25 bp, Homo sapien
tggagctggcaggcaggggcggggg

SEQ ID NO: 886465 - DNA, 25 bp, Homo sapien
ctacggcccggtggagctggcaggc

SEQ ID NO: 886466 - DNA, 25 bp, Homo sapien
cggcattaggtgatgcgtccttgag

SEQ ID NO: 886467 - DNA, 25 bp, Homo sapien
ccgtgaccgcggcattaggtgatgc

SEQ ID NO: 886468 - DNA, 25 bp, Homo sapien
gcttgtgacggtggccgtgaccgcg

SEQ ID NO: 886469 - DNA, 25 bp, Homo sapien
gggcgcttgtgacggtggccgtgac

SEQ ID NO: 886470 - DNA, 25 bp, Homo sapien
ctgggggcttccgggcggcgagcgg

SEQ ID NO: 886471 - DNA, 25 bp, Homo sapien
gcaagaatgcgaagaggaaccgaga

SEQ ID NO: 886472 - DNA, 25 bp, Homo sapien
ccagcgctacgggactggcaagaat

SEQ ID NO: 886473 - DNA, 25 bp, Homo sapien
ttagagacctcggaggaaaccagcc

SEQ ID NO: 886474 - DNA, 25 bp, Homo sapien
cgcagtaggaggctcttagagacct

SEQ ID NO: 886475 - DNA, 25 bp, Homo sapien
caaccttagtcctattttcccatgg

SEQ ID NO: 886476 - DNA, 25 bp, Homo sapien
tccagtactttctatacttcacctt

SEQ ID NO: 886477 - DNA, 25 bp, Homo sapien
ccctccaatttctggtagttcattg

SEQ ID NO: 886478 - DNA, 25 bp, Homo sapien
cattaaattccttgtctccccagcc

SEQ ID NO: 886479 - DNA, 25 bp, Homo sapien
cagcagcccatggacagtctcaata

SEQ ID NO: 886480 - DNA, 25 bp, Homo sapien
caagtaagtggtgctcagcggtgca

SEQ ID NO: 886481 - DNA, 25 bp, Homo sapien
tcgggcccggataagtgttggtatc

SEQ ID NO: 886482 - DNA, 25 bp, Homo sapien
tgttatagcaaagagagcgggatga

SEQ ID NO: 886483 - DNA, 25 bp, Homo sapien
cagtgtattcatccaagagtttgtc

SEQ ID NO: 886484 - DNA, 25 bp, Homo sapien
tgacaaccatggttgaaccgaggct

SEQ ID NO: 886485 - DNA, 25 bp, Homo sapien
cagaactctgtattaacctcaggga

SEQ ID NO: 886486 - DNA, 25 bp, Homo sapien
aaccgaggctgtgaagtgccaggca

SEQ ID NO: 886487 - DNA, 25 bp, Homo sapien
aactggtctgtagatgtggcctgcc

SEQ ID NO: 886488 - DNA, 25 bp, Homo sapien
aagtagtccgctcttgttggagggt

SEQ ID NO: 886489 - DNA, 25 bp, Homo sapien
caggcggcggtagtccctagaagta

SEQ ID NO: 886490 - DNA, 25 bp, Homo sapien
tcaacgaaggctgagatgcaaactt

SEQ ID NO: 886491 - DNA, 25 bp, Homo sapien
taaactttgcctttccaagcttggc

SEQ ID NO: 886492 - DNA, 25 bp, Homo sapien
aatgtgagccacagatttgggaccc

SEQ ID NO: 886493 - DNA, 25 bp, Homo sapien
ggcaatgtgagccacagatttggga

SEQ ID NO: 886494 - DNA, 25 bp, Homo sapien
tccccagtgacggtggatctcatcg

SEQ ID NO: 886495 - DNA, 25 bp, Homo sapien
tagttggtcctcatagcttccgcca

SEQ ID NO: 886496 - DNA, 25 bp, Homo sapien
gttggtcctcatagcttccgccagc

SEQ ID NO: 886497 - DNA, 25 bp, Homo sapien
tatctgttgttgtagttggtcctca

SEQ ID NO: 886498 - DNA, 25 bp, Homo sapien
gttgttgtagttggtcctcatagct

SEQ ID NO: 886499 - DNA, 25 bp, Homo sapien
ggcaacagtggtgcaggtcttcctg

SEQ ID NO: 886500 - DNA, 25 bp, Homo sapien
acagtggtgcaggtcttcctgtgga

SEQ ID NO: 886501 - DNA, 25 bp, Homo sapien
ctgcgtgaaggcaacagtggtgcag

SEQ ID NO: 886502 - DNA, 25 bp, Homo sapien
caacagtggtgcaggtcttcctgtg

SEQ ID NO: 886503 - DNA, 25 bp, Homo sapien
cccttgataatgcaggggaagagac

SEQ ID NO: 886504 - DNA, 25 bp, Homo sapien
ggatggtatccacatcgtgtgccat

SEQ ID NO: 886505 - DNA, 25 bp, Homo sapien
tggatggtatccacatcgtgtgcca

SEQ ID NO: 886506 - DNA, 25 bp, Homo sapien
ctggatggtatccacatcgtgtgcc

SEQ ID NO: 886507 - DNA, 25 bp, Homo sapien
actggttaatcgcacgcaggaggca

SEQ ID NO: 886508 - DNA, 25 bp, Homo sapien
gggtgaactggttaatcgcacgcag

SEQ ID NO: 886509 - DNA, 25 bp, Homo sapien
ctgtttggaggtgcagggcttgggt

SEQ ID NO: 886510 - DNA, 25 bp, Homo sapien
tgaactggttaatcgcacgcaggag

SEQ ID NO: 886511 - DNA, 25 bp, Homo sapien
gccttttgtcaaacaggggactcgc

SEQ ID NO: 886512 - DNA, 25 bp, Homo sapien
ttttgtcaaacaggggactcgccac

SEQ ID NO: 886513 - DNA, 25 bp, Homo sapien
cagacaatttcatgaagcaggtgag

SEQ ID NO: 886514 - DNA, 25 bp, Homo sapien
gcaacctgatataacctaatacaga

SEQ ID NO: 886515 - DNA, 25 bp, Homo sapien
gacagcaggggccggagccaccttc

SEQ ID NO: 886516 - DNA, 25 bp, Homo sapien
agcaggggccggagccaccttcttc

SEQ ID NO: 886517 - DNA, 25 bp, Homo sapien
ccttggccttctttcctttcggcat

SEQ ID NO: 886518 - DNA, 25 bp, Homo sapien
cagcaggggccggagccaccttctt

SEQ ID NO: 886519 - DNA, 25 bp, Homo sapien
gagtgcctcatgcatcagagaagtc

SEQ ID NO: 886520 - DNA, 25 bp, Homo sapien
aagctgtatcaggtttgattggcaa

SEQ ID NO: 886521 - DNA, 25 bp, Homo sapien
tcttggataaagtcacgcataaccc

SEQ ID NO: 886522 - DNA, 25 bp, Homo sapien
gcataaccccacaaggtaaaagctg

SEQ ID NO: 886523 - DNA, 25 bp, Homo sapien
cgctctcccgtgatgtaggacatag

SEQ ID NO: 886524 - DNA, 25 bp, Homo sapien
tgcagtgatgtataacccctggctc

SEQ ID NO: 886525 - DNA, 25 bp, Homo sapien
attgccctctcgctctcccgtgatg

SEQ ID NO: 886526 - DNA, 25 bp, Homo sapien
tggctccgttcctccatcagcctgc

SEQ ID NO: 886527 - DNA, 25 bp, Homo sapien
tattttccgaattcaggcctgactc

SEQ ID NO: 886528 - DNA, 25 bp, Homo sapien
atattttccgaattcaggcctgact

SEQ ID NO: 886529 - DNA, 25 bp, Homo sapien
tttccgaattcaggcctgactccaa

SEQ ID NO: 886530 - DNA, 25 bp, Homo sapien
tcaggcctgactccaagaagcaaag

SEQ ID NO: 886531 - DNA, 25 bp, Homo sapien
ttgtgtatttctcaaggtcgttgtc

SEQ ID NO: 886532 - DNA, 25 bp, Homo sapien
tcattttgtcggtcacagttaggtg

SEQ ID NO: 886533 - DNA, 25 bp, Homo sapien
caaggtcgttgtcatagtatgatgt

SEQ ID NO: 886534 - DNA, 25 bp, Homo sapien
agttaggtgaacactgacctttcat

SEQ ID NO: 886535 - DNA, 25 bp, Homo sapien
ggagcacgtgaaagccgccttccat

SEQ ID NO: 886536 - DNA, 25 bp, Homo sapien
ttaggaccagtccagatggaatttc

SEQ ID NO: 886537 - DNA, 25 bp, Homo sapien
cgccttccatgaaaacccttgctgt

SEQ ID NO: 886538 - DNA, 25 bp, Homo sapien
ttcacaggccagctgaagcttgggt

SEQ ID NO: 886539 - DNA, 25 bp, Homo sapien
agaaaagtggaatggatactgggaa

SEQ ID NO: 886540 - DNA, 25 bp, Homo sapien
agtggaatggatactgggaaggaag

SEQ ID NO: 886541 - DNA, 25 bp, Homo sapien
gaagagaaaagtggaatggatactg

SEQ ID NO: 886542 - DNA, 25 bp, Homo sapien
aaagggaagtgttggaagagaagag

SEQ ID NO: 886543 - DNA, 25 bp, Homo sapien
gaggggcttccacatgatgaggaaa

SEQ ID NO: 886544 - DNA, 25 bp, Homo sapien
ttctatgaggttgagaaaaacaaaa

SEQ ID NO: 886545 - DNA, 25 bp, Homo sapien
gggcttccacatgatgaggaaatgt

SEQ ID NO: 886546 - DNA, 25 bp, Homo sapien
gaggaaatgtattctatgaggttga

SEQ ID NO: 886547 - DNA, 25 bp, Homo sapien
ggacagaggagccatttgggatcac

SEQ ID NO: 886548 - DNA, 25 bp, Homo sapien
atttgggatcacagccaggtgtgga

SEQ ID NO: 886549 - DNA, 25 bp, Homo sapien
cagaggagccatttgggatcacagc

SEQ ID NO: 886550 - DNA, 25 bp, Homo sapien
agaggagccatttgggatcacagcc

SEQ ID NO: 886551 - DNA, 25 bp, Homo sapien
tctgcattttctatgctccaagcgg

SEQ ID NO: 886552 - DNA, 25 bp, Homo sapien
ttctatgctccaagcggtcgctggg

SEQ ID NO: 886553 - DNA, 25 bp, Homo sapien
ggtagctggcttgagcctttctgtc

SEQ ID NO: 886554 - DNA, 25 bp, Homo sapien
gggtggagacgacggcgggcagtgg

SEQ ID NO: 886555 - DNA, 25 bp, Homo sapien
gaagaacgctcctgtagaagcagca

SEQ ID NO: 886556 - DNA, 25 bp, Homo sapien
gaggagaccgcttctcttgaccacc

SEQ ID NO: 886557 - DNA, 25 bp, Homo sapien
gtgtgaaggcccctgcgagtcttcc

SEQ ID NO: 886558 - DNA, 25 bp, Homo sapien
gtttttcagagcctaccatgttccc

SEQ ID NO: 886559 - DNA, 25 bp, Homo sapien
tccgtgtggtcttcgctatagagcc

SEQ ID NO: 886560 - DNA, 25 bp, Homo sapien
gaaaaattgccgttgatgatccata

SEQ ID NO: 886561 - DNA, 25 bp, Homo sapien
cagctttagggacaggctccaggtt

SEQ ID NO: 886562 - DNA, 25 bp, Homo sapien
tgtatgtagctactcttccgtgtgg

SEQ ID NO: 886563 - DNA, 25 bp, Homo sapien
atctattttcttgaatagcagtctc

SEQ ID NO: 886564 - DNA, 25 bp, Homo sapien
ttttcttgtttcaattctgcatcat

SEQ ID NO: 886565 - DNA, 25 bp, Homo sapien
aattctgcatcatctattttcttga

SEQ ID NO: 886566 - DNA, 25 bp, Homo sapien
tatttttcttgtttcaattctgcat

SEQ ID NO: 886567 - DNA, 25 bp, Homo sapien
ctgtttttgatcgggattctggatt

SEQ ID NO: 886568 - DNA, 25 bp, Homo sapien
tgactgtttttgatcgggattctgg

SEQ ID NO: 886569 - DNA, 25 bp, Homo sapien
gtttttgatcgggattctggatttc

SEQ ID NO: 886570 - DNA, 25 bp, Homo sapien
gactgtttttgatcgggattctgga

SEQ ID NO: 886571 - DNA, 25 bp, Homo sapien
tggtgaatgcatggatccttgacac

SEQ ID NO: 886572 - DNA, 25 bp, Homo sapien
ctggcaggtcatggagtaaaataag

SEQ ID NO: 886573 - DNA, 25 bp, Homo sapien
aaataagtcattggcacatggtgaa

SEQ ID NO: 886574 - DNA, 25 bp, Homo sapien
ggcaggttaggaacacgtctcacga

SEQ ID NO: 886575 - DNA, 25 bp, Homo sapien
cattttattgactgcaggtgtactc

SEQ ID NO: 886576 - DNA, 25 bp, Homo sapien
tcttcttgaacgttcctcccaaatc

SEQ ID NO: 886577 - DNA, 25 bp, Homo sapien
tctcaatggcaagttggcgaaggag

SEQ ID NO: 886578 - DNA, 25 bp, Homo sapien
ggttggctgttgctccagcacttct

SEQ ID NO: 886579 - DNA, 25 bp, Homo sapien
tcctcaaaattgaggcttctttccc

SEQ ID NO: 886580 - DNA, 25 bp, Homo sapien
ctcaaaattgaggcttctttcccct

SEQ ID NO: 886581 - DNA, 25 bp, Homo sapien
tgtgaagattggagatcactaattc

SEQ ID NO: 886582 - DNA, 25 bp, Homo sapien
ttgctgtgaagattggagatcacta

SEQ ID NO: 886583 - DNA, 25 bp, Homo sapien
ctgtgaagattggagatcactaatt

SEQ ID NO: 886584 - DNA, 25 bp, Homo sapien
gctgtgaagattggagatcactaat

SEQ ID NO: 886585 - DNA, 25 bp, Homo sapien
gatgttaacaagcttgaagtggcta

SEQ ID NO: 886586 - DNA, 25 bp, Homo sapien
taacaagcttgaagtggctaaagtc

SEQ ID NO: 886587 - DNA, 25 bp, Homo sapien
gcttgaagtggctaaagtcaataaa

SEQ ID NO: 886588 - DNA, 25 bp, Homo sapien
atgtttgatgttaacaagcttgaag

SEQ ID NO: 886589 - DNA, 25 bp, Homo sapien
taagtctctatgtgcagcccaatgt

SEQ ID NO: 886590 - DNA, 25 bp, Homo sapien
aaattaagtctctatgtgcagccca

SEQ ID NO: 886591 - DNA, 25 bp, Homo sapien
ttaagtctctatgtgcagcccaatg

SEQ ID NO: 886592 - DNA, 25 bp, Homo sapien
aattaagtctctatgtgcagcccaa

SEQ ID NO: 886593 - DNA, 25 bp, Homo sapien
tcggggaggaaatctgttgcttaaa

SEQ ID NO: 886594 - DNA, 25 bp, Homo sapien
ttatcggggaggaaatctgttgctt

SEQ ID NO: 886595 - DNA, 25 bp, Homo sapien
tatcggggaggaaatctgttgctta

SEQ ID NO: 886596 - DNA, 25 bp, Homo sapien
atcggggaggaaatctgttgcttaa

SEQ ID NO: 886597 - DNA, 25 bp, Homo sapien
tggattctgaatagcagctggcctg

SEQ ID NO: 886598 - DNA, 25 bp, Homo sapien
tggccgaccttgcatgaacacactg

SEQ ID NO: 886599 - DNA, 25 bp, Homo sapien
tcatcactaatgtgggtcctcccag

SEQ ID NO: 886600 - DNA, 25 bp, Homo sapien
ggtccacgtagcatccacacaattg

SEQ ID NO: 886601 - DNA, 25 bp, Homo sapien
gtaggttgttagttgattccccaga

SEQ ID NO: 886602 - DNA, 25 bp, Homo sapien
cctttcagggtaagtgtggggacag

SEQ ID NO: 886603 - DNA, 25 bp, Homo sapien
ttgttagttgattccccagaaagca

SEQ ID NO: 886604 - DNA, 25 bp, Homo sapien
ccagaaagcagttctgtgaagctat

SEQ ID NO: 886605 - DNA, 25 bp, Homo sapien
tgctcgctggatgccaggggtatat

SEQ ID NO: 886606 - DNA, 25 bp, Homo sapien
ggaggaagtagtgccagtgcttggg

SEQ ID NO: 886607 - DNA, 25 bp, Homo sapien
ccagggtgtttacagggtagaatga

SEQ ID NO: 886608 - DNA, 25 bp, Homo sapien
ggtatatgaggaggaagtagtgcca

SEQ ID NO: 886609 - DNA, 25 bp, Homo sapien
tgcacagtgggatcagaggagcagg

SEQ ID NO: 886610 - DNA, 25 bp, Homo sapien
gtgggatcagaggagcagggccggg

SEQ ID NO: 886611 - DNA, 25 bp, Homo sapien
gggacttttgttccgcagagtccac

SEQ ID NO: 886612 - DNA, 25 bp, Homo sapien
ggggacttttgttccgcagagtcca

SEQ ID NO: 886613 - DNA, 25 bp, Homo sapien
cggatattttgtgccgatttggagg

SEQ ID NO: 886614 - DNA, 25 bp, Homo sapien
gatattttgtgccgatttggaggcc

SEQ ID NO: 886615 - DNA, 25 bp, Homo sapien
gcggatattttgtgccgatttggag

SEQ ID NO: 886616 - DNA, 25 bp, Homo sapien
ctgcggatattttgtgccgatttgg

SEQ ID NO: 886617 - DNA, 25 bp, Homo sapien
aagatttctgggtagggatgtgaca

SEQ ID NO: 886618 - DNA, 25 bp, Homo sapien
gggatgtgacatgatgaaaatgatg

SEQ ID NO: 886619 - DNA, 25 bp, Homo sapien
atgtccagggtggactggttgctca

SEQ ID NO: 886620 - DNA, 25 bp, Homo sapien
ttgctcaggatggccctagggatga

SEQ ID NO: 886621 - DNA, 25 bp, Homo sapien
caacttttactgtccatgaggtcca

SEQ ID NO: 886622 - DNA, 25 bp, Homo sapien
gatctcccttgagcagttacggctg

SEQ ID NO: 886623 - DNA, 25 bp, Homo sapien
taaatacttagggttggtgcccatc

SEQ ID NO: 886624 - DNA, 25 bp, Homo sapien
ccatgatggctagtgtagtgcttcc

SEQ ID NO: 886625 - DNA, 25 bp, Homo sapien
gattccgcttcagcacctttgatgt

SEQ ID NO: 886626 - DNA, 25 bp, Homo sapien
tctatttggactagattccgcttca

SEQ ID NO: 886627 - DNA, 25 bp, Homo sapien
gatcatctatttggactagattccg

SEQ ID NO: 886628 - DNA, 25 bp, Homo sapien
ttggactagattccgcttcagcacc

SEQ ID NO: 886629 - DNA, 25 bp, Homo sapien
ctttgtagctgaaagtctagaatag

SEQ ID NO: 886630 - DNA, 25 bp, Homo sapien
ttgtagctgaaagtctagaatagcc

SEQ ID NO: 886631 - DNA, 25 bp, Homo sapien
gtagctgaaagtctagaatagccat

SEQ ID NO: 886632 - DNA, 25 bp, Homo sapien
tgtagctgaaagtctagaatagcca

SEQ ID NO: 886633 - DNA, 25 bp, Homo sapien
ggtgatgaggatagaatgagattat

SEQ ID NO: 886634 - DNA, 25 bp, Homo sapien
ctgccccttttgattccccagggtg

SEQ ID NO: 886635 - DNA, 25 bp, Homo sapien
agcacttgaaagctgcgatagcttt

SEQ ID NO: 886636 - DNA, 25 bp, Homo sapien
tgaaagctgcgatagctttggccag

SEQ ID NO: 886637 - DNA, 25 bp, Homo sapien
caaaatatgggtatgggtaaatgcc

SEQ ID NO: 886638 - DNA, 25 bp, Homo sapien
cccaaaatatgggtatgggtaaatg

SEQ ID NO: 886639 - DNA, 25 bp, Homo sapien
ttggataacacccaaaatatgggta

SEQ ID NO: 886640 - DNA, 25 bp, Homo sapien
gataacacccaaaatatgggtatgg

SEQ ID NO: 886641 - DNA, 25 bp, Homo sapien
ctacactcggtcagaactcagtggt

SEQ ID NO: 886642 - DNA, 25 bp, Homo sapien
tggcttggggactttacatttgagt

SEQ ID NO: 886643 - DNA, 25 bp, Homo sapien
cactcggtcagaactcagtggtggc

SEQ ID NO: 886644 - DNA, 25 bp, Homo sapien
ttacatttgagtgttcctggaagaa

SEQ ID NO: 886645 - DNA, 25 bp, Homo sapien
aaccaaagcttgtctctcagggggt

SEQ ID NO: 886646 - DNA, 25 bp, Homo sapien
gctttgtgagtgtgcagataactca

SEQ ID NO: 886647 - DNA, 25 bp, Homo sapien
ggtcatcaagcaggctttgtgagtg

SEQ ID NO: 886648 - DNA, 25 bp, Homo sapien
gccaaggtcatcaagcaggctttgt

SEQ ID NO: 886649 - DNA, 25 bp, Homo sapien
agccatttggcaagtgtgtgccaag

SEQ ID NO: 886650 - DNA, 25 bp, Homo sapien
ttcaacttgtggaggctcttgtttt

SEQ ID NO: 886651 - DNA, 25 bp, Homo sapien
tcaacttgtggaggctcttgttttc

SEQ ID NO: 886652 - DNA, 25 bp, Homo sapien
tagcacagtcagcattagggagatc

SEQ ID NO: 886653 - DNA, 25 bp, Homo sapien
ggccgactcaagatgcctagacagt

SEQ ID NO: 886654 - DNA, 25 bp, Homo sapien
taaagaggacaggtcgcttcacacc

SEQ ID NO: 886655 - DNA, 25 bp, Homo sapien
ttcacaccacgatccctttttggga

SEQ ID NO: 886656 - DNA, 25 bp, Homo sapien
aaggagaggttttcagccatcggca

SEQ ID NO: 886657 - DNA, 25 bp, Homo sapien
ggcataaccatattggaaaatcagg

SEQ ID NO: 886658 - DNA, 25 bp, Homo sapien
gagttgaaggagaggttttcagcca

SEQ ID NO: 886659 - DNA, 25 bp, Homo sapien
cagagactgccgtcataggcataac

SEQ ID NO: 886660 - DNA, 25 bp, Homo sapien
tgttggttcattagacccagctgct

SEQ ID NO: 886661 - DNA, 25 bp, Homo sapien
gtgttggttcattagacccagctgc

SEQ ID NO: 886662 - DNA, 25 bp, Homo sapien
ttagtgaacacctctgctattccag

SEQ ID NO: 886663 - DNA, 25 bp, Homo sapien
tgtgttggttcattagacccagctg

SEQ ID NO: 886664 - DNA, 25 bp, Homo sapien
tcttccccagtaacagctaggtggc

SEQ ID NO: 886665 - DNA, 25 bp, Homo sapien
taaatacagcactaagtagtgtgcc

SEQ ID NO: 886666 - DNA, 25 bp, Homo sapien
gactccggtgccagacagattacat

SEQ ID NO: 886667 - DNA, 25 bp, Homo sapien
taaggctctgcgagattgccaagca

SEQ ID NO: 886668 - DNA, 25 bp, Homo sapien
tggtcttgatagagcatgtggagaa

SEQ ID NO: 886669 - DNA, 25 bp, Homo sapien
acttggtcttgatagagcatgtgga

SEQ ID NO: 886670 - DNA, 25 bp, Homo sapien
gagaaagccttcttgggttccatga

SEQ ID NO: 886671 - DNA, 25 bp, Homo sapien
tctttgtctccataatagtttttca

SEQ ID NO: 886672 - DNA, 25 bp, Homo sapien
cgggcagaattggacttgaatcaag

SEQ ID NO: 886673 - DNA, 25 bp, Homo sapien
aaggtcacatggtaacgggcagaat

SEQ ID NO: 886674 - DNA, 25 bp, Homo sapien
catcagatgcttgtaatgccgtaaa

SEQ ID NO: 886675 - DNA, 25 bp, Homo sapien
agattacaagattcactcaaggtca

SEQ ID NO: 886676 - DNA, 25 bp, Homo sapien
acttatatacagcaactcctggagt

SEQ ID NO: 886677 - DNA, 25 bp, Homo sapien
tcctggagtgccctgaataacggtc

SEQ ID NO: 886678 - DNA, 25 bp, Homo sapien
gaataacggtcccagtggagatgac

SEQ ID NO: 886679 - DNA, 25 bp, Homo sapien
agtggagatgaccatcacaaaagcc

SEQ ID NO: 886680 - DNA, 25 bp, Homo sapien
gcctccattaaggtaccagatgtat

SEQ ID NO: 886681 - DNA, 25 bp, Homo sapien
tctattctaattggtgagtgatgtg

SEQ ID NO: 886682 - DNA, 25 bp, Homo sapien
aagcctgtgctgtcgcctccattaa

SEQ ID NO: 886683 - DNA, 25 bp, Homo sapien
tgatgtgtgaactaatcagaagcct

SEQ ID NO: 886684 - DNA, 25 bp, Homo sapien
agtgcagcctttctcataacctttg

SEQ ID NO: 886685 - DNA, 25 bp, Homo sapien
gtatttgctccctgcaacgtctggg

SEQ ID NO: 886686 - DNA, 25 bp, Homo sapien
tgttattacccaagatttcgcctcc

SEQ ID NO: 886687 - DNA, 25 bp, Homo sapien
cagtaaatcctgtttgttgcttgag

SEQ ID NO: 886688 - DNA, 25 bp, Homo sapien
gccaaaagagtttgcagcaggatgg

SEQ ID NO: 886689 - DNA, 25 bp, Homo sapien
gcaggatggcatcagcgcagacaca

SEQ ID NO: 886690 - DNA, 25 bp, Homo sapien
agagccaaaagagtttgcagcagga

SEQ ID NO: 886691 - DNA, 25 bp, Homo sapien
aggatggcatcagcgcagacacatt

SEQ ID NO: 886692 - DNA, 25 bp, Homo sapien
gcttgttggaaagccctcgacgaga

SEQ ID NO: 886693 - DNA, 25 bp, Homo sapien
ttccaagttgcttgttggaaagccc

SEQ ID NO: 886694 - DNA, 25 bp, Homo sapien
agccctcgacgagactgacaaacct

SEQ ID NO: 886695 - DNA, 25 bp, Homo sapien
tgttggaaagccctcgacgagactg

SEQ ID NO: 886696 - DNA, 25 bp, Homo sapien
aaaccctgctgacacaaggctgttc

SEQ ID NO: 886697 - DNA, 25 bp, Homo sapien
gccggcgacatccttctggtaagct

SEQ ID NO: 886698 - DNA, 25 bp, Homo sapien
ccaaaccctgctgacacaaggctgt

SEQ ID NO: 886699 - DNA, 25 bp, Homo sapien
ttctggtaagctgcccaaaccctgc

SEQ ID NO: 886700 - DNA, 25 bp, Homo sapien
gcctagacacggataccttctttct

SEQ ID NO: 886701 - DNA, 25 bp, Homo sapien
gacacagagcctagacacggatacc

SEQ ID NO: 886702 - DNA, 25 bp, Homo sapien
gctagacacagagcctagacacgga

SEQ ID NO: 886703 - DNA, 25 bp, Homo sapien
gacacggataccttctttcttgatt

SEQ ID NO: 886704 - DNA, 25 bp, Homo sapien
ggtggcagcaatcatgtactcaatg

SEQ ID NO: 886705 - DNA, 25 bp, Homo sapien
ccaggtggcagcaatcatgtactca

SEQ ID NO: 886706 - DNA, 25 bp, Homo sapien
tggcagcaatcatgtactcaatgcc

SEQ ID NO: 886707 - DNA, 25 bp, Homo sapien
caggtggcagcaatcatgtactcaa

SEQ ID NO: 886708 - DNA, 25 bp, Homo sapien
tgctgtactccgtctcctggctttg

SEQ ID NO: 886709 - DNA, 25 bp, Homo sapien
gctgtactccgtctcctggctttgc

SEQ ID NO: 886710 - DNA, 25 bp, Homo sapien
ctgctgtactccgtctcctggcttt

SEQ ID NO: 886711 - DNA, 25 bp, Homo sapien
ttctgtggtcagacagttttctgga

SEQ ID NO: 886712 - DNA, 25 bp, Homo sapien
tctttcctcccggacatgagtgact

SEQ ID NO: 886713 - DNA, 25 bp, Homo sapien
tgcaaccgataaaaatgagactcag

SEQ ID NO: 886714 - DNA, 25 bp, Homo sapien
tatttccagccttgttttgcaaccg

SEQ ID NO: 886715 - DNA, 25 bp, Homo sapien
ccaattaggtgccaagatcttcaga

SEQ ID NO: 886716 - DNA, 25 bp, Homo sapien
tcttagtacggctccaaagcatgag

SEQ ID NO: 886717 - DNA, 25 bp, Homo sapien
caaagacgagaaagccctggtagat

SEQ ID NO: 886718 - DNA, 25 bp, Homo sapien
tttggtgcagaaaactagaccctcc

SEQ ID NO: 886719 - DNA, 25 bp, Homo sapien
gctaaaagtgtgcagtccatccgta

SEQ ID NO: 886720 - DNA, 25 bp, Homo sapien
gactaggtttcaagacgaagatcag

SEQ ID NO: 886721 - DNA, 25 bp, Homo sapien
tcagtttaatggtataggcttcctc

SEQ ID NO: 886722 - DNA, 25 bp, Homo sapien
gcaacagatagggtttacaaaagcc

SEQ ID NO: 886723 - DNA, 25 bp, Homo sapien
agccacaatggcacagtaaaaatca

SEQ ID NO: 886724 - DNA, 25 bp, Homo sapien
cactggagtctagcactgccctgga

SEQ ID NO: 886725 - DNA, 25 bp, Homo sapien
gcactgccctggaggaacccgtggg

SEQ ID NO: 886726 - DNA, 25 bp, Homo sapien
gcactggagtctagcactgccctgg

SEQ ID NO: 886727 - DNA, 25 bp, Homo sapien
tagaaggaagcggggtaagatgcca

SEQ ID NO: 886728 - DNA, 25 bp, Homo sapien
gtagaaggaagcggggtaagatgcc

SEQ ID NO: 886729 - DNA, 25 bp, Homo sapien
aagtagaaggaagcggggtaagatg

SEQ ID NO: 886730 - DNA, 25 bp, Homo sapien
gaaggaagcggggtaagatgccagc

SEQ ID NO: 886731 - DNA, 25 bp, Homo sapien
tatggtgtctgctagatcaactgac

SEQ ID NO: 886732 - DNA, 25 bp, Homo sapien
gagacaaagtggactatggtgtctg

SEQ ID NO: 886733 - DNA, 25 bp, Homo sapien
tggactatggtgtctgctagatcaa

SEQ ID NO: 886734 - DNA, 25 bp, Homo sapien
agaaggcaatggttaacccttctgt

SEQ ID NO: 886735 - DNA, 25 bp, Homo sapien
tatttgactgatcataagggcagac

SEQ ID NO: 886736 - DNA, 25 bp, Homo sapien
aaaggtcgtgactttgagaaagtct

SEQ ID NO: 886737 - DNA, 25 bp, Homo sapien
gccttgcaagccctgttcatgggaa

SEQ ID NO: 886738 - DNA, 25 bp, Homo sapien
taagggcagacggtgaacagagcca

SEQ ID NO: 886739 - DNA, 25 bp, Homo sapien
tcctgcaaagagcaacagagcatcg

SEQ ID NO: 886740 - DNA, 25 bp, Homo sapien
gcaaacccctagctttctgttgagg

SEQ ID NO: 886741 - DNA, 25 bp, Homo sapien
ggagcgtggtcatgaagcctgatca

SEQ ID NO: 886742 - DNA, 25 bp, Homo sapien
tgatgaggaagcttctgtggcaccc

SEQ ID NO: 886743 - DNA, 25 bp, Homo sapien
ttcactgagcatgtggcatgatcat

SEQ ID NO: 886744 - DNA, 25 bp, Homo sapien
gcccaccctctcccaatacacagct

SEQ ID NO: 886745 - DNA, 25 bp, Homo sapien
cactgagcatgtggcatgatcatga

SEQ ID NO: 886746 - DNA, 25 bp, Homo sapien
ccaccctctcccaatacacagctgt

SEQ ID NO: 886747 - DNA, 25 bp, Homo sapien
tgtatggactgcttctgacaggtca

SEQ ID NO: 886748 - DNA, 25 bp, Homo sapien
agacatacaaagaacccctcattgt

SEQ ID NO: 886749 - DNA, 25 bp, Homo sapien
tgacaggtcatcaaatttaagcccc

SEQ ID NO: 886750 - DNA, 25 bp, Homo sapien
cattgtcttcagctcagatacatat

SEQ ID NO: 886751 - DNA, 25 bp, Homo sapien
gatagacttttagtgactccctggg

SEQ ID NO: 886752 - DNA, 25 bp, Homo sapien
tgttgatagtaccagcagacggtaa

SEQ ID NO: 886753 - DNA, 25 bp, Homo sapien
caataagggctagcaattaaggtac

SEQ ID NO: 886754 - DNA, 25 bp, Homo sapien
tctgaccggttgagcattaaggaag

SEQ ID NO: 886755 - DNA, 25 bp, Homo sapien
tgaagtcaagtggtagggcaataat

SEQ ID NO: 886756 - DNA, 25 bp, Homo sapien
taatgaagtcaagtggtagggcaat

SEQ ID NO: 886757 - DNA, 25 bp, Homo sapien
agtcaagtggtagggcaataatctc

SEQ ID NO: 886758 - DNA, 25 bp, Homo sapien
agtggtagggcaataatctcaagga

SEQ ID NO: 886759 - DNA, 25 bp, Homo sapien
gttgagttgcctcccgtcgcctgca

SEQ ID NO: 886760 - DNA, 25 bp, Homo sapien
cattgctattttgggcttcggaagt

SEQ ID NO: 886761 - DNA, 25 bp, Homo sapien
aagtgggagtagtgagttgagttgc

SEQ ID NO: 886762 - DNA, 25 bp, Homo sapien
gggtgaattcattgctattttgggc

SEQ ID NO: 886763 - DNA, 25 bp, Homo sapien
gcttcagggatttgttgccatggca

SEQ ID NO: 886764 - DNA, 25 bp, Homo sapien
cactaataagctgaaactgggcttc

SEQ ID NO: 886765 - DNA, 25 bp, Homo sapien
tgccatggcatgtaaactcccttta

SEQ ID NO: 886766 - DNA, 25 bp, Homo sapien
agtgctcatttgctgtggccaattt

SEQ ID NO: 886767 - DNA, 25 bp, Homo sapien
ttccaccgggggacagtcgcctgct

SEQ ID NO: 886768 - DNA, 25 bp, Homo sapien
ttgtcagtgctggagttccaccggg

SEQ ID NO: 886769 - DNA, 25 bp, Homo sapien
agcatttccccattagctgactctc

SEQ ID NO: 886770 - DNA, 25 bp, Homo sapien
atttccccattagctgactctctgc

SEQ ID NO: 886771 - DNA, 25 bp, Homo sapien
cagctgatcaaacaccaggcctcac

SEQ ID NO: 886772 - DNA, 25 bp, Homo sapien
gagacagctgatcaaacaccaggcc

SEQ ID NO: 886773 - DNA, 25 bp, Homo sapien
tgagacagctgatcaaacaccaggc

SEQ ID NO: 886774 - DNA, 25 bp, Homo sapien
cctcctagacttgctgtggttgcca

SEQ ID NO: 886775 - DNA, 25 bp, Homo sapien
gaaaggcggctatttcctacaagca

SEQ ID NO: 886776 - DNA, 25 bp, Homo sapien
taagaaggcctgtcgtttcctccag

SEQ ID NO: 886777 - DNA, 25 bp, Homo sapien
gcttgaagctcgtctgtaaacactg

SEQ ID NO: 886778 - DNA, 25 bp, Homo sapien
cctgttcattgtgatggcagctcat

SEQ ID NO: 886779 - DNA, 25 bp, Homo sapien
tatggttgtcaagagacagcagctc

SEQ ID NO: 886780 - DNA, 25 bp, Homo sapien
tgtaggaacaccagagccattcagg

SEQ ID NO: 886781 - DNA, 25 bp, Homo sapien
gcctcttccagaatcatgacccttg

SEQ ID NO: 886782 - DNA, 25 bp, Homo sapien
ccttccgactttatgctgcctgtgg

SEQ ID NO: 886783 - DNA, 25 bp, Homo sapien
cgtgggatggtgacaggagggtctc

SEQ ID NO: 886784 - DNA, 25 bp, Homo sapien
cagcttcgtgggatggtgacaggag

SEQ ID NO: 886785 - DNA, 25 bp, Homo sapien
aggagggtctctcctgagtactcac

SEQ ID NO: 886786 - DNA, 25 bp, Homo sapien
ccagaatgcattctgcagcttcgtg

SEQ ID NO: 886787 - DNA, 25 bp, Homo sapien
tgggacgaactaggctaacaaacat

SEQ ID NO: 886788 - DNA, 25 bp, Homo sapien
gtccggtggtcactgggacgaacta

SEQ ID NO: 886789 - DNA, 25 bp, Homo sapien
gtggtcactgggacgaactaggcta

SEQ ID NO: 886790 - DNA, 25 bp, Homo sapien
cactgggacgaactaggctaacaaa

SEQ ID NO: 886791 - DNA, 25 bp, Homo sapien
cgatttgcctttcatgagctcccag

SEQ ID NO: 886792 - DNA, 25 bp, Homo sapien
tataggtaagaatgcctgcgtttcc

SEQ ID NO: 886793 - DNA, 25 bp, Homo sapien
cctggcgtgtatatgttggctgtca

SEQ ID NO: 886794 - DNA, 25 bp, Homo sapien
tattgtcctgtgtacctgctttcca

SEQ ID NO: 886795 - DNA, 25 bp, Homo sapien
ttccgctttgctttagtcatgttga

SEQ ID NO: 886796 - DNA, 25 bp, Homo sapien
cttcttgtatactctgctatttctt

SEQ ID NO: 886797 - DNA, 25 bp, Homo sapien
ccgctttgctttagtcatgttgaag

SEQ ID NO: 886798 - DNA, 25 bp, Homo sapien
tttgctttagtcatgttgaagccct

SEQ ID NO: 886799 - DNA, 25 bp, Homo sapien
gaagcccagggaatggactgctctg

SEQ ID NO: 886800 - DNA, 25 bp, Homo sapien
gcaactgttgtcctctgcatctttc

SEQ ID NO: 886801 - DNA, 25 bp, Homo sapien
ttgtcaagaatgagccagcactgca

SEQ ID NO: 886802 - DNA, 25 bp, Homo sapien
ggaggagtgacaggcccatttgtca

SEQ ID NO: 886803 - DNA, 25 bp, Homo sapien
taccattcgctctcttgtgggatga

SEQ ID NO: 886804 - DNA, 25 bp, Homo sapien
tagaattaagtgcacatggcaatgg

SEQ ID NO: 886805 - DNA, 25 bp, Homo sapien
gattccctgatccaggttgtcagga

SEQ ID NO: 886806 - DNA, 25 bp, Homo sapien
ttccatgagggttaagagttgactg

SEQ ID NO: 886807 - DNA, 25 bp, Homo sapien
gctttgctagtgaaacacccctgga

SEQ ID NO: 886808 - DNA, 25 bp, Homo sapien
gacctaatgtttcttccacgtggag

SEQ ID NO: 886809 - DNA, 25 bp, Homo sapien
tagttccatgggtgaagtttgcagc

SEQ ID NO: 886810 - DNA, 25 bp, Homo sapien
gtgaatgttccttcccgagacctaa

SEQ ID NO: 886811 - DNA, 25 bp, Homo sapien
tcactgcatgcagagctatggtaac

SEQ ID NO: 886812 - DNA, 25 bp, Homo sapien
tgtagccatccaagcagtaggaggg

SEQ ID NO: 886813 - DNA, 25 bp, Homo sapien
cattttgaattgtagccatccaagc

SEQ ID NO: 886814 - DNA, 25 bp, Homo sapien
aaccctctgtacctatttctccaag

SEQ ID NO: 886815 - DNA, 25 bp, Homo sapien
agcaccctcagttctgtgattcccc

SEQ ID NO: 886816 - DNA, 25 bp, Homo sapien
aatgctgccaatgcccctgccttta

SEQ ID NO: 886817 - DNA, 25 bp, Homo sapien
tggaaaagggcaatttggctttcag

SEQ ID NO: 886818 - DNA, 25 bp, Homo sapien
aaactgaggcttcactgtggagcac

SEQ ID NO: 886819 - DNA, 25 bp, Homo sapien
tgcccttcgggccacagttgtttgc

SEQ ID NO: 886820 - DNA, 25 bp, Homo sapien
cagttgcttcgtatataaactcggg

SEQ ID NO: 886821 - DNA, 25 bp, Homo sapien
gtcagattctccatcatggaaaggt

SEQ ID NO: 886822 - DNA, 25 bp, Homo sapien
catggaaaggtctaattgggattca

SEQ ID NO: 886823 - DNA, 25 bp, Homo sapien
agagcccaggtggagaaagaggtgc

SEQ ID NO: 886824 - DNA, 25 bp, Homo sapien
ctagagcccaggtggagaaagaggt

SEQ ID NO: 886825 - DNA, 25 bp, Homo sapien
tagagcccaggtggagaaagaggtg

SEQ ID NO: 886826 - DNA, 25 bp, Homo sapien
ctttccagctgcatagctttgggca

SEQ ID NO: 886827 - DNA, 25 bp, Homo sapien
tacttgcactggtacagcaggactg

SEQ ID NO: 886828 - DNA, 25 bp, Homo sapien
gcaggactgattccacaaggccatg

SEQ ID NO: 886829 - DNA, 25 bp, Homo sapien
tttgggcagttctctacaatgtgat

SEQ ID NO: 886830 - DNA, 25 bp, Homo sapien
ggaaggcaattaattgtaagcaaac

SEQ ID NO: 886831 - DNA, 25 bp, Homo sapien
aggaaggcaattaattgtaagcaaa

SEQ ID NO: 886832 - DNA, 25 bp, Homo sapien
gaggaaggcaattaattgtaagcaa

SEQ ID NO: 886833 - DNA, 25 bp, Homo sapien
ggaggaaggcaattaattgtaagca

SEQ ID NO: 886834 - DNA, 25 bp, Homo sapien
ctgacttcacccctgctgcaagtga

SEQ ID NO: 886835 - DNA, 25 bp, Homo sapien
aaggacccagctgactgacttcacc

SEQ ID NO: 886836 - DNA, 25 bp, Homo sapien
agctgactgacttcacccctgctgc

SEQ ID NO: 886837 - DNA, 25 bp, Homo sapien
caaaggacccagctgactgacttca

SEQ ID NO: 886838 - DNA, 25 bp, Homo sapien
cttccatgtgtataggatctttttc

SEQ ID NO: 886839 - DNA, 25 bp, Homo sapien
tgcttccatgtgtataggatctttt

SEQ ID NO: 886840 - DNA, 25 bp, Homo sapien
ccatgtgtataggatctttttcttt

SEQ ID NO: 886841 - DNA, 25 bp, Homo sapien
tccatgtgtataggatctttttctt

SEQ ID NO: 886842 - DNA, 25 bp, Homo sapien
gctctcgtgatttctggctgagttc

SEQ ID NO: 886843 - DNA, 25 bp, Homo sapien
atttgctctcgtgatttctggctga

SEQ ID NO: 886844 - DNA, 25 bp, Homo sapien
gtctgggggatgacacgccctcctc

SEQ ID NO: 886845 - DNA, 25 bp, Homo sapien
ttcttcaatcgccacacttgcacag

SEQ ID NO: 886846 - DNA, 25 bp, Homo sapien
ctttggtgttccagcaccatagagc

SEQ ID NO: 886847 - DNA, 25 bp, Homo sapien
tttgcccaggattgccctcattcag

SEQ ID NO: 886848 - DNA, 25 bp, Homo sapien
gtggcccagctagtctacaaccact

SEQ ID NO: 886849 - DNA, 25 bp, Homo sapien
cctgtggcccagctagtctacaacc

SEQ ID NO: 886850 - DNA, 25 bp, Homo sapien
ttgcccaggattgccctcattcagc

SEQ ID NO: 886851 - DNA, 25 bp, Homo sapien
ccagagagaaggatttcgcaaaaca

SEQ ID NO: 886852 - DNA, 25 bp, Homo sapien
ggacctggcttgagctgtgcttcag

SEQ ID NO: 886853 - DNA, 25 bp, Homo sapien
aacgcaaatgcgaggaacagggaag

SEQ ID NO: 886854 - DNA, 25 bp, Homo sapien
gaagatcactgttgtgagcacgtag

SEQ ID NO: 886855 - DNA, 25 bp, Homo sapien
ccgtctccttaggacagcgagagaa

SEQ ID NO: 886856 - DNA, 25 bp, Homo sapien
gtttagtgaccgtctccttaggaca

SEQ ID NO: 886857 - DNA, 25 bp, Homo sapien
gtggagtttagtgaccgtctcctta

SEQ ID NO: 886858 - DNA, 25 bp, Homo sapien
tagtgaccgtctccttaggacagcg

SEQ ID NO: 886859 - DNA, 25 bp, Homo sapien
cacagaaatggaagatataaatgaa

SEQ ID NO: 886860 - DNA, 25 bp, Homo sapien
ggtagttgccatcgacaaaacaact

SEQ ID NO: 886861 - DNA, 25 bp, Homo sapien
tatggtagttgccatcgacaaaaca

SEQ ID NO: 886862 - DNA, 25 bp, Homo sapien
agttgccatcgacaaaacaactgtc

SEQ ID NO: 886863 - DNA, 25 bp, Homo sapien
ctttgaggtcagtatggaaatctgc

SEQ ID NO: 886864 - DNA, 25 bp, Homo sapien
atgactctgggatgatacaaagcca

SEQ ID NO: 886865 - DNA, 25 bp, Homo sapien
catgttttcatcagatggtctttga

SEQ ID NO: 886866 - DNA, 25 bp, Homo sapien
aagccagacttttcccgtgctgaac

SEQ ID NO: 886867 - DNA, 25 bp, Homo sapien
agtagtaagcaatcacttagttgtg

SEQ ID NO: 886868 - DNA, 25 bp, Homo sapien
gagatgtctattttctctccagaac

SEQ ID NO: 886869 - DNA, 25 bp, Homo sapien
tatggccataggactgaaggtgttg

SEQ ID NO: 886870 - DNA, 25 bp, Homo sapien
ccaaatgccttctaactgggaggat

SEQ ID NO: 886871 - DNA, 25 bp, Homo sapien
agtagatgaacctgtagcctgagac

SEQ ID NO: 886872 - DNA, 25 bp, Homo sapien
tgtagcctgagaccatgctgtttga

SEQ ID NO: 886873 - DNA, 25 bp, Homo sapien
tgagaccatgctgtttgagcttcct

SEQ ID NO: 886874 - DNA, 25 bp, Homo sapien
tgaacctgtagcctgagaccatgct

SEQ ID NO: 886875 - DNA, 25 bp, Homo sapien
tgcgttttgcgtttcctatagcaca

SEQ ID NO: 886876 - DNA, 25 bp, Homo sapien
tcttctccatgcatcaggtactaca

SEQ ID NO: 886877 - DNA, 25 bp, Homo sapien
tactacatgattaccaggaagactc

SEQ ID NO: 886878 - DNA, 25 bp, Homo sapien
tcaagtgactttcgtctccattcag

SEQ ID NO: 886879 - DNA, 25 bp, Homo sapien
gtcttaccactggactgtacctcat

SEQ ID NO: 886880 - DNA, 25 bp, Homo sapien
tccgtgtcttaccactggactgtac

SEQ ID NO: 886881 - DNA, 25 bp, Homo sapien
gatgtttccgtgtcttaccactgga

SEQ ID NO: 886882 - DNA, 25 bp, Homo sapien
tgactggatgtttccgtgtcttacc

SEQ ID NO: 886883 - DNA, 25 bp, Homo sapien
tgccagtgccggcagagtggcccac

SEQ ID NO: 886884 - DNA, 25 bp, Homo sapien
tatgatactccccactaagttccca

SEQ ID NO: 886885 - DNA, 25 bp, Homo sapien
ttgccattgggcgaagggaccagaa

SEQ ID NO: 886886 - DNA, 25 bp, Homo sapien
gatgaggctcactgttgccactggg

SEQ ID NO: 886887 - DNA, 25 bp, Homo sapien
gaaattatcttcagcccattatcag

SEQ ID NO: 886888 - DNA, 25 bp, Homo sapien
ccagagatgatttgagcagccatgc

SEQ ID NO: 886889 - DNA, 25 bp, Homo sapien
tgcaagatttccatgaggcgactcc

SEQ ID NO: 886890 - DNA, 25 bp, Homo sapien
gaccttcagccctagcaatgcagag

SEQ ID NO: 886891 - DNA, 25 bp, Homo sapien
ttctgagggtagtgaaagccaatcc

SEQ ID NO: 886892 - DNA, 25 bp, Homo sapien
tcaagactccctggcagttgttctt

SEQ ID NO: 886893 - DNA, 25 bp, Homo sapien
tggatttcctacacccttctgaggg

SEQ ID NO: 886894 - DNA, 25 bp, Homo sapien
taactgagtaagagatggatttcct

SEQ ID NO: 886895 - DNA, 25 bp, Homo sapien
gagacagagcgtcagctttggtttg

SEQ ID NO: 886896 - DNA, 25 bp, Homo sapien
tgccttgacacattatactcctcat

SEQ ID NO: 886897 - DNA, 25 bp, Homo sapien
acagagcgtcagctttggtttgcct

SEQ ID NO: 886898 - DNA, 25 bp, Homo sapien
tttgccttgacacattatactcctc

SEQ ID NO: 886899 - DNA, 25 bp, Homo sapien
agctcaggccacgtaactagaggac

SEQ ID NO: 886900 - DNA, 25 bp, Homo sapien
agaggactgtcagctcaggccacgt

SEQ ID NO: 886901 - DNA, 25 bp, Homo sapien
gactgtcagctcaggccacgtaact

SEQ ID NO: 886902 - DNA, 25 bp, Homo sapien
gtcagctcaggccacgtaactagag

SEQ ID NO: 886903 - DNA, 25 bp, Homo sapien
caactcttatggaaacgatctttcg

SEQ ID NO: 886904 - DNA, 25 bp, Homo sapien
cgatctttcgattgtttttgcagga

SEQ ID NO: 886905 - DNA, 25 bp, Homo sapien
tttaaacccgagatctcatcaactc

SEQ ID NO: 886906 - DNA, 25 bp, Homo sapien
caggaaagcctgaaggacacgtcta

SEQ ID NO: 886907 - DNA, 25 bp, Homo sapien
ctgcctcgccgggtggtttctgctt

SEQ ID NO: 886908 - DNA, 25 bp, Homo sapien
ggaccccaagcatgcgtggcacagg

SEQ ID NO: 886909 - DNA, 25 bp, Homo sapien
tgcaggcctccttgccgcgttggga

SEQ ID NO: 886910 - DNA, 25 bp, Homo sapien
tttctgcttgcaccggtgcctcggc

SEQ ID NO: 886911 - DNA, 25 bp, Homo sapien
catctgtagatgagtatgtgcatat

SEQ ID NO: 886912 - DNA, 25 bp, Homo sapien
tcacactccagtaggatggcattca

SEQ ID NO: 886913 - DNA, 25 bp, Homo sapien
tcatgagtccaaaagcattaggaac

SEQ ID NO: 886914 - DNA, 25 bp, Homo sapien
tctgcaggtgagcacataactttta

SEQ ID NO: 886915 - DNA, 25 bp, Homo sapien
attgggaagactgagcactctccac

SEQ ID NO: 886916 - DNA, 25 bp, Homo sapien
gaattgggaagactgagcactctcc

SEQ ID NO: 886917 - DNA, 25 bp, Homo sapien
ttgaattgggaagactgagcactct

SEQ ID NO: 886918 - DNA, 25 bp, Homo sapien
tgaattgggaagactgagcactctc

SEQ ID NO: 886919 - DNA, 25 bp, Homo sapien
gggccttgtcagcaactaaggcttt

SEQ ID NO: 886920 - DNA, 25 bp, Homo sapien
taatctcccatggctcttgaactcc

SEQ ID NO: 886921 - DNA, 25 bp, Homo sapien
aatttcggtcattgccctgctgtca

SEQ ID NO: 886922 - DNA, 25 bp, Homo sapien
caactaaggctttcgacgggaggtg

SEQ ID NO: 886923 - DNA, 25 bp, Homo sapien
ctcctaatagcttgtccccaggtag

SEQ ID NO: 886924 - DNA, 25 bp, Homo sapien
caggtagctggtctaacaatctcac

SEQ ID NO: 886925 - DNA, 25 bp, Homo sapien
ccccaggtagctggtctaacaatct

SEQ ID NO: 886926 - DNA, 25 bp, Homo sapien
ctaatagcttgtccccaggtagctg

SEQ ID NO: 886927 - DNA, 25 bp, Homo sapien
ccgaactgagtcaaccagcaggcaa

SEQ ID NO: 886928 - DNA, 25 bp, Homo sapien
gaccagaaaggccaataaattggat

SEQ ID NO: 886929 - DNA, 25 bp, Homo sapien
taaattggatccgaactgagtcaac

SEQ ID NO: 886930 - DNA, 25 bp, Homo sapien
gctctttcctcaccctgaaatttag

SEQ ID NO: 886931 - DNA, 25 bp, Homo sapien
gtgaaggttcaaattgtctcatcgg

SEQ ID NO: 886932 - DNA, 25 bp, Homo sapien
aaattgtctcatcggcaccatcacc

SEQ ID NO: 886933 - DNA, 25 bp, Homo sapien
ttaggaggacaagtcaaatggcggg

SEQ ID NO: 886934 - DNA, 25 bp, Homo sapien
ggttcaaattgtctcatcggcacca

SEQ ID NO: 886935 - DNA, 25 bp, Homo sapien
agttacccaagccagacacacgggc

SEQ ID NO: 886936 - DNA, 25 bp, Homo sapien
ccagcgctgtctagtcccactggca

SEQ ID NO: 886937 - DNA, 25 bp, Homo sapien
cccctcctcgccagcgctgtctagt

SEQ ID NO: 886938 - DNA, 25 bp, Homo sapien
tgagttacccaagccagacacacgg

SEQ ID NO: 886939 - DNA, 25 bp, Homo sapien
cctggaaggtccttgtattggctgc

SEQ ID NO: 886940 - DNA, 25 bp, Homo sapien
tggaaggtccttgtattggctgcag

SEQ ID NO: 886941 - DNA, 25 bp, Homo sapien
ctggaaggtccttgtattggctgca

SEQ ID NO: 886942 - DNA, 25 bp, Homo sapien
tcctggaaggtccttgtattggctg

SEQ ID NO: 886943 - DNA, 25 bp, Homo sapien
gttatcagaactggcatctcacgaa

SEQ ID NO: 886944 - DNA, 25 bp, Homo sapien
cacatctgaaagttatcagaactgg

SEQ ID NO: 886945 - DNA, 25 bp, Homo sapien
tcagaactggcatctcacgaatcct

SEQ ID NO: 886946 - DNA, 25 bp, Homo sapien
agaactggcatctcacgaatcctcc

SEQ ID NO: 886947 - DNA, 25 bp, Homo sapien
tgtgtagacttctcagcctgggaga

SEQ ID NO: 886948 - DNA, 25 bp, Homo sapien
gaacaaaaattcctaccatggagac

SEQ ID NO: 886949 - DNA, 25 bp, Homo sapien
ttccatggactgattagaacaaaaa

SEQ ID NO: 886950 - DNA, 25 bp, Homo sapien
cctgggaagttcaataatagctttt

SEQ ID NO: 886951 - DNA, 25 bp, Homo sapien
agctattgttaggggccagccaaag

SEQ ID NO: 886952 - DNA, 25 bp, Homo sapien
gctattgttaggggccagccaaagg

SEQ ID NO: 886953 - DNA, 25 bp, Homo sapien
ctattgttaggggccagccaaagga

SEQ ID NO: 886954 - DNA, 25 bp, Homo sapien
gaacgctggccaggtaagcatcggt

SEQ ID NO: 886955 - DNA, 25 bp, Homo sapien
tcataggacggaccgcactggatct

SEQ ID NO: 886956 - DNA, 25 bp, Homo sapien
gagcagactggcctcgccttcagga

SEQ ID NO: 886957 - DNA, 25 bp, Homo sapien
ggaccggatacctcatgatttccag

SEQ ID NO: 886958 - DNA, 25 bp, Homo sapien
aggcgatggccactggctgctgtga

SEQ ID NO: 886959 - DNA, 25 bp, Homo sapien
ctgcaggcgatggccactggctgct

SEQ ID NO: 886960 - DNA, 25 bp, Homo sapien
tggccactggctgctgtgactacag

SEQ ID NO: 886961 - DNA, 25 bp, Homo sapien
gccactggctgctgtgactacaggg

SEQ ID NO: 886962 - DNA, 25 bp, Homo sapien
ccccaaatatttcatagcagccagc

SEQ ID NO: 886963 - DNA, 25 bp, Homo sapien
gccccaaatatttcatagcagccag

SEQ ID NO: 886964 - DNA, 25 bp, Homo sapien
tggagtccttatcggctctgctgct

SEQ ID NO: 886965 - DNA, 25 bp, Homo sapien
tctccagagagaatggcatccttag

SEQ ID NO: 886966 - DNA, 25 bp, Homo sapien
gaggttcactctcaggtctggagtc

SEQ ID NO: 886967 - DNA, 25 bp, Homo sapien
aggcccagaagtgcgcatcctcctt

SEQ ID NO: 886968 - DNA, 25 bp, Homo sapien
gattgtcgcatatttcaggcagcaa

SEQ ID NO: 886969 - DNA, 25 bp, Homo sapien
caaattcttgattgtcgcatatttc

SEQ ID NO: 886970 - DNA, 25 bp, Homo sapien
gcagtggaataagcctataaactat

SEQ ID NO: 886971 - DNA, 25 bp, Homo sapien
aagcctggcagtggaataagcctat

SEQ ID NO: 886972 - DNA, 25 bp, Homo sapien
tccatcttcagcacagagatctctc

SEQ ID NO: 886973 - DNA, 25 bp, Homo sapien
ccatcttcagcacagagatctctct

SEQ ID NO: 886974 - DNA, 25 bp, Homo sapien
tcccagcacagggaagagcttaagg

SEQ ID NO: 886975 - DNA, 25 bp, Homo sapien
cacagggaagagcttaaggaattca

SEQ ID NO: 886976 - DNA, 25 bp, Homo sapien
agagcttaaggaattcatcttcctc

SEQ ID NO: 886977 - DNA, 25 bp, Homo sapien
gaagagcttaaggaattcatcttcc

SEQ ID NO: 886978 - DNA, 25 bp, Homo sapien
gcttgacttgggatctgagaatttg

SEQ ID NO: 886979 - DNA, 25 bp, Homo sapien
cctgtaagcttgacttgggatctga

SEQ ID NO: 886980 - DNA, 25 bp, Homo sapien
ctgagcctgtaagcttgacttggga

SEQ ID NO: 886981 - DNA, 25 bp, Homo sapien
taagcttgacttgggatctgagaat

SEQ ID NO: 886982 - DNA, 25 bp, Homo sapien
caggctagtgaacaactatgtgaac

SEQ ID NO: 886983 - DNA, 25 bp, Homo sapien
gcttccaggctagtgaacaactatg

SEQ ID NO: 886984 - DNA, 25 bp, Homo sapien
tactagcttccaggctagtgaacaa

SEQ ID NO: 886985 - DNA, 25 bp, Homo sapien
tcatattactagcttccaggctagt

SEQ ID NO: 886986 - DNA, 25 bp, Homo sapien
ttttgttcgatagaaaacataacac

SEQ ID NO: 886987 - DNA, 25 bp, Homo sapien
ttcttttgttcgatagaaaacataa

SEQ ID NO: 886988 - DNA, 25 bp, Homo sapien
ctttcttttgttcgatagaaaacat

SEQ ID NO: 886989 - DNA, 25 bp, Homo sapien
tcttttgttcgatagaaaacataac

SEQ ID NO: 886990 - DNA, 25 bp, Homo sapien
gcaattgtatgagcatctctctcca

SEQ ID NO: 886991 - DNA, 25 bp, Homo sapien
ggtggcttagcatcacttctcagga

SEQ ID NO: 886992 - DNA, 25 bp, Homo sapien
taacattcgctgtcagttggcaaag

SEQ ID NO: 886993 - DNA, 25 bp, Homo sapien
cctaattcgatgatttccacccaga

SEQ ID NO: 886994 - DNA, 25 bp, Homo sapien
cagggcaggcaacttattcctcggt

SEQ ID NO: 886995 - DNA, 25 bp, Homo sapien
tggattcgtagtctgtccccgggca

SEQ ID NO: 886996 - DNA, 25 bp, Homo sapien
caagaacgccagttgagtaacacgg

SEQ ID NO: 886997 - DNA, 25 bp, Homo sapien
gagctcgctgcctgttgctaattga

SEQ ID NO: 886998 - DNA, 25 bp, Homo sapien
ggtctctgcttttgccgctactgct

SEQ ID NO: 886999 - DNA, 25 bp, Homo sapien
tacttccaagtgtatacagtccttt

SEQ ID NO: 887000 - DNA, 25 bp, Homo sapien
gtatacagtcctttgtccaggtctc

SEQ ID NO: 887001 - DNA, 25 bp, Homo sapien
ggtgtttccgcattcagaaagtcca

SEQ ID NO: 887002 - DNA, 25 bp, Homo sapien
aaaagactggcctcgagtgtgacac

SEQ ID NO: 887003 - DNA, 25 bp, Homo sapien
cagttagaattaggatgcccactcc

SEQ ID NO: 887004 - DNA, 25 bp, Homo sapien
tacacagtgtgcaagtcctggactc

SEQ ID NO: 887005 - DNA, 25 bp, Homo sapien
agaagaaatctcctaacgcccctgt

SEQ ID NO: 887006 - DNA, 25 bp, Homo sapien
tgaaaaaagctttggcgcaccgaca

SEQ ID NO: 887007 - DNA, 25 bp, Homo sapien
caagcatggatgacacagagtagac

SEQ ID NO: 887008 - DNA, 25 bp, Homo sapien
ccctggtggatagaaaggactgcat

SEQ ID NO: 887009 - DNA, 25 bp, Homo sapien
tacccaggtagaccacagaatgatg

SEQ ID NO: 887010 - DNA, 25 bp, Homo sapien
agctgggacccagaaatggttctac

SEQ ID NO: 887011 - DNA, 25 bp, Homo sapien
gggacccacgtcttcatagctgaga

SEQ ID NO: 887012 - DNA, 25 bp, Homo sapien
tcagacttcacctcgtaagggcagc

SEQ ID NO: 887013 - DNA, 25 bp, Homo sapien
taaaatcctacagttgtgcaaggcc

SEQ ID NO: 887014 - DNA, 25 bp, Homo sapien
gtagataccatcttctgggccctgt

SEQ ID NO: 887015 - DNA, 25 bp, Homo sapien
tgtgtggctgaattcgtctgttggc

SEQ ID NO: 887016 - DNA, 25 bp, Homo sapien
gcagtcagggtgagggaaactgtgt

SEQ ID NO: 887017 - DNA, 25 bp, Homo sapien
tcgcctttcgtgaggagcagtcagg

SEQ ID NO: 887018 - DNA, 25 bp, Homo sapien
tgaattcgtctgttggcccagccac

SEQ ID NO: 887019 - DNA, 25 bp, Homo sapien
gaagcagctagatcaaaaggcgccc

SEQ ID NO: 887020 - DNA, 25 bp, Homo sapien
tctagagccatgaaaaatccgtgtc

SEQ ID NO: 887021 - DNA, 25 bp, Homo sapien
tcagcgactgataggagaggccagc

SEQ ID NO: 887022 - DNA, 25 bp, Homo sapien
tcaacctctgaagctactgagtggg

SEQ ID NO: 887023 - DNA, 25 bp, Homo sapien
taggccacctttgcagagctgtctc

SEQ ID NO: 887024 - DNA, 25 bp, Homo sapien
cacagggcctactttcaaaaagaca

SEQ ID NO: 887025 - DNA, 25 bp, Homo sapien
ggcaattggccgtagaaagctctag

SEQ ID NO: 887026 - DNA, 25 bp, Homo sapien
tcagggttcttaaggacaggacttg

SEQ ID NO: 887027 - DNA, 25 bp, Homo sapien
tacaactcaccaaggagactgccat

SEQ ID NO: 887028 - DNA, 25 bp, Homo sapien
cagcaatgactagtgtgatccttac

SEQ ID NO: 887029 - DNA, 25 bp, Homo sapien
atttccatttcttcaacgactggtc

SEQ ID NO: 887030 - DNA, 25 bp, Homo sapien
caacgactggtctaccctcttcttt

SEQ ID NO: 887031 - DNA, 25 bp, Homo sapien
tgacctcgagagcagtcgtttaacc

SEQ ID NO: 887032 - DNA, 25 bp, Homo sapien
ggctcgagtttcatggccaggcact

SEQ ID NO: 887033 - DNA, 25 bp, Homo sapien
gtctgcactccatccaacagctaag

SEQ ID NO: 887034 - DNA, 25 bp, Homo sapien
ttgaccaagagtcgctgacctcgag

SEQ ID NO: 887035 - DNA, 25 bp, Homo sapien
cgtctcccctaattggctgactgca

SEQ ID NO: 887036 - DNA, 25 bp, Homo sapien
tccagccgtgtcaggagtcatctgt

SEQ ID NO: 887037 - DNA, 25 bp, Homo sapien
caatatgtattagaaaactccccgc

SEQ ID NO: 887038 - DNA, 25 bp, Homo sapien
tgaaagttaaccaggctaggagccg

SEQ ID NO: 887039 - DNA, 25 bp, Homo sapien
gcactgaatgtctcctggccttcct

SEQ ID NO: 887040 - DNA, 25 bp, Homo sapien
attcatcacaaggtgcagagaaggc

SEQ ID NO: 887041 - DNA, 25 bp, Homo sapien
ctattcatcacaaggtgcagagaag

SEQ ID NO: 887042 - DNA, 25 bp, Homo sapien
gcagagaaggcactgaatgtctcct

SEQ ID NO: 887043 - DNA, 25 bp, Homo sapien
tacaaaatgaaagggcctgagcatc

SEQ ID NO: 887044 - DNA, 25 bp, Homo sapien
ggtgcatgagcatccaatctaccct

SEQ ID NO: 887045 - DNA, 25 bp, Homo sapien
ctacaaaatgaaagggcctgagcat

SEQ ID NO: 887046 - DNA, 25 bp, Homo sapien
aaaaaacaataggtgcatgagcatc

SEQ ID NO: 887047 - DNA, 25 bp, Homo sapien
tatggtacttgagcctcaggcccag

SEQ ID NO: 887048 - DNA, 25 bp, Homo sapien
ggcttatggtacttgagcctcaggc

SEQ ID NO: 887049 - DNA, 25 bp, Homo sapien
gggctttgagaggcttatggtactt

SEQ ID NO: 887050 - DNA, 25 bp, Homo sapien
cccaggggagttatcaggaggacca

SEQ ID NO: 887051 - DNA, 25 bp, Homo sapien
ggaactatcatctaggaaacctctg

SEQ ID NO: 887052 - DNA, 25 bp, Homo sapien
cagacaggctataacactcaacacg

SEQ ID NO: 887053 - DNA, 25 bp, Homo sapien
tctctggatccccatggaactatca

SEQ ID NO: 887054 - DNA, 25 bp, Homo sapien
tgtgtgacatcaggtgccagacagg

SEQ ID NO: 887055 - DNA, 25 bp, Homo sapien
gcacagcgacctctgcaaaagcatt

SEQ ID NO: 887056 - DNA, 25 bp, Homo sapien
caaaggttgtaattctgggatagac

SEQ ID NO: 887057 - DNA, 25 bp, Homo sapien
ctcaatattatctcatggtggcaaa

SEQ ID NO: 887058 - DNA, 25 bp, Homo sapien
caataatgtcggagtaattcaagtc

SEQ ID NO: 887059 - DNA, 25 bp, Homo sapien
tatggatgctaaaggctggaaacct

SEQ ID NO: 887060 - DNA, 25 bp, Homo sapien
gatgctaaaggctggaaacctttaa

SEQ ID NO: 887061 - DNA, 25 bp, Homo sapien
ttttatggatgctaaaggctggaaa

SEQ ID NO: 887062 - DNA, 25 bp, Homo sapien
ctattttgagtgtaactttatcttg

SEQ ID NO: 887063 - DNA, 25 bp, Homo sapien
tcagccagatttgccaatccaaatg

SEQ ID NO: 887064 - DNA, 25 bp, Homo sapien
gttcagccagatttgccaatccaaa

SEQ ID NO: 887065 - DNA, 25 bp, Homo sapien
ttcagccagatttgccaatccaaat

SEQ ID NO: 887066 - DNA, 25 bp, Homo sapien
gatgcacaaatgcacagtcacctct

SEQ ID NO: 887067 - DNA, 25 bp, Homo sapien
atgcacaaatgcacagtcacctctt

SEQ ID NO: 887068 - DNA, 25 bp, Homo sapien
gctgggtattcccctttaggctcta

SEQ ID NO: 887069 - DNA, 25 bp, Homo sapien
tcctgagaagagttaccctgtgtgg

SEQ ID NO: 887070 - DNA, 25 bp, Homo sapien
tggaacaaactggatcccagaagag

SEQ ID NO: 887071 - DNA, 25 bp, Homo sapien
gactgggtatctgcggagcttgctc

SEQ ID NO: 887072 - DNA, 25 bp, Homo sapien
ctcctgatccctgacatggaacaaa

SEQ ID NO: 887073 - DNA, 25 bp, Homo sapien
ccatgatgggttccattaaaggatc

SEQ ID NO: 887074 - DNA, 25 bp, Homo sapien
gaaggaatatgacccatccatgatg

SEQ ID NO: 887075 - DNA, 25 bp, Homo sapien
ccattaaaggatcaaggaggccttc

SEQ ID NO: 887076 - DNA, 25 bp, Homo sapien
gatcaaggaggccttcataaggaag

SEQ ID NO: 887077 - DNA, 25 bp, Homo sapien
agtgccttgcacgtgccatcctgga

SEQ ID NO: 887078 - DNA, 25 bp, Homo sapien
cagtgatgccggcagatgctgtgtc

SEQ ID NO: 887079 - DNA, 25 bp, Homo sapien
ccatcctggatcttacggaggtcaa

SEQ ID NO: 887080 - DNA, 25 bp, Homo sapien
tgtgtcctcatgaaacctgcctcta

SEQ ID NO: 887081 - DNA, 25 bp, Homo sapien
tctttgctgaacatcaattcattct

SEQ ID NO: 887082 - DNA, 25 bp, Homo sapien
ttctttctacaattaatcaaaatga

SEQ ID NO: 887083 - DNA, 25 bp, Homo sapien
tctttgttacctggtctcagtcatc

SEQ ID NO: 887084 - DNA, 25 bp, Homo sapien
taatttatgaagttaagtgtctttg

SEQ ID NO: 887085 - DNA, 25 bp, Homo sapien
ggaatgggtgataagaacatttccc

SEQ ID NO: 887086 - DNA, 25 bp, Homo sapien
cactggacgttggatctcagcatca

SEQ ID NO: 887087 - DNA, 25 bp, Homo sapien
tgcatcatctctgacaggaatgggt

SEQ ID NO: 887088 - DNA, 25 bp, Homo sapien
ggtactcaggcactggacgttggat

SEQ ID NO: 887089 - DNA, 25 bp, Homo sapien
ttcttgagttggtgactgatagcct

SEQ ID NO: 887090 - DNA, 25 bp, Homo sapien
gggtggttagtttaccacatcacat

SEQ ID NO: 887091 - DNA, 25 bp, Homo sapien
gagttggtgactgatagcctccaaa

SEQ ID NO: 887092 - DNA, 25 bp, Homo sapien
ggtggttagtttaccacatcacatt

SEQ ID NO: 887093 - DNA, 25 bp, Homo sapien
gaggttctctgatatgccacattaa

SEQ ID NO: 887094 - DNA, 25 bp, Homo sapien
tgcttgcatatgaaagtggaccttc

SEQ ID NO: 887095 - DNA, 25 bp, Homo sapien
tgtgaagtccgtatcagaaagcttt

SEQ ID NO: 887096 - DNA, 25 bp, Homo sapien
cctgagccgcattaagccgtaacat

SEQ ID NO: 887097 - DNA, 25 bp, Homo sapien
ttctgacttcagtctggcattctgg

SEQ ID NO: 887098 - DNA, 25 bp, Homo sapien
tctggatttgtgcacagtagctgtg

SEQ ID NO: 887099 - DNA, 25 bp, Homo sapien
tagagtcttgacacaaaccatgaca

SEQ ID NO: 887100 - DNA, 25 bp, Homo sapien
tgtggtgctgatggtagacttctcc

SEQ ID NO: 887101 - DNA, 25 bp, Homo sapien
cacatatcccagcttctgtttcctc

SEQ ID NO: 887102 - DNA, 25 bp, Homo sapien
cattgattagctgcaggaccttgga

SEQ ID NO: 887103 - DNA, 25 bp, Homo sapien
tgattagctgcaggaccttggaaat

SEQ ID NO: 887104 - DNA, 25 bp, Homo sapien
ccttggaaatgtttactcacatatc

SEQ ID NO: 887105 - DNA, 25 bp, Homo sapien
gagacaccgctctctatccagggca

SEQ ID NO: 887106 - DNA, 25 bp, Homo sapien
aaaaggcaggaggtatgctggccac

SEQ ID NO: 887107 - DNA, 25 bp, Homo sapien
tgcaatgaggcgcaacctttcccag

SEQ ID NO: 887108 - DNA, 25 bp, Homo sapien
gagtttttggcagggcacttccacc

SEQ ID NO: 887109 - DNA, 25 bp, Homo sapien
agctccaggggagagacttgaactg

SEQ ID NO: 887110 - DNA, 25 bp, Homo sapien
agtgtcctttctggaacatccagct

SEQ ID NO: 887111 - DNA, 25 bp, Homo sapien
ctgagtgtcctttctggaacatcca

SEQ ID NO: 887112 - DNA, 25 bp, Homo sapien
ctccaggggagagacttgaactgga

SEQ ID NO: 887113 - DNA, 25 bp, Homo sapien
aagctgactctcagccgacagttta

SEQ ID NO: 887114 - DNA, 25 bp, Homo sapien
tgactctcagccgacagtttatcag

SEQ ID NO: 887115 - DNA, 25 bp, Homo sapien
tctcagccgacagtttatcagcaat

SEQ ID NO: 887116 - DNA, 25 bp, Homo sapien
tcagccgacagtttatcagcaataa

SEQ ID NO: 887117 - DNA, 25 bp, Homo sapien
atccagatccatcgttgcccccttg

SEQ ID NO: 887118 - DNA, 25 bp, Homo sapien
ctacctgcttcgacaaggggaaggc

SEQ ID NO: 887119 - DNA, 25 bp, Homo sapien
acctgcttcgacaaggggaaggcca

SEQ ID NO: 887120 - DNA, 25 bp, Homo sapien
ggtcatgtggttcccatccagatcc

SEQ ID NO: 887121 - DNA, 25 bp, Homo sapien
ttctttgactctaatgctaagtgat

SEQ ID NO: 887122 - DNA, 25 bp, Homo sapien
gactctaatgctaagtgatgtagcc

SEQ ID NO: 887123 - DNA, 25 bp, Homo sapien
ctccaaactcggcttctttgactct

SEQ ID NO: 887124 - DNA, 25 bp, Homo sapien
caggtcccctccaaactcggcttct

SEQ ID NO: 887125 - DNA, 25 bp, Homo sapien
ctgttcttagacctcgcccagcctc

SEQ ID NO: 887126 - DNA, 25 bp, Homo sapien
tactgttcttagacctcgcccagcc

SEQ ID NO: 887127 - DNA, 25 bp, Homo sapien
atactgttcttagacctcgcccagc

SEQ ID NO: 887128 - DNA, 25 bp, Homo sapien
catactgttcttagacctcgcccag

SEQ ID NO: 887129 - DNA, 25 bp, Homo sapien
gtcacgggcagctgaacattttgct

SEQ ID NO: 887130 - DNA, 25 bp, Homo sapien
ttaatacctgctgcgtttggaaaaa

SEQ ID NO: 887131 - DNA, 25 bp, Homo sapien
taaatgcttgtattgtcttcccgct

SEQ ID NO: 887132 - DNA, 25 bp, Homo sapien
cattttgcttggtacgtccacagaa

SEQ ID NO: 887133 - DNA, 25 bp, Homo sapien
tgtcctctccagctgtataagtgcc

SEQ ID NO: 887134 - DNA, 25 bp, Homo sapien
ttggaacacagtattaacggcactg

SEQ ID NO: 887135 - DNA, 25 bp, Homo sapien
tccacagtccttaacgtgcttatgt

SEQ ID NO: 887136 - DNA, 25 bp, Homo sapien
tattaacggcactgacaattctgct

SEQ ID NO: 887137 - DNA, 25 bp, Homo sapien
tctacaccttttaggggataggaca

SEQ ID NO: 887138 - DNA, 25 bp, Homo sapien
cactgtcaatcactactaccaaagt

SEQ ID NO: 887139 - DNA, 25 bp, Homo sapien
tctctacaccttttaggggatagga

SEQ ID NO: 887140 - DNA, 25 bp, Homo sapien
actgtcaatcactactaccaaagtt

SEQ ID NO: 887141 - DNA, 25 bp, Homo sapien
cctcttgttttgcctgtaaagaact

SEQ ID NO: 887142 - DNA, 25 bp, Homo sapien
tctttgctgccccaccaaatctccc

SEQ ID NO: 887143 - DNA, 25 bp, Homo sapien
tccctcctttttcaacgtgagcctc

SEQ ID NO: 887144 - DNA, 25 bp, Homo sapien
ctcctttttcaacgtgagcctcagc

SEQ ID NO: 887145 - DNA, 25 bp, Homo sapien
tcagttcctcggatttctgcgtcca

SEQ ID NO: 887146 - DNA, 25 bp, Homo sapien
ttgactgttgccaccttgaggaaaa

SEQ ID NO: 887147 - DNA, 25 bp, Homo sapien
ttgggacgccagtgccctctttctg

SEQ ID NO: 887148 - DNA, 25 bp, Homo sapien
ggatttctgcgtccatcagcaccct

SEQ ID NO: 887149 - DNA, 25 bp, Homo sapien
gtgtggcctcacttcttgcagcagt

SEQ ID NO: 887150 - DNA, 25 bp, Homo sapien
ggacactttattgaggccccagggc

SEQ ID NO: 887151 - DNA, 25 bp, Homo sapien
tttgtccagtcaatgaaagggacac

SEQ ID NO: 887152 - DNA, 25 bp, Homo sapien
agagccttatttgatcttcctcttg

SEQ ID NO: 887153 - DNA, 25 bp, Homo sapien
caggcaagcacagcacttgcggcag

SEQ ID NO: 887154 - DNA, 25 bp, Homo sapien
ggtgcaggcaagcacagcacttgcg

SEQ ID NO: 887155 - DNA, 25 bp, Homo sapien
tgcaggcaagcacagcacttgcggc

SEQ ID NO: 887156 - DNA, 25 bp, Homo sapien
gggtgcaggcaagcacagcacttgc

SEQ ID NO: 887157 - DNA, 25 bp, Homo sapien
ctggcagagggctcaataatgccac

SEQ ID NO: 887158 - DNA, 25 bp, Homo sapien
tgttgcagtctgagagagtacggcc

SEQ ID NO: 887159 - DNA, 25 bp, Homo sapien
gtttgcccacaaatatcagacattg

SEQ ID NO: 887160 - DNA, 25 bp, Homo sapien
gtctgagagagtacggccatcctcc

SEQ ID NO: 887161 - DNA, 25 bp, Homo sapien
cccaggtgcaggatggactctttct

SEQ ID NO: 887162 - DNA, 25 bp, Homo sapien
ggtcaagtggaacgccctccttgtc

SEQ ID NO: 887163 - DNA, 25 bp, Homo sapien
ctggtcaagtggaacgccctccttg

SEQ ID NO: 887164 - DNA, 25 bp, Homo sapien
gtcaagtggaacgccctccttgtct

SEQ ID NO: 887165 - DNA, 25 bp, Homo sapien
tggtcaagtggaacgccctccttgt

SEQ ID NO: 887166 - DNA, 25 bp, Homo sapien
tgtcactgggctcgacctcgagggt

SEQ ID NO: 887167 - DNA, 25 bp, Homo sapien
cttgcctgtgagggtcttcacaaag

SEQ ID NO: 887168 - DNA, 25 bp, Homo sapien
ggtgtcactgggctcgacctcgagg

SEQ ID NO: 887169 - DNA, 25 bp, Homo sapien
cactgggctcgacctcgagggtgat

SEQ ID NO: 887170 - DNA, 25 bp, Homo sapien
tatacctcgcactaccacatggatg

SEQ ID NO: 887171 - DNA, 25 bp, Homo sapien
cacatggatgtgatctgacgcactg

SEQ ID NO: 887172 - DNA, 25 bp, Homo sapien
cacgatgtagcacgagtatacctcg

SEQ ID NO: 887173 - DNA, 25 bp, Homo sapien
tctgacagtgactttaacaagggtc

SEQ ID NO: 887174 - DNA, 25 bp, Homo sapien
caagcactctgctatgggtactggg

SEQ ID NO: 887175 - DNA, 25 bp, Homo sapien
gagtctgcggcctagaagttgccca

SEQ ID NO: 887176 - DNA, 25 bp, Homo sapien
gatatcagctcctaagcctgcagcg

SEQ ID NO: 887177 - DNA, 25 bp, Homo sapien
taacagtccaacgtggtgtgccaga

SEQ ID NO: 887178 - DNA, 25 bp, Homo sapien
cagagcagacaatcaaaaggtgggc

SEQ ID NO: 887179 - DNA, 25 bp, Homo sapien
aaagctgtgtctgcgaggacacccc

SEQ ID NO: 887180 - DNA, 25 bp, Homo sapien
catatgcctgccaccgataagggaa

SEQ ID NO: 887181 - DNA, 25 bp, Homo sapien
tgagatagaacaccagccaagacac

SEQ ID NO: 887182 - DNA, 25 bp, Homo sapien
cagaggagcccttgttgggtcttca

SEQ ID NO: 887183 - DNA, 25 bp, Homo sapien
tccctggtctctggacttatcagga

SEQ ID NO: 887184 - DNA, 25 bp, Homo sapien
aacccgttctctaaaagcatctcag

SEQ ID NO: 887185 - DNA, 25 bp, Homo sapien
tcaggagcagacatctgcagccacg

SEQ ID NO: 887186 - DNA, 25 bp, Homo sapien
agggctgccctgatcactccaggca

SEQ ID NO: 887187 - DNA, 25 bp, Homo sapien
agaaccttcagaaagctgtcctgaa

SEQ ID NO: 887188 - DNA, 25 bp, Homo sapien
tcagaaagctgtcctgaagtctgag

SEQ ID NO: 887189 - DNA, 25 bp, Homo sapien
tccaggcacatggttgccaaatctc

SEQ ID NO: 887190 - DNA, 25 bp, Homo sapien
tggaacccagttagggagagtctcc

SEQ ID NO: 887191 - DNA, 25 bp, Homo sapien
accttggacaggacaggacgaatcc

SEQ ID NO: 887192 - DNA, 25 bp, Homo sapien
gaaacagggctggttctactgcagc

SEQ ID NO: 887193 - DNA, 25 bp, Homo sapien
ccttaaggtaccacagggcaccatg

SEQ ID NO: 887194 - DNA, 25 bp, Homo sapien
tgaggttcggccataagtcaagggc

SEQ ID NO: 887195 - DNA, 25 bp, Homo sapien
tcaagggcagatttattaaggcccc

SEQ ID NO: 887196 - DNA, 25 bp, Homo sapien
gcagagcattcaatatgctgcagaa

SEQ ID NO: 887197 - DNA, 25 bp, Homo sapien
tgaagagtcctctccaccacatgtg

SEQ ID NO: 887198 - DNA, 25 bp, Homo sapien
aatctttgatcacccttacacgtaa

SEQ ID NO: 887199 - DNA, 25 bp, Homo sapien
gttctaaatccaagcagacagggca

SEQ ID NO: 887200 - DNA, 25 bp, Homo sapien
tgaacagcccagatctacaagatga

SEQ ID NO: 887201 - DNA, 25 bp, Homo sapien
ttacacgtaaccccttcactgctga

SEQ ID NO: 887202 - DNA, 25 bp, Homo sapien
tgaggaccaacgcaaccaccatcaa

SEQ ID NO: 887203 - DNA, 25 bp, Homo sapien
aaccatgaccagacatgaggaccaa

SEQ ID NO: 887204 - DNA, 25 bp, Homo sapien
gggtatattcctctaaagttgcaat

SEQ ID NO: 887205 - DNA, 25 bp, Homo sapien
catcagccacaatatcgcccatggg

SEQ ID NO: 887206 - DNA, 25 bp, Homo sapien
aatctggtagcaattaggaagcggc

SEQ ID NO: 887207 - DNA, 25 bp, Homo sapien
ggaaagcatgctatgactgctagac

SEQ ID NO: 887208 - DNA, 25 bp, Homo sapien
tgggactgcatccactatatgagat

SEQ ID NO: 887209 - DNA, 25 bp, Homo sapien
tgtttgtccttccagttaaatagga

SEQ ID NO: 887210 - DNA, 25 bp, Homo sapien
tctgaatgttatgtccacgcaccat

SEQ ID NO: 887211 - DNA, 25 bp, Homo sapien
tatctgaatgttatgtccacgcacc

SEQ ID NO: 887212 - DNA, 25 bp, Homo sapien
atctgaatgttatgtccacgcacca

SEQ ID NO: 887213 - DNA, 25 bp, Homo sapien
caagccacagaattgactgtatttg

SEQ ID NO: 887214 - DNA, 25 bp, Homo sapien
atgacaggatcaatgccgtgtggct

SEQ ID NO: 887215 - DNA, 25 bp, Homo sapien
aattgactgtatttggtactgagtg

SEQ ID NO: 887216 - DNA, 25 bp, Homo sapien
tgtggacacaaccacaccagccatg

SEQ ID NO: 887217 - DNA, 25 bp, Homo sapien
gaacacactgccattataagaagta

SEQ ID NO: 887218 - DNA, 25 bp, Homo sapien
tttctccccactagagaacacactg

SEQ ID NO: 887219 - DNA, 25 bp, Homo sapien
ttaaaaacagaagccgtggcatcca

SEQ ID NO: 887220 - DNA, 25 bp, Homo sapien
cagctgcatgctttcgcttgcaagt

SEQ ID NO: 887221 - DNA, 25 bp, Homo sapien
tatgtgtcttcctcgccatgggata

SEQ ID NO: 887222 - DNA, 25 bp, Homo sapien
gatatgcattggtccgcgtgaagca

SEQ ID NO: 887223 - DNA, 25 bp, Homo sapien
tggtccgcgtgaagcattgtagctg

SEQ ID NO: 887224 - DNA, 25 bp, Homo sapien
cctcgccatgggatatgcattggtc

SEQ ID NO: 887225 - DNA, 25 bp, Homo sapien
tttgcacacctctgcttagtctcca

SEQ ID NO: 887226 - DNA, 25 bp, Homo sapien
tctttgcacacctctgcttagtctc

SEQ ID NO: 887227 - DNA, 25 bp, Homo sapien
aggcattgccaggtcataacagaaa

SEQ ID NO: 887228 - DNA, 25 bp, Homo sapien
cattctttgcacacctctgcttagt

SEQ ID NO: 887229 - DNA, 25 bp, Homo sapien
cagctgtcagtgtttgtgctttagg

SEQ ID NO: 887230 - DNA, 25 bp, Homo sapien
gtgctttaggttcttcactggaact

SEQ ID NO: 887231 - DNA, 25 bp, Homo sapien
cttacagctgtcagtgtttgtgctt

SEQ ID NO: 887232 - DNA, 25 bp, Homo sapien
ctgtcagtgtttgtgctttaggttc

SEQ ID NO: 887233 - DNA, 25 bp, Homo sapien
agcatgctttgcagccaggcacaat

SEQ ID NO: 887234 - DNA, 25 bp, Homo sapien
atgctttgcagccaggcacaatgat

SEQ ID NO: 887235 - DNA, 25 bp, Homo sapien
gcatgctttgcagccaggcacaatg

SEQ ID NO: 887236 - DNA, 25 bp, Homo sapien
gctttgcagccaggcacaatgatac

SEQ ID NO: 887237 - DNA, 25 bp, Homo sapien
tgaacaggggcatgaccacttgaaa

SEQ ID NO: 887238 - DNA, 25 bp, Homo sapien
taatacataatcaacagcaagctgc

SEQ ID NO: 887239 - DNA, 25 bp, Homo sapien
ggcatgaccacttgaaattaataca

SEQ ID NO: 887240 - DNA, 25 bp, Homo sapien
acccatgcatgactgaagcctctca

SEQ ID NO: 887241 - DNA, 25 bp, Homo sapien
cttcatcatagtcccagttagtccc

SEQ ID NO: 887242 - DNA, 25 bp, Homo sapien
gaaaatcggtcacatatgtctcctg

SEQ ID NO: 887243 - DNA, 25 bp, Homo sapien
ttacacagctgcgatttggccacaa

SEQ ID NO: 887244 - DNA, 25 bp, Homo sapien
tctaagtgacctacgacttcatcat

SEQ ID NO: 887245 - DNA, 25 bp, Homo sapien
aataattgctgaatctcaaatatcc

SEQ ID NO: 887246 - DNA, 25 bp, Homo sapien
gctgaatctcaaatatccagggtcc

SEQ ID NO: 887247 - DNA, 25 bp, Homo sapien
aattgctgaatctcaaatatccagg

SEQ ID NO: 887248 - DNA, 25 bp, Homo sapien
aatctcaaatatccagggtcccacc

SEQ ID NO: 887249 - DNA, 25 bp, Homo sapien
ctgcttctcctacaggaaagtcaag

SEQ ID NO: 887250 - DNA, 25 bp, Homo sapien
ctcctacaggaaagtcaagctgatt

SEQ ID NO: 887251 - DNA, 25 bp, Homo sapien
tgattggatgagaccaaagctaatt

SEQ ID NO: 887252 - DNA, 25 bp, Homo sapien
cctgaaccatctgcccaccggcatt

SEQ ID NO: 887253 - DNA, 25 bp, Homo sapien
tattgtgagccaccccagtaggcat

SEQ ID NO: 887254 - DNA, 25 bp, Homo sapien
ctattgtgagccaccccagtaggca

SEQ ID NO: 887255 - DNA, 25 bp, Homo sapien
tactacgataacctccttgatgttt

SEQ ID NO: 887256 - DNA, 25 bp, Homo sapien
actacgataacctccttgatgtttt

SEQ ID NO: 887257 - DNA, 25 bp, Homo sapien
atactacgataacctccttgatgtt

SEQ ID NO: 887258 - DNA, 25 bp, Homo sapien
gatgttttcatcgccgcagatacta

SEQ ID NO: 887259 - DNA, 25 bp, Homo sapien
gaggtagtactcattacgcttccca

SEQ ID NO: 887260 - DNA, 25 bp, Homo sapien
caaaggctaaccgactgggtgtatt

SEQ ID NO: 887261 - DNA, 25 bp, Homo sapien
tcaaaaactactggaggtagtactc

SEQ ID NO: 887262 - DNA, 25 bp, Homo sapien
acttgaagccattcttctagggacc

SEQ ID NO: 887263 - DNA, 25 bp, Homo sapien
tgggccagttccacctctagaggta

SEQ ID NO: 887264 - DNA, 25 bp, Homo sapien
ccaaatgggcttgatgtcggcttcc

SEQ ID NO: 887265 - DNA, 25 bp, Homo sapien
catagacattccatagcactctggg

SEQ ID NO: 887266 - DNA, 25 bp, Homo sapien
tgtccattaggtcctcctttgttcc

SEQ ID NO: 887267 - DNA, 25 bp, Homo sapien
ctgcaattatcaggcttggacaaaa

SEQ ID NO: 887268 - DNA, 25 bp, Homo sapien
ttgataacgtatggccccaggaaag

SEQ ID NO: 887269 - DNA, 25 bp, Homo sapien
aattactgcaattatcaggcttgga

SEQ ID NO: 887270 - DNA, 25 bp, Homo sapien
aatggacactgggaatttcctggtg

SEQ ID NO: 887271 - DNA, 25 bp, Homo sapien
actgagagagagcatatgaaattac

SEQ ID NO: 887272 - DNA, 25 bp, Homo sapien
tgtactatagtatatgaactgagag

SEQ ID NO: 887273 - DNA, 25 bp, Homo sapien
tctatagatagatactatgtactat

SEQ ID NO: 887274 - DNA, 25 bp, Homo sapien
aggtagtcataagtagaagttaaag

SEQ ID NO: 887275 - DNA, 25 bp, Homo sapien
tcttcacatagaccacggacagggc

SEQ ID NO: 887276 - DNA, 25 bp, Homo sapien
tcgctgtcttcacatagaccacgga

SEQ ID NO: 887277 - DNA, 25 bp, Homo sapien
ttcacatagaccacggacagggcct

SEQ ID NO: 887278 - DNA, 25 bp, Homo sapien
tgtcttcacatagaccacggacagg

SEQ ID NO: 887279 - DNA, 25 bp, Homo sapien
tgggctcatccttttgtgttggttc

SEQ ID NO: 887280 - DNA, 25 bp, Homo sapien
tgttgccgatgtactcagcacatga

SEQ ID NO: 887281 - DNA, 25 bp, Homo sapien
aatgaacaggtaaatgttgccgatg

SEQ ID NO: 887282 - DNA, 25 bp, Homo sapien
cacatgactagtgtctgggctcatc

SEQ ID NO: 887283 - DNA, 25 bp, Homo sapien
tatttcgaagggtggcctttttgca

SEQ ID NO: 887284 - DNA, 25 bp, Homo sapien
ccacttagcatccacacccttcctt

SEQ ID NO: 887285 - DNA, 25 bp, Homo sapien
caaactcctgccttcgttctggaat

SEQ ID NO: 887286 - DNA, 25 bp, Homo sapien
actggcttctatttcgaagggtggc

SEQ ID NO: 887287 - DNA, 25 bp, Homo sapien
acagcatcaagattctgcagttttg

SEQ ID NO: 887288 - DNA, 25 bp, Homo sapien
cacagcatcaagattctgcagtttt

SEQ ID NO: 887289 - DNA, 25 bp, Homo sapien
tcacagcatcaagattctgcagttt

SEQ ID NO: 887290 - DNA, 25 bp, Homo sapien
ctcacagcatcaagattctgcagtt

SEQ ID NO: 887291 - DNA, 25 bp, Homo sapien
gcaagctgagtattagctctgccct

SEQ ID NO: 887292 - DNA, 25 bp, Homo sapien
tgagtattagctctgccctatgaac

SEQ ID NO: 887293 - DNA, 25 bp, Homo sapien
gactggttcatgcaagctgagtatt

SEQ ID NO: 887294 - DNA, 25 bp, Homo sapien
agctggactggttcatgcaagctga

SEQ ID NO: 887295 - DNA, 25 bp, Homo sapien
gttattcacccttcctaactttgca

SEQ ID NO: 887296 - DNA, 25 bp, Homo sapien
tgttattcacccttcctaactttgc

SEQ ID NO: 887297 - DNA, 25 bp, Homo sapien
cagcacccccgttgtattctcttgg

SEQ ID NO: 887298 - DNA, 25 bp, Homo sapien
tgaatatgtgtattcagaaatgcat

SEQ ID NO: 887299 - DNA, 25 bp, Homo sapien
cagacctcaactacattccttgaaa

SEQ ID NO: 887300 - DNA, 25 bp, Homo sapien
ctctttgtggaaatctccagacctc

SEQ ID NO: 887301 - DNA, 25 bp, Homo sapien
aatgttttcctcaggcatgacactg

SEQ ID NO: 887302 - DNA, 25 bp, Homo sapien
ttaaacttgaggagcacggtaatgt

SEQ ID NO: 887303 - DNA, 25 bp, Homo sapien
taacggtttggtctgcaaagaactg

SEQ ID NO: 887304 - DNA, 25 bp, Homo sapien
ttaacacacctgagtttctaaggcc

SEQ ID NO: 887305 - DNA, 25 bp, Homo sapien
tgcggaaagataacagggtctctct

SEQ ID NO: 887306 - DNA, 25 bp, Homo sapien
gctctccttgcagccagtcaaactg

SEQ ID NO: 887307 - DNA, 25 bp, Homo sapien
ccctcactagagattaactcataaa

SEQ ID NO: 887308 - DNA, 25 bp, Homo sapien
gtcaaactgccacttataccaaagg

SEQ ID NO: 887309 - DNA, 25 bp, Homo sapien
ctggggatgattagatgttgtcttt

SEQ ID NO: 887310 - DNA, 25 bp, Homo sapien
ctctggggatgattagatgttgtct

SEQ ID NO: 887311 - DNA, 25 bp, Homo sapien
gggatgattagatgttgtctttgaa

SEQ ID NO: 887312 - DNA, 25 bp, Homo sapien
ggggatgattagatgttgtctttga

SEQ ID NO: 887313 - DNA, 25 bp, Homo sapien
ctccattaataagtaaagcagcagg

SEQ ID NO: 887314 - DNA, 25 bp, Homo sapien
tcagttgtaatactttcaattccgc

SEQ ID NO: 887315 - DNA, 25 bp, Homo sapien
tggttttaggagtcaaacttgattc

SEQ ID NO: 887316 - DNA, 25 bp, Homo sapien
ccgcaacagcaaatggctccattaa

SEQ ID NO: 887317 - DNA, 25 bp, Homo sapien
tgccttcgtgccttgatatgcgcat

SEQ ID NO: 887318 - DNA, 25 bp, Homo sapien
tgcaacacccgcattttcagacatg

SEQ ID NO: 887319 - DNA, 25 bp, Homo sapien
tgcacctctgcaacacccgcatttt

SEQ ID NO: 887320 - DNA, 25 bp, Homo sapien
cattttcagacatgccttcgtgcct

SEQ ID NO: 887321 - DNA, 25 bp, Homo sapien
cctctacagcatcctctcagaggag

SEQ ID NO: 887322 - DNA, 25 bp, Homo sapien
aattccataggatggaaagccggca

SEQ ID NO: 887323 - DNA, 25 bp, Homo sapien
ctctacagcatcctctcagaggaga

SEQ ID NO: 887324 - DNA, 25 bp, Homo sapien
cccaccaaattccataggatggaaa

SEQ ID NO: 887325 - DNA, 25 bp, Homo sapien
tcttcaggaagagtaaagcatgtct

SEQ ID NO: 887326 - DNA, 25 bp, Homo sapien
taaattccttccagatcgacctcag

SEQ ID NO: 887327 - DNA, 25 bp, Homo sapien
ggaatgcacaaatcaacacagcgct

SEQ ID NO: 887328 - DNA, 25 bp, Homo sapien
gctgatatatgtgtacctgtgccta

SEQ ID NO: 887329 - DNA, 25 bp, Homo sapien
atttatctgaggaaccgccacgggc

SEQ ID NO: 887330 - DNA, 25 bp, Homo sapien
caaatgcactggaccgcttcggaat

SEQ ID NO: 887331 - DNA, 25 bp, Homo sapien
cacaaggacaagtacatggttttct

SEQ ID NO: 887332 - DNA, 25 bp, Homo sapien
cacgggcagaggagcaacatctgtc

SEQ ID NO: 887333 - DNA, 25 bp, Homo sapien
cgttcacctttgacaggggccgtca

SEQ ID NO: 887334 - DNA, 25 bp, Homo sapien
cacactgcggctgcatttaatttat

SEQ ID NO: 887335 - DNA, 25 bp, Homo sapien
gtcacctcacactccagtgtaatgg

SEQ ID NO: 887336 - DNA, 25 bp, Homo sapien
gtaatggaccacactgcggctgcat

SEQ ID NO: 887337 - DNA, 25 bp, Homo sapien
ccggagcgcacagacgccagctgag

SEQ ID NO: 887338 - DNA, 25 bp, Homo sapien
cttcccggagcgcacagacgccagc

SEQ ID NO: 887339 - DNA, 25 bp, Homo sapien
cgcacagacgccagctgagtgggag

SEQ ID NO: 887340 - DNA, 25 bp, Homo sapien
cggagcgcacagacgccagctgagt

SEQ ID NO: 887341 - DNA, 25 bp, Homo sapien
ttttcacgatttatgaaataagatg

SEQ ID NO: 887342 - DNA, 25 bp, Homo sapien
tatgaaataagatgtcaagtgacaa

SEQ ID NO: 887343 - DNA, 25 bp, Homo sapien
gatttatgaaataagatgtcaagtg

SEQ ID NO: 887344 - DNA, 25 bp, Homo sapien
cacgatttatgaaataagatgtcaa

SEQ ID NO: 887345 - DNA, 25 bp, Homo sapien
acaaaggacatgtaattaagaatat

SEQ ID NO: 887346 - DNA, 25 bp, Homo sapien
tattaatagcacctgaaaatagcag

SEQ ID NO: 887347 - DNA, 25 bp, Homo sapien
tccaatctatttgcacttttaggaa

SEQ ID NO: 887348 - DNA, 25 bp, Homo sapien
taatagcacctgaaaatagcagcaa

SEQ ID NO: 887349 - DNA, 25 bp, Homo sapien
cgttgaagtgcttcttgcaggtata

SEQ ID NO: 887350 - DNA, 25 bp, Homo sapien
ttgaagtgcttcttgcaggtatagc

SEQ ID NO: 887351 - DNA, 25 bp, Homo sapien
cacgttgaagtgcttcttgcaggta

SEQ ID NO: 887352 - DNA, 25 bp, Homo sapien
gaagtgcttcttgcaggtatagcat

SEQ ID NO: 887353 - DNA, 25 bp, Homo sapien
tgtgccagggatgagcctctaactc

SEQ ID NO: 887354 - DNA, 25 bp, Homo sapien
caggagacagtggtgtcatcctggt

SEQ ID NO: 887355 - DNA, 25 bp, Homo sapien
agcaatgtgtcatgaggatagtaca

SEQ ID NO: 887356 - DNA, 25 bp, Homo sapien
tatattcccagcgataagcaatgtg

SEQ ID NO: 887357 - DNA, 25 bp, Homo sapien
gaaagaggctttagtgacaaagcca

SEQ ID NO: 887358 - DNA, 25 bp, Homo sapien
ggaaagaggctttagtgacaaagcc

SEQ ID NO: 887359 - DNA, 25 bp, Homo sapien
aaagaggctttagtgacaaagccag

SEQ ID NO: 887360 - DNA, 25 bp, Homo sapien
aacagaattctgagcccagtgaccc

SEQ ID NO: 887361 - DNA, 25 bp, Homo sapien
gagcgccttccaaaaagtcgagact

SEQ ID NO: 887362 - DNA, 25 bp, Homo sapien
cagaaacgttctcgaaaggagcgcc

SEQ ID NO: 887363 - DNA, 25 bp, Homo sapien
gatgtgtgttagagataaggcagaa

SEQ ID NO: 887364 - DNA, 25 bp, Homo sapien
cattctggcaggtaaatcgggcccc

SEQ ID NO: 887365 - DNA, 25 bp, Homo sapien
tgttccctgcgcctttcaaacaaca

SEQ ID NO: 887366 - DNA, 25 bp, Homo sapien
tctgctgccgttggaaattgatgca

SEQ ID NO: 887367 - DNA, 25 bp, Homo sapien
acaccagcatgcacgagcacgcatg

SEQ ID NO: 887368 - DNA, 25 bp, Homo sapien
tgaatatctaaagcccaccactcag

SEQ ID NO: 887369 - DNA, 25 bp, Homo sapien
agtgtcagtactgtctcccgcagca

SEQ ID NO: 887370 - DNA, 25 bp, Homo sapien
tggtgcctgtgttttcccgaaatga

SEQ ID NO: 887371 - DNA, 25 bp, Homo sapien
ccgaaatgagggtagacgtggttca

SEQ ID NO: 887372 - DNA, 25 bp, Homo sapien
tgccccaagcgagtcaaacagtgtc

SEQ ID NO: 887373 - DNA, 25 bp, Homo sapien
gaaagctccaaagtatctctgaggt

SEQ ID NO: 887374 - DNA, 25 bp, Homo sapien
cgctgtatatgaagctctccgatga

SEQ ID NO: 887375 - DNA, 25 bp, Homo sapien
ggaagccctccaagaactgaagtct

SEQ ID NO: 887376 - DNA, 25 bp, Homo sapien
tctctgaggttgtgttcgctgtata

SEQ ID NO: 887377 - DNA, 25 bp, Homo sapien
tccgtttctgccgttccaacacagg

SEQ ID NO: 887378 - DNA, 25 bp, Homo sapien
gcatttagatggaggcagtattaac

SEQ ID NO: 887379 - DNA, 25 bp, Homo sapien
cattaacacgcttacggagggtgga

SEQ ID NO: 887380 - DNA, 25 bp, Homo sapien
gaggcagtattaactcaagacattt

SEQ ID NO: 887381 - DNA, 25 bp, Homo sapien
cttggtgcacgattgcttcagcagc

SEQ ID NO: 887382 - DNA, 25 bp, Homo sapien
ggtgcacgattgcttcagcagcagc

SEQ ID NO: 887383 - DNA, 25 bp, Homo sapien
tgttcttggtgcacgattgcttcag

SEQ ID NO: 887384 - DNA, 25 bp, Homo sapien
tgctgttcttggtgcacgattgctt

SEQ ID NO: 887385 - DNA, 25 bp, Homo sapien
gaaaagcaactggtaggtcctgcca

SEQ ID NO: 887386 - DNA, 25 bp, Homo sapien
gccttaggatcaatacacagcattt

SEQ ID NO: 887387 - DNA, 25 bp, Homo sapien
tcagccatttttgggtaaaggattg

SEQ ID NO: 887388 - DNA, 25 bp, Homo sapien
ggatcactttatttaactgcacaga

SEQ ID NO: 887389 - DNA, 25 bp, Homo sapien
acatcaagcagctgaatactttctc

SEQ ID NO: 887390 - DNA, 25 bp, Homo sapien
attgagccttcctccattatcatcc

SEQ ID NO: 887391 - DNA, 25 bp, Homo sapien
ttaagctctaacatcaagcagctga

SEQ ID NO: 887392 - DNA, 25 bp, Homo sapien
tccctctcccgatgataaaccactg

SEQ ID NO: 887393 - DNA, 25 bp, Homo sapien
gagagcagtctctccacctaaagga

SEQ ID NO: 887394 - DNA, 25 bp, Homo sapien
tggaacaggactacaatttggtgcc

SEQ ID NO: 887395 - DNA, 25 bp, Homo sapien
ttccactagggatgagagagcagtc

SEQ ID NO: 887396 - DNA, 25 bp, Homo sapien
gacccactatagagagcaggctatt

SEQ ID NO: 887397 - DNA, 25 bp, Homo sapien
tagtgcactgacttctatcatactc

SEQ ID NO: 887398 - DNA, 25 bp, Homo sapien
aagttctgtagtgcactgacttcta

SEQ ID NO: 887399 - DNA, 25 bp, Homo sapien
cagagtcggagtgtctcagaacttt

SEQ ID NO: 887400 - DNA, 25 bp, Homo sapien
atcatactcagagtcggagtgtctc

SEQ ID NO: 887401 - DNA, 25 bp, Homo sapien
gggcgctgcacgaggacgaatattc

SEQ ID NO: 887402 - DNA, 25 bp, Homo sapien
cgctgcacgaggacgaatattcgga

SEQ ID NO: 887403 - DNA, 25 bp, Homo sapien
gctgcacgaggacgaatattcggag

SEQ ID NO: 887404 - DNA, 25 bp, Homo sapien
cgggggcgctgcacgaggacgaata

SEQ ID NO: 887405 - DNA, 25 bp, Homo sapien
tgggccgggacaccttcgcgagtgg

SEQ ID NO: 887406 - DNA, 25 bp, Homo sapien
ctgaacagctgttgcgcgcgtgcaa

SEQ ID NO: 887407 - DNA, 25 bp, Homo sapien
catcttgacttttgccgacgtggaa

SEQ ID NO: 887408 - DNA, 25 bp, Homo sapien
ttttgggtttggagacgacctgcgc

SEQ ID NO: 887409 - DNA, 25 bp, Homo sapien
gcttcccgcgacactcgggccgggc

SEQ ID NO: 887410 - DNA, 25 bp, Homo sapien
gcctgttccgcttcccgcgacactc

SEQ ID NO: 887411 - DNA, 25 bp, Homo sapien
ggagcccgcgttttgcaagatgccc

SEQ ID NO: 887412 - DNA, 25 bp, Homo sapien
gcccgcgttttgcaagatgcccctg

SEQ ID NO: 887413 - DNA, 25 bp, Homo sapien
cacgggcacgtagaatcaattttaa

SEQ ID NO: 887414 - DNA, 25 bp, Homo sapien
tccctgagaagaggtcacgggcacg

SEQ ID NO: 887415 - DNA, 25 bp, Homo sapien
gggagctcagaattccctgagaaga

SEQ ID NO: 887416 - DNA, 25 bp, Homo sapien
cccaagcacgccaaagaagatgctg

SEQ ID NO: 887417 - DNA, 25 bp, Homo sapien
gtttgtttatctgaccattcgcggg

SEQ ID NO: 887418 - DNA, 25 bp, Homo sapien
tatctgaccattcgcgggtttgcag

SEQ ID NO: 887419 - DNA, 25 bp, Homo sapien
tgtttatctgaccattcgcgggttt

SEQ ID NO: 887420 - DNA, 25 bp, Homo sapien
ttgtttgtttatctgaccattcgcg

SEQ ID NO: 887421 - DNA, 25 bp, Homo sapien
tcaaattccagtgtctagagggcta

SEQ ID NO: 887422 - DNA, 25 bp, Homo sapien
caagaaggttaagtgatccggccaa

SEQ ID NO: 887423 - DNA, 25 bp, Homo sapien
gcaatagtgtgaggctagaacgtcc

SEQ ID NO: 887424 - DNA, 25 bp, Homo sapien
tgggatgcatcggacagaaaaagcc

SEQ ID NO: 887425 - DNA, 25 bp, Homo sapien
caaaaacaagcttgcggcatggcag

SEQ ID NO: 887426 - DNA, 25 bp, Homo sapien
gcaggttcccgccaaggatctggtt

SEQ ID NO: 887427 - DNA, 25 bp, Homo sapien
caatcacgtggtagagtttgacagt

SEQ ID NO: 887428 - DNA, 25 bp, Homo sapien
catttaatgagtgggtgcaatcacg

SEQ ID NO: 887429 - DNA, 25 bp, Homo sapien
agtccctggtaatcaggagggcctt

SEQ ID NO: 887430 - DNA, 25 bp, Homo sapien
tacaggcctttagcctcattttcag

SEQ ID NO: 887431 - DNA, 25 bp, Homo sapien
tgtttgctgaaggtatggaggaggt

SEQ ID NO: 887432 - DNA, 25 bp, Homo sapien
ttcaggagggcagtccctggtaatc

SEQ ID NO: 887433 - DNA, 25 bp, Homo sapien
aggagggaatgctaggagaggtgac

SEQ ID NO: 887434 - DNA, 25 bp, Homo sapien
gcgaggagggaatgctaggagaggt

SEQ ID NO: 887435 - DNA, 25 bp, Homo sapien
ctgcgaggagggaatgctaggagag

SEQ ID NO: 887436 - DNA, 25 bp, Homo sapien
cgaggagggaatgctaggagaggtg

SEQ ID NO: 887437 - DNA, 25 bp, Homo sapien
agaatgctgtgcattgaactctcac

SEQ ID NO: 887438 - DNA, 25 bp, Homo sapien
gaagtgacattcagaatgctgtgca

SEQ ID NO: 887439 - DNA, 25 bp, Homo sapien
cattcagaatgctgtgcattgaact

SEQ ID NO: 887440 - DNA, 25 bp, Homo sapien
atggaagtgacattcagaatgctgt

SEQ ID NO: 887441 - DNA, 25 bp, Homo sapien
cccaaaagataaacagcggcaatgg

SEQ ID NO: 887442 - DNA, 25 bp, Homo sapien
aatgcaactgttatggctcgagggt

SEQ ID NO: 887443 - DNA, 25 bp, Homo sapien
caatggtcaagatcaaagcgttggg

SEQ ID NO: 887444 - DNA, 25 bp, Homo sapien
ggcactttgtaaatatctaaggtac

SEQ ID NO: 887445 - DNA, 25 bp, Homo sapien
tcttgccaatgtagcaggatgcttc

SEQ ID NO: 887446 - DNA, 25 bp, Homo sapien
tgtgcagcggacctcaaatcctgtg

SEQ ID NO: 887447 - DNA, 25 bp, Homo sapien
ttgtccgggcacagataattgagga

SEQ ID NO: 887448 - DNA, 25 bp, Homo sapien
tccagacgtggataagaggccattc

SEQ ID NO: 887449 - DNA, 25 bp, Homo sapien
gatatgtccccaaagttggttgtct

SEQ ID NO: 887450 - DNA, 25 bp, Homo sapien
ttggttgtctggtagttaattgtgg

SEQ ID NO: 887451 - DNA, 25 bp, Homo sapien
gttgtctggtagttaattgtggtca

SEQ ID NO: 887452 - DNA, 25 bp, Homo sapien
ctactgatatgtccccaaagttggt

SEQ ID NO: 887453 - DNA, 25 bp, Homo sapien
actttttcaaagatactccagagca

SEQ ID NO: 887454 - DNA, 25 bp, Homo sapien
gcacagagtcctactgaagtccaca

SEQ ID NO: 887455 - DNA, 25 bp, Homo sapien
tctagagttttcagctgccaccagg

SEQ ID NO: 887456 - DNA, 25 bp, Homo sapien
gagggcatgtgtccggttccctcaa

SEQ ID NO: 887457 - DNA, 25 bp, Homo sapien
taaaaccgtcatcatcagaatgtgc

SEQ ID NO: 887458 - DNA, 25 bp, Homo sapien
tgttgactcttccaatggcaaaagc

SEQ ID NO: 887459 - DNA, 25 bp, Homo sapien
tgctcccgactcaaagggtactgga

SEQ ID NO: 887460 - DNA, 25 bp, Homo sapien
taagcagcaatatcataaaaccgtc

SEQ ID NO: 887461 - DNA, 25 bp, Homo sapien
tatgtagcagagttgcatgaggagg

SEQ ID NO: 887462 - DNA, 25 bp, Homo sapien
tagcagagttgcatgaggaggagaa

SEQ ID NO: 887463 - DNA, 25 bp, Homo sapien
gtagcagagttgcatgaggaggaga

SEQ ID NO: 887464 - DNA, 25 bp, Homo sapien
tgtagcagagttgcatgaggaggag

SEQ ID NO: 887465 - DNA, 25 bp, Homo sapien
gccttgagccttggccaaatctcca

SEQ ID NO: 887466 - DNA, 25 bp, Homo sapien
ctgaatttaacacaggggccttgag

SEQ ID NO: 887467 - DNA, 25 bp, Homo sapien
aagtttgagtcagcacctgaattta

SEQ ID NO: 887468 - DNA, 25 bp, Homo sapien
ggccttgagccttggccaaatctcc

SEQ ID NO: 887469 - DNA, 25 bp, Homo sapien
gaaagcgtaatgaacatcaagggca

SEQ ID NO: 887470 - DNA, 25 bp, Homo sapien
ggaaagcgtaatgaacatcaagggc

SEQ ID NO: 887471 - DNA, 25 bp, Homo sapien
caggaaagcgtaatgaacatcaagg

SEQ ID NO: 887472 - DNA, 25 bp, Homo sapien
aggaaagcgtaatgaacatcaaggg

SEQ ID NO: 887473 - DNA, 25 bp, Homo sapien
ggttctaaatttgtaactagctgag

SEQ ID NO: 887474 - DNA, 25 bp, Homo sapien
gggttagaagcagtccccatggaaa

SEQ ID NO: 887475 - DNA, 25 bp, Homo sapien
ctgagtcttacggaaatgcagggtg

SEQ ID NO: 887476 - DNA, 25 bp, Homo sapien
catggaaaacccacctagggaacag

SEQ ID NO: 887477 - DNA, 25 bp, Homo sapien
agaagcataaagctccttggccatc

SEQ ID NO: 887478 - DNA, 25 bp, Homo sapien
tacacggaccatcgtgtgagctggc

SEQ ID NO: 887479 - DNA, 25 bp, Homo sapien
ttccgttcacaacagggccatgctg

SEQ ID NO: 887480 - DNA, 25 bp, Homo sapien
tgcttcggcagcagaacgtggagac

SEQ ID NO: 887481 - DNA, 25 bp, Homo sapien
gggaaaggccggtgatcatgtgagc

SEQ ID NO: 887482 - DNA, 25 bp, Homo sapien
aaggccggtgatcatgtgagcatga

SEQ ID NO: 887483 - DNA, 25 bp, Homo sapien
tgatcatgtgagcatgagtggtcat

SEQ ID NO: 887484 - DNA, 25 bp, Homo sapien
gtgatcatgtgagcatgagtggtca

SEQ ID NO: 887485 - DNA, 25 bp, Homo sapien
ttaatctctgcactcttgtcacttt

SEQ ID NO: 887486 - DNA, 25 bp, Homo sapien
tttggtgaaaatagagtgctgggtt

SEQ ID NO: 887487 - DNA, 25 bp, Homo sapien
gtttcctaacccgattgatggtgct

SEQ ID NO: 887488 - DNA, 25 bp, Homo sapien
ggtgctgtcaccgtataacctcaca

SEQ ID NO: 887489 - DNA, 25 bp, Homo sapien
agttcactttcacattgcgctgtct

SEQ ID NO: 887490 - DNA, 25 bp, Homo sapien
tctgaggatcccgagacactgtgga

SEQ ID NO: 887491 - DNA, 25 bp, Homo sapien
gaaatatctctccatacgcccagtg

SEQ ID NO: 887492 - DNA, 25 bp, Homo sapien
tggagatgatgcttgcaaagttcac

SEQ ID NO: 887493 - DNA, 25 bp, Homo sapien
aaaccttggatgaagcgttcatgag

SEQ ID NO: 887494 - DNA, 25 bp, Homo sapien
caattagaggccaggaaatcttgtc

SEQ ID NO: 887495 - DNA, 25 bp, Homo sapien
cagagtcaacgggtgctgccaatta

SEQ ID NO: 887496 - DNA, 25 bp, Homo sapien
tctggtcacgagcagagtcaacggg

SEQ ID NO: 887497 - DNA, 25 bp, Homo sapien
gtgactgtcaggctttgagcaatgc

SEQ ID NO: 887498 - DNA, 25 bp, Homo sapien
ggctttgagcaatgctctccttcat

SEQ ID NO: 887499 - DNA, 25 bp, Homo sapien
gactgtcaggctttgagcaatgctc

SEQ ID NO: 887500 - DNA, 25 bp, Homo sapien
gcaatgctctccttcataaagggca

SEQ ID NO: 887501 - DNA, 25 bp, Homo sapien
aagctgaaacttgattccgactacc

SEQ ID NO: 887502 - DNA, 25 bp, Homo sapien
aatggtagcaaaatacactgtcctg

SEQ ID NO: 887503 - DNA, 25 bp, Homo sapien
tttccgcgtctgcatatgtaaagct

SEQ ID NO: 887504 - DNA, 25 bp, Homo sapien
ttttaagagacctttccgcgtctgc

SEQ ID NO: 887505 - DNA, 25 bp, Homo sapien
tggactcttgctccacctcgctttt

SEQ ID NO: 887506 - DNA, 25 bp, Homo sapien
ctcctctggaagtcgtggactcttg

SEQ ID NO: 887507 - DNA, 25 bp, Homo sapien
taacgaggacattgtgaaacataat

SEQ ID NO: 887508 - DNA, 25 bp, Homo sapien
tccatcaaatgggactaacgaggac

SEQ ID NO: 887509 - DNA, 25 bp, Homo sapien
tggctggtgttcacctccaagaact

SEQ ID NO: 887510 - DNA, 25 bp, Homo sapien
ctggctggtgttcacctccaagaac

SEQ ID NO: 887511 - DNA, 25 bp, Homo sapien
ggctggtgttcacctccaagaactt

SEQ ID NO: 887512 - DNA, 25 bp, Homo sapien
aaactcgtctgagtctggccattgc

SEQ ID NO: 887513 - DNA, 25 bp, Homo sapien
tgacgtaacaggaattaatgatgct

SEQ ID NO: 887514 - DNA, 25 bp, Homo sapien
caaggctccttgattgacagttccc

SEQ ID NO: 887515 - DNA, 25 bp, Homo sapien
cctgaagagtctgactggcttgcca

SEQ ID NO: 887516 - DNA, 25 bp, Homo sapien
tacttgttctctagaaacggacaga

SEQ ID NO: 887517 - DNA, 25 bp, Homo sapien
tcctgctgagaaccttgcaaaacct

SEQ ID NO: 887518 - DNA, 25 bp, Homo sapien
cagtgctgcgaactgtcttttgtag

SEQ ID NO: 887519 - DNA, 25 bp, Homo sapien
tatagatgtctggtcctggtcctcc

SEQ ID NO: 887520 - DNA, 25 bp, Homo sapien
tcctggatgtcactgggatgccaca

SEQ ID NO: 887521 - DNA, 25 bp, Homo sapien
tggtgtcaagatgaagggggggcct

SEQ ID NO: 887522 - DNA, 25 bp, Homo sapien
ttggtgtcaagatgaagggggggcc

SEQ ID NO: 887523 - DNA, 25 bp, Homo sapien
ctggatgtcactgggatgccacagc

SEQ ID NO: 887524 - DNA, 25 bp, Homo sapien
gtcacattgcaggaaagacgttggg

SEQ ID NO: 887525 - DNA, 25 bp, Homo sapien
gaagtcacattgcaggaaagacgtt

SEQ ID NO: 887526 - DNA, 25 bp, Homo sapien
agtcacattgcaggaaagacgttgg

SEQ ID NO: 887527 - DNA, 25 bp, Homo sapien
agaagtcacattgcaggaaagacgt

SEQ ID NO: 887528 - DNA, 25 bp, Homo sapien
gctggggatgaaagatcaagctccc

SEQ ID NO: 887529 - DNA, 25 bp, Homo sapien
tgagacctctgaaagccgccctttt

SEQ ID NO: 887530 - DNA, 25 bp, Homo sapien
ctcccagaccatgaggttgagacct

SEQ ID NO: 887531 - DNA, 25 bp, Homo sapien
gaccatgaggttgagacctctgaaa

SEQ ID NO: 887532 - DNA, 25 bp, Homo sapien
ttcagtgcagactgtcaactgctgg

SEQ ID NO: 887533 - DNA, 25 bp, Homo sapien
ggttgggactgaggatgacaacccc

SEQ ID NO: 887534 - DNA, 25 bp, Homo sapien
tgcctcagagtacagccacagtggg

SEQ ID NO: 887535 - DNA, 25 bp, Homo sapien
tgggaagagaacagtgtctaagcaa

SEQ ID NO: 887536 - DNA, 25 bp, Homo sapien
tagcatcctagtaccaacagctttt

SEQ ID NO: 887537 - DNA, 25 bp, Homo sapien
ccccagtggaaactgcggagattag

SEQ ID NO: 887538 - DNA, 25 bp, Homo sapien
tttttatgataatcttggcttccaa

SEQ ID NO: 887539 - DNA, 25 bp, Homo sapien
tgcacataagaggagaggacaccgg

SEQ ID NO: 887540 - DNA, 25 bp, Homo sapien
tccatgcgatgggtaggagcgtgcc

SEQ ID NO: 887541 - DNA, 25 bp, Homo sapien
gggtaggagcgtgctgtccaccttc

SEQ ID NO: 887542 - DNA, 25 bp, Homo sapien
tccatgcgatgggtaggagcgtgct

SEQ ID NO: 887543 - DNA, 25 bp, Homo sapien
tgcgatgggtaggagcgtgccccat

SEQ ID NO: 887544 - DNA, 25 bp, Homo sapien
catgcttgctaaatgggcaggacca

SEQ ID NO: 887545 - DNA, 25 bp, Homo sapien
gaaaccatgtctgcagactgtcatg

SEQ ID NO: 887546 - DNA, 25 bp, Homo sapien
gaccttgtatttggccttagtagca

SEQ ID NO: 887547 - DNA, 25 bp, Homo sapien
ggcaggaccaagtagatactatacc

SEQ ID NO: 887548 - DNA, 25 bp, Homo sapien
cgcacccggctggatctatgttaat

SEQ ID NO: 887549 - DNA, 25 bp, Homo sapien
ccggctggatctatgttaatattca

SEQ ID NO: 887550 - DNA, 25 bp, Homo sapien
cctaggctgaggtacatccctgagt

SEQ ID NO: 887551 - DNA, 25 bp, Homo sapien
cctgcctaggctgaggtacatccct

SEQ ID NO: 887552 - DNA, 25 bp, Homo sapien
gaagcagaagtcgaactgtgatgca

SEQ ID NO: 887553 - DNA, 25 bp, Homo sapien
tgcatcagacttgtcccacattggg

SEQ ID NO: 887554 - DNA, 25 bp, Homo sapien
tgggaatagccacaagtcctccttt

SEQ ID NO: 887555 - DNA, 25 bp, Homo sapien
cctgggctgacatggatgcatcaga

SEQ ID NO: 887556 - DNA, 25 bp, Homo sapien
ttagaaacaactatgcaccattaag

SEQ ID NO: 887557 - DNA, 25 bp, Homo sapien
ccaaagtgattttgctatgtaggca

SEQ ID NO: 887558 - DNA, 25 bp, Homo sapien
cagcaagaatatcaggtatcaccat

SEQ ID NO: 887559 - DNA, 25 bp, Homo sapien
gcattatttgggaagcatagctaaa

SEQ ID NO: 887560 - DNA, 25 bp, Homo sapien
tttgctgttgccttagccaaagtga

SEQ ID NO: 887561 - DNA, 25 bp, Homo sapien
cagagttaggcacaatcagacagag

SEQ ID NO: 887562 - DNA, 25 bp, Homo sapien
tagtaggctgatgcgaattgtccag

SEQ ID NO: 887563 - DNA, 25 bp, Homo sapien
tctgaagactagtgtgggaccaagg

SEQ ID NO: 887564 - DNA, 25 bp, Homo sapien
cagaatctgggttacgaagtggcca

SEQ ID NO: 887565 - DNA, 25 bp, Homo sapien
ttcttggagagggggatgtggcagg

SEQ ID NO: 887566 - DNA, 25 bp, Homo sapien
ataggataatagtggagagaaggtc

SEQ ID NO: 887567 - DNA, 25 bp, Homo sapien
cttggagagggggatgtggcagggt

SEQ ID NO: 887568 - DNA, 25 bp, Homo sapien
ttggagagggggatgtggcagggtc

SEQ ID NO: 887569 - DNA, 25 bp, Homo sapien
ggaagattgcacagcagccaggcag

SEQ ID NO: 887570 - DNA, 25 bp, Homo sapien
cttggaagattgcacagcagccagg

SEQ ID NO: 887571 - DNA, 25 bp, Homo sapien
ttggaagattgcacagcagccaggc

SEQ ID NO: 887572 - DNA, 25 bp, Homo sapien
cacttggaagattgcacagcagcca

SEQ ID NO: 887573 - DNA, 25 bp, Homo sapien
aatggagggagaccgtcgaaaggag

SEQ ID NO: 887574 - DNA, 25 bp, Homo sapien
gccaagatcacggcagtagagtcca

SEQ ID NO: 887575 - DNA, 25 bp, Homo sapien
caatggagggagaccgtcgaaagga

SEQ ID NO: 887576 - DNA, 25 bp, Homo sapien
aagatcacggcagtagagtccaggc

SEQ ID NO: 887577 - DNA, 25 bp, Homo sapien
taagtcctagacataccagattgaa

SEQ ID NO: 887578 - DNA, 25 bp, Homo sapien
ataacactgagagcaaacttaccag

SEQ ID NO: 887579 - DNA, 25 bp, Homo sapien
aagttacttctaataggagtcccag

SEQ ID NO: 887580 - DNA, 25 bp, Homo sapien
gactacacagagctcctaacgaaaa

SEQ ID NO: 887581 - DNA, 25 bp, Homo sapien
tgtgattaccaaccgctaggatgag

SEQ ID NO: 887582 - DNA, 25 bp, Homo sapien
acaggatttctttcaccggttgaca

SEQ ID NO: 887583 - DNA, 25 bp, Homo sapien
tcagccaggctataagtcaggatgt

SEQ ID NO: 887584 - DNA, 25 bp, Homo sapien
cgtttttcagggcatctcattggga

SEQ ID NO: 887585 - DNA, 25 bp, Homo sapien
tatccacattcaggaatataggtga

SEQ ID NO: 887586 - DNA, 25 bp, Homo sapien
cattcaggaatataggtgaataaca

SEQ ID NO: 887587 - DNA, 25 bp, Homo sapien
gaaacttgagccgtgatgaacagcg

SEQ ID NO: 887588 - DNA, 25 bp, Homo sapien
gagccgtgatgaacagcgtgctaaa

SEQ ID NO: 887589 - DNA, 25 bp, Homo sapien
ttaatcggcgcattaagcagccagc

SEQ ID NO: 887590 - DNA, 25 bp, Homo sapien
gaaagctgaccattgcctaggaccc

SEQ ID NO: 887591 - DNA, 25 bp, Homo sapien
tctaattggctatgggctggcttcc

SEQ ID NO: 887592 - DNA, 25 bp, Homo sapien
tacctacctagttgagcagtcttga

SEQ ID NO: 887593 - DNA, 25 bp, Homo sapien
catattgtaaacctcagtgcttctg

SEQ ID NO: 887594 - DNA, 25 bp, Homo sapien
tgacatttgacaatctagcacatat

SEQ ID NO: 887595 - DNA, 25 bp, Homo sapien
tctgcaaagccacttaatctggacc

SEQ ID NO: 887596 - DNA, 25 bp, Homo sapien
tgccaccagtattgctaaacgtaaa

SEQ ID NO: 887597 - DNA, 25 bp, Homo sapien
gggacagccaataatgtccacaatg

SEQ ID NO: 887598 - DNA, 25 bp, Homo sapien
ggtgatcttttagacaaccaaatat

SEQ ID NO: 887599 - DNA, 25 bp, Homo sapien
aatatttatagaacaagattcacac

SEQ ID NO: 887600 - DNA, 25 bp, Homo sapien
gcatagctttgtgaaactgctttta

SEQ ID NO: 887601 - DNA, 25 bp, Homo sapien
ttttatatcaagaacctcaactaaa

SEQ ID NO: 887602 - DNA, 25 bp, Homo sapien
aaatagaattgtaatctgtctactc

SEQ ID NO: 887603 - DNA, 25 bp, Homo sapien
gaattgtaatctgtctactcacaaa

SEQ ID NO: 887604 - DNA, 25 bp, Homo sapien
tctagccaatttgatgttactgttt

SEQ ID NO: 887605 - DNA, 25 bp, Homo sapien
tttaaatgaaggcaccaacaagaac

SEQ ID NO: 887606 - DNA, 25 bp, Homo sapien
aatgaaggcaccaacaagaactact

SEQ ID NO: 887607 - DNA, 25 bp, Homo sapien
gaaggcaccaacaagaactactttc

SEQ ID NO: 887608 - DNA, 25 bp, Homo sapien
taaatgaaggcaccaacaagaacta

SEQ ID NO: 887609 - DNA, 25 bp, Homo sapien
cttcttcattagttacctgcagcaa

SEQ ID NO: 887610 - DNA, 25 bp, Homo sapien
tcttcattagttacctgcagcaaga

SEQ ID NO: 887611 - DNA, 25 bp, Homo sapien
cttcattagttacctgcagcaagac

SEQ ID NO: 887612 - DNA, 25 bp, Homo sapien
ttcttcattagttacctgcagcaag

SEQ ID NO: 887613 - DNA, 25 bp, Homo sapien
cattggtgtatagagtaagccctga

SEQ ID NO: 887614 - DNA, 25 bp, Homo sapien
caagggtgtaacgatgggaaatctc

SEQ ID NO: 887615 - DNA, 25 bp, Homo sapien
caacttcagtggtggtcttaggatc

SEQ ID NO: 887616 - DNA, 25 bp, Homo sapien
taaagccgggcaatcaaactgatca

SEQ ID NO: 887617 - DNA, 25 bp, Homo sapien
cattttactaccaacaccactgaag

SEQ ID NO: 887618 - DNA, 25 bp, Homo sapien
cagctgttgaaatgaagcactttac

SEQ ID NO: 887619 - DNA, 25 bp, Homo sapien
gcagcagaatatacttgtccatggt

SEQ ID NO: 887620 - DNA, 25 bp, Homo sapien
aagcactttacagtctttgtggcag

SEQ ID NO: 887621 - DNA, 25 bp, Homo sapien
ctttacagtctttgtggcagcagaa

SEQ ID NO: 887622 - DNA, 25 bp, Homo sapien
aaaaaatgatatgttaagcacccaa

SEQ ID NO: 887623 - DNA, 25 bp, Homo sapien
gctatgttaaactacgtaagaacca

SEQ ID NO: 887624 - DNA, 25 bp, Homo sapien
gaaccactatactgaaagaccattt

SEQ ID NO: 887625 - DNA, 25 bp, Homo sapien
gaccatttaagagtattagtttatc

SEQ ID NO: 887626 - DNA, 25 bp, Homo sapien
taagactggctgaacttagtagccg

SEQ ID NO: 887627 - DNA, 25 bp, Homo sapien
tgctctacaccctcagctttcgttg

SEQ ID NO: 887628 - DNA, 25 bp, Homo sapien
gagttctcttgtactagacctgtgt

SEQ ID NO: 887629 - DNA, 25 bp, Homo sapien
tggcatccttataaactactgtagt

SEQ ID NO: 887630 - DNA, 25 bp, Homo sapien
tcctttccttgcattgaagaagcag

SEQ ID NO: 887631 - DNA, 25 bp, Homo sapien
tttccttgcattgaagaagcagcat

SEQ ID NO: 887632 - DNA, 25 bp, Homo sapien
tttcctttccttgcattgaagaagc

SEQ ID NO: 887633 - DNA, 25 bp, Homo sapien
ctttccttgcattgaagaagcagca

SEQ ID NO: 887634 - DNA, 25 bp, Homo sapien
gagatatcccttaagttatctacat

SEQ ID NO: 887635 - DNA, 25 bp, Homo sapien
tatcccttaagttatctacataatt

SEQ ID NO: 887636 - DNA, 25 bp, Homo sapien
cagagatatcccttaagttatctac

SEQ ID NO: 887637 - DNA, 25 bp, Homo sapien
gatatcccttaagttatctacataa

SEQ ID NO: 887638 - DNA, 25 bp, Homo sapien
tatacaaatataacaacagctttgc

SEQ ID NO: 887639 - DNA, 25 bp, Homo sapien
gatgaattgcagacaacacacttac

SEQ ID NO: 887640 - DNA, 25 bp, Homo sapien
cacttacatctgaccagcatttatc

SEQ ID NO: 887641 - DNA, 25 bp, Homo sapien
gctttgcaacggaccttaattatac

SEQ ID NO: 887642 - DNA, 25 bp, Homo sapien
ttttattaaatcataaatgtacaac

SEQ ID NO: 887643 - DNA, 25 bp, Homo sapien
tttattaaatcataaatgtacaaca

SEQ ID NO: 887644 - DNA, 25 bp, Homo sapien
gatcctggctaatagcttttcaaaa

SEQ ID NO: 887645 - DNA, 25 bp, Homo sapien
ttaacattatcaaagaaggaatgct

SEQ ID NO: 887646 - DNA, 25 bp, Homo sapien
gcttcttaactctacacacgcactt

SEQ ID NO: 887647 - DNA, 25 bp, Homo sapien
tgtcttattacaccatgatcctggc

SEQ ID NO: 887648 - DNA, 25 bp, Homo sapien
tgtcttctgccatatcactgcatat

SEQ ID NO: 887649 - DNA, 25 bp, Homo sapien
tcctctcctatttatacagtgaagc

SEQ ID NO: 887650 - DNA, 25 bp, Homo sapien
cattcacaaaatggctctctgcatc

SEQ ID NO: 887651 - DNA, 25 bp, Homo sapien
tgaagctgttctgttacctctgggc

SEQ ID NO: 887652 - DNA, 25 bp, Homo sapien
aaaagcttttactcctgcagctatg

SEQ ID NO: 887653 - DNA, 25 bp, Homo sapien
tatgaaattatccatctaaccagat

SEQ ID NO: 887654 - DNA, 25 bp, Homo sapien
gataacatgatcctaaaaagctttt

SEQ ID NO: 887655 - DNA, 25 bp, Homo sapien
gctatgtctcccaagataataataa

SEQ ID NO: 887656 - DNA, 25 bp, Homo sapien
caccataacccccacttcctccact

SEQ ID NO: 887657 - DNA, 25 bp, Homo sapien
tcagtatcggctcctcccaccataa

SEQ ID NO: 887658 - DNA, 25 bp, Homo sapien
tccactgcctcctggaccatagttt

SEQ ID NO: 887659 - DNA, 25 bp, Homo sapien
cctccactgcctcctggaccatagt

SEQ ID NO: 887660 - DNA, 25 bp, Homo sapien
ctccaccatatggtccccccatgtt

SEQ ID NO: 887661 - DNA, 25 bp, Homo sapien
ccaccatatggtccccccatgttcc

SEQ ID NO: 887662 - DNA, 25 bp, Homo sapien
tccaccatatggtccccccatgttc

SEQ ID NO: 887663 - DNA, 25 bp, Homo sapien
tcattggaccgtagttagaaggttg

SEQ ID NO: 887664 - DNA, 25 bp, Homo sapien
ccgtagttagaaggttgctggttat

SEQ ID NO: 887665 - DNA, 25 bp, Homo sapien
agaaggttgctggttataatttcca

SEQ ID NO: 887666 - DNA, 25 bp, Homo sapien
ttggaccgtagttagaaggttgctg

SEQ ID NO: 887667 - DNA, 25 bp, Homo sapien
ccaaattcccacataaaggttgcag

SEQ ID NO: 887668 - DNA, 25 bp, Homo sapien
attccaaattcccacataaaggttg

SEQ ID NO: 887669 - DNA, 25 bp, Homo sapien
attcccacataaaggttgcaggtga

SEQ ID NO: 887670 - DNA, 25 bp, Homo sapien
caaattcccacataaaggttgcagg

SEQ ID NO: 887671 - DNA, 25 bp, Homo sapien
gttgtcataaccacctccgtagccc

SEQ ID NO: 887672 - DNA, 25 bp, Homo sapien
tggttgccatatccaggtcctccac

SEQ ID NO: 887673 - DNA, 25 bp, Homo sapien
accctggttgccatatccaggtcct

SEQ ID NO: 887674 - DNA, 25 bp, Homo sapien
tcctccatagttgtcataaccacct

SEQ ID NO: 887675 - DNA, 25 bp, Homo sapien
gggttactcagccaaatggataaca

SEQ ID NO: 887676 - DNA, 25 bp, Homo sapien
aaaacaatgttctcggttgggcaca

SEQ ID NO: 887677 - DNA, 25 bp, Homo sapien
tagagggaaagtaaaagagcacttc

SEQ ID NO: 887678 - DNA, 25 bp, Homo sapien
gactgaataactatccttggtaaac

SEQ ID NO: 887679 - DNA, 25 bp, Homo sapien
taatcccagcagtacgggaagttga

SEQ ID NO: 887680 - DNA, 25 bp, Homo sapien
aaaacgaaacaatgttcttggctgg

SEQ ID NO: 887681 - DNA, 25 bp, Homo sapien
ccagcagtacgggaagttgaggcgg

SEQ ID NO: 887682 - DNA, 25 bp, Homo sapien
catggtggcagcaacctgtagtact

SEQ ID NO: 887683 - DNA, 25 bp, Homo sapien
ttctttactgtaaatagaagtgcgg

SEQ ID NO: 887684 - DNA, 25 bp, Homo sapien
tagaagtgcggacataaacaaaaat

SEQ ID NO: 887685 - DNA, 25 bp, Homo sapien
gatggcttgagactaagattgcagt

SEQ ID NO: 887686 - DNA, 25 bp, Homo sapien
cttgagactaagattgcagtaagcc

SEQ ID NO: 887687 - DNA, 25 bp, Homo sapien
cagccttttctgtacgccaatgata

SEQ ID NO: 887688 - DNA, 25 bp, Homo sapien
tgagtggcaacaccagaaatcaagt

SEQ ID NO: 887689 - DNA, 25 bp, Homo sapien
gggatgcttcccatctagttacggg

SEQ ID NO: 887690 - DNA, 25 bp, Homo sapien
gaaatcaagtctattaccagctcag

SEQ ID NO: 887691 - DNA, 25 bp, Homo sapien
aaatgaagtaaatatacgatatagt

SEQ ID NO: 887692 - DNA, 25 bp, Homo sapien
tatacgatatagttaagtattagtc

SEQ ID NO: 887693 - DNA, 25 bp, Homo sapien
atagttaagtattagtcacataaac

SEQ ID NO: 887694 - DNA, 25 bp, Homo sapien
cgatatagttaagtattagtcacat

SEQ ID NO: 887695 - DNA, 25 bp, Homo sapien
catccccaaatccacgtccactgcc

SEQ ID NO: 887696 - DNA, 25 bp, Homo sapien
tccaccgccaccacgtgaatcccca

SEQ ID NO: 887697 - DNA, 25 bp, Homo sapien
ttccaccgccaccacgtgaatcccc

SEQ ID NO: 887698 - DNA, 25 bp, Homo sapien
tcctggtccgaaatttccaccgcca

SEQ ID NO: 887699 - DNA, 25 bp, Homo sapien
tcctggtcctggtccgaaatttcca

SEQ ID NO: 887700 - DNA, 25 bp, Homo sapien
gaagcaagcccttatatatgaacaa

SEQ ID NO: 887701 - DNA, 25 bp, Homo sapien
aagcaagcccttatatatgaacaaa

SEQ ID NO: 887702 - DNA, 25 bp, Homo sapien
gttagaagcaagcccttatatatga

SEQ ID NO: 887703 - DNA, 25 bp, Homo sapien
tagaagcaagcccttatatatgaac

SEQ ID NO: 887704 - DNA, 25 bp, Homo sapien
cctcttccactcctagaactctgaa

SEQ ID NO: 887705 - DNA, 25 bp, Homo sapien
ctcttccactcctagaactctgaac

SEQ ID NO: 887706 - DNA, 25 bp, Homo sapien
tcctcttccactcctagaactctga

SEQ ID NO: 887707 - DNA, 25 bp, Homo sapien
ctgcatttcttgtctagacaaagcc

SEQ ID NO: 887708 - DNA, 25 bp, Homo sapien
catttcttgtctagacaaagccttt

SEQ ID NO: 887709 - DNA, 25 bp, Homo sapien
ccattgatggtatggtatttctgca

SEQ ID NO: 887710 - DNA, 25 bp, Homo sapien
acttctgcattatgaccattgatgg

SEQ ID NO: 887711 - DNA, 25 bp, Homo sapien
aatcaacaatattaagcagcttcaa

SEQ ID NO: 887712 - DNA, 25 bp, Homo sapien
agtacatttgtggttagacacttac

SEQ ID NO: 887713 - DNA, 25 bp, Homo sapien
aagttacagatgttaacatacacaa

SEQ ID NO: 887714 - DNA, 25 bp, Homo sapien
acaatattaagcagcttcaaaagtt

SEQ ID NO: 887715 - DNA, 25 bp, Homo sapien
tcttcacagttacatgagcccctgg

SEQ ID NO: 887716 - DNA, 25 bp, Homo sapien
taaggtgatgttcctcagtatcttc

SEQ ID NO: 887717 - DNA, 25 bp, Homo sapien
attttatccacaggatcatggtcat

SEQ ID NO: 887718 - DNA, 25 bp, Homo sapien
catattcctcaaagtaatctctaag

SEQ ID NO: 887719 - DNA, 25 bp, Homo sapien
gctacagcacgttttggctcaacta

SEQ ID NO: 887720 - DNA, 25 bp, Homo sapien
ctctcttgctacagcacgttttggc

SEQ ID NO: 887721 - DNA, 25 bp, Homo sapien
ggctcaactactctcccatcaattg

SEQ ID NO: 887722 - DNA, 25 bp, Homo sapien
caattgaatgaggtcttgcagccat

SEQ ID NO: 887723 - DNA, 25 bp, Homo sapien
tgatcttttgcttgcaggatccctc

SEQ ID NO: 887724 - DNA, 25 bp, Homo sapien
atcttttgcttgcaggatccctcat

SEQ ID NO: 887725 - DNA, 25 bp, Homo sapien
gatcttttgcttgcaggatccctca

SEQ ID NO: 887726 - DNA, 25 bp, Homo sapien
ttgatcttttgcttgcaggatccct

SEQ ID NO: 887727 - DNA, 25 bp, Homo sapien
ataaagagcttacggaactgttcct

SEQ ID NO: 887728 - DNA, 25 bp, Homo sapien
cattgttcgtagtagttcctcaaac

SEQ ID NO: 887729 - DNA, 25 bp, Homo sapien
tccccattgttcgtagtagttcctc

SEQ ID NO: 887730 - DNA, 25 bp, Homo sapien
aagcttaagccaccaataaagagct

SEQ ID NO: 887731 - DNA, 25 bp, Homo sapien
tctttgtatgcaggaaattaaattc

SEQ ID NO: 887732 - DNA, 25 bp, Homo sapien
ttcctctttgtatgcaggaaattaa

SEQ ID NO: 887733 - DNA, 25 bp, Homo sapien
aattaaattcttaaatatgaggtga

SEQ ID NO: 887734 - DNA, 25 bp, Homo sapien
ctgcaaaggaaaataccatttcaat

SEQ ID NO: 887735 - DNA, 25 bp, Homo sapien
tcctctccaaaggaacagtttctaa

SEQ ID NO: 887736 - DNA, 25 bp, Homo sapien
ctctccaaaggaacagtttctaaag

SEQ ID NO: 887737 - DNA, 25 bp, Homo sapien
ttcctctccaaaggaacagtttcta

SEQ ID NO: 887738 - DNA, 25 bp, Homo sapien
tgcctcagctgatctacacaagttt

SEQ ID NO: 887739 - DNA, 25 bp, Homo sapien
caaatgtagaccgtgattatcaaag

SEQ ID NO: 887740 - DNA, 25 bp, Homo sapien
tatgaccagcagcactcgaagctta

SEQ ID NO: 887741 - DNA, 25 bp, Homo sapien
ggtgattctaagtatctcagccaaa

SEQ ID NO: 887742 - DNA, 25 bp, Homo sapien
gatatcttctctgaaaccgggcccg

SEQ ID NO: 887743 - DNA, 25 bp, Homo sapien
tataaaggtccatggatctgtcccg

SEQ ID NO: 887744 - DNA, 25 bp, Homo sapien
cgagagaaagtgatatccaggacca

SEQ ID NO: 887745 - DNA, 25 bp, Homo sapien
gaaacgatatgaaaacagcccgaga

SEQ ID NO: 887746 - DNA, 25 bp, Homo sapien
tgagaggaaggcgagccatgaaaat

SEQ ID NO: 887747 - DNA, 25 bp, Homo sapien
gagttataaggaaaacgctgagagg

SEQ ID NO: 887748 - DNA, 25 bp, Homo sapien
agccatgaaaatggcggccgccaaa

SEQ ID NO: 887749 - DNA, 25 bp, Homo sapien
aaacgctcgccgaggagacgccgtg

SEQ ID NO: 887750 - DNA, 25 bp, Homo sapien
ctgtttgtacgctcaggcctccgct

SEQ ID NO: 887751 - DNA, 25 bp, Homo sapien
tactgaattggtccgatttcctgcc

SEQ ID NO: 887752 - DNA, 25 bp, Homo sapien
gttcataaaccttaagccccactgc

SEQ ID NO: 887753 - DNA, 25 bp, Homo sapien
gcagcgtccgccatgtgaaagctcc

SEQ ID NO: 887754 - DNA, 25 bp, Homo sapien
ccgatttcccgcagccgagcgagat

SEQ ID NO: 887755 - DNA, 25 bp, Homo sapien
cagccgagcgagatgagagagatct

SEQ ID NO: 887756 - DNA, 25 bp, Homo sapien
ggactcagtcgcttcagcccgattt

SEQ ID NO: 887757 - DNA, 25 bp, Homo sapien
gagatctccgcggacgaacacgaac

SEQ ID NO: 887758 - DNA, 25 bp, Homo sapien
gagaaacaactctgcgaggagcacc

SEQ ID NO: 887759 - DNA, 25 bp, Homo sapien
tgagaactgccgctgctcgagaaac

SEQ ID NO: 887760 - DNA, 25 bp, Homo sapien
tgcgaggagcacctccgcacgggac

SEQ ID NO: 887761 - DNA, 25 bp, Homo sapien
ctggcgctgtagtgagaactgccgc

SEQ ID NO: 887762 - DNA, 25 bp, Homo sapien
ctgccgccgcttttctagaaccttc

SEQ ID NO: 887763 - DNA, 25 bp, Homo sapien
gctgccgccgcttttctagaacctt

SEQ ID NO: 887764 - DNA, 25 bp, Homo sapien
tgccgccgcttttctagaaccttcc

SEQ ID NO: 887765 - DNA, 25 bp, Homo sapien
cgctgccgccgcttttctagaacct

SEQ ID NO: 887766 - DNA, 25 bp, Homo sapien
gccgtcgcgtaaacgccctatccgc

SEQ ID NO: 887767 - DNA, 25 bp, Homo sapien
cctatccgccgccaatggcgggaag

SEQ ID NO: 887768 - DNA, 25 bp, Homo sapien
tatccgccgccaatggcgggaaggc

SEQ ID NO: 887769 - DNA, 25 bp, Homo sapien
gtaaacgccctatccgccgccaatg

SEQ ID NO: 887770 - DNA, 25 bp, Homo sapien
aattgcggaaggctagagtcctgct

SEQ ID NO: 887771 - DNA, 25 bp, Homo sapien
ctagttactacctcttggaataggg

SEQ ID NO: 887772 - DNA, 25 bp, Homo sapien
cggccagagacagtacccgacgtta

SEQ ID NO: 887773 - DNA, 25 bp, Homo sapien
taaatgcgctcaatgaattgcggaa

SEQ ID NO: 887774 - DNA, 25 bp, Homo sapien
caaggcaggtgagaaacggtcgcgc

SEQ ID NO: 887775 - DNA, 25 bp, Homo sapien
cgacgggaggggcttaatccgcagc

SEQ ID NO: 887776 - DNA, 25 bp, Homo sapien
gtgagaaacggtcgcgcagtttgaa

SEQ ID NO: 887777 - DNA, 25 bp, Homo sapien
gaaacggtcgcgcagtttgaaatta

SEQ ID NO: 887778 - DNA, 25 bp, Homo sapien
tggtccctgcagttacgccaatgat

SEQ ID NO: 887779 - DNA, 25 bp, Homo sapien
cggaaacacccgaatcaacttctag

SEQ ID NO: 887780 - DNA, 25 bp, Homo sapien
tccgtgccccaactcggcggattga

SEQ ID NO: 887781 - DNA, 25 bp, Homo sapien
caaattattgttcacgccgcaatga

SEQ ID NO: 887782 - DNA, 25 bp, Homo sapien
ccctggcccgcgtctgtggaactga

SEQ ID NO: 887783 - DNA, 25 bp, Homo sapien
cctggcccgcgtctgtggaactgac

SEQ ID NO: 887784 - DNA, 25 bp, Homo sapien
gagtccggttttggcgccagccgct

SEQ ID NO: 887785 - DNA, 25 bp, Homo sapien
ctggtgtacaggagagttcgctgct

SEQ ID NO: 887786 - DNA, 25 bp, Homo sapien
tcgctgctgaaagtggtcccaaagg

SEQ ID NO: 887787 - DNA, 25 bp, Homo sapien
tcccccagcgtctggaggattccac

SEQ ID NO: 887788 - DNA, 25 bp, Homo sapien
gccacgccgcgaacggtaagtgccg

SEQ ID NO: 887789 - DNA, 25 bp, Homo sapien
ctgccaagcagaaaagccaccgctg

SEQ ID NO: 887790 - DNA, 25 bp, Homo sapien
gaaaagccaccgctgaggagactcc

SEQ ID NO: 887791 - DNA, 25 bp, Homo sapien
taagtgccgcggtcgtcggcgcctc

SEQ ID NO: 887792 - DNA, 25 bp, Homo sapien
gtctgcagcgtctccggccctccgc

SEQ ID NO: 887793 - DNA, 25 bp, Homo sapien
ctcaagccacatccgaagggggagg

SEQ ID NO: 887794 - DNA, 25 bp, Homo sapien
gccacatccgaagggggagggagcc

SEQ ID NO: 887795 - DNA, 25 bp, Homo sapien
ggccctccgcgcctacagctcaagc

SEQ ID NO: 887796 - DNA, 25 bp, Homo sapien
tccgcgcctacagctcaagccacat

SEQ ID NO: 887797 - DNA, 25 bp, Homo sapien
gctcaagccacatccgaagggggag

SEQ ID NO: 887798 - DNA, 25 bp, Homo sapien
gcggagggccggagacgctgcagac

SEQ ID NO: 887799 - DNA, 25 bp, Homo sapien
cctcccccttcggatgtggcttgag

SEQ ID NO: 887800 - DNA, 25 bp, Homo sapien
atgtggcttgagctgtaggcgcgga

SEQ ID NO: 887801 - DNA, 25 bp, Homo sapien
gcttgagctgtaggcgcggagggcc

SEQ ID NO: 887802 - DNA, 25 bp, Homo sapien
ctgtaggcgcggagggccggagacg

SEQ ID NO: 887803 - DNA, 25 bp, Homo sapien
tggcttgagctgtaggcgcggaggg

SEQ ID NO: 887804 - DNA, 25 bp, Homo sapien
gtctgcagcgtctccggccctccgc

SEQ ID NO: 887805 - DNA, 25 bp, Homo sapien
ctcaagccacatccgaagggggagg

SEQ ID NO: 887806 - DNA, 25 bp, Homo sapien
tacagctcaagccacatccgaaggg

SEQ ID NO: 887807 - DNA, 25 bp, Homo sapien
ggccctccgcgcctacagctcaagc

SEQ ID NO: 887808 - DNA, 25 bp, Homo sapien
ggagggagccgggagctgcgcgcgg

SEQ ID NO: 887809 - DNA, 25 bp, Homo sapien
tggcaccgcccacgccgggcggcca

SEQ ID NO: 887810 - DNA, 25 bp, Homo sapien
gcggagggccggagacgctgcagac

SEQ ID NO: 887811 - DNA, 25 bp, Homo sapien
cctcccccttcggatgtggcttgag

SEQ ID NO: 887812 - DNA, 25 bp, Homo sapien
ccccttcggatgtggcttgagctgt

SEQ ID NO: 887813 - DNA, 25 bp, Homo sapien
tggccgcccggcgtgggcggtgcca

SEQ ID NO: 887814 - DNA, 25 bp, Homo sapien
gcttgagctgtaggcgcggagggcc

SEQ ID NO: 887815 - DNA, 25 bp, Homo sapien
cccttcggatgtggcttgagctgta

SEQ ID NO: 887816 - DNA, 25 bp, Homo sapien
tcaccgcctccgagctgctccgggt

SEQ ID NO: 887817 - DNA, 25 bp, Homo sapien
gcaccaccagcgagcgagagctaga

SEQ ID NO: 887818 - DNA, 25 bp, Homo sapien
gagggcagagcagtccccccactaa

SEQ ID NO: 887819 - DNA, 25 bp, Homo sapien
caccagcgagcgagagctagagaga

SEQ ID NO: 887820 - DNA, 25 bp, Homo sapien
ccccgggacgcgtgtggcatctgaa

SEQ ID NO: 887821 - DNA, 25 bp, Homo sapien
tttgtctcgaaatggggcaaccgtc

SEQ ID NO: 887822 - DNA, 25 bp, Homo sapien
gctgtggcgacggttgccccatttc

SEQ ID NO: 887823 - DNA, 25 bp, Homo sapien
gacggttgccccatttcgagacaaa

SEQ ID NO: 887824 - DNA, 25 bp, Homo sapien
tctctctagctctcgctcgctggtg

SEQ ID NO: 887825 - DNA, 25 bp, Homo sapien
acccggagcagctcggaggcggtga

SEQ ID NO: 887826 - DNA, 25 bp, Homo sapien
tgccccatttcgagacaaagcgcat

SEQ ID NO: 887827 - DNA, 25 bp, Homo sapien
tctagctctcgctcgctggtggtgc

SEQ ID NO: 887828 - DNA, 25 bp, Homo sapien
caggcacgattacccaaacaactca

SEQ ID NO: 887829 - DNA, 25 bp, Homo sapien
tctctgttctgcaatcccaacttgg

SEQ ID NO: 887830 - DNA, 25 bp, Homo sapien
taagatgcttcaaccccgtttcgtg

SEQ ID NO: 887831 - DNA, 25 bp, Homo sapien
aatcccaacttggtttctgctcaga

SEQ ID NO: 887832 - DNA, 25 bp, Homo sapien
tcaaccccgtttcgtgacactttga

SEQ ID NO: 887833 - DNA, 25 bp, Homo sapien
aacaactcacaacggtaaagcactg

SEQ ID NO: 887834 - DNA, 25 bp, Homo sapien
agcgggtgtttgcaagaggtgattc

SEQ ID NO: 887835 - DNA, 25 bp, Homo sapien
ccaagttgggattgcagaacagaga

SEQ ID NO: 887836 - DNA, 25 bp, Homo sapien
tgagttgtttgggtaatcgtgcctg

SEQ ID NO: 887837 - DNA, 25 bp, Homo sapien
cgaaacggggttgaagcatcttaag

SEQ ID NO: 887838 - DNA, 25 bp, Homo sapien
tctgagcagaaaccaagttgggatt

SEQ ID NO: 887839 - DNA, 25 bp, Homo sapien
cagtgctttaccgttgtgagttgtt

SEQ ID NO: 887840 - DNA, 25 bp, Homo sapien
gtcctaaccatgtgagtctagaaag

SEQ ID NO: 887841 - DNA, 25 bp, Homo sapien
ctttctagactcacatggttaggac

SEQ ID NO: 887842 - DNA, 25 bp, Homo sapien
gtgagtctagaaagactttactggg

SEQ ID NO: 887843 - DNA, 25 bp, Homo sapien
gtcctaaccatgtgagtctagaaag

SEQ ID NO: 887844 - DNA, 25 bp, Homo sapien
tgtgagtctagaaagactttactgg

SEQ ID NO: 887845 - DNA, 25 bp, Homo sapien
taaccatgtgagtctagaaagactt

SEQ ID NO: 887846 - DNA, 25 bp, Homo sapien
cctaaccatgtgagtctagaaagac

SEQ ID NO: 887847 - DNA, 25 bp, Homo sapien
tcctaaccatgtgagtctagaaaga

SEQ ID NO: 887848 - DNA, 25 bp, Homo sapien
ccagtaaagtctttctagactcaca

SEQ ID NO: 887849 - DNA, 25 bp, Homo sapien
tctttctagactcacatggttagga

SEQ ID NO: 887850 - DNA, 25 bp, Homo sapien
gtctttctagactcacatggttagg

SEQ ID NO: 887851 - DNA, 25 bp, Homo sapien
aagtctttctagactcacatggtta

SEQ ID NO: 887852 - DNA, 25 bp, Homo sapien
tccccagtaaagtctttctagactc

SEQ ID NO: 887853 - DNA, 25 bp, Homo sapien
ctttctagactcacatggttaggac

SEQ ID NO: 887854 - DNA, 25 bp, Homo sapien
gggcatttcaagctatgcaagcata

SEQ ID NO: 887855 - DNA, 25 bp, Homo sapien
aaagggcatttcaagctatgcaagc

SEQ ID NO: 887856 - DNA, 25 bp, Homo sapien
catttcaagctatgcaagcatatag

SEQ ID NO: 887857 - DNA, 25 bp, Homo sapien
ggcatttcaagctatgcaagcatat

SEQ ID NO: 887858 - DNA, 25 bp, Homo sapien
gcatttcaagctatgcaagcatata

SEQ ID NO: 887859 - DNA, 25 bp, Homo sapien
aagggcatttcaagctatgcaagca

SEQ ID NO: 887860 - DNA, 25 bp, Homo sapien
gcttgcatagcttgaaatgcccttt

SEQ ID NO: 887861 - DNA, 25 bp, Homo sapien
tatgcttgcatagcttgaaatgccc

SEQ ID NO: 887862 - DNA, 25 bp, Homo sapien
tgcttgcatagcttgaaatgccctt

SEQ ID NO: 887863 - DNA, 25 bp, Homo sapien
tatatgcttgcatagcttgaaatgc

SEQ ID NO: 887864 - DNA, 25 bp, Homo sapien
atatgcttgcatagcttgaaatgcc

SEQ ID NO: 887865 - DNA, 25 bp, Homo sapien
ctatatgcttgcatagcttgaaatg

SEQ ID NO: 887866 - DNA, 25 bp, Homo sapien
atgcaggcatatgaagtgtgcagac

SEQ ID NO: 887867 - DNA, 25 bp, Homo sapien
gcaggcatatgaagtgtgcagacag

SEQ ID NO: 887868 - DNA, 25 bp, Homo sapien
tgcaggcatatgaagtgtgcagaca

SEQ ID NO: 887869 - DNA, 25 bp, Homo sapien
ctgtctgcacacttcatatgcctgc

SEQ ID NO: 887870 - DNA, 25 bp, Homo sapien
gtctgcacacttcatatgcctgcat

SEQ ID NO: 887871 - DNA, 25 bp, Homo sapien
tgtctgcacacttcatatgcctgca

SEQ ID NO: 887872 - DNA, 25 bp, Homo sapien
atgcaggcatatgaagtgtgcagac

SEQ ID NO: 887873 - DNA, 25 bp, Homo sapien
gcaggcatatgaagtgtgcagacag

SEQ ID NO: 887874 - DNA, 25 bp, Homo sapien
tgcaggcatatgaagtgtgcagaca

SEQ ID NO: 887875 - DNA, 25 bp, Homo sapien
ggcatatgaagtgtgcagacagata

SEQ ID NO: 887876 - DNA, 25 bp, Homo sapien
caggcatatgaagtgtgcagacaga

SEQ ID NO: 887877 - DNA, 25 bp, Homo sapien
gcatatgaagtgtgcagacagatat

SEQ ID NO: 887878 - DNA, 25 bp, Homo sapien
ctgtctgcacacttcatatgcctgc

SEQ ID NO: 887879 - DNA, 25 bp, Homo sapien
tctgtctgcacacttcatatgcctg

SEQ ID NO: 887880 - DNA, 25 bp, Homo sapien
gtctgcacacttcatatgcctgcat

SEQ ID NO: 887881 - DNA, 25 bp, Homo sapien
tgtctgcacacttcatatgcctgca

SEQ ID NO: 887882 - DNA, 25 bp, Homo sapien
atatctgtctgcacacttcatatgc

SEQ ID NO: 887883 - DNA, 25 bp, Homo sapien
tatctgtctgcacacttcatatgcc

SEQ ID NO: 887884 - DNA, 25 bp, Homo sapien
cagggattccaacattttgctaagg

SEQ ID NO: 887885 - DNA, 25 bp, Homo sapien
tttgctaaggaatggcccgctaggg

SEQ ID NO: 887886 - DNA, 25 bp, Homo sapien
catgcaggtcaataggttaggttac

SEQ ID NO: 887887 - DNA, 25 bp, Homo sapien
cacacatttatgacagcaggtccta

SEQ ID NO: 887888 - DNA, 25 bp, Homo sapien
taaatctagaatggtccttaggctc

SEQ ID NO: 887889 - DNA, 25 bp, Homo sapien
gattgagcctccatgtaatgaattg

SEQ ID NO: 887890 - DNA, 25 bp, Homo sapien
cctagcgggccattccttagcaaaa

SEQ ID NO: 887891 - DNA, 25 bp, Homo sapien
caattcattacatggaggctcaatc

SEQ ID NO: 887892 - DNA, 25 bp, Homo sapien
gtaacctaacctattgacctgcatg

SEQ ID NO: 887893 - DNA, 25 bp, Homo sapien
ggctcatagaaacctaatcagatgg

SEQ ID NO: 887894 - DNA, 25 bp, Homo sapien
gaatggaatatgtaagacttggctc

SEQ ID NO: 887895 - DNA, 25 bp, Homo sapien
taggacctgctgtcataaatgtgtg

SEQ ID NO: 887896 - DNA, 25 bp, Homo sapien
cattatccgatatcccaattgttct

SEQ ID NO: 887897 - DNA, 25 bp, Homo sapien
cttgctgaggttgattactgcactg

SEQ ID NO: 887898 - DNA, 25 bp, Homo sapien
ctgtgcttgctgaggttgattactg

SEQ ID NO: 887899 - DNA, 25 bp, Homo sapien
taaagctcaagtagtttcgggacta

SEQ ID NO: 887900 - DNA, 25 bp, Homo sapien
gtgtgattcccaagtggtttgccca

SEQ ID NO: 887901 - DNA, 25 bp, Homo sapien
tgagctggtgtgattcccaagtggt

SEQ ID NO: 887902 - DNA, 25 bp, Homo sapien
gctggtgtgattcccaagtggtttg

SEQ ID NO: 887903 - DNA, 25 bp, Homo sapien
cctgagctggtgtgattcccaagtg

SEQ ID NO: 887904 - DNA, 25 bp, Homo sapien
tgtggccccggattgcgttcaatac

SEQ ID NO: 887905 - DNA, 25 bp, Homo sapien
ggtcttctggtaggatccctgatca

SEQ ID NO: 887906 - DNA, 25 bp, Homo sapien
caacaatgctgacaatacaggagcc

SEQ ID NO: 887907 - DNA, 25 bp, Homo sapien
ctgaacagacttccctgccagtgtg

SEQ ID NO: 887908 - DNA, 25 bp, Homo sapien
ctagttatgttacttcatcattggt

SEQ ID NO: 887909 - DNA, 25 bp, Homo sapien
tgagtatagcttaaaactagttatg

SEQ ID NO: 887910 - DNA, 25 bp, Homo sapien
gagtatagcttaaaactagttatgt

SEQ ID NO: 887911 - DNA, 25 bp, Homo sapien
atcattggtattcattggtgttttc

SEQ ID NO: 887912 - DNA, 25 bp, Homo sapien
tcaagctgtgtgggcccagaatctt

SEQ ID NO: 887913 - DNA, 25 bp, Homo sapien
aagctgtgtgggcccagaatcttac

SEQ ID NO: 887914 - DNA, 25 bp, Homo sapien
caagctgtgtgggcccagaatctta

SEQ ID NO: 887915 - DNA, 25 bp, Homo sapien
tcagcactgtgtttccattcacatg

SEQ ID NO: 887916 - DNA, 25 bp, Homo sapien
agatggactctacgcaggctggcac

SEQ ID NO: 887917 - DNA, 25 bp, Homo sapien
cacttgccctgacgtgaccttgaga

SEQ ID NO: 887918 - DNA, 25 bp, Homo sapien
tcctctttcacgtttttgtacagct

SEQ ID NO: 887919 - DNA, 25 bp, Homo sapien
ctgattcctccaattgacagctcct

SEQ ID NO: 887920 - DNA, 25 bp, Homo sapien
ttcctctactcatctggccactctg

SEQ ID NO: 887921 - DNA, 25 bp, Homo sapien
ctctgattcctccaattgacagctc

SEQ ID NO: 887922 - DNA, 25 bp, Homo sapien
tttcctctactcatctggccactct

SEQ ID NO: 887923 - DNA, 25 bp, Homo sapien
ctgaatgaaggcctatgccttccat

SEQ ID NO: 887924 - DNA, 25 bp, Homo sapien
agtacatcagaacgtgtcactccag

SEQ ID NO: 887925 - DNA, 25 bp, Homo sapien
tctgatcgagtctctctggttccac

SEQ ID NO: 887926 - DNA, 25 bp, Homo sapien
aacctaggagccgtttctcatcttc

SEQ ID NO: 887927 - DNA, 25 bp, Homo sapien
ttattgtagagtggcgtttggaaga

SEQ ID NO: 887928 - DNA, 25 bp, Homo sapien
tagagtggcgtttggaagagctggg

SEQ ID NO: 887929 - DNA, 25 bp, Homo sapien
tgtagcagctcttattgtagagtgg

SEQ ID NO: 887930 - DNA, 25 bp, Homo sapien
cagctcttattgtagagtggcgttt

SEQ ID NO: 887931 - DNA, 25 bp, Homo sapien
cttcaaattgagaaacacagctctt

SEQ ID NO: 887932 - DNA, 25 bp, Homo sapien
ttgccttccatctcttcaaattgag

SEQ ID NO: 887933 - DNA, 25 bp, Homo sapien
tccatctcttcaaattgagaaacac

SEQ ID NO: 887934 - DNA, 25 bp, Homo sapien
ccttccatctcttcaaattgagaaa

SEQ ID NO: 887935 - DNA, 25 bp, Homo sapien
cttgtggcatttccacactcatctt

SEQ ID NO: 887936 - DNA, 25 bp, Homo sapien
tggcatttccacactcatcttcact

SEQ ID NO: 887937 - DNA, 25 bp, Homo sapien
ttgtggcatttccacactcatcttc

SEQ ID NO: 887938 - DNA, 25 bp, Homo sapien
tgtggcatttccacactcatcttca

SEQ ID NO: 887939 - DNA, 25 bp, Homo sapien
tagccaaaccagagaatgagtgtag

SEQ ID NO: 887940 - DNA, 25 bp, Homo sapien
aagtgccctgattaaagtggaaggc

SEQ ID NO: 887941 - DNA, 25 bp, Homo sapien
cctttgtacatgatatgggagtgga

SEQ ID NO: 887942 - DNA, 25 bp, Homo sapien
gggaagtgccctgattaaagtggaa

SEQ ID NO: 887943 - DNA, 25 bp, Homo sapien
ccccaggctgcatggaatgtttgtc

SEQ ID NO: 887944 - DNA, 25 bp, Homo sapien
catgtgccccaccaagaatatgcca

SEQ ID NO: 887945 - DNA, 25 bp, Homo sapien
tgtctgtgcacttcaaggccagccc

SEQ ID NO: 887946 - DNA, 25 bp, Homo sapien
ccagcccttgggtaggcagtacaga

SEQ ID NO: 887947 - DNA, 25 bp, Homo sapien
gatgctatatttaggtagtactttg

SEQ ID NO: 887948 - DNA, 25 bp, Homo sapien
caccgcacccgactattttattctt

SEQ ID NO: 887949 - DNA, 25 bp, Homo sapien
gatagtacttcttactcttaccagg

SEQ ID NO: 887950 - DNA, 25 bp, Homo sapien
ctttgatgggaagttgtgatagtac

SEQ ID NO: 887951 - DNA, 25 bp, Homo sapien
ggaccatagggcacgcttttcacca

SEQ ID NO: 887952 - DNA, 25 bp, Homo sapien
ccccagctgatctggcctggtcacg

SEQ ID NO: 887953 - DNA, 25 bp, Homo sapien
gactcccttcctcttggaaagcttc

SEQ ID NO: 887954 - DNA, 25 bp, Homo sapien
tggtcacgatctctggaccataggg

SEQ ID NO: 887955 - DNA, 25 bp, Homo sapien
tgggaatacgtgtgggggataatag

SEQ ID NO: 887956 - DNA, 25 bp, Homo sapien
gaatacgtgtgggggataataggga

SEQ ID NO: 887957 - DNA, 25 bp, Homo sapien
atagggacccggaaagtgggctcag

SEQ ID NO: 887958 - DNA, 25 bp, Homo sapien
actcctaacccctggtgtggactga

SEQ ID NO: 887959 - DNA, 25 bp, Homo sapien
ctggtggtggatctctctgcgcgtc

SEQ ID NO: 887960 - DNA, 25 bp, Homo sapien
tttccggtaaaagcgtcagggctgc

SEQ ID NO: 887961 - DNA, 25 bp, Homo sapien
tgactggctggccttgcggtttgaa

SEQ ID NO: 887962 - DNA, 25 bp, Homo sapien
ctgctcctctactcccaccattggt

SEQ ID NO: 887963 - DNA, 25 bp, Homo sapien
actcccaccattggtgcctgcatag

SEQ ID NO: 887964 - DNA, 25 bp, Homo sapien
tctactcccaccattggtgcctgca

SEQ ID NO: 887965 - DNA, 25 bp, Homo sapien
tcctctactcccaccattggtgcct

SEQ ID NO: 887966 - DNA, 25 bp, Homo sapien
tccagtgactcagctgtggagcaca

SEQ ID NO: 887967 - DNA, 25 bp, Homo sapien
gttccagtgactcagctgtggagca

SEQ ID NO: 887968 - DNA, 25 bp, Homo sapien
ccagtgactcagctgtggagcacat

SEQ ID NO: 887969 - DNA, 25 bp, Homo sapien
ttccagtgactcagctgtggagcac

SEQ ID NO: 887970 - DNA, 25 bp, Homo sapien
tttgcacattggtttgaattcccag

SEQ ID NO: 887971 - DNA, 25 bp, Homo sapien
tctcccttgttagttaagcatgttc

SEQ ID NO: 887972 - DNA, 25 bp, Homo sapien
gaaaagggagtgagaatctcccttg

SEQ ID NO: 887973 - DNA, 25 bp, Homo sapien
gagcagtatccgagctgatggatct

SEQ ID NO: 887974 - DNA, 25 bp, Homo sapien
aggtttcagagaaggctgttaccat

SEQ ID NO: 887975 - DNA, 25 bp, Homo sapien
caggtttcagagaaggctgttacca

SEQ ID NO: 887976 - DNA, 25 bp, Homo sapien
gaactggatgtgatgtgtaccttgg

SEQ ID NO: 887977 - DNA, 25 bp, Homo sapien
cactctagggaactggatgtgatgt

SEQ ID NO: 887978 - DNA, 25 bp, Homo sapien
ctggatgtgatgtgtaccttggcac

SEQ ID NO: 887979 - DNA, 25 bp, Homo sapien
gtccactctagggaactggatgtga

SEQ ID NO: 887980 - DNA, 25 bp, Homo sapien
ccttgtacttatggcaggcaggaaa

SEQ ID NO: 887981 - DNA, 25 bp, Homo sapien
cagacttcacgatccaagttcgtat

SEQ ID NO: 887982 - DNA, 25 bp, Homo sapien
gccacgagtacaatcccatgaacag

SEQ ID NO: 887983 - DNA, 25 bp, Homo sapien
ggattgttgctctataactcttctc

SEQ ID NO: 887984 - DNA, 25 bp, Homo sapien
cactgaattgacatgctgttggcag

SEQ ID NO: 887985 - DNA, 25 bp, Homo sapien
gggcagagcccataattgatacaaa

SEQ ID NO: 887986 - DNA, 25 bp, Homo sapien
ttcatgacagcctatcccataaaga

SEQ ID NO: 887987 - DNA, 25 bp, Homo sapien
gatacaaagtttaccacagtagaga

SEQ ID NO: 887988 - DNA, 25 bp, Homo sapien
tgaccatcctgttcaccaattattt

SEQ ID NO: 887989 - DNA, 25 bp, Homo sapien
tgtgtttctgggcagactaagtact

SEQ ID NO: 887990 - DNA, 25 bp, Homo sapien
tttcttctaccctatcactgaccat

SEQ ID NO: 887991 - DNA, 25 bp, Homo sapien
tagagtcctacagaatgcacttttg

SEQ ID NO: 887992 - DNA, 25 bp, Homo sapien
tcatagtagtcttcacacacacctc

SEQ ID NO: 887993 - DNA, 25 bp, Homo sapien
tattcgcgtttaaattatctagcta

SEQ ID NO: 887994 - DNA, 25 bp, Homo sapien
aatacatagtatgcacatatgcacg

SEQ ID NO: 887995 - DNA, 25 bp, Homo sapien
tttagtcagacttgaattattcgcg

SEQ ID NO: 887996 - DNA, 25 bp, Homo sapien
tctctctttgtgactggagataatt

SEQ ID NO: 887997 - DNA, 25 bp, Homo sapien
cacatggatgtaaagtaaatacagc

SEQ ID NO: 887998 - DNA, 25 bp, Homo sapien
aagtaaatacagctccgcaggaatc

SEQ ID NO: 887999 - DNA, 25 bp, Homo sapien
aattaaagttctcctctgttactca

SEQ ID NO: 888000 - DNA, 25 bp, Homo sapien
tttgtggatacctcccctgcactgg

SEQ ID NO: 888001 - DNA, 25 bp, Homo sapien
cctgcactggcaaaacactatgctt

SEQ ID NO: 888002 - DNA, 25 bp, Homo sapien
aagatcttgccctccaatgaaatga

SEQ ID NO: 888003 - DNA, 25 bp, Homo sapien
tgaagagtaacagtgtagaccagac

SEQ ID NO: 888004 - DNA, 25 bp, Homo sapien
gaagagtggcagaggctactacaaa

SEQ ID NO: 888005 - DNA, 25 bp, Homo sapien
tgttacccagcctaattgaagagtg

SEQ ID NO: 888006 - DNA, 25 bp, Homo sapien
ggatgtcgacttgctaatttcagaa

SEQ ID NO: 888007 - DNA, 25 bp, Homo sapien
catccaggcatttaagagcgatcct

SEQ ID NO: 888008 - DNA, 25 bp, Homo sapien
tttgttggatgccttaaggattcat

SEQ ID NO: 888009 - DNA, 25 bp, Homo sapien
caataaccgttatatccaacagtaa

SEQ ID NO: 888010 - DNA, 25 bp, Homo sapien
atttagcctggccacaataaccgtt

SEQ ID NO: 888011 - DNA, 25 bp, Homo sapien
tggatgccttaaggattcattatta

SEQ ID NO: 888012 - DNA, 25 bp, Homo sapien
tctgggccttctttatagctttgcc

SEQ ID NO: 888013 - DNA, 25 bp, Homo sapien
accctcggccgcctgttggttgcgg

SEQ ID NO: 888014 - DNA, 25 bp, Homo sapien
gcctcggtccggtaacccatggcaa

SEQ ID NO: 888015 - DNA, 25 bp, Homo sapien
atggcaaccgccctggtaacccatg

SEQ ID NO: 888016 - DNA, 25 bp, Homo sapien
gaatgggaacaacgaccgcaaagag

SEQ ID NO: 888017 - DNA, 25 bp, Homo sapien
cgaccgcaaagagacagcgatttac

SEQ ID NO: 888018 - DNA, 25 bp, Homo sapien
gaacaacgaccgcaaagagacagcg

SEQ ID NO: 888019 - DNA, 25 bp, Homo sapien
gcggcgggcggtgaatgggaacaac

SEQ ID NO: 888020 - DNA, 25 bp, Homo sapien
gcgcgggcctgcggctcccggccgc

SEQ ID NO: 888021 - DNA, 25 bp, Homo sapien
cgcgcgggcctgcggctcccggccg

SEQ ID NO: 888022 - DNA, 25 bp, Homo sapien
gcgggcctgcggctcccggccgcac

SEQ ID NO: 888023 - DNA, 25 bp, Homo sapien
cgcgggcctgcggctcccggccgca

SEQ ID NO: 888024 - DNA, 25 bp, Homo sapien
ctacggtgacgattctggctgctgg

SEQ ID NO: 888025 - DNA, 25 bp, Homo sapien
gatccgggcggtgcacttggtgtgg

SEQ ID NO: 888026 - DNA, 25 bp, Homo sapien
gggaggctgccttaaacgccgatga

SEQ ID NO: 888027 - DNA, 25 bp, Homo sapien
aataagcagaaagccctcgtgcaga

SEQ ID NO: 888028 - DNA, 25 bp, Homo sapien
ctggagagcgcgcgtggagagggcc

SEQ ID NO: 888029 - DNA, 25 bp, Homo sapien
agcgcgcgtggagagggccttgccg

SEQ ID NO: 888030 - DNA, 25 bp, Homo sapien
agagcgcgcgtggagagggccttgc

SEQ ID NO: 888031 - DNA, 25 bp, Homo sapien
cgcgcgtggagagggccttgccgcc

SEQ ID NO: 888032 - DNA, 25 bp, Homo sapien
gcagaacgcgcccttggttgggtct

SEQ ID NO: 888033 - DNA, 25 bp, Homo sapien
gcggcctgtgacacatcaggtgcca

SEQ ID NO: 888034 - DNA, 25 bp, Homo sapien
ctgttccctacgtaggtgtcggttg

SEQ ID NO: 888035 - DNA, 25 bp, Homo sapien
tggtgttagggctcccaagtagaaa

SEQ ID NO: 888036 - DNA, 25 bp, Homo sapien
tggtcgctcgtgtattcgcagaacc

SEQ ID NO: 888037 - DNA, 25 bp, Homo sapien
ggtcgctcgtgtattcgcagaaccc

SEQ ID NO: 888038 - DNA, 25 bp, Homo sapien
ttggtcgctcgtgtattcgcagaac

SEQ ID NO: 888039 - DNA, 25 bp, Homo sapien
actcgaattccaacttttgcagcca

SEQ ID NO: 888040 - DNA, 25 bp, Homo sapien
ttctcccagtagctctcagagtaaa

SEQ ID NO: 888041 - DNA, 25 bp, Homo sapien
gtaaatctgacacggcagtccctgg

SEQ ID NO: 888042 - DNA, 25 bp, Homo sapien
ctttagcctctttctgattttccag

SEQ ID NO: 888043 - DNA, 25 bp, Homo sapien
ggaagcagaacaagttctgtccttg

SEQ ID NO: 888044 - DNA, 25 bp, Homo sapien
gaagcagaacaagttctgtccttgt

SEQ ID NO: 888045 - DNA, 25 bp, Homo sapien
aagcagaacaagttctgtccttgtg

SEQ ID NO: 888046 - DNA, 25 bp, Homo sapien
tagccagtgctgcttaatgtcattt

SEQ ID NO: 888047 - DNA, 25 bp, Homo sapien
cacagcccttgcatgattctgacag

SEQ ID NO: 888048 - DNA, 25 bp, Homo sapien
ccacagcccttgcatgattctgaca

SEQ ID NO: 888049 - DNA, 25 bp, Homo sapien
tctcttgtagccagtgctgcttaat

SEQ ID NO: 888050 - DNA, 25 bp, Homo sapien
aaattcttaacaccgtctacctcat

SEQ ID NO: 888051 - DNA, 25 bp, Homo sapien
cctcattagtgtggattacagcaat

SEQ ID NO: 888052 - DNA, 25 bp, Homo sapien
ataatgagaaatgttaagtgaagaa

SEQ ID NO: 888053 - DNA, 25 bp, Homo sapien
tcactttatagttgtcagtgcaaaa

SEQ ID NO: 888054 - DNA, 25 bp, Homo sapien
gagaaaaggctgttcggcagttgca

SEQ ID NO: 888055 - DNA, 25 bp, Homo sapien
tatgattgcagaaacccaacacaca

SEQ ID NO: 888056 - DNA, 25 bp, Homo sapien
ctttccgaatgcatatttgtggtca

SEQ ID NO: 888057 - DNA, 25 bp, Homo sapien
attctgtcaggctgccgagaaaagg

SEQ ID NO: 888058 - DNA, 25 bp, Homo sapien
ttttggtgtacactgttcctcagca

SEQ ID NO: 888059 - DNA, 25 bp, Homo sapien
tttttggtgtacactgttcctcagc

SEQ ID NO: 888060 - DNA, 25 bp, Homo sapien
ctattccataagtatttttggtgta

SEQ ID NO: 888061 - DNA, 25 bp, Homo sapien
attccataagtatttttggtgtaca

SEQ ID NO: 888062 - DNA, 25 bp, Homo sapien
tatggtgcagctcgccaatgatccg

SEQ ID NO: 888063 - DNA, 25 bp, Homo sapien
gatccgtgtgttaaagactccccaa

SEQ ID NO: 888064 - DNA, 25 bp, Homo sapien
cgatgcgctgcaaatgatccgggcg

SEQ ID NO: 888065 - DNA, 25 bp, Homo sapien
gctcccggagtatgcattgacacga

SEQ ID NO: 888066 - DNA, 25 bp, Homo sapien
tcatgggcacacaatggcctgagcc

SEQ ID NO: 888067 - DNA, 25 bp, Homo sapien
caaaagctctgtttatctcacagtt

SEQ ID NO: 888068 - DNA, 25 bp, Homo sapien
gtcctgtttacagtcctcatgggca

SEQ ID NO: 888069 - DNA, 25 bp, Homo sapien
gctgtatatccatgacgtgtcctgt

SEQ ID NO: 888070 - DNA, 25 bp, Homo sapien
tccacggttccatttttagaagcag

SEQ ID NO: 888071 - DNA, 25 bp, Homo sapien
atgcgcacagcactctcatgcacgg

SEQ ID NO: 888072 - DNA, 25 bp, Homo sapien
tggaagaggcggtgtttataaatgc

SEQ ID NO: 888073 - DNA, 25 bp, Homo sapien
gaaagcttaacttcgtggaagaggc

SEQ ID NO: 888074 - DNA, 25 bp, Homo sapien
ccattttgttctacaggatcgacaa

SEQ ID NO: 888075 - DNA, 25 bp, Homo sapien
tgttctacaggatcgacaatgttaa

SEQ ID NO: 888076 - DNA, 25 bp, Homo sapien
tacaggatcgacaatgttaattctc

SEQ ID NO: 888077 - DNA, 25 bp, Homo sapien
ggatcgacaatgttaattctcatat

SEQ ID NO: 888078 - DNA, 25 bp, Homo sapien
tccctgacagttaatcctgagacag

SEQ ID NO: 888079 - DNA, 25 bp, Homo sapien
gccttgacacctctcattcatctga

SEQ ID NO: 888080 - DNA, 25 bp, Homo sapien
gataggcttgtcattcatgccttga

SEQ ID NO: 888081 - DNA, 25 bp, Homo sapien
tcctgagacagccttccattgcctt

SEQ ID NO: 888082 - DNA, 25 bp, Homo sapien
gagctgtcagacttcaaaaggcggc

SEQ ID NO: 888083 - DNA, 25 bp, Homo sapien
gtcctcattgtgtgcctggcccttc

SEQ ID NO: 888084 - DNA, 25 bp, Homo sapien
tgtctcctgcgtcctcattgtgtgc

SEQ ID NO: 888085 - DNA, 25 bp, Homo sapien
cagacttcaaaaggcggcgtttgcc

SEQ ID NO: 888086 - DNA, 25 bp, Homo sapien
gtctatgcctgtggcctgaacttta

SEQ ID NO: 888087 - DNA, 25 bp, Homo sapien
gctgtctatgcctgtggcctgaact

SEQ ID NO: 888088 - DNA, 25 bp, Homo sapien
aatgctgtctatgcctgtggcctga

SEQ ID NO: 888089 - DNA, 25 bp, Homo sapien
gttcgaatgctgtctatgcctgtgg

SEQ ID NO: 888090 - DNA, 25 bp, Homo sapien
gcttcctctcctgtgactctcctca

SEQ ID NO: 888091 - DNA, 25 bp, Homo sapien
gcagctccaggtccttgcctctttg

SEQ ID NO: 888092 - DNA, 25 bp, Homo sapien
cctctcctgtgactctcctcagcag

SEQ ID NO: 888093 - DNA, 25 bp, Homo sapien
tgagcttcctctcctgtgactctcc

SEQ ID NO: 888094 - DNA, 25 bp, Homo sapien
tggacttttgatcatggcctcgggc

SEQ ID NO: 888095 - DNA, 25 bp, Homo sapien
cctcgggccgctgtcctggatggct

SEQ ID NO: 888096 - DNA, 25 bp, Homo sapien
ccagcaaagctggtttgaaggctct

SEQ ID NO: 888097 - DNA, 25 bp, Homo sapien
agcaaagctggtttgaaggctctgg

SEQ ID NO: 888098 - DNA, 25 bp, Homo sapien
tgtgctggttgggtgtcttcaactt

SEQ ID NO: 888099 - DNA, 25 bp, Homo sapien
gaagtgatgtctcactgcactgttg

SEQ ID NO: 888100 - DNA, 25 bp, Homo sapien
tctcactgcactgttgatggatttt

SEQ ID NO: 888101 - DNA, 25 bp, Homo sapien
gatgtctcactgcactgttgatgga

SEQ ID NO: 888102 - DNA, 25 bp, Homo sapien
aaagaagatatcagggatgggcaca

SEQ ID NO: 888103 - DNA, 25 bp, Homo sapien
tcggctctactatatttgacaaaag

SEQ ID NO: 888104 - DNA, 25 bp, Homo sapien
tgtaatccataagccattaggtggc

SEQ ID NO: 888105 - DNA, 25 bp, Homo sapien
gggcaacatagagagtctccatcgt

SEQ ID NO: 888106 - DNA, 25 bp, Homo sapien
ggcaagggtcatctttgtgctattc

SEQ ID NO: 888107 - DNA, 25 bp, Homo sapien
gtcatctttgtgctattccttgcca

SEQ ID NO: 888108 - DNA, 25 bp, Homo sapien
tctcagtaaaccaggactagatggg

SEQ ID NO: 888109 - DNA, 25 bp, Homo sapien
ggcaagggtgttgactcttaccact

SEQ ID NO: 888110 - DNA, 25 bp, Homo sapien
ggtcagctatgaaaaatctacaggt

SEQ ID NO: 888111 - DNA, 25 bp, Homo sapien
tcttcaacctgttatgaggtcagct

SEQ ID NO: 888112 - DNA, 25 bp, Homo sapien
aagactgaaaatccacttgtgctca

SEQ ID NO: 888113 - DNA, 25 bp, Homo sapien
gagcaactgtggaattgttctccta

SEQ ID NO: 888114 - DNA, 25 bp, Homo sapien
tccattctgccacacaagactgaaa

SEQ ID NO: 888115 - DNA, 25 bp, Homo sapien
tatctgtatctgtacctcatcccca

SEQ ID NO: 888116 - DNA, 25 bp, Homo sapien
aatgtgtaccttattaaccgctgca

SEQ ID NO: 888117 - DNA, 25 bp, Homo sapien
gtgtaccttattaaccgctgcaccc

SEQ ID NO: 888118 - DNA, 25 bp, Homo sapien
cagcaatgtgtaccttattaaccgc

SEQ ID NO: 888119 - DNA, 25 bp, Homo sapien
gcaatgtgtaccttattaaccgctg

SEQ ID NO: 888120 - DNA, 25 bp, Homo sapien
tggatttttagcgacgtctcccaag

SEQ ID NO: 888121 - DNA, 25 bp, Homo sapien
gctgggcttgtcatagggatggagt

SEQ ID NO: 888122 - DNA, 25 bp, Homo sapien
ttctggattggtgatgactgtgtcg

SEQ ID NO: 888123 - DNA, 25 bp, Homo sapien
tcttggctggatttttagcgacgtc

SEQ ID NO: 888124 - DNA, 25 bp, Homo sapien
gccctgtgttatggccacaagggca

SEQ ID NO: 888125 - DNA, 25 bp, Homo sapien
gagcaatgctaccatcatgttgcaa

SEQ ID NO: 888126 - DNA, 25 bp, Homo sapien
ccaacatagccctgtgttatggcca

SEQ ID NO: 888127 - DNA, 25 bp, Homo sapien
agtgtgggagcaatgctaccatcat

SEQ ID NO: 888128 - DNA, 25 bp, Homo sapien
catgttttgaaactggagaatttgt

SEQ ID NO: 888129 - DNA, 25 bp, Homo sapien
aacatgttttgaaactggagaattt

SEQ ID NO: 888130 - DNA, 25 bp, Homo sapien
tgttttgaaactggagaatttgtca

SEQ ID NO: 888131 - DNA, 25 bp, Homo sapien
ttgaaactggagaatttgtcaagac

SEQ ID NO: 888132 - DNA, 25 bp, Homo sapien
tgtgctatcatcgtggatcctcgga

SEQ ID NO: 888133 - DNA, 25 bp, Homo sapien
ctatcatcgtggatcctcggagcat

SEQ ID NO: 888134 - DNA, 25 bp, Homo sapien
catcagtgcaacagcaagtaaaata

SEQ ID NO: 888135 - DNA, 25 bp, Homo sapien
taaaaatgtgctatcatcgtggatc

SEQ ID NO: 888136 - DNA, 25 bp, Homo sapien
tgaacaccagacagtccaggaaatc

SEQ ID NO: 888137 - DNA, 25 bp, Homo sapien
tccaagaaggcagctaaccaaaggg

SEQ ID NO: 888138 - DNA, 25 bp, Homo sapien
gacttttgctgtctcaggactgatg

SEQ ID NO: 888139 - DNA, 25 bp, Homo sapien
gaaatacttgcctcggtgccaggag

SEQ ID NO: 888140 - DNA, 25 bp, Homo sapien
agatgctgccatgggaagcgctttc

SEQ ID NO: 888141 - DNA, 25 bp, Homo sapien
ctttgctttcgggtaacacccactg

SEQ ID NO: 888142 - DNA, 25 bp, Homo sapien
tgaggctgggacacggggagaagcc

SEQ ID NO: 888143 - DNA, 25 bp, Homo sapien
tgctttcgggtaacacccactgaaa

SEQ ID NO: 888144 - DNA, 25 bp, Homo sapien
gtgttggagcatggtgaagactgca

SEQ ID NO: 888145 - DNA, 25 bp, Homo sapien
tgtgttcggtatgcagtgccagtgt

SEQ ID NO: 888146 - DNA, 25 bp, Homo sapien
cttgtgttcggtatgcagtgccagt

SEQ ID NO: 888147 - DNA, 25 bp, Homo sapien
gccagtgtgttggagcatggtgaag

SEQ ID NO: 888148 - DNA, 25 bp, Homo sapien
ttttgcagtgtccaaagatatccca

SEQ ID NO: 888149 - DNA, 25 bp, Homo sapien
ggtcaaatgtgcttggtcccgtcaa

SEQ ID NO: 888150 - DNA, 25 bp, Homo sapien
gatatcccaatactttgttccgatg

SEQ ID NO: 888151 - DNA, 25 bp, Homo sapien
tccgatgaccccatatcaaaggttc

SEQ ID NO: 888152 - DNA, 25 bp, Homo sapien
gagttctgctaggagctcctaaatt

SEQ ID NO: 888153 - DNA, 25 bp, Homo sapien
ttctgctaggagctcctaaattccc

SEQ ID NO: 888154 - DNA, 25 bp, Homo sapien
gttctgctaggagctcctaaattcc

SEQ ID NO: 888155 - DNA, 25 bp, Homo sapien
agttctgctaggagctcctaaattc

SEQ ID NO: 888156 - DNA, 25 bp, Homo sapien
cactgcaagtctggaagctctgcaa

SEQ ID NO: 888157 - DNA, 25 bp, Homo sapien
tcagaagacgccagagctagccacc

SEQ ID NO: 888158 - DNA, 25 bp, Homo sapien
accacccacactgcaagtctggaag

SEQ ID NO: 888159 - DNA, 25 bp, Homo sapien
gcctgctcagcgaaggctttgtctc

SEQ ID NO: 888160 - DNA, 25 bp, Homo sapien
tataagggagcttgattcattcaac

SEQ ID NO: 888161 - DNA, 25 bp, Homo sapien
gacacatgccccttgagtataaggg

SEQ ID NO: 888162 - DNA, 25 bp, Homo sapien
gttgtccatctccaatgtactggca

SEQ ID NO: 888163 - DNA, 25 bp, Homo sapien
tctactgtgagccaagcaaagtgct

SEQ ID NO: 888164 - DNA, 25 bp, Homo sapien
catccatagcaagggagcctagaca

SEQ ID NO: 888165 - DNA, 25 bp, Homo sapien
ggttttgagatgctcctcgtgaatg

SEQ ID NO: 888166 - DNA, 25 bp, Homo sapien
tctggttcctccatccatagcaagg

SEQ ID NO: 888167 - DNA, 25 bp, Homo sapien
gaatgaaaataggactgtctggttc

SEQ ID NO: 888168 - DNA, 25 bp, Homo sapien
caacactgttgcctgagggctgtca

SEQ ID NO: 888169 - DNA, 25 bp, Homo sapien
gttgctctggacactatggacatgt

SEQ ID NO: 888170 - DNA, 25 bp, Homo sapien
ccacagatttaggtctctgcagaag

SEQ ID NO: 888171 - DNA, 25 bp, Homo sapien
tggatcatcgtctctgttgctctgg

SEQ ID NO: 888172 - DNA, 25 bp, Homo sapien
attgtgttctgcttgggaattggaa

SEQ ID NO: 888173 - DNA, 25 bp, Homo sapien
gacagctgcctagttaaggcaaatt

SEQ ID NO: 888174 - DNA, 25 bp, Homo sapien
aattgtgttctgcttgggaattgga

SEQ ID NO: 888175 - DNA, 25 bp, Homo sapien
gctgcctagttaaggcaaattttac

SEQ ID NO: 888176 - DNA, 25 bp, Homo sapien
ttcctaggcagagggactgcctgca

SEQ ID NO: 888177 - DNA, 25 bp, Homo sapien
ggaatccccacagagactcctgcca

SEQ ID NO: 888178 - DNA, 25 bp, Homo sapien
tgccacctgcatggttcagagccag

SEQ ID NO: 888179 - DNA, 25 bp, Homo sapien
gtaccacagcccagacagggagtgg

SEQ ID NO: 888180 - DNA, 25 bp, Homo sapien
atcccacttcttgtaggctcagagg

SEQ ID NO: 888181 - DNA, 25 bp, Homo sapien
cagtgtgggtgacactcctgcaatg

SEQ ID NO: 888182 - DNA, 25 bp, Homo sapien
gggtgacactcctgcaatgccatcc

SEQ ID NO: 888183 - DNA, 25 bp, Homo sapien
gcactggctgctgtcggaagccctc

SEQ ID NO: 888184 - DNA, 25 bp, Homo sapien
tcctccacacttgggagaaagctgt

SEQ ID NO: 888185 - DNA, 25 bp, Homo sapien
atgtgccggtctttgctcctccaca

SEQ ID NO: 888186 - DNA, 25 bp, Homo sapien
ctggaggatgtgccggtctttgctc

SEQ ID NO: 888187 - DNA, 25 bp, Homo sapien
tccacacttgggagaaagctgtgct

SEQ ID NO: 888188 - DNA, 25 bp, Homo sapien
gaatcaatgccacgtgtgaaagcag

SEQ ID NO: 888189 - DNA, 25 bp, Homo sapien
aatgccacgtgtgaaagcagctgtg

SEQ ID NO: 888190 - DNA, 25 bp, Homo sapien
cacgtgtgaaagcagctgtgtgcat

SEQ ID NO: 888191 - DNA, 25 bp, Homo sapien
ctgggtggaatcaatgccacgtgtg

SEQ ID NO: 888192 - DNA, 25 bp, Homo sapien
acaagttcttcgttgataaaattgg

SEQ ID NO: 888193 - DNA, 25 bp, Homo sapien
cacaagttcttcgttgataaaattg

SEQ ID NO: 888194 - DNA, 25 bp, Homo sapien
caagttcttcgttgataaaattggg

SEQ ID NO: 888195 - DNA, 25 bp, Homo sapien
tcacaagttcttcgttgataaaatt

SEQ ID NO: 888196 - DNA, 25 bp, Homo sapien
tgtccccaggtataaccagcttgca

SEQ ID NO: 888197 - DNA, 25 bp, Homo sapien
tctgtagagctgacgccagagtctg

SEQ ID NO: 888198 - DNA, 25 bp, Homo sapien
cagagtctggatgggtaaattttcg

SEQ ID NO: 888199 - DNA, 25 bp, Homo sapien
gaaagcttctttccgtgaaacatag

SEQ ID NO: 888200 - DNA, 25 bp, Homo sapien
aatgagatacttcggcacgcagggc

SEQ ID NO: 888201 - DNA, 25 bp, Homo sapien
cacgcagggccaatcttccagggtg

SEQ ID NO: 888202 - DNA, 25 bp, Homo sapien
gatgtcctgttctggtagtagccca

SEQ ID NO: 888203 - DNA, 25 bp, Homo sapien
tcatccactggatgtcctgttctgg

SEQ ID NO: 888204 - DNA, 25 bp, Homo sapien
tccaggggctcatgttttcatggtc

SEQ ID NO: 888205 - DNA, 25 bp, Homo sapien
acctcttgttctggctgacctctta

SEQ ID NO: 888206 - DNA, 25 bp, Homo sapien
cctcttatttctcttggaccccaag

SEQ ID NO: 888207 - DNA, 25 bp, Homo sapien
ccgtggccaccaagatactgccagt

SEQ ID NO: 888208 - DNA, 25 bp, Homo sapien
gaatttaaaccccactgcatagcat

SEQ ID NO: 888209 - DNA, 25 bp, Homo sapien
ttaaaccccactgcatagcatcttt

SEQ ID NO: 888210 - DNA, 25 bp, Homo sapien
tgggaatttaaaccccactgcatag

SEQ ID NO: 888211 - DNA, 25 bp, Homo sapien
ttgtgggaatttaaaccccactgca

SEQ ID NO: 888212 - DNA, 25 bp, Homo sapien
ggctgtatactggatgctctttact

SEQ ID NO: 888213 - DNA, 25 bp, Homo sapien
tccgaggctgtatactggatgctct

SEQ ID NO: 888214 - DNA, 25 bp, Homo sapien
tactggatgctctttactgagcagg

SEQ ID NO: 888215 - DNA, 25 bp, Homo sapien
attcctccgaggctgtatactggat

SEQ ID NO: 888216 - DNA, 25 bp, Homo sapien
gacgatctgaatctaaagcactggg

SEQ ID NO: 888217 - DNA, 25 bp, Homo sapien
aaaggcgctgccctcaagacgatct

SEQ ID NO: 888218 - DNA, 25 bp, Homo sapien
gtaagaagcccagaccaagcctcat

SEQ ID NO: 888219 - DNA, 25 bp, Homo sapien
ccactcggagtggtgtaagaagccc

SEQ ID NO: 888220 - DNA, 25 bp, Homo sapien
tggtaaaacagctgggaaactctct

SEQ ID NO: 888221 - DNA, 25 bp, Homo sapien
gatggatactcaagacccgctgaag

SEQ ID NO: 888222 - DNA, 25 bp, Homo sapien
ttccccggcggaagtctaagctgct

SEQ ID NO: 888223 - DNA, 25 bp, Homo sapien
gagataatactgaccgaagcacctg

SEQ ID NO: 888224 - DNA, 25 bp, Homo sapien
cataccatggtgagcggggtgcttc

SEQ ID NO: 888225 - DNA, 25 bp, Homo sapien
ttgactttggtcactttgtaagccc

SEQ ID NO: 888226 - DNA, 25 bp, Homo sapien
tctcacagaccagcatttgactttg

SEQ ID NO: 888227 - DNA, 25 bp, Homo sapien
tgaatctgatagaaacaagcaactg

SEQ ID NO: 888228 - DNA, 25 bp, Homo sapien
tgttcccgtgttcaggctccaatgt

SEQ ID NO: 888229 - DNA, 25 bp, Homo sapien
cctgagcaagggttgggatgactcc

SEQ ID NO: 888230 - DNA, 25 bp, Homo sapien
tccgtccctatcagtgccaggcaga

SEQ ID NO: 888231 - DNA, 25 bp, Homo sapien
ccaatgtatccaggtcacaggaggc

SEQ ID NO: 888232 - DNA, 25 bp, Homo sapien
tctataggatgttttcgtcattcaa

SEQ ID NO: 888233 - DNA, 25 bp, Homo sapien
ggaggaagcaggagctttctttgca

SEQ ID NO: 888234 - DNA, 25 bp, Homo sapien
ccaaaataaatctggatctctttta

SEQ ID NO: 888235 - DNA, 25 bp, Homo sapien
aaggagctgaggaattagatgttgc

SEQ ID NO: 888236 - DNA, 25 bp, Homo sapien
tcgaatgaccagttgatgaaagcct

SEQ ID NO: 888237 - DNA, 25 bp, Homo sapien
gaccagttgatgaaagccttcaaat

SEQ ID NO: 888238 - DNA, 25 bp, Homo sapien
agtgcatgtcgaatgaccagttgat

SEQ ID NO: 888239 - DNA, 25 bp, Homo sapien
gaatgagacgtggagtactgaccct

SEQ ID NO: 888240 - DNA, 25 bp, Homo sapien
tggttctcaggcagcggtagcactc

SEQ ID NO: 888241 - DNA, 25 bp, Homo sapien
caggcagcggtagcactccttcctg

SEQ ID NO: 888242 - DNA, 25 bp, Homo sapien
tcttggctggcagacatcttgattc

SEQ ID NO: 888243 - DNA, 25 bp, Homo sapien
gccaccaaggcttctggtattcttg

SEQ ID NO: 888244 - DNA, 25 bp, Homo sapien
gcatctgccatccaattgcagaaag

SEQ ID NO: 888245 - DNA, 25 bp, Homo sapien
cattccggttttgtgtattgggcca

SEQ ID NO: 888246 - DNA, 25 bp, Homo sapien
cttaaagtcaacaaggagttcatga

SEQ ID NO: 888247 - DNA, 25 bp, Homo sapien
tgtggtaggaatcatcattccggtt

SEQ ID NO: 888248 - DNA, 25 bp, Homo sapien
gtgctcttgggaaaagacccacagc

SEQ ID NO: 888249 - DNA, 25 bp, Homo sapien
tcctgccccacaaatggcttgagca

SEQ ID NO: 888250 - DNA, 25 bp, Homo sapien
cacgaagcctggagcagactcggct

SEQ ID NO: 888251 - DNA, 25 bp, Homo sapien
catcctgccccacaaatggcttgag

SEQ ID NO: 888252 - DNA, 25 bp, Homo sapien
tctcactcgttgaaggtgcaatgcc

SEQ ID NO: 888253 - DNA, 25 bp, Homo sapien
caactgggatcgttccaggcaaact

SEQ ID NO: 888254 - DNA, 25 bp, Homo sapien
tgcttagctcccttcttacaaacgg

SEQ ID NO: 888255 - DNA, 25 bp, Homo sapien
gagaatacatcttcgccatcccttg

SEQ ID NO: 888256 - DNA, 25 bp, Homo sapien
tctttttatactgatgggtacatat

SEQ ID NO: 888257 - DNA, 25 bp, Homo sapien
tatctttttatactgatgggtacat

SEQ ID NO: 888258 - DNA, 25 bp, Homo sapien
tttttatactgatgggtacatattt

SEQ ID NO: 888259 - DNA, 25 bp, Homo sapien
tttatactgatgggtacatattttg

SEQ ID NO: 888260 - DNA, 25 bp, Homo sapien
gtgctcctctgtgtgtagagccgaa

SEQ ID NO: 888261 - DNA, 25 bp, Homo sapien
gtgtagagccgaagtaggcccacag

SEQ ID NO: 888262 - DNA, 25 bp, Homo sapien
ctgtggactgcgctgccctttcagc

SEQ ID NO: 888263 - DNA, 25 bp, Homo sapien
ttgcggtctgtggactgcgctgccc

SEQ ID NO: 888264 - DNA, 25 bp, Homo sapien
gccacaagtgagataccatgagctg

SEQ ID NO: 888265 - DNA, 25 bp, Homo sapien
ccacaagtgagataccatgagctgg

SEQ ID NO: 888266 - DNA, 25 bp, Homo sapien
tgtcccatttgatgtattaggatat

SEQ ID NO: 888267 - DNA, 25 bp, Homo sapien
gtcccatttgatgtattaggatatg

SEQ ID NO: 888268 - DNA, 25 bp, Homo sapien
ctgtcccatttgatgtattaggata

SEQ ID NO: 888269 - DNA, 25 bp, Homo sapien
gctttgaaaatctcaccaggactga

SEQ ID NO: 888270 - DNA, 25 bp, Homo sapien
tgatcttccatggtcaaagtgtggc

SEQ ID NO: 888271 - DNA, 25 bp, Homo sapien
taaagttcaccagaatcagaagtgc

SEQ ID NO: 888272 - DNA, 25 bp, Homo sapien
gcaaaagctccttatacatccccta

SEQ ID NO: 888273 - DNA, 25 bp, Homo sapien
catcccctactttggtgatcttcca

SEQ ID NO: 888274 - DNA, 25 bp, Homo sapien
ctatccgcagggttgtagcacagca

SEQ ID NO: 888275 - DNA, 25 bp, Homo sapien
ggcagaaccatctatccgcagggtt

SEQ ID NO: 888276 - DNA, 25 bp, Homo sapien
aaactttacatttatcacggcagaa

SEQ ID NO: 888277 - DNA, 25 bp, Homo sapien
tatcacggcagaaccatctatccgc

SEQ ID NO: 888278 - DNA, 25 bp, Homo sapien
aaatctctgtcctcacgttgtatcc

SEQ ID NO: 888279 - DNA, 25 bp, Homo sapien
tgaagccccgcatcataagtgggac

SEQ ID NO: 888280 - DNA, 25 bp, Homo sapien
cccacagatgggtgaatgcggagca

SEQ ID NO: 888281 - DNA, 25 bp, Homo sapien
cgttgtatcccagtgaaattctacc

SEQ ID NO: 888282 - DNA, 25 bp, Homo sapien
ttcttccaaaacacccatgcatgag

SEQ ID NO: 888283 - DNA, 25 bp, Homo sapien
ctctgagttgccttgtttccctgta

SEQ ID NO: 888284 - DNA, 25 bp, Homo sapien
gaatttaaattgcttggcatctcac

SEQ ID NO: 888285 - DNA, 25 bp, Homo sapien
ggtacgcctgatcctctgtctggaa

SEQ ID NO: 888286 - DNA, 25 bp, Homo sapien
tctgagtaggaaacctgggtaggcc

SEQ ID NO: 888287 - DNA, 25 bp, Homo sapien
tgggtaggccccagtaataaataca

SEQ ID NO: 888288 - DNA, 25 bp, Homo sapien
tgtagaatgattgggccacgaccgc

SEQ ID NO: 888289 - DNA, 25 bp, Homo sapien
gaaaaagattcgaagcagccaagcc

SEQ ID NO: 888290 - DNA, 25 bp, Homo sapien
caaacagcgtgggtgggttccacct

SEQ ID NO: 888291 - DNA, 25 bp, Homo sapien
ttactggagaaattgtcaccaggtc

SEQ ID NO: 888292 - DNA, 25 bp, Homo sapien
cacatgttctaatagagagttttac

SEQ ID NO: 888293 - DNA, 25 bp, Homo sapien
gggaaggtcccatatactgttgcaa

SEQ ID NO: 888294 - DNA, 25 bp, Homo sapien
attctcctctgaaatcgtgagcaac

SEQ ID NO: 888295 - DNA, 25 bp, Homo sapien
ctttgttgacaagtagacacttgcg

SEQ ID NO: 888296 - DNA, 25 bp, Homo sapien
gacacttgcgaatattccattcctc

SEQ ID NO: 888297 - DNA, 25 bp, Homo sapien
gtgagcaacactgtgggctacagct

SEQ ID NO: 888298 - DNA, 25 bp, Homo sapien
tatgaagttcagtggctgggtgcca

SEQ ID NO: 888299 - DNA, 25 bp, Homo sapien
cagagcccgggctgaatggacacct

SEQ ID NO: 888300 - DNA, 25 bp, Homo sapien
gttacggccgttcccagagacatgt

SEQ ID NO: 888301 - DNA, 25 bp, Homo sapien
caggtggcgccaatgacaccctttt

SEQ ID NO: 888302 - DNA, 25 bp, Homo sapien
gggcacccgggctgcctgaagccag

SEQ ID NO: 888303 - DNA, 25 bp, Homo sapien
tgaacagcgtcttgggcaaaactga

SEQ ID NO: 888304 - DNA, 25 bp, Homo sapien
agcataggtggggatcctccagcca

SEQ ID NO: 888305 - DNA, 25 bp, Homo sapien
tagttagtcgggtttgtctctggtg

SEQ ID NO: 888306 - DNA, 25 bp, Homo sapien
cacatcgtgatggtcccctcatagg

SEQ ID NO: 888307 - DNA, 25 bp, Homo sapien
tatcaaaagccccactatcccctaa

SEQ ID NO: 888308 - DNA, 25 bp, Homo sapien
cccaggtcggccatctatcaaaagc

SEQ ID NO: 888309 - DNA, 25 bp, Homo sapien
tgccccaggtcggccatctatcaaa

SEQ ID NO: 888310 - DNA, 25 bp, Homo sapien
ggtcggccatctatcaaaagcccca

SEQ ID NO: 888311 - DNA, 25 bp, Homo sapien
cacttctgctttggttctcctctct

SEQ ID NO: 888312 - DNA, 25 bp, Homo sapien
ctggtgtgaagcctgccgcagtgta

SEQ ID NO: 888313 - DNA, 25 bp, Homo sapien
aattctgtccaagaaactttgctgc

SEQ ID NO: 888314 - DNA, 25 bp, Homo sapien
tgctgctaccaatggcagtggcaag

SEQ ID NO: 888315 - DNA, 25 bp, Homo sapien
gcctctgctggttagttttttctct

SEQ ID NO: 888316 - DNA, 25 bp, Homo sapien
cctctgctggttagttttttctctc

SEQ ID NO: 888317 - DNA, 25 bp, Homo sapien
tttcccattgtcagagagcccttct

SEQ ID NO: 888318 - DNA, 25 bp, Homo sapien
agtttcccattgtcagagagccctt

SEQ ID NO: 888319 - DNA, 25 bp, Homo sapien
tgaagatctctgcaacaatcagcct

SEQ ID NO: 888320 - DNA, 25 bp, Homo sapien
tgtaaatgttgtcccctctagtctg

SEQ ID NO: 888321 - DNA, 25 bp, Homo sapien
ccattatacagtaatcggacaatct

SEQ ID NO: 888322 - DNA, 25 bp, Homo sapien
tcttctataaccgtacaactgtaaa

SEQ ID NO: 888323 - DNA, 25 bp, Homo sapien
tcgagttttgaatgtcacccaaagg

SEQ ID NO: 888324 - DNA, 25 bp, Homo sapien
ttatatcgagttttgaatgtcaccc

SEQ ID NO: 888325 - DNA, 25 bp, Homo sapien
tatcgagttttgaatgtcacccaaa

SEQ ID NO: 888326 - DNA, 25 bp, Homo sapien
tatatcgagttttgaatgtcaccca

SEQ ID NO: 888327 - DNA, 25 bp, Homo sapien
gtctttactgaagcggaataaggct

SEQ ID NO: 888328 - DNA, 25 bp, Homo sapien
tactgaagcggaataaggctgccag

SEQ ID NO: 888329 - DNA, 25 bp, Homo sapien
cttgtctttactgaagcggaataag

SEQ ID NO: 888330 - DNA, 25 bp, Homo sapien
tttactgaagcggaataaggctgcc

SEQ ID NO: 888331 - DNA, 25 bp, Homo sapien
gtgcctttgtcatgatttggtgttg

SEQ ID NO: 888332 - DNA, 25 bp, Homo sapien
ttgaattcaagtgcaaggagagttt

SEQ ID NO: 888333 - DNA, 25 bp, Homo sapien
attcaagtgcaaggagagtttttcc

SEQ ID NO: 888334 - DNA, 25 bp, Homo sapien
tatgctgcataccaatttcctctct

SEQ ID NO: 888335 - DNA, 25 bp, Homo sapien
agttatgttaccataactggtagca

SEQ ID NO: 888336 - DNA, 25 bp, Homo sapien
tcctaaaggggtagggtcactctca

SEQ ID NO: 888337 - DNA, 25 bp, Homo sapien
aatactgctggtacaactctgtctc

SEQ ID NO: 888338 - DNA, 25 bp, Homo sapien
tatgttaccataactggtagcaact

SEQ ID NO: 888339 - DNA, 25 bp, Homo sapien
tgtaaaagacgttcacattattcat

SEQ ID NO: 888340 - DNA, 25 bp, Homo sapien
ctgtaaaagacgttcacattattca

SEQ ID NO: 888341 - DNA, 25 bp, Homo sapien
cacgagactatctggcttggaactg

SEQ ID NO: 888342 - DNA, 25 bp, Homo sapien
catctactggcctaggactaaaaac

SEQ ID NO: 888343 - DNA, 25 bp, Homo sapien
caaaggctacattgtcatgggaaac

SEQ ID NO: 888344 - DNA, 25 bp, Homo sapien
gggtaatggtaaagcagaccctctc

SEQ ID NO: 888345 - DNA, 25 bp, Homo sapien
cactgggatttctacactctcctct

SEQ ID NO: 888346 - DNA, 25 bp, Homo sapien
ctgggatttctacactctcctctgc

SEQ ID NO: 888347 - DNA, 25 bp, Homo sapien
ctgttggtacatgctaccactggga

SEQ ID NO: 888348 - DNA, 25 bp, Homo sapien
ggtacatgctaccactgggatttct

SEQ ID NO: 888349 - DNA, 25 bp, Homo sapien
tgcaggtgaacattaccacacttgg

SEQ ID NO: 888350 - DNA, 25 bp, Homo sapien
tcacaccagaagtagcaatagtagc

SEQ ID NO: 888351 - DNA, 25 bp, Homo sapien
ggtgacagcacactgccatttgcaa

SEQ ID NO: 888352 - DNA, 25 bp, Homo sapien
tcatcgcaccaggatatttgtacgg

SEQ ID NO: 888353 - DNA, 25 bp, Homo sapien
ttaggagctgtcactcgtgctttca

SEQ ID NO: 888354 - DNA, 25 bp, Homo sapien
gaggaatattttaatgagcgactgc

SEQ ID NO: 888355 - DNA, 25 bp, Homo sapien
tttcatgacgcttctaaatccaaag

SEQ ID NO: 888356 - DNA, 25 bp, Homo sapien
gagcgactgcataaaataacagtca

SEQ ID NO: 888357 - DNA, 25 bp, Homo sapien
tttgattcagctgaaacttgatttt

SEQ ID NO: 888358 - DNA, 25 bp, Homo sapien
ttttgattcagctgaaacttgattt

SEQ ID NO: 888359 - DNA, 25 bp, Homo sapien
atttttgattcagctgaaacttgat

SEQ ID NO: 888360 - DNA, 25 bp, Homo sapien
tttttgattcagctgaaacttgatt

SEQ ID NO: 888361 - DNA, 25 bp, Homo sapien
taggcaccaagccaatggctccctt

SEQ ID NO: 888362 - DNA, 25 bp, Homo sapien
taggctttaggcaccaagccaatgg

SEQ ID NO: 888363 - DNA, 25 bp, Homo sapien
tatcatacatctccattatgtaggc

SEQ ID NO: 888364 - DNA, 25 bp, Homo sapien
catctccattatgtaggctttaggc

SEQ ID NO: 888365 - DNA, 25 bp, Homo sapien
tctaaaacagagtggtcgatgagtc

SEQ ID NO: 888366 - DNA, 25 bp, Homo sapien
tagaatgttgatagatgtgtgcccc

SEQ ID NO: 888367 - DNA, 25 bp, Homo sapien
gcattgtgaatactccataaccggt

SEQ ID NO: 888368 - DNA, 25 bp, Homo sapien
taaccggtctcatatgtctgccaga

SEQ ID NO: 888369 - DNA, 25 bp, Homo sapien
aaatttatggatttacactgcagcc

SEQ ID NO: 888370 - DNA, 25 bp, Homo sapien
gcagccattagagtgttgacaagac

SEQ ID NO: 888371 - DNA, 25 bp, Homo sapien
tgagcctcctgagcaacatgaatcc

SEQ ID NO: 888372 - DNA, 25 bp, Homo sapien
cagtattctaaactttggcctgaac

SEQ ID NO: 888373 - DNA, 25 bp, Homo sapien
tgttgaggccagatattcagggcag

SEQ ID NO: 888374 - DNA, 25 bp, Homo sapien
gctgggaaaagccaagatccttcct

SEQ ID NO: 888375 - DNA, 25 bp, Homo sapien
gaatatttaagtagccagtgctggg

SEQ ID NO: 888376 - DNA, 25 bp, Homo sapien
tcagggccaaggtggaagtacaacc

SEQ ID NO: 888377 - DNA, 25 bp, Homo sapien
caaggtacaggcgaagataagggaa

SEQ ID NO: 888378 - DNA, 25 bp, Homo sapien
accattctccaaggtaaggaaagag

SEQ ID NO: 888379 - DNA, 25 bp, Homo sapien
cacagggtttctctggctgcctacc

SEQ ID NO: 888380 - DNA, 25 bp, Homo sapien
ctagcttggaaacatcaggttgatt

SEQ ID NO: 888381 - DNA, 25 bp, Homo sapien
ggcatgctggttgttccttgatagc

SEQ ID NO: 888382 - DNA, 25 bp, Homo sapien
gaacatctgtcacttatctataatt

SEQ ID NO: 888383 - DNA, 25 bp, Homo sapien
ggttgttccttgatagctgaatact

SEQ ID NO: 888384 - DNA, 25 bp, Homo sapien
tccttgatagctgaatactcaatga

SEQ ID NO: 888385 - DNA, 25 bp, Homo sapien
taatcagtagtctatctctagtctc

SEQ ID NO: 888386 - DNA, 25 bp, Homo sapien
gcctaatgatttccctggaatatct

SEQ ID NO: 888387 - DNA, 25 bp, Homo sapien
aaacttttcttaatcagtagtctat

SEQ ID NO: 888388 - DNA, 25 bp, Homo sapien
tctctagtctctatgcctaatgatt

SEQ ID NO: 888389 - DNA, 25 bp, Homo sapien
ttgcctctctgacactgccttctgg

SEQ ID NO: 888390 - DNA, 25 bp, Homo sapien
cactgccttctggcttttcctctac

SEQ ID NO: 888391 - DNA, 25 bp, Homo sapien
tgacactgccttctggcttttcctc

SEQ ID NO: 888392 - DNA, 25 bp, Homo sapien
cttgcctctctgacactgccttctg

SEQ ID NO: 888393 - DNA, 25 bp, Homo sapien
cagtacaatcccacaatccctggta

SEQ ID NO: 888394 - DNA, 25 bp, Homo sapien
ttagcataatcagtgctcttatccc

SEQ ID NO: 888395 - DNA, 25 bp, Homo sapien
aatcacatcaccacgcttaaatgac

SEQ ID NO: 888396 - DNA, 25 bp, Homo sapien
cacgcttaaatgacaactcatcaga

SEQ ID NO: 888397 - DNA, 25 bp, Homo sapien
tcactggactctggcatttcttacc

SEQ ID NO: 888398 - DNA, 25 bp, Homo sapien
agctgtgggtcgactgtcagagcct

SEQ ID NO: 888399 - DNA, 25 bp, Homo sapien
gatgtctacattgccagtcccctgg

SEQ ID NO: 888400 - DNA, 25 bp, Homo sapien
tatgcatggccaacatttaaacagg

SEQ ID NO: 888401 - DNA, 25 bp, Homo sapien
ggtgtgatggacactatcctgactc

SEQ ID NO: 888402 - DNA, 25 bp, Homo sapien
cactatcctgactcatcttcctttg

SEQ ID NO: 888403 - DNA, 25 bp, Homo sapien
gatggacactatcctgactcatctt

SEQ ID NO: 888404 - DNA, 25 bp, Homo sapien
gacactatcctgactcatcttcctt

SEQ ID NO: 888405 - DNA, 25 bp, Homo sapien
gaaacttccaggagcaatcagaccc

SEQ ID NO: 888406 - DNA, 25 bp, Homo sapien
taacagtaaagtgagctaagtgcag

SEQ ID NO: 888407 - DNA, 25 bp, Homo sapien
aatagggattgcaaatctgtctagc

SEQ ID NO: 888408 - DNA, 25 bp, Homo sapien
ggcttactgtgggaaaagtcatggc

SEQ ID NO: 888409 - DNA, 25 bp, Homo sapien
cagaaaactcatgcgatgaggatat

SEQ ID NO: 888410 - DNA, 25 bp, Homo sapien
gggattcccaacacttaggcacagt

SEQ ID NO: 888411 - DNA, 25 bp, Homo sapien
ggcactcctttgaggcctgtgtaag

SEQ ID NO: 888412 - DNA, 25 bp, Homo sapien
gctacttttgacactatctgctgga

SEQ ID NO: 888413 - DNA, 25 bp, Homo sapien
gacaaacttgctgaaccgtgcagat

SEQ ID NO: 888414 - DNA, 25 bp, Homo sapien
tcgatcactttgcagagcaactggg

SEQ ID NO: 888415 - DNA, 25 bp, Homo sapien
tagccgttggcacaaacttgacaaa

SEQ ID NO: 888416 - DNA, 25 bp, Homo sapien
agaaaaatcccctctgtagccgttg

SEQ ID NO: 888417 - DNA, 25 bp, Homo sapien
aacaagcagccagggaatattcttc

SEQ ID NO: 888418 - DNA, 25 bp, Homo sapien
gatgtaatggcagtaatatcgtgtt

SEQ ID NO: 888419 - DNA, 25 bp, Homo sapien
tatggtgtgaccaaaaacaagcagc

SEQ ID NO: 888420 - DNA, 25 bp, Homo sapien
agcagatgccatttccttagggtaa

SEQ ID NO: 888421 - DNA, 25 bp, Homo sapien
tagtggattgcttattggtagagga

SEQ ID NO: 888422 - DNA, 25 bp, Homo sapien
ggtagaggatgatcaacatcatcat

SEQ ID NO: 888423 - DNA, 25 bp, Homo sapien
aatttcatcatctattggttgactg

SEQ ID NO: 888424 - DNA, 25 bp, Homo sapien
tattggttgactgcttgttagtgga

SEQ ID NO: 888425 - DNA, 25 bp, Homo sapien
caaatttcagctgctgtacccattc

SEQ ID NO: 888426 - DNA, 25 bp, Homo sapien
acccattcttcagcatctttgggag

SEQ ID NO: 888427 - DNA, 25 bp, Homo sapien
tcagctgctgtacccattcttcagc

SEQ ID NO: 888428 - DNA, 25 bp, Homo sapien
ttgcaatacaaatttcagctgctgt

SEQ ID NO: 888429 - DNA, 25 bp, Homo sapien
catttctttaagactattagtaatt

SEQ ID NO: 888430 - DNA, 25 bp, Homo sapien
ttaagactattagtaattcttttca

SEQ ID NO: 888431 - DNA, 25 bp, Homo sapien
taagactattagtaattcttttcat

SEQ ID NO: 888432 - DNA, 25 bp, Homo sapien
ttgttaacatgtcaaggaaagtatt

SEQ ID NO: 888433 - DNA, 25 bp, Homo sapien
atcaacttaatttcaaggcaacata

SEQ ID NO: 888434 - DNA, 25 bp, Homo sapien
tattaatcaaatgttaatgtctcta

SEQ ID NO: 888435 - DNA, 25 bp, Homo sapien
caaggaaagtattaatcaaatgtta

SEQ ID NO: 888436 - DNA, 25 bp, Homo sapien
tattcattctgacactgtagccatc

SEQ ID NO: 888437 - DNA, 25 bp, Homo sapien
tgtagccatctattgcaaattcacc

SEQ ID NO: 888438 - DNA, 25 bp, Homo sapien
tacgtttatcaggagcagagatttc

SEQ ID NO: 888439 - DNA, 25 bp, Homo sapien
catcctttcttagagtgttattcat

SEQ ID NO: 888440 - DNA, 25 bp, Homo sapien
tattaatgctcaattatcttttatg

SEQ ID NO: 888441 - DNA, 25 bp, Homo sapien
taatgcttaggtaatgtttttagaa

SEQ ID NO: 888442 - DNA, 25 bp, Homo sapien
tcatttactaagtattaatgctcaa

SEQ ID NO: 888443 - DNA, 25 bp, Homo sapien
tttggtcatattgctttagtaatat

SEQ ID NO: 888444 - DNA, 25 bp, Homo sapien
gccttctacctccaatttcggtcta

SEQ ID NO: 888445 - DNA, 25 bp, Homo sapien
ggtccatctgacctaaaacctatgc

SEQ ID NO: 888446 - DNA, 25 bp, Homo sapien
tgacctaaaacctatgccttctacc

SEQ ID NO: 888447 - DNA, 25 bp, Homo sapien
ctcatcaatgtaacttgaatgcagg

SEQ ID NO: 888448 - DNA, 25 bp, Homo sapien
gaacaggttcctaaatggtccacca

SEQ ID NO: 888449 - DNA, 25 bp, Homo sapien
ctgagaggaggtactaagaactgac

SEQ ID NO: 888450 - DNA, 25 bp, Homo sapien
gtagctcccatttactagacggtgc

SEQ ID NO: 888451 - DNA, 25 bp, Homo sapien
ttcgaagtcctgctaaatggtcctg

SEQ ID NO: 888452 - DNA, 25 bp, Homo sapien
gacatctgaacatctaggacctaag

SEQ ID NO: 888453 - DNA, 25 bp, Homo sapien
gcctactagctaacaagtgcctgaa

SEQ ID NO: 888454 - DNA, 25 bp, Homo sapien
taagtggtgtcaactccttctgtgc

SEQ ID NO: 888455 - DNA, 25 bp, Homo sapien
gaatgctgtaccgtcacatggcgga

SEQ ID NO: 888456 - DNA, 25 bp, Homo sapien
taaaaactgtctaaagacagatctt

SEQ ID NO: 888457 - DNA, 25 bp, Homo sapien
attaaaaactgtctaaagacagatc

SEQ ID NO: 888458 - DNA, 25 bp, Homo sapien
taattaaaaactgtctaaagacaga

SEQ ID NO: 888459 - DNA, 25 bp, Homo sapien
ttaaaaactgtctaaagacagatct

SEQ ID NO: 888460 - DNA, 25 bp, Homo sapien
ccacatcttcagacatcaacatgaa

SEQ ID NO: 888461 - DNA, 25 bp, Homo sapien
atcttcagacatcaacatgaaaaag

SEQ ID NO: 888462 - DNA, 25 bp, Homo sapien
cacatcttcagacatcaacatgaaa

SEQ ID NO: 888463 - DNA, 25 bp, Homo sapien
catcttcagacatcaacatgaaaaa

SEQ ID NO: 888464 - DNA, 25 bp, Homo sapien
taccattaggtctcatcaaataaga

SEQ ID NO: 888465 - DNA, 25 bp, Homo sapien
gcaaattacaaacaatgttactacc

SEQ ID NO: 888466 - DNA, 25 bp, Homo sapien
gggctaaatggatcacaaagtagtt

SEQ ID NO: 888467 - DNA, 25 bp, Homo sapien
tgacagaaagggctaaatggatcac

SEQ ID NO: 888468 - DNA, 25 bp, Homo sapien
taactaatatctaaataactctaac

SEQ ID NO: 888469 - DNA, 25 bp, Homo sapien
gaatatattagtgtttgaagtaaat

SEQ ID NO: 888470 - DNA, 25 bp, Homo sapien
tgtaactaatatctaaataactcta

SEQ ID NO: 888471 - DNA, 25 bp, Homo sapien
tgaagtaaatattaacacgctttgg

SEQ ID NO: 888472 - DNA, 25 bp, Homo sapien
taatcgtaactgaacttggactcta

SEQ ID NO: 888473 - DNA, 25 bp, Homo sapien
gacctacttcactactgacccttag

SEQ ID NO: 888474 - DNA, 25 bp, Homo sapien
aaaaggtaagaacaacttccagcat

SEQ ID NO: 888475 - DNA, 25 bp, Homo sapien
caacactgataacaattccatagga

SEQ ID NO: 888476 - DNA, 25 bp, Homo sapien
taataatagaataccgttttactga

SEQ ID NO: 888477 - DNA, 25 bp, Homo sapien
tgagagcacaccaccgtttctgcca

SEQ ID NO: 888478 - DNA, 25 bp, Homo sapien
agaataccgttttactgagagcaca

SEQ ID NO: 888479 - DNA, 25 bp, Homo sapien
taatagaataccgttttactgagag

SEQ ID NO: 888480 - DNA, 25 bp, Homo sapien
tgcgtttttcaaggtagccagcctt

SEQ ID NO: 888481 - DNA, 25 bp, Homo sapien
ttgtgctgcaattggaggaaactgg

SEQ ID NO: 888482 - DNA, 25 bp, Homo sapien
gaacaaaaggaaggtcttgtgctgc

SEQ ID NO: 888483 - DNA, 25 bp, Homo sapien
tttctgcgtttttcaaggtagccag

SEQ ID NO: 888484 - DNA, 25 bp, Homo sapien
gagccaagatcacgccattgcaatc

SEQ ID NO: 888485 - DNA, 25 bp, Homo sapien
gaacccaggaggcagaggttgcagt

SEQ ID NO: 888486 - DNA, 25 bp, Homo sapien
gggagctgacgcaggagaatcactc

SEQ ID NO: 888487 - DNA, 25 bp, Homo sapien
agctacttgggagctgacgcaggag

SEQ ID NO: 888488 - DNA, 25 bp, Homo sapien
tggtcaggtctaaacccagtcttgg

SEQ ID NO: 888489 - DNA, 25 bp, Homo sapien
tagaacagcacgcaagtcccttgag

SEQ ID NO: 888490 - DNA, 25 bp, Homo sapien
ccagtcttggcattaacagggtaga

SEQ ID NO: 888491 - DNA, 25 bp, Homo sapien
tcactcagaagacaaggcctagaac

SEQ ID NO: 888492 - DNA, 25 bp, Homo sapien
accaagctttcacatagggtaattt

SEQ ID NO: 888493 - DNA, 25 bp, Homo sapien
caagatgttggtccatttagtcaaa

SEQ ID NO: 888494 - DNA, 25 bp, Homo sapien
tacgactaggtttctgagcttcacc

SEQ ID NO: 888495 - DNA, 25 bp, Homo sapien
gtcaaatattctgtgtcaccacatg

SEQ ID NO: 888496 - DNA, 25 bp, Homo sapien
accaccaggttcaacgatttccctg

SEQ ID NO: 888497 - DNA, 25 bp, Homo sapien
accaggttcaacgatttccctgtct

SEQ ID NO: 888498 - DNA, 25 bp, Homo sapien
ccaccaggttcaacgatttccctgt

SEQ ID NO: 888499 - DNA, 25 bp, Homo sapien
caccaggttcaacgatttccctgtc

SEQ ID NO: 888500 - DNA, 25 bp, Homo sapien
tcaccactatcattgcctagaaagc

SEQ ID NO: 888501 - DNA, 25 bp, Homo sapien
tgttcacctacctggctattcttca

SEQ ID NO: 888502 - DNA, 25 bp, Homo sapien
tccaagtctcatgtacccacacaag

SEQ ID NO: 888503 - DNA, 25 bp, Homo sapien
tcccaatatatatgaaggtactact

SEQ ID NO: 888504 - DNA, 25 bp, Homo sapien
ggtatgacaataaggtatgaaagcc

SEQ ID NO: 888505 - DNA, 25 bp, Homo sapien
tatgacaataaggtatgaaagccca

SEQ ID NO: 888506 - DNA, 25 bp, Homo sapien
actgtaaggtatgacaataaggtat

SEQ ID NO: 888507 - DNA, 25 bp, Homo sapien
taaggtatgacaataaggtatgaaa

SEQ ID NO: 888508 - DNA, 25 bp, Homo sapien
taaacacgtgccctagcaagagcag

SEQ ID NO: 888509 - DNA, 25 bp, Homo sapien
ggcgagcctggcactttcaacgggt

SEQ ID NO: 888510 - DNA, 25 bp, Homo sapien
aagatccgccattctacaattaggg

SEQ ID NO: 888511 - DNA, 25 bp, Homo sapien
aaccaatattcattaaagatccgcc

SEQ ID NO: 888512 - DNA, 25 bp, Homo sapien
aaggtggcacctctatagcattact

SEQ ID NO: 888513 - DNA, 25 bp, Homo sapien
ggtcttaccccgtgcagtcatagtg

SEQ ID NO: 888514 - DNA, 25 bp, Homo sapien
gagaattctcccggatcttgtccaa

SEQ ID NO: 888515 - DNA, 25 bp, Homo sapien
cattacttggctaggggtgctccct

SEQ ID NO: 888516 - DNA, 25 bp, Homo sapien
gacttcttgagcaaaaccccgcaag

SEQ ID NO: 888517 - DNA, 25 bp, Homo sapien
ctggaaatccatatgggaaagaatg

SEQ ID NO: 888518 - DNA, 25 bp, Homo sapien
aaatttccaggacattagtctgggt

SEQ ID NO: 888519 - DNA, 25 bp, Homo sapien
cattagtctgggtaaagacttcttg

SEQ ID NO: 888520 - DNA, 25 bp, Homo sapien
tttacctagtagaaaagcaccagaa

SEQ ID NO: 888521 - DNA, 25 bp, Homo sapien
cagaaacctctatttgtctctgttc

SEQ ID NO: 888522 - DNA, 25 bp, Homo sapien
ctctttacctagtagaaaagcacca

SEQ ID NO: 888523 - DNA, 25 bp, Homo sapien
tagtagaaaagcaccagaaacctct

SEQ ID NO: 888524 - DNA, 25 bp, Homo sapien
taacctcttagagtatttatggtca

SEQ ID NO: 888525 - DNA, 25 bp, Homo sapien
gagtatttatggtcaatgccacaca

SEQ ID NO: 888526 - DNA, 25 bp, Homo sapien
ttctagttcaaactccaacttcttc

SEQ ID NO: 888527 - DNA, 25 bp, Homo sapien
caccagttggcaatagcttcttcct

SEQ ID NO: 888528 - DNA, 25 bp, Homo sapien
catacatctactgggatccttcgac

SEQ ID NO: 888529 - DNA, 25 bp, Homo sapien
tgtattcacaccctagaggtttcag

SEQ ID NO: 888530 - DNA, 25 bp, Homo sapien
cacaaagtgattatggtctaggact

SEQ ID NO: 888531 - DNA, 25 bp, Homo sapien
tctaggactgaatcagatttgtaac

SEQ ID NO: 888532 - DNA, 25 bp, Homo sapien
catcagagggggcttcatcgtcttt

SEQ ID NO: 888533 - DNA, 25 bp, Homo sapien
gggcttcatcgtctttatcatatcg

SEQ ID NO: 888534 - DNA, 25 bp, Homo sapien
tcatatcgttctgaggctaatgaaa

SEQ ID NO: 888535 - DNA, 25 bp, Homo sapien
taatgaaatagtgtctggaggccca

SEQ ID NO: 888536 - DNA, 25 bp, Homo sapien
cattaagtggaaaggacacatcatt

SEQ ID NO: 888537 - DNA, 25 bp, Homo sapien
gtggaaaggacacatcatttttcaa

SEQ ID NO: 888538 - DNA, 25 bp, Homo sapien
ctgcattaagtggaaaggacacatc

SEQ ID NO: 888539 - DNA, 25 bp, Homo sapien
aagtggaaaggacacatcatttttc

SEQ ID NO: 888540 - DNA, 25 bp, Homo sapien
aactcaaggtttaatcatactacag

SEQ ID NO: 888541 - DNA, 25 bp, Homo sapien
caaacattgcaacaaactcaaggtt

SEQ ID NO: 888542 - DNA, 25 bp, Homo sapien
agtagtaacaaacattgcaacaaac

SEQ ID NO: 888543 - DNA, 25 bp, Homo sapien
ggtttaatcatactacagcagcata

SEQ ID NO: 888544 - DNA, 25 bp, Homo sapien
acacttggatacaggaaggcggaca

SEQ ID NO: 888545 - DNA, 25 bp, Homo sapien
gcctgagacgcagagtgagagaccc

SEQ ID NO: 888546 - DNA, 25 bp, Homo sapien
ttggatacaggaaggcggacatcac

SEQ ID NO: 888547 - DNA, 25 bp, Homo sapien
caagcacctatagttccatctacta

SEQ ID NO: 888548 - DNA, 25 bp, Homo sapien
aatggcagtgggttagtatctcacc

SEQ ID NO: 888549 - DNA, 25 bp, Homo sapien
aaacattacctgtgagcactcagcc

SEQ ID NO: 888550 - DNA, 25 bp, Homo sapien
taaatgcctaagatttccgcatcag

SEQ ID NO: 888551 - DNA, 25 bp, Homo sapien
tccgcatcagaagactgtgcagagt

SEQ ID NO: 888552 - DNA, 25 bp, Homo sapien
atatctgctacaaatgtttcaacat

SEQ ID NO: 888553 - DNA, 25 bp, Homo sapien
tttatcttcttaataagggattctc

SEQ ID NO: 888554 - DNA, 25 bp, Homo sapien
ttctcctttcagtatatctgctaca

SEQ ID NO: 888555 - DNA, 25 bp, Homo sapien
tatcttcttaataagggattctctc

SEQ ID NO: 888556 - DNA, 25 bp, Homo sapien
tagatcaccaaaaagggcttcgcca

SEQ ID NO: 888557 - DNA, 25 bp, Homo sapien
tcacaatgcacatagaaacgtcctg

SEQ ID NO: 888558 - DNA, 25 bp, Homo sapien
acgtccactccctttctgagacaaa

SEQ ID NO: 888559 - DNA, 25 bp, Homo sapien
gaaacgtcctgatcccatttgtgta

SEQ ID NO: 888560 - DNA, 25 bp, Homo sapien
cgccccgacagcattatcgccgcct

SEQ ID NO: 888561 - DNA, 25 bp, Homo sapien
ccccgccccgacagcattatcgccg

SEQ ID NO: 888562 - DNA, 25 bp, Homo sapien
cccgacagcattatcgccgccttcc

SEQ ID NO: 888563 - DNA, 25 bp, Homo sapien
cgacagcattatcgccgccttcccg

SEQ ID NO: 888564 - DNA, 25 bp, Homo sapien
caacaggttcctaatttcctcaggg

SEQ ID NO: 888565 - DNA, 25 bp, Homo sapien
ctgccaacaggttcctaatttcctc

SEQ ID NO: 888566 - DNA, 25 bp, Homo sapien
acaggttcctaatttcctcagggag

SEQ ID NO: 888567 - DNA, 25 bp, Homo sapien
gccaacaggttcctaatttcctcag

SEQ ID NO: 888568 - DNA, 25 bp, Homo sapien
aaaggacctgcgctgaaaaggtgac

SEQ ID NO: 888569 - DNA, 25 bp, Homo sapien
tagcggcccggattaagaacagcgg

SEQ ID NO: 888570 - DNA, 25 bp, Homo sapien
ggctgcggctgcgacctagactcag

SEQ ID NO: 888571 - DNA, 25 bp, Homo sapien
cctgcgctgaaaaggtgaccgacgg

SEQ ID NO: 888572 - DNA, 25 bp, Homo sapien
ggccggggctcacaacaaggaagtc

SEQ ID NO: 888573 - DNA, 25 bp, Homo sapien
gcgcatgtgtattcctcggttttcc

SEQ ID NO: 888574 - DNA, 25 bp, Homo sapien
gcctgaggggtccaactgcgcatgt

SEQ ID NO: 888575 - DNA, 25 bp, Homo sapien
ggtccaactgcgcatgtgtattcct

SEQ ID NO: 888576 - DNA, 25 bp, Homo sapien
gctgcgtcacctgatgctgcgtcac

SEQ ID NO: 888577 - DNA, 25 bp, Homo sapien
aagggggcggactgaggctgcgtca

SEQ ID NO: 888578 - DNA, 25 bp, Homo sapien
aggctgcgtcacctgatgctgcgtc

SEQ ID NO: 888579 - DNA, 25 bp, Homo sapien
gggaagggggcggactgaggctgcg

SEQ ID NO: 888580 - DNA, 25 bp, Homo sapien
tacagccattttcggtactggtgcc

SEQ ID NO: 888581 - DNA, 25 bp, Homo sapien
ttttcggtactggtgccatcacaac

SEQ ID NO: 888582 - DNA, 25 bp, Homo sapien
ctgatccagcgtccggagcgcctta

SEQ ID NO: 888583 - DNA, 25 bp, Homo sapien
gtccggagcgccttacagccatttt

SEQ ID NO: 888584 - DNA, 25 bp, Homo sapien
gcaggattccagaaaataatgtatc

SEQ ID NO: 888585 - DNA, 25 bp, Homo sapien
caggattccagaaaataatgtatcc

SEQ ID NO: 888586 - DNA, 25 bp, Homo sapien
ctgcaggattccagaaaataatgta

SEQ ID NO: 888587 - DNA, 25 bp, Homo sapien
ggattccagaaaataatgtatccat

SEQ ID NO: 888588 - DNA, 25 bp, Homo sapien
tacagagtgtatacaagttttgcga

SEQ ID NO: 888589 - DNA, 25 bp, Homo sapien
tatacaagttttgcgattacgcctt

SEQ ID NO: 888590 - DNA, 25 bp, Homo sapien
gatacagagtgtatacaagttttgc

SEQ ID NO: 888591 - DNA, 25 bp, Homo sapien
gagtgtatacaagttttgcgattac

SEQ ID NO: 888592 - DNA, 25 bp, Homo sapien
ccatcaacgaaaatgaagtcgctga

SEQ ID NO: 888593 - DNA, 25 bp, Homo sapien
ctggtgcggaaccatcaacgaaaat

SEQ ID NO: 888594 - DNA, 25 bp, Homo sapien
aacgaaaatgaagtcgctgaaatcc

SEQ ID NO: 888595 - DNA, 25 bp, Homo sapien
tgcggaaccatcaacgaaaatgaag

SEQ ID NO: 888596 - DNA, 25 bp, Homo sapien
tcaggagttagagtacaacttgata

SEQ ID NO: 888597 - DNA, 25 bp, Homo sapien
ctgacatcaggagttagagtacaac

SEQ ID NO: 888598 - DNA, 25 bp, Homo sapien
catcaggagttagagtacaacttga

SEQ ID NO: 888599 - DNA, 25 bp, Homo sapien
gacatcaggagttagagtacaactt

SEQ ID NO: 888600 - DNA, 25 bp, Homo sapien
cacaaagttgtctttggatgagaag

SEQ ID NO: 888601 - DNA, 25 bp, Homo sapien
tttccacaaagttgtctttggatga

SEQ ID NO: 888602 - DNA, 25 bp, Homo sapien
caactgaagttcatagtttccacaa

SEQ ID NO: 888603 - DNA, 25 bp, Homo sapien
aagttgtctttggatgagaagtgaa

SEQ ID NO: 888604 - DNA, 25 bp, Homo sapien
tatgtcttaactgagggtcaggtcc

SEQ ID NO: 888605 - DNA, 25 bp, Homo sapien
tgagggtcaggtccccaggattcct

SEQ ID NO: 888606 - DNA, 25 bp, Homo sapien
cattcttatgtcttaactgagggtc

SEQ ID NO: 888607 - DNA, 25 bp, Homo sapien
tcttaactgagggtcaggtccccag

SEQ ID NO: 888608 - DNA, 25 bp, Homo sapien
tctgagacccatgttagctgaactg

SEQ ID NO: 888609 - DNA, 25 bp, Homo sapien
tgtttcctagcattcagatccttag

SEQ ID NO: 888610 - DNA, 25 bp, Homo sapien
gtatcacatgatgagcagcccaacc

SEQ ID NO: 888611 - DNA, 25 bp, Homo sapien
cagatccttagctcattactgcaga

SEQ ID NO: 888612 - DNA, 25 bp, Homo sapien
aagttttgtctaagccacagcatcc

SEQ ID NO: 888613 - DNA, 25 bp, Homo sapien
tccacacattggcaaaagttttgtc

SEQ ID NO: 888614 - DNA, 25 bp, Homo sapien
gccctccaagcattacaactacgat

SEQ ID NO: 888615 - DNA, 25 bp, Homo sapien
ctagaaatataatggcagtgtgagc

SEQ ID NO: 888616 - DNA, 25 bp, Homo sapien
tctgttctttggtatatgcctcctc

SEQ ID NO: 888617 - DNA, 25 bp, Homo sapien
gtatatgcctcctccattccactag

SEQ ID NO: 888618 - DNA, 25 bp, Homo sapien
tttggtatatgcctcctccattcca

SEQ ID NO: 888619 - DNA, 25 bp, Homo sapien
gttctttggtatatgcctcctccat

SEQ ID NO: 888620 - DNA, 25 bp, Homo sapien
cctcgtaaagtagtacatgtgcagc

SEQ ID NO: 888621 - DNA, 25 bp, Homo sapien
tgaatacgctgaagactgtgaactc

SEQ ID NO: 888622 - DNA, 25 bp, Homo sapien
gtgaactctgacctcgtaaagtagt

SEQ ID NO: 888623 - DNA, 25 bp, Homo sapien
agcatcattagcaacatcagtgaat

SEQ ID NO: 888624 - DNA, 25 bp, Homo sapien
taccaactgagcctagataatctgg

SEQ ID NO: 888625 - DNA, 25 bp, Homo sapien
cataaggcgcaatgtgcttgcagca

SEQ ID NO: 888626 - DNA, 25 bp, Homo sapien
gaaagctccagtattcataaggcgc

SEQ ID NO: 888627 - DNA, 25 bp, Homo sapien
tctgtatctgacctgacatagcaac

SEQ ID NO: 888628 - DNA, 25 bp, Homo sapien
agccctaattacttccccagctttg

SEQ ID NO: 888629 - DNA, 25 bp, Homo sapien
taactgatcacggatgccgcagtcc

SEQ ID NO: 888630 - DNA, 25 bp, Homo sapien
cccagctttgaccagccagcagtgt

SEQ ID NO: 888631 - DNA, 25 bp, Homo sapien
tggcactgtttgtagttatttgacc

SEQ ID NO: 888632 - DNA, 25 bp, Homo sapien
gcaacattagcaggaccctctgcgc

SEQ ID NO: 888633 - DNA, 25 bp, Homo sapien
ccaggcaacattagcaggaccctct

SEQ ID NO: 888634 - DNA, 25 bp, Homo sapien
tccaggcaacattagcaggaccctc

SEQ ID NO: 888635 - DNA, 25 bp, Homo sapien
attagcaggaccctctgcgccatca

SEQ ID NO: 888636 - DNA, 25 bp, Homo sapien
catagcgcattttatccgcctttgt

SEQ ID NO: 888637 - DNA, 25 bp, Homo sapien
ccatgtctctaatagagatggtggg

SEQ ID NO: 888638 - DNA, 25 bp, Homo sapien
ttcgccatgtctctaatagagatgg

SEQ ID NO: 888639 - DNA, 25 bp, Homo sapien
cattttatccgcctttgttatttca

SEQ ID NO: 888640 - DNA, 25 bp, Homo sapien
ttcttggggtcaccgttagccaatc

SEQ ID NO: 888641 - DNA, 25 bp, Homo sapien
cttggggtcaccgttagccaatctg

SEQ ID NO: 888642 - DNA, 25 bp, Homo sapien
ttggggtcaccgttagccaatctga

SEQ ID NO: 888643 - DNA, 25 bp, Homo sapien
tcttggggtcaccgttagccaatct

SEQ ID NO: 888644 - DNA, 25 bp, Homo sapien
catgagagcccgactatccttttaa

SEQ ID NO: 888645 - DNA, 25 bp, Homo sapien
taattgatacaaagccctgcctcca

SEQ ID NO: 888646 - DNA, 25 bp, Homo sapien
tgtgctagctgcctccatgagagcc

SEQ ID NO: 888647 - DNA, 25 bp, Homo sapien
gcagcgcagggcacaatgcatggct

SEQ ID NO: 888648 - DNA, 25 bp, Homo sapien
cttgcttgaacctctgcttctccat

SEQ ID NO: 888649 - DNA, 25 bp, Homo sapien
ggttgaaccttgcttgaacctctgc

SEQ ID NO: 888650 - DNA, 25 bp, Homo sapien
accttgcttgaacctctgcttctcc

SEQ ID NO: 888651 - DNA, 25 bp, Homo sapien
aaggttgaaccttgcttgaacctct

SEQ ID NO: 888652 - DNA, 25 bp, Homo sapien
cagcactgatttgatcaaaattgta

SEQ ID NO: 888653 - DNA, 25 bp, Homo sapien
aaaagtaatattgttcagcactgat

SEQ ID NO: 888654 - DNA, 25 bp, Homo sapien
aatattgttcagcactgatttgatc

SEQ ID NO: 888655 - DNA, 25 bp, Homo sapien
aagaaaaagtaatattgttcagcac

SEQ ID NO: 888656 - DNA, 25 bp, Homo sapien
attctttttcagacatgtccacaat

SEQ ID NO: 888657 - DNA, 25 bp, Homo sapien
ggattgtgggcaagggtaaactcca

SEQ ID NO: 888658 - DNA, 25 bp, Homo sapien
gattgtgggcaagggtaaactccag

SEQ ID NO: 888659 - DNA, 25 bp, Homo sapien
ttgtccttcaccagcccgtctttct

SEQ ID NO: 888660 - DNA, 25 bp, Homo sapien
agtttgtccttcaccagcccgtctt

SEQ ID NO: 888661 - DNA, 25 bp, Homo sapien
ttagtttgtccttcaccagcccgtc

SEQ ID NO: 888662 - DNA, 25 bp, Homo sapien
cttagtttgtccttcaccagcccgt

SEQ ID NO: 888663 - DNA, 25 bp, Homo sapien
tttgcttgtctgcttatttatgcaa

SEQ ID NO: 888664 - DNA, 25 bp, Homo sapien
ttgcttgtctgcttatttatgcaaa

SEQ ID NO: 888665 - DNA, 25 bp, Homo sapien
cttccttgggtttgtggcaccctgg

SEQ ID NO: 888666 - DNA, 25 bp, Homo sapien
cgtgggctggcagtttgctgatctt

SEQ ID NO: 888667 - DNA, 25 bp, Homo sapien
ccttgggtttgtggcaccctggcca

SEQ ID NO: 888668 - DNA, 25 bp, Homo sapien
gtgacagcctctgcagtccgtgggc

SEQ ID NO: 888669 - DNA, 25 bp, Homo sapien
taatagcttcattcagtgcaaggag

SEQ ID NO: 888670 - DNA, 25 bp, Homo sapien
gtctcattcttactcaggctattgg

SEQ ID NO: 888671 - DNA, 25 bp, Homo sapien
ctaagcatgatgaaaggagtggaaa

SEQ ID NO: 888672 - DNA, 25 bp, Homo sapien
gaactacactaagtaagaaagtctc

SEQ ID NO: 888673 - DNA, 25 bp, Homo sapien
caatgtcgattttacatcatctacc

SEQ ID NO: 888674 - DNA, 25 bp, Homo sapien
tcaagaacaccctgaccttttagta

SEQ ID NO: 888675 - DNA, 25 bp, Homo sapien
tcaacttatgtttcccaaagtcaac

SEQ ID NO: 888676 - DNA, 25 bp, Homo sapien
cacacagggcctcagtaattatttc

SEQ ID NO: 888677 - DNA, 25 bp, Homo sapien
tcccccgcagcaagagttctagaat

SEQ ID NO: 888678 - DNA, 25 bp, Homo sapien
gaagctggaacgctaaattcatatt

SEQ ID NO: 888679 - DNA, 25 bp, Homo sapien
atattttccctatactcccccgcag

SEQ ID NO: 888680 - DNA, 25 bp, Homo sapien
agctggaacgctaaattcatatttt

SEQ ID NO: 888681 - DNA, 25 bp, Homo sapien
agtgttcctccatggcgactcgaca

SEQ ID NO: 888682 - DNA, 25 bp, Homo sapien
tgtcgagtcgccatggaggaacact

SEQ ID NO: 888683 - DNA, 25 bp, Homo sapien
aaaacaccaccgcatttgaatagcc

SEQ ID NO: 888684 - DNA, 25 bp, Homo sapien
tttgaatctgattgccccagaggaa

SEQ ID NO: 888685 - DNA, 25 bp, Homo sapien
taaactgctgggactcattctaaag

SEQ ID NO: 888686 - DNA, 25 bp, Homo sapien
tcaacaaccctttcagactgagtaa

SEQ ID NO: 888687 - DNA, 25 bp, Homo sapien
ttgaagggagttctgtttatatata

SEQ ID NO: 888688 - DNA, 25 bp, Homo sapien
aattgtagcccagccaaatacacgg

SEQ ID NO: 888689 - DNA, 25 bp, Homo sapien
tttcccctcatgaaatgtgccaact

SEQ ID NO: 888690 - DNA, 25 bp, Homo sapien
cttgacccaggaagtatccatgttt

SEQ ID NO: 888691 - DNA, 25 bp, Homo sapien
ggtgaaaaggttagcacttgaccca

SEQ ID NO: 888692 - DNA, 25 bp, Homo sapien
gggaatatcataggctcacaaagga

SEQ ID NO: 888693 - DNA, 25 bp, Homo sapien
tgttaaggcccaccagaaaatgtat

SEQ ID NO: 888694 - DNA, 25 bp, Homo sapien
taagacccgtaaactctgctctgga

SEQ ID NO: 888695 - DNA, 25 bp, Homo sapien
caatctggatgaaggtgttaacccc

SEQ ID NO: 888696 - DNA, 25 bp, Homo sapien
tgggttgacccaggtagccgtactc

SEQ ID NO: 888697 - DNA, 25 bp, Homo sapien
cagagtgtctgaggtagaagacccc

SEQ ID NO: 888698 - DNA, 25 bp, Homo sapien
tagtgaagttggtgcgcaccgcgtt

SEQ ID NO: 888699 - DNA, 25 bp, Homo sapien
ttcacttgggtctcgttgagctgca

SEQ ID NO: 888700 - DNA, 25 bp, Homo sapien
caagaactcagcacaaatcgggctg

SEQ ID NO: 888701 - DNA, 25 bp, Homo sapien
ccagaataatcaaggagcatccacc

SEQ ID NO: 888702 - DNA, 25 bp, Homo sapien
taaaccattagcatggtcagaccgg

SEQ ID NO: 888703 - DNA, 25 bp, Homo sapien
tcagaccggtgattaatggagcctc

SEQ ID NO: 888704 - DNA, 25 bp, Homo sapien
agggtttcttttgactttcatccag

SEQ ID NO: 888705 - DNA, 25 bp, Homo sapien
gagggtttcttttgactttcatcca

SEQ ID NO: 888706 - DNA, 25 bp, Homo sapien
caaaagtctgcgctggagaagatgt

SEQ ID NO: 888707 - DNA, 25 bp, Homo sapien
cgctggagaagatgtctccgatgcg

SEQ ID NO: 888708 - DNA, 25 bp, Homo sapien
tgcgggggagcgacaggcttcttgg

SEQ ID NO: 888709 - DNA, 25 bp, Homo sapien
tccgatgcgggggagcgacaggctt

SEQ ID NO: 888710 - DNA, 25 bp, Homo sapien
aggagttattatacgtagccagggc

SEQ ID NO: 888711 - DNA, 25 bp, Homo sapien
gagttattatacgtagccagggcca

SEQ ID NO: 888712 - DNA, 25 bp, Homo sapien
caaggagttattatacgtagccagg

SEQ ID NO: 888713 - DNA, 25 bp, Homo sapien
gacaaggagttattatacgtagcca

SEQ ID NO: 888714 - DNA, 25 bp, Homo sapien
tgggagatgagagatttccagagta

SEQ ID NO: 888715 - DNA, 25 bp, Homo sapien
gagatgagagatttccagagtaaac

SEQ ID NO: 888716 - DNA, 25 bp, Homo sapien
atgtattgaggcgagcccaccgcgc

SEQ ID NO: 888717 - DNA, 25 bp, Homo sapien
ccagagtaaacagcgggagcgcact

SEQ ID NO: 888718 - DNA, 25 bp, Homo sapien
cgtaggggctgtaaggcgcactgaa

SEQ ID NO: 888719 - DNA, 25 bp, Homo sapien
cttcctgatttaacgcgtaggggct

SEQ ID NO: 888720 - DNA, 25 bp, Homo sapien
tgatttaacgcgtaggggctgtaag

SEQ ID NO: 888721 - DNA, 25 bp, Homo sapien
taggggctgtaaggcgcactgaagt

SEQ ID NO: 888722 - DNA, 25 bp, Homo sapien
cttggaccacaacttgagtgggagt

SEQ ID NO: 888723 - DNA, 25 bp, Homo sapien
caacttgagtgggagtaggacaccc

SEQ ID NO: 888724 - DNA, 25 bp, Homo sapien
gtgagccatagcttggaccacaact

SEQ ID NO: 888725 - DNA, 25 bp, Homo sapien
ctgtgagccatagcttggaccacaa

SEQ ID NO: 888726 - DNA, 25 bp, Homo sapien
ggtggtggggcgaaccgatctgcac

SEQ ID NO: 888727 - DNA, 25 bp, Homo sapien
tggtaggtagccggctgggggtggc

SEQ ID NO: 888728 - DNA, 25 bp, Homo sapien
ctggtaggtagccggctgggggtgg

SEQ ID NO: 888729 - DNA, 25 bp, Homo sapien
ctgaccgcgcacgactggaaagttg

SEQ ID NO: 888730 - DNA, 25 bp, Homo sapien
cgactggaaagttgtaatcctatgg

SEQ ID NO: 888731 - DNA, 25 bp, Homo sapien
ccgagtcgccactgctaagtatggg

SEQ ID NO: 888732 - DNA, 25 bp, Homo sapien
gccgcaactgttggcgctgaccgcg

SEQ ID NO: 888733 - DNA, 25 bp, Homo sapien
actgagtgacctggtcctgcgaagc

SEQ ID NO: 888734 - DNA, 25 bp, Homo sapien
cccggcgtgactgtgccaactttct

SEQ ID NO: 888735 - DNA, 25 bp, Homo sapien
gcgaagcccggcgtgactgtgccaa

SEQ ID NO: 888736 - DNA, 25 bp, Homo sapien
tggtcctgcgaagcccggcgtgact

SEQ ID NO: 888737 - DNA, 25 bp, Homo sapien
tccatggggccggagaagaaaaatg

SEQ ID NO: 888738 - DNA, 25 bp, Homo sapien
ctccatggggccggagaagaaaaat

SEQ ID NO: 888739 - DNA, 25 bp, Homo sapien
ttcctccatggggccggagaagaaa

SEQ ID NO: 888740 - DNA, 25 bp, Homo sapien
tcctccatggggccggagaagaaaa

SEQ ID NO: 888741 - DNA, 25 bp, Homo sapien
cggagctactcgaccgccggatttt

SEQ ID NO: 888742 - DNA, 25 bp, Homo sapien
tttgcaccgggagccctccgggatg

SEQ ID NO: 888743 - DNA, 25 bp, Homo sapien
ttcccactcagttttgcaccgggag

SEQ ID NO: 888744 - DNA, 25 bp, Homo sapien
gatgcggagctactcgaccgccgga

SEQ ID NO: 888745 - DNA, 25 bp, Homo sapien
ggccgggcggtgcgctgcaggccat

SEQ ID NO: 888746 - DNA, 25 bp, Homo sapien
gggcggtgcgctgcaggccatctgc

SEQ ID NO: 888747 - DNA, 25 bp, Homo sapien
gggccgggcggtgcgctgcaggcca

SEQ ID NO: 888748 - DNA, 25 bp, Homo sapien
ccgggcggtgcgctgcaggccatct

SEQ ID NO: 888749 - DNA, 25 bp, Homo sapien
tctgctgcacgtctagagtgggtgt

SEQ ID NO: 888750 - DNA, 25 bp, Homo sapien
gctgatggtggacgggacactttac

SEQ ID NO: 888751 - DNA, 25 bp, Homo sapien
ccttcgttgcgttcctctttttctg

SEQ ID NO: 888752 - DNA, 25 bp, Homo sapien
ccacagctccaacatagtagctgaa

SEQ ID NO: 888753 - DNA, 25 bp, Homo sapien
gttgcttatgagaaccttcaagtcc

SEQ ID NO: 888754 - DNA, 25 bp, Homo sapien
gcttatgagaaccttcaagtccttc

SEQ ID NO: 888755 - DNA, 25 bp, Homo sapien
gtgtagttgcttatgagaaccttca

SEQ ID NO: 888756 - DNA, 25 bp, Homo sapien
tggctgtgtagttgcttatgagaac

SEQ ID NO: 888757 - DNA, 25 bp, Homo sapien
agagggagcacgggcaggaaaggcc

SEQ ID NO: 888758 - DNA, 25 bp, Homo sapien
ttaagagggagcacgggcaggaaag

SEQ ID NO: 888759 - DNA, 25 bp, Homo sapien
gggagcacgggcaggaaaggcccac

SEQ ID NO: 888760 - DNA, 25 bp, Homo sapien
agggagcacgggcaggaaaggccca

SEQ ID NO: 888761 - DNA, 25 bp, Homo sapien
cctgggaatcctccgactggagaag

SEQ ID NO: 888762 - DNA, 25 bp, Homo sapien
ctgccccagtttcggctcctgggaa

SEQ ID NO: 888763 - DNA, 25 bp, Homo sapien
agcaccagcttccagcggcggggag

SEQ ID NO: 888764 - DNA, 25 bp, Homo sapien
caccagcttccagcggcggggagag

SEQ ID NO: 888765 - DNA, 25 bp, Homo sapien
taaaatgatcgcctacaagcggttc

SEQ ID NO: 888766 - DNA, 25 bp, Homo sapien
ggagataaaatgacgccgaggccct

SEQ ID NO: 888767 - DNA, 25 bp, Homo sapien
gagctggtctctttcaacgccttgg

SEQ ID NO: 888768 - DNA, 25 bp, Homo sapien
tgaactgttcatggcatccgcggct

SEQ ID NO: 888769 - DNA, 25 bp, Homo sapien
cctatgaagaaacatcgcgttgtca

SEQ ID NO: 888770 - DNA, 25 bp, Homo sapien
taggacgaatcgcatccaggagctg

SEQ ID NO: 888771 - DNA, 25 bp, Homo sapien
ggaaggtagggagcaaacctatgaa

SEQ ID NO: 888772 - DNA, 25 bp, Homo sapien
gccgccgcagctgagatttagcgga

SEQ ID NO: 888773 - DNA, 25 bp, Homo sapien
tataacctagggtgtagaaacacac

SEQ ID NO: 888774 - DNA, 25 bp, Homo sapien
tctcacggtaagtaagtaggcatca

SEQ ID NO: 888775 - DNA, 25 bp, Homo sapien
gagccaggttcttaaatcaacccgc

SEQ ID NO: 888776 - DNA, 25 bp, Homo sapien
tctctctctctagaacctgcgttaa

SEQ ID NO: 888777 - DNA, 25 bp, Homo sapien
gaagcattaacgatctattattagc

SEQ ID NO: 888778 - DNA, 25 bp, Homo sapien
ctgacttcgaagcattaacgatcta

SEQ ID NO: 888779 - DNA, 25 bp, Homo sapien
tctattattagcaatgtaaacaggt

SEQ ID NO: 888780 - DNA, 25 bp, Homo sapien
cgatctattattagcaatgtaaaca

SEQ ID NO: 888781 - DNA, 25 bp, Homo sapien
tgggtcagggaatcactaaacagaa

SEQ ID NO: 888782 - DNA, 25 bp, Homo sapien
gactttgaacatgccgccttaataa

SEQ ID NO: 888783 - DNA, 25 bp, Homo sapien
aaagatggctctgtttgaaactggg

SEQ ID NO: 888784 - DNA, 25 bp, Homo sapien
ttgcaggcctcatactgctctcagg

SEQ ID NO: 888785 - DNA, 25 bp, Homo sapien
gtgatgctttgttttgctttaatgt

SEQ ID NO: 888786 - DNA, 25 bp, Homo sapien
tggtgatgctttgttttgctttaat

SEQ ID NO: 888787 - DNA, 25 bp, Homo sapien
ggtgatgctttgttttgctttaatg

SEQ ID NO: 888788 - DNA, 25 bp, Homo sapien
gatgctttgttttgctttaatgttt

SEQ ID NO: 888789 - DNA, 25 bp, Homo sapien
tcagatgctgcaagtcgattgtggt

SEQ ID NO: 888790 - DNA, 25 bp, Homo sapien
gtgtgtctgtaaaaaagtctaagct

SEQ ID NO: 888791 - DNA, 25 bp, Homo sapien
taaaaaagtctaagctgtcagctga

SEQ ID NO: 888792 - DNA, 25 bp, Homo sapien
agatgctgcaagtcgattgtggtga

SEQ ID NO: 888793 - DNA, 25 bp, Homo sapien
tctgtggagaaaacgctaaagtcct

SEQ ID NO: 888794 - DNA, 25 bp, Homo sapien
tggtgtaagcagttctcaggcgccg

SEQ ID NO: 888795 - DNA, 25 bp, Homo sapien
gactgtcgagggaacctggcaaact

SEQ ID NO: 888796 - DNA, 25 bp, Homo sapien
ccagagacgctaagggcttgctcaa

SEQ ID NO: 888797 - DNA, 25 bp, Homo sapien
agagacacacgcacagttggaggtg

SEQ ID NO: 888798 - DNA, 25 bp, Homo sapien
aagagacacacgcacagttggaggt

SEQ ID NO: 888799 - DNA, 25 bp, Homo sapien
aacaagagacacacgcacagttgga

SEQ ID NO: 888800 - DNA, 25 bp, Homo sapien
acaagagacacacgcacagttggag

SEQ ID NO: 888801 - DNA, 25 bp, Homo sapien
ccggcagaagtgcggttttcttggc

SEQ ID NO: 888802 - DNA, 25 bp, Homo sapien
tccttcatccaggggtactcgggcg

SEQ ID NO: 888803 - DNA, 25 bp, Homo sapien
ttcatccaggggtactcgggcggct

SEQ ID NO: 888804 - DNA, 25 bp, Homo sapien
gcagaagtgcggttttcttggccgc

SEQ ID NO: 888805 - DNA, 25 bp, Homo sapien
actttgaaatgtatcagcgacaggg

SEQ ID NO: 888806 - DNA, 25 bp, Homo sapien
agcgacggctggctattgataaaac

SEQ ID NO: 888807 - DNA, 25 bp, Homo sapien
aatcagtgtcgagtgtgaaagcgtc

SEQ ID NO: 888808 - DNA, 25 bp, Homo sapien
ggaaaagatgtcaggcactcagcga

SEQ ID NO: 888809 - DNA, 25 bp, Homo sapien
ggaccgcgctactattaaactattg

SEQ ID NO: 888810 - DNA, 25 bp, Homo sapien
gctgtcacatgattgcttctgccca

SEQ ID NO: 888811 - DNA, 25 bp, Homo sapien
aattcactgattacagccgtatggg

SEQ ID NO: 888812 - DNA, 25 bp, Homo sapien
gaaattggaccgaattggctgtcac

SEQ ID NO: 888813 - DNA, 25 bp, Homo sapien
gcacactccgcgcattgtttgggac

SEQ ID NO: 888814 - DNA, 25 bp, Homo sapien
catttaagcacctcagtctgacgcc

SEQ ID NO: 888815 - DNA, 25 bp, Homo sapien
tgcgtcccagccacataagttctgt

SEQ ID NO: 888816 - DNA, 25 bp, Homo sapien
tgaatgtgcgcgagtgtaagccctg

SEQ ID NO: 888817 - DNA, 25 bp, Homo sapien
agctttgcatctggctccggcggga

SEQ ID NO: 888818 - DNA, 25 bp, Homo sapien
gaggcggctctcgaagcttcccgac

SEQ ID NO: 888819 - DNA, 25 bp, Homo sapien
agcggaaaacgggaggcggctctcg

SEQ ID NO: 888820 - DNA, 25 bp, Homo sapien
tccacggcagctttgcatctggctc

SEQ ID NO: 888821 - DNA, 25 bp, Homo sapien
atgtgtccaaatccccgtagccagg

SEQ ID NO: 888822 - DNA, 25 bp, Homo sapien
tgcgccatcaacttctcaggagtgg

SEQ ID NO: 888823 - DNA, 25 bp, Homo sapien
tctgggtttcatacccgtagggctc

SEQ ID NO: 888824 - DNA, 25 bp, Homo sapien
gatgcatgtgccaagcgagacaaca

SEQ ID NO: 888825 - DNA, 25 bp, Homo sapien
ttcttgtccttgtcgctctggttgg

SEQ ID NO: 888826 - DNA, 25 bp, Homo sapien
tagatacagcgagtgctccctggca

SEQ ID NO: 888827 - DNA, 25 bp, Homo sapien
ggatgtttgcttccgggttctgttg

SEQ ID NO: 888828 - DNA, 25 bp, Homo sapien
ccgggttctgttgtgggaaacagca

SEQ ID NO: 888829 - DNA, 25 bp, Homo sapien
tatatcattgaccagcccagagcat

SEQ ID NO: 888830 - DNA, 25 bp, Homo sapien
aagtctgggcgcgatcaatcttgct

SEQ ID NO: 888831 - DNA, 25 bp, Homo sapien
taaaatgtggccgagcaaagaggag

SEQ ID NO: 888832 - DNA, 25 bp, Homo sapien
tctgaggccagcgtcaaagagggtt

SEQ ID NO: 888833 - DNA, 25 bp, Homo sapien
ccgagccttttccttaaaccatgag

SEQ ID NO: 888834 - DNA, 25 bp, Homo sapien
ccagcaggtacccagaaatggctcc

SEQ ID NO: 888835 - DNA, 25 bp, Homo sapien
tgcctgcttctaaggataatctgag

SEQ ID NO: 888836 - DNA, 25 bp, Homo sapien
ctaaaagcagctcgttgggacccag

SEQ ID NO: 888837 - DNA, 25 bp, Homo sapien
agttcctcgcttctagctctgaagg

SEQ ID NO: 888838 - DNA, 25 bp, Homo sapien
gccctatcttaaatccaggagtgga

SEQ ID NO: 888839 - DNA, 25 bp, Homo sapien
tagccagtcagtaagcagccctatc

SEQ ID NO: 888840 - DNA, 25 bp, Homo sapien
tgatccccagacgaaagcagttcct

SEQ ID NO: 888841 - DNA, 25 bp, Homo sapien
tcagagaatgccaaatactacattc

SEQ ID NO: 888842 - DNA, 25 bp, Homo sapien
gaagctaatgctgggattccggcag

SEQ ID NO: 888843 - DNA, 25 bp, Homo sapien
cagttcagtcctccgtttgctggag

SEQ ID NO: 888844 - DNA, 25 bp, Homo sapien
tattacaaagataccgatctccttg

SEQ ID NO: 888845 - DNA, 25 bp, Homo sapien
gagcaattctttcctcctgacgcga

SEQ ID NO: 888846 - DNA, 25 bp, Homo sapien
gacgcgataacagaccgcgaagcat

SEQ ID NO: 888847 - DNA, 25 bp, Homo sapien
gattgctcccggaaagtgctcggca

SEQ ID NO: 888848 - DNA, 25 bp, Homo sapien
caaactgtttcgctccgcgtgcaga

SEQ ID NO: 888849 - DNA, 25 bp, Homo sapien
taggcgttagttggtccgctttgac

SEQ ID NO: 888850 - DNA, 25 bp, Homo sapien
tgtttcttccgtgcacagcactcgg

SEQ ID NO: 888851 - DNA, 25 bp, Homo sapien
ttgacccgaggaagagcatggagca

SEQ ID NO: 888852 - DNA, 25 bp, Homo sapien
tggagcagaagaccgccctgcgtta

SEQ ID NO: 888853 - DNA, 25 bp, Homo sapien
gccatcctgagaattcgccgagctt

SEQ ID NO: 888854 - DNA, 25 bp, Homo sapien
cagacccacgtcttcggccaaagaa

SEQ ID NO: 888855 - DNA, 25 bp, Homo sapien
ttctaagtacgccaatacacaattg

SEQ ID NO: 888856 - DNA, 25 bp, Homo sapien
cacaattgaacaaaaggcccaagaa

SEQ ID NO: 888857 - DNA, 25 bp, Homo sapien
ccctgtttctgatcaaagagtggag

SEQ ID NO: 888858 - DNA, 25 bp, Homo sapien
ccagtggcctatcgaggagcaggaa

SEQ ID NO: 888859 - DNA, 25 bp, Homo sapien
ttcccctcgggagccataatgtaag

SEQ ID NO: 888860 - DNA, 25 bp, Homo sapien
tatcgctatgatacagccattccag

SEQ ID NO: 888861 - DNA, 25 bp, Homo sapien
gctcatacgggacgctgttgaccag

SEQ ID NO: 888862 - DNA, 25 bp, Homo sapien
gatgacgttagcatgcccttgccct

SEQ ID NO: 888863 - DNA, 25 bp, Homo sapien
tgttgaccagcgaatgcatagagtt

SEQ ID NO: 888864 - DNA, 25 bp, Homo sapien
catagagttcagatagccaccggct

SEQ ID NO: 888865 - DNA, 25 bp, Homo sapien
caaaggttcctgcatccgtcaggtc

SEQ ID NO: 888866 - DNA, 25 bp, Homo sapien
aggagcaaatcacagccttctcggg

SEQ ID NO: 888867 - DNA, 25 bp, Homo sapien
tttggcctatcggacaacagcctcc

SEQ ID NO: 888868 - DNA, 25 bp, Homo sapien
ccagagagaagtaggaactaggtgc

SEQ ID NO: 888869 - DNA, 25 bp, Homo sapien
ggagctcaggttgtttctgcacaga

SEQ ID NO: 888870 - DNA, 25 bp, Homo sapien
gagattccaactgcactagacccta

SEQ ID NO: 888871 - DNA, 25 bp, Homo sapien
tggtgttttccagcctacagaggcc

SEQ ID NO: 888872 - DNA, 25 bp, Homo sapien
tagaccctacttgcccttggagaag

SEQ ID NO: 888873 - DNA, 25 bp, Homo sapien
ctttgtgttttgtcgagactctttc

SEQ ID NO: 888874 - DNA, 25 bp, Homo sapien
gctttgtgttttgtcgagactcttt

SEQ ID NO: 888875 - DNA, 25 bp, Homo sapien
gggggctcttggccgcgttggcagg

SEQ ID NO: 888876 - DNA, 25 bp, Homo sapien
tcttggccgcgttggcaggggtagg

SEQ ID NO: 888877 - DNA, 25 bp, Homo sapien
ggctcttggccgcgttggcaggggt

SEQ ID NO: 888878 - DNA, 25 bp, Homo sapien
agggggctcttggccgcgttggcag

SEQ ID NO: 888879 - DNA, 25 bp, Homo sapien
gctcagggtgcgcaggcacgcctca

SEQ ID NO: 888880 - DNA, 25 bp, Homo sapien
gggcgctcagggtgcgcaggcacgc

SEQ ID NO: 888881 - DNA, 25 bp, Homo sapien
ctcagggtgcgcaggcacgcctcac

SEQ ID NO: 888882 - DNA, 25 bp, Homo sapien
gcgctcagggtgcgcaggcacgcct

SEQ ID NO: 888883 - DNA, 25 bp, Homo sapien
cagttcgtgtgccttggggtggccc

SEQ ID NO: 888884 - DNA, 25 bp, Homo sapien
gtcggcgcccaaagcggcggacgcc

SEQ ID NO: 888885 - DNA, 25 bp, Homo sapien
gcaggcgggtcggtggtactcgccg

SEQ ID NO: 888886 - DNA, 25 bp, Homo sapien
ggacgccgggtacggctgctgattg

SEQ ID NO: 888887 - DNA, 25 bp, Homo sapien
ctgtcgtagtaggtcgctttttgca

SEQ ID NO: 888888 - DNA, 25 bp, Homo sapien
ggtagccaccgtagatcgccgagct

SEQ ID NO: 888889 - DNA, 25 bp, Homo sapien
ctggtaggggtagccaccgtagatc

SEQ ID NO: 888890 - DNA, 25 bp, Homo sapien
tcgccgagctgtcgtagtaggtcgc

SEQ ID NO: 888891 - DNA, 25 bp, Homo sapien
gtgagggcgcacattggcacgcccc

SEQ ID NO: 888892 - DNA, 25 bp, Homo sapien
ggtcacgtgacactccgccgccaat

SEQ ID NO: 888893 - DNA, 25 bp, Homo sapien
gatcttgatcgcacactctgacagg

SEQ ID NO: 888894 - DNA, 25 bp, Homo sapien
tctgacaggggtttgacacccgtga

SEQ ID NO: 888895 - DNA, 25 bp, Homo sapien
gcgagaagcgcagcgcggtgagggc

SEQ ID NO: 888896 - DNA, 25 bp, Homo sapien
gggcgagaagcgcagcgcggtgagg

SEQ ID NO: 888897 - DNA, 25 bp, Homo sapien
agcgcagcgcggtgagggctccgcg

SEQ ID NO: 888898 - DNA, 25 bp, Homo sapien
ctggtggggcgagaagcgcagcgcg

SEQ ID NO: 888899 - DNA, 25 bp, Homo sapien
caacttaacgataataggttctgtc

SEQ ID NO: 888900 - DNA, 25 bp, Homo sapien
ggtcatttggctcccgacgagggat

SEQ ID NO: 888901 - DNA, 25 bp, Homo sapien
gacgagggatggaagcacaagccat

SEQ ID NO: 888902 - DNA, 25 bp, Homo sapien
ctgtcttagaaactgctatgtaatt

SEQ ID NO: 888903 - DNA, 25 bp, Homo sapien
caaaatccttcctattgttcgaggt

SEQ ID NO: 888904 - DNA, 25 bp, Homo sapien
accttggagctcatacatcccccca

SEQ ID NO: 888905 - DNA, 25 bp, Homo sapien
tcctattgttcgaggtcagcagacc

SEQ ID NO: 888906 - DNA, 25 bp, Homo sapien
aatccttcctattgttcgaggtcag

SEQ ID NO: 888907 - DNA, 25 bp, Homo sapien
ccagccaggaaactttgctctgtac

SEQ ID NO: 888908 - DNA, 25 bp, Homo sapien
atttgccagccaggaaactttgctc

SEQ ID NO: 888909 - DNA, 25 bp, Homo sapien
tttgccagccaggaaactttgctct

SEQ ID NO: 888910 - DNA, 25 bp, Homo sapien
tgccagccaggaaactttgctctgt

SEQ ID NO: 888911 - DNA, 25 bp, Homo sapien
ccaggtgcaagagccgaaagagagt

SEQ ID NO: 888912 - DNA, 25 bp, Homo sapien
tctctctggaagatgtgcccaaatt

SEQ ID NO: 888913 - DNA, 25 bp, Homo sapien
tgagtgcaagaagcaagccctattg

SEQ ID NO: 888914 - DNA, 25 bp, Homo sapien
gtttctggacaataatccccaggtg

SEQ ID NO: 888915 - DNA, 25 bp, Homo sapien
ataagcgctagtgcggcgccgggct

SEQ ID NO: 888916 - DNA, 25 bp, Homo sapien
gcctgggctagtggcaccgacttgg

SEQ ID NO: 888917 - DNA, 25 bp, Homo sapien
gggctagtggcaccgacttgggtat

SEQ ID NO: 888918 - DNA, 25 bp, Homo sapien
cagcagccgcggcccggagataagc

SEQ ID NO: 888919 - DNA, 25 bp, Homo sapien
gtagaaccagagtccatccttagat

SEQ ID NO: 888920 - DNA, 25 bp, Homo sapien
ggactcactttagcactttcatggg

SEQ ID NO: 888921 - DNA, 25 bp, Homo sapien
tgaagctggcatttcgaggtagaag

SEQ ID NO: 888922 - DNA, 25 bp, Homo sapien
ctgagagggcctctggcggttccaa

SEQ ID NO: 888923 - DNA, 25 bp, Homo sapien
ttatttgaaatagggaaccactgaa

SEQ ID NO: 888924 - DNA, 25 bp, Homo sapien
ttatgtgctcacgtggtcatacgtc

SEQ ID NO: 888925 - DNA, 25 bp, Homo sapien
atttgaaatagggaaccactgaagg

SEQ ID NO: 888926 - DNA, 25 bp, Homo sapien
gtggtcatacgtcaacttaaatcct

SEQ ID NO: 888927 - DNA, 25 bp, Homo sapien
cacaccatacactacagacgcaaga

SEQ ID NO: 888928 - DNA, 25 bp, Homo sapien
ggagtttgctaacacccacaccata

SEQ ID NO: 888929 - DNA, 25 bp, Homo sapien
cactacagacgcaagaaacaccaaa

SEQ ID NO: 888930 - DNA, 25 bp, Homo sapien
ttcctcacagcctgccattgtatgg

SEQ ID NO: 888931 - DNA, 25 bp, Homo sapien
aaagatgtgcttggctatagagtgg

SEQ ID NO: 888932 - DNA, 25 bp, Homo sapien
aaaaggttaaagcatctcctccaag

SEQ ID NO: 888933 - DNA, 25 bp, Homo sapien
tgggagcccactaggaaagatgtgc

SEQ ID NO: 888934 - DNA, 25 bp, Homo sapien
acctagtgccctgactaaacttgca

SEQ ID NO: 888935 - DNA, 25 bp, Homo sapien
atatcagaggaaatgatctaattgc

SEQ ID NO: 888936 - DNA, 25 bp, Homo sapien
tcagaggaaatgatctaattgctct

SEQ ID NO: 888937 - DNA, 25 bp, Homo sapien
gaaatgatctaattgctctgcaaga

SEQ ID NO: 888938 - DNA, 25 bp, Homo sapien
gaggaaatgatctaattgctctgca

SEQ ID NO: 888939 - DNA, 25 bp, Homo sapien
tccaagacaattctgtgtccaccag

SEQ ID NO: 888940 - DNA, 25 bp, Homo sapien
tgtccacccacttttccaagacaat

SEQ ID NO: 888941 - DNA, 25 bp, Homo sapien
gaaaaagaatcaaccttcactggag

SEQ ID NO: 888942 - DNA, 25 bp, Homo sapien
taacaaggcaatctgggaccctctc

SEQ ID NO: 888943 - DNA, 25 bp, Homo sapien
aacaaataagctgctcccacccttg

SEQ ID NO: 888944 - DNA, 25 bp, Homo sapien
gaaaaccagtagagaaccaactgtg

SEQ ID NO: 888945 - DNA, 25 bp, Homo sapien
aaataagctgctcccacccttggtt

SEQ ID NO: 888946 - DNA, 25 bp, Homo sapien
aaaaccagtagagaaccaactgtgc

SEQ ID NO: 888947 - DNA, 25 bp, Homo sapien
gagaacttgttcatgggttgtccaa

SEQ ID NO: 888948 - DNA, 25 bp, Homo sapien
gagaatgggtcttcagctggctatg

SEQ ID NO: 888949 - DNA, 25 bp, Homo sapien
cctaatcccctggaagcaagtcctg

SEQ ID NO: 888950 - DNA, 25 bp, Homo sapien
ctcacttatagcagctgcaggaggc

SEQ ID NO: 888951 - DNA, 25 bp, Homo sapien
agtagaagctggtttccaaaaagcg

SEQ ID NO: 888952 - DNA, 25 bp, Homo sapien
tcaccaatcattcacactgagctct

SEQ ID NO: 888953 - DNA, 25 bp, Homo sapien
gcctcatacccctcaccaatcattc

SEQ ID NO: 888954 - DNA, 25 bp, Homo sapien
gagctctccagataccctagaaagg

SEQ ID NO: 888955 - DNA, 25 bp, Homo sapien
tcctccgaagttaaatattgaccag

SEQ ID NO: 888956 - DNA, 25 bp, Homo sapien
cccacgcggcgaagagttttggagc

SEQ ID NO: 888957 - DNA, 25 bp, Homo sapien
gcactcgcagggcaagaagcttaaa

SEQ ID NO: 888958 - DNA, 25 bp, Homo sapien
acctctttcaacaggccgcggttgc

SEQ ID NO: 888959 - DNA, 25 bp, Homo sapien
gaatcgccttttccggtgtccaggc

SEQ ID NO: 888960 - DNA, 25 bp, Homo sapien
caggcgctcagggaatcgccttttc

SEQ ID NO: 888961 - DNA, 25 bp, Homo sapien
aattctgaaccaggaattgtctcca

SEQ ID NO: 888962 - DNA, 25 bp, Homo sapien
taaattctgaaccaggaattgtctc

SEQ ID NO: 888963 - DNA, 25 bp, Homo sapien
cagacaaataaacagcagaaggtga

SEQ ID NO: 888964 - DNA, 25 bp, Homo sapien
ataaacagcagaaggtgaatggcgg

SEQ ID NO: 888965 - DNA, 25 bp, Homo sapien
ctgcagacaaataaacagcagaagg

SEQ ID NO: 888966 - DNA, 25 bp, Homo sapien
caaataaacagcagaaggtgaatgg

SEQ ID NO: 888967 - DNA, 25 bp, Homo sapien
ggtgacgcgaacatcagggagtcac

SEQ ID NO: 888968 - DNA, 25 bp, Homo sapien
gggtgacgcgaacatcagggagtca

SEQ ID NO: 888969 - DNA, 25 bp, Homo sapien
tcatgcgggcgccaaggtggccctg

SEQ ID NO: 888970 - DNA, 25 bp, Homo sapien
ggaagcgaggctcatgcgggcgcca

SEQ ID NO: 888971 - DNA, 25 bp, Homo sapien
cagggcactcgtccgtgtggcgcac

SEQ ID NO: 888972 - DNA, 25 bp, Homo sapien
gcactcattgctcgaaatgttccag

SEQ ID NO: 888973 - DNA, 25 bp, Homo sapien
actcgtccgtgtggcgcactcattg

SEQ ID NO: 888974 - DNA, 25 bp, Homo sapien
cgtgtggcgcactcattgctcgaaa

SEQ ID NO: 888975 - DNA, 25 bp, Homo sapien
ggacgccggctggtacaatacctgc

SEQ ID NO: 888976 - DNA, 25 bp, Homo sapien
tctgtaggcgcgaaatcagacccgg

SEQ ID NO: 888977 - DNA, 25 bp, Homo sapien
tctgggagcattcaatcacggactc

SEQ ID NO: 888978 - DNA, 25 bp, Homo sapien
tcagacccgggttcattccactggc

SEQ ID NO: 888979 - DNA, 25 bp, Homo sapien
aagaggaaagaatcgtccgctcgcc

SEQ ID NO: 888980 - DNA, 25 bp, Homo sapien
ttggagaagttctgcgctccgctgg

SEQ ID NO: 888981 - DNA, 25 bp, Homo sapien
ctagcacgtggaacaagtggccgca

SEQ ID NO: 888982 - DNA, 25 bp, Homo sapien
gtagctgcgctctgccacagttcga

SEQ ID NO: 888983 - DNA, 25 bp, Homo sapien
ccgggtatatcatagatttcagcaa

SEQ ID NO: 888984 - DNA, 25 bp, Homo sapien
aggaagcctgcaaagtgccattttt

SEQ ID NO: 888985 - DNA, 25 bp, Homo sapien
tttcagcaaaactagggaaggaagc

SEQ ID NO: 888986 - DNA, 25 bp, Homo sapien
gaattcctgctgtaataaaacaccg

SEQ ID NO: 888987 - DNA, 25 bp, Homo sapien
gagtcatgcacaacttggctctgtg

SEQ ID NO: 888988 - DNA, 25 bp, Homo sapien
gatgttgacaaaacttttgtctccg

SEQ ID NO: 888989 - DNA, 25 bp, Homo sapien
gatttaggtcgatttcagatgttga

SEQ ID NO: 888990 - DNA, 25 bp, Homo sapien
taaagtgtctcctatccgatttagg

SEQ ID NO: 888991 - DNA, 25 bp, Homo sapien
tttgcagcttgacactcaatttcca

SEQ ID NO: 888992 - DNA, 25 bp, Homo sapien
ttttttagcagacagccaagatgct

SEQ ID NO: 888993 - DNA, 25 bp, Homo sapien
aaatgatgatagtctgccatttgag

SEQ ID NO: 888994 - DNA, 25 bp, Homo sapien
ttgcagcttgacactcaatttccac

SEQ ID NO: 888995 - DNA, 25 bp, Homo sapien
ccaagtgaatccagctcaagctatc

SEQ ID NO: 888996 - DNA, 25 bp, Homo sapien
ggtcaagtatctcaatccagaggac

SEQ ID NO: 888997 - DNA, 25 bp, Homo sapien
ccagctcaagctatctacaaggttt

SEQ ID NO: 888998 - DNA, 25 bp, Homo sapien
aggtttttacatgcaaggtcaagta

SEQ ID NO: 888999 - DNA, 25 bp, Homo sapien
atgcaagtgtatgtccccactcagc

SEQ ID NO: 889000 - DNA, 25 bp, Homo sapien
taacatgtcacacctaccatcaagg

SEQ ID NO: 889001 - DNA, 25 bp, Homo sapien
aattaaataatcttgtgaggtccac

SEQ ID NO: 889002 - DNA, 25 bp, Homo sapien
tacagttccacataagtctaaatgc

SEQ ID NO: 889003 - DNA, 25 bp, Homo sapien
tttgataccaagtagtccttctcag

SEQ ID NO: 889004 - DNA, 25 bp, Homo sapien
tgataccaagtagtccttctcaggt

SEQ ID NO: 889005 - DNA, 25 bp, Homo sapien
gtatttgataccaagtagtccttct

SEQ ID NO: 889006 - DNA, 25 bp, Homo sapien
gataccaagtagtccttctcaggta

SEQ ID NO: 889007 - DNA, 25 bp, Homo sapien
ctgttctctcttgggtggcaaccag

SEQ ID NO: 889008 - DNA, 25 bp, Homo sapien
taaccggataatgtcttctttttga

SEQ ID NO: 889009 - DNA, 25 bp, Homo sapien
gcaaccagcacagactcttaaccgg

SEQ ID NO: 889010 - DNA, 25 bp, Homo sapien
ccagcatcctggacaactgttctct

SEQ ID NO: 889011 - DNA, 25 bp, Homo sapien
gaaactggttaagatctctagaaga

SEQ ID NO: 889012 - DNA, 25 bp, Homo sapien
gcaggtaagggatagaaactggtta

SEQ ID NO: 889013 - DNA, 25 bp, Homo sapien
agcaggtaagggatagaaactggtt

SEQ ID NO: 889014 - DNA, 25 bp, Homo sapien
tagaaactggttaagatctctagaa

SEQ ID NO: 889015 - DNA, 25 bp, Homo sapien
ccgaggccgaattggaggatcgcat

SEQ ID NO: 889016 - DNA, 25 bp, Homo sapien
gaattggaggatcgcatcttggtgt

SEQ ID NO: 889017 - DNA, 25 bp, Homo sapien
ggccgaattggaggatcgcatcttg

SEQ ID NO: 889018 - DNA, 25 bp, Homo sapien
attggaggatcgcatcttggtgttg

SEQ ID NO: 889019 - DNA, 25 bp, Homo sapien
tccggttctgaaaccagatcttgac

SEQ ID NO: 889020 - DNA, 25 bp, Homo sapien
cctccggttctgaaaccagatcttg

SEQ ID NO: 889021 - DNA, 25 bp, Homo sapien
catcctccggttctgaaaccagatc

SEQ ID NO: 889022 - DNA, 25 bp, Homo sapien
ttcatcctccggttctgaaaccaga

SEQ ID NO: 889023 - DNA, 25 bp, Homo sapien
ctggcgctcagacaaacagagcgtg

SEQ ID NO: 889024 - DNA, 25 bp, Homo sapien
aacagagcgtgtgggcgatctcgat

SEQ ID NO: 889025 - DNA, 25 bp, Homo sapien
cggcgccgccgggtcaggtatcgat

SEQ ID NO: 889026 - DNA, 25 bp, Homo sapien
ccgccgggtcaggtatcgattgaag

SEQ ID NO: 889027 - DNA, 25 bp, Homo sapien
ctgccgggtgtaggcggttcgagag

SEQ ID NO: 889028 - DNA, 25 bp, Homo sapien
ggtgtaggcggttcgagagcgctta

SEQ ID NO: 889029 - DNA, 25 bp, Homo sapien
gagagcgcttaggctcccctccgtt

SEQ ID NO: 889030 - DNA, 25 bp, Homo sapien
tcgagagcgcttaggctcccctccg

SEQ ID NO: 889031 - DNA, 25 bp, Homo sapien
cacaggctattgacaacgggaaaca

SEQ ID NO: 889032 - DNA, 25 bp, Homo sapien
ttcacgcaagatacataaaacggca

SEQ ID NO: 889033 - DNA, 25 bp, Homo sapien
tcgtaaatctcctgataaagggacc

SEQ ID NO: 889034 - DNA, 25 bp, Homo sapien
ttctcatgttgggatcaggcggctg

SEQ ID NO: 889035 - DNA, 25 bp, Homo sapien
ttcatccaggggtacaccacgggct

SEQ ID NO: 889036 - DNA, 25 bp, Homo sapien
ggcgctgacatggatcttcttcatc

SEQ ID NO: 889037 - DNA, 25 bp, Homo sapien
caggggtacaccacgggctccttgc

SEQ ID NO: 889038 - DNA, 25 bp, Homo sapien
cggcgctgacatggatcttcttcat

SEQ ID NO: 889039 - DNA, 25 bp, Homo sapien
ttgtcggccaagagcagcgggcacg

SEQ ID NO: 889040 - DNA, 25 bp, Homo sapien
cttgtcggccaagagcagcgggcac

SEQ ID NO: 889041 - DNA, 25 bp, Homo sapien
cggccaagagcagcgggcacgcggg

SEQ ID NO: 889042 - DNA, 25 bp, Homo sapien
gtcggccaagagcagcgggcacgcg

SEQ ID NO: 889043 - DNA, 25 bp, Homo sapien
tgctgcgcgtactcctcgaagggag

SEQ ID NO: 889044 - DNA, 25 bp, Homo sapien
ttatcaaaaacgagctcatggtcat

SEQ ID NO: 889045 - DNA, 25 bp, Homo sapien
ggctcgatgtagttggagtttatca

SEQ ID NO: 889046 - DNA, 25 bp, Homo sapien
tccgcggcgcgtagtaggaggcagt

SEQ ID NO: 889047 - DNA, 25 bp, Homo sapien
taatttgtgaagtgcaaaaatacta

SEQ ID NO: 889048 - DNA, 25 bp, Homo sapien
tgcaaaaatactaatttttctcgcg

SEQ ID NO: 889049 - DNA, 25 bp, Homo sapien
atttgtgaagtgcaaaaatactaat

SEQ ID NO: 889050 - DNA, 25 bp, Homo sapien
atactaatttttctcgcgttgtcgt

SEQ ID NO: 889051 - DNA, 25 bp, Homo sapien
ctgtcaggctgtaggtcctctcggg

SEQ ID NO: 889052 - DNA, 25 bp, Homo sapien
tgtaggtcctctcgggagccctctg

SEQ ID NO: 889053 - DNA, 25 bp, Homo sapien
ggctgtaggtcctctcgggagccct

SEQ ID NO: 889054 - DNA, 25 bp, Homo sapien
tcaggctgtaggtcctctcgggagc

SEQ ID NO: 889055 - DNA, 25 bp, Homo sapien
gctggcctaggcctcgggctgtctg

SEQ ID NO: 889056 - DNA, 25 bp, Homo sapien
cgcgactcagcgctgacctcgggcg

SEQ ID NO: 889057 - DNA, 25 bp, Homo sapien
tgacctcgggcgcaacccagtcagg

SEQ ID NO: 889058 - DNA, 25 bp, Homo sapien
taggcctcgggctgtctggcggccg

SEQ ID NO: 889059 - DNA, 25 bp, Homo sapien
ggcatcctggtttttatgtacgcca

SEQ ID NO: 889060 - DNA, 25 bp, Homo sapien
gacacattttctcaaccgcagatcc

SEQ ID NO: 889061 - DNA, 25 bp, Homo sapien
ttttatgtacgccactgagaggcca

SEQ ID NO: 889062 - DNA, 25 bp, Homo sapien
accagacacattttctcaaccgcag

SEQ ID NO: 889063 - DNA, 25 bp, Homo sapien
caaggatgtaaatcgaggccattcc

SEQ ID NO: 889064 - DNA, 25 bp, Homo sapien
ggcgggcagctaagagaaatcgacc

SEQ ID NO: 889065 - DNA, 25 bp, Homo sapien
tgctccttgcgtgtcagcctgagag

SEQ ID NO: 889066 - DNA, 25 bp, Homo sapien
gaaatcgacccaaggatgtaaatcg

SEQ ID NO: 889067 - DNA, 25 bp, Homo sapien
gagagctaaatatgcccgcatttac

SEQ ID NO: 889068 - DNA, 25 bp, Homo sapien
aaattggaaccttcgtaatagcatc

SEQ ID NO: 889069 - DNA, 25 bp, Homo sapien
gggttgtcgatgtgagagctaaata

SEQ ID NO: 889070 - DNA, 25 bp, Homo sapien
tttcagagacaatctgtttcgtgtt

SEQ ID NO: 889071 - DNA, 25 bp, Homo sapien
tatttcctaagcctggagacacttg

SEQ ID NO: 889072 - DNA, 25 bp, Homo sapien
ctcatatgagttactaaatgctgga

SEQ ID NO: 889073 - DNA, 25 bp, Homo sapien
tctcacaactgagtctggaacgcag

SEQ ID NO: 889074 - DNA, 25 bp, Homo sapien
ttttcagctggtgcaccttagttga

SEQ ID NO: 889075 - DNA, 25 bp, Homo sapien
tggcaccattaaatccaatcaacca

SEQ ID NO: 889076 - DNA, 25 bp, Homo sapien
accaaaatattgggatgatcttaaa

SEQ ID NO: 889077 - DNA, 25 bp, Homo sapien
aaaatattgggatgatcttaaacat

SEQ ID NO: 889078 - DNA, 25 bp, Homo sapien
ctggcaccattaaatccaatcaacc

SEQ ID NO: 889079 - DNA, 25 bp, Homo sapien
taccgtgatacacgcgtcactctga

SEQ ID NO: 889080 - DNA, 25 bp, Homo sapien
cataccgtgatacacgcgtcactct

SEQ ID NO: 889081 - DNA, 25 bp, Homo sapien
cgtgatacacgcgtcactctgagcc

SEQ ID NO: 889082 - DNA, 25 bp, Homo sapien
tgatacacgcgtcactctgagccat

SEQ ID NO: 889083 - DNA, 25 bp, Homo sapien
tgtaggtggcctctgcacaataagt

SEQ ID NO: 889084 - DNA, 25 bp, Homo sapien
tgcttcagactcacaagcggctgag

SEQ ID NO: 889085 - DNA, 25 bp, Homo sapien
ggcggaaatctcctactgacaaagg

SEQ ID NO: 889086 - DNA, 25 bp, Homo sapien
gctgagaacagtcccgccgaaataa

SEQ ID NO: 889087 - DNA, 25 bp, Homo sapien
aatcatctttttgcacgccggcggg

SEQ ID NO: 889088 - DNA, 25 bp, Homo sapien
taacatccgcggttgtgctgcaatt

SEQ ID NO: 889089 - DNA, 25 bp, Homo sapien
gaggcagcctgagttattgaaccag

SEQ ID NO: 889090 - DNA, 25 bp, Homo sapien
cgggagcagcggaagtcattaacat

SEQ ID NO: 889091 - DNA, 25 bp, Homo sapien
tttgaatggccaggcggcacacgta

SEQ ID NO: 889092 - DNA, 25 bp, Homo sapien
tttcagagagttttgagaacttgtg

SEQ ID NO: 889093 - DNA, 25 bp, Homo sapien
cttgtggtttggacacttctggacc

SEQ ID NO: 889094 - DNA, 25 bp, Homo sapien
taaaattgacagtttgaatggccag

SEQ ID NO: 889095 - DNA, 25 bp, Homo sapien
tagtactgacactacgcgggatccg

SEQ ID NO: 889096 - DNA, 25 bp, Homo sapien
gagctattgagacaggaacacttcc

SEQ ID NO: 889097 - DNA, 25 bp, Homo sapien
gaattagggcaacgagaacagggct

SEQ ID NO: 889098 - DNA, 25 bp, Homo sapien
ttccagagttcgtgcaaagggtcct

SEQ ID NO: 889099 - DNA, 25 bp, Homo sapien
gaggcaaagagcatgtgctatttca

SEQ ID NO: 889100 - DNA, 25 bp, Homo sapien
ggccatgctcatgcttttcagctta

SEQ ID NO: 889101 - DNA, 25 bp, Homo sapien
ttttaatttgtctctcggagaggca

SEQ ID NO: 889102 - DNA, 25 bp, Homo sapien
caatcctccttctgcgggtcaggta

SEQ ID NO: 889103 - DNA, 25 bp, Homo sapien
ctctctgcgccttgctcggctggcc

SEQ ID NO: 889104 - DNA, 25 bp, Homo sapien
ctgcgccttgctcggctggcctgac

SEQ ID NO: 889105 - DNA, 25 bp, Homo sapien
tctgcgccttgctcggctggcctga

SEQ ID NO: 889106 - DNA, 25 bp, Homo sapien
tctctgcgccttgctcggctggcct

SEQ ID NO: 889107 - DNA, 25 bp, Homo sapien
catgacttatgtgcagcttgcgcat

SEQ ID NO: 889108 - DNA, 25 bp, Homo sapien
cttatgtgcagcttgcgcatccagg

SEQ ID NO: 889109 - DNA, 25 bp, Homo sapien
gacttatgtgcagcttgcgcatcca

SEQ ID NO: 889110 - DNA, 25 bp, Homo sapien
tgacttatgtgcagcttgcgcatcc

SEQ ID NO: 889111 - DNA, 25 bp, Homo sapien
cgctggagttgcttagggagttttt

SEQ ID NO: 889112 - DNA, 25 bp, Homo sapien
aggcgccgctggagttgcttaggga

SEQ ID NO: 889113 - DNA, 25 bp, Homo sapien
ccgaggcgccgctggagttgcttag

SEQ ID NO: 889114 - DNA, 25 bp, Homo sapien
tcctcggctccggacgccgtgccaa

SEQ ID NO: 889115 - DNA, 25 bp, Homo sapien
cggagcagggcagcggatcgggctg

SEQ ID NO: 889116 - DNA, 25 bp, Homo sapien
cgggcgagggggccacggcggagca

SEQ ID NO: 889117 - DNA, 25 bp, Homo sapien
ggcggagcagggcagcggatcgggc

SEQ ID NO: 889118 - DNA, 25 bp, Homo sapien
agcagggcagcggatcgggctgagg

SEQ ID NO: 889119 - DNA, 25 bp, Homo sapien
gatccatgccattgtagccgtagcc

SEQ ID NO: 889120 - DNA, 25 bp, Homo sapien
ggccatttggatagcgaccgcaaaa

SEQ ID NO: 889121 - DNA, 25 bp, Homo sapien
gagtccctgaattgctcgctcacgg

SEQ ID NO: 889122 - DNA, 25 bp, Homo sapien
cgtagccgtacctgccggagtgcat

SEQ ID NO: 889123 - DNA, 25 bp, Homo sapien
tgactgggacatgtacttggttccc

SEQ ID NO: 889124 - DNA, 25 bp, Homo sapien
cgcggtcgtttgtgcgtctatagca

SEQ ID NO: 889125 - DNA, 25 bp, Homo sapien
tagcacccttgcacaatttatgatg

SEQ ID NO: 889126 - DNA, 25 bp, Homo sapien
tcctacgtaggcacccaaatatggg

SEQ ID NO: 889127 - DNA, 25 bp, Homo sapien
tttgttgtccagtcgtaaatcctgc

SEQ ID NO: 889128 - DNA, 25 bp, Homo sapien
tgtccagtcgtaaatcctgcctgat

SEQ ID NO: 889129 - DNA, 25 bp, Homo sapien
tccagtcgtaaatcctgcctgatga

SEQ ID NO: 889130 - DNA, 25 bp, Homo sapien
gttgtccagtcgtaaatcctgcctg

SEQ ID NO: 889131 - DNA, 25 bp, Homo sapien
ggactcgagcgccacccgctggagg

SEQ ID NO: 889132 - DNA, 25 bp, Homo sapien
cgccgccagttgccgccgttcagcc

SEQ ID NO: 889133 - DNA, 25 bp, Homo sapien
gagcgccacccgctggaggcagggc

SEQ ID NO: 889134 - DNA, 25 bp, Homo sapien
gccgttcagccggactcgagcgcca

SEQ ID NO: 889135 - DNA, 25 bp, Homo sapien
tggcaaaattattgcatttccctcg

SEQ ID NO: 889136 - DNA, 25 bp, Homo sapien
aattattgcatttccctcgcagttc

SEQ ID NO: 889137 - DNA, 25 bp, Homo sapien
ggttacagcccattatggcaaaatt

SEQ ID NO: 889138 - DNA, 25 bp, Homo sapien
ggtcgaattgaggttacagcccatt

SEQ ID NO: 889139 - DNA, 25 bp, Homo sapien
tccaaggcgaggtcaaattccatac

SEQ ID NO: 889140 - DNA, 25 bp, Homo sapien
gggaaagccatttagccaattggag

SEQ ID NO: 889141 - DNA, 25 bp, Homo sapien
gagaaataaatcctgcccgcagcag

SEQ ID NO: 889142 - DNA, 25 bp, Homo sapien
acaattacggctctgtttttgcgag

SEQ ID NO: 889143 - DNA, 25 bp, Homo sapien
tctgtagttattttccacggctccg

SEQ ID NO: 889144 - DNA, 25 bp, Homo sapien
ttcatcacagggtccggttcctcga

SEQ ID NO: 889145 - DNA, 25 bp, Homo sapien
tagctgagaggcaagtggagtctcc

SEQ ID NO: 889146 - DNA, 25 bp, Homo sapien
cacggctccgaaagactcaagtaaa

SEQ ID NO: 889147 - DNA, 25 bp, Homo sapien
ggctgtaatgttccacccgcgccca

SEQ ID NO: 889148 - DNA, 25 bp, Homo sapien
ttgcacacgcgggaccgagagactg

SEQ ID NO: 889149 - DNA, 25 bp, Homo sapien
gcttctcttccactgacggttgcac

SEQ ID NO: 889150 - DNA, 25 bp, Homo sapien
gcccaggttaactcgcctcggctga

SEQ ID NO: 889151 - DNA, 25 bp, Homo sapien
tttgggcatccttgtggagcgggac

SEQ ID NO: 889152 - DNA, 25 bp, Homo sapien
ggtgtgtgcagtgcgccccgctcca

SEQ ID NO: 889153 - DNA, 25 bp, Homo sapien
acaggagccccagacgcattcaggg

SEQ ID NO: 889154 - DNA, 25 bp, Homo sapien
agggacttaggcagagacgcccaga

SEQ ID NO: 889155 - DNA, 25 bp, Homo sapien
gcacagacgcttgcaaagctccggg

SEQ ID NO: 889156 - DNA, 25 bp, Homo sapien
caaagccgaaggaggttgcagcgct

SEQ ID NO: 889157 - DNA, 25 bp, Homo sapien
aggttgcagcgctggcctggtccct

SEQ ID NO: 889158 - DNA, 25 bp, Homo sapien
tccgggctcccctgaagctgcggaa

SEQ ID NO: 889159 - DNA, 25 bp, Homo sapien
tgggctgcgtggaattgatgagctt

SEQ ID NO: 889160 - DNA, 25 bp, Homo sapien
ggctgcgtggaattgatgagcttgt

SEQ ID NO: 889161 - DNA, 25 bp, Homo sapien
ctgcgtggaattgatgagcttgttt

SEQ ID NO: 889162 - DNA, 25 bp, Homo sapien
gctgcgtggaattgatgagcttgtt

SEQ ID NO: 889163 - DNA, 25 bp, Homo sapien
tcgtcatggagtgctttgccctgcc

SEQ ID NO: 889164 - DNA, 25 bp, Homo sapien
ggtttgtactgctgctcgggagaaa

SEQ ID NO: 889165 - DNA, 25 bp, Homo sapien
tgcatccaagggtaaaccgggctcg

SEQ ID NO: 889166 - DNA, 25 bp, Homo sapien
tatcagaatagaaacacgaggcccc

SEQ ID NO: 889167 - DNA, 25 bp, Homo sapien
cgggagactcgacgccccgtacgag

SEQ ID NO: 889168 - DNA, 25 bp, Homo sapien
gcgcgtcatagccagcctggtagag

SEQ ID NO: 889169 - DNA, 25 bp, Homo sapien
agtgggattcacaaaataggaactc

SEQ ID NO: 889170 - DNA, 25 bp, Homo sapien
ggtgtacgtcttgtccgggagactc

SEQ ID NO: 889171 - DNA, 25 bp, Homo sapien
gatttgttgtgtattagtacatctg

SEQ ID NO: 889172 - DNA, 25 bp, Homo sapien
atttgttgtgtattagtacatctgg

SEQ ID NO: 889173 - DNA, 25 bp, Homo sapien
ggcccaaggccgcgggataattgat

SEQ ID NO: 889174 - DNA, 25 bp, Homo sapien
acattccagaggcacagaagacgca

SEQ ID NO: 889175 - DNA, 25 bp, Homo sapien
ccactgcgagaaccgctcagagctg

SEQ ID NO: 889176 - DNA, 25 bp, Homo sapien
ataattgatgggctcggtttccggg

SEQ ID NO: 889177 - DNA, 25 bp, Homo sapien
gccaaagccacgcagaaagcgactt

SEQ ID NO: 889178 - DNA, 25 bp, Homo sapien
tattccggcaagaataggcacccca

SEQ ID NO: 889179 - DNA, 25 bp, Homo sapien
caaagggcctctcctgcgatggtga

SEQ ID NO: 889180 - DNA, 25 bp, Homo sapien
aacaaccgtttggagatgacaatca

SEQ ID NO: 889181 - DNA, 25 bp, Homo sapien
aggacggcgagctgggccccactgt

SEQ ID NO: 889182 - DNA, 25 bp, Homo sapien
ggctgcccattgaacagctccacct

SEQ ID NO: 889183 - DNA, 25 bp, Homo sapien
ctccaaggggggcaggacggcgagc

SEQ ID NO: 889184 - DNA, 25 bp, Homo sapien
caaggggggcaggacggcgagctgg

SEQ ID NO: 889185 - DNA, 25 bp, Homo sapien
tggtctgggagtatgtaggtgtggg

SEQ ID NO: 889186 - DNA, 25 bp, Homo sapien
agggtggtctgggagtatgtaggtg

SEQ ID NO: 889187 - DNA, 25 bp, Homo sapien
tgtaggtgtgggaccttgaaggcca

SEQ ID NO: 889188 - DNA, 25 bp, Homo sapien
gtctgggagtatgtaggtgtgggac

SEQ ID NO: 889189 - DNA, 25 bp, Homo sapien
caaagcacacaggtgcggcctctgc

SEQ ID NO: 889190 - DNA, 25 bp, Homo sapien
ccaaagcacacaggtgcggcctctg

SEQ ID NO: 889191 - DNA, 25 bp, Homo sapien
agcccaaagcacacaggtgcggcct

SEQ ID NO: 889192 - DNA, 25 bp, Homo sapien
cagagcccaaagcacacaggtgcgg

SEQ ID NO: 889193 - DNA, 25 bp, Homo sapien
acaggtagtctctccgattgcagaa

SEQ ID NO: 889194 - DNA, 25 bp, Homo sapien
catataggctctgggtgatcgcccc

SEQ ID NO: 889195 - DNA, 25 bp, Homo sapien
ccttgggacgcgcagtttggacaga

SEQ ID NO: 889196 - DNA, 25 bp, Homo sapien
acagaagcagccatgacgtgccagg

SEQ ID NO: 889197 - DNA, 25 bp, Homo sapien
acggccacggcgtggcagcagcgag

SEQ ID NO: 889198 - DNA, 25 bp, Homo sapien
gcaataaataatcggcccgcggcag

SEQ ID NO: 889199 - DNA, 25 bp, Homo sapien
agcagcgagcgccagcacggtcgca

SEQ ID NO: 889200 - DNA, 25 bp, Homo sapien
ggaaatctctgaggggccagtacag

SEQ ID NO: 889201 - DNA, 25 bp, Homo sapien
gagcgcacgcagagcacgggctaac

SEQ ID NO: 889202 - DNA, 25 bp, Homo sapien
ctaggatgcaaatgcgccgctttat

SEQ ID NO: 889203 - DNA, 25 bp, Homo sapien
gggctaacgtcctaaacatccacag

SEQ ID NO: 889204 - DNA, 25 bp, Homo sapien
gcagagcacgggctaacgtcctaaa

SEQ ID NO: 889205 - DNA, 25 bp, Homo sapien
tcccacggagtagaaagtgctgtgc

SEQ ID NO: 889206 - DNA, 25 bp, Homo sapien
caacgagcggagaactctggctgaa

SEQ ID NO: 889207 - DNA, 25 bp, Homo sapien
tctctcatcgaaaaaccgggcgaag

SEQ ID NO: 889208 - DNA, 25 bp, Homo sapien
gatgtgcacttaggccgagctacag

SEQ ID NO: 889209 - DNA, 25 bp, Homo sapien
gcggggaacacagtgtgccgggcca

SEQ ID NO: 889210 - DNA, 25 bp, Homo sapien
ggtcaaggatggtctcctcttgttg

SEQ ID NO: 889211 - DNA, 25 bp, Homo sapien
caggtcaaggatggtctcctcttgt

SEQ ID NO: 889212 - DNA, 25 bp, Homo sapien
cagtgtgccgggccacttccttttg

SEQ ID NO: 889213 - DNA, 25 bp, Homo sapien
tgtgccttggcgctgtgccacggag

SEQ ID NO: 889214 - DNA, 25 bp, Homo sapien
aaggaaggcgggcacttactgccaa

SEQ ID NO: 889215 - DNA, 25 bp, Homo sapien
tgtgtgacgtgtgtgggctgtagtg

SEQ ID NO: 889216 - DNA, 25 bp, Homo sapien
gggagtatgcccctcttaaagcctc

SEQ ID NO: 889217 - DNA, 25 bp, Homo sapien
gcagcccgagagaagaattgtcctc

SEQ ID NO: 889218 - DNA, 25 bp, Homo sapien
gcccgagagaagaattgtcctcttt

SEQ ID NO: 889219 - DNA, 25 bp, Homo sapien
cttcagacggtggctcccagaagct

SEQ ID NO: 889220 - DNA, 25 bp, Homo sapien
ctgtcgcttgggcagcccgagagaa

SEQ ID NO: 889221 - DNA, 25 bp, Homo sapien
tagccaggttgcgagttgcaaagct

SEQ ID NO: 889222 - DNA, 25 bp, Homo sapien
ggacgcaggaaattagccaggttgc

SEQ ID NO: 889223 - DNA, 25 bp, Homo sapien
tgccagaggacgcaggaaattagcc

SEQ ID NO: 889224 - DNA, 25 bp, Homo sapien
gaaattagccaggttgcgagttgca

SEQ ID NO: 889225 - DNA, 25 bp, Homo sapien
gccgggaacggagcgcgcccaatct

SEQ ID NO: 889226 - DNA, 25 bp, Homo sapien
gagcgcgcccaatctccagcgggag

SEQ ID NO: 889227 - DNA, 25 bp, Homo sapien
cttcgctcgccatctccggacaaag

SEQ ID NO: 889228 - DNA, 25 bp, Homo sapien
ggcttcccttcgctcgccatctccg

SEQ ID NO: 889229 - DNA, 25 bp, Homo sapien
agagctccgaagcaggcaggacgga

SEQ ID NO: 889230 - DNA, 25 bp, Homo sapien
cagagctccgaagcaggcaggacgg

SEQ ID NO: 889231 - DNA, 25 bp, Homo sapien
gcagagctccgaagcaggcaggacg

SEQ ID NO: 889232 - DNA, 25 bp, Homo sapien
ttataggaaacatcagggcgtacat

SEQ ID NO: 889233 - DNA, 25 bp, Homo sapien
tcggttacataaaacacagctgggc

SEQ ID NO: 889234 - DNA, 25 bp, Homo sapien
tcctttccaagtcaagacactgcct

SEQ ID NO: 889235 - DNA, 25 bp, Homo sapien
ttaactcaagacaacataccatgct

SEQ ID NO: 889236 - DNA, 25 bp, Homo sapien
gctcaggaacattcccctccagaag

SEQ ID NO: 889237 - DNA, 25 bp, Homo sapien
ccacagatctgcagccagctcagga

SEQ ID NO: 889238 - DNA, 25 bp, Homo sapien
aggaacattcccctccagaagtggg

SEQ ID NO: 889239 - DNA, 25 bp, Homo sapien
cagaagtgggggttgatgggcctga

SEQ ID NO: 889240 - DNA, 25 bp, Homo sapien
tagatgccaataccctgatcctgga

SEQ ID NO: 889241 - DNA, 25 bp, Homo sapien
tagtattttggacgcgccagagcag

SEQ ID NO: 889242 - DNA, 25 bp, Homo sapien
cagtcggcactaggtagcaggcaag

SEQ ID NO: 889243 - DNA, 25 bp, Homo sapien
gattcactttcttgcgggtctggga

SEQ ID NO: 889244 - DNA, 25 bp, Homo sapien
cctcctcgtcggccttgtccgcggc

SEQ ID NO: 889245 - DNA, 25 bp, Homo sapien
cgccctcgggagctgcggcggcagt

SEQ ID NO: 889246 - DNA, 25 bp, Homo sapien
tcgggagctgcggcggcagtcggac

SEQ ID NO: 889247 - DNA, 25 bp, Homo sapien
ggcgccctcgggagctgcggcggca

SEQ ID NO: 889248 - DNA, 25 bp, Homo sapien
ccctcgggagctgcggcggcagtcg

SEQ ID NO: 889249 - DNA, 25 bp, Homo sapien
tggcggccccgcttcctgtcaggtc

SEQ ID NO: 889250 - DNA, 25 bp, Homo sapien
gtaggtctggcggccccgcttcctg

SEQ ID NO: 889251 - DNA, 25 bp, Homo sapien
cgatttcaatgcggcggcgccgcgt

SEQ ID NO: 889252 - DNA, 25 bp, Homo sapien
gagcgcgtgggcgatttcaatgcgg

SEQ ID NO: 889253 - DNA, 25 bp, Homo sapien
tcgtccgtcttgtcgcaggcgcctt

SEQ ID NO: 889254 - DNA, 25 bp, Homo sapien
tagatgcggaaattggcctcagccg

SEQ ID NO: 889255 - DNA, 25 bp, Homo sapien
tttggcgaggtcactgcagagcccg

SEQ ID NO: 889256 - DNA, 25 bp, Homo sapien
ttgacattgtataagcccggaacgg

SEQ ID NO: 889257 - DNA, 25 bp, Homo sapien
cggcattttggaacagagaagcccc

SEQ ID NO: 889258 - DNA, 25 bp, Homo sapien
ctgtgagttgggagcaaaggagcaa

SEQ ID NO: 889259 - DNA, 25 bp, Homo sapien
caaaggagcaagaagtcggctcggc

SEQ ID NO: 889260 - DNA, 25 bp, Homo sapien
caagaagtcggctcggcattttgga

SEQ ID NO: 889261 - DNA, 25 bp, Homo sapien
gcgcgttcacataatacgaagaact

SEQ ID NO: 889262 - DNA, 25 bp, Homo sapien
cgttcacataatacgaagaactcat

SEQ ID NO: 889263 - DNA, 25 bp, Homo sapien
ctaaaaagcgcgttcacataatacg

SEQ ID NO: 889264 - DNA, 25 bp, Homo sapien
aaaagcgcgttcacataatacgaag

SEQ ID NO: 889265 - DNA, 25 bp, Homo sapien
gccaatctcagcagtcctcacaggt

SEQ ID NO: 889266 - DNA, 25 bp, Homo sapien
cattttcttttggacggagctcgcc

SEQ ID NO: 889267 - DNA, 25 bp, Homo sapien
tgtgatttgttgtccggcagctttc

SEQ ID NO: 889268 - DNA, 25 bp, Homo sapien
cctagaatggaagggcaagaggctc

SEQ ID NO: 889269 - DNA, 25 bp, Homo sapien
tcgaataaagtcaacgtctcccagc

SEQ ID NO: 889270 - DNA, 25 bp, Homo sapien
gagagattgccaccgcaaactggag

SEQ ID NO: 889271 - DNA, 25 bp, Homo sapien
ggaaggcgcagcatctcttgcagct

SEQ ID NO: 889272 - DNA, 25 bp, Homo sapien
cgacaggccggacttagactcggat

SEQ ID NO: 889273 - DNA, 25 bp, Homo sapien
tggctccagcagtccgataaattgc

SEQ ID NO: 889274 - DNA, 25 bp, Homo sapien
ttggaaaaatctcgggcctgcaccc

SEQ ID NO: 889275 - DNA, 25 bp, Homo sapien
ttctggttcccctctggcgcatggg

SEQ ID NO: 889276 - DNA, 25 bp, Homo sapien
ttgctaaagattcctttgtcctttc

SEQ ID NO: 889277 - DNA, 25 bp, Homo sapien
ggctctggcgtctagggactgcaac

SEQ ID NO: 889278 - DNA, 25 bp, Homo sapien
ggtgcctgggaacaatacatgcttt

SEQ ID NO: 889279 - DNA, 25 bp, Homo sapien
tggcgtctagggactgcaacccact

SEQ ID NO: 889280 - DNA, 25 bp, Homo sapien
acatgctttagagcggatttggaga

SEQ ID NO: 889281 - DNA, 25 bp, Homo sapien
cccgatgcgcgtccaggaggttctg

SEQ ID NO: 889282 - DNA, 25 bp, Homo sapien
tccaggaggttctggcaggacgcac

SEQ ID NO: 889283 - DNA, 25 bp, Homo sapien
gttttgcccgatgcgcgtccaggag

SEQ ID NO: 889284 - DNA, 25 bp, Homo sapien
ccggttttgcccgatgcgcgtccag

SEQ ID NO: 889285 - DNA, 25 bp, Homo sapien
gggccgagtcctgcggacaccgaaa

SEQ ID NO: 889286 - DNA, 25 bp, Homo sapien
cccggccaaggaggatgcggatact

SEQ ID NO: 889287 - DNA, 25 bp, Homo sapien
caaggcttcggcctttatggaccca

SEQ ID NO: 889288 - DNA, 25 bp, Homo sapien
ttatggacccaagtcagccaactgg

SEQ ID NO: 889289 - DNA, 25 bp, Homo sapien
ctgaggcctccgtgatcagtggaga

SEQ ID NO: 889290 - DNA, 25 bp, Homo sapien
gtcgccaccgatctgtgacttcatt

SEQ ID NO: 889291 - DNA, 25 bp, Homo sapien
gtggagagacgcagtcgccaccgat

SEQ ID NO: 889292 - DNA, 25 bp, Homo sapien
agacgcagtcgccaccgatctgtga

SEQ ID NO: 889293 - DNA, 25 bp, Homo sapien
acattttgtgggcttggcggagact

SEQ ID NO: 889294 - DNA, 25 bp, Homo sapien
ggaaccattcgacatccgtggctga

SEQ ID NO: 889295 - DNA, 25 bp, Homo sapien
aagcactgggatgcgggtcgtaaac

SEQ ID NO: 889296 - DNA, 25 bp, Homo sapien
cagtccccagttttacagcgtgaaa

SEQ ID NO: 889297 - DNA, 25 bp, Homo sapien
acagcggagggcatgccgcggccag

SEQ ID NO: 889298 - DNA, 25 bp, Homo sapien
ctgatgggtgaacgccagagcagcc

SEQ ID NO: 889299 - DNA, 25 bp, Homo sapien
agagacagcccgggcggcttccaca

SEQ ID NO: 889300 - DNA, 25 bp, Homo sapien
cctgtacagcggagggcatgccgcg

SEQ ID NO: 889301 - DNA, 25 bp, Homo sapien
cacaccctctgggcggtcatcaagt

SEQ ID NO: 889302 - DNA, 25 bp, Homo sapien
tgtgtccgccagtcagccggggctc

SEQ ID NO: 889303 - DNA, 25 bp, Homo sapien
cctgtgtccgccagtcagccggggc

SEQ ID NO: 889304 - DNA, 25 bp, Homo sapien
caccctctgggcggtcatcaagttc

SEQ ID NO: 889305 - DNA, 25 bp, Homo sapien
tttgggagagcttagctcggcggac

SEQ ID NO: 889306 - DNA, 25 bp, Homo sapien
cttctccgccgtcccgcacatagac

SEQ ID NO: 889307 - DNA, 25 bp, Homo sapien
tcggcggactggttgtggcaggtcc

SEQ ID NO: 889308 - DNA, 25 bp, Homo sapien
ccgcacatagacacaaggccgggag

SEQ ID NO: 889309 - DNA, 25 bp, Homo sapien
tggaaaccccagattcatcaaggat

SEQ ID NO: 889310 - DNA, 25 bp, Homo sapien
caaaatatacagtgtaagttcagtc

SEQ ID NO: 889311 - DNA, 25 bp, Homo sapien
caacaatttggtcagtaggccttga

SEQ ID NO: 889312 - DNA, 25 bp, Homo sapien
taggccttgaggtaactattgcaaa

SEQ ID NO: 889313 - DNA, 25 bp, Homo sapien
tgtatagctccgaatttcctcactg

SEQ ID NO: 889314 - DNA, 25 bp, Homo sapien
ttaactccgttacaatcagcattca

SEQ ID NO: 889315 - DNA, 25 bp, Homo sapien
cactgttcgtctggtgcaaaaacaa

SEQ ID NO: 889316 - DNA, 25 bp, Homo sapien
tggcggtttcatagtgtataattta

SEQ ID NO: 889317 - DNA, 25 bp, Homo sapien
tagacaagacaggactatatagata

SEQ ID NO: 889318 - DNA, 25 bp, Homo sapien
acaatagacaagacaggactatata

SEQ ID NO: 889319 - DNA, 25 bp, Homo sapien
aatagacaagacaggactatataga

SEQ ID NO: 889320 - DNA, 25 bp, Homo sapien
agacaagacaggactatatagataa

SEQ ID NO: 889321 - DNA, 25 bp, Homo sapien
ggacagacttaaatgcccgcatttt

SEQ ID NO: 889322 - DNA, 25 bp, Homo sapien
acagacttaaatgcccgcattttta

SEQ ID NO: 889323 - DNA, 25 bp, Homo sapien
cagacttaaatgcccgcatttttaa

SEQ ID NO: 889324 - DNA, 25 bp, Homo sapien
gacagacttaaatgcccgcattttt

SEQ ID NO: 889325 - DNA, 25 bp, Homo sapien
gcatcacccagtacacagaagtttg

SEQ ID NO: 889326 - DNA, 25 bp, Homo sapien
gaagacatattccactacagagcta

SEQ ID NO: 889327 - DNA, 25 bp, Homo sapien
tacagcctaccatcaacagttgtgc

SEQ ID NO: 889328 - DNA, 25 bp, Homo sapien
cacaatcacaatgggtgcatcaccc

SEQ ID NO: 889329 - DNA, 25 bp, Homo sapien
tgtggcctgaggtttagagccgctt

SEQ ID NO: 889330 - DNA, 25 bp, Homo sapien
ttggaaaagatgtggcctgaggttt

SEQ ID NO: 889331 - DNA, 25 bp, Homo sapien
aagatgtggcctgaggtttagagcc

SEQ ID NO: 889332 - DNA, 25 bp, Homo sapien
cctgaggtttagagccgctttgtgc

SEQ ID NO: 889333 - DNA, 25 bp, Homo sapien
gtgagagaagggagaaggcggaagg

SEQ ID NO: 889334 - DNA, 25 bp, Homo sapien
tttttctaaataagcccaaatggca

SEQ ID NO: 889335 - DNA, 25 bp, Homo sapien
tagggtgggggtgagagaagggaga

SEQ ID NO: 889336 - DNA, 25 bp, Homo sapien
tctctctagcttacccttttttcta

SEQ ID NO: 889337 - DNA, 25 bp, Homo sapien
cttttgctcggtctttgttgatttt

SEQ ID NO: 889338 - DNA, 25 bp, Homo sapien
gtcttttgctcggtctttgttgatt

SEQ ID NO: 889339 - DNA, 25 bp, Homo sapien
tcttttgctcggtctttgttgattt

SEQ ID NO: 889340 - DNA, 25 bp, Homo sapien
tcgtcttttgctcggtctttgttga

SEQ ID NO: 889341 - DNA, 25 bp, Homo sapien
gggcaccgctttttccgagtggagc

SEQ ID NO: 889342 - DNA, 25 bp, Homo sapien
ctcgtacctgcggtccctggtgagg

SEQ ID NO: 889343 - DNA, 25 bp, Homo sapien
agcgcgcatgaagccagttggctgc

SEQ ID NO: 889344 - DNA, 25 bp, Homo sapien
gtgaggttgagcagtcgagccacct

SEQ ID NO: 889345 - DNA, 25 bp, Homo sapien
aagagaaacactgggtttaggagca

SEQ ID NO: 889346 - DNA, 25 bp, Homo sapien
cccgctggggcaaatgagcctcctg

SEQ ID NO: 889347 - DNA, 25 bp, Homo sapien
tcccgctggggcaaatgagcctcct

SEQ ID NO: 889348 - DNA, 25 bp, Homo sapien
atcccgctggggcaaatgagcctcc

SEQ ID NO: 889349 - DNA, 25 bp, Homo sapien
ctggttaggaaaggcagtcaggcct

SEQ ID NO: 889350 - DNA, 25 bp, Homo sapien
gcagtcaggcctcggacacaatgga

SEQ ID NO: 889351 - DNA, 25 bp, Homo sapien
taggaaaggcagtcaggcctcggac

SEQ ID NO: 889352 - DNA, 25 bp, Homo sapien
gtcaggcctcggacacaatggaacc

SEQ ID NO: 889353 - DNA, 25 bp, Homo sapien
gccttcggagctgggcaagccgtca

SEQ ID NO: 889354 - DNA, 25 bp, Homo sapien
gtcagggcgccctaaggccgctgat

SEQ ID NO: 889355 - DNA, 25 bp, Homo sapien
tgttctgtagcaagattaggattcc

SEQ ID NO: 889356 - DNA, 25 bp, Homo sapien
aggattcctctgtcccgttcactga

SEQ ID NO: 889357 - DNA, 25 bp, Homo sapien
ccactggccgaaggcaagaagtgga

SEQ ID NO: 889358 - DNA, 25 bp, Homo sapien
gaagtggaaggaatcggccgtctcc

SEQ ID NO: 889359 - DNA, 25 bp, Homo sapien
gccgccactggccgaaggcaagaag

SEQ ID NO: 889360 - DNA, 25 bp, Homo sapien
agaagtggaaggaatcggccgtctc

SEQ ID NO: 889361 - DNA, 25 bp, Homo sapien
gtcttggctcgtcccgaagtgcccg

SEQ ID NO: 889362 - DNA, 25 bp, Homo sapien
gcactgctttcgaagaacggcccaa

SEQ ID NO: 889363 - DNA, 25 bp, Homo sapien
caatctagttgtacaaaaggctctc

SEQ ID NO: 889364 - DNA, 25 bp, Homo sapien
cccaaagtatctcggtcctgggcct

SEQ ID NO: 889365 - DNA, 25 bp, Homo sapien
ctgaggcgtcccaaacaccaacttc

SEQ ID NO: 889366 - DNA, 25 bp, Homo sapien
ggcggcggcggatttgaagggagga

SEQ ID NO: 889367 - DNA, 25 bp, Homo sapien
aaggcaggctcgagagaaacctggc

SEQ ID NO: 889368 - DNA, 25 bp, Homo sapien
ggatttgaagggaggagacacttac

SEQ ID NO: 889369 - DNA, 25 bp, Homo sapien
ccagcgaggacgaaggcaggctcga

SEQ ID NO: 889370 - DNA, 25 bp, Homo sapien
ttgtctccgccgctctcattctcag

SEQ ID NO: 889371 - DNA, 25 bp, Homo sapien
tgggatcgatggggggcttgtctcc

SEQ ID NO: 889372 - DNA, 25 bp, Homo sapien
tctccgccgctctcattctcagcat

SEQ ID NO: 889373 - DNA, 25 bp, Homo sapien
cgatggggggcttgtctccgccgct

SEQ ID NO: 889374 - DNA, 25 bp, Homo sapien
gaaccacaagcatagtcagtcaggg

SEQ ID NO: 889375 - DNA, 25 bp, Homo sapien
agtgtcaagcgtgggacagtcaccc

SEQ ID NO: 889376 - DNA, 25 bp, Homo sapien
tttaatgccataaggccggctggag

SEQ ID NO: 889377 - DNA, 25 bp, Homo sapien
ggccgacagcggttcaggtttaatg

SEQ ID NO: 889378 - DNA, 25 bp, Homo sapien
gaggcgccaaacaccgtcgccttgg

SEQ ID NO: 889379 - DNA, 25 bp, Homo sapien
gtgcactgggttccacgaggcgcca

SEQ ID NO: 889380 - DNA, 25 bp, Homo sapien
tcgccttggactggaagctgcacgg

SEQ ID NO: 889381 - DNA, 25 bp, Homo sapien
ccagcaggaacgagtccacgtagta

SEQ ID NO: 889382 - DNA, 25 bp, Homo sapien
cccagcgcctggcccgcccggcccg

SEQ ID NO: 889383 - DNA, 25 bp, Homo sapien
ccagcgcctggcccgcccggcccga

SEQ ID NO: 889384 - DNA, 25 bp, Homo sapien
cagcgcctggcccgcccggcccgac

SEQ ID NO: 889385 - DNA, 25 bp, Homo sapien
tgcccagcgcctggcccgcccggcc

SEQ ID NO: 889386 - DNA, 25 bp, Homo sapien
taaattcgcctttgctacgaggacc

SEQ ID NO: 889387 - DNA, 25 bp, Homo sapien
tacagtcacctaataagttgccggc

SEQ ID NO: 889388 - DNA, 25 bp, Homo sapien
catgtaacaacttggtggcaccggg

SEQ ID NO: 889389 - DNA, 25 bp, Homo sapien
aacagattcgtttgcctcgccgtgg

SEQ ID NO: 889390 - DNA, 25 bp, Homo sapien
gttgcgctccgtgaatcccagctgg

SEQ ID NO: 889391 - DNA, 25 bp, Homo sapien
ggaaaaggcagcctcgcctaagaga

SEQ ID NO: 889392 - DNA, 25 bp, Homo sapien
aaaaggcagcctcgcctaagagacc

SEQ ID NO: 889393 - DNA, 25 bp, Homo sapien
ctgcaagcctggttgcgctccgtga

SEQ ID NO: 889394 - DNA, 25 bp, Homo sapien
taagagcttcccagcgaatggccag

SEQ ID NO: 889395 - DNA, 25 bp, Homo sapien
aacatactggctcttggaagggtcc

SEQ ID NO: 889396 - DNA, 25 bp, Homo sapien
taatggaagccactagtaagcaagc

SEQ ID NO: 889397 - DNA, 25 bp, Homo sapien
gatatgggcacacaaagctgcagcg

SEQ ID NO: 889398 - DNA, 25 bp, Homo sapien
tccagccttacaagagaatggcagg

SEQ ID NO: 889399 - DNA, 25 bp, Homo sapien
gcccctgaccttgaatggcccaaag

SEQ ID NO: 889400 - DNA, 25 bp, Homo sapien
gaaggagcagccaacctaaccctac

SEQ ID NO: 889401 - DNA, 25 bp, Homo sapien
caggaggtccctgggcaggcgcagg

SEQ ID NO: 889402 - DNA, 25 bp, Homo sapien
cctggcacgaccagggccgtgatgc

SEQ ID NO: 889403 - DNA, 25 bp, Homo sapien
aaagccggccggctggcaaagcgct

SEQ ID NO: 889404 - DNA, 25 bp, Homo sapien
ctggcaaagcgctgcggagaaagac

SEQ ID NO: 889405 - DNA, 25 bp, Homo sapien
agaaagacacgaggctcctgagcag

SEQ ID NO: 889406 - DNA, 25 bp, Homo sapien
caggcggccgcaaatgcgtcaagga

SEQ ID NO: 889407 - DNA, 25 bp, Homo sapien
gccacaggccccagtaaggtattcc

SEQ ID NO: 889408 - DNA, 25 bp, Homo sapien
acgagagcagctccgagaagcagtg

SEQ ID NO: 889409 - DNA, 25 bp, Homo sapien
agccgtggaaggctcgaaagcgcca

SEQ ID NO: 889410 - DNA, 25 bp, Homo sapien
caccagggctatagggcccagacaa

SEQ ID NO: 889411 - DNA, 25 bp, Homo sapien
cttacggcaccagggctatagggcc

SEQ ID NO: 889412 - DNA, 25 bp, Homo sapien
cccagacaaattacgaccgtctagg

SEQ ID NO: 889413 - DNA, 25 bp, Homo sapien
tatagggcccagacaaattacgacc

SEQ ID NO: 889414 - DNA, 25 bp, Homo sapien
gggccatttcgagcagtgggacccc

SEQ ID NO: 889415 - DNA, 25 bp, Homo sapien
gcacagatgtaacggcccaggagat

SEQ ID NO: 889416 - DNA, 25 bp, Homo sapien
ttaaatcagccaaagtcaagcccgt

SEQ ID NO: 889417 - DNA, 25 bp, Homo sapien
tgaaaaaaccgcgtcgcctggagat

SEQ ID NO: 889418 - DNA, 25 bp, Homo sapien
tggacgctgcggctaatctctaggc

SEQ ID NO: 889419 - DNA, 25 bp, Homo sapien
taggcgccgctctcgagtaaggtac

SEQ ID NO: 889420 - DNA, 25 bp, Homo sapien
agttggctgcgttttcacctttgga

SEQ ID NO: 889421 - DNA, 25 bp, Homo sapien
cactctttgccgtgagccagttggc

SEQ ID NO: 889422 - DNA, 25 bp, Homo sapien
aagaggggatgattaagtcgaggcc

SEQ ID NO: 889423 - DNA, 25 bp, Homo sapien
gggatgattaagtcgaggccacacg

SEQ ID NO: 889424 - DNA, 25 bp, Homo sapien
ggggatgattaagtcgaggccacac

SEQ ID NO: 889425 - DNA, 25 bp, Homo sapien
gaggggatgattaagtcgaggccac

SEQ ID NO: 889426 - DNA, 25 bp, Homo sapien
gagaaagaagggcatcattggtcca

SEQ ID NO: 889427 - DNA, 25 bp, Homo sapien
ccaagactcgataaggggagaaaga

SEQ ID NO: 889428 - DNA, 25 bp, Homo sapien
agaagggcatcattggtccaatggg

SEQ ID NO: 889429 - DNA, 25 bp, Homo sapien
gattgcccaagactcgataagggga

SEQ ID NO: 889430 - DNA, 25 bp, Homo sapien
gcatgggggatcgtaaactcgaact

SEQ ID NO: 889431 - DNA, 25 bp, Homo sapien
ggcttatttattggcgctggcggct

SEQ ID NO: 889432 - DNA, 25 bp, Homo sapien
ttcttcttcccgcaacgaagattcc

SEQ ID NO: 889433 - DNA, 25 bp, Homo sapien
ctcgaacttcgccggttaatgggct

SEQ ID NO: 889434 - DNA, 25 bp, Homo sapien
tgcagccctctgcagccctgcttac

SEQ ID NO: 889435 - DNA, 25 bp, Homo sapien
gcggcgaatcgagggctcgctcctt

SEQ ID NO: 889436 - DNA, 25 bp, Homo sapien
gaggacgacgcgtgcgcctcctcgt

SEQ ID NO: 889437 - DNA, 25 bp, Homo sapien
tagcgcgggcgggagatcgaaaccg

SEQ ID NO: 889438 - DNA, 25 bp, Homo sapien
agggaatccttctccggcgaggctt

SEQ ID NO: 889439 - DNA, 25 bp, Homo sapien
tagaggcagtaggagctctcttctt

SEQ ID NO: 889440 - DNA, 25 bp, Homo sapien
gccatagcccttggcggtgccgtag

SEQ ID NO: 889441 - DNA, 25 bp, Homo sapien
agaaaggcggaagtagccaggcact

SEQ ID NO: 889442 - DNA, 25 bp, Homo sapien
catttgtccgccgagtcgtagaggc

SEQ ID NO: 889443 - DNA, 25 bp, Homo sapien
ctgcggcgctggctggggtggttgc

SEQ ID NO: 889444 - DNA, 25 bp, Homo sapien
gcggcggcccgtcaggcggctccat

SEQ ID NO: 889445 - DNA, 25 bp, Homo sapien
cggcggcggcccgtcaggcggctcc

SEQ ID NO: 889446 - DNA, 25 bp, Homo sapien
cgctggctggggtggttgcggcggg

SEQ ID NO: 889447 - DNA, 25 bp, Homo sapien
ccacaggtctatgggcgagggcccg

SEQ ID NO: 889448 - DNA, 25 bp, Homo sapien
caggtctatgggcgagggcccgtag

SEQ ID NO: 889449 - DNA, 25 bp, Homo sapien
gtctatgggcgagggcccgtagccg

SEQ ID NO: 889450 - DNA, 25 bp, Homo sapien
tagccgtgcgccccgggacctagac

SEQ ID NO: 889451 - DNA, 25 bp, Homo sapien
ccaccgctgcccggcgacgctgcct

SEQ ID NO: 889452 - DNA, 25 bp, Homo sapien
accgctgcccggcgacgctgcctca

SEQ ID NO: 889453 - DNA, 25 bp, Homo sapien
ccgccaccgctgcccggcgacgctg

SEQ ID NO: 889454 - DNA, 25 bp, Homo sapien
ccgctgcccggcgacgctgcctcat

SEQ ID NO: 889455 - DNA, 25 bp, Homo sapien
cgggcggcaggtagaccccgccgtg

SEQ ID NO: 889456 - DNA, 25 bp, Homo sapien
cgagtcgaccaaaaaagagttcgcg

SEQ ID NO: 889457 - DNA, 25 bp, Homo sapien
tctgcccgagctgatgagcgagtcg

SEQ ID NO: 889458 - DNA, 25 bp, Homo sapien
tctgcagcccgtagggcaggtcggc

SEQ ID NO: 889459 - DNA, 25 bp, Homo sapien
gataatttggcgaagggagcagata

SEQ ID NO: 889460 - DNA, 25 bp, Homo sapien
agggagcagatagccctttctggct

SEQ ID NO: 889461 - DNA, 25 bp, Homo sapien
gggagcagatagccctttctggctg

SEQ ID NO: 889462 - DNA, 25 bp, Homo sapien
ataatttggcgaagggagcagatag

SEQ ID NO: 889463 - DNA, 25 bp, Homo sapien
tgcctcctcaaaagtggcgaacctg

SEQ ID NO: 889464 - DNA, 25 bp, Homo sapien
attctgcctcctcaaaagtggcgaa

SEQ ID NO: 889465 - DNA, 25 bp, Homo sapien
ctcctcaaaagtggcgaacctggcc

SEQ ID NO: 889466 - DNA, 25 bp, Homo sapien
tctgcctcctcaaaagtggcgaacc

SEQ ID NO: 889467 - DNA, 25 bp, Homo sapien
tccgttgatccagttaggatcttct

SEQ ID NO: 889468 - DNA, 25 bp, Homo sapien
cctagtccgttgatccagttaggat

SEQ ID NO: 889469 - DNA, 25 bp, Homo sapien
tttctcccctagtccgttgatccag

SEQ ID NO: 889470 - DNA, 25 bp, Homo sapien
tcccctagtccgttgatccagttag

SEQ ID NO: 889471 - DNA, 25 bp, Homo sapien
cagccttgatggaaagacggcccca

SEQ ID NO: 889472 - DNA, 25 bp, Homo sapien
tcctgtcagtggactttggtgggct

SEQ ID NO: 889473 - DNA, 25 bp, Homo sapien
tctctacaactcctgtcagtggact

SEQ ID NO: 889474 - DNA, 25 bp, Homo sapien
ggtgggaagcggctgccagccttga

SEQ ID NO: 889475 - DNA, 25 bp, Homo sapien
ccaggccttatgcagcggttacaca

SEQ ID NO: 889476 - DNA, 25 bp, Homo sapien
taggctgcagttcactaggtactcc

SEQ ID NO: 889477 - DNA, 25 bp, Homo sapien
aacaatttatatctggagggcactc

SEQ ID NO: 889478 - DNA, 25 bp, Homo sapien
taccaggtcctgagatcgaaactgc

SEQ ID NO: 889479 - DNA, 25 bp, Homo sapien
caaaggttttctccaagctgccggg

SEQ ID NO: 889480 - DNA, 25 bp, Homo sapien
gtttgatgacaaccccaatggagtg

SEQ ID NO: 889481 - DNA, 25 bp, Homo sapien
gattcgccttgagtgaaatgctggc

SEQ ID NO: 889482 - DNA, 25 bp, Homo sapien
gactgaaattgctaaacttgtggcc

SEQ ID NO: 889483 - DNA, 25 bp, Homo sapien
tccgaaatcactgccaagggacagc

SEQ ID NO: 889484 - DNA, 25 bp, Homo sapien
gctttaaattaccataccaatcact

SEQ ID NO: 889485 - DNA, 25 bp, Homo sapien
cgctcgcgaggcctagcgaatgcgc

SEQ ID NO: 889486 - DNA, 25 bp, Homo sapien
cacttcttgagggtgagtccccttt

SEQ ID NO: 889487 - DNA, 25 bp, Homo sapien
tccccggcggctttgacattgatcg

SEQ ID NO: 889488 - DNA, 25 bp, Homo sapien
cacattgtcacagccatcggaggat

SEQ ID NO: 889489 - DNA, 25 bp, Homo sapien
ttagtatcagaagcgaacaaaggcc

SEQ ID NO: 889490 - DNA, 25 bp, Homo sapien
cattgatcggaagtgcgccatctcg

SEQ ID NO: 889491 - DNA, 25 bp, Homo sapien
cccagttgcctgtataagtgctgca

SEQ ID NO: 889492 - DNA, 25 bp, Homo sapien
cagaattgaggacaggccaacactc

SEQ ID NO: 889493 - DNA, 25 bp, Homo sapien
cacacacggtgggtaagaaccagaa

SEQ ID NO: 889494 - DNA, 25 bp, Homo sapien
aacactcccagtacaaatggagcca

SEQ ID NO: 889495 - DNA, 25 bp, Homo sapien
cactctcaggctcttggaaggtcac

SEQ ID NO: 889496 - DNA, 25 bp, Homo sapien
tgagcgagtttaaccacggaacact

SEQ ID NO: 889497 - DNA, 25 bp, Homo sapien
caaggccctcatagccaaagctggg

SEQ ID NO: 889498 - DNA, 25 bp, Homo sapien
caaatattcttagcagtgagcgagt

SEQ ID NO: 889499 - DNA, 25 bp, Homo sapien
ctgagtagtactgtaaacggtctct

SEQ ID NO: 889500 - DNA, 25 bp, Homo sapien
catgcgggacagttgcaggcgcttc

SEQ ID NO: 889501 - DNA, 25 bp, Homo sapien
tgaagaagaactcccgttccagctc

SEQ ID NO: 889502 - DNA, 25 bp, Homo sapien
ctctttgttaatgtagacgctgaag

SEQ ID NO: 889503 - DNA, 25 bp, Homo sapien
ggtgtgggggctgcaatccacccca

SEQ ID NO: 889504 - DNA, 25 bp, Homo sapien
gtgtgggggctgcaatccaccccag

SEQ ID NO: 889505 - DNA, 25 bp, Homo sapien
tgtgggggctgcaatccaccccaga

SEQ ID NO: 889506 - DNA, 25 bp, Homo sapien
gagctggccccgagcggggtcgagc

SEQ ID NO: 889507 - DNA, 25 bp, Homo sapien
tggccccgagcggggtcgagctgct

SEQ ID NO: 889508 - DNA, 25 bp, Homo sapien
agctggccccgagcggggtcgagct

SEQ ID NO: 889509 - DNA, 25 bp, Homo sapien
ctggccccgagcggggtcgagctgc

SEQ ID NO: 889510 - DNA, 25 bp, Homo sapien
tccgaacttgaagttgccggcgcgc

SEQ ID NO: 889511 - DNA, 25 bp, Homo sapien
gaaaaactggtcgaaagcctgtggc

SEQ ID NO: 889512 - DNA, 25 bp, Homo sapien
tgccgtaggctgtctcgaaaaactg

SEQ ID NO: 889513 - DNA, 25 bp, Homo sapien
ggccttgtcctcagtgtggccggaa

SEQ ID NO: 889514 - DNA, 25 bp, Homo sapien
tagacgttggccgagctcttggcca

SEQ ID NO: 889515 - DNA, 25 bp, Homo sapien
caatggcgtactctctgaaggtcac

SEQ ID NO: 889516 - DNA, 25 bp, Homo sapien
tatagaaattggacgagactgcggg

SEQ ID NO: 889517 - DNA, 25 bp, Homo sapien
tgaaggtcacttcgcgcacgggttg

SEQ ID NO: 889518 - DNA, 25 bp, Homo sapien
taggagtatgtcattgggcgcgaag

SEQ ID NO: 889519 - DNA, 25 bp, Homo sapien
gaggagtaggagtatgtcattgggc

SEQ ID NO: 889520 - DNA, 25 bp, Homo sapien
gttggaggagtaggagtatgtcatt

SEQ ID NO: 889521 - DNA, 25 bp, Homo sapien
gagtatgtcattgggcgcgaagacg

SEQ ID NO: 889522 - DNA, 25 bp, Homo sapien
aggctggagaaatctggacccgaga

SEQ ID NO: 889523 - DNA, 25 bp, Homo sapien
tggacccgagacgtagtaagtacaa

SEQ ID NO: 889524 - DNA, 25 bp, Homo sapien
gagaaatctggacccgagacgtagt

SEQ ID NO: 889525 - DNA, 25 bp, Homo sapien
aaatctggacccgagacgtagtaag

SEQ ID NO: 889526 - DNA, 25 bp, Homo sapien
tgcctctttgaagcggatccgtgaa

SEQ ID NO: 889527 - DNA, 25 bp, Homo sapien
agaaatttggagacgtaagctgacg

SEQ ID NO: 889528 - DNA, 25 bp, Homo sapien
ttgggctctccgcagtagccgagct

SEQ ID NO: 889529 - DNA, 25 bp, Homo sapien
tagccgagcttaacatgattctcca

SEQ ID NO: 889530 - DNA, 25 bp, Homo sapien
tattgctgagctgactgtaactgac

SEQ ID NO: 889531 - DNA, 25 bp, Homo sapien
gtaactgactcaataacaaatctaa

SEQ ID NO: 889532 - DNA, 25 bp, Homo sapien
gctgactgtaactgactcaataaca

SEQ ID NO: 889533 - DNA, 25 bp, Homo sapien
tttatttattgctgagctgactgta

SEQ ID NO: 889534 - DNA, 25 bp, Homo sapien
tgccctgcagcgaaaaaacttctat

SEQ ID NO: 889535 - DNA, 25 bp, Homo sapien
gaaggttattggagaagagtagcct

SEQ ID NO: 889536 - DNA, 25 bp, Homo sapien
taatgaactctttattcaagatttg

SEQ ID NO: 889537 - DNA, 25 bp, Homo sapien
ttggagaagagtagcctcagacctc

SEQ ID NO: 889538 - DNA, 25 bp, Homo sapien
catgaagggtttcagtgactttgcc

SEQ ID NO: 889539 - DNA, 25 bp, Homo sapien
caaattcttgcacttgtattagggc

SEQ ID NO: 889540 - DNA, 25 bp, Homo sapien
tgccataacaaaggcgccaccattg

SEQ ID NO: 889541 - DNA, 25 bp, Homo sapien
cgcccctgggtgaaggcaaacaaat

SEQ ID NO: 889542 - DNA, 25 bp, Homo sapien
tagcagttttggcagtcaacttcag

SEQ ID NO: 889543 - DNA, 25 bp, Homo sapien
agcagttttggcagtcaacttcagc

SEQ ID NO: 889544 - DNA, 25 bp, Homo sapien
ttatagcagttttggcagtcaactt

SEQ ID NO: 889545 - DNA, 25 bp, Homo sapien
tatagcagttttggcagtcaacttc

SEQ ID NO: 889546 - DNA, 25 bp, Homo sapien
tccaggcagttctgcgatgggaccc

SEQ ID NO: 889547 - DNA, 25 bp, Homo sapien
tctacagccgtagctcacaggaagc

SEQ ID NO: 889548 - DNA, 25 bp, Homo sapien
ggcgaagccctagttctcagtgtct

SEQ ID NO: 889549 - DNA, 25 bp, Homo sapien
ggtccttgggtctcggtctctacag

SEQ ID NO: 889550 - DNA, 25 bp, Homo sapien
ctgccaagtcggccctatgttccta

SEQ ID NO: 889551 - DNA, 25 bp, Homo sapien
ctcttccctgccaagtcggccctat

SEQ ID NO: 889552 - DNA, 25 bp, Homo sapien
tgccaagtcggccctatgttcctac

SEQ ID NO: 889553 - DNA, 25 bp, Homo sapien
ttccctgccaagtcggccctatgtt

SEQ ID NO: 889554 - DNA, 25 bp, Homo sapien
tgcagcaaggtaactgtgcgtcctg

SEQ ID NO: 889555 - DNA, 25 bp, Homo sapien
gctgccgggactcctttccaacagg

SEQ ID NO: 889556 - DNA, 25 bp, Homo sapien
cgctaggccttagcgggctccgaag

SEQ ID NO: 889557 - DNA, 25 bp, Homo sapien
aggctaccagaacccgcttgcagca

SEQ ID NO: 889558 - DNA, 25 bp, Homo sapien
aggcggccgtggcgcggaggacttg

SEQ ID NO: 889559 - DNA, 25 bp, Homo sapien
ctgaccatagaggcggccgtggcgc

SEQ ID NO: 889560 - DNA, 25 bp, Homo sapien
gcggccgtggcgcggaggacttgac

SEQ ID NO: 889561 - DNA, 25 bp, Homo sapien
agaggcggccgtggcgcggaggact

SEQ ID NO: 889562 - DNA, 25 bp, Homo sapien
ctttacggcacgagaggagggcgct

SEQ ID NO: 889563 - DNA, 25 bp, Homo sapien
acccaatagcagtccgctcgaccca

SEQ ID NO: 889564 - DNA, 25 bp, Homo sapien
ttacggcacgagaggagggcgctgg

SEQ ID NO: 889565 - DNA, 25 bp, Homo sapien
ctcctccacccaatagcagtccgct

SEQ ID NO: 889566 - DNA, 25 bp, Homo sapien
tccattttgtgcagtgtccgcagac

SEQ ID NO: 889567 - DNA, 25 bp, Homo sapien
cctccattttgtgcagtgtccgcag

SEQ ID NO: 889568 - DNA, 25 bp, Homo sapien
gcagacccgcggccggaaacaaagc

SEQ ID NO: 889569 - DNA, 25 bp, Homo sapien
cccctccattttgtgcagtgtccgc

SEQ ID NO: 889570 - DNA, 25 bp, Homo sapien
agctgctgtcgccaaccccccagac

SEQ ID NO: 889571 - DNA, 25 bp, Homo sapien
ttgcaagctgctgtcgccaaccccc

SEQ ID NO: 889572 - DNA, 25 bp, Homo sapien
gcaagctgctgtcgccaacccccca

SEQ ID NO: 889573 - DNA, 25 bp, Homo sapien
aagctgctgtcgccaaccccccaga

SEQ ID NO: 889574 - DNA, 25 bp, Homo sapien
agctcctgggtaccactctgggtgc

SEQ ID NO: 889575 - DNA, 25 bp, Homo sapien
gagctaacgctaagccccttaaggc

SEQ ID NO: 889576 - DNA, 25 bp, Homo sapien
ctgccggtgccacggtcccgtgcgc

SEQ ID NO: 889577 - DNA, 25 bp, Homo sapien
actctgggtgccaaccgggacctgc

SEQ ID NO: 889578 - DNA, 25 bp, Homo sapien
gccaagaattaagaccgggagagat

SEQ ID NO: 889579 - DNA, 25 bp, Homo sapien
tgtcaagttttatttcccgttgcaa

SEQ ID NO: 889580 - DNA, 25 bp, Homo sapien
gattaaatacccgattattctcctg

SEQ ID NO: 889581 - DNA, 25 bp, Homo sapien
caccttccacgctgccaagaattaa

SEQ ID NO: 889582 - DNA, 25 bp, Homo sapien
cttgaagtaggcttgtcctgatcca

SEQ ID NO: 889583 - DNA, 25 bp, Homo sapien
ccttgaagtaggcttgtcctgatcc

SEQ ID NO: 889584 - DNA, 25 bp, Homo sapien
tccttgaagtaggcttgtcctgatc

SEQ ID NO: 889585 - DNA, 25 bp, Homo sapien
ctgcggtgacgtcagcctgcagttg

SEQ ID NO: 889586 - DNA, 25 bp, Homo sapien
ggcccttgctgttccgcgccgggac

SEQ ID NO: 889587 - DNA, 25 bp, Homo sapien
gaggcccgctttacaccggcctgag

SEQ ID NO: 889588 - DNA, 25 bp, Homo sapien
acagacacggcccttgctgttccgc

SEQ ID NO: 889589 - DNA, 25 bp, Homo sapien
actggcccgcgtgccgtcagaggga

SEQ ID NO: 889590 - DNA, 25 bp, Homo sapien
tgtagaagcgtggagggtttggggc

SEQ ID NO: 889591 - DNA, 25 bp, Homo sapien
cttgtagaagcgtggagggtttggg

SEQ ID NO: 889592 - DNA, 25 bp, Homo sapien
gcgacatcaggtagctctccgagtt

SEQ ID NO: 889593 - DNA, 25 bp, Homo sapien
catcaggtagctctccgagttcaca

SEQ ID NO: 889594 - DNA, 25 bp, Homo sapien
tcaggtagctctccgagttcacacc

SEQ ID NO: 889595 - DNA, 25 bp, Homo sapien
gggcgcgacatcaggtagctctccg

SEQ ID NO: 889596 - DNA, 25 bp, Homo sapien
gaaaacttaattagcgtgcctgtcc

SEQ ID NO: 889597 - DNA, 25 bp, Homo sapien
atgaaaacttaattagcgtgcctgt

SEQ ID NO: 889598 - DNA, 25 bp, Homo sapien
cttaattagcgtgcctgtcctaaaa

SEQ ID NO: 889599 - DNA, 25 bp, Homo sapien
aacttaattagcgtgcctgtcctaa

SEQ ID NO: 889600 - DNA, 25 bp, Homo sapien
ctaggcataaatctccctctgcctt

SEQ ID NO: 889601 - DNA, 25 bp, Homo sapien
aatctccctctgccttttggataac

SEQ ID NO: 889602 - DNA, 25 bp, Homo sapien
taggcataaatctccctctgccttt

SEQ ID NO: 889603 - DNA, 25 bp, Homo sapien
ataaatctccctctgccttttggat

SEQ ID NO: 889604 - DNA, 25 bp, Homo sapien
tttgcttatgagaaatgggatgtga

SEQ ID NO: 889605 - DNA, 25 bp, Homo sapien
gcttatgagaaatgggatgtgagca

SEQ ID NO: 889606 - DNA, 25 bp, Homo sapien
tgcttatgagaaatgggatgtgagc

SEQ ID NO: 889607 - DNA, 25 bp, Homo sapien
atgggatgtgagcaactcgctgcac

SEQ ID NO: 889608 - DNA, 25 bp, Homo sapien
tagcgtctccttgggagaggtccgc

SEQ ID NO: 889609 - DNA, 25 bp, Homo sapien
tcttggtcggctgacacgcattcga

SEQ ID NO: 889610 - DNA, 25 bp, Homo sapien
gcataaatcagcaagcccctagcgt

SEQ ID NO: 889611 - DNA, 25 bp, Homo sapien
aggtccgcaaatccaggagggcgcc

SEQ ID NO: 889612 - DNA, 25 bp, Homo sapien
gggattagcagtccagggcaacctc

SEQ ID NO: 889613 - DNA, 25 bp, Homo sapien
attagcagtccagggcaacctccgt

SEQ ID NO: 889614 - DNA, 25 bp, Homo sapien
aactcgggaattcacagaggaagca

SEQ ID NO: 889615 - DNA, 25 bp, Homo sapien
aacctccgtctctgctcctgaactc

SEQ ID NO: 889616 - DNA, 25 bp, Homo sapien
ggtaagatcgacactatcaatgacc

SEQ ID NO: 889617 - DNA, 25 bp, Homo sapien
cactttaggttatctggtagatcca

SEQ ID NO: 889618 - DNA, 25 bp, Homo sapien
caacaacattatccatgggtcagtg

SEQ ID NO: 889619 - DNA, 25 bp, Homo sapien
ggctcgaggctcagaatatttctta

SEQ ID NO: 889620 - DNA, 25 bp, Homo sapien
tgagacagctttagagactctttcg

SEQ ID NO: 889621 - DNA, 25 bp, Homo sapien
taattgaatttctcgagacctttcg

SEQ ID NO: 889622 - DNA, 25 bp, Homo sapien
gtgaaaatcctcagggcagcaaaat

SEQ ID NO: 889623 - DNA, 25 bp, Homo sapien
taaagaagttgtgagtcctcaggag

SEQ ID NO: 889624 - DNA, 25 bp, Homo sapien
tacagcacctgattgttgttagagg

SEQ ID NO: 889625 - DNA, 25 bp, Homo sapien
gataaaattagcctgcatctcacaa

SEQ ID NO: 889626 - DNA, 25 bp, Homo sapien
cacggctactgattccaccaacatt

SEQ ID NO: 889627 - DNA, 25 bp, Homo sapien
tacatatgcgcatagcatagatttg

SEQ ID NO: 889628 - DNA, 25 bp, Homo sapien
gatctactaatccagctaaggccaa

SEQ ID NO: 889629 - DNA, 25 bp, Homo sapien
cgaggtggcgcccttgatctactaa

SEQ ID NO: 889630 - DNA, 25 bp, Homo sapien
gattttaaaatacgacagcctaggc

SEQ ID NO: 889631 - DNA, 25 bp, Homo sapien
aatataagattgcacaccaccctgg

SEQ ID NO: 889632 - DNA, 25 bp, Homo sapien
ggattttagttatgagggatttctc

SEQ ID NO: 889633 - DNA, 25 bp, Homo sapien
tttggtagcaaaagaagtactgaat

SEQ ID NO: 889634 - DNA, 25 bp, Homo sapien
agaatggtccttggtttatataaga

SEQ ID NO: 889635 - DNA, 25 bp, Homo sapien
cagtgcacatttagcataggaaagt

SEQ ID NO: 889636 - DNA, 25 bp, Homo sapien
ttaacatgcaaagggaatggcgacc

SEQ ID NO: 889637 - DNA, 25 bp, Homo sapien
cactaagatttacctgagcagacgc

SEQ ID NO: 889638 - DNA, 25 bp, Homo sapien
tttgacatttaacgggctgggctga

SEQ ID NO: 889639 - DNA, 25 bp, Homo sapien
tatctgggcaaagcaacgagttctg

SEQ ID NO: 889640 - DNA, 25 bp, Homo sapien
gagagattcgtcgtggctgatatcc

SEQ ID NO: 889641 - DNA, 25 bp, Homo sapien
tattcgtggcgtattcccgttcaag

SEQ ID NO: 889642 - DNA, 25 bp, Homo sapien
cagattgtgacctgccgctcagaga

SEQ ID NO: 889643 - DNA, 25 bp, Homo sapien
taattgcaccttggtataaggcacg

SEQ ID NO: 889644 - DNA, 25 bp, Homo sapien
cccaagggttcgtggcgcgactcgc

SEQ ID NO: 889645 - DNA, 25 bp, Homo sapien
gttccagccgttgggcagcgcccag

SEQ ID NO: 889646 - DNA, 25 bp, Homo sapien
ccgaggcccggcaccactggcatat

SEQ ID NO: 889647 - DNA, 25 bp, Homo sapien
gggcagtacatttggccgttccagc

SEQ ID NO: 889648 - DNA, 25 bp, Homo sapien
gcgaactccttagcgcgggagctga

SEQ ID NO: 889649 - DNA, 25 bp, Homo sapien
cccggctgcgtagccctggtggtag

SEQ ID NO: 889650 - DNA, 25 bp, Homo sapien
gaaggcgaactccttagcgcgggag

SEQ ID NO: 889651 - DNA, 25 bp, Homo sapien
gcccggctgcgtagccctggtggta

SEQ ID NO: 889652 - DNA, 25 bp, Homo sapien
ggccgaggcgggctgcgcgcacgac

SEQ ID NO: 889653 - DNA, 25 bp, Homo sapien
gcggcggccgaggcgggctgcgcgc

SEQ ID NO: 889654 - DNA, 25 bp, Homo sapien
cggccgaggcgggctgcgcgcacga

SEQ ID NO: 889655 - DNA, 25 bp, Homo sapien
ggcggccgaggcgggctgcgcgcac

SEQ ID NO: 889656 - DNA, 25 bp, Homo sapien
ttgatggcgttggggtgcgggccca

SEQ ID NO: 889657 - DNA, 25 bp, Homo sapien
tgatggcgttggggtgcgggcccat

SEQ ID NO: 889658 - DNA, 25 bp, Homo sapien
gcgcacgggtagtagccgctgccga

SEQ ID NO: 889659 - DNA, 25 bp, Homo sapien
cgaagtagccatagggcagcgccgc

SEQ ID NO: 889660 - DNA, 25 bp, Homo sapien
tgccgaagtagccatagggcagcgc

SEQ ID NO: 889661 - DNA, 25 bp, Homo sapien
gcgggcgcacgggtagtagccgctg

SEQ ID NO: 889662 - DNA, 25 bp, Homo sapien
tgcgccatcaggttgcggcactggt

SEQ ID NO: 889663 - DNA, 25 bp, Homo sapien
tcctggcgccaagggcgccgggtgc

SEQ ID NO: 889664 - DNA, 25 bp, Homo sapien
ggcgctgctgtaggcggacgcggct

SEQ ID NO: 889665 - DNA, 25 bp, Homo sapien
tgttcttgttgagctcgtcggccac

SEQ ID NO: 889666 - DNA, 25 bp, Homo sapien
caggccgccgccgttgtcgtagaga

SEQ ID NO: 889667 - DNA, 25 bp, Homo sapien
cgccgttgtcgtagagaaacatgac

SEQ ID NO: 889668 - DNA, 25 bp, Homo sapien
gccgccgccgttgtcgtagagaaac

SEQ ID NO: 889669 - DNA, 25 bp, Homo sapien
gccgccgttgtcgtagagaaacatg

SEQ ID NO: 889670 - DNA, 25 bp, Homo sapien
gtgggctcgatccagcgggggtgga

SEQ ID NO: 889671 - DNA, 25 bp, Homo sapien
ggtggaggagcacggaggctgtcat

SEQ ID NO: 889672 - DNA, 25 bp, Homo sapien
tccagcgggggtggaggagcacgga

SEQ ID NO: 889673 - DNA, 25 bp, Homo sapien
cgatccagcgggggtggaggagcac

SEQ ID NO: 889674 - DNA, 25 bp, Homo sapien
cccaagaagtgaagagcgcgcggcg

SEQ ID NO: 889675 - DNA, 25 bp, Homo sapien
tccgcccacggcgtatgcaaagcgg

SEQ ID NO: 889676 - DNA, 25 bp, Homo sapien
cgcccacggcgtatgcaaagcgggc

SEQ ID NO: 889677 - DNA, 25 bp, Homo sapien
agcccgagccgcatggagaagaccc

SEQ ID NO: 889678 - DNA, 25 bp, Homo sapien
gagaggcggaggaacgtgcgggtgg

SEQ ID NO: 889679 - DNA, 25 bp, Homo sapien
ggaccagcctagctcagaatgggtg

SEQ ID NO: 889680 - DNA, 25 bp, Homo sapien
tcaggtaattctgccggcggtcagg

SEQ ID NO: 889681 - DNA, 25 bp, Homo sapien
cgcgattgggttgcgatctggagca

SEQ ID NO: 889682 - DNA, 25 bp, Homo sapien
cgcagctgccggtgcacacggcggc

SEQ ID NO: 889683 - DNA, 25 bp, Homo sapien
ggcgcagctgccggtgcacacggcg

SEQ ID NO: 889684 - DNA, 25 bp, Homo sapien
tgcacacggcggccaaggccagctc

SEQ ID NO: 889685 - DNA, 25 bp, Homo sapien
gcgcagctgccggtgcacacggcgg

SEQ ID NO: 889686 - DNA, 25 bp, Homo sapien
gcaaatgaaatttacctgctctcac

SEQ ID NO: 889687 - DNA, 25 bp, Homo sapien
tttgcatccatccagcactaggata

SEQ ID NO: 889688 - DNA, 25 bp, Homo sapien
tcactttaactctgaggaggctgtc

SEQ ID NO: 889689 - DNA, 25 bp, Homo sapien
ccttggttgattctaaagacacttt

SEQ ID NO: 889690 - DNA, 25 bp, Homo sapien
tggagctggaaacagccttcgcgga

SEQ ID NO: 889691 - DNA, 25 bp, Homo sapien
agtgacctgcgggtcactcagccgg

SEQ ID NO: 889692 - DNA, 25 bp, Homo sapien
ctggaaggaggaaacgccttctcgc

SEQ ID NO: 889693 - DNA, 25 bp, Homo sapien
accggagcatgcgttagaagcagag

SEQ ID NO: 889694 - DNA, 25 bp, Homo sapien
agcggttttgcatgccagcctctgg

SEQ ID NO: 889695 - DNA, 25 bp, Homo sapien
gaaaatgtcaccttcgaatcctaag

SEQ ID NO: 889696 - DNA, 25 bp, Homo sapien
gaacctacatatgggcgctccaggg

SEQ ID NO: 889697 - DNA, 25 bp, Homo sapien
gatttgcccgcattaggatcaggag

SEQ ID NO: 889698 - DNA, 25 bp, Homo sapien
taatcggaactcaagggcgctgtct

SEQ ID NO: 889699 - DNA, 25 bp, Homo sapien
cagttgcgacctcttcccactagat

SEQ ID NO: 889700 - DNA, 25 bp, Homo sapien
tgctcgcaggacaccgctgcagttg

SEQ ID NO: 889701 - DNA, 25 bp, Homo sapien
cactagatgtcttcccagttaatcg

SEQ ID NO: 889702 - DNA, 25 bp, Homo sapien
aaagcgtttcctccgacgtctcctg

SEQ ID NO: 889703 - DNA, 25 bp, Homo sapien
gattaaactttaatcggctgcagtc

SEQ ID NO: 889704 - DNA, 25 bp, Homo sapien
ctcggattaaactttaatcggctgc

SEQ ID NO: 889705 - DNA, 25 bp, Homo sapien
aactttaatcggctgcagtcaaggt

SEQ ID NO: 889706 - DNA, 25 bp, Homo sapien
tctttttagagagattgtgaggtag

SEQ ID NO: 889707 - DNA, 25 bp, Homo sapien
tagagagattgtgaggtaggaacat

SEQ ID NO: 889708 - DNA, 25 bp, Homo sapien
acaggagccggttcagtatagagag

SEQ ID NO: 889709 - DNA, 25 bp, Homo sapien
tgacaggagccggttcagtatagag

SEQ ID NO: 889710 - DNA, 25 bp, Homo sapien
tttttagtcttggcgtagggagtca

SEQ ID NO: 889711 - DNA, 25 bp, Homo sapien
gagggcacgcgcccagagggtgtgg

SEQ ID NO: 889712 - DNA, 25 bp, Homo sapien
ggagtcagggagggcacgcgcccag

SEQ ID NO: 889713 - DNA, 25 bp, Homo sapien
ttttagtcttggcgtagggagtcag

SEQ ID NO: 889714 - DNA, 25 bp, Homo sapien
gccctgcgtcttggccaggcactgg

SEQ ID NO: 889715 - DNA, 25 bp, Homo sapien
tcgggcggcttcgatgccaggttca

SEQ ID NO: 889716 - DNA, 25 bp, Homo sapien
caggccccttcttgggcagggtcgg

SEQ ID NO: 889717 - DNA, 25 bp, Homo sapien
agggtcgggcactcccgctgtccag

SEQ ID NO: 889718 - DNA, 25 bp, Homo sapien
ttctcgaaaggtgcggactgagccc

SEQ ID NO: 889719 - DNA, 25 bp, Homo sapien
cagggtgaacttgctatttcgggtc

SEQ ID NO: 889720 - DNA, 25 bp, Homo sapien
ttctcgcaagtgtgacccagggtga

SEQ ID NO: 889721 - DNA, 25 bp, Homo sapien
tccgaagctgctccaggttgaaatg

SEQ ID NO: 889722 - DNA, 25 bp, Homo sapien
ggagccactggttccgcgaccctgg

SEQ ID NO: 889723 - DNA, 25 bp, Homo sapien
ttccgcgaccctgggcatgaaactc

SEQ ID NO: 889724 - DNA, 25 bp, Homo sapien
ctgccggcgcctgcccgagggcttc

SEQ ID NO: 889725 - DNA, 25 bp, Homo sapien
atgaaactcctcaagggcggccctc

SEQ ID NO: 889726 - DNA, 25 bp, Homo sapien
accggagtcattgccgggaccctca

SEQ ID NO: 889727 - DNA, 25 bp, Homo sapien
gtcattgccgggaccctcagcgcaa

SEQ ID NO: 889728 - DNA, 25 bp, Homo sapien
ggcaggcaccccaccggagtcattg

SEQ ID NO: 889729 - DNA, 25 bp, Homo sapien
agcgggcaggcaccccaccggagtc

SEQ ID NO: 889730 - DNA, 25 bp, Homo sapien
caaagggaggcaggacgttgaggag

SEQ ID NO: 889731 - DNA, 25 bp, Homo sapien
tcatctcaaagggaggcaggacgtt

SEQ ID NO: 889732 - DNA, 25 bp, Homo sapien
atctcaaagggaggcaggacgttga

SEQ ID NO: 889733 - DNA, 25 bp, Homo sapien
ctcaaagggaggcaggacgttgagg

SEQ ID NO: 889734 - DNA, 25 bp, Homo sapien
cttttcctgcagctttgaaagctct

SEQ ID NO: 889735 - DNA, 25 bp, Homo sapien
gctttgaaagctctttctttggcat

SEQ ID NO: 889736 - DNA, 25 bp, Homo sapien
cagctttgaaagctctttctttggc

SEQ ID NO: 889737 - DNA, 25 bp, Homo sapien
tgcagctttgaaagctctttctttg

SEQ ID NO: 889738 - DNA, 25 bp, Homo sapien
ttgttgaggttatcagggaatggaa

SEQ ID NO: 889739 - DNA, 25 bp, Homo sapien
ttgaggttatcagggaatggaaagc

SEQ ID NO: 889740 - DNA, 25 bp, Homo sapien
atggttgttgaggttatcagggaat

SEQ ID NO: 889741 - DNA, 25 bp, Homo sapien
aaatggttgttgaggttatcaggga

SEQ ID NO: 889742 - DNA, 25 bp, Homo sapien
tgcatctagctattaggggaatgtt

SEQ ID NO: 889743 - DNA, 25 bp, Homo sapien
aatcagtgcatctagctattagggg

SEQ ID NO: 889744 - DNA, 25 bp, Homo sapien
aaccttcatacttgccacctccagg

SEQ ID NO: 889745 - DNA, 25 bp, Homo sapien
ttcccaaaccttcatacttgccacc

SEQ ID NO: 889746 - DNA, 25 bp, Homo sapien
tatcagaaggcccataggggtggaa

SEQ ID NO: 889747 - DNA, 25 bp, Homo sapien
ctagactatcagaaggcccataggg

SEQ ID NO: 889748 - DNA, 25 bp, Homo sapien
gtcacttgccagccttgtcacagtt

SEQ ID NO: 889749 - DNA, 25 bp, Homo sapien
cagaaggcccataggggtggaaact

SEQ ID NO: 889750 - DNA, 25 bp, Homo sapien
tattccaaatcccagtgaatgtctt

SEQ ID NO: 889751 - DNA, 25 bp, Homo sapien
gacacaaaatcctggatgccattta

SEQ ID NO: 889752 - DNA, 25 bp, Homo sapien
actattccaaatcccagtgaatgtc

SEQ ID NO: 889753 - DNA, 25 bp, Homo sapien
aaggacacaaaatcctggatgccat

SEQ ID NO: 889754 - DNA, 25 bp, Homo sapien
aggatgctgggactcgccgcgactt

SEQ ID NO: 889755 - DNA, 25 bp, Homo sapien
cgcaccaagacagcagttcgggagc

SEQ ID NO: 889756 - DNA, 25 bp, Homo sapien
agcgggcgcatagggcctggtggaa

SEQ ID NO: 889757 - DNA, 25 bp, Homo sapien
cgggatccgagccagcaaggatgct

SEQ ID NO: 889758 - DNA, 25 bp, Homo sapien
tcggacgctcagaagctcagtagga

SEQ ID NO: 889759 - DNA, 25 bp, Homo sapien
gacaacttgcgttaaaatcctggct

SEQ ID NO: 889760 - DNA, 25 bp, Homo sapien
cacggcgttaatgtcagaggagaat

SEQ ID NO: 889761 - DNA, 25 bp, Homo sapien
gggagtccgttttcccgctgcacga

SEQ ID NO: 889762 - DNA, 25 bp, Homo sapien
gagttgtcctctactactccacagc

SEQ ID NO: 889763 - DNA, 25 bp, Homo sapien
cgaaatgatgcctccacccagattt

SEQ ID NO: 889764 - DNA, 25 bp, Homo sapien
tgcattgcccttgttgggtggccct

SEQ ID NO: 889765 - DNA, 25 bp, Homo sapien
gaattttgggaccatcgagttgtcc

SEQ ID NO: 889766 - DNA, 25 bp, Homo sapien
gcaggttccctcttacagtgcaggg

SEQ ID NO: 889767 - DNA, 25 bp, Homo sapien
ggttccctcttacagtgcaggggtg

SEQ ID NO: 889768 - DNA, 25 bp, Homo sapien
ggcaggttccctcttacagtgcagg

SEQ ID NO: 889769 - DNA, 25 bp, Homo sapien
ttccctcttacagtgcaggggtgga

SEQ ID NO: 889770 - DNA, 25 bp, Homo sapien
gaggtcttcagctgccagtctcacc

SEQ ID NO: 889771 - DNA, 25 bp, Homo sapien
agagttccagaagccgcagtttccc

SEQ ID NO: 889772 - DNA, 25 bp, Homo sapien
tctgaaggagaaagtgttccacggt

SEQ ID NO: 889773 - DNA, 25 bp, Homo sapien
ccctgtctgaaggagaaagtgttcc

SEQ ID NO: 889774 - DNA, 25 bp, Homo sapien
ggagggggcactcttcaaaatcaga

SEQ ID NO: 889775 - DNA, 25 bp, Homo sapien
gattccatttaaaacgacccgcgca

SEQ ID NO: 889776 - DNA, 25 bp, Homo sapien
aatttaccttccttctcgagccgtg

SEQ ID NO: 889777 - DNA, 25 bp, Homo sapien
tgcagggcttcacttgctctcggaa

SEQ ID NO: 889778 - DNA, 25 bp, Homo sapien
gaatttcaatccgagaggagccggc

SEQ ID NO: 889779 - DNA, 25 bp, Homo sapien
agggacacagaaaggagggaggtgc

SEQ ID NO: 889780 - DNA, 25 bp, Homo sapien
gggacacagaaaggagggaggtgct

SEQ ID NO: 889781 - DNA, 25 bp, Homo sapien
ggcattttcagcgacttcactctct

SEQ ID NO: 889782 - DNA, 25 bp, Homo sapien
ttttagggcattttcagcgacttca

SEQ ID NO: 889783 - DNA, 25 bp, Homo sapien
ttttcagcgacttcactctcttcta

SEQ ID NO: 889784 - DNA, 25 bp, Homo sapien
tagggcattttcagcgacttcactc

SEQ ID NO: 889785 - DNA, 25 bp, Homo sapien
aagcgacttcttgtacgaatagcca

SEQ ID NO: 889786 - DNA, 25 bp, Homo sapien
gcgaggtccaggcaaacgggaaagc

SEQ ID NO: 889787 - DNA, 25 bp, Homo sapien
cgggaaagcgacttcttgtacgaat

SEQ ID NO: 889788 - DNA, 25 bp, Homo sapien
ccaggcaaacgggaaagcgacttct

SEQ ID NO: 889789 - DNA, 25 bp, Homo sapien
gagtggcgtcaccagcggtactgta

SEQ ID NO: 889790 - DNA, 25 bp, Homo sapien
ctatttatccacttgcgctcgccga

SEQ ID NO: 889791 - DNA, 25 bp, Homo sapien
tggcgcatcactgccgagccattag

SEQ ID NO: 889792 - DNA, 25 bp, Homo sapien
aggagcgctcgcttcacaaggtgac

SEQ ID NO: 889793 - DNA, 25 bp, Homo sapien
tctacgcgggctctgttagtgtgcg

SEQ ID NO: 889794 - DNA, 25 bp, Homo sapien
gtaaaaccgcgtgccgcgtctacgc

SEQ ID NO: 889795 - DNA, 25 bp, Homo sapien
ttagtgtgcgtgtcccagaagagtg

SEQ ID NO: 889796 - DNA, 25 bp, Homo sapien
gtttctcccgaaactggcgctcttg

SEQ ID NO: 889797 - DNA, 25 bp, Homo sapien
cccgggagcgactttgatgtattgc

SEQ ID NO: 889798 - DNA, 25 bp, Homo sapien
taattggtgtcctcggagacaggca

SEQ ID NO: 889799 - DNA, 25 bp, Homo sapien
gatgtattgctgtccaattagtgcc

SEQ ID NO: 889800 - DNA, 25 bp, Homo sapien
ggtaaaatttataacacactgtggc

SEQ ID NO: 889801 - DNA, 25 bp, Homo sapien
gagtgagtaaatcaggctcctggac

SEQ ID NO: 889802 - DNA, 25 bp, Homo sapien
tggtgtccaggttacggctgcagtc

SEQ ID NO: 889803 - DNA, 25 bp, Homo sapien
gctcctggacttgcgaggctgatgg

SEQ ID NO: 889804 - DNA, 25 bp, Homo sapien
ctgtgggactggcaagagaagctgg

SEQ ID NO: 889805 - DNA, 25 bp, Homo sapien
aatccatctcgttttcttaatagtg

SEQ ID NO: 889806 - DNA, 25 bp, Homo sapien
catctgtccaatccatctcgttttc

SEQ ID NO: 889807 - DNA, 25 bp, Homo sapien
gcctgggccacggttcttcatatat

SEQ ID NO: 889808 - DNA, 25 bp, Homo sapien
ctcccctagcctgtaggttgtcttt

SEQ ID NO: 889809 - DNA, 25 bp, Homo sapien
tgacaacgcgccactcgggccttga

SEQ ID NO: 889810 - DNA, 25 bp, Homo sapien
ttattgacaacgcgccactcgggcc

SEQ ID NO: 889811 - DNA, 25 bp, Homo sapien
ttgacaacgcgccactcgggccttg

SEQ ID NO: 889812 - DNA, 25 bp, Homo sapien
attgacaacgcgccactcgggcctt

SEQ ID NO: 889813 - DNA, 25 bp, Homo sapien
gtgcttgttgaaccggcagcacatg

SEQ ID NO: 889814 - DNA, 25 bp, Homo sapien
tgtgcttgttgaaccggcagcacat

SEQ ID NO: 889815 - DNA, 25 bp, Homo sapien
tccttgtgcttgttgaaccggcagc

SEQ ID NO: 889816 - DNA, 25 bp, Homo sapien
cttgtgcttgttgaaccggcagcac

SEQ ID NO: 889817 - DNA, 25 bp, Homo sapien
tccaggggcttatacttcttgccct

SEQ ID NO: 889818 - DNA, 25 bp, Homo sapien
ggccacaggtccaggggcttatact

SEQ ID NO: 889819 - DNA, 25 bp, Homo sapien
ggtccaggggcttatacttcttgcc

SEQ ID NO: 889820 - DNA, 25 bp, Homo sapien
caggtccaggggcttatacttcttg

SEQ ID NO: 889821 - DNA, 25 bp, Homo sapien
gtccaatttgcggacgactcaaatc

SEQ ID NO: 889822 - DNA, 25 bp, Homo sapien
tgagaacacgtccaatttgcggacg

SEQ ID NO: 889823 - DNA, 25 bp, Homo sapien
aatttgcggacgactcaaatcttag

SEQ ID NO: 889824 - DNA, 25 bp, Homo sapien
aaccgtgagaacacgtccaatttgc

SEQ ID NO: 889825 - DNA, 25 bp, Homo sapien
tggcgacgtgcagctgggacagctc

SEQ ID NO: 889826 - DNA, 25 bp, Homo sapien
cgacgtgcagctgggacagctccac

SEQ ID NO: 889827 - DNA, 25 bp, Homo sapien
tttggcgacgtgcagctgggacagc

SEQ ID NO: 889828 - DNA, 25 bp, Homo sapien
gcgacgtgcagctgggacagctcca

SEQ ID NO: 889829 - DNA, 25 bp, Homo sapien
tctcgtgcaggtctcgagccttgat

SEQ ID NO: 889830 - DNA, 25 bp, Homo sapien
ttctcgtgcaggtctcgagccttga

SEQ ID NO: 889831 - DNA, 25 bp, Homo sapien
tccttctcgtgcaggtctcgagcct

SEQ ID NO: 889832 - DNA, 25 bp, Homo sapien
tcctccttctcgtgcaggtctcgag

SEQ ID NO: 889833 - DNA, 25 bp, Homo sapien
tgctgcataggccaccgccgctgcc

SEQ ID NO: 889834 - DNA, 25 bp, Homo sapien
ctgcataggccaccgccgctgcctg

SEQ ID NO: 889835 - DNA, 25 bp, Homo sapien
gctgcataggccaccgccgctgcct

SEQ ID NO: 889836 - DNA, 25 bp, Homo sapien
gcataggccaccgccgctgcctgct

SEQ ID NO: 889837 - DNA, 25 bp, Homo sapien
caacaagggtgaccgcagggactgt

SEQ ID NO: 889838 - DNA, 25 bp, Homo sapien
tgggagcagggagacgaatccatct

SEQ ID NO: 889839 - DNA, 25 bp, Homo sapien
cacattgatgttctggacactccac

SEQ ID NO: 889840 - DNA, 25 bp, Homo sapien
cagcggttgcagtgatccaggaagg

SEQ ID NO: 889841 - DNA, 25 bp, Homo sapien
gctccccggtggagagctctcttcg

SEQ ID NO: 889842 - DNA, 25 bp, Homo sapien
cagctgagactgatatgggtcactc

SEQ ID NO: 889843 - DNA, 25 bp, Homo sapien
ccagcccttgggtggattccaggat

SEQ ID NO: 889844 - DNA, 25 bp, Homo sapien
gctataaccttcagtgagatgtgga

SEQ ID NO: 889845 - DNA, 25 bp, Homo sapien
tctgctgaacacaagtctaaacatg

SEQ ID NO: 889846 - DNA, 25 bp, Homo sapien
catgaacaaggattctggctgcttg

SEQ ID NO: 889847 - DNA, 25 bp, Homo sapien
ggcaccatggggagtgatactcctg

SEQ ID NO: 889848 - DNA, 25 bp, Homo sapien
ggagtgatactcctggtaaggaaga

SEQ ID NO: 889849 - DNA, 25 bp, Homo sapien
gggatgcagacagtgttaacctgga

SEQ ID NO: 889850 - DNA, 25 bp, Homo sapien
agacagtgttaacctggaccctttg

SEQ ID NO: 889851 - DNA, 25 bp, Homo sapien
tgcagacagtgttaacctggaccct

SEQ ID NO: 889852 - DNA, 25 bp, Homo sapien
gggctgaggattggtagttcttgga

SEQ ID NO: 889853 - DNA, 25 bp, Homo sapien
caatcttatccatggttgtcaaagg

SEQ ID NO: 889854 - DNA, 25 bp, Homo sapien
aacccctttggctggatgaggcatc

SEQ ID NO: 889855 - DNA, 25 bp, Homo sapien
cttcacgggtccaaatctggagatt

SEQ ID NO: 889856 - DNA, 25 bp, Homo sapien
catctcttgctccaacagggctttc

SEQ ID NO: 889857 - DNA, 25 bp, Homo sapien
tggcatatgggacaacccacagccc

SEQ ID NO: 889858 - DNA, 25 bp, Homo sapien
gcattcacggccccatccacttcct

SEQ ID NO: 889859 - DNA, 25 bp, Homo sapien
ttgggtctctcattagcacacagac

SEQ ID NO: 889860 - DNA, 25 bp, Homo sapien
tgggtctctcattagcacacagact

SEQ ID NO: 889861 - DNA, 25 bp, Homo sapien
tttgggtctctcattagcacacaga

SEQ ID NO: 889862 - DNA, 25 bp, Homo sapien
ctcctcacactctcatcagttgttc

SEQ ID NO: 889863 - DNA, 25 bp, Homo sapien
tccaaaattctacccccacatgaag

SEQ ID NO: 889864 - DNA, 25 bp, Homo sapien
tcctcacactctcatcagttgttcc

SEQ ID NO: 889865 - DNA, 25 bp, Homo sapien
gggagacacatagcaccataactgc

SEQ ID NO: 889866 - DNA, 25 bp, Homo sapien
cagtgtccagtacccacgggagaca

SEQ ID NO: 889867 - DNA, 25 bp, Homo sapien
tgaggagccccatacaacacagtgt

SEQ ID NO: 889868 - DNA, 25 bp, Homo sapien
gaggttggctcatttgctccccagt

SEQ ID NO: 889869 - DNA, 25 bp, Homo sapien
tctgcccgatggtctgacagttctt

SEQ ID NO: 889870 - DNA, 25 bp, Homo sapien
tccagtggaactttgacacttctaa

SEQ ID NO: 889871 - DNA, 25 bp, Homo sapien
tctgacccaactgaccgaaaagtgc

SEQ ID NO: 889872 - DNA, 25 bp, Homo sapien
tcactgtggagctgtcaatgagctg

SEQ ID NO: 889873 - DNA, 25 bp, Homo sapien
ttactgtatttcacaaggaagacat

SEQ ID NO: 889874 - DNA, 25 bp, Homo sapien
cacaaggaagacatagtagaacatt

SEQ ID NO: 889875 - DNA, 25 bp, Homo sapien
tatttcacaaggaagacatagtaga

SEQ ID NO: 889876 - DNA, 25 bp, Homo sapien
tatattactgtatttcacaaggaag

SEQ ID NO: 889877 - DNA, 25 bp, Homo sapien
gtaactttatctgaaggagcagggc

SEQ ID NO: 889878 - DNA, 25 bp, Homo sapien
tagattgtagtgattgaagggcctg

SEQ ID NO: 889879 - DNA, 25 bp, Homo sapien
gggcctgtttatgagatattgaaaa

SEQ ID NO: 889880 - DNA, 25 bp, Homo sapien
tgtcaggagactttcaattaatact

SEQ ID NO: 889881 - DNA, 25 bp, Homo sapien
ttcatacggtccagcaacccattcc

SEQ ID NO: 889882 - DNA, 25 bp, Homo sapien
ttttcatacggtccagcaacccatt

SEQ ID NO: 889883 - DNA, 25 bp, Homo sapien
catacggtccagcaacccattccat

SEQ ID NO: 889884 - DNA, 25 bp, Homo sapien
attttcatacggtccagcaacccat

SEQ ID NO: 889885 - DNA, 25 bp, Homo sapien
gcagcatctgtgctctcccacatgg

SEQ ID NO: 889886 - DNA, 25 bp, Homo sapien
tcactccccgagtccctaacttcat

SEQ ID NO: 889887 - DNA, 25 bp, Homo sapien
agccagggtttgccagaagcactca

SEQ ID NO: 889888 - DNA, 25 bp, Homo sapien
caatggctgtgccttacgctcagga

SEQ ID NO: 889889 - DNA, 25 bp, Homo sapien
aaggcacacagtctctgctccaaag

SEQ ID NO: 889890 - DNA, 25 bp, Homo sapien
atccaaggcacacagtctctgctcc

SEQ ID NO: 889891 - DNA, 25 bp, Homo sapien
gctccaaagcaagggtgcagctcca

SEQ ID NO: 889892 - DNA, 25 bp, Homo sapien
ggcacacagtctctgctccaaagca

SEQ ID NO: 889893 - DNA, 25 bp, Homo sapien
cttgcctctggcagttttgaatgaa

SEQ ID NO: 889894 - DNA, 25 bp, Homo sapien
tcctaaggaagaatttacactgggc

SEQ ID NO: 889895 - DNA, 25 bp, Homo sapien
tttacactgggctttgtctctcccc

SEQ ID NO: 889896 - DNA, 25 bp, Homo sapien
tccagggtaacacttttggtagtca

SEQ ID NO: 889897 - DNA, 25 bp, Homo sapien
acttttggtagtcaataaaatgtgc

SEQ ID NO: 889898 - DNA, 25 bp, Homo sapien
gctgataggagcttcttgttggcaa

SEQ ID NO: 889899 - DNA, 25 bp, Homo sapien
tacagctttgaatccttatgtgagc

SEQ ID NO: 889900 - DNA, 25 bp, Homo sapien
caaagaggttaatggtcttgtaggc

SEQ ID NO: 889901 - DNA, 25 bp, Homo sapien
tttacttgcttctcagttttacagc

SEQ ID NO: 889902 - DNA, 25 bp, Homo sapien
agcgtatgaagtcgaagattgagca

SEQ ID NO: 889903 - DNA, 25 bp, Homo sapien
ggaaaaaatgaagcgtatgaagtcg

SEQ ID NO: 889904 - DNA, 25 bp, Homo sapien
ggcaagagggcgttatttagttgat

SEQ ID NO: 889905 - DNA, 25 bp, Homo sapien
tatttagttgatggaggtaaggaaa

SEQ ID NO: 889906 - DNA, 25 bp, Homo sapien
tttattgttaagcagggaacctgtg

SEQ ID NO: 889907 - DNA, 25 bp, Homo sapien
gagattctgccaacaccagtgggga

SEQ ID NO: 889908 - DNA, 25 bp, Homo sapien
catagctaagagattgtgttacatc

SEQ ID NO: 889909 - DNA, 25 bp, Homo sapien
cttttaaatatggtcttgataaatg

SEQ ID NO: 889910 - DNA, 25 bp, Homo sapien
caccagtggggaacatagctaagag

SEQ ID NO: 889911 - DNA, 25 bp, Homo sapien
tgctatccaccaggcaacactgatt

SEQ ID NO: 889912 - DNA, 25 bp, Homo sapien
ccttgaaacttgatttgctatccac

SEQ ID NO: 889913 - DNA, 25 bp, Homo sapien
tctgtaaccttgaaacttgatttgc

SEQ ID NO: 889914 - DNA, 25 bp, Homo sapien
aacttgatttgctatccaccaggca

SEQ ID NO: 889915 - DNA, 25 bp, Homo sapien
gaggaggggggcttacagcctcaaa

SEQ ID NO: 889916 - DNA, 25 bp, Homo sapien
gaggggggcttacagcctcaaaaca

SEQ ID NO: 889917 - DNA, 25 bp, Homo sapien
tcccttgacattctggaatgtgtcc

SEQ ID NO: 889918 - DNA, 25 bp, Homo sapien
catagggtcaactttgcttcccttg

SEQ ID NO: 889919 - DNA, 25 bp, Homo sapien
ccttgacattctggaatgtgtccac

SEQ ID NO: 889920 - DNA, 25 bp, Homo sapien
agggtcaactttgcttcccttgaca

SEQ ID NO: 889921 - DNA, 25 bp, Homo sapien
caggcacaggagccggaatggctgt

SEQ ID NO: 889922 - DNA, 25 bp, Homo sapien
gggatgcaggtagccaatgaacagc

SEQ ID NO: 889923 - DNA, 25 bp, Homo sapien
atgcaggtagccaatgaacagccag

SEQ ID NO: 889924 - DNA, 25 bp, Homo sapien
cacaggagccggaatggctgtgcct

SEQ ID NO: 889925 - DNA, 25 bp, Homo sapien
ctctgaagggcacttggaaggaaag

SEQ ID NO: 889926 - DNA, 25 bp, Homo sapien
tctctgaagggcacttggaaggaaa

SEQ ID NO: 889927 - DNA, 25 bp, Homo sapien
tctgaagggcacttggaaggaaagt

SEQ ID NO: 889928 - DNA, 25 bp, Homo sapien
cattttgcatgtaatggctgttctg

SEQ ID NO: 889929 - DNA, 25 bp, Homo sapien
tgttcataagatctagggtccttct

SEQ ID NO: 889930 - DNA, 25 bp, Homo sapien
gctgttctgtgcagacattgtgggc

SEQ ID NO: 889931 - DNA, 25 bp, Homo sapien
aagatctagggtccttctgtgcaaa

SEQ ID NO: 889932 - DNA, 25 bp, Homo sapien
cacggacttccagttaacagaagaa

SEQ ID NO: 889933 - DNA, 25 bp, Homo sapien
taaagctacacgagtcactggccag

SEQ ID NO: 889934 - DNA, 25 bp, Homo sapien
gctctgtggatgagcagctctcaca

SEQ ID NO: 889935 - DNA, 25 bp, Homo sapien
aaagtggtcatcgaaaagtaaggca

SEQ ID NO: 889936 - DNA, 25 bp, Homo sapien
ggaaagatggaatgttggaggaggg

SEQ ID NO: 889937 - DNA, 25 bp, Homo sapien
tgaggaaagatggaatgttggagga

SEQ ID NO: 889938 - DNA, 25 bp, Homo sapien
ggagatgtttgaggaaagatggaat

SEQ ID NO: 889939 - DNA, 25 bp, Homo sapien
atgtttgaggaaagatggaatgttg

SEQ ID NO: 889940 - DNA, 25 bp, Homo sapien
ttttgttgctggaaagaagaggaca

SEQ ID NO: 889941 - DNA, 25 bp, Homo sapien
aaggcaacagccttgtctgaatccc

SEQ ID NO: 889942 - DNA, 25 bp, Homo sapien
tcattttcacataggaaccatagcc

SEQ ID NO: 889943 - DNA, 25 bp, Homo sapien
ggaaccatagccataccaagtttcg

SEQ ID NO: 889944 - DNA, 25 bp, Homo sapien
tgctgaaccaatctctctataaact

SEQ ID NO: 889945 - DNA, 25 bp, Homo sapien
gaaccaatctctctataaactcttc

SEQ ID NO: 889946 - DNA, 25 bp, Homo sapien
atctctctataaactcttctcatca

SEQ ID NO: 889947 - DNA, 25 bp, Homo sapien
ccaatctctctataaactcttctca

SEQ ID NO: 889948 - DNA, 25 bp, Homo sapien
attgtccatactaccctcgcagcag

SEQ ID NO: 889949 - DNA, 25 bp, Homo sapien
tggcttgctgcctcattgtccatac

SEQ ID NO: 889950 - DNA, 25 bp, Homo sapien
gaactcccattttgtccaatagggc

SEQ ID NO: 889951 - DNA, 25 bp, Homo sapien
cacaagaatccagggctaggaactc

SEQ ID NO: 889952 - DNA, 25 bp, Homo sapien
tgtcagatgccagaaagggccagtt

SEQ ID NO: 889953 - DNA, 25 bp, Homo sapien
tataaagggaacgaagctgttgtcc

SEQ ID NO: 889954 - DNA, 25 bp, Homo sapien
tattgttgttcacgagatgtcttat

SEQ ID NO: 889955 - DNA, 25 bp, Homo sapien
gccagttataaagggaacgaagctg

SEQ ID NO: 889956 - DNA, 25 bp, Homo sapien
cccagagtttcttgctgctgacttt

SEQ ID NO: 889957 - DNA, 25 bp, Homo sapien
tcttcccagagtttcttgctgctga

SEQ ID NO: 889958 - DNA, 25 bp, Homo sapien
ttggcctgcaccatccagttcattt

SEQ ID NO: 889959 - DNA, 25 bp, Homo sapien
tgacttttcctctgttcttcagcac

SEQ ID NO: 889960 - DNA, 25 bp, Homo sapien
tccactgcaggctattaacagccat

SEQ ID NO: 889961 - DNA, 25 bp, Homo sapien
gccaattagctcagaattatgggct

SEQ ID NO: 889962 - DNA, 25 bp, Homo sapien
ttatgggctctgaggtaacagtcat

SEQ ID NO: 889963 - DNA, 25 bp, Homo sapien
gtttgttccactgcaggctattaac

SEQ ID NO: 889964 - DNA, 25 bp, Homo sapien
tccagccatgcaacttccctcacct

SEQ ID NO: 889965 - DNA, 25 bp, Homo sapien
ctcacctcctgactgatgatggtca

SEQ ID NO: 889966 - DNA, 25 bp, Homo sapien
gactgatgatggtcagtcggcccat

SEQ ID NO: 889967 - DNA, 25 bp, Homo sapien
tcctgactgatgatggtcagtcggc

SEQ ID NO: 889968 - DNA, 25 bp, Homo sapien
ggcgcaagagagcagaactcaggct

SEQ ID NO: 889969 - DNA, 25 bp, Homo sapien
tcatgtgacaaggtccaggtcctga

SEQ ID NO: 889970 - DNA, 25 bp, Homo sapien
taactttctatagtcagacctcagg

SEQ ID NO: 889971 - DNA, 25 bp, Homo sapien
cctcagggcacacccttcacttttc

SEQ ID NO: 889972 - DNA, 25 bp, Homo sapien
tacttgtaaggagggctactgagag

SEQ ID NO: 889973 - DNA, 25 bp, Homo sapien
aatacttgtaaggagggctactgag

SEQ ID NO: 889974 - DNA, 25 bp, Homo sapien
gaatacttgtaaggagggctactga

SEQ ID NO: 889975 - DNA, 25 bp, Homo sapien
cggaatacttgtaaggagggctact

SEQ ID NO: 889976 - DNA, 25 bp, Homo sapien
tgatctgataacctgcttgatatca

SEQ ID NO: 889977 - DNA, 25 bp, Homo sapien
gatctgataacctgcttgatatcat

SEQ ID NO: 889978 - DNA, 25 bp, Homo sapien
ctgatctgataacctgcttgatatc

SEQ ID NO: 889979 - DNA, 25 bp, Homo sapien
caaatactaagcacattccgctggg

SEQ ID NO: 889980 - DNA, 25 bp, Homo sapien
aaggaaaaatgacgcagcaccgcag

SEQ ID NO: 889981 - DNA, 25 bp, Homo sapien
tttccgctgtgaggaggccaatggc

SEQ ID NO: 889982 - DNA, 25 bp, Homo sapien
acacacgtgtgaatgcatgcaagca

SEQ ID NO: 889983 - DNA, 25 bp, Homo sapien
gtcgcgactgttcgaggtttaagct

SEQ ID NO: 889984 - DNA, 25 bp, Homo sapien
ctaggcctggcacccccgaagatag

SEQ ID NO: 889985 - DNA, 25 bp, Homo sapien
ctacttgattgaggggcgtcgcgac

SEQ ID NO: 889986 - DNA, 25 bp, Homo sapien
ctgttcgccggtcgcctgggcgact

SEQ ID NO: 889987 - DNA, 25 bp, Homo sapien
caatgtccacacgaagtgaccgatc

SEQ ID NO: 889988 - DNA, 25 bp, Homo sapien
cacgaagtgaccgatcgcccaacag

SEQ ID NO: 889989 - DNA, 25 bp, Homo sapien
tgtccacacgaagtgaccgatcgcc

SEQ ID NO: 889990 - DNA, 25 bp, Homo sapien
acacgaagtgaccgatcgcccaaca

SEQ ID NO: 889991 - DNA, 25 bp, Homo sapien
gtagatttcctacgtatgctgtgta

SEQ ID NO: 889992 - DNA, 25 bp, Homo sapien
cgtattgaaaggtagatttcctacg

SEQ ID NO: 889993 - DNA, 25 bp, Homo sapien
gatttcctacgtatgctgtgtaggg

SEQ ID NO: 889994 - DNA, 25 bp, Homo sapien
gaaaggtagatttcctacgtatgct

SEQ ID NO: 889995 - DNA, 25 bp, Homo sapien
cgtcgtaggtgtcgaagtccgccat

SEQ ID NO: 889996 - DNA, 25 bp, Homo sapien
atcgtcgtaggtgtcgaagtccgcc

SEQ ID NO: 889997 - DNA, 25 bp, Homo sapien
tcgtcgtaggtgtcgaagtccgcca

SEQ ID NO: 889998 - DNA, 25 bp, Homo sapien
gatcgtcgtaggtgtcgaagtccgc

SEQ ID NO: 889999 - DNA, 25 bp, Homo sapien
tattagattggtgtgaaagtgttac

SEQ ID NO: 890000 - DNA, 25 bp, Homo sapien
gagtgagaagttaatattgtggaaa

SEQ ID NO: 890001 - DNA, 25 bp, Homo sapien
ggtgctaatggctgttgggatacaa

SEQ ID NO: 890002 - DNA, 25 bp, Homo sapien
gatacaaggcgagaatgacgaacag

SEQ ID NO: 890003 - DNA, 25 bp, Homo sapien
tcaagcaatgcagggtaaaggagac

SEQ ID NO: 890004 - DNA, 25 bp, Homo sapien
actgttgtcctatggctggcacctt

SEQ ID NO: 890005 - DNA, 25 bp, Homo sapien
ggacggctgcccactgttgtcctat

SEQ ID NO: 890006 - DNA, 25 bp, Homo sapien
ggggacggctgcccactgttgtcct

SEQ ID NO: 890007 - DNA, 25 bp, Homo sapien
cctatggctggcaccttctccttgt

SEQ ID NO: 890008 - DNA, 25 bp, Homo sapien
tttcatcagtctctaatttagagtt

SEQ ID NO: 890009 - DNA, 25 bp, Homo sapien
ttcatcagtctctaatttagagttc

SEQ ID NO: 890010 - DNA, 25 bp, Homo sapien
gggattcctggagtctacaagtctt

SEQ ID NO: 890011 - DNA, 25 bp, Homo sapien
cactagtgctgtcctcgggattcct

SEQ ID NO: 890012 - DNA, 25 bp, Homo sapien
gtctacaagtctttgcttggaaatc

SEQ ID NO: 890013 - DNA, 25 bp, Homo sapien
ctgatttaacaagacactagtgctg

SEQ ID NO: 890014 - DNA, 25 bp, Homo sapien
ctctccacaaagcttctccagactc

SEQ ID NO: 890015 - DNA, 25 bp, Homo sapien
tccctttctgtgaattcctttagcc

SEQ ID NO: 890016 - DNA, 25 bp, Homo sapien
tgaattcctttagcccttatgccca

SEQ ID NO: 890017 - DNA, 25 bp, Homo sapien
agacccataagactgctccctttct

SEQ ID NO: 890018 - DNA, 25 bp, Homo sapien
tgcactgcttggcatagttctctag

SEQ ID NO: 890019 - DNA, 25 bp, Homo sapien
tagttctctaggtgtgaccacagca

SEQ ID NO: 890020 - DNA, 25 bp, Homo sapien
gcatagttctctaggtgtgaccaca

SEQ ID NO: 890021 - DNA, 25 bp, Homo sapien
atgcactgcttggcatagttctcta

SEQ ID NO: 890022 - DNA, 25 bp, Homo sapien
cagcagggctagggtgtcccgcttc

SEQ ID NO: 890023 - DNA, 25 bp, Homo sapien
gcttctgcagcagggctagggtgtc

SEQ ID NO: 890024 - DNA, 25 bp, Homo sapien
tgcagcagggctagggtgtcccgct

SEQ ID NO: 890025 - DNA, 25 bp, Homo sapien
tctgcagcagggctagggtgtcccg

SEQ ID NO: 890026 - DNA, 25 bp, Homo sapien
gctgctgctttgcccgcttgagctt

SEQ ID NO: 890027 - DNA, 25 bp, Homo sapien
ttgagcttggcagggtttcggatca

SEQ ID NO: 890028 - DNA, 25 bp, Homo sapien
tgctttgcccgcttgagcttggcag

SEQ ID NO: 890029 - DNA, 25 bp, Homo sapien
tttgcccgcttgagcttggcagggt

SEQ ID NO: 890030 - DNA, 25 bp, Homo sapien
ggacgatctccaccttccgctcgtt

SEQ ID NO: 890031 - DNA, 25 bp, Homo sapien
tggacgatctccaccttccgctcgt

SEQ ID NO: 890032 - DNA, 25 bp, Homo sapien
ttggacgatctccaccttccgctcg

SEQ ID NO: 890033 - DNA, 25 bp, Homo sapien
atttcaggttctccgcccgacgctg

SEQ ID NO: 890034 - DNA, 25 bp, Homo sapien
ggcatttcaggttctccgcccgacg

SEQ ID NO: 890035 - DNA, 25 bp, Homo sapien
gcatttcaggttctccgcccgacgc

SEQ ID NO: 890036 - DNA, 25 bp, Homo sapien
gcggcatttcaggttctccgcccga

SEQ ID NO: 890037 - DNA, 25 bp, Homo sapien
cctaaagcatctgagagaatctttt

SEQ ID NO: 890038 - DNA, 25 bp, Homo sapien
tcctaaagcatctgagagaatcttt

SEQ ID NO: 890039 - DNA, 25 bp, Homo sapien
gtcctaaagcatctgagagaatctt

SEQ ID NO: 890040 - DNA, 25 bp, Homo sapien
ttctttgccccgaagccgtctgtca

SEQ ID NO: 890041 - DNA, 25 bp, Homo sapien
tccccttcgggattacaggaagctc

SEQ ID NO: 890042 - DNA, 25 bp, Homo sapien
gatgaagaaccctttggcttctttg

SEQ ID NO: 890043 - DNA, 25 bp, Homo sapien
ggcctgggatgaagaaccctttggc

SEQ ID NO: 890044 - DNA, 25 bp, Homo sapien
ggaggtggtttgctctgctcgtgct

SEQ ID NO: 890045 - DNA, 25 bp, Homo sapien
aggtggtttgctctgctcgtgctga

SEQ ID NO: 890046 - DNA, 25 bp, Homo sapien
gtggtttgctctgctcgtgctgacc

SEQ ID NO: 890047 - DNA, 25 bp, Homo sapien
ggtggtttgctctgctcgtgctgac

SEQ ID NO: 890048 - DNA, 25 bp, Homo sapien
ggtgcctcgagtgttagctgcagta

SEQ ID NO: 890049 - DNA, 25 bp, Homo sapien
tcgagtgttagctgcagtagtggct

SEQ ID NO: 890050 - DNA, 25 bp, Homo sapien
cctcgagtgttagctgcagtagtgg

SEQ ID NO: 890051 - DNA, 25 bp, Homo sapien
caggtgcctcgagtgttagctgcag

SEQ ID NO: 890052 - DNA, 25 bp, Homo sapien
tttgggccaactccgaggccaggta

SEQ ID NO: 890053 - DNA, 25 bp, Homo sapien
ggccaactccgaggccaggtactcc

SEQ ID NO: 890054 - DNA, 25 bp, Homo sapien
aactccgaggccaggtactccctgg

SEQ ID NO: 890055 - DNA, 25 bp, Homo sapien
ccgaggccaggtactccctggccct

SEQ ID NO: 890056 - DNA, 25 bp, Homo sapien
tcttctgtgtccaactcgaactcca

SEQ ID NO: 890057 - DNA, 25 bp, Homo sapien
ctgcaccctgctgcaaagactgggt

SEQ ID NO: 890058 - DNA, 25 bp, Homo sapien
gggaccctggacctgattctagccg

SEQ ID NO: 890059 - DNA, 25 bp, Homo sapien
gccagcttgttgcacactcggagga

SEQ ID NO: 890060 - DNA, 25 bp, Homo sapien
gccttccagctgtcggcttcgcctt

SEQ ID NO: 890061 - DNA, 25 bp, Homo sapien
ctggagggattcaggccctaggcct

SEQ ID NO: 890062 - DNA, 25 bp, Homo sapien
cggcttcgccttggcggtgtatcca

SEQ ID NO: 890063 - DNA, 25 bp, Homo sapien
gattcaggccctaggccttccagct

SEQ ID NO: 890064 - DNA, 25 bp, Homo sapien
gagtatcacctcaaattatagaatc

SEQ ID NO: 890065 - DNA, 25 bp, Homo sapien
ggcattagcaacctaggatcccatt

SEQ ID NO: 890066 - DNA, 25 bp, Homo sapien
gagaggattttaagctgagtttcag

SEQ ID NO: 890067 - DNA, 25 bp, Homo sapien
gaatgttaccatgtcttcagaaagg

SEQ ID NO: 890068 - DNA, 25 bp, Homo sapien
tctggcccttgcatggttattctcc

SEQ ID NO: 890069 - DNA, 25 bp, Homo sapien
tttggtcattttgctgctcattagc

SEQ ID NO: 890070 - DNA, 25 bp, Homo sapien
gagggctgtccaagctccttggctg

SEQ ID NO: 890071 - DNA, 25 bp, Homo sapien
cctgttaggcctagcttcaagagct

SEQ ID NO: 890072 - DNA, 25 bp, Homo sapien
catggaccatgtcaaagcctaagtt

SEQ ID NO: 890073 - DNA, 25 bp, Homo sapien
gcagaagccatgaggaagctctgaa

SEQ ID NO: 890074 - DNA, 25 bp, Homo sapien
ggcatccgtatgagctgaagctgaa

SEQ ID NO: 890075 - DNA, 25 bp, Homo sapien
ctctgaaatgtggtccgtgaaggga

SEQ ID NO: 890076 - DNA, 25 bp, Homo sapien
gattgatcagaggatttgctctctc

SEQ ID NO: 890077 - DNA, 25 bp, Homo sapien
aaaagtgcagaaagattgatcagag

SEQ ID NO: 890078 - DNA, 25 bp, Homo sapien
atctttcaagcaaatagcggctcac

SEQ ID NO: 890079 - DNA, 25 bp, Homo sapien
tctctctggaaataccggtcttgcc

SEQ ID NO: 890080 - DNA, 25 bp, Homo sapien
gtctcgcctttgacacacagccagg

SEQ ID NO: 890081 - DNA, 25 bp, Homo sapien
caaggaggtcctccataaacacttg

SEQ ID NO: 890082 - DNA, 25 bp, Homo sapien
aggcttggtgcaggctgacgctttc

SEQ ID NO: 890083 - DNA, 25 bp, Homo sapien
cctgtgcttaaactgccaaattcct

SEQ ID NO: 890084 - DNA, 25 bp, Homo sapien
tcttcccaacctggaaatggcattg

SEQ ID NO: 890085 - DNA, 25 bp, Homo sapien
catttacagcaagcaaagcaagcct

SEQ ID NO: 890086 - DNA, 25 bp, Homo sapien
tctgtttacaaaccagacctgctag

SEQ ID NO: 890087 - DNA, 25 bp, Homo sapien
tgaatcctatgcaaatcagtcctga

SEQ ID NO: 890088 - DNA, 25 bp, Homo sapien
tataatatatagaatggcccatcag

SEQ ID NO: 890089 - DNA, 25 bp, Homo sapien
ggcagttttatggaccacagtatac

SEQ ID NO: 890090 - DNA, 25 bp, Homo sapien
taatatatagaatggcccatcagac

SEQ ID NO: 890091 - DNA, 25 bp, Homo sapien
catttgtggagattatgtagcatat

SEQ ID NO: 890092 - DNA, 25 bp, Homo sapien
agaaaagtatgcctgcacacacaag

SEQ ID NO: 890093 - DNA, 25 bp, Homo sapien
gatgattcctagaactcacaagagg

SEQ ID NO: 890094 - DNA, 25 bp, Homo sapien
tgaattgggctgaaagtggcaagct

SEQ ID NO: 890095 - DNA, 25 bp, Homo sapien
aacacatttgtcagaaccccatgga

SEQ ID NO: 890096 - DNA, 25 bp, Homo sapien
ggacaaacttcctgatggacacaga

SEQ ID NO: 890097 - DNA, 25 bp, Homo sapien
gatatcctaccatattgtgacggag

SEQ ID NO: 890098 - DNA, 25 bp, Homo sapien
tagttagcagagactatcagtggct

SEQ ID NO: 890099 - DNA, 25 bp, Homo sapien
gacaatcaaaagcagataggtgacc

SEQ ID NO: 890100 - DNA, 25 bp, Homo sapien
ttcccaacagtgtccgtggccaaag

SEQ ID NO: 890101 - DNA, 25 bp, Homo sapien
tacttgtggagtgagctaaaaggag

SEQ ID NO: 890102 - DNA, 25 bp, Homo sapien
gagtgagctaaaaggaggctccaag

SEQ ID NO: 890103 - DNA, 25 bp, Homo sapien
ggctccaagacagagtttggttccc

SEQ ID NO: 890104 - DNA, 25 bp, Homo sapien
gagaagtctttctttgagtagccct

SEQ ID NO: 890105 - DNA, 25 bp, Homo sapien
cagaaggtctcctcctctcgtagga

SEQ ID NO: 890106 - DNA, 25 bp, Homo sapien
tgtagatctgatgggccagactgcc

SEQ ID NO: 890107 - DNA, 25 bp, Homo sapien
tctcgtaggaactggaacacggatg

SEQ ID NO: 890108 - DNA, 25 bp, Homo sapien
taaatcaaacaggaggagagaacac

SEQ ID NO: 890109 - DNA, 25 bp, Homo sapien
gagaacacgctgagactggtggtaa

SEQ ID NO: 890110 - DNA, 25 bp, Homo sapien
ggctctttggaactgtggttcctta

SEQ ID NO: 890111 - DNA, 25 bp, Homo sapien
cgctgagactggtggtaaaggctct

SEQ ID NO: 890112 - DNA, 25 bp, Homo sapien
ttgaagtgtgctgacaatgtgccag

SEQ ID NO: 890113 - DNA, 25 bp, Homo sapien
ccctgtgtaatcttatctgtggaaa

SEQ ID NO: 890114 - DNA, 25 bp, Homo sapien
tctgagtgtctcttcgatttttcca

SEQ ID NO: 890115 - DNA, 25 bp, Homo sapien
taagcgctttcatataactgcaaaa

SEQ ID NO: 890116 - DNA, 25 bp, Homo sapien
ctgcagaagacgtgtgaagctagta

SEQ ID NO: 890117 - DNA, 25 bp, Homo sapien
tgtcagaaagcgcacataagatggc

SEQ ID NO: 890118 - DNA, 25 bp, Homo sapien
tgtgcccagccgatcagtgatcttt

SEQ ID NO: 890119 - DNA, 25 bp, Homo sapien
tgataagtgaaacggccttactgct

SEQ ID NO: 890120 - DNA, 25 bp, Homo sapien
cactgacagtacacgtggtcaccca

SEQ ID NO: 890121 - DNA, 25 bp, Homo sapien
aggacaggctaaccctcttgttaag

SEQ ID NO: 890122 - DNA, 25 bp, Homo sapien
tcactgatgagggtagccacactaa

SEQ ID NO: 890123 - DNA, 25 bp, Homo sapien
caaaatacgactgctcactgacagt

SEQ ID NO: 890124 - DNA, 25 bp, Homo sapien
tggtgaacgaaattttaccggctca

SEQ ID NO: 890125 - DNA, 25 bp, Homo sapien
tcgcgcctggccgtattcttacttt

SEQ ID NO: 890126 - DNA, 25 bp, Homo sapien
gggaaaatcctctcttcgtgatgca

SEQ ID NO: 890127 - DNA, 25 bp, Homo sapien
tggcccattcttctcaaccaaaagg

SEQ ID NO: 890128 - DNA, 25 bp, Homo sapien
ctgatagttattagccgagggaacg

SEQ ID NO: 890129 - DNA, 25 bp, Homo sapien
tagccatgagtgttgttccaaatcc

SEQ ID NO: 890130 - DNA, 25 bp, Homo sapien
ttagccagtagttttgggtcaagcc

SEQ ID NO: 890131 - DNA, 25 bp, Homo sapien
tataagtgtcacttgaccaacaccg

SEQ ID NO: 890132 - DNA, 25 bp, Homo sapien
tgttaagtgtcaaaatgtacacgtc

SEQ ID NO: 890133 - DNA, 25 bp, Homo sapien
aagtgttaagtgtcaaaatgtacac

SEQ ID NO: 890134 - DNA, 25 bp, Homo sapien
tgtcaaaggtcaaagaaaagaagtg

SEQ ID NO: 890135 - DNA, 25 bp, Homo sapien
aaaagaagtgttaagtgtcaaaatg

SEQ ID NO: 890136 - DNA, 25 bp, Homo sapien
tgggctgatggcataaacggctgtt

SEQ ID NO: 890137 - DNA, 25 bp, Homo sapien
taaggttactgatcctgataaaaca

SEQ ID NO: 890138 - DNA, 25 bp, Homo sapien
tgatggcataaacggctgttcaatg

SEQ ID NO: 890139 - DNA, 25 bp, Homo sapien
aacatcatttgttctatcactgggc

SEQ ID NO: 890140 - DNA, 25 bp, Homo sapien
taaaatcagttactgaagtcctctg

SEQ ID NO: 890141 - DNA, 25 bp, Homo sapien
ccgcagcaaagtgtatcattaaaaa

SEQ ID NO: 890142 - DNA, 25 bp, Homo sapien
gattcgttctctggcacatacataa

SEQ ID NO: 890143 - DNA, 25 bp, Homo sapien
caaggcttgtaatggtctgaaacca

SEQ ID NO: 890144 - DNA, 25 bp, Homo sapien
ggcctggttggcaatgcaagtaact

SEQ ID NO: 890145 - DNA, 25 bp, Homo sapien
tctaagggcagtatgcaagaaacta

SEQ ID NO: 890146 - DNA, 25 bp, Homo sapien
aaacaactaaggctccagtcatcac

SEQ ID NO: 890147 - DNA, 25 bp, Homo sapien
ttcttttggcggaagacaatacagt

SEQ ID NO: 890148 - DNA, 25 bp, Homo sapien
gttgatcagagccaaaaataaggga

SEQ ID NO: 890149 - DNA, 25 bp, Homo sapien
tagctggtgtttgcagtagaacttc

SEQ ID NO: 890150 - DNA, 25 bp, Homo sapien
taaaccatgtctgtaaaccgtgaag

SEQ ID NO: 890151 - DNA, 25 bp, Homo sapien
caaagctcaataaatcgtggccgtt

SEQ ID NO: 890152 - DNA, 25 bp, Homo sapien
tggtccagtgatgctcaaggtgaga

SEQ ID NO: 890153 - DNA, 25 bp, Homo sapien
gactaaggaacatcctggtccagtg

SEQ ID NO: 890154 - DNA, 25 bp, Homo sapien
gaggatgcatcactatgactaagga

SEQ ID NO: 890155 - DNA, 25 bp, Homo sapien
caaagagggaaagctgtagtacagt

SEQ ID NO: 890156 - DNA, 25 bp, Homo sapien
gcttcagcagttccaatcatactaa

SEQ ID NO: 890157 - DNA, 25 bp, Homo sapien
attccaagattcatagcttcagcag

SEQ ID NO: 890158 - DNA, 25 bp, Homo sapien
tcagcagttccaatcatactaatag

SEQ ID NO: 890159 - DNA, 25 bp, Homo sapien
ctaacagcatgttgttgcagatctt

SEQ ID NO: 890160 - DNA, 25 bp, Homo sapien
ctgaaaataaattgagtacatatta

SEQ ID NO: 890161 - DNA, 25 bp, Homo sapien
taaatatctgtattttcaaggtaaa

SEQ ID NO: 890162 - DNA, 25 bp, Homo sapien
tctgtattttcaaggtaaaactcac

SEQ ID NO: 890163 - DNA, 25 bp, Homo sapien
atatctgtattttcaaggtaaaact

SEQ ID NO: 890164 - DNA, 25 bp, Homo sapien
actgttgattttctcgagtgcggaa

SEQ ID NO: 890165 - DNA, 25 bp, Homo sapien
tcaactgttgattttctcgagtgcg

SEQ ID NO: 890166 - DNA, 25 bp, Homo sapien
tgattttctcgagtgcggaagagaa

SEQ ID NO: 890167 - DNA, 25 bp, Homo sapien
tccttgcccaattccaggggctgct

SEQ ID NO: 890168 - DNA, 25 bp, Homo sapien
gggcaggcacactccggataacttt

SEQ ID NO: 890169 - DNA, 25 bp, Homo sapien
tcttaatggcgcctgggaactgtct

SEQ ID NO: 890170 - DNA, 25 bp, Homo sapien
caaaaagtgcaagcctgctggagta

SEQ ID NO: 890171 - DNA, 25 bp, Homo sapien
gcaagatattgcctgactccagaga

SEQ ID NO: 890172 - DNA, 25 bp, Homo sapien
gctccacagtacaccacgttggagc

SEQ ID NO: 890173 - DNA, 25 bp, Homo sapien
gttcccagatcgtgcagctcctaca

SEQ ID NO: 890174 - DNA, 25 bp, Homo sapien
ttcatcttcaactcctcccaccata

SEQ ID NO: 890175 - DNA, 25 bp, Homo sapien
catgcaccccagcaactcttgggca

SEQ ID NO: 890176 - DNA, 25 bp, Homo sapien
taaagggatagaagcaaaagaatat

SEQ ID NO: 890177 - DNA, 25 bp, Homo sapien
ctgaatcatttgggggtaaagggat

SEQ ID NO: 890178 - DNA, 25 bp, Homo sapien
tgaatcatttgggggtaaagggata

SEQ ID NO: 890179 - DNA, 25 bp, Homo sapien
agggatagaagcaaaagaatatatt

SEQ ID NO: 890180 - DNA, 25 bp, Homo sapien
gatctctttgcctcatgatcctcct

SEQ ID NO: 890181 - DNA, 25 bp, Homo sapien
tctccattaagttattctttctgaa

SEQ ID NO: 890182 - DNA, 25 bp, Homo sapien
ccagccagcatttcttatataatct

SEQ ID NO: 890183 - DNA, 25 bp, Homo sapien
ttatataatctcaaagttcctccca

SEQ ID NO: 890184 - DNA, 25 bp, Homo sapien
tccccacaatgaattgtcctaacac

SEQ ID NO: 890185 - DNA, 25 bp, Homo sapien
aacaatcagttatttaatccatctg

SEQ ID NO: 890186 - DNA, 25 bp, Homo sapien
gaattgtcctaacacaatttattaa

SEQ ID NO: 890187 - DNA, 25 bp, Homo sapien
tgaagtagggatctgctccccacaa

SEQ ID NO: 890188 - DNA, 25 bp, Homo sapien
tcatcttcctcatataggtcttaca

SEQ ID NO: 890189 - DNA, 25 bp, Homo sapien
taagtactattctagacctcagaac

SEQ ID NO: 890190 - DNA, 25 bp, Homo sapien
caagagaatggacatgtttacatgc

SEQ ID NO: 890191 - DNA, 25 bp, Homo sapien
tgctcctatcacagaatatcacaga

SEQ ID NO: 890192 - DNA, 25 bp, Homo sapien
ggccagtaagtattaacacctgaat

SEQ ID NO: 890193 - DNA, 25 bp, Homo sapien
ttcaaaccgtagcacaatatacaag

SEQ ID NO: 890194 - DNA, 25 bp, Homo sapien
tcaggaaaggaggaaccctcatgac

SEQ ID NO: 890195 - DNA, 25 bp, Homo sapien
taatatctttacattggccagtaag

SEQ ID NO: 890196 - DNA, 25 bp, Homo sapien
gtttactcatgtgtttacctcttct

SEQ ID NO: 890197 - DNA, 25 bp, Homo sapien
tctctggtcgttggaagtttactca

SEQ ID NO: 890198 - DNA, 25 bp, Homo sapien
aatggctgtctgaatatctctggtc

SEQ ID NO: 890199 - DNA, 25 bp, Homo sapien
ttgttccttcttagtaatggctgtc

SEQ ID NO: 890200 - DNA, 25 bp, Homo sapien
ttttctgcccacaaacttataattc

SEQ ID NO: 890201 - DNA, 25 bp, Homo sapien
ttctgcccacaaacttataattcct

SEQ ID NO: 890202 - DNA, 25 bp, Homo sapien
tgcccacaaacttataattccttat

SEQ ID NO: 890203 - DNA, 25 bp, Homo sapien
tctgcccacaaacttataattcctt

SEQ ID NO: 890204 - DNA, 25 bp, Homo sapien
cactgatctctatgtctttcactaa

SEQ ID NO: 890205 - DNA, 25 bp, Homo sapien
aattgagtaatgtgacttctccaac

SEQ ID NO: 890206 - DNA, 25 bp, Homo sapien
tttgtcgaaaagaccatcccttctc

SEQ ID NO: 890207 - DNA, 25 bp, Homo sapien
tataagatgtgagctatagatcaac

SEQ ID NO: 890208 - DNA, 25 bp, Homo sapien
gcttttcaaaagtagcagccttggg

SEQ ID NO: 890209 - DNA, 25 bp, Homo sapien
cactgcaaaatttatgtcaattgag

SEQ ID NO: 890210 - DNA, 25 bp, Homo sapien
gttccttacagtgctccattcctga

SEQ ID NO: 890211 - DNA, 25 bp, Homo sapien
tttagtagtttgtggctctcaaaaa

SEQ ID NO: 890212 - DNA, 25 bp, Homo sapien
tatttagagcgcatattggacactg

SEQ ID NO: 890213 - DNA, 25 bp, Homo sapien
tcagctactcaagggccaatgcaga

SEQ ID NO: 890214 - DNA, 25 bp, Homo sapien
tcagctgacactgcgtgaggatacc

SEQ ID NO: 890215 - DNA, 25 bp, Homo sapien
gcttggccaattctaacaggaggat

SEQ ID NO: 890216 - DNA, 25 bp, Homo sapien
tatttatctacatcactgattcata

SEQ ID NO: 890217 - DNA, 25 bp, Homo sapien
aatacctaggtattatagaatacaa

SEQ ID NO: 890218 - DNA, 25 bp, Homo sapien
tatctcatgatgcagtctaatactg

SEQ ID NO: 890219 - DNA, 25 bp, Homo sapien
ttaatcaattctcccttattggaca

SEQ ID NO: 890220 - DNA, 25 bp, Homo sapien
taaaaaggctctctaacagggccac

SEQ ID NO: 890221 - DNA, 25 bp, Homo sapien
gaagccaccagctggcgtgccacag

SEQ ID NO: 890222 - DNA, 25 bp, Homo sapien
gcaggtacagtaccctgacaggcca

SEQ ID NO: 890223 - DNA, 25 bp, Homo sapien
ggtgacttgtgacattctcctgcca

SEQ ID NO: 890224 - DNA, 25 bp, Homo sapien
gctgcgcaacgtgccacccagctgc

SEQ ID NO: 890225 - DNA, 25 bp, Homo sapien
atatatcatgaaaccatcttattct

SEQ ID NO: 890226 - DNA, 25 bp, Homo sapien
aatatatcatgaaaccatcttattc

SEQ ID NO: 890227 - DNA, 25 bp, Homo sapien
aaatatatcatgaaaccatcttatt

SEQ ID NO: 890228 - DNA, 25 bp, Homo sapien
tctttcccatacaagctttatgtac

SEQ ID NO: 890229 - DNA, 25 bp, Homo sapien
gattaggaacctacaaataccaaca

SEQ ID NO: 890230 - DNA, 25 bp, Homo sapien
tagaagattaggaacctacaaatac

SEQ ID NO: 890231 - DNA, 25 bp, Homo sapien
tacaagctttatgtactgagtgagc

SEQ ID NO: 890232 - DNA, 25 bp, Homo sapien
gaatatgtaaaatctattgggtaag

SEQ ID NO: 890233 - DNA, 25 bp, Homo sapien
gactactgaattctcgttcttagaa

SEQ ID NO: 890234 - DNA, 25 bp, Homo sapien
tttccaaaaatacactagcatttcg

SEQ ID NO: 890235 - DNA, 25 bp, Homo sapien
tgatctttgcaaaattcagacaaac

SEQ ID NO: 890236 - DNA, 25 bp, Homo sapien
caaagactgaaatcctaactctcaa

SEQ ID NO: 890237 - DNA, 25 bp, Homo sapien
gccacattaactgtgtcctaatcag

SEQ ID NO: 890238 - DNA, 25 bp, Homo sapien
aagactccccagtgtgtgcaaatga

SEQ ID NO: 890239 - DNA, 25 bp, Homo sapien
cattgtttccttgcctatatattta

SEQ ID NO: 890240 - DNA, 25 bp, Homo sapien
cattgtaggcaactatatgtatgca

SEQ ID NO: 890241 - DNA, 25 bp, Homo sapien
gacagcaggaggcaattccagaaca

SEQ ID NO: 890242 - DNA, 25 bp, Homo sapien
gaagcagactgttgcatcaagttta

SEQ ID NO: 890243 - DNA, 25 bp, Homo sapien
gctacatagctcacaaaagaccctg

SEQ ID NO: 890244 - DNA, 25 bp, Homo sapien
tctgacaacatatcctatcacctgg

SEQ ID NO: 890245 - DNA, 25 bp, Homo sapien
catagttaggcttgtgaaaaggacc

SEQ ID NO: 890246 - DNA, 25 bp, Homo sapien
aaggaccaacttgcacctttcagag

SEQ ID NO: 890247 - DNA, 25 bp, Homo sapien
gacatgaacatgaactgcctaatga

SEQ ID NO: 890248 - DNA, 25 bp, Homo sapien
actaggcgccagctgataaacaaac

SEQ ID NO: 890249 - DNA, 25 bp, Homo sapien
tagcaggtttggatgcaatgccacc

SEQ ID NO: 890250 - DNA, 25 bp, Homo sapien
aaagtgtcctgcaagagtttcaaag

SEQ ID NO: 890251 - DNA, 25 bp, Homo sapien
agctcttgactccagactaggcgcc

SEQ ID NO: 890252 - DNA, 25 bp, Homo sapien
tgttcactagctcctcaatattgcg

SEQ ID NO: 890253 - DNA, 25 bp, Homo sapien
tgtaaatgccgaatcatgaaaagct

SEQ ID NO: 890254 - DNA, 25 bp, Homo sapien
gataatagctcctcttactctgcac

SEQ ID NO: 890255 - DNA, 25 bp, Homo sapien
tatgggtagcagtcagctcacctga

SEQ ID NO: 890256 - DNA, 25 bp, Homo sapien
tattctggcctcatactaagtttga

SEQ ID NO: 890257 - DNA, 25 bp, Homo sapien
ctctcacacataagaagcattaggg

SEQ ID NO: 890258 - DNA, 25 bp, Homo sapien
tacaatgtcctcctagaggctgtag

SEQ ID NO: 890259 - DNA, 25 bp, Homo sapien
taaaatctccctaggtacaatgtcc

SEQ ID NO: 890260 - DNA, 25 bp, Homo sapien
taaattgatcataatcacactcgcc

SEQ ID NO: 890261 - DNA, 25 bp, Homo sapien
cataatcacactcgccacaatggca

SEQ ID NO: 890262 - DNA, 25 bp, Homo sapien
tctcatccccactaaattgatcata

SEQ ID NO: 890263 - DNA, 25 bp, Homo sapien
acttcctctttaagttgttctgagt

SEQ ID NO: 890264 - DNA, 25 bp, Homo sapien
accctgacactagcgcaggtggaga

SEQ ID NO: 890265 - DNA, 25 bp, Homo sapien
gaaccctgacactagcgcaggtgga

SEQ ID NO: 890266 - DNA, 25 bp, Homo sapien
atgaaccctgacactagcgcaggtg

SEQ ID NO: 890267 - DNA, 25 bp, Homo sapien
cctgacactagcgcaggtggagatc

SEQ ID NO: 890268 - DNA, 25 bp, Homo sapien
gcagggcccatacaccactctgtat

SEQ ID NO: 890269 - DNA, 25 bp, Homo sapien
cccatacaccactctgtatagcatg

SEQ ID NO: 890270 - DNA, 25 bp, Homo sapien
gcattgctgctatagacggcagaaa

SEQ ID NO: 890271 - DNA, 25 bp, Homo sapien
cattgctgctatagacggcagaaaa

SEQ ID NO: 890272 - DNA, 25 bp, Homo sapien
ctgttcagaccctttacaagctcca

SEQ ID NO: 890273 - DNA, 25 bp, Homo sapien
tcagaccctttacaagctccatccc

SEQ ID NO: 890274 - DNA, 25 bp, Homo sapien
tgttcagaccctttacaagctccat

SEQ ID NO: 890275 - DNA, 25 bp, Homo sapien
gttcagaccctttacaagctccatc

SEQ ID NO: 890276 - DNA, 25 bp, Homo sapien
ggtgtattcagttatgttagcattt

SEQ ID NO: 890277 - DNA, 25 bp, Homo sapien
caggtgtattcagttatgttagcat

SEQ ID NO: 890278 - DNA, 25 bp, Homo sapien
tcaggtgtattcagttatgttagca

SEQ ID NO: 890279 - DNA, 25 bp, Homo sapien
gtgtattcagttatgttagcatttt

SEQ ID NO: 890280 - DNA, 25 bp, Homo sapien
taaaatttagatgatctgctccttg

SEQ ID NO: 890281 - DNA, 25 bp, Homo sapien
cattcatacatggttggattcagtt

SEQ ID NO: 890282 - DNA, 25 bp, Homo sapien
tatcagagttataaaggtcttacag

SEQ ID NO: 890283 - DNA, 25 bp, Homo sapien
catacatgggctaaaggaaacttgg

SEQ ID NO: 890284 - DNA, 25 bp, Homo sapien
ccagaaacaggggcatccatgaaaa

SEQ ID NO: 890285 - DNA, 25 bp, Homo sapien
atgaaaactgctcccattttctcaa

SEQ ID NO: 890286 - DNA, 25 bp, Homo sapien
catccatgaaaactgctcccatttt

SEQ ID NO: 890287 - DNA, 25 bp, Homo sapien
cagaaacaggggcatccatgaaaac

SEQ ID NO: 890288 - DNA, 25 bp, Homo sapien
caatagtgctggaatctattaataa

SEQ ID NO: 890289 - DNA, 25 bp, Homo sapien
agtgctggaatctattaataatgag

SEQ ID NO: 890290 - DNA, 25 bp, Homo sapien
ctgcaggatcaatagtgctggaatc

SEQ ID NO: 890291 - DNA, 25 bp, Homo sapien
caggatcaatagtgctggaatctat

SEQ ID NO: 890292 - DNA, 25 bp, Homo sapien
ttgcattgatactggtgggcagcat

SEQ ID NO: 890293 - DNA, 25 bp, Homo sapien
gaatcccatttgctccggaataagc

SEQ ID NO: 890294 - DNA, 25 bp, Homo sapien
ccggaataagcttctattgcattga

SEQ ID NO: 890295 - DNA, 25 bp, Homo sapien
ctggtgggcagcattgtaataattc

SEQ ID NO: 890296 - DNA, 25 bp, Homo sapien
ccttcatgcagggataagccttatt

SEQ ID NO: 890297 - DNA, 25 bp, Homo sapien
tctccaagcattggcttcttgatag

SEQ ID NO: 890298 - DNA, 25 bp, Homo sapien
tgatagcacttctgttgcaaagata

SEQ ID NO: 890299 - DNA, 25 bp, Homo sapien
ggataagccttattcttaaggcagc

SEQ ID NO: 890300 - DNA, 25 bp, Homo sapien
tacagtcgttccacatacaagctgg

SEQ ID NO: 890301 - DNA, 25 bp, Homo sapien
tctgtttagagatcaagtacccttg

SEQ ID NO: 890302 - DNA, 25 bp, Homo sapien
tacaagctggaagtactacaggcat

SEQ ID NO: 890303 - DNA, 25 bp, Homo sapien
tgccagtctagggtaatagtcccca

SEQ ID NO: 890304 - DNA, 25 bp, Homo sapien
gttcacctgcatcttgaaactcttt

SEQ ID NO: 890305 - DNA, 25 bp, Homo sapien
cccatgttgcccagtccaatgaatc

SEQ ID NO: 890306 - DNA, 25 bp, Homo sapien
ttttgccattggattccccatgttg

SEQ ID NO: 890307 - DNA, 25 bp, Homo sapien
gcaggcatcagggaacacatcataa

SEQ ID NO: 890308 - DNA, 25 bp, Homo sapien
cataagtatggtcacgtagaaccac

SEQ ID NO: 890309 - DNA, 25 bp, Homo sapien
gatgccaaagaaggtaagagacaca

SEQ ID NO: 890310 - DNA, 25 bp, Homo sapien
tttaacaggcaattcactctaggtc

SEQ ID NO: 890311 - DNA, 25 bp, Homo sapien
aatgtggcatctgacctggatatta

SEQ ID NO: 890312 - DNA, 25 bp, Homo sapien
aactgtatactttatgtacaactta

SEQ ID NO: 890313 - DNA, 25 bp, Homo sapien
cctaaagttctaggagcgcaggcgt

SEQ ID NO: 890314 - DNA, 25 bp, Homo sapien
gcttcaccggcttatatacatcaaa

SEQ ID NO: 890315 - DNA, 25 bp, Homo sapien
catcaaaactaatcaaactgtatac

SEQ ID NO: 890316 - DNA, 25 bp, Homo sapien
taaagtgtgaagtctgaatggatcc

SEQ ID NO: 890317 - DNA, 25 bp, Homo sapien
tagatgataccatggaatcactgct

SEQ ID NO: 890318 - DNA, 25 bp, Homo sapien
tcaaatgattcaagcgggataggta

SEQ ID NO: 890319 - DNA, 25 bp, Homo sapien
tagggttaaagtgtcatgtcagcaa

SEQ ID NO: 890320 - DNA, 25 bp, Homo sapien
acatggtaatggcatccttctgcca

SEQ ID NO: 890321 - DNA, 25 bp, Homo sapien
aatacatggtaatggcatccttctg

SEQ ID NO: 890322 - DNA, 25 bp, Homo sapien
tacatggtaatggcatccttctgcc

SEQ ID NO: 890323 - DNA, 25 bp, Homo sapien
atacatggtaatggcatccttctgc

SEQ ID NO: 890324 - DNA, 25 bp, Homo sapien
attagctaggtatcgtggtgcaccc

SEQ ID NO: 890325 - DNA, 25 bp, Homo sapien
tagtaggcaactagccttgtctcaa

SEQ ID NO: 890326 - DNA, 25 bp, Homo sapien
taggtatcgtggtgcaccctgcaat

SEQ ID NO: 890327 - DNA, 25 bp, Homo sapien
tggcttcacgccagtagttctagac

SEQ ID NO: 890328 - DNA, 25 bp, Homo sapien
ccagccagaaaggaaattcagaggt

SEQ ID NO: 890329 - DNA, 25 bp, Homo sapien
agccagaaaggaaattcagaggttt

SEQ ID NO: 890330 - DNA, 25 bp, Homo sapien
tctccagccagaaaggaaattcaga

SEQ ID NO: 890331 - DNA, 25 bp, Homo sapien
tccagccagaaaggaaattcagagg

SEQ ID NO: 890332 - DNA, 25 bp, Homo sapien
tggagttgggcgctccaaacgtcct

SEQ ID NO: 890333 - DNA, 25 bp, Homo sapien
tgagtgcgggttgctcctggagttg

SEQ ID NO: 890334 - DNA, 25 bp, Homo sapien
tccaaagcagcatgccggggtccca

SEQ ID NO: 890335 - DNA, 25 bp, Homo sapien
cgtcctcggagtcctaactccaaag

SEQ ID NO: 890336 - DNA, 25 bp, Homo sapien
ctccgaggagccgtaaggaggctgc

SEQ ID NO: 890337 - DNA, 25 bp, Homo sapien
gaggcagctccgaggagccgtaagg

SEQ ID NO: 890338 - DNA, 25 bp, Homo sapien
cagccgccggctccagtaccggaga

SEQ ID NO: 890339 - DNA, 25 bp, Homo sapien
cagtaccggagaccggaggcagctc

SEQ ID NO: 890340 - DNA, 25 bp, Homo sapien
ctcatttacagcctgcgggcgggag

SEQ ID NO: 890341 - DNA, 25 bp, Homo sapien
tgtgcgaaggaccaataagaggcct

SEQ ID NO: 890342 - DNA, 25 bp, Homo sapien
tttacggacagggaagcagaccaat

SEQ ID NO: 890343 - DNA, 25 bp, Homo sapien
taagaggcctttttgaacagtgacg

SEQ ID NO: 890344 - DNA, 25 bp, Homo sapien
tcttcctccagcactacaggtttct

SEQ ID NO: 890345 - DNA, 25 bp, Homo sapien
ctataattaactcctgaactgcaat

SEQ ID NO: 890346 - DNA, 25 bp, Homo sapien
cagcactacaggtttctataattaa

SEQ ID NO: 890347 - DNA, 25 bp, Homo sapien
aactgcaattggtctttcaactgtg

SEQ ID NO: 890348 - DNA, 25 bp, Homo sapien
catggacctgaatttttatgacctc

SEQ ID NO: 890349 - DNA, 25 bp, Homo sapien
tgatgatgtctatggtataaaggtg

SEQ ID NO: 890350 - DNA, 25 bp, Homo sapien
gacctctcagtatgggaagattcaa

SEQ ID NO: 890351 - DNA, 25 bp, Homo sapien
ggtgttacaaattcccataaatcac

SEQ ID NO: 890352 - DNA, 25 bp, Homo sapien
agatatatatctgggagtcgtgggc

SEQ ID NO: 890353 - DNA, 25 bp, Homo sapien
tctaagacataagagatgctcagga

SEQ ID NO: 890354 - DNA, 25 bp, Homo sapien
cacagggaactgtgtaacagtgagt

SEQ ID NO: 890355 - DNA, 25 bp, Homo sapien
tcggaagtggacattattcaagggc

SEQ ID NO: 890356 - DNA, 25 bp, Homo sapien
gacaaaatgaggagccatctatttt

SEQ ID NO: 890357 - DNA, 25 bp, Homo sapien
cagggactgtacagtcaggtctgcc

SEQ ID NO: 890358 - DNA, 25 bp, Homo sapien
cataggaaatccatacacctcaggg

SEQ ID NO: 890359 - DNA, 25 bp, Homo sapien
ttctctgacttgaaggacaaaatga

SEQ ID NO: 890360 - DNA, 25 bp, Homo sapien
tcattggccgtaagaaagatgcaag

SEQ ID NO: 890361 - DNA, 25 bp, Homo sapien
gatgcaaggcacatggagtgacgat

SEQ ID NO: 890362 - DNA, 25 bp, Homo sapien
gagtgacgatagctacaagaccctt

SEQ ID NO: 890363 - DNA, 25 bp, Homo sapien
ccttgtggcagacctcgttggtttc

SEQ ID NO: 890364 - DNA, 25 bp, Homo sapien
tccaataggctgctgactagcagtg

SEQ ID NO: 890365 - DNA, 25 bp, Homo sapien
gtgacagcaggtattcttgtttcgt

SEQ ID NO: 890366 - DNA, 25 bp, Homo sapien
tatggaagacctcaaaggctcttct

SEQ ID NO: 890367 - DNA, 25 bp, Homo sapien
taggctgctgactagcagtgacagc

SEQ ID NO: 890368 - DNA, 25 bp, Homo sapien
ttaagatgtgtcttaaaacatcact

SEQ ID NO: 890369 - DNA, 25 bp, Homo sapien
tttaagatgtgtcttaaaacatcac

SEQ ID NO: 890370 - DNA, 25 bp, Homo sapien
ctggttctgctaacactgatgctac

SEQ ID NO: 890371 - DNA, 25 bp, Homo sapien
aacactgatgctacaattactgtca

SEQ ID NO: 890372 - DNA, 25 bp, Homo sapien
accgtccacacagctggttctgcta

SEQ ID NO: 890373 - DNA, 25 bp, Homo sapien
cgtccacacagctggttctgctaac

SEQ ID NO: 890374 - DNA, 25 bp, Homo sapien
gaggctgttaaacctgtgaagggta

SEQ ID NO: 890375 - DNA, 25 bp, Homo sapien
tggaggctgttaaacctgtgaaggg

SEQ ID NO: 890376 - DNA, 25 bp, Homo sapien
gcctagccacggtctcttgtgagaa

SEQ ID NO: 890377 - DNA, 25 bp, Homo sapien
gggaattttgtctactcacagcttg

SEQ ID NO: 890378 - DNA, 25 bp, Homo sapien
ttcatggcaggatcagcctagccac

SEQ ID NO: 890379 - DNA, 25 bp, Homo sapien
gctatatcgcactatgtaacgtcag

SEQ ID NO: 890380 - DNA, 25 bp, Homo sapien
taccatctggaacttgctagacatc

SEQ ID NO: 890381 - DNA, 25 bp, Homo sapien
gctgagctggtgaaacttgctggaa

SEQ ID NO: 890382 - DNA, 25 bp, Homo sapien
gaacttgctagaaatctgccctctg

SEQ ID NO: 890383 - DNA, 25 bp, Homo sapien
gagaagtccttgtgttgctgagctg

SEQ ID NO: 890384 - DNA, 25 bp, Homo sapien
gggaagaaaccatgcttgattcctt

SEQ ID NO: 890385 - DNA, 25 bp, Homo sapien
tttttcccagagcacatagtaaatg

SEQ ID NO: 890386 - DNA, 25 bp, Homo sapien
tattaagaagcgacatgacacaatg

SEQ ID NO: 890387 - DNA, 25 bp, Homo sapien
tttgacagttatctataccatccgg

SEQ ID NO: 890388 - DNA, 25 bp, Homo sapien
catatcctttctggtgctattgcaa

SEQ ID NO: 890389 - DNA, 25 bp, Homo sapien
gcaacagaagactatgatgaattcg

SEQ ID NO: 890390 - DNA, 25 bp, Homo sapien
ctattgcaaggtttgtcagggtttt

SEQ ID NO: 890391 - DNA, 25 bp, Homo sapien
gcttcaacatttaatgcgatctaat

SEQ ID NO: 890392 - DNA, 25 bp, Homo sapien
ctgccctttccacatcgctggtgag

SEQ ID NO: 890393 - DNA, 25 bp, Homo sapien
tagtttaggccgactgagacgcaga

SEQ ID NO: 890394 - DNA, 25 bp, Homo sapien
ggatacggtactgtccatggacctc

SEQ ID NO: 890395 - DNA, 25 bp, Homo sapien
tgagttacttaaacctcctgtgtgt

SEQ ID NO: 890396 - DNA, 25 bp, Homo sapien
tcagaatgtaaatccagacgcattg

SEQ ID NO: 890397 - DNA, 25 bp, Homo sapien
caaggacgaagtaaggagagagcca

SEQ ID NO: 890398 - DNA, 25 bp, Homo sapien
gttttgctgcgattaagttgaacga

SEQ ID NO: 890399 - DNA, 25 bp, Homo sapien
aaatccagacgcattgttttgctgc

SEQ ID NO: 890400 - DNA, 25 bp, Homo sapien
gaagtgacgcaaggcctactgtcgg

SEQ ID NO: 890401 - DNA, 25 bp, Homo sapien
ggatcggaagcctgcgtaactttct

SEQ ID NO: 890402 - DNA, 25 bp, Homo sapien
cagtgtgggttttaccggcgcagta

SEQ ID NO: 890403 - DNA, 25 bp, Homo sapien
tggtgacgaggctttccttcccgaa

SEQ ID NO: 890404 - DNA, 25 bp, Homo sapien
tctcaggatgttagtgaagctacac

SEQ ID NO: 890405 - DNA, 25 bp, Homo sapien
gacatggtaaagctgcttgcttcta

SEQ ID NO: 890406 - DNA, 25 bp, Homo sapien
tttgtgtagggagtgtacttctctc

SEQ ID NO: 890407 - DNA, 25 bp, Homo sapien
cctgtttgtagaggtgcactttaga

SEQ ID NO: 890408 - DNA, 25 bp, Homo sapien
tggaatttcttgttaatagggctat

SEQ ID NO: 890409 - DNA, 25 bp, Homo sapien
taattgaggttaacagaagttgaaa

SEQ ID NO: 890410 - DNA, 25 bp, Homo sapien
gaaaaaagtattatccttaatcagc

SEQ ID NO: 890411 - DNA, 25 bp, Homo sapien
cacacatcccttataagactattaa

SEQ ID NO: 890412 - DNA, 25 bp, Homo sapien
ttaacattttgaataggctaataat

SEQ ID NO: 890413 - DNA, 25 bp, Homo sapien
tcacaaagaaaacggggaatcagca

SEQ ID NO: 890414 - DNA, 25 bp, Homo sapien
tcttcacaaagaaaacggggaatca

SEQ ID NO: 890415 - DNA, 25 bp, Homo sapien
tatttacttagttactgcaaggagg

SEQ ID NO: 890416 - DNA, 25 bp, Homo sapien
cctccaggtatttaacgagcagggt

SEQ ID NO: 890417 - DNA, 25 bp, Homo sapien
ggctccttagagtgcttactgcata

SEQ ID NO: 890418 - DNA, 25 bp, Homo sapien
gatttcaacctatgctctgggtaga

SEQ ID NO: 890419 - DNA, 25 bp, Homo sapien
cagaataatcgggttatcattgcca

SEQ ID NO: 890420 - DNA, 25 bp, Homo sapien
gctcctgatcctccaagtcaacatt

SEQ ID NO: 890421 - DNA, 25 bp, Homo sapien
tgggcatgggacaggcttttgcttt

SEQ ID NO: 890422 - DNA, 25 bp, Homo sapien
caagtcaacatttacgtgggcatgg

SEQ ID NO: 890423 - DNA, 25 bp, Homo sapien
caacatttacgtgggcatgggacag

SEQ ID NO: 890424 - DNA, 25 bp, Homo sapien
tgtgcccgatgtgcagcgagcagtt

SEQ ID NO: 890425 - DNA, 25 bp, Homo sapien
catagagcggatgctttcatgcacc

SEQ ID NO: 890426 - DNA, 25 bp, Homo sapien
tgatgttcacaagaagtgtcccctc

SEQ ID NO: 890427 - DNA, 25 bp, Homo sapien
tagaccactgaggagaccatagagc

SEQ ID NO: 890428 - DNA, 25 bp, Homo sapien
cactaaatgggtatcttggtccgca

SEQ ID NO: 890429 - DNA, 25 bp, Homo sapien
tagcacttgggagaaaagaacactc

SEQ ID NO: 890430 - DNA, 25 bp, Homo sapien
caaggcatgatggtactgtcggtga

SEQ ID NO: 890431 - DNA, 25 bp, Homo sapien
ggtccgcagatatcaataggcataa

SEQ ID NO: 890432 - DNA, 25 bp, Homo sapien
tgatgattacatgtgcaaatgtaca

SEQ ID NO: 890433 - DNA, 25 bp, Homo sapien
tctacaaagatacatcattccaaaa

SEQ ID NO: 890434 - DNA, 25 bp, Homo sapien
tgtttagcaccttatatcaaagtaa

SEQ ID NO: 890435 - DNA, 25 bp, Homo sapien
ctgaagaacctagagctttttttgt

SEQ ID NO: 890436 - DNA, 25 bp, Homo sapien
tgaggatttcttggcacagttatga

SEQ ID NO: 890437 - DNA, 25 bp, Homo sapien
tcttggcacagttatgaccagcatg

SEQ ID NO: 890438 - DNA, 25 bp, Homo sapien
caaaatcagcaactgctggtgagga

SEQ ID NO: 890439 - DNA, 25 bp, Homo sapien
tgaatgcttcccctgaaaaaaggtg

SEQ ID NO: 890440 - DNA, 25 bp, Homo sapien
tgttctgtgaccattcttagcgtga

SEQ ID NO: 890441 - DNA, 25 bp, Homo sapien
cacttgaatggtttgcggacacgaa

SEQ ID NO: 890442 - DNA, 25 bp, Homo sapien
cctgataatctcagccgacaccggg

SEQ ID NO: 890443 - DNA, 25 bp, Homo sapien
attgattgtgtggtgccgcaggccc

SEQ ID NO: 890444 - DNA, 25 bp, Homo sapien
gccactgtgggagctacttgttgcc

SEQ ID NO: 890445 - DNA, 25 bp, Homo sapien
tgtgttaacagttccctaccatgcc

SEQ ID NO: 890446 - DNA, 25 bp, Homo sapien
caattgccagattagagagtaaggg

SEQ ID NO: 890447 - DNA, 25 bp, Homo sapien
tgtttaataagcacctgtagtcaga

SEQ ID NO: 890448 - DNA, 25 bp, Homo sapien
ggaacccagggatgtccaatccata

SEQ ID NO: 890449 - DNA, 25 bp, Homo sapien
tattaagagcttaccatactgggta

SEQ ID NO: 890450 - DNA, 25 bp, Homo sapien
gagagaattgactcctagagaaggt

SEQ ID NO: 890451 - DNA, 25 bp, Homo sapien
tactgggtacttgatgtcaattgcc

SEQ ID NO: 890452 - DNA, 25 bp, Homo sapien
aggattgggataatagtctggagaa

SEQ ID NO: 890453 - DNA, 25 bp, Homo sapien
gagttttctcaaagtgatgctctga

SEQ ID NO: 890454 - DNA, 25 bp, Homo sapien
gttgggaggaaggattgggataata

SEQ ID NO: 890455 - DNA, 25 bp, Homo sapien
agttttctcaaagtgatgctctgac

SEQ ID NO: 890456 - DNA, 25 bp, Homo sapien
taggaactacctgtcccctctgatg

SEQ ID NO: 890457 - DNA, 25 bp, Homo sapien
caccattaggaactacctgtcccct

SEQ ID NO: 890458 - DNA, 25 bp, Homo sapien
ggaactacctgtcccctctgatgga

SEQ ID NO: 890459 - DNA, 25 bp, Homo sapien
gttccaccattaggaactacctgtc

SEQ ID NO: 890460 - DNA, 25 bp, Homo sapien
agaggactccagaggaactttgggg

SEQ ID NO: 890461 - DNA, 25 bp, Homo sapien
gggcggggtattgttctgtgtaaca

SEQ ID NO: 890462 - DNA, 25 bp, Homo sapien
tctgcagcagaggactccagaggaa

SEQ ID NO: 890463 - DNA, 25 bp, Homo sapien
cggggtattgttctgtgtaacattt

SEQ ID NO: 890464 - DNA, 25 bp, Homo sapien
tctgtctgatccgtaaatgccaatg

SEQ ID NO: 890465 - DNA, 25 bp, Homo sapien
ccaatgaaatggtgaggactgtaga

SEQ ID NO: 890466 - DNA, 25 bp, Homo sapien
gggagttcggtacctcatcttctgt

SEQ ID NO: 890467 - DNA, 25 bp, Homo sapien
tgctctgcatgaggtctgggagttc

SEQ ID NO: 890468 - DNA, 25 bp, Homo sapien
agcaagcagggaataagaaaagtct

SEQ ID NO: 890469 - DNA, 25 bp, Homo sapien
gcagcaagcagggaataagaaaagt

SEQ ID NO: 890470 - DNA, 25 bp, Homo sapien
cagcagcaagcagggaataagaaaa

SEQ ID NO: 890471 - DNA, 25 bp, Homo sapien
gccagcagcaagcagggaataagaa

SEQ ID NO: 890472 - DNA, 25 bp, Homo sapien
caggaccaccaactgccacccatgt

SEQ ID NO: 890473 - DNA, 25 bp, Homo sapien
ggaccaccaactgccacccatgtca

SEQ ID NO: 890474 - DNA, 25 bp, Homo sapien
cgtgggatcaggaccaccaactgcc

SEQ ID NO: 890475 - DNA, 25 bp, Homo sapien
tgggatcaggaccaccaactgccac

SEQ ID NO: 890476 - DNA, 25 bp, Homo sapien
catctgtagggccatccgttgggga

SEQ ID NO: 890477 - DNA, 25 bp, Homo sapien
ggtgcttggcaaataaagtaggttg

SEQ ID NO: 890478 - DNA, 25 bp, Homo sapien
gggaaggtgcttggcaaataaagta

SEQ ID NO: 890479 - DNA, 25 bp, Homo sapien
ggcaaataaagtaggttgacatatt

SEQ ID NO: 890480 - DNA, 25 bp, Homo sapien
gtggtccaggactcatcgctgtccg

SEQ ID NO: 890481 - DNA, 25 bp, Homo sapien
gctgaggatggcttcggagctgatg

SEQ ID NO: 890482 - DNA, 25 bp, Homo sapien
ttcggagctgatggcactctctgtg

SEQ ID NO: 890483 - DNA, 25 bp, Homo sapien
tcatcgctgtccgactcctcatagt

SEQ ID NO: 890484 - DNA, 25 bp, Homo sapien
gctattcccttacaaccctggaagc

SEQ ID NO: 890485 - DNA, 25 bp, Homo sapien
accaggggactgcaaacacggctat

SEQ ID NO: 890486 - DNA, 25 bp, Homo sapien
gcaaacacggctattcccttacaac

SEQ ID NO: 890487 - DNA, 25 bp, Homo sapien
ggactgcaaacacggctattccctt

SEQ ID NO: 890488 - DNA, 25 bp, Homo sapien
gttgcgccaggaacagggacgccgg

SEQ ID NO: 890489 - DNA, 25 bp, Homo sapien
cattaataagattgtttgaagagcc

SEQ ID NO: 890490 - DNA, 25 bp, Homo sapien
taataggcattaataagattgtttg

SEQ ID NO: 890491 - DNA, 25 bp, Homo sapien
gcgccaggaacagggacgccggcat

SEQ ID NO: 890492 - DNA, 25 bp, Homo sapien
taaaacgcgcatgtgttctgaactc

SEQ ID NO: 890493 - DNA, 25 bp, Homo sapien
ccctcgtgaggttaaaacgcgcatg

SEQ ID NO: 890494 - DNA, 25 bp, Homo sapien
gggattactgtcaccgttatacaca

SEQ ID NO: 890495 - DNA, 25 bp, Homo sapien
ttatacacacgagcaactgagccct

SEQ ID NO: 890496 - DNA, 25 bp, Homo sapien
agttgctggctcttcaccatttaat

SEQ ID NO: 890497 - DNA, 25 bp, Homo sapien
gttgctggctcttcaccatttaata

SEQ ID NO: 890498 - DNA, 25 bp, Homo sapien
gaaacgcttgtaccaagtgacacag

SEQ ID NO: 890499 - DNA, 25 bp, Homo sapien
ctcgggtggtgcagaaaaaacaatc

SEQ ID NO: 890500 - DNA, 25 bp, Homo sapien
tatttcgcaaagctcctccagcggg

SEQ ID NO: 890501 - DNA, 25 bp, Homo sapien
gtaccacttggccacgttgcttggg

SEQ ID NO: 890502 - DNA, 25 bp, Homo sapien
attaatgaagcccaacagaagagaa

SEQ ID NO: 890503 - DNA, 25 bp, Homo sapien
actccactggatcaaaagcgatcag

SEQ ID NO: 890504 - DNA, 25 bp, Homo sapien
agcctacactgtctgcgtctcaggg

SEQ ID NO: 890505 - DNA, 25 bp, Homo sapien
tcagcccgaggcgttgaagcagcct

SEQ ID NO: 890506 - DNA, 25 bp, Homo sapien
gcaagttggaacacttctgagaggg

SEQ ID NO: 890507 - DNA, 25 bp, Homo sapien
ttggaactatcccaggcaaggtggg

SEQ ID NO: 890508 - DNA, 25 bp, Homo sapien
gccgacaggtggtaagttggaacta

SEQ ID NO: 890509 - DNA, 25 bp, Homo sapien
gagggaaaggtagtgtaggccgaca

SEQ ID NO: 890510 - DNA, 25 bp, Homo sapien
ccaagtccttgggtgaaactagtca

SEQ ID NO: 890511 - DNA, 25 bp, Homo sapien
caccaagtccttgggtgaaactagt

SEQ ID NO: 890512 - DNA, 25 bp, Homo sapien
caagtccttgggtgaaactagtcat

SEQ ID NO: 890513 - DNA, 25 bp, Homo sapien
catgcctttgctttcgttaggtgaa

SEQ ID NO: 890514 - DNA, 25 bp, Homo sapien
taggtgaaggacaagccacttggct

SEQ ID NO: 890515 - DNA, 25 bp, Homo sapien
tccctcggttgcgacaagatggact

SEQ ID NO: 890516 - DNA, 25 bp, Homo sapien
tcctctgacagagaacatcaacaca

SEQ ID NO: 890517 - DNA, 25 bp, Homo sapien
taggaggacctccatagagtatgca

SEQ ID NO: 890518 - DNA, 25 bp, Homo sapien
gataggaggacctccatagagtatg

SEQ ID NO: 890519 - DNA, 25 bp, Homo sapien
ataggaggacctccatagagtatgc

SEQ ID NO: 890520 - DNA, 25 bp, Homo sapien
ggataggaggacctccatagagtat

SEQ ID NO: 890521 - DNA, 25 bp, Homo sapien
attaaccaggcgtccacagcaccag

SEQ ID NO: 890522 - DNA, 25 bp, Homo sapien
ccttttattaaccaggcgtccacag

SEQ ID NO: 890523 - DNA, 25 bp, Homo sapien
ttattaaccaggcgtccacagcacc

SEQ ID NO: 890524 - DNA, 25 bp, Homo sapien
ttttattaaccaggcgtccacagca

SEQ ID NO: 890525 - DNA, 25 bp, Homo sapien
attaatacccccttctcgcacctca

SEQ ID NO: 890526 - DNA, 25 bp, Homo sapien
tataagtaggtacaaagaattaata

SEQ ID NO: 890527 - DNA, 25 bp, Homo sapien
ttaatacccccttctcgcacctcac

SEQ ID NO: 890528 - DNA, 25 bp, Homo sapien
tcttaatacaggaatagttttaata

SEQ ID NO: 890529 - DNA, 25 bp, Homo sapien
ccaacggggcacatcacagtctgca

SEQ ID NO: 890530 - DNA, 25 bp, Homo sapien
ctgcactgaggctatcaggttgaaa

SEQ ID NO: 890531 - DNA, 25 bp, Homo sapien
gctccaacggggcacatcacagtct

SEQ ID NO: 890532 - DNA, 25 bp, Homo sapien
gtctgcactgaggctatcaggttga

SEQ ID NO: 890533 - DNA, 25 bp, Homo sapien
ccgccaggagacagaagatcataag

SEQ ID NO: 890534 - DNA, 25 bp, Homo sapien
caggtctttgcagtgtgagagtcac

SEQ ID NO: 890535 - DNA, 25 bp, Homo sapien
gcaccatcccgagacaagaaatgtt

SEQ ID NO: 890536 - DNA, 25 bp, Homo sapien
tccaccctataagccaaaggagagg

SEQ ID NO: 890537 - DNA, 25 bp, Homo sapien
gctgatgctctgattgaagtgccac

SEQ ID NO: 890538 - DNA, 25 bp, Homo sapien
gacacaaaggatccaccggctgtga

SEQ ID NO: 890539 - DNA, 25 bp, Homo sapien
gaagtgccacggttttgaggcccta

SEQ ID NO: 890540 - DNA, 25 bp, Homo sapien
tctctatcagaggagaatgcgctca

SEQ ID NO: 890541 - DNA, 25 bp, Homo sapien
ggaaccacaaggagccactggacat

SEQ ID NO: 890542 - DNA, 25 bp, Homo sapien
ttcccaggacactgctggaaccaca

SEQ ID NO: 890543 - DNA, 25 bp, Homo sapien
gctggaaccacaaggagccactgga

SEQ ID NO: 890544 - DNA, 25 bp, Homo sapien
acactgctggaaccacaaggagcca

SEQ ID NO: 890545 - DNA, 25 bp, Homo sapien
cactgtactccgacaaggcaagacc

SEQ ID NO: 890546 - DNA, 25 bp, Homo sapien
acagaggaactgacctcgggccagt

SEQ ID NO: 890547 - DNA, 25 bp, Homo sapien
gaaccctgtgataagttcgggaaga

SEQ ID NO: 890548 - DNA, 25 bp, Homo sapien
tgagcaaaaccaggatagaaccctg

SEQ ID NO: 890549 - DNA, 25 bp, Homo sapien
tagttgatgtagcttcttcatagta

SEQ ID NO: 890550 - DNA, 25 bp, Homo sapien
cttgttagttgatgtagcttcttca

SEQ ID NO: 890551 - DNA, 25 bp, Homo sapien
tagcttcttcatagtatctatggtc

SEQ ID NO: 890552 - DNA, 25 bp, Homo sapien
tgatgtagcttcttcatagtatcta

SEQ ID NO: 890553 - DNA, 25 bp, Homo sapien
gagactctcagccagttctcctgac

SEQ ID NO: 890554 - DNA, 25 bp, Homo sapien
taatctggtctctgacactgtctgt

SEQ ID NO: 890555 - DNA, 25 bp, Homo sapien
tctatcaaatggtgaaggtccacac

SEQ ID NO: 890556 - DNA, 25 bp, Homo sapien
tggacttctaccactcaggatggag

SEQ ID NO: 890557 - DNA, 25 bp, Homo sapien
gagcgcagggccctgactaccgcct

SEQ ID NO: 890558 - DNA, 25 bp, Homo sapien
gccgctgtgacgagaccgtcgtcat

SEQ ID NO: 890559 - DNA, 25 bp, Homo sapien
tgactaccgcctggccgctgtgacg

SEQ ID NO: 890560 - DNA, 25 bp, Homo sapien
cgcctggccgctgtgacgagaccgt

SEQ ID NO: 890561 - DNA, 25 bp, Homo sapien
gccaatccaacttccgtagcttcag

SEQ ID NO: 890562 - DNA, 25 bp, Homo sapien
cctgaagtttaaccggggagcagag

SEQ ID NO: 890563 - DNA, 25 bp, Homo sapien
cagagctgttgccaatccaacttcc

SEQ ID NO: 890564 - DNA, 25 bp, Homo sapien
caacttccgtagcttcagaagggcc

SEQ ID NO: 890565 - DNA, 25 bp, Homo sapien
gcccagacactaagggagtgcctca

SEQ ID NO: 890566 - DNA, 25 bp, Homo sapien
cccagacactaagggagtgcctcac

SEQ ID NO: 890567 - DNA, 25 bp, Homo sapien
ccggagcttgttttggtatgatgat

SEQ ID NO: 890568 - DNA, 25 bp, Homo sapien
cagccctcgccggagcttgttttgg

SEQ ID NO: 890569 - DNA, 25 bp, Homo sapien
tgcggcagccctcgccggagcttgt

SEQ ID NO: 890570 - DNA, 25 bp, Homo sapien
ctcgccggagcttgttttggtatga

SEQ ID NO: 890571 - DNA, 25 bp, Homo sapien
tgcagatgccgttccccggtcctca

SEQ ID NO: 890572 - DNA, 25 bp, Homo sapien
gcagatgccgttccccggtcctcac

SEQ ID NO: 890573 - DNA, 25 bp, Homo sapien
ctccctgtggggttgactgccgctt

SEQ ID NO: 890574 - DNA, 25 bp, Homo sapien
gttgactgccgcttgcttctcccgc

SEQ ID NO: 890575 - DNA, 25 bp, Homo sapien
cgcaactccctgtggggttgactgc

SEQ ID NO: 890576 - DNA, 25 bp, Homo sapien
cctgtggggttgactgccgcttgct

SEQ ID NO: 890577 - DNA, 25 bp, Homo sapien
tgcatgggccgcctcacgggggttt

SEQ ID NO: 890578 - DNA, 25 bp, Homo sapien
tgggccgcctcacgggggtttctca

SEQ ID NO: 890579 - DNA, 25 bp, Homo sapien
gcatgggccgcctcacgggggtttc

SEQ ID NO: 890580 - DNA, 25 bp, Homo sapien
catgggccgcctcacgggggtttct

SEQ ID NO: 890581 - DNA, 25 bp, Homo sapien
aacaaggcgtggagttgcttgctcc

SEQ ID NO: 890582 - DNA, 25 bp, Homo sapien
tctgaacaaggcgtggagttgcttg

SEQ ID NO: 890583 - DNA, 25 bp, Homo sapien
ccactctgaacaaggcgtggagttg

SEQ ID NO: 890584 - DNA, 25 bp, Homo sapien
cactctgaacaaggcgtggagttgc

SEQ ID NO: 890585 - DNA, 25 bp, Homo sapien
ggaaatcctgcattcacaagttgca

SEQ ID NO: 890586 - DNA, 25 bp, Homo sapien
agggcctctctggatacatgtattg

SEQ ID NO: 890587 - DNA, 25 bp, Homo sapien
cacatagtgataagcaagaggtttt

SEQ ID NO: 890588 - DNA, 25 bp, Homo sapien
tgtcttgtggaacagaacgatgcca

SEQ ID NO: 890589 - DNA, 25 bp, Homo sapien
aatgcgatgaatgacgtatttacca

SEQ ID NO: 890590 - DNA, 25 bp, Homo sapien
atgacgtatttaccagtaggactcc

SEQ ID NO: 890591 - DNA, 25 bp, Homo sapien
cctgctgtgaatggaaatgcgatga

SEQ ID NO: 890592 - DNA, 25 bp, Homo sapien
gaatggaaatgcgatgaatgacgta

SEQ ID NO: 890593 - DNA, 25 bp, Homo sapien
caccgttatcacaactgctaggatt

SEQ ID NO: 890594 - DNA, 25 bp, Homo sapien
ctcttgggagagcatctgataggac

SEQ ID NO: 890595 - DNA, 25 bp, Homo sapien
cagagtgcacgtttccattttccag

SEQ ID NO: 890596 - DNA, 25 bp, Homo sapien
tgataggacctcgaggggcatacca

SEQ ID NO: 890597 - DNA, 25 bp, Homo sapien
cacgtctacgttatttgtggggatg

SEQ ID NO: 890598 - DNA, 25 bp, Homo sapien
cagacgtggttttttcacgtctacg

SEQ ID NO: 890599 - DNA, 25 bp, Homo sapien
tctacgttatttgtggggatgcagt

SEQ ID NO: 890600 - DNA, 25 bp, Homo sapien
ttcacgtctacgttatttgtgggga

SEQ ID NO: 890601 - DNA, 25 bp, Homo sapien
gattgtcttgcacactaagtgcttc

SEQ ID NO: 890602 - DNA, 25 bp, Homo sapien
gatggccctatgattgtcttgcaca

SEQ ID NO: 890603 - DNA, 25 bp, Homo sapien
tatgattgtcttgcacactaagtgc

SEQ ID NO: 890604 - DNA, 25 bp, Homo sapien
accctgatggccctatgattgtctt

SEQ ID NO: 890605 - DNA, 25 bp, Homo sapien
acaactactgaaatggtttgcagct

SEQ ID NO: 890606 - DNA, 25 bp, Homo sapien
tctctgattttaatatgccgtgttt

SEQ ID NO: 890607 - DNA, 25 bp, Homo sapien
gttaaaacttgagccacatggaaaa

SEQ ID NO: 890608 - DNA, 25 bp, Homo sapien
ccgccgtgatactcatgaagatgaa

SEQ ID NO: 890609 - DNA, 25 bp, Homo sapien
aagtttgccgccgtgatactcatga

SEQ ID NO: 890610 - DNA, 25 bp, Homo sapien
cagagcaggtttgaggacattctct

SEQ ID NO: 890611 - DNA, 25 bp, Homo sapien
gagcaggtttgaggacattctctgc

SEQ ID NO: 890612 - DNA, 25 bp, Homo sapien
tcagagcaggtttgaggacattctc

SEQ ID NO: 890613 - DNA, 25 bp, Homo sapien
agcaggtttgaggacattctctgct

SEQ ID NO: 890614 - DNA, 25 bp, Homo sapien
tttcttagtactctgagtctccaca

SEQ ID NO: 890615 - DNA, 25 bp, Homo sapien
tccttcaccagtgtgttcacctgct

SEQ ID NO: 890616 - DNA, 25 bp, Homo sapien
tccacatttaaaagggttattgcta

SEQ ID NO: 890617 - DNA, 25 bp, Homo sapien
tgctggaaacatccagtgctctgtt

SEQ ID NO: 890618 - DNA, 25 bp, Homo sapien
gattccttgacctacaaactaagta

SEQ ID NO: 890619 - DNA, 25 bp, Homo sapien
gacacatggatccacgattccttga

SEQ ID NO: 890620 - DNA, 25 bp, Homo sapien
caagataattgtggttagtgcctac

SEQ ID NO: 890621 - DNA, 25 bp, Homo sapien
aaactggattttctcgtgtaacaag

SEQ ID NO: 890622 - DNA, 25 bp, Homo sapien
tagtttcttgagacatgtaagtcta

SEQ ID NO: 890623 - DNA, 25 bp, Homo sapien
gacatgtaagtctaccaaggttttc

SEQ ID NO: 890624 - DNA, 25 bp, Homo sapien
agacatgtaagtctaccaaggtttt

SEQ ID NO: 890625 - DNA, 25 bp, Homo sapien
ctagtttcttgagacatgtaagtct

SEQ ID NO: 890626 - DNA, 25 bp, Homo sapien
taggctaatcctaatgtggaactga

SEQ ID NO: 890627 - DNA, 25 bp, Homo sapien
tattataggctaatcctaatgtgga

SEQ ID NO: 890628 - DNA, 25 bp, Homo sapien
gattattataggctaatcctaatgt

SEQ ID NO: 890629 - DNA, 25 bp, Homo sapien
gctaatcctaatgtggaactgagga

SEQ ID NO: 890630 - DNA, 25 bp, Homo sapien
aaaggacagaagcctctttaaggcg

SEQ ID NO: 890631 - DNA, 25 bp, Homo sapien
ggacagaagcctctttaaggcgagg

SEQ ID NO: 890632 - DNA, 25 bp, Homo sapien
aaggacagaagcctctttaaggcga

SEQ ID NO: 890633 - DNA, 25 bp, Homo sapien
aggacagaagcctctttaaggcgag

SEQ ID NO: 890634 - DNA, 25 bp, Homo sapien
agtgctgctgcggaatgaagaggag

SEQ ID NO: 890635 - DNA, 25 bp, Homo sapien
acattccctcgagacactgagctgg

SEQ ID NO: 890636 - DNA, 25 bp, Homo sapien
tcttctttagggactcctgctctcg

SEQ ID NO: 890637 - DNA, 25 bp, Homo sapien
ctggacagagtcagcgagagcttcg

SEQ ID NO: 890638 - DNA, 25 bp, Homo sapien
caataatggaaggtaaggaacctgg

SEQ ID NO: 890639 - DNA, 25 bp, Homo sapien
acaataatggaaggtaaggaacctg

SEQ ID NO: 890640 - DNA, 25 bp, Homo sapien
tgaaacaataatggaaggtaaggaa

SEQ ID NO: 890641 - DNA, 25 bp, Homo sapien
ctgaaacaataatggaaggtaagga

SEQ ID NO: 890642 - DNA, 25 bp, Homo sapien
tgcactgctgcaagggtgcctgcag

SEQ ID NO: 890643 - DNA, 25 bp, Homo sapien
tgaacagactcccacgtgcactgct

SEQ ID NO: 890644 - DNA, 25 bp, Homo sapien
ctgcagaaggcgacttgtcctccat

SEQ ID NO: 890645 - DNA, 25 bp, Homo sapien
cctgcagaaggcgacttgtcctcca

SEQ ID NO: 890646 - DNA, 25 bp, Homo sapien
cagaactcatacctcttgttgtaaa

SEQ ID NO: 890647 - DNA, 25 bp, Homo sapien
gaactcatacctcttgttgtaaaat

SEQ ID NO: 890648 - DNA, 25 bp, Homo sapien
aaatactctcctacagctcagatat

SEQ ID NO: 890649 - DNA, 25 bp, Homo sapien
tacagaactcatacctcttgttgta

SEQ ID NO: 890650 - DNA, 25 bp, Homo sapien
atttgaaccgggcttcttgcctact

SEQ ID NO: 890651 - DNA, 25 bp, Homo sapien
gaaccgggcttcttgcctactcact

SEQ ID NO: 890652 - DNA, 25 bp, Homo sapien
ttgaaccgggcttcttgcctactca

SEQ ID NO: 890653 - DNA, 25 bp, Homo sapien
tatggatttgtgacttatgtttaaa

SEQ ID NO: 890654 - DNA, 25 bp, Homo sapien
caagttcgtgtatgcaaaccaagcg

SEQ ID NO: 890655 - DNA, 25 bp, Homo sapien
gggagcctctttcaccaagttcgtg

SEQ ID NO: 890656 - DNA, 25 bp, Homo sapien
cacccgggccatttttggtgaccag

SEQ ID NO: 890657 - DNA, 25 bp, Homo sapien
gggctcctttttgagtgactgaagg

SEQ ID NO: 890658 - DNA, 25 bp, Homo sapien
gagtaagcaaaacacccatcggagg

SEQ ID NO: 890659 - DNA, 25 bp, Homo sapien
gaagccacttgaatgatacctccgt

SEQ ID NO: 890660 - DNA, 25 bp, Homo sapien
gcatgaatgataagggagtccccaa

SEQ ID NO: 890661 - DNA, 25 bp, Homo sapien
caggacatcttaaggacaggctcaa

SEQ ID NO: 890662 - DNA, 25 bp, Homo sapien
cctccttactttgggttaggcaatg

SEQ ID NO: 890663 - DNA, 25 bp, Homo sapien
tacaccaagacaatcacagacctaa

SEQ ID NO: 890664 - DNA, 25 bp, Homo sapien
cagttgaatgaactcatacaccaag

SEQ ID NO: 890665 - DNA, 25 bp, Homo sapien
tatcgtcaagtaagtgaagacaacc

SEQ ID NO: 890666 - DNA, 25 bp, Homo sapien
tgcatgagtccagtgcaagaaaaag

SEQ ID NO: 890667 - DNA, 25 bp, Homo sapien
tacagcgcataaggttttaatggcc

SEQ ID NO: 890668 - DNA, 25 bp, Homo sapien
taatggccttcgcttgcttgcagac

SEQ ID NO: 890669 - DNA, 25 bp, Homo sapien
gcttgcagaccaatcccttaatttt

SEQ ID NO: 890670 - DNA, 25 bp, Homo sapien
tgctgggctggtgatattcgggtca

SEQ ID NO: 890671 - DNA, 25 bp, Homo sapien
ctgatgtggggtagccagccactga

SEQ ID NO: 890672 - DNA, 25 bp, Homo sapien
cactgatgtggggtagccagccact

SEQ ID NO: 890673 - DNA, 25 bp, Homo sapien
gctggtgatattcgggtcactgatg

SEQ ID NO: 890674 - DNA, 25 bp, Homo sapien
agagtgcatgtgtagttccaggacc

SEQ ID NO: 890675 - DNA, 25 bp, Homo sapien
ttctattgtcgtgccctcctgtcat

SEQ ID NO: 890676 - DNA, 25 bp, Homo sapien
agcctttctattgtcgtgccctcct

SEQ ID NO: 890677 - DNA, 25 bp, Homo sapien
cctttctattgtcgtgccctcctgt

SEQ ID NO: 890678 - DNA, 25 bp, Homo sapien
tacttttgatacaatctcattccac

SEQ ID NO: 890679 - DNA, 25 bp, Homo sapien
tcctctttgtgaaacattggcatca

SEQ ID NO: 890680 - DNA, 25 bp, Homo sapien
tcattgagctttgcaccggttaaca

SEQ ID NO: 890681 - DNA, 25 bp, Homo sapien
gcttttcacgatacttttgatacaa

SEQ ID NO: 890682 - DNA, 25 bp, Homo sapien
tgcaatgtcagtaaagatggcccct

SEQ ID NO: 890683 - DNA, 25 bp, Homo sapien
aatgtcagtaaagatggcccctgga

SEQ ID NO: 890684 - DNA, 25 bp, Homo sapien
catgcaatgtcagtaaagatggccc

SEQ ID NO: 890685 - DNA, 25 bp, Homo sapien
caatgtcagtaaagatggcccctgg

SEQ ID NO: 890686 - DNA, 25 bp, Homo sapien
ttgactttcttcactgaattaagaa

SEQ ID NO: 890687 - DNA, 25 bp, Homo sapien
gactttcttcactgaattaagaaag

SEQ ID NO: 890688 - DNA, 25 bp, Homo sapien
tcactgaattaagaaagtgctggag

SEQ ID NO: 890689 - DNA, 25 bp, Homo sapien
tcttcactgaattaagaaagtgctg

SEQ ID NO: 890690 - DNA, 25 bp, Homo sapien
gcagatcttaaaggcgtttcacaaa

SEQ ID NO: 890691 - DNA, 25 bp, Homo sapien
tagtgacagagtgtcaaggaagtct

SEQ ID NO: 890692 - DNA, 25 bp, Homo sapien
aggtagcagagatgaagtagtgaca

SEQ ID NO: 890693 - DNA, 25 bp, Homo sapien
tctgtgagtagggtgtagcagatct

SEQ ID NO: 890694 - DNA, 25 bp, Homo sapien
tctggctacagccagtccgggctgc

SEQ ID NO: 890695 - DNA, 25 bp, Homo sapien
cagtccgggctgctgaggacatctg

SEQ ID NO: 890696 - DNA, 25 bp, Homo sapien
tcacagttctggctacagccagtcc

SEQ ID NO: 890697 - DNA, 25 bp, Homo sapien
cagttctggctacagccagtccggg

SEQ ID NO: 890698 - DNA, 25 bp, Homo sapien
gccatttgtcaatgaaaagttcgtg

SEQ ID NO: 890699 - DNA, 25 bp, Homo sapien
caatgaaaagttcgtgccgctgact

SEQ ID NO: 890700 - DNA, 25 bp, Homo sapien
gtgccgctgactcagttctgctctg

SEQ ID NO: 890701 - DNA, 25 bp, Homo sapien
aagttcgtgccgctgactcagttct

SEQ ID NO: 890702 - DNA, 25 bp, Homo sapien
cctggctgctgacatattttggaca

SEQ ID NO: 890703 - DNA, 25 bp, Homo sapien
gaggctccaactcataacctggtgg

SEQ ID NO: 890704 - DNA, 25 bp, Homo sapien
taaagccacaggagggtgaaacctg

SEQ ID NO: 890705 - DNA, 25 bp, Homo sapien
tacgcagacaaggaaggaatggcaa

SEQ ID NO: 890706 - DNA, 25 bp, Homo sapien
tcaatttaacttctgaagtttgtct

SEQ ID NO: 890707 - DNA, 25 bp, Homo sapien
tcattcctgcacatcttgtttcaat

SEQ ID NO: 890708 - DNA, 25 bp, Homo sapien
aacttctgaagtttgtcttgttcca

SEQ ID NO: 890709 - DNA, 25 bp, Homo sapien
tgttccatctctaggacaagtcagg

SEQ ID NO: 890710 - DNA, 25 bp, Homo sapien
gctttgggtgtcgtttgtgatgata

SEQ ID NO: 890711 - DNA, 25 bp, Homo sapien
gatgatatggttatgtggatgtcct

SEQ ID NO: 890712 - DNA, 25 bp, Homo sapien
tgcactgctttgagccaacgggcaa

SEQ ID NO: 890713 - DNA, 25 bp, Homo sapien
tgtcttcatttgctggacggctttg

SEQ ID NO: 890714 - DNA, 25 bp, Homo sapien
gaataatttcctgggtgctatgccc

SEQ ID NO: 890715 - DNA, 25 bp, Homo sapien
taatctgaaagaaacacccagggac

SEQ ID NO: 890716 - DNA, 25 bp, Homo sapien
tatcccaacaggtcaagctacacag

SEQ ID NO: 890717 - DNA, 25 bp, Homo sapien
ttccagaggctgtacgacacatagc

SEQ ID NO: 890718 - DNA, 25 bp, Homo sapien
gccctccaagtgaagttacacatat

SEQ ID NO: 890719 - DNA, 25 bp, Homo sapien
cacatatgtacactctcatgagtga

SEQ ID NO: 890720 - DNA, 25 bp, Homo sapien
ttaaatgtatcaccaaattgccctc

SEQ ID NO: 890721 - DNA, 25 bp, Homo sapien
tgagtggctatttccccatgatctc

SEQ ID NO: 890722 - DNA, 25 bp, Homo sapien
cataggttggctgctgtaattcttg

SEQ ID NO: 890723 - DNA, 25 bp, Homo sapien
ggcaacataggttggctgctgtaat

SEQ ID NO: 890724 - DNA, 25 bp, Homo sapien
tatttatgtaactcagggcaacata

SEQ ID NO: 890725 - DNA, 25 bp, Homo sapien
ctatttatgtaactcagggcaacat

SEQ ID NO: 890726 - DNA, 25 bp, Homo sapien
tgcatcagaatatatgaggctacct

SEQ ID NO: 890727 - DNA, 25 bp, Homo sapien
gcatcagaatatatgaggctaccta

SEQ ID NO: 890728 - DNA, 25 bp, Homo sapien
tttgcatcagaatatatgaggctac

SEQ ID NO: 890729 - DNA, 25 bp, Homo sapien
atcagaatatatgaggctacctaac

SEQ ID NO: 890730 - DNA, 25 bp, Homo sapien
ctacactctatacctttggttctga

SEQ ID NO: 890731 - DNA, 25 bp, Homo sapien
tcttgcctttggttaggttcagaga

SEQ ID NO: 890732 - DNA, 25 bp, Homo sapien
agagggtggtccagtatttgttctc

SEQ ID NO: 890733 - DNA, 25 bp, Homo sapien
tggttctgattatcctgtttgcctt

SEQ ID NO: 890734 - DNA, 25 bp, Homo sapien
tgtacatactgtcgccgttcaacca

SEQ ID NO: 890735 - DNA, 25 bp, Homo sapien
tatgttctcaaacaataagggctgt

SEQ ID NO: 890736 - DNA, 25 bp, Homo sapien
gtttcctcttcagctagatcctcta

SEQ ID NO: 890737 - DNA, 25 bp, Homo sapien
tgttttcggcttcttccagcatagg

SEQ ID NO: 890738 - DNA, 25 bp, Homo sapien
tggacatgcatattcgtacaacaac

SEQ ID NO: 890739 - DNA, 25 bp, Homo sapien
gacatgcatattcgtacaacaacca

SEQ ID NO: 890740 - DNA, 25 bp, Homo sapien
gttgtcctacggcaggcatggacat

SEQ ID NO: 890741 - DNA, 25 bp, Homo sapien
tgtcctacggcaggcatggacatgc

SEQ ID NO: 890742 - DNA, 25 bp, Homo sapien
gaggtagaagtgagcgaaggaactg

SEQ ID NO: 890743 - DNA, 25 bp, Homo sapien
aagtgagcgaaggaactgctgatga

SEQ ID NO: 890744 - DNA, 25 bp, Homo sapien
tagaagtgagcgaaggaactgctga

SEQ ID NO: 890745 - DNA, 25 bp, Homo sapien
tgagcgaaggaactgctgatgaatg

SEQ ID NO: 890746 - DNA, 25 bp, Homo sapien
ctcctattcgccagtgtgtcttttt

SEQ ID NO: 890747 - DNA, 25 bp, Homo sapien
cttccctcctattcgccagtgtgtc

SEQ ID NO: 890748 - DNA, 25 bp, Homo sapien
tccctcctattcgccagtgtgtctt

SEQ ID NO: 890749 - DNA, 25 bp, Homo sapien
cctcctattcgccagtgtgtctttt

SEQ ID NO: 890750 - DNA, 25 bp, Homo sapien
tagatgcagacctgagcaaaccaga

SEQ ID NO: 890751 - DNA, 25 bp, Homo sapien
ctagatgcagacctgagcaaaccag

SEQ ID NO: 890752 - DNA, 25 bp, Homo sapien
tgcataagaatcaacactggcactg

SEQ ID NO: 890753 - DNA, 25 bp, Homo sapien
cataagaatcaacactggcactgca

SEQ ID NO: 890754 - DNA, 25 bp, Homo sapien
taagaatcaacactggcactgcaca

SEQ ID NO: 890755 - DNA, 25 bp, Homo sapien
tctgcataagaatcaacactggcac

SEQ ID NO: 890756 - DNA, 25 bp, Homo sapien
aatagaagtggtagagtaacgcaac

SEQ ID NO: 890757 - DNA, 25 bp, Homo sapien
catcttgaaaaaggctcgcactgga

SEQ ID NO: 890758 - DNA, 25 bp, Homo sapien
ggaacaatgaggatgcaaatagaag

SEQ ID NO: 890759 - DNA, 25 bp, Homo sapien
cactggaggaggtagggtcatctct

SEQ ID NO: 890760 - DNA, 25 bp, Homo sapien
tactttaggaagaatctgggcctgg

SEQ ID NO: 890761 - DNA, 25 bp, Homo sapien
ggcacagttcagtggcccagtttac

SEQ ID NO: 890762 - DNA, 25 bp, Homo sapien
catccaagagatctgcacagtcaga

SEQ ID NO: 890763 - DNA, 25 bp, Homo sapien
tatttgggtacgtgcagaacttgct

SEQ ID NO: 890764 - DNA, 25 bp, Homo sapien
tgcaattgtgaaaggtatccctttc

SEQ ID NO: 890765 - DNA, 25 bp, Homo sapien
tcctagccaggagtgaaatgtatct

SEQ ID NO: 890766 - DNA, 25 bp, Homo sapien
caatatcactttccagatacttcag

SEQ ID NO: 890767 - DNA, 25 bp, Homo sapien
agagaatttataatactgagctcct

SEQ ID NO: 890768 - DNA, 25 bp, Homo sapien
gggacaccaatcactccttctgaag

SEQ ID NO: 890769 - DNA, 25 bp, Homo sapien
gaccagtcagagtttgtatgcaagg

SEQ ID NO: 890770 - DNA, 25 bp, Homo sapien
gaagccaggctcatatacaccaaag

SEQ ID NO: 890771 - DNA, 25 bp, Homo sapien
taccagtcagggatgcagaaccatt

SEQ ID NO: 890772 - DNA, 25 bp, Homo sapien
ccagtgcccaattgctggaatggca

SEQ ID NO: 890773 - DNA, 25 bp, Homo sapien
tgtgccaaaaactgggctaggaggt

SEQ ID NO: 890774 - DNA, 25 bp, Homo sapien
cctagaagcttctcatgcatgcata

SEQ ID NO: 890775 - DNA, 25 bp, Homo sapien
tgaagaccttgcaaatgatcccagt

SEQ ID NO: 890776 - DNA, 25 bp, Homo sapien
gatagtcttaaggacaactgcctca

SEQ ID NO: 890777 - DNA, 25 bp, Homo sapien
tacggctccatgctaggtctgcagc

SEQ ID NO: 890778 - DNA, 25 bp, Homo sapien
caatcatgtgcagaggcctttagct

SEQ ID NO: 890779 - DNA, 25 bp, Homo sapien
ggtctgtaccaggttcaaagggcag

SEQ ID NO: 890780 - DNA, 25 bp, Homo sapien
gcaatgtttcaaggtagaggaggta

SEQ ID NO: 890781 - DNA, 25 bp, Homo sapien
aagatgggcatttgaacagcacaga

SEQ ID NO: 890782 - DNA, 25 bp, Homo sapien
gcttccacgtccacatagaaaagaa

SEQ ID NO: 890783 - DNA, 25 bp, Homo sapien
gaggcactgcatacctcacgaaagt

SEQ ID NO: 890784 - DNA, 25 bp, Homo sapien
cagttgtttcaaaagttgggatggg

SEQ ID NO: 890785 - DNA, 25 bp, Homo sapien
agattttcctctggatacatatttt

SEQ ID NO: 890786 - DNA, 25 bp, Homo sapien
aaagtacaaagacaacctctctcac

SEQ ID NO: 890787 - DNA, 25 bp, Homo sapien
catgtataattaacgttttagaagg

SEQ ID NO: 890788 - DNA, 25 bp, Homo sapien
cacacccggccatgcgcataattta

SEQ ID NO: 890789 - DNA, 25 bp, Homo sapien
gatgtacctcacttggactctgatc

SEQ ID NO: 890790 - DNA, 25 bp, Homo sapien
aagatgtacctcacttggactctga

SEQ ID NO: 890791 - DNA, 25 bp, Homo sapien
atgtacctcacttggactctgatca

SEQ ID NO: 890792 - DNA, 25 bp, Homo sapien
tcttcagtaagcctggaatggagcc

SEQ ID NO: 890793 - DNA, 25 bp, Homo sapien
gcccagtgttgttactcttcagtaa

SEQ ID NO: 890794 - DNA, 25 bp, Homo sapien
gcaggccttgcattctttgacctca

SEQ ID NO: 890795 - DNA, 25 bp, Homo sapien
tgacccagtcaggttaaggttttga

SEQ ID NO: 890796 - DNA, 25 bp, Homo sapien
aatccccaaggactgtgcatccacc

SEQ ID NO: 890797 - DNA, 25 bp, Homo sapien
ccagtgactgcaaagggggcctttg

SEQ ID NO: 890798 - DNA, 25 bp, Homo sapien
agagagtgccacagtgatagttcac

SEQ ID NO: 890799 - DNA, 25 bp, Homo sapien
cattgctaaaatccagtcagctctc

SEQ ID NO: 890800 - DNA, 25 bp, Homo sapien
gtcagctctctcaggcggcgcgttc

SEQ ID NO: 890801 - DNA, 25 bp, Homo sapien
tctcaccgagctttgggcaaaccca

SEQ ID NO: 890802 - DNA, 25 bp, Homo sapien
ctgtagcgcccccctgtggcaatgc

SEQ ID NO: 890803 - DNA, 25 bp, Homo sapien
gctgtagcgcccccctgtggcaatg

SEQ ID NO: 890804 - DNA, 25 bp, Homo sapien
agccaataacaagaatgccttttag

SEQ ID NO: 890805 - DNA, 25 bp, Homo sapien
gccaataacaagaatgccttttaga

SEQ ID NO: 890806 - DNA, 25 bp, Homo sapien
aataacaagaatgccttttagaatg

SEQ ID NO: 890807 - DNA, 25 bp, Homo sapien
ccaataacaagaatgccttttagaa

SEQ ID NO: 890808 - DNA, 25 bp, Homo sapien
tgctgccttccaacaggtaatcatg

SEQ ID NO: 890809 - DNA, 25 bp, Homo sapien
tggtcccctccgctgaacgtcaaat

SEQ ID NO: 890810 - DNA, 25 bp, Homo sapien
aggtaatcatggtcccctccgctga

SEQ ID NO: 890811 - DNA, 25 bp, Homo sapien
gctcatcttcagtccacctgtcctt

SEQ ID NO: 890812 - DNA, 25 bp, Homo sapien
aataaataactgcatgttaccacag

SEQ ID NO: 890813 - DNA, 25 bp, Homo sapien
gccacactaaccaacttttcagaaa

SEQ ID NO: 890814 - DNA, 25 bp, Homo sapien
tttgccagaatgttgctggaaaaca

SEQ ID NO: 890815 - DNA, 25 bp, Homo sapien
catttgggcctctgcttaaatcagc

SEQ ID NO: 890816 - DNA, 25 bp, Homo sapien
tagcactaggactgagggatgccag

SEQ ID NO: 890817 - DNA, 25 bp, Homo sapien
cttttcctaataagcatcagggcaa

SEQ ID NO: 890818 - DNA, 25 bp, Homo sapien
ttcttgggactttctattattgctg

SEQ ID NO: 890819 - DNA, 25 bp, Homo sapien
taagcatcagggcaaagttagcact

SEQ ID NO: 890820 - DNA, 25 bp, Homo sapien
ggaatctcaccaacatgggggagag

SEQ ID NO: 890821 - DNA, 25 bp, Homo sapien
agatggaacagccttttaactcttt

SEQ ID NO: 890822 - DNA, 25 bp, Homo sapien
tgcaagatggaacagccttttaact

SEQ ID NO: 890823 - DNA, 25 bp, Homo sapien
atctcaccaacatgggggagaggag

SEQ ID NO: 890824 - DNA, 25 bp, Homo sapien
cacgttgtcttatgaaccacagagg

SEQ ID NO: 890825 - DNA, 25 bp, Homo sapien
cagaggaataaatggtgcctcatca

SEQ ID NO: 890826 - DNA, 25 bp, Homo sapien
tttttaacagaatacagctagaggg

SEQ ID NO: 890827 - DNA, 25 bp, Homo sapien
cctcatcagacatgtctcagtggca

SEQ ID NO: 890828 - DNA, 25 bp, Homo sapien
catttggcatccaacaggcatcgca

SEQ ID NO: 890829 - DNA, 25 bp, Homo sapien
catcgcaaacttaacctggccaaaa

SEQ ID NO: 890830 - DNA, 25 bp, Homo sapien
tcaggtcaaccactctggagtcatc

SEQ ID NO: 890831 - DNA, 25 bp, Homo sapien
ttagcgaatgccaaccaaatccttc

SEQ ID NO: 890832 - DNA, 25 bp, Homo sapien
gtctcttggcaagtagaaaactcta

SEQ ID NO: 890833 - DNA, 25 bp, Homo sapien
gccctttcgaggtcaataacagtac

SEQ ID NO: 890834 - DNA, 25 bp, Homo sapien
tttgctgacccatattccatcttgg

SEQ ID NO: 890835 - DNA, 25 bp, Homo sapien
actctacctgaagacaattttgctg

SEQ ID NO: 890836 - DNA, 25 bp, Homo sapien
gaacacataacggttttcgagtgga

SEQ ID NO: 890837 - DNA, 25 bp, Homo sapien
gctgaacacataacggttttcgagt

SEQ ID NO: 890838 - DNA, 25 bp, Homo sapien
cacataacggttttcgagtggataa

SEQ ID NO: 890839 - DNA, 25 bp, Homo sapien
attgagctgaacacataacggtttt

SEQ ID NO: 890840 - DNA, 25 bp, Homo sapien
gacaaaaggatttccttcgtcacac

SEQ ID NO: 890841 - DNA, 25 bp, Homo sapien
ctatttcaggaatgcgcagagttga

SEQ ID NO: 890842 - DNA, 25 bp, Homo sapien
gcagcaatgcctgccctatttcagg

SEQ ID NO: 890843 - DNA, 25 bp, Homo sapien
aatgcgcagagttgataggaaggca

SEQ ID NO: 890844 - DNA, 25 bp, Homo sapien
aacaagaatgaatggtgggcccgcc

SEQ ID NO: 890845 - DNA, 25 bp, Homo sapien
gcccgcccaggttagcagtcaaata

SEQ ID NO: 890846 - DNA, 25 bp, Homo sapien
gaatgacgaggatctcaaccccaga

SEQ ID NO: 890847 - DNA, 25 bp, Homo sapien
gaccgtacagacctcgagtgcttaa

SEQ ID NO: 890848 - DNA, 25 bp, Homo sapien
caaagggtctctgtaggcatgtagg

SEQ ID NO: 890849 - DNA, 25 bp, Homo sapien
gggaactagggatgcctcatcaaaa

SEQ ID NO: 890850 - DNA, 25 bp, Homo sapien
ggttctgcccttgaggtgctcccag

SEQ ID NO: 890851 - DNA, 25 bp, Homo sapien
aagcagcgtttgtatgtgcagggaa

SEQ ID NO: 890852 - DNA, 25 bp, Homo sapien
tttcctatttttgcatatgtgctgc

SEQ ID NO: 890853 - DNA, 25 bp, Homo sapien
ataaaatgcttcataaatgtgtgtg

SEQ ID NO: 890854 - DNA, 25 bp, Homo sapien
ctctgtatctttcctatttttgcat

SEQ ID NO: 890855 - DNA, 25 bp, Homo sapien
tgtatctttcctatttttgcatatg

SEQ ID NO: 890856 - DNA, 25 bp, Homo sapien
ttgttaaaagcaggagaaacatacc

SEQ ID NO: 890857 - DNA, 25 bp, Homo sapien
ctttgaagtatagagactttctacc

SEQ ID NO: 890858 - DNA, 25 bp, Homo sapien
cataccattctaagctccaatttta

SEQ ID NO: 890859 - DNA, 25 bp, Homo sapien
gaagtatagagactttctacctagc

SEQ ID NO: 890860 - DNA, 25 bp, Homo sapien
cagggacgcagcactcatgtgttca

SEQ ID NO: 890861 - DNA, 25 bp, Homo sapien
tggttcaagcaactagggtgaggct

SEQ ID NO: 890862 - DNA, 25 bp, Homo sapien
tgcttgtaaggttagggcaatcccg

SEQ ID NO: 890863 - DNA, 25 bp, Homo sapien
cctgcaaataggacgggcaacttcc

SEQ ID NO: 890864 - DNA, 25 bp, Homo sapien
gaaaaagtggccatagaacagatcc

SEQ ID NO: 890865 - DNA, 25 bp, Homo sapien
gcatctcggtcagtccctgtttggg

SEQ ID NO: 890866 - DNA, 25 bp, Homo sapien
aacgtgccacgtgcagcatctcggt

SEQ ID NO: 890867 - DNA, 25 bp, Homo sapien
caaaactgagtgaacaggagacgca

SEQ ID NO: 890868 - DNA, 25 bp, Homo sapien
tgtagtaaaacgataatttatctgt

SEQ ID NO: 890869 - DNA, 25 bp, Homo sapien
ttgaaattgtattgacagatatgac

SEQ ID NO: 890870 - DNA, 25 bp, Homo sapien
cagatatgactaacaattgtaatca

SEQ ID NO: 890871 - DNA, 25 bp, Homo sapien
tttatctgtcacaatttaccgaggg

SEQ ID NO: 890872 - DNA, 25 bp, Homo sapien
gcaatgatcttagggagctggagac

SEQ ID NO: 890873 - DNA, 25 bp, Homo sapien
tattccagtaaatggaggcaccagg

SEQ ID NO: 890874 - DNA, 25 bp, Homo sapien
gactccaccggaatgggatccaagc

SEQ ID NO: 890875 - DNA, 25 bp, Homo sapien
ggttcaagtgtagcatattccagta

SEQ ID NO: 890876 - DNA, 25 bp, Homo sapien
ctggtggtattctggctaagtaggt

SEQ ID NO: 890877 - DNA, 25 bp, Homo sapien
tctgaaatgtatggatagcactgcc

SEQ ID NO: 890878 - DNA, 25 bp, Homo sapien
tagcactgccaatctacaacgctgc

SEQ ID NO: 890879 - DNA, 25 bp, Homo sapien
gaggtgcagtgacatttacagcaac

SEQ ID NO: 890880 - DNA, 25 bp, Homo sapien
gcagcaaccggtgagaagaatctat

SEQ ID NO: 890881 - DNA, 25 bp, Homo sapien
tacaggagattttactgtccggtcc

SEQ ID NO: 890882 - DNA, 25 bp, Homo sapien
ggagagaacatgtatgcccttaaaa

SEQ ID NO: 890883 - DNA, 25 bp, Homo sapien
tccgtaagagccatataagtgatgc

SEQ ID NO: 890884 - DNA, 25 bp, Homo sapien
catattccctgaggctcgctgagga

SEQ ID NO: 890885 - DNA, 25 bp, Homo sapien
tctaaaggcaatggaggaggtgact

SEQ ID NO: 890886 - DNA, 25 bp, Homo sapien
caaaggacgctgcagtaagacatca

SEQ ID NO: 890887 - DNA, 25 bp, Homo sapien
taaagacttagggagcactgaccac

SEQ ID NO: 890888 - DNA, 25 bp, Homo sapien
tgcaggcagcatgtgaagtatagtc

SEQ ID NO: 890889 - DNA, 25 bp, Homo sapien
tgtgctcattcgataggtaacgcca

SEQ ID NO: 890890 - DNA, 25 bp, Homo sapien
cagtcatttaagtgtctgcaggcag

SEQ ID NO: 890891 - DNA, 25 bp, Homo sapien
ctgacaactgaaggagactggctct

SEQ ID NO: 890892 - DNA, 25 bp, Homo sapien
tggccaattgcatggggagtcactt

SEQ ID NO: 890893 - DNA, 25 bp, Homo sapien
ggtggtggtcacctggccaattgca

SEQ ID NO: 890894 - DNA, 25 bp, Homo sapien
ttgcatggggagtcacttcgtggct

SEQ ID NO: 890895 - DNA, 25 bp, Homo sapien
gtggtggtcacctggccaattgcat

SEQ ID NO: 890896 - DNA, 25 bp, Homo sapien
ccagacaaccggcatcaaaatatgt

SEQ ID NO: 890897 - DNA, 25 bp, Homo sapien
tctccaagactttcaggtgcggaag

SEQ ID NO: 890898 - DNA, 25 bp, Homo sapien
tgctcttggtggaaatccagccttt

SEQ ID NO: 890899 - DNA, 25 bp, Homo sapien
tcttcagaagccttgacacattcag

SEQ ID NO: 890900 - DNA, 25 bp, Homo sapien
atgagtatctacaatccagcaagta

SEQ ID NO: 890901 - DNA, 25 bp, Homo sapien
ttctttgtacacaggacacgtctgt

SEQ ID NO: 890902 - DNA, 25 bp, Homo sapien
tctttgtacacaggacacgtctgta

SEQ ID NO: 890903 - DNA, 25 bp, Homo sapien
aaaatgagtatctacaatccagcaa

SEQ ID NO: 890904 - DNA, 25 bp, Homo sapien
atgttggaagccgctggctttgaca

SEQ ID NO: 890905 - DNA, 25 bp, Homo sapien
ttggaagccgctggctttgacacca

SEQ ID NO: 890906 - DNA, 25 bp, Homo sapien
ggccatgttggaagccgctggcttt

SEQ ID NO: 890907 - DNA, 25 bp, Homo sapien
gccatgttggaagccgctggctttg

SEQ ID NO: 890908 - DNA, 25 bp, Homo sapien
catagtacggttaatttgcccctgg

SEQ ID NO: 890909 - DNA, 25 bp, Homo sapien
caagcaggctggattcgctatgcca

SEQ ID NO: 890910 - DNA, 25 bp, Homo sapien
caagtggcagacatgtgtgttcaac

SEQ ID NO: 890911 - DNA, 25 bp, Homo sapien
taaccactccgtgagatggatgctg

SEQ ID NO: 890912 - DNA, 25 bp, Homo sapien
tgtgtactgcctgcgcccagaatgt

SEQ ID NO: 890913 - DNA, 25 bp, Homo sapien
tggtcaatgagactctgccccttaa

SEQ ID NO: 890914 - DNA, 25 bp, Homo sapien
tgtttctattcaagtgctgcaggcc

SEQ ID NO: 890915 - DNA, 25 bp, Homo sapien
tgctagtctggtacgatcacatgaa

SEQ ID NO: 890916 - DNA, 25 bp, Homo sapien
ccagaacttcacagtaccggtgttt

SEQ ID NO: 890917 - DNA, 25 bp, Homo sapien
gattatctcctattccggatggccc

SEQ ID NO: 890918 - DNA, 25 bp, Homo sapien
gaagctattacaaggacgcctgaaa

SEQ ID NO: 890919 - DNA, 25 bp, Homo sapien
gacattttgtagacgtttcccatga

SEQ ID NO: 890920 - DNA, 25 bp, Homo sapien
agccccattgggacatcgctcggac

SEQ ID NO: 890921 - DNA, 25 bp, Homo sapien
ttagacagccccattgggacatcgc

SEQ ID NO: 890922 - DNA, 25 bp, Homo sapien
attgggacatcgctcggacccttca

SEQ ID NO: 890923 - DNA, 25 bp, Homo sapien
ccattgggacatcgctcggaccctt

SEQ ID NO: 890924 - DNA, 25 bp, Homo sapien
tagcccacgcaggacaactcgctgg

SEQ ID NO: 890925 - DNA, 25 bp, Homo sapien
ttccgcaggtggttggaccgcctaa

SEQ ID NO: 890926 - DNA, 25 bp, Homo sapien
gcgtcggtcacaccttccgcaggtg

SEQ ID NO: 890927 - DNA, 25 bp, Homo sapien
caggggttccgaatagaagtgtgaa

SEQ ID NO: 890928 - DNA, 25 bp, Homo sapien
gggaagtggagtccgcagcccccga

SEQ ID NO: 890929 - DNA, 25 bp, Homo sapien
ggttgtcctcgatgtgctcgatgag

SEQ ID NO: 890930 - DNA, 25 bp, Homo sapien
cagcccccgaatcggcaggtattgg

SEQ ID NO: 890931 - DNA, 25 bp, Homo sapien
caggtattggagaagaaggaggcgg

SEQ ID NO: 890932 - DNA, 25 bp, Homo sapien
gctacatcgagagcccccctggtgt

SEQ ID NO: 890933 - DNA, 25 bp, Homo sapien
tgtcataatgctgctccactcagag

SEQ ID NO: 890934 - DNA, 25 bp, Homo sapien
gcagggtcctgcatgtgttgtcata

SEQ ID NO: 890935 - DNA, 25 bp, Homo sapien
tcagagccctgttccaaagtcacac

SEQ ID NO: 890936 - DNA, 25 bp, Homo sapien
aaagtcacaccaagcccactgaggc

SEQ ID NO: 890937 - DNA, 25 bp, Homo sapien
gctcagtagttattagtctccttcc

SEQ ID NO: 890938 - DNA, 25 bp, Homo sapien
ctcaagccgtgatgcagtgatggga

SEQ ID NO: 890939 - DNA, 25 bp, Homo sapien
tatttctcaatacgtctgggcaatg

SEQ ID NO: 890940 - DNA, 25 bp, Homo sapien
cgccttccccggctgagagtacttt

SEQ ID NO: 890941 - DNA, 25 bp, Homo sapien
tcaggatagctgtcctggggagggc

SEQ ID NO: 890942 - DNA, 25 bp, Homo sapien
caggatagctgtcctggggagggcc

SEQ ID NO: 890943 - DNA, 25 bp, Homo sapien
gaattgtgcacttcagatatgtgcc

SEQ ID NO: 890944 - DNA, 25 bp, Homo sapien
tgatgacaggatctacacgtttgtc

SEQ ID NO: 890945 - DNA, 25 bp, Homo sapien
tgtctgaggtaactaacagcatagg

SEQ ID NO: 890946 - DNA, 25 bp, Homo sapien
tcttaaatggacaaaactcatgtac

SEQ ID NO: 890947 - DNA, 25 bp, Homo sapien
gtgacacaattggactctgaacttc

SEQ ID NO: 890948 - DNA, 25 bp, Homo sapien
gatccatagcgtctgcaagacaaaa

SEQ ID NO: 890949 - DNA, 25 bp, Homo sapien
agcacctgatccatagcgtctgcaa

SEQ ID NO: 890950 - DNA, 25 bp, Homo sapien
tggaaaagatgtgacacaattggac

SEQ ID NO: 890951 - DNA, 25 bp, Homo sapien
agctggtcatgggtaaaactgtgaa

SEQ ID NO: 890952 - DNA, 25 bp, Homo sapien
taaaagatccatataggctcccagg

SEQ ID NO: 890953 - DNA, 25 bp, Homo sapien
tataggctcccagggcaagctggtc

SEQ ID NO: 890954 - DNA, 25 bp, Homo sapien
actgtgaaggtaacggtcgctgatc

SEQ ID NO: 890955 - DNA, 25 bp, Homo sapien
ggatgccttgtccttttcgcaatag

SEQ ID NO: 890956 - DNA, 25 bp, Homo sapien
tgtcagcttgaattcggatgccttg

SEQ ID NO: 890957 - DNA, 25 bp, Homo sapien
tctgtgcgcagttccctcttggtgt

SEQ ID NO: 890958 - DNA, 25 bp, Homo sapien
ggccttcctgaatgtcagggcttcc

SEQ ID NO: 890959 - DNA, 25 bp, Homo sapien
taaacatgcagaagatttcctctga

SEQ ID NO: 890960 - DNA, 25 bp, Homo sapien
tttcctggcactggaaagcggagag

SEQ ID NO: 890961 - DNA, 25 bp, Homo sapien
ttgaaggatatggtgcaacaagccc

SEQ ID NO: 890962 - DNA, 25 bp, Homo sapien
actaaacatgcagaagatttcctct

SEQ ID NO: 890963 - DNA, 25 bp, Homo sapien
gcccttctaccgtgaaggtgagccg

SEQ ID NO: 890964 - DNA, 25 bp, Homo sapien
gaaacaactggccttgactaaacaa

SEQ ID NO: 890965 - DNA, 25 bp, Homo sapien
aggtgagccgtgaagtctattgccc

SEQ ID NO: 890966 - DNA, 25 bp, Homo sapien
caggaagatgtgttgtggagatgct

SEQ ID NO: 890967 - DNA, 25 bp, Homo sapien
tctggcagtgagttgactgtacttg

SEQ ID NO: 890968 - DNA, 25 bp, Homo sapien
caagaattgagaaggcctaccagat

SEQ ID NO: 890969 - DNA, 25 bp, Homo sapien
gattctggcagtgagttgactgtac

SEQ ID NO: 890970 - DNA, 25 bp, Homo sapien
gagacaagaattgagaaggcctacc

SEQ ID NO: 890971 - DNA, 25 bp, Homo sapien
ttgctctatggcctccaaaatattc

SEQ ID NO: 890972 - DNA, 25 bp, Homo sapien
acccaaattgctctatggcctccaa

SEQ ID NO: 890973 - DNA, 25 bp, Homo sapien
cccaaattgctctatggcctccaaa

SEQ ID NO: 890974 - DNA, 25 bp, Homo sapien
aaattgctctatggcctccaaaata

SEQ ID NO: 890975 - DNA, 25 bp, Homo sapien
cttgccaaagactacatgcttgcca

SEQ ID NO: 890976 - DNA, 25 bp, Homo sapien
gccaaagactacatgcttgccatcc

SEQ ID NO: 890977 - DNA, 25 bp, Homo sapien
acatgcttgccatccaaccaccccg

SEQ ID NO: 890978 - DNA, 25 bp, Homo sapien
catgcttgccatccaaccaccccgt

SEQ ID NO: 890979 - DNA, 25 bp, Homo sapien
tggcagtgcagatgaaaaacggaac

SEQ ID NO: 890980 - DNA, 25 bp, Homo sapien
ttggcagtgcagatgaaaaacggaa

SEQ ID NO: 890981 - DNA, 25 bp, Homo sapien
cttggcagtgcagatgaaaaacgga

SEQ ID NO: 890982 - DNA, 25 bp, Homo sapien
agggctcactgtcgacagcaacgtc

SEQ ID NO: 890983 - DNA, 25 bp, Homo sapien
cacataaatgctggtataattctgt

SEQ ID NO: 890984 - DNA, 25 bp, Homo sapien
tgtcgacagcaacgtcgaagaacat

SEQ ID NO: 890985 - DNA, 25 bp, Homo sapien
aggacctgtacgctttaggataaat

SEQ ID NO: 890986 - DNA, 25 bp, Homo sapien
ggctgatagtactgggactcctggc

SEQ ID NO: 890987 - DNA, 25 bp, Homo sapien
tgatagtactgggactcctggcggc

SEQ ID NO: 890988 - DNA, 25 bp, Homo sapien
gctgatagtactgggactcctggcg

SEQ ID NO: 890989 - DNA, 25 bp, Homo sapien
tagtactgggactcctggcggcagt

SEQ ID NO: 890990 - DNA, 25 bp, Homo sapien
tttccaatctccagattcgactgtg

SEQ ID NO: 890991 - DNA, 25 bp, Homo sapien
tctccagattcgactgtgttacact

SEQ ID NO: 890992 - DNA, 25 bp, Homo sapien
catagccacttgcaagcacgatatt

SEQ ID NO: 890993 - DNA, 25 bp, Homo sapien
caagcacgatattggtttgtttcca

SEQ ID NO: 890994 - DNA, 25 bp, Homo sapien
ttgactccagataccagtttgctct

SEQ ID NO: 890995 - DNA, 25 bp, Homo sapien
tgttgactccagataccagtttgct

SEQ ID NO: 890996 - DNA, 25 bp, Homo sapien
tgccctctgcagtaaggccccagaa

SEQ ID NO: 890997 - DNA, 25 bp, Homo sapien
aggccccagaacttctcctattgcc

SEQ ID NO: 890998 - DNA, 25 bp, Homo sapien
ccaatgctgactccccgaggaatca

SEQ ID NO: 890999 - DNA, 25 bp, Homo sapien
gcagctggtgacttctgcatactcc

SEQ ID NO: 891000 - DNA, 25 bp, Homo sapien
cagcaaatagttgacattgcagact

SEQ ID NO: 891001 - DNA, 25 bp, Homo sapien
gaatcaaagctttcaccccagtggg

SEQ ID NO: 891002 - DNA, 25 bp, Homo sapien
ttgttcaggaatgagacacacttgg

SEQ ID NO: 891003 - DNA, 25 bp, Homo sapien
cacacttgggggcttagactacggt

SEQ ID NO: 891004 - DNA, 25 bp, Homo sapien
agacacacttgggggcttagactac

SEQ ID NO: 891005 - DNA, 25 bp, Homo sapien
ggaatgagacacacttgggggctta

SEQ ID NO: 891006 - DNA, 25 bp, Homo sapien
tgcattcagctgttccgtcaattta

SEQ ID NO: 891007 - DNA, 25 bp, Homo sapien
tgttccgtcaatttagtcaaagcaa

SEQ ID NO: 891008 - DNA, 25 bp, Homo sapien
cgtcaatttagtcaaagcaacacat

SEQ ID NO: 891009 - DNA, 25 bp, Homo sapien
tcagctgttccgtcaatttagtcaa

SEQ ID NO: 891010 - DNA, 25 bp, Homo sapien
cactggtgttttatattccttctga

SEQ ID NO: 891011 - DNA, 25 bp, Homo sapien
tggtgttttatattccttctgagaa

SEQ ID NO: 891012 - DNA, 25 bp, Homo sapien
gtgttttatattccttctgagaaag

SEQ ID NO: 891013 - DNA, 25 bp, Homo sapien
tgatcactggtgttttatattcctt

SEQ ID NO: 891014 - DNA, 25 bp, Homo sapien
taaccatggccagtggatttgcctg

SEQ ID NO: 891015 - DNA, 25 bp, Homo sapien
tggatgacatcctgcttaaccctca

SEQ ID NO: 891016 - DNA, 25 bp, Homo sapien
ttcctttccagggatagaggcttcc

SEQ ID NO: 891017 - DNA, 25 bp, Homo sapien
gcacatgcttctgatttgtgtccac

SEQ ID NO: 891018 - DNA, 25 bp, Homo sapien
ttctccgcagcaaaagcgtcacgtg

SEQ ID NO: 891019 - DNA, 25 bp, Homo sapien
ttgggctgttaggaccctgacttct

SEQ ID NO: 891020 - DNA, 25 bp, Homo sapien
tcctcctgtgttctgcacccttttg

SEQ ID NO: 891021 - DNA, 25 bp, Homo sapien
cagtgcatggagttgctgaccagaa

SEQ ID NO: 891022 - DNA, 25 bp, Homo sapien
tttcttgctgctgattatagggcat

SEQ ID NO: 891023 - DNA, 25 bp, Homo sapien
tttatcatccatcttcatcacttgc

SEQ ID NO: 891024 - DNA, 25 bp, Homo sapien
gctccaagttaaaatggttgatttc

SEQ ID NO: 891025 - DNA, 25 bp, Homo sapien
ccttggagatggtgctgtctttatc

SEQ ID NO: 891026 - DNA, 25 bp, Homo sapien
ccggggagtttttcggcaagtgctg

SEQ ID NO: 891027 - DNA, 25 bp, Homo sapien
gggagtttttcggcaagtgctgtaa

SEQ ID NO: 891028 - DNA, 25 bp, Homo sapien
gagtttttcggcaagtgctgtaaaa

SEQ ID NO: 891029 - DNA, 25 bp, Homo sapien
gtttttcggcaagtgctgtaaaaga

SEQ ID NO: 891030 - DNA, 25 bp, Homo sapien
gaaaacaggccggggaaatgtgcat

SEQ ID NO: 891031 - DNA, 25 bp, Homo sapien
agaaaacaggccggggaaatgtgca

SEQ ID NO: 891032 - DNA, 25 bp, Homo sapien
tagaaaacaggccggggaaatgtgc

SEQ ID NO: 891033 - DNA, 25 bp, Homo sapien
aagaacaggcggcaataatgatgcc

SEQ ID NO: 891034 - DNA, 25 bp, Homo sapien
tgatgcctcagcaaataagatgcag

SEQ ID NO: 891035 - DNA, 25 bp, Homo sapien
cacagagggctgttcaatttgatac

SEQ ID NO: 891036 - DNA, 25 bp, Homo sapien
tgacgtagccaatctgcaatgtatt

SEQ ID NO: 891037 - DNA, 25 bp, Homo sapien
tctcagggttgcctgagacaggagt

SEQ ID NO: 891038 - DNA, 25 bp, Homo sapien
gttgcctgagacaggagttggacca

SEQ ID NO: 891039 - DNA, 25 bp, Homo sapien
gagacaggagttggaccacatggct

SEQ ID NO: 891040 - DNA, 25 bp, Homo sapien
ggaccacatggcttgacccaggagg

SEQ ID NO: 891041 - DNA, 25 bp, Homo sapien
tgcaaggttaggtcccctgaagggc

SEQ ID NO: 891042 - DNA, 25 bp, Homo sapien
tgaagggcgagcgtggcccaagatg

SEQ ID NO: 891043 - DNA, 25 bp, Homo sapien
cagcagctaagcagctccatgggac

SEQ ID NO: 891044 - DNA, 25 bp, Homo sapien
gggacctccctactcttgatgcctg

SEQ ID NO: 891045 - DNA, 25 bp, Homo sapien
ggaggggccaggcttgacctcaatt

SEQ ID NO: 891046 - DNA, 25 bp, Homo sapien
ctcaatttatcctttagggcagggc

SEQ ID NO: 891047 - DNA, 25 bp, Homo sapien
cctcaatttatcctttagggcaggg

SEQ ID NO: 891048 - DNA, 25 bp, Homo sapien
tcatagttgcatcgactctgtccaa

SEQ ID NO: 891049 - DNA, 25 bp, Homo sapien
gggagcacattcgaattccctataa

SEQ ID NO: 891050 - DNA, 25 bp, Homo sapien
tgttccaaacaagccacctggtttg

SEQ ID NO: 891051 - DNA, 25 bp, Homo sapien
taattcaaaccacttgtaagcagag

SEQ ID NO: 891052 - DNA, 25 bp, Homo sapien
gcactgggccttgtcggtttattgt

SEQ ID NO: 891053 - DNA, 25 bp, Homo sapien
cttgtcggtttattgtcagctccat

SEQ ID NO: 891054 - DNA, 25 bp, Homo sapien
cactgggccttgtcggtttattgtc

SEQ ID NO: 891055 - DNA, 25 bp, Homo sapien
ggccttgtcggtttattgtcagctc

SEQ ID NO: 891056 - DNA, 25 bp, Homo sapien
taatacagtgtgtacatggcagctt

SEQ ID NO: 891057 - DNA, 25 bp, Homo sapien
gacctcttgataatacagtgtgtac

SEQ ID NO: 891058 - DNA, 25 bp, Homo sapien
tacagtgtgtacatggcagctttcc

SEQ ID NO: 891059 - DNA, 25 bp, Homo sapien
ccagacctcttgataatacagtgtg

SEQ ID NO: 891060 - DNA, 25 bp, Homo sapien
ttcgttgtgaggagagcatgacagc

SEQ ID NO: 891061 - DNA, 25 bp, Homo sapien
tttctgaagaaacgagtgactcaag

SEQ ID NO: 891062 - DNA, 25 bp, Homo sapien
cgtccatcagggcaattcgttgtga

SEQ ID NO: 891063 - DNA, 25 bp, Homo sapien
gactcaagtcgtccatcagggcaat

SEQ ID NO: 891064 - DNA, 25 bp, Homo sapien
aacaacatagagtaaagcaccagca

SEQ ID NO: 891065 - DNA, 25 bp, Homo sapien
agcaccagcataaccaaaatgacgt

SEQ ID NO: 891066 - DNA, 25 bp, Homo sapien
gagctttgtaaacacgcctctctgt

SEQ ID NO: 891067 - DNA, 25 bp, Homo sapien
tcggaagaagtgaacaacatagagt

SEQ ID NO: 891068 - DNA, 25 bp, Homo sapien
gaccactgatggtgtgcggtcagca

SEQ ID NO: 891069 - DNA, 25 bp, Homo sapien
tgtgtctctgggacttgacacggcc

SEQ ID NO: 891070 - DNA, 25 bp, Homo sapien
tgggacttgacacggccacttgtgg

SEQ ID NO: 891071 - DNA, 25 bp, Homo sapien
accactgatggtgtgcggtcagcat

SEQ ID NO: 891072 - DNA, 25 bp, Homo sapien
tcttggatatcactgttggtcacca

SEQ ID NO: 891073 - DNA, 25 bp, Homo sapien
tccaagctgccttacatttgacctg

SEQ ID NO: 891074 - DNA, 25 bp, Homo sapien
tcccagctgtcgaagtctttctttc

SEQ ID NO: 891075 - DNA, 25 bp, Homo sapien
ttacatttgacctggtcttggccat

SEQ ID NO: 891076 - DNA, 25 bp, Homo sapien
ggccatgagctcatctgatctctta

SEQ ID NO: 891077 - DNA, 25 bp, Homo sapien
gggcaggctgtctttgccacctgag

SEQ ID NO: 891078 - DNA, 25 bp, Homo sapien
aagacgccgttgcttatgcgtgtcc

SEQ ID NO: 891079 - DNA, 25 bp, Homo sapien
cacctgagcgcttgtgactggcctg

SEQ ID NO: 891080 - DNA, 25 bp, Homo sapien
tgcacttattctaagacgccgttgc

SEQ ID NO: 891081 - DNA, 25 bp, Homo sapien
tattctctgacaagtggttttgacc

SEQ ID NO: 891082 - DNA, 25 bp, Homo sapien
gttttgacccataatggctgacacc

SEQ ID NO: 891083 - DNA, 25 bp, Homo sapien
tttgctgcctactccactgtgcctt

SEQ ID NO: 891084 - DNA, 25 bp, Homo sapien
caggtctgctgcgatggtgctagat

SEQ ID NO: 891085 - DNA, 25 bp, Homo sapien
gtcagccccggttggtgctctcaca

SEQ ID NO: 891086 - DNA, 25 bp, Homo sapien
atcgatccgtcagccccggttggtg

SEQ ID NO: 891087 - DNA, 25 bp, Homo sapien
ctgaagtatcgatccgtcagccccg

SEQ ID NO: 891088 - DNA, 25 bp, Homo sapien
cggttggtgctctcacagtactcat

SEQ ID NO: 891089 - DNA, 25 bp, Homo sapien
catttgcacagacggccatctgagc

SEQ ID NO: 891090 - DNA, 25 bp, Homo sapien
tgagtgcttattagatcggatgaaa

SEQ ID NO: 891091 - DNA, 25 bp, Homo sapien
aaggttagcagccagacatcacagg

SEQ ID NO: 891092 - DNA, 25 bp, Homo sapien
ttattttatctgctaccaatgtagg

SEQ ID NO: 891093 - DNA, 25 bp, Homo sapien
ctgtaatttactcctacagttcccg

SEQ ID NO: 891094 - DNA, 25 bp, Homo sapien
tctcctcttaatctggtatcctgga

SEQ ID NO: 891095 - DNA, 25 bp, Homo sapien
actcctacagttcccggtcataacg

SEQ ID NO: 891096 - DNA, 25 bp, Homo sapien
cagttcccggtcataacgtatttca

SEQ ID NO: 891097 - DNA, 25 bp, Homo sapien
tacattgtgtactacatgcagtggg

SEQ ID NO: 891098 - DNA, 25 bp, Homo sapien
tacagagaacatccgaaacaggcct

SEQ ID NO: 891099 - DNA, 25 bp, Homo sapien
cagtgggatatgctccaattacaga

SEQ ID NO: 891100 - DNA, 25 bp, Homo sapien
ctattctccacgttgcaacaggttg

SEQ ID NO: 891101 - DNA, 25 bp, Homo sapien
ctccatggtgaaggaatagcagcca

SEQ ID NO: 891102 - DNA, 25 bp, Homo sapien
tgctttttgtgtcgggcctcatgag

SEQ ID NO: 891103 - DNA, 25 bp, Homo sapien
gtttgctttttgtgtcgggcctcat

SEQ ID NO: 891104 - DNA, 25 bp, Homo sapien
gcctcatgagtagagcgctccatgg

SEQ ID NO: 891105 - DNA, 25 bp, Homo sapien
gtgctgacacggcactattattctg

SEQ ID NO: 891106 - DNA, 25 bp, Homo sapien
gagtgtgctgacacggcactattat

SEQ ID NO: 891107 - DNA, 25 bp, Homo sapien
ctgacacggcactattattctgggt

SEQ ID NO: 891108 - DNA, 25 bp, Homo sapien
ggagtgtgctgacacggcactatta

SEQ ID NO: 891109 - DNA, 25 bp, Homo sapien
gttctggtgtaagcgcccctgtctc

SEQ ID NO: 891110 - DNA, 25 bp, Homo sapien
tggttctggtgtaagcgcccctgtc

SEQ ID NO: 891111 - DNA, 25 bp, Homo sapien
tggtgtaagcgcccctgtctccaca

SEQ ID NO: 891112 - DNA, 25 bp, Homo sapien
cttggttctggtgtaagcgcccctg

SEQ ID NO: 891113 - DNA, 25 bp, Homo sapien
gagtgtgcaccataaggaagttatt

SEQ ID NO: 891114 - DNA, 25 bp, Homo sapien
agcttctcagacgcatgaagcaggg

SEQ ID NO: 891115 - DNA, 25 bp, Homo sapien
ggctgtgtatttcatgagagtgtgc

SEQ ID NO: 891116 - DNA, 25 bp, Homo sapien
tcagacgcatgaagcaggggtcccg

SEQ ID NO: 891117 - DNA, 25 bp, Homo sapien
ttttgttgcacttgccgcaggagcc

SEQ ID NO: 891118 - DNA, 25 bp, Homo sapien
cgcaggagccatctcgggagtgtac

SEQ ID NO: 891119 - DNA, 25 bp, Homo sapien
gcagccgcgaggttacttggtccag

SEQ ID NO: 891120 - DNA, 25 bp, Homo sapien
tgtaaacattttggcggaccagagg

SEQ ID NO: 891121 - DNA, 25 bp, Homo sapien
attcccaagacctggcggcggagtc

SEQ ID NO: 891122 - DNA, 25 bp, Homo sapien
cccctgcggcagattctcggcagaa

SEQ ID NO: 891123 - DNA, 25 bp, Homo sapien
gacagctccggctcgagctttggcg

SEQ ID NO: 891124 - DNA, 25 bp, Homo sapien
ggcggcgcccaggcaattcccaaga

SEQ ID NO: 891125 - DNA, 25 bp, Homo sapien
ggcaagatgcgaaggaaggaaccaa

SEQ ID NO: 891126 - DNA, 25 bp, Homo sapien
ggggcaagatgcgaaggaaggaacc

SEQ ID NO: 891127 - DNA, 25 bp, Homo sapien
tagaggggcaagatgcgaaggaagg

SEQ ID NO: 891128 - DNA, 25 bp, Homo sapien
cttagaggggcaagatgcgaaggaa

SEQ ID NO: 891129 - DNA, 25 bp, Homo sapien
aataggcatgcacccagggacaact

SEQ ID NO: 891130 - DNA, 25 bp, Homo sapien
cagaggattaacaggctctttagat

SEQ ID NO: 891131 - DNA, 25 bp, Homo sapien
cagggacaactttcgaagaaaatca

SEQ ID NO: 891132 - DNA, 25 bp, Homo sapien
tagataaatgctcattagtggaagg

SEQ ID NO: 891133 - DNA, 25 bp, Homo sapien
caatagaacacatttcagccagttt

SEQ ID NO: 891134 - DNA, 25 bp, Homo sapien
ggcatgatttctccaatagaacaca

SEQ ID NO: 891135 - DNA, 25 bp, Homo sapien
tcctgtgttgcaggcatgatttctc

SEQ ID NO: 891136 - DNA, 25 bp, Homo sapien
tttattacactgaggagctcctgtg

SEQ ID NO: 891137 - DNA, 25 bp, Homo sapien
taagtaagttggcttctgactggcc

SEQ ID NO: 891138 - DNA, 25 bp, Homo sapien
gaagggtctgatttgcctcactgca

SEQ ID NO: 891139 - DNA, 25 bp, Homo sapien
ggcattgggataaagtccgtttcca

SEQ ID NO: 891140 - DNA, 25 bp, Homo sapien
tgtggtgcaccatcatgaagggtct

SEQ ID NO: 891141 - DNA, 25 bp, Homo sapien
ccaaattcatgagtcatttcactct

SEQ ID NO: 891142 - DNA, 25 bp, Homo sapien
caaattcatgagtcatttcactctg

SEQ ID NO: 891143 - DNA, 25 bp, Homo sapien
gcagagccatctatgtccaaataca

SEQ ID NO: 891144 - DNA, 25 bp, Homo sapien
ctgcagagccatctatgtccaaata

SEQ ID NO: 891145 - DNA, 25 bp, Homo sapien
cgtgccaatgtactgtcttcacact

SEQ ID NO: 891146 - DNA, 25 bp, Homo sapien
gttttctcctaacaatggtgatacg

SEQ ID NO: 891147 - DNA, 25 bp, Homo sapien
taaaacactttagcccttgtcgtgc

SEQ ID NO: 891148 - DNA, 25 bp, Homo sapien
caatggtgatacgttggcttggcca

SEQ ID NO: 891149 - DNA, 25 bp, Homo sapien
gggatggattctggcccagtgccca

SEQ ID NO: 891150 - DNA, 25 bp, Homo sapien
tcatcctttgtggtgctgaattggg

SEQ ID NO: 891151 - DNA, 25 bp, Homo sapien
caggataagcctgacccagtaagaa

SEQ ID NO: 891152 - DNA, 25 bp, Homo sapien
ccagtgcccacaggcttgtgtctgc

SEQ ID NO: 891153 - DNA, 25 bp, Homo sapien
aatggccttcactgcacctttgaca

SEQ ID NO: 891154 - DNA, 25 bp, Homo sapien
ggccttcactgcacctttgacattt

SEQ ID NO: 891155 - DNA, 25 bp, Homo sapien
cattttccaactgcgcctttgacat

SEQ ID NO: 891156 - DNA, 25 bp, Homo sapien
ggcaatggccttcactgcacctttg

SEQ ID NO: 891157 - DNA, 25 bp, Homo sapien
ctagttgtgaagtttatcaaggtgc

SEQ ID NO: 891158 - DNA, 25 bp, Homo sapien
gtgtcgggatctgagctggctggca

SEQ ID NO: 891159 - DNA, 25 bp, Homo sapien
cacagggaagggttagaggcgttgt

SEQ ID NO: 891160 - DNA, 25 bp, Homo sapien
ggttagaggcgttgtgtcgggatct

SEQ ID NO: 891161 - DNA, 25 bp, Homo sapien
aaacacccagtgtaggagtcatttg

SEQ ID NO: 891162 - DNA, 25 bp, Homo sapien
cacccagtgtaggagtcatttggca

SEQ ID NO: 891163 - DNA, 25 bp, Homo sapien
aacacccagtgtaggagtcatttgg

SEQ ID NO: 891164 - DNA, 25 bp, Homo sapien
acacccagtgtaggagtcatttggc

SEQ ID NO: 891165 - DNA, 25 bp, Homo sapien
atgctctggtatgaaaccacatttc

SEQ ID NO: 891166 - DNA, 25 bp, Homo sapien
gatgctctggtatgaaaccacattt

SEQ ID NO: 891167 - DNA, 25 bp, Homo sapien
gaagatgctctggtatgaaaccaca

SEQ ID NO: 891168 - DNA, 25 bp, Homo sapien
catttggctggaagaagatgctctg

SEQ ID NO: 891169 - DNA, 25 bp, Homo sapien
gaagattggtgactcttggatttac

SEQ ID NO: 891170 - DNA, 25 bp, Homo sapien
ggaagattggtgactcttggattta

SEQ ID NO: 891171 - DNA, 25 bp, Homo sapien
agttgtcctctccacgtgacagtaa

SEQ ID NO: 891172 - DNA, 25 bp, Homo sapien
gcccatgaattctgctgagtatcca

SEQ ID NO: 891173 - DNA, 25 bp, Homo sapien
gccaaatcttgcaaagatgcccatg

SEQ ID NO: 891174 - DNA, 25 bp, Homo sapien
aactctcagttgtcctctccacgtg

SEQ ID NO: 891175 - DNA, 25 bp, Homo sapien
tctcctcttccatgtaatatgtgtg

SEQ ID NO: 891176 - DNA, 25 bp, Homo sapien
cctcttccatgtaatatgtgtgcat

SEQ ID NO: 891177 - DNA, 25 bp, Homo sapien
cttctcctcttccatgtaatatgtg

SEQ ID NO: 891178 - DNA, 25 bp, Homo sapien
tttaaaatggcatttgcctcctctt

SEQ ID NO: 891179 - DNA, 25 bp, Homo sapien
gagtctaatgaccagcttatgtcgt

SEQ ID NO: 891180 - DNA, 25 bp, Homo sapien
cacctgtgaggatagtgaggcagca

SEQ ID NO: 891181 - DNA, 25 bp, Homo sapien
tatgtcgtgataggtctgccctcgc

SEQ ID NO: 891182 - DNA, 25 bp, Homo sapien
caaagctgccacagttgtaggtaaa

SEQ ID NO: 891183 - DNA, 25 bp, Homo sapien
ctgtcgctttccctgccaagacgaa

SEQ ID NO: 891184 - DNA, 25 bp, Homo sapien
tttccctgccaagacgaactgtagc

SEQ ID NO: 891185 - DNA, 25 bp, Homo sapien
cgctttccctgccaagacgaactgt

SEQ ID NO: 891186 - DNA, 25 bp, Homo sapien
ctgccaagacgaactgtagccgtca

SEQ ID NO: 891187 - DNA, 25 bp, Homo sapien
cttttctcggttcaagtgagtccag

SEQ ID NO: 891188 - DNA, 25 bp, Homo sapien
aatatgccctgaatggtctgacttt

SEQ ID NO: 891189 - DNA, 25 bp, Homo sapien
tgacttttctcggttcaagtgagtc

SEQ ID NO: 891190 - DNA, 25 bp, Homo sapien
ccctgaatggtctgacttttctcgg

SEQ ID NO: 891191 - DNA, 25 bp, Homo sapien
tcaaggctttgcaaatcggggctat

SEQ ID NO: 891192 - DNA, 25 bp, Homo sapien
ggctatgatccggaaaatgtagtgc

SEQ ID NO: 891193 - DNA, 25 bp, Homo sapien
ggcgcttagacgacatctctccggt

SEQ ID NO: 891194 - DNA, 25 bp, Homo sapien
tctctccggtgtgttgactcctctg

SEQ ID NO: 891195 - DNA, 25 bp, Homo sapien
gatggagtttacatgtcacaggctg

SEQ ID NO: 891196 - DNA, 25 bp, Homo sapien
aatgagcctgtgaacggctgtggca

SEQ ID NO: 891197 - DNA, 25 bp, Homo sapien
gacaagccgtgggtaggacataggg

SEQ ID NO: 891198 - DNA, 25 bp, Homo sapien
acatagggggctcatttctgggatg

SEQ ID NO: 891199 - DNA, 25 bp, Homo sapien
gtgtgattgcataatctaacaaata

SEQ ID NO: 891200 - DNA, 25 bp, Homo sapien
taatctaacaaatacgcctatggat

SEQ ID NO: 891201 - DNA, 25 bp, Homo sapien
gattgcataatctaacaaatacgcc

SEQ ID NO: 891202 - DNA, 25 bp, Homo sapien
acaaatacgcctatggatttactga

SEQ ID NO: 891203 - DNA, 25 bp, Homo sapien
tgtttcagagggcatccagtgctga

SEQ ID NO: 891204 - DNA, 25 bp, Homo sapien
gctgataccgagcaaattctctccc

SEQ ID NO: 891205 - DNA, 25 bp, Homo sapien
gagggcatccagtgctgataccgag

SEQ ID NO: 891206 - DNA, 25 bp, Homo sapien
actctcctgtttcagagggcatcca

SEQ ID NO: 891207 - DNA, 25 bp, Homo sapien
gcagtgaagttaaggcttgcccaga

SEQ ID NO: 891208 - DNA, 25 bp, Homo sapien
cagtttccgcgggtgttgactggta

SEQ ID NO: 891209 - DNA, 25 bp, Homo sapien
gtgttgactggtaactattggtttc

SEQ ID NO: 891210 - DNA, 25 bp, Homo sapien
gtttcaaatgcgagatgggagtctt

SEQ ID NO: 891211 - DNA, 25 bp, Homo sapien
tacataactctgtgccatgtgccat

SEQ ID NO: 891212 - DNA, 25 bp, Homo sapien
tctctcgacatatgccaccaaatgt

SEQ ID NO: 891213 - DNA, 25 bp, Homo sapien
tcttcaatctctcgacatatgccac

SEQ ID NO: 891214 - DNA, 25 bp, Homo sapien
tatacataactctgtgccatgtgcc

SEQ ID NO: 891215 - DNA, 25 bp, Homo sapien
tgcaactccatgtctgcgagttgat

SEQ ID NO: 891216 - DNA, 25 bp, Homo sapien
ctctgcaactccatgtctgcgagtt

SEQ ID NO: 891217 - DNA, 25 bp, Homo sapien
tctgcaactccatgtctgcgagttg

SEQ ID NO: 891218 - DNA, 25 bp, Homo sapien
aactccatgtctgcgagttgattgt

SEQ ID NO: 891219 - DNA, 25 bp, Homo sapien
tcataggccttctccaacgtcccca

SEQ ID NO: 891220 - DNA, 25 bp, Homo sapien
ccacgttcatgcgtaggaagggctc

SEQ ID NO: 891221 - DNA, 25 bp, Homo sapien
catatgatctacactcccctgagca

SEQ ID NO: 891222 - DNA, 25 bp, Homo sapien
gattcgaaaatggtgctgttgtttg

SEQ ID NO: 891223 - DNA, 25 bp, Homo sapien
tctgggtttttcctagcatatgatc

SEQ ID NO: 891224 - DNA, 25 bp, Homo sapien
ggagtctggcacagtgttaacctct

SEQ ID NO: 891225 - DNA, 25 bp, Homo sapien
ttattaatggcttggaccttttgat

SEQ ID NO: 891226 - DNA, 25 bp, Homo sapien
gttttagtggatttgcaggctttag

SEQ ID NO: 891227 - DNA, 25 bp, Homo sapien
gccctgcgtttgtttattaatggct

SEQ ID NO: 891228 - DNA, 25 bp, Homo sapien
tgtgtaaatctctggtttgaaaacc

SEQ ID NO: 891229 - DNA, 25 bp, Homo sapien
cgccaagttctggtgaaatgttcac

SEQ ID NO: 891230 - DNA, 25 bp, Homo sapien
aatgttcacttataaggtacagccc

SEQ ID NO: 891231 - DNA, 25 bp, Homo sapien
cattcaggcgtttcaagcttgaggg

SEQ ID NO: 891232 - DNA, 25 bp, Homo sapien
tgcgtacttggataacttttgttga

SEQ ID NO: 891233 - DNA, 25 bp, Homo sapien
aacttttgttgaggcatatcaaatg

SEQ ID NO: 891234 - DNA, 25 bp, Homo sapien
gtacttggataacttttgttgaggc

SEQ ID NO: 891235 - DNA, 25 bp, Homo sapien
tcctgcgtacttggataacttttgt

SEQ ID NO: 891236 - DNA, 25 bp, Homo sapien
gactggacaagggttggtgtacact

SEQ ID NO: 891237 - DNA, 25 bp, Homo sapien
ggtgtacactttgcctgagaacctt

SEQ ID NO: 891238 - DNA, 25 bp, Homo sapien
gggtagcattttcatactggcagtt

SEQ ID NO: 891239 - DNA, 25 bp, Homo sapien
cagtgattgccattcctcttgctgt

SEQ ID NO: 891240 - DNA, 25 bp, Homo sapien
tcagatctgttccatgcgagatact

SEQ ID NO: 891241 - DNA, 25 bp, Homo sapien
tccatgcgagatacttgttcttctt

SEQ ID NO: 891242 - DNA, 25 bp, Homo sapien
cactggtaaattgtgcaccttgaaa

SEQ ID NO: 891243 - DNA, 25 bp, Homo sapien
ggcgagtcccactggtaaattgtgc

SEQ ID NO: 891244 - DNA, 25 bp, Homo sapien
agactttgccactttatagacacgg

SEQ ID NO: 891245 - DNA, 25 bp, Homo sapien
tctcccaatactcccggtgtcggag

SEQ ID NO: 891246 - DNA, 25 bp, Homo sapien
gaagacaccgagttcaaaggcagca

SEQ ID NO: 891247 - DNA, 25 bp, Homo sapien
cggctactgcatcatcagactttgc

SEQ ID NO: 891248 - DNA, 25 bp, Homo sapien
atcttgtcttgttaaatatccccac

SEQ ID NO: 891249 - DNA, 25 bp, Homo sapien
ggaatttccaaatcttgtcttgtta

SEQ ID NO: 891250 - DNA, 25 bp, Homo sapien
tccaaatcttgtcttgttaaatatc

SEQ ID NO: 891251 - DNA, 25 bp, Homo sapien
ctaggaatttccaaatcttgtcttg

SEQ ID NO: 891252 - DNA, 25 bp, Homo sapien
cctgagttctttatagggttcctgg

SEQ ID NO: 891253 - DNA, 25 bp, Homo sapien
ctgagttctttatagggttcctggg

SEQ ID NO: 891254 - DNA, 25 bp, Homo sapien
tgatagtaaaggtatatagtaactt

SEQ ID NO: 891255 - DNA, 25 bp, Homo sapien
tagtaacttcccaccgtgtgtatta

SEQ ID NO: 891256 - DNA, 25 bp, Homo sapien
caccgtgtgtattaattggatcttt

SEQ ID NO: 891257 - DNA, 25 bp, Homo sapien
gagatggcttgcaccagagggcagc

SEQ ID NO: 891258 - DNA, 25 bp, Homo sapien
tcgtccagggtgcacgaagccatag

SEQ ID NO: 891259 - DNA, 25 bp, Homo sapien
caatgtcaagggctcctaatgtcca

SEQ ID NO: 891260 - DNA, 25 bp, Homo sapien
gggaacaaggttcaccatcactgag

SEQ ID NO: 891261 - DNA, 25 bp, Homo sapien
gctggaccctagtcgagctgctcag

SEQ ID NO: 891262 - DNA, 25 bp, Homo sapien
aacatatgatcccataaaaagctgc

SEQ ID NO: 891263 - DNA, 25 bp, Homo sapien
gcggactgcagctcgcatctctggt

SEQ ID NO: 891264 - DNA, 25 bp, Homo sapien
ggcttgcggactgcagctcgcatct

SEQ ID NO: 891265 - DNA, 25 bp, Homo sapien
tgagggcttgcggactgcagctcgc

SEQ ID NO: 891266 - DNA, 25 bp, Homo sapien
gactgcagctcgcatctctggttcc

SEQ ID NO: 891267 - DNA, 25 bp, Homo sapien
aatgggatattgtggcccctttgct

SEQ ID NO: 891268 - DNA, 25 bp, Homo sapien
taggcaatgggatattgtggcccct

SEQ ID NO: 891269 - DNA, 25 bp, Homo sapien
tggtgaattaggcaatgggatattg

SEQ ID NO: 891270 - DNA, 25 bp, Homo sapien
gaattaggcaatgggatattgtggc

SEQ ID NO: 891271 - DNA, 25 bp, Homo sapien
taaccatttctattgcactcctttt

SEQ ID NO: 891272 - DNA, 25 bp, Homo sapien
ggttgggctgtgctaacttctgtcc

SEQ ID NO: 891273 - DNA, 25 bp, Homo sapien
tctgtcccaccaaaagcctacatgg

SEQ ID NO: 891274 - DNA, 25 bp, Homo sapien
acatggtagaacttggttatgttct

SEQ ID NO: 891275 - DNA, 25 bp, Homo sapien
atacccatgagcatgtgggagagct

SEQ ID NO: 891276 - DNA, 25 bp, Homo sapien
tgatacccatgagcatgtgggagag

SEQ ID NO: 891277 - DNA, 25 bp, Homo sapien
tacccatgagcatgtgggagagctt

SEQ ID NO: 891278 - DNA, 25 bp, Homo sapien
gatacccatgagcatgtgggagagc

SEQ ID NO: 891279 - DNA, 25 bp, Homo sapien
cctgctgaattaattgatgctcttc

SEQ ID NO: 891280 - DNA, 25 bp, Homo sapien
cacctgctgaattaattgatgctct

SEQ ID NO: 891281 - DNA, 25 bp, Homo sapien
ctgctgaattaattgatgctcttca

SEQ ID NO: 891282 - DNA, 25 bp, Homo sapien
gctgaattaattgatgctcttcatt

SEQ ID NO: 891283 - DNA, 25 bp, Homo sapien
ggcagaaaggaatttaaagatggga

SEQ ID NO: 891284 - DNA, 25 bp, Homo sapien
ggagatggtacaggatgatttgatc

SEQ ID NO: 891285 - DNA, 25 bp, Homo sapien
ctggaggtcacagtccactagggat

SEQ ID NO: 891286 - DNA, 25 bp, Homo sapien
cactagggatggcttttgtcccagg

SEQ ID NO: 891287 - DNA, 25 bp, Homo sapien
aggttcctgtttatatgcacacaat

SEQ ID NO: 891288 - DNA, 25 bp, Homo sapien
cctgtttatatgcacacaataggca

SEQ ID NO: 891289 - DNA, 25 bp, Homo sapien
ttcctgtttatatgcacacaatagg

SEQ ID NO: 891290 - DNA, 25 bp, Homo sapien
caataggcagcttggagggggtaaa

SEQ ID NO: 891291 - DNA, 25 bp, Homo sapien
tcccagcttgcatccaagccagacc

SEQ ID NO: 891292 - DNA, 25 bp, Homo sapien
tgtctcccagcttgcatccaagcca

SEQ ID NO: 891293 - DNA, 25 bp, Homo sapien
gggtttatctatctgaattcctgtt

SEQ ID NO: 891294 - DNA, 25 bp, Homo sapien
tgttttgggtttatctatctgaatt

SEQ ID NO: 891295 - DNA, 25 bp, Homo sapien
gctcggcacggtaatggctttatgg

SEQ ID NO: 891296 - DNA, 25 bp, Homo sapien
taagcccgattgtttcaccaggagg

SEQ ID NO: 891297 - DNA, 25 bp, Homo sapien
agaaagtagagttgagctcggcacg

SEQ ID NO: 891298 - DNA, 25 bp, Homo sapien
ggtacataaacaccaggtgccaaat

SEQ ID NO: 891299 - DNA, 25 bp, Homo sapien
catgtgtcctctgatacctcactac

SEQ ID NO: 891300 - DNA, 25 bp, Homo sapien
aaatacctgtcctgatagatagctc

SEQ ID NO: 891301 - DNA, 25 bp, Homo sapien
tacagtgctgcggagaatgctagga

SEQ ID NO: 891302 - DNA, 25 bp, Homo sapien
gcctgtcctcttagcaagatccaaa

SEQ ID NO: 891303 - DNA, 25 bp, Homo sapien
cattttgcctatatgctccaacctt

SEQ ID NO: 891304 - DNA, 25 bp, Homo sapien
cactttcaattgtggtccattccct

SEQ ID NO: 891305 - DNA, 25 bp, Homo sapien
ccaaccttcactttcaattgtggtc

SEQ ID NO: 891306 - DNA, 25 bp, Homo sapien
tcaacatcattttgcctatatgctc

SEQ ID NO: 891307 - DNA, 25 bp, Homo sapien
tattgagcactctgatatatcaggc

SEQ ID NO: 891308 - DNA, 25 bp, Homo sapien
cagacaggacattagcactctcgaa

SEQ ID NO: 891309 - DNA, 25 bp, Homo sapien
cactctcgaaaattgaccagggaac

SEQ ID NO: 891310 - DNA, 25 bp, Homo sapien
gctcaaagattggaagctcaactct

SEQ ID NO: 891311 - DNA, 25 bp, Homo sapien
gattcagcaagccatgccgtcgcct

SEQ ID NO: 891312 - DNA, 25 bp, Homo sapien
tgcccaaccatgacaccaacgttgt

SEQ ID NO: 891313 - DNA, 25 bp, Homo sapien
ccagatcgggtaaggagccctcctt

SEQ ID NO: 891314 - DNA, 25 bp, Homo sapien
tggaactcaggaaatgtcctggact

SEQ ID NO: 891315 - DNA, 25 bp, Homo sapien
gttgcgggattctgaagcacacact

SEQ ID NO: 891316 - DNA, 25 bp, Homo sapien
cttcttgttgattaagctgtctgcc

SEQ ID NO: 891317 - DNA, 25 bp, Homo sapien
tctgctcagtagtagttgcgggatt

SEQ ID NO: 891318 - DNA, 25 bp, Homo sapien
ttagcctcgaatgttctgctcagta

SEQ ID NO: 891319 - DNA, 25 bp, Homo sapien
aaagacccctcagtgagtgtggtgg

SEQ ID NO: 891320 - DNA, 25 bp, Homo sapien
gtcctcactgtcacgggccagaaat

SEQ ID NO: 891321 - DNA, 25 bp, Homo sapien
tctagagccctgatgaaagacccct

SEQ ID NO: 891322 - DNA, 25 bp, Homo sapien
aatctgtgtgggcatcttccaaacc

SEQ ID NO: 891323 - DNA, 25 bp, Homo sapien
gttttctctcggcatgagaattttt

SEQ ID NO: 891324 - DNA, 25 bp, Homo sapien
tcaagcagttgttctccaagcctgt

SEQ ID NO: 891325 - DNA, 25 bp, Homo sapien
caagcagttgttctccaagcctgtt

SEQ ID NO: 891326 - DNA, 25 bp, Homo sapien
tttggatccgttagtgacataaagc

SEQ ID NO: 891327 - DNA, 25 bp, Homo sapien
tcaagatgtgccataggtgataact

SEQ ID NO: 891328 - DNA, 25 bp, Homo sapien
ggtgataactaactgcctgccacat

SEQ ID NO: 891329 - DNA, 25 bp, Homo sapien
gctgacttagccagagatccaaggg

SEQ ID NO: 891330 - DNA, 25 bp, Homo sapien
aaatgggtctggcttatggctcttc

SEQ ID NO: 891331 - DNA, 25 bp, Homo sapien
ggaataattgagagatcatatttca

SEQ ID NO: 891332 - DNA, 25 bp, Homo sapien
caactttgggaataattgagagatc

SEQ ID NO: 891333 - DNA, 25 bp, Homo sapien
agcagcaactttgggaataattgag

SEQ ID NO: 891334 - DNA, 25 bp, Homo sapien
tgaacatcttgtgtgccaaactcca

SEQ ID NO: 891335 - DNA, 25 bp, Homo sapien
cccaacctagaactagtgactgaac

SEQ ID NO: 891336 - DNA, 25 bp, Homo sapien
gaactagtgactgaacatcttgtgt

SEQ ID NO: 891337 - DNA, 25 bp, Homo sapien
aacctagaactagtgactgaacatc

SEQ ID NO: 891338 - DNA, 25 bp, Homo sapien
gtgtccctggatcttcctttctcca

SEQ ID NO: 891339 - DNA, 25 bp, Homo sapien
tgtccctggatcttcctttctccat

SEQ ID NO: 891340 - DNA, 25 bp, Homo sapien
tgtgtccctggatcttcctttctcc

SEQ ID NO: 891341 - DNA, 25 bp, Homo sapien
ctgtgtccctggatcttcctttctc

SEQ ID NO: 891342 - DNA, 25 bp, Homo sapien
ggcactggaacgtgcaaatacatct

SEQ ID NO: 891343 - DNA, 25 bp, Homo sapien
tacatctggagcgtgctcattgaca

SEQ ID NO: 891344 - DNA, 25 bp, Homo sapien
ggcggaatgaggccttccaggcact

SEQ ID NO: 891345 - DNA, 25 bp, Homo sapien
ggaacgtgcaaatacatctggagcg

SEQ ID NO: 891346 - DNA, 25 bp, Homo sapien
tgcttccgggcttactggggcccta

SEQ ID NO: 891347 - DNA, 25 bp, Homo sapien
ggccctagtactaatgttacattta

SEQ ID NO: 891348 - DNA, 25 bp, Homo sapien
gccctagtactaatgttacatttaa

SEQ ID NO: 891349 - DNA, 25 bp, Homo sapien
ctgcttccgggcttactggggccct

SEQ ID NO: 891350 - DNA, 25 bp, Homo sapien
gagtggatactgagctgcaaaggtc

SEQ ID NO: 891351 - DNA, 25 bp, Homo sapien
aaggtcgtgtacttgtctgctggga

SEQ ID NO: 891352 - DNA, 25 bp, Homo sapien
ttgttgagtttgatgcaccaggtgc

SEQ ID NO: 891353 - DNA, 25 bp, Homo sapien
catggaggtagtttggtctcttgca

SEQ ID NO: 891354 - DNA, 25 bp, Homo sapien
tacattgggacaaaagtgaggcaac

SEQ ID NO: 891355 - DNA, 25 bp, Homo sapien
tgtggaaacaggtcatacattggga

SEQ ID NO: 891356 - DNA, 25 bp, Homo sapien
tagtattgaaggtcccagagctcat

SEQ ID NO: 891357 - DNA, 25 bp, Homo sapien
cagagctcatcaccagtaaatcgca

SEQ ID NO: 891358 - DNA, 25 bp, Homo sapien
ccctggccaacatgtagcattcata

SEQ ID NO: 891359 - DNA, 25 bp, Homo sapien
tcttggagaccgcatcagaggtggc

SEQ ID NO: 891360 - DNA, 25 bp, Homo sapien
gccttaagcagcagtttcttaggca

SEQ ID NO: 891361 - DNA, 25 bp, Homo sapien
aaatagctcaatgtcttggagaccg

SEQ ID NO: 891362 - DNA, 25 bp, Homo sapien
gtcaggaggaggtgcgccagagcca

SEQ ID NO: 891363 - DNA, 25 bp, Homo sapien
gcgccagagccacggaggccagtca

SEQ ID NO: 891364 - DNA, 25 bp, Homo sapien
agtcacctttcaagggaccacttag

SEQ ID NO: 891365 - DNA, 25 bp, Homo sapien
gccagtcacctttcaagggaccact

SEQ ID NO: 891366 - DNA, 25 bp, Homo sapien
cccacagtgtcctcgagcagacagg

SEQ ID NO: 891367 - DNA, 25 bp, Homo sapien
tcctcgagcagacaggtgatggaga

SEQ ID NO: 891368 - DNA, 25 bp, Homo sapien
cagtgtcctcgagcagacaggtgat

SEQ ID NO: 891369 - DNA, 25 bp, Homo sapien
tgtcctcgagcagacaggtgatgga

SEQ ID NO: 891370 - DNA, 25 bp, Homo sapien
gattttagactcctcaatgggcaag

SEQ ID NO: 891371 - DNA, 25 bp, Homo sapien
gcagtctctgagtgtaacaaatgcc

SEQ ID NO: 891372 - DNA, 25 bp, Homo sapien
tcatgactaacctccagggccttga

SEQ ID NO: 891373 - DNA, 25 bp, Homo sapien
cctctgtggtctaggccaggttcgt

SEQ ID NO: 891374 - DNA, 25 bp, Homo sapien
ccaggacggcttcaatttcttttct

SEQ ID NO: 891375 - DNA, 25 bp, Homo sapien
caggacggcttcaatttcttttctg

SEQ ID NO: 891376 - DNA, 25 bp, Homo sapien
ctaccgggggcccttcatcagattt

SEQ ID NO: 891377 - DNA, 25 bp, Homo sapien
ccgggggcccttcatcagatttggg

SEQ ID NO: 891378 - DNA, 25 bp, Homo sapien
agcaggttctgcagggaagtccaag

SEQ ID NO: 891379 - DNA, 25 bp, Homo sapien
gaagctgaggatggacacagcagca

SEQ ID NO: 891380 - DNA, 25 bp, Homo sapien
ttaatccactggcatatgtttaaaa

SEQ ID NO: 891381 - DNA, 25 bp, Homo sapien
catatgtttaaaaagagaagctgag

SEQ ID NO: 891382 - DNA, 25 bp, Homo sapien
gtcctggaatcagacgcccagcgtg

SEQ ID NO: 891383 - DNA, 25 bp, Homo sapien
gacgcccagcgtgcgggtcagccaa

SEQ ID NO: 891384 - DNA, 25 bp, Homo sapien
cccagcgtgcgggtcagccaagctg

SEQ ID NO: 891385 - DNA, 25 bp, Homo sapien
gaatcagacgcccagcgtgcgggtc

SEQ ID NO: 891386 - DNA, 25 bp, Homo sapien
aaggaacagaacttcctccctctct

SEQ ID NO: 891387 - DNA, 25 bp, Homo sapien
gaacagaacttcctccctctctcac

SEQ ID NO: 891388 - DNA, 25 bp, Homo sapien
ccaaggaacagaacttcctccctct

SEQ ID NO: 891389 - DNA, 25 bp, Homo sapien
ggaacagaacttcctccctctctca

SEQ ID NO: 891390 - DNA, 25 bp, Homo sapien
acatggatgtctgaagtctgaactg

SEQ ID NO: 891391 - DNA, 25 bp, Homo sapien
tgggcagcaatttcgaaaaatttcc

SEQ ID NO: 891392 - DNA, 25 bp, Homo sapien
ctgaagttgactgatgacaggacat

SEQ ID NO: 891393 - DNA, 25 bp, Homo sapien
agattgggcagcaatttcgaaaaat

SEQ ID NO: 891394 - DNA, 25 bp, Homo sapien
tgaacactctgaagctaccagccat

SEQ ID NO: 891395 - DNA, 25 bp, Homo sapien
ctttgtgtctgaacactctgaagct

SEQ ID NO: 891396 - DNA, 25 bp, Homo sapien
gattggctggttactttgtgtctga

SEQ ID NO: 891397 - DNA, 25 bp, Homo sapien
tttgattggctggttactttgtgtc

SEQ ID NO: 891398 - DNA, 25 bp, Homo sapien
gcccttttttgagggaccatgtcta

SEQ ID NO: 891399 - DNA, 25 bp, Homo sapien
gagggaccatgtctaaggctctcca

SEQ ID NO: 891400 - DNA, 25 bp, Homo sapien
ttttttgagggaccatgtctaaggc

SEQ ID NO: 891401 - DNA, 25 bp, Homo sapien
cttgcccatgcccttttttgaggga

SEQ ID NO: 891402 - DNA, 25 bp, Homo sapien
aaattgagttctattgtcaagcaca

SEQ ID NO: 891403 - DNA, 25 bp, Homo sapien
taaattctcaattgtcgggtcctga

SEQ ID NO: 891404 - DNA, 25 bp, Homo sapien
aacagagtcatagatctgcccctgg

SEQ ID NO: 891405 - DNA, 25 bp, Homo sapien
ctcgctcaatttgcgtaacaatgtg

SEQ ID NO: 891406 - DNA, 25 bp, Homo sapien
agccagttcctcgagaataaattct

SEQ ID NO: 891407 - DNA, 25 bp, Homo sapien
gaaactcttggccaacaacgcgtac

SEQ ID NO: 891408 - DNA, 25 bp, Homo sapien
ggaaactcttggccaacaacgcgta

SEQ ID NO: 891409 - DNA, 25 bp, Homo sapien
agatggaaactcttggccaacaacg

SEQ ID NO: 891410 - DNA, 25 bp, Homo sapien
atggaaactcttggccaacaacgcg

SEQ ID NO: 891411 - DNA, 25 bp, Homo sapien
ccaacccttgagtcttgtggctagg

SEQ ID NO: 891412 - DNA, 25 bp, Homo sapien
cccagtgccgttgtcaagataggaa

SEQ ID NO: 891413 - DNA, 25 bp, Homo sapien
tttcagacggaagatccccagtgcc

SEQ ID NO: 891414 - DNA, 25 bp, Homo sapien
tgtggctaggtttcggcccagcctt

SEQ ID NO: 891415 - DNA, 25 bp, Homo sapien
tttcaaagccattcctacttgcacc

SEQ ID NO: 891416 - DNA, 25 bp, Homo sapien
aaaataaatacactcataagggcgg

SEQ ID NO: 891417 - DNA, 25 bp, Homo sapien
ggagcacggcttgcacatcagggat

SEQ ID NO: 891418 - DNA, 25 bp, Homo sapien
tccttaatgcagaggatgcaataaa

SEQ ID NO: 891419 - DNA, 25 bp, Homo sapien
ataagggcggagcacggcttgcaca

SEQ ID NO: 891420 - DNA, 25 bp, Homo sapien
caaccactttggcaatttcttgtca

SEQ ID NO: 891421 - DNA, 25 bp, Homo sapien
ttgccaggccttgaaggttccaacc

SEQ ID NO: 891422 - DNA, 25 bp, Homo sapien
cactttggcaatttcttgtcatcag

SEQ ID NO: 891423 - DNA, 25 bp, Homo sapien
cttagacactctctgttgtttgcca

SEQ ID NO: 891424 - DNA, 25 bp, Homo sapien
tctaagaacagatccaggatgttgt

SEQ ID NO: 891425 - DNA, 25 bp, Homo sapien
aagaacagatccaggatgttgtaca

SEQ ID NO: 891426 - DNA, 25 bp, Homo sapien
gcttctaagaacagatccaggatgt

SEQ ID NO: 891427 - DNA, 25 bp, Homo sapien
tgcttctaagaacagatccaggatg

SEQ ID NO: 891428 - DNA, 25 bp, Homo sapien
ccttttctaagtcagtgtaggccat

SEQ ID NO: 891429 - DNA, 25 bp, Homo sapien
ctctactgcccttttctaagtcagt

SEQ ID NO: 891430 - DNA, 25 bp, Homo sapien
tgcccttttctaagtcagtgtaggc

SEQ ID NO: 891431 - DNA, 25 bp, Homo sapien
actgcccttttctaagtcagtgtag

SEQ ID NO: 891432 - DNA, 25 bp, Homo sapien
gctaagcaacagaagaggcatcaat

SEQ ID NO: 891433 - DNA, 25 bp, Homo sapien
gaggagagatggctttgctaagcaa

SEQ ID NO: 891434 - DNA, 25 bp, Homo sapien
tgctaagcaacagaagaggcatcaa

SEQ ID NO: 891435 - DNA, 25 bp, Homo sapien
gagagatggctttgctaagcaacag

SEQ ID NO: 891436 - DNA, 25 bp, Homo sapien
gtcgatgctgaactcacattcttcc

SEQ ID NO: 891437 - DNA, 25 bp, Homo sapien
tagtcgatgctgaactcacattctt

SEQ ID NO: 891438 - DNA, 25 bp, Homo sapien
caccatagtcgatgctgaactcaca

SEQ ID NO: 891439 - DNA, 25 bp, Homo sapien
catagtcgatgctgaactcacattc

SEQ ID NO: 891440 - DNA, 25 bp, Homo sapien
tagaatctcagctcaattctcctgc

SEQ ID NO: 891441 - DNA, 25 bp, Homo sapien
gtagaatctcagctcaattctcctg

SEQ ID NO: 891442 - DNA, 25 bp, Homo sapien
tggtagaatctcagctcaattctcc

SEQ ID NO: 891443 - DNA, 25 bp, Homo sapien
agtggtagaatctcagctcaattct

SEQ ID NO: 891444 - DNA, 25 bp, Homo sapien
ttttggtaaccacggcaactggtga

SEQ ID NO: 891445 - DNA, 25 bp, Homo sapien
cacacactcagacattctcctagga

SEQ ID NO: 891446 - DNA, 25 bp, Homo sapien
gactcattgtcttctcggttttatt

SEQ ID NO: 891447 - DNA, 25 bp, Homo sapien
tcccaatatttgctagctgcctctg

SEQ ID NO: 891448 - DNA, 25 bp, Homo sapien
ctgctttggaacattgtgcgaataa

SEQ ID NO: 891449 - DNA, 25 bp, Homo sapien
ttggaacattgtgcgaataagttca

SEQ ID NO: 891450 - DNA, 25 bp, Homo sapien
ttgtgtatttgtggacgtgtgagca

SEQ ID NO: 891451 - DNA, 25 bp, Homo sapien
tatttgtggacgtgtgagcacgcgt

SEQ ID NO: 891452 - DNA, 25 bp, Homo sapien
tcagaggctagcatatgggcccaca

SEQ ID NO: 891453 - DNA, 25 bp, Homo sapien
aaaaatgtctctagccgtccactga

SEQ ID NO: 891454 - DNA, 25 bp, Homo sapien
aatagagatctcattcggccgtgcc

SEQ ID NO: 891455 - DNA, 25 bp, Homo sapien
tgggactgccccttatacaatagag

SEQ ID NO: 891456 - DNA, 25 bp, Homo sapien
cctgagccagatcttgtttgcatta

SEQ ID NO: 891457 - DNA, 25 bp, Homo sapien
gaagcctgagccagatcttgtttgc

SEQ ID NO: 891458 - DNA, 25 bp, Homo sapien
tctcccttctaaatggtgttccgtg

SEQ ID NO: 891459 - DNA, 25 bp, Homo sapien
aatggtgttccgtggattagtttag

SEQ ID NO: 891460 - DNA, 25 bp, Homo sapien
gaaactggagacatgtgaaagcagc

SEQ ID NO: 891461 - DNA, 25 bp, Homo sapien
cactggctgatatgtaggttggaaa

SEQ ID NO: 891462 - DNA, 25 bp, Homo sapien
gaaagcagcttttatgcaccaatag

SEQ ID NO: 891463 - DNA, 25 bp, Homo sapien
gtagctaacttaggcagatcgaatg

SEQ ID NO: 891464 - DNA, 25 bp, Homo sapien
tggctgatttacaaggcagtcctct

SEQ ID NO: 891465 - DNA, 25 bp, Homo sapien
caaggcagtcctctgatctgagtca

SEQ ID NO: 891466 - DNA, 25 bp, Homo sapien
tgctgcaaacccattgagtggcacc

SEQ ID NO: 891467 - DNA, 25 bp, Homo sapien
cacccagcggttggagcgtctactt

SEQ ID NO: 891468 - DNA, 25 bp, Homo sapien
tctccaaagcggccctctcctcaag

SEQ ID NO: 891469 - DNA, 25 bp, Homo sapien
tccaaagcggccctctcctcaagca

SEQ ID NO: 891470 - DNA, 25 bp, Homo sapien
caccatgactaccactggtgctctc

SEQ ID NO: 891471 - DNA, 25 bp, Homo sapien
gactaccactggtgctctccaaagc

SEQ ID NO: 891472 - DNA, 25 bp, Homo sapien
atacagtaagagtgtttttgaccca

SEQ ID NO: 891473 - DNA, 25 bp, Homo sapien
aagagtgtttttgacccaagactgc

SEQ ID NO: 891474 - DNA, 25 bp, Homo sapien
cagtaagagtgtttttgacccaaga

SEQ ID NO: 891475 - DNA, 25 bp, Homo sapien
gaaatacagtaagagtgtttttgac

SEQ ID NO: 891476 - DNA, 25 bp, Homo sapien
tcattgcaattgatgggcttccttg

SEQ ID NO: 891477 - DNA, 25 bp, Homo sapien
ctcgtgggacacttcaagtcttggg

SEQ ID NO: 891478 - DNA, 25 bp, Homo sapien
cattcagggtaaacacagctcgtgg

SEQ ID NO: 891479 - DNA, 25 bp, Homo sapien
tgtcgtgctccaagcattcagggta

SEQ ID NO: 891480 - DNA, 25 bp, Homo sapien
tgatagtgtcagaggctgaaagaag

SEQ ID NO: 891481 - DNA, 25 bp, Homo sapien
gaaagaagatacagccaacttgtac

SEQ ID NO: 891482 - DNA, 25 bp, Homo sapien
tttcaagaaaactagtgatagtgtc

SEQ ID NO: 891483 - DNA, 25 bp, Homo sapien
tacagccaacttgtactcagtttca

SEQ ID NO: 891484 - DNA, 25 bp, Homo sapien
tgctccttaagcatgatgctgttcg

SEQ ID NO: 891485 - DNA, 25 bp, Homo sapien
tgctgttcgtattaagtcaggctgg

SEQ ID NO: 891486 - DNA, 25 bp, Homo sapien
ccttcccctggtaagttgagcttca

SEQ ID NO: 891487 - DNA, 25 bp, Homo sapien
ggagaactacccactgctagacctg

SEQ ID NO: 891488 - DNA, 25 bp, Homo sapien
tagtggttgacacatttggttaacc

SEQ ID NO: 891489 - DNA, 25 bp, Homo sapien
ttccacttggcttagtggttgacac

SEQ ID NO: 891490 - DNA, 25 bp, Homo sapien
cacttggcttagtggttgacacatt

SEQ ID NO: 891491 - DNA, 25 bp, Homo sapien
tggcttagtggttgacacatttggt

SEQ ID NO: 891492 - DNA, 25 bp, Homo sapien
ctcccgtcgcggatagtggacagga

SEQ ID NO: 891493 - DNA, 25 bp, Homo sapien
cactcggatgggaggaggcgaatag

SEQ ID NO: 891494 - DNA, 25 bp, Homo sapien
gaggcgaatagttggttccttacca

SEQ ID NO: 891495 - DNA, 25 bp, Homo sapien
ctgggccatgacagcagcggccaca

SEQ ID NO: 891496 - DNA, 25 bp, Homo sapien
tccagggacgcagtaggttccttag

SEQ ID NO: 891497 - DNA, 25 bp, Homo sapien
taggacttcgaagagtgtcccacac

SEQ ID NO: 891498 - DNA, 25 bp, Homo sapien
gcaactgtgactcttgttggcacca

SEQ ID NO: 891499 - DNA, 25 bp, Homo sapien
cactgtttcgaaatgacatggagaa

SEQ ID NO: 891500 - DNA, 25 bp, Homo sapien
tccaggtccctagctgtgtgctgag

SEQ ID NO: 891501 - DNA, 25 bp, Homo sapien
tgctggaccattcggcaataacgtc

SEQ ID NO: 891502 - DNA, 25 bp, Homo sapien
cttgcacgtggccattgctggacca

SEQ ID NO: 891503 - DNA, 25 bp, Homo sapien
aaatttcagaaagagtgcatccagg

SEQ ID NO: 891504 - DNA, 25 bp, Homo sapien
aggtgcagcccacggtgtctttccc

SEQ ID NO: 891505 - DNA, 25 bp, Homo sapien
ttccggccctgacaggcacttgttg

SEQ ID NO: 891506 - DNA, 25 bp, Homo sapien
cagccccactcctcgagttttatta

SEQ ID NO: 891507 - DNA, 25 bp, Homo sapien
tgttgacctaagcagtgataccaca

SEQ ID NO: 891508 - DNA, 25 bp, Homo sapien
gcactctttgactgctgaaggaacc

SEQ ID NO: 891509 - DNA, 25 bp, Homo sapien
ccgtgatacaaagcagatagtccct

SEQ ID NO: 891510 - DNA, 25 bp, Homo sapien
cacagtcgtgcctccttgaaacaag

SEQ ID NO: 891511 - DNA, 25 bp, Homo sapien
ccatggatgaggtgcaggctacttc

SEQ ID NO: 891512 - DNA, 25 bp, Homo sapien
cctactccaatcagctatgtgtggg

SEQ ID NO: 891513 - DNA, 25 bp, Homo sapien
tctgattggccatatcggatgaggc

SEQ ID NO: 891514 - DNA, 25 bp, Homo sapien
ggaagcagggttacatgctcctact

SEQ ID NO: 891515 - DNA, 25 bp, Homo sapien
tatgggcttccaattcaagcacccg

SEQ ID NO: 891516 - DNA, 25 bp, Homo sapien
ggtgaagtgggcataatttctatag

SEQ ID NO: 891517 - DNA, 25 bp, Homo sapien
tgaagtgggcataatttctatagtg

SEQ ID NO: 891518 - DNA, 25 bp, Homo sapien
aagtgggcataatttctatagtggt

SEQ ID NO: 891519 - DNA, 25 bp, Homo sapien
atttctatagtggttttctatggaa

SEQ ID NO: 891520 - DNA, 25 bp, Homo sapien
catccagctggcttctgcaagagat

SEQ ID NO: 891521 - DNA, 25 bp, Homo sapien
gcttctgcaagagattccataacca

SEQ ID NO: 891522 - DNA, 25 bp, Homo sapien
cagctggcttctgcaagagattcca

SEQ ID NO: 891523 - DNA, 25 bp, Homo sapien
tccttctctggagagtttctcttcc

SEQ ID NO: 891524 - DNA, 25 bp, Homo sapien
tcctgggacagcgagccttccgaaa

SEQ ID NO: 891525 - DNA, 25 bp, Homo sapien
cgagccccaagaaaagttgaccctg

SEQ ID NO: 891526 - DNA, 25 bp, Homo sapien
gacagcgagccttccgaaagtccga

SEQ ID NO: 891527 - DNA, 25 bp, Homo sapien
cggtggccaagtcggggagcgcatg

SEQ ID NO: 891528 - DNA, 25 bp, Homo sapien
tgtctgcaggctgaagagcaaggag

SEQ ID NO: 891529 - DNA, 25 bp, Homo sapien
cagtctgagtcccaacgctgaagaa

SEQ ID NO: 891530 - DNA, 25 bp, Homo sapien
ataggctgtctgcaggctgaagagc

SEQ ID NO: 891531 - DNA, 25 bp, Homo sapien
ccaacgctgaagaacttgaagtccg

SEQ ID NO: 891532 - DNA, 25 bp, Homo sapien
ccctggagaggcacaactgccttcc

SEQ ID NO: 891533 - DNA, 25 bp, Homo sapien
ctggagaggcacaactgccttcctc

SEQ ID NO: 891534 - DNA, 25 bp, Homo sapien
cctggagaggcacaactgccttcct

SEQ ID NO: 891535 - DNA, 25 bp, Homo sapien
agcattctgagaactttggctgtga

SEQ ID NO: 891536 - DNA, 25 bp, Homo sapien
cagcattctgagaactttggctgtg

SEQ ID NO: 891537 - DNA, 25 bp, Homo sapien
tgaagacaaatagcccctgggccct

SEQ ID NO: 891538 - DNA, 25 bp, Homo sapien
ggctgtgaagacaaatagcccctgg

SEQ ID NO: 891539 - DNA, 25 bp, Homo sapien
gacttccacgaggacgtgatttgcc

SEQ ID NO: 891540 - DNA, 25 bp, Homo sapien
aggacgtgatttgccctttccatgg

SEQ ID NO: 891541 - DNA, 25 bp, Homo sapien
cacgaggacgtgatttgccctttcc

SEQ ID NO: 891542 - DNA, 25 bp, Homo sapien
tcagggaagacttccacgaggacgt

SEQ ID NO: 891543 - DNA, 25 bp, Homo sapien
aagcttcttgtcaaccctagatatt

SEQ ID NO: 891544 - DNA, 25 bp, Homo sapien
tgtcaaccctagatattatcagaga

SEQ ID NO: 891545 - DNA, 25 bp, Homo sapien
tcctggtcattcaggagtccccaaa

SEQ ID NO: 891546 - DNA, 25 bp, Homo sapien
tctctcctggtcattcaggagtccc

SEQ ID NO: 891547 - DNA, 25 bp, Homo sapien
caattgccatgctctcatcagggcc

SEQ ID NO: 891548 - DNA, 25 bp, Homo sapien
tgctagcaagctagctctttcccca

SEQ ID NO: 891549 - DNA, 25 bp, Homo sapien
ttgccctgctagcaagctagctctt

SEQ ID NO: 891550 - DNA, 25 bp, Homo sapien
gaggtggagagtaaccagaaagaca

SEQ ID NO: 891551 - DNA, 25 bp, Homo sapien
cagcgcatcatgtctatttttcacg

SEQ ID NO: 891552 - DNA, 25 bp, Homo sapien
tcctcgtcggatatttctacccaca

SEQ ID NO: 891553 - DNA, 25 bp, Homo sapien
gcattcggaaaacgctcctcgtcgg

SEQ ID NO: 891554 - DNA, 25 bp, Homo sapien
tgcaaagaagaggtccggtatcccg

SEQ ID NO: 891555 - DNA, 25 bp, Homo sapien
ggaggagagggctcgcaggaggaag

SEQ ID NO: 891556 - DNA, 25 bp, Homo sapien
ccggctcgtggaaccacgtccactt

SEQ ID NO: 891557 - DNA, 25 bp, Homo sapien
gagaagtgaccgctagagggcaata

SEQ ID NO: 891558 - DNA, 25 bp, Homo sapien
aatccgcgaagccagaagttacccg

SEQ ID NO: 891559 - DNA, 25 bp, Homo sapien
aaagcgatttgtattggtgcctctc

SEQ ID NO: 891560 - DNA, 25 bp, Homo sapien
aaataagaatttgatcgcacatgag

SEQ ID NO: 891561 - DNA, 25 bp, Homo sapien
aataagaatttgatcgcacatgaga

SEQ ID NO: 891562 - DNA, 25 bp, Homo sapien
taagaatttgatcgcacatgagaag

SEQ ID NO: 891563 - DNA, 25 bp, Homo sapien
agaatttgatcgcacatgagaagag

SEQ ID NO: 891564 - DNA, 25 bp, Homo sapien
caacttttccttgtccggtcctcat

SEQ ID NO: 891565 - DNA, 25 bp, Homo sapien
gaaagccttgataaagctccgccca

SEQ ID NO: 891566 - DNA, 25 bp, Homo sapien
tgagcccctgagagaagacaatttc

SEQ ID NO: 891567 - DNA, 25 bp, Homo sapien
gagatgccaggaccaacaaggaaga

SEQ ID NO: 891568 - DNA, 25 bp, Homo sapien
ttagcaaccggtgaaaacaagcagg

SEQ ID NO: 891569 - DNA, 25 bp, Homo sapien
tcacctatgcacatgaaaggctgct

SEQ ID NO: 891570 - DNA, 25 bp, Homo sapien
ttctggcagtcacctatgcacatga

SEQ ID NO: 891571 - DNA, 25 bp, Homo sapien
gcagtcacctatgcacatgaaaggc

SEQ ID NO: 891572 - DNA, 25 bp, Homo sapien
ctatgcacatgaaaggctgctcctc

SEQ ID NO: 891573 - DNA, 25 bp, Homo sapien
tgtgtcattatgaaagtgtataaaa

SEQ ID NO: 891574 - DNA, 25 bp, Homo sapien
gtgtcattatgaaagtgtataaaat

SEQ ID NO: 891575 - DNA, 25 bp, Homo sapien
attgtgtcattatgaaagtgtataa

SEQ ID NO: 891576 - DNA, 25 bp, Homo sapien
ttgtgtcattatgaaagtgtataaa

SEQ ID NO: 891577 - DNA, 25 bp, Homo sapien
ccctgctgggcaaaagaaatagcta

SEQ ID NO: 891578 - DNA, 25 bp, Homo sapien
cacaaaaggtgccagatagctccct

SEQ ID NO: 891579 - DNA, 25 bp, Homo sapien
tgggactcaatattaccctgctggg

SEQ ID NO: 891580 - DNA, 25 bp, Homo sapien
ggcatgggtcaatctaggccaaaca

SEQ ID NO: 891581 - DNA, 25 bp, Homo sapien
ttagcaccattgcagtgacctccat

SEQ ID NO: 891582 - DNA, 25 bp, Homo sapien
tgtgaccataaccacagtgtacatt

SEQ ID NO: 891583 - DNA, 25 bp, Homo sapien
catggtactccactgccaataaatc

SEQ ID NO: 891584 - DNA, 25 bp, Homo sapien
tccactgtcagccttagcaccattg

SEQ ID NO: 891585 - DNA, 25 bp, Homo sapien
tcataaatagcagggaatgaaagta

SEQ ID NO: 891586 - DNA, 25 bp, Homo sapien
catgtacttcataaatagcagggaa

SEQ ID NO: 891587 - DNA, 25 bp, Homo sapien
cacttagtgataaacatgtacttca

SEQ ID NO: 891588 - DNA, 25 bp, Homo sapien
accactacacttagtgataaacatg

SEQ ID NO: 891589 - DNA, 25 bp, Homo sapien
ttttagtagaacagatacccactgg

SEQ ID NO: 891590 - DNA, 25 bp, Homo sapien
tagggcacagtcaaccatgtcactg

SEQ ID NO: 891591 - DNA, 25 bp, Homo sapien
cacagtgaggtttaagtactcataa

SEQ ID NO: 891592 - DNA, 25 bp, Homo sapien
gcaactcaagagaattagggcacag

SEQ ID NO: 891593 - DNA, 25 bp, Homo sapien
gatggtgcccgaattggccctctgt

SEQ ID NO: 891594 - DNA, 25 bp, Homo sapien
acaaaacggcacttcccctgaggtg

SEQ ID NO: 891595 - DNA, 25 bp, Homo sapien
gtgtcaaagcctccaagcgaagcct

SEQ ID NO: 891596 - DNA, 25 bp, Homo sapien
caacataaacgagttccttggcggg

SEQ ID NO: 891597 - DNA, 25 bp, Homo sapien
tgcaggagacggtcctcccgtctca

SEQ ID NO: 891598 - DNA, 25 bp, Homo sapien
aaatcgctgcaggagacggtcctcc

SEQ ID NO: 891599 - DNA, 25 bp, Homo sapien
ctgcaggagacggtcctcccgtctc

SEQ ID NO: 891600 - DNA, 25 bp, Homo sapien
tcgctgcaggagacggtcctcccgt

SEQ ID NO: 891601 - DNA, 25 bp, Homo sapien
gggaattcgatgaggtccgcctcac

SEQ ID NO: 891602 - DNA, 25 bp, Homo sapien
tcgcaggggaattcgatgaggtccg

SEQ ID NO: 891603 - DNA, 25 bp, Homo sapien
ccatgaagcggtcgcaggggaattc

SEQ ID NO: 891604 - DNA, 25 bp, Homo sapien
caggggaattcgatgaggtccgcct

SEQ ID NO: 891605 - DNA, 25 bp, Homo sapien
ttgaagtcgcatgggtcggacacca

SEQ ID NO: 891606 - DNA, 25 bp, Homo sapien
agtttcctacgcagccagcgagacg

SEQ ID NO: 891607 - DNA, 25 bp, Homo sapien
tggccaaagcggtcaaagagcaggc

SEQ ID NO: 891608 - DNA, 25 bp, Homo sapien
tggagtacatgtgccgaacgtggac

SEQ ID NO: 891609 - DNA, 25 bp, Homo sapien
gggatctgcccgagtcggacggccc

SEQ ID NO: 891610 - DNA, 25 bp, Homo sapien
ggctccgcgagggcgggatctgccc

SEQ ID NO: 891611 - DNA, 25 bp, Homo sapien
gcgggcgatggcgcagagccaggag

SEQ ID NO: 891612 - DNA, 25 bp, Homo sapien
aggccgttggggtgggctccgcgag

SEQ ID NO: 891613 - DNA, 25 bp, Homo sapien
gccccgccgactcagccttagggcg

SEQ ID NO: 891614 - DNA, 25 bp, Homo sapien
gactcagccttagggcgctgcggtt

SEQ ID NO: 891615 - DNA, 25 bp, Homo sapien
gccttagggcgctgcggttgcctac

SEQ ID NO: 891616 - DNA, 25 bp, Homo sapien
gccgactcagccttagggcgctgcg

SEQ ID NO: 891617 - DNA, 25 bp, Homo sapien
ttcccgttggcgtagaggatgcgca

SEQ ID NO: 891618 - DNA, 25 bp, Homo sapien
aagatgtccccggatagggcgctga

SEQ ID NO: 891619 - DNA, 25 bp, Homo sapien
taatccaggtatttgcctcgcaggg

SEQ ID NO: 891620 - DNA, 25 bp, Homo sapien
tcttgcccagaaagcggatccggtt

SEQ ID NO: 891621 - DNA, 25 bp, Homo sapien
ctcggccagcgagctggtcttgggc

SEQ ID NO: 891622 - DNA, 25 bp, Homo sapien
tcggccagcgagctggtcttgggca

SEQ ID NO: 891623 - DNA, 25 bp, Homo sapien
gggatgctggcagtcgcagcgctcc

SEQ ID NO: 891624 - DNA, 25 bp, Homo sapien
tggcagtcgcagcgctccgggcaca

SEQ ID NO: 891625 - DNA, 25 bp, Homo sapien
cccctgttggtgcacaggagatgct

SEQ ID NO: 891626 - DNA, 25 bp, Homo sapien
cggagccccctgttggtgcacagga

SEQ ID NO: 891627 - DNA, 25 bp, Homo sapien
cggcagcggcgggagcgcgaggcag

SEQ ID NO: 891628 - DNA, 25 bp, Homo sapien
gcgggagcgcgaggcagccgcacac

SEQ ID NO: 891629 - DNA, 25 bp, Homo sapien
gcagcggcgggagcgcgaggcagcc

SEQ ID NO: 891630 - DNA, 25 bp, Homo sapien
gggctcggcagcggcgggagcgcga

SEQ ID NO: 891631 - DNA, 25 bp, Homo sapien
ggaggcgcaaggcgcgggcagcctc

SEQ ID NO: 891632 - DNA, 25 bp, Homo sapien
aggaggcgcaaggcgcgggcagcct

SEQ ID NO: 891633 - DNA, 25 bp, Homo sapien
taaatggcctctttcggacttcgca

SEQ ID NO: 891634 - DNA, 25 bp, Homo sapien
agcctggccagagtcgctaaatggc

SEQ ID NO: 891635 - DNA, 25 bp, Homo sapien
tttcggacttcgcagcgccgtccag

SEQ ID NO: 891636 - DNA, 25 bp, Homo sapien
tgcagcggccggatcgtcctcttgg

SEQ ID NO: 891637 - DNA, 25 bp, Homo sapien
aagacccggcgctttttgtttgcag

SEQ ID NO: 891638 - DNA, 25 bp, Homo sapien
ctgagtccggagagctggattccct

SEQ ID NO: 891639 - DNA, 25 bp, Homo sapien
ataaaactgtttctccgggtgcgcg

SEQ ID NO: 891640 - DNA, 25 bp, Homo sapien
cagaccccgggtactacttgttgca

SEQ ID NO: 891641 - DNA, 25 bp, Homo sapien
ccaagtctgcgagcggagagcaaac

SEQ ID NO: 891642 - DNA, 25 bp, Homo sapien
ggcggctccagtgcaatagctcggg

SEQ ID NO: 891643 - DNA, 25 bp, Homo sapien
gctgcgtccggaagggacccaagtc

SEQ ID NO: 891644 - DNA, 25 bp, Homo sapien
gtccggaagggacccaagtctgcga

SEQ ID NO: 891645 - DNA, 25 bp, Homo sapien
taattccaggagatgagcgctgagg

SEQ ID NO: 891646 - DNA, 25 bp, Homo sapien
cgttggcagggtagtcagtggtgac

SEQ ID NO: 891647 - DNA, 25 bp, Homo sapien
tgacttcgtgggtgagcagggacct

SEQ ID NO: 891648 - DNA, 25 bp, Homo sapien
cagggaggtgagtcaatgataattc

SEQ ID NO: 891649 - DNA, 25 bp, Homo sapien
gagtgtgaggaaggcgtctagaaga

SEQ ID NO: 891650 - DNA, 25 bp, Homo sapien
cgtctagaagaggggaaacctgtgc

SEQ ID NO: 891651 - DNA, 25 bp, Homo sapien
gagtttgaggggtgagtggtattac

SEQ ID NO: 891652 - DNA, 25 bp, Homo sapien
gggaaacctgtgctgagtttgaggg

SEQ ID NO: 891653 - DNA, 25 bp, Homo sapien
acaaatgcgtttgggctgggtccat

SEQ ID NO: 891654 - DNA, 25 bp, Homo sapien
tgcagggtagtttcagaggtcagaa

SEQ ID NO: 891655 - DNA, 25 bp, Homo sapien
cagaagcacaaatgcgtttgggctg

SEQ ID NO: 891656 - DNA, 25 bp, Homo sapien
tgcactgcagggtagtttcagaggt

SEQ ID NO: 891657 - DNA, 25 bp, Homo sapien
tgtggttcccttgaacttcagctac

SEQ ID NO: 891658 - DNA, 25 bp, Homo sapien
tgtgtcttcccaagcaacctgtggt

SEQ ID NO: 891659 - DNA, 25 bp, Homo sapien
gctacagaggtatgaaggattccag

SEQ ID NO: 891660 - DNA, 25 bp, Homo sapien
cttctcaggcttgccacggttgtgc

SEQ ID NO: 891661 - DNA, 25 bp, Homo sapien
atgagttgcttcttgggccatggca

SEQ ID NO: 891662 - DNA, 25 bp, Homo sapien
tgagttgcttcttgggccatggcag

SEQ ID NO: 891663 - DNA, 25 bp, Homo sapien
catgagttgcttcttgggccatggc

SEQ ID NO: 891664 - DNA, 25 bp, Homo sapien
agtctgccttctctatggagatata

SEQ ID NO: 891665 - DNA, 25 bp, Homo sapien
catggtaggaccatccacagctgcc

SEQ ID NO: 891666 - DNA, 25 bp, Homo sapien
ggctcatggtaggaccatccacagc

SEQ ID NO: 891667 - DNA, 25 bp, Homo sapien
aacatgctgttttgtagtctgcctt

SEQ ID NO: 891668 - DNA, 25 bp, Homo sapien
ctgtctactccaaatgccaagttgt

SEQ ID NO: 891669 - DNA, 25 bp, Homo sapien
tggctcatcacaaagaccagcagca

SEQ ID NO: 891670 - DNA, 25 bp, Homo sapien
tgtctactccaaatgccaagttgtt

SEQ ID NO: 891671 - DNA, 25 bp, Homo sapien
gggagaaatggctcatcacaaagac

SEQ ID NO: 891672 - DNA, 25 bp, Homo sapien
ttcagtttacgtaactgagtatgtc

SEQ ID NO: 891673 - DNA, 25 bp, Homo sapien
gatctaaggatttgtttggagtgag

SEQ ID NO: 891674 - DNA, 25 bp, Homo sapien
ttactaaaagacaactccattggag

SEQ ID NO: 891675 - DNA, 25 bp, Homo sapien
tctctgcattcttagccttactagc

SEQ ID NO: 891676 - DNA, 25 bp, Homo sapien
tctccccctggaaggtctccagtct

SEQ ID NO: 891677 - DNA, 25 bp, Homo sapien
cagtgatactctctccccctggaag

SEQ ID NO: 891678 - DNA, 25 bp, Homo sapien
gtgatactctctccccctggaaggt

SEQ ID NO: 891679 - DNA, 25 bp, Homo sapien
ccccctggaaggtctccagtctcac

SEQ ID NO: 891680 - DNA, 25 bp, Homo sapien
tttggagtaattagtcatcctctgt

SEQ ID NO: 891681 - DNA, 25 bp, Homo sapien
tggtttggagtaattagtcatcctc

SEQ ID NO: 891682 - DNA, 25 bp, Homo sapien
ccttggtttggagtaattagtcatc

SEQ ID NO: 891683 - DNA, 25 bp, Homo sapien
ggagtaattagtcatcctctgtcct

SEQ ID NO: 891684 - DNA, 25 bp, Homo sapien
cttcatctattaaagtaggtggcac

SEQ ID NO: 891685 - DNA, 25 bp, Homo sapien
cagccttcccttcataagcatctgt

SEQ ID NO: 891686 - DNA, 25 bp, Homo sapien
aggtggcacactgggattatttatg

SEQ ID NO: 891687 - DNA, 25 bp, Homo sapien
gtggtcaccagccttcccttcataa

SEQ ID NO: 891688 - DNA, 25 bp, Homo sapien
aagatgttacagctttgtttgttac

SEQ ID NO: 891689 - DNA, 25 bp, Homo sapien
tcacggcatgccaaacttctgttat

SEQ ID NO: 891690 - DNA, 25 bp, Homo sapien
tacatcttgtctcagtgtcacatca

SEQ ID NO: 891691 - DNA, 25 bp, Homo sapien
aactgcacttttcacttactcttag

SEQ ID NO: 891692 - DNA, 25 bp, Homo sapien
cttttcagcaatgaaaacctctgat

SEQ ID NO: 891693 - DNA, 25 bp, Homo sapien
ttttcagcaatgaaaacctctgatg

SEQ ID NO: 891694 - DNA, 25 bp, Homo sapien
ccttttccataaatgaatcgattaa

SEQ ID NO: 891695 - DNA, 25 bp, Homo sapien
tatgtcctccacctcgaataattac

SEQ ID NO: 891696 - DNA, 25 bp, Homo sapien
cgattaatcatgtcaaaagctctca

SEQ ID NO: 891697 - DNA, 25 bp, Homo sapien
gtcatagggtaaaatatgtcctcca

SEQ ID NO: 891698 - DNA, 25 bp, Homo sapien
ctgaccctggtccaatttctgagct

SEQ ID NO: 891699 - DNA, 25 bp, Homo sapien
gaccctggtccaatttctgagctgc

SEQ ID NO: 891700 - DNA, 25 bp, Homo sapien
accctggtccaatttctgagctgcc

SEQ ID NO: 891701 - DNA, 25 bp, Homo sapien
cctggtccaatttctgagctgccat

SEQ ID NO: 891702 - DNA, 25 bp, Homo sapien
gaaaaggagcttctaggtgcttcag

SEQ ID NO: 891703 - DNA, 25 bp, Homo sapien
tcaggagacccacatgtagccatca

SEQ ID NO: 891704 - DNA, 25 bp, Homo sapien
gatgcataccctcaagagaatctgc

SEQ ID NO: 891705 - DNA, 25 bp, Homo sapien
cagcactcagggaaacgattcttga

SEQ ID NO: 891706 - DNA, 25 bp, Homo sapien
tcatagaccccctccaattggtgag

SEQ ID NO: 891707 - DNA, 25 bp, Homo sapien
gatgtaacctctagctgaaggtctg

SEQ ID NO: 891708 - DNA, 25 bp, Homo sapien
tttccagaacagtcaagcttcaggg

SEQ ID NO: 891709 - DNA, 25 bp, Homo sapien
ctagatgtaacctctagctgaaggt

SEQ ID NO: 891710 - DNA, 25 bp, Homo sapien
tgcctgctcccaagcatcttcctac

SEQ ID NO: 891711 - DNA, 25 bp, Homo sapien
tcaggctttattttcaatcccgctc

SEQ ID NO: 891712 - DNA, 25 bp, Homo sapien
tttattttcaatcccgctctcccat

SEQ ID NO: 891713 - DNA, 25 bp, Homo sapien
cctgcctgctcccaagcatcttcct

SEQ ID NO: 891714 - DNA, 25 bp, Homo sapien
gcttgccggatgtaaccagccactt

SEQ ID NO: 891715 - DNA, 25 bp, Homo sapien
tgatggaagtcacccgcttgccgga

SEQ ID NO: 891716 - DNA, 25 bp, Homo sapien
catcaaggagcgctctgtcagggca

SEQ ID NO: 891717 - DNA, 25 bp, Homo sapien
gatgatgtccagttggccattgtag

SEQ ID NO: 891718 - DNA, 25 bp, Homo sapien
caggaggtgaagctcatgaatcgag

SEQ ID NO: 891719 - DNA, 25 bp, Homo sapien
agccatcagcaaatgcaagattcag

SEQ ID NO: 891720 - DNA, 25 bp, Homo sapien
caaatgcaagattcaggaggtgaag

SEQ ID NO: 891721 - DNA, 25 bp, Homo sapien
tgaaatgaaatcaagccatcagcaa

SEQ ID NO: 891722 - DNA, 25 bp, Homo sapien
ccctaaggcttgctggtattttaag

SEQ ID NO: 891723 - DNA, 25 bp, Homo sapien
ctaaggcttgctggtattttaagca

SEQ ID NO: 891724 - DNA, 25 bp, Homo sapien
ggcttgctggtattttaagcaacaa

SEQ ID NO: 891725 - DNA, 25 bp, Homo sapien
cttgctggtattttaagcaacaagg

SEQ ID NO: 891726 - DNA, 25 bp, Homo sapien
ggtcctctctgtcaatagctgcgaa

SEQ ID NO: 891727 - DNA, 25 bp, Homo sapien
ctgcgaagtaacagaagtaagtaac

SEQ ID NO: 891728 - DNA, 25 bp, Homo sapien
tggaaagaaaattggtcctctctgt

SEQ ID NO: 891729 - DNA, 25 bp, Homo sapien
agccactctcggaggagcggtctgc

SEQ ID NO: 891730 - DNA, 25 bp, Homo sapien
catagaccaggcaaatccaacgaaa

SEQ ID NO: 891731 - DNA, 25 bp, Homo sapien
tctttttgataacagaccagggtca

SEQ ID NO: 891732 - DNA, 25 bp, Homo sapien
gaagtgtgacaacgtggctttctct

SEQ ID NO: 891733 - DNA, 25 bp, Homo sapien
taagtcatccactctcacacgaaag

SEQ ID NO: 891734 - DNA, 25 bp, Homo sapien
tactcttgcatttggattataacgg

SEQ ID NO: 891735 - DNA, 25 bp, Homo sapien
aataaatgtcctagagttagcttcc

SEQ ID NO: 891736 - DNA, 25 bp, Homo sapien
ctcacaaggaactctgcagtataaa

SEQ ID NO: 891737 - DNA, 25 bp, Homo sapien
ggcagttgcttatctatagactata

SEQ ID NO: 891738 - DNA, 25 bp, Homo sapien
ctgcaaccttgttatgattaatcac

SEQ ID NO: 891739 - DNA, 25 bp, Homo sapien
tatagatgtgagtttctgacctata

SEQ ID NO: 891740 - DNA, 25 bp, Homo sapien
ttctctttatatagatgtgagtttc

SEQ ID NO: 891741 - DNA, 25 bp, Homo sapien
gattaatcacttattaattccaaga

SEQ ID NO: 891742 - DNA, 25 bp, Homo sapien
tcatttgctcttggtgtcctccttc

SEQ ID NO: 891743 - DNA, 25 bp, Homo sapien
tatcttctcgcaagtacttttcaac

SEQ ID NO: 891744 - DNA, 25 bp, Homo sapien
catgatttcagttaaccatggctta

SEQ ID NO: 891745 - DNA, 25 bp, Homo sapien
tccccacgtggatggcttgtctcac

SEQ ID NO: 891746 - DNA, 25 bp, Homo sapien
ccatggcttaactgactgtactgta

SEQ ID NO: 891747 - DNA, 25 bp, Homo sapien
aatttcacatagtaaagctgatcct

SEQ ID NO: 891748 - DNA, 25 bp, Homo sapien
gacaaaaatttcacatagtaaagct

SEQ ID NO: 891749 - DNA, 25 bp, Homo sapien
tctgggagtgacaaaaatttcacat

SEQ ID NO: 891750 - DNA, 25 bp, Homo sapien
catagtaaagctgatcctcaggttc

SEQ ID NO: 891751 - DNA, 25 bp, Homo sapien
gcagcattggcgaattccactgaaa

SEQ ID NO: 891752 - DNA, 25 bp, Homo sapien
tgaagtgagggccatactaaatgca

SEQ ID NO: 891753 - DNA, 25 bp, Homo sapien
gagactcgtaaacagacttgaagct

SEQ ID NO: 891754 - DNA, 25 bp, Homo sapien
tatccaagcgtcttaagtacagaac

SEQ ID NO: 891755 - DNA, 25 bp, Homo sapien
cattctggaagtaagaaggatcact

SEQ ID NO: 891756 - DNA, 25 bp, Homo sapien
cgccatctagtagtttatccagtat

SEQ ID NO: 891757 - DNA, 25 bp, Homo sapien
gatcacttgttaagtcgccatctag

SEQ ID NO: 891758 - DNA, 25 bp, Homo sapien
cgtgcaccgcaaaaagttatagtaa

SEQ ID NO: 891759 - DNA, 25 bp, Homo sapien
aatttggtacaggaattctgcatag

SEQ ID NO: 891760 - DNA, 25 bp, Homo sapien
cattcatggcactgcttctggaagt

SEQ ID NO: 891761 - DNA, 25 bp, Homo sapien
tggtacaggaattctgcatagcccc

SEQ ID NO: 891762 - DNA, 25 bp, Homo sapien
cttcctgatgtgttctatgcattca

SEQ ID NO: 891763 - DNA, 25 bp, Homo sapien
gattcgggatcagaatatccatctc

SEQ ID NO: 891764 - DNA, 25 bp, Homo sapien
ggttgatcttcacctctctcacagg

SEQ ID NO: 891765 - DNA, 25 bp, Homo sapien
ccaatagcaattccgttcaggttga

SEQ ID NO: 891766 - DNA, 25 bp, Homo sapien
aatggctggcacatatttccctgca

SEQ ID NO: 891767 - DNA, 25 bp, Homo sapien
tgtttgactccccttcagacacaaa

SEQ ID NO: 891768 - DNA, 25 bp, Homo sapien
agacacaaagtgaatctgaagcagg

SEQ ID NO: 891769 - DNA, 25 bp, Homo sapien
tcaagaagctagagaacttcttttc

SEQ ID NO: 891770 - DNA, 25 bp, Homo sapien
taaaatatggaaggggatgtttgac

SEQ ID NO: 891771 - DNA, 25 bp, Homo sapien
cagggttctgctcattatctcgtca

SEQ ID NO: 891772 - DNA, 25 bp, Homo sapien
gcctgtccccactggagagtctttg

SEQ ID NO: 891773 - DNA, 25 bp, Homo sapien
tttgtccagtgcctcaaacatagca

SEQ ID NO: 891774 - DNA, 25 bp, Homo sapien
ttcagtgaacactggaccctcaatg

SEQ ID NO: 891775 - DNA, 25 bp, Homo sapien
gtcattatttttatattcaggaaat

SEQ ID NO: 891776 - DNA, 25 bp, Homo sapien
ctccccagtgacataaaagtcatta

SEQ ID NO: 891777 - DNA, 25 bp, Homo sapien
tatctggaaaaactgaattagtgca

SEQ ID NO: 891778 - DNA, 25 bp, Homo sapien
tatttttatattcaggaaatatctg

SEQ ID NO: 891779 - DNA, 25 bp, Homo sapien
tcctcattgactgcatatccgtggg

SEQ ID NO: 891780 - DNA, 25 bp, Homo sapien
tccgtgggtatcatcagtaaaactg

SEQ ID NO: 891781 - DNA, 25 bp, Homo sapien
tgtataaatcccgtgctacatcgtc

SEQ ID NO: 891782 - DNA, 25 bp, Homo sapien
tcccgtgctacatcgtcctcattga

SEQ ID NO: 891783 - DNA, 25 bp, Homo sapien
ccaccccacgctcccatctctacta

SEQ ID NO: 891784 - DNA, 25 bp, Homo sapien
gctaacatggtgaacaccccccacc

SEQ ID NO: 891785 - DNA, 25 bp, Homo sapien
aggcaggagaaccaggttgaaccgg

SEQ ID NO: 891786 - DNA, 25 bp, Homo sapien
cccccaccccacgctcccatctcta

SEQ ID NO: 891787 - DNA, 25 bp, Homo sapien
caatgtaaagcatggagagcgttgt

SEQ ID NO: 891788 - DNA, 25 bp, Homo sapien
tggattgtcaatgtaaagcatggag

SEQ ID NO: 891789 - DNA, 25 bp, Homo sapien
aaagcatggagagcgttgtggtcca

SEQ ID NO: 891790 - DNA, 25 bp, Homo sapien
tgtcaatgtaaagcatggagagcgt

SEQ ID NO: 891791 - DNA, 25 bp, Homo sapien
tccttctcggatggatattgccaga

SEQ ID NO: 891792 - DNA, 25 bp, Homo sapien
aatctggaacggttaagctattcat

SEQ ID NO: 891793 - DNA, 25 bp, Homo sapien
cctccttctcggatggatattgcca

SEQ ID NO: 891794 - DNA, 25 bp, Homo sapien
ttgtgttttgataatctggaacggt

SEQ ID NO: 891795 - DNA, 25 bp, Homo sapien
aacataaggcccatgttccacaaag

SEQ ID NO: 891796 - DNA, 25 bp, Homo sapien
catgttccacaaagagtccaaacat

SEQ ID NO: 891797 - DNA, 25 bp, Homo sapien
aggcccatgttccacaaagagtcca

SEQ ID NO: 891798 - DNA, 25 bp, Homo sapien
aggtcatgttacttgtgacaacata

SEQ ID NO: 891799 - DNA, 25 bp, Homo sapien
agagaactactggggcatcttctgg

SEQ ID NO: 891800 - DNA, 25 bp, Homo sapien
cagagaactactggggcatcttctg

SEQ ID NO: 891801 - DNA, 25 bp, Homo sapien
tcttcctttactatgactgctgcca

SEQ ID NO: 891802 - DNA, 25 bp, Homo sapien
caaatcttcctttactatgactgct

SEQ ID NO: 891803 - DNA, 25 bp, Homo sapien
aatcttcctttactatgactgctgc

SEQ ID NO: 891804 - DNA, 25 bp, Homo sapien
cttcctttactatgactgctgccat

SEQ ID NO: 891805 - DNA, 25 bp, Homo sapien
tggctacatgatgcaaggacaggta

SEQ ID NO: 891806 - DNA, 25 bp, Homo sapien
aaatgaaaggttggccatacttggc

SEQ ID NO: 891807 - DNA, 25 bp, Homo sapien
tggcagccatgggtgctagttaatc

SEQ ID NO: 891808 - DNA, 25 bp, Homo sapien
aagaagacgtgatccagactgtggc

SEQ ID NO: 891809 - DNA, 25 bp, Homo sapien
ttggctccatggcatttgaggtaac

SEQ ID NO: 891810 - DNA, 25 bp, Homo sapien
tctttcatagacactagattctcaa

SEQ ID NO: 891811 - DNA, 25 bp, Homo sapien
gctccatggcatttgaggtaactga

SEQ ID NO: 891812 - DNA, 25 bp, Homo sapien
gcctcagcagtgtaatcctgatctt

SEQ ID NO: 891813 - DNA, 25 bp, Homo sapien
acactggtgttctttctgttgggca

SEQ ID NO: 891814 - DNA, 25 bp, Homo sapien
aaacggcaagccaggtcttgaacac

SEQ ID NO: 891815 - DNA, 25 bp, Homo sapien
gaacactggtgttctttctgttggg

SEQ ID NO: 891816 - DNA, 25 bp, Homo sapien
caaacggcaagccaggtcttgaaca

SEQ ID NO: 891817 - DNA, 25 bp, Homo sapien
gtcttattcacggtgaggaagccgg

SEQ ID NO: 891818 - DNA, 25 bp, Homo sapien
gaggaagccggcataactcttcatg

SEQ ID NO: 891819 - DNA, 25 bp, Homo sapien
ctgttgtaagtcttattcacggtga

SEQ ID NO: 891820 - DNA, 25 bp, Homo sapien
ttattcacggtgaggaagccggcat

SEQ ID NO: 891821 - DNA, 25 bp, Homo sapien
aatgtgagccatctatctcagtctg

SEQ ID NO: 891822 - DNA, 25 bp, Homo sapien
aaatgtgagccatctatctcagtct

SEQ ID NO: 891823 - DNA, 25 bp, Homo sapien
tgggattaaacacagcagtcaggct

SEQ ID NO: 891824 - DNA, 25 bp, Homo sapien
ctgggattaaacacagcagtcaggc

SEQ ID NO: 891825 - DNA, 25 bp, Homo sapien
gggattaaacacagcagtcaggctg

SEQ ID NO: 891826 - DNA, 25 bp, Homo sapien
cttcccagcttcaatgtaaggggtg

SEQ ID NO: 891827 - DNA, 25 bp, Homo sapien
atgtaaggggtgagaaataatggct

SEQ ID NO: 891828 - DNA, 25 bp, Homo sapien
gcttcaatgtaaggggtgagaaata

SEQ ID NO: 891829 - DNA, 25 bp, Homo sapien
cccagcttcaatgtaaggggtgaga

SEQ ID NO: 891830 - DNA, 25 bp, Homo sapien
acaggggccaggcatcaacaggacc

SEQ ID NO: 891831 - DNA, 25 bp, Homo sapien
aacaggaccagcgaaacaatcacct

SEQ ID NO: 891832 - DNA, 25 bp, Homo sapien
tgtatagggagcgaaacagcccatc

SEQ ID NO: 891833 - DNA, 25 bp, Homo sapien
ggaccagcgaaacaatcaccttcca

SEQ ID NO: 891834 - DNA, 25 bp, Homo sapien
ggtatgacctcttctgtttcctagg

SEQ ID NO: 891835 - DNA, 25 bp, Homo sapien
ctgggtatgacctcttctgtttcct

SEQ ID NO: 891836 - DNA, 25 bp, Homo sapien
gggtatgacctcttctgtttcctag

SEQ ID NO: 891837 - DNA, 25 bp, Homo sapien
gtatgacctcttctgtttcctagga

SEQ ID NO: 891838 - DNA, 25 bp, Homo sapien
ccagaatttaaagccccatacagtc

SEQ ID NO: 891839 - DNA, 25 bp, Homo sapien
agccccatacagtctggcttgctca

SEQ ID NO: 891840 - DNA, 25 bp, Homo sapien
aatttaaagccccatacagtctggc

SEQ ID NO: 891841 - DNA, 25 bp, Homo sapien
tacagtctggcttgctcacaccaac

SEQ ID NO: 891842 - DNA, 25 bp, Homo sapien
taatcctgctgaaacgtggtgaatc

SEQ ID NO: 891843 - DNA, 25 bp, Homo sapien
tactggttactgcagaaggcaaaag

SEQ ID NO: 891844 - DNA, 25 bp, Homo sapien
gaattggcaagagtctataacagca

SEQ ID NO: 891845 - DNA, 25 bp, Homo sapien
agtccctccccagtctaaaagagag

SEQ ID NO: 891846 - DNA, 25 bp, Homo sapien
ccgagggaccgaggcgaggacctgt

SEQ ID NO: 891847 - DNA, 25 bp, Homo sapien
gaccgaggcgaggacctgtcccgct

SEQ ID NO: 891848 - DNA, 25 bp, Homo sapien
ctaagtccgagggaccgaggcgagg

SEQ ID NO: 891849 - DNA, 25 bp, Homo sapien
ccgaggcgaggacctgtcccgctga

SEQ ID NO: 891850 - DNA, 25 bp, Homo sapien
cacgacccacgcagggcaggcggca

SEQ ID NO: 891851 - DNA, 25 bp, Homo sapien
acccacgcagggcaggcggcactta

SEQ ID NO: 891852 - DNA, 25 bp, Homo sapien
ctggcacgacccacgcagggcaggc

SEQ ID NO: 891853 - DNA, 25 bp, Homo sapien
gacccacgcagggcaggcggcactt

SEQ ID NO: 891854 - DNA, 25 bp, Homo sapien
ctccctgagccgcggcgcgcaagga

SEQ ID NO: 891855 - DNA, 25 bp, Homo sapien
ggaccccagccggttgtccttgcag

SEQ ID NO: 891856 - DNA, 25 bp, Homo sapien
cgcaaggaccccagccggttgtcct

SEQ ID NO: 891857 - DNA, 25 bp, Homo sapien
cggcgcgcaaggaccccagccggtt

SEQ ID NO: 891858 - DNA, 25 bp, Homo sapien
ccaaatcaggcagaagtgaggcagc

SEQ ID NO: 891859 - DNA, 25 bp, Homo sapien
aatcaggcagaagtgaggcagcccc

SEQ ID NO: 891860 - DNA, 25 bp, Homo sapien
tcccaaatcaggcagaagtgaggca

SEQ ID NO: 891861 - DNA, 25 bp, Homo sapien
caaatcaggcagaagtgaggcagcc

SEQ ID NO: 891862 - DNA, 25 bp, Homo sapien
cctctaggctcacatgacccagacc

SEQ ID NO: 891863 - DNA, 25 bp, Homo sapien
aaagtgcgtcgtcgtgtcccaacct

SEQ ID NO: 891864 - DNA, 25 bp, Homo sapien
ggcaaaaagtgcgtcgtcgtgtccc

SEQ ID NO: 891865 - DNA, 25 bp, Homo sapien
acctggccgcatcaagtcagcgctt

SEQ ID NO: 891866 - DNA, 25 bp, Homo sapien
gaagcaagcagccccagggtggaat

SEQ ID NO: 891867 - DNA, 25 bp, Homo sapien
aagaagcaagcagccccagggtgga

SEQ ID NO: 891868 - DNA, 25 bp, Homo sapien
ctggaagaagcaagcagccccaggg

SEQ ID NO: 891869 - DNA, 25 bp, Homo sapien
tggaagaagcaagcagccccagggt

SEQ ID NO: 891870 - DNA, 25 bp, Homo sapien
cttcagaccacatcggagcgtcctg

SEQ ID NO: 891871 - DNA, 25 bp, Homo sapien
tgagctgggaaataggccctgagcc

SEQ ID NO: 891872 - DNA, 25 bp, Homo sapien
gaaaggcgaggacatttctaaatgc

SEQ ID NO: 891873 - DNA, 25 bp, Homo sapien
agcgtcctgtcagggtctgtgagct

SEQ ID NO: 891874 - DNA, 25 bp, Homo sapien
agccactcaatgacctgaacaagat

SEQ ID NO: 891875 - DNA, 25 bp, Homo sapien
cttcaccagtgaaaagccactcaat

SEQ ID NO: 891876 - DNA, 25 bp, Homo sapien
cagtgaaaagccactcaatgacctg

SEQ ID NO: 891877 - DNA, 25 bp, Homo sapien
gaaaagccactcaatgacctgaaca

SEQ ID NO: 891878 - DNA, 25 bp, Homo sapien
ttcatggaacacttctgtgtgactt

SEQ ID NO: 891879 - DNA, 25 bp, Homo sapien
ctgtaatatctaatctcaggcaaaa

SEQ ID NO: 891880 - DNA, 25 bp, Homo sapien
ctaaacttcatggaacacttctgtg

SEQ ID NO: 891881 - DNA, 25 bp, Homo sapien
tgtgtgactttctgtaatatctaat

SEQ ID NO: 891882 - DNA, 25 bp, Homo sapien
tttcacatgaaggaacagcgcagac

SEQ ID NO: 891883 - DNA, 25 bp, Homo sapien
tctttcacatgaaggaacagcgcag

SEQ ID NO: 891884 - DNA, 25 bp, Homo sapien
ttcacatgaaggaacagcgcagaca

SEQ ID NO: 891885 - DNA, 25 bp, Homo sapien
tgctctttcacatgaaggaacagcg

SEQ ID NO: 891886 - DNA, 25 bp, Homo sapien
ctaatacgcgtcctactgtattctt

SEQ ID NO: 891887 - DNA, 25 bp, Homo sapien
tcacctaatacgcgtcctactgtat

SEQ ID NO: 891888 - DNA, 25 bp, Homo sapien
cacctaatacgcgtcctactgtatt

SEQ ID NO: 891889 - DNA, 25 bp, Homo sapien
cctaatacgcgtcctactgtattct

SEQ ID NO: 891890 - DNA, 25 bp, Homo sapien
aacctgtaaactgggcttggtgatt

SEQ ID NO: 891891 - DNA, 25 bp, Homo sapien
caacctgtaaactgggcttggtgat

SEQ ID NO: 891892 - DNA, 25 bp, Homo sapien
agaacaacctgtaaactgggcttgg

SEQ ID NO: 891893 - DNA, 25 bp, Homo sapien
aacaacctgtaaactgggcttggtg

SEQ ID NO: 891894 - DNA, 25 bp, Homo sapien
tgactggtctcatccagttgaccaa

SEQ ID NO: 891895 - DNA, 25 bp, Homo sapien
gaccaacattctgcttcaggaacat

SEQ ID NO: 891896 - DNA, 25 bp, Homo sapien
agcatccggcccactgagttcttga

SEQ ID NO: 891897 - DNA, 25 bp, Homo sapien
gaaagcatggttgctgtgggcatca

SEQ ID NO: 891898 - DNA, 25 bp, Homo sapien
ttatttgtgttaggccatgctgcca

SEQ ID NO: 891899 - DNA, 25 bp, Homo sapien
cttatttgtgttaggccatgctgcc

SEQ ID NO: 891900 - DNA, 25 bp, Homo sapien
taaggcttatttgtgttaggccatg

SEQ ID NO: 891901 - DNA, 25 bp, Homo sapien
ggcttatttgtgttaggccatgctg

SEQ ID NO: 891902 - DNA, 25 bp, Homo sapien
ggctcctggcagcaacatttatata

SEQ ID NO: 891903 - DNA, 25 bp, Homo sapien
attgtagtttgaactggggctcctg

SEQ ID NO: 891904 - DNA, 25 bp, Homo sapien
cactgacgtgttcaacttacagcaa

SEQ ID NO: 891905 - DNA, 25 bp, Homo sapien
tggtggctcctagggttgtgcagct

SEQ ID NO: 891906 - DNA, 25 bp, Homo sapien
aagcaaaagctcctcattgtgatat

SEQ ID NO: 891907 - DNA, 25 bp, Homo sapien
gaaataagatcataagcagcagtaa

SEQ ID NO: 891908 - DNA, 25 bp, Homo sapien
aataatgaaataagatcataagcag

SEQ ID NO: 891909 - DNA, 25 bp, Homo sapien
cattgtgatatgacacatagagtgt

SEQ ID NO: 891910 - DNA, 25 bp, Homo sapien
tatagttcctgtcaagacagcaggc

SEQ ID NO: 891911 - DNA, 25 bp, Homo sapien
aggatgacttggcatgtaagagacc

SEQ ID NO: 891912 - DNA, 25 bp, Homo sapien
caggatgacttggcatgtaagagac

SEQ ID NO: 891913 - DNA, 25 bp, Homo sapien
ccagtcaagctcttcaacaatataa

SEQ ID NO: 891914 - DNA, 25 bp, Homo sapien
catttccagtcaagctcttcaacaa

SEQ ID NO: 891915 - DNA, 25 bp, Homo sapien
caaaccttagcagcatatcaaaatc

SEQ ID NO: 891916 - DNA, 25 bp, Homo sapien
atttctcttatcaaaccttagcagc

SEQ ID NO: 891917 - DNA, 25 bp, Homo sapien
gagctgtgatcgtgtcactgtattg

SEQ ID NO: 891918 - DNA, 25 bp, Homo sapien
aggatggattaagcccaggaggtag

SEQ ID NO: 891919 - DNA, 25 bp, Homo sapien
ggagggaggatggattaagcccagg

SEQ ID NO: 891920 - DNA, 25 bp, Homo sapien
ctgtgatcgtgtcactgtattgcag

SEQ ID NO: 891921 - DNA, 25 bp, Homo sapien
agtggccaaataggatactccaggc

SEQ ID NO: 891922 - DNA, 25 bp, Homo sapien
tggccaaataggatactccaggcaa

SEQ ID NO: 891923 - DNA, 25 bp, Homo sapien
ccaaataggatactccaggcaatac

SEQ ID NO: 891924 - DNA, 25 bp, Homo sapien
ggccaaataggatactccaggcaat

SEQ ID NO: 891925 - DNA, 25 bp, Homo sapien
agtgagaaagacgatgcaggaatac

SEQ ID NO: 891926 - DNA, 25 bp, Homo sapien
cagtgagaaagacgatgcaggaata

SEQ ID NO: 891927 - DNA, 25 bp, Homo sapien
tcagtgagaaagacgatgcaggaat

SEQ ID NO: 891928 - DNA, 25 bp, Homo sapien
ctacctgcggcgtctgagctgcctg

SEQ ID NO: 891929 - DNA, 25 bp, Homo sapien
agcagaggcggcctccctttgtctg

SEQ ID NO: 891930 - DNA, 25 bp, Homo sapien
ttaacccatcctgggccgtctgtgc

SEQ ID NO: 891931 - DNA, 25 bp, Homo sapien
tgtgcctgcgtcgtgtgccgccact

SEQ ID NO: 891932 - DNA, 25 bp, Homo sapien
aacaattaagatttctgtagcacca

SEQ ID NO: 891933 - DNA, 25 bp, Homo sapien
gcaccaatattctttccactggcaa

SEQ ID NO: 891934 - DNA, 25 bp, Homo sapien
cacaagactccgtttatcccataag

SEQ ID NO: 891935 - DNA, 25 bp, Homo sapien
tacctagaattaaggcaacacataa

SEQ ID NO: 891936 - DNA, 25 bp, Homo sapien
gtccacaaacaggtccctgagccta

SEQ ID NO: 891937 - DNA, 25 bp, Homo sapien
cagcatgtcctgataacttactgat

SEQ ID NO: 891938 - DNA, 25 bp, Homo sapien
gcctaccaaagagggatgttagcat

SEQ ID NO: 891939 - DNA, 25 bp, Homo sapien
cctgataacttactgatactaaaca

SEQ ID NO: 891940 - DNA, 25 bp, Homo sapien
ttgaaagaaccgattagcccgctgg

SEQ ID NO: 891941 - DNA, 25 bp, Homo sapien
gctcatatcacaccgacagactggg

SEQ ID NO: 891942 - DNA, 25 bp, Homo sapien
aaatgcgggcgcttgggtctcctta

SEQ ID NO: 891943 - DNA, 25 bp, Homo sapien
cccgctgggagcgtgaaacagactt

SEQ ID NO: 891944 - DNA, 25 bp, Homo sapien
gctcgagtctctttctctcacacac

SEQ ID NO: 891945 - DNA, 25 bp, Homo sapien
tgtgctcgagtctctttctctcaca

SEQ ID NO: 891946 - DNA, 25 bp, Homo sapien
cttgtgctcgagtctctttctctca

SEQ ID NO: 891947 - DNA, 25 bp, Homo sapien
tgctcgagtctctttctctcacaca

SEQ ID NO: 891948 - DNA, 25 bp, Homo sapien
gaaacgcaccttcttgcagggcagg

SEQ ID NO: 891949 - DNA, 25 bp, Homo sapien
tgagcagttcctatcctgaaagggc

SEQ ID NO: 891950 - DNA, 25 bp, Homo sapien
ctgaaagggcacagtcggacctgct

SEQ ID NO: 891951 - DNA, 25 bp, Homo sapien
ttttttgcaaggcacggagaacctc

SEQ ID NO: 891952 - DNA, 25 bp, Homo sapien
aggttcccttctgcctagcaccgtg

SEQ ID NO: 891953 - DNA, 25 bp, Homo sapien
gcgctccatagtggctctgtcatcc

SEQ ID NO: 891954 - DNA, 25 bp, Homo sapien
ctccagagcaacaaaggacaatttg

SEQ ID NO: 891955 - DNA, 25 bp, Homo sapien
ggaaggagcgctccatagtggctct

SEQ ID NO: 891956 - DNA, 25 bp, Homo sapien
cccctgacacccatagaaaagcgtg

SEQ ID NO: 891957 - DNA, 25 bp, Homo sapien
cacaaataaatagcggcggcggcag

SEQ ID NO: 891958 - DNA, 25 bp, Homo sapien
cggcagcgcgtcatctggtggagca

SEQ ID NO: 891959 - DNA, 25 bp, Homo sapien
gctggtgctttctgcgcgtccccag

SEQ ID NO: 891960 - DNA, 25 bp, Homo sapien
cttagtgtgcggacgcgggtgttcc

SEQ ID NO: 891961 - DNA, 25 bp, Homo sapien
gcgcctgacatctgacagcgcagag

SEQ ID NO: 891962 - DNA, 25 bp, Homo sapien
gatacttgtttggttcgccagcacc

SEQ ID NO: 891963 - DNA, 25 bp, Homo sapien
gagagcggtggtgcccttagtgtgc

SEQ ID NO: 891964 - DNA, 25 bp, Homo sapien
ttaagaaacctgattgaaaatccta

SEQ ID NO: 891965 - DNA, 25 bp, Homo sapien
ttccagatcttgatgtagcttaaga

SEQ ID NO: 891966 - DNA, 25 bp, Homo sapien
ctgaatttccagatcttgatgtagc

SEQ ID NO: 891967 - DNA, 25 bp, Homo sapien
gaaacctgattgaaaatcctaagtc

SEQ ID NO: 891968 - DNA, 25 bp, Homo sapien
taattcagatgacacaagcaattca

SEQ ID NO: 891969 - DNA, 25 bp, Homo sapien
ttcagatgacacaagcaattcacac

SEQ ID NO: 891970 - DNA, 25 bp, Homo sapien
gaataattcagatgacacaagcaat

SEQ ID NO: 891971 - DNA, 25 bp, Homo sapien
tcatgaataattcagatgacacaag

SEQ ID NO: 891972 - DNA, 25 bp, Homo sapien
aggcccataagcagcatcatgcaca

SEQ ID NO: 891973 - DNA, 25 bp, Homo sapien
gcccataagcagcatcatgcacaga

SEQ ID NO: 891974 - DNA, 25 bp, Homo sapien
cataagcagcatcatgcacagagct

SEQ ID NO: 891975 - DNA, 25 bp, Homo sapien
tgcacagagctgccagctcactcat

SEQ ID NO: 891976 - DNA, 25 bp, Homo sapien
tcacatcacctagactggcagaaag

SEQ ID NO: 891977 - DNA, 25 bp, Homo sapien
tattgtgggccaggtaaatcatgct

SEQ ID NO: 891978 - DNA, 25 bp, Homo sapien
ccatgaagtgcactgggtgaccctg

SEQ ID NO: 891979 - DNA, 25 bp, Homo sapien
tgcatccaatactacaaaacagggt

SEQ ID NO: 891980 - DNA, 25 bp, Homo sapien
agtctgtgcagggtttagctggaca

SEQ ID NO: 891981 - DNA, 25 bp, Homo sapien
agctggacagtgtgttctgagagct

SEQ ID NO: 891982 - DNA, 25 bp, Homo sapien
aggtattttcaacggccagtctgtg

SEQ ID NO: 891983 - DNA, 25 bp, Homo sapien
ctggcctgagtgtcagccgtgctga

SEQ ID NO: 891984 - DNA, 25 bp, Homo sapien
atacatgagcagtgtcacataggaa

SEQ ID NO: 891985 - DNA, 25 bp, Homo sapien
cacaatggtggaagcaactggacat

SEQ ID NO: 891986 - DNA, 25 bp, Homo sapien
catttggtttggagcacctatacat

SEQ ID NO: 891987 - DNA, 25 bp, Homo sapien
gttttctgccagaagatcaagattc

SEQ ID NO: 891988 - DNA, 25 bp, Homo sapien
tctggtgcaggctggttggtgtgac

SEQ ID NO: 891989 - DNA, 25 bp, Homo sapien
ggtgcaggctggttggtgtgacaga

SEQ ID NO: 891990 - DNA, 25 bp, Homo sapien
gtgtctctggtgcaggctggttggt

SEQ ID NO: 891991 - DNA, 25 bp, Homo sapien
tgtgtctctggtgcaggctggttgg

SEQ ID NO: 891992 - DNA, 25 bp, Homo sapien
tcttggtcggggggccttgtcctca

SEQ ID NO: 891993 - DNA, 25 bp, Homo sapien
agatgacaatagcagtcccctggga

SEQ ID NO: 891994 - DNA, 25 bp, Homo sapien
cactgtctttacagggtcaagatga

SEQ ID NO: 891995 - DNA, 25 bp, Homo sapien
gctctgtctccttctcttagcgctg

SEQ ID NO: 891996 - DNA, 25 bp, Homo sapien
agacagaaggaaccgcagctgcaga

SEQ ID NO: 891997 - DNA, 25 bp, Homo sapien
cagaaacaaggccagtagagtgaga

SEQ ID NO: 891998 - DNA, 25 bp, Homo sapien
tcccaatgcgagagtgtacctggtg

SEQ ID NO: 891999 - DNA, 25 bp, Homo sapien
tacactgagataggttgtccctgga

SEQ ID NO: 892000 - DNA, 25 bp, Homo sapien
tggatctgcttattcaggacagccc

SEQ ID NO: 892001 - DNA, 25 bp, Homo sapien
catggatctgcttattcaggacagc

SEQ ID NO: 892002 - DNA, 25 bp, Homo sapien
ggatctgcttattcaggacagccct

SEQ ID NO: 892003 - DNA, 25 bp, Homo sapien
tccatggatctgcttattcaggaca

SEQ ID NO: 892004 - DNA, 25 bp, Homo sapien
ctgcagagaataatgccccaaaaaa

SEQ ID NO: 892005 - DNA, 25 bp, Homo sapien
gatgcaagaactctccaatatctgg

SEQ ID NO: 892006 - DNA, 25 bp, Homo sapien
gctacaaacaggtgaagacctggtt

SEQ ID NO: 892007 - DNA, 25 bp, Homo sapien
cccagctgtgtgtactcaatgatag

SEQ ID NO: 892008 - DNA, 25 bp, Homo sapien
agccactactcttcctaccaccagg

SEQ ID NO: 892009 - DNA, 25 bp, Homo sapien
ggtgacctgactgggaaccttccaa

SEQ ID NO: 892010 - DNA, 25 bp, Homo sapien
ccagccactactcttcctaccacca

SEQ ID NO: 892011 - DNA, 25 bp, Homo sapien
acctgactgggaaccttccaatgtg

SEQ ID NO: 892012 - DNA, 25 bp, Homo sapien
tcctgtacatcattaaattgttcct

SEQ ID NO: 892013 - DNA, 25 bp, Homo sapien
agcatcctgtacatcattaaattgt

SEQ ID NO: 892014 - DNA, 25 bp, Homo sapien
tcagtgatctcctttctggcagcag

SEQ ID NO: 892015 - DNA, 25 bp, Homo sapien
gtcactttcccaactcagtgatctc

SEQ ID NO: 892016 - DNA, 25 bp, Homo sapien
ggatggactcgattgccagctttca

SEQ ID NO: 892017 - DNA, 25 bp, Homo sapien
gattcagggatggactcgattgcca

SEQ ID NO: 892018 - DNA, 25 bp, Homo sapien
gactcgattgccagctttcaccctg

SEQ ID NO: 892019 - DNA, 25 bp, Homo sapien
catggattcagggatggactcgatt

SEQ ID NO: 892020 - DNA, 25 bp, Homo sapien
tttcaatgtgctttgcaagagtggg

SEQ ID NO: 892021 - DNA, 25 bp, Homo sapien
cttgcaagaagggtgttgtttcaat

SEQ ID NO: 892022 - DNA, 25 bp, Homo sapien
taaaagagtgacaaaagagtagcag

SEQ ID NO: 892023 - DNA, 25 bp, Homo sapien
tcctccccgctgttgacctccttct

SEQ ID NO: 892024 - DNA, 25 bp, Homo sapien
gtttggtttatcaccatttgctaca

SEQ ID NO: 892025 - DNA, 25 bp, Homo sapien
ccatttgctacagctgtgttttgca

SEQ ID NO: 892026 - DNA, 25 bp, Homo sapien
tttatcaccatttgctacagctgtg

SEQ ID NO: 892027 - DNA, 25 bp, Homo sapien
ttcattttcgtttggtttatcacca

SEQ ID NO: 892028 - DNA, 25 bp, Homo sapien
tggtacttggtccactgtttaaata

SEQ ID NO: 892029 - DNA, 25 bp, Homo sapien
tttcggctcaaagttgcacaaggag

SEQ ID NO: 892030 - DNA, 25 bp, Homo sapien
cactgtttaaatactgccacggtac

SEQ ID NO: 892031 - DNA, 25 bp, Homo sapien
ccagtgtgaccttggtacttggtcc

SEQ ID NO: 892032 - DNA, 25 bp, Homo sapien
ttataactccaggatggcccttttc

SEQ ID NO: 892033 - DNA, 25 bp, Homo sapien
tataactccaggatggcccttttcc

SEQ ID NO: 892034 - DNA, 25 bp, Homo sapien
taactccaggatggcccttttccat

SEQ ID NO: 892035 - DNA, 25 bp, Homo sapien
ctttataactccaggatggcccttt

SEQ ID NO: 892036 - DNA, 25 bp, Homo sapien
aaaggagcagaactatctttcctgc

SEQ ID NO: 892037 - DNA, 25 bp, Homo sapien
ttaaaaggagcagaactatctttcc

SEQ ID NO: 892038 - DNA, 25 bp, Homo sapien
gcagaactatctttcctgctgcacg

SEQ ID NO: 892039 - DNA, 25 bp, Homo sapien
gaactatctttcctgctgcacggca

SEQ ID NO: 892040 - DNA, 25 bp, Homo sapien
aattcaaagggcaatgggagctgca

SEQ ID NO: 892041 - DNA, 25 bp, Homo sapien
ttcaaagggcaatgggagctgcaca

SEQ ID NO: 892042 - DNA, 25 bp, Homo sapien
attcaaagggcaatgggagctgcac

SEQ ID NO: 892043 - DNA, 25 bp, Homo sapien
accctccacagaatcaggtgcccat

SEQ ID NO: 892044 - DNA, 25 bp, Homo sapien
cggcactcagggaagtggctgccca

SEQ ID NO: 892045 - DNA, 25 bp, Homo sapien
ggcactcagggaagtggctgcccac

SEQ ID NO: 892046 - DNA, 25 bp, Homo sapien
acaccctccacagaatcaggtgccc

SEQ ID NO: 892047 - DNA, 25 bp, Homo sapien
gatgtgatctgactgtgttgcaggt

SEQ ID NO: 892048 - DNA, 25 bp, Homo sapien
cccttgcagcgaagcacagacatta

SEQ ID NO: 892049 - DNA, 25 bp, Homo sapien
ggaaagtaggccctgtcccttgcag

SEQ ID NO: 892050 - DNA, 25 bp, Homo sapien
tgatgggaacaagtctggccaggca

SEQ ID NO: 892051 - DNA, 25 bp, Homo sapien
gggactggacatgagaatctctgcg

SEQ ID NO: 892052 - DNA, 25 bp, Homo sapien
tctctgcgagctgccccagaaaaat

SEQ ID NO: 892053 - DNA, 25 bp, Homo sapien
cagcattggttaccggggactggac

SEQ ID NO: 892054 - DNA, 25 bp, Homo sapien
ggacatgagaatctctgcgagctgc

SEQ ID NO: 892055 - DNA, 25 bp, Homo sapien
gatctggaagtgtttctctgctcgc

SEQ ID NO: 892056 - DNA, 25 bp, Homo sapien
tagctcctccaaagttgtgcacttg

SEQ ID NO: 892057 - DNA, 25 bp, Homo sapien
ctgttttctccacggcctgttaatt

SEQ ID NO: 892058 - DNA, 25 bp, Homo sapien
aaagtctaagtctgttgcatctccc

SEQ ID NO: 892059 - DNA, 25 bp, Homo sapien
aggagcatcagaggtgtgcttcaga

SEQ ID NO: 892060 - DNA, 25 bp, Homo sapien
cagaggtgtgcttcagaaagctttt

SEQ ID NO: 892061 - DNA, 25 bp, Homo sapien
tcatttgcggaactgggtaaccttc

SEQ ID NO: 892062 - DNA, 25 bp, Homo sapien
ggccactgagtgaaggtccattgca

SEQ ID NO: 892063 - DNA, 25 bp, Homo sapien
tggaaacctcgtgctcttttgagtt

SEQ ID NO: 892064 - DNA, 25 bp, Homo sapien
caaagaacagggcacaacttccact

SEQ ID NO: 892065 - DNA, 25 bp, Homo sapien
gatttgctatctgatctgttgccaa

SEQ ID NO: 892066 - DNA, 25 bp, Homo sapien
tagacttagactggccaaacccact

SEQ ID NO: 892067 - DNA, 25 bp, Homo sapien
ctgcctttgtcactccccgaataaa

SEQ ID NO: 892068 - DNA, 25 bp, Homo sapien
tgcctttgtcactccccgaataaag

SEQ ID NO: 892069 - DNA, 25 bp, Homo sapien
gataataatctccagggagatttga

SEQ ID NO: 892070 - DNA, 25 bp, Homo sapien
tgatctttgcatttggaggataata

SEQ ID NO: 892071 - DNA, 25 bp, Homo sapien
aaataatcttgttgagtattaggat

SEQ ID NO: 892072 - DNA, 25 bp, Homo sapien
aggataataatctccagggagattt

SEQ ID NO: 892073 - DNA, 25 bp, Homo sapien
cagctgccagcttgtaatgatctgt

SEQ ID NO: 892074 - DNA, 25 bp, Homo sapien
ttgtaatgatctgtgctaaatggag

SEQ ID NO: 892075 - DNA, 25 bp, Homo sapien
tctgtctggcttggataattgacag

SEQ ID NO: 892076 - DNA, 25 bp, Homo sapien
ccagatgtggaatgcacggatgctt

SEQ ID NO: 892077 - DNA, 25 bp, Homo sapien
ttcatactgcatgtagctggggctc

SEQ ID NO: 892078 - DNA, 25 bp, Homo sapien
catgctgccgactggatgggccgtt

SEQ ID NO: 892079 - DNA, 25 bp, Homo sapien
caaggtccgtggaacctgcagagaa

SEQ ID NO: 892080 - DNA, 25 bp, Homo sapien
cactgtgattgcaggagagacatgg

SEQ ID NO: 892081 - DNA, 25 bp, Homo sapien
tttggtgttgccgtgactttcagac

SEQ ID NO: 892082 - DNA, 25 bp, Homo sapien
ctgccccgtgacagacacggagtcc

SEQ ID NO: 892083 - DNA, 25 bp, Homo sapien
cccgtgacagacacggagtccgcca

SEQ ID NO: 892084 - DNA, 25 bp, Homo sapien
gtgacagacacggagtccgccacgg

SEQ ID NO: 892085 - DNA, 25 bp, Homo sapien
tgccccgtgacagacacggagtccg

SEQ ID NO: 892086 - DNA, 25 bp, Homo sapien
tttctgtgactgaacttctatgatg

SEQ ID NO: 892087 - DNA, 25 bp, Homo sapien
gctccacagggttggcccagtttct

SEQ ID NO: 892088 - DNA, 25 bp, Homo sapien
gatggcctctattttgccgagggac

SEQ ID NO: 892089 - DNA, 25 bp, Homo sapien
cctgctgagttggaaatccggccat

SEQ ID NO: 892090 - DNA, 25 bp, Homo sapien
ccttctctctgcaatggaccttcca

SEQ ID NO: 892091 - DNA, 25 bp, Homo sapien
ttctctctgcaatggaccttccata

SEQ ID NO: 892092 - DNA, 25 bp, Homo sapien
ttccttctctctgcaatggaccttc

SEQ ID NO: 892093 - DNA, 25 bp, Homo sapien
cttcactcagggtcctgcttccttc

SEQ ID NO: 892094 - DNA, 25 bp, Homo sapien
tttcacatagcatctgtccctgaca

SEQ ID NO: 892095 - DNA, 25 bp, Homo sapien
ttttcacatagcatctgtccctgac

SEQ ID NO: 892096 - DNA, 25 bp, Homo sapien
gctcggccacttgttgaggctgagg

SEQ ID NO: 892097 - DNA, 25 bp, Homo sapien
tgaggctcggccacttgttgaggct

SEQ ID NO: 892098 - DNA, 25 bp, Homo sapien
tgtttatcgctctgttccttgtggt

SEQ ID NO: 892099 - DNA, 25 bp, Homo sapien
gaagcttgtgtttatcgctctgttc

SEQ ID NO: 892100 - DNA, 25 bp, Homo sapien
gttctgtggatagcgaatctctgct

SEQ ID NO: 892101 - DNA, 25 bp, Homo sapien
tctgtggatagcgaatctctgctgc

SEQ ID NO: 892102 - DNA, 25 bp, Homo sapien
gctgcgaagccctaggccaggatta

SEQ ID NO: 892103 - DNA, 25 bp, Homo sapien
actgatgcctgagatgttgggcatt

SEQ ID NO: 892104 - DNA, 25 bp, Homo sapien
gcaccacaggcttgtccatgttgaa

SEQ ID NO: 892105 - DNA, 25 bp, Homo sapien
taaatatgtgttgtagctgcgaagc

SEQ ID NO: 892106 - DNA, 25 bp, Homo sapien
ttaatggctcctctggattaagaag

SEQ ID NO: 892107 - DNA, 25 bp, Homo sapien
tgctctgttaatggctcctctggat

SEQ ID NO: 892108 - DNA, 25 bp, Homo sapien
gagatttgcatttgggagctgggca

SEQ ID NO: 892109 - DNA, 25 bp, Homo sapien
aggaggatgctctgttaatggctcc

SEQ ID NO: 892110 - DNA, 25 bp, Homo sapien
ttctgtatttgaactgactactcca

SEQ ID NO: 892111 - DNA, 25 bp, Homo sapien
gaactgactactccacatacctcat

SEQ ID NO: 892112 - DNA, 25 bp, Homo sapien
tcttcagagtttagcatgttgtagc

SEQ ID NO: 892113 - DNA, 25 bp, Homo sapien
gtgtacagtttgatgtccattcaca

SEQ ID NO: 892114 - DNA, 25 bp, Homo sapien
tatgccttgccattgtgcgttgatg

SEQ ID NO: 892115 - DNA, 25 bp, Homo sapien
caacaggctgtctatgccttgccat

SEQ ID NO: 892116 - DNA, 25 bp, Homo sapien
gggcaacaggctgtctatgccttgc

SEQ ID NO: 892117 - DNA, 25 bp, Homo sapien
tgtgcgttgatgctggcgtctgttt

SEQ ID NO: 892118 - DNA, 25 bp, Homo sapien
agcagacgtatccaccctgacacct

SEQ ID NO: 892119 - DNA, 25 bp, Homo sapien
aggcacaccaagcagacgtatccac

SEQ ID NO: 892120 - DNA, 25 bp, Homo sapien
tctcagtcattggcgcaggcacacc

SEQ ID NO: 892121 - DNA, 25 bp, Homo sapien
gtatccaccctgacacctccctgtc

SEQ ID NO: 892122 - DNA, 25 bp, Homo sapien
ctaaaggctctgtttgtctccacca

SEQ ID NO: 892123 - DNA, 25 bp, Homo sapien
cttccctggaacgaaatgtgtgggc

SEQ ID NO: 892124 - DNA, 25 bp, Homo sapien
aatgctttgtagcaggggcagtgtc

SEQ ID NO: 892125 - DNA, 25 bp, Homo sapien
tcagtccttgattatggttgctttc

SEQ ID NO: 892126 - DNA, 25 bp, Homo sapien
gatgattacgatattgcaccgttga

SEQ ID NO: 892127 - DNA, 25 bp, Homo sapien
cagtgcacagggtcagattgggtca

SEQ ID NO: 892128 - DNA, 25 bp, Homo sapien
aacatagtggttcgtagtaaagtgc

SEQ ID NO: 892129 - DNA, 25 bp, Homo sapien
taaagtgctttcctactgggctctg

SEQ ID NO: 892130 - DNA, 25 bp, Homo sapien
gagtacagttgggaattgttaccac

SEQ ID NO: 892131 - DNA, 25 bp, Homo sapien
tgggaattgttaccactctgagaac

SEQ ID NO: 892132 - DNA, 25 bp, Homo sapien
tgtgtgagtacagttgggaattgtt

SEQ ID NO: 892133 - DNA, 25 bp, Homo sapien
cagttgggaattgttaccactctga

SEQ ID NO: 892134 - DNA, 25 bp, Homo sapien
tgacaatcaatggatttgaccacct

SEQ ID NO: 892135 - DNA, 25 bp, Homo sapien
tttgacaatcaatggatttgaccac

SEQ ID NO: 892136 - DNA, 25 bp, Homo sapien
acaatcaatggatttgaccaccttg

SEQ ID NO: 892137 - DNA, 25 bp, Homo sapien
cttttgacaatcaatggatttgacc

SEQ ID NO: 892138 - DNA, 25 bp, Homo sapien
tttcctctttaatcagatctgccag

SEQ ID NO: 892139 - DNA, 25 bp, Homo sapien
tctgccagcttgtgcctgactagtc

SEQ ID NO: 892140 - DNA, 25 bp, Homo sapien
agatctgccagcttgtgcctgacta

SEQ ID NO: 892141 - DNA, 25 bp, Homo sapien
ataaactcgattgttcttttcctct

SEQ ID NO: 892142 - DNA, 25 bp, Homo sapien
gctccagtggggtagctttgcagtg

SEQ ID NO: 892143 - DNA, 25 bp, Homo sapien
attctaccagaagccagaagatact

SEQ ID NO: 892144 - DNA, 25 bp, Homo sapien
cctcttcattctaccagaagccaga

SEQ ID NO: 892145 - DNA, 25 bp, Homo sapien
acctcttcattctaccagaagccag

SEQ ID NO: 892146 - DNA, 25 bp, Homo sapien
ctaccagaagccagaagatactcac

SEQ ID NO: 892147 - DNA, 25 bp, Homo sapien
cagcaagagctaatgggccgtttgc

SEQ ID NO: 892148 - DNA, 25 bp, Homo sapien
tgagcagcaagagctaatgggccgt

SEQ ID NO: 892149 - DNA, 25 bp, Homo sapien
ggacagtcgtgatgggagtttttcc

SEQ ID NO: 892150 - DNA, 25 bp, Homo sapien
agtcgtgatgggagtttttccatga

SEQ ID NO: 892151 - DNA, 25 bp, Homo sapien
tcctgcatacatttgttcaagcatt

SEQ ID NO: 892152 - DNA, 25 bp, Homo sapien
tgataaatgcatgctaatgcagagc

SEQ ID NO: 892153 - DNA, 25 bp, Homo sapien
gattgtttcggctgttgggtcctta

SEQ ID NO: 892154 - DNA, 25 bp, Homo sapien
tcagttagcatcttgcaggttgtga

SEQ ID NO: 892155 - DNA, 25 bp, Homo sapien
gacacgcttcctgtgctgtttgttg

SEQ ID NO: 892156 - DNA, 25 bp, Homo sapien
ctgtacatcacagacacgcttcctg

SEQ ID NO: 892157 - DNA, 25 bp, Homo sapien
tgcagtgcgtgtgatctttagaaat

SEQ ID NO: 892158 - DNA, 25 bp, Homo sapien
gggtgtctgaagtgttgctaatgca

SEQ ID NO: 892159 - DNA, 25 bp, Homo sapien
tgtggaggtacagtcggtagccctc

SEQ ID NO: 892160 - DNA, 25 bp, Homo sapien
ggtacagtcggtagccctctgatag

SEQ ID NO: 892161 - DNA, 25 bp, Homo sapien
tgatagtccgtccagttccactgca

SEQ ID NO: 892162 - DNA, 25 bp, Homo sapien
ggtagccctctgatagtccgtccag

SEQ ID NO: 892163 - DNA, 25 bp, Homo sapien
agaagtcgttagcaggccagccttt

SEQ ID NO: 892164 - DNA, 25 bp, Homo sapien
caattcttgccagcgatgtagtgca

SEQ ID NO: 892165 - DNA, 25 bp, Homo sapien
aacaattcttgccagcgatgtagtg

SEQ ID NO: 892166 - DNA, 25 bp, Homo sapien
gaaaatctccccagaagtcgttagc

SEQ ID NO: 892167 - DNA, 25 bp, Homo sapien
aggcacagattgtgacccatgggcc

SEQ ID NO: 892168 - DNA, 25 bp, Homo sapien
tcgaaggcacagattgtgacccatg

SEQ ID NO: 892169 - DNA, 25 bp, Homo sapien
tctcctcgaaggcacagattgtgac

SEQ ID NO: 892170 - DNA, 25 bp, Homo sapien
ctccatgcatgtcccccatcactgg

SEQ ID NO: 892171 - DNA, 25 bp, Homo sapien
tcttagatctggaactctgtgattc

SEQ ID NO: 892172 - DNA, 25 bp, Homo sapien
ggcattaataatgggaagagaaaag

SEQ ID NO: 892173 - DNA, 25 bp, Homo sapien
gattctctcgctgtggattctatag

SEQ ID NO: 892174 - DNA, 25 bp, Homo sapien
tctgtgattctaggagatggcccct

SEQ ID NO: 892175 - DNA, 25 bp, Homo sapien
caatttgatatattagtaagtgaca

SEQ ID NO: 892176 - DNA, 25 bp, Homo sapien
catttctgccacgaaacctaacgtg

SEQ ID NO: 892177 - DNA, 25 bp, Homo sapien
tctagaattccatatcccatttctg

SEQ ID NO: 892178 - DNA, 25 bp, Homo sapien
tgacattggttgatgcttgctttcc

SEQ ID NO: 892179 - DNA, 25 bp, Homo sapien
ttagtgcctctcagaagtgtcctca

SEQ ID NO: 892180 - DNA, 25 bp, Homo sapien
ctctcagaagtgtcctcagggaaac

SEQ ID NO: 892181 - DNA, 25 bp, Homo sapien
tcagaagtgtcctcagggaaacggc

SEQ ID NO: 892182 - DNA, 25 bp, Homo sapien
cagaagtgtcctcagggaaacggct

SEQ ID NO: 892183 - DNA, 25 bp, Homo sapien
catccaatgacttcttttggcagga

SEQ ID NO: 892184 - DNA, 25 bp, Homo sapien
aaagggattcatccaatgacttctt

SEQ ID NO: 892185 - DNA, 25 bp, Homo sapien
gattcatccaatgacttcttttggc

SEQ ID NO: 892186 - DNA, 25 bp, Homo sapien
ttttggcaggaacattctagctcag

SEQ ID NO: 892187 - DNA, 25 bp, Homo sapien
ctggcggctacctctcagtgccacg

SEQ ID NO: 892188 - DNA, 25 bp, Homo sapien
tctcagtgccacgtccttgccactc

SEQ ID NO: 892189 - DNA, 25 bp, Homo sapien
tggcggctacctctcagtgccacgt

SEQ ID NO: 892190 - DNA, 25 bp, Homo sapien
agtgccacgtccttgccactcatag

SEQ ID NO: 892191 - DNA, 25 bp, Homo sapien
tagagaggcacacccaaacctttga

SEQ ID NO: 892192 - DNA, 25 bp, Homo sapien
gcaacatctgccctgtaaacacaaa

SEQ ID NO: 892193 - DNA, 25 bp, Homo sapien
tggagtgacgcctcaagttggagac

SEQ ID NO: 892194 - DNA, 25 bp, Homo sapien
ggattctaggagataatcggcccag

SEQ ID NO: 892195 - DNA, 25 bp, Homo sapien
gacttcatctggtcttgcaaaaggg

SEQ ID NO: 892196 - DNA, 25 bp, Homo sapien
gaggcaataaggtttccatctatac

SEQ ID NO: 892197 - DNA, 25 bp, Homo sapien
tggtgcccggtttgagaaactcagc

SEQ ID NO: 892198 - DNA, 25 bp, Homo sapien
taaccctgggcaaacactagactag

SEQ ID NO: 892199 - DNA, 25 bp, Homo sapien
agcgaagatggcaccactgtactcc

SEQ ID NO: 892200 - DNA, 25 bp, Homo sapien
gagcgaagatggcaccactgtactc

SEQ ID NO: 892201 - DNA, 25 bp, Homo sapien
gagacgaaggctgcagtgagcgaag

SEQ ID NO: 892202 - DNA, 25 bp, Homo sapien
cgggagacgaaggctgcagtgagcg

SEQ ID NO: 892203 - DNA, 25 bp, Homo sapien
gttagaagcaaatcaagtccatccc

SEQ ID NO: 892204 - DNA, 25 bp, Homo sapien
gcagtttgctggaggcaaccctcag

SEQ ID NO: 892205 - DNA, 25 bp, Homo sapien
caagagcacccaatatgagagacag

SEQ ID NO: 892206 - DNA, 25 bp, Homo sapien
tatgggacactagaacctctggtga

SEQ ID NO: 892207 - DNA, 25 bp, Homo sapien
tacagtttggaaggcaaagtaccac

SEQ ID NO: 892208 - DNA, 25 bp, Homo sapien
cactttgatggtgagaaacgtcctc

SEQ ID NO: 892209 - DNA, 25 bp, Homo sapien
tacatgacacaaactgggttgacct

SEQ ID NO: 892210 - DNA, 25 bp, Homo sapien
taaactatgggtatcacatctggct

SEQ ID NO: 892211 - DNA, 25 bp, Homo sapien
gctgtgcctcctatgtatgtctggt

SEQ ID NO: 892212 - DNA, 25 bp, Homo sapien
tggactgcagaggatcgctgagtgg

SEQ ID NO: 892213 - DNA, 25 bp, Homo sapien
cctccacgtgagaacaagggtgaag

SEQ ID NO: 892214 - DNA, 25 bp, Homo sapien
gacatgcgccacctccacgtgagaa

SEQ ID NO: 892215 - DNA, 25 bp, Homo sapien
tacagaggtgaaccgtttagggcaa

SEQ ID NO: 892216 - DNA, 25 bp, Homo sapien
taggccacttggagggtagcagaac

SEQ ID NO: 892217 - DNA, 25 bp, Homo sapien
cattgtttccagatagacgctggca

SEQ ID NO: 892218 - DNA, 25 bp, Homo sapien
tgcttcaagattaaggccctgaggc

SEQ ID NO: 892219 - DNA, 25 bp, Homo sapien
gacataaatgggcattccagatgac

SEQ ID NO: 892220 - DNA, 25 bp, Homo sapien
tcaacaactgagttgtgggaagtgg

SEQ ID NO: 892221 - DNA, 25 bp, Homo sapien
gaaacccactgttaaattgtcaaca

SEQ ID NO: 892222 - DNA, 25 bp, Homo sapien
tagttagaccatcaaggaggcagca

SEQ ID NO: 892223 - DNA, 25 bp, Homo sapien
cacagcttggaagggctgctgcaga

SEQ ID NO: 892224 - DNA, 25 bp, Homo sapien
tgctgcagatgtcaaggataacagc

SEQ ID NO: 892225 - DNA, 25 bp, Homo sapien
gggctgctgcagatgtcaaggataa

SEQ ID NO: 892226 - DNA, 25 bp, Homo sapien
gctgctgcagatgtcaaggataaca

SEQ ID NO: 892227 - DNA, 25 bp, Homo sapien
cagggccatttccaaggtcggtgct

SEQ ID NO: 892228 - DNA, 25 bp, Homo sapien
atcagggccatttccaaggtcggtg

SEQ ID NO: 892229 - DNA, 25 bp, Homo sapien
catttccaaggtcggtgctgtcttt

SEQ ID NO: 892230 - DNA, 25 bp, Homo sapien
gggccatttccaaggtcggtgctgt

SEQ ID NO: 892231 - DNA, 25 bp, Homo sapien
aatcaggacttacacctgacctggg

SEQ ID NO: 892232 - DNA, 25 bp, Homo sapien
ctaggactcattagcaaagaaaggg

SEQ ID NO: 892233 - DNA, 25 bp, Homo sapien
cactgtgaaggttgttgagattctc

SEQ ID NO: 892234 - DNA, 25 bp, Homo sapien
gcttcatgaggactggaatccgatc

SEQ ID NO: 892235 - DNA, 25 bp, Homo sapien
tgctttatgtttcttatcctgaccc

SEQ ID NO: 892236 - DNA, 25 bp, Homo sapien
tccaaatccagatgtactgtgtgta

SEQ ID NO: 892237 - DNA, 25 bp, Homo sapien
ctactagtcacatgtaagcttttga

SEQ ID NO: 892238 - DNA, 25 bp, Homo sapien
tgagacagagttgtggcccatgcct

SEQ ID NO: 892239 - DNA, 25 bp, Homo sapien
aattaagttcagctggaaatggcag

SEQ ID NO: 892240 - DNA, 25 bp, Homo sapien
tggcagaaaacccaaattgcaatag

SEQ ID NO: 892241 - DNA, 25 bp, Homo sapien
caaaatggaagttgacgtctcgctc

SEQ ID NO: 892242 - DNA, 25 bp, Homo sapien
aaaatggcctataactgtctctgaa

SEQ ID NO: 892243 - DNA, 25 bp, Homo sapien
atagctccctagtggtgatgactcc

SEQ ID NO: 892244 - DNA, 25 bp, Homo sapien
catagctccctagtggtgatgactc

SEQ ID NO: 892245 - DNA, 25 bp, Homo sapien
atttgagttaggcagtatgtctttc

SEQ ID NO: 892246 - DNA, 25 bp, Homo sapien
caaattatttgagttaggcagtatg

SEQ ID NO: 892247 - DNA, 25 bp, Homo sapien
ttttctactaattctatattgcaaa

SEQ ID NO: 892248 - DNA, 25 bp, Homo sapien
gttaggcagtatgtctttcactact

SEQ ID NO: 892249 - DNA, 25 bp, Homo sapien
tatgcttgcatatgagctcaaggaa

SEQ ID NO: 892250 - DNA, 25 bp, Homo sapien
tcttgcccggctgtctttcactgct

SEQ ID NO: 892251 - DNA, 25 bp, Homo sapien
agtgaaaatgccctgtgccaatatc

SEQ ID NO: 892252 - DNA, 25 bp, Homo sapien
gctcaaggaacatcaaaatcgtttt

SEQ ID NO: 892253 - DNA, 25 bp, Homo sapien
accgtagaagctagagtcaggcccc

SEQ ID NO: 892254 - DNA, 25 bp, Homo sapien
tgctagggtttcctcgcctgtcgag

SEQ ID NO: 892255 - DNA, 25 bp, Homo sapien
tggatttacactgccctcgttgggt

SEQ ID NO: 892256 - DNA, 25 bp, Homo sapien
gagcaaccattttcccgtgctaggg

SEQ ID NO: 892257 - DNA, 25 bp, Homo sapien
taagggcgcctgaaactcgcaaaca

SEQ ID NO: 892258 - DNA, 25 bp, Homo sapien
taaatgacaatccacagaaagcgcc

SEQ ID NO: 892259 - DNA, 25 bp, Homo sapien
cattttgctcgggtgtggattcgct

SEQ ID NO: 892260 - DNA, 25 bp, Homo sapien
tgcggcaacttttacccagcggagc

SEQ ID NO: 892261 - DNA, 25 bp, Homo sapien
tgaaacactactagcccggaaagcc

SEQ ID NO: 892262 - DNA, 25 bp, Homo sapien
agagaggctgaaaaccacggacgct

SEQ ID NO: 892263 - DNA, 25 bp, Homo sapien
tacggacgcgtaggcaagttcgatg

SEQ ID NO: 892264 - DNA, 25 bp, Homo sapien
gttaagcccgagcaggtgagcgact

SEQ ID NO: 892265 - DNA, 25 bp, Homo sapien
gacgcagttgctaattgtgcctgag

SEQ ID NO: 892266 - DNA, 25 bp, Homo sapien
cccgagtgtgtcctcagggcatcct

SEQ ID NO: 892267 - DNA, 25 bp, Homo sapien
tattgttttcaagtcgctgcccgag

SEQ ID NO: 892268 - DNA, 25 bp, Homo sapien
tacgggttgcttttccgatctgcaa

SEQ ID NO: 892269 - DNA, 25 bp, Homo sapien
tccgggaggagaacctcctacaaca

SEQ ID NO: 892270 - DNA, 25 bp, Homo sapien
gaagtttccctctccagcgcgatcg

SEQ ID NO: 892271 - DNA, 25 bp, Homo sapien
agcgcgatcgccaatcccaggagcg

SEQ ID NO: 892272 - DNA, 25 bp, Homo sapien
tcccgtaggcgatcagacttcctct

SEQ ID NO: 892273 - DNA, 25 bp, Homo sapien
tcaatgtcatgagaacctcggtagg

SEQ ID NO: 892274 - DNA, 25 bp, Homo sapien
gatggacagttcatgggaaggcagt

SEQ ID NO: 892275 - DNA, 25 bp, Homo sapien
tctgggtctgacacgccctcatggg

SEQ ID NO: 892276 - DNA, 25 bp, Homo sapien
gaaatcccacaggaaagtaggagtg

SEQ ID NO: 892277 - DNA, 25 bp, Homo sapien
gggggaatacaattgagaggctgac

SEQ ID NO: 892278 - DNA, 25 bp, Homo sapien
gaggggggaatacaattgagaggct

SEQ ID NO: 892279 - DNA, 25 bp, Homo sapien
agaggggggaatacaattgagaggc

SEQ ID NO: 892280 - DNA, 25 bp, Homo sapien
ggggggaatacaattgagaggctga

SEQ ID NO: 892281 - DNA, 25 bp, Homo sapien
tttgccaaaattgaggacagatgct

SEQ ID NO: 892282 - DNA, 25 bp, Homo sapien
tttctcccagtgaataagaactctt

SEQ ID NO: 892283 - DNA, 25 bp, Homo sapien
ttctcccagtgaataagaactcttt

SEQ ID NO: 892284 - DNA, 25 bp, Homo sapien
ttttggaaagcatgcatgttgagga

SEQ ID NO: 892285 - DNA, 25 bp, Homo sapien
cagggaggtgagtcaggcatctctc

SEQ ID NO: 892286 - DNA, 25 bp, Homo sapien
cctgtaacgcagatgtccactaatt

SEQ ID NO: 892287 - DNA, 25 bp, Homo sapien
tttagagaggacctcatacttgctg

SEQ ID NO: 892288 - DNA, 25 bp, Homo sapien
tggagagtgtccagctatctcagct

SEQ ID NO: 892289 - DNA, 25 bp, Homo sapien
aatggagagtgtccagctatctcag

SEQ ID NO: 892290 - DNA, 25 bp, Homo sapien
ggcctcgaagaacgggatagatttc

SEQ ID NO: 892291 - DNA, 25 bp, Homo sapien
aattctcttggcctcgaagaacggg

SEQ ID NO: 892292 - DNA, 25 bp, Homo sapien
cactcatgttttgggtaatcaaatc

SEQ ID NO: 892293 - DNA, 25 bp, Homo sapien
taaaacagggtaggtatcacattcc

SEQ ID NO: 892294 - DNA, 25 bp, Homo sapien
tcacaacaagggagttatattgggt

SEQ ID NO: 892295 - DNA, 25 bp, Homo sapien
ttgacagaagctatgaactgcttta

SEQ ID NO: 892296 - DNA, 25 bp, Homo sapien
tcttcgtgggtacagacaggctctg

SEQ ID NO: 892297 - DNA, 25 bp, Homo sapien
tgctaattcgacaggaggcgttccc

SEQ ID NO: 892298 - DNA, 25 bp, Homo sapien
tagggttacacacgaccagtgaggg

SEQ ID NO: 892299 - DNA, 25 bp, Homo sapien
tatgaactaacacgcacaggagagg

SEQ ID NO: 892300 - DNA, 25 bp, Homo sapien
tcagcagttctttcagctacctggg

SEQ ID NO: 892301 - DNA, 25 bp, Homo sapien
tgtttgcaatacatgcactggtttc

SEQ ID NO: 892302 - DNA, 25 bp, Homo sapien
gcttttcaaactctcgattgtcata

SEQ ID NO: 892303 - DNA, 25 bp, Homo sapien
ctgggctatttctaagaagttggct

SEQ ID NO: 892304 - DNA, 25 bp, Homo sapien
tctgcacaacacacacctaggatgg

SEQ ID NO: 892305 - DNA, 25 bp, Homo sapien
tatagttttgcatgaggccctgaga

SEQ ID NO: 892306 - DNA, 25 bp, Homo sapien
aagaagttaagacgaggctgcaggc

SEQ ID NO: 892307 - DNA, 25 bp, Homo sapien
gagtgagtcaccctagaagcaaatt

SEQ ID NO: 892308 - DNA, 25 bp, Homo sapien
gactgcccgtgtgaacggcttcaac

SEQ ID NO: 892309 - DNA, 25 bp, Homo sapien
cagggactgcccgtgtgaacggctt

SEQ ID NO: 892310 - DNA, 25 bp, Homo sapien
gtgtgaacggcttcaaccgcatgcc

SEQ ID NO: 892311 - DNA, 25 bp, Homo sapien
gacatgcagggactgcccgtgtgaa

SEQ ID NO: 892312 - DNA, 25 bp, Homo sapien
cagtcgccaagaagactgggaggtc

SEQ ID NO: 892313 - DNA, 25 bp, Homo sapien
gcgaggcgagtcaggcctttccaga

SEQ ID NO: 892314 - DNA, 25 bp, Homo sapien
tttccagacctcgccggactgggct

SEQ ID NO: 892315 - DNA, 25 bp, Homo sapien
tccgcatcggcggtgggtacaagtc

SEQ ID NO: 892316 - DNA, 25 bp, Homo sapien
gctgaaaagcggaggctcaagagcc

SEQ ID NO: 892317 - DNA, 25 bp, Homo sapien
gctcaaaagtggagtctcaaagcca

SEQ ID NO: 892318 - DNA, 25 bp, Homo sapien
aaaatagttgagcaatcgaggagtc

SEQ ID NO: 892319 - DNA, 25 bp, Homo sapien
caagagccatttcaagctgggctgc

SEQ ID NO: 892320 - DNA, 25 bp, Homo sapien
gacatgcagggactaccggcgcgaa

SEQ ID NO: 892321 - DNA, 25 bp, Homo sapien
ctgcttccagaagcgcggaggctgg

SEQ ID NO: 892322 - DNA, 25 bp, Homo sapien
ggacgtgattgccaagacccttctg

SEQ ID NO: 892323 - DNA, 25 bp, Homo sapien
ggcgcgaatggcttcaaccctacgc

SEQ ID NO: 892324 - DNA, 25 bp, Homo sapien
taagctcaaaatcggaggctcaaga

SEQ ID NO: 892325 - DNA, 25 bp, Homo sapien
ttatgagaaaatagtcgggcaaacc

SEQ ID NO: 892326 - DNA, 25 bp, Homo sapien
aggagtaagctcaaaatcggaggct

SEQ ID NO: 892327 - DNA, 25 bp, Homo sapien
caaaatcggaggctcaagagcagtt

SEQ ID NO: 892328 - DNA, 25 bp, Homo sapien
tagctggatgtgatcgccaagaccc

SEQ ID NO: 892329 - DNA, 25 bp, Homo sapien
tggtgaggaaaggtcaggagagccc

SEQ ID NO: 892330 - DNA, 25 bp, Homo sapien
gaggtccgcagtctgagatggctga

SEQ ID NO: 892331 - DNA, 25 bp, Homo sapien
aactgcaggcgtgtgcgttctccag

SEQ ID NO: 892332 - DNA, 25 bp, Homo sapien
ggaacagacattatgtttctcagca

SEQ ID NO: 892333 - DNA, 25 bp, Homo sapien
ggctcttggggaacagacattatgt

SEQ ID NO: 892334 - DNA, 25 bp, Homo sapien
ttggggaacagacattatgtttctc

SEQ ID NO: 892335 - DNA, 25 bp, Homo sapien
gaacagacattatgtttctcagcac

SEQ ID NO: 892336 - DNA, 25 bp, Homo sapien
tgcacgtgatgatagagtctataat

SEQ ID NO: 892337 - DNA, 25 bp, Homo sapien
tctatgcacgtgatgatagagtcta

SEQ ID NO: 892338 - DNA, 25 bp, Homo sapien
atttttctatgcacgtgatgataga

SEQ ID NO: 892339 - DNA, 25 bp, Homo sapien
tttctatgcacgtgatgatagagtc

SEQ ID NO: 892340 - DNA, 25 bp, Homo sapien
ctatgggaaagggaaaaccaggcag

SEQ ID NO: 892341 - DNA, 25 bp, Homo sapien
cacaggagagatacagtttggtcag

SEQ ID NO: 892342 - DNA, 25 bp, Homo sapien
tgagggtaaagcctaggccatcgct

SEQ ID NO: 892343 - DNA, 25 bp, Homo sapien
tggagaagaggacaagtcacatcac

SEQ ID NO: 892344 - DNA, 25 bp, Homo sapien
tatcttttatcacgcaactttgctg

SEQ ID NO: 892345 - DNA, 25 bp, Homo sapien
tcctttcctcagcattgtatagttt

SEQ ID NO: 892346 - DNA, 25 bp, Homo sapien
ggtgaatgtgaacatacatgccttg

SEQ ID NO: 892347 - DNA, 25 bp, Homo sapien
tctggcatgggcaaatagggacagt

SEQ ID NO: 892348 - DNA, 25 bp, Homo sapien
tattcgcaagggatatcagtctgaa

SEQ ID NO: 892349 - DNA, 25 bp, Homo sapien
gaaaacctcatttggtcatggtata

SEQ ID NO: 892350 - DNA, 25 bp, Homo sapien
ctctagcagaagtctctagtgaaaa

SEQ ID NO: 892351 - DNA, 25 bp, Homo sapien
gaaaatacctgggtctagagatttc

SEQ ID NO: 892352 - DNA, 25 bp, Homo sapien
ctgtatgttagtttttctctagtga

SEQ ID NO: 892353 - DNA, 25 bp, Homo sapien
tagtttttctctagtgaacaggtat

SEQ ID NO: 892354 - DNA, 25 bp, Homo sapien
gccactgcttttctgtatgttagtt

SEQ ID NO: 892355 - DNA, 25 bp, Homo sapien
gcttttctgtatgttagtttttctc

SEQ ID NO: 892356 - DNA, 25 bp, Homo sapien
cacattctgatgtccggcaactcaa

SEQ ID NO: 892357 - DNA, 25 bp, Homo sapien
catgttatgctctatgaacaatagc

SEQ ID NO: 892358 - DNA, 25 bp, Homo sapien
tttctatagcccaattcatctaccc

SEQ ID NO: 892359 - DNA, 25 bp, Homo sapien
ctggaaagaataacaagcacaagat

SEQ ID NO: 892360 - DNA, 25 bp, Homo sapien
ctaaaagaactatagtgagtgcaca

SEQ ID NO: 892361 - DNA, 25 bp, Homo sapien
aataaacccacagaactataatgtt

SEQ ID NO: 892362 - DNA, 25 bp, Homo sapien
caaagggaattatcagctcttagaa

SEQ ID NO: 892363 - DNA, 25 bp, Homo sapien
tgagtgcacaaatctagaacttaga

SEQ ID NO: 892364 - DNA, 25 bp, Homo sapien
gtaccttgtaggcagagttgcaaaa

SEQ ID NO: 892365 - DNA, 25 bp, Homo sapien
gctttccaaattaagcaggactcac

SEQ ID NO: 892366 - DNA, 25 bp, Homo sapien
taactctagtcaacactgctcttca

SEQ ID NO: 892367 - DNA, 25 bp, Homo sapien
gaacctagccaattactgtaccttg

SEQ ID NO: 892368 - DNA, 25 bp, Homo sapien
gacttcctggtactaaaagccacaa

SEQ ID NO: 892369 - DNA, 25 bp, Homo sapien
gaactacatttagcaaccgtctcct

SEQ ID NO: 892370 - DNA, 25 bp, Homo sapien
gatcttaagtagcagtttagtgagg

SEQ ID NO: 892371 - DNA, 25 bp, Homo sapien
taacgcattcatccaattaaagtga

SEQ ID NO: 892372 - DNA, 25 bp, Homo sapien
tgagctggtaaggagccgatcacca

SEQ ID NO: 892373 - DNA, 25 bp, Homo sapien
agctggtaaggagccgatcaccagg

SEQ ID NO: 892374 - DNA, 25 bp, Homo sapien
aggtgagctggtaaggagccgatca

SEQ ID NO: 892375 - DNA, 25 bp, Homo sapien
gagaggtgagctggtaaggagccga

SEQ ID NO: 892376 - DNA, 25 bp, Homo sapien
ccccgaggaaacagctgcggggccg

SEQ ID NO: 892377 - DNA, 25 bp, Homo sapien
tctggtcccggtcccattggccact

SEQ ID NO: 892378 - DNA, 25 bp, Homo sapien
gcgccgccgggctggtgagcgctgg

SEQ ID NO: 892379 - DNA, 25 bp, Homo sapien
ccacgcccccccgaggaaacagctg

SEQ ID NO: 892380 - DNA, 25 bp, Homo sapien
gctgtctccagcaggaaggggcgac

SEQ ID NO: 892381 - DNA, 25 bp, Homo sapien
ccctcgctgtctccagcaggaaggg

SEQ ID NO: 892382 - DNA, 25 bp, Homo sapien
ctcgctgtctccagcaggaaggggc

SEQ ID NO: 892383 - DNA, 25 bp, Homo sapien
cgctgtctccagcaggaaggggcga

SEQ ID NO: 892384 - DNA, 25 bp, Homo sapien
tcaggtggcggtgcgactgccgctg

SEQ ID NO: 892385 - DNA, 25 bp, Homo sapien
tttcggttctggtgcgccatgacgg

SEQ ID NO: 892386 - DNA, 25 bp, Homo sapien
tgcgactgccgctggtttcggttct

SEQ ID NO: 892387 - DNA, 25 bp, Homo sapien
atgacgggccgctgccgctttctgc

SEQ ID NO: 892388 - DNA, 25 bp, Homo sapien
gctgctaccgccgccatcctccggc

SEQ ID NO: 892389 - DNA, 25 bp, Homo sapien
cctccggctcccacggcggctggcg

SEQ ID NO: 892390 - DNA, 25 bp, Homo sapien
ctagtctccggcggccgctgctacc

SEQ ID NO: 892391 - DNA, 25 bp, Homo sapien
tagtctccggcggccgctgctaccg

SEQ ID NO: 892392 - DNA, 25 bp, Homo sapien
aagattaggtgatggaagctgacca

SEQ ID NO: 892393 - DNA, 25 bp, Homo sapien
caacctgacaagtatattctggggt

SEQ ID NO: 892394 - DNA, 25 bp, Homo sapien
ttgccttctctcaaagattaggtga

SEQ ID NO: 892395 - DNA, 25 bp, Homo sapien
cttctctcaaagattaggtgatgga

SEQ ID NO: 892396 - DNA, 25 bp, Homo sapien
tatagtatggcctttcgaaactcca

SEQ ID NO: 892397 - DNA, 25 bp, Homo sapien
cctgctcagcttgttggtctcccaa

SEQ ID NO: 892398 - DNA, 25 bp, Homo sapien
ggtatctgcctctgttgaaattggc

SEQ ID NO: 892399 - DNA, 25 bp, Homo sapien
ccaaactaaagcacccttcttggtg

SEQ ID NO: 892400 - DNA, 25 bp, Homo sapien
ggagaaaagtggcccaaaatgtcat

SEQ ID NO: 892401 - DNA, 25 bp, Homo sapien
gggagaaaagtggcccaaaatgtca

SEQ ID NO: 892402 - DNA, 25 bp, Homo sapien
tgggagaaaagtggcccaaaatgtc

SEQ ID NO: 892403 - DNA, 25 bp, Homo sapien
tatgcagatggatggcccgtattac

SEQ ID NO: 892404 - DNA, 25 bp, Homo sapien
gttgacttatcaccactaagctgta

SEQ ID NO: 892405 - DNA, 25 bp, Homo sapien
gacttatcaccactaagctgtagtc

SEQ ID NO: 892406 - DNA, 25 bp, Homo sapien
tttgttgacttatcaccactaagct

SEQ ID NO: 892407 - DNA, 25 bp, Homo sapien
ttttgttgacttatcaccactaagc

SEQ ID NO: 892408 - DNA, 25 bp, Homo sapien
gctggtggtactgggacaatggcac

SEQ ID NO: 892409 - DNA, 25 bp, Homo sapien
ctggtggtactgggacaatggcacc

SEQ ID NO: 892410 - DNA, 25 bp, Homo sapien
gtgccttgcaacaagccctgtgctg

SEQ ID NO: 892411 - DNA, 25 bp, Homo sapien
cacattcaataaaggtgccttgcaa

SEQ ID NO: 892412 - DNA, 25 bp, Homo sapien
tgtccagtcacacattcaataaagg

SEQ ID NO: 892413 - DNA, 25 bp, Homo sapien
gggcacgactaagctgaaatgttca

SEQ ID NO: 892414 - DNA, 25 bp, Homo sapien
tcagcctcggacacaaactttctgc

SEQ ID NO: 892415 - DNA, 25 bp, Homo sapien
cattcagcctcggacacaaactttc

SEQ ID NO: 892416 - DNA, 25 bp, Homo sapien
ccaatgatctcagcacctacagcaa

SEQ ID NO: 892417 - DNA, 25 bp, Homo sapien
aatgcattcagcctcggacacaaac

SEQ ID NO: 892418 - DNA, 25 bp, Homo sapien
gtgcgggtcggtgcccgagggtgga

SEQ ID NO: 892419 - DNA, 25 bp, Homo sapien
agacgtcggccggagctcgagtcca

SEQ ID NO: 892420 - DNA, 25 bp, Homo sapien
aggtagcggcttcccgcgcgggtgc

SEQ ID NO: 892421 - DNA, 25 bp, Homo sapien
gccctggtcggtcccggagcagagt

SEQ ID NO: 892422 - DNA, 25 bp, Homo sapien
gaatgatcatgttgcaccctgctgt

SEQ ID NO: 892423 - DNA, 25 bp, Homo sapien
tgtggtcttttatcaacccactcat

SEQ ID NO: 892424 - DNA, 25 bp, Homo sapien
tctcagaatgatcatgttgcaccct

SEQ ID NO: 892425 - DNA, 25 bp, Homo sapien
catgttgcaccctgctgtggtcttt

SEQ ID NO: 892426 - DNA, 25 bp, Homo sapien
tgttgccatagagacctaagtcttc

SEQ ID NO: 892427 - DNA, 25 bp, Homo sapien
tgtaattcttatgagagtcaggtag

SEQ ID NO: 892428 - DNA, 25 bp, Homo sapien
taattcttatgagagtcaggtagtg

SEQ ID NO: 892429 - DNA, 25 bp, Homo sapien
tcttatgagagtcaggtagtgaaca

SEQ ID NO: 892430 - DNA, 25 bp, Homo sapien
atctttaagaactttggctctggct

SEQ ID NO: 892431 - DNA, 25 bp, Homo sapien
ctcatccaggaaaagtccaaagggt

SEQ ID NO: 892432 - DNA, 25 bp, Homo sapien
catccaggaaaagtccaaagggtgt

SEQ ID NO: 892433 - DNA, 25 bp, Homo sapien
tccaggaaaagtccaaagggtgtca

SEQ ID NO: 892434 - DNA, 25 bp, Homo sapien
ccaggaaaagtccaaagggtgtcat

SEQ ID NO: 892435 - DNA, 25 bp, Homo sapien
cctcgcgtggaagtgagtgttagtt

SEQ ID NO: 892436 - DNA, 25 bp, Homo sapien
ccctctaatggtgcttggatgtgta

SEQ ID NO: 892437 - DNA, 25 bp, Homo sapien
aatgggttgagagaacacaaagcct

SEQ ID NO: 892438 - DNA, 25 bp, Homo sapien
caggtgctgtattcgggcctcgcgt

SEQ ID NO: 892439 - DNA, 25 bp, Homo sapien
tgtgaagtcaagttccagtgtggaa

SEQ ID NO: 892440 - DNA, 25 bp, Homo sapien
tcactggaaacctcacgcaatgggc

SEQ ID NO: 892441 - DNA, 25 bp, Homo sapien
tacaggctcgcgagtctgagtgact

SEQ ID NO: 892442 - DNA, 25 bp, Homo sapien
tgccaaagtgcacggccaatgaggc

SEQ ID NO: 892443 - DNA, 25 bp, Homo sapien
cctcctcatctccgtcgctgatgag

SEQ ID NO: 892444 - DNA, 25 bp, Homo sapien
tcctcctcatctccgtcgctgatga

SEQ ID NO: 892445 - DNA, 25 bp, Homo sapien
ctcctcatctccgtcgctgatgagc

SEQ ID NO: 892446 - DNA, 25 bp, Homo sapien
tcttttttcaagagcgtggaacaga

SEQ ID NO: 892447 - DNA, 25 bp, Homo sapien
aaaaatgagctagtgttggcagcag

SEQ ID NO: 892448 - DNA, 25 bp, Homo sapien
aaaatgagctagtgttggcagcagg

SEQ ID NO: 892449 - DNA, 25 bp, Homo sapien
ggtcatctggggttccaagtccatg

SEQ ID NO: 892450 - DNA, 25 bp, Homo sapien
gctcctgcagcatgattcttaggag

SEQ ID NO: 892451 - DNA, 25 bp, Homo sapien
ggagtggaatggtttgtcttctctc

SEQ ID NO: 892452 - DNA, 25 bp, Homo sapien
ttgctgagttgagtggacttgggcc

SEQ ID NO: 892453 - DNA, 25 bp, Homo sapien
caataaacatgattccagggggcca

SEQ ID NO: 892454 - DNA, 25 bp, Homo sapien
aaacatgattccagggggccagaga

SEQ ID NO: 892455 - DNA, 25 bp, Homo sapien
ataaacatgattccagggggccaga

SEQ ID NO: 892456 - DNA, 25 bp, Homo sapien
aataaacatgattccagggggccag

SEQ ID NO: 892457 - DNA, 25 bp, Homo sapien
tgcaggctgggctgactagacgggt

SEQ ID NO: 892458 - DNA, 25 bp, Homo sapien
cacagatggtgagggctattggcaa

SEQ ID NO: 892459 - DNA, 25 bp, Homo sapien
gaccagctgcatggccgcatgctgg

SEQ ID NO: 892460 - DNA, 25 bp, Homo sapien
aatgtcgttctttcctgctgttggc

SEQ ID NO: 892461 - DNA, 25 bp, Homo sapien
ggatctcacgaagtttaaacaccat

SEQ ID NO: 892462 - DNA, 25 bp, Homo sapien
gatagggatctcacgaagtttaaac

SEQ ID NO: 892463 - DNA, 25 bp, Homo sapien
ttatgtctgatagggatctcacgaa

SEQ ID NO: 892464 - DNA, 25 bp, Homo sapien
gcatttatgtctgatagggatctca

SEQ ID NO: 892465 - DNA, 25 bp, Homo sapien
tcatgaactatggaggtagggctgg

SEQ ID NO: 892466 - DNA, 25 bp, Homo sapien
cacatgagacaaggcgaagaattcg

SEQ ID NO: 892467 - DNA, 25 bp, Homo sapien
gtagcagtaagaatggataaaccac

SEQ ID NO: 892468 - DNA, 25 bp, Homo sapien
gagacaaggcgaagaattcgttcca

SEQ ID NO: 892469 - DNA, 25 bp, Homo sapien
gaagccctggtgtggttgctgacat

SEQ ID NO: 892470 - DNA, 25 bp, Homo sapien
gcaattcagccatgcagtagcggga

SEQ ID NO: 892471 - DNA, 25 bp, Homo sapien
agccatgcagtagcgggaagccctg

SEQ ID NO: 892472 - DNA, 25 bp, Homo sapien
gaagtgtttttgcagcaattcagcc

SEQ ID NO: 892473 - DNA, 25 bp, Homo sapien
ggcttcccaacaaaaccatcagcgg

SEQ ID NO: 892474 - DNA, 25 bp, Homo sapien
cggcccgcttatcccgcctgcctct

SEQ ID NO: 892475 - DNA, 25 bp, Homo sapien
acaaaaccatcagcggcccgcttat

SEQ ID NO: 892476 - DNA, 25 bp, Homo sapien
agcggcccgcttatcccgcctgcct

SEQ ID NO: 892477 - DNA, 25 bp, Homo sapien
gctaaaaatctagcagttactatat

SEQ ID NO: 892478 - DNA, 25 bp, Homo sapien
gacaagtgcactcattaagaagttt

SEQ ID NO: 892479 - DNA, 25 bp, Homo sapien
tgctcagttaataaactagctaaaa

SEQ ID NO: 892480 - DNA, 25 bp, Homo sapien
tctttattctaggacaagtgcactc

SEQ ID NO: 892481 - DNA, 25 bp, Homo sapien
tcttaggatccttggagccacccgt

SEQ ID NO: 892482 - DNA, 25 bp, Homo sapien
gagtccttagtttgcaggtagcccc

SEQ ID NO: 892483 - DNA, 25 bp, Homo sapien
cagctcagaggaagtagcgtgtccc

SEQ ID NO: 892484 - DNA, 25 bp, Homo sapien
gaaacatcgtgtgaaatacctgcca

SEQ ID NO: 892485 - DNA, 25 bp, Homo sapien
caagggcaagcactggatagggata

SEQ ID NO: 892486 - DNA, 25 bp, Homo sapien
tattggttcccacgagaaatctgca

SEQ ID NO: 892487 - DNA, 25 bp, Homo sapien
tgttaagactacatggccagttccc

SEQ ID NO: 892488 - DNA, 25 bp, Homo sapien
tgcagaatgaaaagccacggctacg

SEQ ID NO: 892489 - DNA, 25 bp, Homo sapien
gaaagacacttttagaatagccgcc

SEQ ID NO: 892490 - DNA, 25 bp, Homo sapien
tgccttcagaaaagcaatccctggt

SEQ ID NO: 892491 - DNA, 25 bp, Homo sapien
taaaagtaagcgcagccacatcagc

SEQ ID NO: 892492 - DNA, 25 bp, Homo sapien
cagatggctcttcagtcaggaatgc

SEQ ID NO: 892493 - DNA, 25 bp, Homo sapien
tagagacactgtgcactacaggcat

SEQ ID NO: 892494 - DNA, 25 bp, Homo sapien
acacaagagccctgtgtgtgtgcac

SEQ ID NO: 892495 - DNA, 25 bp, Homo sapien
gagggtccccttgacaacacacaca

SEQ ID NO: 892496 - DNA, 25 bp, Homo sapien
ctacaggcatgcactcacgggaggc

SEQ ID NO: 892497 - DNA, 25 bp, Homo sapien
ttcccgccaactcggcactgtgaag

SEQ ID NO: 892498 - DNA, 25 bp, Homo sapien
agaatttgcttttcccgccaactcg

SEQ ID NO: 892499 - DNA, 25 bp, Homo sapien
tgagggaaagactaagacttcaaaa

SEQ ID NO: 892500 - DNA, 25 bp, Homo sapien
tgaaagaaaccgctactgagggaaa

SEQ ID NO: 892501 - DNA, 25 bp, Homo sapien
gaaggagacctacattgcagaaggg

SEQ ID NO: 892502 - DNA, 25 bp, Homo sapien
ttagtcacacaaccgaacaacaggc

SEQ ID NO: 892503 - DNA, 25 bp, Homo sapien
gatacatgttacactgcacaggaag

SEQ ID NO: 892504 - DNA, 25 bp, Homo sapien
tcaaggtggaacacaaggtaacagt

SEQ ID NO: 892505 - DNA, 25 bp, Homo sapien
tctccgtgtcaacacagtcatagaa

SEQ ID NO: 892506 - DNA, 25 bp, Homo sapien
cgcagggtccagtggctcggagctg

SEQ ID NO: 892507 - DNA, 25 bp, Homo sapien
cttaaagaacttaatctccgtgtca

SEQ ID NO: 892508 - DNA, 25 bp, Homo sapien
agcatggtgctcctcagcttgcgac

SEQ ID NO: 892509 - DNA, 25 bp, Homo sapien
cacgactgctttaggtgtcagcaaa

SEQ ID NO: 892510 - DNA, 25 bp, Homo sapien
ggaaggacacgactgctttaggtgt

SEQ ID NO: 892511 - DNA, 25 bp, Homo sapien
aaaatagcaggggacattgcagcgg

SEQ ID NO: 892512 - DNA, 25 bp, Homo sapien
aggacacgactgctttaggtgtcag

SEQ ID NO: 892513 - DNA, 25 bp, Homo sapien
cagggtcgtcatccccaaaacaggg

SEQ ID NO: 892514 - DNA, 25 bp, Homo sapien
cactttcgatgatggcacgtgccca

SEQ ID NO: 892515 - DNA, 25 bp, Homo sapien
tggaaccgaggctcctttttggcag

SEQ ID NO: 892516 - DNA, 25 bp, Homo sapien
gctttgtacagctcatgccggcggt

SEQ ID NO: 892517 - DNA, 25 bp, Homo sapien
tggagaggaaggagaggcacttcag

SEQ ID NO: 892518 - DNA, 25 bp, Homo sapien
ctggagaggaaggagaggcacttca

SEQ ID NO: 892519 - DNA, 25 bp, Homo sapien
ctctgcgtcccaaggattgcctgtt

SEQ ID NO: 892520 - DNA, 25 bp, Homo sapien
tgcctgttttcagctgtaccatggg

SEQ ID NO: 892521 - DNA, 25 bp, Homo sapien
gaaacactgctggatcagagggctg

SEQ ID NO: 892522 - DNA, 25 bp, Homo sapien
tttcagctgtaccatggggcagcac

SEQ ID NO: 892523 - DNA, 25 bp, Homo sapien
taggcttcacggtggaactggtgca

SEQ ID NO: 892524 - DNA, 25 bp, Homo sapien
agacaggcgtcctacccttgagggc

SEQ ID NO: 892525 - DNA, 25 bp, Homo sapien
tcctgggaagtcagcgcatgtcacc

SEQ ID NO: 892526 - DNA, 25 bp, Homo sapien
gaaacccttcagtggtagacaggcc

SEQ ID NO: 892527 - DNA, 25 bp, Homo sapien
acatgcatgggacgcccccgagtgt

SEQ ID NO: 892528 - DNA, 25 bp, Homo sapien
tgtcctcagggctgactctcagacc

SEQ ID NO: 892529 - DNA, 25 bp, Homo sapien
ggaatttgccccagtcactcagact

SEQ ID NO: 892530 - DNA, 25 bp, Homo sapien
cccgtggatggcttggatgcagaac

SEQ ID NO: 892531 - DNA, 25 bp, Homo sapien
tactggtctaacaactatatctctg

SEQ ID NO: 892532 - DNA, 25 bp, Homo sapien
aatcagctttccgtggctccagcac

SEQ ID NO: 892533 - DNA, 25 bp, Homo sapien
ttaacaagtgctggcttcctaggaa

SEQ ID NO: 892534 - DNA, 25 bp, Homo sapien
ccagcacactgtaagactccgaatt

SEQ ID NO: 892535 - DNA, 25 bp, Homo sapien
cacggagagcttctattctgcggca

SEQ ID NO: 892536 - DNA, 25 bp, Homo sapien
gctttgtcccgtaaggtgttcatca

SEQ ID NO: 892537 - DNA, 25 bp, Homo sapien
gtctatgcacactccgctggctttg

SEQ ID NO: 892538 - DNA, 25 bp, Homo sapien
ccagtgaagtagtgaatgcacggag

SEQ ID NO: 892539 - DNA, 25 bp, Homo sapien
gaatcgtgagggagagactaactca

SEQ ID NO: 892540 - DNA, 25 bp, Homo sapien
caatgacatcagagattaaaggaga

SEQ ID NO: 892541 - DNA, 25 bp, Homo sapien
tagcagaagttggtctttacataca

SEQ ID NO: 892542 - DNA, 25 bp, Homo sapien
gcctgcacatcagggacttttagca

SEQ ID NO: 892543 - DNA, 25 bp, Homo sapien
tcttgtttttctaagctgtctttgc

SEQ ID NO: 892544 - DNA, 25 bp, Homo sapien
ctgtctttgccagcaccgcagtcta

SEQ ID NO: 892545 - DNA, 25 bp, Homo sapien
gcaccgcagtctagatgatcctcaa

SEQ ID NO: 892546 - DNA, 25 bp, Homo sapien
ttgtttttctaagctgtctttgcca

SEQ ID NO: 892547 - DNA, 25 bp, Homo sapien
tagtggtgagcgaaagctgactgca

SEQ ID NO: 892548 - DNA, 25 bp, Homo sapien
tcggaaaaattgaactcgccctctc

SEQ ID NO: 892549 - DNA, 25 bp, Homo sapien
tccggatgctctgcatccatcttag

SEQ ID NO: 892550 - DNA, 25 bp, Homo sapien
agctgactgcaaatgcacctcactc

SEQ ID NO: 892551 - DNA, 25 bp, Homo sapien
atggtctcgagcacccaggcttcat

SEQ ID NO: 892552 - DNA, 25 bp, Homo sapien
ggcttcatcacgatccacaatcaga

SEQ ID NO: 892553 - DNA, 25 bp, Homo sapien
tcggcagcccagtacttccctatgg

SEQ ID NO: 892554 - DNA, 25 bp, Homo sapien
cagatatgcactttggaagctgtgg

SEQ ID NO: 892555 - DNA, 25 bp, Homo sapien
tgcaacagtgcaaccagctacaatt

SEQ ID NO: 892556 - DNA, 25 bp, Homo sapien
cactgtgaagatgccggctgcaaca

SEQ ID NO: 892557 - DNA, 25 bp, Homo sapien
tgcgtgctttgcgaggctggtggga

SEQ ID NO: 892558 - DNA, 25 bp, Homo sapien
ccctaccaagttggcagggtgggag

SEQ ID NO: 892559 - DNA, 25 bp, Homo sapien
tatgcacactccatgttcattggct

SEQ ID NO: 892560 - DNA, 25 bp, Homo sapien
caaggcttctatctcggcagctggc

SEQ ID NO: 892561 - DNA, 25 bp, Homo sapien
gatggcttcattggctatgcacact

SEQ ID NO: 892562 - DNA, 25 bp, Homo sapien
agagccaggcgggtctgcttatcat

SEQ ID NO: 892563 - DNA, 25 bp, Homo sapien
tccttggaacttggtcgattgaaat

SEQ ID NO: 892564 - DNA, 25 bp, Homo sapien
ccttggaacttggtcgattgaaatg

SEQ ID NO: 892565 - DNA, 25 bp, Homo sapien
cttggtcgattgaaatgtaagtgca

SEQ ID NO: 892566 - DNA, 25 bp, Homo sapien
ggaacttggtcgattgaaatgtaag

SEQ ID NO: 892567 - DNA, 25 bp, Homo sapien
gaaagaaagcgccatcacctgtcag

SEQ ID NO: 892568 - DNA, 25 bp, Homo sapien
aagaaagcgccatcacctgtcaggt

SEQ ID NO: 892569 - DNA, 25 bp, Homo sapien
gaaagcgccatcacctgtcaggtac

SEQ ID NO: 892570 - DNA, 25 bp, Homo sapien
cacaggaaagaaagcgccatcacct

SEQ ID NO: 892571 - DNA, 25 bp, Homo sapien
tcttcacaatgcagctcaaaagtct

SEQ ID NO: 892572 - DNA, 25 bp, Homo sapien
aagtcttcacaatgcagctcaaaag

SEQ ID NO: 892573 - DNA, 25 bp, Homo sapien
ttaagtcttcacaatgcagctcaaa

SEQ ID NO: 892574 - DNA, 25 bp, Homo sapien
ttcacaatgcagctcaaaagtctcc

SEQ ID NO: 892575 - DNA, 25 bp, Homo sapien
aagccgccattgtcatcctggcccg

SEQ ID NO: 892576 - DNA, 25 bp, Homo sapien
ttgtcatcctggcccgttctcagtg

SEQ ID NO: 892577 - DNA, 25 bp, Homo sapien
ctggcccgttctcagtgagctgttg

SEQ ID NO: 892578 - DNA, 25 bp, Homo sapien
cattgtcatcctggcccgttctcag

SEQ ID NO: 892579 - DNA, 25 bp, Homo sapien
tcgtggaaggagtgcccttcacact

SEQ ID NO: 892580 - DNA, 25 bp, Homo sapien
ttcacactggaagaagggcacttgg

SEQ ID NO: 892581 - DNA, 25 bp, Homo sapien
gatttggtgcagccacctttgagaa

SEQ ID NO: 892582 - DNA, 25 bp, Homo sapien
ctttccctcttcgtggaaggagtgc

SEQ ID NO: 892583 - DNA, 25 bp, Homo sapien
catccttagcacgtggagggaaggc

SEQ ID NO: 892584 - DNA, 25 bp, Homo sapien
tctccggttcgtgatcagcagccga

SEQ ID NO: 892585 - DNA, 25 bp, Homo sapien
aacagtaacttggaggagctgcagc

SEQ ID NO: 892586 - DNA, 25 bp, Homo sapien
cacttcatctctgggccgggctgaa

SEQ ID NO: 892587 - DNA, 25 bp, Homo sapien
tcttgtagtcccttttccgtccatc

SEQ ID NO: 892588 - DNA, 25 bp, Homo sapien
tctgttttaacttctccttacatac

SEQ ID NO: 892589 - DNA, 25 bp, Homo sapien
tgtagtcccttttccgtccatcctg

SEQ ID NO: 892590 - DNA, 25 bp, Homo sapien
catcctgtccccttttcagtttctg

SEQ ID NO: 892591 - DNA, 25 bp, Homo sapien
ggccgcgggcgagttggacgcgctg

SEQ ID NO: 892592 - DNA, 25 bp, Homo sapien
cggccgcgggcgagttggacgcgct

SEQ ID NO: 892593 - DNA, 25 bp, Homo sapien
cccacaggcacatcccagtgggcag

SEQ ID NO: 892594 - DNA, 25 bp, Homo sapien
ccacaggcacatcccagtgggcagc

SEQ ID NO: 892595 - DNA, 25 bp, Homo sapien
cacaggcacatcccagtgggcagca

SEQ ID NO: 892596 - DNA, 25 bp, Homo sapien
ccgagggtgcgggtgctgccgggtc

SEQ ID NO: 892597 - DNA, 25 bp, Homo sapien
ctccgctctgcggtgctgaggctgc

SEQ ID NO: 892598 - DNA, 25 bp, Homo sapien
gctctccgctctgcggtgctgaggc

SEQ ID NO: 892599 - DNA, 25 bp, Homo sapien
gtccggattactgcggcgacctcgg

SEQ ID NO: 892600 - DNA, 25 bp, Homo sapien
ccccctacccagactcccggcgctg

SEQ ID NO: 892601 - DNA, 25 bp, Homo sapien
ccctacccagactcccggcgctggg

SEQ ID NO: 892602 - DNA, 25 bp, Homo sapien
ctgcagtggcggaggcggccgccgg

SEQ ID NO: 892603 - DNA, 25 bp, Homo sapien
ggcggaggcggccgccgggcgcttc

SEQ ID NO: 892604 - DNA, 25 bp, Homo sapien
ctgggagctggaggagcggccgaga

SEQ ID NO: 892605 - DNA, 25 bp, Homo sapien
tgggagctggaggagcggccgagag

SEQ ID NO: 892606 - DNA, 25 bp, Homo sapien
gcctgggagctggaggagcggccga

SEQ ID NO: 892607 - DNA, 25 bp, Homo sapien
gggcctgggagctggaggagcggcc

SEQ ID NO: 892608 - DNA, 25 bp, Homo sapien
gcacgtccaagtcgagtccctggtt

SEQ ID NO: 892609 - DNA, 25 bp, Homo sapien
cttgttgactcgcacgtccaagtcg

SEQ ID NO: 892610 - DNA, 25 bp, Homo sapien
tgactcgcacgtccaagtcgagtcc

SEQ ID NO: 892611 - DNA, 25 bp, Homo sapien
tcgcacgtccaagtcgagtccctgg

SEQ ID NO: 892612 - DNA, 25 bp, Homo sapien
gattgactgaagaacactatgcata

SEQ ID NO: 892613 - DNA, 25 bp, Homo sapien
tatgtatgggtaagaaagcctgcat

SEQ ID NO: 892614 - DNA, 25 bp, Homo sapien
gccgtaggtgtaattgcgaaatgcc

SEQ ID NO: 892615 - DNA, 25 bp, Homo sapien
aagacctgtcactgggcaaacctca

SEQ ID NO: 892616 - DNA, 25 bp, Homo sapien
tatgaccgtaatagaagagaatcac

SEQ ID NO: 892617 - DNA, 25 bp, Homo sapien
tataatatcctagtctcttcacgag

SEQ ID NO: 892618 - DNA, 25 bp, Homo sapien
agtgggtctccctatccttatttca

SEQ ID NO: 892619 - DNA, 25 bp, Homo sapien
tctggcagaataagtccaacaaatg

SEQ ID NO: 892620 - DNA, 25 bp, Homo sapien
ctatctttggtacaaaattacacag

SEQ ID NO: 892621 - DNA, 25 bp, Homo sapien
gggtaccatgtactacagagagcat

SEQ ID NO: 892622 - DNA, 25 bp, Homo sapien
gagagcatttcaattactatctttg

SEQ ID NO: 892623 - DNA, 25 bp, Homo sapien
tatctactatatacatgacatacac

SEQ ID NO: 892624 - DNA, 25 bp, Homo sapien
tatacagagtagcaccatcggacaa

SEQ ID NO: 892625 - DNA, 25 bp, Homo sapien
tgtaagctccgttagtaagtgccct

SEQ ID NO: 892626 - DNA, 25 bp, Homo sapien
aaaacacatctggaacctcgcgttg

SEQ ID NO: 892627 - DNA, 25 bp, Homo sapien
gactcagagccatgaaaagcgaaga

SEQ ID NO: 892628 - DNA, 25 bp, Homo sapien
gaaccaggaaggatattccgctagc

SEQ ID NO: 892629 - DNA, 25 bp, Homo sapien
tgggaaaatgtagactggtttacta

SEQ ID NO: 892630 - DNA, 25 bp, Homo sapien
tccgctagccttaagaagtaaatat

SEQ ID NO: 892631 - DNA, 25 bp, Homo sapien
ggtatttattcaatagtagctgctg

SEQ ID NO: 892632 - DNA, 25 bp, Homo sapien
taagtcctaggtagcatgtctcaat

SEQ ID NO: 892633 - DNA, 25 bp, Homo sapien
tcactaggagccaagcttcatcagc

SEQ ID NO: 892634 - DNA, 25 bp, Homo sapien
gcagtagccattaacaagtcaggtc

SEQ ID NO: 892635 - DNA, 25 bp, Homo sapien
taatttgtgctataacctggtctca

SEQ ID NO: 892636 - DNA, 25 bp, Homo sapien
taaattctctggcagatataaaccc

SEQ ID NO: 892637 - DNA, 25 bp, Homo sapien
tataactcatcgtgtttatatgtaa

SEQ ID NO: 892638 - DNA, 25 bp, Homo sapien
tttcattcaccaccgcaccatgttt

SEQ ID NO: 892639 - DNA, 25 bp, Homo sapien
tatcctccaccaaagcatcatgatg

SEQ ID NO: 892640 - DNA, 25 bp, Homo sapien
tccactttcaaagcatcagtatttt

SEQ ID NO: 892641 - DNA, 25 bp, Homo sapien
gaaaaagtccactttcaaagcatca

SEQ ID NO: 892642 - DNA, 25 bp, Homo sapien
tctccaaaacagtgattcactatga

SEQ ID NO: 892643 - DNA, 25 bp, Homo sapien
tctctccaaaacagtgattcactat

SEQ ID NO: 892644 - DNA, 25 bp, Homo sapien
cttggtccatttcgaatctccagga

SEQ ID NO: 892645 - DNA, 25 bp, Homo sapien
tcttggaatgattcatgggatcttg

SEQ ID NO: 892646 - DNA, 25 bp, Homo sapien
attcatgggatcttggtccatttcg

SEQ ID NO: 892647 - DNA, 25 bp, Homo sapien
attaaatatcagtgtactttctggg

SEQ ID NO: 892648 - DNA, 25 bp, Homo sapien
gagatgtgacatgcgctaggttgtt

SEQ ID NO: 892649 - DNA, 25 bp, Homo sapien
cagatctagacagagatgtgacatg

SEQ ID NO: 892650 - DNA, 25 bp, Homo sapien
gaggcatgcaagcatgtactaaaag

SEQ ID NO: 892651 - DNA, 25 bp, Homo sapien
gtgacatgcgctaggttgttgataa

SEQ ID NO: 892652 - DNA, 25 bp, Homo sapien
ggatatgtgtctgccctgaaaaact

SEQ ID NO: 892653 - DNA, 25 bp, Homo sapien
gttctcacttgaacagcaggatatg

SEQ ID NO: 892654 - DNA, 25 bp, Homo sapien
actagtacaaaagctgtccggacca

SEQ ID NO: 892655 - DNA, 25 bp, Homo sapien
ttgatatatatcacaaagcagctct

SEQ ID NO: 892656 - DNA, 25 bp, Homo sapien
gctatagtaagaaaaatacagaaat

SEQ ID NO: 892657 - DNA, 25 bp, Homo sapien
tatagtaagaaaaatacagaaatac

SEQ ID NO: 892658 - DNA, 25 bp, Homo sapien
tagtaagaaaaatacagaaatacta

SEQ ID NO: 892659 - DNA, 25 bp, Homo sapien
agtaagaaaaatacagaaatactat

SEQ ID NO: 892660 - DNA, 25 bp, Homo sapien
gagcaggaggaatgatgagctttct

SEQ ID NO: 892661 - DNA, 25 bp, Homo sapien
gcaggaggaatgatgagctttctct

SEQ ID NO: 892662 - DNA, 25 bp, Homo sapien
aggaggaatgatgagctttctcttc

SEQ ID NO: 892663 - DNA, 25 bp, Homo sapien
caggaggaatgatgagctttctctt

SEQ ID NO: 892664 - DNA, 25 bp, Homo sapien
aagtgacgaacagagtcaagaccgc

SEQ ID NO: 892665 - DNA, 25 bp, Homo sapien
tcaagaccgcgttccacaagaaaag

SEQ ID NO: 892666 - DNA, 25 bp, Homo sapien
tggagtgaaataaggagccgtcctt

SEQ ID NO: 892667 - DNA, 25 bp, Homo sapien
cttgcgatggcagatgaatggcttc

SEQ ID NO: 892668 - DNA, 25 bp, Homo sapien
gaaagaagtccctacaaaagcagcg

SEQ ID NO: 892669 - DNA, 25 bp, Homo sapien
caagggcttcagacaagttcaggac

SEQ ID NO: 892670 - DNA, 25 bp, Homo sapien
tagttcaaggcttacggacaagggc

SEQ ID NO: 892671 - DNA, 25 bp, Homo sapien
caactcttttctcaagggtcacgaa

SEQ ID NO: 892672 - DNA, 25 bp, Homo sapien
tccttgtgaacagcgtgccggcttc

SEQ ID NO: 892673 - DNA, 25 bp, Homo sapien
aaacggcgggcaccatttacagtca

SEQ ID NO: 892674 - DNA, 25 bp, Homo sapien
tatcgtgagaggtcacgtagaccct

SEQ ID NO: 892675 - DNA, 25 bp, Homo sapien
gaatagggactagaactcaggaggt

SEQ ID NO: 892676 - DNA, 25 bp, Homo sapien
cacggtgctcttgatgtcagcggga

SEQ ID NO: 892677 - DNA, 25 bp, Homo sapien
gctcgcagctaggttggaaggtttc

SEQ ID NO: 892678 - DNA, 25 bp, Homo sapien
tgtggctgccctttcgcttcaagga

SEQ ID NO: 892679 - DNA, 25 bp, Homo sapien
gattttgggtgacttgaaaggcacg

SEQ ID NO: 892680 - DNA, 25 bp, Homo sapien
tgatgctgcttgttcccttagccca

SEQ ID NO: 892681 - DNA, 25 bp, Homo sapien
gatgctgcttgttcccttagcccac

SEQ ID NO: 892682 - DNA, 25 bp, Homo sapien
gtgatgctgcttgttcccttagccc

SEQ ID NO: 892683 - DNA, 25 bp, Homo sapien
gccccgtccttgtaggcatactgtt

SEQ ID NO: 892684 - DNA, 25 bp, Homo sapien
tgccccgtccttgtaggcatactgt

SEQ ID NO: 892685 - DNA, 25 bp, Homo sapien
gtgccccgtccttgtaggcatactg

SEQ ID NO: 892686 - DNA, 25 bp, Homo sapien
ccccgtccttgtaggcatactgttc

SEQ ID NO: 892687 - DNA, 25 bp, Homo sapien
tatacatagaatgatggttcggcat

SEQ ID NO: 892688 - DNA, 25 bp, Homo sapien
ccagatatacatagaatgatggttc

SEQ ID NO: 892689 - DNA, 25 bp, Homo sapien
ttttccagatatacatagaatgatg

SEQ ID NO: 892690 - DNA, 25 bp, Homo sapien
gatatacatagaatgatggttcggc

SEQ ID NO: 892691 - DNA, 25 bp, Homo sapien
gacagaatggtgtgatgcaacaaga

SEQ ID NO: 892692 - DNA, 25 bp, Homo sapien
ttttgacagaatggtgtgatgcaac

SEQ ID NO: 892693 - DNA, 25 bp, Homo sapien
gatgcaacaagagtgtccccaggtc

SEQ ID NO: 892694 - DNA, 25 bp, Homo sapien
cagaatggtgtgatgcaacaagagt

SEQ ID NO: 892695 - DNA, 25 bp, Homo sapien
ccatgtcttcttacagggaatcacc

SEQ ID NO: 892696 - DNA, 25 bp, Homo sapien
atggacctgtacaccctcttgccag

SEQ ID NO: 892697 - DNA, 25 bp, Homo sapien
gaggctgtacctagtattctctgcc

SEQ ID NO: 892698 - DNA, 25 bp, Homo sapien
tctgaaatttccctgatgccatgtc

SEQ ID NO: 892699 - DNA, 25 bp, Homo sapien
gttggggaataaagtagccttgcag

SEQ ID NO: 892700 - DNA, 25 bp, Homo sapien
ggttggggaataaagtagccttgca

SEQ ID NO: 892701 - DNA, 25 bp, Homo sapien
ttttggttccatgtgaagtctaaag

SEQ ID NO: 892702 - DNA, 25 bp, Homo sapien
cttttttggttccatgtgaagtcta

SEQ ID NO: 892703 - DNA, 25 bp, Homo sapien
ggttccatgtgaagtctaaagtagt

SEQ ID NO: 892704 - DNA, 25 bp, Homo sapien
ttggttccatgtgaagtctaaagta

SEQ ID NO: 892705 - DNA, 25 bp, Homo sapien
gccttgcagacccagaaatacatca

SEQ ID NO: 892706 - DNA, 25 bp, Homo sapien
aatacctgcggtatccaagtcacca

SEQ ID NO: 892707 - DNA, 25 bp, Homo sapien
tagaagtgtctccacaccaagcaag

SEQ ID NO: 892708 - DNA, 25 bp, Homo sapien
agtcaccaattagatgccttgcaga

SEQ ID NO: 892709 - DNA, 25 bp, Homo sapien
ggatgcccagcaagccccgagatgc

SEQ ID NO: 892710 - DNA, 25 bp, Homo sapien
cagcctggactaaatgcctctcctg

SEQ ID NO: 892711 - DNA, 25 bp, Homo sapien
acatctgggtgacgcctctctccag

SEQ ID NO: 892712 - DNA, 25 bp, Homo sapien
tccaggggatcagcctggactaaat

SEQ ID NO: 892713 - DNA, 25 bp, Homo sapien
ttcccaaattcttgtacaagaatct

SEQ ID NO: 892714 - DNA, 25 bp, Homo sapien
atctgattggcccacttaagtccca

SEQ ID NO: 892715 - DNA, 25 bp, Homo sapien
tgtatcttggcctcattcccaaatt

SEQ ID NO: 892716 - DNA, 25 bp, Homo sapien
ttcttgtacaagaatctgattggcc

SEQ ID NO: 892717 - DNA, 25 bp, Homo sapien
cattggcccgtggtacagacatgac

SEQ ID NO: 892718 - DNA, 25 bp, Homo sapien
ttggcccgtggtacagacatgactg

SEQ ID NO: 892719 - DNA, 25 bp, Homo sapien
ggcccgtggtacagacatgactgct

SEQ ID NO: 892720 - DNA, 25 bp, Homo sapien
gggcattggcccgtggtacagacat

SEQ ID NO: 892721 - DNA, 25 bp, Homo sapien
agaccaaaggtcactgctataagaa

SEQ ID NO: 892722 - DNA, 25 bp, Homo sapien
gggtatatagtcaaattcctcacat

SEQ ID NO: 892723 - DNA, 25 bp, Homo sapien
ccattgtgtcacatatcggagctgt

SEQ ID NO: 892724 - DNA, 25 bp, Homo sapien
gccagtttcccattatcatagctga

SEQ ID NO: 892725 - DNA, 25 bp, Homo sapien
tgagagcgaggactgcctgcctttc

SEQ ID NO: 892726 - DNA, 25 bp, Homo sapien
caggtgaggtatggaccaaaagctc

SEQ ID NO: 892727 - DNA, 25 bp, Homo sapien
catgtctgaaaaccgcccttagcct

SEQ ID NO: 892728 - DNA, 25 bp, Homo sapien
tactcacaggccgatctgggtaaag

SEQ ID NO: 892729 - DNA, 25 bp, Homo sapien
gattacatctcctcctgcggcaaga

SEQ ID NO: 892730 - DNA, 25 bp, Homo sapien
tctttcagacctgtaggtgcctgct

SEQ ID NO: 892731 - DNA, 25 bp, Homo sapien
caagaagacgctccacgaagtcctg

SEQ ID NO: 892732 - DNA, 25 bp, Homo sapien
tagcacaggattacatctcctcctg

SEQ ID NO: 892733 - DNA, 25 bp, Homo sapien
gaaatccggatgtgcagctgaaagc

SEQ ID NO: 892734 - DNA, 25 bp, Homo sapien
ccaggctagccacgttaaatgagga

SEQ ID NO: 892735 - DNA, 25 bp, Homo sapien
gaagtggaactttaccttgtgggca

SEQ ID NO: 892736 - DNA, 25 bp, Homo sapien
cgctgagatgtgtcacgtgggccca

SEQ ID NO: 892737 - DNA, 25 bp, Homo sapien
gtgagccccacagtaacctaggtgg

SEQ ID NO: 892738 - DNA, 25 bp, Homo sapien
tagcacttcgaaataggacatctgg

SEQ ID NO: 892739 - DNA, 25 bp, Homo sapien
agtacagtgctgacgtggaagaaga

SEQ ID NO: 892740 - DNA, 25 bp, Homo sapien
ggagaattaacattcgctgactcga

SEQ ID NO: 892741 - DNA, 25 bp, Homo sapien
agctgtttataagccgtcccacgta

SEQ ID NO: 892742 - DNA, 25 bp, Homo sapien
cctgggtatgtagcgactggttcgt

SEQ ID NO: 892743 - DNA, 25 bp, Homo sapien
aatttaatcacatgtttcgagggac

SEQ ID NO: 892744 - DNA, 25 bp, Homo sapien
tctttctaatgagatggccgcttgt

SEQ ID NO: 892745 - DNA, 25 bp, Homo sapien
ggttccatggtgaaacacatccctg

SEQ ID NO: 892746 - DNA, 25 bp, Homo sapien
tctgttatggaaatggttccatggt

SEQ ID NO: 892747 - DNA, 25 bp, Homo sapien
cccaaacagcattagcagatcgaat

SEQ ID NO: 892748 - DNA, 25 bp, Homo sapien
tgaccttggacgcaggagagacacc

SEQ ID NO: 892749 - DNA, 25 bp, Homo sapien
gatcaccatatcgagcagacgtcaa

SEQ ID NO: 892750 - DNA, 25 bp, Homo sapien
gagacattgttcttatggccgcctg

SEQ ID NO: 892751 - DNA, 25 bp, Homo sapien
aacattacaaaaccgtgatcctggg

SEQ ID NO: 892752 - DNA, 25 bp, Homo sapien
gaatcagagtgaagtacggagccag

SEQ ID NO: 892753 - DNA, 25 bp, Homo sapien
gtgaggacctcatccgaccatgtaa

SEQ ID NO: 892754 - DNA, 25 bp, Homo sapien
tagtgcgcagtacaaatgtcagctc

SEQ ID NO: 892755 - DNA, 25 bp, Homo sapien
cgattaaaagtagatgccaggccac

SEQ ID NO: 892756 - DNA, 25 bp, Homo sapien
aagtaaatcttcaatgctagggcag

SEQ ID NO: 892757 - DNA, 25 bp, Homo sapien
ggaaaagcaagacccacagaaggac

SEQ ID NO: 892758 - DNA, 25 bp, Homo sapien
ctctctctgccagcgcacaggagga

SEQ ID NO: 892759 - DNA, 25 bp, Homo sapien
tcacaaacgtgtgttggccgcgcca

SEQ ID NO: 892760 - DNA, 25 bp, Homo sapien
ggaggaaaagcaagacccacagaag

SEQ ID NO: 892761 - DNA, 25 bp, Homo sapien
cacaagggccatgatccgatctgct

SEQ ID NO: 892762 - DNA, 25 bp, Homo sapien
gcctatctcgcatccccaggctaaa

SEQ ID NO: 892763 - DNA, 25 bp, Homo sapien
gctaaagttatcctgatctctcttg

SEQ ID NO: 892764 - DNA, 25 bp, Homo sapien
ggagtgggttatgcttcatggtaca

SEQ ID NO: 892765 - DNA, 25 bp, Homo sapien
caacctcagaacatttgctgatatc

SEQ ID NO: 892766 - DNA, 25 bp, Homo sapien
gatatcatccatcttcccgaaacca

SEQ ID NO: 892767 - DNA, 25 bp, Homo sapien
catttgctgatatcatccatcttcc

SEQ ID NO: 892768 - DNA, 25 bp, Homo sapien
ccaacctcagaacatttgctgatat

SEQ ID NO: 892769 - DNA, 25 bp, Homo sapien
caaatattccgggaggtggtcctag

SEQ ID NO: 892770 - DNA, 25 bp, Homo sapien
tgatgctgcagaaccccataatggc

SEQ ID NO: 892771 - DNA, 25 bp, Homo sapien
ggctgactcgtgtgcttcccaagtt

SEQ ID NO: 892772 - DNA, 25 bp, Homo sapien
gagagtgccacaccaatgagcaatg

SEQ ID NO: 892773 - DNA, 25 bp, Homo sapien
tccaaacagttggacattgctctga

SEQ ID NO: 892774 - DNA, 25 bp, Homo sapien
tgctctgagtaacagagccagaatc

SEQ ID NO: 892775 - DNA, 25 bp, Homo sapien
cgaaggggcatgagtccaaacagtt

SEQ ID NO: 892776 - DNA, 25 bp, Homo sapien
agaatctccttttcatccagccttg

SEQ ID NO: 892777 - DNA, 25 bp, Homo sapien
tcctttgaatgtccagcttggtctg

SEQ ID NO: 892778 - DNA, 25 bp, Homo sapien
tccgttgacgtcctgtctgaatccc

SEQ ID NO: 892779 - DNA, 25 bp, Homo sapien
gctttggtggtctctgggtttccca

SEQ ID NO: 892780 - DNA, 25 bp, Homo sapien
acttcgccttccgttgacgtcctgt

SEQ ID NO: 892781 - DNA, 25 bp, Homo sapien
tcaatgtgtgtgacccgagaaggca

SEQ ID NO: 892782 - DNA, 25 bp, Homo sapien
ggtctcttatgaggctgcagtccag

SEQ ID NO: 892783 - DNA, 25 bp, Homo sapien
cctctaaggcattccgcagttgaca

SEQ ID NO: 892784 - DNA, 25 bp, Homo sapien
taaagaatctgcttgtaagggaggc

SEQ ID NO: 892785 - DNA, 25 bp, Homo sapien
agcaccctagggttgatttccctgg

SEQ ID NO: 892786 - DNA, 25 bp, Homo sapien
gcctgctgtccattagtccaaaagt

SEQ ID NO: 892787 - DNA, 25 bp, Homo sapien
tgtaaggaaccaataagttgtccca

SEQ ID NO: 892788 - DNA, 25 bp, Homo sapien
tgacatctctgcagagtccgtccag

SEQ ID NO: 892789 - DNA, 25 bp, Homo sapien
cccccacctcacaagaggccccagt

SEQ ID NO: 892790 - DNA, 25 bp, Homo sapien
ccccccacctcacaagaggccccag

SEQ ID NO: 892791 - DNA, 25 bp, Homo sapien
ccccacctcacaagaggccccagtg

SEQ ID NO: 892792 - DNA, 25 bp, Homo sapien
tccccccacctcacaagaggcccca

SEQ ID NO: 892793 - DNA, 25 bp, Homo sapien
tgacaggcttctttagttgccccat

SEQ ID NO: 892794 - DNA, 25 bp, Homo sapien
ctgagagatgacaggcttctttagt

SEQ ID NO: 892795 - DNA, 25 bp, Homo sapien
agagatgacaggcttctttagttgc

SEQ ID NO: 892796 - DNA, 25 bp, Homo sapien
gatgacaggcttctttagttgcccc

SEQ ID NO: 892797 - DNA, 25 bp, Homo sapien
tatgctacatggcaagtggacccac

SEQ ID NO: 892798 - DNA, 25 bp, Homo sapien
tgcttgcacaaaacctacatgctga

SEQ ID NO: 892799 - DNA, 25 bp, Homo sapien
ccagaatgcctggaagagaaaagcc

SEQ ID NO: 892800 - DNA, 25 bp, Homo sapien
gagggttacatgctagcgttcaaaa

SEQ ID NO: 892801 - DNA, 25 bp, Homo sapien
ccagcaggaaatgtagtggcaatca

SEQ ID NO: 892802 - DNA, 25 bp, Homo sapien
gcaaggattactcaaaggcagtcaa

SEQ ID NO: 892803 - DNA, 25 bp, Homo sapien
taaataatcttgacagtagcagctg

SEQ ID NO: 892804 - DNA, 25 bp, Homo sapien
tataaagtgaactctcccagaatgg

SEQ ID NO: 892805 - DNA, 25 bp, Homo sapien
tttgctgctaagactcggtggatca

SEQ ID NO: 892806 - DNA, 25 bp, Homo sapien
gctaagactcggtggatcatcattt

SEQ ID NO: 892807 - DNA, 25 bp, Homo sapien
gactcggtggatcatcatttgttct

SEQ ID NO: 892808 - DNA, 25 bp, Homo sapien
gctgctaagactcggtggatcatca

SEQ ID NO: 892809 - DNA, 25 bp, Homo sapien
tagaggtttcccaaagctaggtgac

SEQ ID NO: 892810 - DNA, 25 bp, Homo sapien
ggcatacaatctgtccccaagctaa

SEQ ID NO: 892811 - DNA, 25 bp, Homo sapien
cattaactctcaaaagtggcgcatt

SEQ ID NO: 892812 - DNA, 25 bp, Homo sapien
tatgcctctgttggcctggaacagt

SEQ ID NO: 892813 - DNA, 25 bp, Homo sapien
taaggagaataattgctgctgccaa

SEQ ID NO: 892814 - DNA, 25 bp, Homo sapien
tgctgccaaaagctacccatgtgaa

SEQ ID NO: 892815 - DNA, 25 bp, Homo sapien
caagccctgctgttgaagtagaacg

SEQ ID NO: 892816 - DNA, 25 bp, Homo sapien
aaatagagagtgagatgagcctccc

SEQ ID NO: 892817 - DNA, 25 bp, Homo sapien
gaattgggatacgtaataataatgc

SEQ ID NO: 892818 - DNA, 25 bp, Homo sapien
tggactaatacacttaccaacagca

SEQ ID NO: 892819 - DNA, 25 bp, Homo sapien
tcctgctcctaccacataagacttg

SEQ ID NO: 892820 - DNA, 25 bp, Homo sapien
tcctgtatagcttgcagagctgtga

SEQ ID NO: 892821 - DNA, 25 bp, Homo sapien
attttcaagtagagactagacattt

SEQ ID NO: 892822 - DNA, 25 bp, Homo sapien
ttttataaaacaccacttgctatta

SEQ ID NO: 892823 - DNA, 25 bp, Homo sapien
aaaacaccacttgctattattattt

SEQ ID NO: 892824 - DNA, 25 bp, Homo sapien
cattttcataatgggagtctcagag

SEQ ID NO: 892825 - DNA, 25 bp, Homo sapien
aggcactgaggagaattttattaca

SEQ ID NO: 892826 - DNA, 25 bp, Homo sapien
ggtgccctaggatttaacacaaaca

SEQ ID NO: 892827 - DNA, 25 bp, Homo sapien
ggatttaacacaaacagttcaggta

SEQ ID NO: 892828 - DNA, 25 bp, Homo sapien
ccgtgaagagaccacaccaacactg

SEQ ID NO: 892829 - DNA, 25 bp, Homo sapien
acagtatttgccctaccacagaggg

SEQ ID NO: 892830 - DNA, 25 bp, Homo sapien
caacctggattatcccgagttcttc

SEQ ID NO: 892831 - DNA, 25 bp, Homo sapien
cgcttcctcccaggttggtgtttca

SEQ ID NO: 892832 - DNA, 25 bp, Homo sapien
tgacacaggctcctacagcgtcggc

SEQ ID NO: 892833 - DNA, 25 bp, Homo sapien
gaggaagacaagggcgcgccctggc

SEQ ID NO: 892834 - DNA, 25 bp, Homo sapien
ggagggcgtggccagagacctgtcc

SEQ ID NO: 892835 - DNA, 25 bp, Homo sapien
ggcgtggccagagacctgtccatca

SEQ ID NO: 892836 - DNA, 25 bp, Homo sapien
ggccagagacctgtccatcaccgag

SEQ ID NO: 892837 - DNA, 25 bp, Homo sapien
gcaggcaggtcgcggaagggggagg

SEQ ID NO: 892838 - DNA, 25 bp, Homo sapien
ggcggagcaaggccggcgggagcca

SEQ ID NO: 892839 - DNA, 25 bp, Homo sapien
aggcaggtcgcggaagggggaggcg

SEQ ID NO: 892840 - DNA, 25 bp, Homo sapien
gaggcggagcaaggccggcgggagc

SEQ ID NO: 892841 - DNA, 25 bp, Homo sapien
ggcccagatcctcccgccagcccgg

SEQ ID NO: 892842 - DNA, 25 bp, Homo sapien
gcagggggagcgaggcgacggttgc

SEQ ID NO: 892843 - DNA, 25 bp, Homo sapien
ccctccttcgcagggggagcgaggc

SEQ ID NO: 892844 - DNA, 25 bp, Homo sapien
gggagcgaggcgacggttgccggga

SEQ ID NO: 892845 - DNA, 25 bp, Homo sapien
cagccgcacggccacttgagccgcc

SEQ ID NO: 892846 - DNA, 25 bp, Homo sapien
cggtgccgagatcgggggcgccgag

SEQ ID NO: 892847 - DNA, 25 bp, Homo sapien
cagagagcggtagcggcccgtcgtg

SEQ ID NO: 892848 - DNA, 25 bp, Homo sapien
gcgtcaggccgtcggcctcgcccgc

SEQ ID NO: 892849 - DNA, 25 bp, Homo sapien
ggctcggatctaccttccagtagca

SEQ ID NO: 892850 - DNA, 25 bp, Homo sapien
ctggtgatcggctccttaccagctc

SEQ ID NO: 892851 - DNA, 25 bp, Homo sapien
tggtgatcggctccttaccagctca

SEQ ID NO: 892852 - DNA, 25 bp, Homo sapien
ggtgatcggctccttaccagctcac

SEQ ID NO: 892853 - DNA, 25 bp, Homo sapien
cctggtgatcggctccttaccagct

SEQ ID NO: 892854 - DNA, 25 bp, Homo sapien
gcccgcgtcggtctccatcctggaa

SEQ ID NO: 892855 - DNA, 25 bp, Homo sapien
aacaccggcggtgccgctaccgcat

SEQ ID NO: 892856 - DNA, 25 bp, Homo sapien
ccggcgcttaacaccggcggtgccg

SEQ ID NO: 892857 - DNA, 25 bp, Homo sapien
ctcccggaccagcccgcgtcggtct

SEQ ID NO: 892858 - DNA, 25 bp, Homo sapien
ggagcaaatgttgttttacaacaaa

SEQ ID NO: 892859 - DNA, 25 bp, Homo sapien
cgaaacagcccttgtggttgtggtt

SEQ ID NO: 892860 - DNA, 25 bp, Homo sapien
caacaaaccgacgaaacagcccttg

SEQ ID NO: 892861 - DNA, 25 bp, Homo sapien
tattttccagtgagatgactggagc

SEQ ID NO: 892862 - DNA, 25 bp, Homo sapien
taagtgtatagattttacttaggtg

SEQ ID NO: 892863 - DNA, 25 bp, Homo sapien
cctctttggcctcttgagcaacttt

SEQ ID NO: 892864 - DNA, 25 bp, Homo sapien
tgtcctttattaagtcgctgtcatt

SEQ ID NO: 892865 - DNA, 25 bp, Homo sapien
ttaagtcgctgtcatttttaagtgt

SEQ ID NO: 892866 - DNA, 25 bp, Homo sapien
tcgatgacataggagggaggttcat

SEQ ID NO: 892867 - DNA, 25 bp, Homo sapien
gacataggagggaggttcatgacat

SEQ ID NO: 892868 - DNA, 25 bp, Homo sapien
catttatagccagtgaggtcgatga

SEQ ID NO: 892869 - DNA, 25 bp, Homo sapien
aaacttggagtgccggctttggata

SEQ ID NO: 892870 - DNA, 25 bp, Homo sapien
caggtttaggatcagtccctttttg

SEQ ID NO: 892871 - DNA, 25 bp, Homo sapien
ctcaggtttaggatcagtccctttt

SEQ ID NO: 892872 - DNA, 25 bp, Homo sapien
gcctgtttcatatacttttccctct

SEQ ID NO: 892873 - DNA, 25 bp, Homo sapien
cttcatgtgaaggactgcctgtttc

SEQ ID NO: 892874 - DNA, 25 bp, Homo sapien
catgtgaaggactgcctgtttcata

SEQ ID NO: 892875 - DNA, 25 bp, Homo sapien
aaggactgcctgtttcatatacttt

SEQ ID NO: 892876 - DNA, 25 bp, Homo sapien
aatgttacgagttacagaatctctc

SEQ ID NO: 892877 - DNA, 25 bp, Homo sapien
tattctgtccctatagtaggtgcct

SEQ ID NO: 892878 - DNA, 25 bp, Homo sapien
gaatctctcattacctatgtcggtc

SEQ ID NO: 892879 - DNA, 25 bp, Homo sapien
tccattcctgcatatacttacatag

SEQ ID NO: 892880 - DNA, 25 bp, Homo sapien
cgttaaacttgttccctatctgaat

SEQ ID NO: 892881 - DNA, 25 bp, Homo sapien
tatcagttagatgcttcacgttaaa

SEQ ID NO: 892882 - DNA, 25 bp, Homo sapien
ttctcactgctatcagttagatgct

SEQ ID NO: 892883 - DNA, 25 bp, Homo sapien
tcacgttaaacttgttccctatctg

SEQ ID NO: 892884 - DNA, 25 bp, Homo sapien
ccatataggatgctgtacactgact

SEQ ID NO: 892885 - DNA, 25 bp, Homo sapien
tcactacgcctttcattgagtcaag

SEQ ID NO: 892886 - DNA, 25 bp, Homo sapien
ttttggcaagtacctagagtgatcc

SEQ ID NO: 892887 - DNA, 25 bp, Homo sapien
cataaagcaaatcgcagcaaagtac

SEQ ID NO: 892888 - DNA, 25 bp, Homo sapien
tactacatgggcagggtgaactctg

SEQ ID NO: 892889 - DNA, 25 bp, Homo sapien
tgtcacagtgagcttatgggatatg

SEQ ID NO: 892890 - DNA, 25 bp, Homo sapien
tacagaaatctgaaccaatggagtc

SEQ ID NO: 892891 - DNA, 25 bp, Homo sapien
ggatatgtggagcatacatctcatc

SEQ ID NO: 892892 - DNA, 25 bp, Homo sapien
ggatgccaggtttatagcaatttgc

SEQ ID NO: 892893 - DNA, 25 bp, Homo sapien
tttagcaggctgtaaacttaagaaa

SEQ ID NO: 892894 - DNA, 25 bp, Homo sapien
attttccagataatctggaggttag

SEQ ID NO: 892895 - DNA, 25 bp, Homo sapien
aaactgtaatttaattgggatgcca

SEQ ID NO: 892896 - DNA, 25 bp, Homo sapien
ctttgtcataaggttctgtgctgca

SEQ ID NO: 892897 - DNA, 25 bp, Homo sapien
gctggtatactcttgtgatgagaat

SEQ ID NO: 892898 - DNA, 25 bp, Homo sapien
tttgctacaatagaagctcctatgg

SEQ ID NO: 892899 - DNA, 25 bp, Homo sapien
gggattaactgtattctcctggaag

SEQ ID NO: 892900 - DNA, 25 bp, Homo sapien
gctctggctcatcatagggactgtg

SEQ ID NO: 892901 - DNA, 25 bp, Homo sapien
taagcatcccgagctcttcaaagca

SEQ ID NO: 892902 - DNA, 25 bp, Homo sapien
cacaagatcctacccaacaaggtgg

SEQ ID NO: 892903 - DNA, 25 bp, Homo sapien
tgatcgacctgcctgctaagcatcc

SEQ ID NO: 892904 - DNA, 25 bp, Homo sapien
tagcgagtccatgtcactcagaagg

SEQ ID NO: 892905 - DNA, 25 bp, Homo sapien
catgtatgccctgagtagcgagtcc

SEQ ID NO: 892906 - DNA, 25 bp, Homo sapien
tgaggccaccaagagtatcacggtt

SEQ ID NO: 892907 - DNA, 25 bp, Homo sapien
tgaagggcatgtgcacagaaaccgg

SEQ ID NO: 892908 - DNA, 25 bp, Homo sapien
tttaattatgctttaagttctggga

SEQ ID NO: 892909 - DNA, 25 bp, Homo sapien
tttttcctaatgctatgtctcccct

SEQ ID NO: 892910 - DNA, 25 bp, Homo sapien
atttttcctaatgctatgtctcccc

SEQ ID NO: 892911 - DNA, 25 bp, Homo sapien
ttatgttgtccacagatcgaaacca

SEQ ID NO: 892912 - DNA, 25 bp, Homo sapien
caattatgttgtccacagatcgaaa

SEQ ID NO: 892913 - DNA, 25 bp, Homo sapien
gacaattatgttgtccacagatcga

SEQ ID NO: 892914 - DNA, 25 bp, Homo sapien
tagacaattatgttgtccacagatc

SEQ ID NO: 892915 - DNA, 25 bp, Homo sapien
ggaagactcattctcgtcaggtggt

SEQ ID NO: 892916 - DNA, 25 bp, Homo sapien
ttgtctcacaagtcacacagagtca

SEQ ID NO: 892917 - DNA, 25 bp, Homo sapien
tttgggctacaattggcagaacagc

SEQ ID NO: 892918 - DNA, 25 bp, Homo sapien
caagagcagttatcccaagagaaca

SEQ ID NO: 892919 - DNA, 25 bp, Homo sapien
caaggtgaccttgggaaccacacat

SEQ ID NO: 892920 - DNA, 25 bp, Homo sapien
tctgcaagtatgtctcaagctcctg

SEQ ID NO: 892921 - DNA, 25 bp, Homo sapien
tgttcatgcggctacagtgagcagg

SEQ ID NO: 892922 - DNA, 25 bp, Homo sapien
cacacattggcgatgacagacggac

SEQ ID NO: 892923 - DNA, 25 bp, Homo sapien
aacgtcagtgtgcttaggatgcagc

SEQ ID NO: 892924 - DNA, 25 bp, Homo sapien
tggccttaggcaccaggccagtcct

SEQ ID NO: 892925 - DNA, 25 bp, Homo sapien
tggctccaggaaacgtcagtgtgct

SEQ ID NO: 892926 - DNA, 25 bp, Homo sapien
tcagcaggtgatgagcttactggct

SEQ ID NO: 892927 - DNA, 25 bp, Homo sapien
ataatggattaattactggacacat

SEQ ID NO: 892928 - DNA, 25 bp, Homo sapien
gttcccaccactcttagctggtttg

SEQ ID NO: 892929 - DNA, 25 bp, Homo sapien
cactgggtaacaacattactttgac

SEQ ID NO: 892930 - DNA, 25 bp, Homo sapien
taacttctcagaaccagagtttttg

SEQ ID NO: 892931 - DNA, 25 bp, Homo sapien
tttacttaggtcacacagacgttac

SEQ ID NO: 892932 - DNA, 25 bp, Homo sapien
tgaaaaaacacccaagtagtcatgg

SEQ ID NO: 892933 - DNA, 25 bp, Homo sapien
tcttcatgatcctgggttaatggtc

SEQ ID NO: 892934 - DNA, 25 bp, Homo sapien
gctggtcttgggtgcagttcattcc

SEQ ID NO: 892935 - DNA, 25 bp, Homo sapien
ttggttactggaaacagacctgtgg

SEQ ID NO: 892936 - DNA, 25 bp, Homo sapien
aagcagccatttggatgccagggcc

SEQ ID NO: 892937 - DNA, 25 bp, Homo sapien
tgaaaagagcggtgaccaactcgct

SEQ ID NO: 892938 - DNA, 25 bp, Homo sapien
tctttggagggacagaatcacttct

SEQ ID NO: 892939 - DNA, 25 bp, Homo sapien
ccttctagaggagggtagcctagca

SEQ ID NO: 892940 - DNA, 25 bp, Homo sapien
tacttagggagtttgccgaccagac

SEQ ID NO: 892941 - DNA, 25 bp, Homo sapien
ttttctgcagaattgtagcgggtac

SEQ ID NO: 892942 - DNA, 25 bp, Homo sapien
ggctccagggcaaaaaccccatgaa

SEQ ID NO: 892943 - DNA, 25 bp, Homo sapien
tgcgcaggcccctttaagacactga

SEQ ID NO: 892944 - DNA, 25 bp, Homo sapien
catcttcatagactttggcctcctc

SEQ ID NO: 892945 - DNA, 25 bp, Homo sapien
tcagaaacagataatccgcttctca

SEQ ID NO: 892946 - DNA, 25 bp, Homo sapien
tcatcttcatagactttggcctcct

SEQ ID NO: 892947 - DNA, 25 bp, Homo sapien
gaaacagataatccgcttctcatct

SEQ ID NO: 892948 - DNA, 25 bp, Homo sapien
taagaatcagcagaaacggagtggc

SEQ ID NO: 892949 - DNA, 25 bp, Homo sapien
ttccttgtgtaggaatggtgaccct

SEQ ID NO: 892950 - DNA, 25 bp, Homo sapien
tctctgaattggtggccagttcccc

SEQ ID NO: 892951 - DNA, 25 bp, Homo sapien
gcaactgtaggtctttactacccgc

SEQ ID NO: 892952 - DNA, 25 bp, Homo sapien
gccttgatctcccatgcatccatcc

SEQ ID NO: 892953 - DNA, 25 bp, Homo sapien
tgatctcccatgcatccatcctccc

SEQ ID NO: 892954 - DNA, 25 bp, Homo sapien
aggcacatagcaccatgtcgggcta

SEQ ID NO: 892955 - DNA, 25 bp, Homo sapien
ccatgcctagccaacagtgtttttt

SEQ ID NO: 892956 - DNA, 25 bp, Homo sapien
tcaccaaactgatcgattttatgac

SEQ ID NO: 892957 - DNA, 25 bp, Homo sapien
aatattgttggttgcaattcaccaa

SEQ ID NO: 892958 - DNA, 25 bp, Homo sapien
tgttggttgcaattcaccaaactga

SEQ ID NO: 892959 - DNA, 25 bp, Homo sapien
gattttatgacaagttccaaacaag

SEQ ID NO: 892960 - DNA, 25 bp, Homo sapien
agtgttgctctgtaacgcatctgcc

SEQ ID NO: 892961 - DNA, 25 bp, Homo sapien
caaatctctgttatgccagtgttgc

SEQ ID NO: 892962 - DNA, 25 bp, Homo sapien
taacgcatctgccagctgggcagtc

SEQ ID NO: 892963 - DNA, 25 bp, Homo sapien
ctgttatgccagtgttgctctgtaa

SEQ ID NO: 892964 - DNA, 25 bp, Homo sapien
tatatatttgggagaccaccaatct

SEQ ID NO: 892965 - DNA, 25 bp, Homo sapien
tgggagaccaccaatctgaacaaca

SEQ ID NO: 892966 - DNA, 25 bp, Homo sapien
gaacaacaaattgtaagaaacacac

SEQ ID NO: 892967 - DNA, 25 bp, Homo sapien
tatttgggagaccaccaatctgaac

SEQ ID NO: 892968 - DNA, 25 bp, Homo sapien
caggaagtctgacgtctccttccag

SEQ ID NO: 892969 - DNA, 25 bp, Homo sapien
gaagtctgacgtctccttccaggta

SEQ ID NO: 892970 - DNA, 25 bp, Homo sapien
atgggacaggaagtctgacgtctcc

SEQ ID NO: 892971 - DNA, 25 bp, Homo sapien
gacaggaagtctgacgtctccttcc

SEQ ID NO: 892972 - DNA, 25 bp, Homo sapien
gaataggctcctgctaaacatgacc

SEQ ID NO: 892973 - DNA, 25 bp, Homo sapien
gacgagggccctatgctgtcatgaa

SEQ ID NO: 892974 - DNA, 25 bp, Homo sapien
ttcagctatcgctaggaagccaggc

SEQ ID NO: 892975 - DNA, 25 bp, Homo sapien
gaggctaccaacatgcaagagggag

SEQ ID NO: 892976 - DNA, 25 bp, Homo sapien
atcgttgagttcattttgggtcagc

SEQ ID NO: 892977 - DNA, 25 bp, Homo sapien
gctttaacgtctggttgactttcaa

SEQ ID NO: 892978 - DNA, 25 bp, Homo sapien
cataaatgctttaacgtctggttga

SEQ ID NO: 892979 - DNA, 25 bp, Homo sapien
cttcatcgttgagttcattttgggt

SEQ ID NO: 892980 - DNA, 25 bp, Homo sapien
tgcagatgatcacttgctgagaacc

SEQ ID NO: 892981 - DNA, 25 bp, Homo sapien
caaggctctccagctatgcagatga

SEQ ID NO: 892982 - DNA, 25 bp, Homo sapien
cacagaaggtcaatgggactcattt

SEQ ID NO: 892983 - DNA, 25 bp, Homo sapien
ttttagagttcacaggagcgggagc

SEQ ID NO: 892984 - DNA, 25 bp, Homo sapien
tatttctagagacgtgttctgctgc

SEQ ID NO: 892985 - DNA, 25 bp, Homo sapien
cacagtatttctagagacgtgttct

SEQ ID NO: 892986 - DNA, 25 bp, Homo sapien
tcctccttctgtggagatgccgttg

SEQ ID NO: 892987 - DNA, 25 bp, Homo sapien
ttctgtggagatgccgttggacgca

SEQ ID NO: 892988 - DNA, 25 bp, Homo sapien
tcttctattaggagcacgaatcacc

SEQ ID NO: 892989 - DNA, 25 bp, Homo sapien
taggtgcatccccatttatagagag

SEQ ID NO: 892990 - DNA, 25 bp, Homo sapien
gcagagccgtggacataccaaggtc

SEQ ID NO: 892991 - DNA, 25 bp, Homo sapien
caagctgtccttctaaaggctggcc

SEQ ID NO: 892992 - DNA, 25 bp, Homo sapien
tcatccccaacttgattgccccaca

SEQ ID NO: 892993 - DNA, 25 bp, Homo sapien
cgcagagcctctgcgaaggcttttg

SEQ ID NO: 892994 - DNA, 25 bp, Homo sapien
caagctggggtggttccgcagagcc

SEQ ID NO: 892995 - DNA, 25 bp, Homo sapien
tctgcgaaggcttttgctccttcat

SEQ ID NO: 892996 - DNA, 25 bp, Homo sapien
agccagggcgagatacttccctcct

SEQ ID NO: 892997 - DNA, 25 bp, Homo sapien
acagccagggcgagatacttccctc

SEQ ID NO: 892998 - DNA, 25 bp, Homo sapien
gccagggcgagatacttccctcctt

SEQ ID NO: 892999 - DNA, 25 bp, Homo sapien
cagccagggcgagatacttccctcc

SEQ ID NO: 893000 - DNA, 25 bp, Homo sapien
tctgggatccacaagagccatggcc

SEQ ID NO: 893001 - DNA, 25 bp, Homo sapien
agcatcactgacttccctcgggaga

SEQ ID NO: 893002 - DNA, 25 bp, Homo sapien
ccaagggtcaaggtatgtggccact

SEQ ID NO: 893003 - DNA, 25 bp, Homo sapien
tcctgtcagggagggaactgaagcc

SEQ ID NO: 893004 - DNA, 25 bp, Homo sapien
ttaagatgcgtgaggcctttgcatt

SEQ ID NO: 893005 - DNA, 25 bp, Homo sapien
tgaggcctttgcattcatccaggat

SEQ ID NO: 893006 - DNA, 25 bp, Homo sapien
gatgcgtgaggcctttgcattcatc

SEQ ID NO: 893007 - DNA, 25 bp, Homo sapien
gcctttgcattcatccaggattttg

SEQ ID NO: 893008 - DNA, 25 bp, Homo sapien
ctggctccgacatcggtgatctggt

SEQ ID NO: 893009 - DNA, 25 bp, Homo sapien
gctccgacatcggtgatctggttgt

SEQ ID NO: 893010 - DNA, 25 bp, Homo sapien
tggctccgacatcggtgatctggtt

SEQ ID NO: 893011 - DNA, 25 bp, Homo sapien
ctccgacatcggtgatctggttgtt

SEQ ID NO: 893012 - DNA, 25 bp, Homo sapien
ttaatagcccctgttttttgaagca

SEQ ID NO: 893013 - DNA, 25 bp, Homo sapien
tctggctcctgatgtcattttaata

SEQ ID NO: 893014 - DNA, 25 bp, Homo sapien
taatagcccctgttttttgaagcat

SEQ ID NO: 893015 - DNA, 25 bp, Homo sapien
ctggctcctgatgtcattttaatag

SEQ ID NO: 893016 - DNA, 25 bp, Homo sapien
tcttaggacataacgcaaagccctg

SEQ ID NO: 893017 - DNA, 25 bp, Homo sapien
tatggcctgagacaagtcacgttac

SEQ ID NO: 893018 - DNA, 25 bp, Homo sapien
caaagccctggtgcatgagtgctcg

SEQ ID NO: 893019 - DNA, 25 bp, Homo sapien
taatgatgatagtccccttgcaggg

SEQ ID NO: 893020 - DNA, 25 bp, Homo sapien
catgtcctcattaacatcgaaggcc

SEQ ID NO: 893021 - DNA, 25 bp, Homo sapien
gctcaatgccaattcaatagtacag

SEQ ID NO: 893022 - DNA, 25 bp, Homo sapien
gggtcgtttgcgtccatgtcctcat

SEQ ID NO: 893023 - DNA, 25 bp, Homo sapien
cagagccctggagccgagtgtggcc

SEQ ID NO: 893024 - DNA, 25 bp, Homo sapien
cttgcagagccaccagttgtgtggg

SEQ ID NO: 893025 - DNA, 25 bp, Homo sapien
tgaggccccaagaaactgaacaact

SEQ ID NO: 893026 - DNA, 25 bp, Homo sapien
agcttgcagagccaccagttgtgtg

SEQ ID NO: 893027 - DNA, 25 bp, Homo sapien
tgaacaactgctccagcttgcagag

SEQ ID NO: 893028 - DNA, 25 bp, Homo sapien
gggtcttgccccaaaggctctggat

SEQ ID NO: 893029 - DNA, 25 bp, Homo sapien
catgcactcagaatccccattcggg

SEQ ID NO: 893030 - DNA, 25 bp, Homo sapien
ggcaactgatgtggagctacttata

SEQ ID NO: 893031 - DNA, 25 bp, Homo sapien
gactgtttcatacattctgcgggag

SEQ ID NO: 893032 - DNA, 25 bp, Homo sapien
aattttgtatttggtcagctcttcg

SEQ ID NO: 893033 - DNA, 25 bp, Homo sapien
tggtcagctcttcgcttagcacctt

SEQ ID NO: 893034 - DNA, 25 bp, Homo sapien
tcagctcttcgcttagcacctttac

SEQ ID NO: 893035 - DNA, 25 bp, Homo sapien
tgtatttggtcagctcttcgcttag

SEQ ID NO: 893036 - DNA, 25 bp, Homo sapien
cgtcagtgatctggtttacgctgag

SEQ ID NO: 893037 - DNA, 25 bp, Homo sapien
gtcagtgatctggtttacgctgagt

SEQ ID NO: 893038 - DNA, 25 bp, Homo sapien
ttgaagctttcgacctgaacgcggg

SEQ ID NO: 893039 - DNA, 25 bp, Homo sapien
ttcagatggacctcagtgaccagga

SEQ ID NO: 893040 - DNA, 25 bp, Homo sapien
tgtgtctcgtagatgcagcgcagca

SEQ ID NO: 893041 - DNA, 25 bp, Homo sapien
gaagcaccggaagatgatccagcag

SEQ ID NO: 893042 - DNA, 25 bp, Homo sapien
ctgtagcagcatggacttgcccacc

SEQ ID NO: 893043 - DNA, 25 bp, Homo sapien
tgaacatgcggcagcgaaagtggaa

SEQ ID NO: 893044 - DNA, 25 bp, Homo sapien
agaatttgacccctgcgtctagccg

SEQ ID NO: 893045 - DNA, 25 bp, Homo sapien
agaggctctgcagccgctgtagcag

SEQ ID NO: 893046 - DNA, 25 bp, Homo sapien
ggtgtccatgtagatctcctccagc

SEQ ID NO: 893047 - DNA, 25 bp, Homo sapien
gcatagcacagcacgaacttggagt

SEQ ID NO: 893048 - DNA, 25 bp, Homo sapien
aacttggagtcacggcccagatggt

SEQ ID NO: 893049 - DNA, 25 bp, Homo sapien
gctgaagccaaccagctccatgatg

SEQ ID NO: 893050 - DNA, 25 bp, Homo sapien
tgaggtccacgtaggcatctgcgag

SEQ ID NO: 893051 - DNA, 25 bp, Homo sapien
gaccacgactttgctctgagtgagc

SEQ ID NO: 893052 - DNA, 25 bp, Homo sapien
tgtaccaggtccagaattttgcgga

SEQ ID NO: 893053 - DNA, 25 bp, Homo sapien
caagtagaggaagaactcggacacc

SEQ ID NO: 893054 - DNA, 25 bp, Homo sapien
gagaaccaccccttgggcataatga

SEQ ID NO: 893055 - DNA, 25 bp, Homo sapien
tgtgtcattcctctaaccaagaagg

SEQ ID NO: 893056 - DNA, 25 bp, Homo sapien
ccacacagtaggagggcgataggcc

SEQ ID NO: 893057 - DNA, 25 bp, Homo sapien
gaaaccgtcctggtctcttctgagt

SEQ ID NO: 893058 - DNA, 25 bp, Homo sapien
ttttcaggagataacgcaaagcgta

SEQ ID NO: 893059 - DNA, 25 bp, Homo sapien
taagggctgttaaggcgtcccacag

SEQ ID NO: 893060 - DNA, 25 bp, Homo sapien
tgactgtgcaacctgctaacccagg

SEQ ID NO: 893061 - DNA, 25 bp, Homo sapien
gatgtcagggtttgctccagacaca

SEQ ID NO: 893062 - DNA, 25 bp, Homo sapien
tgtcaggctgggtggggcaggcaca

SEQ ID NO: 893063 - DNA, 25 bp, Homo sapien
caggctgggtggggcaggcacacac

SEQ ID NO: 893064 - DNA, 25 bp, Homo sapien
gtcaggctgggtggggcaggcacac

SEQ ID NO: 893065 - DNA, 25 bp, Homo sapien
cttgtcaggctgggtggggcaggca

SEQ ID NO: 893066 - DNA, 25 bp, Homo sapien
tcttcagcaagttgtccaccagaca

SEQ ID NO: 893067 - DNA, 25 bp, Homo sapien
tgagtattgcggatgtgagtgacca

SEQ ID NO: 893068 - DNA, 25 bp, Homo sapien
aatctccgcatcttcggccgagaag

SEQ ID NO: 893069 - DNA, 25 bp, Homo sapien
tgcggatgtgagtgaccagaagttc

SEQ ID NO: 893070 - DNA, 25 bp, Homo sapien
tcagtaattgaatgtgggggtgaga

SEQ ID NO: 893071 - DNA, 25 bp, Homo sapien
taattgaatgtgggggtgagactct

SEQ ID NO: 893072 - DNA, 25 bp, Homo sapien
tgaatgtgggggtgagactctgatg

SEQ ID NO: 893073 - DNA, 25 bp, Homo sapien
tgtgggggtgagactctgatgggat

SEQ ID NO: 893074 - DNA, 25 bp, Homo sapien
cagcagaagggcaatcaggattcag

SEQ ID NO: 893075 - DNA, 25 bp, Homo sapien
atcttcagctgcgtgtgtcctctca

SEQ ID NO: 893076 - DNA, 25 bp, Homo sapien
agttaaagtagcaagcggctacttt

SEQ ID NO: 893077 - DNA, 25 bp, Homo sapien
tagcaagcggctacttttcccaaat

SEQ ID NO: 893078 - DNA, 25 bp, Homo sapien
ccgtgtccttgaccttcagcaaagt

SEQ ID NO: 893079 - DNA, 25 bp, Homo sapien
ccattttgggttgtgctataacctc

SEQ ID NO: 893080 - DNA, 25 bp, Homo sapien
ctgttgcccattttgggttgtgcta

SEQ ID NO: 893081 - DNA, 25 bp, Homo sapien
tgggttgtgctataacctcttcccc

SEQ ID NO: 893082 - DNA, 25 bp, Homo sapien
cattgtttaaatcttcaatttccaa

SEQ ID NO: 893083 - DNA, 25 bp, Homo sapien
gcatcattctttgaagttagaatat

SEQ ID NO: 893084 - DNA, 25 bp, Homo sapien
ctttttaagtttctggcatcattct

SEQ ID NO: 893085 - DNA, 25 bp, Homo sapien
aaacaacattgtttaaatcttcaat

SEQ ID NO: 893086 - DNA, 25 bp, Homo sapien
cacctcttgccatcaaaggcagaaa

SEQ ID NO: 893087 - DNA, 25 bp, Homo sapien
tcttccaagcctgcgattcccataa

SEQ ID NO: 893088 - DNA, 25 bp, Homo sapien
gatgttttctgtaatcgccgccaca

SEQ ID NO: 893089 - DNA, 25 bp, Homo sapien
ggaaagtctcctgacttacaatcac

SEQ ID NO: 893090 - DNA, 25 bp, Homo sapien
gggcacttattaccagaaacaccag

SEQ ID NO: 893091 - DNA, 25 bp, Homo sapien
gaaacaccagacagccagagatctg

SEQ ID NO: 893092 - DNA, 25 bp, Homo sapien
tgggtccagttgatgaagacggtct

SEQ ID NO: 893093 - DNA, 25 bp, Homo sapien
catgggagactggagatcaattcga

SEQ ID NO: 893094 - DNA, 25 bp, Homo sapien
tgagtgtcacagatactacactgag

SEQ ID NO: 893095 - DNA, 25 bp, Homo sapien
aaaagagtacttagggctgggtgca

SEQ ID NO: 893096 - DNA, 25 bp, Homo sapien
cacagatactacactgagtgagaga

SEQ ID NO: 893097 - DNA, 25 bp, Homo sapien
gactcaaaagagtacttagggctgg

SEQ ID NO: 893098 - DNA, 25 bp, Homo sapien
gagcggagatgtgcatttcttataa

SEQ ID NO: 893099 - DNA, 25 bp, Homo sapien
gagatgtgcatttcttataactgag

SEQ ID NO: 893100 - DNA, 25 bp, Homo sapien
tttccttgcactgtcccaggggacc

SEQ ID NO: 893101 - DNA, 25 bp, Homo sapien
ggaccttgagcggagatgtgcattt

SEQ ID NO: 893102 - DNA, 25 bp, Homo sapien
tgtaactgctaaggccctctttgga

SEQ ID NO: 893103 - DNA, 25 bp, Homo sapien
tctttgtaactgctaaggccctctt

SEQ ID NO: 893104 - DNA, 25 bp, Homo sapien
tttgtaactgctaaggccctctttg

SEQ ID NO: 893105 - DNA, 25 bp, Homo sapien
ttgtaactgctaaggccctctttgg

SEQ ID NO: 893106 - DNA, 25 bp, Homo sapien
gatataactttatgggtcacaggag

SEQ ID NO: 893107 - DNA, 25 bp, Homo sapien
tcttgaagtgagttcccaaacagct

SEQ ID NO: 893108 - DNA, 25 bp, Homo sapien
tgctggcacccaggtcatatggaac

SEQ ID NO: 893109 - DNA, 25 bp, Homo sapien
tatcttagagttacaacccagcgtt

SEQ ID NO: 893110 - DNA, 25 bp, Homo sapien
tctctggtaaagtcacaacctgcca

SEQ ID NO: 893111 - DNA, 25 bp, Homo sapien
caaatgtcaattagagtgggctcca

SEQ ID NO: 893112 - DNA, 25 bp, Homo sapien
tcagaggtgatataacccagattgc

SEQ ID NO: 893113 - DNA, 25 bp, Homo sapien
tggaacattctgacaccgagtgatg

SEQ ID NO: 893114 - DNA, 25 bp, Homo sapien
cagttttacaagtaaagaagataat

SEQ ID NO: 893115 - DNA, 25 bp, Homo sapien
cacaggctccacagttttacaagta

SEQ ID NO: 893116 - DNA, 25 bp, Homo sapien
ccacaggctccacagttttacaagt

SEQ ID NO: 893117 - DNA, 25 bp, Homo sapien
tacaagtaaagaagataattatact

SEQ ID NO: 893118 - DNA, 25 bp, Homo sapien
cacaccttacacagcttcgacagag

SEQ ID NO: 893119 - DNA, 25 bp, Homo sapien
tagttgttgacatgaactgcttgga

SEQ ID NO: 893120 - DNA, 25 bp, Homo sapien
cccaacagcaagctgggtggatgaa

SEQ ID NO: 893121 - DNA, 25 bp, Homo sapien
tggtgatgacgtgaacaacagactt

SEQ ID NO: 893122 - DNA, 25 bp, Homo sapien
tgcttggtttacaatttcttaagga

SEQ ID NO: 893123 - DNA, 25 bp, Homo sapien
tgcttggtcagctcaaatggtgtcc

SEQ ID NO: 893124 - DNA, 25 bp, Homo sapien
tgctgcatgatccacaacaatctgt

SEQ ID NO: 893125 - DNA, 25 bp, Homo sapien
cacggagaacacatatgcttggtca

SEQ ID NO: 893126 - DNA, 25 bp, Homo sapien
tggtgaataaattcaactttccatc

SEQ ID NO: 893127 - DNA, 25 bp, Homo sapien
ccaatagtttctgttgctctaaggc

SEQ ID NO: 893128 - DNA, 25 bp, Homo sapien
agtttctgttgctctaaggcattta

SEQ ID NO: 893129 - DNA, 25 bp, Homo sapien
aactttccatcaccaatagtttctg

SEQ ID NO: 893130 - DNA, 25 bp, Homo sapien
ttccagaaatatggccctacacaga

SEQ ID NO: 893131 - DNA, 25 bp, Homo sapien
taatcttgttgagcctcagttgtct

SEQ ID NO: 893132 - DNA, 25 bp, Homo sapien
gagcataagcacatctgactgttaa

SEQ ID NO: 893133 - DNA, 25 bp, Homo sapien
catcaggaggtaggtagaataagca

SEQ ID NO: 893134 - DNA, 25 bp, Homo sapien
agaaacaacacttgccctcaacgag

SEQ ID NO: 893135 - DNA, 25 bp, Homo sapien
ccaggtcagaccttttggataaatc

SEQ ID NO: 893136 - DNA, 25 bp, Homo sapien
tggataaatcaaaggaggccccttg

SEQ ID NO: 893137 - DNA, 25 bp, Homo sapien
ggccccttgtgtgacatgcaactga

SEQ ID NO: 893138 - DNA, 25 bp, Homo sapien
gacgcaggcatcagcaattgtagaa

SEQ ID NO: 893139 - DNA, 25 bp, Homo sapien
gcaggcatcagcaattgtagaattt

SEQ ID NO: 893140 - DNA, 25 bp, Homo sapien
ctgggacgcaggcatcagcaattgt

SEQ ID NO: 893141 - DNA, 25 bp, Homo sapien
gggacgcaggcatcagcaattgtag

SEQ ID NO: 893142 - DNA, 25 bp, Homo sapien
actagcttagcttccccagacttaa

SEQ ID NO: 893143 - DNA, 25 bp, Homo sapien
catcaaggccatgggtttactagct

SEQ ID NO: 893144 - DNA, 25 bp, Homo sapien
ccatgggtttactagcttagcttcc

SEQ ID NO: 893145 - DNA, 25 bp, Homo sapien
ttagcttccccagacttaatttcaa

SEQ ID NO: 893146 - DNA, 25 bp, Homo sapien
gaactggctgcgactacagccgcag

SEQ ID NO: 893147 - DNA, 25 bp, Homo sapien
ggccaccaggtttacagacttcgca

SEQ ID NO: 893148 - DNA, 25 bp, Homo sapien
acgctgctcccgcagtagcgcgagg

SEQ ID NO: 893149 - DNA, 25 bp, Homo sapien
ccgctgagagctagagaagagcccg

SEQ ID NO: 893150 - DNA, 25 bp, Homo sapien
agacagagcagagcaattcaccagc

SEQ ID NO: 893151 - DNA, 25 bp, Homo sapien
cagagcaaggagacacttaagatca

SEQ ID NO: 893152 - DNA, 25 bp, Homo sapien
ccagatccctgttctcaagtgttaa

SEQ ID NO: 893153 - DNA, 25 bp, Homo sapien
aaatggatcaaacgtggagatcccc

SEQ ID NO: 893154 - DNA, 25 bp, Homo sapien
gtatagtcatttggttctattgctt

SEQ ID NO: 893155 - DNA, 25 bp, Homo sapien
acttctcttgatactccagcggcaa

SEQ ID NO: 893156 - DNA, 25 bp, Homo sapien
tcttgatactccagcggcaaaccat

SEQ ID NO: 893157 - DNA, 25 bp, Homo sapien
ttctcttgatactccagcggcaaac

SEQ ID NO: 893158 - DNA, 25 bp, Homo sapien
cttgatactccagcggcaaaccatt

SEQ ID NO: 893159 - DNA, 25 bp, Homo sapien
tacccttgctctgaattggacatgg

SEQ ID NO: 893160 - DNA, 25 bp, Homo sapien
taaagtttacagagagcagtttcgg

SEQ ID NO: 893161 - DNA, 25 bp, Homo sapien
gcaactgtgtttagcggtactttca

SEQ ID NO: 893162 - DNA, 25 bp, Homo sapien
gcagtttcggttacaacgccagagg

SEQ ID NO: 893163 - DNA, 25 bp, Homo sapien
aggcagtgtgacgtttctttctcca

SEQ ID NO: 893164 - DNA, 25 bp, Homo sapien
catgacctgattgggcctgccaaca

SEQ ID NO: 893165 - DNA, 25 bp, Homo sapien
gagctaagcttaggttctgaacagg

SEQ ID NO: 893166 - DNA, 25 bp, Homo sapien
cttgtgcttgcaagggtgatttccc

SEQ ID NO: 893167 - DNA, 25 bp, Homo sapien
ctagggatgaaaaacatttcagcag

SEQ ID NO: 893168 - DNA, 25 bp, Homo sapien
gggatgaaaaacatttcagcagtag

SEQ ID NO: 893169 - DNA, 25 bp, Homo sapien
ggatgaaaaacatttcagcagtaga

SEQ ID NO: 893170 - DNA, 25 bp, Homo sapien
tagggatgaaaaacatttcagcagt

SEQ ID NO: 893171 - DNA, 25 bp, Homo sapien
tacactcataaatattctttcctac

SEQ ID NO: 893172 - DNA, 25 bp, Homo sapien
cataaaatactgtgttacggggaga

SEQ ID NO: 893173 - DNA, 25 bp, Homo sapien
cctactttaatacatgtctacatca

SEQ ID NO: 893174 - DNA, 25 bp, Homo sapien
catgtctagaattctgactcacata

SEQ ID NO: 893175 - DNA, 25 bp, Homo sapien
agccaccacgttgggcctaaagtct

SEQ ID NO: 893176 - DNA, 25 bp, Homo sapien
tcaccaccagtctgtaaatagctta

SEQ ID NO: 893177 - DNA, 25 bp, Homo sapien
caccaccagtctgtaaatagcttac

SEQ ID NO: 893178 - DNA, 25 bp, Homo sapien
gagccaccacgttgggcctaaagtc

SEQ ID NO: 893179 - DNA, 25 bp, Homo sapien
tcttgagttgcaactttaacttcta

SEQ ID NO: 893180 - DNA, 25 bp, Homo sapien
gagcactttcgtaatttgtcatcag

SEQ ID NO: 893181 - DNA, 25 bp, Homo sapien
tccttcttgagttgcaactttaact

SEQ ID NO: 893182 - DNA, 25 bp, Homo sapien
gatgggggagcactttcgtaatttg

SEQ ID NO: 893183 - DNA, 25 bp, Homo sapien
gggattaaacatttaactacatctg

SEQ ID NO: 893184 - DNA, 25 bp, Homo sapien
catacttgctccctatgtatttggg

SEQ ID NO: 893185 - DNA, 25 bp, Homo sapien
gtcaagatggtgtatgggattaaac

SEQ ID NO: 893186 - DNA, 25 bp, Homo sapien
gacctagccaatttagctcactggg

SEQ ID NO: 893187 - DNA, 25 bp, Homo sapien
gagaatatccacctagaacaaaggt

SEQ ID NO: 893188 - DNA, 25 bp, Homo sapien
tatcgagcatgtcagataaccctct

SEQ ID NO: 893189 - DNA, 25 bp, Homo sapien
gaaacattgttctttgggctacaaa

SEQ ID NO: 893190 - DNA, 25 bp, Homo sapien
tcacaagtgaggtaaagtatcgagc

SEQ ID NO: 893191 - DNA, 25 bp, Homo sapien
taatgaatatgtctgtagtatgtgg

SEQ ID NO: 893192 - DNA, 25 bp, Homo sapien
ttgaaaaactaacacacaggtacac

SEQ ID NO: 893193 - DNA, 25 bp, Homo sapien
ttctagaccttttagcaaactcaca

SEQ ID NO: 893194 - DNA, 25 bp, Homo sapien
tcctcacatacaatctgctttctga

SEQ ID NO: 893195 - DNA, 25 bp, Homo sapien
tcgccaggactctgaaaaatggtgg

SEQ ID NO: 893196 - DNA, 25 bp, Homo sapien
tccctccatgccaagtttgacttgt

SEQ ID NO: 893197 - DNA, 25 bp, Homo sapien
aaaatggtggctatccctccatgcc

SEQ ID NO: 893198 - DNA, 25 bp, Homo sapien
tttgccttgggaattgccaaagtca

SEQ ID NO: 893199 - DNA, 25 bp, Homo sapien
accaaatttgccctgagggacctgg

SEQ ID NO: 893200 - DNA, 25 bp, Homo sapien
ttttacttagagacaagctgggtga

SEQ ID NO: 893201 - DNA, 25 bp, Homo sapien
tatgtctgtagagtatcctaccaac

SEQ ID NO: 893202 - DNA, 25 bp, Homo sapien
ggacctggcatttgaggatgaatga

SEQ ID NO: 893203 - DNA, 25 bp, Homo sapien
caattcccagacacgggtcagagaa

SEQ ID NO: 893204 - DNA, 25 bp, Homo sapien
gactgagagttcctcgaaacagcca

SEQ ID NO: 893205 - DNA, 25 bp, Homo sapien
ggttatagttcatgcagccccttga

SEQ ID NO: 893206 - DNA, 25 bp, Homo sapien
ggtaaacggattttcacaatgccag

SEQ ID NO: 893207 - DNA, 25 bp, Homo sapien
aagaactgcattcctggcccgatcg

SEQ ID NO: 893208 - DNA, 25 bp, Homo sapien
aggcagcccgagagggcaccgtggc

SEQ ID NO: 893209 - DNA, 25 bp, Homo sapien
caggaggcggaagccgcgtcctagt

SEQ ID NO: 893210 - DNA, 25 bp, Homo sapien
cgcgtcctagtaccctcatcaagaa

SEQ ID NO: 893211 - DNA, 25 bp, Homo sapien
aggcgggccacacagaagaacgccg

SEQ ID NO: 893212 - DNA, 25 bp, Homo sapien
ctcatctggacccgtgacgtccttg

SEQ ID NO: 893213 - DNA, 25 bp, Homo sapien
ggaggtggatcctctctgtcagcag

SEQ ID NO: 893214 - DNA, 25 bp, Homo sapien
cagcaggttgctgccgtaggcaaag

SEQ ID NO: 893215 - DNA, 25 bp, Homo sapien
aacggccagagagcgcaacactggg

SEQ ID NO: 893216 - DNA, 25 bp, Homo sapien
tacgcccctgcactggagcctgaag

SEQ ID NO: 893217 - DNA, 25 bp, Homo sapien
aagcagagtgtaaggaacggccaga

SEQ ID NO: 893218 - DNA, 25 bp, Homo sapien
actggagcctgaagcagagtgtaag

SEQ ID NO: 893219 - DNA, 25 bp, Homo sapien
agactacagacttgagtcattgtgc

SEQ ID NO: 893220 - DNA, 25 bp, Homo sapien
actacagttgcaacacatctggcta

SEQ ID NO: 893221 - DNA, 25 bp, Homo sapien
ttaaagttttttgattgtgccatta

SEQ ID NO: 893222 - DNA, 25 bp, Homo sapien
ctataatacccacaaaatagaaatt

SEQ ID NO: 893223 - DNA, 25 bp, Homo sapien
tgatgactgcctggctaactgaggg

SEQ ID NO: 893224 - DNA, 25 bp, Homo sapien
tgggctgagaaacacaatcttgtca

SEQ ID NO: 893225 - DNA, 25 bp, Homo sapien
taaggaaagcgactgactgagagcc

SEQ ID NO: 893226 - DNA, 25 bp, Homo sapien
tataaatctgtttagctaagcccag

SEQ ID NO: 893227 - DNA, 25 bp, Homo sapien
cactcgtcagggaacatagggatct

SEQ ID NO: 893228 - DNA, 25 bp, Homo sapien
ggagaaagcagaccacagctcaagc

SEQ ID NO: 893229 - DNA, 25 bp, Homo sapien
tccctgagaatgtgtacctgagtct

SEQ ID NO: 893230 - DNA, 25 bp, Homo sapien
tcttagagaaggaagcactcgtcag

SEQ ID NO: 893231 - DNA, 25 bp, Homo sapien
tttgatatctctgtatctacatttc

SEQ ID NO: 893232 - DNA, 25 bp, Homo sapien
actatacactttggaaagacaaaca

SEQ ID NO: 893233 - DNA, 25 bp, Homo sapien
tctctgtatctacatttctattcag

SEQ ID NO: 893234 - DNA, 25 bp, Homo sapien
tttctattcagatctataactatac

SEQ ID NO: 893235 - DNA, 25 bp, Homo sapien
cccagtctgttttaggagaaggcca

SEQ ID NO: 893236 - DNA, 25 bp, Homo sapien
cacatcaatcggagaattaggccag

SEQ ID NO: 893237 - DNA, 25 bp, Homo sapien
gagatgtaccgatcccaagattcac

SEQ ID NO: 893238 - DNA, 25 bp, Homo sapien
gacaataacctgctagatcccacag

SEQ ID NO: 893239 - DNA, 25 bp, Homo sapien
agtgtgggagctatgcttgcattat

SEQ ID NO: 893240 - DNA, 25 bp, Homo sapien
tgctttcagtctattcaacaatatt

SEQ ID NO: 893241 - DNA, 25 bp, Homo sapien
gctttcagtctattcaacaatattt

SEQ ID NO: 893242 - DNA, 25 bp, Homo sapien
tgtggagtgtgggagctatgcttgc

SEQ ID NO: 893243 - DNA, 25 bp, Homo sapien
tatatgtagaggagaaacttgcttc

SEQ ID NO: 893244 - DNA, 25 bp, Homo sapien
taacagaaactcaaatgactcactg

SEQ ID NO: 893245 - DNA, 25 bp, Homo sapien
tggaatcttccagagggtaatgcat

SEQ ID NO: 893246 - DNA, 25 bp, Homo sapien
gaaaatgaacagttactcatggcag

SEQ ID NO: 893247 - DNA, 25 bp, Homo sapien
tcccgcggacaataagacctatgag

SEQ ID NO: 893248 - DNA, 25 bp, Homo sapien
tagtacatgcctgtcccctcatgga

SEQ ID NO: 893249 - DNA, 25 bp, Homo sapien
cctactagactatgatgcccagaga

SEQ ID NO: 893250 - DNA, 25 bp, Homo sapien
gattagacaggagtgacaaaaccaa

SEQ ID NO: 893251 - DNA, 25 bp, Homo sapien
tatggacctcgggtccaggactact

SEQ ID NO: 893252 - DNA, 25 bp, Homo sapien
ctgatttttatggacctcgggtcca

SEQ ID NO: 893253 - DNA, 25 bp, Homo sapien
gacctcgggtccaggactactgcta

SEQ ID NO: 893254 - DNA, 25 bp, Homo sapien
ctcgggtccaggactactgctagtt

SEQ ID NO: 893255 - DNA, 25 bp, Homo sapien
cagaggggcatgccgtgtccactgt

SEQ ID NO: 893256 - DNA, 25 bp, Homo sapien
ctggcagaggggcatgccgtgtcca

SEQ ID NO: 893257 - DNA, 25 bp, Homo sapien
gaggggcatgccgtgtccactgtgg

SEQ ID NO: 893258 - DNA, 25 bp, Homo sapien
ggcagaggggcatgccgtgtccact

SEQ ID NO: 893259 - DNA, 25 bp, Homo sapien
atgatgtagggccctccccgtggat

SEQ ID NO: 893260 - DNA, 25 bp, Homo sapien
cagatgatgtagggccctccccgtg

SEQ ID NO: 893261 - DNA, 25 bp, Homo sapien
agatgatgtagggccctccccgtgg

SEQ ID NO: 893262 - DNA, 25 bp, Homo sapien
gatgtagggccctccccgtggatac

SEQ ID NO: 893263 - DNA, 25 bp, Homo sapien
atggagatgttctgtccccctcagt

SEQ ID NO: 893264 - DNA, 25 bp, Homo sapien
ctcagtgtctaagccctctgacttc

SEQ ID NO: 893265 - DNA, 25 bp, Homo sapien
ggagatgttctgtccccctcagtgt

SEQ ID NO: 893266 - DNA, 25 bp, Homo sapien
acttcctttcttccccatcaactgg

SEQ ID NO: 893267 - DNA, 25 bp, Homo sapien
ttatgcagatgtaataagagaggcc

SEQ ID NO: 893268 - DNA, 25 bp, Homo sapien
tttcagggctactgccactcgtttt

SEQ ID NO: 893269 - DNA, 25 bp, Homo sapien
cagggctactgccactcgttttcct

SEQ ID NO: 893270 - DNA, 25 bp, Homo sapien
ggctactgccactcgttttcctgtt

SEQ ID NO: 893271 - DNA, 25 bp, Homo sapien
gctgtttcagggctactgccactcg

SEQ ID NO: 893272 - DNA, 25 bp, Homo sapien
tggctatggccaatttgctttgtcg

SEQ ID NO: 893273 - DNA, 25 bp, Homo sapien
ctatggccaatttgctttgtcgagt

SEQ ID NO: 893274 - DNA, 25 bp, Homo sapien
ccttggctatggccaatttgctttg

SEQ ID NO: 893275 - DNA, 25 bp, Homo sapien
ttttccttggctatggccaatttgc

SEQ ID NO: 893276 - DNA, 25 bp, Homo sapien
aactaaattcttgaccaggagcagg

SEQ ID NO: 893277 - DNA, 25 bp, Homo sapien
tgtaatacttcagcactagcaccaa

SEQ ID NO: 893278 - DNA, 25 bp, Homo sapien
caaaagtcctgtgaaccttggatgg

SEQ ID NO: 893279 - DNA, 25 bp, Homo sapien
gcctcggaagcttagtgagttcaca

SEQ ID NO: 893280 - DNA, 25 bp, Homo sapien
ttaaaagggtcatgtgtacaaatac

SEQ ID NO: 893281 - DNA, 25 bp, Homo sapien
aagggtcatgtgtacaaatacatag

SEQ ID NO: 893282 - DNA, 25 bp, Homo sapien
catgtgtacaaatacatagttcaga

SEQ ID NO: 893283 - DNA, 25 bp, Homo sapien
ggtcatgtgtacaaatacatagttc

SEQ ID NO: 893284 - DNA, 25 bp, Homo sapien
tcagcttaaataggcctggcattgt

SEQ ID NO: 893285 - DNA, 25 bp, Homo sapien
atcagcttaaataggcctggcattg

SEQ ID NO: 893286 - DNA, 25 bp, Homo sapien
cagcttaaataggcctggcattgtg

SEQ ID NO: 893287 - DNA, 25 bp, Homo sapien
tcccagagtgggactttaatttaga

SEQ ID NO: 893288 - DNA, 25 bp, Homo sapien
tccatgggccatgtgagggaaacac

SEQ ID NO: 893289 - DNA, 25 bp, Homo sapien
gaccctgaacagtgcagcagagcct

SEQ ID NO: 893290 - DNA, 25 bp, Homo sapien
tttagaataatgtcactgaggagct

SEQ ID NO: 893291 - DNA, 25 bp, Homo sapien
tgctgctatcaaatagaggtgttgc

SEQ ID NO: 893292 - DNA, 25 bp, Homo sapien
cccacagcttttggcaacgaccatt

SEQ ID NO: 893293 - DNA, 25 bp, Homo sapien
taaggctgagtaacatgccactgta

SEQ ID NO: 893294 - DNA, 25 bp, Homo sapien
catgtcctctggaatgtatctagac

SEQ ID NO: 893295 - DNA, 25 bp, Homo sapien
agttttaagacactgttctgggcta

SEQ ID NO: 893296 - DNA, 25 bp, Homo sapien
tactacattggtgcaaaacaaaatg

SEQ ID NO: 893297 - DNA, 25 bp, Homo sapien
gaagccttcacaacagagttttaag

SEQ ID NO: 893298 - DNA, 25 bp, Homo sapien
gatgggaatgttcaacgtctactcc

SEQ ID NO: 893299 - DNA, 25 bp, Homo sapien
ttcaatctggtgcagggtccagtgt

SEQ ID NO: 893300 - DNA, 25 bp, Homo sapien
attgctataatgttccaggaaattg

SEQ ID NO: 893301 - DNA, 25 bp, Homo sapien
attcattgctataatgttccaggaa

SEQ ID NO: 893302 - DNA, 25 bp, Homo sapien
tcattgctataatgttccaggaaat

SEQ ID NO: 893303 - DNA, 25 bp, Homo sapien
taagtaagtacagctaaaggagata

SEQ ID NO: 893304 - DNA, 25 bp, Homo sapien
gacttgcaggaactcacaggtacca

SEQ ID NO: 893305 - DNA, 25 bp, Homo sapien
gtaagtaagtagagataagtaagtc

SEQ ID NO: 893306 - DNA, 25 bp, Homo sapien
taagtagagacaagtaagtaagtag

SEQ ID NO: 893307 - DNA, 25 bp, Homo sapien
tcctaagcatggactgggttcccca

SEQ ID NO: 893308 - DNA, 25 bp, Homo sapien
tgagaagatggaacgaggaccgacc

SEQ ID NO: 893309 - DNA, 25 bp, Homo sapien
tttctcaatatcagtggcctcccag

SEQ ID NO: 893310 - DNA, 25 bp, Homo sapien
ccgaccggagtcttgatgcttaaca

SEQ ID NO: 893311 - DNA, 25 bp, Homo sapien
caaccggcaattaagggctgcacag

SEQ ID NO: 893312 - DNA, 25 bp, Homo sapien
gcttaatgcaacatgtccttttgac

SEQ ID NO: 893313 - DNA, 25 bp, Homo sapien
aaatgaagctggatcaccaaccggc

SEQ ID NO: 893314 - DNA, 25 bp, Homo sapien
tggactgccaataaatagcatgggc

SEQ ID NO: 893315 - DNA, 25 bp, Homo sapien
gactaatataatgaatgtcccggga

SEQ ID NO: 893316 - DNA, 25 bp, Homo sapien
tagatttaaatcagatccatgaagt

SEQ ID NO: 893317 - DNA, 25 bp, Homo sapien
ggtagattccaaactgtgctccttg

SEQ ID NO: 893318 - DNA, 25 bp, Homo sapien
gatccatgaagtggcccaagaggat

SEQ ID NO: 893319 - DNA, 25 bp, Homo sapien
ggtggcagcgctatgtcaacaggca

SEQ ID NO: 893320 - DNA, 25 bp, Homo sapien
cgatacacatggataggagggcact

SEQ ID NO: 893321 - DNA, 25 bp, Homo sapien
tcttcccagggagtgtctcagcgct

SEQ ID NO: 893322 - DNA, 25 bp, Homo sapien
gacttgagtcacgtagccgatacac

SEQ ID NO: 893323 - DNA, 25 bp, Homo sapien
attgaaacccataatgaagaggatg

SEQ ID NO: 893324 - DNA, 25 bp, Homo sapien
aattgaaacccataatgaagaggat

SEQ ID NO: 893325 - DNA, 25 bp, Homo sapien
tgtggatagaacacagggttactga

SEQ ID NO: 893326 - DNA, 25 bp, Homo sapien
tcactttgagtcaatggaactgttc

SEQ ID NO: 893327 - DNA, 25 bp, Homo sapien
gattacacttggctattgctgtcat

SEQ ID NO: 893328 - DNA, 25 bp, Homo sapien
tttgagtcaatggaactgttcaggc

SEQ ID NO: 893329 - DNA, 25 bp, Homo sapien
cagagatctgtctgctgccaccaca

SEQ ID NO: 893330 - DNA, 25 bp, Homo sapien
tctccagactgttcagatctggtcc

SEQ ID NO: 893331 - DNA, 25 bp, Homo sapien
ctctctccagactgttcagatctgg

SEQ ID NO: 893332 - DNA, 25 bp, Homo sapien
gacacctggcccctgaagcagagat

SEQ ID NO: 893333 - DNA, 25 bp, Homo sapien
ctgtaggatggaagtgcacacactg

SEQ ID NO: 893334 - DNA, 25 bp, Homo sapien
tcctccttcatcattcgggcaaaaa

SEQ ID NO: 893335 - DNA, 25 bp, Homo sapien
gcagacaccggtcataaccaagcaa

SEQ ID NO: 893336 - DNA, 25 bp, Homo sapien
ggtcataaccaagcaattaccaggc

SEQ ID NO: 893337 - DNA, 25 bp, Homo sapien
caagcaattaccaggcacttaaaaa

SEQ ID NO: 893338 - DNA, 25 bp, Homo sapien
taccaggcacttaaaaacttaatga

SEQ ID NO: 893339 - DNA, 25 bp, Homo sapien
gagtttcagtaacataccacgggtg

SEQ ID NO: 893340 - DNA, 25 bp, Homo sapien
tagtgtgtctcataaatgctccagc

SEQ ID NO: 893341 - DNA, 25 bp, Homo sapien
ggagttctgctagcacctcagtcag

SEQ ID NO: 893342 - DNA, 25 bp, Homo sapien
gatgctcctcctggtgatttcctga

SEQ ID NO: 893343 - DNA, 25 bp, Homo sapien
tgattcacaattctgtgtgcctggg

SEQ ID NO: 893344 - DNA, 25 bp, Homo sapien
tatacccattgtaatagtctgttct

SEQ ID NO: 893345 - DNA, 25 bp, Homo sapien
tctatcagtccaaggtgaaactcta

SEQ ID NO: 893346 - DNA, 25 bp, Homo sapien
ccaaaacttttctatcagtccaagg

SEQ ID NO: 893347 - DNA, 25 bp, Homo sapien
gcagcagaggcccggcatggcctgg

SEQ ID NO: 893348 - DNA, 25 bp, Homo sapien
ggcagcagaggcccggcatggcctg

SEQ ID NO: 893349 - DNA, 25 bp, Homo sapien
tttttccaagtctcgcagcagcagt

SEQ ID NO: 893350 - DNA, 25 bp, Homo sapien
gtttgggtacagactagccatctca

SEQ ID NO: 893351 - DNA, 25 bp, Homo sapien
tgggatagcacctctcctggtacag

SEQ ID NO: 893352 - DNA, 25 bp, Homo sapien
taatcgaaggttggattctcccagg

SEQ ID NO: 893353 - DNA, 25 bp, Homo sapien
gatgccaacagtggaaaatgccagt

SEQ ID NO: 893354 - DNA, 25 bp, Homo sapien
tcctaagttaggtacaggttgcctc

SEQ ID NO: 893355 - DNA, 25 bp, Homo sapien
gcctgaaaaatagcatgcgctcaat

SEQ ID NO: 893356 - DNA, 25 bp, Homo sapien
tgtaggcagccaggaatcgtggctc

SEQ ID NO: 893357 - DNA, 25 bp, Homo sapien
ggaacacactcataacgtgcagcag

SEQ ID NO: 893358 - DNA, 25 bp, Homo sapien
tgttagaagcagtcatgccaggaac

SEQ ID NO: 893359 - DNA, 25 bp, Homo sapien
gagtggttcccagaaatgtcggtct

SEQ ID NO: 893360 - DNA, 25 bp, Homo sapien
tgctcctccccgatgtcagtggatt

SEQ ID NO: 893361 - DNA, 25 bp, Homo sapien
tttaggacctgatgccactttgaag

SEQ ID NO: 893362 - DNA, 25 bp, Homo sapien
ggttacggaaacaatggtcccagca

SEQ ID NO: 893363 - DNA, 25 bp, Homo sapien
gaagggactcttgcatgggaacact

SEQ ID NO: 893364 - DNA, 25 bp, Homo sapien
tctggaaacaggcacattgcaagct

SEQ ID NO: 893365 - DNA, 25 bp, Homo sapien
ccgataaggctgttctggccactag

SEQ ID NO: 893366 - DNA, 25 bp, Homo sapien
cagagcctctagtatgggaagaaca

SEQ ID NO: 893367 - DNA, 25 bp, Homo sapien
ttatcgaagactactggatgcctgc

SEQ ID NO: 893368 - DNA, 25 bp, Homo sapien
agttgaatagttagagcagagcctc

SEQ ID NO: 893369 - DNA, 25 bp, Homo sapien
aggtcatgctttggcaggagaaaga

SEQ ID NO: 893370 - DNA, 25 bp, Homo sapien
tcatgctttggcaggagaaagagaa

SEQ ID NO: 893371 - DNA, 25 bp, Homo sapien
ataaggtcatgctttggcaggagaa

SEQ ID NO: 893372 - DNA, 25 bp, Homo sapien
caattataaggtcatgctttggcag

SEQ ID NO: 893373 - DNA, 25 bp, Homo sapien
tgggttcagagtccaccctactcca

SEQ ID NO: 893374 - DNA, 25 bp, Homo sapien
gatcaaagtgttggccgagccatgc

SEQ ID NO: 893375 - DNA, 25 bp, Homo sapien
taataaggacgcttgtcccactggg

SEQ ID NO: 893376 - DNA, 25 bp, Homo sapien
catttgtggcgtgtggcagcatctc

SEQ ID NO: 893377 - DNA, 25 bp, Homo sapien
tctgggatgccgtaagtaagagctg

SEQ ID NO: 893378 - DNA, 25 bp, Homo sapien
tggaacaacacctcgctttggaggg

SEQ ID NO: 893379 - DNA, 25 bp, Homo sapien
tgctggacagagtgaaacgtgctct

SEQ ID NO: 893380 - DNA, 25 bp, Homo sapien
gctggacacttgtcagcctggaaca

SEQ ID NO: 893381 - DNA, 25 bp, Homo sapien
tgttcctggtccaagccgagggtca

SEQ ID NO: 893382 - DNA, 25 bp, Homo sapien
tcagtgagcctagcagaaaagggag

SEQ ID NO: 893383 - DNA, 25 bp, Homo sapien
cacttgggtaccactgagtctctga

SEQ ID NO: 893384 - DNA, 25 bp, Homo sapien
gagagtatagtagggcaagcgcatt

SEQ ID NO: 893385 - DNA, 25 bp, Homo sapien
tgaagggccgtactaacacccaagc

SEQ ID NO: 893386 - DNA, 25 bp, Homo sapien
gagacctaggatgccacagtgtgga

SEQ ID NO: 893387 - DNA, 25 bp, Homo sapien
gagggaattttcagccaagggtaca

SEQ ID NO: 893388 - DNA, 25 bp, Homo sapien
tgttcagctgctagagagacctagg

SEQ ID NO: 893389 - DNA, 25 bp, Homo sapien
ccttactattagagcactcagtgac

SEQ ID NO: 893390 - DNA, 25 bp, Homo sapien
gaattggagttttgtcttggctaga

SEQ ID NO: 893391 - DNA, 25 bp, Homo sapien
ggctagagttaagactaacagccag

SEQ ID NO: 893392 - DNA, 25 bp, Homo sapien
ttactattagagcactcagtgacca

SEQ ID NO: 893393 - DNA, 25 bp, Homo sapien
aattccaaattatggagaacaagac

SEQ ID NO: 893394 - DNA, 25 bp, Homo sapien
gagaacaagacctctgaattggcta

SEQ ID NO: 893395 - DNA, 25 bp, Homo sapien
tcccattgggtttgaccaactctat

SEQ ID NO: 893396 - DNA, 25 bp, Homo sapien
tatccaacttgatcaaatccgaagg

SEQ ID NO: 893397 - DNA, 25 bp, Homo sapien
cttttgctaaccaggccaaactgaa

SEQ ID NO: 893398 - DNA, 25 bp, Homo sapien
aactgaaagagcaatggttgtcccc

SEQ ID NO: 893399 - DNA, 25 bp, Homo sapien
cactgcagtttggaaactaagattc

SEQ ID NO: 893400 - DNA, 25 bp, Homo sapien
tggaaactaagattctgtccttatt

SEQ ID NO: 893401 - DNA, 25 bp, Homo sapien
ttaggaagagagtagttcagacact

SEQ ID NO: 893402 - DNA, 25 bp, Homo sapien
gtcaaagagtaacaacagaggttac

SEQ ID NO: 893403 - DNA, 25 bp, Homo sapien
taatctcctcctactagtgagaggt

SEQ ID NO: 893404 - DNA, 25 bp, Homo sapien
taaaaccatcacatggtcttagcct

SEQ ID NO: 893405 - DNA, 25 bp, Homo sapien
gcagcactctataacaatgcaccaa

SEQ ID NO: 893406 - DNA, 25 bp, Homo sapien
ggtcttgtgaaatgataagctctac

SEQ ID NO: 893407 - DNA, 25 bp, Homo sapien
aacaatgaatgcagcccaaaggaaa

SEQ ID NO: 893408 - DNA, 25 bp, Homo sapien
taggaaaacctgaaattcgcagtct

SEQ ID NO: 893409 - DNA, 25 bp, Homo sapien
tggcctagaataaaacgactggttg

SEQ ID NO: 893410 - DNA, 25 bp, Homo sapien
gcacaaatcagctttaggttccctg

SEQ ID NO: 893411 - DNA, 25 bp, Homo sapien
cctatgtaaacgaaggagtagccca

SEQ ID NO: 893412 - DNA, 25 bp, Homo sapien
cataactacttcatgctgacttggg

SEQ ID NO: 893413 - DNA, 25 bp, Homo sapien
cattcaatcctagaaactcagcaca

SEQ ID NO: 893414 - DNA, 25 bp, Homo sapien
gacatcattatctgaaactgactgg

SEQ ID NO: 893415 - DNA, 25 bp, Homo sapien
gggttgacatcattatctgaaactg

SEQ ID NO: 893416 - DNA, 25 bp, Homo sapien
ttggtggccggggttgacatcatta

SEQ ID NO: 893417 - DNA, 25 bp, Homo sapien
gtggccggggttgacatcattatct

SEQ ID NO: 893418 - DNA, 25 bp, Homo sapien
cagctagtgggcctaccttaacggt

SEQ ID NO: 893419 - DNA, 25 bp, Homo sapien
tagcattttgactaggcgccccatg

SEQ ID NO: 893420 - DNA, 25 bp, Homo sapien
tgactttagatgtcccagggcggga

SEQ ID NO: 893421 - DNA, 25 bp, Homo sapien
tgatatgtgcattgagattgggccc

SEQ ID NO: 893422 - DNA, 25 bp, Homo sapien
ttttcataacttacccagaccatct

SEQ ID NO: 893423 - DNA, 25 bp, Homo sapien
gaatttatcgtacaagatcttttct

SEQ ID NO: 893424 - DNA, 25 bp, Homo sapien
caccctctaaacttaggcaagaaat

SEQ ID NO: 893425 - DNA, 25 bp, Homo sapien
ctttcaccctctaaacttaggcaag

SEQ ID NO: 893426 - DNA, 25 bp, Homo sapien
tgtgcagggcaactcccattttcaa

SEQ ID NO: 893427 - DNA, 25 bp, Homo sapien
tgcagggcaactcccattttcaaaa

SEQ ID NO: 893428 - DNA, 25 bp, Homo sapien
gaagagcaaatcacatcttatgtgg

SEQ ID NO: 893429 - DNA, 25 bp, Homo sapien
aaggaagagcaaatcacatcttatg

SEQ ID NO: 893430 - DNA, 25 bp, Homo sapien
caaaatttacctaatcattcatccc

SEQ ID NO: 893431 - DNA, 25 bp, Homo sapien
caaaccatatcatcttagtaacctt

SEQ ID NO: 893432 - DNA, 25 bp, Homo sapien
cacggtaattatgggagttataaga

SEQ ID NO: 893433 - DNA, 25 bp, Homo sapien
aaatgactgagatatccaatgggca

SEQ ID NO: 893434 - DNA, 25 bp, Homo sapien
ctaaataagaacctcacagttaaat

SEQ ID NO: 893435 - DNA, 25 bp, Homo sapien
tatgccaaatgctgacacttcaaca

SEQ ID NO: 893436 - DNA, 25 bp, Homo sapien
agaagatttagctaacaatattaaa

SEQ ID NO: 893437 - DNA, 25 bp, Homo sapien
aacattatgtgttcacctaaataag

SEQ ID NO: 893438 - DNA, 25 bp, Homo sapien
tttataagctgatttggttgacaca

SEQ ID NO: 893439 - DNA, 25 bp, Homo sapien
ttttatttataagctgatttggttg

SEQ ID NO: 893440 - DNA, 25 bp, Homo sapien
tataagctgatttggttgacacaac

SEQ ID NO: 893441 - DNA, 25 bp, Homo sapien
ttatttataagctgatttggttgac

SEQ ID NO: 893442 - DNA, 25 bp, Homo sapien
ggagagcaccatatgctgactaggc

SEQ ID NO: 893443 - DNA, 25 bp, Homo sapien
gagatatcaatacaagctcacaggt

SEQ ID NO: 893444 - DNA, 25 bp, Homo sapien
tggatacatgcaacgtcatcctgct

SEQ ID NO: 893445 - DNA, 25 bp, Homo sapien
gctcacaggttttacatggttacac

SEQ ID NO: 893446 - DNA, 25 bp, Homo sapien
gcagtggtggtcaggcactttcaca

SEQ ID NO: 893447 - DNA, 25 bp, Homo sapien
cagtggtggtcaggcactttcacac

SEQ ID NO: 893448 - DNA, 25 bp, Homo sapien
ttcaccagagagtggccctgttaga

SEQ ID NO: 893449 - DNA, 25 bp, Homo sapien
tcagtttcaccagagagtggccctg

SEQ ID NO: 893450 - DNA, 25 bp, Homo sapien
ggctcgccaatatatgttactggtg

SEQ ID NO: 893451 - DNA, 25 bp, Homo sapien
tgactatgagtcatccaggttcttg

SEQ ID NO: 893452 - DNA, 25 bp, Homo sapien
ggctggctcgccaatatatgttact

SEQ ID NO: 893453 - DNA, 25 bp, Homo sapien
cgccaatatatgttactggtggagg

SEQ ID NO: 893454 - DNA, 25 bp, Homo sapien
caacataatattctgtgcttttggc

SEQ ID NO: 893455 - DNA, 25 bp, Homo sapien
tccaacataatattctgtgcttttg

SEQ ID NO: 893456 - DNA, 25 bp, Homo sapien
tcctatgtctaactgtgtccagaat

SEQ ID NO: 893457 - DNA, 25 bp, Homo sapien
cttcctatgtctaactgtgtccaga

SEQ ID NO: 893458 - DNA, 25 bp, Homo sapien
caagactagcatatgggcctctgag

SEQ ID NO: 893459 - DNA, 25 bp, Homo sapien
tctaaaaaggatgccaagtccggct

SEQ ID NO: 893460 - DNA, 25 bp, Homo sapien
gaagtctcctctcaaagaataaagg

SEQ ID NO: 893461 - DNA, 25 bp, Homo sapien
taaccattaatgtcgaaggcactga

SEQ ID NO: 893462 - DNA, 25 bp, Homo sapien
ccctcacaatttgcccacaagaaaa

SEQ ID NO: 893463 - DNA, 25 bp, Homo sapien
cacaatttgcccacaagaaaattcc

SEQ ID NO: 893464 - DNA, 25 bp, Homo sapien
ctccctcacaatttgcccacaagaa

SEQ ID NO: 893465 - DNA, 25 bp, Homo sapien
tcacaatttgcccacaagaaaattc

SEQ ID NO: 893466 - DNA, 25 bp, Homo sapien
attagaaactcaaaagaatgcaaat

SEQ ID NO: 893467 - DNA, 25 bp, Homo sapien
tagaaactcaaaagaatgcaaatgt

SEQ ID NO: 893468 - DNA, 25 bp, Homo sapien
tgaaaggctaattagaaactcaaaa

SEQ ID NO: 893469 - DNA, 25 bp, Homo sapien
gaaactcaaaagaatgcaaatgtac

SEQ ID NO: 893470 - DNA, 25 bp, Homo sapien
tctttccagacgaaactgatgtaca

SEQ ID NO: 893471 - DNA, 25 bp, Homo sapien
tccagacgaaactgatgtacatctt

SEQ ID NO: 893472 - DNA, 25 bp, Homo sapien
tgtcccatctttccagacgaaactg

SEQ ID NO: 893473 - DNA, 25 bp, Homo sapien
gacgaaactgatgtacatcttacat

SEQ ID NO: 893474 - DNA, 25 bp, Homo sapien
gccactgtacgccagcctggcagcc

SEQ ID NO: 893475 - DNA, 25 bp, Homo sapien
gccagcctggcagcctgcgtgacag

SEQ ID NO: 893476 - DNA, 25 bp, Homo sapien
tgtacgccagcctggcagcctgcgt

SEQ ID NO: 893477 - DNA, 25 bp, Homo sapien
gtacgccagcctggcagcctgcgtg

SEQ ID NO: 893478 - DNA, 25 bp, Homo sapien
ccggtggtatagaacattaagaatc

SEQ ID NO: 893479 - DNA, 25 bp, Homo sapien
taaaagggctgcagtttgtccggtg

SEQ ID NO: 893480 - DNA, 25 bp, Homo sapien
ggactggcccagaaagtactccata

SEQ ID NO: 893481 - DNA, 25 bp, Homo sapien
tgtcttcagtagcagataccccaag

SEQ ID NO: 893482 - DNA, 25 bp, Homo sapien
aaagaatgactgaagcagcagtggg

SEQ ID NO: 893483 - DNA, 25 bp, Homo sapien
gactgtcctaacatgaaaatggatg

SEQ ID NO: 893484 - DNA, 25 bp, Homo sapien
gatgagacattattgatctaaggaa

SEQ ID NO: 893485 - DNA, 25 bp, Homo sapien
ttcaaaggatatagaatttcaacat

SEQ ID NO: 893486 - DNA, 25 bp, Homo sapien
ttgtgtcgaatctgcggcggcgacc

SEQ ID NO: 893487 - DNA, 25 bp, Homo sapien
ccgggttttgtgtcgaatctgcggc

SEQ ID NO: 893488 - DNA, 25 bp, Homo sapien
ttttgtgtcgaatctgcggcggcga

SEQ ID NO: 893489 - DNA, 25 bp, Homo sapien
ttccgggttttgtgtcgaatctgcg

SEQ ID NO: 893490 - DNA, 25 bp, Homo sapien
gcacctctgaggctagcagtgcgcc

SEQ ID NO: 893491 - DNA, 25 bp, Homo sapien
ccagtgctgcttagaggtgctcgcg

SEQ ID NO: 893492 - DNA, 25 bp, Homo sapien
gctcttagcccgaccctcgctcctg

SEQ ID NO: 893493 - DNA, 25 bp, Homo sapien
agggccgcaggctcatgccctctcc

SEQ ID NO: 893494 - DNA, 25 bp, Homo sapien
gtagacgtagacaaagcagtggctg

SEQ ID NO: 893495 - DNA, 25 bp, Homo sapien
agggagatcttgtgcgaaaactcaa

SEQ ID NO: 893496 - DNA, 25 bp, Homo sapien
taaagcaccccaagtagacgtagac

SEQ ID NO: 893497 - DNA, 25 bp, Homo sapien
gatcttgtgcgaaaactcaaagaag

SEQ ID NO: 893498 - DNA, 25 bp, Homo sapien
aaactggtgatggagtatcttgcca

SEQ ID NO: 893499 - DNA, 25 bp, Homo sapien
catataagaaggatgcaaaactggt

SEQ ID NO: 893500 - DNA, 25 bp, Homo sapien
tttgtgatgagtgctacattacaga

SEQ ID NO: 893501 - DNA, 25 bp, Homo sapien
cagtaagggagcaattggtaaggca

SEQ ID NO: 893502 - DNA, 25 bp, Homo sapien
caaaagacatgatcaatgtgaagag

SEQ ID NO: 893503 - DNA, 25 bp, Homo sapien
ggaattcacaattgaaactgaaggg

SEQ ID NO: 893504 - DNA, 25 bp, Homo sapien
taacaaaagacatgatcaatgtgaa

SEQ ID NO: 893505 - DNA, 25 bp, Homo sapien
gatcaatgtgaagagattccagaaa

SEQ ID NO: 893506 - DNA, 25 bp, Homo sapien
tgttccgaatgtaattgaaccttcc

SEQ ID NO: 893507 - DNA, 25 bp, Homo sapien
tggaagaagttgttccgaatgtaat

SEQ ID NO: 893508 - DNA, 25 bp, Homo sapien
tcatgtatacggtatttgaacatac

SEQ ID NO: 893509 - DNA, 25 bp, Homo sapien
ccttccttcggcctgggtaggatca

SEQ ID NO: 893510 - DNA, 25 bp, Homo sapien
gaagatttggattcccgcaagggat

SEQ ID NO: 893511 - DNA, 25 bp, Homo sapien
gagtccattgacctgcttagagcca

SEQ ID NO: 893512 - DNA, 25 bp, Homo sapien
cttggtgccaagttcatcgagggaa

SEQ ID NO: 893513 - DNA, 25 bp, Homo sapien
tttgagtgaggcaaggtaggaccca

SEQ ID NO: 893514 - DNA, 25 bp, Homo sapien
cacactgcaactctgagggaccgtg

SEQ ID NO: 893515 - DNA, 25 bp, Homo sapien
ttttggatagcggaagccctgacca

SEQ ID NO: 893516 - DNA, 25 bp, Homo sapien
ctctgggtcaatcggaaggcgctat

SEQ ID NO: 893517 - DNA, 25 bp, Homo sapien
tgaccaggcatggagtatctcacaa

SEQ ID NO: 893518 - DNA, 25 bp, Homo sapien
aaaaagagacaatcgaggaatgagg

SEQ ID NO: 893519 - DNA, 25 bp, Homo sapien
aggtatcctctgtttgaagggcaag

SEQ ID NO: 893520 - DNA, 25 bp, Homo sapien
tagtccaagacctagccaatggcaa

SEQ ID NO: 893521 - DNA, 25 bp, Homo sapien
gctgatgtggaggccaggtatcctc

SEQ ID NO: 893522 - DNA, 25 bp, Homo sapien
aaaaaactcatgtctgggctcctcc

SEQ ID NO: 893523 - DNA, 25 bp, Homo sapien
tgttgcctcagtaaaagatgttggg

SEQ ID NO: 893524 - DNA, 25 bp, Homo sapien
taagagccccttcacttttgctggc

SEQ ID NO: 893525 - DNA, 25 bp, Homo sapien
ggactgtctcctctagaaattggga

SEQ ID NO: 893526 - DNA, 25 bp, Homo sapien
gagaagtatgacaaagtgagcaata

SEQ ID NO: 893527 - DNA, 25 bp, Homo sapien
gcattagtataaaattctatagggc

SEQ ID NO: 893528 - DNA, 25 bp, Homo sapien
cccacaattaaagcggagctggcca

SEQ ID NO: 893529 - DNA, 25 bp, Homo sapien
cactttcagccataaaagtaatgca

SEQ ID NO: 893530 - DNA, 25 bp, Homo sapien
gtgcaagacgggatacatgattttt

SEQ ID NO: 893531 - DNA, 25 bp, Homo sapien
aaatgtgcaagacgggatacatgat

SEQ ID NO: 893532 - DNA, 25 bp, Homo sapien
tgggtgttaaatcaccatggtgatc

SEQ ID NO: 893533 - DNA, 25 bp, Homo sapien
tttgtagggggtacctagagcattg

SEQ ID NO: 893534 - DNA, 25 bp, Homo sapien
gacacagggacggaagccaagcctg

SEQ ID NO: 893535 - DNA, 25 bp, Homo sapien
aactgaggggccatgtctaccctgc

SEQ ID NO: 893536 - DNA, 25 bp, Homo sapien
tgccctggtggtcaactgaggggcc

SEQ ID NO: 893537 - DNA, 25 bp, Homo sapien
tccaggctgaatcaagctgcccttg

SEQ ID NO: 893538 - DNA, 25 bp, Homo sapien
ttggagtgataagggacagacccgc

SEQ ID NO: 893539 - DNA, 25 bp, Homo sapien
gcctgcaggtgctttgaccataaag

SEQ ID NO: 893540 - DNA, 25 bp, Homo sapien
tgataagggacagacccgcctgcag

SEQ ID NO: 893541 - DNA, 25 bp, Homo sapien
ccgcctgcaggtgctttgaccataa

SEQ ID NO: 893542 - DNA, 25 bp, Homo sapien
ttttgccccgcacgatgcaactggt

SEQ ID NO: 893543 - DNA, 25 bp, Homo sapien
tcttcgggtgcctgggtgacttgac

SEQ ID NO: 893544 - DNA, 25 bp, Homo sapien
tggaagcctgcatccttcatggagc

SEQ ID NO: 893545 - DNA, 25 bp, Homo sapien
aaactgatcctttgctggcgtaccc

SEQ ID NO: 893546 - DNA, 25 bp, Homo sapien
tgctgtggaagctgatccgtgtggg

SEQ ID NO: 893547 - DNA, 25 bp, Homo sapien
tagggatggacatggcccgggccat

SEQ ID NO: 893548 - DNA, 25 bp, Homo sapien
cacacagcggccgtctgcttgatgc

SEQ ID NO: 893549 - DNA, 25 bp, Homo sapien
actcgaagggagtgatggtcctgcc

SEQ ID NO: 893550 - DNA, 25 bp, Homo sapien
gaagcttgactccacacctccttta

SEQ ID NO: 893551 - DNA, 25 bp, Homo sapien
tcatgacaaggaactgtctgcttcc

SEQ ID NO: 893552 - DNA, 25 bp, Homo sapien
tttctgctctcatgggtcgactgcc

SEQ ID NO: 893553 - DNA, 25 bp, Homo sapien
gatcatccagtttcctctggacaca

SEQ ID NO: 893554 - DNA, 25 bp, Homo sapien
tctccattgaagaagcagtagaaga

SEQ ID NO: 893555 - DNA, 25 bp, Homo sapien
catgatctgtgacaggtcgtcctcc

SEQ ID NO: 893556 - DNA, 25 bp, Homo sapien
ggagttgaaatagatgaacatgatc

SEQ ID NO: 893557 - DNA, 25 bp, Homo sapien
ctgtgacaggtcgtcctccccggga

SEQ ID NO: 893558 - DNA, 25 bp, Homo sapien
tgaacatgatctgtgacaggtcgtc

SEQ ID NO: 893559 - DNA, 25 bp, Homo sapien
agtgggcggcgggagacagtggtgg

SEQ ID NO: 893560 - DNA, 25 bp, Homo sapien
tcttccgggagcttgagcgagctcc

SEQ ID NO: 893561 - DNA, 25 bp, Homo sapien
tgtttcttccgggagcttgagcgag

SEQ ID NO: 893562 - DNA, 25 bp, Homo sapien
tccgggagcttgagcgagctccctg

SEQ ID NO: 893563 - DNA, 25 bp, Homo sapien
tgccaggaagcagggggacggcccg

SEQ ID NO: 893564 - DNA, 25 bp, Homo sapien
aggaagcagggggacggcccgatga

SEQ ID NO: 893565 - DNA, 25 bp, Homo sapien
ccaggaagcagggggacggcccgat

SEQ ID NO: 893566 - DNA, 25 bp, Homo sapien
gaagcagggggacggcccgatgacc

SEQ ID NO: 893567 - DNA, 25 bp, Homo sapien
tggtggacgcgcgtaactttgtcat

SEQ ID NO: 893568 - DNA, 25 bp, Homo sapien
tgtactggattgtctcggatgtggt

SEQ ID NO: 893569 - DNA, 25 bp, Homo sapien
tgttgaacagaaatacgaaattgat

SEQ ID NO: 893570 - DNA, 25 bp, Homo sapien
tgtcattaggatcctgacgatgttg

SEQ ID NO: 893571 - DNA, 25 bp, Homo sapien
tgcactgtcactggctctaggtcgg

SEQ ID NO: 893572 - DNA, 25 bp, Homo sapien
ctctaggtcggcctgaggtccttct

SEQ ID NO: 893573 - DNA, 25 bp, Homo sapien
cctgaggtccttctgactgaggaca

SEQ ID NO: 893574 - DNA, 25 bp, Homo sapien
ggctctctgagtcccttgcactgtc

SEQ ID NO: 893575 - DNA, 25 bp, Homo sapien
gaactccagagccttcgtaggcacc

SEQ ID NO: 893576 - DNA, 25 bp, Homo sapien
aggaactccagagccttcgtaggca

SEQ ID NO: 893577 - DNA, 25 bp, Homo sapien
cctgtgcccaggaactccagagcct

SEQ ID NO: 893578 - DNA, 25 bp, Homo sapien
gcccaggaactccagagccttcgta

SEQ ID NO: 893579 - DNA, 25 bp, Homo sapien
cattgtacagtgtcagaccgggagg

SEQ ID NO: 893580 - DNA, 25 bp, Homo sapien
ggcacaggaagtctacccatcagat

SEQ ID NO: 893581 - DNA, 25 bp, Homo sapien
gaatgcagcctctacttgaactctc

SEQ ID NO: 893582 - DNA, 25 bp, Homo sapien
cattatgctgcatcccggtattcac

SEQ ID NO: 893583 - DNA, 25 bp, Homo sapien
gggccttggtagatgtagtccacca

SEQ ID NO: 893584 - DNA, 25 bp, Homo sapien
tggggccttggtagatgtagtccac

SEQ ID NO: 893585 - DNA, 25 bp, Homo sapien
ggagcacgagaatgatggggccttg

SEQ ID NO: 893586 - DNA, 25 bp, Homo sapien
tgtagtccaccaggtcgccaggctc

SEQ ID NO: 893587 - DNA, 25 bp, Homo sapien
tctgatctccccagcccgactgagg

SEQ ID NO: 893588 - DNA, 25 bp, Homo sapien
cttttgctctacatggtgggtctga

SEQ ID NO: 893589 - DNA, 25 bp, Homo sapien
ataccagctccactgaccaccctta

SEQ ID NO: 893590 - DNA, 25 bp, Homo sapien
tcctgagacccaatctccaggactg

SEQ ID NO: 893591 - DNA, 25 bp, Homo sapien
tggcccagggccaattgccttaggc

SEQ ID NO: 893592 - DNA, 25 bp, Homo sapien
tgaaacccgctgttccgtgtgccag

SEQ ID NO: 893593 - DNA, 25 bp, Homo sapien
gctgccagaggcataattcattctc

SEQ ID NO: 893594 - DNA, 25 bp, Homo sapien
gattttgcgtctttgagccaatgct

SEQ ID NO: 893595 - DNA, 25 bp, Homo sapien
tgggcagcttttactcttacaagct

SEQ ID NO: 893596 - DNA, 25 bp, Homo sapien
ggtcatccagtgcagacctgcctca

SEQ ID NO: 893597 - DNA, 25 bp, Homo sapien
tttgacaggaagctcaccacctacc

SEQ ID NO: 893598 - DNA, 25 bp, Homo sapien
gcctcagataggattctccctgtct

SEQ ID NO: 893599 - DNA, 25 bp, Homo sapien
ccccatggctggcccatccacttac

SEQ ID NO: 893600 - DNA, 25 bp, Homo sapien
attctcatagtagagcttgccgatg

SEQ ID NO: 893601 - DNA, 25 bp, Homo sapien
tctcatagtagagcttgccgatggc

SEQ ID NO: 893602 - DNA, 25 bp, Homo sapien
tagagcttgccgatggcccaggcga

SEQ ID NO: 893603 - DNA, 25 bp, Homo sapien
catagtagagcttgccgatggccca

SEQ ID NO: 893604 - DNA, 25 bp, Homo sapien
cagggctgcgtgattttgtgataga

SEQ ID NO: 893605 - DNA, 25 bp, Homo sapien
gggtaccacaacagggctaggatca

SEQ ID NO: 893606 - DNA, 25 bp, Homo sapien
ggatcatgtttttactcttccaaca

SEQ ID NO: 893607 - DNA, 25 bp, Homo sapien
gactttcttgtaggacataccgtgg

SEQ ID NO: 893608 - DNA, 25 bp, Homo sapien
cagcatggagggaagtagctgcatc

SEQ ID NO: 893609 - DNA, 25 bp, Homo sapien
gagggaagtagctgcatccaccgga

SEQ ID NO: 893610 - DNA, 25 bp, Homo sapien
tggagggaagtagctgcatccaccg

SEQ ID NO: 893611 - DNA, 25 bp, Homo sapien
ggagggaagtagctgcatccaccgg

SEQ ID NO: 893612 - DNA, 25 bp, Homo sapien
ctggtccttggacccaagacgaagg

SEQ ID NO: 893613 - DNA, 25 bp, Homo sapien
tggtgagaagtcctccccccaacta

SEQ ID NO: 893614 - DNA, 25 bp, Homo sapien
ctggtgagaagtcctccccccaact

SEQ ID NO: 893615 - DNA, 25 bp, Homo sapien
acccaagacgaagggaaatggcctg

SEQ ID NO: 893616 - DNA, 25 bp, Homo sapien
tgacaatggccgtgtgcaggtagca

SEQ ID NO: 893617 - DNA, 25 bp, Homo sapien
tggtggtgatgcagcggcaccagac

SEQ ID NO: 893618 - DNA, 25 bp, Homo sapien
cgctcagtggagtaggtcatgacaa

SEQ ID NO: 893619 - DNA, 25 bp, Homo sapien
gaagaagttggtcaccacgaagtag

SEQ ID NO: 893620 - DNA, 25 bp, Homo sapien
atgacagcattctggccatgggtca

SEQ ID NO: 893621 - DNA, 25 bp, Homo sapien
gagccacagcccagatgacagcatt

SEQ ID NO: 893622 - DNA, 25 bp, Homo sapien
ccaaggagcagccagaaagtcagtt

SEQ ID NO: 893623 - DNA, 25 bp, Homo sapien
caaggagcagccagaaagtcagttg

SEQ ID NO: 893624 - DNA, 25 bp, Homo sapien
ggaaccacatgacatttcgcaggat

SEQ ID NO: 893625 - DNA, 25 bp, Homo sapien
catggtcaacgagctgcagcaggaa

SEQ ID NO: 893626 - DNA, 25 bp, Homo sapien
gtgaatcacattccgcagacagcga

SEQ ID NO: 893627 - DNA, 25 bp, Homo sapien
tggtgatgaggttccagtgaatcac

SEQ ID NO: 893628 - DNA, 25 bp, Homo sapien
ccacagatacgcagtggcccaggta

SEQ ID NO: 893629 - DNA, 25 bp, Homo sapien
agggctgccacagatacgcagtggc

SEQ ID NO: 893630 - DNA, 25 bp, Homo sapien
aagggcgatgcggtagtgcaggtca

SEQ ID NO: 893631 - DNA, 25 bp, Homo sapien
ccaggtagttgacgacaagggcgat

SEQ ID NO: 893632 - DNA, 25 bp, Homo sapien
tccaaaatgggctcacactgtgagt

SEQ ID NO: 893633 - DNA, 25 bp, Homo sapien
gtcccattctccaagcattctcgat

SEQ ID NO: 893634 - DNA, 25 bp, Homo sapien
tccaagcattctcgataggcattcc

SEQ ID NO: 893635 - DNA, 25 bp, Homo sapien
gagtagttgatctttgaggcccacg

SEQ ID NO: 893636 - DNA, 25 bp, Homo sapien
tacagtcctagtactaacagcatgg

SEQ ID NO: 893637 - DNA, 25 bp, Homo sapien
tcctgcattgcttggaggccactgc

SEQ ID NO: 893638 - DNA, 25 bp, Homo sapien
tgagcttcccaaacgaggtgcatct

SEQ ID NO: 893639 - DNA, 25 bp, Homo sapien
cactgcaggttaaggaggactgacc

SEQ ID NO: 893640 - DNA, 25 bp, Homo sapien
cagtctgaatcaggcatgctgatct

SEQ ID NO: 893641 - DNA, 25 bp, Homo sapien
gcccagtctgaatcaggcatgctga

SEQ ID NO: 893642 - DNA, 25 bp, Homo sapien
ttaatctccgggcccagtctgaatc

SEQ ID NO: 893643 - DNA, 25 bp, Homo sapien
cctggatggcccttaatctccgggc

SEQ ID NO: 893644 - DNA, 25 bp, Homo sapien
cttctcaggaggccggtgtagagca

SEQ ID NO: 893645 - DNA, 25 bp, Homo sapien
cgccttctcaggaggccggtgtaga

SEQ ID NO: 893646 - DNA, 25 bp, Homo sapien
aaccgccttctcaggaggccggtgt

SEQ ID NO: 893647 - DNA, 25 bp, Homo sapien
ccgccttctcaggaggccggtgtag

SEQ ID NO: 893648 - DNA, 25 bp, Homo sapien
ccaaggtcgtgttgcagtaggagta

SEQ ID NO: 893649 - DNA, 25 bp, Homo sapien
acttgacgccgttgaagtactcggg

SEQ ID NO: 893650 - DNA, 25 bp, Homo sapien
gggccagcacgttccgatctggtcc

SEQ ID NO: 893651 - DNA, 25 bp, Homo sapien
ggtcgtgttgtacttgacgccgttg

SEQ ID NO: 893652 - DNA, 25 bp, Homo sapien
ccccagccgtccaagagcagctctt

SEQ ID NO: 893653 - DNA, 25 bp, Homo sapien
ggcccccagccgtccaagagcagct

SEQ ID NO: 893654 - DNA, 25 bp, Homo sapien
ggctgtggagcagtgccgcgtccat

SEQ ID NO: 893655 - DNA, 25 bp, Homo sapien
tggcccccagccgtccaagagcagc

SEQ ID NO: 893656 - DNA, 25 bp, Homo sapien
agggagtgggagtgcgcgcccggcg

SEQ ID NO: 893657 - DNA, 25 bp, Homo sapien
gcgtcccgcagccgcgtgcggagag

SEQ ID NO: 893658 - DNA, 25 bp, Homo sapien
gggagtgggagtgcgcgcccggcgt

SEQ ID NO: 893659 - DNA, 25 bp, Homo sapien
ccgcagccgcgtgcggagagggagt

SEQ ID NO: 893660 - DNA, 25 bp, Homo sapien
gagtgagcggccgagagggcgcggg

SEQ ID NO: 893661 - DNA, 25 bp, Homo sapien
gatctcccgggcagcctttgggcgc

SEQ ID NO: 893662 - DNA, 25 bp, Homo sapien
gagtggacgcgagagtgagcggccg

SEQ ID NO: 893663 - DNA, 25 bp, Homo sapien
cgatctcccgggcagcctttgggcg

SEQ ID NO: 893664 - DNA, 25 bp, Homo sapien
tgtcttcaggccaaggctctcttcc

SEQ ID NO: 893665 - DNA, 25 bp, Homo sapien
caggtccctgtcttcaggccaaggc

SEQ ID NO: 893666 - DNA, 25 bp, Homo sapien
tcttcaggccaaggctctcttccca

SEQ ID NO: 893667 - DNA, 25 bp, Homo sapien
agctgaggaaagcccaggtccctgt

SEQ ID NO: 893668 - DNA, 25 bp, Homo sapien
atccattcggattcttggccaggtg

SEQ ID NO: 893669 - DNA, 25 bp, Homo sapien
tttgaatccattcggattcttggcc

SEQ ID NO: 893670 - DNA, 25 bp, Homo sapien
caaggtatctttgaatccattcgga

SEQ ID NO: 893671 - DNA, 25 bp, Homo sapien
tttcaaggtatctttgaatccattc

SEQ ID NO: 893672 - DNA, 25 bp, Homo sapien
ggaacattcccttgactattgcatt

SEQ ID NO: 893673 - DNA, 25 bp, Homo sapien
tagacatgatgcatttccccaagca

SEQ ID NO: 893674 - DNA, 25 bp, Homo sapien
ggttttgaactctgcgttagacatg

SEQ ID NO: 893675 - DNA, 25 bp, Homo sapien
tataataagcctaccacccaattgg

SEQ ID NO: 893676 - DNA, 25 bp, Homo sapien
tcccttttgcaaatggatgaatgct

SEQ ID NO: 893677 - DNA, 25 bp, Homo sapien
ggttgtgggagaatgagtacttatc

SEQ ID NO: 893678 - DNA, 25 bp, Homo sapien
tgttagaagctgaacaggcaaggct

SEQ ID NO: 893679 - DNA, 25 bp, Homo sapien
tagaaatcatgtggatcccttttgc

SEQ ID NO: 893680 - DNA, 25 bp, Homo sapien
ctatccgctgcactcagagcgggga

SEQ ID NO: 893681 - DNA, 25 bp, Homo sapien
gggaccatccgccaagggagacagg

SEQ ID NO: 893682 - DNA, 25 bp, Homo sapien
gctgcactcagagcggggaccatcc

SEQ ID NO: 893683 - DNA, 25 bp, Homo sapien
tcagagcggggaccatccgccaagg

SEQ ID NO: 893684 - DNA, 25 bp, Homo sapien
acacctgtagccacggcaaccagag

SEQ ID NO: 893685 - DNA, 25 bp, Homo sapien
cacctgtagccacggcaaccagaga

SEQ ID NO: 893686 - DNA, 25 bp, Homo sapien
agctgacttccatcgtgggagctgg

SEQ ID NO: 893687 - DNA, 25 bp, Homo sapien
ccagctgacttccatcgtgggagct

SEQ ID NO: 893688 - DNA, 25 bp, Homo sapien
gaatggggagtggcctcccagccaa

SEQ ID NO: 893689 - DNA, 25 bp, Homo sapien
agcccagctgacttccatcgtggga

SEQ ID NO: 893690 - DNA, 25 bp, Homo sapien
cagaagtgcccacaggggctggtct

SEQ ID NO: 893691 - DNA, 25 bp, Homo sapien
agaagtgcccacaggggctggtctt

SEQ ID NO: 893692 - DNA, 25 bp, Homo sapien
cttagaagaggcaaaggagaggccc

SEQ ID NO: 893693 - DNA, 25 bp, Homo sapien
tagaagaggcaaaggagaggccctg

SEQ ID NO: 893694 - DNA, 25 bp, Homo sapien
ttagaagaggcaaaggagaggccct

SEQ ID NO: 893695 - DNA, 25 bp, Homo sapien
agaagaggcaaaggagaggccctgg

SEQ ID NO: 893696 - DNA, 25 bp, Homo sapien
tggagcagccagcagaagcttcctc

SEQ ID NO: 893697 - DNA, 25 bp, Homo sapien
gcagccagcagaagcttcctccgtc

SEQ ID NO: 893698 - DNA, 25 bp, Homo sapien
ctggagcagccagcagaagcttcct

SEQ ID NO: 893699 - DNA, 25 bp, Homo sapien
gccagcagaagcttcctccgtctaa

SEQ ID NO: 893700 - DNA, 25 bp, Homo sapien
ggctgaggggcaacccttgccccaa

SEQ ID NO: 893701 - DNA, 25 bp, Homo sapien
aacacttggatctcctggaaggcac

SEQ ID NO: 893702 - DNA, 25 bp, Homo sapien
atggaccccagagggacgggctgag

SEQ ID NO: 893703 - DNA, 25 bp, Homo sapien
gcttgggcggctggcagcatggacc

SEQ ID NO: 893704 - DNA, 25 bp, Homo sapien
tgtccccatcgctcatctggtactg

SEQ ID NO: 893705 - DNA, 25 bp, Homo sapien
gactctggacaaaggcacggggtgt

SEQ ID NO: 893706 - DNA, 25 bp, Homo sapien
ttccatcggtggcccctgactctgg

SEQ ID NO: 893707 - DNA, 25 bp, Homo sapien
gctctgagtcttgagaaacccttgg

SEQ ID NO: 893708 - DNA, 25 bp, Homo sapien
ccaggcacgggatctccaattcatc

SEQ ID NO: 893709 - DNA, 25 bp, Homo sapien
caggcacgggatctccaattcatca

SEQ ID NO: 893710 - DNA, 25 bp, Homo sapien
tcagacacaaggatccccgatccag

SEQ ID NO: 893711 - DNA, 25 bp, Homo sapien
gggatctccaattcatcatcagaca

SEQ ID NO: 893712 - DNA, 25 bp, Homo sapien
tgtgggacgtagaggaggcctgggg

SEQ ID NO: 893713 - DNA, 25 bp, Homo sapien
gaggtgtgggacgtagaggaggcct

SEQ ID NO: 893714 - DNA, 25 bp, Homo sapien
aggaggtgtgggacgtagaggaggc

SEQ ID NO: 893715 - DNA, 25 bp, Homo sapien
ggaggaggtgtgggacgtagaggag

SEQ ID NO: 893716 - DNA, 25 bp, Homo sapien
ccttgggcatgaggaggtattctcc

SEQ ID NO: 893717 - DNA, 25 bp, Homo sapien
tgggcatgaggaggtattctccacc

SEQ ID NO: 893718 - DNA, 25 bp, Homo sapien
aggccttgggcatgaggaggtattc

SEQ ID NO: 893719 - DNA, 25 bp, Homo sapien
catgaggaggtattctccacccact

SEQ ID NO: 893720 - DNA, 25 bp, Homo sapien
ccgaagttatcaataatgctgaagg

SEQ ID NO: 893721 - DNA, 25 bp, Homo sapien
tcccaagatacaccgaagttatcaa

SEQ ID NO: 893722 - DNA, 25 bp, Homo sapien
gatacaccgaagttatcaataatgc

SEQ ID NO: 893723 - DNA, 25 bp, Homo sapien
cttcccaagatacaccgaagttatc

SEQ ID NO: 893724 - DNA, 25 bp, Homo sapien
ctggtcctcctgctgaatttcagag

SEQ ID NO: 893725 - DNA, 25 bp, Homo sapien
ggtcctcctgctgaatttcagagcc

SEQ ID NO: 893726 - DNA, 25 bp, Homo sapien
tcctcctgctgaatttcagagccca

SEQ ID NO: 893727 - DNA, 25 bp, Homo sapien
cctcctgctgaatttcagagcccat

SEQ ID NO: 893728 - DNA, 25 bp, Homo sapien
tcttcctggtcattgatgactgatc

SEQ ID NO: 893729 - DNA, 25 bp, Homo sapien
ttcttcctggtcattgatgactgat

SEQ ID NO: 893730 - DNA, 25 bp, Homo sapien
ttcctggtcattgatgactgatccc

SEQ ID NO: 893731 - DNA, 25 bp, Homo sapien
cctggtcattgatgactgatcccat

SEQ ID NO: 893732 - DNA, 25 bp, Homo sapien
ggtagtgaatgagctcatctgccca

SEQ ID NO: 893733 - DNA, 25 bp, Homo sapien
gctgggctcagggagtactcctggg

SEQ ID NO: 893734 - DNA, 25 bp, Homo sapien
gatggggactggtattgaagtactg

SEQ ID NO: 893735 - DNA, 25 bp, Homo sapien
aggatggggactggtattgaagtac

SEQ ID NO: 893736 - DNA, 25 bp, Homo sapien
gggactggtattgaagtactggtgg

SEQ ID NO: 893737 - DNA, 25 bp, Homo sapien
ggtggcaccacactgctgatgctcg

SEQ ID NO: 893738 - DNA, 25 bp, Homo sapien
tggcaccacactgctgatgctcgtc

SEQ ID NO: 893739 - DNA, 25 bp, Homo sapien
catggtggcaccacactgctgatgc

SEQ ID NO: 893740 - DNA, 25 bp, Homo sapien
tggtggcaccacactgctgatgctc

SEQ ID NO: 893741 - DNA, 25 bp, Homo sapien
tctgaaagccgaatggctggcctct

SEQ ID NO: 893742 - DNA, 25 bp, Homo sapien
ggctgtctgaaagccgaatggctgg

SEQ ID NO: 893743 - DNA, 25 bp, Homo sapien
tgcctttgctgccgcggtagaaaag

SEQ ID NO: 893744 - DNA, 25 bp, Homo sapien
tgctgccgcggtagaaaagatgact

SEQ ID NO: 893745 - DNA, 25 bp, Homo sapien
aagcaagcagttatgccttttgcgg

SEQ ID NO: 893746 - DNA, 25 bp, Homo sapien
aaagcaagcagttatgccttttgcg

SEQ ID NO: 893747 - DNA, 25 bp, Homo sapien
aggccacgttgccaccctctgcaca

SEQ ID NO: 893748 - DNA, 25 bp, Homo sapien
ctctgcacaggtgtcgagctcctca

SEQ ID NO: 893749 - DNA, 25 bp, Homo sapien
caccctctgcacaggtgtcgagctc

SEQ ID NO: 893750 - DNA, 25 bp, Homo sapien
tgcacaggtgtcgagctcctcaggc

SEQ ID NO: 893751 - DNA, 25 bp, Homo sapien
gggggatgccggcagaatgcaagct

SEQ ID NO: 893752 - DNA, 25 bp, Homo sapien
ccggcagaatgcaagctctcctgct

SEQ ID NO: 893753 - DNA, 25 bp, Homo sapien
gatgccggcagaatgcaagctctcc

SEQ ID NO: 893754 - DNA, 25 bp, Homo sapien
ccagggggatgccggcagaatgcaa

SEQ ID NO: 893755 - DNA, 25 bp, Homo sapien
gcagccacaaagcagatgccgtcgt

SEQ ID NO: 893756 - DNA, 25 bp, Homo sapien
cgttgatggagcatgtctcagagca

SEQ ID NO: 893757 - DNA, 25 bp, Homo sapien
gactgtagatgctctggtcatgact

SEQ ID NO: 893758 - DNA, 25 bp, Homo sapien
gggcaagactgtagatgctctggtc

SEQ ID NO: 893759 - DNA, 25 bp, Homo sapien
ctaccatatagtgggagtgcagggc

SEQ ID NO: 893760 - DNA, 25 bp, Homo sapien
ttggagcctaccatatagtgggagt

SEQ ID NO: 893761 - DNA, 25 bp, Homo sapien
ccagtacatgtccacatcaggacag

SEQ ID NO: 893762 - DNA, 25 bp, Homo sapien
tacatgtccacatcaggacaggcac

SEQ ID NO: 893763 - DNA, 25 bp, Homo sapien
ccccagtggatgcagcttggtcata

SEQ ID NO: 893764 - DNA, 25 bp, Homo sapien
acacctggattgaccccagtggatg

SEQ ID NO: 893765 - DNA, 25 bp, Homo sapien
ggtcatatcgcacttcagcaaccac

SEQ ID NO: 893766 - DNA, 25 bp, Homo sapien
cagcaaccacgtgactgtccagcaa

SEQ ID NO: 893767 - DNA, 25 bp, Homo sapien
aataaaattagatgtctacccagtt

SEQ ID NO: 893768 - DNA, 25 bp, Homo sapien
aattaacagagctcatactctgtgg

SEQ ID NO: 893769 - DNA, 25 bp, Homo sapien
aaaattagctgaatgggatggcgtg

SEQ ID NO: 893770 - DNA, 25 bp, Homo sapien
tttcagttcagtgagaaaagtgtca

SEQ ID NO: 893771 - DNA, 25 bp, Homo sapien
tccccagaactgcatggaacatgct

SEQ ID NO: 893772 - DNA, 25 bp, Homo sapien
aaagcactgatgtgtggtagtcacc

SEQ ID NO: 893773 - DNA, 25 bp, Homo sapien
tggagtcagctggaacataccactg

SEQ ID NO: 893774 - DNA, 25 bp, Homo sapien
ggcaaccctacttcagacccaggtg

SEQ ID NO: 893775 - DNA, 25 bp, Homo sapien
ttttgggtagacttgatttcagact

SEQ ID NO: 893776 - DNA, 25 bp, Homo sapien
gtcttgctcttcatgttacagatcc

SEQ ID NO: 893777 - DNA, 25 bp, Homo sapien
cacagatgtcactaaccaacatatg

SEQ ID NO: 893778 - DNA, 25 bp, Homo sapien
tcctgtattcacttaaagcctccat

SEQ ID NO: 893779 - DNA, 25 bp, Homo sapien
tctttaagtcgtctggaatgttgcc

SEQ ID NO: 893780 - DNA, 25 bp, Homo sapien
tcttcactgtacctatacttggaca

SEQ ID NO: 893781 - DNA, 25 bp, Homo sapien
ttctcagacctctcatggcacatgt

SEQ ID NO: 893782 - DNA, 25 bp, Homo sapien
tggcacatgtcacgctggagagagt

SEQ ID NO: 893783 - DNA, 25 bp, Homo sapien
tgcagcaggtctgagaaaggtgact

SEQ ID NO: 893784 - DNA, 25 bp, Homo sapien
ccctgccgggaaggcaagtgggctc

SEQ ID NO: 893785 - DNA, 25 bp, Homo sapien
aaaggtgactggcagcagggcccct

SEQ ID NO: 893786 - DNA, 25 bp, Homo sapien
ggatgtgccagaggggtaaggagcc

SEQ ID NO: 893787 - DNA, 25 bp, Homo sapien
aaaagctccagatacctttggtcag

SEQ ID NO: 893788 - DNA, 25 bp, Homo sapien
gagattgcccagaatgggtccagct

SEQ ID NO: 893789 - DNA, 25 bp, Homo sapien
cctggcgtctgccttgcttgggcca

SEQ ID NO: 893790 - DNA, 25 bp, Homo sapien
tgaggctcaacatgacatttccaac

SEQ ID NO: 893791 - DNA, 25 bp, Homo sapien
ggtttgctacccaaggaccctcaca

SEQ ID NO: 893792 - DNA, 25 bp, Homo sapien
gcagaggcaagaggccgtaacccca

SEQ ID NO: 893793 - DNA, 25 bp, Homo sapien
gaggcaagaggccgtaaccccagag

SEQ ID NO: 893794 - DNA, 25 bp, Homo sapien
gtttgctacccaaggaccctcacaa

SEQ ID NO: 893795 - DNA, 25 bp, Homo sapien
gagctgacttcagccgtgcccagga

SEQ ID NO: 893796 - DNA, 25 bp, Homo sapien
gacttcagccgtgcccaggaaacca

SEQ ID NO: 893797 - DNA, 25 bp, Homo sapien
tggagctgacttcagccgtgcccag

SEQ ID NO: 893798 - DNA, 25 bp, Homo sapien
ctgacttcagccgtgcccaggaaac

SEQ ID NO: 893799 - DNA, 25 bp, Homo sapien
ggcgatccctatctttgtccacctt

SEQ ID NO: 893800 - DNA, 25 bp, Homo sapien
gggcgatccctatctttgtccacct

SEQ ID NO: 893801 - DNA, 25 bp, Homo sapien
tgggcgatccctatctttgtccacc

SEQ ID NO: 893802 - DNA, 25 bp, Homo sapien
gaccctttcccatataaatgattac

SEQ ID NO: 893803 - DNA, 25 bp, Homo sapien
tatcaccattgttatatgcccatta

SEQ ID NO: 893804 - DNA, 25 bp, Homo sapien
cattggagtgtgtaaaatgatgatt

SEQ ID NO: 893805 - DNA, 25 bp, Homo sapien
ttgacggtattctgtagaaaagagc

SEQ ID NO: 893806 - DNA, 25 bp, Homo sapien
tgcgtgacaccacgctcaactaatt

SEQ ID NO: 893807 - DNA, 25 bp, Homo sapien
aagccaaggattcagttattcagag

SEQ ID NO: 893808 - DNA, 25 bp, Homo sapien
tgcttcttctctgttattatgtgag

SEQ ID NO: 893809 - DNA, 25 bp, Homo sapien
ttattatgtgagagtggctctttcc

SEQ ID NO: 893810 - DNA, 25 bp, Homo sapien
aggctgtgccggcttggctcacaga

SEQ ID NO: 893811 - DNA, 25 bp, Homo sapien
ccggcctctcctcagtcgggaagga

SEQ ID NO: 893812 - DNA, 25 bp, Homo sapien
gccggcctctcctcagtcgggaagg

SEQ ID NO: 893813 - DNA, 25 bp, Homo sapien
gaagaggctgtgccggcttggctca

SEQ ID NO: 893814 - DNA, 25 bp, Homo sapien
tcctttttctgataagctctgcttt

SEQ ID NO: 893815 - DNA, 25 bp, Homo sapien
cagggcccccttagtccttggtgtg

SEQ ID NO: 893816 - DNA, 25 bp, Homo sapien
catggtggttttcatagtgaaccgt

SEQ ID NO: 893817 - DNA, 25 bp, Homo sapien
gagcaatgttttctcatggtggttt

SEQ ID NO: 893818 - DNA, 25 bp, Homo sapien
ggtggttttcatagtgaaccgtgac

SEQ ID NO: 893819 - DNA, 25 bp, Homo sapien
agcaatgttttctcatggtggtttt

SEQ ID NO: 893820 - DNA, 25 bp, Homo sapien
gcatccggttcggtgaatgcttggt

SEQ ID NO: 893821 - DNA, 25 bp, Homo sapien
gggcatccggttcggtgaatgcttg

SEQ ID NO: 893822 - DNA, 25 bp, Homo sapien
atccggttcggtgaatgcttggtaa

SEQ ID NO: 893823 - DNA, 25 bp, Homo sapien
tggggcatccggttcggtgaatgct

SEQ ID NO: 893824 - DNA, 25 bp, Homo sapien
aagtgtcaggcagtagctgttttat

SEQ ID NO: 893825 - DNA, 25 bp, Homo sapien
agaagtgtcaggcagtagctgtttt

SEQ ID NO: 893826 - DNA, 25 bp, Homo sapien
gaagtgtcaggcagtagctgtttta

SEQ ID NO: 893827 - DNA, 25 bp, Homo sapien
cacagcagcctaggtgtaggtcact

SEQ ID NO: 893828 - DNA, 25 bp, Homo sapien
ttaaagtaattggaccacagcagcc

SEQ ID NO: 893829 - DNA, 25 bp, Homo sapien
cctaggtgtaggtcactggctatgt

SEQ ID NO: 893830 - DNA, 25 bp, Homo sapien
taggtcactggctatgtgtcccagg

SEQ ID NO: 893831 - DNA, 25 bp, Homo sapien
tcctggccctcgcagacattgtgtg

SEQ ID NO: 893832 - DNA, 25 bp, Homo sapien
gagagagagccgttgttgcactgta

SEQ ID NO: 893833 - DNA, 25 bp, Homo sapien
aagtggttccgaggtctgtgttgcc

SEQ ID NO: 893834 - DNA, 25 bp, Homo sapien
tgttgccgtggctcatcgtctgctg

SEQ ID NO: 893835 - DNA, 25 bp, Homo sapien
gctgctctctgacgcagggacattc

SEQ ID NO: 893836 - DNA, 25 bp, Homo sapien
ctctctgacgcagggacattcccaa

SEQ ID NO: 893837 - DNA, 25 bp, Homo sapien
atacaggtatggccgtgcctctcag

SEQ ID NO: 893838 - DNA, 25 bp, Homo sapien
agatgctgctctctgacgcagggac

SEQ ID NO: 893839 - DNA, 25 bp, Homo sapien
atttcactgtgggaacaatgctgtg

SEQ ID NO: 893840 - DNA, 25 bp, Homo sapien
tactcctgtgggatgtgcgtcacta

SEQ ID NO: 893841 - DNA, 25 bp, Homo sapien
cttcaacaaagcattcatcaggtat

SEQ ID NO: 893842 - DNA, 25 bp, Homo sapien
tcatcaggtatgaagcatgccttac

SEQ ID NO: 893843 - DNA, 25 bp, Homo sapien
gatgtgggatccattctttttggcc

SEQ ID NO: 893844 - DNA, 25 bp, Homo sapien
tggatgtgggatccattctttttgg

SEQ ID NO: 893845 - DNA, 25 bp, Homo sapien
ggtggtaagccggagagtgggagaa

SEQ ID NO: 893846 - DNA, 25 bp, Homo sapien
gtaagccggagagtgggagaacttg

SEQ ID NO: 893847 - DNA, 25 bp, Homo sapien
tgccttccgcagaactttcccaaag

SEQ ID NO: 893848 - DNA, 25 bp, Homo sapien
aatgggaccaggactaaagctcctg

SEQ ID NO: 893849 - DNA, 25 bp, Homo sapien
ctgggaaatgatcaggccctggcag

SEQ ID NO: 893850 - DNA, 25 bp, Homo sapien
tggcagcaccagatgtcccttgggt

SEQ ID NO: 893851 - DNA, 25 bp, Homo sapien
gtgcatggagaccataagctgcacc

SEQ ID NO: 893852 - DNA, 25 bp, Homo sapien
catggagaccataagctgcaccacc

SEQ ID NO: 893853 - DNA, 25 bp, Homo sapien
tggagaccataagctgcaccacctt

SEQ ID NO: 893854 - DNA, 25 bp, Homo sapien
tgcatggagaccataagctgcacca

SEQ ID NO: 893855 - DNA, 25 bp, Homo sapien
ggttgggtgggagtctccagatctc

SEQ ID NO: 893856 - DNA, 25 bp, Homo sapien
gggaagctgcactctcaggagggcc

SEQ ID NO: 893857 - DNA, 25 bp, Homo sapien
ggaagctgcactctcaggagggcca

SEQ ID NO: 893858 - DNA, 25 bp, Homo sapien
cttgccaggtgtgtagcttgagtca

SEQ ID NO: 893859 - DNA, 25 bp, Homo sapien
cagagctagaactcatacttgggct

SEQ ID NO: 893860 - DNA, 25 bp, Homo sapien
gccacgtagcaagacaacagcagaa

SEQ ID NO: 893861 - DNA, 25 bp, Homo sapien
tagttattggtactgcaccatggtc

SEQ ID NO: 893862 - DNA, 25 bp, Homo sapien
actgcgcctggccccttccctcttc

SEQ ID NO: 893863 - DNA, 25 bp, Homo sapien
tgcgcctggccccttccctcttctt

SEQ ID NO: 893864 - DNA, 25 bp, Homo sapien
ctgcgcctggccccttccctcttct

SEQ ID NO: 893865 - DNA, 25 bp, Homo sapien
ggtgggctggagcagtcgaaagctt

SEQ ID NO: 893866 - DNA, 25 bp, Homo sapien
tggagcagtcgaaagcttcttgaag

SEQ ID NO: 893867 - DNA, 25 bp, Homo sapien
gggctggagcagtcgaaagcttctt

SEQ ID NO: 893868 - DNA, 25 bp, Homo sapien
tggagctcagatgaggggaatcctc

SEQ ID NO: 893869 - DNA, 25 bp, Homo sapien
cctggacctgtggatcagaggcgca

SEQ ID NO: 893870 - DNA, 25 bp, Homo sapien
gaggcgcaagtctgtctgccattcc

SEQ ID NO: 893871 - DNA, 25 bp, Homo sapien
ctctcttggttttggggatccttgc

SEQ ID NO: 893872 - DNA, 25 bp, Homo sapien
ttggggatccttgctgcccctaccg

SEQ ID NO: 893873 - DNA, 25 bp, Homo sapien
aagtcgtttgggtcctgcacgttgc

SEQ ID NO: 893874 - DNA, 25 bp, Homo sapien
gtcctgcacgttgctgtctccacaa

SEQ ID NO: 893875 - DNA, 25 bp, Homo sapien
cgtttgggtcctgcacgttgctgtc

SEQ ID NO: 893876 - DNA, 25 bp, Homo sapien
ttctggaaagtcgtttgggtcctgc

SEQ ID NO: 893877 - DNA, 25 bp, Homo sapien
gcctgaggccgtgatgatgcccaag

SEQ ID NO: 893878 - DNA, 25 bp, Homo sapien
ctgcctgaggccgtgatgatgccca

SEQ ID NO: 893879 - DNA, 25 bp, Homo sapien
ggggtggcctgtcatagggataaac

SEQ ID NO: 893880 - DNA, 25 bp, Homo sapien
cttggggtggcctgtcatagggata

SEQ ID NO: 893881 - DNA, 25 bp, Homo sapien
ctgggtgctcccgaggcagagcctg

SEQ ID NO: 893882 - DNA, 25 bp, Homo sapien
tgggtgctcccgaggcagagcctgt

SEQ ID NO: 893883 - DNA, 25 bp, Homo sapien
gggtgctcccgaggcagagcctgtc

SEQ ID NO: 893884 - DNA, 25 bp, Homo sapien
cctgggtgctcccgaggcagagcct

SEQ ID NO: 893885 - DNA, 25 bp, Homo sapien
gcagatcctgctgctgtgatgttcc

SEQ ID NO: 893886 - DNA, 25 bp, Homo sapien
tcctgctgctgtgatgttccaacgc

SEQ ID NO: 893887 - DNA, 25 bp, Homo sapien
gatcctgctgctgtgatgttccaac

SEQ ID NO: 893888 - DNA, 25 bp, Homo sapien
ctatggggttgtaatggcctgcaga

SEQ ID NO: 893889 - DNA, 25 bp, Homo sapien
cttgtgaggtggcttcccaggacct

SEQ ID NO: 893890 - DNA, 25 bp, Homo sapien
gggcttgtgaggtggcttcccagga

SEQ ID NO: 893891 - DNA, 25 bp, Homo sapien
catggggggcttgtgaggtggcttc

SEQ ID NO: 893892 - DNA, 25 bp, Homo sapien
aggatgtggcatggggggcttgtga

SEQ ID NO: 893893 - DNA, 25 bp, Homo sapien
ggcaggtcccgttcagctttgaaca

SEQ ID NO: 893894 - DNA, 25 bp, Homo sapien
cagatggcaggtcccgttcagcttt

SEQ ID NO: 893895 - DNA, 25 bp, Homo sapien
ggcagatggcaggtcccgttcagct

SEQ ID NO: 893896 - DNA, 25 bp, Homo sapien
tggcaggtcccgttcagctttgaac

SEQ ID NO: 893897 - DNA, 25 bp, Homo sapien
tcacctgcgcaagtgcctgggattc

SEQ ID NO: 893898 - DNA, 25 bp, Homo sapien
cagcatgggtccagaagacgtggtc

SEQ ID NO: 893899 - DNA, 25 bp, Homo sapien
gaatcgtccctatatcagggcctga

SEQ ID NO: 893900 - DNA, 25 bp, Homo sapien
tactgcctgaccttggaatcgtccc

SEQ ID NO: 893901 - DNA, 25 bp, Homo sapien
tagttgcagcccaaggacagttcag

SEQ ID NO: 893902 - DNA, 25 bp, Homo sapien
tgcacaggcttgctgtatgacccct

SEQ ID NO: 893903 - DNA, 25 bp, Homo sapien
gtcagccttgacctaatgaggtagc

SEQ ID NO: 893904 - DNA, 25 bp, Homo sapien
cttcccttgctcatgagctcctgat

SEQ ID NO: 893905 - DNA, 25 bp, Homo sapien
ggctggtgtccgtgccaagctcctg

SEQ ID NO: 893906 - DNA, 25 bp, Homo sapien
tccttctattgtgctggaaccagct

SEQ ID NO: 893907 - DNA, 25 bp, Homo sapien
gaacgaagcctccatgaatcattga

SEQ ID NO: 893908 - DNA, 25 bp, Homo sapien
ccctgctggggtagcttgtacagga

SEQ ID NO: 893909 - DNA, 25 bp, Homo sapien
gtccttgctctgagcaccgccatcc

SEQ ID NO: 893910 - DNA, 25 bp, Homo sapien
tccttgctctgagcaccgccatccc

SEQ ID NO: 893911 - DNA, 25 bp, Homo sapien
ccttgatttcttcccggccactgtt

SEQ ID NO: 893912 - DNA, 25 bp, Homo sapien
cccttgatttcttcccggccactgt

SEQ ID NO: 893913 - DNA, 25 bp, Homo sapien
cttgatttcttcccggccactgttt

SEQ ID NO: 893914 - DNA, 25 bp, Homo sapien
tgatttcttcccggccactgtttcc

SEQ ID NO: 893915 - DNA, 25 bp, Homo sapien
cttcagcctgcgcatgcctggcgcc

SEQ ID NO: 893916 - DNA, 25 bp, Homo sapien
gggcacccttcagcctgcgcatgcc

SEQ ID NO: 893917 - DNA, 25 bp, Homo sapien
acccttcagcctgcgcatgcctggc

SEQ ID NO: 893918 - DNA, 25 bp, Homo sapien
tcagcctgcgcatgcctggcgccat

SEQ ID NO: 893919 - DNA, 25 bp, Homo sapien
gatgtctgaggacgtctcaccaggg

SEQ ID NO: 893920 - DNA, 25 bp, Homo sapien
tgcctgcctgagctgacgctggaga

SEQ ID NO: 893921 - DNA, 25 bp, Homo sapien
gaagcgcaatgatcatcctggccac

SEQ ID NO: 893922 - DNA, 25 bp, Homo sapien
caacgagctaggctgagaagcgcaa

SEQ ID NO: 893923 - DNA, 25 bp, Homo sapien
gaggagagtttcctaaagagaagga

SEQ ID NO: 893924 - DNA, 25 bp, Homo sapien
agaggagagtttcctaaagagaagg

SEQ ID NO: 893925 - DNA, 25 bp, Homo sapien
aaactcggacttccctcctgttatg

SEQ ID NO: 893926 - DNA, 25 bp, Homo sapien
gggttttgccccaaaggctgaggca

SEQ ID NO: 893927 - DNA, 25 bp, Homo sapien
tgggttttgccccaaaggctgaggc

SEQ ID NO: 893928 - DNA, 25 bp, Homo sapien
ggttttgccccaaaggctgaggcac

SEQ ID NO: 893929 - DNA, 25 bp, Homo sapien
tggaagggagtggagtattcggtgc

SEQ ID NO: 893930 - DNA, 25 bp, Homo sapien
gtcagagagcatttgtgcaatgcca

SEQ ID NO: 893931 - DNA, 25 bp, Homo sapien
cttgtaggtgtttgtcagagagcat

SEQ ID NO: 893932 - DNA, 25 bp, Homo sapien
gagtattcggtgctagggctgggtg

SEQ ID NO: 893933 - DNA, 25 bp, Homo sapien
gagccacgggccatgctggtgccat

SEQ ID NO: 893934 - DNA, 25 bp, Homo sapien
cagagccacgggccatgctggtgcc

SEQ ID NO: 893935 - DNA, 25 bp, Homo sapien
acgcccagcagagccacgggccatg

SEQ ID NO: 893936 - DNA, 25 bp, Homo sapien
cagcagagccacgggccatgctggt

SEQ ID NO: 893937 - DNA, 25 bp, Homo sapien
caattcacaatagcggtctggtggc

SEQ ID NO: 893938 - DNA, 25 bp, Homo sapien
ccattcaattcacaatagcggtctg

SEQ ID NO: 893939 - DNA, 25 bp, Homo sapien
tcacaatagcggtctggtggcagac

SEQ ID NO: 893940 - DNA, 25 bp, Homo sapien
atagcggtctggtggcagacaccac

SEQ ID NO: 893941 - DNA, 25 bp, Homo sapien
ttgttccgtttgttcagcagtgcct

SEQ ID NO: 893942 - DNA, 25 bp, Homo sapien
ttctccatggtgcttactactaaaa

SEQ ID NO: 893943 - DNA, 25 bp, Homo sapien
tactaaaatgccacataacttgttt

SEQ ID NO: 893944 - DNA, 25 bp, Homo sapien
gttccgtttgttcagcagtgcctag

SEQ ID NO: 893945 - DNA, 25 bp, Homo sapien
catagctccaatgacagggtgccca

SEQ ID NO: 893946 - DNA, 25 bp, Homo sapien
cttgtctatacagagggctcctgac

SEQ ID NO: 893947 - DNA, 25 bp, Homo sapien
gggtgcccactaccagtctgtgctt

SEQ ID NO: 893948 - DNA, 25 bp, Homo sapien
aattgaccaagtttggcagggccgg

SEQ ID NO: 893949 - DNA, 25 bp, Homo sapien
gcagttctgagtaattggggaccaa

SEQ ID NO: 893950 - DNA, 25 bp, Homo sapien
tcctcctcagccatcaggtggtaaa

SEQ ID NO: 893951 - DNA, 25 bp, Homo sapien
gagtcctttgcctgccgatattaaa

SEQ ID NO: 893952 - DNA, 25 bp, Homo sapien
taattgtgcagaagatagatcctcc

SEQ ID NO: 893953 - DNA, 25 bp, Homo sapien
aaccacagctatttgatacaccaag

SEQ ID NO: 893954 - DNA, 25 bp, Homo sapien
cctttgtgatgattgagtgtaaccc

SEQ ID NO: 893955 - DNA, 25 bp, Homo sapien
ggggaccacatggtttcccagccag

SEQ ID NO: 893956 - DNA, 25 bp, Homo sapien
atgacagatgacaagcatcttgatt

SEQ ID NO: 893957 - DNA, 25 bp, Homo sapien
aggagtacttgacaccaggtgatgc

SEQ ID NO: 893958 - DNA, 25 bp, Homo sapien
tacttgacaccaggtgatgctctgg

SEQ ID NO: 893959 - DNA, 25 bp, Homo sapien
caggaggagcagctgaccattcagg

SEQ ID NO: 893960 - DNA, 25 bp, Homo sapien
caccaggtgatgctctggactttct

SEQ ID NO: 893961 - DNA, 25 bp, Homo sapien
gagaaaggcgggtgatgagcagcac

SEQ ID NO: 893962 - DNA, 25 bp, Homo sapien
aaggcccgagagcagccatcagtcc

SEQ ID NO: 893963 - DNA, 25 bp, Homo sapien
cttccgaatcaaagggtgtcagcaa

SEQ ID NO: 893964 - DNA, 25 bp, Homo sapien
aagagaatagcttccgaatcaaagg

SEQ ID NO: 893965 - DNA, 25 bp, Homo sapien
gccatcgaatggagcagaacctgaa

SEQ ID NO: 893966 - DNA, 25 bp, Homo sapien
tcgaatggagcagaacctgaattgc

SEQ ID NO: 893967 - DNA, 25 bp, Homo sapien
gaacctgaattgctgtatatagcag

SEQ ID NO: 893968 - DNA, 25 bp, Homo sapien
tccctagggtgccatcgaatggagc

SEQ ID NO: 893969 - DNA, 25 bp, Homo sapien
agcctctgtgcgttccctgtcacta

SEQ ID NO: 893970 - DNA, 25 bp, Homo sapien
gcctctgtgcgttccctgtcactaa

SEQ ID NO: 893971 - DNA, 25 bp, Homo sapien
catcagcagcttgccttcaaccaca

SEQ ID NO: 893972 - DNA, 25 bp, Homo sapien
cacactgcccgcagaaccaagtgct

SEQ ID NO: 893973 - DNA, 25 bp, Homo sapien
ggagcagaggattggagctccgaga

SEQ ID NO: 893974 - DNA, 25 bp, Homo sapien
cagaggattggagctccgagagggt

SEQ ID NO: 893975 - DNA, 25 bp, Homo sapien
gagaagtgaacatggggtcaggtgg

SEQ ID NO: 893976 - DNA, 25 bp, Homo sapien
aggattggagctccgagagggtcca

SEQ ID NO: 893977 - DNA, 25 bp, Homo sapien
aggggagctcttttcccaccgccat

SEQ ID NO: 893978 - DNA, 25 bp, Homo sapien
agctataggaacagcaggagggacc

SEQ ID NO: 893979 - DNA, 25 bp, Homo sapien
catgcttgccgtggccctgcgttaa

SEQ ID NO: 893980 - DNA, 25 bp, Homo sapien
tccatgcttgccgtggccctgcgtt

SEQ ID NO: 893981 - DNA, 25 bp, Homo sapien
aggctccaggaagctataggaacag

SEQ ID NO: 893982 - DNA, 25 bp, Homo sapien
tctccccttgcgtgtcctcacccat

SEQ ID NO: 893983 - DNA, 25 bp, Homo sapien
ttctccccttgcgtgtcctcaccca

SEQ ID NO: 893984 - DNA, 25 bp, Homo sapien
ccttctccccttgcgtgtcctcacc

SEQ ID NO: 893985 - DNA, 25 bp, Homo sapien
cttctccccttgcgtgtcctcaccc

SEQ ID NO: 893986 - DNA, 25 bp, Homo sapien
cgcggacttgcaggctgcgcgtcct

SEQ ID NO: 893987 - DNA, 25 bp, Homo sapien
aggctgcgcgtcctttgcggagtct

SEQ ID NO: 893988 - DNA, 25 bp, Homo sapien
gacttgcaggctgcgcgtcctttgc

SEQ ID NO: 893989 - DNA, 25 bp, Homo sapien
gcgggccgcggacttgcaggctgcg

SEQ ID NO: 893990 - DNA, 25 bp, Homo sapien
ggagaggctgaagcttaaccagcgt

SEQ ID NO: 893991 - DNA, 25 bp, Homo sapien
gtgctgtgggcacacgcacgtcaga

SEQ ID NO: 893992 - DNA, 25 bp, Homo sapien
actcgtgtgtcttgcctgtgccagg

SEQ ID NO: 893993 - DNA, 25 bp, Homo sapien
ggcgctcatccaggttttctgggca

SEQ ID NO: 893994 - DNA, 25 bp, Homo sapien
cagccttctgtcccttgttcctggc

SEQ ID NO: 893995 - DNA, 25 bp, Homo sapien
tcagccttctgtcccttgttcctgg

SEQ ID NO: 893996 - DNA, 25 bp, Homo sapien
agccttctgtcccttgttcctggcc

SEQ ID NO: 893997 - DNA, 25 bp, Homo sapien
tcagtccaccgcagctacagctgag

SEQ ID NO: 893998 - DNA, 25 bp, Homo sapien
ctagtaagcagcctggcgatgaagc

SEQ ID NO: 893999 - DNA, 25 bp, Homo sapien
ttgtcttcagtccaccgcagctaca

SEQ ID NO: 894000 - DNA, 25 bp, Homo sapien
tctcctagtaagcagcctggcgatg

SEQ ID NO: 894001 - DNA, 25 bp, Homo sapien
tccacggccgttccacggtcaacat

SEQ ID NO: 894002 - DNA, 25 bp, Homo sapien
ctgtgcctgagcctaatgttctcca

SEQ ID NO: 894003 - DNA, 25 bp, Homo sapien
tgttctccattaagggaacatctgt

SEQ ID NO: 894004 - DNA, 25 bp, Homo sapien
gctgctgtagccaaagatgtgctat

SEQ ID NO: 894005 - DNA, 25 bp, Homo sapien
aatagcactcaagcgtcacagaccc

SEQ ID NO: 894006 - DNA, 25 bp, Homo sapien
ggtccaaatagcactcaagcgtcac

SEQ ID NO: 894007 - DNA, 25 bp, Homo sapien
tccaaatagcactcaagcgtcacag

SEQ ID NO: 894008 - DNA, 25 bp, Homo sapien
ctggtccaaatagcactcaagcgtc

SEQ ID NO: 894009 - DNA, 25 bp, Homo sapien
tgcatgtggtcctatttcttcaact

SEQ ID NO: 894010 - DNA, 25 bp, Homo sapien
tctttcctccacaggccctcggggc

SEQ ID NO: 894011 - DNA, 25 bp, Homo sapien
catgtggtcctatttcttcaactcc

SEQ ID NO: 894012 - DNA, 25 bp, Homo sapien
caggcggacacattctcactggtct

SEQ ID NO: 894013 - DNA, 25 bp, Homo sapien
ttccaagaagtatttctgcagtcat

SEQ ID NO: 894014 - DNA, 25 bp, Homo sapien
gagcgtagggctttctccacttcca

SEQ ID NO: 894015 - DNA, 25 bp, Homo sapien
catagagcgtagggctttctccact

SEQ ID NO: 894016 - DNA, 25 bp, Homo sapien
acttccatggccacttgatttccaa

SEQ ID NO: 894017 - DNA, 25 bp, Homo sapien
actcgcctggcatcttggtgtccgg

SEQ ID NO: 894018 - DNA, 25 bp, Homo sapien
tccaaaaggagctgagagccagaaa

SEQ ID NO: 894019 - DNA, 25 bp, Homo sapien
aagagacggagtttgggagacccat

SEQ ID NO: 894020 - DNA, 25 bp, Homo sapien
ggtggccagaacaccccttggtgca

SEQ ID NO: 894021 - DNA, 25 bp, Homo sapien
cagtacgcatgtaaccttgcacagg

SEQ ID NO: 894022 - DNA, 25 bp, Homo sapien
gcccagggaccatggaagtcagcta

SEQ ID NO: 894023 - DNA, 25 bp, Homo sapien
caaggagcaaggacttgggcttctc

SEQ ID NO: 894024 - DNA, 25 bp, Homo sapien
gatgagaaaatacacgcaggcctag

SEQ ID NO: 894025 - DNA, 25 bp, Homo sapien
taaatgcactaaagtacagagacca

SEQ ID NO: 894026 - DNA, 25 bp, Homo sapien
tcagagaacgtggtagggatcctca

SEQ ID NO: 894027 - DNA, 25 bp, Homo sapien
tatggactttcctagggactgatgg

SEQ ID NO: 894028 - DNA, 25 bp, Homo sapien
gatgaatcagacaacaagggaggca

SEQ ID NO: 894029 - DNA, 25 bp, Homo sapien
gtacgtcggatcctcttcaatcagg

SEQ ID NO: 894030 - DNA, 25 bp, Homo sapien
gactggtcagccttctcatcgcata

SEQ ID NO: 894031 - DNA, 25 bp, Homo sapien
caagatcatagtagcgctgatgcca

SEQ ID NO: 894032 - DNA, 25 bp, Homo sapien
agggtcctggtcattcttgcaagca

SEQ ID NO: 894033 - DNA, 25 bp, Homo sapien
cccagggttggtagaagccatggag

SEQ ID NO: 894034 - DNA, 25 bp, Homo sapien
ccagggttggtagaagccatggaga

SEQ ID NO: 894035 - DNA, 25 bp, Homo sapien
agtaggcaggttccaggcctcacac

SEQ ID NO: 894036 - DNA, 25 bp, Homo sapien
ggagtaggcaggttccaggcctcac

SEQ ID NO: 894037 - DNA, 25 bp, Homo sapien
gagtaggcaggttccaggcctcaca

SEQ ID NO: 894038 - DNA, 25 bp, Homo sapien
gtaggcaggttccaggcctcacact

SEQ ID NO: 894039 - DNA, 25 bp, Homo sapien
tggaaatgatgtagtggcaatggaa

SEQ ID NO: 894040 - DNA, 25 bp, Homo sapien
ctggaaatgatgtagtggcaatgga

SEQ ID NO: 894041 - DNA, 25 bp, Homo sapien
ggaaatgatgtagtggcaatggaaa

SEQ ID NO: 894042 - DNA, 25 bp, Homo sapien
gaaatgatgtagtggcaatggaaag

SEQ ID NO: 894043 - DNA, 25 bp, Homo sapien
ccttggatatggcagtgcatggctg

SEQ ID NO: 894044 - DNA, 25 bp, Homo sapien
tcacagcattccttggatatggcag

SEQ ID NO: 894045 - DNA, 25 bp, Homo sapien
ctctggggtcgccaccgcatcagtg

SEQ ID NO: 894046 - DNA, 25 bp, Homo sapien
cagtgccttcacagcattccttgga

SEQ ID NO: 894047 - DNA, 25 bp, Homo sapien
ctgtccacgcggaacaggaacccat

SEQ ID NO: 894048 - DNA, 25 bp, Homo sapien
tattctcggctgctctggtgagagt

SEQ ID NO: 894049 - DNA, 25 bp, Homo sapien
acgcggaacaggaacccattggagg

SEQ ID NO: 894050 - DNA, 25 bp, Homo sapien
acccattggaggcagcacgtattct

SEQ ID NO: 894051 - DNA, 25 bp, Homo sapien
gagtgggattcaggaggactctcct

SEQ ID NO: 894052 - DNA, 25 bp, Homo sapien
gggattcaggaggactctcctccac

SEQ ID NO: 894053 - DNA, 25 bp, Homo sapien
attcaggaggactctcctccaccag

SEQ ID NO: 894054 - DNA, 25 bp, Homo sapien
tgggattcaggaggactctcctcca

SEQ ID NO: 894055 - DNA, 25 bp, Homo sapien
ccttcaggattaggagctgatgttg

SEQ ID NO: 894056 - DNA, 25 bp, Homo sapien
gctgatgttggtgtgagtgagaagg

SEQ ID NO: 894057 - DNA, 25 bp, Homo sapien
tggaccgaaacccagagggccttca

SEQ ID NO: 894058 - DNA, 25 bp, Homo sapien
taccaccagagagcatcactctgct

SEQ ID NO: 894059 - DNA, 25 bp, Homo sapien
tttcctttccgcacagagggcaagc

SEQ ID NO: 894060 - DNA, 25 bp, Homo sapien
tgatgctgggaaacttgtgcctgcc

SEQ ID NO: 894061 - DNA, 25 bp, Homo sapien
tccactatcctactctgggcatagg

SEQ ID NO: 894062 - DNA, 25 bp, Homo sapien
tgggcataggcacttaaacagttct

SEQ ID NO: 894063 - DNA, 25 bp, Homo sapien
caggagatctcataggaaggatatc

SEQ ID NO: 894064 - DNA, 25 bp, Homo sapien
gagcactccacgcagattttcttgg

SEQ ID NO: 894065 - DNA, 25 bp, Homo sapien
cagggattgtctcgaatccgcgcag

SEQ ID NO: 894066 - DNA, 25 bp, Homo sapien
gctgcccctagaggtcagtctgatc

SEQ ID NO: 894067 - DNA, 25 bp, Homo sapien
gacacatttggaggctacttggcga

SEQ ID NO: 894068 - DNA, 25 bp, Homo sapien
agtatttgaagatcttgctacacat

SEQ ID NO: 894069 - DNA, 25 bp, Homo sapien
tagtatttgaagatcttgctacaca

SEQ ID NO: 894070 - DNA, 25 bp, Homo sapien
gtagtatttgaagatcttgctacac

SEQ ID NO: 894071 - DNA, 25 bp, Homo sapien
tgtagtatttgaagatcttgctaca

SEQ ID NO: 894072 - DNA, 25 bp, Homo sapien
catctgactgatttgttgatcagga

SEQ ID NO: 894073 - DNA, 25 bp, Homo sapien
gatcatctgactgatttgttgatca

SEQ ID NO: 894074 - DNA, 25 bp, Homo sapien
tcagcctataagctccttgatcatc

SEQ ID NO: 894075 - DNA, 25 bp, Homo sapien
tgactgatttgttgatcaggagtac

SEQ ID NO: 894076 - DNA, 25 bp, Homo sapien
aatcttaggctgctctacggcatgg

SEQ ID NO: 894077 - DNA, 25 bp, Homo sapien
tgcttctgggatatcccgtcctgat

SEQ ID NO: 894078 - DNA, 25 bp, Homo sapien
gtagccctgcttctgggatatcccg

SEQ ID NO: 894079 - DNA, 25 bp, Homo sapien
tatcccgtcctgatcaatcttaggc

SEQ ID NO: 894080 - DNA, 25 bp, Homo sapien
gctcagctgttaggcagctcctcac

SEQ ID NO: 894081 - DNA, 25 bp, Homo sapien
ggccacacatgtcgaatctgagctc

SEQ ID NO: 894082 - DNA, 25 bp, Homo sapien
ctgagctcagctgttaggcagctcc

SEQ ID NO: 894083 - DNA, 25 bp, Homo sapien
cctgggccacacatgtcgaatctga

SEQ ID NO: 894084 - DNA, 25 bp, Homo sapien
ctttctgagatctgcagttatgctt

SEQ ID NO: 894085 - DNA, 25 bp, Homo sapien
cccaaatgaagtgtggatttttatt

SEQ ID NO: 894086 - DNA, 25 bp, Homo sapien
ttttgatcaatgacagctttctgag

SEQ ID NO: 894087 - DNA, 25 bp, Homo sapien
caatgttaccactggctctttgttt

SEQ ID NO: 894088 - DNA, 25 bp, Homo sapien
gaatctggacggctcactctgacag

SEQ ID NO: 894089 - DNA, 25 bp, Homo sapien
tccagactggcagcttggcaagaca

SEQ ID NO: 894090 - DNA, 25 bp, Homo sapien
catggataccagcacacgggaatct

SEQ ID NO: 894091 - DNA, 25 bp, Homo sapien
taaaggcagtaaggtgtgacgctcc

SEQ ID NO: 894092 - DNA, 25 bp, Homo sapien
tttctttttccagatcagccatcat

SEQ ID NO: 894093 - DNA, 25 bp, Homo sapien
gcgaatcctggtttgcgtgctgaag

SEQ ID NO: 894094 - DNA, 25 bp, Homo sapien
tagaaatgggtgtcgtcaacttcca

SEQ ID NO: 894095 - DNA, 25 bp, Homo sapien
cgtgctgaagtcaaaatgtggtgct

SEQ ID NO: 894096 - DNA, 25 bp, Homo sapien
tcctttcgcaatcctggcggtctgg

SEQ ID NO: 894097 - DNA, 25 bp, Homo sapien
actacaggtgcccgccatcatgcac

SEQ ID NO: 894098 - DNA, 25 bp, Homo sapien
aggtgcccgccatcatgcacggcta

SEQ ID NO: 894099 - DNA, 25 bp, Homo sapien
ggtgcccgccatcatgcacggctaa

SEQ ID NO: 894100 - DNA, 25 bp, Homo sapien
tacaggtgcccgccatcatgcacgg

SEQ ID NO: 894101 - DNA, 25 bp, Homo sapien
ggtcctggccccggtactgtgtcat

SEQ ID NO: 894102 - DNA, 25 bp, Homo sapien
gagccaaacaagctgcaatctaata

SEQ ID NO: 894103 - DNA, 25 bp, Homo sapien
taatatggaaatgtggtcctggccc

SEQ ID NO: 894104 - DNA, 25 bp, Homo sapien
tcaacctcagaaataggagtcgagc

SEQ ID NO: 894105 - DNA, 25 bp, Homo sapien
taagtgtcgtgctttaaattggtca

SEQ ID NO: 894106 - DNA, 25 bp, Homo sapien
gagagagtaagtgtcgtgctttaaa

SEQ ID NO: 894107 - DNA, 25 bp, Homo sapien
gtgtcgtgctttaaattggtcagca

SEQ ID NO: 894108 - DNA, 25 bp, Homo sapien
gagtaagtgtcgtgctttaaattgg

SEQ ID NO: 894109 - DNA, 25 bp, Homo sapien
taaaagtcattgagctctggcaaga

SEQ ID NO: 894110 - DNA, 25 bp, Homo sapien
ggtagccaggatagccaggattccc

SEQ ID NO: 894111 - DNA, 25 bp, Homo sapien
agccaggattcccagggtccccaag

SEQ ID NO: 894112 - DNA, 25 bp, Homo sapien
gcactttggtgcgattcccagggta

SEQ ID NO: 894113 - DNA, 25 bp, Homo sapien
ttgttctatcccatcatctgcatcc

SEQ ID NO: 894114 - DNA, 25 bp, Homo sapien
ttgaagaagagtgaacaagggtaag

SEQ ID NO: 894115 - DNA, 25 bp, Homo sapien
tgaagaagagtgaacaagggtaagg

SEQ ID NO: 894116 - DNA, 25 bp, Homo sapien
gaagaagagtgaacaagggtaagga

SEQ ID NO: 894117 - DNA, 25 bp, Homo sapien
ttagaagggcgcgttcagcacccgc

SEQ ID NO: 894118 - DNA, 25 bp, Homo sapien
ggcagggtcagctctcggctgcact

SEQ ID NO: 894119 - DNA, 25 bp, Homo sapien
gcgtaaaactggaggcgtagaggga

SEQ ID NO: 894120 - DNA, 25 bp, Homo sapien
cacttgggcaagagatagctggagc

SEQ ID NO: 894121 - DNA, 25 bp, Homo sapien
tcggccagacatttaaccggcgcag

SEQ ID NO: 894122 - DNA, 25 bp, Homo sapien
tttaggctcgagctgaaggttacca

SEQ ID NO: 894123 - DNA, 25 bp, Homo sapien
aaatttgccaccgattttaggctcg

SEQ ID NO: 894124 - DNA, 25 bp, Homo sapien
gaatttagcctctgatcggccagac

SEQ ID NO: 894125 - DNA, 25 bp, Homo sapien
gatgattgagataattgtccccgaa

SEQ ID NO: 894126 - DNA, 25 bp, Homo sapien
tgtccccgaattatgacatcagcta

SEQ ID NO: 894127 - DNA, 25 bp, Homo sapien
gagttgtgccaattactcagcccac

SEQ ID NO: 894128 - DNA, 25 bp, Homo sapien
caaatatcatgttgccccatctgca

SEQ ID NO: 894129 - DNA, 25 bp, Homo sapien
taagttgtccagagcgtcgttgagg

SEQ ID NO: 894130 - DNA, 25 bp, Homo sapien
tcggtgggcaacctgaacatggcac

SEQ ID NO: 894131 - DNA, 25 bp, Homo sapien
gaaactcctggcgttgagctgcaag

SEQ ID NO: 894132 - DNA, 25 bp, Homo sapien
aattatcaagagtcccatgccctgg

SEQ ID NO: 894133 - DNA, 25 bp, Homo sapien
actcatcaaacggtagtgttaacat

SEQ ID NO: 894134 - DNA, 25 bp, Homo sapien
tctggtcctcgcattctctagaaaa

SEQ ID NO: 894135 - DNA, 25 bp, Homo sapien
cctcgaaggacaatctgtttggaaa

SEQ ID NO: 894136 - DNA, 25 bp, Homo sapien
ctgggattctggcattacaacagac

SEQ ID NO: 894137 - DNA, 25 bp, Homo sapien
ttgtgcacgtgtgttcagaatccca

SEQ ID NO: 894138 - DNA, 25 bp, Homo sapien
caaggattctgactgcaattgtgca

SEQ ID NO: 894139 - DNA, 25 bp, Homo sapien
aggaacggtccaaggattctgactg

SEQ ID NO: 894140 - DNA, 25 bp, Homo sapien
gactgcaattgtgcacgtgtgttca

SEQ ID NO: 894141 - DNA, 25 bp, Homo sapien
gcatccctgtaagtgggtaccagcc

SEQ ID NO: 894142 - DNA, 25 bp, Homo sapien
aagtgacattgatgccaactgccag

SEQ ID NO: 894143 - DNA, 25 bp, Homo sapien
gctgagtgtcgcatcgtctcctgga

SEQ ID NO: 894144 - DNA, 25 bp, Homo sapien
catctgctagtgacgtcacagggca

SEQ ID NO: 894145 - DNA, 25 bp, Homo sapien
agcgccgtgacagtaagccctggat

SEQ ID NO: 894146 - DNA, 25 bp, Homo sapien
ctgggaagactaggagcagcgccgt

SEQ ID NO: 894147 - DNA, 25 bp, Homo sapien
ccgtgacagtaagccctggatcgtc

SEQ ID NO: 894148 - DNA, 25 bp, Homo sapien
ggagcagcgccgtgacagtaagccc

SEQ ID NO: 894149 - DNA, 25 bp, Homo sapien
cgtggtaaagcatttcgaatatatt

SEQ ID NO: 894150 - DNA, 25 bp, Homo sapien
ggtaaagcatttcgaatatattcca

SEQ ID NO: 894151 - DNA, 25 bp, Homo sapien
aagcatttcgaatatattccaaagg

SEQ ID NO: 894152 - DNA, 25 bp, Homo sapien
gggtcgtggtaaagcatttcgaata

SEQ ID NO: 894153 - DNA, 25 bp, Homo sapien
atgatgacgatgaacaaagtattca

SEQ ID NO: 894154 - DNA, 25 bp, Homo sapien
gatgatgacgatgaacaaagtattc

SEQ ID NO: 894155 - DNA, 25 bp, Homo sapien
ctagagaactgttttgacagaacca

SEQ ID NO: 894156 - DNA, 25 bp, Homo sapien
gaaccactgaattgggtgcaggagt

SEQ ID NO: 894157 - DNA, 25 bp, Homo sapien
tagagaactgttttgacagaaccac

SEQ ID NO: 894158 - DNA, 25 bp, Homo sapien
tgaattgggtgcaggagtcaaattc

SEQ ID NO: 894159 - DNA, 25 bp, Homo sapien
tgctcgtccacaaacaacagagacc

SEQ ID NO: 894160 - DNA, 25 bp, Homo sapien
tctgctcgtccacaaacaacagaga

SEQ ID NO: 894161 - DNA, 25 bp, Homo sapien
cagattttctgctcgtccacaaaca

SEQ ID NO: 894162 - DNA, 25 bp, Homo sapien
ttttctgctcgtccacaaacaacag

SEQ ID NO: 894163 - DNA, 25 bp, Homo sapien
gcaaatgccatcactaaggtgcctg

SEQ ID NO: 894164 - DNA, 25 bp, Homo sapien
caaatttctttgctggaacacgata

SEQ ID NO: 894165 - DNA, 25 bp, Homo sapien
tgcaattctgcgagggctttcacat

SEQ ID NO: 894166 - DNA, 25 bp, Homo sapien
ctgtgacgtggagctcggcagttca

SEQ ID NO: 894167 - DNA, 25 bp, Homo sapien
tccacaagccttttaactccacaag

SEQ ID NO: 894168 - DNA, 25 bp, Homo sapien
ctccacaagtttgcaaccattaatt

SEQ ID NO: 894169 - DNA, 25 bp, Homo sapien
caggccactagacccccaaatgtgt

SEQ ID NO: 894170 - DNA, 25 bp, Homo sapien
ttgtctccctgttgttagcaaatgg

SEQ ID NO: 894171 - DNA, 25 bp, Homo sapien
aacaataaatatggcccggatggta

SEQ ID NO: 894172 - DNA, 25 bp, Homo sapien
tatggcccggatggtaacagtgcat

SEQ ID NO: 894173 - DNA, 25 bp, Homo sapien
gacaaatctccccagttaaatatta

SEQ ID NO: 894174 - DNA, 25 bp, Homo sapien
ggtaacagtgcattgtgaagtctgt

SEQ ID NO: 894175 - DNA, 25 bp, Homo sapien
gatgagtaaagccaaattctgcctc

SEQ ID NO: 894176 - DNA, 25 bp, Homo sapien
aaaagatgagtaaagccaaattctg

SEQ ID NO: 894177 - DNA, 25 bp, Homo sapien
actcctacaccctgtgcggctggtc

SEQ ID NO: 894178 - DNA, 25 bp, Homo sapien
tacaccctgtgcggctggtccagca

SEQ ID NO: 894179 - DNA, 25 bp, Homo sapien
catctgtttcctcgacactgcacaa

SEQ ID NO: 894180 - DNA, 25 bp, Homo sapien
caacctccggtagctcttgatccag

SEQ ID NO: 894181 - DNA, 25 bp, Homo sapien
actgcacaacctccggtagctcttg

SEQ ID NO: 894182 - DNA, 25 bp, Homo sapien
tctgttccatctgtttcctcgacac

SEQ ID NO: 894183 - DNA, 25 bp, Homo sapien
tacagggcatgcacgataaagagac

SEQ ID NO: 894184 - DNA, 25 bp, Homo sapien
agaacaatgactccacatacccaag

SEQ ID NO: 894185 - DNA, 25 bp, Homo sapien
agagagtgtgacacagttggctaca

SEQ ID NO: 894186 - DNA, 25 bp, Homo sapien
cccaagcttcttagaagagagtgtg

SEQ ID NO: 894187 - DNA, 25 bp, Homo sapien
gagcatgtcgaagacaaagacaccc

SEQ ID NO: 894188 - DNA, 25 bp, Homo sapien
taggagcatatggttgacatcgtgg

SEQ ID NO: 894189 - DNA, 25 bp, Homo sapien
tgaaaggtgtgagcatgtcgaagac

SEQ ID NO: 894190 - DNA, 25 bp, Homo sapien
taataaacacgggttgctcattagg

SEQ ID NO: 894191 - DNA, 25 bp, Homo sapien
ttcgggtatgtcacggaggggctgc

SEQ ID NO: 894192 - DNA, 25 bp, Homo sapien
ctcagcagggtagagtgcctccggg

SEQ ID NO: 894193 - DNA, 25 bp, Homo sapien
ctgagcacggcagaggctcgagccc

SEQ ID NO: 894194 - DNA, 25 bp, Homo sapien
aggctcgagcccagggagacctcct

SEQ ID NO: 894195 - DNA, 25 bp, Homo sapien
gatgtgagtcgaagggctgtgatgc

SEQ ID NO: 894196 - DNA, 25 bp, Homo sapien
gctgtgatgcaagcaccggggccac

SEQ ID NO: 894197 - DNA, 25 bp, Homo sapien
cacttaaggtgggtgaatctgaaac

SEQ ID NO: 894198 - DNA, 25 bp, Homo sapien
ttaccacagagtggagaagtcccca

SEQ ID NO: 894199 - DNA, 25 bp, Homo sapien
ttgtgccagctgtacttcatagacc

SEQ ID NO: 894200 - DNA, 25 bp, Homo sapien
caagtttgattccagtgatgcagct

SEQ ID NO: 894201 - DNA, 25 bp, Homo sapien
gctggactccattggaaaactaaac

SEQ ID NO: 894202 - DNA, 25 bp, Homo sapien
cccaaagaggcaattacaagtttga

SEQ ID NO: 894203 - DNA, 25 bp, Homo sapien
caataatcccattttaagctctttc

SEQ ID NO: 894204 - DNA, 25 bp, Homo sapien
tgtactgctttctctcatgactcat

SEQ ID NO: 894205 - DNA, 25 bp, Homo sapien
aatgtactgctttctctcatgactc

SEQ ID NO: 894206 - DNA, 25 bp, Homo sapien
cacttgagtcatttgaatgtactgc

SEQ ID NO: 894207 - DNA, 25 bp, Homo sapien
taagcgctttacatactgccttctt

SEQ ID NO: 894208 - DNA, 25 bp, Homo sapien
actgagatataaagaggctaaataa

SEQ ID NO: 894209 - DNA, 25 bp, Homo sapien
gcagtgtgctgttttaatcattaga

SEQ ID NO: 894210 - DNA, 25 bp, Homo sapien
acctcacatttgtgggctaggcact

SEQ ID NO: 894211 - DNA, 25 bp, Homo sapien
tttcctagaatgcactgggccacca

SEQ ID NO: 894212 - DNA, 25 bp, Homo sapien
tcaactccttttgctaccttactgt

SEQ ID NO: 894213 - DNA, 25 bp, Homo sapien
tttccagtcccgatatgaatgtggg

SEQ ID NO: 894214 - DNA, 25 bp, Homo sapien
gctgaatactttgtgtggagggaca

SEQ ID NO: 894215 - DNA, 25 bp, Homo sapien
tgttattctgcccggcagtgttcac

SEQ ID NO: 894216 - DNA, 25 bp, Homo sapien
attctgcccggcagtgttcacagct

SEQ ID NO: 894217 - DNA, 25 bp, Homo sapien
ttattctgcccggcagtgttcacag

SEQ ID NO: 894218 - DNA, 25 bp, Homo sapien
ccatgttattctgcccggcagtgtt

SEQ ID NO: 894219 - DNA, 25 bp, Homo sapien
caatctctggggacaacatcagggg

SEQ ID NO: 894220 - DNA, 25 bp, Homo sapien
ctgaggaactgcatcaatctctggg

SEQ ID NO: 894221 - DNA, 25 bp, Homo sapien
ctggggacaacatcaggggcttctt

SEQ ID NO: 894222 - DNA, 25 bp, Homo sapien
tggggacaacatcaggggcttcttt

SEQ ID NO: 894223 - DNA, 25 bp, Homo sapien
tagatggcccgagctgtgcctggca

SEQ ID NO: 894224 - DNA, 25 bp, Homo sapien
tgtgtgtgagtagatggcccgagct

SEQ ID NO: 894225 - DNA, 25 bp, Homo sapien
cttgggaatatgtggacctgagctg

SEQ ID NO: 894226 - DNA, 25 bp, Homo sapien
tgagtagatggcccgagctgtgcct

SEQ ID NO: 894227 - DNA, 25 bp, Homo sapien
gtgagtgacaggacggtggcagtgg

SEQ ID NO: 894228 - DNA, 25 bp, Homo sapien
gattgtgagtgacaggacggtggca

SEQ ID NO: 894229 - DNA, 25 bp, Homo sapien
agattgtgagtgacaggacggtggc

SEQ ID NO: 894230 - DNA, 25 bp, Homo sapien
tgagtgacaggacggtggcagtggc

SEQ ID NO: 894231 - DNA, 25 bp, Homo sapien
agtggagagaagttttcaggctcac

SEQ ID NO: 894232 - DNA, 25 bp, Homo sapien
aagtggagagaagttttcaggctca

SEQ ID NO: 894233 - DNA, 25 bp, Homo sapien
gctcatgtgggtcaatcactttttt

SEQ ID NO: 894234 - DNA, 25 bp, Homo sapien
tgttcagggtcctggcccacaagct

SEQ ID NO: 894235 - DNA, 25 bp, Homo sapien
gcagctgtcctgcacaatatttagt

SEQ ID NO: 894236 - DNA, 25 bp, Homo sapien
tacttgtagactgaaaagcagcagc

SEQ ID NO: 894237 - DNA, 25 bp, Homo sapien
ggcctgtgtacaagagcccacagat

SEQ ID NO: 894238 - DNA, 25 bp, Homo sapien
agataatgcagtgattccactctgc

SEQ ID NO: 894239 - DNA, 25 bp, Homo sapien
acccaagtggcctgtgtacaagagc

SEQ ID NO: 894240 - DNA, 25 bp, Homo sapien
acagataatgcagtgattccactct

SEQ ID NO: 894241 - DNA, 25 bp, Homo sapien
gactcctttggggatgctaacctga

SEQ ID NO: 894242 - DNA, 25 bp, Homo sapien
gctaagctccacgtctaggcactgc

SEQ ID NO: 894243 - DNA, 25 bp, Homo sapien
gatgctaacctgattctgacctgtt

SEQ ID NO: 894244 - DNA, 25 bp, Homo sapien
tccagctaagctccacgtctaggca

SEQ ID NO: 894245 - DNA, 25 bp, Homo sapien
agcagtaaaggctgtcgctggtagc

SEQ ID NO: 894246 - DNA, 25 bp, Homo sapien
cttggagcagtaaaggctgtcgctg

SEQ ID NO: 894247 - DNA, 25 bp, Homo sapien
taaaggctgtcgctggtagcacagc

SEQ ID NO: 894248 - DNA, 25 bp, Homo sapien
gctgtcgctggtagcacagccacca

SEQ ID NO: 894249 - DNA, 25 bp, Homo sapien
tccatatcttcctactccaatggca

SEQ ID NO: 894250 - DNA, 25 bp, Homo sapien
cacacatgattctcaagtcctccat

SEQ ID NO: 894251 - DNA, 25 bp, Homo sapien
agtcctccatatcttcctactccaa

SEQ ID NO: 894252 - DNA, 25 bp, Homo sapien
atatcttcctactccaatggcaagg

SEQ ID NO: 894253 - DNA, 25 bp, Homo sapien
gaaagcacgggctgaatactaagtc

SEQ ID NO: 894254 - DNA, 25 bp, Homo sapien
gggctgaatactaagtctccccact

SEQ ID NO: 894255 - DNA, 25 bp, Homo sapien
aatactaagtctccccactcatggg

SEQ ID NO: 894256 - DNA, 25 bp, Homo sapien
gatgctgaaagcacgggctgaatac

SEQ ID NO: 894257 - DNA, 25 bp, Homo sapien
tctgttaccttgtgcatttccttta

SEQ ID NO: 894258 - DNA, 25 bp, Homo sapien
tcaggttttggactctctatccaac

SEQ ID NO: 894259 - DNA, 25 bp, Homo sapien
tttatcctaacctcatggccatatg

SEQ ID NO: 894260 - DNA, 25 bp, Homo sapien
tgacggctgcctctgatatcctctg

SEQ ID NO: 894261 - DNA, 25 bp, Homo sapien
gtctataaatgttgttgggaccctc

SEQ ID NO: 894262 - DNA, 25 bp, Homo sapien
catagtccaacagtttgtctataaa

SEQ ID NO: 894263 - DNA, 25 bp, Homo sapien
acatagtccaacagtttgtctataa

SEQ ID NO: 894264 - DNA, 25 bp, Homo sapien
aacatagtccaacagtttgtctata

SEQ ID NO: 894265 - DNA, 25 bp, Homo sapien
ttccagtaaatttccaggctcccaa

SEQ ID NO: 894266 - DNA, 25 bp, Homo sapien
cagtaaatttccaggctcccaagcc

SEQ ID NO: 894267 - DNA, 25 bp, Homo sapien
tcagactaattctggaggacttcca

SEQ ID NO: 894268 - DNA, 25 bp, Homo sapien
gaggacttccagtaaatttccaggc

SEQ ID NO: 894269 - DNA, 25 bp, Homo sapien
ccctgcagaatccttggtgaggatc

SEQ ID NO: 894270 - DNA, 25 bp, Homo sapien
ctgatttagcacagaattctgccag

SEQ ID NO: 894271 - DNA, 25 bp, Homo sapien
tgatttagcacagaattctgccaga

SEQ ID NO: 894272 - DNA, 25 bp, Homo sapien
actctggctggcagctctaaaaacc

SEQ ID NO: 894273 - DNA, 25 bp, Homo sapien
tttccagcagccgtactctggctgg

SEQ ID NO: 894274 - DNA, 25 bp, Homo sapien
agcagccgtactctggctggcagct

SEQ ID NO: 894275 - DNA, 25 bp, Homo sapien
tcatcctctttccagcagccgtact

SEQ ID NO: 894276 - DNA, 25 bp, Homo sapien
acgcaggattgtcccactgaaactg

SEQ ID NO: 894277 - DNA, 25 bp, Homo sapien
ttcaaaacgcaggattgtcccactg

SEQ ID NO: 894278 - DNA, 25 bp, Homo sapien
caaaacgcaggattgtcccactgaa

SEQ ID NO: 894279 - DNA, 25 bp, Homo sapien
aaacgcaggattgtcccactgaaac

SEQ ID NO: 894280 - DNA, 25 bp, Homo sapien
tctccttcccctgccctgcttcggt

SEQ ID NO: 894281 - DNA, 25 bp, Homo sapien
tcccctgccctgcttcggtccagca

SEQ ID NO: 894282 - DNA, 25 bp, Homo sapien
tccttcccctgccctgcttcggtcc

SEQ ID NO: 894283 - DNA, 25 bp, Homo sapien
cttcccctgccctgcttcggtccag

SEQ ID NO: 894284 - DNA, 25 bp, Homo sapien
gtgccactgttgaggtgcatcatag

SEQ ID NO: 894285 - DNA, 25 bp, Homo sapien
cactgttgaggtgcatcatagctcc

SEQ ID NO: 894286 - DNA, 25 bp, Homo sapien
ccactgttgaggtgcatcatagctc

SEQ ID NO: 894287 - DNA, 25 bp, Homo sapien
tgttgaggtgcatcatagctcctgg

SEQ ID NO: 894288 - DNA, 25 bp, Homo sapien
tgtaagaatgggtgatcttgtaaag

SEQ ID NO: 894289 - DNA, 25 bp, Homo sapien
gaatgggtgatcttgtaaagtaaaa

SEQ ID NO: 894290 - DNA, 25 bp, Homo sapien
aagggtgcccaggtcaggttgacta

SEQ ID NO: 894291 - DNA, 25 bp, Homo sapien
caggttgactatagacaggtctctg

SEQ ID NO: 894292 - DNA, 25 bp, Homo sapien
ccttgagcacgcagatgctgcctgc

SEQ ID NO: 894293 - DNA, 25 bp, Homo sapien
tgaggaaaggacaaggctcttggat

SEQ ID NO: 894294 - DNA, 25 bp, Homo sapien
aggaaaggacaaggctcttggatct

SEQ ID NO: 894295 - DNA, 25 bp, Homo sapien
gaggaaaggacaaggctcttggatc

SEQ ID NO: 894296 - DNA, 25 bp, Homo sapien
gaggccatgaggaccctgaataagc

SEQ ID NO: 894297 - DNA, 25 bp, Homo sapien
tgttgttctggctccacagcagtaa

SEQ ID NO: 894298 - DNA, 25 bp, Homo sapien
ttgtcccctagggaagcggacctca

SEQ ID NO: 894299 - DNA, 25 bp, Homo sapien
tgaataagcaaaggacaacggctct

SEQ ID NO: 894300 - DNA, 25 bp, Homo sapien
ctatgatgataacgggaagtccttg

SEQ ID NO: 894301 - DNA, 25 bp, Homo sapien
cgatcaatgcatgatgatttgatga

SEQ ID NO: 894302 - DNA, 25 bp, Homo sapien
aatgcatgatgatttgatgattttg

SEQ ID NO: 894303 - DNA, 25 bp, Homo sapien
gatcaatgcatgatgatttgatgat

SEQ ID NO: 894304 - DNA, 25 bp, Homo sapien
tcaatgcatgatgatttgatgattt

SEQ ID NO: 894305 - DNA, 25 bp, Homo sapien
acgatatcacttatttcatggcctg

SEQ ID NO: 894306 - DNA, 25 bp, Homo sapien
tcatggcctgtagtccatagtcttc

SEQ ID NO: 894307 - DNA, 25 bp, Homo sapien
aaggttgagatgctgagcatggcac

SEQ ID NO: 894308 - DNA, 25 bp, Homo sapien
ggccagaaataagattacgatatca

SEQ ID NO: 894309 - DNA, 25 bp, Homo sapien
gacaccagagtactgcctgattagc

SEQ ID NO: 894310 - DNA, 25 bp, Homo sapien
gaatatcagagcatagtttaggcat

SEQ ID NO: 894311 - DNA, 25 bp, Homo sapien
tgattagccttgctcagaacttctc

SEQ ID NO: 894312 - DNA, 25 bp, Homo sapien
caagtggccatccaatgttctggga

SEQ ID NO: 894313 - DNA, 25 bp, Homo sapien
caagtttacacttcattctcaggaa

SEQ ID NO: 894314 - DNA, 25 bp, Homo sapien
aacagggtagcatccttttagctgg

SEQ ID NO: 894315 - DNA, 25 bp, Homo sapien
tccaagcaagaaagtattcagcagt

SEQ ID NO: 894316 - DNA, 25 bp, Homo sapien
tggaaaacaggagattttgccttca

SEQ ID NO: 894317 - DNA, 25 bp, Homo sapien
ccttgtagttggctgtttgtcgttg

SEQ ID NO: 894318 - DNA, 25 bp, Homo sapien
gttattgcccttgtagttggctgtt

SEQ ID NO: 894319 - DNA, 25 bp, Homo sapien
tcccagtaggacaccacagttattg

SEQ ID NO: 894320 - DNA, 25 bp, Homo sapien
cagcgcctgcacgagaggctgcatt

SEQ ID NO: 894321 - DNA, 25 bp, Homo sapien
agcaacaaagggctgggtagtcgcc

SEQ ID NO: 894322 - DNA, 25 bp, Homo sapien
ctgaggctgggaagtattttctatc

SEQ ID NO: 894323 - DNA, 25 bp, Homo sapien
caggagagtcgtcttgctgtcccct

SEQ ID NO: 894324 - DNA, 25 bp, Homo sapien
tcagcctggcatctagactcatctg

SEQ ID NO: 894325 - DNA, 25 bp, Homo sapien
tatatcaccccctcatcgcatcttt

SEQ ID NO: 894326 - DNA, 25 bp, Homo sapien
tcatccagatactgtttctggctgc

SEQ ID NO: 894327 - DNA, 25 bp, Homo sapien
tctttcctcatccagatactgtttc

SEQ ID NO: 894328 - DNA, 25 bp, Homo sapien
ccagatactgtttctggctgcccat

SEQ ID NO: 894329 - DNA, 25 bp, Homo sapien
tgctcctgtaaatgttgttgatgcc

SEQ ID NO: 894330 - DNA, 25 bp, Homo sapien
tcctcctttagtgctcctgtaaatg

SEQ ID NO: 894331 - DNA, 25 bp, Homo sapien
aatgttgttgatgcctgcctttacc

SEQ ID NO: 894332 - DNA, 25 bp, Homo sapien
ctccaggaacgctgctccctagaca

SEQ ID NO: 894333 - DNA, 25 bp, Homo sapien
taccccaaagatggttgcacttcag

SEQ ID NO: 894334 - DNA, 25 bp, Homo sapien
gagctcgtcccggtataatttatca

SEQ ID NO: 894335 - DNA, 25 bp, Homo sapien
taaacagctgtagggagctacccca

SEQ ID NO: 894336 - DNA, 25 bp, Homo sapien
cacttcagtggtgggtgagctcgtc

SEQ ID NO: 894337 - DNA, 25 bp, Homo sapien
aaaagcatcctcatattagatgcca

SEQ ID NO: 894338 - DNA, 25 bp, Homo sapien
aaaaagcatcctcatattagatgcc

SEQ ID NO: 894339 - DNA, 25 bp, Homo sapien
tcccttcaaaaagcactgtcaaggt

SEQ ID NO: 894340 - DNA, 25 bp, Homo sapien
tagaacagttctcgtgagccatccc

SEQ ID NO: 894341 - DNA, 25 bp, Homo sapien
tttggaacaggaacaataaggcaga

SEQ ID NO: 894342 - DNA, 25 bp, Homo sapien
ctgtcaaggtaaaatatgggccact

SEQ ID NO: 894343 - DNA, 25 bp, Homo sapien
ggctctgttccaagctttggtcacg

SEQ ID NO: 894344 - DNA, 25 bp, Homo sapien
gcttcagagctgtcaagatgtggtt

SEQ ID NO: 894345 - DNA, 25 bp, Homo sapien
caagctttggtcacgggcttcagag

SEQ ID NO: 894346 - DNA, 25 bp, Homo sapien
tggtcacgggcttcagagctgtcaa

SEQ ID NO: 894347 - DNA, 25 bp, Homo sapien
tcctttattgtgctgcctctctggt

SEQ ID NO: 894348 - DNA, 25 bp, Homo sapien
ttatatgaacgcttgaggtaatgtt

SEQ ID NO: 894349 - DNA, 25 bp, Homo sapien
tggttcctttattgtgctgcctctc

SEQ ID NO: 894350 - DNA, 25 bp, Homo sapien
ttgacaggctttggcgacacagtgg

SEQ ID NO: 894351 - DNA, 25 bp, Homo sapien
ctccagtgagcagacccaaaacata

SEQ ID NO: 894352 - DNA, 25 bp, Homo sapien
gtgagcagacccaaaacatagaacc

SEQ ID NO: 894353 - DNA, 25 bp, Homo sapien
cagacccaaaacatagaaccttcct

SEQ ID NO: 894354 - DNA, 25 bp, Homo sapien
ctgatctcccagactggccttcctg

SEQ ID NO: 894355 - DNA, 25 bp, Homo sapien
ttataccccatgtgcagtgccaata

SEQ ID NO: 894356 - DNA, 25 bp, Homo sapien
tctctttgcctatcaagacagaatt

SEQ ID NO: 894357 - DNA, 25 bp, Homo sapien
tccagaactgactttttgcataacc

SEQ ID NO: 894358 - DNA, 25 bp, Homo sapien
ttccagtatttcctgacacacttat

SEQ ID NO: 894359 - DNA, 25 bp, Homo sapien
gccacactcagtgctaccttttagg

SEQ ID NO: 894360 - DNA, 25 bp, Homo sapien
tatctctactagtagctccccaggg

SEQ ID NO: 894361 - DNA, 25 bp, Homo sapien
cagcaagctgcgttgtcctgaagtg

SEQ ID NO: 894362 - DNA, 25 bp, Homo sapien
ttaggtttatctctactagtagctc

SEQ ID NO: 894363 - DNA, 25 bp, Homo sapien
tatctatcccttcgtcttcaccact

SEQ ID NO: 894364 - DNA, 25 bp, Homo sapien
tctatcccttcgtcttcaccactta

SEQ ID NO: 894365 - DNA, 25 bp, Homo sapien
tctatctatcccttcgtcttcacca

SEQ ID NO: 894366 - DNA, 25 bp, Homo sapien
ctctatctatcccttcgtcttcacc

SEQ ID NO: 894367 - DNA, 25 bp, Homo sapien
tggactggcagtcttggtcttaaaa

SEQ ID NO: 894368 - DNA, 25 bp, Homo sapien
aacccactaagctcttacaagcagc

SEQ ID NO: 894369 - DNA, 25 bp, Homo sapien
agctgattggcccttggagactttg

SEQ ID NO: 894370 - DNA, 25 bp, Homo sapien
caagcagccaagttccctaaactct

SEQ ID NO: 894371 - DNA, 25 bp, Homo sapien
cccctgaaagcatgagggtcagaag

SEQ ID NO: 894372 - DNA, 25 bp, Homo sapien
tgagggtcagaaggaggttaaacca

SEQ ID NO: 894373 - DNA, 25 bp, Homo sapien
gaatgtttggactctaactcaccga

SEQ ID NO: 894374 - DNA, 25 bp, Homo sapien
ctgggcaggacttgacttagcatta

SEQ ID NO: 894375 - DNA, 25 bp, Homo sapien
gatcgtggattacatgggctccttc

SEQ ID NO: 894376 - DNA, 25 bp, Homo sapien
gatgttcctaagacccttgtcccag

SEQ ID NO: 894377 - DNA, 25 bp, Homo sapien
ttagaaggaggaaaagtagatacgc

SEQ ID NO: 894378 - DNA, 25 bp, Homo sapien
cagcctgcaatctgtggatgcccag

SEQ ID NO: 894379 - DNA, 25 bp, Homo sapien
tctgtatgtatgctggttccaactg

SEQ ID NO: 894380 - DNA, 25 bp, Homo sapien
tcatccaccaggcaatagacaggag

SEQ ID NO: 894381 - DNA, 25 bp, Homo sapien
gagtacacctgtagccatgtctgca

SEQ ID NO: 894382 - DNA, 25 bp, Homo sapien
gagatgctcgataacttctgaggct

SEQ ID NO: 894383 - DNA, 25 bp, Homo sapien
tgctgtatgaacacagagtacacct

SEQ ID NO: 894384 - DNA, 25 bp, Homo sapien
tgaaaaccttcatcgttactgactt

SEQ ID NO: 894385 - DNA, 25 bp, Homo sapien
gaatgggccgcaattatgagactca

SEQ ID NO: 894386 - DNA, 25 bp, Homo sapien
cattgcctgagtattgaatgggccg

SEQ ID NO: 894387 - DNA, 25 bp, Homo sapien
tatatggccttaactgaaagaccgg

SEQ ID NO: 894388 - DNA, 25 bp, Homo sapien
aaagacaccttcagagtttgcacgg

SEQ ID NO: 894389 - DNA, 25 bp, Homo sapien
gtgtatcctcaccttcagtagcagg

SEQ ID NO: 894390 - DNA, 25 bp, Homo sapien
caccttcagtagcaggtccttccag

SEQ ID NO: 894391 - DNA, 25 bp, Homo sapien
gaaaaggataggtgtatcctcacct

SEQ ID NO: 894392 - DNA, 25 bp, Homo sapien
ggataggtgtatcctcaccttcagt

SEQ ID NO: 894393 - DNA, 25 bp, Homo sapien
gaaagtatactctcgctgtatggga

SEQ ID NO: 894394 - DNA, 25 bp, Homo sapien
ttaatacagccctggactgaaagta

SEQ ID NO: 894395 - DNA, 25 bp, Homo sapien
tggtgggaccataggagtccttccc

SEQ ID NO: 894396 - DNA, 25 bp, Homo sapien
gcttctggagaatattaatacagcc

SEQ ID NO: 894397 - DNA, 25 bp, Homo sapien
tgagagacagccaggacgtttgaaa

SEQ ID NO: 894398 - DNA, 25 bp, Homo sapien
cagcatgggactgccaaacttcagc

SEQ ID NO: 894399 - DNA, 25 bp, Homo sapien
catgggactgccaaacttcagcagt

SEQ ID NO: 894400 - DNA, 25 bp, Homo sapien
cagccaggacgtttgaaagaagtat

SEQ ID NO: 894401 - DNA, 25 bp, Homo sapien
gccccaagcctcctgtgtcgagtgg

SEQ ID NO: 894402 - DNA, 25 bp, Homo sapien
ccaagcctcctgtgtcgagtgggat

SEQ ID NO: 894403 - DNA, 25 bp, Homo sapien
cccaagcctcctgtgtcgagtggga

SEQ ID NO: 894404 - DNA, 25 bp, Homo sapien
aagcctcctgtgtcgagtgggatga

SEQ ID NO: 894405 - DNA, 25 bp, Homo sapien
ggaccagctccatgttcgactccct

SEQ ID NO: 894406 - DNA, 25 bp, Homo sapien
ccctcagaaggcatcgtgtctctct

SEQ ID NO: 894407 - DNA, 25 bp, Homo sapien
ggctcaaactctggtcatatttgca

SEQ ID NO: 894408 - DNA, 25 bp, Homo sapien
tcttctgataagggctttctccagt

SEQ ID NO: 894409 - DNA, 25 bp, Homo sapien
gaaaagtctcaatgtggtcattaag

SEQ ID NO: 894410 - DNA, 25 bp, Homo sapien
taaggtaaggcaagtgaggtgtcta

SEQ ID NO: 894411 - DNA, 25 bp, Homo sapien
tgaaattttagtgtcttcctaccca

SEQ ID NO: 894412 - DNA, 25 bp, Homo sapien
tctgatctgacagccaatccaaagc

SEQ ID NO: 894413 - DNA, 25 bp, Homo sapien
gagaagccctctgggtaagacagga

SEQ ID NO: 894414 - DNA, 25 bp, Homo sapien
tctctcttgcaatggagggctgtaa

SEQ ID NO: 894415 - DNA, 25 bp, Homo sapien
taaaatgttcgcttctcgttgacag

SEQ ID NO: 894416 - DNA, 25 bp, Homo sapien
taagacaggagtggacaaacttctc

SEQ ID NO: 894417 - DNA, 25 bp, Homo sapien
tgagaagaatcatgccattgctgct

SEQ ID NO: 894418 - DNA, 25 bp, Homo sapien
ttgagaagaatcatgccattgctgc

SEQ ID NO: 894419 - DNA, 25 bp, Homo sapien
caaatgactttgtacagcaagcgct

SEQ ID NO: 894420 - DNA, 25 bp, Homo sapien
tctagttaagcaaatggaggcatca

SEQ ID NO: 894421 - DNA, 25 bp, Homo sapien
ttatgccatccgagcaaggacctgc

SEQ ID NO: 894422 - DNA, 25 bp, Homo sapien
gaataggatgaagatcagactggcc

SEQ ID NO: 894423 - DNA, 25 bp, Homo sapien
gctgagaagcagataggtagaccct

SEQ ID NO: 894424 - DNA, 25 bp, Homo sapien
catgaggttattgggcatgaggcac

SEQ ID NO: 894425 - DNA, 25 bp, Homo sapien
tggattccaccaacaactgtgagaa

SEQ ID NO: 894426 - DNA, 25 bp, Homo sapien
gaggcacaatcttcatgaggcacaa

SEQ ID NO: 894427 - DNA, 25 bp, Homo sapien
cataggagctagatgcgtaagcagg

SEQ ID NO: 894428 - DNA, 25 bp, Homo sapien
tccagcatcttgtaccttgcaggat

SEQ ID NO: 894429 - DNA, 25 bp, Homo sapien
cttgcaggatgctcatcagttttct

SEQ ID NO: 894430 - DNA, 25 bp, Homo sapien
cgtttaaaatgacgcaaaggaggct

SEQ ID NO: 894431 - DNA, 25 bp, Homo sapien
catgcatggtgcttgtgaccaaaca

SEQ ID NO: 894432 - DNA, 25 bp, Homo sapien
ggaaacagagccagttgaacccttg

SEQ ID NO: 894433 - DNA, 25 bp, Homo sapien
tctcttccaataacagggacatgca

SEQ ID NO: 894434 - DNA, 25 bp, Homo sapien
caaggtcagggacccatctgtccaa

SEQ ID NO: 894435 - DNA, 25 bp, Homo sapien
tcctcctttcaacgactgggcactt

SEQ ID NO: 894436 - DNA, 25 bp, Homo sapien
tgaatccaaccagtcgtacaatccc

SEQ ID NO: 894437 - DNA, 25 bp, Homo sapien
acttcccacagctgaatccaaccag

SEQ ID NO: 894438 - DNA, 25 bp, Homo sapien
ccgaccactagtggagaagaaccaa

SEQ ID NO: 894439 - DNA, 25 bp, Homo sapien
tgcacagtacacaatgcccagaatg

SEQ ID NO: 894440 - DNA, 25 bp, Homo sapien
tatgcatatgcagtacccatgtgcc

SEQ ID NO: 894441 - DNA, 25 bp, Homo sapien
tcattgctgcctcgtgatagcgccc

SEQ ID NO: 894442 - DNA, 25 bp, Homo sapien
tgaaagatctcaccacacaatgaag

SEQ ID NO: 894443 - DNA, 25 bp, Homo sapien
ggaagccactttgctgaaactatgt

SEQ ID NO: 894444 - DNA, 25 bp, Homo sapien
aaggaaaaatggctagcccacattc

SEQ ID NO: 894445 - DNA, 25 bp, Homo sapien
gccactttgctgaaactatgtgcca

SEQ ID NO: 894446 - DNA, 25 bp, Homo sapien
tctaaaccatttaggcaatgcaaaa

SEQ ID NO: 894447 - DNA, 25 bp, Homo sapien
cacgttgcgtttattatgccgagtc

SEQ ID NO: 894448 - DNA, 25 bp, Homo sapien
gacggaaggagttccagtccctgaa

SEQ ID NO: 894449 - DNA, 25 bp, Homo sapien
tagataaccaaccaagacggaagga

SEQ ID NO: 894450 - DNA, 25 bp, Homo sapien
taacctcaagtacaaagagtgctgg

SEQ ID NO: 894451 - DNA, 25 bp, Homo sapien
tcccaggcagaatacaagtgtgaaa

SEQ ID NO: 894452 - DNA, 25 bp, Homo sapien
tcttcaaggtgatagagctcctgca

SEQ ID NO: 894453 - DNA, 25 bp, Homo sapien
caaagctggatcaagtgggataggc

SEQ ID NO: 894454 - DNA, 25 bp, Homo sapien
tcaatccagtccacagtaagtgaca

SEQ ID NO: 894455 - DNA, 25 bp, Homo sapien
catggcacacaagccagagggaggc

SEQ ID NO: 894456 - DNA, 25 bp, Homo sapien
ctacagctatgagatggtaaggtgg

SEQ ID NO: 894457 - DNA, 25 bp, Homo sapien
ctcttctacagctatgagatggtaa

SEQ ID NO: 894458 - DNA, 25 bp, Homo sapien
ccccatggcacacaagccagaggga

SEQ ID NO: 894459 - DNA, 25 bp, Homo sapien
gtaccagttacacagattaattatg

SEQ ID NO: 894460 - DNA, 25 bp, Homo sapien
tctgcacactgtgtagtaccagtta

SEQ ID NO: 894461 - DNA, 25 bp, Homo sapien
tagtgaaagcatgattccagctcct

SEQ ID NO: 894462 - DNA, 25 bp, Homo sapien
ttctgtcctgtagtgtcaatctgca

SEQ ID NO: 894463 - DNA, 25 bp, Homo sapien
ctggtgagccgtgagaacgctgttt

SEQ ID NO: 894464 - DNA, 25 bp, Homo sapien
gagccgtgagaacgctgttttgtgc

SEQ ID NO: 894465 - DNA, 25 bp, Homo sapien
caacgtaaggcgacacgtggagctg

SEQ ID NO: 894466 - DNA, 25 bp, Homo sapien
ctggcaacgtaaggcgacacgtgga

SEQ ID NO: 894467 - DNA, 25 bp, Homo sapien
tttcttctgaaacaactggtgtgct

SEQ ID NO: 894468 - DNA, 25 bp, Homo sapien
tcttctgaaacaactggtgtgctca

SEQ ID NO: 894469 - DNA, 25 bp, Homo sapien
ttcttctgaaacaactggtgtgctc

SEQ ID NO: 894470 - DNA, 25 bp, Homo sapien
cttctgaaacaactggtgtgctcat

SEQ ID NO: 894471 - DNA, 25 bp, Homo sapien
tatacattgaaggactgtcaggctc

SEQ ID NO: 894472 - DNA, 25 bp, Homo sapien
gaaagagcctacagactcaaggtga

SEQ ID NO: 894473 - DNA, 25 bp, Homo sapien
gcatcctaaagagaaaaaccctgtg

SEQ ID NO: 894474 - DNA, 25 bp, Homo sapien
tatttaatgcatagggtgctacgca

SEQ ID NO: 894475 - DNA, 25 bp, Homo sapien
tttgtgtttgtacgtgctaaaatga

SEQ ID NO: 894476 - DNA, 25 bp, Homo sapien
tacgaattgcatggaacaaggtgct

SEQ ID NO: 894477 - DNA, 25 bp, Homo sapien
cagcgacctttgacacccaaaactt

SEQ ID NO: 894478 - DNA, 25 bp, Homo sapien
gctaaaatgatactgcaagcagaat

SEQ ID NO: 894479 - DNA, 25 bp, Homo sapien
tatgtctcttgatacccagagggag

SEQ ID NO: 894480 - DNA, 25 bp, Homo sapien
gatcctgcaggttcagaagccagca

SEQ ID NO: 894481 - DNA, 25 bp, Homo sapien
ctgaatgagtgtgccctgagcgaac

SEQ ID NO: 894482 - DNA, 25 bp, Homo sapien
tgcaagtacagttagtgaagccagc

SEQ ID NO: 894483 - DNA, 25 bp, Homo sapien
cctgtcttgctgatacaaaggccca

SEQ ID NO: 894484 - DNA, 25 bp, Homo sapien
tatgaacacagggagcacaacagaa

SEQ ID NO: 894485 - DNA, 25 bp, Homo sapien
tttacttgacctgctaggcccctga

SEQ ID NO: 894486 - DNA, 25 bp, Homo sapien
ttatccagggacgtgtagagcgcat

SEQ ID NO: 894487 - DNA, 25 bp, Homo sapien
catgctgttgtgcattcgatactac

SEQ ID NO: 894488 - DNA, 25 bp, Homo sapien
tcaaatatcagcatgctgttgtgca

SEQ ID NO: 894489 - DNA, 25 bp, Homo sapien
gaacattttggcaaggcaaaggtcc

SEQ ID NO: 894490 - DNA, 25 bp, Homo sapien
ggaacattttggcaaggcaaaggtc

SEQ ID NO: 894491 - DNA, 25 bp, Homo sapien
cagtagccagtgcaaaaatgacaac

SEQ ID NO: 894492 - DNA, 25 bp, Homo sapien
gggttcccactcaacagtacagtca

SEQ ID NO: 894493 - DNA, 25 bp, Homo sapien
taccagtggaaacaatgggttccca

SEQ ID NO: 894494 - DNA, 25 bp, Homo sapien
gaagctcagctagaatgatgcaaga

SEQ ID NO: 894495 - DNA, 25 bp, Homo sapien
gttagagtgatccttcttgtctgtc

SEQ ID NO: 894496 - DNA, 25 bp, Homo sapien
tcatttccgatgttagagtgatcct

SEQ ID NO: 894497 - DNA, 25 bp, Homo sapien
tctttgaatcatttccgatgttaga

SEQ ID NO: 894498 - DNA, 25 bp, Homo sapien
cgatgttagagtgatccttcttgtc

SEQ ID NO: 894499 - DNA, 25 bp, Homo sapien
cccgagctaactgtaagttctacca

SEQ ID NO: 894500 - DNA, 25 bp, Homo sapien
catctttaagtctgccaagttttga

SEQ ID NO: 894501 - DNA, 25 bp, Homo sapien
tggagtgaggagaaacccgagctaa

SEQ ID NO: 894502 - DNA, 25 bp, Homo sapien
ttttgtaatcacgttaggtcctgga

SEQ ID NO: 894503 - DNA, 25 bp, Homo sapien
cctttgctggttgctaaccagcagc

SEQ ID NO: 894504 - DNA, 25 bp, Homo sapien
gtggagatggttccctttgctggtt

SEQ ID NO: 894505 - DNA, 25 bp, Homo sapien
tctggaagtcgtggagatggttccc

SEQ ID NO: 894506 - DNA, 25 bp, Homo sapien
aagtcgtggagatggttccctttgc

SEQ ID NO: 894507 - DNA, 25 bp, Homo sapien
gctgttctcctgatgacttctcggc

SEQ ID NO: 894508 - DNA, 25 bp, Homo sapien
agctttgccagatgcgccttcttca

SEQ ID NO: 894509 - DNA, 25 bp, Homo sapien
gtttgcccgtgttccattgacttga

SEQ ID NO: 894510 - DNA, 25 bp, Homo sapien
tgattcttagtttctccagacgtct

SEQ ID NO: 894511 - DNA, 25 bp, Homo sapien
atacatgttcaagtgccccacggag

SEQ ID NO: 894512 - DNA, 25 bp, Homo sapien
cccatttccagtgcatttactaaca

SEQ ID NO: 894513 - DNA, 25 bp, Homo sapien
acccatttccagtgcatttactaac

SEQ ID NO: 894514 - DNA, 25 bp, Homo sapien
tgaaatgtgccctgataaccaaact

SEQ ID NO: 894515 - DNA, 25 bp, Homo sapien
tacttaggtaccaaccttgtgcagg

SEQ ID NO: 894516 - DNA, 25 bp, Homo sapien
tcaggtcttaatcccagaagtctgc

SEQ ID NO: 894517 - DNA, 25 bp, Homo sapien
taattagcaccagtcaaccagtcaa

SEQ ID NO: 894518 - DNA, 25 bp, Homo sapien
agtgtaatgagtgtaattgattata

SEQ ID NO: 894519 - DNA, 25 bp, Homo sapien
tagctgccatcgctgcttgcaatgc

SEQ ID NO: 894520 - DNA, 25 bp, Homo sapien
aagtgtaatgagtgtaattgattat

SEQ ID NO: 894521 - DNA, 25 bp, Homo sapien
gactcttgttgaaggctcacctcta

SEQ ID NO: 894522 - DNA, 25 bp, Homo sapien
gatgttagcaaaaaccgactcttgt

SEQ ID NO: 894523 - DNA, 25 bp, Homo sapien
gaccccttatctcaggtttgcgcta

SEQ ID NO: 894524 - DNA, 25 bp, Homo sapien
gctcccagagccaccatgtctttgt

SEQ ID NO: 894525 - DNA, 25 bp, Homo sapien
ggcatctctccctagtatgataatg

SEQ ID NO: 894526 - DNA, 25 bp, Homo sapien
tgatagtaccaagggccacaacttt

SEQ ID NO: 894527 - DNA, 25 bp, Homo sapien
catggaggacatgctcagtagtcac

SEQ ID NO: 894528 - DNA, 25 bp, Homo sapien
gtagaatgtaccgatcatggaggac

SEQ ID NO: 894529 - DNA, 25 bp, Homo sapien
caatttaccatcatctcagaagatc

SEQ ID NO: 894530 - DNA, 25 bp, Homo sapien
tggccaaggcaaggtggctattagc

SEQ ID NO: 894531 - DNA, 25 bp, Homo sapien
tatatggtttgagcaatgagtgaag

SEQ ID NO: 894532 - DNA, 25 bp, Homo sapien
tatatcccaacataatggccaaggc

SEQ ID NO: 894533 - DNA, 25 bp, Homo sapien
cacctgatcgcttggcatctgacga

SEQ ID NO: 894534 - DNA, 25 bp, Homo sapien
tctctcccgattgatgtgcaccact

SEQ ID NO: 894535 - DNA, 25 bp, Homo sapien
ctcttatagtcaacggagatgacag

SEQ ID NO: 894536 - DNA, 25 bp, Homo sapien
tctgaaccagaggtcttgacacctg

SEQ ID NO: 894537 - DNA, 25 bp, Homo sapien
tgcaagggtctttctgatcccagca

SEQ ID NO: 894538 - DNA, 25 bp, Homo sapien
agggtctttctgatcccagcatacc

SEQ ID NO: 894539 - DNA, 25 bp, Homo sapien
caagggtctttctgatcccagcata

SEQ ID NO: 894540 - DNA, 25 bp, Homo sapien
caagtccaggggaagtgataatttc

SEQ ID NO: 894541 - DNA, 25 bp, Homo sapien
ggtgggttccacgatgaaatcaatg

SEQ ID NO: 894542 - DNA, 25 bp, Homo sapien
ttaatggactcacaatcttctcggt

SEQ ID NO: 894543 - DNA, 25 bp, Homo sapien
ccagtttgagaggtttcatcgatta

SEQ ID NO: 894544 - DNA, 25 bp, Homo sapien
cgtaagcacagtgaaggtgggttcc

SEQ ID NO: 894545 - DNA, 25 bp, Homo sapien
agtggactttcggtcacacagagga

SEQ ID NO: 894546 - DNA, 25 bp, Homo sapien
tacttgtgactgagcaaccatagtg

SEQ ID NO: 894547 - DNA, 25 bp, Homo sapien
caaccatagtggactttcggtcaca

SEQ ID NO: 894548 - DNA, 25 bp, Homo sapien
tgtgactgagcaaccatagtggact

SEQ ID NO: 894549 - DNA, 25 bp, Homo sapien
gctaatatctgctgtatgcagcata

SEQ ID NO: 894550 - DNA, 25 bp, Homo sapien
tccaggagtgacattgtccagcgat

SEQ ID NO: 894551 - DNA, 25 bp, Homo sapien
aggtcccatgcttttgctggatggc

SEQ ID NO: 894552 - DNA, 25 bp, Homo sapien
tccagcgatgatggaggtcccatgc

SEQ ID NO: 894553 - DNA, 25 bp, Homo sapien
tgcagagcagtcttcattgctttga

SEQ ID NO: 894554 - DNA, 25 bp, Homo sapien
gatttgttggaagtgacaagacata

SEQ ID NO: 894555 - DNA, 25 bp, Homo sapien
caccatttcaattaccaaggttcga

SEQ ID NO: 894556 - DNA, 25 bp, Homo sapien
caagacatatctgtggccatcacca

SEQ ID NO: 894557 - DNA, 25 bp, Homo sapien
gctctgttctgtccaatggaataga

SEQ ID NO: 894558 - DNA, 25 bp, Homo sapien
ctctgttctgtccaatggaatagaa

SEQ ID NO: 894559 - DNA, 25 bp, Homo sapien
tctgttctgtccaatggaatagaac

SEQ ID NO: 894560 - DNA, 25 bp, Homo sapien
ttaagtcaaatattcccatatgttt

SEQ ID NO: 894561 - DNA, 25 bp, Homo sapien
ggtgcaatgattaattgaattgctc

SEQ ID NO: 894562 - DNA, 25 bp, Homo sapien
ttttcagatgctggctgagtctagc

SEQ ID NO: 894563 - DNA, 25 bp, Homo sapien
ccaatagtaaaattggatagagggt

SEQ ID NO: 894564 - DNA, 25 bp, Homo sapien
gagagaaagcaacacgaatcaacat

SEQ ID NO: 894565 - DNA, 25 bp, Homo sapien
tcaaaaacagcatacttcatccaac

SEQ ID NO: 894566 - DNA, 25 bp, Homo sapien
ccctggcctacaaatctctctcttt

SEQ ID NO: 894567 - DNA, 25 bp, Homo sapien
acattccatagcctttatttataaa

SEQ ID NO: 894568 - DNA, 25 bp, Homo sapien
agctgcacttaaatggtgattctcc

SEQ ID NO: 894569 - DNA, 25 bp, Homo sapien
gtcatcctttgagaggttaatcaaa

SEQ ID NO: 894570 - DNA, 25 bp, Homo sapien
cattatacagaatagctggatcaga

SEQ ID NO: 894571 - DNA, 25 bp, Homo sapien
catcttgcagaaggcgataagctgc

SEQ ID NO: 894572 - DNA, 25 bp, Homo sapien
aacagttgtgatttacttgggtaat

SEQ ID NO: 894573 - DNA, 25 bp, Homo sapien
acagttgtgatttacttgggtaatt

SEQ ID NO: 894574 - DNA, 25 bp, Homo sapien
cagttgtgatttacttgggtaattc

SEQ ID NO: 894575 - DNA, 25 bp, Homo sapien
cgagtctgaatgtggaaattgttgg

SEQ ID NO: 894576 - DNA, 25 bp, Homo sapien
tatgctcgtagtcatggatggcagc

SEQ ID NO: 894577 - DNA, 25 bp, Homo sapien
agattatagcaaagatctccagctc

SEQ ID NO: 894578 - DNA, 25 bp, Homo sapien
gaaattgttggtggttccggtatgc

SEQ ID NO: 894579 - DNA, 25 bp, Homo sapien
agctggtaagctattgccaaacaca

SEQ ID NO: 894580 - DNA, 25 bp, Homo sapien
agtgctgcctttctaccctgcagct

SEQ ID NO: 894581 - DNA, 25 bp, Homo sapien
ttgctgacaacacacccacagtgct

SEQ ID NO: 894582 - DNA, 25 bp, Homo sapien
agcttgctgacaacacacccacagt

SEQ ID NO: 894583 - DNA, 25 bp, Homo sapien
taatgcactgtctgtgtaacatcgg

SEQ ID NO: 894584 - DNA, 25 bp, Homo sapien
cgccactcctgtcttatagaggagg

SEQ ID NO: 894585 - DNA, 25 bp, Homo sapien
tgcttgctgtatcccacttccaggg

SEQ ID NO: 894586 - DNA, 25 bp, Homo sapien
cggcagcgtgcattaagttatggta

SEQ ID NO: 894587 - DNA, 25 bp, Homo sapien
tgagggaaaagacgtcaaaggacca

SEQ ID NO: 894588 - DNA, 25 bp, Homo sapien
cttgaaacggctgatcagatcataa

SEQ ID NO: 894589 - DNA, 25 bp, Homo sapien
taaatttcagtgcatgatccccact

SEQ ID NO: 894590 - DNA, 25 bp, Homo sapien
cataacgtgtgagtagttcatagaa

SEQ ID NO: 894591 - DNA, 25 bp, Homo sapien
tcctaatgctgaatacttacagcca

SEQ ID NO: 894592 - DNA, 25 bp, Homo sapien
ggtaatcagataatgggacaattgc

SEQ ID NO: 894593 - DNA, 25 bp, Homo sapien
taacatatttgatctcgtatggcaa

SEQ ID NO: 894594 - DNA, 25 bp, Homo sapien
gacaattgcaaatactgaagatcct

SEQ ID NO: 894595 - DNA, 25 bp, Homo sapien
aagatgaagggtgaaaagacagtga

SEQ ID NO: 894596 - DNA, 25 bp, Homo sapien
gaataaagtcaggaataactggaaa

SEQ ID NO: 894597 - DNA, 25 bp, Homo sapien
gacagtgatactgttagaacaaata

SEQ ID NO: 894598 - DNA, 25 bp, Homo sapien
aatgaaagcctcttattttctaaca

SEQ ID NO: 894599 - DNA, 25 bp, Homo sapien
attgtaaaatcttttcactcgtatt

SEQ ID NO: 894600 - DNA, 25 bp, Homo sapien
ttgtaaaatcttttcactcgtatta

SEQ ID NO: 894601 - DNA, 25 bp, Homo sapien
tgtaaaatcttttcactcgtattac

SEQ ID NO: 894602 - DNA, 25 bp, Homo sapien
ctttaatgcctcaataacagctggt

SEQ ID NO: 894603 - DNA, 25 bp, Homo sapien
tggtggatagctcagtccaaccatg

SEQ ID NO: 894604 - DNA, 25 bp, Homo sapien
taatgcctcaataacagctggtgga

SEQ ID NO: 894605 - DNA, 25 bp, Homo sapien
accatgtttgatgtccgtctataca

SEQ ID NO: 894606 - DNA, 25 bp, Homo sapien
gcgtgaacgatgctcttgaaccggg

SEQ ID NO: 894607 - DNA, 25 bp, Homo sapien
agtctcggacctcagaaggcacagc

SEQ ID NO: 894608 - DNA, 25 bp, Homo sapien
acaaatatcccagcctgcactgcgt

SEQ ID NO: 894609 - DNA, 25 bp, Homo sapien
catctgccgcgtgaaggtggaggcc

SEQ ID NO: 894610 - DNA, 25 bp, Homo sapien
cagattcaagcactgtggctgcata

SEQ ID NO: 894611 - DNA, 25 bp, Homo sapien
ttgtttcatcaatatacacagattc

SEQ ID NO: 894612 - DNA, 25 bp, Homo sapien
tctaattgtttgaccaaagaccgta

SEQ ID NO: 894613 - DNA, 25 bp, Homo sapien
aattcttcttaagatctaccactga

SEQ ID NO: 894614 - DNA, 25 bp, Homo sapien
tctgctctgttgaaggcacttggtc

SEQ ID NO: 894615 - DNA, 25 bp, Homo sapien
tgttgaaggcacttggtccagcagt

SEQ ID NO: 894616 - DNA, 25 bp, Homo sapien
cagcagtggccccagataatggcag

SEQ ID NO: 894617 - DNA, 25 bp, Homo sapien
cagataatggcagccccatgaccca

SEQ ID NO: 894618 - DNA, 25 bp, Homo sapien
gatatcgctcaggtagtgacacaag

SEQ ID NO: 894619 - DNA, 25 bp, Homo sapien
taaaaatatgagcttgatatcgctc

SEQ ID NO: 894620 - DNA, 25 bp, Homo sapien
tttgtagatgaagaatgggactcct

SEQ ID NO: 894621 - DNA, 25 bp, Homo sapien
caaggtaaacgctaatacaggacca

SEQ ID NO: 894622 - DNA, 25 bp, Homo sapien
cataccaggtgatgctccgtgctct

SEQ ID NO: 894623 - DNA, 25 bp, Homo sapien
ataccaggtgatgctccgtgctctg

SEQ ID NO: 894624 - DNA, 25 bp, Homo sapien
cagtcccagacattagctagagatg

SEQ ID NO: 894625 - DNA, 25 bp, Homo sapien
tggatccatagtgccaggaggagct

SEQ ID NO: 894626 - DNA, 25 bp, Homo sapien
ggtcagggatcaaataggtgctaca

SEQ ID NO: 894627 - DNA, 25 bp, Homo sapien
gaagcagctgatagtgctgactgga

SEQ ID NO: 894628 - DNA, 25 bp, Homo sapien
attcacctccgtagcagccagtcag

SEQ ID NO: 894629 - DNA, 25 bp, Homo sapien
tagccttcttgtggtatattcacct

SEQ ID NO: 894630 - DNA, 25 bp, Homo sapien
agctagccttgttgaatatactccc

SEQ ID NO: 894631 - DNA, 25 bp, Homo sapien
tagccttgttgaatatactccccag

SEQ ID NO: 894632 - DNA, 25 bp, Homo sapien
cacaatgacgagagcatatttttaa

SEQ ID NO: 894633 - DNA, 25 bp, Homo sapien
ctgaggaccagttaacgtcatgtca

SEQ ID NO: 894634 - DNA, 25 bp, Homo sapien
ctcacaatgacgagagcatattttt

SEQ ID NO: 894635 - DNA, 25 bp, Homo sapien
tgtcaaggacaaatgggtgcatcat

SEQ ID NO: 894636 - DNA, 25 bp, Homo sapien
tccctgcctctgtctgaagcgctcc

SEQ ID NO: 894637 - DNA, 25 bp, Homo sapien
cccctccctgcctctgtctgaagcg

SEQ ID NO: 894638 - DNA, 25 bp, Homo sapien
cctgcctctgtctgaagcgctccat

SEQ ID NO: 894639 - DNA, 25 bp, Homo sapien
ctccctgcctctgtctgaagcgctc

SEQ ID NO: 894640 - DNA, 25 bp, Homo sapien
gaggagggagatacatatccagccc

SEQ ID NO: 894641 - DNA, 25 bp, Homo sapien
tccagggctaagtgatgacagaaac

SEQ ID NO: 894642 - DNA, 25 bp, Homo sapien
tggatgactccctaaaacaccacag

SEQ ID NO: 894643 - DNA, 25 bp, Homo sapien
tactcctggttacacagactcaaag

SEQ ID NO: 894644 - DNA, 25 bp, Homo sapien
cacaatgtgtggtagaaagggtcac

SEQ ID NO: 894645 - DNA, 25 bp, Homo sapien
tattttatggtcttgagtaagcccc

SEQ ID NO: 894646 - DNA, 25 bp, Homo sapien
tataactggcgatatgcaatagccc

SEQ ID NO: 894647 - DNA, 25 bp, Homo sapien
gcaccaagcccaaggagagctgcat

SEQ ID NO: 894648 - DNA, 25 bp, Homo sapien
tgtgaggcctagctgcaacagataa

SEQ ID NO: 894649 - DNA, 25 bp, Homo sapien
caagctccgctagtccaagtgagtc

SEQ ID NO: 894650 - DNA, 25 bp, Homo sapien
caacagataagcctggcagagagca

SEQ ID NO: 894651 - DNA, 25 bp, Homo sapien
tcttactgcatacaggccacctggc

SEQ ID NO: 894652 - DNA, 25 bp, Homo sapien
agagctccccaggtcactcgtctgt

SEQ ID NO: 894653 - DNA, 25 bp, Homo sapien
gccacagtgctagcatatgaggtag

SEQ ID NO: 894654 - DNA, 25 bp, Homo sapien
tagaccctcagtctggtaacactct

SEQ ID NO: 894655 - DNA, 25 bp, Homo sapien
tcaaagccatgttttgcattgcaga

SEQ ID NO: 894656 - DNA, 25 bp, Homo sapien
tggtcctggcagaaacgttaactct

SEQ ID NO: 894657 - DNA, 25 bp, Homo sapien
caaaccggaagaggctttgctccca

SEQ ID NO: 894658 - DNA, 25 bp, Homo sapien
aaattttggcacatccgtaccgtgg

SEQ ID NO: 894659 - DNA, 25 bp, Homo sapien
catactgctacacaactggtcctgg

SEQ ID NO: 894660 - DNA, 25 bp, Homo sapien
ggctcatcccatttggctccctggg

SEQ ID NO: 894661 - DNA, 25 bp, Homo sapien
cccagaaggtccgtgatgagggctc

SEQ ID NO: 894662 - DNA, 25 bp, Homo sapien
aggtccgtgatgagggctcatccca

SEQ ID NO: 894663 - DNA, 25 bp, Homo sapien
gatgagggctcatcccatttggctc

SEQ ID NO: 894664 - DNA, 25 bp, Homo sapien
ctggccactctatttcattgttcaa

SEQ ID NO: 894665 - DNA, 25 bp, Homo sapien
tagaattctggccactctatttcat

SEQ ID NO: 894666 - DNA, 25 bp, Homo sapien
aggaaatatcagaagttcgactggg

SEQ ID NO: 894667 - DNA, 25 bp, Homo sapien
gaattctggccactctatttcattg

SEQ ID NO: 894668 - DNA, 25 bp, Homo sapien
gatctgttccggttgcaggtatttc

SEQ ID NO: 894669 - DNA, 25 bp, Homo sapien
gattttctcgatctgttccggttgc

SEQ ID NO: 894670 - DNA, 25 bp, Homo sapien
tcaatctccttggttggcgactcca

SEQ ID NO: 894671 - DNA, 25 bp, Homo sapien
gcccgcggagccgaagccagatttt

SEQ ID NO: 894672 - DNA, 25 bp, Homo sapien
gctgagatagtttgggctgtcccct

SEQ ID NO: 894673 - DNA, 25 bp, Homo sapien
tgaccactggcggtgaagctgagat

SEQ ID NO: 894674 - DNA, 25 bp, Homo sapien
cgatcagcgcgcagctaaagggttt

SEQ ID NO: 894675 - DNA, 25 bp, Homo sapien
gactccgacttagagcggactccga

SEQ ID NO: 894676 - DNA, 25 bp, Homo sapien
tgagaaaagtcgtctgtcagcgccc

SEQ ID NO: 894677 - DNA, 25 bp, Homo sapien
tgcggagctgcgtgggcttccggaa

SEQ ID NO: 894678 - DNA, 25 bp, Homo sapien
tggtgtctgggctgtcaccgcgggc

SEQ ID NO: 894679 - DNA, 25 bp, Homo sapien
tgctgacaagcgagaaaactgacaa

SEQ ID NO: 894680 - DNA, 25 bp, Homo sapien
gccacagaaccggatccattttgaa

SEQ ID NO: 894681 - DNA, 25 bp, Homo sapien
aagagctcggctccgcgcgcaagta

SEQ ID NO: 894682 - DNA, 25 bp, Homo sapien
agggcacgcagaagccgcgaggctt

SEQ ID NO: 894683 - DNA, 25 bp, Homo sapien
ttcgcggaggttgggcctggaggtc

SEQ ID NO: 894684 - DNA, 25 bp, Homo sapien
acgctactcaagagggtccctcctg

SEQ ID NO: 894685 - DNA, 25 bp, Homo sapien
tcttcagatcaatatcacacgctac

SEQ ID NO: 894686 - DNA, 25 bp, Homo sapien
cttcagatcaatatcacacgctact

SEQ ID NO: 894687 - DNA, 25 bp, Homo sapien
cacgctactcaagagggtccctcct

SEQ ID NO: 894688 - DNA, 25 bp, Homo sapien
agccacaatttctactagcattctg

SEQ ID NO: 894689 - DNA, 25 bp, Homo sapien
ctctcttcatctatcacagccaaag

SEQ ID NO: 894690 - DNA, 25 bp, Homo sapien
acagccaaagtatgcttgatagttg

SEQ ID NO: 894691 - DNA, 25 bp, Homo sapien
caatttctactagcattctgctcag

SEQ ID NO: 894692 - DNA, 25 bp, Homo sapien
cattgtgcacagaggtcagctctcc

SEQ ID NO: 894693 - DNA, 25 bp, Homo sapien
gccaagggcattgtgcacagaggtc

SEQ ID NO: 894694 - DNA, 25 bp, Homo sapien
aagggcattgtgcacagaggtcagc

SEQ ID NO: 894695 - DNA, 25 bp, Homo sapien
ggcattgtgcacagaggtcagctct

SEQ ID NO: 894696 - DNA, 25 bp, Homo sapien
ttgattttataatttggggcagact

SEQ ID NO: 894697 - DNA, 25 bp, Homo sapien
ttctccctctgacgtctttttctgt

SEQ ID NO: 894698 - DNA, 25 bp, Homo sapien
tataatttggggcagactctgtctc

SEQ ID NO: 894699 - DNA, 25 bp, Homo sapien
cctgcttctccctctgacgtctttt

SEQ ID NO: 894700 - DNA, 25 bp, Homo sapien
tgccacagagactgtatgtcccaga

SEQ ID NO: 894701 - DNA, 25 bp, Homo sapien
caaactaaggccatgggtcaaatcc

SEQ ID NO: 894702 - DNA, 25 bp, Homo sapien
tcagcagaactgagtggttgccaca

SEQ ID NO: 894703 - DNA, 25 bp, Homo sapien
caaagaactcacttggtcaacagag

SEQ ID NO: 894704 - DNA, 25 bp, Homo sapien
tcagtaggaaaaaccccagagtcac

SEQ ID NO: 894705 - DNA, 25 bp, Homo sapien
gcagcaccttttgagtccatgctcc

SEQ ID NO: 894706 - DNA, 25 bp, Homo sapien
ttcagtaggaaaaaccccagagtca

SEQ ID NO: 894707 - DNA, 25 bp, Homo sapien
aagggctgtgcgactgcagcacctt

SEQ ID NO: 894708 - DNA, 25 bp, Homo sapien
agccagcagggtgcctcagcacttt

SEQ ID NO: 894709 - DNA, 25 bp, Homo sapien
aatagaggcagggagtgaatccagc

SEQ ID NO: 894710 - DNA, 25 bp, Homo sapien
gcctcagcactttggcctgccacag

SEQ ID NO: 894711 - DNA, 25 bp, Homo sapien
tcagcgtgcccactcgagagtgagg

SEQ ID NO: 894712 - DNA, 25 bp, Homo sapien
ggacgtgaaagtgactggccagaca

SEQ ID NO: 894713 - DNA, 25 bp, Homo sapien
caaacttctccagaagggacgtgaa

SEQ ID NO: 894714 - DNA, 25 bp, Homo sapien
gaacatagtgagtgcagtgcggcct

SEQ ID NO: 894715 - DNA, 25 bp, Homo sapien
catgtctgtcgctgactctgtgcac

SEQ ID NO: 894716 - DNA, 25 bp, Homo sapien
ccagcaccggattcaactcaactat

SEQ ID NO: 894717 - DNA, 25 bp, Homo sapien
agaactgactcccagcaccggattc

SEQ ID NO: 894718 - DNA, 25 bp, Homo sapien
aactcaactatcagagcagagctgc

SEQ ID NO: 894719 - DNA, 25 bp, Homo sapien
ggattcaactcaactatcagagcag

SEQ ID NO: 894720 - DNA, 25 bp, Homo sapien
gacaaggccttaatctcatccgtag

SEQ ID NO: 894721 - DNA, 25 bp, Homo sapien
ctggaacatattcttagtaagctat

SEQ ID NO: 894722 - DNA, 25 bp, Homo sapien
catccgtagctgagggtgttggctc

SEQ ID NO: 894723 - DNA, 25 bp, Homo sapien
gtgttggctcaatgcgattctgctc

SEQ ID NO: 894724 - DNA, 25 bp, Homo sapien
gaagcatgctcccaagactctgcta

SEQ ID NO: 894725 - DNA, 25 bp, Homo sapien
cagccatgaggagacctcaagccct

SEQ ID NO: 894726 - DNA, 25 bp, Homo sapien
taaactgtctgctccaatacataga

SEQ ID NO: 894727 - DNA, 25 bp, Homo sapien
aatacatagagtatgcctcatcagc

SEQ ID NO: 894728 - DNA, 25 bp, Homo sapien
gaaggaacacattgagttgcaatcc

SEQ ID NO: 894729 - DNA, 25 bp, Homo sapien
tctaactggattgaaacaactccac

SEQ ID NO: 894730 - DNA, 25 bp, Homo sapien
taatttgctggccacactgactatg

SEQ ID NO: 894731 - DNA, 25 bp, Homo sapien
ctccacaagcaaataagaaggaaca

SEQ ID NO: 894732 - DNA, 25 bp, Homo sapien
tgagggagttccacagacagttctg

SEQ ID NO: 894733 - DNA, 25 bp, Homo sapien
cctgtgagcccatcgatgagggagt

SEQ ID NO: 894734 - DNA, 25 bp, Homo sapien
tgtggcaattcatcagctaggatct

SEQ ID NO: 894735 - DNA, 25 bp, Homo sapien
tcgagggtcatggacaattgttggc

SEQ ID NO: 894736 - DNA, 25 bp, Homo sapien
tcttcaaaacagtcaaaggtaccaa

SEQ ID NO: 894737 - DNA, 25 bp, Homo sapien
ggggtgtccatccaaactgcttgtg

SEQ ID NO: 894738 - DNA, 25 bp, Homo sapien
ccttggggtgtccatccaaactgct

SEQ ID NO: 894739 - DNA, 25 bp, Homo sapien
ctcccttggggtgtccatccaaact

SEQ ID NO: 894740 - DNA, 25 bp, Homo sapien
gggtgtccatccaaactgcttgtgt

SEQ ID NO: 894741 - DNA, 25 bp, Homo sapien
aataatgccaggtgaatttaatggg

SEQ ID NO: 894742 - DNA, 25 bp, Homo sapien
ttaacaaaggaagctcaggctgcag

SEQ ID NO: 894743 - DNA, 25 bp, Homo sapien
ttgcatgcagcagtttgcagcttcc

SEQ ID NO: 894744 - DNA, 25 bp, Homo sapien
aggataaataatgccaggtgaattt

SEQ ID NO: 894745 - DNA, 25 bp, Homo sapien
ggaatattttcctttacaattgcca

SEQ ID NO: 894746 - DNA, 25 bp, Homo sapien
tggaatattttcctttacaattgcc

SEQ ID NO: 894747 - DNA, 25 bp, Homo sapien
ttggaatattttcctttacaattgc

SEQ ID NO: 894748 - DNA, 25 bp, Homo sapien
gaatattttcctttacaattgccat

SEQ ID NO: 894749 - DNA, 25 bp, Homo sapien
tctgtctcaaacgtagtacatgccc

SEQ ID NO: 894750 - DNA, 25 bp, Homo sapien
tccctggctgaactctagcactgtc

SEQ ID NO: 894751 - DNA, 25 bp, Homo sapien
ctgatctagtaaagttccctggctg

SEQ ID NO: 894752 - DNA, 25 bp, Homo sapien
gacatgattttgagttccctctggg

SEQ ID NO: 894753 - DNA, 25 bp, Homo sapien
gaggctttagactcctactcatagg

SEQ ID NO: 894754 - DNA, 25 bp, Homo sapien
tggaatccaggttttcgttccagga

SEQ ID NO: 894755 - DNA, 25 bp, Homo sapien
taatttgctgatcacactggtacag

SEQ ID NO: 894756 - DNA, 25 bp, Homo sapien
ggtacagaaaccattgagaggcttt

SEQ ID NO: 894757 - DNA, 25 bp, Homo sapien
cagtggtctggcattcttgtctcca

SEQ ID NO: 894758 - DNA, 25 bp, Homo sapien
agtggtctggcattcttgtctccag

SEQ ID NO: 894759 - DNA, 25 bp, Homo sapien
gagagaagcgggccagtggtctggc

SEQ ID NO: 894760 - DNA, 25 bp, Homo sapien
caaagacccaagcaatagcagagaa

SEQ ID NO: 894761 - DNA, 25 bp, Homo sapien
tgcaaagacccaagcaatagcagag

SEQ ID NO: 894762 - DNA, 25 bp, Homo sapien
cttgcaaagacccaagcaatagcag

SEQ ID NO: 894763 - DNA, 25 bp, Homo sapien
acttgcaaagacccaagcaatagca

SEQ ID NO: 894764 - DNA, 25 bp, Homo sapien
actgtgatgtccaggagcataaatc

SEQ ID NO: 894765 - DNA, 25 bp, Homo sapien
aaatcatcgcatcgttaccaactgg

SEQ ID NO: 894766 - DNA, 25 bp, Homo sapien
tccaggagcataaatcatcgcatcg

SEQ ID NO: 894767 - DNA, 25 bp, Homo sapien
cgcatcgttaccaactggcttcagg

SEQ ID NO: 894768 - DNA, 25 bp, Homo sapien
tcatgtcccctggtacttctctgac

SEQ ID NO: 894769 - DNA, 25 bp, Homo sapien
acatcatgtcccctggtacttctct

SEQ ID NO: 894770 - DNA, 25 bp, Homo sapien
tgtcccctggtacttctctgaccat

SEQ ID NO: 894771 - DNA, 25 bp, Homo sapien
catcatgtcccctggtacttctctg

SEQ ID NO: 894772 - DNA, 25 bp, Homo sapien
gggagaggtgctttgggccctgaag

SEQ ID NO: 894773 - DNA, 25 bp, Homo sapien
ctgttttgtaagggagaggtgcttt

SEQ ID NO: 894774 - DNA, 25 bp, Homo sapien
ggagaggtgctttgggccctgaaga

SEQ ID NO: 894775 - DNA, 25 bp, Homo sapien
tttgtaagggagaggtgctttgggc

SEQ ID NO: 894776 - DNA, 25 bp, Homo sapien
aacacaccgcaaaggcatcctgtca

SEQ ID NO: 894777 - DNA, 25 bp, Homo sapien
ggcatcctgtcatgggcttgcattt

SEQ ID NO: 894778 - DNA, 25 bp, Homo sapien
caggtttggctgtaacacaccgcaa

SEQ ID NO: 894779 - DNA, 25 bp, Homo sapien
cctgtcatgggcttgcatttctgaa

SEQ ID NO: 894780 - DNA, 25 bp, Homo sapien
tgtgtgacttggaaacaataggatc

SEQ ID NO: 894781 - DNA, 25 bp, Homo sapien
gtgtgacttggaaacaataggatct

SEQ ID NO: 894782 - DNA, 25 bp, Homo sapien
tgtgacttggaaacaataggatctg

SEQ ID NO: 894783 - DNA, 25 bp, Homo sapien
gtaaacacccggcacaaacctgcag

SEQ ID NO: 894784 - DNA, 25 bp, Homo sapien
aacccatcaagtgacatgaggtaaa

SEQ ID NO: 894785 - DNA, 25 bp, Homo sapien
caggaacccatcaagtgacatgagg

SEQ ID NO: 894786 - DNA, 25 bp, Homo sapien
ggaacccatcaagtgacatgaggta

SEQ ID NO: 894787 - DNA, 25 bp, Homo sapien
tcctgtttccaggcggactgatagg

SEQ ID NO: 894788 - DNA, 25 bp, Homo sapien
ccgggcccaaccagtctctagaggg

SEQ ID NO: 894789 - DNA, 25 bp, Homo sapien
tctagagggctgctacgaggctctt

SEQ ID NO: 894790 - DNA, 25 bp, Homo sapien
atcagactctgaggaccgggcccaa

SEQ ID NO: 894791 - DNA, 25 bp, Homo sapien
aagccaccaacactactgcagggag

SEQ ID NO: 894792 - DNA, 25 bp, Homo sapien
gagccaagctgggacatgcaggtcc

SEQ ID NO: 894793 - DNA, 25 bp, Homo sapien
cagcatgggagaacatctggcacac

SEQ ID NO: 894794 - DNA, 25 bp, Homo sapien
caaactgaagacaggttcctctgag

SEQ ID NO: 894795 - DNA, 25 bp, Homo sapien
ggtaccgcagctataggtgtgtcta

SEQ ID NO: 894796 - DNA, 25 bp, Homo sapien
caaaatcagttgtgtcaacaccata

SEQ ID NO: 894797 - DNA, 25 bp, Homo sapien
tcagcatgatgccaactgactcatc

SEQ ID NO: 894798 - DNA, 25 bp, Homo sapien
gaggtccatgagaaccagagggtaa

SEQ ID NO: 894799 - DNA, 25 bp, Homo sapien
tgcatagtcactcacaccagtgacc

SEQ ID NO: 894800 - DNA, 25 bp, Homo sapien
ctgcatagtcactcacaccagtgac

SEQ ID NO: 894801 - DNA, 25 bp, Homo sapien
ctttttgaagagcattggcatgcca

SEQ ID NO: 894802 - DNA, 25 bp, Homo sapien
taaaagaaagatgtggcttgccatc

SEQ ID NO: 894803 - DNA, 25 bp, Homo sapien
tagtaatagcatgctgaaattaagc

SEQ ID NO: 894804 - DNA, 25 bp, Homo sapien
tagtaacaatggtagtaatagcatg

SEQ ID NO: 894805 - DNA, 25 bp, Homo sapien
ttacagctgctatgacaacaagagg

SEQ ID NO: 894806 - DNA, 25 bp, Homo sapien
cagcagagacctcattaagggcatc

SEQ ID NO: 894807 - DNA, 25 bp, Homo sapien
ggtcccgtcccaatgcagagctttg

SEQ ID NO: 894808 - DNA, 25 bp, Homo sapien
tgatccagtgacttcaacggtcccg

SEQ ID NO: 894809 - DNA, 25 bp, Homo sapien
gaagcccagctcaggaccgtcattc

SEQ ID NO: 894810 - DNA, 25 bp, Homo sapien
agtggacacgccaggcacactgtgt

SEQ ID NO: 894811 - DNA, 25 bp, Homo sapien
tgtgtggctccggaaagtgcatcag

SEQ ID NO: 894812 - DNA, 25 bp, Homo sapien
gctgtgttccaagccaatcccgaag

SEQ ID NO: 894813 - DNA, 25 bp, Homo sapien
ggaagggacattgaacagacaccca

SEQ ID NO: 894814 - DNA, 25 bp, Homo sapien
agggacattgaacagacacccacag

SEQ ID NO: 894815 - DNA, 25 bp, Homo sapien
gggaagggacattgaacagacaccc

SEQ ID NO: 894816 - DNA, 25 bp, Homo sapien
gaagggacattgaacagacacccac

SEQ ID NO: 894817 - DNA, 25 bp, Homo sapien
gggcatgataaatctgcgtgtgact

SEQ ID NO: 894818 - DNA, 25 bp, Homo sapien
aatgggcatgataaatctgcgtgtg

SEQ ID NO: 894819 - DNA, 25 bp, Homo sapien
tgggcatgataaatctgcgtgtgac

SEQ ID NO: 894820 - DNA, 25 bp, Homo sapien
ggcatgataaatctgcgtgtgactc

SEQ ID NO: 894821 - DNA, 25 bp, Homo sapien
agttggcagctatctcacttggaag

SEQ ID NO: 894822 - DNA, 25 bp, Homo sapien
tattgaatgtttgccgtgtggcagg

SEQ ID NO: 894823 - DNA, 25 bp, Homo sapien
gaatacaaattccttgaacacagat

SEQ ID NO: 894824 - DNA, 25 bp, Homo sapien
tccccatgatattagcttagtgcct

SEQ ID NO: 894825 - DNA, 25 bp, Homo sapien
tcaatgctgtgttgagggaatggct

SEQ ID NO: 894826 - DNA, 25 bp, Homo sapien
aatgctgtgttgagggaatggcttt

SEQ ID NO: 894827 - DNA, 25 bp, Homo sapien
caatgctgtgttgagggaatggctt

SEQ ID NO: 894828 - DNA, 25 bp, Homo sapien
tgaagctgtagccatcgatgctgaa

SEQ ID NO: 894829 - DNA, 25 bp, Homo sapien
gcgctccggcattttttgaagccct

SEQ ID NO: 894830 - DNA, 25 bp, Homo sapien
catcgatgctgaaagtggcgctccg

SEQ ID NO: 894831 - DNA, 25 bp, Homo sapien
ctccttcctgttgccggcgtccgtc

SEQ ID NO: 894832 - DNA, 25 bp, Homo sapien
caatgtcaacagctaaagcgctagg

SEQ ID NO: 894833 - DNA, 25 bp, Homo sapien
atctccaagccgagttccagaggcg

SEQ ID NO: 894834 - DNA, 25 bp, Homo sapien
aatggctgaattggcgtcgtgcgtc

SEQ ID NO: 894835 - DNA, 25 bp, Homo sapien
cccgcgcgccacaggaaagtctgtt

SEQ ID NO: 894836 - DNA, 25 bp, Homo sapien
ctgtgacacccttgagggcatgttg

SEQ ID NO: 894837 - DNA, 25 bp, Homo sapien
agggcatgttgattcactgatgctc

SEQ ID NO: 894838 - DNA, 25 bp, Homo sapien
gagggcatgttgattcactgatgct

SEQ ID NO: 894839 - DNA, 25 bp, Homo sapien
gtgacacccttgagggcatgttgat

SEQ ID NO: 894840 - DNA, 25 bp, Homo sapien
ccatctggatatcttggcagagcct

SEQ ID NO: 894841 - DNA, 25 bp, Homo sapien
tgaccatctggatatcttggcagag

SEQ ID NO: 894842 - DNA, 25 bp, Homo sapien
gaaatgagaaggcttttagttgtgc

SEQ ID NO: 894843 - DNA, 25 bp, Homo sapien
atgctgaccatctggatatcttggc

SEQ ID NO: 894844 - DNA, 25 bp, Homo sapien
ctgctcatcccttggaacacggctg

SEQ ID NO: 894845 - DNA, 25 bp, Homo sapien
acacggctggcagctagataactgc

SEQ ID NO: 894846 - DNA, 25 bp, Homo sapien
atcccttggaacacggctggcagct

SEQ ID NO: 894847 - DNA, 25 bp, Homo sapien
cttggaacacggctggcagctagat

SEQ ID NO: 894848 - DNA, 25 bp, Homo sapien
ccttcaatagattgtaagttcttca

SEQ ID NO: 894849 - DNA, 25 bp, Homo sapien
ctccttcaatagattgtaagttctt

SEQ ID NO: 894850 - DNA, 25 bp, Homo sapien
tccttcaatagattgtaagttcttc

SEQ ID NO: 894851 - DNA, 25 bp, Homo sapien
cttcaatagattgtaagttcttcat

SEQ ID NO: 894852 - DNA, 25 bp, Homo sapien
ttgtcttttgccaggaacatcaaca

SEQ ID NO: 894853 - DNA, 25 bp, Homo sapien
ttattttgtcttttgccaggaacat

SEQ ID NO: 894854 - DNA, 25 bp, Homo sapien
cttttgccaggaacatcaacactca

SEQ ID NO: 894855 - DNA, 25 bp, Homo sapien
tttttccaacactaaagtcacatat

SEQ ID NO: 894856 - DNA, 25 bp, Homo sapien
tccattttatatctacccttaacca

SEQ ID NO: 894857 - DNA, 25 bp, Homo sapien
ccattttatatctacccttaaccat

SEQ ID NO: 894858 - DNA, 25 bp, Homo sapien
agctcttctcgatgtctcgccgcgg

SEQ ID NO: 894859 - DNA, 25 bp, Homo sapien
ctgcggcttcgtggccagcagggct

SEQ ID NO: 894860 - DNA, 25 bp, Homo sapien
cagcagggctgggacatactcgcct

SEQ ID NO: 894861 - DNA, 25 bp, Homo sapien
tgcctcgccaacttcggcagctctt

SEQ ID NO: 894862 - DNA, 25 bp, Homo sapien
tctccgacagcaacgggagcagccg

SEQ ID NO: 894863 - DNA, 25 bp, Homo sapien
ttttagggagcgcgaatgggtctcc

SEQ ID NO: 894864 - DNA, 25 bp, Homo sapien
ctcaggctgcggtggcaacgagccc

SEQ ID NO: 894865 - DNA, 25 bp, Homo sapien
actgcactacggctttgcgggaccg

SEQ ID NO: 894866 - DNA, 25 bp, Homo sapien
ctgcatattcaggactgatgattct

SEQ ID NO: 894867 - DNA, 25 bp, Homo sapien
tctgcatattcaggactgatgattc

SEQ ID NO: 894868 - DNA, 25 bp, Homo sapien
gtctgtggtgcattgcatctatgcc

SEQ ID NO: 894869 - DNA, 25 bp, Homo sapien
gacctgaggtgattgtctgtggtgc

SEQ ID NO: 894870 - DNA, 25 bp, Homo sapien
ggtgcattgcatctatgcccatgag

SEQ ID NO: 894871 - DNA, 25 bp, Homo sapien
tgtggtgcattgcatctatgcccat

SEQ ID NO: 894872 - DNA, 25 bp, Homo sapien
tgtccaagtcgaaaggatccccacc

SEQ ID NO: 894873 - DNA, 25 bp, Homo sapien
gaaaggatccccaccaaagtgcaac

SEQ ID NO: 894874 - DNA, 25 bp, Homo sapien
ggtggcctgtccaagtcgaaaggat

SEQ ID NO: 894875 - DNA, 25 bp, Homo sapien
aaagtgcaacacacccaactccaac

SEQ ID NO: 894876 - DNA, 25 bp, Homo sapien
agggttcctctaggctagatgctgc

SEQ ID NO: 894877 - DNA, 25 bp, Homo sapien
taggctagatgctgctgtccatccc

SEQ ID NO: 894878 - DNA, 25 bp, Homo sapien
tcctctaggctagatgctgctgtcc

SEQ ID NO: 894879 - DNA, 25 bp, Homo sapien
ctcagagggttcctctaggctagat

SEQ ID NO: 894880 - DNA, 25 bp, Homo sapien
gactaaagcgtctaacttcatctag

SEQ ID NO: 894881 - DNA, 25 bp, Homo sapien
tccaactctacccacgaggtgagga

SEQ ID NO: 894882 - DNA, 25 bp, Homo sapien
ctgcctcgggctgcaacttggaaac

SEQ ID NO: 894883 - DNA, 25 bp, Homo sapien
cgaggtgaggactaaagcgtctaac

SEQ ID NO: 894884 - DNA, 25 bp, Homo sapien
agccaattattgatgtcctctagaa

SEQ ID NO: 894885 - DNA, 25 bp, Homo sapien
ctgtctgacatagacagccaattat

SEQ ID NO: 894886 - DNA, 25 bp, Homo sapien
ctgacatagacagccaattattgat

SEQ ID NO: 894887 - DNA, 25 bp, Homo sapien
gatgtcctctagaatctgctgtgcc

SEQ ID NO: 894888 - DNA, 25 bp, Homo sapien
accaatacatggagctatagaggaa

SEQ ID NO: 894889 - DNA, 25 bp, Homo sapien
gcctcagagctgaagtggtataaac

SEQ ID NO: 894890 - DNA, 25 bp, Homo sapien
gagctatagaggaacatggctaaac

SEQ ID NO: 894891 - DNA, 25 bp, Homo sapien
cagcctcagagctgaagtggtataa

SEQ ID NO: 894892 - DNA, 25 bp, Homo sapien
tctgcagagtcatgtgttgtgccac

SEQ ID NO: 894893 - DNA, 25 bp, Homo sapien
catgcattgggtatgtcatccacaa

SEQ ID NO: 894894 - DNA, 25 bp, Homo sapien
cacaaggacagccacccagtcttta

SEQ ID NO: 894895 - DNA, 25 bp, Homo sapien
tggttccagcagacagtagcttgtc

SEQ ID NO: 894896 - DNA, 25 bp, Homo sapien
tctgtccatgaatggtggagtctct

SEQ ID NO: 894897 - DNA, 25 bp, Homo sapien
caaggcaagccatgttaggtctgtc

SEQ ID NO: 894898 - DNA, 25 bp, Homo sapien
agtctgcaatattctctcaggtcca

SEQ ID NO: 894899 - DNA, 25 bp, Homo sapien
ctgctttgggtgaaacaatgctgca

SEQ ID NO: 894900 - DNA, 25 bp, Homo sapien
cacagaactgcaggctccacatgta

SEQ ID NO: 894901 - DNA, 25 bp, Homo sapien
caggctccacatgtaagtcattcac

SEQ ID NO: 894902 - DNA, 25 bp, Homo sapien
aactgcaggctccacatgtaagtca

SEQ ID NO: 894903 - DNA, 25 bp, Homo sapien
cagaactgcaggctccacatgtaag

SEQ ID NO: 894904 - DNA, 25 bp, Homo sapien
cttcatgccagaggaccatgtggct

SEQ ID NO: 894905 - DNA, 25 bp, Homo sapien
tgagcagtgtgcagatccatagtac

SEQ ID NO: 894906 - DNA, 25 bp, Homo sapien
ggagaacatgagagtactgccttca

SEQ ID NO: 894907 - DNA, 25 bp, Homo sapien
gacatgctccaacccagctactgaa

SEQ ID NO: 894908 - DNA, 25 bp, Homo sapien
acaatgacataggcagcttggtctc

SEQ ID NO: 894909 - DNA, 25 bp, Homo sapien
cctcctgattgctgaacttcttagt

SEQ ID NO: 894910 - DNA, 25 bp, Homo sapien
ctcactatgctaacctcctgattgc

SEQ ID NO: 894911 - DNA, 25 bp, Homo sapien
gcaagagatgtcaaggtgtcattaa

SEQ ID NO: 894912 - DNA, 25 bp, Homo sapien
gggatgctcaaggtggtgatgtcag

SEQ ID NO: 894913 - DNA, 25 bp, Homo sapien
ggatgctcaaggtggtgatgtcagg

SEQ ID NO: 894914 - DNA, 25 bp, Homo sapien
tggacatagctggagcttggtggag

SEQ ID NO: 894915 - DNA, 25 bp, Homo sapien
attggacatagctggagcttggtgg

SEQ ID NO: 894916 - DNA, 25 bp, Homo sapien
ttagcatagactgtaaaatcactgc

SEQ ID NO: 894917 - DNA, 25 bp, Homo sapien
tcccttatgattggcaggaaaagcc

SEQ ID NO: 894918 - DNA, 25 bp, Homo sapien
catgttattttggtcactccttccc

SEQ ID NO: 894919 - DNA, 25 bp, Homo sapien
caaaccattgtaacttccccacatg

SEQ ID NO: 894920 - DNA, 25 bp, Homo sapien
caaagcagcacatttgagggactcc

SEQ ID NO: 894921 - DNA, 25 bp, Homo sapien
gaaagggtctcttcttgccacagag

SEQ ID NO: 894922 - DNA, 25 bp, Homo sapien
ggcaagttctgttccctaccaagac

SEQ ID NO: 894923 - DNA, 25 bp, Homo sapien
catgccctcgtgctagtgctgctag

SEQ ID NO: 894924 - DNA, 25 bp, Homo sapien
caagagtggtactcatagagcacca

SEQ ID NO: 894925 - DNA, 25 bp, Homo sapien
gaagtacacagagcgtcaatttggg

SEQ ID NO: 894926 - DNA, 25 bp, Homo sapien
tgatgtgagaagtaccagctccact

SEQ ID NO: 894927 - DNA, 25 bp, Homo sapien
gctccacttcttagagagatgtcag

SEQ ID NO: 894928 - DNA, 25 bp, Homo sapien
gatctagttagactactgtggccag

SEQ ID NO: 894929 - DNA, 25 bp, Homo sapien
tggtactatgaaagactcctggcaa

SEQ ID NO: 894930 - DNA, 25 bp, Homo sapien
tggcaaaagcctcaacagataagtc

SEQ ID NO: 894931 - DNA, 25 bp, Homo sapien
ttgatatcgcgacaaggcacaccag

SEQ ID NO: 894932 - DNA, 25 bp, Homo sapien
gtctacgaagacatacagcaaagca

SEQ ID NO: 894933 - DNA, 25 bp, Homo sapien
taaaacgtgtactgagagtggactg

SEQ ID NO: 894934 - DNA, 25 bp, Homo sapien
gagtggactgagaaagtctacgaag

SEQ ID NO: 894935 - DNA, 25 bp, Homo sapien
tgcttacctacaattctacgatgtg

SEQ ID NO: 894936 - DNA, 25 bp, Homo sapien
taaatgcacctgttcaaatcaaagt

SEQ ID NO: 894937 - DNA, 25 bp, Homo sapien
tcatttccggttgtttaaatgcacc

SEQ ID NO: 894938 - DNA, 25 bp, Homo sapien
caaactttgttccactggctactgc

SEQ ID NO: 894939 - DNA, 25 bp, Homo sapien
tgagaatcaaatggtcacgtaaatg

SEQ ID NO: 894940 - DNA, 25 bp, Homo sapien
aacaaaatctagtgtaagtcaagga

SEQ ID NO: 894941 - DNA, 25 bp, Homo sapien
aatctagtgtaagtcaaggaaactc

SEQ ID NO: 894942 - DNA, 25 bp, Homo sapien
tctagtgtaagtcaaggaaactcat

SEQ ID NO: 894943 - DNA, 25 bp, Homo sapien
caaaatctagtgtaagtcaaggaaa

SEQ ID NO: 894944 - DNA, 25 bp, Homo sapien
tcaggtccttctcctccaggaacca

SEQ ID NO: 894945 - DNA, 25 bp, Homo sapien
caggtccttctcctccaggaaccag

SEQ ID NO: 894946 - DNA, 25 bp, Homo sapien
ttcaggtccttctcctccaggaacc

SEQ ID NO: 894947 - DNA, 25 bp, Homo sapien
cttcaggtccttctcctccaggaac

SEQ ID NO: 894948 - DNA, 25 bp, Homo sapien
atctaatttagtaatccttcttcct

SEQ ID NO: 894949 - DNA, 25 bp, Homo sapien
gatctaatttagtaatccttcttcc

SEQ ID NO: 894950 - DNA, 25 bp, Homo sapien
taagacccacgtctatcagacagag

SEQ ID NO: 894951 - DNA, 25 bp, Homo sapien
tcagatacaaaggttatccactagg

SEQ ID NO: 894952 - DNA, 25 bp, Homo sapien
gaatgaactcactgacactaagacc

SEQ ID NO: 894953 - DNA, 25 bp, Homo sapien
cactgaggttgagcaattatatcca

SEQ ID NO: 894954 - DNA, 25 bp, Homo sapien
ctcagtgacatcttccagtaccata

SEQ ID NO: 894955 - DNA, 25 bp, Homo sapien
tcagtgacatcttccagtaccatat

SEQ ID NO: 894956 - DNA, 25 bp, Homo sapien
actcagtgacatcttccagtaccat

SEQ ID NO: 894957 - DNA, 25 bp, Homo sapien
aactcagtgacatcttccagtacca

SEQ ID NO: 894958 - DNA, 25 bp, Homo sapien
atttactctagcttctgcctttgtt

SEQ ID NO: 894959 - DNA, 25 bp, Homo sapien
tttactctagcttctgcctttgttc

SEQ ID NO: 894960 - DNA, 25 bp, Homo sapien
ccgtctttcaatacatacctcttaa

SEQ ID NO: 894961 - DNA, 25 bp, Homo sapien
aaaacattatcataagttccctgag

SEQ ID NO: 894962 - DNA, 25 bp, Homo sapien
tcacaaatatactgattgtctatag

SEQ ID NO: 894963 - DNA, 25 bp, Homo sapien
tgttgttgataggaactttaccgtc

SEQ ID NO: 894964 - DNA, 25 bp, Homo sapien
cactcttcatcacgatgtgaattct

SEQ ID NO: 894965 - DNA, 25 bp, Homo sapien
tttccttatcactcttcatcacgat

SEQ ID NO: 894966 - DNA, 25 bp, Homo sapien
tcacgatgtgaattcttgatcctat

SEQ ID NO: 894967 - DNA, 25 bp, Homo sapien
tcatcacgatgtgaattcttgatcc

SEQ ID NO: 894968 - DNA, 25 bp, Homo sapien
ctataacactgcagaggcgggctca

SEQ ID NO: 894969 - DNA, 25 bp, Homo sapien
tataacactgcagaggcgggctcac

SEQ ID NO: 894970 - DNA, 25 bp, Homo sapien
acaaagtaggccgacgacgcgttca

SEQ ID NO: 894971 - DNA, 25 bp, Homo sapien
actaaatgtggaccttttccagtga

SEQ ID NO: 894972 - DNA, 25 bp, Homo sapien
tgaaggtctggtttgagaagtcaaa

SEQ ID NO: 894973 - DNA, 25 bp, Homo sapien
gacgacgcgttcactaaatgtggac

SEQ ID NO: 894974 - DNA, 25 bp, Homo sapien
tgcggcctgctgtcgcgaagacttg

SEQ ID NO: 894975 - DNA, 25 bp, Homo sapien
ggagctcagagtcgaaccgcatttg

SEQ ID NO: 894976 - DNA, 25 bp, Homo sapien
ggagcccgaccacgttaaagagcag

SEQ ID NO: 894977 - DNA, 25 bp, Homo sapien
gtcgaaccgcatttggtcttataca

SEQ ID NO: 894978 - DNA, 25 bp, Homo sapien
ggttggtagtagcgttagccgccat

SEQ ID NO: 894979 - DNA, 25 bp, Homo sapien
gggttggtagtagcgttagccgcca

SEQ ID NO: 894980 - DNA, 25 bp, Homo sapien
ctgcgacgggttggtagtagcgtta

SEQ ID NO: 894981 - DNA, 25 bp, Homo sapien
ggcagcagctgcgacgggttggtag

SEQ ID NO: 894982 - DNA, 25 bp, Homo sapien
tagtcagctgcgtgggtcgcgttca

SEQ ID NO: 894983 - DNA, 25 bp, Homo sapien
ggacattttaccatctcggcagata

SEQ ID NO: 894984 - DNA, 25 bp, Homo sapien
caaacaggctcgaccaatctgaggc

SEQ ID NO: 894985 - DNA, 25 bp, Homo sapien
cctgccttcattgatggtgggacga

SEQ ID NO: 894986 - DNA, 25 bp, Homo sapien
tgccagatttgtttgtgacgcttct

SEQ ID NO: 894987 - DNA, 25 bp, Homo sapien
cattttcaggcacactgtagggcgc

SEQ ID NO: 894988 - DNA, 25 bp, Homo sapien
ggctcagagtgaagctacataaagc

SEQ ID NO: 894989 - DNA, 25 bp, Homo sapien
cagacataagccactttaaggaagc

SEQ ID NO: 894990 - DNA, 25 bp, Homo sapien
caccagtatgctccatgttactaca

SEQ ID NO: 894991 - DNA, 25 bp, Homo sapien
gaatacacagatacgcaacctcacc

SEQ ID NO: 894992 - DNA, 25 bp, Homo sapien
tcggagagtgaaccgaaaagatgtg

SEQ ID NO: 894993 - DNA, 25 bp, Homo sapien
tgaaggaatcggacactcggagagt

SEQ ID NO: 894994 - DNA, 25 bp, Homo sapien
gctcctcgtcaagtcccacccggac

SEQ ID NO: 894995 - DNA, 25 bp, Homo sapien
agcccagccgcccgggtcacgtaag

SEQ ID NO: 894996 - DNA, 25 bp, Homo sapien
aggtcccgcggacaccacaggctct

SEQ ID NO: 894997 - DNA, 25 bp, Homo sapien
agagtcgatctctcctctcctagac

SEQ ID NO: 894998 - DNA, 25 bp, Homo sapien
gctgcggaagcggatgagggaaggg

SEQ ID NO: 894999 - DNA, 25 bp, Homo sapien
ccctgtgcggccctcatgtgctgtg

SEQ ID NO: 895000 - DNA, 25 bp, Homo sapien
ggtgacagcccggaagctgcggaag

SEQ ID NO: 895001 - DNA, 25 bp, Homo sapien
gagctgctttgcctccaccgatctc

SEQ ID NO: 895002 - DNA, 25 bp, Homo sapien
ttcaaggtaataggctcagtgggct

SEQ ID NO: 895003 - DNA, 25 bp, Homo sapien
gatttcaccacaagaagggctgcca

SEQ ID NO: 895004 - DNA, 25 bp, Homo sapien
catgcagcctccgtagaaaaatcag

SEQ ID NO: 895005 - DNA, 25 bp, Homo sapien
ttctgcccctgaaaaatggttgagc

SEQ ID NO: 895006 - DNA, 25 bp, Homo sapien
cccattggtccttagttttgctatt

SEQ ID NO: 895007 - DNA, 25 bp, Homo sapien
taaaggcgtttttcagcagcctcac

SEQ ID NO: 895008 - DNA, 25 bp, Homo sapien
tgccttttggtgagagattaatctc

SEQ ID NO: 895009 - DNA, 25 bp, Homo sapien
tatcaaccgcaataagagaaagtgt

SEQ ID NO: 895010 - DNA, 25 bp, Homo sapien
ctgaaatggaatatttgcaatctat

SEQ ID NO: 895011 - DNA, 25 bp, Homo sapien
tgaaatggaatatttgcaatctatg

SEQ ID NO: 895012 - DNA, 25 bp, Homo sapien
gactgatatgaaaggctcacttgag

SEQ ID NO: 895013 - DNA, 25 bp, Homo sapien
aaattagttgcatgtgatagcgcac

SEQ ID NO: 895014 - DNA, 25 bp, Homo sapien
tgagaccagcttagataacaaaggg

SEQ ID NO: 895015 - DNA, 25 bp, Homo sapien
gaaatatatcctcacacctggaatg

SEQ ID NO: 895016 - DNA, 25 bp, Homo sapien
tcttccaagtattcaaaattgccgt

SEQ ID NO: 895017 - DNA, 25 bp, Homo sapien
agggtacttagactgctcttccaag

SEQ ID NO: 895018 - DNA, 25 bp, Homo sapien
ttgtgtgagggtacttagactgctc

SEQ ID NO: 895019 - DNA, 25 bp, Homo sapien
caagtattcaaaattgccgtgggtc

SEQ ID NO: 895020 - DNA, 25 bp, Homo sapien
ttagttctaaatgtgcgctgagatt

SEQ ID NO: 895021 - DNA, 25 bp, Homo sapien
gcgctgagattgtgcatagggaaga

SEQ ID NO: 895022 - DNA, 25 bp, Homo sapien
accacgcccagtcatgaccattagt

SEQ ID NO: 895023 - DNA, 25 bp, Homo sapien
gcccagtcatgaccattagttctaa

SEQ ID NO: 895024 - DNA, 25 bp, Homo sapien
ctattaactttatcacttgatcttt

SEQ ID NO: 895025 - DNA, 25 bp, Homo sapien
taaatgaacatctattaactttatc

SEQ ID NO: 895026 - DNA, 25 bp, Homo sapien
ttacaggcatcaggccagatgtatt

SEQ ID NO: 895027 - DNA, 25 bp, Homo sapien
catcaggccagatgtattttaaatg

SEQ ID NO: 895028 - DNA, 25 bp, Homo sapien
taagtatagagacttcattgtagcc

SEQ ID NO: 895029 - DNA, 25 bp, Homo sapien
gaatagcgctgcaaagaacatcctt

SEQ ID NO: 895030 - DNA, 25 bp, Homo sapien
agttactctgggtgactctcttcag

SEQ ID NO: 895031 - DNA, 25 bp, Homo sapien
gaaaaggtatcaaaccataatcatg

SEQ ID NO: 895032 - DNA, 25 bp, Homo sapien
ggctcaaccctcagctttgatgaga

SEQ ID NO: 895033 - DNA, 25 bp, Homo sapien
tgcaggagactttccttaagggcag

SEQ ID NO: 895034 - DNA, 25 bp, Homo sapien
ctttccctttctggcgtggaagcag

SEQ ID NO: 895035 - DNA, 25 bp, Homo sapien
aagcagctaactgagagggaggctc

SEQ ID NO: 895036 - DNA, 25 bp, Homo sapien
cattttctacgtccattaaatcagc

SEQ ID NO: 895037 - DNA, 25 bp, Homo sapien
ttttctacgtccattaaatcagcct

SEQ ID NO: 895038 - DNA, 25 bp, Homo sapien
acattttctacgtccattaaatcag

SEQ ID NO: 895039 - DNA, 25 bp, Homo sapien
ttctacgtccattaaatcagccttc

SEQ ID NO: 895040 - DNA, 25 bp, Homo sapien
ccagtatgaggaaagcaatctctcc

SEQ ID NO: 895041 - DNA, 25 bp, Homo sapien
tgtgggagtccacagtcctggaaat

SEQ ID NO: 895042 - DNA, 25 bp, Homo sapien
agatttgtgagccatcaggtctggt

SEQ ID NO: 895043 - DNA, 25 bp, Homo sapien
agtatgaggaaagcaatctctccag

SEQ ID NO: 895044 - DNA, 25 bp, Homo sapien
gatcttgtaggaggagcttaagagc

SEQ ID NO: 895045 - DNA, 25 bp, Homo sapien
cagaactgtacttttcgtagcttac

SEQ ID NO: 895046 - DNA, 25 bp, Homo sapien
gcagaactgtacttttcgtagctta

SEQ ID NO: 895047 - DNA, 25 bp, Homo sapien
gtaggaggagcttaagagcagaact

SEQ ID NO: 895048 - DNA, 25 bp, Homo sapien
tgtggtcccttggtttgatgccttt

SEQ ID NO: 895049 - DNA, 25 bp, Homo sapien
gaaacaaaaggccaaagctggtaca

SEQ ID NO: 895050 - DNA, 25 bp, Homo sapien
caaagctggtacactctctgcccat

SEQ ID NO: 895051 - DNA, 25 bp, Homo sapien
ccagaaacaaaaggccaaagctggt

SEQ ID NO: 895052 - DNA, 25 bp, Homo sapien
aaaaggccaaagctggtacactctc

SEQ ID NO: 895053 - DNA, 25 bp, Homo sapien
ccctcccctgacattgagtattatg

SEQ ID NO: 895054 - DNA, 25 bp, Homo sapien
taagaggctatttcagtcgttttaa

SEQ ID NO: 895055 - DNA, 25 bp, Homo sapien
acacagtgcgaaaccatatcattca

SEQ ID NO: 895056 - DNA, 25 bp, Homo sapien
cttaaaatcatgttaagtaaccttg

SEQ ID NO: 895057 - DNA, 25 bp, Homo sapien
ccattgctgtcacaagtactctgct

SEQ ID NO: 895058 - DNA, 25 bp, Homo sapien
tcacaagtactctgcttgcaaggtt

SEQ ID NO: 895059 - DNA, 25 bp, Homo sapien
tggaaccattgctgtcacaagtact

SEQ ID NO: 895060 - DNA, 25 bp, Homo sapien
ttgcaaggttgcttgcttgcatgcg

SEQ ID NO: 895061 - DNA, 25 bp, Homo sapien
gaatgcagattgtggcataccatgc

SEQ ID NO: 895062 - DNA, 25 bp, Homo sapien
catcgatcatgagattagagtggaa

SEQ ID NO: 895063 - DNA, 25 bp, Homo sapien
gaaacatgttttgatcttgcagaat

SEQ ID NO: 895064 - DNA, 25 bp, Homo sapien
cattttcgacacaaggtatggtacc

SEQ ID NO: 895065 - DNA, 25 bp, Homo sapien
catgggctccaaaatgaacgttgtg

SEQ ID NO: 895066 - DNA, 25 bp, Homo sapien
tgtacatcttcattagagcccttag

SEQ ID NO: 895067 - DNA, 25 bp, Homo sapien
agcccttagatgaccaggtgcattg

SEQ ID NO: 895068 - DNA, 25 bp, Homo sapien
aagtttttatcagtagtttgcagca

SEQ ID NO: 895069 - DNA, 25 bp, Homo sapien
gggatctgatcccaaacagtttggc

SEQ ID NO: 895070 - DNA, 25 bp, Homo sapien
tcacagaggttcataagaggcttag

SEQ ID NO: 895071 - DNA, 25 bp, Homo sapien
tgcccaggaggctgtaagcactgaa

SEQ ID NO: 895072 - DNA, 25 bp, Homo sapien
ggcttaggcccatactcttacaagt

SEQ ID NO: 895073 - DNA, 25 bp, Homo sapien
aaataccactggtttactgcatgag

SEQ ID NO: 895074 - DNA, 25 bp, Homo sapien
tatatggtcatacctggtttccaca

SEQ ID NO: 895075 - DNA, 25 bp, Homo sapien
tggactcctggatatatggtcatac

SEQ ID NO: 895076 - DNA, 25 bp, Homo sapien
tgacatatgcgaaaccaattaaagt

SEQ ID NO: 895077 - DNA, 25 bp, Homo sapien
gctaccaagattcaagctgcaccag

SEQ ID NO: 895078 - DNA, 25 bp, Homo sapien
tctaatagagagtgacaaaattttc

SEQ ID NO: 895079 - DNA, 25 bp, Homo sapien
ggcagagactcataataaaagtagg

SEQ ID NO: 895080 - DNA, 25 bp, Homo sapien
ggaactgctatcctctaaggtagta

SEQ ID NO: 895081 - DNA, 25 bp, Homo sapien
tacaaattaccaacgttagggatga

SEQ ID NO: 895082 - DNA, 25 bp, Homo sapien
tattaaagaaattgggccgaatgca

SEQ ID NO: 895083 - DNA, 25 bp, Homo sapien
gagggacattactgtagctcttaca

SEQ ID NO: 895084 - DNA, 25 bp, Homo sapien
gattcgcattaccaacacagttgca

SEQ ID NO: 895085 - DNA, 25 bp, Homo sapien
agttcacacttcaaggatctaggag

SEQ ID NO: 895086 - DNA, 25 bp, Homo sapien
aagcagcccaactcatgctttggaa

SEQ ID NO: 895087 - DNA, 25 bp, Homo sapien
ccagcaagatgctgatttgtctttc

SEQ ID NO: 895088 - DNA, 25 bp, Homo sapien
tttgtctttcagttggtatggtttc

SEQ ID NO: 895089 - DNA, 25 bp, Homo sapien
gaaccagcactaggtcatcttctga

SEQ ID NO: 895090 - DNA, 25 bp, Homo sapien
tacttcaggcttggattctaggctc

SEQ ID NO: 895091 - DNA, 25 bp, Homo sapien
cctttttcagatggcgccaggcaca

SEQ ID NO: 895092 - DNA, 25 bp, Homo sapien
tttgtacctaggtgtgagggaacca

SEQ ID NO: 895093 - DNA, 25 bp, Homo sapien
aagatgctgccctaattccccgagg

SEQ ID NO: 895094 - DNA, 25 bp, Homo sapien
gctgggactcttcatggcatcaaca

SEQ ID NO: 895095 - DNA, 25 bp, Homo sapien
cgtcagcagttgcagaaagtagcct

SEQ ID NO: 895096 - DNA, 25 bp, Homo sapien
catgcagcataatgtgccgtgagga

SEQ ID NO: 895097 - DNA, 25 bp, Homo sapien
accctgagggcctgacttaggaact

SEQ ID NO: 895098 - DNA, 25 bp, Homo sapien
taggaactggcttaacttcgtagct

SEQ ID NO: 895099 - DNA, 25 bp, Homo sapien
tgaaaaggcactagttcctgtgcgg

SEQ ID NO: 895100 - DNA, 25 bp, Homo sapien
accaactgaaaccttggctgctgct

SEQ ID NO: 895101 - DNA, 25 bp, Homo sapien
ggagacttgccatacagtgccacac

SEQ ID NO: 895102 - DNA, 25 bp, Homo sapien
tgaggactatgtaaagcggtgcttc

SEQ ID NO: 895103 - DNA, 25 bp, Homo sapien
tactccgtggaccttgctgttcagc

SEQ ID NO: 895104 - DNA, 25 bp, Homo sapien
gacacgttcagttcctactccgtgg

SEQ ID NO: 895105 - DNA, 25 bp, Homo sapien
gcctgggcaacaagagtgaaactcc

SEQ ID NO: 895106 - DNA, 25 bp, Homo sapien
tgggagaggaaggttgcggtgagcc

SEQ ID NO: 895107 - DNA, 25 bp, Homo sapien
aagatcacaccattgcactccagcc

SEQ ID NO: 895108 - DNA, 25 bp, Homo sapien
aacctgggagaggaaggttgcggtg

SEQ ID NO: 895109 - DNA, 25 bp, Homo sapien
gaaaactacaaatccaagaggctgg

SEQ ID NO: 895110 - DNA, 25 bp, Homo sapien
cacttggaagctgcgacagatttca

SEQ ID NO: 895111 - DNA, 25 bp, Homo sapien
taaagtcgggatgccataaataggt

SEQ ID NO: 895112 - DNA, 25 bp, Homo sapien
tcctctatggcaagtgaacagggct

SEQ ID NO: 895113 - DNA, 25 bp, Homo sapien
ctcacccggcctgctattactatta

SEQ ID NO: 895114 - DNA, 25 bp, Homo sapien
cactcacccggcctgctattactat

SEQ ID NO: 895115 - DNA, 25 bp, Homo sapien
actcacccggcctgctattactatt

SEQ ID NO: 895116 - DNA, 25 bp, Homo sapien
cacacaccaatcagaatggcgatta

SEQ ID NO: 895117 - DNA, 25 bp, Homo sapien
atcacacaccaatcagaatggcgat

SEQ ID NO: 895118 - DNA, 25 bp, Homo sapien
aaaaccataagataccatcacacac

SEQ ID NO: 895119 - DNA, 25 bp, Homo sapien
accataagataccatcacacaccaa

SEQ ID NO: 895120 - DNA, 25 bp, Homo sapien
cccgccatctttaaggaagcaaatg

SEQ ID NO: 895121 - DNA, 25 bp, Homo sapien
ctccggtgatggctgaccgatataa

SEQ ID NO: 895122 - DNA, 25 bp, Homo sapien
gatataattcaaacagcttcccgcc

SEQ ID NO: 895123 - DNA, 25 bp, Homo sapien
gcttcccgccatctttaaggaagca

SEQ ID NO: 895124 - DNA, 25 bp, Homo sapien
gaagccttaggaacaccacggccat

SEQ ID NO: 895125 - DNA, 25 bp, Homo sapien
ccatgggcgtgggaaggataccctt

SEQ ID NO: 895126 - DNA, 25 bp, Homo sapien
cccttgggattctcgcgaaacattc

SEQ ID NO: 895127 - DNA, 25 bp, Homo sapien
tgaagggcaaagtcgagtgagacca

SEQ ID NO: 895128 - DNA, 25 bp, Homo sapien
cacagacgtgtggaagaagctagga

SEQ ID NO: 895129 - DNA, 25 bp, Homo sapien
tactaggagaggaattctgtgtcca

SEQ ID NO: 895130 - DNA, 25 bp, Homo sapien
agaaagatctgtcctcacagacgtg

SEQ ID NO: 895131 - DNA, 25 bp, Homo sapien
ccatgcctggcctcgagatgtgctg

SEQ ID NO: 895132 - DNA, 25 bp, Homo sapien
cttcatacccaagagaattcagctg

SEQ ID NO: 895133 - DNA, 25 bp, Homo sapien
tcttcatacccaagagaattcagct

SEQ ID NO: 895134 - DNA, 25 bp, Homo sapien
ttcatacccaagagaattcagctga

SEQ ID NO: 895135 - DNA, 25 bp, Homo sapien
tccagaaagtactgtccaaggggaa

SEQ ID NO: 895136 - DNA, 25 bp, Homo sapien
ctcatctggaaatctagcagttcca

SEQ ID NO: 895137 - DNA, 25 bp, Homo sapien
gatccagaataaacagcactcatct

SEQ ID NO: 895138 - DNA, 25 bp, Homo sapien
gaaaaagacccacaacgttgatctg

SEQ ID NO: 895139 - DNA, 25 bp, Homo sapien
tatataaccctttaacaaagagaca

SEQ ID NO: 895140 - DNA, 25 bp, Homo sapien
caaagagacaagaagcgctatcgtg

SEQ ID NO: 895141 - DNA, 25 bp, Homo sapien
taacaaagagacaagaagcgctatc

SEQ ID NO: 895142 - DNA, 25 bp, Homo sapien
tttaacaaagagacaagaagcgcta

SEQ ID NO: 895143 - DNA, 25 bp, Homo sapien
gaagagagatctgtacacccacgtt

SEQ ID NO: 895144 - DNA, 25 bp, Homo sapien
tggctattacaaacaggtcaagact

SEQ ID NO: 895145 - DNA, 25 bp, Homo sapien
aatagtcatgtgaggagcattgcac

SEQ ID NO: 895146 - DNA, 25 bp, Homo sapien
gaaaataacaggtctcagccctcaa

SEQ ID NO: 895147 - DNA, 25 bp, Homo sapien
tcaaattcagatgccctcattattg

SEQ ID NO: 895148 - DNA, 25 bp, Homo sapien
tatactacagtaaaccactcagtgt

SEQ ID NO: 895149 - DNA, 25 bp, Homo sapien
ttagagctgggaaatacaattagcg

SEQ ID NO: 895150 - DNA, 25 bp, Homo sapien
aattatcaatgtatggccgatcttg

SEQ ID NO: 895151 - DNA, 25 bp, Homo sapien
ggtgaaaacaacagagctaagcatt

SEQ ID NO: 895152 - DNA, 25 bp, Homo sapien
tagacaatttgtaagatacattaaa

SEQ ID NO: 895153 - DNA, 25 bp, Homo sapien
tgagaataaggacaggaattggtga

SEQ ID NO: 895154 - DNA, 25 bp, Homo sapien
cagagctaagcatttcccttgggta

SEQ ID NO: 895155 - DNA, 25 bp, Homo sapien
gaaaaaagaatgagactataatacg

SEQ ID NO: 895156 - DNA, 25 bp, Homo sapien
aaagccttttacaagtaatgacttg

SEQ ID NO: 895157 - DNA, 25 bp, Homo sapien
aaagatggtgtctttaccagttaca

SEQ ID NO: 895158 - DNA, 25 bp, Homo sapien
taatacgatctccagttaaggctct

SEQ ID NO: 895159 - DNA, 25 bp, Homo sapien
ttattcttagcttattagattcttt

SEQ ID NO: 895160 - DNA, 25 bp, Homo sapien
attcttagcttattagattcttttc

SEQ ID NO: 895161 - DNA, 25 bp, Homo sapien
tcttagcttattagattcttttcaa

SEQ ID NO: 895162 - DNA, 25 bp, Homo sapien
ttcttagcttattagattcttttca

SEQ ID NO: 895163 - DNA, 25 bp, Homo sapien
caagtatttaagtatgacagttcca

SEQ ID NO: 895164 - DNA, 25 bp, Homo sapien
tgtcaagtatttaagtatgacagtt

SEQ ID NO: 895165 - DNA, 25 bp, Homo sapien
agtatttaagtatgacagttccaaa

SEQ ID NO: 895166 - DNA, 25 bp, Homo sapien
tcaagtatttaagtatgacagttcc

SEQ ID NO: 895167 - DNA, 25 bp, Homo sapien
aatgtggtttcattgccagaatacc

SEQ ID NO: 895168 - DNA, 25 bp, Homo sapien
aaacagccaaataagtaaggaatat

SEQ ID NO: 895169 - DNA, 25 bp, Homo sapien
aagaagcagcataataataacattg

SEQ ID NO: 895170 - DNA, 25 bp, Homo sapien
caacaaaacaaagtgcaagagaaat

SEQ ID NO: 895171 - DNA, 25 bp, Homo sapien
tgagttcccaaacatcacaacaaaa

SEQ ID NO: 895172 - DNA, 25 bp, Homo sapien
ccaaataattaccaaagaagcagca

SEQ ID NO: 895173 - DNA, 25 bp, Homo sapien
tagaatttctaatatcaacacattc

SEQ ID NO: 895174 - DNA, 25 bp, Homo sapien
atttctaatatcaacacattcctga

SEQ ID NO: 895175 - DNA, 25 bp, Homo sapien
gaatttctaatatcaacacattcct

SEQ ID NO: 895176 - DNA, 25 bp, Homo sapien
atagaatttctaatatcaacacatt

SEQ ID NO: 895177 - DNA, 25 bp, Homo sapien
acatatatcaatgtacccgacaaca

SEQ ID NO: 895178 - DNA, 25 bp, Homo sapien
tacatatatcaatgtacccgacaac

SEQ ID NO: 895179 - DNA, 25 bp, Homo sapien
ttacatatatcaatgtacccgacaa

SEQ ID NO: 895180 - DNA, 25 bp, Homo sapien
atatatcaatgtacccgacaacata

SEQ ID NO: 895181 - DNA, 25 bp, Homo sapien
gagtaagaagtacaaactgagcaaa

SEQ ID NO: 895182 - DNA, 25 bp, Homo sapien
tgagtaagaagtacaaactgagcaa

SEQ ID NO: 895183 - DNA, 25 bp, Homo sapien
ctgagtaagaagtacaaactgagca

SEQ ID NO: 895184 - DNA, 25 bp, Homo sapien
aatgcagagtgcaatcaaacttcct

SEQ ID NO: 895185 - DNA, 25 bp, Homo sapien
ctgccaaggaagcatgaaaaataaa

SEQ ID NO: 895186 - DNA, 25 bp, Homo sapien
attggaaatgcagagtgcaatcaaa

SEQ ID NO: 895187 - DNA, 25 bp, Homo sapien
aataaattggaaatgcagagtgcaa

SEQ ID NO: 895188 - DNA, 25 bp, Homo sapien
gtggtgtccacattacacaggtaca

SEQ ID NO: 895189 - DNA, 25 bp, Homo sapien
agaaatggatatgagaagctttcgc

SEQ ID NO: 895190 - DNA, 25 bp, Homo sapien
atatgagaagctttcgcggagaggt

SEQ ID NO: 895191 - DNA, 25 bp, Homo sapien
tgagaatatgagtcacaagcaacat

SEQ ID NO: 895192 - DNA, 25 bp, Homo sapien
aagcatcaaaaagtacctggagtac

SEQ ID NO: 895193 - DNA, 25 bp, Homo sapien
tgaaatgctactcccttaactaaga

SEQ ID NO: 895194 - DNA, 25 bp, Homo sapien
tggagtacagcaggccaaaacctta

SEQ ID NO: 895195 - DNA, 25 bp, Homo sapien
aattggtaagaaaaggtctctgcac

SEQ ID NO: 895196 - DNA, 25 bp, Homo sapien
tgtaaccaggcctcctaatcggctg

SEQ ID NO: 895197 - DNA, 25 bp, Homo sapien
gaagcacaacactgtaaccaggcct

SEQ ID NO: 895198 - DNA, 25 bp, Homo sapien
aaaaagaagcacaacactgtaacca

SEQ ID NO: 895199 - DNA, 25 bp, Homo sapien
caacactgtaaccaggcctcctaat

SEQ ID NO: 895200 - DNA, 25 bp, Homo sapien
gaaggagataatcaacaagctcaat

SEQ ID NO: 895201 - DNA, 25 bp, Homo sapien
ggaaacatattagggatctgaagga

SEQ ID NO: 895202 - DNA, 25 bp, Homo sapien
caggtcaagtaagctaaaggaaaca

SEQ ID NO: 895203 - DNA, 25 bp, Homo sapien
gggatctgaaggagataatcaacaa

SEQ ID NO: 895204 - DNA, 25 bp, Homo sapien
tatgaaagctcctattgtgcaaatt

SEQ ID NO: 895205 - DNA, 25 bp, Homo sapien
aaagtctctcctgcaatattaccac

SEQ ID NO: 895206 - DNA, 25 bp, Homo sapien
catacaggctactaagtaagtcctg

SEQ ID NO: 895207 - DNA, 25 bp, Homo sapien
tcccattatagttgatcagttgaca

SEQ ID NO: 895208 - DNA, 25 bp, Homo sapien
agaagacctcctctgacggcacttg

SEQ ID NO: 895209 - DNA, 25 bp, Homo sapien
aagacctcctctgacggcacttgat

SEQ ID NO: 895210 - DNA, 25 bp, Homo sapien
ttctccagaagacctcctctgacgg

SEQ ID NO: 895211 - DNA, 25 bp, Homo sapien
ccagaagacctcctctgacggcact

SEQ ID NO: 895212 - DNA, 25 bp, Homo sapien
aatttttgtctatccttcagctcca

SEQ ID NO: 895213 - DNA, 25 bp, Homo sapien
ggaatttttgtctatccttcagctc

SEQ ID NO: 895214 - DNA, 25 bp, Homo sapien
gaatttttgtctatccttcagctcc

SEQ ID NO: 895215 - DNA, 25 bp, Homo sapien
taatatacatcaggatcaattgtgg

SEQ ID NO: 895216 - DNA, 25 bp, Homo sapien
gaagaaccttcagtttaggatgcct

SEQ ID NO: 895217 - DNA, 25 bp, Homo sapien
taggatgcctttgaatagagctaaa

SEQ ID NO: 895218 - DNA, 25 bp, Homo sapien
tagagctaaagagatggttccgggt

SEQ ID NO: 895219 - DNA, 25 bp, Homo sapien
taaaaattacagcaacatagaagca

SEQ ID NO: 895220 - DNA, 25 bp, Homo sapien
aatatgtgccatatatgaagaataa

SEQ ID NO: 895221 - DNA, 25 bp, Homo sapien
gccatatatgaagaataatgccatc

SEQ ID NO: 895222 - DNA, 25 bp, Homo sapien
tagaagcaagcaagatctcccaatc

SEQ ID NO: 895223 - DNA, 25 bp, Homo sapien
gccttggttcccacatgaaaaccca

SEQ ID NO: 895224 - DNA, 25 bp, Homo sapien
gttgccttggttcccacatgaaaac

SEQ ID NO: 895225 - DNA, 25 bp, Homo sapien
tgccttggttcccacatgaaaaccc

SEQ ID NO: 895226 - DNA, 25 bp, Homo sapien
tagttgccttggttcccacatgaaa

SEQ ID NO: 895227 - DNA, 25 bp, Homo sapien
ccgacatatcttggtttgaattgca

SEQ ID NO: 895228 - DNA, 25 bp, Homo sapien
ttctcctctggtaaccgtccgacat

SEQ ID NO: 895229 - DNA, 25 bp, Homo sapien
cttggtttgaattgcaatgaagtcc

SEQ ID NO: 895230 - DNA, 25 bp, Homo sapien
tttcagtaggactgagtccttctcc

SEQ ID NO: 895231 - DNA, 25 bp, Homo sapien
tattttggtataaatccagtaccag

SEQ ID NO: 895232 - DNA, 25 bp, Homo sapien
catactccattcaaaaatgagggtg

SEQ ID NO: 895233 - DNA, 25 bp, Homo sapien
ccatactccattcaaaaatgagggt

SEQ ID NO: 895234 - DNA, 25 bp, Homo sapien
gtattcagtcagtttatcattcata

SEQ ID NO: 895235 - DNA, 25 bp, Homo sapien
agtcagtttatcattcataatcatc

SEQ ID NO: 895236 - DNA, 25 bp, Homo sapien
cataattatgatgcctcttcgaagt

SEQ ID NO: 895237 - DNA, 25 bp, Homo sapien
taacaaaaggtacataattatgatg

SEQ ID NO: 895238 - DNA, 25 bp, Homo sapien
ggtacataattatgatgcctcttcg

SEQ ID NO: 895239 - DNA, 25 bp, Homo sapien
gaaataaggatatgctcagttaaaa

SEQ ID NO: 895240 - DNA, 25 bp, Homo sapien
atttattccatgaccattgcccggg

SEQ ID NO: 895241 - DNA, 25 bp, Homo sapien
tcttgggatcagaacagatattcac

SEQ ID NO: 895242 - DNA, 25 bp, Homo sapien
gatactccatggattgctggtccta

SEQ ID NO: 895243 - DNA, 25 bp, Homo sapien
gcccgggtttccaatgctcttcaga

SEQ ID NO: 895244 - DNA, 25 bp, Homo sapien
caagggacttttctccatactagga

SEQ ID NO: 895245 - DNA, 25 bp, Homo sapien
gacaatggtctggatctctgagata

SEQ ID NO: 895246 - DNA, 25 bp, Homo sapien
taggaactctaaaatctgacaatgg

SEQ ID NO: 895247 - DNA, 25 bp, Homo sapien
taggcaaggcatcttgtaggtacag

SEQ ID NO: 895248 - DNA, 25 bp, Homo sapien
ccccaagagggacagactgacacct

SEQ ID NO: 895249 - DNA, 25 bp, Homo sapien
aattccagaggaacgatcagacagc

SEQ ID NO: 895250 - DNA, 25 bp, Homo sapien
ccaagagggacagactgacacctca

SEQ ID NO: 895251 - DNA, 25 bp, Homo sapien
ggaggcaccccccaagagggacaga

SEQ ID NO: 895252 - DNA, 25 bp, Homo sapien
tgtagttatctaaaacctgtagcct

SEQ ID NO: 895253 - DNA, 25 bp, Homo sapien
cctgtagcctacactcttaaatgga

SEQ ID NO: 895254 - DNA, 25 bp, Homo sapien
gtcagagtacctaaactttgaagag

SEQ ID NO: 895255 - DNA, 25 bp, Homo sapien
tgaaactggttgtcctgttagaaac

SEQ ID NO: 895256 - DNA, 25 bp, Homo sapien
ctgagaatcaaagttaaaatataca

SEQ ID NO: 895257 - DNA, 25 bp, Homo sapien
tgagaatcaaagttaaaatatacat

SEQ ID NO: 895258 - DNA, 25 bp, Homo sapien
ctgaagtacaaggaatggataggaa

SEQ ID NO: 895259 - DNA, 25 bp, Homo sapien
gttgtgtccacatcacacgggtgac

SEQ ID NO: 895260 - DNA, 25 bp, Homo sapien
tggataggaaaaactttcacggaga

SEQ ID NO: 895261 - DNA, 25 bp, Homo sapien
aactttcacggagaggttgtgtcca

SEQ ID NO: 895262 - DNA, 25 bp, Homo sapien
ttaggtggactatgtttcattgggc

SEQ ID NO: 895263 - DNA, 25 bp, Homo sapien
tgaacagacagcatgacgtaacaca

SEQ ID NO: 895264 - DNA, 25 bp, Homo sapien
cagagtatggacatggtatatacca

SEQ ID NO: 895265 - DNA, 25 bp, Homo sapien
gcttctatgagctcttttttaggtg

SEQ ID NO: 895266 - DNA, 25 bp, Homo sapien
ggcctgaggcctctttcattgttgt

SEQ ID NO: 895267 - DNA, 25 bp, Homo sapien
ctttcattgttgttaaggggagtgc

SEQ ID NO: 895268 - DNA, 25 bp, Homo sapien
gtggcagtgtcttaaccgtgtccct

SEQ ID NO: 895269 - DNA, 25 bp, Homo sapien
accgtgtccctgctgtcaggcctga

SEQ ID NO: 895270 - DNA, 25 bp, Homo sapien
taaaatattgtgaagtcataagtag

SEQ ID NO: 895271 - DNA, 25 bp, Homo sapien
tattgtgaagtcataagtagtatac

SEQ ID NO: 895272 - DNA, 25 bp, Homo sapien
gtgaagtcataagtagtatacaatt

SEQ ID NO: 895273 - DNA, 25 bp, Homo sapien
aaatattgtgaagtcataagtagta

SEQ ID NO: 895274 - DNA, 25 bp, Homo sapien
gtttatgaatgtttacaaatgacag

SEQ ID NO: 895275 - DNA, 25 bp, Homo sapien
tgtttatgaatgtttacaaatgaca

SEQ ID NO: 895276 - DNA, 25 bp, Homo sapien
gatgtgcgacaccaggaggctatga

SEQ ID NO: 895277 - DNA, 25 bp, Homo sapien
ttcattattcccatggatgtgcgac

SEQ ID NO: 895278 - DNA, 25 bp, Homo sapien
ttattcccatggatgtgcgacacca

SEQ ID NO: 895279 - DNA, 25 bp, Homo sapien
cattattcccatggatgtgcgacac

SEQ ID NO: 895280 - DNA, 25 bp, Homo sapien
gtgatggttgccttagacattataa

SEQ ID NO: 895281 - DNA, 25 bp, Homo sapien
attacacattatgcctctatataga

SEQ ID NO: 895282 - DNA, 25 bp, Homo sapien
tttgtgatggttgccttagacatta

SEQ ID NO: 895283 - DNA, 25 bp, Homo sapien
ttagatcatttcacttaggaatcag

SEQ ID NO: 895284 - DNA, 25 bp, Homo sapien
cgccgtgggagccggaggatggcgg

SEQ ID NO: 895285 - DNA, 25 bp, Homo sapien
gccgtgggagccggaggatggcggc

SEQ ID NO: 895286 - DNA, 25 bp, Homo sapien
tgcccaccgccccgagaagagcgcg

SEQ ID NO: 895287 - DNA, 25 bp, Homo sapien
ccgcgtcaggccgccagccttgccc

SEQ ID NO: 895288 - DNA, 25 bp, Homo sapien
ttgcccaccgccccgagaagagcgc

SEQ ID NO: 895289 - DNA, 25 bp, Homo sapien
gcccgcgtcaggccgccagccttgc

SEQ ID NO: 895290 - DNA, 25 bp, Homo sapien
ggcgcacgcgcgcgtactcggctcg

SEQ ID NO: 895291 - DNA, 25 bp, Homo sapien
ctaacggcgcacgcgcgcgtactcg

SEQ ID NO: 895292 - DNA, 25 bp, Homo sapien
taacggcgcacgcgcgcgtactcgg

SEQ ID NO: 895293 - DNA, 25 bp, Homo sapien
gcacgcgcgcgtactcggctcggat

SEQ ID NO: 895294 - DNA, 25 bp, Homo sapien
tagcagcggagtggccaatgggacc

SEQ ID NO: 895295 - DNA, 25 bp, Homo sapien
ggagtggccaatgggaccgggacca

SEQ ID NO: 895296 - DNA, 25 bp, Homo sapien
cagcggagtggccaatgggaccggg

SEQ ID NO: 895297 - DNA, 25 bp, Homo sapien
cttccagtagcagcggagtggccaa

SEQ ID NO: 895298 - DNA, 25 bp, Homo sapien
catgtttggaggtacggacccctct

SEQ ID NO: 895299 - DNA, 25 bp, Homo sapien
tgcttcccggcccagcccgccaggg

SEQ ID NO: 895300 - DNA, 25 bp, Homo sapien
ggcccagcccgccaggggctgcttc

SEQ ID NO: 895301 - DNA, 25 bp, Homo sapien
cggcccagcccgcgccggtctccat

SEQ ID NO: 895302 - DNA, 25 bp, Homo sapien
ccggcccagcccgcgccggtctcca

SEQ ID NO: 895303 - DNA, 25 bp, Homo sapien
gagttctttggaggattgccattag

SEQ ID NO: 895304 - DNA, 25 bp, Homo sapien
taactccttttgtccactcttcctc

SEQ ID NO: 895305 - DNA, 25 bp, Homo sapien
tcctccaccttaccatacacagagt

SEQ ID NO: 895306 - DNA, 25 bp, Homo sapien
aaatgtcagttccttaataactcct

SEQ ID NO: 895307 - DNA, 25 bp, Homo sapien
cttgggatgctgttaatctataacc

SEQ ID NO: 895308 - DNA, 25 bp, Homo sapien
ccttgggatgctgttaatctataac

SEQ ID NO: 895309 - DNA, 25 bp, Homo sapien
gggatgctgttaatctataacctta

SEQ ID NO: 895310 - DNA, 25 bp, Homo sapien
aagtagatataggagactccatttt

SEQ ID NO: 895311 - DNA, 25 bp, Homo sapien
tacactagaaaagctagatattttt

SEQ ID NO: 895312 - DNA, 25 bp, Homo sapien
aaatacactagaaaagctagatatt

SEQ ID NO: 895313 - DNA, 25 bp, Homo sapien
atatgtataaaatggcgtacataaa

SEQ ID NO: 895314 - DNA, 25 bp, Homo sapien
tatgtataaaatggcgtacataaag

SEQ ID NO: 895315 - DNA, 25 bp, Homo sapien
caatgtaaaattgccacaaagacgg

SEQ ID NO: 895316 - DNA, 25 bp, Homo sapien
tgctggagaactgccgcgcctgcag

SEQ ID NO: 895317 - DNA, 25 bp, Homo sapien
cgatgccaagagtggtcctgctgga

SEQ ID NO: 895318 - DNA, 25 bp, Homo sapien
ccttttcccgaagctgcgccaggaa

SEQ ID NO: 895319 - DNA, 25 bp, Homo sapien
aagctgcgccaggaaattatggacg

SEQ ID NO: 895320 - DNA, 25 bp, Homo sapien
tttcggatcctccgcgtggagcacc

SEQ ID NO: 895321 - DNA, 25 bp, Homo sapien
gtgctttcagatttcggatcctccg

SEQ ID NO: 895322 - DNA, 25 bp, Homo sapien
ggatcctccgcgtggagcaccttgg

SEQ ID NO: 895323 - DNA, 25 bp, Homo sapien
ttgtgctttcagatttcggatcctc

SEQ ID NO: 895324 - DNA, 25 bp, Homo sapien
ccacattcagctggagtggccacaa

SEQ ID NO: 895325 - DNA, 25 bp, Homo sapien
aatgccagtcgtcacttcaaaacag

SEQ ID NO: 895326 - DNA, 25 bp, Homo sapien
tggccacaatgccagtcgtcacttc

SEQ ID NO: 895327 - DNA, 25 bp, Homo sapien
gtccacattcagctggagtggccac

SEQ ID NO: 895328 - DNA, 25 bp, Homo sapien
cctggtgccacttctcactgcttac

SEQ ID NO: 895329 - DNA, 25 bp, Homo sapien
tgcctggtgccacttctcactgctt

SEQ ID NO: 895330 - DNA, 25 bp, Homo sapien
cctgtgcctggtgccacttctcact

SEQ ID NO: 895331 - DNA, 25 bp, Homo sapien
ctgtgcctggtgccacttctcactg

SEQ ID NO: 895332 - DNA, 25 bp, Homo sapien
ggcacatggacaccggtggttccca

SEQ ID NO: 895333 - DNA, 25 bp, Homo sapien
cacatggacaccggtggttcccaaa

SEQ ID NO: 895334 - DNA, 25 bp, Homo sapien
catggacaccggtggttcccaaaat

SEQ ID NO: 895335 - DNA, 25 bp, Homo sapien
agggcacatggacaccggtggttcc

SEQ ID NO: 895336 - DNA, 25 bp, Homo sapien
ttggggccagatggttagagaagat

SEQ ID NO: 895337 - DNA, 25 bp, Homo sapien
gatgcagtgacaatgtgggcctgct

SEQ ID NO: 895338 - DNA, 25 bp, Homo sapien
atgcagtgacaatgtgggcctgctc

SEQ ID NO: 895339 - DNA, 25 bp, Homo sapien
aggatgcagtgacaatgtgggcctg

SEQ ID NO: 895340 - DNA, 25 bp, Homo sapien
ccttctgcttcatgtagatatcata

SEQ ID NO: 895341 - DNA, 25 bp, Homo sapien
gcttcatgtagatatcatacagaat

SEQ ID NO: 895342 - DNA, 25 bp, Homo sapien
cttctgcttcatgtagatatcatac

SEQ ID NO: 895343 - DNA, 25 bp, Homo sapien
tctgcttcatgtagatatcatacag

SEQ ID NO: 895344 - DNA, 25 bp, Homo sapien
tttacaatgccgaaatttttcttca

SEQ ID NO: 895345 - DNA, 25 bp, Homo sapien
caaagtttcagctgtagtatgcagc

SEQ ID NO: 895346 - DNA, 25 bp, Homo sapien
tccttgttctcacttagaaacaatt

SEQ ID NO: 895347 - DNA, 25 bp, Homo sapien
gaggaaggtggaacttctcacagaa

SEQ ID NO: 895348 - DNA, 25 bp, Homo sapien
aaaagaatgactgctacatgacctg

SEQ ID NO: 895349 - DNA, 25 bp, Homo sapien
taatgttttgctaagtcatgtgttg

SEQ ID NO: 895350 - DNA, 25 bp, Homo sapien
gagaactacatctctaatggtttta

SEQ ID NO: 895351 - DNA, 25 bp, Homo sapien
gacctgctgcctacggagaactaca

SEQ ID NO: 895352 - DNA, 25 bp, Homo sapien
tttgctttgcggaactatctgtctg

SEQ ID NO: 895353 - DNA, 25 bp, Homo sapien
caaggatgacgtgaaaatacaggac

SEQ ID NO: 895354 - DNA, 25 bp, Homo sapien
taagttcttcggtcatgtcagcccc

SEQ ID NO: 895355 - DNA, 25 bp, Homo sapien
tgttaatgaagcttttcctgcccat

SEQ ID NO: 895356 - DNA, 25 bp, Homo sapien
tttttagcattattcaaatgtttac

SEQ ID NO: 895357 - DNA, 25 bp, Homo sapien
ttttttagcattattcaaatgttta

SEQ ID NO: 895358 - DNA, 25 bp, Homo sapien
tggaagccgctgttccctttctacc

SEQ ID NO: 895359 - DNA, 25 bp, Homo sapien
ggtgcccattcctggaagccgctgt

SEQ ID NO: 895360 - DNA, 25 bp, Homo sapien
tcaggcatggtttctggtgcccatt

SEQ ID NO: 895361 - DNA, 25 bp, Homo sapien
cattcctggaagccgctgttccctt

SEQ ID NO: 895362 - DNA, 25 bp, Homo sapien
tgcccagagccgcagctcctaggga

SEQ ID NO: 895363 - DNA, 25 bp, Homo sapien
gggcgggactcattgactgatttca

SEQ ID NO: 895364 - DNA, 25 bp, Homo sapien
tggtgaccagccatagacacatttg

SEQ ID NO: 895365 - DNA, 25 bp, Homo sapien
cttggtaggtactttcagacatggc

SEQ ID NO: 895366 - DNA, 25 bp, Homo sapien
gacagtttatgttttccagccatgg

SEQ ID NO: 895367 - DNA, 25 bp, Homo sapien
gacagtactcagctgaacagcttgc

SEQ ID NO: 895368 - DNA, 25 bp, Homo sapien
agaagagcttggaaaaatgcgtggc

SEQ ID NO: 895369 - DNA, 25 bp, Homo sapien
tggaaaaatgcgtggcagcctgatg

SEQ ID NO: 895370 - DNA, 25 bp, Homo sapien
gggaagaacaagacagtactcagct

SEQ ID NO: 895371 - DNA, 25 bp, Homo sapien
cttctagtcccctctttatttatct

SEQ ID NO: 895372 - DNA, 25 bp, Homo sapien
cacttctagtcccctctttatttat

SEQ ID NO: 895373 - DNA, 25 bp, Homo sapien
ctgccaactcaagacgcagcatgtc

SEQ ID NO: 895374 - DNA, 25 bp, Homo sapien
tccaaacactgccaactcaagacgc

SEQ ID NO: 895375 - DNA, 25 bp, Homo sapien
gaagcactgggtcacagttactgcc

SEQ ID NO: 895376 - DNA, 25 bp, Homo sapien
caaacactgccaactcaagacgcag

SEQ ID NO: 895377 - DNA, 25 bp, Homo sapien
tgcttgcacatcaaagggcgtggcg

SEQ ID NO: 895378 - DNA, 25 bp, Homo sapien
gcagggcccctgtgcgataagtgca

SEQ ID NO: 895379 - DNA, 25 bp, Homo sapien
ggattgaactcaacactgcaccctg

SEQ ID NO: 895380 - DNA, 25 bp, Homo sapien
cacagagcacatgggtgatcacggc

SEQ ID NO: 895381 - DNA, 25 bp, Homo sapien
catttgtgtattgcatctccctgag

SEQ ID NO: 895382 - DNA, 25 bp, Homo sapien
taccttggagccagattgtggatcc

SEQ ID NO: 895383 - DNA, 25 bp, Homo sapien
tctgtgatcttaacggcctccatgc

SEQ ID NO: 895384 - DNA, 25 bp, Homo sapien
gatgatgttgctcacggttctcccc

SEQ ID NO: 895385 - DNA, 25 bp, Homo sapien
gaagcagttaggtcaccttgaatat

SEQ ID NO: 895386 - DNA, 25 bp, Homo sapien
attacattgctcatgcatgtgagca

SEQ ID NO: 895387 - DNA, 25 bp, Homo sapien
cattgctcatgcatgtgagcacagg

SEQ ID NO: 895388 - DNA, 25 bp, Homo sapien
gctgtttgaagcagttaggtcacct

SEQ ID NO: 895389 - DNA, 25 bp, Homo sapien
tgctcatgttagattggcggcgccc

SEQ ID NO: 895390 - DNA, 25 bp, Homo sapien
tgacaaagcacataactcaggcgtg

SEQ ID NO: 895391 - DNA, 25 bp, Homo sapien
tagacatttctataccaacacggac

SEQ ID NO: 895392 - DNA, 25 bp, Homo sapien
gattaatgccagagcagcgctagtt

SEQ ID NO: 895393 - DNA, 25 bp, Homo sapien
taaagggcttaccatcgtccactca

SEQ ID NO: 895394 - DNA, 25 bp, Homo sapien
cattgccaagcacaaggtaaagggc

SEQ ID NO: 895395 - DNA, 25 bp, Homo sapien
tttctacccatgagtcagaccttgg

SEQ ID NO: 895396 - DNA, 25 bp, Homo sapien
tagagtttccccacagtgcatcgaa

SEQ ID NO: 895397 - DNA, 25 bp, Homo sapien
gaccccctgctatgtagatatcatt

SEQ ID NO: 895398 - DNA, 25 bp, Homo sapien
accccctgctatgtagatatcatta

SEQ ID NO: 895399 - DNA, 25 bp, Homo sapien
cttgaccccctgctatgtagatatc

SEQ ID NO: 895400 - DNA, 25 bp, Homo sapien
ttgaccccctgctatgtagatatca

SEQ ID NO: 895401 - DNA, 25 bp, Homo sapien
ggtcccaaccttatgcaaatcagct

SEQ ID NO: 895402 - DNA, 25 bp, Homo sapien
cagcatagcagcttctcgaacggtt

SEQ ID NO: 895403 - DNA, 25 bp, Homo sapien
aacttgggcatggacttatacagac

SEQ ID NO: 895404 - DNA, 25 bp, Homo sapien
cactgacttatcattgggtggcaga

SEQ ID NO: 895405 - DNA, 25 bp, Homo sapien
acacagcagtgaacttgtgctccac

SEQ ID NO: 895406 - DNA, 25 bp, Homo sapien
cagcagtgaacttgtgctccaccat

SEQ ID NO: 895407 - DNA, 25 bp, Homo sapien
gatgatacacagcagtgaacttgtg

SEQ ID NO: 895408 - DNA, 25 bp, Homo sapien
gatacacagcagtgaacttgtgctc

SEQ ID NO: 895409 - DNA, 25 bp, Homo sapien
acaactgaagagatcagcaaaactc

SEQ ID NO: 895410 - DNA, 25 bp, Homo sapien
tattctcgacaacgttgtaacacat

SEQ ID NO: 895411 - DNA, 25 bp, Homo sapien
taaatattctcgacaacgttgtaac

SEQ ID NO: 895412 - DNA, 25 bp, Homo sapien
taattaaatattctcgacaacgttg

SEQ ID NO: 895413 - DNA, 25 bp, Homo sapien
tctcgacaacgttgtaacacatctt

SEQ ID NO: 895414 - DNA, 25 bp, Homo sapien
tctatttaggaaccagcagtacaac

SEQ ID NO: 895415 - DNA, 25 bp, Homo sapien
catctgggctgagataaggtcttct

SEQ ID NO: 895416 - DNA, 25 bp, Homo sapien
taaatgacccatcttagccactgta

SEQ ID NO: 895417 - DNA, 25 bp, Homo sapien
cgtaagtatattaatcagatgccca

SEQ ID NO: 895418 - DNA, 25 bp, Homo sapien
tcacgggagcacttcagagtctaga

SEQ ID NO: 895419 - DNA, 25 bp, Homo sapien
tgacacttgaaatactcacgggagc

SEQ ID NO: 895420 - DNA, 25 bp, Homo sapien
gaattactagtgcaccagcaagcta

SEQ ID NO: 895421 - DNA, 25 bp, Homo sapien
ggttggccaggtgttgtaactcgca

SEQ ID NO: 895422 - DNA, 25 bp, Homo sapien
tagtaaaacacacgaaaccagtata

SEQ ID NO: 895423 - DNA, 25 bp, Homo sapien
tagtttactgggtaatcaaatccta

SEQ ID NO: 895424 - DNA, 25 bp, Homo sapien
tcaaaattctcaggtatattaggta

SEQ ID NO: 895425 - DNA, 25 bp, Homo sapien
ttcacctatctcttttattaacaga

SEQ ID NO: 895426 - DNA, 25 bp, Homo sapien
taaaccaataagctacaactcatgt

SEQ ID NO: 895427 - DNA, 25 bp, Homo sapien
ccaataagctacaactcatgtatgt

SEQ ID NO: 895428 - DNA, 25 bp, Homo sapien
ataataaaccaataagctacaactc

SEQ ID NO: 895429 - DNA, 25 bp, Homo sapien
gctacaactcatgtatgtaactgag

SEQ ID NO: 895430 - DNA, 25 bp, Homo sapien
atacaaaaattagcacctgtaatcc

SEQ ID NO: 895431 - DNA, 25 bp, Homo sapien
agaatcacttgaacctgggaggcgg

SEQ ID NO: 895432 - DNA, 25 bp, Homo sapien
cagctactcaggaggctgaggcagg

SEQ ID NO: 895433 - DNA, 25 bp, Homo sapien
agactccgtctaaaaaaatatatat

SEQ ID NO: 895434 - DNA, 25 bp, Homo sapien
ctgtaggaagcaagctgtttcataa

SEQ ID NO: 895435 - DNA, 25 bp, Homo sapien
agcaagctgtttcataaagctgttc

SEQ ID NO: 895436 - DNA, 25 bp, Homo sapien
aagctgtttcataaagctgttctac

SEQ ID NO: 895437 - DNA, 25 bp, Homo sapien
tgtaggaagcaagctgtttcataaa

SEQ ID NO: 895438 - DNA, 25 bp, Homo sapien
tctgtaaggtggcagcatcgacatt

SEQ ID NO: 895439 - DNA, 25 bp, Homo sapien
attcctcaggtgtacatgggtttgt

SEQ ID NO: 895440 - DNA, 25 bp, Homo sapien
attcattgccaagttacccgtgtat

SEQ ID NO: 895441 - DNA, 25 bp, Homo sapien
tacccgtgtatgcataagttattat

SEQ ID NO: 895442 - DNA, 25 bp, Homo sapien
aagcttctgcatgtagcggtcaaca

SEQ ID NO: 895443 - DNA, 25 bp, Homo sapien
cacagagggcctttaaatgagacaa

SEQ ID NO: 895444 - DNA, 25 bp, Homo sapien
tacaaaaaccactatagctgggcgc

SEQ ID NO: 895445 - DNA, 25 bp, Homo sapien
gcttgaacataagggctcatgcagg

SEQ ID NO: 895446 - DNA, 25 bp, Homo sapien
tgatctgcctctcgtcttgagtgga

SEQ ID NO: 895447 - DNA, 25 bp, Homo sapien
cacagcatattcagtattgatctgc

SEQ ID NO: 895448 - DNA, 25 bp, Homo sapien
agagctacatgttgcaagaaccatc

SEQ ID NO: 895449 - DNA, 25 bp, Homo sapien
ctatgtcagtaaacaactgctgttc

SEQ ID NO: 895450 - DNA, 25 bp, Homo sapien
tagaatcactcctaggtcatcctgt

SEQ ID NO: 895451 - DNA, 25 bp, Homo sapien
gagtttttcaacacagtctgcagac

SEQ ID NO: 895452 - DNA, 25 bp, Homo sapien
gaaaagtccgtcttactgatggaag

SEQ ID NO: 895453 - DNA, 25 bp, Homo sapien
catcctatgttcagcggatcctgtg

SEQ ID NO: 895454 - DNA, 25 bp, Homo sapien
aaacctaggctttagtcatactgca

SEQ ID NO: 895455 - DNA, 25 bp, Homo sapien
taatgttggaagtggctaactgctc

SEQ ID NO: 895456 - DNA, 25 bp, Homo sapien
caccaactgttaagatgaccattag

SEQ ID NO: 895457 - DNA, 25 bp, Homo sapien
taactaaaacaggtgcaaaggcaga

SEQ ID NO: 895458 - DNA, 25 bp, Homo sapien
cagaatttcttgcaggctagcggta

SEQ ID NO: 895459 - DNA, 25 bp, Homo sapien
tagcggtacaggctcactctggtca

SEQ ID NO: 895460 - DNA, 25 bp, Homo sapien
gagaggcagcctacgtaaaagttac

SEQ ID NO: 895461 - DNA, 25 bp, Homo sapien
gacttaaatcatgccgctagacccc

SEQ ID NO: 895462 - DNA, 25 bp, Homo sapien
taacagtggatcacacaggaggaag

SEQ ID NO: 895463 - DNA, 25 bp, Homo sapien
gctcagccctactactaacagtgga

SEQ ID NO: 895464 - DNA, 25 bp, Homo sapien
gcaaaggtatctggtgctcagccct

SEQ ID NO: 895465 - DNA, 25 bp, Homo sapien
gtagtacaggtaaaatgagcaaagg

SEQ ID NO: 895466 - DNA, 25 bp, Homo sapien
ggcaatgaggggggatagatgtcta

SEQ ID NO: 895467 - DNA, 25 bp, Homo sapien
gaggcaatgaggggggatagatgtc

SEQ ID NO: 895468 - DNA, 25 bp, Homo sapien
aatgaggggggatagatgtctaatt

SEQ ID NO: 895469 - DNA, 25 bp, Homo sapien
caatgaggggggatagatgtctaat

SEQ ID NO: 895470 - DNA, 25 bp, Homo sapien
tcaccaggtccgaagattccaattt

SEQ ID NO: 895471 - DNA, 25 bp, Homo sapien
taaaagtacaactctcttctcaatg

SEQ ID NO: 895472 - DNA, 25 bp, Homo sapien
tattaacccacccactggtgaagct

SEQ ID NO: 895473 - DNA, 25 bp, Homo sapien
cacacagcactacacagatattcga

SEQ ID NO: 895474 - DNA, 25 bp, Homo sapien
atttcagcatacttgcagtgagccg

SEQ ID NO: 895475 - DNA, 25 bp, Homo sapien
cataaaggcaatgccacctgcgata

SEQ ID NO: 895476 - DNA, 25 bp, Homo sapien
gctccatcaggttaattacgctcag

SEQ ID NO: 895477 - DNA, 25 bp, Homo sapien
gctcagcaccctaagtaaattcagg

SEQ ID NO: 895478 - DNA, 25 bp, Homo sapien
cttggttagttcagatgtacgcggg

SEQ ID NO: 895479 - DNA, 25 bp, Homo sapien
caccatgtcgcgaacacgtcgcgag

SEQ ID NO: 895480 - DNA, 25 bp, Homo sapien
tcttttttaagtcgatatagaccat

SEQ ID NO: 895481 - DNA, 25 bp, Homo sapien
caggagctctgttcgtctagacctc

SEQ ID NO: 895482 - DNA, 25 bp, Homo sapien
tgcccggcgctactgtcgcctgctc

SEQ ID NO: 895483 - DNA, 25 bp, Homo sapien
agcctgcccggcgctactgtcgcct

SEQ ID NO: 895484 - DNA, 25 bp, Homo sapien
cccggcgctactgtcgcctgctcac

SEQ ID NO: 895485 - DNA, 25 bp, Homo sapien
ctgcccggcgctactgtcgcctgct

SEQ ID NO: 895486 - DNA, 25 bp, Homo sapien
ctcgcttggtccgtccagcgcggaa

SEQ ID NO: 895487 - DNA, 25 bp, Homo sapien
gtccagcgcggaaagcagcgtcctc

SEQ ID NO: 895488 - DNA, 25 bp, Homo sapien
tgtgggatccgctccagccggtggc

SEQ ID NO: 895489 - DNA, 25 bp, Homo sapien
ccgcgtccctcggtccggaggtgtg

SEQ ID NO: 895490 - DNA, 25 bp, Homo sapien
ccccgcccccgccgcgcgctctcgc

SEQ ID NO: 895491 - DNA, 25 bp, Homo sapien
gcccccgccgcgcgctctcgccccc

SEQ ID NO: 895492 - DNA, 25 bp, Homo sapien
ccgcccccgccgcgcgctctcgccc

SEQ ID NO: 895493 - DNA, 25 bp, Homo sapien
cgcccccgccgcgcgctctcgcccc

SEQ ID NO: 895494 - DNA, 25 bp, Homo sapien
cagcctgccgcgcccgccctcgcca

SEQ ID NO: 895495 - DNA, 25 bp, Homo sapien
cgcaatggaccgctggccagcctgc

SEQ ID NO: 895496 - DNA, 25 bp, Homo sapien
caatggaccgctggccagcctgccg

SEQ ID NO: 895497 - DNA, 25 bp, Homo sapien
atggaccgctggccagcctgccgcg

SEQ ID NO: 895498 - DNA, 25 bp, Homo sapien
ggcaccagcggcagttttgcagttt

SEQ ID NO: 895499 - DNA, 25 bp, Homo sapien
ccttactctagctgcccccgccctt

SEQ ID NO: 895500 - DNA, 25 bp, Homo sapien
tttgcagtttcccgggtcctcgcga

SEQ ID NO: 895501 - DNA, 25 bp, Homo sapien
gcgcctgtcggcaccagcggcagtt

SEQ ID NO: 895502 - DNA, 25 bp, Homo sapien
tgaaggaggtgttttatcccttgga

SEQ ID NO: 895503 - DNA, 25 bp, Homo sapien
ctgaaggaggtgttttatcccttgg

SEQ ID NO: 895504 - DNA, 25 bp, Homo sapien
gggaatgagtaggactaaacaatac

SEQ ID NO: 895505 - DNA, 25 bp, Homo sapien
gcaggctggctcggaaagtgggaat

SEQ ID NO: 895506 - DNA, 25 bp, Homo sapien
gctttgttgccgcagcacctcttct

SEQ ID NO: 895507 - DNA, 25 bp, Homo sapien
agcacccaaaagggcccgcagttgg

SEQ ID NO: 895508 - DNA, 25 bp, Homo sapien
gcgttgggcgggtcgctttgttgcc

SEQ ID NO: 895509 - DNA, 25 bp, Homo sapien
ggagaaagttgaggaggcgttgggc

SEQ ID NO: 895510 - DNA, 25 bp, Homo sapien
cggacggcagctccagcgtctgaag

SEQ ID NO: 895511 - DNA, 25 bp, Homo sapien
agcgtctgaagccttccgttgtgtg

SEQ ID NO: 895512 - DNA, 25 bp, Homo sapien
acggcagctccagcgtctgaagcct

SEQ ID NO: 895513 - DNA, 25 bp, Homo sapien
ggtgcggacggcagctccagcgtct

SEQ ID NO: 895514 - DNA, 25 bp, Homo sapien
tgacttcatggttgcaatatggctg

SEQ ID NO: 895515 - DNA, 25 bp, Homo sapien
tcaatagctcaagaacagcagggcc

SEQ ID NO: 895516 - DNA, 25 bp, Homo sapien
gcagcagttttagccttcgcacctt

SEQ ID NO: 895517 - DNA, 25 bp, Homo sapien
cagcagggccatcatttctgtgatt

SEQ ID NO: 895518 - DNA, 25 bp, Homo sapien
tatactgtaagagaatggataaatt

SEQ ID NO: 895519 - DNA, 25 bp, Homo sapien
ggtagaatctgtcaaacttaaaata

SEQ ID NO: 895520 - DNA, 25 bp, Homo sapien
gatatttactcaaggcaaggtgcgg

SEQ ID NO: 895521 - DNA, 25 bp, Homo sapien
ggaaatgggccactttatatactgt

SEQ ID NO: 895522 - DNA, 25 bp, Homo sapien
tcaaagcatcataagtagactccct

SEQ ID NO: 895523 - DNA, 25 bp, Homo sapien
gaattgtgaactctttacgggcatg

SEQ ID NO: 895524 - DNA, 25 bp, Homo sapien
taaaattgccaacatacggtgagtg

SEQ ID NO: 895525 - DNA, 25 bp, Homo sapien
ggatctggagcactgtatcaaagca

SEQ ID NO: 895526 - DNA, 25 bp, Homo sapien
gggcaagatcacaatagaaaggaag

SEQ ID NO: 895527 - DNA, 25 bp, Homo sapien
gcaagatcacaatagaaaggaagag

SEQ ID NO: 895528 - DNA, 25 bp, Homo sapien
ggcaagatcacaatagaaaggaaga

SEQ ID NO: 895529 - DNA, 25 bp, Homo sapien
tggggcaagatcacaatagaaagga

SEQ ID NO: 895530 - DNA, 25 bp, Homo sapien
tcacagtggtgtaggtcagaagcct

SEQ ID NO: 895531 - DNA, 25 bp, Homo sapien
gacaaatcgagttccagagggttct

SEQ ID NO: 895532 - DNA, 25 bp, Homo sapien
tttagagttgagatgtgccacaccc

SEQ ID NO: 895533 - DNA, 25 bp, Homo sapien
tatgcatccagaaccattgagggtg

SEQ ID NO: 895534 - DNA, 25 bp, Homo sapien
gggagaggtgccactcacacttaaa

SEQ ID NO: 895535 - DNA, 25 bp, Homo sapien
gaaagtttaagtgggtggctagcac

SEQ ID NO: 895536 - DNA, 25 bp, Homo sapien
tcatcatacgatgtctgagtgaagg

SEQ ID NO: 895537 - DNA, 25 bp, Homo sapien
gcaatgaggagccagcatatcacat

SEQ ID NO: 895538 - DNA, 25 bp, Homo sapien
ttctcatttgagtttggagatggat

SEQ ID NO: 895539 - DNA, 25 bp, Homo sapien
tctcatttgagtttggagatggatt

SEQ ID NO: 895540 - DNA, 25 bp, Homo sapien
gatggatttgtaggggctctgggat

SEQ ID NO: 895541 - DNA, 25 bp, Homo sapien
ggagatggatttgtaggggctctgg

SEQ ID NO: 895542 - DNA, 25 bp, Homo sapien
gcggaagattttgattgatgcttct

SEQ ID NO: 895543 - DNA, 25 bp, Homo sapien
caaagcggaagattttgattgatgc

SEQ ID NO: 895544 - DNA, 25 bp, Homo sapien
ggagcaaagcggaagattttgattg

SEQ ID NO: 895545 - DNA, 25 bp, Homo sapien
ctataggagcaaagcggaagatttt

SEQ ID NO: 895546 - DNA, 25 bp, Homo sapien
ggatcacagatcaggggagatgaca

SEQ ID NO: 895547 - DNA, 25 bp, Homo sapien
tggacaaaaggatcacagatcaggg

SEQ ID NO: 895548 - DNA, 25 bp, Homo sapien
ctggacaaaaggatcacagatcagg

SEQ ID NO: 895549 - DNA, 25 bp, Homo sapien
aaaggatcacagatcaggggagatg

SEQ ID NO: 895550 - DNA, 25 bp, Homo sapien
ggattgcagagggacagtagccaat

SEQ ID NO: 895551 - DNA, 25 bp, Homo sapien
tcatgaatgggattgcagagggaca

SEQ ID NO: 895552 - DNA, 25 bp, Homo sapien
gattgcagagggacagtagccaatt

SEQ ID NO: 895553 - DNA, 25 bp, Homo sapien
tttatcatgaatgggattgcagagg

SEQ ID NO: 895554 - DNA, 25 bp, Homo sapien
aagaaatgctgagcatatggcagag

SEQ ID NO: 895555 - DNA, 25 bp, Homo sapien
taagaaatgctgagcatatggcaga

SEQ ID NO: 895556 - DNA, 25 bp, Homo sapien
tgggtaagaaatgctgagcatatgg

SEQ ID NO: 895557 - DNA, 25 bp, Homo sapien
ggtaagaaatgctgagcatatggca

SEQ ID NO: 895558 - DNA, 25 bp, Homo sapien
tcctgaggtggtattccgaggccaa

SEQ ID NO: 895559 - DNA, 25 bp, Homo sapien
ttggcgcagcaaaggatagacttcc

SEQ ID NO: 895560 - DNA, 25 bp, Homo sapien
gattttgggatgtggatacctgacc

SEQ ID NO: 895561 - DNA, 25 bp, Homo sapien
caagatccgcttcactttggcgcag

SEQ ID NO: 895562 - DNA, 25 bp, Homo sapien
gaactccctagcccccaaatcaaca

SEQ ID NO: 895563 - DNA, 25 bp, Homo sapien
taagaactccctagcccccaaatca

SEQ ID NO: 895564 - DNA, 25 bp, Homo sapien
aatataaatattttagccaaccagt

SEQ ID NO: 895565 - DNA, 25 bp, Homo sapien
tttagccaaccagtggctctcgcct

SEQ ID NO: 895566 - DNA, 25 bp, Homo sapien
aaatattttagccaaccagtggctc

SEQ ID NO: 895567 - DNA, 25 bp, Homo sapien
tattttagccaaccagtggctctcg

SEQ ID NO: 895568 - DNA, 25 bp, Homo sapien
gcctggaagacacgcctcagagatt

SEQ ID NO: 895569 - DNA, 25 bp, Homo sapien
cagggaggacaacgatgaagaaact

SEQ ID NO: 895570 - DNA, 25 bp, Homo sapien
catcttcactgcaaggcgggtggga

SEQ ID NO: 895571 - DNA, 25 bp, Homo sapien
cgtaaactcatgtgaccagcaggga

SEQ ID NO: 895572 - DNA, 25 bp, Homo sapien
ctatcctgctactttctctgactgc

SEQ ID NO: 895573 - DNA, 25 bp, Homo sapien
tgttgaacaagtcacatccttgtca

SEQ ID NO: 895574 - DNA, 25 bp, Homo sapien
ctctgttccttggtcagtgtttgag

SEQ ID NO: 895575 - DNA, 25 bp, Homo sapien
ttgagaagagaatgttgaacaagtc

SEQ ID NO: 895576 - DNA, 25 bp, Homo sapien
agaaccctcatttgacttggaagat

SEQ ID NO: 895577 - DNA, 25 bp, Homo sapien
gaaccctcatttgacttggaagatt

SEQ ID NO: 895578 - DNA, 25 bp, Homo sapien
cagaaccctcatttgacttggaaga

SEQ ID NO: 895579 - DNA, 25 bp, Homo sapien
tttcttatgcttttctttcttcttc

SEQ ID NO: 895580 - DNA, 25 bp, Homo sapien
ttcttatgcttttctttcttcttct

SEQ ID NO: 895581 - DNA, 25 bp, Homo sapien
cttatgcttttctttcttcttcttt

SEQ ID NO: 895582 - DNA, 25 bp, Homo sapien
cttttcttatgcttttctttcttct

SEQ ID NO: 895583 - DNA, 25 bp, Homo sapien
ggagctgctcctatcttcacctgag

SEQ ID NO: 895584 - DNA, 25 bp, Homo sapien
gctgctcctatcttcacctgaggta

SEQ ID NO: 895585 - DNA, 25 bp, Homo sapien
tcacctgaggtagaatcctccagta

SEQ ID NO: 895586 - DNA, 25 bp, Homo sapien
cctccagtaactgttttaactgctg

SEQ ID NO: 895587 - DNA, 25 bp, Homo sapien
tcatttctgtaggttcccacagtac

SEQ ID NO: 895588 - DNA, 25 bp, Homo sapien
tatggaaggatcatgaataaccaca

SEQ ID NO: 895589 - DNA, 25 bp, Homo sapien
gactgtaaccagtgtacaaaccatt

SEQ ID NO: 895590 - DNA, 25 bp, Homo sapien
tcttcacctgaatgcctatgtttat

SEQ ID NO: 895591 - DNA, 25 bp, Homo sapien
ttcatgttgtttattgtctcgtatg

SEQ ID NO: 895592 - DNA, 25 bp, Homo sapien
ttgtttattgtctcgtatgatgtca

SEQ ID NO: 895593 - DNA, 25 bp, Homo sapien
cttttcatgttgtttattgtctcgt

SEQ ID NO: 895594 - DNA, 25 bp, Homo sapien
catgttgtttattgtctcgtatgat

SEQ ID NO: 895595 - DNA, 25 bp, Homo sapien
ccttttaagggtcatatcactgata

SEQ ID NO: 895596 - DNA, 25 bp, Homo sapien
ttggacttggtggtaaaagcctgac

SEQ ID NO: 895597 - DNA, 25 bp, Homo sapien
tatacacatcaagctatttgctgca

SEQ ID NO: 895598 - DNA, 25 bp, Homo sapien
tgatgtagccacacgctcaacatgt

SEQ ID NO: 895599 - DNA, 25 bp, Homo sapien
attctttgtagcctgttcggtgacc

SEQ ID NO: 895600 - DNA, 25 bp, Homo sapien
ttgtagcctgttcggtgaccatacc

SEQ ID NO: 895601 - DNA, 25 bp, Homo sapien
tgttcggtgaccataccatttgcaa

SEQ ID NO: 895602 - DNA, 25 bp, Homo sapien
ctgttgtaacttttggttgtctttg

SEQ ID NO: 895603 - DNA, 25 bp, Homo sapien
tgtaacctagcaaaagagtgccaga

SEQ ID NO: 895604 - DNA, 25 bp, Homo sapien
tgaggattgaatgcaggaaaccact

SEQ ID NO: 895605 - DNA, 25 bp, Homo sapien
gatgaaccgtgtaaggtcccagaaa

SEQ ID NO: 895606 - DNA, 25 bp, Homo sapien
caaagctgaagggatgtgaaatgcc

SEQ ID NO: 895607 - DNA, 25 bp, Homo sapien
ctctggcgtattcattgcctggtat

SEQ ID NO: 895608 - DNA, 25 bp, Homo sapien
tctggcgtattcattgcctggtata

SEQ ID NO: 895609 - DNA, 25 bp, Homo sapien
gcgcttggcgaagaatctttctcca

SEQ ID NO: 895610 - DNA, 25 bp, Homo sapien
tggccgtggcctgccactctaagtc

SEQ ID NO: 895611 - DNA, 25 bp, Homo sapien
tctccattgacagttacgaaacagc

SEQ ID NO: 895612 - DNA, 25 bp, Homo sapien
tctaagtctccctcgtgcgcacaca

SEQ ID NO: 895613 - DNA, 25 bp, Homo sapien
tgagctgtcgggtctcctcggagtt

SEQ ID NO: 895614 - DNA, 25 bp, Homo sapien
tggatgagctgtcgggtctcctcgg

SEQ ID NO: 895615 - DNA, 25 bp, Homo sapien
gagctgctgatactcaagaaaccaa

SEQ ID NO: 895616 - DNA, 25 bp, Homo sapien
ctcctcggagttgactgctctctga

SEQ ID NO: 895617 - DNA, 25 bp, Homo sapien
caaggaacccatgtgggcctgcact

SEQ ID NO: 895618 - DNA, 25 bp, Homo sapien
caaaggcagaggcttgtgacaacac

SEQ ID NO: 895619 - DNA, 25 bp, Homo sapien
ggcctgcactggttcctcagggaag

SEQ ID NO: 895620 - DNA, 25 bp, Homo sapien
cagctgagcttaaagatgccgttcc

SEQ ID NO: 895621 - DNA, 25 bp, Homo sapien
tgataagcccaggaggaggtttttc

SEQ ID NO: 895622 - DNA, 25 bp, Homo sapien
taagcccaggaggaggtttttcata

SEQ ID NO: 895623 - DNA, 25 bp, Homo sapien
cttgataagcccaggaggaggtttt

SEQ ID NO: 895624 - DNA, 25 bp, Homo sapien
gataagcccaggaggaggtttttca

SEQ ID NO: 895625 - DNA, 25 bp, Homo sapien
ggagattcttagagaaaattcaaaa

SEQ ID NO: 895626 - DNA, 25 bp, Homo sapien
tttagtatattatatctaaaacagt

SEQ ID NO: 895627 - DNA, 25 bp, Homo sapien
cattttaatgggaacgtaacatact

SEQ ID NO: 895628 - DNA, 25 bp, Homo sapien
gcacacctttttggctaaggatcat

SEQ ID NO: 895629 - DNA, 25 bp, Homo sapien
tcctcagttgaatagctgtaggaga

SEQ ID NO: 895630 - DNA, 25 bp, Homo sapien
tcaaagcacacctttttggctaagg

SEQ ID NO: 895631 - DNA, 25 bp, Homo sapien
agttgaatagctgtaggagaccaga

SEQ ID NO: 895632 - DNA, 25 bp, Homo sapien
cgtgatctgtccaccgcggcctctc

SEQ ID NO: 895633 - DNA, 25 bp, Homo sapien
ctcctggccacaggtgagacccttt

SEQ ID NO: 895634 - DNA, 25 bp, Homo sapien
tcgtgatctgtccaccgcggcctct

SEQ ID NO: 895635 - DNA, 25 bp, Homo sapien
ccgctcctggccacaggtgagaccc

SEQ ID NO: 895636 - DNA, 25 bp, Homo sapien
tagataatgtccattacggaatcaa

SEQ ID NO: 895637 - DNA, 25 bp, Homo sapien
gataatgtccattacggaatcaaaa

SEQ ID NO: 895638 - DNA, 25 bp, Homo sapien
ccattacggaatcaaaaaaggcaat

SEQ ID NO: 895639 - DNA, 25 bp, Homo sapien
atgtccattacggaatcaaaaaagg

SEQ ID NO: 895640 - DNA, 25 bp, Homo sapien
tattttgcacggagtttctggatct

SEQ ID NO: 895641 - DNA, 25 bp, Homo sapien
gttgcagtgaatggtcactactgaa

SEQ ID NO: 895642 - DNA, 25 bp, Homo sapien
tctaagagtcatgagtaggcttctc

SEQ ID NO: 895643 - DNA, 25 bp, Homo sapien
gatggctggcaagtcactggcaaaa

SEQ ID NO: 895644 - DNA, 25 bp, Homo sapien
gtccccgccgcccattctctcttct

SEQ ID NO: 895645 - DNA, 25 bp, Homo sapien
gtggccagtccccgccgcccattct

SEQ ID NO: 895646 - DNA, 25 bp, Homo sapien
cagcgccgtggccagtccccgccgc

SEQ ID NO: 895647 - DNA, 25 bp, Homo sapien
ccgccgcccattctctcttcttccg

SEQ ID NO: 895648 - DNA, 25 bp, Homo sapien
aaatgccgagcaagcgccaataact

SEQ ID NO: 895649 - DNA, 25 bp, Homo sapien
gcagcgtgctcggttgaacttgcct

SEQ ID NO: 895650 - DNA, 25 bp, Homo sapien
tgaacttgcctgttcggtccacaaa

SEQ ID NO: 895651 - DNA, 25 bp, Homo sapien
cccttctccgtagcagaggatgaaa

SEQ ID NO: 895652 - DNA, 25 bp, Homo sapien
agaggcgacgcccacaccaaagcgg

SEQ ID NO: 895653 - DNA, 25 bp, Homo sapien
ttccccaaaagaggcgacgcccaca

SEQ ID NO: 895654 - DNA, 25 bp, Homo sapien
gaggcgacgcccacaccaaagcggg

SEQ ID NO: 895655 - DNA, 25 bp, Homo sapien
caaaagaggcgacgcccacaccaaa

SEQ ID NO: 895656 - DNA, 25 bp, Homo sapien
gactgcggcccagacggctgctcga

SEQ ID NO: 895657 - DNA, 25 bp, Homo sapien
agtgaggactagaagtcccgtcgca

SEQ ID NO: 895658 - DNA, 25 bp, Homo sapien
cgtcgcaggcactaggttcctcaca

SEQ ID NO: 895659 - DNA, 25 bp, Homo sapien
ggcccagacggctgctcgagactca

SEQ ID NO: 895660 - DNA, 25 bp, Homo sapien
gggcccgctgcagttcctgatccag

SEQ ID NO: 895661 - DNA, 25 bp, Homo sapien
gcacttcctccgtgcggcgcccctt

SEQ ID NO: 895662 - DNA, 25 bp, Homo sapien
ggacgacatcgcggcacctgcggcg

SEQ ID NO: 895663 - DNA, 25 bp, Homo sapien
tctggctgcggccaagagggcactt

SEQ ID NO: 895664 - DNA, 25 bp, Homo sapien
taggcatgcaacaccacacctagct

SEQ ID NO: 895665 - DNA, 25 bp, Homo sapien
ataggcatgcaacaccacacctagc

SEQ ID NO: 895666 - DNA, 25 bp, Homo sapien
attataggcatgcaacaccacacct

SEQ ID NO: 895667 - DNA, 25 bp, Homo sapien
ttataggcatgcaacaccacaccta

SEQ ID NO: 895668 - DNA, 25 bp, Homo sapien
gacttcgtgcgctaccactacgtgg

SEQ ID NO: 895669 - DNA, 25 bp, Homo sapien
gccagaagttcgactccaggtaccg

SEQ ID NO: 895670 - DNA, 25 bp, Homo sapien
gacccggtccacgtttgcaaacgca

SEQ ID NO: 895671 - DNA, 25 bp, Homo sapien
cttgtccggagatcacagtgtctcg

SEQ ID NO: 895672 - DNA, 25 bp, Homo sapien
cccgtctgggtagtttgccagttca

SEQ ID NO: 895673 - DNA, 25 bp, Homo sapien
gcgttctcacactttcccgtctggg

SEQ ID NO: 895674 - DNA, 25 bp, Homo sapien
ggtagtttgccagttcattaactgc

SEQ ID NO: 895675 - DNA, 25 bp, Homo sapien
tcctcctctgcagcgttctcacact

SEQ ID NO: 895676 - DNA, 25 bp, Homo sapien
ctgggagactgactcacgttaactt

SEQ ID NO: 895677 - DNA, 25 bp, Homo sapien
tgggagactgactcacgttaacttc

SEQ ID NO: 895678 - DNA, 25 bp, Homo sapien
cagaatactgggctaatggaaagct

SEQ ID NO: 895679 - DNA, 25 bp, Homo sapien
gaatactgggctaatggaaagcttg

SEQ ID NO: 895680 - DNA, 25 bp, Homo sapien
aatactgggctaatggaaagcttgg

SEQ ID NO: 895681 - DNA, 25 bp, Homo sapien
atactgggctaatggaaagcttggc

SEQ ID NO: 895682 - DNA, 25 bp, Homo sapien
taacagagattacatttctcagggt

SEQ ID NO: 895683 - DNA, 25 bp, Homo sapien
tgttgtctccgtttcatagataaag

SEQ ID NO: 895684 - DNA, 25 bp, Homo sapien
aaaggaccccattccactatgcttc

SEQ ID NO: 895685 - DNA, 25 bp, Homo sapien
aaaacgtccctgtgagatagctata

SEQ ID NO: 895686 - DNA, 25 bp, Homo sapien
ttagtatgtgttgctaaagtgagca

SEQ ID NO: 895687 - DNA, 25 bp, Homo sapien
tcgttactgggtgctcaatgcctgc

SEQ ID NO: 895688 - DNA, 25 bp, Homo sapien
tcctggaagaggtaactaactggcc

SEQ ID NO: 895689 - DNA, 25 bp, Homo sapien
cctaagaggtgtagggcatgattcc

SEQ ID NO: 895690 - DNA, 25 bp, Homo sapien
tgattccagggcatacagtctgcat

SEQ ID NO: 895691 - DNA, 25 bp, Homo sapien
gcctggcgttcatggcggctgaact

SEQ ID NO: 895692 - DNA, 25 bp, Homo sapien
tctggcaaagggaaactcgctcctg

SEQ ID NO: 895693 - DNA, 25 bp, Homo sapien
tctcagagtacattcacgcccaggt

SEQ ID NO: 895694 - DNA, 25 bp, Homo sapien
ctttgatgctgagctgattgtgaag

SEQ ID NO: 895695 - DNA, 25 bp, Homo sapien
gcaaattctgatgatggccccaccc

SEQ ID NO: 895696 - DNA, 25 bp, Homo sapien
gagtcaaagggcttgcttgccccag

SEQ ID NO: 895697 - DNA, 25 bp, Homo sapien
aaggcatctcagaccacaaatagag

SEQ ID NO: 895698 - DNA, 25 bp, Homo sapien
gcacacgcacatcatgcttttccag

SEQ ID NO: 895699 - DNA, 25 bp, Homo sapien
tcctggagacggtggtaccctgaag

SEQ ID NO: 895700 - DNA, 25 bp, Homo sapien
tgccgcaagacagcaatgacagtcc

SEQ ID NO: 895701 - DNA, 25 bp, Homo sapien
gaaaatgctgtgcactcattccatg

SEQ ID NO: 895702 - DNA, 25 bp, Homo sapien
tggtggcacttatcctgaagtcgtc

SEQ ID NO: 895703 - DNA, 25 bp, Homo sapien
tgaacagttcaattgcacccacagg

SEQ ID NO: 895704 - DNA, 25 bp, Homo sapien
tttcccagtgtaaaagactcctcaa

SEQ ID NO: 895705 - DNA, 25 bp, Homo sapien
cacaatttcaagagatggtgatacc

SEQ ID NO: 895706 - DNA, 25 bp, Homo sapien
taaataagtctctcagcaagatgaa

SEQ ID NO: 895707 - DNA, 25 bp, Homo sapien
tagagttggctacttctaatgattc

SEQ ID NO: 895708 - DNA, 25 bp, Homo sapien
aaatagagttggctacttctaatga

SEQ ID NO: 895709 - DNA, 25 bp, Homo sapien
taaaatagagttggctacttctaat

SEQ ID NO: 895710 - DNA, 25 bp, Homo sapien
tgtaaaatagagttggctacttcta

SEQ ID NO: 895711 - DNA, 25 bp, Homo sapien
gaatgtgctcaacattggccactcc

SEQ ID NO: 895712 - DNA, 25 bp, Homo sapien
gtctcccagaagaattatgttacta

SEQ ID NO: 895713 - DNA, 25 bp, Homo sapien
ccattcttaagtctccttgggagtc

SEQ ID NO: 895714 - DNA, 25 bp, Homo sapien
tgtattcctcaaggcaccatcatgt

SEQ ID NO: 895715 - DNA, 25 bp, Homo sapien
tataaatcttttgaacaggctttaa

SEQ ID NO: 895716 - DNA, 25 bp, Homo sapien
tgaaaaatataaatcttttgaacag

SEQ ID NO: 895717 - DNA, 25 bp, Homo sapien
aatataaatcttttgaacaggcttt

SEQ ID NO: 895718 - DNA, 25 bp, Homo sapien
aaaatataaatcttttgaacaggct

SEQ ID NO: 895719 - DNA, 25 bp, Homo sapien
cggcttggcctaatttctggatata

SEQ ID NO: 895720 - DNA, 25 bp, Homo sapien
tgggcctatcggcttggcctaattt

SEQ ID NO: 895721 - DNA, 25 bp, Homo sapien
cccacagtgggcctatcggcttggc

SEQ ID NO: 895722 - DNA, 25 bp, Homo sapien
tattagtctatagcttggggaatga

SEQ ID NO: 895723 - DNA, 25 bp, Homo sapien
ctatgttgttggagcttatcaaaga

SEQ ID NO: 895724 - DNA, 25 bp, Homo sapien
cataaaattggacacaactttgaca

SEQ ID NO: 895725 - DNA, 25 bp, Homo sapien
atccataaaattggacacaactttg

SEQ ID NO: 895726 - DNA, 25 bp, Homo sapien
tgttgttggagcttatcaaagaaat

SEQ ID NO: 895727 - DNA, 25 bp, Homo sapien
caggaacttagatgtattctcgaca

SEQ ID NO: 895728 - DNA, 25 bp, Homo sapien
gaatgctaatgttgcctactaagga

SEQ ID NO: 895729 - DNA, 25 bp, Homo sapien
tcctgggccataggttaaagaatgc

SEQ ID NO: 895730 - DNA, 25 bp, Homo sapien
tggagtcccatagtgggcctatcaa

SEQ ID NO: 895731 - DNA, 25 bp, Homo sapien
ttgagcataacgtcagattctgcca

SEQ ID NO: 895732 - DNA, 25 bp, Homo sapien
agcataacgtcagattctgccacaa

SEQ ID NO: 895733 - DNA, 25 bp, Homo sapien
tgaacaagcaaaccatgtgatttag

SEQ ID NO: 895734 - DNA, 25 bp, Homo sapien
aagcaaaccatgtgatttagtatac

SEQ ID NO: 895735 - DNA, 25 bp, Homo sapien
cccagacttagcttaaatatgttag

SEQ ID NO: 895736 - DNA, 25 bp, Homo sapien
taatgaatgtatacctcatgtctca

SEQ ID NO: 895737 - DNA, 25 bp, Homo sapien
tgttcttactgagtttcccagtcct

SEQ ID NO: 895738 - DNA, 25 bp, Homo sapien
caaaatgtgatatgcatgttcttac

SEQ ID NO: 895739 - DNA, 25 bp, Homo sapien
tgattaatgcaaccaaaggtcgatt

SEQ ID NO: 895740 - DNA, 25 bp, Homo sapien
gcctggaacactgcattttgattaa

SEQ ID NO: 895741 - DNA, 25 bp, Homo sapien
gatttttgggtaaccatatcacctg

SEQ ID NO: 895742 - DNA, 25 bp, Homo sapien
ttccagaatccgacacagtgctttc

SEQ ID NO: 895743 - DNA, 25 bp, Homo sapien
caggatcaacttcaatagcgtaata

SEQ ID NO: 895744 - DNA, 25 bp, Homo sapien
acttctcttctacagtaagaacagg

SEQ ID NO: 895745 - DNA, 25 bp, Homo sapien
tataagggtacttctcttctacagt

SEQ ID NO: 895746 - DNA, 25 bp, Homo sapien
taagaacaggatcaacttcaatagc

SEQ ID NO: 895747 - DNA, 25 bp, Homo sapien
tgtgtaattcatacagcaaacctac

SEQ ID NO: 895748 - DNA, 25 bp, Homo sapien
gggtaatgaagtctttgagtgacta

SEQ ID NO: 895749 - DNA, 25 bp, Homo sapien
tcttacttctgtgaatgcacctgaa

SEQ ID NO: 895750 - DNA, 25 bp, Homo sapien
tgcacctgaagaaattctcaggcaa

SEQ ID NO: 895751 - DNA, 25 bp, Homo sapien
taaccagcttacagttgtcaatgat

SEQ ID NO: 895752 - DNA, 25 bp, Homo sapien
gtaaccagcttacagttgtcaatga

SEQ ID NO: 895753 - DNA, 25 bp, Homo sapien
tatctcacaggtaatataaagagga

SEQ ID NO: 895754 - DNA, 25 bp, Homo sapien
cacaggtaatataaagaggatctta

SEQ ID NO: 895755 - DNA, 25 bp, Homo sapien
aataaccatttatataatatgggaa

SEQ ID NO: 895756 - DNA, 25 bp, Homo sapien
tctgattccctttgctaccaaaacc

SEQ ID NO: 895757 - DNA, 25 bp, Homo sapien
gagtgtcatatcaaagtccgttatt

SEQ ID NO: 895758 - DNA, 25 bp, Homo sapien
atctactgagtgtcatatcaaagtc

SEQ ID NO: 895759 - DNA, 25 bp, Homo sapien
gttgggcatcttttccctttatatg

SEQ ID NO: 895760 - DNA, 25 bp, Homo sapien
tccctttatatgaaaatctactgag

SEQ ID NO: 895761 - DNA, 25 bp, Homo sapien
agctcctcctttgataagaccacag

SEQ ID NO: 895762 - DNA, 25 bp, Homo sapien
ttcttgattcgaactgaacttttct

SEQ ID NO: 895763 - DNA, 25 bp, Homo sapien
gttcttgattcgaactgaacttttc

SEQ ID NO: 895764 - DNA, 25 bp, Homo sapien
ctcctcctttgataagaccacagat

SEQ ID NO: 895765 - DNA, 25 bp, Homo sapien
actggcagatgcacagcaatcagca

SEQ ID NO: 895766 - DNA, 25 bp, Homo sapien
agccttaactggcagatgcacagca

SEQ ID NO: 895767 - DNA, 25 bp, Homo sapien
ctggcagatgcacagcaatcagcat

SEQ ID NO: 895768 - DNA, 25 bp, Homo sapien
tcagccttaactggcagatgcacag

SEQ ID NO: 895769 - DNA, 25 bp, Homo sapien
ctcaggcaaatcacagcttcaagtt

SEQ ID NO: 895770 - DNA, 25 bp, Homo sapien
ccacttcgaagaaggctggtttctg

SEQ ID NO: 895771 - DNA, 25 bp, Homo sapien
cggataggagaatcacaccaagacc

SEQ ID NO: 895772 - DNA, 25 bp, Homo sapien
caagtttttgataacggataggaga

SEQ ID NO: 895773 - DNA, 25 bp, Homo sapien
gacagaggtaaaagtggtgaagatt

SEQ ID NO: 895774 - DNA, 25 bp, Homo sapien
aaatttcagtcccataattatctgg

SEQ ID NO: 895775 - DNA, 25 bp, Homo sapien
tttgtgatgcactgtgaagaaagag

SEQ ID NO: 895776 - DNA, 25 bp, Homo sapien
ttctgagaagcacgacaatgtgcat

SEQ ID NO: 895777 - DNA, 25 bp, Homo sapien
tttcacatgtacggcagactcttga

SEQ ID NO: 895778 - DNA, 25 bp, Homo sapien
catgtacggcagactcttgattagt

SEQ ID NO: 895779 - DNA, 25 bp, Homo sapien
gtacggcagactcttgattagtcat

SEQ ID NO: 895780 - DNA, 25 bp, Homo sapien
cacatgtacggcagactcttgatta

SEQ ID NO: 895781 - DNA, 25 bp, Homo sapien
cccagcttccgtgggtggctccagt

SEQ ID NO: 895782 - DNA, 25 bp, Homo sapien
ggcccagcttccgtgggtggctcca

SEQ ID NO: 895783 - DNA, 25 bp, Homo sapien
gagtgcaatgaggcaaaaggctttg

SEQ ID NO: 895784 - DNA, 25 bp, Homo sapien
gaagctctcctgtaagaacttatat

SEQ ID NO: 895785 - DNA, 25 bp, Homo sapien
gaaaattatgcattgctactaccga

SEQ ID NO: 895786 - DNA, 25 bp, Homo sapien
cagacagaacaaagtaagggaagac

SEQ ID NO: 895787 - DNA, 25 bp, Homo sapien
ctcagcaagggttttactctatcca

SEQ ID NO: 895788 - DNA, 25 bp, Homo sapien
ctgaatgaaccttttagggtctggg

SEQ ID NO: 895789 - DNA, 25 bp, Homo sapien
tatgactaagacatgagctgtattt

SEQ ID NO: 895790 - DNA, 25 bp, Homo sapien
atttgaatcgagcattgtgtctagc

SEQ ID NO: 895791 - DNA, 25 bp, Homo sapien
tctgggtgaagtttaaatatatctg

SEQ ID NO: 895792 - DNA, 25 bp, Homo sapien
aaagactcaggtgtaaaatgtcagc

SEQ ID NO: 895793 - DNA, 25 bp, Homo sapien
tcacataaagtgatactgcagtcct

SEQ ID NO: 895794 - DNA, 25 bp, Homo sapien
ggcactattctaaggaagacactga

SEQ ID NO: 895795 - DNA, 25 bp, Homo sapien
agtcctcactagcaatctgaccaga

SEQ ID NO: 895796 - DNA, 25 bp, Homo sapien
aatactgcccttgatctacgaactc

SEQ ID NO: 895797 - DNA, 25 bp, Homo sapien
cacatcaagtgtagaagacgtgttc

SEQ ID NO: 895798 - DNA, 25 bp, Homo sapien
tggaaaatgtggaaactggaaaata

SEQ ID NO: 895799 - DNA, 25 bp, Homo sapien
ctgttgcagatgcttcaagagaaga

SEQ ID NO: 895800 - DNA, 25 bp, Homo sapien
caagtcttaaagtacctgaatgcaa

SEQ ID NO: 895801 - DNA, 25 bp, Homo sapien
aatatggacacagtatccgcaacag

SEQ ID NO: 895802 - DNA, 25 bp, Homo sapien
tctaaagactgaagcaagaggtaag

SEQ ID NO: 895803 - DNA, 25 bp, Homo sapien
taattgtgatactcgcagaaacatg

SEQ ID NO: 895804 - DNA, 25 bp, Homo sapien
cctgaaggtaaccggacgagctaca

SEQ ID NO: 895805 - DNA, 25 bp, Homo sapien
taaccggacgagctacaccagcaaa

SEQ ID NO: 895806 - DNA, 25 bp, Homo sapien
aaggtaaccggacgagctacaccag

SEQ ID NO: 895807 - DNA, 25 bp, Homo sapien
tgaaggtaaccggacgagctacacc

SEQ ID NO: 895808 - DNA, 25 bp, Homo sapien
tgaagctgccatatacggaagacaa

SEQ ID NO: 895809 - DNA, 25 bp, Homo sapien
catgcaaaacatcagtctaggtatg

SEQ ID NO: 895810 - DNA, 25 bp, Homo sapien
taacattgagacagggaagtaaaca

SEQ ID NO: 895811 - DNA, 25 bp, Homo sapien
gatgacaccctaggaagttattcca

SEQ ID NO: 895812 - DNA, 25 bp, Homo sapien
cagcttaggagtatggacctgctct

SEQ ID NO: 895813 - DNA, 25 bp, Homo sapien
tggcacagcacactaaagcttggaa

SEQ ID NO: 895814 - DNA, 25 bp, Homo sapien
tgttttcaaccagggctagttcacc

SEQ ID NO: 895815 - DNA, 25 bp, Homo sapien
ggaccataggcgctaggccagtacg

SEQ ID NO: 895816 - DNA, 25 bp, Homo sapien
ccattgagaggctagacattaggga

SEQ ID NO: 895817 - DNA, 25 bp, Homo sapien
tctgaccttagagaagatggacata

SEQ ID NO: 895818 - DNA, 25 bp, Homo sapien
tatatattggttactctgggccagg

SEQ ID NO: 895819 - DNA, 25 bp, Homo sapien
catcattgttttaccaacggcggct

SEQ ID NO: 895820 - DNA, 25 bp, Homo sapien
tttccattgaaaagctactagcagg

SEQ ID NO: 895821 - DNA, 25 bp, Homo sapien
tcttagccagttagataggcccaac

SEQ ID NO: 895822 - DNA, 25 bp, Homo sapien
tgggcagagcagacctacattatta

SEQ ID NO: 895823 - DNA, 25 bp, Homo sapien
cattaatcttgctgccctatgggat

SEQ ID NO: 895824 - DNA, 25 bp, Homo sapien
tagcggcaacggtttgacgcggatc

SEQ ID NO: 895825 - DNA, 25 bp, Homo sapien
tttcataatctaactcacggcagcc

SEQ ID NO: 895826 - DNA, 25 bp, Homo sapien
aacataaaactagtcctctgcggga

SEQ ID NO: 895827 - DNA, 25 bp, Homo sapien
cgggaattgcaactagattagcggc

SEQ ID NO: 895828 - DNA, 25 bp, Homo sapien
agtagcctgtgtccgattcatctat

SEQ ID NO: 895829 - DNA, 25 bp, Homo sapien
gagctagcgagatcccagcctgaca

SEQ ID NO: 895830 - DNA, 25 bp, Homo sapien
tagagaaacgggttttgcagcacaa

SEQ ID NO: 895831 - DNA, 25 bp, Homo sapien
caagctgcgcgtcccgagctagcga

SEQ ID NO: 895832 - DNA, 25 bp, Homo sapien
cgcgtgctctgggcgcgccgagcct

SEQ ID NO: 895833 - DNA, 25 bp, Homo sapien
tcgcgtgctctgggcgcgccgagcc

SEQ ID NO: 895834 - DNA, 25 bp, Homo sapien
ctcgcgtgctctgggcgcgccgagc

SEQ ID NO: 895835 - DNA, 25 bp, Homo sapien
tcgatgatcttggtcttccgccccg

SEQ ID NO: 895836 - DNA, 25 bp, Homo sapien
ctcgatgatcttggtcttccgcccc

SEQ ID NO: 895837 - DNA, 25 bp, Homo sapien
cacacgctggcgctcgctaccgcgc

SEQ ID NO: 895838 - DNA, 25 bp, Homo sapien
agggcgcacacgctggcgctcgcta

SEQ ID NO: 895839 - DNA, 25 bp, Homo sapien
tggcgctcgctaccgcgcccaccct

SEQ ID NO: 895840 - DNA, 25 bp, Homo sapien
caaggtgaatatgtactgagccagc

SEQ ID NO: 895841 - DNA, 25 bp, Homo sapien
aaacaggcagctcgcgtagactgcg

SEQ ID NO: 895842 - DNA, 25 bp, Homo sapien
caggcagctcgcgtagactgcgagt

SEQ ID NO: 895843 - DNA, 25 bp, Homo sapien
aaaaacaggcagctcgcgtagactg

SEQ ID NO: 895844 - DNA, 25 bp, Homo sapien
aaaaaaacaggcagctcgcgtagac

SEQ ID NO: 895845 - DNA, 25 bp, Homo sapien
gggatcccagagcatcacggacgag

SEQ ID NO: 895846 - DNA, 25 bp, Homo sapien
cgcgggatcccagagcatcacggac

SEQ ID NO: 895847 - DNA, 25 bp, Homo sapien
tcggaagcgcgggatcccagagcat

SEQ ID NO: 895848 - DNA, 25 bp, Homo sapien
ctcggaagcgcgggatcccagagca

SEQ ID NO: 895849 - DNA, 25 bp, Homo sapien
taaacattttgtagacgataacatt

SEQ ID NO: 895850 - DNA, 25 bp, Homo sapien
taacattcgtcttgaagctgtggac

SEQ ID NO: 895851 - DNA, 25 bp, Homo sapien
tagacgataacattcgtcttgaagc

SEQ ID NO: 895852 - DNA, 25 bp, Homo sapien
aacattttgtagacgataacattcg

SEQ ID NO: 895853 - DNA, 25 bp, Homo sapien
tggacagggcaattctgagagcaga

SEQ ID NO: 895854 - DNA, 25 bp, Homo sapien
taggtctggacagggcaattctgag

SEQ ID NO: 895855 - DNA, 25 bp, Homo sapien
aaggtaggtctggacagggcaattc

SEQ ID NO: 895856 - DNA, 25 bp, Homo sapien
ctggacagggcaattctgagagcag

SEQ ID NO: 895857 - DNA, 25 bp, Homo sapien
tcctggataggagtagaaaatgcag

SEQ ID NO: 895858 - DNA, 25 bp, Homo sapien
ttgtcttcctggataggagtagaaa

SEQ ID NO: 895859 - DNA, 25 bp, Homo sapien
catcccattcttgattgtgttcgtg

SEQ ID NO: 895860 - DNA, 25 bp, Homo sapien
cccattcttgattgtgttcgtgagg

SEQ ID NO: 895861 - DNA, 25 bp, Homo sapien
gattgtgttcgtgaggttgtattcc

SEQ ID NO: 895862 - DNA, 25 bp, Homo sapien
cgtgaggttgtattccaaggccaag

SEQ ID NO: 895863 - DNA, 25 bp, Homo sapien
gagtttctgggaccctgactgagtg

SEQ ID NO: 895864 - DNA, 25 bp, Homo sapien
tccaaaccccaggaaaagtggcaga

SEQ ID NO: 895865 - DNA, 25 bp, Homo sapien
aatgggagtgagtttctgggaccct

SEQ ID NO: 895866 - DNA, 25 bp, Homo sapien
gagtgagtttctgggaccctgactg

SEQ ID NO: 895867 - DNA, 25 bp, Homo sapien
gggacctgagtccacactgtggagg

SEQ ID NO: 895868 - DNA, 25 bp, Homo sapien
ctatgggacctgagtccacactgtg

SEQ ID NO: 895869 - DNA, 25 bp, Homo sapien
ggacctgagtccacactgtggaggg

SEQ ID NO: 895870 - DNA, 25 bp, Homo sapien
gacctgagtccacactgtggagggc

SEQ ID NO: 895871 - DNA, 25 bp, Homo sapien
gaaccctcatttgacttggaagatt

SEQ ID NO: 895872 - DNA, 25 bp, Homo sapien
agaaccctcatttgacttggaagat

SEQ ID NO: 895873 - DNA, 25 bp, Homo sapien
cagaaccctcatttgacttggaaga

SEQ ID NO: 895874 - DNA, 25 bp, Homo sapien
gctgctcctatcttcatctgaggta

SEQ ID NO: 895875 - DNA, 25 bp, Homo sapien
ggagctgctcctatcttcatctgag

SEQ ID NO: 895876 - DNA, 25 bp, Homo sapien
cctatcttcatctgaggtagaatcc

SEQ ID NO: 895877 - DNA, 25 bp, Homo sapien
tcatctgaggtagaatcctccagta

SEQ ID NO: 895878 - DNA, 25 bp, Homo sapien
tattgttatcatcaggacgacctca

SEQ ID NO: 895879 - DNA, 25 bp, Homo sapien
aagctcacatccctaaagactctgg

SEQ ID NO: 895880 - DNA, 25 bp, Homo sapien
catggctttaagttaacccaaggag

SEQ ID NO: 895881 - DNA, 25 bp, Homo sapien
tacaagtagacagcacaacatgggt

SEQ ID NO: 895882 - DNA, 25 bp, Homo sapien
tgtcatacatgggatcttcatgtgc

SEQ ID NO: 895883 - DNA, 25 bp, Homo sapien
gtccttttcatgtcgtttattgtct

SEQ ID NO: 895884 - DNA, 25 bp, Homo sapien
atgatgtcatacatgggatcttcat

SEQ ID NO: 895885 - DNA, 25 bp, Homo sapien
tcgtttattgtctcgtatgatgtca

SEQ ID NO: 895886 - DNA, 25 bp, Homo sapien
gacatgtactctttaaagaccggga

SEQ ID NO: 895887 - DNA, 25 bp, Homo sapien
catgttcaacatgttctaggtcaca

SEQ ID NO: 895888 - DNA, 25 bp, Homo sapien
tacaggaaatggctactctcagcac

SEQ ID NO: 895889 - DNA, 25 bp, Homo sapien
gaaatgcctatgttatgaaaaccag

SEQ ID NO: 895890 - DNA, 25 bp, Homo sapien
aagggcattctttgtcacccgttcg

SEQ ID NO: 895891 - DNA, 25 bp, Homo sapien
cactctgaactgctctaacttttgg

SEQ ID NO: 895892 - DNA, 25 bp, Homo sapien
tgctctaacttttggttgcctttga

SEQ ID NO: 895893 - DNA, 25 bp, Homo sapien
cgttcggtgaccatagcgtttgcaa

SEQ ID NO: 895894 - DNA, 25 bp, Homo sapien
caagataaagaatcagcagaatata

SEQ ID NO: 895895 - DNA, 25 bp, Homo sapien
aagccatgtaagatcccagaaacag

SEQ ID NO: 895896 - DNA, 25 bp, Homo sapien
tccccaagcatcctttagtcttata

SEQ ID NO: 895897 - DNA, 25 bp, Homo sapien
caaaatataattatggacaagccat

SEQ ID NO: 895898 - DNA, 25 bp, Homo sapien
cttcttcacatggcacggtggtggg

SEQ ID NO: 895899 - DNA, 25 bp, Homo sapien
tgaggcatgtaagttgcatggatta

SEQ ID NO: 895900 - DNA, 25 bp, Homo sapien
catggattagggaaactctcccaca

SEQ ID NO: 895901 - DNA, 25 bp, Homo sapien
tagaagatggagaacgtgccttggc

SEQ ID NO: 895902 - DNA, 25 bp, Homo sapien
tccaaagtcctttagttggtgcatg

SEQ ID NO: 895903 - DNA, 25 bp, Homo sapien
aaattccctggcgtgttcattgcct

SEQ ID NO: 895904 - DNA, 25 bp, Homo sapien
gcctggtacatctggtatgcaatct

SEQ ID NO: 895905 - DNA, 25 bp, Homo sapien
tggtgcatgagccagaaattccctg

SEQ ID NO: 895906 - DNA, 25 bp, Homo sapien
tataccaaaaacaatgtagctgttc

SEQ ID NO: 895907 - DNA, 25 bp, Homo sapien
aaacagcatggcaagagcgctggga

SEQ ID NO: 895908 - DNA, 25 bp, Homo sapien
aaaagacaagttacacctgattgaa

SEQ ID NO: 895909 - DNA, 25 bp, Homo sapien
ttttcctgggcttccggtgccaaca

SEQ ID NO: 895910 - DNA, 25 bp, Homo sapien
atgcctgtaccagggagcgggactg

SEQ ID NO: 895911 - DNA, 25 bp, Homo sapien
ggagggatgcctgtaccagggagcg

SEQ ID NO: 895912 - DNA, 25 bp, Homo sapien
aggagggatgcctgtaccagggagc

SEQ ID NO: 895913 - DNA, 25 bp, Homo sapien
ggatgcctgtaccagggagcgggac

SEQ ID NO: 895914 - DNA, 25 bp, Homo sapien
tgataagcccaggaggaggtttttc

SEQ ID NO: 895915 - DNA, 25 bp, Homo sapien
cttgataagcccaggaggaggtttt

SEQ ID NO: 895916 - DNA, 25 bp, Homo sapien
tgccatctaagactggccaggcctt

SEQ ID NO: 895917 - DNA, 25 bp, Homo sapien
tgctgagcacgcaagtctccagatg

SEQ ID NO: 895918 - DNA, 25 bp, Homo sapien
catccagggactgaacccagaggag

SEQ ID NO: 895919 - DNA, 25 bp, Homo sapien
ccctgtgctgagcggcacctgccat

SEQ ID NO: 895920 - DNA, 25 bp, Homo sapien
gagaagagtccctaatgcaagtgta

SEQ ID NO: 895921 - DNA, 25 bp, Homo sapien
gaaggtccactctgttatgcctggc

SEQ ID NO: 895922 - DNA, 25 bp, Homo sapien
ttccacacaattgttcctgcagctg

SEQ ID NO: 895923 - DNA, 25 bp, Homo sapien
gcagcccaggagctattaagtgaca

SEQ ID NO: 895924 - DNA, 25 bp, Homo sapien
ctggcaggcagggtcaccgagggaa

SEQ ID NO: 895925 - DNA, 25 bp, Homo sapien
ggcaggcagggtcaccgagggaaaa

SEQ ID NO: 895926 - DNA, 25 bp, Homo sapien
tggcaggcagggtcaccgagggaaa

SEQ ID NO: 895927 - DNA, 25 bp, Homo sapien
ctgtggtggagactcaggagactcc

SEQ ID NO: 895928 - DNA, 25 bp, Homo sapien
tgtggtggagactcaggagactcca

SEQ ID NO: 895929 - DNA, 25 bp, Homo sapien
gtggtggagactcaggagactccat

SEQ ID NO: 895930 - DNA, 25 bp, Homo sapien
tctgtacaacaaatccccatgacat

SEQ ID NO: 895931 - DNA, 25 bp, Homo sapien
atctgtacaacaaatccccatgaca

SEQ ID NO: 895932 - DNA, 25 bp, Homo sapien
aatctgtacaacaaatccccatgac

SEQ ID NO: 895933 - DNA, 25 bp, Homo sapien
caatgcagggtctctatcctgcatc

SEQ ID NO: 895934 - DNA, 25 bp, Homo sapien
tgccctgtaacatggatgcccacaa

SEQ ID NO: 895935 - DNA, 25 bp, Homo sapien
agtgacttgaaagggccaggactgc

SEQ ID NO: 895936 - DNA, 25 bp, Homo sapien
gaccaagagcgccacacagtgactt

SEQ ID NO: 895937 - DNA, 25 bp, Homo sapien
gacttcaagtccttgaccgcggcgc

SEQ ID NO: 895938 - DNA, 25 bp, Homo sapien
ggatggacttcaagtccttgaccgc

SEQ ID NO: 895939 - DNA, 25 bp, Homo sapien
agggcctcccaagtcagattctgct

SEQ ID NO: 895940 - DNA, 25 bp, Homo sapien
gcttggtgccgagcggcagttggct

SEQ ID NO: 895941 - DNA, 25 bp, Homo sapien
ccgcttctgctcccgacgtcgctgc

SEQ ID NO: 895942 - DNA, 25 bp, Homo sapien
cgcttctgctcccgacgtcgctgca

SEQ ID NO: 895943 - DNA, 25 bp, Homo sapien
tcctcgcgcccaggccgggacgaca

SEQ ID NO: 895944 - DNA, 25 bp, Homo sapien
cctcgcgcccaggccgggacgacat

SEQ ID NO: 895945 - DNA, 25 bp, Homo sapien
gtcctcgcgcccaggccgggacgac

SEQ ID NO: 895946 - DNA, 25 bp, Homo sapien
ttctctcactgattgttatcttgtt

SEQ ID NO: 895947 - DNA, 25 bp, Homo sapien
tctctcactgattgttatcttgttt

SEQ ID NO: 895948 - DNA, 25 bp, Homo sapien
attctctcactgattgttatcttgt

SEQ ID NO: 895949 - DNA, 25 bp, Homo sapien
ccttcttctccaaggtgaatatgta

SEQ ID NO: 895950 - DNA, 25 bp, Homo sapien
agggcgcacacgctggcgctcgcta

SEQ ID NO: 895951 - DNA, 25 bp, Homo sapien
cctcgccacggtcgcgcggtgcatg

SEQ ID NO: 895952 - DNA, 25 bp, Homo sapien
tggcgctcgctaccgcgaccaccct

SEQ ID NO: 895953 - DNA, 25 bp, Homo sapien
cacggtcgcgcggtgcatggacggg

SEQ ID NO: 895954 - DNA, 25 bp, Homo sapien
cttgtcaggcgttcataaagcaaaa

SEQ ID NO: 895955 - DNA, 25 bp, Homo sapien
gcagagctcatctgacgtggcatca

SEQ ID NO: 895956 - DNA, 25 bp, Homo sapien
aaatttgccgaacgagggttcgcag

SEQ ID NO: 895957 - DNA, 25 bp, Homo sapien
ctgttgttaaacttcgggtacatga

SEQ ID NO: 895958 - DNA, 25 bp, Homo sapien
ctagtcaggtaaaagaatatgtgat

SEQ ID NO: 895959 - DNA, 25 bp, Homo sapien
tactagtttccttatgcttggccat

SEQ ID NO: 895960 - DNA, 25 bp, Homo sapien
tgccatctgtagttcattgttacta

SEQ ID NO: 895961 - DNA, 25 bp, Homo sapien
gcaggggaagggttgttattgccat

SEQ ID NO: 895962 - DNA, 25 bp, Homo sapien
caggggaagggttgttattgccatc

SEQ ID NO: 895963 - DNA, 25 bp, Homo sapien
aactctgatcccttacaaggcaatg

SEQ ID NO: 895964 - DNA, 25 bp, Homo sapien
aggctttgtttaatgaccttgaact

SEQ ID NO: 895965 - DNA, 25 bp, Homo sapien
ctctgatcccttacaaggcaatgca

SEQ ID NO: 895966 - DNA, 25 bp, Homo sapien
actctgatcccttacaaggcaatgc

SEQ ID NO: 895967 - DNA, 25 bp, Homo sapien
tacagttcccgtacagattccttcc

SEQ ID NO: 895968 - DNA, 25 bp, Homo sapien
tcttgcctacagttcccgtacagat

SEQ ID NO: 895969 - DNA, 25 bp, Homo sapien
atgctgatggtatttgagcaggaga

SEQ ID NO: 895970 - DNA, 25 bp, Homo sapien
caggagagctatgcttttggaagat

SEQ ID NO: 895971 - DNA, 25 bp, Homo sapien
aactgtggtaagtctccaacatacc

SEQ ID NO: 895972 - DNA, 25 bp, Homo sapien
ccaacataccaatctattaaattca

SEQ ID NO: 895973 - DNA, 25 bp, Homo sapien
ctgtggtaagtctccaacataccaa

SEQ ID NO: 895974 - DNA, 25 bp, Homo sapien
ttaactgtggtaagtctccaacata

SEQ ID NO: 895975 - DNA, 25 bp, Homo sapien
caagcagtccataggtgtggtggtt

SEQ ID NO: 895976 - DNA, 25 bp, Homo sapien
ttgcaagcagtccataggtgtggtg

SEQ ID NO: 895977 - DNA, 25 bp, Homo sapien
ctttgcaagcagtccataggtgtgg

SEQ ID NO: 895978 - DNA, 25 bp, Homo sapien
gcagtccataggtgtggtggttccc

SEQ ID NO: 895979 - DNA, 25 bp, Homo sapien
agagccaggcagatctaagctgatg

SEQ ID NO: 895980 - DNA, 25 bp, Homo sapien
gagccaggcagatctaagctgatgt

SEQ ID NO: 895981 - DNA, 25 bp, Homo sapien
aggcagatctaagctgatgtcccag

SEQ ID NO: 895982 - DNA, 25 bp, Homo sapien
aagagccaggcagatctaagctgat

SEQ ID NO: 895983 - DNA, 25 bp, Homo sapien
tatgatgtagttgtggtagttggcc

SEQ ID NO: 895984 - DNA, 25 bp, Homo sapien
atgtagttgtggtagttggccttct

SEQ ID NO: 895985 - DNA, 25 bp, Homo sapien
tagttgtggtagttggccttcttcc

SEQ ID NO: 895986 - DNA, 25 bp, Homo sapien
ctgttctatgatgtagttgtggtag

SEQ ID NO: 895987 - DNA, 25 bp, Homo sapien
tggccctttggtcccggagatcatt

SEQ ID NO: 895988 - DNA, 25 bp, Homo sapien
atcatttctatcaggttagtgactt

SEQ ID NO: 895989 - DNA, 25 bp, Homo sapien
cctttggtcccggagatcatttcta

SEQ ID NO: 895990 - DNA, 25 bp, Homo sapien
tcttggccctttggtcccggagatc

SEQ ID NO: 895991 - DNA, 25 bp, Homo sapien
catatagggaccacccttattcagt

SEQ ID NO: 895992 - DNA, 25 bp, Homo sapien
ttcatatagggaccacccttattca

SEQ ID NO: 895993 - DNA, 25 bp, Homo sapien
ccagggaattggcttatagaaagat

SEQ ID NO: 895994 - DNA, 25 bp, Homo sapien
ctttggggagaactaccttctccag

SEQ ID NO: 895995 - DNA, 25 bp, Homo sapien
ctttccaacagaggcgaataaacac

SEQ ID NO: 895996 - DNA, 25 bp, Homo sapien
cactcttggtatgtgaagattaaag

SEQ ID NO: 895997 - DNA, 25 bp, Homo sapien
cttggtatgtgaagattaaaggccc

SEQ ID NO: 895998 - DNA, 25 bp, Homo sapien
gaggcgaataaacactcttggtatg

SEQ ID NO: 895999 - DNA, 25 bp, Homo sapien
agggcaccaagctttaccaattgtg

SEQ ID NO: 896000 - DNA, 25 bp, Homo sapien
tgttcgcttacactggaaccagcgg

SEQ ID NO: 896001 - DNA, 25 bp, Homo sapien
tcttgccactggaaacaagggtggt

SEQ ID NO: 896002 - DNA, 25 bp, Homo sapien
tctttggtcgaacttgaagggagct

SEQ ID NO: 896003 - DNA, 25 bp, Homo sapien
atctgttcgggctgcaatgcagata

SEQ ID NO: 896004 - DNA, 25 bp, Homo sapien
gttcgggctgcaatgcagataagca

SEQ ID NO: 896005 - DNA, 25 bp, Homo sapien
aaagagaggcaaacgaggttttatg

SEQ ID NO: 896006 - DNA, 25 bp, Homo sapien
gagaggcaaacgaggttttatgttg

SEQ ID NO: 896007 - DNA, 25 bp, Homo sapien
tgcctggacttcacagtgcagaatc

SEQ ID NO: 896008 - DNA, 25 bp, Homo sapien
tatgtgtcttgagcaatttggccca

SEQ ID NO: 896009 - DNA, 25 bp, Homo sapien
tgcagaatctcttgccacaggtgta

SEQ ID NO: 896010 - DNA, 25 bp, Homo sapien
cagaagctgcctatagtgagggtaa

SEQ ID NO: 896011 - DNA, 25 bp, Homo sapien
ttcccttcaggcctacacatatctt

SEQ ID NO: 896012 - DNA, 25 bp, Homo sapien
caggcctacacatatcttcattttt

SEQ ID NO: 896013 - DNA, 25 bp, Homo sapien
ttagatcagttagtagtaatttccc

SEQ ID NO: 896014 - DNA, 25 bp, Homo sapien
cagttagtagtaatttcccttcagg

SEQ ID NO: 896015 - DNA, 25 bp, Homo sapien
ttgtagaggctctactgaattcctg

SEQ ID NO: 896016 - DNA, 25 bp, Homo sapien
ggttgtagaggctctactgaattcc

SEQ ID NO: 896017 - DNA, 25 bp, Homo sapien
atggttgtagaggctctactgaatt

SEQ ID NO: 896018 - DNA, 25 bp, Homo sapien
gtagaggctctactgaattcctggg

SEQ ID NO: 896019 - DNA, 25 bp, Homo sapien
tcttggggtaggaggaaaggatgca

SEQ ID NO: 896020 - DNA, 25 bp, Homo sapien
cttggggtaggaggaaaggatgcaa

SEQ ID NO: 896021 - DNA, 25 bp, Homo sapien
tggggtaggaggaaaggatgcaaag

SEQ ID NO: 896022 - DNA, 25 bp, Homo sapien
cttcttggggtaggaggaaaggatg

SEQ ID NO: 896023 - DNA, 25 bp, Homo sapien
ttccaaatggcttatcagtgctggc

SEQ ID NO: 896024 - DNA, 25 bp, Homo sapien
tgttacgaggtttgggcaggaatcc

SEQ ID NO: 896025 - DNA, 25 bp, Homo sapien
tgctttggttctgtggcctcgggac

SEQ ID NO: 896026 - DNA, 25 bp, Homo sapien
gggacactagtatgcacctggctta

SEQ ID NO: 896027 - DNA, 25 bp, Homo sapien
aatggacagcagcttgcgtgtctgg

SEQ ID NO: 896028 - DNA, 25 bp, Homo sapien
tgatggatgctgtgtcgaaatggac

SEQ ID NO: 896029 - DNA, 25 bp, Homo sapien
tgtgtcgaaatggacagcagcttgc

SEQ ID NO: 896030 - DNA, 25 bp, Homo sapien
agcttgcgtgtctggtctttcctcc

SEQ ID NO: 896031 - DNA, 25 bp, Homo sapien
gttgggcatatgctataaactctcc

SEQ ID NO: 896032 - DNA, 25 bp, Homo sapien
tcggttgttaaaggatctgagaagt

SEQ ID NO: 896033 - DNA, 25 bp, Homo sapien
ggtgttgggcatatgctataaactc

SEQ ID NO: 896034 - DNA, 25 bp, Homo sapien
tctgctggggattcactaagccaca

SEQ ID NO: 896035 - DNA, 25 bp, Homo sapien
gggagagaggattggagaacattcc

SEQ ID NO: 896036 - DNA, 25 bp, Homo sapien
cattccatgagtgcctagttggtat

SEQ ID NO: 896037 - DNA, 25 bp, Homo sapien
ggagaacattccatgagtgcctagt

SEQ ID NO: 896038 - DNA, 25 bp, Homo sapien
catgagtgcctagttggtattggga

SEQ ID NO: 896039 - DNA, 25 bp, Homo sapien
cattggcatatgtgtagcagttttc

SEQ ID NO: 896040 - DNA, 25 bp, Homo sapien
aaaaggccacctctatttgttgcta

SEQ ID NO: 896041 - DNA, 25 bp, Homo sapien
ttttgacattggtgttaggctagct

SEQ ID NO: 896042 - DNA, 25 bp, Homo sapien
taggtaaagtcctagagtgctagaa

SEQ ID NO: 896043 - DNA, 25 bp, Homo sapien
ctgtataatgcctttcctccaatac

SEQ ID NO: 896044 - DNA, 25 bp, Homo sapien
gtataatgcctttcctccaatacat

SEQ ID NO: 896045 - DNA, 25 bp, Homo sapien
tataatgcctttcctccaatacatc

SEQ ID NO: 896046 - DNA, 25 bp, Homo sapien
taatgcctttcctccaatacatcat

SEQ ID NO: 896047 - DNA, 25 bp, Homo sapien
gactctgcttgtcctgatagctgca

SEQ ID NO: 896048 - DNA, 25 bp, Homo sapien
gatagctgcagcgttgccttggttt

SEQ ID NO: 896049 - DNA, 25 bp, Homo sapien
tggccgctagttttccggactctgc

SEQ ID NO: 896050 - DNA, 25 bp, Homo sapien
ggatgtgttccgcagttctggccag

SEQ ID NO: 896051 - DNA, 25 bp, Homo sapien
gacattgtttacaccgagggtcatc

SEQ ID NO: 896052 - DNA, 25 bp, Homo sapien
ttagacattgtttacaccgagggtc

SEQ ID NO: 896053 - DNA, 25 bp, Homo sapien
tgggtctctttagacattgtttaca

SEQ ID NO: 896054 - DNA, 25 bp, Homo sapien
tctttagacattgtttacaccgagg

SEQ ID NO: 896055 - DNA, 25 bp, Homo sapien
gaggctgtgattaaagatggtctga

SEQ ID NO: 896056 - DNA, 25 bp, Homo sapien
agatggtctgaagacatttattgca

SEQ ID NO: 896057 - DNA, 25 bp, Homo sapien
tgattaaagatggtctgaagacatt

SEQ ID NO: 896058 - DNA, 25 bp, Homo sapien
ggcggaggctgtgattaaagatggt

SEQ ID NO: 896059 - DNA, 25 bp, Homo sapien
cttctttgaacttgggaagattttg

SEQ ID NO: 896060 - DNA, 25 bp, Homo sapien
gaacttgggaagattttgtcattca

SEQ ID NO: 896061 - DNA, 25 bp, Homo sapien
gatggccctgccgagctccagctct

SEQ ID NO: 896062 - DNA, 25 bp, Homo sapien
ccctggatggccctgccgagctcca

SEQ ID NO: 896063 - DNA, 25 bp, Homo sapien
ttcataacattcaagtgggctgtca

SEQ ID NO: 896064 - DNA, 25 bp, Homo sapien
cagggaaatctcctcggagaggaag

SEQ ID NO: 896065 - DNA, 25 bp, Homo sapien
gccccagggaaatctcctcggagag

SEQ ID NO: 896066 - DNA, 25 bp, Homo sapien
caatggcctcctgatggatgtgtgg

SEQ ID NO: 896067 - DNA, 25 bp, Homo sapien
tttcgaaggatcaggtggtttagct

SEQ ID NO: 896068 - DNA, 25 bp, Homo sapien
gatcaggtggtttagctcattagga

SEQ ID NO: 896069 - DNA, 25 bp, Homo sapien
cttagtgtttcgaaggatcaggtgg

SEQ ID NO: 896070 - DNA, 25 bp, Homo sapien
tagctcattaggaggtctcttttta

SEQ ID NO: 896071 - DNA, 25 bp, Homo sapien
tgatacctgtatggcacagggcaga

SEQ ID NO: 896072 - DNA, 25 bp, Homo sapien
cagaatgcttggcatgcggcctatg

SEQ ID NO: 896073 - DNA, 25 bp, Homo sapien
cagtgggtgtttatgaccttgatcc

SEQ ID NO: 896074 - DNA, 25 bp, Homo sapien
gcacatatctggcattcagtgggtg

SEQ ID NO: 896075 - DNA, 25 bp, Homo sapien
tatgtggctggtaataaagactgtg

SEQ ID NO: 896076 - DNA, 25 bp, Homo sapien
gtcaatagatggcaaagcagacact

SEQ ID NO: 896077 - DNA, 25 bp, Homo sapien
ccacttctggccatatggatttgga

SEQ ID NO: 896078 - DNA, 25 bp, Homo sapien
ggccatatggatttggaattactgt

SEQ ID NO: 896079 - DNA, 25 bp, Homo sapien
atcattgccgttattaatgacctct

SEQ ID NO: 896080 - DNA, 25 bp, Homo sapien
ggtttaatgtaagggccattgtgct

SEQ ID NO: 896081 - DNA, 25 bp, Homo sapien
taaagacttctacgtcataggtcag

SEQ ID NO: 896082 - DNA, 25 bp, Homo sapien
tgactgcgatggctaatcattgccg

SEQ ID NO: 896083 - DNA, 25 bp, Homo sapien
ctgactttctgtgttggcatccgaa

SEQ ID NO: 896084 - DNA, 25 bp, Homo sapien
ttctgtgttggcatccgaagtagcc

SEQ ID NO: 896085 - DNA, 25 bp, Homo sapien
actttctgtgttggcatccgaagta

SEQ ID NO: 896086 - DNA, 25 bp, Homo sapien
catccgaagtagcctttttgcccat

SEQ ID NO: 896087 - DNA, 25 bp, Homo sapien
gcagggtagtaaagcaaagcagtca

SEQ ID NO: 896088 - DNA, 25 bp, Homo sapien
tactgtttctaataagccacttgct

SEQ ID NO: 896089 - DNA, 25 bp, Homo sapien
ctattgaccagtggagactagcagg

SEQ ID NO: 896090 - DNA, 25 bp, Homo sapien
cttgcttgatctggtatttaggcct

SEQ ID NO: 896091 - DNA, 25 bp, Homo sapien
tctgggaccagcatggactgtagga

SEQ ID NO: 896092 - DNA, 25 bp, Homo sapien
ggaccagcatggactgtaggagcct

SEQ ID NO: 896093 - DNA, 25 bp, Homo sapien
ccagcatggactgtaggagcctctg

SEQ ID NO: 896094 - DNA, 25 bp, Homo sapien
cacaggctggtaagatgtggaaaca

SEQ ID NO: 896095 - DNA, 25 bp, Homo sapien
acatgtcataatgggccgtagcttc

SEQ ID NO: 896096 - DNA, 25 bp, Homo sapien
cataatgggccgtagcttcagctgt

SEQ ID NO: 896097 - DNA, 25 bp, Homo sapien
tcacatgtcataatgggccgtagct

SEQ ID NO: 896098 - DNA, 25 bp, Homo sapien
taatgggccgtagcttcagctgtat

SEQ ID NO: 896099 - DNA, 25 bp, Homo sapien
gggtcttagccacccagctagtcta

SEQ ID NO: 896100 - DNA, 25 bp, Homo sapien
agtggataccagtgcatgttctggt

SEQ ID NO: 896101 - DNA, 25 bp, Homo sapien
tatgagttcaggctgtccttgaggg

SEQ ID NO: 896102 - DNA, 25 bp, Homo sapien
aatggactccataaaggtccttagc

SEQ ID NO: 896103 - DNA, 25 bp, Homo sapien
gctaaatctgtgtacatcctgatga

SEQ ID NO: 896104 - DNA, 25 bp, Homo sapien
tgatcccctgaatcgaaaatttaaa

SEQ ID NO: 896105 - DNA, 25 bp, Homo sapien
tgtgtatacactcactacgtatgtg

SEQ ID NO: 896106 - DNA, 25 bp, Homo sapien
caggcgatctgcagctaaaattcac

SEQ ID NO: 896107 - DNA, 25 bp, Homo sapien
tggaagtagggttgttaatacagga

SEQ ID NO: 896108 - DNA, 25 bp, Homo sapien
tactaatgtggatactcaacagtct

SEQ ID NO: 896109 - DNA, 25 bp, Homo sapien
gtagataactctgtaaaatgcccat

SEQ ID NO: 896110 - DNA, 25 bp, Homo sapien
tacaatgtgatgaccaaagaccagc

SEQ ID NO: 896111 - DNA, 25 bp, Homo sapien
gagttgacagaaacgataaattccc

SEQ ID NO: 896112 - DNA, 25 bp, Homo sapien
tgtagaggtagtagccacctgagtt

SEQ ID NO: 896113 - DNA, 25 bp, Homo sapien
ctttcccaaattgtagaggtagtag

SEQ ID NO: 896114 - DNA, 25 bp, Homo sapien
gccacctgagttgacagaaacgata

SEQ ID NO: 896115 - DNA, 25 bp, Homo sapien
caggcatttgagattgaaagcagat

SEQ ID NO: 896116 - DNA, 25 bp, Homo sapien
tttgagattgaaagcagatccagcc

SEQ ID NO: 896117 - DNA, 25 bp, Homo sapien
tgaaagcagatccagcctgtttctc

SEQ ID NO: 896118 - DNA, 25 bp, Homo sapien
gagattgaaagcagatccagcctgt

SEQ ID NO: 896119 - DNA, 25 bp, Homo sapien
agatattgaccctaagtccttgagt

SEQ ID NO: 896120 - DNA, 25 bp, Homo sapien
ccctagcccctctttgctgtaatag

SEQ ID NO: 896121 - DNA, 25 bp, Homo sapien
tctttgctgtaatagatattgaccc

SEQ ID NO: 896122 - DNA, 25 bp, Homo sapien
gcccctctttgctgtaatagatatt

SEQ ID NO: 896123 - DNA, 25 bp, Homo sapien
ctgggtgagggaaggcctatcagac

SEQ ID NO: 896124 - DNA, 25 bp, Homo sapien
cactgggtgagggaaggcctatcag

SEQ ID NO: 896125 - DNA, 25 bp, Homo sapien
ggcactgggtgagggaaggcctatc

SEQ ID NO: 896126 - DNA, 25 bp, Homo sapien
tgggtgagggaaggcctatcagaca

SEQ ID NO: 896127 - DNA, 25 bp, Homo sapien
ttggaaaatatggaggagttaggcc

SEQ ID NO: 896128 - DNA, 25 bp, Homo sapien
gttgttggaaaatatggaggagtta

SEQ ID NO: 896129 - DNA, 25 bp, Homo sapien
ttgttggaaaatatggaggagttag

SEQ ID NO: 896130 - DNA, 25 bp, Homo sapien
ggaaaatatggaggagttaggccaa

SEQ ID NO: 896131 - DNA, 25 bp, Homo sapien
gttgtttatctaatctttcattggg

SEQ ID NO: 896132 - DNA, 25 bp, Homo sapien
tatgttaccagagtgtaaaaaacat

SEQ ID NO: 896133 - DNA, 25 bp, Homo sapien
gtttatctaatctttcattgggctt

SEQ ID NO: 896134 - DNA, 25 bp, Homo sapien
ttatgttaccagagtgtaaaaaaca

SEQ ID NO: 896135 - DNA, 25 bp, Homo sapien
gccaacacccgtaaagtattcactg

SEQ ID NO: 896136 - DNA, 25 bp, Homo sapien
gttgccactgaatccttcattaata

SEQ ID NO: 896137 - DNA, 25 bp, Homo sapien
tccttcaaggcatacatttaaatac

SEQ ID NO: 896138 - DNA, 25 bp, Homo sapien
tattcactgggagaattaaagtcat

SEQ ID NO: 896139 - DNA, 25 bp, Homo sapien
caaagttggttatcaggcagcggaa

SEQ ID NO: 896140 - DNA, 25 bp, Homo sapien
tattcacacgctttatctctgctct

SEQ ID NO: 896141 - DNA, 25 bp, Homo sapien
aactgagctccatacatttcgcggg

SEQ ID NO: 896142 - DNA, 25 bp, Homo sapien
ggtacatgcatagtcttaaacacgc

SEQ ID NO: 896143 - DNA, 25 bp, Homo sapien
tctctgtcaatgtggtcagcattgt

SEQ ID NO: 896144 - DNA, 25 bp, Homo sapien
tgttgtctctgtcaatgtggtcagc

SEQ ID NO: 896145 - DNA, 25 bp, Homo sapien
acactgttgtctctgtcaatgtggt

SEQ ID NO: 896146 - DNA, 25 bp, Homo sapien
cccctctgcagctgaacactgttgt

SEQ ID NO: 896147 - DNA, 25 bp, Homo sapien
tgcaagatacgcagtcatcagaagc

SEQ ID NO: 896148 - DNA, 25 bp, Homo sapien
gatacgcagtcatcagaagcagcat

SEQ ID NO: 896149 - DNA, 25 bp, Homo sapien
tttttgcaagatacgcagtcatcag

SEQ ID NO: 896150 - DNA, 25 bp, Homo sapien
tctttttgcaagatacgcagtcatc

SEQ ID NO: 896151 - DNA, 25 bp, Homo sapien
gagagcattccgcaaagctgcttgt

SEQ ID NO: 896152 - DNA, 25 bp, Homo sapien
tgtttggttgagaggaacatcccca

SEQ ID NO: 896153 - DNA, 25 bp, Homo sapien
cattcttccccttagcactggtgca

SEQ ID NO: 896154 - DNA, 25 bp, Homo sapien
cctccaaggagtctcggaataattc

SEQ ID NO: 896155 - DNA, 25 bp, Homo sapien
gcttgctgcttcgttctggtagact

SEQ ID NO: 896156 - DNA, 25 bp, Homo sapien
tgcgattttgccttgtcctccctct

SEQ ID NO: 896157 - DNA, 25 bp, Homo sapien
tccctctgggttcgccggatcctgt

SEQ ID NO: 896158 - DNA, 25 bp, Homo sapien
tgggttcgccggatcctgtgttttc

SEQ ID NO: 896159 - DNA, 25 bp, Homo sapien
tgatctttacgggttttactgcagg

SEQ ID NO: 896160 - DNA, 25 bp, Homo sapien
ggagaggagctctttaccaggtaaa

SEQ ID NO: 896161 - DNA, 25 bp, Homo sapien
tagtggcttcccacgatctctggaa

SEQ ID NO: 896162 - DNA, 25 bp, Homo sapien
gatttgaaaatccttgggttagtga

SEQ ID NO: 896163 - DNA, 25 bp, Homo sapien
caggctgtgtcacgtaaaacagatt

SEQ ID NO: 896164 - DNA, 25 bp, Homo sapien
cacatttgtaggaaacggctaaaga

SEQ ID NO: 896165 - DNA, 25 bp, Homo sapien
tattaccccaggtgtgagtttctgt

SEQ ID NO: 896166 - DNA, 25 bp, Homo sapien
cagattcagtgcacatttgtaggaa

SEQ ID NO: 896167 - DNA, 25 bp, Homo sapien
tagagatgggcagtggactcctcac

SEQ ID NO: 896168 - DNA, 25 bp, Homo sapien
gacatcaagaagagattttccagcc

SEQ ID NO: 896169 - DNA, 25 bp, Homo sapien
tccagccacaggcttagtccggagt

SEQ ID NO: 896170 - DNA, 25 bp, Homo sapien
ctaaatgacgacatcaagaagagat

SEQ ID NO: 896171 - DNA, 25 bp, Homo sapien
ccccggttcaatcctgtgctcagaa

SEQ ID NO: 896172 - DNA, 25 bp, Homo sapien
tcgaaaccatcggtacccagtgtcc

SEQ ID NO: 896173 - DNA, 25 bp, Homo sapien
tccctgctcagaggtgcgggtgcct

SEQ ID NO: 896174 - DNA, 25 bp, Homo sapien
gcctgtcacgggcagttgaaattct

SEQ ID NO: 896175 - DNA, 25 bp, Homo sapien
ctttgtaaatgctgctagccaaaat

SEQ ID NO: 896176 - DNA, 25 bp, Homo sapien
tttgtaaatgctgctagccaaaatc

SEQ ID NO: 896177 - DNA, 25 bp, Homo sapien
tccagggaaccctttgtaaatgctg

SEQ ID NO: 896178 - DNA, 25 bp, Homo sapien
aggacaagttggaaatcttcaaaag

SEQ ID NO: 896179 - DNA, 25 bp, Homo sapien
cccctgtgtgttattggcctgtttt

SEQ ID NO: 896180 - DNA, 25 bp, Homo sapien
cttgcccctgtgtgttattggcctg

SEQ ID NO: 896181 - DNA, 25 bp, Homo sapien
ggcatttccagggagccttgcccct

SEQ ID NO: 896182 - DNA, 25 bp, Homo sapien
ggagccttgcccctgtgtgttattg

SEQ ID NO: 896183 - DNA, 25 bp, Homo sapien
aatgacccttgtggggatttctagc

SEQ ID NO: 896184 - DNA, 25 bp, Homo sapien
gttgccttttggttctagtaggagc

SEQ ID NO: 896185 - DNA, 25 bp, Homo sapien
ggattgcctcgagtttgacatgaga

SEQ ID NO: 896186 - DNA, 25 bp, Homo sapien
aagctaaatcttcggattgcctcga

SEQ ID NO: 896187 - DNA, 25 bp, Homo sapien
gtcttgagagtttcagtacccactg

SEQ ID NO: 896188 - DNA, 25 bp, Homo sapien
gacacgcgtggactctataatgtgg

SEQ ID NO: 896189 - DNA, 25 bp, Homo sapien
tgagaggacatatacccagggcctg

SEQ ID NO: 896190 - DNA, 25 bp, Homo sapien
tgatgtagacttttgggcacttcca

SEQ ID NO: 896191 - DNA, 25 bp, Homo sapien
tttggctccaaagactttcacttcc

SEQ ID NO: 896192 - DNA, 25 bp, Homo sapien
aaaaataccctccagaccatacagc

SEQ ID NO: 896193 - DNA, 25 bp, Homo sapien
tgttttccatagacagtaacagaca

SEQ ID NO: 896194 - DNA, 25 bp, Homo sapien
caatcacctcccttaatcattcatg

SEQ ID NO: 896195 - DNA, 25 bp, Homo sapien
agagcagcctgcaccagacaaccag

SEQ ID NO: 896196 - DNA, 25 bp, Homo sapien
gacaaccagacctcctggcactgtg

SEQ ID NO: 896197 - DNA, 25 bp, Homo sapien
acttcccagccaacagactgtgagg

SEQ ID NO: 896198 - DNA, 25 bp, Homo sapien
actaagacaaatttgactaagacag

SEQ ID NO: 896199 - DNA, 25 bp, Homo sapien
tgtgtaccactctctaacttggagt

SEQ ID NO: 896200 - DNA, 25 bp, Homo sapien
ttcagtctctggctcgtgggtcacc

SEQ ID NO: 896201 - DNA, 25 bp, Homo sapien
ggtcacctactcagtgggatacact

SEQ ID NO: 896202 - DNA, 25 bp, Homo sapien
tactcagtgggatacactgacctcc

SEQ ID NO: 896203 - DNA, 25 bp, Homo sapien
tgtgatacgctctctggaagatggc

SEQ ID NO: 896204 - DNA, 25 bp, Homo sapien
ccaacgcacgcaggcattatccatt

SEQ ID NO: 896205 - DNA, 25 bp, Homo sapien
tctgtagtaaataccggaccaacgc

SEQ ID NO: 896206 - DNA, 25 bp, Homo sapien
ttttagaagagacatgcactctgct

SEQ ID NO: 896207 - DNA, 25 bp, Homo sapien
cccatgggtggttggccatggctat

SEQ ID NO: 896208 - DNA, 25 bp, Homo sapien
aaatgactgagaggcaagggatgta

SEQ ID NO: 896209 - DNA, 25 bp, Homo sapien
gaaggcccagaggtggaggacaaag

SEQ ID NO: 896210 - DNA, 25 bp, Homo sapien
ggccatggctatgatgtctgggctt

SEQ ID NO: 896211 - DNA, 25 bp, Homo sapien
ggctgattgtgtaacaccttcctgc

SEQ ID NO: 896212 - DNA, 25 bp, Homo sapien
attgtgtaacaccttcctgccttag

SEQ ID NO: 896213 - DNA, 25 bp, Homo sapien
tgattgtgtaacaccttcctgcctt

SEQ ID NO: 896214 - DNA, 25 bp, Homo sapien
gctgattgtgtaacaccttcctgcc

SEQ ID NO: 896215 - DNA, 25 bp, Homo sapien
gatggatattcatacgggctggtcc

SEQ ID NO: 896216 - DNA, 25 bp, Homo sapien
taactaattagaccagacagggtgc

SEQ ID NO: 896217 - DNA, 25 bp, Homo sapien
ttctggccgaccactcgaggtttca

SEQ ID NO: 896218 - DNA, 25 bp, Homo sapien
tcacactgggtcagcaaaaatgctt

SEQ ID NO: 896219 - DNA, 25 bp, Homo sapien
atgggtgctgggatctactgtcagc

SEQ ID NO: 896220 - DNA, 25 bp, Homo sapien
ggcttctgcaaagctaggaaccagg

SEQ ID NO: 896221 - DNA, 25 bp, Homo sapien
tggaaatcctgctgattagaccatg

SEQ ID NO: 896222 - DNA, 25 bp, Homo sapien
cctgctgattagaccatgggtgctg

SEQ ID NO: 896223 - DNA, 25 bp, Homo sapien
ttcctcctcctgacccttgttctcc

SEQ ID NO: 896224 - DNA, 25 bp, Homo sapien
cctccttttgctcctgcttatcctc

SEQ ID NO: 896225 - DNA, 25 bp, Homo sapien
ttttgctcctgcttatcctcctcct

SEQ ID NO: 896226 - DNA, 25 bp, Homo sapien
cctcctgacccttgttctcctgctt

SEQ ID NO: 896227 - DNA, 25 bp, Homo sapien
gtataaatctaagggattcttattg

SEQ ID NO: 896228 - DNA, 25 bp, Homo sapien
tttgtaagacactaaagtgctgtat

SEQ ID NO: 896229 - DNA, 25 bp, Homo sapien
aatctaagggattcttattgccatg

SEQ ID NO: 896230 - DNA, 25 bp, Homo sapien
tattgccatggttatcacctcctcc

SEQ ID NO: 896231 - DNA, 25 bp, Homo sapien
ctggtgtacgttgtgattaggtttg

SEQ ID NO: 896232 - DNA, 25 bp, Homo sapien
gcgagttcgtgaccacgttgtgacg

SEQ ID NO: 896233 - DNA, 25 bp, Homo sapien
gttgtgacgtgctggcatatacttc

SEQ ID NO: 896234 - DNA, 25 bp, Homo sapien
ttaggtttggcagtagcgagttcgt

SEQ ID NO: 896235 - DNA, 25 bp, Homo sapien
ggtggtctggctttattgcttatta

SEQ ID NO: 896236 - DNA, 25 bp, Homo sapien
cctggattcagaacaactgggttgc

SEQ ID NO: 896237 - DNA, 25 bp, Homo sapien
gcttattagtggtatgacattgggc

SEQ ID NO: 896238 - DNA, 25 bp, Homo sapien
cttgtccatgtaagaacttctgaaa

SEQ ID NO: 896239 - DNA, 25 bp, Homo sapien
accaggcactgtgcttaaacatttt

SEQ ID NO: 896240 - DNA, 25 bp, Homo sapien
tatacaccaggcactgtgcttaaac

SEQ ID NO: 896241 - DNA, 25 bp, Homo sapien
cactgtgcttaaacattttaatgta

SEQ ID NO: 896242 - DNA, 25 bp, Homo sapien
ggcactgtgcttaaacattttaatg

SEQ ID NO: 896243 - DNA, 25 bp, Homo sapien
ctacagccagtcctgcgctgccagc

SEQ ID NO: 896244 - DNA, 25 bp, Homo sapien
tggtacacagccatttgttatgttc

SEQ ID NO: 896245 - DNA, 25 bp, Homo sapien
caacataaaccttgatgtctccctt

SEQ ID NO: 896246 - DNA, 25 bp, Homo sapien
tccaccctggtacacagccatttgt

SEQ ID NO: 896247 - DNA, 25 bp, Homo sapien
cagtgtcttcttggaggacccgggc

SEQ ID NO: 896248 - DNA, 25 bp, Homo sapien
tccctcgcctgttagattggtaagc

SEQ ID NO: 896249 - DNA, 25 bp, Homo sapien
ttcagtcctagtggcgcccagtgtc

SEQ ID NO: 896250 - DNA, 25 bp, Homo sapien
tgtttcttgaaccatgggtggctgg

SEQ ID NO: 896251 - DNA, 25 bp, Homo sapien
taaaatggacggtctgcattcgccg

SEQ ID NO: 896252 - DNA, 25 bp, Homo sapien
gacagactcagtccctagtaaaatg

SEQ ID NO: 896253 - DNA, 25 bp, Homo sapien
gaacagcctcggtactgttaagaca

SEQ ID NO: 896254 - DNA, 25 bp, Homo sapien
tctgcattcgccgtgggattctgtg

SEQ ID NO: 896255 - DNA, 25 bp, Homo sapien
tgaagatagattcccgcagccagag

SEQ ID NO: 896256 - DNA, 25 bp, Homo sapien
gacttgaagatagattcccgcagcc

SEQ ID NO: 896257 - DNA, 25 bp, Homo sapien
gaggacttgaagatagattcccgca

SEQ ID NO: 896258 - DNA, 25 bp, Homo sapien
gtcagaggacttgaagatagattcc

SEQ ID NO: 896259 - DNA, 25 bp, Homo sapien
gatccatttccagcccagtctgaga

SEQ ID NO: 896260 - DNA, 25 bp, Homo sapien
cattgcatccggtgagttaaataac

SEQ ID NO: 896261 - DNA, 25 bp, Homo sapien
ttaaataactcagccaagatccatt

SEQ ID NO: 896262 - DNA, 25 bp, Homo sapien
taataaatcatagtcaagggcgtcg

SEQ ID NO: 896263 - DNA, 25 bp, Homo sapien
tttagaaatagatcaaggtagtagc

SEQ ID NO: 896264 - DNA, 25 bp, Homo sapien
aaatcagtgaaagctggcgtctgca

SEQ ID NO: 896265 - DNA, 25 bp, Homo sapien
tgctgtttagaaatagatcaaggta

SEQ ID NO: 896266 - DNA, 25 bp, Homo sapien
gggtttaatctcagcattggtcaca

SEQ ID NO: 896267 - DNA, 25 bp, Homo sapien
gaagcagtctgtagcatgcagctgt

SEQ ID NO: 896268 - DNA, 25 bp, Homo sapien
ggctttgtttaccactgaccaagat

SEQ ID NO: 896269 - DNA, 25 bp, Homo sapien
ccaggttcttggagttctcttggct

SEQ ID NO: 896270 - DNA, 25 bp, Homo sapien
tgtcctcagggacattgagatccag

SEQ ID NO: 896271 - DNA, 25 bp, Homo sapien
tgtcctgctgtcccgtaagttcctg

SEQ ID NO: 896272 - DNA, 25 bp, Homo sapien
tgtcccgtaagttcctgcttattct

SEQ ID NO: 896273 - DNA, 25 bp, Homo sapien
catggctactgtggtctagaggaag

SEQ ID NO: 896274 - DNA, 25 bp, Homo sapien
cctgctgtcccgtaagttcctgctt

SEQ ID NO: 896275 - DNA, 25 bp, Homo sapien
cctaagaagtcttttgtgcctttat

SEQ ID NO: 896276 - DNA, 25 bp, Homo sapien
caagctgtgagcttaagtaacactt

SEQ ID NO: 896277 - DNA, 25 bp, Homo sapien
ccaagctgtgagcttaagtaacact

SEQ ID NO: 896278 - DNA, 25 bp, Homo sapien
gctgtgagcttaagtaacactttaa

SEQ ID NO: 896279 - DNA, 25 bp, Homo sapien
gtctgaattgaacccggaaggaagc

SEQ ID NO: 896280 - DNA, 25 bp, Homo sapien
cacttcggtatggttgtgtggccat

SEQ ID NO: 896281 - DNA, 25 bp, Homo sapien
tctttctgccacttcggtatggttg

SEQ ID NO: 896282 - DNA, 25 bp, Homo sapien
agtagatgtgtctgaattgaacccg

SEQ ID NO: 896283 - DNA, 25 bp, Homo sapien
tgaagcacacgtgtgagggtcatct

SEQ ID NO: 896284 - DNA, 25 bp, Homo sapien
aatgtcctcatctgccgaactggag

SEQ ID NO: 896285 - DNA, 25 bp, Homo sapien
agaatttctctctccgtgttgacca

SEQ ID NO: 896286 - DNA, 25 bp, Homo sapien
gctgatctgtttaccgccacgtgac

SEQ ID NO: 896287 - DNA, 25 bp, Homo sapien
cccagaagagtcacatttgggtttc

SEQ ID NO: 896288 - DNA, 25 bp, Homo sapien
cacccagaagagtcacatttgggtt

SEQ ID NO: 896289 - DNA, 25 bp, Homo sapien
gagccaaactcagggcagcacccag

SEQ ID NO: 896290 - DNA, 25 bp, Homo sapien
ggataggagccaaactcagggcagc

SEQ ID NO: 896291 - DNA, 25 bp, Homo sapien
gttccattcagcagacccaccctct

SEQ ID NO: 896292 - DNA, 25 bp, Homo sapien
cattcagcagacccaccctctttgc

SEQ ID NO: 896293 - DNA, 25 bp, Homo sapien
ggttccattcagcagacccaccctc

SEQ ID NO: 896294 - DNA, 25 bp, Homo sapien
tccattcagcagacccaccctcttt

SEQ ID NO: 896295 - DNA, 25 bp, Homo sapien
gatggattggtttgaaacaaaacca

SEQ ID NO: 896296 - DNA, 25 bp, Homo sapien
ggagaatccacagcggtggacagtt

SEQ ID NO: 896297 - DNA, 25 bp, Homo sapien
gggcttatgtttgattgaattcatc

SEQ ID NO: 896298 - DNA, 25 bp, Homo sapien
cacagcggtggacagttgatagaag

SEQ ID NO: 896299 - DNA, 25 bp, Homo sapien
gaagccataattcgggggcttatgt

SEQ ID NO: 896300 - DNA, 25 bp, Homo sapien
ccttcacatccctaagcgtgttggt

SEQ ID NO: 896301 - DNA, 25 bp, Homo sapien
cgtgttggtgctcattaggtgaaaa

SEQ ID NO: 896302 - DNA, 25 bp, Homo sapien
taagcgtgttggtgctcattaggtg

SEQ ID NO: 896303 - DNA, 25 bp, Homo sapien
catccctaagcgtgttggtgctcat

SEQ ID NO: 896304 - DNA, 25 bp, Homo sapien
caaagcgcttagatccagagagggt

SEQ ID NO: 896305 - DNA, 25 bp, Homo sapien
tactgaaccgtaagagcaatgactg

SEQ ID NO: 896306 - DNA, 25 bp, Homo sapien
taccctcatgatcgaacctggcttg

SEQ ID NO: 896307 - DNA, 25 bp, Homo sapien
tactatgaagggaaactcgacaggc

SEQ ID NO: 896308 - DNA, 25 bp, Homo sapien
taccatgtgttagagagtcctgggc

SEQ ID NO: 896309 - DNA, 25 bp, Homo sapien
gctaaggtctacaccaaggcacagg

SEQ ID NO: 896310 - DNA, 25 bp, Homo sapien
gataggtccctgtctccgaggaagg

SEQ ID NO: 896311 - DNA, 25 bp, Homo sapien
gaggtcttcttagggtcaacacgaa

SEQ ID NO: 896312 - DNA, 25 bp, Homo sapien
tcctgttacttccatgatgccgtag

SEQ ID NO: 896313 - DNA, 25 bp, Homo sapien
gctgcttatggagatgtttcctcca

SEQ ID NO: 896314 - DNA, 25 bp, Homo sapien
tgttgagttcttcactggttccctt

SEQ ID NO: 896315 - DNA, 25 bp, Homo sapien
agtcttgttcctgcctgtctgttga

SEQ ID NO: 896316 - DNA, 25 bp, Homo sapien
gaatacaagcttgaacccttctcag

SEQ ID NO: 896317 - DNA, 25 bp, Homo sapien
ttatcactgattcctggattgtctg

SEQ ID NO: 896318 - DNA, 25 bp, Homo sapien
tgctcttacttcctagaaaggtcag

SEQ ID NO: 896319 - DNA, 25 bp, Homo sapien
gcttctcagaatctaacctgtttgt

SEQ ID NO: 896320 - DNA, 25 bp, Homo sapien
tttctgctgatggtaacaacctggt

SEQ ID NO: 896321 - DNA, 25 bp, Homo sapien
gagatactttttggtcctgttgtct

SEQ ID NO: 896322 - DNA, 25 bp, Homo sapien
agcatttcttgtggcaacttgtgct

SEQ ID NO: 896323 - DNA, 25 bp, Homo sapien
tgcttctggttccttacaagtaaac

SEQ ID NO: 896324 - DNA, 25 bp, Homo sapien
tgcatatctaattccgtgcacacag

SEQ ID NO: 896325 - DNA, 25 bp, Homo sapien
gcatatctaattccgtgcacacagc

SEQ ID NO: 896326 - DNA, 25 bp, Homo sapien
tctgcatatctaattccgtgcacac

SEQ ID NO: 896327 - DNA, 25 bp, Homo sapien
aaaatcccttaaattgctcatcaca

SEQ ID NO: 896328 - DNA, 25 bp, Homo sapien
tacaacattgataaaccacaaggcc

SEQ ID NO: 896329 - DNA, 25 bp, Homo sapien
gttacaacattgataaaccacaagg

SEQ ID NO: 896330 - DNA, 25 bp, Homo sapien
caacattgataaaccacaaggccat

SEQ ID NO: 896331 - DNA, 25 bp, Homo sapien
ctgttacaacattgataaaccacaa

SEQ ID NO: 896332 - DNA, 25 bp, Homo sapien
tcaagcagtgcagggcttcagaaca

SEQ ID NO: 896333 - DNA, 25 bp, Homo sapien
gcagggcttcagaacagctggttct

SEQ ID NO: 896334 - DNA, 25 bp, Homo sapien
ttcagaacagctggttctgcttcct

SEQ ID NO: 896335 - DNA, 25 bp, Homo sapien
aagcagtgcagggcttcagaacagc

SEQ ID NO: 896336 - DNA, 25 bp, Homo sapien
tggttgtgcttccaattgcccttct

SEQ ID NO: 896337 - DNA, 25 bp, Homo sapien
accaagagttacaggaatctcacca

SEQ ID NO: 896338 - DNA, 25 bp, Homo sapien
tatatccctgagcagttggttgtgc

SEQ ID NO: 896339 - DNA, 25 bp, Homo sapien
ggaagcctggacaagtgacgtgact

SEQ ID NO: 896340 - DNA, 25 bp, Homo sapien
gcaagtcgatcgtcctaacagtgaa

SEQ ID NO: 896341 - DNA, 25 bp, Homo sapien
cttgcaagcaatccgcaagtcgatc

SEQ ID NO: 896342 - DNA, 25 bp, Homo sapien
gcaccctctactggccaggaggact

SEQ ID NO: 896343 - DNA, 25 bp, Homo sapien
taacagtgaaagatgcagcaccctc

SEQ ID NO: 896344 - DNA, 25 bp, Homo sapien
tggtcctcctttgtccgtgttagag

SEQ ID NO: 896345 - DNA, 25 bp, Homo sapien
ctggtcctcctttgtccgtgttaga

SEQ ID NO: 896346 - DNA, 25 bp, Homo sapien
agggcactaggcactgaaaggtact

SEQ ID NO: 896347 - DNA, 25 bp, Homo sapien
cactaggcactgaaaggtactccat

SEQ ID NO: 896348 - DNA, 25 bp, Homo sapien
gcactaggcactgaaaggtactcca

SEQ ID NO: 896349 - DNA, 25 bp, Homo sapien
ggcactaggcactgaaaggtactcc

SEQ ID NO: 896350 - DNA, 25 bp, Homo sapien
ttacactgggttgtctagacgtagg

SEQ ID NO: 896351 - DNA, 25 bp, Homo sapien
tctgaagctgggagagctcagcctg

SEQ ID NO: 896352 - DNA, 25 bp, Homo sapien
taggtgtcgttctggattgcctcca

SEQ ID NO: 896353 - DNA, 25 bp, Homo sapien
gcaagggcggccaagtaggaacaaa

SEQ ID NO: 896354 - DNA, 25 bp, Homo sapien
aaattcaacatccccgctgtcccaa

SEQ ID NO: 896355 - DNA, 25 bp, Homo sapien
ccccgctgtcccaagcctccagcat

SEQ ID NO: 896356 - DNA, 25 bp, Homo sapien
tcagacctaacaggcccccaaacaa

SEQ ID NO: 896357 - DNA, 25 bp, Homo sapien
tgtttccacagtagaggtcccctgg

SEQ ID NO: 896358 - DNA, 25 bp, Homo sapien
ttccatgatacgtccaacttaaccg

SEQ ID NO: 896359 - DNA, 25 bp, Homo sapien
agtgaacagcgctttccttgggtca

SEQ ID NO: 896360 - DNA, 25 bp, Homo sapien
ctcacattgcactggagaagactca

SEQ ID NO: 896361 - DNA, 25 bp, Homo sapien
tctgagggagcagatccatgaggct

SEQ ID NO: 896362 - DNA, 25 bp, Homo sapien
cagtagcaagtctgacacaaaccat

SEQ ID NO: 896363 - DNA, 25 bp, Homo sapien
tgtattgcctaatggcagtagcaag

SEQ ID NO: 896364 - DNA, 25 bp, Homo sapien
cctaatggcagtagcaagtctgaca

SEQ ID NO: 896365 - DNA, 25 bp, Homo sapien
gctgtcagaatgtcaatgtattgcc

SEQ ID NO: 896366 - DNA, 25 bp, Homo sapien
gacacagccttggaaacgcaaaggc

SEQ ID NO: 896367 - DNA, 25 bp, Homo sapien
aatttcgcaagctggcctgttgtgg

SEQ ID NO: 896368 - DNA, 25 bp, Homo sapien
tcaggctccttaacaatttcgcaag

SEQ ID NO: 896369 - DNA, 25 bp, Homo sapien
gctgtgtgatgtcgctgagtgacac

SEQ ID NO: 896370 - DNA, 25 bp, Homo sapien
atgctggagtttcggttgtaagcaa

SEQ ID NO: 896371 - DNA, 25 bp, Homo sapien
aaattcctgcccttttggagactgc

SEQ ID NO: 896372 - DNA, 25 bp, Homo sapien
gagtggctgatattccccagacatt

SEQ ID NO: 896373 - DNA, 25 bp, Homo sapien
tggagtttcggttgtaagcaagaga

SEQ ID NO: 896374 - DNA, 25 bp, Homo sapien
tgtcagtttcgttgtattgtcaggc

SEQ ID NO: 896375 - DNA, 25 bp, Homo sapien
gcagggcttagggataaaattctcc

SEQ ID NO: 896376 - DNA, 25 bp, Homo sapien
gtttcttcactcgtccttgatgtca

SEQ ID NO: 896377 - DNA, 25 bp, Homo sapien
ccatgctggttatagactgtctggt

SEQ ID NO: 896378 - DNA, 25 bp, Homo sapien
ctaggagtggagatgaccaatgacc

SEQ ID NO: 896379 - DNA, 25 bp, Homo sapien
tcctccagtctgaaagtacagatgt

SEQ ID NO: 896380 - DNA, 25 bp, Homo sapien
cagatgtttgaaactcttctaggag

SEQ ID NO: 896381 - DNA, 25 bp, Homo sapien
gagatgaccaatgaccagtctgact

SEQ ID NO: 896382 - DNA, 25 bp, Homo sapien
tcctcctaatatggtgaaatatgcc

SEQ ID NO: 896383 - DNA, 25 bp, Homo sapien
aatgcctaagctaacaaaactgagt

SEQ ID NO: 896384 - DNA, 25 bp, Homo sapien
gcctttggcccattcacgttaacca

SEQ ID NO: 896385 - DNA, 25 bp, Homo sapien
ttaaccaccacgtccctggagactg

SEQ ID NO: 896386 - DNA, 25 bp, Homo sapien
atctaagtgttaacacactggttag

SEQ ID NO: 896387 - DNA, 25 bp, Homo sapien
tgtaagtgtggtcttaatctaagtg

SEQ ID NO: 896388 - DNA, 25 bp, Homo sapien
ccatttaattgctcttaagtaagaa

SEQ ID NO: 896389 - DNA, 25 bp, Homo sapien
taactttcttcttgttagtacacca

SEQ ID NO: 896390 - DNA, 25 bp, Homo sapien
tagtgaccaattaatccaacccatc

SEQ ID NO: 896391 - DNA, 25 bp, Homo sapien
tccttttactagtgaccaattaatc

SEQ ID NO: 896392 - DNA, 25 bp, Homo sapien
aacatttaatctttctcttaagtgg

SEQ ID NO: 896393 - DNA, 25 bp, Homo sapien
gggcagcgatataattccttttact

SEQ ID NO: 896394 - DNA, 25 bp, Homo sapien
tgcagggatttccagcaatccacag

SEQ ID NO: 896395 - DNA, 25 bp, Homo sapien
ctgactgaggcatgataaaatgtgc

SEQ ID NO: 896396 - DNA, 25 bp, Homo sapien
cagtcagctgatctgctaaggagaa

SEQ ID NO: 896397 - DNA, 25 bp, Homo sapien
tatacctcaaagtgaatagctgcat

SEQ ID NO: 896398 - DNA, 25 bp, Homo sapien
ccagtcccacagtaagggggatgtt

SEQ ID NO: 896399 - DNA, 25 bp, Homo sapien
caaaggctggaaattgagtcccagt

SEQ ID NO: 896400 - DNA, 25 bp, Homo sapien
tagcacgcaagtgtcagcttcccca

SEQ ID NO: 896401 - DNA, 25 bp, Homo sapien
ttctagcacgcaagtgtcagcttcc

SEQ ID NO: 896402 - DNA, 25 bp, Homo sapien
tcttgagttgctgcaaccggggctg

SEQ ID NO: 896403 - DNA, 25 bp, Homo sapien
acctacagggtctgcgaggcagagc

SEQ ID NO: 896404 - DNA, 25 bp, Homo sapien
gccgccctcgtgtctctcgggagtc

SEQ ID NO: 896405 - DNA, 25 bp, Homo sapien
accaatacgttcctcaccagccatg

SEQ ID NO: 896406 - DNA, 25 bp, Homo sapien
tacaatagctaatgcccagccatta

SEQ ID NO: 896407 - DNA, 25 bp, Homo sapien
taattgcgtctgttcgcactacaat

SEQ ID NO: 896408 - DNA, 25 bp, Homo sapien
tgttcgcactacaatagctaatgcc

SEQ ID NO: 896409 - DNA, 25 bp, Homo sapien
ggcccatttaattgcgtctgttcgc

SEQ ID NO: 896410 - DNA, 25 bp, Homo sapien
gcgattgcaccccttttgagtagag

SEQ ID NO: 896411 - DNA, 25 bp, Homo sapien
tcaactcttggacagaggaagtcgg

SEQ ID NO: 896412 - DNA, 25 bp, Homo sapien
cagctagctgatcgtcaggtcccaa

SEQ ID NO: 896413 - DNA, 25 bp, Homo sapien
caccgtgagctcaaggacagctagc

SEQ ID NO: 896414 - DNA, 25 bp, Homo sapien
aggaggcggcgattcagcaggggga

SEQ ID NO: 896415 - DNA, 25 bp, Homo sapien
gggggatcacaggagctgactcccc

SEQ ID NO: 896416 - DNA, 25 bp, Homo sapien
gggatcacaggagctgactccccga

SEQ ID NO: 896417 - DNA, 25 bp, Homo sapien
gatcacaggagctgactccccgaca

SEQ ID NO: 896418 - DNA, 25 bp, Homo sapien
ttcctccttcttgacaggtagggga

SEQ ID NO: 896419 - DNA, 25 bp, Homo sapien
gctactcaattgctcgggggtcccc

SEQ ID NO: 896420 - DNA, 25 bp, Homo sapien
ctgctactcaattgctcgggggtcc

SEQ ID NO: 896421 - DNA, 25 bp, Homo sapien
cctccttcttgacaggtaggggagg

SEQ ID NO: 896422 - DNA, 25 bp, Homo sapien
gtacatagtttgtgagttgaatcca

SEQ ID NO: 896423 - DNA, 25 bp, Homo sapien
ctttgacatcatccttatagacgta

SEQ ID NO: 896424 - DNA, 25 bp, Homo sapien
aggctttgtatgacgtctcggtgaa

SEQ ID NO: 896425 - DNA, 25 bp, Homo sapien
tatagacgtaaatttcagataggct

SEQ ID NO: 896426 - DNA, 25 bp, Homo sapien
aggctcagtgatatgttatcatgac

SEQ ID NO: 896427 - DNA, 25 bp, Homo sapien
tggctgaaaggctcagtgatatgtt

SEQ ID NO: 896428 - DNA, 25 bp, Homo sapien
tgaaaggctcagtgatatgttatca

SEQ ID NO: 896429 - DNA, 25 bp, Homo sapien
tttcattggctgaaaggctcagtga

SEQ ID NO: 896430 - DNA, 25 bp, Homo sapien
tacatttccacgaacccactgcagt

SEQ ID NO: 896431 - DNA, 25 bp, Homo sapien
tgagtaataatagatggatgaccac

SEQ ID NO: 896432 - DNA, 25 bp, Homo sapien
agcactccggacagccaggaagcta

SEQ ID NO: 896433 - DNA, 25 bp, Homo sapien
agttcatggatttcaaagcactccg

SEQ ID NO: 896434 - DNA, 25 bp, Homo sapien
ttaaagagtgtgatgtggccagcat

SEQ ID NO: 896435 - DNA, 25 bp, Homo sapien
ttttaaagagtgtgatgtggccagc

SEQ ID NO: 896436 - DNA, 25 bp, Homo sapien
gcaaaccacaggcactagtgcatac

SEQ ID NO: 896437 - DNA, 25 bp, Homo sapien
tcattttaaagagtgtgatgtggcc

SEQ ID NO: 896438 - DNA, 25 bp, Homo sapien
gtgggattgggcctccttctagaaa

SEQ ID NO: 896439 - DNA, 25 bp, Homo sapien
tgccaactcctctaagagcctgctg

SEQ ID NO: 896440 - DNA, 25 bp, Homo sapien
ttctgtgcttgggactagaagtcct

SEQ ID NO: 896441 - DNA, 25 bp, Homo sapien
cttcttggtaatagcatgttctgcc

SEQ ID NO: 896442 - DNA, 25 bp, Homo sapien
gattcccacagggatacgctctgtt

SEQ ID NO: 896443 - DNA, 25 bp, Homo sapien
cagtctcttcatgggatggattccc

SEQ ID NO: 896444 - DNA, 25 bp, Homo sapien
acagggatacgctctgtttcctgtg

SEQ ID NO: 896445 - DNA, 25 bp, Homo sapien
tcttcatgggatggattcccacagg

SEQ ID NO: 896446 - DNA, 25 bp, Homo sapien
caggacgaagctgacgtgacgttat

SEQ ID NO: 896447 - DNA, 25 bp, Homo sapien
ctgcaggacgaagctgacgtgacgt

SEQ ID NO: 896448 - DNA, 25 bp, Homo sapien
gaagctgacgtgacgttatgtttgt

SEQ ID NO: 896449 - DNA, 25 bp, Homo sapien
gacgaagctgacgtgacgttatgtt

SEQ ID NO: 896450 - DNA, 25 bp, Homo sapien
tcctcgtgcagaataaagccattct

SEQ ID NO: 896451 - DNA, 25 bp, Homo sapien
agcaggtcccttcctcgtgcagaat

SEQ ID NO: 896452 - DNA, 25 bp, Homo sapien
ggtcccttcctcgtgcagaataaag

SEQ ID NO: 896453 - DNA, 25 bp, Homo sapien
ccttcctcgtgcagaataaagccat

SEQ ID NO: 896454 - DNA, 25 bp, Homo sapien
tgtggggacattggtcctagacctt

SEQ ID NO: 896455 - DNA, 25 bp, Homo sapien
actaagctctagtgggtctgtgccc

SEQ ID NO: 896456 - DNA, 25 bp, Homo sapien
tggtcactaagctctagtgggtctg

SEQ ID NO: 896457 - DNA, 25 bp, Homo sapien
ccagcctttggtcactaagctctag

SEQ ID NO: 896458 - DNA, 25 bp, Homo sapien
ggaggactgcaggatccagctctaa

SEQ ID NO: 896459 - DNA, 25 bp, Homo sapien
gcagagatctttccagcaactgaga

SEQ ID NO: 896460 - DNA, 25 bp, Homo sapien
cttactgttacccagagggaggact

SEQ ID NO: 896461 - DNA, 25 bp, Homo sapien
cattacttgggctaactggacaacc

SEQ ID NO: 896462 - DNA, 25 bp, Homo sapien
tgagccccggatcctacaggtagtt

SEQ ID NO: 896463 - DNA, 25 bp, Homo sapien
ttctgagccccggatcctacaggta

SEQ ID NO: 896464 - DNA, 25 bp, Homo sapien
tggaaagccccaataatgccttctg

SEQ ID NO: 896465 - DNA, 25 bp, Homo sapien
ccggatcctacaggtagttggagtt

SEQ ID NO: 896466 - DNA, 25 bp, Homo sapien
aatattcatagagtttcatcacccc

SEQ ID NO: 896467 - DNA, 25 bp, Homo sapien
tattcatagagtttcatcacccctt

SEQ ID NO: 896468 - DNA, 25 bp, Homo sapien
aaaatattcatagagtttcatcacc

SEQ ID NO: 896469 - DNA, 25 bp, Homo sapien
taaaaatattcatagagtttcatca

SEQ ID NO: 896470 - DNA, 25 bp, Homo sapien
gcctggcctcctgcgtgtgaagctg

SEQ ID NO: 896471 - DNA, 25 bp, Homo sapien
ctggcctcctgcgtgtgaagctgca

SEQ ID NO: 896472 - DNA, 25 bp, Homo sapien
ggcctcctgcgtgtgaagctgcatt

SEQ ID NO: 896473 - DNA, 25 bp, Homo sapien
tggcctcctgcgtgtgaagctgcat

SEQ ID NO: 896474 - DNA, 25 bp, Homo sapien
cacatcccagctgttggagtctctt

SEQ ID NO: 896475 - DNA, 25 bp, Homo sapien
ccacatcccagctgttggagtctct

SEQ ID NO: 896476 - DNA, 25 bp, Homo sapien
cccacatcccagctgttggagtctc

SEQ ID NO: 896477 - DNA, 25 bp, Homo sapien
ctgcatctgtgacagggcccacggg

SEQ ID NO: 896478 - DNA, 25 bp, Homo sapien
ggctcgatccctggctctgcgtgtt

SEQ ID NO: 896479 - DNA, 25 bp, Homo sapien
agagctgcatctgtgacagggccca

SEQ ID NO: 896480 - DNA, 25 bp, Homo sapien
acggggctcgatccctggctctgcg

SEQ ID NO: 896481 - DNA, 25 bp, Homo sapien
gagacagcctcattgtgtgccattt

SEQ ID NO: 896482 - DNA, 25 bp, Homo sapien
tctgagacagcctcattgtgtgcca

SEQ ID NO: 896483 - DNA, 25 bp, Homo sapien
gctgatcccgtaagccaggctggga

SEQ ID NO: 896484 - DNA, 25 bp, Homo sapien
ttcccaggtccactgctagctgcct

SEQ ID NO: 896485 - DNA, 25 bp, Homo sapien
caggaagacaccaatctcccctggg

SEQ ID NO: 896486 - DNA, 25 bp, Homo sapien
tctgcagaccttcccatggttggcc

SEQ ID NO: 896487 - DNA, 25 bp, Homo sapien
gttggccatgacacaggcccctgga

SEQ ID NO: 896488 - DNA, 25 bp, Homo sapien
gttagagagttcctgtctggagcca

SEQ ID NO: 896489 - DNA, 25 bp, Homo sapien
tgtgttaggatttggggaattctgt

SEQ ID NO: 896490 - DNA, 25 bp, Homo sapien
tatttgctctcacagcgtcttcttg

SEQ ID NO: 896491 - DNA, 25 bp, Homo sapien
caaaatcctatttgctctcacagcg

SEQ ID NO: 896492 - DNA, 25 bp, Homo sapien
ctgtttgatgtctatttcaaatctc

SEQ ID NO: 896493 - DNA, 25 bp, Homo sapien
taccagaaggacttatgttccccat

SEQ ID NO: 896494 - DNA, 25 bp, Homo sapien
gaagtaccagaaggacttatgttcc

SEQ ID NO: 896495 - DNA, 25 bp, Homo sapien
tcatggaagtaccagaaggacttat

SEQ ID NO: 896496 - DNA, 25 bp, Homo sapien
ttatcttcatggaagtaccagaagg

SEQ ID NO: 896497 - DNA, 25 bp, Homo sapien
catgcttgggcattgactggctgat

SEQ ID NO: 896498 - DNA, 25 bp, Homo sapien
tgatgctgaacacatgaggcagtcc

SEQ ID NO: 896499 - DNA, 25 bp, Homo sapien
gcattctccgaacctgcactgtgag

SEQ ID NO: 896500 - DNA, 25 bp, Homo sapien
tctgactgtcggagagtgtccaggc

SEQ ID NO: 896501 - DNA, 25 bp, Homo sapien
tcttcaaacctccagaggcaaggcc

SEQ ID NO: 896502 - DNA, 25 bp, Homo sapien
atcttcaaacctccagaggcaaggc

SEQ ID NO: 896503 - DNA, 25 bp, Homo sapien
aggcaaaagcctggcctggttaata

SEQ ID NO: 896504 - DNA, 25 bp, Homo sapien
cctggcctggttaatatattcagac

SEQ ID NO: 896505 - DNA, 25 bp, Homo sapien
tcagagatccccacaagttctggtg

SEQ ID NO: 896506 - DNA, 25 bp, Homo sapien
ccccacaagttctggtggcaggaag

SEQ ID NO: 896507 - DNA, 25 bp, Homo sapien
gagatccccacaagttctggtggca

SEQ ID NO: 896508 - DNA, 25 bp, Homo sapien
gatccccacaagttctggtggcagg

SEQ ID NO: 896509 - DNA, 25 bp, Homo sapien
gaggaagaggctccaaccacaacca

SEQ ID NO: 896510 - DNA, 25 bp, Homo sapien
agaggctccaaccacaaccattgca

SEQ ID NO: 896511 - DNA, 25 bp, Homo sapien
gaagaggctccaaccacaaccattg

SEQ ID NO: 896512 - DNA, 25 bp, Homo sapien
gaggctccaaccacaaccattgcaa

SEQ ID NO: 896513 - DNA, 25 bp, Homo sapien
ctttgtgcagccaaacagtgtgatg

SEQ ID NO: 896514 - DNA, 25 bp, Homo sapien
gagcagccctaaccatggctttgtg

SEQ ID NO: 896515 - DNA, 25 bp, Homo sapien
tgttgttgttggctggatctgtgtg

SEQ ID NO: 896516 - DNA, 25 bp, Homo sapien
gtgtgatgtgatcccccggctgccg

SEQ ID NO: 896517 - DNA, 25 bp, Homo sapien
gagaggaaatcaaacctttgtacac

SEQ ID NO: 896518 - DNA, 25 bp, Homo sapien
tcaaaatggcagtttctaggcactg

SEQ ID NO: 896519 - DNA, 25 bp, Homo sapien
acctttgtacacagctttagagtca

SEQ ID NO: 896520 - DNA, 25 bp, Homo sapien
taggcactggttcccttttgacttc

SEQ ID NO: 896521 - DNA, 25 bp, Homo sapien
taataatcacatgtcgagtgcacag

SEQ ID NO: 896522 - DNA, 25 bp, Homo sapien
aataatcacatgtcgagtgcacagg

SEQ ID NO: 896523 - DNA, 25 bp, Homo sapien
gcagaacattgtgctcaatcccttc

SEQ ID NO: 896524 - DNA, 25 bp, Homo sapien
caaagatctaaaacttgcacgcaga

SEQ ID NO: 896525 - DNA, 25 bp, Homo sapien
gacattgctgaaaagacccaaagat

SEQ ID NO: 896526 - DNA, 25 bp, Homo sapien
cacatgtttttgaaagggcagcatc

SEQ ID NO: 896527 - DNA, 25 bp, Homo sapien
gagtttgaagtcgtcagccaccata

SEQ ID NO: 896528 - DNA, 25 bp, Homo sapien
gaagtcgtcagccaccatatccagt

SEQ ID NO: 896529 - DNA, 25 bp, Homo sapien
ttgaagtcgtcagccaccatatcca

SEQ ID NO: 896530 - DNA, 25 bp, Homo sapien
tgattgagtttgaagtcgtcagcca

SEQ ID NO: 896531 - DNA, 25 bp, Homo sapien
tttgtccagaaatgtccgtaagatg

SEQ ID NO: 896532 - DNA, 25 bp, Homo sapien
ctttggtttcttcgtatttgtccag

SEQ ID NO: 896533 - DNA, 25 bp, Homo sapien
tggtcctcaatcttgatgcttccag

SEQ ID NO: 896534 - DNA, 25 bp, Homo sapien
aatgtccgtaagatgtctttgctgg

SEQ ID NO: 896535 - DNA, 25 bp, Homo sapien
ggagtttccagcttcacttgaattc

SEQ ID NO: 896536 - DNA, 25 bp, Homo sapien
caggccgccgtggagtttccagctt

SEQ ID NO: 896537 - DNA, 25 bp, Homo sapien
tgccacttgtagctggattgatagt

SEQ ID NO: 896538 - DNA, 25 bp, Homo sapien
cagcaggccgccgtggagtttccag

SEQ ID NO: 896539 - DNA, 25 bp, Homo sapien
agtcacatttgtttggagtcttggc

SEQ ID NO: 896540 - DNA, 25 bp, Homo sapien
gatggaagtttccaccgagatgtgg

SEQ ID NO: 896541 - DNA, 25 bp, Homo sapien
cattttctgaagacgagagatggaa

SEQ ID NO: 896542 - DNA, 25 bp, Homo sapien
tgtggatgtagggaatcgtagtcac

SEQ ID NO: 896543 - DNA, 25 bp, Homo sapien
cactggatacaatgcagctttgttg

SEQ ID NO: 896544 - DNA, 25 bp, Homo sapien
gagtcaaagttctcctggtcgctga

SEQ ID NO: 896545 - DNA, 25 bp, Homo sapien
gaagcccagtattcctgtgcagagc

SEQ ID NO: 896546 - DNA, 25 bp, Homo sapien
gatgctttccatagagacgccagtg

SEQ ID NO: 896547 - DNA, 25 bp, Homo sapien
ctgctggtctggaatcacagaagta

SEQ ID NO: 896548 - DNA, 25 bp, Homo sapien
tctgtacaaatggatttaggatgga

SEQ ID NO: 896549 - DNA, 25 bp, Homo sapien
cctgtgatatttggaagaatctgta

SEQ ID NO: 896550 - DNA, 25 bp, Homo sapien
tttagttgtgtcgtagggagatctg

SEQ ID NO: 896551 - DNA, 25 bp, Homo sapien
tgatccaattgggttgtcaagactt

SEQ ID NO: 896552 - DNA, 25 bp, Homo sapien
caatcgatcagatggactttgctgt

SEQ ID NO: 896553 - DNA, 25 bp, Homo sapien
tatggtttgtctgcacaatcgatca

SEQ ID NO: 896554 - DNA, 25 bp, Homo sapien
caagactttgttgattggctgaggc

SEQ ID NO: 896555 - DNA, 25 bp, Homo sapien
gcttgaataggtctggaatggagcc

SEQ ID NO: 896556 - DNA, 25 bp, Homo sapien
gaaatctgttctagactactgcctc

SEQ ID NO: 896557 - DNA, 25 bp, Homo sapien
cacaaagactctgctgaacagatta

SEQ ID NO: 896558 - DNA, 25 bp, Homo sapien
tactgcctctcaaagcttgtacaca

SEQ ID NO: 896559 - DNA, 25 bp, Homo sapien
tgtagactccttttgttggagagaa

SEQ ID NO: 896560 - DNA, 25 bp, Homo sapien
caccagtcctgtagagcaaaagcca

SEQ ID NO: 896561 - DNA, 25 bp, Homo sapien
tagtgaatttgcctgcacacagaca

SEQ ID NO: 896562 - DNA, 25 bp, Homo sapien
tcattgttaacagggaacctcttgc

SEQ ID NO: 896563 - DNA, 25 bp, Homo sapien
tcgagtagattatgccgtgggacaa

SEQ ID NO: 896564 - DNA, 25 bp, Homo sapien
tagattatgccgtgggacaattgtg

SEQ ID NO: 896565 - DNA, 25 bp, Homo sapien
tatgccgtgggacaattgtgtaggc

SEQ ID NO: 896566 - DNA, 25 bp, Homo sapien
ctcttcgagtagattatgccgtggg

SEQ ID NO: 896567 - DNA, 25 bp, Homo sapien
tactaatcaccctcgtatctgcagc

SEQ ID NO: 896568 - DNA, 25 bp, Homo sapien
gaggtagtcaggtcattgtttcaat

SEQ ID NO: 896569 - DNA, 25 bp, Homo sapien
ttcaatgctgcccttggaaagaaga

SEQ ID NO: 896570 - DNA, 25 bp, Homo sapien
actttgacttaggtgctttgggatc

SEQ ID NO: 896571 - DNA, 25 bp, Homo sapien
catcagaccgtcctgtaagagggca

SEQ ID NO: 896572 - DNA, 25 bp, Homo sapien
taactcgttgactgcttcctgacca

SEQ ID NO: 896573 - DNA, 25 bp, Homo sapien
gacccaggaggttgactagcttctc

SEQ ID NO: 896574 - DNA, 25 bp, Homo sapien
tcaataagaacgagaaagacccagg

SEQ ID NO: 896575 - DNA, 25 bp, Homo sapien
ttggagagggcagaaccacagggag

SEQ ID NO: 896576 - DNA, 25 bp, Homo sapien
ggtgagctgaaaatgcgctgctgct

SEQ ID NO: 896577 - DNA, 25 bp, Homo sapien
gagatctgctgaagccatgaggacc

SEQ ID NO: 896578 - DNA, 25 bp, Homo sapien
tgaggacctgaaggtctgaggcttt

SEQ ID NO: 896579 - DNA, 25 bp, Homo sapien
acaagaggctgagaatgtacccttg

SEQ ID NO: 896580 - DNA, 25 bp, Homo sapien
tgtacccttgctcaagtaaagaaac

SEQ ID NO: 896581 - DNA, 25 bp, Homo sapien
tacccttgctcaagtaaagaaacat

SEQ ID NO: 896582 - DNA, 25 bp, Homo sapien
agaggctgagaatgtacccttgctc

SEQ ID NO: 896583 - DNA, 25 bp, Homo sapien
tgacaataatcagccttccacgtgg

SEQ ID NO: 896584 - DNA, 25 bp, Homo sapien
aatggcatcggcaaatatttcaaac

SEQ ID NO: 896585 - DNA, 25 bp, Homo sapien
gacacatcgtgaatggtgaatccat

SEQ ID NO: 896586 - DNA, 25 bp, Homo sapien
tccacgtggagctaagatcatcttc

SEQ ID NO: 896587 - DNA, 25 bp, Homo sapien
tcccagtggtttaagagggactcat

SEQ ID NO: 896588 - DNA, 25 bp, Homo sapien
tagatcgaatgaataggcttccggg

SEQ ID NO: 896589 - DNA, 25 bp, Homo sapien
gctttgtttctaatcggctctgtga

SEQ ID NO: 896590 - DNA, 25 bp, Homo sapien
gagaagaccgaagcgcagctctgtt

SEQ ID NO: 896591 - DNA, 25 bp, Homo sapien
ctgggttgttggtatttagtcttgg

SEQ ID NO: 896592 - DNA, 25 bp, Homo sapien
ggcaagggaggacactttaatataa

SEQ ID NO: 896593 - DNA, 25 bp, Homo sapien
gcaagggaggacactttaatataac

SEQ ID NO: 896594 - DNA, 25 bp, Homo sapien
ttggtatttagtcttgggcaaggga

SEQ ID NO: 896595 - DNA, 25 bp, Homo sapien
tagagcaaacttcacttgtccaggg

SEQ ID NO: 896596 - DNA, 25 bp, Homo sapien
gccaacatagagcaaacttcacttg

SEQ ID NO: 896597 - DNA, 25 bp, Homo sapien
tagcagccaacatagagcaaacttc

SEQ ID NO: 896598 - DNA, 25 bp, Homo sapien
gtctttagcagccaacatagagcaa

SEQ ID NO: 896599 - DNA, 25 bp, Homo sapien
tattgttttcagttgagcgcaatca

SEQ ID NO: 896600 - DNA, 25 bp, Homo sapien
atcaactgaacaccttttatgctgg

SEQ ID NO: 896601 - DNA, 25 bp, Homo sapien
tcagagctgatctgcccctgatgag

SEQ ID NO: 896602 - DNA, 25 bp, Homo sapien
taaaccttcctgatccagacagtgc

SEQ ID NO: 896603 - DNA, 25 bp, Homo sapien
aagcagctggaagcgctgtttgctc

SEQ ID NO: 896604 - DNA, 25 bp, Homo sapien
caaatacagggaagcacacaacaag

SEQ ID NO: 896605 - DNA, 25 bp, Homo sapien
tggattgcttaggtctgtgcttggc

SEQ ID NO: 896606 - DNA, 25 bp, Homo sapien
tgccaatgcgactcttctccttctg

SEQ ID NO: 896607 - DNA, 25 bp, Homo sapien
aagaaaagggtgagaaatatttgca

SEQ ID NO: 896608 - DNA, 25 bp, Homo sapien
gaaaagggtgagaaatatttgcagt

SEQ ID NO: 896609 - DNA, 25 bp, Homo sapien
aatatttgcagtgactcagggaagg

SEQ ID NO: 896610 - DNA, 25 bp, Homo sapien
gaaatatttgcagtgactcagggaa

SEQ ID NO: 896611 - DNA, 25 bp, Homo sapien
acaggctccccacttaactgagatg

SEQ ID NO: 896612 - DNA, 25 bp, Homo sapien
agggcgctttgataacacaggctcc

SEQ ID NO: 896613 - DNA, 25 bp, Homo sapien
ttcctcagggcgctttgataacaca

SEQ ID NO: 896614 - DNA, 25 bp, Homo sapien
cacttaactgagatgggccactcat

SEQ ID NO: 896615 - DNA, 25 bp, Homo sapien
tgctccaggtctgttatcttcgtga

SEQ ID NO: 896616 - DNA, 25 bp, Homo sapien
cttcgtgacttattagcagggcatc

SEQ ID NO: 896617 - DNA, 25 bp, Homo sapien
ctgaaaaagtgcactggtaaagctg

SEQ ID NO: 896618 - DNA, 25 bp, Homo sapien
gcactggtaaagctgctccaggtct

SEQ ID NO: 896619 - DNA, 25 bp, Homo sapien
caggatatcaatcctcagaaggact

SEQ ID NO: 896620 - DNA, 25 bp, Homo sapien
gaagtgttaccattcagcagagcca

SEQ ID NO: 896621 - DNA, 25 bp, Homo sapien
gactactgctgatacgtatccacat

SEQ ID NO: 896622 - DNA, 25 bp, Homo sapien
gagccaatttatgcatggcagtcat

SEQ ID NO: 896623 - DNA, 25 bp, Homo sapien
tgcagcagcggagatagtttcactt

SEQ ID NO: 896624 - DNA, 25 bp, Homo sapien
caatattgggattggtgcagcagcg

SEQ ID NO: 896625 - DNA, 25 bp, Homo sapien
gaggatggagcttcacactggaacc

SEQ ID NO: 896626 - DNA, 25 bp, Homo sapien
gaaccctgactgtaggatggagaga

SEQ ID NO: 896627 - DNA, 25 bp, Homo sapien
gtaattccaccggtacctgttgcga

SEQ ID NO: 896628 - DNA, 25 bp, Homo sapien
ttttcacgatatgactgctccacaa

SEQ ID NO: 896629 - DNA, 25 bp, Homo sapien
cctgttgcgatggtcgcactggact

SEQ ID NO: 896630 - DNA, 25 bp, Homo sapien
ggactctcttgggaacagttggcat

SEQ ID NO: 896631 - DNA, 25 bp, Homo sapien
gttgctttcactgcaagttctctga

SEQ ID NO: 896632 - DNA, 25 bp, Homo sapien
tgctttcactgcaagttctctgaac

SEQ ID NO: 896633 - DNA, 25 bp, Homo sapien
tatgttgctttcactgcaagttctc

SEQ ID NO: 896634 - DNA, 25 bp, Homo sapien
cctttttctatccctgctctccttt

SEQ ID NO: 896635 - DNA, 25 bp, Homo sapien
tggaacagccacatgactcaagatc

SEQ ID NO: 896636 - DNA, 25 bp, Homo sapien
catggaacagccacatgactcaaga

SEQ ID NO: 896637 - DNA, 25 bp, Homo sapien
gaacagccacatgactcaagatcaa

SEQ ID NO: 896638 - DNA, 25 bp, Homo sapien
tcatggaacagccacatgactcaag

SEQ ID NO: 896639 - DNA, 25 bp, Homo sapien
tattgagaagtgaacttccgccact

SEQ ID NO: 896640 - DNA, 25 bp, Homo sapien
tcaattgggttaagctcctttctag

SEQ ID NO: 896641 - DNA, 25 bp, Homo sapien
agagggagcaactggtctcattgtc

SEQ ID NO: 896642 - DNA, 25 bp, Homo sapien
cagtgtctttccattgggagcatca

SEQ ID NO: 896643 - DNA, 25 bp, Homo sapien
ttccctttccaaagacaatgctgtc

SEQ ID NO: 896644 - DNA, 25 bp, Homo sapien
ccctttccaaagacaatgctgtcat

SEQ ID NO: 896645 - DNA, 25 bp, Homo sapien
tccctttccaaagacaatgctgtca

SEQ ID NO: 896646 - DNA, 25 bp, Homo sapien
tgtcatccttgctcaagagccatgt

SEQ ID NO: 896647 - DNA, 25 bp, Homo sapien
aaatattaaatgtttcatgaatttg

SEQ ID NO: 896648 - DNA, 25 bp, Homo sapien
catccttgctcaagagccatgttaa

SEQ ID NO: 896649 - DNA, 25 bp, Homo sapien
aatattaaatgtttcatgaatttgc

SEQ ID NO: 896650 - DNA, 25 bp, Homo sapien
tactatggagacaccatttgacttt

SEQ ID NO: 896651 - DNA, 25 bp, Homo sapien
gcattctccttggtaggcttgagca

SEQ ID NO: 896652 - DNA, 25 bp, Homo sapien
caggccctactggttactatggaga

SEQ ID NO: 896653 - DNA, 25 bp, Homo sapien
gatgaactctgtaaccatccttgca

SEQ ID NO: 896654 - DNA, 25 bp, Homo sapien
gtggcagacttggtgacagcagtag

SEQ ID NO: 896655 - DNA, 25 bp, Homo sapien
aggtggcagacttggtgacagcagt

SEQ ID NO: 896656 - DNA, 25 bp, Homo sapien
ccaccaccttcatgcatctcttcac

SEQ ID NO: 896657 - DNA, 25 bp, Homo sapien
ggtggcagacttggtgacagcagta

SEQ ID NO: 896658 - DNA, 25 bp, Homo sapien
tcccaactcaacaccagtcaaaagt

SEQ ID NO: 896659 - DNA, 25 bp, Homo sapien
tcacccttccaggtaacagatttgc

SEQ ID NO: 896660 - DNA, 25 bp, Homo sapien
cagatttgcattttcccggaatgct

SEQ ID NO: 896661 - DNA, 25 bp, Homo sapien
atgtcacccttccaggtaacagatt

SEQ ID NO: 896662 - DNA, 25 bp, Homo sapien
tgtgtgttgggaccatttcatatct

SEQ ID NO: 896663 - DNA, 25 bp, Homo sapien
tcacttcaatccacagaaggcatta

SEQ ID NO: 896664 - DNA, 25 bp, Homo sapien
ttcaatccacagaaggcattatttc

SEQ ID NO: 896665 - DNA, 25 bp, Homo sapien
ttctagtacagatgctttttgtgtg

SEQ ID NO: 896666 - DNA, 25 bp, Homo sapien
cccactgtggtagctagtctgcaaa

SEQ ID NO: 896667 - DNA, 25 bp, Homo sapien
ggaaggctttgcgtgacccacaaaa

SEQ ID NO: 896668 - DNA, 25 bp, Homo sapien
gcaaagtactgtggtggcaatccca

SEQ ID NO: 896669 - DNA, 25 bp, Homo sapien
taaagtgtcccagtccaaatgaatg

SEQ ID NO: 896670 - DNA, 25 bp, Homo sapien
gctgtgcaaccctgtcgatgagaaa

SEQ ID NO: 896671 - DNA, 25 bp, Homo sapien
gagcaggcatgcaccaagttgtagc

SEQ ID NO: 896672 - DNA, 25 bp, Homo sapien
gaaatcgagatccttggagaatggc

SEQ ID NO: 896673 - DNA, 25 bp, Homo sapien
catcttgtccccaatacgcatgtgg

SEQ ID NO: 896674 - DNA, 25 bp, Homo sapien
ctacagtggtagtgaacaaagcaga

SEQ ID NO: 896675 - DNA, 25 bp, Homo sapien
tgagccaggatctcatttagtacat

SEQ ID NO: 896676 - DNA, 25 bp, Homo sapien
gatgattgtaggtctggaactacag

SEQ ID NO: 896677 - DNA, 25 bp, Homo sapien
acaaagcagatgagatcctgcgctt

SEQ ID NO: 896678 - DNA, 25 bp, Homo sapien
taagggagataacctgattggcccc

SEQ ID NO: 896679 - DNA, 25 bp, Homo sapien
ccatagagtttaagcgaattgccca

SEQ ID NO: 896680 - DNA, 25 bp, Homo sapien
gagtgtaattttgccccacaggaga

SEQ ID NO: 896681 - DNA, 25 bp, Homo sapien
caaggtcagtgtcctaagtcctgga

SEQ ID NO: 896682 - DNA, 25 bp, Homo sapien
tatgcaccctatgtaagtagagaag

SEQ ID NO: 896683 - DNA, 25 bp, Homo sapien
tgggtctcaataccctctggaggtt

SEQ ID NO: 896684 - DNA, 25 bp, Homo sapien
gagaataaagtcaagttataaagtc

SEQ ID NO: 896685 - DNA, 25 bp, Homo sapien
ggtgttactagttgaggatgtccag

SEQ ID NO: 896686 - DNA, 25 bp, Homo sapien
ccattccacgtctggcagatcagct

SEQ ID NO: 896687 - DNA, 25 bp, Homo sapien
gtcctaggcatgcttattatatccg

SEQ ID NO: 896688 - DNA, 25 bp, Homo sapien
gcagttatttacagattccccattc

SEQ ID NO: 896689 - DNA, 25 bp, Homo sapien
gccaaaccatattaccttgcagtta

SEQ ID NO: 896690 - DNA, 25 bp, Homo sapien
ggtaactattgccagtagcagggtg

SEQ ID NO: 896691 - DNA, 25 bp, Homo sapien
aactattgccagtagcagggtgcct

SEQ ID NO: 896692 - DNA, 25 bp, Homo sapien
tcttggtaactattgccagtagcag

SEQ ID NO: 896693 - DNA, 25 bp, Homo sapien
gtttcttggtaactattgccagtag

SEQ ID NO: 896694 - DNA, 25 bp, Homo sapien
tcaaaaaaatccttgattagcggga

SEQ ID NO: 896695 - DNA, 25 bp, Homo sapien
ctgatgttcgttacacacagaatca

SEQ ID NO: 896696 - DNA, 25 bp, Homo sapien
gcagctgttagagtgtcacgggcta

SEQ ID NO: 896697 - DNA, 25 bp, Homo sapien
agtgtcacgggctaggagcctttga

SEQ ID NO: 896698 - DNA, 25 bp, Homo sapien
tgtcacgggctaggagcctttgatc

SEQ ID NO: 896699 - DNA, 25 bp, Homo sapien
tttatttcatggtagagcttactgc

SEQ ID NO: 896700 - DNA, 25 bp, Homo sapien
ggaagacaactcgtgggtactaggc

SEQ ID NO: 896701 - DNA, 25 bp, Homo sapien
caattcccatgacgcaagttgacct

SEQ ID NO: 896702 - DNA, 25 bp, Homo sapien
gcagagacggtaattgttcttagcc

SEQ ID NO: 896703 - DNA, 25 bp, Homo sapien
agctctctttctagcagtaaccagt

SEQ ID NO: 896704 - DNA, 25 bp, Homo sapien
ctttctacaatcagtttgcctgttc

SEQ ID NO: 896705 - DNA, 25 bp, Homo sapien
tactcagttgtgtttggcacttaca

SEQ ID NO: 896706 - DNA, 25 bp, Homo sapien
tctaaagtggactcatgtagtatgt

SEQ ID NO: 896707 - DNA, 25 bp, Homo sapien
cttctccacttgtatggttgttgat

SEQ ID NO: 896708 - DNA, 25 bp, Homo sapien
gctgaaggatgcatagcagtttgct

SEQ ID NO: 896709 - DNA, 25 bp, Homo sapien
cttgtatggttgttgatagcattca

SEQ ID NO: 896710 - DNA, 25 bp, Homo sapien
ccacttgtatggttgttgatagcat

SEQ ID NO: 896711 - DNA, 25 bp, Homo sapien
ttcactcttcaagacaacttcagtg

SEQ ID NO: 896712 - DNA, 25 bp, Homo sapien
agggaacagaattatgggagagagc

SEQ ID NO: 896713 - DNA, 25 bp, Homo sapien
taaaggttactttcactcttcaaga

SEQ ID NO: 896714 - DNA, 25 bp, Homo sapien
aagtcctgctcatgtaatctttgta

SEQ ID NO: 896715 - DNA, 25 bp, Homo sapien
taaccacaccttgggagtcgggtga

SEQ ID NO: 896716 - DNA, 25 bp, Homo sapien
gttaatcactttgcctgggacctca

SEQ ID NO: 896717 - DNA, 25 bp, Homo sapien
gaaagtaggagtatggccattccag

SEQ ID NO: 896718 - DNA, 25 bp, Homo sapien
cccagaaacattaggtaaggccaca

SEQ ID NO: 896719 - DNA, 25 bp, Homo sapien
tttgtataagtaacaggaggataca

SEQ ID NO: 896720 - DNA, 25 bp, Homo sapien
ttattttggagatgtaaagactcat

SEQ ID NO: 896721 - DNA, 25 bp, Homo sapien
ctttcagcagttgctttgatattta

SEQ ID NO: 896722 - DNA, 25 bp, Homo sapien
cttggctttcagcagttgctttgat

SEQ ID NO: 896723 - DNA, 25 bp, Homo sapien
tggctttcagcagttgctttgatat

SEQ ID NO: 896724 - DNA, 25 bp, Homo sapien
tagtaagagggtgtgagtcagaatc

SEQ ID NO: 896725 - DNA, 25 bp, Homo sapien
tatcactgctactgagctacgagac

SEQ ID NO: 896726 - DNA, 25 bp, Homo sapien
gaatcaaaggccaactgagcgtcat

SEQ ID NO: 896727 - DNA, 25 bp, Homo sapien
ttgagcccagacacttagtaagagg

SEQ ID NO: 896728 - DNA, 25 bp, Homo sapien
gaataactacatactttacacccag

SEQ ID NO: 896729 - DNA, 25 bp, Homo sapien
aactgagagggtccacatatatgta

SEQ ID NO: 896730 - DNA, 25 bp, Homo sapien
tcttccatgatatacagttaaccct

SEQ ID NO: 896731 - DNA, 25 bp, Homo sapien
agcttactcaatatgaagatgatga

SEQ ID NO: 896732 - DNA, 25 bp, Homo sapien
tgagccaaaacagggtagggtgtta

SEQ ID NO: 896733 - DNA, 25 bp, Homo sapien
agggaagtcattagggactgtacca

SEQ ID NO: 896734 - DNA, 25 bp, Homo sapien
cattagggactgtaccatgcactct

SEQ ID NO: 896735 - DNA, 25 bp, Homo sapien
ggactgtaccatgcactctggccca

SEQ ID NO: 896736 - DNA, 25 bp, Homo sapien
cattcagcaactcatggacctgtgt

SEQ ID NO: 896737 - DNA, 25 bp, Homo sapien
gctgagcagcagttcattgtgtaga

SEQ ID NO: 896738 - DNA, 25 bp, Homo sapien
tgtttgtatggctcttcaagcttgc

SEQ ID NO: 896739 - DNA, 25 bp, Homo sapien
catatgagggtttcagttgctccac

SEQ ID NO: 896740 - DNA, 25 bp, Homo sapien
cattcttaaccaatgaagaatccat

SEQ ID NO: 896741 - DNA, 25 bp, Homo sapien
tggccacagtgtaagtccacaaatc

SEQ ID NO: 896742 - DNA, 25 bp, Homo sapien
cttgtggaaggtatagaaatggcca

SEQ ID NO: 896743 - DNA, 25 bp, Homo sapien
aagctgtggattttagttgtctact

SEQ ID NO: 896744 - DNA, 25 bp, Homo sapien
atttctacatttggcttccaggttt

SEQ ID NO: 896745 - DNA, 25 bp, Homo sapien
tcagccatttctacatttggcttcc

SEQ ID NO: 896746 - DNA, 25 bp, Homo sapien
ccatttctacatttggcttccaggt

SEQ ID NO: 896747 - DNA, 25 bp, Homo sapien
gccatttctacatttggcttccagg

SEQ ID NO: 896748 - DNA, 25 bp, Homo sapien
catagccaattgaatagtattagtc

SEQ ID NO: 896749 - DNA, 25 bp, Homo sapien
cttactttgattcatagccaattga

SEQ ID NO: 896750 - DNA, 25 bp, Homo sapien
gattggaagtgtcatcttactttga

SEQ ID NO: 896751 - DNA, 25 bp, Homo sapien
ttcttggattggaagtgtcatctta

SEQ ID NO: 896752 - DNA, 25 bp, Homo sapien
ttgtgtcttcacttctaaagatgac

SEQ ID NO: 896753 - DNA, 25 bp, Homo sapien
accatgtgttaattgtgtcttcact

SEQ ID NO: 896754 - DNA, 25 bp, Homo sapien
cttctaaagatgacactaccaggtt

SEQ ID NO: 896755 - DNA, 25 bp, Homo sapien
aattgtgtcttcacttctaaagatg

SEQ ID NO: 896756 - DNA, 25 bp, Homo sapien
ggtcattaggtacagaagaaataaa

SEQ ID NO: 896757 - DNA, 25 bp, Homo sapien
ctcaggtcattaggtacagaagaaa

SEQ ID NO: 896758 - DNA, 25 bp, Homo sapien
gcacttgggattaatttgttaaaga

SEQ ID NO: 896759 - DNA, 25 bp, Homo sapien
aaatgtcttgcacttgggattaatt

SEQ ID NO: 896760 - DNA, 25 bp, Homo sapien
ctaatctagtggttcaaaacatggc

SEQ ID NO: 896761 - DNA, 25 bp, Homo sapien
gaaattgcttgaccctctaatctag

SEQ ID NO: 896762 - DNA, 25 bp, Homo sapien
tggtctacgtagaattcagagtaaa

SEQ ID NO: 896763 - DNA, 25 bp, Homo sapien
actcagaggaggtatacacatgaaa

SEQ ID NO: 896764 - DNA, 25 bp, Homo sapien
gaatgctctaggtggaagagtgtca

SEQ ID NO: 896765 - DNA, 25 bp, Homo sapien
cagaggatgagagacggaatgctct

SEQ ID NO: 896766 - DNA, 25 bp, Homo sapien
ctaggtggaagagtgtcacacctgg

SEQ ID NO: 896767 - DNA, 25 bp, Homo sapien
tgctctaggtggaagagtgtcacac

SEQ ID NO: 896768 - DNA, 25 bp, Homo sapien
tcagtgctcctgcacatgacttctc

SEQ ID NO: 896769 - DNA, 25 bp, Homo sapien
tctagcagagcagcccggacttcct

SEQ ID NO: 896770 - DNA, 25 bp, Homo sapien
cttcctacttgacagctcagaggag

SEQ ID NO: 896771 - DNA, 25 bp, Homo sapien
tctctttctagcagagcagcccgga

SEQ ID NO: 896772 - DNA, 25 bp, Homo sapien
tataccctttgagaggttcacagcg

SEQ ID NO: 896773 - DNA, 25 bp, Homo sapien
gagtaactagcttcaacctctctga

SEQ ID NO: 896774 - DNA, 25 bp, Homo sapien
ccacttgaccaagaggcaacccttg

SEQ ID NO: 896775 - DNA, 25 bp, Homo sapien
aaagtggcaggattccacgacctgg

SEQ ID NO: 896776 - DNA, 25 bp, Homo sapien
tattcacttcttccacatgccccat

SEQ ID NO: 896777 - DNA, 25 bp, Homo sapien
cctctcctctaggctattcacttct

SEQ ID NO: 896778 - DNA, 25 bp, Homo sapien
gctattcacttcttccacatgcccc

SEQ ID NO: 896779 - DNA, 25 bp, Homo sapien
tctcctctaggctattcacttcttc

SEQ ID NO: 896780 - DNA, 25 bp, Homo sapien
aaatcttttcaacacatgctgcttg

SEQ ID NO: 896781 - DNA, 25 bp, Homo sapien
agacaaatcttttcaacacatgctg

SEQ ID NO: 896782 - DNA, 25 bp, Homo sapien
tcaacacatgctgcttggaacagtg

SEQ ID NO: 896783 - DNA, 25 bp, Homo sapien
gctgcttggaacagtgtatatccac

SEQ ID NO: 896784 - DNA, 25 bp, Homo sapien
gagaacatcccaacaaagaaggtgt

SEQ ID NO: 896785 - DNA, 25 bp, Homo sapien
ttcaaagtgagttcatgatcaacgg

SEQ ID NO: 896786 - DNA, 25 bp, Homo sapien
tcatgatcaacggtggtctcgcctg

SEQ ID NO: 896787 - DNA, 25 bp, Homo sapien
gagtcattagtccagagaacatccc

SEQ ID NO: 896788 - DNA, 25 bp, Homo sapien
ttgggcactgaggaatacattagca

SEQ ID NO: 896789 - DNA, 25 bp, Homo sapien
gtcctcctttaagtagaacattgca

SEQ ID NO: 896790 - DNA, 25 bp, Homo sapien
ccctaaaagtatggactgtgaaatc

SEQ ID NO: 896791 - DNA, 25 bp, Homo sapien
atataagaatcacaattgggcactg

SEQ ID NO: 896792 - DNA, 25 bp, Homo sapien
cctttatcagtaacccactcctgca

SEQ ID NO: 896793 - DNA, 25 bp, Homo sapien
aatttatttctacagtgccagggtc

SEQ ID NO: 896794 - DNA, 25 bp, Homo sapien
gacaagggaggggaactgaactcat

SEQ ID NO: 896795 - DNA, 25 bp, Homo sapien
cagccttcatgacctagtcacttct

SEQ ID NO: 896796 - DNA, 25 bp, Homo sapien
caattgataactctgtgggtcctct

SEQ ID NO: 896797 - DNA, 25 bp, Homo sapien
ccattgttggaaactccgttgtgct

SEQ ID NO: 896798 - DNA, 25 bp, Homo sapien
aatgaccttctttgtgactcagctg

SEQ ID NO: 896799 - DNA, 25 bp, Homo sapien
gactcagctggccatcacaggtaag

SEQ ID NO: 896800 - DNA, 25 bp, Homo sapien
tacagtgataactcaatagtatgtt

SEQ ID NO: 896801 - DNA, 25 bp, Homo sapien
ccctggaactagttacaatgataaa

SEQ ID NO: 896802 - DNA, 25 bp, Homo sapien
tatttatagttacatatgtcatggc

SEQ ID NO: 896803 - DNA, 25 bp, Homo sapien
aactcaatagtatgttgtattagtc

SEQ ID NO: 896804 - DNA, 25 bp, Homo sapien
ggaaggctgaaaacctgagtagagc

SEQ ID NO: 896805 - DNA, 25 bp, Homo sapien
ggaagaaggcattatcccatcatca

SEQ ID NO: 896806 - DNA, 25 bp, Homo sapien
tgcatgcacacaaaccatctgccag

SEQ ID NO: 896807 - DNA, 25 bp, Homo sapien
ggatcagccctcaccaaaaaattaa

SEQ ID NO: 896808 - DNA, 25 bp, Homo sapien
agtgttgaggcgtccaggtccgtct

SEQ ID NO: 896809 - DNA, 25 bp, Homo sapien
caagggaggtaaggccaggagtgtt

SEQ ID NO: 896810 - DNA, 25 bp, Homo sapien
ctgaacgcagagaaacttgagacgt

SEQ ID NO: 896811 - DNA, 25 bp, Homo sapien
caggtccgtctgtggagttcactgc

SEQ ID NO: 896812 - DNA, 25 bp, Homo sapien
gatggacttccagttcgagactctg

SEQ ID NO: 896813 - DNA, 25 bp, Homo sapien
tcatttagacacaaggatgcctggc

SEQ ID NO: 896814 - DNA, 25 bp, Homo sapien
gcaggtgacctagaaaagatcttcc

SEQ ID NO: 896815 - DNA, 25 bp, Homo sapien
tattgctgccagagtatgtccctaa

SEQ ID NO: 896816 - DNA, 25 bp, Homo sapien
tgacctgcctccagatgcatgtcag

SEQ ID NO: 896817 - DNA, 25 bp, Homo sapien
gctagagaccccatcagaaacttgg

SEQ ID NO: 896818 - DNA, 25 bp, Homo sapien
gaagccttccattggctagagaccc

SEQ ID NO: 896819 - DNA, 25 bp, Homo sapien
gaaacttggagttggcctggagctt

SEQ ID NO: 896820 - DNA, 25 bp, Homo sapien
cttcaaaataccatctaacagattg

SEQ ID NO: 896821 - DNA, 25 bp, Homo sapien
gtgatgtcccattgtccaataataa

SEQ ID NO: 896822 - DNA, 25 bp, Homo sapien
aataccatctaacagattggagctc

SEQ ID NO: 896823 - DNA, 25 bp, Homo sapien
tcactgggtctaggtgtcctttacc

SEQ ID NO: 896824 - DNA, 25 bp, Homo sapien
tcagacccatgatagctatacgtac

SEQ ID NO: 896825 - DNA, 25 bp, Homo sapien
gaataacccctctgatgggcttcag

SEQ ID NO: 896826 - DNA, 25 bp, Homo sapien
acccttgggaataacccctctgatg

SEQ ID NO: 896827 - DNA, 25 bp, Homo sapien
cctctgatgggcttcagacccatga

SEQ ID NO: 896828 - DNA, 25 bp, Homo sapien
tgggcatgaagattgcagtgactga

SEQ ID NO: 896829 - DNA, 25 bp, Homo sapien
gatgggcatgaagattgcagtgact

SEQ ID NO: 896830 - DNA, 25 bp, Homo sapien
ttcttctcacaagaaactgatgggc

SEQ ID NO: 896831 - DNA, 25 bp, Homo sapien
cttctcacaagaaactgatgggcat

SEQ ID NO: 896832 - DNA, 25 bp, Homo sapien
gactatttcaggtctcaccatcaca

SEQ ID NO: 896833 - DNA, 25 bp, Homo sapien
tcacactcaggccatgccacagtca

SEQ ID NO: 896834 - DNA, 25 bp, Homo sapien
acagccacttcacactcaggccatg

SEQ ID NO: 896835 - DNA, 25 bp, Homo sapien
tcatgccagcgtctggcggcaaggg

SEQ ID NO: 896836 - DNA, 25 bp, Homo sapien
ttattttcttgggtgtcctgtcttc

SEQ ID NO: 896837 - DNA, 25 bp, Homo sapien
tgtgcctgcgagctgatgctctgag

SEQ ID NO: 896838 - DNA, 25 bp, Homo sapien
tattttcttgggtgtcctgtcttct

SEQ ID NO: 896839 - DNA, 25 bp, Homo sapien
ggatctgtgcctgcgagctgatgct

SEQ ID NO: 896840 - DNA, 25 bp, Homo sapien
cggatgccgatgggtagtacgacgg

SEQ ID NO: 896841 - DNA, 25 bp, Homo sapien
gttcggatgccgatgggtagtacga

SEQ ID NO: 896842 - DNA, 25 bp, Homo sapien
ttcggatgccgatgggtagtacgac

SEQ ID NO: 896843 - DNA, 25 bp, Homo sapien
tcggatgccgatgggtagtacgacg

SEQ ID NO: 896844 - DNA, 25 bp, Homo sapien
tggttaatctcaagctcctcaatcc

SEQ ID NO: 896845 - DNA, 25 bp, Homo sapien
gttaatctcaagctcctcaatccca

SEQ ID NO: 896846 - DNA, 25 bp, Homo sapien
taatctcaagctcctcaatcccatc

SEQ ID NO: 896847 - DNA, 25 bp, Homo sapien
ttggttaatctcaagctcctcaatc

SEQ ID NO: 896848 - DNA, 25 bp, Homo sapien
aggcttggccccatgttgtagcttg

SEQ ID NO: 896849 - DNA, 25 bp, Homo sapien
tgtagcttgcccataactgacaaaa

SEQ ID NO: 896850 - DNA, 25 bp, Homo sapien
caaaattgccaagcatcttgcaagg

SEQ ID NO: 896851 - DNA, 25 bp, Homo sapien
agtcaaaattgccaagcatcttgca

SEQ ID NO: 896852 - DNA, 25 bp, Homo sapien
agctgtgacacacagtaggccaggt

SEQ ID NO: 896853 - DNA, 25 bp, Homo sapien
ctgtgacacacagtaggccaggtcc

SEQ ID NO: 896854 - DNA, 25 bp, Homo sapien
tgacacacagtaggccaggtcctgc

SEQ ID NO: 896855 - DNA, 25 bp, Homo sapien
tgtgacacacagtaggccaggtcct

SEQ ID NO: 896856 - DNA, 25 bp, Homo sapien
ggaaccgctgacacagcttttccac

SEQ ID NO: 896857 - DNA, 25 bp, Homo sapien
cttcataatggtgtgaaaaggcact

SEQ ID NO: 896858 - DNA, 25 bp, Homo sapien
atttgagactcagggttgatgagca

SEQ ID NO: 896859 - DNA, 25 bp, Homo sapien
aggagaagaactgcttcataatggt

SEQ ID NO: 896860 - DNA, 25 bp, Homo sapien
tcataatggtgtgaaaaggcacttc

SEQ ID NO: 896861 - DNA, 25 bp, Homo sapien
cttgaggatcaggtggagtcatcac

SEQ ID NO: 896862 - DNA, 25 bp, Homo sapien
ctgaaggtgagcatatagatgagga

SEQ ID NO: 896863 - DNA, 25 bp, Homo sapien
acactggctgagcagggtcctgaag

SEQ ID NO: 896864 - DNA, 25 bp, Homo sapien
ggtcctgaaggtgagcatatagatg

SEQ ID NO: 896865 - DNA, 25 bp, Homo sapien
tcctgaaggtgagcatatagatgag

SEQ ID NO: 896866 - DNA, 25 bp, Homo sapien
caccagattgggaaagtggatggcc

SEQ ID NO: 896867 - DNA, 25 bp, Homo sapien
gagacttttctagcatggtgaacag

SEQ ID NO: 896868 - DNA, 25 bp, Homo sapien
cagatccccagtggcaacgatgaga

SEQ ID NO: 896869 - DNA, 25 bp, Homo sapien
attagaccggacaatgggaagtgga

SEQ ID NO: 896870 - DNA, 25 bp, Homo sapien
atcttgcagaagccgcggattagtt

SEQ ID NO: 896871 - DNA, 25 bp, Homo sapien
tgcagaagccgcggattagttctgc

SEQ ID NO: 896872 - DNA, 25 bp, Homo sapien
agttgcagaaagtggtactgatcat

SEQ ID NO: 896873 - DNA, 25 bp, Homo sapien
gttgcagaaagtggtactgatcatg

SEQ ID NO: 896874 - DNA, 25 bp, Homo sapien
tccatagtggtctcgaaacttgtat

SEQ ID NO: 896875 - DNA, 25 bp, Homo sapien
tcctccatagtggtctcgaaacttg

SEQ ID NO: 896876 - DNA, 25 bp, Homo sapien
agtggtctcgaaacttgtattcttc

SEQ ID NO: 896877 - DNA, 25 bp, Homo sapien
catagtggtctcgaaacttgtattc

SEQ ID NO: 896878 - DNA, 25 bp, Homo sapien
tccagggcctgttttgcacagccct

SEQ ID NO: 896879 - DNA, 25 bp, Homo sapien
cattgtgggagactccttcgggtcc

SEQ ID NO: 896880 - DNA, 25 bp, Homo sapien
gccctgccatatctgggcacagatc

SEQ ID NO: 896881 - DNA, 25 bp, Homo sapien
tgggcacagatcactgtgggactct

SEQ ID NO: 896882 - DNA, 25 bp, Homo sapien
ctgccagttggtaaatgagggtcac

SEQ ID NO: 896883 - DNA, 25 bp, Homo sapien
tgccagttggtaaatgagggtcact

SEQ ID NO: 896884 - DNA, 25 bp, Homo sapien
cagttggtaaatgagggtcactgcc

SEQ ID NO: 896885 - DNA, 25 bp, Homo sapien
ccagttggtaaatgagggtcactgc

SEQ ID NO: 896886 - DNA, 25 bp, Homo sapien
tactgtcagagatgttggcgatggc

SEQ ID NO: 896887 - DNA, 25 bp, Homo sapien
ttcgggaccgtctcccgcagtcact

SEQ ID NO: 896888 - DNA, 25 bp, Homo sapien
tgttcctgaggcaactggaagtggg

SEQ ID NO: 896889 - DNA, 25 bp, Homo sapien
agcctttcgggaccgtctcccgcag

SEQ ID NO: 896890 - DNA, 25 bp, Homo sapien
gatgtcagaccagcactagaagaaa

SEQ ID NO: 896891 - DNA, 25 bp, Homo sapien
actggacacaggactaggtttatca

SEQ ID NO: 896892 - DNA, 25 bp, Homo sapien
tgaaaccttgccatgtccaagaagg

SEQ ID NO: 896893 - DNA, 25 bp, Homo sapien
ggtcacctaggatcagaacttccac

SEQ ID NO: 896894 - DNA, 25 bp, Homo sapien
gactgttctgctagtctgctccgca

SEQ ID NO: 896895 - DNA, 25 bp, Homo sapien
ttctggccatgcgactgttctgcta

SEQ ID NO: 896896 - DNA, 25 bp, Homo sapien
gcgactgttctgctagtctgctccg

SEQ ID NO: 896897 - DNA, 25 bp, Homo sapien
gccatgcgactgttctgctagtctg

SEQ ID NO: 896898 - DNA, 25 bp, Homo sapien
ctccccactcagcacaaacaactta

SEQ ID NO: 896899 - DNA, 25 bp, Homo sapien
ccactccccactcagcacaaacaac

SEQ ID NO: 896900 - DNA, 25 bp, Homo sapien
tccgatgcctcctctgagctttggc

SEQ ID NO: 896901 - DNA, 25 bp, Homo sapien
cttccgatgcctcctctgagctttg

SEQ ID NO: 896902 - DNA, 25 bp, Homo sapien
gactcttctagaggtctaatcctgg

SEQ ID NO: 896903 - DNA, 25 bp, Homo sapien
ggacacctcgtttgctttataagca

SEQ ID NO: 896904 - DNA, 25 bp, Homo sapien
cccagtatggggtacaacagctcag

SEQ ID NO: 896905 - DNA, 25 bp, Homo sapien
ggtctaatcctggacacctcgtttg

SEQ ID NO: 896906 - DNA, 25 bp, Homo sapien
caggtctatgcttcagtttcttcat

SEQ ID NO: 896907 - DNA, 25 bp, Homo sapien
ttgtatgtgttatctgttatgtctg

SEQ ID NO: 896908 - DNA, 25 bp, Homo sapien
gttcttctatagaaagtgcctgcag

SEQ ID NO: 896909 - DNA, 25 bp, Homo sapien
cagcagtggttagcatgtggtaggc

SEQ ID NO: 896910 - DNA, 25 bp, Homo sapien
taaaatggaggttgtaaaaatatca

SEQ ID NO: 896911 - DNA, 25 bp, Homo sapien
tctttgggaagcggatgctgaaaca

SEQ ID NO: 896912 - DNA, 25 bp, Homo sapien
tttgggaagcggatgctgaaacaga

SEQ ID NO: 896913 - DNA, 25 bp, Homo sapien
ggaagcggatgctgaaacagagtca

SEQ ID NO: 896914 - DNA, 25 bp, Homo sapien
tgggaagcggatgctgaaacagagt

SEQ ID NO: 896915 - DNA, 25 bp, Homo sapien
caggcatggttaaaagatctgtccc

SEQ ID NO: 896916 - DNA, 25 bp, Homo sapien
ttagcctcctcacttaagaaagaag

SEQ ID NO: 896917 - DNA, 25 bp, Homo sapien
aagtaactccatccagtggatcctc

SEQ ID NO: 896918 - DNA, 25 bp, Homo sapien
aattctatgaacagcaagtataagg

SEQ ID NO: 896919 - DNA, 25 bp, Homo sapien
gggaagtttgcacccacagcaatgc

SEQ ID NO: 896920 - DNA, 25 bp, Homo sapien
tgccagtcacatggtcccctttggg

SEQ ID NO: 896921 - DNA, 25 bp, Homo sapien
taaaataatcacagcgccacatgga

SEQ ID NO: 896922 - DNA, 25 bp, Homo sapien
gagcatgctcagtagaatctttcca

SEQ ID NO: 896923 - DNA, 25 bp, Homo sapien
ttaagtctttccagcatcaagtcca

SEQ ID NO: 896924 - DNA, 25 bp, Homo sapien
taagtctttccagcatcaagtccaa

SEQ ID NO: 896925 - DNA, 25 bp, Homo sapien
tttccagcatcaagtccaaagtcat

SEQ ID NO: 896926 - DNA, 25 bp, Homo sapien
gtcttaagtctttccagcatcaagt

SEQ ID NO: 896927 - DNA, 25 bp, Homo sapien
gactcattctccttccaccatcagc

SEQ ID NO: 896928 - DNA, 25 bp, Homo sapien
agactcattctccttccaccatcag

SEQ ID NO: 896929 - DNA, 25 bp, Homo sapien
cagagactcattctccttccaccat

SEQ ID NO: 896930 - DNA, 25 bp, Homo sapien
gagactcattctccttccaccatca

SEQ ID NO: 896931 - DNA, 25 bp, Homo sapien
gataaaggcctgttgttctgccctg

SEQ ID NO: 896932 - DNA, 25 bp, Homo sapien
tcacttaggcaatagctgtgcgtgg

SEQ ID NO: 896933 - DNA, 25 bp, Homo sapien
tgttgtcacttggatgtacccggaa

SEQ ID NO: 896934 - DNA, 25 bp, Homo sapien
tagaagcagctcaataggcaccaac

SEQ ID NO: 896935 - DNA, 25 bp, Homo sapien
aaaaaatccgttgcacagactgaat

SEQ ID NO: 896936 - DNA, 25 bp, Homo sapien
catctttgggtgacaataaaagctc

SEQ ID NO: 896937 - DNA, 25 bp, Homo sapien
ttttggttcccataggcatctttgg

SEQ ID NO: 896938 - DNA, 25 bp, Homo sapien
tgtctggagcaaacatagagtcaca

SEQ ID NO: 896939 - DNA, 25 bp, Homo sapien
taatcagggcttacaaatacgtggc

SEQ ID NO: 896940 - DNA, 25 bp, Homo sapien
aagagtctactcaacactaggtgcc

SEQ ID NO: 896941 - DNA, 25 bp, Homo sapien
tctcaggccacacatctctaagggt

SEQ ID NO: 896942 - DNA, 25 bp, Homo sapien
tctaaaattgttagccctagggcac

SEQ ID NO: 896943 - DNA, 25 bp, Homo sapien
ctctcacgggaggaaatgtaaaagg

SEQ ID NO: 896944 - DNA, 25 bp, Homo sapien
cattgctttgaaagtgaagccagta

SEQ ID NO: 896945 - DNA, 25 bp, Homo sapien
gaagccagtatcaatgttatcctaa

SEQ ID NO: 896946 - DNA, 25 bp, Homo sapien
cactgtgcatacttagagttttggg

SEQ ID NO: 896947 - DNA, 25 bp, Homo sapien
cagctcccggtagagtgtccatcaa

SEQ ID NO: 896948 - DNA, 25 bp, Homo sapien
tgtgctgtcaggaatggagcgcccc

SEQ ID NO: 896949 - DNA, 25 bp, Homo sapien
agcagaggctctcaagtatggtccc

SEQ ID NO: 896950 - DNA, 25 bp, Homo sapien
tgttcccatcgattagagcagaggc

SEQ ID NO: 896951 - DNA, 25 bp, Homo sapien
tcgaaaatgttgtagcaatagctat

SEQ ID NO: 896952 - DNA, 25 bp, Homo sapien
ggctcccctaatatatagccatatt

SEQ ID NO: 896953 - DNA, 25 bp, Homo sapien
tccacagtgcttgggctgcgagctg

SEQ ID NO: 896954 - DNA, 25 bp, Homo sapien
gttttgtacgcctatggaacctgct

SEQ ID NO: 896955 - DNA, 25 bp, Homo sapien
tctgaagaacgctgccagagtccct

SEQ ID NO: 896956 - DNA, 25 bp, Homo sapien
ttttaatccacaaatcaagggctgc

SEQ ID NO: 896957 - DNA, 25 bp, Homo sapien
aacaatcacagataagcagcgcgca

SEQ ID NO: 896958 - DNA, 25 bp, Homo sapien
tgtacacaatcagccacactcaggt

SEQ ID NO: 896959 - DNA, 25 bp, Homo sapien
tatgaacaacacatgacttagcaaa

SEQ ID NO: 896960 - DNA, 25 bp, Homo sapien
ttttgggatatgaacaacacatgac

SEQ ID NO: 896961 - DNA, 25 bp, Homo sapien
gatatgaacaacacatgacttagca

SEQ ID NO: 896962 - DNA, 25 bp, Homo sapien
aagtttttgggatatgaacaacaca

SEQ ID NO: 896963 - DNA, 25 bp, Homo sapien
agatgtagttctccgtaggcagcag

SEQ ID NO: 896964 - DNA, 25 bp, Homo sapien
aggtttggaatccttcaccaagagg

SEQ ID NO: 896965 - DNA, 25 bp, Homo sapien
tacatcccaaatttcaggcatactg

SEQ ID NO: 896966 - DNA, 25 bp, Homo sapien
aatacagtggtgaagtgaggtttgg

SEQ ID NO: 896967 - DNA, 25 bp, Homo sapien
tgaggtttggaatccttcaccaaga

SEQ ID NO: 896968 - DNA, 25 bp, Homo sapien
gaggtgacttctataaacaatccag

SEQ ID NO: 896969 - DNA, 25 bp, Homo sapien
catgaggcaaacaccgtagcaggta

SEQ ID NO: 896970 - DNA, 25 bp, Homo sapien
tcttatgtttagtagcagtccctcc

SEQ ID NO: 896971 - DNA, 25 bp, Homo sapien
ccaccagagcagtgtaaagtgtacc

SEQ ID NO: 896972 - DNA, 25 bp, Homo sapien
tgatcgtgtgagtcagtactcctta

SEQ ID NO: 896973 - DNA, 25 bp, Homo sapien
ctacttttgaagttttgggactcag

SEQ ID NO: 896974 - DNA, 25 bp, Homo sapien
cagactggcttctttgttcctcagc

SEQ ID NO: 896975 - DNA, 25 bp, Homo sapien
tgtggggcctcaccttgtgatcgtg

SEQ ID NO: 896976 - DNA, 25 bp, Homo sapien
caaactaaacctctagagcagcggt

SEQ ID NO: 896977 - DNA, 25 bp, Homo sapien
aaaagctgctagttctcatatgtac

SEQ ID NO: 896978 - DNA, 25 bp, Homo sapien
tattctgggactgtatactgaacaa

SEQ ID NO: 896979 - DNA, 25 bp, Homo sapien
tactgaacaataaaacgtggaacca

SEQ ID NO: 896980 - DNA, 25 bp, Homo sapien
gactcttctagaatgtaatagttca

SEQ ID NO: 896981 - DNA, 25 bp, Homo sapien
ggctgctttccgactatacattgag

SEQ ID NO: 896982 - DNA, 25 bp, Homo sapien
tgagtatactatttttgttctggct

SEQ ID NO: 896983 - DNA, 25 bp, Homo sapien
agttctcgcttcacttcttcggctg

SEQ ID NO: 896984 - DNA, 25 bp, Homo sapien
tagagcttagcggtcttatttcagc

SEQ ID NO: 896985 - DNA, 25 bp, Homo sapien
ctttctgctccctgactcgataagc

SEQ ID NO: 896986 - DNA, 25 bp, Homo sapien
cctgtgaagctttaacggatttgtt

SEQ ID NO: 896987 - DNA, 25 bp, Homo sapien
taagcctcagttcatcatatccttt

SEQ ID NO: 896988 - DNA, 25 bp, Homo sapien
aggtttgttttgatgatgcaagact

SEQ ID NO: 896989 - DNA, 25 bp, Homo sapien
tttgatgatgcaagactgtgcactg

SEQ ID NO: 896990 - DNA, 25 bp, Homo sapien
ttgatgatgcaagactgtgcactga

SEQ ID NO: 896991 - DNA, 25 bp, Homo sapien
gggaggtttgttttgatgatgcaag

SEQ ID NO: 896992 - DNA, 25 bp, Homo sapien
ggccgaagtgcagagagcttaacac

SEQ ID NO: 896993 - DNA, 25 bp, Homo sapien
gggccgaagtgcagagagcttaaca

SEQ ID NO: 896994 - DNA, 25 bp, Homo sapien
tgccatcgtgggcatggcacccgca

SEQ ID NO: 896995 - DNA, 25 bp, Homo sapien
gtgggcatggcacccgcaaacactg

SEQ ID NO: 896996 - DNA, 25 bp, Homo sapien
tattccactgggtttgcagatttgc

SEQ ID NO: 896997 - DNA, 25 bp, Homo sapien
gtactatatttgatccattctataa

SEQ ID NO: 896998 - DNA, 25 bp, Homo sapien
ccagattcaagtaaagccacaacca

SEQ ID NO: 896999 - DNA, 25 bp, Homo sapien
acattcaatcaagttcagggtcctg

SEQ ID NO: 897000 - DNA, 25 bp, Homo sapien
gaataaggcctctgctagagtccca

SEQ ID NO: 897001 - DNA, 25 bp, Homo sapien
ggaacacaatgtaggaagctctttt

SEQ ID NO: 897002 - DNA, 25 bp, Homo sapien
tgggataagactcaagattaaaggc

SEQ ID NO: 897003 - DNA, 25 bp, Homo sapien
gattaaaggcttccaaccagcctcc

SEQ ID NO: 897004 - DNA, 25 bp, Homo sapien
gattgggaacctcaaggctggctaa

SEQ ID NO: 897005 - DNA, 25 bp, Homo sapien
gtccacactccataacaacactttg

SEQ ID NO: 897006 - DNA, 25 bp, Homo sapien
tctgtgaatacagaacaaggaggca

SEQ ID NO: 897007 - DNA, 25 bp, Homo sapien
tggaaaggtgacactatggagaagc

SEQ ID NO: 897008 - DNA, 25 bp, Homo sapien
ggaggcagctatccaggaaaaataa

SEQ ID NO: 897009 - DNA, 25 bp, Homo sapien
tgctgttgtacctaggctggttgac

SEQ ID NO: 897010 - DNA, 25 bp, Homo sapien
tatgctaacaattgcaatgcatggt

SEQ ID NO: 897011 - DNA, 25 bp, Homo sapien
tgtgtggtgtcaagaagagttttag

SEQ ID NO: 897012 - DNA, 25 bp, Homo sapien
aaataccaagggctgtatatgctaa

SEQ ID NO: 897013 - DNA, 25 bp, Homo sapien
cacatgtgtggtgtcaagaagagtt

SEQ ID NO: 897014 - DNA, 25 bp, Homo sapien
ctctccatgatcaaactggtgtttt

SEQ ID NO: 897015 - DNA, 25 bp, Homo sapien
tgttgtttagctaagacaccccaca

SEQ ID NO: 897016 - DNA, 25 bp, Homo sapien
gctaagacaccccacatatcactaa

SEQ ID NO: 897017 - DNA, 25 bp, Homo sapien
tgtgtctgttgtttagctaagacac

SEQ ID NO: 897018 - DNA, 25 bp, Homo sapien
tttagctaagacaccccacatatca

SEQ ID NO: 897019 - DNA, 25 bp, Homo sapien
acaaacactacaagaacaactggaa

SEQ ID NO: 897020 - DNA, 25 bp, Homo sapien
atgttagtaagttgccaatatgagc

SEQ ID NO: 897021 - DNA, 25 bp, Homo sapien
actccgctgcacaggtatacaataa

SEQ ID NO: 897022 - DNA, 25 bp, Homo sapien
cataaagtcaaactccgctgcacag

SEQ ID NO: 897023 - DNA, 25 bp, Homo sapien
gtatcaaaatccttataactaaaga

SEQ ID NO: 897024 - DNA, 25 bp, Homo sapien
tcatcgacatcccaaaggctttttc

SEQ ID NO: 897025 - DNA, 25 bp, Homo sapien
cttccacactcatcgacatcccaaa

SEQ ID NO: 897026 - DNA, 25 bp, Homo sapien
cactcatcgacatcccaaaggcttt

SEQ ID NO: 897027 - DNA, 25 bp, Homo sapien
catcgacatcccaaaggctttttcc

SEQ ID NO: 897028 - DNA, 25 bp, Homo sapien
ccgcacagcatctcccttgctggag

SEQ ID NO: 897029 - DNA, 25 bp, Homo sapien
taaaaggctgggtagccttgccact

SEQ ID NO: 897030 - DNA, 25 bp, Homo sapien
ctgtactactggaacaggctgacct

SEQ ID NO: 897031 - DNA, 25 bp, Homo sapien
gcaggaccgagtgtggctactcata

SEQ ID NO: 897032 - DNA, 25 bp, Homo sapien
gagccaatgcccttaatcaacgtta

SEQ ID NO: 897033 - DNA, 25 bp, Homo sapien
ctcagagctgacttccaggatcctt

SEQ ID NO: 897034 - DNA, 25 bp, Homo sapien
tgtcaagtatttaagtatgacagtt

SEQ ID NO: 897035 - DNA, 25 bp, Homo sapien
agtatttaagtatgacagttccaaa

SEQ ID NO: 897036 - DNA, 25 bp, Homo sapien
tcaagtatttaagtatgacagttcc

SEQ ID NO: 897037 - DNA, 25 bp, Homo sapien
caagtatttaagtatgacagttcca

SEQ ID NO: 897038 - DNA, 25 bp, Homo sapien
aatgtggtttcattgccagaatacc

SEQ ID NO: 897039 - DNA, 25 bp, Homo sapien
tactgactcttagggtaaacagcaa

SEQ ID NO: 897040 - DNA, 25 bp, Homo sapien
tctctgagccatgaggtatataaca

SEQ ID NO: 897041 - DNA, 25 bp, Homo sapien
tggacagtagtcatacaggcataag

SEQ ID NO: 897042 - DNA, 25 bp, Homo sapien
tccaaagtcaattaggtgaatgcgt

SEQ ID NO: 897043 - DNA, 25 bp, Homo sapien
cattgagttcccaaacatcaaaaca

SEQ ID NO: 897044 - DNA, 25 bp, Homo sapien
taagaagttaataacattgagttcc

SEQ ID NO: 897045 - DNA, 25 bp, Homo sapien
ccaaataattaccaaagaagaagca

SEQ ID NO: 897046 - DNA, 25 bp, Homo sapien
aaagaagaagcataataagaagtta

SEQ ID NO: 897047 - DNA, 25 bp, Homo sapien
ttacatatatcaatgtacccgacaa

SEQ ID NO: 897048 - DNA, 25 bp, Homo sapien
acatatatcaatgtacccgacaaca

SEQ ID NO: 897049 - DNA, 25 bp, Homo sapien
atatatcaatgtacccgacaacata

SEQ ID NO: 897050 - DNA, 25 bp, Homo sapien
tacatatatcaatgtacccgacaac

SEQ ID NO: 897051 - DNA, 25 bp, Homo sapien
agcaaactgccaaggaagcatgaaa

SEQ ID NO: 897052 - DNA, 25 bp, Homo sapien
tgagcaaactgccaaggaagcatga

SEQ ID NO: 897053 - DNA, 25 bp, Homo sapien
gagcaaactgccaaggaagcatgaa

SEQ ID NO: 897054 - DNA, 25 bp, Homo sapien
gaaccaggagtggtgaaagcagcag

SEQ ID NO: 897055 - DNA, 25 bp, Homo sapien
aaccaggaaagccatcgcaatcaga

SEQ ID NO: 897056 - DNA, 25 bp, Homo sapien
gcaatcagaagtcataagctgccaa

SEQ ID NO: 897057 - DNA, 25 bp, Homo sapien
agatcaagatgggatggatctgaac

SEQ ID NO: 897058 - DNA, 25 bp, Homo sapien
ggcacagttaaaggttatgaattca

SEQ ID NO: 897059 - DNA, 25 bp, Homo sapien
tcaagatgcctcagaaccaacaggg

SEQ ID NO: 897060 - DNA, 25 bp, Homo sapien
gaagggaccattgctcaagatgcct

SEQ ID NO: 897061 - DNA, 25 bp, Homo sapien
ccttatttgaaggtgctaaagaagt

SEQ ID NO: 897062 - DNA, 25 bp, Homo sapien
attatttaatgcaaaaagaaataag

SEQ ID NO: 897063 - DNA, 25 bp, Homo sapien
tgcaaaaagaaataaggttaagtca

SEQ ID NO: 897064 - DNA, 25 bp, Homo sapien
gaatatgagtcactagcaacatctg

SEQ ID NO: 897065 - DNA, 25 bp, Homo sapien
ggtggtgtccacattacacgggtac

SEQ ID NO: 897066 - DNA, 25 bp, Homo sapien
atatgagaagctttcacggagaggt

SEQ ID NO: 897067 - DNA, 25 bp, Homo sapien
aaatggatatgagaagctttcacgg

SEQ ID NO: 897068 - DNA, 25 bp, Homo sapien
gcaaaactagcatgtgacaaatatt

SEQ ID NO: 897069 - DNA, 25 bp, Homo sapien
agcatgtgacaaatattactgacag

SEQ ID NO: 897070 - DNA, 25 bp, Homo sapien
tgtagtatagtatacttgctaaatt

SEQ ID NO: 897071 - DNA, 25 bp, Homo sapien
aactagcatgtgacaaatattactg

SEQ ID NO: 897072 - DNA, 25 bp, Homo sapien
tgtaaccaggcctcctaatcggctg

SEQ ID NO: 897073 - DNA, 25 bp, Homo sapien
gaagcacaacactgtaaccaggcct

SEQ ID NO: 897074 - DNA, 25 bp, Homo sapien
aaaaagaagcacaacactgtaacca

SEQ ID NO: 897075 - DNA, 25 bp, Homo sapien
caacactgtaaccaggcctcctaat

SEQ ID NO: 897076 - DNA, 25 bp, Homo sapien
cacccaagctagggtagagtggcac

SEQ ID NO: 897077 - DNA, 25 bp, Homo sapien
cctcgaactcatgggatccagcaat

SEQ ID NO: 897078 - DNA, 25 bp, Homo sapien
acccaagctagggtagagtggcaca

SEQ ID NO: 897079 - DNA, 25 bp, Homo sapien
cagcctcgaactcatgggatccagc

SEQ ID NO: 897080 - DNA, 25 bp, Homo sapien
tctgaaggtcttccacaccttaaaa

SEQ ID NO: 897081 - DNA, 25 bp, Homo sapien
taatttcttacaatgctagactctg

SEQ ID NO: 897082 - DNA, 25 bp, Homo sapien
tttaccagcgaaatgaaattcagcc

SEQ ID NO: 897083 - DNA, 25 bp, Homo sapien
tcattcagttgcacagtatatctct

SEQ ID NO: 897084 - DNA, 25 bp, Homo sapien
cctgaacaacgaggaatcaaaatgg

SEQ ID NO: 897085 - DNA, 25 bp, Homo sapien
aaattccctgaacaacgaggaatca

SEQ ID NO: 897086 - DNA, 25 bp, Homo sapien
ttccctgaacaacgaggaatcaaaa

SEQ ID NO: 897087 - DNA, 25 bp, Homo sapien
ccctgaacaacgaggaatcaaaatg

SEQ ID NO: 897088 - DNA, 25 bp, Homo sapien
catttaagttctcttcaaaaagcga

SEQ ID NO: 897089 - DNA, 25 bp, Homo sapien
aaagcgacctcatcgccagagaggg

SEQ ID NO: 897090 - DNA, 25 bp, Homo sapien
aatgtagagttcgtgaaaaagatca

SEQ ID NO: 897091 - DNA, 25 bp, Homo sapien
tctcttcaaaaagcgacctcatcgc

SEQ ID NO: 897092 - DNA, 25 bp, Homo sapien
tgtgctcagccctcatgcataagtg

SEQ ID NO: 897093 - DNA, 25 bp, Homo sapien
gaagaatcagatatgtctcccggac

SEQ ID NO: 897094 - DNA, 25 bp, Homo sapien
tgggtgtcacttctgcactgacgtg

SEQ ID NO: 897095 - DNA, 25 bp, Homo sapien
cataagtgtctgcatatgaccaggg

SEQ ID NO: 897096 - DNA, 25 bp, Homo sapien
cctcttgatctttgccaaaaaatac

SEQ ID NO: 897097 - DNA, 25 bp, Homo sapien
gacctcttgatctttgccaaaaaat

SEQ ID NO: 897098 - DNA, 25 bp, Homo sapien
atggagacctcttgatctttgccaa

SEQ ID NO: 897099 - DNA, 25 bp, Homo sapien
gagacctcttgatctttgccaaaaa

SEQ ID NO: 897100 - DNA, 25 bp, Homo sapien
ttcttcattatgcaggatctttaaa

SEQ ID NO: 897101 - DNA, 25 bp, Homo sapien
cttcattatgcaggatctttaaaca

SEQ ID NO: 897102 - DNA, 25 bp, Homo sapien
actaaagctgcagacaatttaattg

SEQ ID NO: 897103 - DNA, 25 bp, Homo sapien
cattatgcaggatctttaaacaaaa

SEQ ID NO: 897104 - DNA, 25 bp, Homo sapien
aaactatcttaagtgtgatgggcca

SEQ ID NO: 897105 - DNA, 25 bp, Homo sapien
atcttaagtgtgatgggccatggca

SEQ ID NO: 897106 - DNA, 25 bp, Homo sapien
atcaagtattcccaattctatttac

SEQ ID NO: 897107 - DNA, 25 bp, Homo sapien
taaatttatcaagtattcccaattc

SEQ ID NO: 897108 - DNA, 25 bp, Homo sapien
aatatgtgccatatatgaagaataa

SEQ ID NO: 897109 - DNA, 25 bp, Homo sapien
ttaaatatgtgccatatatgaagaa

SEQ ID NO: 897110 - DNA, 25 bp, Homo sapien
aattacagcaacataaaagcaagca

SEQ ID NO: 897111 - DNA, 25 bp, Homo sapien
gccatatatgaagaataatgccatc

SEQ ID NO: 897112 - DNA, 25 bp, Homo sapien
tatcttggtttgaataccaatcaag

SEQ ID NO: 897113 - DNA, 25 bp, Homo sapien
tggtaaccgtccaacatatcttggt

SEQ ID NO: 897114 - DNA, 25 bp, Homo sapien
ttctcctctggtaaccgtccaacat

SEQ ID NO: 897115 - DNA, 25 bp, Homo sapien
cacagctttcaataggactgagtcc

SEQ ID NO: 897116 - DNA, 25 bp, Homo sapien
catactccattcaaaaatgagggtg

SEQ ID NO: 897117 - DNA, 25 bp, Homo sapien
agtcagtttatcattcataatcatc

SEQ ID NO: 897118 - DNA, 25 bp, Homo sapien
ccatactccattcaaaaatgagggt

SEQ ID NO: 897119 - DNA, 25 bp, Homo sapien
gtattcagtcagtttatcattcata

SEQ ID NO: 897120 - DNA, 25 bp, Homo sapien
gaaaaatgacggtcattttcaaaga

SEQ ID NO: 897121 - DNA, 25 bp, Homo sapien
aaatgacggtcattttcaaagaggt

SEQ ID NO: 897122 - DNA, 25 bp, Homo sapien
ttcaaagaggtgtgttatatggctc

SEQ ID NO: 897123 - DNA, 25 bp, Homo sapien
cctttccaatgttgagaggtgagaa

SEQ ID NO: 897124 - DNA, 25 bp, Homo sapien
cagtgcaacactgctgcaaaaacag

SEQ ID NO: 897125 - DNA, 25 bp, Homo sapien
caataccttgctatctgtccaagca

SEQ ID NO: 897126 - DNA, 25 bp, Homo sapien
catgcctgtagtatccattactggg

SEQ ID NO: 897127 - DNA, 25 bp, Homo sapien
ggcagcatcatctcgagcccaggaa

SEQ ID NO: 897128 - DNA, 25 bp, Homo sapien
tcacaagatacagctgatggcaggc

SEQ ID NO: 897129 - DNA, 25 bp, Homo sapien
ggagcccccatttactttgtgcaga

SEQ ID NO: 897130 - DNA, 25 bp, Homo sapien
agcccccatttactttgtgcagatt

SEQ ID NO: 897131 - DNA, 25 bp, Homo sapien
gagcccccatttactttgtgcagat

SEQ ID NO: 897132 - DNA, 25 bp, Homo sapien
tcgttcttcccagcatatctagtgt

SEQ ID NO: 897133 - DNA, 25 bp, Homo sapien
actcccctcggagagatttccctgt

SEQ ID NO: 897134 - DNA, 25 bp, Homo sapien
catatctagtgtcctgggcaagtgg

SEQ ID NO: 897135 - DNA, 25 bp, Homo sapien
caggtggaaaggacgaagacactga

SEQ ID NO: 897136 - DNA, 25 bp, Homo sapien
ctaacaggagcgtggtccaggtccg

SEQ ID NO: 897137 - DNA, 25 bp, Homo sapien
gcggccaggcgccccccaaggccgc

SEQ ID NO: 897138 - DNA, 25 bp, Homo sapien
cttcctgcccgcggcgcccttgcgc

SEQ ID NO: 897139 - DNA, 25 bp, Homo sapien
tcctgcccgcggcgcccttgcgccc

SEQ ID NO: 897140 - DNA, 25 bp, Homo sapien
atcttggcatagtcgcgcccgctcg

SEQ ID NO: 897141 - DNA, 25 bp, Homo sapien
caggaccatcttggcatagtcgcgc

SEQ ID NO: 897142 - DNA, 25 bp, Homo sapien
ccggtgcttgttccgcgcctgcagg

SEQ ID NO: 897143 - DNA, 25 bp, Homo sapien
gcggcttgggagccgcctcccggtg

SEQ ID NO: 897144 - DNA, 25 bp, Homo sapien
tttcctccttaggaaaggagctggc

SEQ ID NO: 897145 - DNA, 25 bp, Homo sapien
gctctattccgttccttacaagaag

SEQ ID NO: 897146 - DNA, 25 bp, Homo sapien
ctctattccgttccttacaagaagt

SEQ ID NO: 897147 - DNA, 25 bp, Homo sapien
tgctctattccgttccttacaagaa

SEQ ID NO: 897148 - DNA, 25 bp, Homo sapien
gtgctctattccgttccttacaaga

SEQ ID NO: 897149 - DNA, 25 bp, Homo sapien
tgaccatgggtcctacccgatcctg

SEQ ID NO: 897150 - DNA, 25 bp, Homo sapien
agcactagccactgtggtgaccatg

SEQ ID NO: 897151 - DNA, 25 bp, Homo sapien
tagccactgtggtgaccatgggtcc

SEQ ID NO: 897152 - DNA, 25 bp, Homo sapien
ggtcctacccgatcctgctggtgac

SEQ ID NO: 897153 - DNA, 25 bp, Homo sapien
tctgtatctccccactagcttctta

SEQ ID NO: 897154 - DNA, 25 bp, Homo sapien
gtctgtatctccccactagcttctt

SEQ ID NO: 897155 - DNA, 25 bp, Homo sapien
ttagtacagctcatccattttttgt

SEQ ID NO: 897156 - DNA, 25 bp, Homo sapien
gtacagctcatccattttttgttga

SEQ ID NO: 897157 - DNA, 25 bp, Homo sapien
tattagtacagctcatccatttttt

SEQ ID NO: 897158 - DNA, 25 bp, Homo sapien
ttttattagtacagctcatccattt

SEQ ID NO: 897159 - DNA, 25 bp, Homo sapien
gcaattcacctagttggatgaaaaa

SEQ ID NO: 897160 - DNA, 25 bp, Homo sapien
aataaagaccatgaccaacaagctt

SEQ ID NO: 897161 - DNA, 25 bp, Homo sapien
aattcacctagttggatgaaaaagg

SEQ ID NO: 897162 - DNA, 25 bp, Homo sapien
ggccagaaataaagaccatgaccaa

SEQ ID NO: 897163 - DNA, 25 bp, Homo sapien
tctgtacacactattctgaaatact

SEQ ID NO: 897164 - DNA, 25 bp, Homo sapien
gcatgagagtttaagttgtatcagt

SEQ ID NO: 897165 - DNA, 25 bp, Homo sapien
tcatggacaaggctttttgtggaca

SEQ ID NO: 897166 - DNA, 25 bp, Homo sapien
tgttgtggttcagtagttccttcct

SEQ ID NO: 897167 - DNA, 25 bp, Homo sapien
tcatatctgagctgtagttcctaca

SEQ ID NO: 897168 - DNA, 25 bp, Homo sapien
cacaaatagcgggatggtgttctca

SEQ ID NO: 897169 - DNA, 25 bp, Homo sapien
tgagtgaccgatatgaggcctttct

SEQ ID NO: 897170 - DNA, 25 bp, Homo sapien
tcacagaaccagttgggaagtaatc

SEQ ID NO: 897171 - DNA, 25 bp, Homo sapien
tccttaaggcgaagctgagtgaccg

SEQ ID NO: 897172 - DNA, 25 bp, Homo sapien
catttgtcctacctggataataagg

SEQ ID NO: 897173 - DNA, 25 bp, Homo sapien
gcctcctccttataaagactttgtg

SEQ ID NO: 897174 - DNA, 25 bp, Homo sapien
gcttgtggccttatatcactccaac

SEQ ID NO: 897175 - DNA, 25 bp, Homo sapien
ttttccagccctagaagctggcctc

SEQ ID NO: 897176 - DNA, 25 bp, Homo sapien
gatttgttgagcttagcagatctct

SEQ ID NO: 897177 - DNA, 25 bp, Homo sapien
ctctcagttagtagcttttatcaaa

SEQ ID NO: 897178 - DNA, 25 bp, Homo sapien
gactataatgttccttgctttggtt

SEQ ID NO: 897179 - DNA, 25 bp, Homo sapien
tgattttaccgttttgactataatg

SEQ ID NO: 897180 - DNA, 25 bp, Homo sapien
tggctcctgttcttttgattaacta

SEQ ID NO: 897181 - DNA, 25 bp, Homo sapien
ttcatctcagaattgttgagtacat

SEQ ID NO: 897182 - DNA, 25 bp, Homo sapien
atctcagaattgttgagtacattta

SEQ ID NO: 897183 - DNA, 25 bp, Homo sapien
ctcagaattgttgagtacatttaaa

SEQ ID NO: 897184 - DNA, 25 bp, Homo sapien
tacgtccctagatgaaataacttaa

SEQ ID NO: 897185 - DNA, 25 bp, Homo sapien
ttacgtccctagatgaaataactta

SEQ ID NO: 897186 - DNA, 25 bp, Homo sapien
taattcacatgtaactccaacaatt

SEQ ID NO: 897187 - DNA, 25 bp, Homo sapien
ataataattcacatgtaactccaac

SEQ ID NO: 897188 - DNA, 25 bp, Homo sapien
aataattcacatgtaactccaacaa

SEQ ID NO: 897189 - DNA, 25 bp, Homo sapien
aattcacatgtaactccaacaattt

SEQ ID NO: 897190 - DNA, 25 bp, Homo sapien
tggacatccacggtatcagaagagg

SEQ ID NO: 897191 - DNA, 25 bp, Homo sapien
tagaacacttagacaatggacatcc

SEQ ID NO: 897192 - DNA, 25 bp, Homo sapien
tgaccgtagtgggaattcttacaaa

SEQ ID NO: 897193 - DNA, 25 bp, Homo sapien
tcaatactcactggatggaacactg

SEQ ID NO: 897194 - DNA, 25 bp, Homo sapien
caatgggatgaagtgtagacagctt

SEQ ID NO: 897195 - DNA, 25 bp, Homo sapien
acaatgggatgaagtgtagacagct

SEQ ID NO: 897196 - DNA, 25 bp, Homo sapien
cacaatgggatgaagtgtagacagc

SEQ ID NO: 897197 - DNA, 25 bp, Homo sapien
cggtgcaccacgagattatatcccg

SEQ ID NO: 897198 - DNA, 25 bp, Homo sapien
aaaaaacggtgcaccacgagattat

SEQ ID NO: 897199 - DNA, 25 bp, Homo sapien
tattgcgcttttcggaccggcttaa

SEQ ID NO: 897200 - DNA, 25 bp, Homo sapien
cccgaatattgcgcttttcggaccg

SEQ ID NO: 897201 - DNA, 25 bp, Homo sapien
gattacggaggtttgcataaccttg

SEQ ID NO: 897202 - DNA, 25 bp, Homo sapien
cctgaggcaaattattaaattctcc

SEQ ID NO: 897203 - DNA, 25 bp, Homo sapien
taaattctcctattatgctccattg

SEQ ID NO: 897204 - DNA, 25 bp, Homo sapien
ctgatgtggtattgtatttgatcca

SEQ ID NO: 897205 - DNA, 25 bp, Homo sapien
taacattatcaaaacgaactctgcg

SEQ ID NO: 897206 - DNA, 25 bp, Homo sapien
gataacattatcaaaacgaactctg

SEQ ID NO: 897207 - DNA, 25 bp, Homo sapien
ttagaatgccaaagataacattatc

SEQ ID NO: 897208 - DNA, 25 bp, Homo sapien
cattatcaaaacgaactctgcgaaa

SEQ ID NO: 897209 - DNA, 25 bp, Homo sapien
taactactaagtatagctgctatag

SEQ ID NO: 897210 - DNA, 25 bp, Homo sapien
tattttgaattagtcagcaaagcca

SEQ ID NO: 897211 - DNA, 25 bp, Homo sapien
cacttgttatagaaatatcaattaa

SEQ ID NO: 897212 - DNA, 25 bp, Homo sapien
tgttatacaagaatgaatcccttac

SEQ ID NO: 897213 - DNA, 25 bp, Homo sapien
agagcatatcaaggaagccataaca

SEQ ID NO: 897214 - DNA, 25 bp, Homo sapien
gagcatatcaaggaagccataacac

SEQ ID NO: 897215 - DNA, 25 bp, Homo sapien
tatcaaggaagccataacacacatg

SEQ ID NO: 897216 - DNA, 25 bp, Homo sapien
gcatatcaaggaagccataacacac

SEQ ID NO: 897217 - DNA, 25 bp, Homo sapien
tggcaagggcagtaaacgctaacaa

SEQ ID NO: 897218 - DNA, 25 bp, Homo sapien
acgctaacaactgcaatgtgtgaaa

SEQ ID NO: 897219 - DNA, 25 bp, Homo sapien
gggcagtaaacgctaacaactgcaa

SEQ ID NO: 897220 - DNA, 25 bp, Homo sapien
agtaaacgctaacaactgcaatgtg

SEQ ID NO: 897221 - DNA, 25 bp, Homo sapien
tcttctaagtaataagcctatcagt

SEQ ID NO: 897222 - DNA, 25 bp, Homo sapien
ttctgggtgcttcggatacagcagt

SEQ ID NO: 897223 - DNA, 25 bp, Homo sapien
tagtctactgtaaggcaataagtgc

SEQ ID NO: 897224 - DNA, 25 bp, Homo sapien
tcattaagacaaggatcttctaagt

SEQ ID NO: 897225 - DNA, 25 bp, Homo sapien
ctcactgtgttcaaggagctgtttt

SEQ ID NO: 897226 - DNA, 25 bp, Homo sapien
cttgggatgcgtcgccctgcagata

SEQ ID NO: 897227 - DNA, 25 bp, Homo sapien
cagaaatgtgttccgatggtggcaa

SEQ ID NO: 897228 - DNA, 25 bp, Homo sapien
caatcacgtgtgttactctctgcag

SEQ ID NO: 897229 - DNA, 25 bp, Homo sapien
taatggccccaaagttcaagagcag

SEQ ID NO: 897230 - DNA, 25 bp, Homo sapien
taatggtaatgctacacacatcatg

SEQ ID NO: 897231 - DNA, 25 bp, Homo sapien
tttactaggacacaataatgattga

SEQ ID NO: 897232 - DNA, 25 bp, Homo sapien
taaggacataaacatgtaagcagag

SEQ ID NO: 897233 - DNA, 25 bp, Homo sapien
gatgtgaactttagacacagaaaaa

SEQ ID NO: 897234 - DNA, 25 bp, Homo sapien
gaacagacacttctcaaaagaagac

SEQ ID NO: 897235 - DNA, 25 bp, Homo sapien
ccatcaaaaagtgggtgaaggacat

SEQ ID NO: 897236 - DNA, 25 bp, Homo sapien
aacacatgaaaaaatgctcaccatc

SEQ ID NO: 897237 - DNA, 25 bp, Homo sapien
atttatgcagccaaaaaacacatga

SEQ ID NO: 897238 - DNA, 25 bp, Homo sapien
gctaaaacacacgaaatatcacgaa

SEQ ID NO: 897239 - DNA, 25 bp, Homo sapien
tttgtagctaaaacacacgaaatat

SEQ ID NO: 897240 - DNA, 25 bp, Homo sapien
tagctaaaacacacgaaatatcacg

SEQ ID NO: 897241 - DNA, 25 bp, Homo sapien
aaacacacgaaatatcacgaacagt

SEQ ID NO: 897242 - DNA, 25 bp, Homo sapien
gggaactggatcaagggtgaaacca

SEQ ID NO: 897243 - DNA, 25 bp, Homo sapien
tcaagggtgaaaccacagaggtgtc

SEQ ID NO: 897244 - DNA, 25 bp, Homo sapien
tctcactcctaaattattcacatct

SEQ ID NO: 897245 - DNA, 25 bp, Homo sapien
actctttccacgtggtccgcaggga

SEQ ID NO: 897246 - DNA, 25 bp, Homo sapien
catgtaatcaccataacaactggaa

SEQ ID NO: 897247 - DNA, 25 bp, Homo sapien
taaaacatgtaatcaccataacaac

SEQ ID NO: 897248 - DNA, 25 bp, Homo sapien
aacatgtaatcaccataacaactgg

SEQ ID NO: 897249 - DNA, 25 bp, Homo sapien
tgtaatcaccataacaactggaagc

SEQ ID NO: 897250 - DNA, 25 bp, Homo sapien
cagccctggattgagagttctagaa

SEQ ID NO: 897251 - DNA, 25 bp, Homo sapien
aaatgtgtgtttaccgatccctggg

SEQ ID NO: 897252 - DNA, 25 bp, Homo sapien
tatatggcatagtctctaagagccc

SEQ ID NO: 897253 - DNA, 25 bp, Homo sapien
gatccctgggtcctacattgtaact

SEQ ID NO: 897254 - DNA, 25 bp, Homo sapien
tcgggagcacaggtgtatattaaag

SEQ ID NO: 897255 - DNA, 25 bp, Homo sapien
tctggctgctataagatcactcagg

SEQ ID NO: 897256 - DNA, 25 bp, Homo sapien
gctgctataagatcactcaggcgaa

SEQ ID NO: 897257 - DNA, 25 bp, Homo sapien
tttccatgaagtcaaattcgggagc

SEQ ID NO: 897258 - DNA, 25 bp, Homo sapien
ttcaaaatgattgttccacaccacc

SEQ ID NO: 897259 - DNA, 25 bp, Homo sapien
caaaatgattgttccacaccaccag

SEQ ID NO: 897260 - DNA, 25 bp, Homo sapien
gattttagatgtcagaaatttcaaa

SEQ ID NO: 897261 - DNA, 25 bp, Homo sapien
ggtctgaaacgcctaagattttaga

SEQ ID NO: 897262 - DNA, 25 bp, Homo sapien
tgagtttagatactcccagtttttg

SEQ ID NO: 897263 - DNA, 25 bp, Homo sapien
gagtttagatactcccagtttttga

SEQ ID NO: 897264 - DNA, 25 bp, Homo sapien
gagagcgagcctgcaacctataata

SEQ ID NO: 897265 - DNA, 25 bp, Homo sapien
tagaaacaatgacctacttagtagc

SEQ ID NO: 897266 - DNA, 25 bp, Homo sapien
ttggaaatacccatcagaacttgtg

SEQ ID NO: 897267 - DNA, 25 bp, Homo sapien
tagcaatgagcatccatgggtccca

SEQ ID NO: 897268 - DNA, 25 bp, Homo sapien
gagtgataatcaggaaagggcctat

SEQ ID NO: 897269 - DNA, 25 bp, Homo sapien
ccactcttgaaaggcaagacatact

SEQ ID NO: 897270 - DNA, 25 bp, Homo sapien
tctgggcaatggcagtgtcactgca

SEQ ID NO: 897271 - DNA, 25 bp, Homo sapien
tcactgcaatgagtacttaacatcc

SEQ ID NO: 897272 - DNA, 25 bp, Homo sapien
tcaaaatgaaactaagggtaactga

SEQ ID NO: 897273 - DNA, 25 bp, Homo sapien
gaagataagtacattgaatttccaa

SEQ ID NO: 897274 - DNA, 25 bp, Homo sapien
aagaagataagtacattgaatttcc

SEQ ID NO: 897275 - DNA, 25 bp, Homo sapien
gataagtacattgaatttccaaaca

SEQ ID NO: 897276 - DNA, 25 bp, Homo sapien
aatgtatcccacaacatacatggga

SEQ ID NO: 897277 - DNA, 25 bp, Homo sapien
gccagggaagcataaaagcaacatt

SEQ ID NO: 897278 - DNA, 25 bp, Homo sapien
taaactgagcaaattgccagggaag

SEQ ID NO: 897279 - DNA, 25 bp, Homo sapien
caacattggaaagacagagtgcaat

SEQ ID NO: 897280 - DNA, 25 bp, Homo sapien
agtataaactgagcaaattgccagg

SEQ ID NO: 897281 - DNA, 25 bp, Homo sapien
ctgaagtacaaggaaaggataggaa

SEQ ID NO: 897282 - DNA, 25 bp, Homo sapien
gtggtgtccacatcacacgggtggc

SEQ ID NO: 897283 - DNA, 25 bp, Homo sapien
aaaactttcatggagaggtggtgtc

SEQ ID NO: 897284 - DNA, 25 bp, Homo sapien
aaggataggaaaaactttcatggag

SEQ ID NO: 897285 - DNA, 25 bp, Homo sapien
actgtatccctgctgtcaggcctga

SEQ ID NO: 897286 - DNA, 25 bp, Homo sapien
agtgtcttaactgtatccctgctgt

SEQ ID NO: 897287 - DNA, 25 bp, Homo sapien
tcttaactgtatccctgctgtcagg

SEQ ID NO: 897288 - DNA, 25 bp, Homo sapien
tggcagtgtcttaactgtatccctg

SEQ ID NO: 897289 - DNA, 25 bp, Homo sapien
aaatattgtgaagtcataagtagta

SEQ ID NO: 897290 - DNA, 25 bp, Homo sapien
taaaatattgtgaagtcataagtag

SEQ ID NO: 897291 - DNA, 25 bp, Homo sapien
gtgaagtcataagtagtatacaatt

SEQ ID NO: 897292 - DNA, 25 bp, Homo sapien
tattgtgaagtcataagtagtatac

SEQ ID NO: 897293 - DNA, 25 bp, Homo sapien
ctgtaataagacctcccagttgagt

SEQ ID NO: 897294 - DNA, 25 bp, Homo sapien
tactgtaataagacctcccagttga

SEQ ID NO: 897295 - DNA, 25 bp, Homo sapien
gtactgtaataagacctcccagttg

SEQ ID NO: 897296 - DNA, 25 bp, Homo sapien
gtaataagacctcccagttgagtcc

SEQ ID NO: 897297 - DNA, 25 bp, Homo sapien
tgagactggtctcgctgctgcttca

SEQ ID NO: 897298 - DNA, 25 bp, Homo sapien
gagactggtctcgctgctgcttcat

SEQ ID NO: 897299 - DNA, 25 bp, Homo sapien
ctgagactggtctcgctgctgcttc

SEQ ID NO: 897300 - DNA, 25 bp, Homo sapien
tcaggtatgctccatacatgaagaa

SEQ ID NO: 897301 - DNA, 25 bp, Homo sapien
caggtatgctccatacatgaagaac

SEQ ID NO: 897302 - DNA, 25 bp, Homo sapien
ctcaggtatgctccatacatgaaga

SEQ ID NO: 897303 - DNA, 25 bp, Homo sapien
ttacaccaacataaaagcaagcagg

SEQ ID NO: 897304 - DNA, 25 bp, Homo sapien
tacaccaacataaaagcaagcagga

SEQ ID NO: 897305 - DNA, 25 bp, Homo sapien
acaccaacataaaagcaagcaggat

SEQ ID NO: 897306 - DNA, 25 bp, Homo sapien
gaaaagatacagataatcagtgttt

SEQ ID NO: 897307 - DNA, 25 bp, Homo sapien
atatgactctaaagcaattgggcat

SEQ ID NO: 897308 - DNA, 25 bp, Homo sapien
cagtgtttaatgaatatatgactct

SEQ ID NO: 897309 - DNA, 25 bp, Homo sapien
aaagatacagataatcagtgtttaa

SEQ ID NO: 897310 - DNA, 25 bp, Homo sapien
tgtaatatccatcacaattgtaact

SEQ ID NO: 897311 - DNA, 25 bp, Homo sapien
tcacaattgtaactgctaacagccc

SEQ ID NO: 897312 - DNA, 25 bp, Homo sapien
ttttcttatttgtaatatccatcac

SEQ ID NO: 897313 - DNA, 25 bp, Homo sapien
cacaattgtaactgctaacagcccc

SEQ ID NO: 897314 - DNA, 25 bp, Homo sapien
ctctatgaggataaggccccacgtc

SEQ ID NO: 897315 - DNA, 25 bp, Homo sapien
aggataaggccccacgtctagctgg

SEQ ID NO: 897316 - DNA, 25 bp, Homo sapien
cactaacctatcacttattgggaat

SEQ ID NO: 897317 - DNA, 25 bp, Homo sapien
taaggccccacgtctagctggttct

SEQ ID NO: 897318 - DNA, 25 bp, Homo sapien
aatttatacattagctattacaaat

SEQ ID NO: 897319 - DNA, 25 bp, Homo sapien
tatatattgaagctaccccaaaaaa

SEQ ID NO: 897320 - DNA, 25 bp, Homo sapien
tttatatattgaagctaccccaaaa

SEQ ID NO: 897321 - DNA, 25 bp, Homo sapien
atattgaagctaccccaaaaaacat

SEQ ID NO: 897322 - DNA, 25 bp, Homo sapien
ttcctatgaatgtgcgataccaggc

SEQ ID NO: 897323 - DNA, 25 bp, Homo sapien
aatgtgcgataccaggcagctatga

SEQ ID NO: 897324 - DNA, 25 bp, Homo sapien
tatgaatgtgcgataccaggcagct

SEQ ID NO: 897325 - DNA, 25 bp, Homo sapien
tgaatgtgcgataccaggcagctat

SEQ ID NO: 897326 - DNA, 25 bp, Homo sapien
aatattatttgtctcaaattatgac

SEQ ID NO: 897327 - DNA, 25 bp, Homo sapien
ttatttgtctcaaattatgactcac

SEQ ID NO: 897328 - DNA, 25 bp, Homo sapien
tcactctacaaatattatttgtctc

SEQ ID NO: 897329 - DNA, 25 bp, Homo sapien
cactctacaaatattatttgtctca

SEQ ID NO: 897330 - DNA, 25 bp, Homo sapien
tcagtaagcctgtcattcataatca

SEQ ID NO: 897331 - DNA, 25 bp, Homo sapien
aagaggatattcagtaagcctgtca

SEQ ID NO: 897332 - DNA, 25 bp, Homo sapien
ggatattcagtaagcctgtcattca

SEQ ID NO: 897333 - DNA, 25 bp, Homo sapien
tattcagtaagcctgtcattcataa

SEQ ID NO: 897334 - DNA, 25 bp, Homo sapien
tagtgcgaaaagtcatctcccattc

SEQ ID NO: 897335 - DNA, 25 bp, Homo sapien
tttagtgcgaaaagtcatctcccat

SEQ ID NO: 897336 - DNA, 25 bp, Homo sapien
atgagaggtgagagaaatgacgatc

SEQ ID NO: 897337 - DNA, 25 bp, Homo sapien
cattttagtgcgaaaagtcatctcc

SEQ ID NO: 897338 - DNA, 25 bp, Homo sapien
caatgtagaattgccacaaagatgg

SEQ ID NO: 897339 - DNA, 25 bp, Homo sapien
ctagggctctcctgccctctcctta

SEQ ID NO: 897340 - DNA, 25 bp, Homo sapien
tagggctctcctgccctctccttac

SEQ ID NO: 897341 - DNA, 25 bp, Homo sapien
tgcgccagggaattacggacgaact

SEQ ID NO: 897342 - DNA, 25 bp, Homo sapien
cgatgctgagagtggttctgctggg

SEQ ID NO: 897343 - DNA, 25 bp, Homo sapien
acctttagctccaagccttttcgct

SEQ ID NO: 897344 - DNA, 25 bp, Homo sapien
ggtcgagaagggtcttggccaccac

SEQ ID NO: 897345 - DNA, 25 bp, Homo sapien
cagatttgggatcctccccggggag

SEQ ID NO: 897346 - DNA, 25 bp, Homo sapien
ctcctggcgccccctggcagtttcc

SEQ ID NO: 897347 - DNA, 25 bp, Homo sapien
tcagatttgggatcctccccgggga

SEQ ID NO: 897348 - DNA, 25 bp, Homo sapien
ctggcgccccctggcagtttcccgc

SEQ ID NO: 897349 - DNA, 25 bp, Homo sapien
gccgacttttccacctccagctccc

SEQ ID NO: 897350 - DNA, 25 bp, Homo sapien
ccgacttttccacctccagctcccg

SEQ ID NO: 897351 - DNA, 25 bp, Homo sapien
ggccgacttttccacctccagctcc

SEQ ID NO: 897352 - DNA, 25 bp, Homo sapien
cgacttttccacctccagctcccgg

SEQ ID NO: 897353 - DNA, 25 bp, Homo sapien
ttgcagcggctttgggtttactcct

SEQ ID NO: 897354 - DNA, 25 bp, Homo sapien
cgggaagattgcagcggctttgggt

SEQ ID NO: 897355 - DNA, 25 bp, Homo sapien
gattgcagcggctttgggtttactc

SEQ ID NO: 897356 - DNA, 25 bp, Homo sapien
gaagattgcagcggctttgggttta

SEQ ID NO: 897357 - DNA, 25 bp, Homo sapien
ctagccgttgacgagcggacctccc

SEQ ID NO: 897358 - DNA, 25 bp, Homo sapien
aatccctagtggagctgggtcaatt

SEQ ID NO: 897359 - DNA, 25 bp, Homo sapien
cccgcagccgttgactagccgttga

SEQ ID NO: 897360 - DNA, 25 bp, Homo sapien
cgttgactagccgttgacgagcgga

SEQ ID NO: 897361 - DNA, 25 bp, Homo sapien
ccagccccactggcgcagaacccat

SEQ ID NO: 897362 - DNA, 25 bp, Homo sapien
cccgagcgcgcagctccacgcagcc

SEQ ID NO: 897363 - DNA, 25 bp, Homo sapien
agcgcgcagctccacgcagcctctc

SEQ ID NO: 897364 - DNA, 25 bp, Homo sapien
acactctccccagcgcttgcagcac

SEQ ID NO: 897365 - DNA, 25 bp, Homo sapien
cacactctccccagcgcttgcagca

SEQ ID NO: 897366 - DNA, 25 bp, Homo sapien
gcttcgggccataaccttgctggcg

SEQ ID NO: 897367 - DNA, 25 bp, Homo sapien
tgcaccgcttcgggccataaccttg

SEQ ID NO: 897368 - DNA, 25 bp, Homo sapien
cataaccttgctggcgactaagtct

SEQ ID NO: 897369 - DNA, 25 bp, Homo sapien
cgggccataaccttgctggcgacta

SEQ ID NO: 897370 - DNA, 25 bp, Homo sapien
aggccaaagcggctggcacagatgc

SEQ ID NO: 897371 - DNA, 25 bp, Homo sapien
ttccatgtcctctgtcacgggccac

SEQ ID NO: 897372 - DNA, 25 bp, Homo sapien
tgctggagcccacaccgcttcactt

SEQ ID NO: 897373 - DNA, 25 bp, Homo sapien
ctgtcacgggccacatgctggagcc

SEQ ID NO: 897374 - DNA, 25 bp, Homo sapien
gatgatggatcacattgaactccca

SEQ ID NO: 897375 - DNA, 25 bp, Homo sapien
ctgtttgatgatggatcacattgaa

SEQ ID NO: 897376 - DNA, 25 bp, Homo sapien
tgatgatggatcacattgaactccc

SEQ ID NO: 897377 - DNA, 25 bp, Homo sapien
tttgatgatggatcacattgaactc

SEQ ID NO: 897378 - DNA, 25 bp, Homo sapien
caaaaataggatagccataggtatg

SEQ ID NO: 897379 - DNA, 25 bp, Homo sapien
ctttgtaccgtgcaaggagttggaa

SEQ ID NO: 897380 - DNA, 25 bp, Homo sapien
ttagttattcccaaagatggtggca

SEQ ID NO: 897381 - DNA, 25 bp, Homo sapien
tagatagaggtggtttagcgaagac

SEQ ID NO: 897382 - DNA, 25 bp, Homo sapien
tataattcagtacagagaggtgcaa

SEQ ID NO: 897383 - DNA, 25 bp, Homo sapien
tactatgcagtaatcccgggctgtg

SEQ ID NO: 897384 - DNA, 25 bp, Homo sapien
gctgggacccacaatcttatctaat

SEQ ID NO: 897385 - DNA, 25 bp, Homo sapien
tctgagggttcattgggtagcatac

SEQ ID NO: 897386 - DNA, 25 bp, Homo sapien
gtgtctactaaagaggctatatcca

SEQ ID NO: 897387 - DNA, 25 bp, Homo sapien
tgttctcacgcaattcattaagcaa

SEQ ID NO: 897388 - DNA, 25 bp, Homo sapien
cattaagcaaatgaacacagcaaac

SEQ ID NO: 897389 - DNA, 25 bp, Homo sapien
aagaactgcattagatgttacttca

SEQ ID NO: 897390 - DNA, 25 bp, Homo sapien
agttggagaggaaagtgtgttgtcg

SEQ ID NO: 897391 - DNA, 25 bp, Homo sapien
ggataaatatcctaacacctctttg

SEQ ID NO: 897392 - DNA, 25 bp, Homo sapien
tgttgtcgtggctggagaagcaaaa

SEQ ID NO: 897393 - DNA, 25 bp, Homo sapien
cagcatgggatgaagataatttact

SEQ ID NO: 897394 - DNA, 25 bp, Homo sapien
tactctgtgcccacctactaggaat

SEQ ID NO: 897395 - DNA, 25 bp, Homo sapien
cagggccttcgctagatgatgactc

SEQ ID NO: 897396 - DNA, 25 bp, Homo sapien
gaatgccccagaagtcaatgtaact

SEQ ID NO: 897397 - DNA, 25 bp, Homo sapien
gataggccttctggacaagttacca

SEQ ID NO: 897398 - DNA, 25 bp, Homo sapien
gattagataaagcaggtctggcagg

SEQ ID NO: 897399 - DNA, 25 bp, Homo sapien
gcagcacttcccattagccatgctt

SEQ ID NO: 897400 - DNA, 25 bp, Homo sapien
tggcaggacctctttttagcagcac

SEQ ID NO: 897401 - DNA, 25 bp, Homo sapien
aaaaaagaccttgaatctactcaga

SEQ ID NO: 897402 - DNA, 25 bp, Homo sapien
tcccacgggagtctgatgtgataag

SEQ ID NO: 897403 - DNA, 25 bp, Homo sapien
gagatgctttgttaacgcagcccat

SEQ ID NO: 897404 - DNA, 25 bp, Homo sapien
ttttctaagacgacaggttgcatcc

SEQ ID NO: 897405 - DNA, 25 bp, Homo sapien
ttcaaaggagcactggcaacaggcc

SEQ ID NO: 897406 - DNA, 25 bp, Homo sapien
tttgataggtcctgtgtctcctgga

SEQ ID NO: 897407 - DNA, 25 bp, Homo sapien
gaagaaaccctacacacaatgattt

SEQ ID NO: 897408 - DNA, 25 bp, Homo sapien
tacccacttgcacattctggatctg

SEQ ID NO: 897409 - DNA, 25 bp, Homo sapien
tatacattactgcatgaacacagcg

SEQ ID NO: 897410 - DNA, 25 bp, Homo sapien
tatggatgctgtgctggtgccaaga

SEQ ID NO: 897411 - DNA, 25 bp, Homo sapien
atggtatcgcggcatgtggaatgaa

SEQ ID NO: 897412 - DNA, 25 bp, Homo sapien
ggtgccaagagcagtcagggactgt

SEQ ID NO: 897413 - DNA, 25 bp, Homo sapien
acagcagaggaatggcgtagtcctt

SEQ ID NO: 897414 - DNA, 25 bp, Homo sapien
attatcagatgttgtaaaggctgac

SEQ ID NO: 897415 - DNA, 25 bp, Homo sapien
ttatcagatgttgtaaaggctgacc

SEQ ID NO: 897416 - DNA, 25 bp, Homo sapien
caaattatcagatgttgtaaaggct

SEQ ID NO: 897417 - DNA, 25 bp, Homo sapien
aaattatcagatgttgtaaaggctg

SEQ ID NO: 897418 - DNA, 25 bp, Homo sapien
gcaattccatggccttggaaactac

SEQ ID NO: 897419 - DNA, 25 bp, Homo sapien
tgaaatctgtgaggatcagtgtcgg

SEQ ID NO: 897420 - DNA, 25 bp, Homo sapien
cccggcatcgtgtactctgaggact

SEQ ID NO: 897421 - DNA, 25 bp, Homo sapien
cctgaaatcctttcccggcatcgtg

SEQ ID NO: 897422 - DNA, 25 bp, Homo sapien
gtgagcgtgcataggaatgcttttg

SEQ ID NO: 897423 - DNA, 25 bp, Homo sapien
gatgggtgagcgtgcataggaatgc

SEQ ID NO: 897424 - DNA, 25 bp, Homo sapien
tacggatgggtgagcgtgcatagga

SEQ ID NO: 897425 - DNA, 25 bp, Homo sapien
ggtacggatgggtgagcgtgcatag

SEQ ID NO: 897426 - DNA, 25 bp, Homo sapien
gcttctcggttgaccacagtaggta

SEQ ID NO: 897427 - DNA, 25 bp, Homo sapien
taaaccaatgtgcaactacaaggct

SEQ ID NO: 897428 - DNA, 25 bp, Homo sapien
gagacattcaagtacctcaatggga

SEQ ID NO: 897429 - DNA, 25 bp, Homo sapien
tcatgtacatgtgagtgctcccaca

SEQ ID NO: 897430 - DNA, 25 bp, Homo sapien
ttccaaccaacttgtcaagctctcc

SEQ ID NO: 897431 - DNA, 25 bp, Homo sapien
tttcctgatctcaacacttccaacc

SEQ ID NO: 897432 - DNA, 25 bp, Homo sapien
gctctccaactatttaatctttctt

SEQ ID NO: 897433 - DNA, 25 bp, Homo sapien
tcaagctctccaactatttaatctt

SEQ ID NO: 897434 - DNA, 25 bp, Homo sapien
cagcagttagtagggaaattacaca

SEQ ID NO: 897435 - DNA, 25 bp, Homo sapien
tatataggtaacaaagagtgcagca

SEQ ID NO: 897436 - DNA, 25 bp, Homo sapien
ggaacttccctggtcaattaagaca

SEQ ID NO: 897437 - DNA, 25 bp, Homo sapien
aaggtaaaaggctatcacggttctg

SEQ ID NO: 897438 - DNA, 25 bp, Homo sapien
taagcagttgcatatgtacaaggaa

SEQ ID NO: 897439 - DNA, 25 bp, Homo sapien
taaggttatgattctctggtgtcga

SEQ ID NO: 897440 - DNA, 25 bp, Homo sapien
gagtgtgttgttacaaactccctct

SEQ ID NO: 897441 - DNA, 25 bp, Homo sapien
tcacagtagctgtcagacttaagca

SEQ ID NO: 897442 - DNA, 25 bp, Homo sapien
tgctatctattttcagcttcgttat

SEQ ID NO: 897443 - DNA, 25 bp, Homo sapien
ttggcaaaaggattgctatctattt

SEQ ID NO: 897444 - DNA, 25 bp, Homo sapien
tggcaaaaggattgctatctatttt

SEQ ID NO: 897445 - DNA, 25 bp, Homo sapien
taggcagtgactgccgtaaaaactg

SEQ ID NO: 897446 - DNA, 25 bp, Homo sapien
ggtaggcagtgactgccgtaaaaac

SEQ ID NO: 897447 - DNA, 25 bp, Homo sapien
aggcagtgactgccgtaaaaactgt

SEQ ID NO: 897448 - DNA, 25 bp, Homo sapien
ctggtaggcagtgactgccgtaaaa

SEQ ID NO: 897449 - DNA, 25 bp, Homo sapien
ggccatgttgatccagttcattgtt

SEQ ID NO: 897450 - DNA, 25 bp, Homo sapien
aaaagacaccatctgtttgagtagt

SEQ ID NO: 897451 - DNA, 25 bp, Homo sapien
gctcaccggtaaaaggagaatctgg

SEQ ID NO: 897452 - DNA, 25 bp, Homo sapien
tgtttgagtagttgctcaccggtaa

SEQ ID NO: 897453 - DNA, 25 bp, Homo sapien
ggcgtagcggtacctcttgttgtcc

SEQ ID NO: 897454 - DNA, 25 bp, Homo sapien
ccaggaggaccggtggtaggcgtag

SEQ ID NO: 897455 - DNA, 25 bp, Homo sapien
tgtccacagggacgatgtccatcag

SEQ ID NO: 897456 - DNA, 25 bp, Homo sapien
catcaggactatgtacttggcctca

SEQ ID NO: 897457 - DNA, 25 bp, Homo sapien
ccttcggggttagtgtgtctccctg

SEQ ID NO: 897458 - DNA, 25 bp, Homo sapien
agggaaagcagaccacacccttcgg

SEQ ID NO: 897459 - DNA, 25 bp, Homo sapien
tcctgagaacgcaaatgactagaca

SEQ ID NO: 897460 - DNA, 25 bp, Homo sapien
gggcttcccatgaccaaatcctgag

SEQ ID NO: 897461 - DNA, 25 bp, Homo sapien
gcccagctcatggaatttgtcccaa

SEQ ID NO: 897462 - DNA, 25 bp, Homo sapien
gcaggcaattttggccatttcctca

SEQ ID NO: 897463 - DNA, 25 bp, Homo sapien
ggatcagtggctcagtgcacagaga

SEQ ID NO: 897464 - DNA, 25 bp, Homo sapien
tgggcacaggacgacttctccacaa

SEQ ID NO: 897465 - DNA, 25 bp, Homo sapien
gaatgacagctgacactgttcaaca

SEQ ID NO: 897466 - DNA, 25 bp, Homo sapien
ggtaaagagaattgtgaatgacagc

SEQ ID NO: 897467 - DNA, 25 bp, Homo sapien
tgacagctgacactgttcaacaagg

SEQ ID NO: 897468 - DNA, 25 bp, Homo sapien
ctggaggtaaagagaattgtgaatg

SEQ ID NO: 897469 - DNA, 25 bp, Homo sapien
ttgctaaatcacaggagcaggttct

SEQ ID NO: 897470 - DNA, 25 bp, Homo sapien
agcttgctaaatcacaggagcaggt

SEQ ID NO: 897471 - DNA, 25 bp, Homo sapien
aatcacaggagcaggttctgtgggc

SEQ ID NO: 897472 - DNA, 25 bp, Homo sapien
gctaaatcacaggagcaggttctgt

SEQ ID NO: 897473 - DNA, 25 bp, Homo sapien
gggtttgattgtgttctccgtcgcc

SEQ ID NO: 897474 - DNA, 25 bp, Homo sapien
ttagagccgccgctcgacatgagcg

SEQ ID NO: 897475 - DNA, 25 bp, Homo sapien
gtcgcctccttctccttagagccgc

SEQ ID NO: 897476 - DNA, 25 bp, Homo sapien
ggcaatggagaaggcgttggcccga

SEQ ID NO: 897477 - DNA, 25 bp, Homo sapien
cagagccgcagagacttcgaaggca

SEQ ID NO: 897478 - DNA, 25 bp, Homo sapien
aagtgtcagctccaacgactccaga

SEQ ID NO: 897479 - DNA, 25 bp, Homo sapien
ggtcgtccgaactgccgtccagatt

SEQ ID NO: 897480 - DNA, 25 bp, Homo sapien
caaagacccgaaacacagctcaaag

SEQ ID NO: 897481 - DNA, 25 bp, Homo sapien
gacagccgggatgtcccaggctgag

SEQ ID NO: 897482 - DNA, 25 bp, Homo sapien
ggcggaaacgagcatcaactgcaca

SEQ ID NO: 897483 - DNA, 25 bp, Homo sapien
gccgagcgcggctgctaggacgctg

SEQ ID NO: 897484 - DNA, 25 bp, Homo sapien
gcggaactacggacagtgagccctg

SEQ ID NO: 897485 - DNA, 25 bp, Homo sapien
gaggagagggctggattttcttggt

SEQ ID NO: 897486 - DNA, 25 bp, Homo sapien
ttctttgttgtcggcccatagggac

SEQ ID NO: 897487 - DNA, 25 bp, Homo sapien
cccagagcccagaaacatgtgcatt

SEQ ID NO: 897488 - DNA, 25 bp, Homo sapien
tgttgtcggcccatagggactctgg

SEQ ID NO: 897489 - DNA, 25 bp, Homo sapien
tctgcaggttcctctggtgcaacag

SEQ ID NO: 897490 - DNA, 25 bp, Homo sapien
tattctgcaggttcctctggtgcaa

SEQ ID NO: 897491 - DNA, 25 bp, Homo sapien
gcaggttcctctggtgcaacagaga

SEQ ID NO: 897492 - DNA, 25 bp, Homo sapien
agtattctgcaggttcctctggtgc

SEQ ID NO: 897493 - DNA, 25 bp, Homo sapien
caggtctgtgctttcacttggcctg

SEQ ID NO: 897494 - DNA, 25 bp, Homo sapien
gcgcatcgctcagtgcaggtctgtg

SEQ ID NO: 897495 - DNA, 25 bp, Homo sapien
ctgtgctttcacttggcctgcgctc

SEQ ID NO: 897496 - DNA, 25 bp, Homo sapien
ggtcgcgcatcgctcagtgcaggtc

SEQ ID NO: 897497 - DNA, 25 bp, Homo sapien
tgcgatggcgggaagcactttcctc

SEQ ID NO: 897498 - DNA, 25 bp, Homo sapien
ggagcgcgtcttctatgatgccagg

SEQ ID NO: 897499 - DNA, 25 bp, Homo sapien
gatgcaggctgctccagttaggtcg

SEQ ID NO: 897500 - DNA, 25 bp, Homo sapien
taccttggagagaccaaggcggccc

SEQ ID NO: 897501 - DNA, 25 bp, Homo sapien
ctgcaggtccctgcttggtcggcgc

SEQ ID NO: 897502 - DNA, 25 bp, Homo sapien
gccgagttagaagccccgccgctgc

SEQ ID NO: 897503 - DNA, 25 bp, Homo sapien
tggtcggcgcggtgacggtgtcgct

SEQ ID NO: 897504 - DNA, 25 bp, Homo sapien
gggacacagacgccgagttagaagc

SEQ ID NO: 897505 - DNA, 25 bp, Homo sapien
tctgagtacatttgctaatcagcat

SEQ ID NO: 897506 - DNA, 25 bp, Homo sapien
ctggtaggggtctgagtacatttgc

SEQ ID NO: 897507 - DNA, 25 bp, Homo sapien
ggtctgagtacatttgctaatcagc

SEQ ID NO: 897508 - DNA, 25 bp, Homo sapien
aggggtctgagtacatttgctaatc

SEQ ID NO: 897509 - DNA, 25 bp, Homo sapien
acacaaagccccatcagtcatttca

SEQ ID NO: 897510 - DNA, 25 bp, Homo sapien
cacaaagccccatcagtcatttcaa

SEQ ID NO: 897511 - DNA, 25 bp, Homo sapien
acaaagccccatcagtcatttcaaa

SEQ ID NO: 897512 - DNA, 25 bp, Homo sapien
catggtcgccatttacagatagggt

SEQ ID NO: 897513 - DNA, 25 bp, Homo sapien
gggtacattttccatggtcgccatt

SEQ ID NO: 897514 - DNA, 25 bp, Homo sapien
cagatagggtggctgctctcggata

SEQ ID NO: 897515 - DNA, 25 bp, Homo sapien
ctttcacaccaagtcgccagggtac

SEQ ID NO: 897516 - DNA, 25 bp, Homo sapien
catgtactttggcaagatgatgctt

SEQ ID NO: 897517 - DNA, 25 bp, Homo sapien
gcttgtactgcctgtaggaaggtga

SEQ ID NO: 897518 - DNA, 25 bp, Homo sapien
cagattccacggtgtggagcaggca

SEQ ID NO: 897519 - DNA, 25 bp, Homo sapien
gatgatgcttgtactgcctgtagga

SEQ ID NO: 897520 - DNA, 25 bp, Homo sapien
gctccacagtgggtagtcaggctca

SEQ ID NO: 897521 - DNA, 25 bp, Homo sapien
tgttagccactggatactgctgggt

SEQ ID NO: 897522 - DNA, 25 bp, Homo sapien
tctgtagaaagtgccaagcccttgg

SEQ ID NO: 897523 - DNA, 25 bp, Homo sapien
gtcataatgttgtttggaggcccca

SEQ ID NO: 897524 - DNA, 25 bp, Homo sapien
tccgtagctttcaggtcttgctagc

SEQ ID NO: 897525 - DNA, 25 bp, Homo sapien
ggagatgctgtcctttccccagcac

SEQ ID NO: 897526 - DNA, 25 bp, Homo sapien
gcactgggacaactccgtagctttc

SEQ ID NO: 897527 - DNA, 25 bp, Homo sapien
cctttgactgattcatgtgattctg

SEQ ID NO: 897528 - DNA, 25 bp, Homo sapien
ccatgtagctgtaatctgcgttcct

SEQ ID NO: 897529 - DNA, 25 bp, Homo sapien
tgcgttcctttagcacaatccagaa

SEQ ID NO: 897530 - DNA, 25 bp, Homo sapien
tccctgtggttggttcgtgcacata

SEQ ID NO: 897531 - DNA, 25 bp, Homo sapien
taactgagtgggaatgctgactaca

SEQ ID NO: 897532 - DNA, 25 bp, Homo sapien
gtttcttgctatatgtagccttcca

SEQ ID NO: 897533 - DNA, 25 bp, Homo sapien
cagccacctaacctgtttcttgcta

SEQ ID NO: 897534 - DNA, 25 bp, Homo sapien
gcttagacttacacgtggcactttc

SEQ ID NO: 897535 - DNA, 25 bp, Homo sapien
ttcctctgtttgctcagtgtctctg

SEQ ID NO: 897536 - DNA, 25 bp, Homo sapien
tatctgtactgagctggaagagtgt

SEQ ID NO: 897537 - DNA, 25 bp, Homo sapien
gggcttccttgtccacgagggcctc

SEQ ID NO: 897538 - DNA, 25 bp, Homo sapien
ttccttgtccacgagggcctcgcag

SEQ ID NO: 897539 - DNA, 25 bp, Homo sapien
tttccagttctccacaatttatctg

SEQ ID NO: 897540 - DNA, 25 bp, Homo sapien
tgtatctacagattggcttcctctg

SEQ ID NO: 897541 - DNA, 25 bp, Homo sapien
ttgtatctacagattggcttcctct

SEQ ID NO: 897542 - DNA, 25 bp, Homo sapien
tcagcaattagcttgttgtacttca

SEQ ID NO: 897543 - DNA, 25 bp, Homo sapien
ccccgattaatagagaggagctgct

SEQ ID NO: 897544 - DNA, 25 bp, Homo sapien
tcccacctgaacgtgaaatagatta

SEQ ID NO: 897545 - DNA, 25 bp, Homo sapien
ttcatcttcccgcttgcctccagct

SEQ ID NO: 897546 - DNA, 25 bp, Homo sapien
tggctgccaaggctacagatccagg

SEQ ID NO: 897547 - DNA, 25 bp, Homo sapien
gcccctgtggtctggcaggctgttt

SEQ ID NO: 897548 - DNA, 25 bp, Homo sapien
caccaccagtgaagctgcaaatcca

SEQ ID NO: 897549 - DNA, 25 bp, Homo sapien
ccttttcaccaccagtgaagctgca

SEQ ID NO: 897550 - DNA, 25 bp, Homo sapien
gatggcccagggatgagctgtcaac

SEQ ID NO: 897551 - DNA, 25 bp, Homo sapien
tgctcctaatgacagccagctgagg

SEQ ID NO: 897552 - DNA, 25 bp, Homo sapien
ccatgggcaggatgaatgatggccc

SEQ ID NO: 897553 - DNA, 25 bp, Homo sapien
tctttgggtatcagccaaggcccag

SEQ ID NO: 897554 - DNA, 25 bp, Homo sapien
taatgctgtcggatacaacagtgtt

SEQ ID NO: 897555 - DNA, 25 bp, Homo sapien
caacagtgttttagggctccagcca

SEQ ID NO: 897556 - DNA, 25 bp, Homo sapien
cacaaggtatcctgcccttcgcaga

SEQ ID NO: 897557 - DNA, 25 bp, Homo sapien
cagtaagatcctgtctaagaaaaca

SEQ ID NO: 897558 - DNA, 25 bp, Homo sapien
aggttgacggcggtgcagctgtagc

SEQ ID NO: 897559 - DNA, 25 bp, Homo sapien
ttgacggcggtgcagctgtagctct

SEQ ID NO: 897560 - DNA, 25 bp, Homo sapien
gagtgcttgattccagccatgtggc

SEQ ID NO: 897561 - DNA, 25 bp, Homo sapien
acggcggtgcagctgtagctcttca

SEQ ID NO: 897562 - DNA, 25 bp, Homo sapien
tcatgtccttgaagacacacgatat

SEQ ID NO: 897563 - DNA, 25 bp, Homo sapien
gtcctgtgcaaatagaaattgcatt

SEQ ID NO: 897564 - DNA, 25 bp, Homo sapien
aattgcattgtcagagacccgattg

SEQ ID NO: 897565 - DNA, 25 bp, Homo sapien
gacacacgatatcatgacaggacat

SEQ ID NO: 897566 - DNA, 25 bp, Homo sapien
tagtaatttattgcagggaagggca

SEQ ID NO: 897567 - DNA, 25 bp, Homo sapien
gtaatttattgcagggaagggcatg

SEQ ID NO: 897568 - DNA, 25 bp, Homo sapien
aagcaatagtaatttattgcaggga

SEQ ID NO: 897569 - DNA, 25 bp, Homo sapien
caatagtaatttattgcagggaagg

SEQ ID NO: 897570 - DNA, 25 bp, Homo sapien
cttggaaacgtccaggcagttgtca

SEQ ID NO: 897571 - DNA, 25 bp, Homo sapien
tggggtcccacatagaggcctggat

SEQ ID NO: 897572 - DNA, 25 bp, Homo sapien
tgcagcttggaaacgtccaggcagt

SEQ ID NO: 897573 - DNA, 25 bp, Homo sapien
agaggcctggatgtgctcgccctgc

SEQ ID NO: 897574 - DNA, 25 bp, Homo sapien
tggcatccgtagttcccattcacca

SEQ ID NO: 897575 - DNA, 25 bp, Homo sapien
catggcatccgtagttcccattcac

SEQ ID NO: 897576 - DNA, 25 bp, Homo sapien
tcatggcatccgtagttcccattca

SEQ ID NO: 897577 - DNA, 25 bp, Homo sapien
gcatccgtagttcccattcaccatt

SEQ ID NO: 897578 - DNA, 25 bp, Homo sapien
ccgcctttctgtgtaggggcctgag

SEQ ID NO: 897579 - DNA, 25 bp, Homo sapien
tgggtgtcccttctccgcctttctg

SEQ ID NO: 897580 - DNA, 25 bp, Homo sapien
agggccgggcaaccacgtcaccatg

SEQ ID NO: 897581 - DNA, 25 bp, Homo sapien
acgtcaccatgcagcatgtcctcag

SEQ ID NO: 897582 - DNA, 25 bp, Homo sapien
gaattactctgcagttgcggaccca

SEQ ID NO: 897583 - DNA, 25 bp, Homo sapien
tgtgcagatttgtagcccagtggag

SEQ ID NO: 897584 - DNA, 25 bp, Homo sapien
ggagaagtcactcggagccagagct

SEQ ID NO: 897585 - DNA, 25 bp, Homo sapien
ccagagcttggtttacttgtgcaga

SEQ ID NO: 897586 - DNA, 25 bp, Homo sapien
tccatgagcactgagtctcttccca

SEQ ID NO: 897587 - DNA, 25 bp, Homo sapien
ctggcacgtgatcggtcctccatga

SEQ ID NO: 897588 - DNA, 25 bp, Homo sapien
ccctccagccatgggcttgtgaagg

SEQ ID NO: 897589 - DNA, 25 bp, Homo sapien
cagccatgggcttgtgaaggtgaaa

SEQ ID NO: 897590 - DNA, 25 bp, Homo sapien
agcaacagagttccccataaacacc

SEQ ID NO: 897591 - DNA, 25 bp, Homo sapien
tgcagctcaacaactccagagaatc

SEQ ID NO: 897592 - DNA, 25 bp, Homo sapien
tcttgaagtttcaacagagccgctg

SEQ ID NO: 897593 - DNA, 25 bp, Homo sapien
gggtaataacctccatggatgaggg

SEQ ID NO: 897594 - DNA, 25 bp, Homo sapien
aagctgctcagccttatctgcattc

SEQ ID NO: 897595 - DNA, 25 bp, Homo sapien
tgccagagctgatcttttgctgtcg

SEQ ID NO: 897596 - DNA, 25 bp, Homo sapien
aaggaaggcacggtcttcctgtcct

SEQ ID NO: 897597 - DNA, 25 bp, Homo sapien
tgaaggaaggcacggtcttcctgtc

SEQ ID NO: 897598 - DNA, 25 bp, Homo sapien
gcatgaaggaaggcacggtcttcct

SEQ ID NO: 897599 - DNA, 25 bp, Homo sapien
ttcctgtccttttgcatggagccat

SEQ ID NO: 897600 - DNA, 25 bp, Homo sapien
tcatcctgcctcatctcatgtctcc

SEQ ID NO: 897601 - DNA, 25 bp, Homo sapien
tccaaaatgcatcccttagaggcca

SEQ ID NO: 897602 - DNA, 25 bp, Homo sapien
gcatcccttagaggccaatgaagca

SEQ ID NO: 897603 - DNA, 25 bp, Homo sapien
ccttagaggccaatgaagcaggcaa

SEQ ID NO: 897604 - DNA, 25 bp, Homo sapien
tggtgccgaaaacagctttttcaaa

SEQ ID NO: 897605 - DNA, 25 bp, Homo sapien
ttagaattccatggtgccgaaaaca

SEQ ID NO: 897606 - DNA, 25 bp, Homo sapien
tttcaaaaagcgtttgctcaaaata

SEQ ID NO: 897607 - DNA, 25 bp, Homo sapien
tcaaaaagcgtttgctcaaaatacc

SEQ ID NO: 897608 - DNA, 25 bp, Homo sapien
aatttaatgctacaaagctggacac

SEQ ID NO: 897609 - DNA, 25 bp, Homo sapien
cacatgctccatccgaatttaatgc

SEQ ID NO: 897610 - DNA, 25 bp, Homo sapien
tgctacaaagctggacacatctgaa

SEQ ID NO: 897611 - DNA, 25 bp, Homo sapien
tgctccatccgaatttaatgctaca

SEQ ID NO: 897612 - DNA, 25 bp, Homo sapien
ccccagtgaccttcatcagcaataa

SEQ ID NO: 897613 - DNA, 25 bp, Homo sapien
aataatgaatattgctgaagtcctc

SEQ ID NO: 897614 - DNA, 25 bp, Homo sapien
cagactttctcggtcttagtctttc

SEQ ID NO: 897615 - DNA, 25 bp, Homo sapien
tccagcataaccctcatcagacttt

SEQ ID NO: 897616 - DNA, 25 bp, Homo sapien
aatccctctggttctacttcagttc

SEQ ID NO: 897617 - DNA, 25 bp, Homo sapien
atgaatgaatgcgaatgtctgtcct

SEQ ID NO: 897618 - DNA, 25 bp, Homo sapien
ctgctgtctccatatctttcatcag

SEQ ID NO: 897619 - DNA, 25 bp, Homo sapien
atgtctgtcctaacaaatccctctg

SEQ ID NO: 897620 - DNA, 25 bp, Homo sapien
ctcattcgcttcacctaatcctggc

SEQ ID NO: 897621 - DNA, 25 bp, Homo sapien
ctggccctgccgatcccttctttct

SEQ ID NO: 897622 - DNA, 25 bp, Homo sapien
cctggccctgccgatcccttctttc

SEQ ID NO: 897623 - DNA, 25 bp, Homo sapien
ttcgcttcacctaatcctggccctg

SEQ ID NO: 897624 - DNA, 25 bp, Homo sapien
cacttgagaaagtcccgaagatgta

SEQ ID NO: 897625 - DNA, 25 bp, Homo sapien
tacaatgtgctatcaactcggttcc

SEQ ID NO: 897626 - DNA, 25 bp, Homo sapien
catatttgttgaggacacttgagaa

SEQ ID NO: 897627 - DNA, 25 bp, Homo sapien
cccgaagatgtaaaggcatgctcct

SEQ ID NO: 897628 - DNA, 25 bp, Homo sapien
atttggtatagggactgtggataaa

SEQ ID NO: 897629 - DNA, 25 bp, Homo sapien
gactgtggataaaataggattctct

SEQ ID NO: 897630 - DNA, 25 bp, Homo sapien
ggatttgtgagagtagtatttggta

SEQ ID NO: 897631 - DNA, 25 bp, Homo sapien
gtggataaaataggattctctctct

SEQ ID NO: 897632 - DNA, 25 bp, Homo sapien
gagggaagcatccttggagattctc

SEQ ID NO: 897633 - DNA, 25 bp, Homo sapien
gaagcatccttggagattctcacct

SEQ ID NO: 897634 - DNA, 25 bp, Homo sapien
gggaagcatccttggagattctcac

SEQ ID NO: 897635 - DNA, 25 bp, Homo sapien
ggagggaagcatccttggagattct

SEQ ID NO: 897636 - DNA, 25 bp, Homo sapien
tgtgtctagcacaacaaagtttttt

SEQ ID NO: 897637 - DNA, 25 bp, Homo sapien
ctcggagccatttgtgtctagcaca

SEQ ID NO: 897638 - DNA, 25 bp, Homo sapien
aaggataaatagagaagcccatcac

SEQ ID NO: 897639 - DNA, 25 bp, Homo sapien
ttttcaaaggataaatagagaagcc

SEQ ID NO: 897640 - DNA, 25 bp, Homo sapien
tcttgtcggagccaaaagttgactc

SEQ ID NO: 897641 - DNA, 25 bp, Homo sapien
ggagccaaaagttgactccatggcc

SEQ ID NO: 897642 - DNA, 25 bp, Homo sapien
cactcttgtcggagccaaaagttga

SEQ ID NO: 897643 - DNA, 25 bp, Homo sapien
gcttagcactcttgtcggagccaaa

SEQ ID NO: 897644 - DNA, 25 bp, Homo sapien
gctcttttaatgggagccgttggtg

SEQ ID NO: 897645 - DNA, 25 bp, Homo sapien
tattaattagctcagcatccatggc

SEQ ID NO: 897646 - DNA, 25 bp, Homo sapien
ttctgccatcagatgtaggtagtcc

SEQ ID NO: 897647 - DNA, 25 bp, Homo sapien
gctgcttcttgcatcaggatcttcc

SEQ ID NO: 897648 - DNA, 25 bp, Homo sapien
gcaactctggtaaatcatgaatctg

SEQ ID NO: 897649 - DNA, 25 bp, Homo sapien
ctgcaactctggtaaatcatgaatc

SEQ ID NO: 897650 - DNA, 25 bp, Homo sapien
tgcaactctggtaaatcatgaatct

SEQ ID NO: 897651 - DNA, 25 bp, Homo sapien
tgttttgcaagctctactatttttc

SEQ ID NO: 897652 - DNA, 25 bp, Homo sapien
cttctccatatgactgctgtaatgt

SEQ ID NO: 897653 - DNA, 25 bp, Homo sapien
gctgtaatgttttgcaagctctact

SEQ ID NO: 897654 - DNA, 25 bp, Homo sapien
gactgctgtaatgttttgcaagctc

SEQ ID NO: 897655 - DNA, 25 bp, Homo sapien
gaagaatccacaagccatgagtacc

SEQ ID NO: 897656 - DNA, 25 bp, Homo sapien
gatctcctggcaaacaatttcactg

SEQ ID NO: 897657 - DNA, 25 bp, Homo sapien
gagtaccttcctcataagccataga

SEQ ID NO: 897658 - DNA, 25 bp, Homo sapien
cgctccgctcaatcctggtgtgtgc

SEQ ID NO: 897659 - DNA, 25 bp, Homo sapien
ttctacatctgtacacatgggtgcg

SEQ ID NO: 897660 - DNA, 25 bp, Homo sapien
gcattgtagcgctgtgcccgctgca

SEQ ID NO: 897661 - DNA, 25 bp, Homo sapien
tgagacaggccacgcttgaaaattt

SEQ ID NO: 897662 - DNA, 25 bp, Homo sapien
ttaccagggccggaaatgtccagtg

SEQ ID NO: 897663 - DNA, 25 bp, Homo sapien
gcagcaggtctcgagaatggattta

SEQ ID NO: 897664 - DNA, 25 bp, Homo sapien
taggcacaatgtcatgcagcaggtc

SEQ ID NO: 897665 - DNA, 25 bp, Homo sapien
taaatgccactaaggtctcttctgc

SEQ ID NO: 897666 - DNA, 25 bp, Homo sapien
tccaggccctctaaccagatggctg

SEQ ID NO: 897667 - DNA, 25 bp, Homo sapien
gaccaggaatcttctggtagagaag

SEQ ID NO: 897668 - DNA, 25 bp, Homo sapien
ggtgagaccagggacacgaggaaag

SEQ ID NO: 897669 - DNA, 25 bp, Homo sapien
gacacgaggaaagggcctgcttctc

SEQ ID NO: 897670 - DNA, 25 bp, Homo sapien
aggagtgtgagccaagggaccagca

SEQ ID NO: 897671 - DNA, 25 bp, Homo sapien
ggcatataccaagtctgaggtttcc

SEQ ID NO: 897672 - DNA, 25 bp, Homo sapien
cacaggtcaaggtagtcagtgggaa

SEQ ID NO: 897673 - DNA, 25 bp, Homo sapien
tggggcaatggaaaccacgaattaa

SEQ ID NO: 897674 - DNA, 25 bp, Homo sapien
cacgaattaacgggcccaggaagat

SEQ ID NO: 897675 - DNA, 25 bp, Homo sapien
tagaaagacggtcactcagcctggc

SEQ ID NO: 897676 - DNA, 25 bp, Homo sapien
tgctttccgagctgaacaagtggct

SEQ ID NO: 897677 - DNA, 25 bp, Homo sapien
catttttgatcggaattggccagac

SEQ ID NO: 897678 - DNA, 25 bp, Homo sapien
caacaagccttgtaggagagtcctg

SEQ ID NO: 897679 - DNA, 25 bp, Homo sapien
gtggtttgagatcgtgtgtgtttgg

SEQ ID NO: 897680 - DNA, 25 bp, Homo sapien
ggtttgagatcgtgtgtgtttgggt

SEQ ID NO: 897681 - DNA, 25 bp, Homo sapien
tgagatcgtgtgtgtttgggtgctg

SEQ ID NO: 897682 - DNA, 25 bp, Homo sapien
tttgagatcgtgtgtgtttgggtgc

SEQ ID NO: 897683 - DNA, 25 bp, Homo sapien
caccaagtgtgatcatctgttggat

SEQ ID NO: 897684 - DNA, 25 bp, Homo sapien
gaaaggacgggattcaaggatatag

SEQ ID NO: 897685 - DNA, 25 bp, Homo sapien
tgtgatcatctgttggatcttctga

SEQ ID NO: 897686 - DNA, 25 bp, Homo sapien
taggaagttgtcagtctagaggtgt

SEQ ID NO: 897687 - DNA, 25 bp, Homo sapien
tgtggtgtcctcgaatggcctccct

SEQ ID NO: 897688 - DNA, 25 bp, Homo sapien
tgctgggcccacggaataaaatagc

SEQ ID NO: 897689 - DNA, 25 bp, Homo sapien
gccagggctgggtagctatcccagg

SEQ ID NO: 897690 - DNA, 25 bp, Homo sapien
gagggggggactccaaatgctgggc

SEQ ID NO: 897691 - DNA, 25 bp, Homo sapien
ccaaatcccatccagtaacctgttg

SEQ ID NO: 897692 - DNA, 25 bp, Homo sapien
taacctgttgcataatcctgatgaa

SEQ ID NO: 897693 - DNA, 25 bp, Homo sapien
catccagtaacctgttgcataatcc

SEQ ID NO: 897694 - DNA, 25 bp, Homo sapien
gcccttgctgccatggcagcagagc

SEQ ID NO: 897695 - DNA, 25 bp, Homo sapien
cataccaaccaataagatgtgctaa

SEQ ID NO: 897696 - DNA, 25 bp, Homo sapien
tctccatgacagagatactgactgg

SEQ ID NO: 897697 - DNA, 25 bp, Homo sapien
cctgatgcatccataccaaccaata

SEQ ID NO: 897698 - DNA, 25 bp, Homo sapien
attgaggagctagtggttgggtgca

SEQ ID NO: 897699 - DNA, 25 bp, Homo sapien
gggttgtgaaaagagaccacctgag

SEQ ID NO: 897700 - DNA, 25 bp, Homo sapien
ttctggcgagcatccaaggctccga

SEQ ID NO: 897701 - DNA, 25 bp, Homo sapien
agagaatgtgagtggccacacttgc

SEQ ID NO: 897702 - DNA, 25 bp, Homo sapien
ggcttccacgcctaatgcttcagag

SEQ ID NO: 897703 - DNA, 25 bp, Homo sapien
ggagatgccaagaactggcttatcc

SEQ ID NO: 897704 - DNA, 25 bp, Homo sapien
gagatgccaagaactggcttatcca

SEQ ID NO: 897705 - DNA, 25 bp, Homo sapien
agatgccaagaactggcttatccaa

SEQ ID NO: 897706 - DNA, 25 bp, Homo sapien
caggagatgtttggtactgcacaac

SEQ ID NO: 897707 - DNA, 25 bp, Homo sapien
tggagctacatttcacagcccctgg

SEQ ID NO: 897708 - DNA, 25 bp, Homo sapien
ccacgggagccgaaagacttggcag

SEQ ID NO: 897709 - DNA, 25 bp, Homo sapien
cgataatagggaggtagagccatct

SEQ ID NO: 897710 - DNA, 25 bp, Homo sapien
cacactcaggtgaacgagaatactg

SEQ ID NO: 897711 - DNA, 25 bp, Homo sapien
gacttctgactcagggacattgaag

SEQ ID NO: 897712 - DNA, 25 bp, Homo sapien
gagggaatcttgagtcacacactca

SEQ ID NO: 897713 - DNA, 25 bp, Homo sapien
actccccttgacttctgactcaggg

SEQ ID NO: 897714 - DNA, 25 bp, Homo sapien
ggtcacccatgtggtttttgaccac

SEQ ID NO: 897715 - DNA, 25 bp, Homo sapien
tttgaccactgtccgcagggccttg

SEQ ID NO: 897716 - DNA, 25 bp, Homo sapien
tttttgaccactgtccgcagggcct

SEQ ID NO: 897717 - DNA, 25 bp, Homo sapien
tggtacaggtcacccatgtggtttt

SEQ ID NO: 897718 - DNA, 25 bp, Homo sapien
cagagggacagccattgtgccaagg

SEQ ID NO: 897719 - DNA, 25 bp, Homo sapien
caaggacaattctcggaataaccac

SEQ ID NO: 897720 - DNA, 25 bp, Homo sapien
ggaataaccacagcccattcatctc

SEQ ID NO: 897721 - DNA, 25 bp, Homo sapien
tgaaaaagacttcaagcagaggaca

SEQ ID NO: 897722 - DNA, 25 bp, Homo sapien
ctccaccatgcgtttgaaatttttc

SEQ ID NO: 897723 - DNA, 25 bp, Homo sapien
cagctccaccatgcgtttgaaattt

SEQ ID NO: 897724 - DNA, 25 bp, Homo sapien
agctccaccatgcgtttgaaatttt

SEQ ID NO: 897725 - DNA, 25 bp, Homo sapien
gctccaccatgcgtttgaaattttt

SEQ ID NO: 897726 - DNA, 25 bp, Homo sapien
tataactgtattactctgtatgtag

SEQ ID NO: 897727 - DNA, 25 bp, Homo sapien
atataactgtattactctgtatgta

SEQ ID NO: 897728 - DNA, 25 bp, Homo sapien
catataactgtattactctgtatgt

SEQ ID NO: 897729 - DNA, 25 bp, Homo sapien
gagaaaggcagacgtgtaaaccaac

SEQ ID NO: 897730 - DNA, 25 bp, Homo sapien
gatggttgccagacatatcaggatg

SEQ ID NO: 897731 - DNA, 25 bp, Homo sapien
cctgggtaaaagtgcatgtctgcta

SEQ ID NO: 897732 - DNA, 25 bp, Homo sapien
taaccctgacaagacatcatgatgg

SEQ ID NO: 897733 - DNA, 25 bp, Homo sapien
cgccgctggagcaaggtctttgcac

SEQ ID NO: 897734 - DNA, 25 bp, Homo sapien
cttttaacgcttcggccagcctgca

SEQ ID NO: 897735 - DNA, 25 bp, Homo sapien
catcagcgccgctggagcaaggtct

SEQ ID NO: 897736 - DNA, 25 bp, Homo sapien
ggaaactgctgcacttttaacgctt

SEQ ID NO: 897737 - DNA, 25 bp, Homo sapien
agttcaacatcgctgcacatgtgga

SEQ ID NO: 897738 - DNA, 25 bp, Homo sapien
aaagaatgggtgctcgggtcaggaa

SEQ ID NO: 897739 - DNA, 25 bp, Homo sapien
ggagtcactgcaccaagttcaacat

SEQ ID NO: 897740 - DNA, 25 bp, Homo sapien
tcaggaaagcgtcgttggcaattgg

SEQ ID NO: 897741 - DNA, 25 bp, Homo sapien
tgtgcaagccatgcttggagccata

SEQ ID NO: 897742 - DNA, 25 bp, Homo sapien
cagctggtgtgcaagccatgcttgg

SEQ ID NO: 897743 - DNA, 25 bp, Homo sapien
tggtgtgcaagccatgcttggagcc

SEQ ID NO: 897744 - DNA, 25 bp, Homo sapien
gcaagccatgcttggagccatacct

SEQ ID NO: 897745 - DNA, 25 bp, Homo sapien
cctcctttccaggggagacagagag

SEQ ID NO: 897746 - DNA, 25 bp, Homo sapien
cgatcacatcgtcattcctcctttc

SEQ ID NO: 897747 - DNA, 25 bp, Homo sapien
cctttccaggggagacagagagaaa

SEQ ID NO: 897748 - DNA, 25 bp, Homo sapien
gatcacatcgtcattcctcctttcc

SEQ ID NO: 897749 - DNA, 25 bp, Homo sapien
gccctgctatagccaagctgtcagc

SEQ ID NO: 897750 - DNA, 25 bp, Homo sapien
cttggaggtccccctcttcttgact

SEQ ID NO: 897751 - DNA, 25 bp, Homo sapien
ctgtcagcagggtcgcggttcttgg

SEQ ID NO: 897752 - DNA, 25 bp, Homo sapien
ttcttggaggtccccctcttcttga

SEQ ID NO: 897753 - DNA, 25 bp, Homo sapien
gaggagtgggaattgtgtaaacatg

SEQ ID NO: 897754 - DNA, 25 bp, Homo sapien
ggagccagggcctcggcaaagctaa

SEQ ID NO: 897755 - DNA, 25 bp, Homo sapien
aaggagagccccttagcacagcact

SEQ ID NO: 897756 - DNA, 25 bp, Homo sapien
gtaaacatggctgtcctgcgggcct

SEQ ID NO: 897757 - DNA, 25 bp, Homo sapien
tgggaatgtgggtctatcaggctct

SEQ ID NO: 897758 - DNA, 25 bp, Homo sapien
gggaatgtgggtctatcaggctctg

SEQ ID NO: 897759 - DNA, 25 bp, Homo sapien
ggaatgtgggtctatcaggctctgt

SEQ ID NO: 897760 - DNA, 25 bp, Homo sapien
ttgtcctcacttgctagattcaggc

SEQ ID NO: 897761 - DNA, 25 bp, Homo sapien
tcctcacttgctagattcaggctag

SEQ ID NO: 897762 - DNA, 25 bp, Homo sapien
cacttgctagattcaggctagcatg

SEQ ID NO: 897763 - DNA, 25 bp, Homo sapien
tagattcaggctagcatgtgatgct

SEQ ID NO: 897764 - DNA, 25 bp, Homo sapien
caattcccagaggtggtgcatctga

SEQ ID NO: 897765 - DNA, 25 bp, Homo sapien
gacagcaatatcagagcaaatcagc

SEQ ID NO: 897766 - DNA, 25 bp, Homo sapien
tcagccaattcccagaggtggtgca

SEQ ID NO: 897767 - DNA, 25 bp, Homo sapien
acagcaatatcagagcaaatcagcc

SEQ ID NO: 897768 - DNA, 25 bp, Homo sapien
gtactccttccaaatccatactgca

SEQ ID NO: 897769 - DNA, 25 bp, Homo sapien
tctggagtagggtactccttccaaa

SEQ ID NO: 897770 - DNA, 25 bp, Homo sapien
catacccacattatctggagtaggg

SEQ ID NO: 897771 - DNA, 25 bp, Homo sapien
aatccatactgcatatgcattgatg

SEQ ID NO: 897772 - DNA, 25 bp, Homo sapien
gtaggattgatcctggctttgttca

SEQ ID NO: 897773 - DNA, 25 bp, Homo sapien
cagcagtaggattgatcctggcttt

SEQ ID NO: 897774 - DNA, 25 bp, Homo sapien
ctgatgctttgtaagcagcagtagg

SEQ ID NO: 897775 - DNA, 25 bp, Homo sapien
tgtaagcagcagtaggattgatcct

SEQ ID NO: 897776 - DNA, 25 bp, Homo sapien
ggcctcattactgaagctatggata

SEQ ID NO: 897777 - DNA, 25 bp, Homo sapien
tgattgccttggaacaacacgggaa

SEQ ID NO: 897778 - DNA, 25 bp, Homo sapien
ggatgcattataccttcctgggaca

SEQ ID NO: 897779 - DNA, 25 bp, Homo sapien
catttattatgcctgggagggatgc

SEQ ID NO: 897780 - DNA, 25 bp, Homo sapien
taaaaactgtttcatacctatataa

SEQ ID NO: 897781 - DNA, 25 bp, Homo sapien
tataaccttaacaataacgtgagta

SEQ ID NO: 897782 - DNA, 25 bp, Homo sapien
tgtttgcccaaatgctatattatag

SEQ ID NO: 897783 - DNA, 25 bp, Homo sapien
cgtgagtagtatgagtatcagcaat

SEQ ID NO: 897784 - DNA, 25 bp, Homo sapien
gaatgttctctagacagcctcccaa

SEQ ID NO: 897785 - DNA, 25 bp, Homo sapien
tcccctggccttggaaaactaatga

SEQ ID NO: 897786 - DNA, 25 bp, Homo sapien
tctagatccctagagtagacccact

SEQ ID NO: 897787 - DNA, 25 bp, Homo sapien
tatcattctataaggtctgtgcccc

SEQ ID NO: 897788 - DNA, 25 bp, Homo sapien
gggctctgggagttgcctctccaac

SEQ ID NO: 897789 - DNA, 25 bp, Homo sapien
cttccccgaggttaccagggctctg

SEQ ID NO: 897790 - DNA, 25 bp, Homo sapien
catgctcaactgctaaataatctac

SEQ ID NO: 897791 - DNA, 25 bp, Homo sapien
tgctactgagaagggcccacacctt

SEQ ID NO: 897792 - DNA, 25 bp, Homo sapien
gcttgtactctaactggaccccgtg

SEQ ID NO: 897793 - DNA, 25 bp, Homo sapien
cattatgaccctgcaagcaagtggc

SEQ ID NO: 897794 - DNA, 25 bp, Homo sapien
tggaggacatgctttacctgagctc

SEQ ID NO: 897795 - DNA, 25 bp, Homo sapien
cacattcggtgggtctcaagttctt

SEQ ID NO: 897796 - DNA, 25 bp, Homo sapien
ctatcagcaaagtgaggtggacctc

SEQ ID NO: 897797 - DNA, 25 bp, Homo sapien
gaaatcaagcatctggagcaacagg

SEQ ID NO: 897798 - DNA, 25 bp, Homo sapien
aagggcactggagttgaggaaatca

SEQ ID NO: 897799 - DNA, 25 bp, Homo sapien
catgccaaacgaaaagagaggttct

SEQ ID NO: 897800 - DNA, 25 bp, Homo sapien
ccatctcactgattgcagttgacac

SEQ ID NO: 897801 - DNA, 25 bp, Homo sapien
gcagctcttatcaaacatatggtca

SEQ ID NO: 897802 - DNA, 25 bp, Homo sapien
taatcatgattctgtccccactgca

SEQ ID NO: 897803 - DNA, 25 bp, Homo sapien
tcctctttaaccactgtaatcatga

SEQ ID NO: 897804 - DNA, 25 bp, Homo sapien
cagtgaccttgcctgcgatgggcat

SEQ ID NO: 897805 - DNA, 25 bp, Homo sapien
acactgcagttttctgagaggagcc

SEQ ID NO: 897806 - DNA, 25 bp, Homo sapien
cagcaagaagggttgttcctcacac

SEQ ID NO: 897807 - DNA, 25 bp, Homo sapien
gaagggttgttcctcacactgcagt

SEQ ID NO: 897808 - DNA, 25 bp, Homo sapien
acaggagcaaccaagaatcctgggc

SEQ ID NO: 897809 - DNA, 25 bp, Homo sapien
gaacggaaggggctacatcctaagc

SEQ ID NO: 897810 - DNA, 25 bp, Homo sapien
aatcctgggccagatcatcagtcat

SEQ ID NO: 897811 - DNA, 25 bp, Homo sapien
taagcccccctgacttgacaggagc

SEQ ID NO: 897812 - DNA, 25 bp, Homo sapien
tctgctgctgtgagtccctccttac

SEQ ID NO: 897813 - DNA, 25 bp, Homo sapien
gcctggaaacttggcccagcattcc

SEQ ID NO: 897814 - DNA, 25 bp, Homo sapien
tatacgaaagatagtgtcttgggct

SEQ ID NO: 897815 - DNA, 25 bp, Homo sapien
cctccttaccggcagagagagactg

SEQ ID NO: 897816 - DNA, 25 bp, Homo sapien
taggacacttgatgtgaatcctggc

SEQ ID NO: 897817 - DNA, 25 bp, Homo sapien
gaaatacatacctattaccaggctc

SEQ ID NO: 897818 - DNA, 25 bp, Homo sapien
tctccatattgtaggtctctgacag

SEQ ID NO: 897819 - DNA, 25 bp, Homo sapien
acaggagcctcccagaggtgaccag

SEQ ID NO: 897820 - DNA, 25 bp, Homo sapien
caggcactgatctaaacactggaga

SEQ ID NO: 897821 - DNA, 25 bp, Homo sapien
aagccactgcgaggtgttgagcacg

SEQ ID NO: 897822 - DNA, 25 bp, Homo sapien
cacagcgacatcactagcagggaga

SEQ ID NO: 897823 - DNA, 25 bp, Homo sapien
cagggagagccatggattaagcact

SEQ ID NO: 897824 - DNA, 25 bp, Homo sapien
cctaaaaaaggcaggacatcctgaa

SEQ ID NO: 897825 - DNA, 25 bp, Homo sapien
ttatctgaggtctacaggccggcag

SEQ ID NO: 897826 - DNA, 25 bp, Homo sapien
tggcctgtgggcatgacttcctctg

SEQ ID NO: 897827 - DNA, 25 bp, Homo sapien
gaaatttagaataagtggcaggcag

SEQ ID NO: 897828 - DNA, 25 bp, Homo sapien
tactgtaagtgaacaggtgctcaca

SEQ ID NO: 897829 - DNA, 25 bp, Homo sapien
tgtcacaggttgcacaaatcccatt

SEQ ID NO: 897830 - DNA, 25 bp, Homo sapien
aaagtgtcttatcttacatgtactg

SEQ ID NO: 897831 - DNA, 25 bp, Homo sapien
tcacatcccatagggcactgggaaa

SEQ ID NO: 897832 - DNA, 25 bp, Homo sapien
aaattcttctctagcttaacctaat

SEQ ID NO: 897833 - DNA, 25 bp, Homo sapien
tcttctctagcttaacctaatttcc

SEQ ID NO: 897834 - DNA, 25 bp, Homo sapien
ataatttatgtaccaagtcaaaata

SEQ ID NO: 897835 - DNA, 25 bp, Homo sapien
ctctagcttaacctaatttcctaag

SEQ ID NO: 897836 - DNA, 25 bp, Homo sapien
aattgttggtgtacaatcttctcaa

SEQ ID NO: 897837 - DNA, 25 bp, Homo sapien
attgttggtgtacaatcttctcaac

SEQ ID NO: 897838 - DNA, 25 bp, Homo sapien
ttaattgttggtgtacaatcttctc

SEQ ID NO: 897839 - DNA, 25 bp, Homo sapien
tgttggtgtacaatcttctcaacaa

SEQ ID NO: 897840 - DNA, 25 bp, Homo sapien
tttccgcaagatacatgagttcatt

SEQ ID NO: 897841 - DNA, 25 bp, Homo sapien
gaggtttccgcaagatacatgagtt

SEQ ID NO: 897842 - DNA, 25 bp, Homo sapien
tgagttcattatggacatttttaca

SEQ ID NO: 897843 - DNA, 25 bp, Homo sapien
agattagaggtttccgcaagataca

SEQ ID NO: 897844 - DNA, 25 bp, Homo sapien
gagaagtggtaacgtcttcctgctt

SEQ ID NO: 897845 - DNA, 25 bp, Homo sapien
cctgcttcaaaacatggcagcgtaa

SEQ ID NO: 897846 - DNA, 25 bp, Homo sapien
ctttgagaagtggtaacgtcttcct

SEQ ID NO: 897847 - DNA, 25 bp, Homo sapien
aagtggtaacgtcttcctgcttcaa

SEQ ID NO: 897848 - DNA, 25 bp, Homo sapien
tcctcttagaaacttctacatccat

SEQ ID NO: 897849 - DNA, 25 bp, Homo sapien
tgtcctcttagaaacttctacatcc

SEQ ID NO: 897850 - DNA, 25 bp, Homo sapien
gtcctcttagaaacttctacatcca

SEQ ID NO: 897851 - DNA, 25 bp, Homo sapien
ctgtcctcttagaaacttctacatc

SEQ ID NO: 897852 - DNA, 25 bp, Homo sapien
ctctgaaacctccacatccgtgccc

SEQ ID NO: 897853 - DNA, 25 bp, Homo sapien
tgtggcaccaattttagttgctact

SEQ ID NO: 897854 - DNA, 25 bp, Homo sapien
cacatccgtgccctatacaatccat

SEQ ID NO: 897855 - DNA, 25 bp, Homo sapien
gtggcaccaattttagttgctactt

SEQ ID NO: 897856 - DNA, 25 bp, Homo sapien
tgcagtgttacagcaccatctagtg

SEQ ID NO: 897857 - DNA, 25 bp, Homo sapien
tctcagggcccgagagtatcctgtc

SEQ ID NO: 897858 - DNA, 25 bp, Homo sapien
cacgctctggtaaggtagcatcctt

SEQ ID NO: 897859 - DNA, 25 bp, Homo sapien
tgtgtgctccaatccactcgctagg

SEQ ID NO: 897860 - DNA, 25 bp, Homo sapien
ccctcttgtatacagaggatttcca

SEQ ID NO: 897861 - DNA, 25 bp, Homo sapien
tccttaccctcttgtatacagagga

SEQ ID NO: 897862 - DNA, 25 bp, Homo sapien
gatagaaagtcccaataagcatgta

SEQ ID NO: 897863 - DNA, 25 bp, Homo sapien
gggatgatagaaagtcccaataagc

SEQ ID NO: 897864 - DNA, 25 bp, Homo sapien
gaaactgaaacatgtacccctgatt

SEQ ID NO: 897865 - DNA, 25 bp, Homo sapien
agaaactgaaacatgtacccctgat

SEQ ID NO: 897866 - DNA, 25 bp, Homo sapien
cccctgtgaaagagtaactacctgg

SEQ ID NO: 897867 - DNA, 25 bp, Homo sapien
gtaatggaaaggatggcacaacagc

SEQ ID NO: 897868 - DNA, 25 bp, Homo sapien
cacttggatgaaacagcttactgca

SEQ ID NO: 897869 - DNA, 25 bp, Homo sapien
ttggcaacaagacccatgaaactgg

SEQ ID NO: 897870 - DNA, 25 bp, Homo sapien
tgctagcaataccaccggcagaggt

SEQ ID NO: 897871 - DNA, 25 bp, Homo sapien
agagcctggcagttttgcacatcca

SEQ ID NO: 897872 - DNA, 25 bp, Homo sapien
aaacttgctttgtacccaccatgtg

SEQ ID NO: 897873 - DNA, 25 bp, Homo sapien
cagggtctgacgtacactggacttc

SEQ ID NO: 897874 - DNA, 25 bp, Homo sapien
tagtcacaatctggccttgagacca

SEQ ID NO: 897875 - DNA, 25 bp, Homo sapien
tcaatagcgatggtagaaagagcca

SEQ ID NO: 897876 - DNA, 25 bp, Homo sapien
ttggattaccccagccacctaggta

SEQ ID NO: 897877 - DNA, 25 bp, Homo sapien
caatactggtgagctgtggcatcta

SEQ ID NO: 897878 - DNA, 25 bp, Homo sapien
acttcatcccttctatatggtgaga

SEQ ID NO: 897879 - DNA, 25 bp, Homo sapien
tgaactaaataccaggttctcccca

SEQ ID NO: 897880 - DNA, 25 bp, Homo sapien
acacatgcatgacatcctttcaaac

SEQ ID NO: 897881 - DNA, 25 bp, Homo sapien
tatctggaaagctaaatctcacaca

SEQ ID NO: 897882 - DNA, 25 bp, Homo sapien
tatcatcttaagaatatggtagttt

SEQ ID NO: 897883 - DNA, 25 bp, Homo sapien
tgacagtgaatgatctgtgcacatt

SEQ ID NO: 897884 - DNA, 25 bp, Homo sapien
cttgctggaaaggctatattctgtt

SEQ ID NO: 897885 - DNA, 25 bp, Homo sapien
ttacattcccctacagtttcaccaa

SEQ ID NO: 897886 - DNA, 25 bp, Homo sapien
acttttcaaacgcttaactaagcag

SEQ ID NO: 897887 - DNA, 25 bp, Homo sapien
caaaacattatatactcagcaatct

SEQ ID NO: 897888 - DNA, 25 bp, Homo sapien
agtatttccacgatttgattgttca

SEQ ID NO: 897889 - DNA, 25 bp, Homo sapien
gattctgccataaaagtgttctctc

SEQ ID NO: 897890 - DNA, 25 bp, Homo sapien
tagctatcccataagaaacttactg

SEQ ID NO: 897891 - DNA, 25 bp, Homo sapien
ttatttagctatcccataagaaact

SEQ ID NO: 897892 - DNA, 25 bp, Homo sapien
ttagctatcccataagaaacttact

SEQ ID NO: 897893 - DNA, 25 bp, Homo sapien
atttagctatcccataagaaactta

SEQ ID NO: 897894 - DNA, 25 bp, Homo sapien
gcccggccaatgaagcagctcttta

SEQ ID NO: 897895 - DNA, 25 bp, Homo sapien
tatggctgggcaagatgctactagc

SEQ ID NO: 897896 - DNA, 25 bp, Homo sapien
gaagtcagaccctccttgtagctgg

SEQ ID NO: 897897 - DNA, 25 bp, Homo sapien
cattaaagggccaggctactagcta

SEQ ID NO: 897898 - DNA, 25 bp, Homo sapien
gaattgcactggcatcttcacctcc

SEQ ID NO: 897899 - DNA, 25 bp, Homo sapien
gggaggcccctctggtattagtgaa

SEQ ID NO: 897900 - DNA, 25 bp, Homo sapien
tagtgaagtaaagaaggtggtgatg

SEQ ID NO: 897901 - DNA, 25 bp, Homo sapien
ttcaagcccatcatccataagacgc

SEQ ID NO: 897902 - DNA, 25 bp, Homo sapien
taacttcggcattattgttgggagc

SEQ ID NO: 897903 - DNA, 25 bp, Homo sapien
ttgggagcctgctgatgacctcctt

SEQ ID NO: 897904 - DNA, 25 bp, Homo sapien
tcattgttaacttcggcattattgt

SEQ ID NO: 897905 - DNA, 25 bp, Homo sapien
cattattgttgggagcctgctgatg

SEQ ID NO: 897906 - DNA, 25 bp, Homo sapien
taaaaggaaaccatccagcttggtg

SEQ ID NO: 897907 - DNA, 25 bp, Homo sapien
ctaaaaggaaaccatccagcttggt

SEQ ID NO: 897908 - DNA, 25 bp, Homo sapien
aaaaggaaaccatccagcttggtgt

SEQ ID NO: 897909 - DNA, 25 bp, Homo sapien
tcaggacagggaactacccttttca

SEQ ID NO: 897910 - DNA, 25 bp, Homo sapien
tctcccacttcaggacagggaacta

SEQ ID NO: 897911 - DNA, 25 bp, Homo sapien
tgttattagtgtcctataagagaaa

SEQ ID NO: 897912 - DNA, 25 bp, Homo sapien
aaatgttattagtgtcctataagag

SEQ ID NO: 897913 - DNA, 25 bp, Homo sapien
gtctagccagtctcgattgaagtct

SEQ ID NO: 897914 - DNA, 25 bp, Homo sapien
gaatcgcagctcgtgagaacgtgta

SEQ ID NO: 897915 - DNA, 25 bp, Homo sapien
tcttgggccactaggtttggagctg

SEQ ID NO: 897916 - DNA, 25 bp, Homo sapien
gaacgtgtacatccagtctagccag

SEQ ID NO: 897917 - DNA, 25 bp, Homo sapien
gaaatagtcaccaaaataaatatta

SEQ ID NO: 897918 - DNA, 25 bp, Homo sapien
tgaaatagtcaccaaaataaatatt

SEQ ID NO: 897919 - DNA, 25 bp, Homo sapien
ctgaaatagtcaccaaaataaatat

SEQ ID NO: 897920 - DNA, 25 bp, Homo sapien
tcaaagctgtttatggttaagagct

SEQ ID NO: 897921 - DNA, 25 bp, Homo sapien
gtaacccagcagcagtataaggaaa

SEQ ID NO: 897922 - DNA, 25 bp, Homo sapien
tctgggtgaaacattggaggtagca

SEQ ID NO: 897923 - DNA, 25 bp, Homo sapien
gaaagagctattgaagtcaagtgga

SEQ ID NO: 897924 - DNA, 25 bp, Homo sapien
tactgatgagcatacatctgttgcc

SEQ ID NO: 897925 - DNA, 25 bp, Homo sapien
ggaatccaggtggagcagcttgccc

SEQ ID NO: 897926 - DNA, 25 bp, Homo sapien
tagcatctgcagtgggctaaacgcg

SEQ ID NO: 897927 - DNA, 25 bp, Homo sapien
gctaaacgcgggatacactgggaat

SEQ ID NO: 897928 - DNA, 25 bp, Homo sapien
tgggacactgccattatgaacaaag

SEQ ID NO: 897929 - DNA, 25 bp, Homo sapien
gacaaaatagtcacttcggcaatgc

SEQ ID NO: 897930 - DNA, 25 bp, Homo sapien
ttttttcgaggccatgacagcccat

SEQ ID NO: 897931 - DNA, 25 bp, Homo sapien
aaatctgacgggtagatctgaccag

SEQ ID NO: 897932 - DNA, 25 bp, Homo sapien
ctgctggcaaggagctcatgttgct

SEQ ID NO: 897933 - DNA, 25 bp, Homo sapien
gagctcatgttgctgcctaatcctt

SEQ ID NO: 897934 - DNA, 25 bp, Homo sapien
agccttatgaagtgccagtcgcccc

SEQ ID NO: 897935 - DNA, 25 bp, Homo sapien
tcatttatggacttatctatgctgt

SEQ ID NO: 897936 - DNA, 25 bp, Homo sapien
catgggctgcacctatttgtctggc

SEQ ID NO: 897937 - DNA, 25 bp, Homo sapien
agtctctcacggcttcccttttgta

SEQ ID NO: 897938 - DNA, 25 bp, Homo sapien
gccactttgtttatgtactcgagcc

SEQ ID NO: 897939 - DNA, 25 bp, Homo sapien
tgtactcgagcctcggcaatggcag

SEQ ID NO: 897940 - DNA, 25 bp, Homo sapien
caaagtatttgaagctactgttcca

SEQ ID NO: 897941 - DNA, 25 bp, Homo sapien
gagataaccactattaatgtggcac

SEQ ID NO: 897942 - DNA, 25 bp, Homo sapien
tacttcgaagagctgaatgcttttg

SEQ ID NO: 897943 - DNA, 25 bp, Homo sapien
ataatataaaccctgagaacactgc

SEQ ID NO: 897944 - DNA, 25 bp, Homo sapien
gcttgtggaagggtacgctgcctca

SEQ ID NO: 897945 - DNA, 25 bp, Homo sapien
tgaggaagaacccacagctaaagac

SEQ ID NO: 897946 - DNA, 25 bp, Homo sapien
ggtacgctgcctcaatccttctgag

SEQ ID NO: 897947 - DNA, 25 bp, Homo sapien
gacaaggtttcttgaccagatgatg

SEQ ID NO: 897948 - DNA, 25 bp, Homo sapien
ggaggagtccgagaagtacatacta

SEQ ID NO: 897949 - DNA, 25 bp, Homo sapien
gactttctctattggtgctggattt

SEQ ID NO: 897950 - DNA, 25 bp, Homo sapien
gagtccgagaagtacatactagatg

SEQ ID NO: 897951 - DNA, 25 bp, Homo sapien
ggatgccaatgcttcatgactttct

SEQ ID NO: 897952 - DNA, 25 bp, Homo sapien
cttaattgctttaggagtttggagg

SEQ ID NO: 897953 - DNA, 25 bp, Homo sapien
aggagttactaagggttagaatgct

SEQ ID NO: 897954 - DNA, 25 bp, Homo sapien
ttactaagggttagaatgctaaaga

SEQ ID NO: 897955 - DNA, 25 bp, Homo sapien
ttaattgctttaggagtttggagga

SEQ ID NO: 897956 - DNA, 25 bp, Homo sapien
tgcccgaatacaccaatctctgatc

SEQ ID NO: 897957 - DNA, 25 bp, Homo sapien
gcagtctgcccgaatacaccaatct

SEQ ID NO: 897958 - DNA, 25 bp, Homo sapien
ttcagctgcagatgatcgggaagca

SEQ ID NO: 897959 - DNA, 25 bp, Homo sapien
tcagctgcagatgatcgggaagcag

SEQ ID NO: 897960 - DNA, 25 bp, Homo sapien
tccaagatacttaaccattacacat

SEQ ID NO: 897961 - DNA, 25 bp, Homo sapien
gctatccttccaagatacttaacca

SEQ ID NO: 897962 - DNA, 25 bp, Homo sapien
gatacttaaccattacacatattcc

SEQ ID NO: 897963 - DNA, 25 bp, Homo sapien
taaccattacacatattccagtttc

SEQ ID NO: 897964 - DNA, 25 bp, Homo sapien
tgaaatgtctagactatgcaaatcc

SEQ ID NO: 897965 - DNA, 25 bp, Homo sapien
ttatgctaagttaaagataggaggc

SEQ ID NO: 897966 - DNA, 25 bp, Homo sapien
acacatgctataatgtagatgagcc

SEQ ID NO: 897967 - DNA, 25 bp, Homo sapien
gctaagttaaagataggaggcacaa

SEQ ID NO: 897968 - DNA, 25 bp, Homo sapien
gaggtattttgaccccaagactgaa

SEQ ID NO: 897969 - DNA, 25 bp, Homo sapien
gaattcagagtgagtcaggtccatc

SEQ ID NO: 897970 - DNA, 25 bp, Homo sapien
aatggagagccaagccatgcaagcc

SEQ ID NO: 897971 - DNA, 25 bp, Homo sapien
cacagtgcagcccaatttcaggatc

SEQ ID NO: 897972 - DNA, 25 bp, Homo sapien
gttaagtgtagaaagcatagttgcc

SEQ ID NO: 897973 - DNA, 25 bp, Homo sapien
gcaataaccgtcctatttctgtggt

SEQ ID NO: 897974 - DNA, 25 bp, Homo sapien
tactgataaacacagctaatgccga

SEQ ID NO: 897975 - DNA, 25 bp, Homo sapien
tagttgccttccaacagatccatgc

SEQ ID NO: 897976 - DNA, 25 bp, Homo sapien
tcttaagtcccttgatatttctgct

SEQ ID NO: 897977 - DNA, 25 bp, Homo sapien
tagatagatgcgtttttagtttccc

SEQ ID NO: 897978 - DNA, 25 bp, Homo sapien
tttgctagggtaaacgttagataga

SEQ ID NO: 897979 - DNA, 25 bp, Homo sapien
agttcaagaagcagctaatagtctg

SEQ ID NO: 897980 - DNA, 25 bp, Homo sapien
aagaagcagctaatagtctggtcac

SEQ ID NO: 897981 - DNA, 25 bp, Homo sapien
tgattcggtgctttaatgatgaggg

SEQ ID NO: 897982 - DNA, 25 bp, Homo sapien
tcggtgctttaatgatgagggtcac

SEQ ID NO: 897983 - DNA, 25 bp, Homo sapien
tgatgagggtcacaggaatctccat

SEQ ID NO: 897984 - DNA, 25 bp, Homo sapien
gagggtcacaggaatctccatccca

SEQ ID NO: 897985 - DNA, 25 bp, Homo sapien
caagtcagttacaagtgcactggag

SEQ ID NO: 897986 - DNA, 25 bp, Homo sapien
cccaaaagagccgagatggtcaccg

SEQ ID NO: 897987 - DNA, 25 bp, Homo sapien
agttcttagtattccgtgtccaagt

SEQ ID NO: 897988 - DNA, 25 bp, Homo sapien
cagaggagcggcagttaagcccaaa

SEQ ID NO: 897989 - DNA, 25 bp, Homo sapien
attgccggtaccaaggatggactga

SEQ ID NO: 897990 - DNA, 25 bp, Homo sapien
cccattgccggtaccaaggatggac

SEQ ID NO: 897991 - DNA, 25 bp, Homo sapien
gaagcccattgccggtaccaaggat

SEQ ID NO: 897992 - DNA, 25 bp, Homo sapien
gtgcccggccgtggaggcagctctc

SEQ ID NO: 897993 - DNA, 25 bp, Homo sapien
tgtggaggccgtcgtgaggagaaag

SEQ ID NO: 897994 - DNA, 25 bp, Homo sapien
ggaggccgtcgtgaggagaaaggaa

SEQ ID NO: 897995 - DNA, 25 bp, Homo sapien
ctgtggaggccgtcgtgaggagaaa

SEQ ID NO: 897996 - DNA, 25 bp, Homo sapien
tggaggccgtcgtgaggagaaagga

SEQ ID NO: 897997 - DNA, 25 bp, Homo sapien
agggatgagggcacaacggccggcc

SEQ ID NO: 897998 - DNA, 25 bp, Homo sapien
cgcggtgcggatcggggaagcagct

SEQ ID NO: 897999 - DNA, 25 bp, Homo sapien
caagctggaacgcaacaaggcccct

SEQ ID NO: 898000 - DNA, 25 bp, Homo sapien
ctcagggcggtcagcgggcactggg

SEQ ID NO: 898001 - DNA, 25 bp, Homo sapien
ctgagagaaggccgcggggcccgcc

SEQ ID NO: 898002 - DNA, 25 bp, Homo sapien
tgagagaaggccgcggggcccgcca

SEQ ID NO: 898003 - DNA, 25 bp, Homo sapien
cgccctccgcgcccaggcagggccg

SEQ ID NO: 898004 - DNA, 25 bp, Homo sapien
cctccgcgcccaggcagggccgcca

SEQ ID NO: 898005 - DNA, 25 bp, Homo sapien
gctggcgcgccggttttgttgttat

SEQ ID NO: 898006 - DNA, 25 bp, Homo sapien
tgttgttattgcgaggattgtctgg

SEQ ID NO: 898007 - DNA, 25 bp, Homo sapien
gcccaggcgactacaggtagcagga

SEQ ID NO: 898008 - DNA, 25 bp, Homo sapien
gtccggccaggcgttttccgtggca

SEQ ID NO: 898009 - DNA, 25 bp, Homo sapien
ggtgctgaaccacgcttctgctcaa

SEQ ID NO: 898010 - DNA, 25 bp, Homo sapien
tcgtctctgcaaaagttggtgtcct

SEQ ID NO: 898011 - DNA, 25 bp, Homo sapien
gaccgcaccctgaagatttgggaag

SEQ ID NO: 898012 - DNA, 25 bp, Homo sapien
caaaatgtgttgagcgtcgtctgtc

SEQ ID NO: 898013 - DNA, 25 bp, Homo sapien
ggtgatctcgtttggcactatgcaa

SEQ ID NO: 898014 - DNA, 25 bp, Homo sapien
tcatgcttgtgactcagacttccag

SEQ ID NO: 898015 - DNA, 25 bp, Homo sapien
tcaaaggttcgctaacacagagaaa

SEQ ID NO: 898016 - DNA, 25 bp, Homo sapien
tgccaccagacaagccctaagctat

SEQ ID NO: 898017 - DNA, 25 bp, Homo sapien
gaattgcttgaactctggcagcaga

SEQ ID NO: 898018 - DNA, 25 bp, Homo sapien
tgcactccagcctggtcgacagagt

SEQ ID NO: 898019 - DNA, 25 bp, Homo sapien
gttgcagtgagctgagattgtgcca

SEQ ID NO: 898020 - DNA, 25 bp, Homo sapien
ctgagattgtgccactgcactccag

SEQ ID NO: 898021 - DNA, 25 bp, Homo sapien
tcagcagttgatgcatttgacaatt

SEQ ID NO: 898022 - DNA, 25 bp, Homo sapien
tggtatgggatagatccttctgagt

SEQ ID NO: 898023 - DNA, 25 bp, Homo sapien
caataaggacagtggtatgggatag

SEQ ID NO: 898024 - DNA, 25 bp, Homo sapien
gacaattagggcaatgaagatgaca

SEQ ID NO: 898025 - DNA, 25 bp, Homo sapien
ttccccatatcaatgtctgtgtccc

SEQ ID NO: 898026 - DNA, 25 bp, Homo sapien
aacctcattctttttcatcacactc

SEQ ID NO: 898027 - DNA, 25 bp, Homo sapien
gtccccactgccattattaacaaca

SEQ ID NO: 898028 - DNA, 25 bp, Homo sapien
gccattattaacaacaacctcattc

SEQ ID NO: 898029 - DNA, 25 bp, Homo sapien
ggttaggaagtgaacagcagaactg

SEQ ID NO: 898030 - DNA, 25 bp, Homo sapien
gccatgttgggctttgactcaggaa

SEQ ID NO: 898031 - DNA, 25 bp, Homo sapien
ggcagaagaagacaccacaggagtt

SEQ ID NO: 898032 - DNA, 25 bp, Homo sapien
gattggccagtacaacagcagaggg

SEQ ID NO: 898033 - DNA, 25 bp, Homo sapien
ctgagttataacagctgccctggga

SEQ ID NO: 898034 - DNA, 25 bp, Homo sapien
tgccctgggaatcttgtctgaacaa

SEQ ID NO: 898035 - DNA, 25 bp, Homo sapien
tctgaacaacaagttaactgctgtt

SEQ ID NO: 898036 - DNA, 25 bp, Homo sapien
gccaagtgttagagttattgctgcc

SEQ ID NO: 898037 - DNA, 25 bp, Homo sapien
acttccaagtgcgaggcagtgtgga

SEQ ID NO: 898038 - DNA, 25 bp, Homo sapien
tgctgtaagacaaacttccaagtgc

SEQ ID NO: 898039 - DNA, 25 bp, Homo sapien
ccaggcactgaagtcgggcattcag

SEQ ID NO: 898040 - DNA, 25 bp, Homo sapien
atgcaccagcgggatccttggcagc

SEQ ID NO: 898041 - DNA, 25 bp, Homo sapien
aactgcttcctggaacactgagaac

SEQ ID NO: 898042 - DNA, 25 bp, Homo sapien
gcaaactgcttcctggaacactgag

SEQ ID NO: 898043 - DNA, 25 bp, Homo sapien
aatggagaaaagaaacttgagcaaa

SEQ ID NO: 898044 - DNA, 25 bp, Homo sapien
aaagaaacttgagcaaactgcttcc

SEQ ID NO: 898045 - DNA, 25 bp, Homo sapien
agattctttggtgcccgtattagtg

SEQ ID NO: 898046 - DNA, 25 bp, Homo sapien
ctttggtgcccgtattagtggacat

SEQ ID NO: 898047 - DNA, 25 bp, Homo sapien
gattctttggtgcccgtattagtgg

SEQ ID NO: 898048 - DNA, 25 bp, Homo sapien
ttctttggtgcccgtattagtggac

SEQ ID NO: 898049 - DNA, 25 bp, Homo sapien
tactttcttagagccaccatatcca

SEQ ID NO: 898050 - DNA, 25 bp, Homo sapien
tgggatcagggctccatctttaaca

SEQ ID NO: 898051 - DNA, 25 bp, Homo sapien
catatccatatccaaatacagctac

SEQ ID NO: 898052 - DNA, 25 bp, Homo sapien
agggctctcctcgtaggtggcagac

SEQ ID NO: 898053 - DNA, 25 bp, Homo sapien
tttcatgatgggctgtgacaacact

SEQ ID NO: 898054 - DNA, 25 bp, Homo sapien
tgtgacaacactgaggatttccatg

SEQ ID NO: 898055 - DNA, 25 bp, Homo sapien
gagcttaatcagcactgctttcatg

SEQ ID NO: 898056 - DNA, 25 bp, Homo sapien
tgtgttttgagcttaatcagcactg

SEQ ID NO: 898057 - DNA, 25 bp, Homo sapien
ttaaaaagccgcgatcctccttcac

SEQ ID NO: 898058 - DNA, 25 bp, Homo sapien
caagcagagggaatttaacagagat

SEQ ID NO: 898059 - DNA, 25 bp, Homo sapien
tttagtcagagtgcaatcagaaggc

SEQ ID NO: 898060 - DNA, 25 bp, Homo sapien
cattgtgcacatacattcagagtgt

SEQ ID NO: 898061 - DNA, 25 bp, Homo sapien
tctgggcactgcaaagttgatggtg

SEQ ID NO: 898062 - DNA, 25 bp, Homo sapien
atcaaccatgatcggcagggccaga

SEQ ID NO: 898063 - DNA, 25 bp, Homo sapien
tgaaatgagttcactgccccatcaa

SEQ ID NO: 898064 - DNA, 25 bp, Homo sapien
catgcctgcttatgggtgaccctgc

SEQ ID NO: 898065 - DNA, 25 bp, Homo sapien
taagaaacgactaccatgatccagg

SEQ ID NO: 898066 - DNA, 25 bp, Homo sapien
tagatggagtgaccaagagcctgag

SEQ ID NO: 898067 - DNA, 25 bp, Homo sapien
tcatgttacaaggaaagagctaggc

SEQ ID NO: 898068 - DNA, 25 bp, Homo sapien
gagtcaaccgaaggtggagcacagt

SEQ ID NO: 898069 - DNA, 25 bp, Homo sapien
ccttttggcctatggattccaagag

SEQ ID NO: 898070 - DNA, 25 bp, Homo sapien
aatcttgaagagagagcagcaagcc

SEQ ID NO: 898071 - DNA, 25 bp, Homo sapien
caagccttttggcctatggattcca

SEQ ID NO: 898072 - DNA, 25 bp, Homo sapien
atcttgaagagagagcagcaagcct

SEQ ID NO: 898073 - DNA, 25 bp, Homo sapien
tgacttgcacggaaggtgcccagtg

SEQ ID NO: 898074 - DNA, 25 bp, Homo sapien
gcaaagcgtttgtacccctctcatc

SEQ ID NO: 898075 - DNA, 25 bp, Homo sapien
gtccctccgggtatttcagatgata

SEQ ID NO: 898076 - DNA, 25 bp, Homo sapien
gagattgtgctgatgccacaagcaa

SEQ ID NO: 898077 - DNA, 25 bp, Homo sapien
cattgtgagccttaaatgagaccag

SEQ ID NO: 898078 - DNA, 25 bp, Homo sapien
tatacagagggtgagtatccttcca

SEQ ID NO: 898079 - DNA, 25 bp, Homo sapien
gctccacttggacttggtaaacacg

SEQ ID NO: 898080 - DNA, 25 bp, Homo sapien
ggcaacctagtagagcagaaagcat

SEQ ID NO: 898081 - DNA, 25 bp, Homo sapien
tctaggagaagctggtgtccttcgt

SEQ ID NO: 898082 - DNA, 25 bp, Homo sapien
ccacgaggacggactggaatctgca

SEQ ID NO: 898083 - DNA, 25 bp, Homo sapien
tccttcgtcatggaggacatgttgg

SEQ ID NO: 898084 - DNA, 25 bp, Homo sapien
caacttcaatggtcaggtactctct

SEQ ID NO: 898085 - DNA, 25 bp, Homo sapien
taaactatagtcatactactgactg

SEQ ID NO: 898086 - DNA, 25 bp, Homo sapien
aaaatcagtgtaactgagattccca

SEQ ID NO: 898087 - DNA, 25 bp, Homo sapien
atccctctccctgctaaggttacga

SEQ ID NO: 898088 - DNA, 25 bp, Homo sapien
caagtaatgggtagttgtagtctag

SEQ ID NO: 898089 - DNA, 25 bp, Homo sapien
tatggttggtcaagcctggatctca

SEQ ID NO: 898090 - DNA, 25 bp, Homo sapien
tttcctactacagatgagcttgctc

SEQ ID NO: 898091 - DNA, 25 bp, Homo sapien
gagcttgctcatcttgctgtggaga

SEQ ID NO: 898092 - DNA, 25 bp, Homo sapien
tgtcatcgctgtctagtaacatcag

SEQ ID NO: 898093 - DNA, 25 bp, Homo sapien
ggtgtccattacagatccttcatgt

SEQ ID NO: 898094 - DNA, 25 bp, Homo sapien
gaaataaggtgttgtactggaagac

SEQ ID NO: 898095 - DNA, 25 bp, Homo sapien
tgctgaacagacacaatcgacaggt

SEQ ID NO: 898096 - DNA, 25 bp, Homo sapien
gaagactggtttggctgtccactaa

SEQ ID NO: 898097 - DNA, 25 bp, Homo sapien
cagaggacatttacaattgcaaaag

SEQ ID NO: 898098 - DNA, 25 bp, Homo sapien
aggtatttaatctccatatgactct

SEQ ID NO: 898099 - DNA, 25 bp, Homo sapien
aagctgcataaataggctgtcatca

SEQ ID NO: 898100 - DNA, 25 bp, Homo sapien
aaagaggagaatgtgtacagatgac

SEQ ID NO: 898101 - DNA, 25 bp, Homo sapien
cacactgagggctatttgctgcaaa

SEQ ID NO: 898102 - DNA, 25 bp, Homo sapien
tgaaatcacctcctcaataagtggt

SEQ ID NO: 898103 - DNA, 25 bp, Homo sapien
ctcctgccggtgtttcctgaaatca

SEQ ID NO: 898104 - DNA, 25 bp, Homo sapien
cacagggagaccgttttggagagtt

SEQ ID NO: 898105 - DNA, 25 bp, Homo sapien
aatatacgtatactcctccttcttg

SEQ ID NO: 898106 - DNA, 25 bp, Homo sapien
ttgaaatactgtcttgaaggagggc

SEQ ID NO: 898107 - DNA, 25 bp, Homo sapien
tctagatagtactcgattttgtgtg

SEQ ID NO: 898108 - DNA, 25 bp, Homo sapien
gcttccctgcatgatattgataatt

SEQ ID NO: 898109 - DNA, 25 bp, Homo sapien
gtgccacagatgacttgggactttg

SEQ ID NO: 898110 - DNA, 25 bp, Homo sapien
tgcttccaagtggtaagaagttctg

SEQ ID NO: 898111 - DNA, 25 bp, Homo sapien
caagtggtaagaagttctgtggccc

SEQ ID NO: 898112 - DNA, 25 bp, Homo sapien
gactttgacagggttgtgatcgtcc

SEQ ID NO: 898113 - DNA, 25 bp, Homo sapien
tcaaatcccagcagtcttacatgag

SEQ ID NO: 898114 - DNA, 25 bp, Homo sapien
cagctgaaataggtctgtaaccctg

SEQ ID NO: 898115 - DNA, 25 bp, Homo sapien
tgtaaccctgcatggagatttggag

SEQ ID NO: 898116 - DNA, 25 bp, Homo sapien
tacaccctagtagagaacaagacag

SEQ ID NO: 898117 - DNA, 25 bp, Homo sapien
gtagagcaggggctctgttttgctt

SEQ ID NO: 898118 - DNA, 25 bp, Homo sapien
agcaggggctctgttttgcttatca

SEQ ID NO: 898119 - DNA, 25 bp, Homo sapien
gcaggggctctgttttgcttatcat

SEQ ID NO: 898120 - DNA, 25 bp, Homo sapien
agagcaggggctctgttttgcttat

SEQ ID NO: 898121 - DNA, 25 bp, Homo sapien
ctcagtgacaaatatagggccatcc

SEQ ID NO: 898122 - DNA, 25 bp, Homo sapien
ggatctaagttctcaacccttctgc

SEQ ID NO: 898123 - DNA, 25 bp, Homo sapien
tccaataaaggtgggcctcctgtca

SEQ ID NO: 898124 - DNA, 25 bp, Homo sapien
cctcctgtcaggatctaagttctca

SEQ ID NO: 898125 - DNA, 25 bp, Homo sapien
cttcagagcctgataagattcacta

SEQ ID NO: 898126 - DNA, 25 bp, Homo sapien
tttagctccatagcacgtaagcatg

SEQ ID NO: 898127 - DNA, 25 bp, Homo sapien
gcgtcgcagctatgattacaattta

SEQ ID NO: 898128 - DNA, 25 bp, Homo sapien
cacgtaagcatggtatgaacaggaa

SEQ ID NO: 898129 - DNA, 25 bp, Homo sapien
ttatgtatgtctcatacacttcttc

SEQ ID NO: 898130 - DNA, 25 bp, Homo sapien
tatcagccaaccatcttcacaacaa

SEQ ID NO: 898131 - DNA, 25 bp, Homo sapien
aatccagttctgaagagttactcag

SEQ ID NO: 898132 - DNA, 25 bp, Homo sapien
atctttatcagccaaccatcttcac

SEQ ID NO: 898133 - DNA, 25 bp, Homo sapien
ttaatccagttctgaagagttactc

SEQ ID NO: 898134 - DNA, 25 bp, Homo sapien
ccaaagcttcgtttgcaaaattatt

SEQ ID NO: 898135 - DNA, 25 bp, Homo sapien
cagggcacggcgggtgcccagagcg

SEQ ID NO: 898136 - DNA, 25 bp, Homo sapien
caaagcttcgtttgcaaaattattg

SEQ ID NO: 898137 - DNA, 25 bp, Homo sapien
cccaaagcttcgtttgcaaaattat

SEQ ID NO: 898138 - DNA, 25 bp, Homo sapien
gaaccacaacaaatgggactcactg

SEQ ID NO: 898139 - DNA, 25 bp, Homo sapien
ggactcactggttctttgtaccaca

SEQ ID NO: 898140 - DNA, 25 bp, Homo sapien
cataagactagctcggtggtggcac

SEQ ID NO: 898141 - DNA, 25 bp, Homo sapien
acatctggagtcatcgaatgcagga

SEQ ID NO: 898142 - DNA, 25 bp, Homo sapien
ggccttcaacttggagtgtagttgg

SEQ ID NO: 898143 - DNA, 25 bp, Homo sapien
tgaagctgcatcctggtgccggaag

SEQ ID NO: 898144 - DNA, 25 bp, Homo sapien
tcaacttggagtgtagttggcaggt

SEQ ID NO: 898145 - DNA, 25 bp, Homo sapien
agcaggcaggatatttgtctgaagc

SEQ ID NO: 898146 - DNA, 25 bp, Homo sapien
gtagataggctgtagcacattcaaa

SEQ ID NO: 898147 - DNA, 25 bp, Homo sapien
aagtgatatcaagagctggagatag

SEQ ID NO: 898148 - DNA, 25 bp, Homo sapien
gaaatcacacttgtagataggctgt

SEQ ID NO: 898149 - DNA, 25 bp, Homo sapien
ttggaagataaaccgaattcccaga

SEQ ID NO: 898150 - DNA, 25 bp, Homo sapien
cctccttgcttgttgcagtttcttt

SEQ ID NO: 898151 - DNA, 25 bp, Homo sapien
tccttgcttgttgcagtttctttaa

SEQ ID NO: 898152 - DNA, 25 bp, Homo sapien
ccttgcttgttgcagtttctttaac

SEQ ID NO: 898153 - DNA, 25 bp, Homo sapien
ttgcttgttgcagtttctttaacat

SEQ ID NO: 898154 - DNA, 25 bp, Homo sapien
gacttgaggatctacatacattcca

SEQ ID NO: 898155 - DNA, 25 bp, Homo sapien
aattatatacccaaaatggcacagc

SEQ ID NO: 898156 - DNA, 25 bp, Homo sapien
taacacaacgtttgcaactgagcct

SEQ ID NO: 898157 - DNA, 25 bp, Homo sapien
tatctgatccatgtgcttctttgag

SEQ ID NO: 898158 - DNA, 25 bp, Homo sapien
cacagcaaaagtaacccatggtcat

SEQ ID NO: 898159 - DNA, 25 bp, Homo sapien
tcacagcaaaagtaacccatggtca

SEQ ID NO: 898160 - DNA, 25 bp, Homo sapien
tctcttgtgtaatagttgtctctca

SEQ ID NO: 898161 - DNA, 25 bp, Homo sapien
tcacaacacttaaacgagattttgt

SEQ ID NO: 898162 - DNA, 25 bp, Homo sapien
gattttgtgaatggtagaatatttc

SEQ ID NO: 898163 - DNA, 25 bp, Homo sapien
ttgtctctcagtatcagaggggatt

SEQ ID NO: 898164 - DNA, 25 bp, Homo sapien
ggcagtctgactccggaggctatat

SEQ ID NO: 898165 - DNA, 25 bp, Homo sapien
ggctatatacatttaccctccttgg

SEQ ID NO: 898166 - DNA, 25 bp, Homo sapien
tactaagcattgactaagcaccgtg

SEQ ID NO: 898167 - DNA, 25 bp, Homo sapien
tcttggttgcaagcctaataaatgg

SEQ ID NO: 898168 - DNA, 25 bp, Homo sapien
ttacaagtgaacacccatgtgccct

SEQ ID NO: 898169 - DNA, 25 bp, Homo sapien
catatatatctttccgcaacctgtc

SEQ ID NO: 898170 - DNA, 25 bp, Homo sapien
catgtgccctctacttagcttaatg

SEQ ID NO: 898171 - DNA, 25 bp, Homo sapien
tacattcccttctgttcatctctgg

SEQ ID NO: 898172 - DNA, 25 bp, Homo sapien
gagagccatcacgttcaagaaaaga

SEQ ID NO: 898173 - DNA, 25 bp, Homo sapien
gggaacgttccaatgacagcgacat

SEQ ID NO: 898174 - DNA, 25 bp, Homo sapien
catgaagaatacaaccaagagagcc

SEQ ID NO: 898175 - DNA, 25 bp, Homo sapien
tctgaactttcttgcacgtgcctat

SEQ ID NO: 898176 - DNA, 25 bp, Homo sapien
tttcaccccgaaagtcaagatagcc

SEQ ID NO: 898177 - DNA, 25 bp, Homo sapien
tagaaactcacacaatcgcagccct

SEQ ID NO: 898178 - DNA, 25 bp, Homo sapien
tgtgccaggccactagagtgtgatg

SEQ ID NO: 898179 - DNA, 25 bp, Homo sapien
caccgacaaggtgagccaatatgaa

SEQ ID NO: 898180 - DNA, 25 bp, Homo sapien
catgacctcagtggtgcgaaacccg

SEQ ID NO: 898181 - DNA, 25 bp, Homo sapien
caattccgtaaggaggcgctgaggc

SEQ ID NO: 898182 - DNA, 25 bp, Homo sapien
tgttgaagaaacacgcaaagaggcc

SEQ ID NO: 898183 - DNA, 25 bp, Homo sapien
caaaacttgacgtgaaattgcgcgg

SEQ ID NO: 898184 - DNA, 25 bp, Homo sapien
gtacttttgtgtacccttcctgcaa

SEQ ID NO: 898185 - DNA, 25 bp, Homo sapien
caagttatggattgctactggagga

SEQ ID NO: 898186 - DNA, 25 bp, Homo sapien
gtttcaaatgactcctacagccaat

SEQ ID NO: 898187 - DNA, 25 bp, Homo sapien
tctgtatttgtcatctctcttggtc

SEQ ID NO: 898188 - DNA, 25 bp, Homo sapien
cccttaggctgtatgagagatggta

SEQ ID NO: 898189 - DNA, 25 bp, Homo sapien
gaatttgactaagcaagtaccagac

SEQ ID NO: 898190 - DNA, 25 bp, Homo sapien
ctaaggagttgagaagtaaacttct

SEQ ID NO: 898191 - DNA, 25 bp, Homo sapien
cactttaggagaaacatacttcgtc

SEQ ID NO: 898192 - DNA, 25 bp, Homo sapien
atatcccagtttcatttagcagtct

SEQ ID NO: 898193 - DNA, 25 bp, Homo sapien
gtaatcttgataatatcccagtttc

SEQ ID NO: 898194 - DNA, 25 bp, Homo sapien
aatgtaatcttgataatatcccagt

SEQ ID NO: 898195 - DNA, 25 bp, Homo sapien
tgtaatcttgataatatcccagttt

SEQ ID NO: 898196 - DNA, 25 bp, Homo sapien
gattccactgactattcccatgcca

SEQ ID NO: 898197 - DNA, 25 bp, Homo sapien
gtcactacattagagcagtgtctct

SEQ ID NO: 898198 - DNA, 25 bp, Homo sapien
agacctcgccaagaccgtgcagatt

SEQ ID NO: 898199 - DNA, 25 bp, Homo sapien
tgtctctgcacacttacgggagtct

SEQ ID NO: 898200 - DNA, 25 bp, Homo sapien
acaagtcgtgcagtgtgaagctcac

SEQ ID NO: 898201 - DNA, 25 bp, Homo sapien
gaagtgggcagccttgtgcacacaa

SEQ ID NO: 898202 - DNA, 25 bp, Homo sapien
agttggccgtgtccagattggtggc

SEQ ID NO: 898203 - DNA, 25 bp, Homo sapien
agattggtggctccgaagtgggcag

SEQ ID NO: 898204 - DNA, 25 bp, Homo sapien
ctgcagaggtaacattcccgaaggg

SEQ ID NO: 898205 - DNA, 25 bp, Homo sapien
gctgcagaggtaacattcccgaagg

SEQ ID NO: 898206 - DNA, 25 bp, Homo sapien
tgctgcagaggtaacattcccgaag

SEQ ID NO: 898207 - DNA, 25 bp, Homo sapien
actcttggatttcaggaacctctgg

SEQ ID NO: 898208 - DNA, 25 bp, Homo sapien
ttgaactatgggaccactcttggat

SEQ ID NO: 898209 - DNA, 25 bp, Homo sapien
cttgaactatgggaccactcttgga

SEQ ID NO: 898210 - DNA, 25 bp, Homo sapien
accactcttggatttcaggaacctc

SEQ ID NO: 898211 - DNA, 25 bp, Homo sapien
gtcagtggagtctgcattgtcttgg

SEQ ID NO: 898212 - DNA, 25 bp, Homo sapien
tttgtatgaggtactcgattgagta

SEQ ID NO: 898213 - DNA, 25 bp, Homo sapien
aaggacgtagatctattattgtatc

SEQ ID NO: 898214 - DNA, 25 bp, Homo sapien
gagtactttaggagaatattcactg

SEQ ID NO: 898215 - DNA, 25 bp, Homo sapien
tcagtgttattcttgaaaggacgta

SEQ ID NO: 898216 - DNA, 25 bp, Homo sapien
tttctttaggcttattttaagcatg

SEQ ID NO: 898217 - DNA, 25 bp, Homo sapien
tctttaggcttattttaagcatgag

SEQ ID NO: 898218 - DNA, 25 bp, Homo sapien
actttagtcagatctcttagatttt

SEQ ID NO: 898219 - DNA, 25 bp, Homo sapien
gtcagatctcttagatttttatgtg

SEQ ID NO: 898220 - DNA, 25 bp, Homo sapien
taagcaggcttatatctgacataac

SEQ ID NO: 898221 - DNA, 25 bp, Homo sapien
caagtatgaactgcatgcatggcta

SEQ ID NO: 898222 - DNA, 25 bp, Homo sapien
caacagtgtactttcagtgcctcct

SEQ ID NO: 898223 - DNA, 25 bp, Homo sapien
cagcttaataaggtagtggcagttt

SEQ ID NO: 898224 - DNA, 25 bp, Homo sapien
ggaactcttttggtatgacagctat

SEQ ID NO: 898225 - DNA, 25 bp, Homo sapien
gagcagtgctgtacttagttttacc

SEQ ID NO: 898226 - DNA, 25 bp, Homo sapien
tgctgggaacctttgccaagaaagt

SEQ ID NO: 898227 - DNA, 25 bp, Homo sapien
tttctgatgaatgttcagggagcag

SEQ ID NO: 898228 - DNA, 25 bp, Homo sapien
tgtgcatttgtagctaggtgttatc

SEQ ID NO: 898229 - DNA, 25 bp, Homo sapien
cagtaggaatctatgggccaccatc

SEQ ID NO: 898230 - DNA, 25 bp, Homo sapien
tatgccatcccttgtttactgaaat

SEQ ID NO: 898231 - DNA, 25 bp, Homo sapien
aagatcatcaagatgccactgggca

SEQ ID NO: 898232 - DNA, 25 bp, Homo sapien
tatgcttactgtgcacctagagctt

SEQ ID NO: 898233 - DNA, 25 bp, Homo sapien
gaaatgggaatcatggcctcttgaa

SEQ ID NO: 898234 - DNA, 25 bp, Homo sapien
acaaaggttccattcagtgcagcat

SEQ ID NO: 898235 - DNA, 25 bp, Homo sapien
aaagtcaccattctgcatttagctg

SEQ ID NO: 898236 - DNA, 25 bp, Homo sapien
tttaactgtaaagagggtagtgtca

SEQ ID NO: 898237 - DNA, 25 bp, Homo sapien
tatactctcaagtccctggaaactg

SEQ ID NO: 898238 - DNA, 25 bp, Homo sapien
aatgtagcctagtttattatcttga

SEQ ID NO: 898239 - DNA, 25 bp, Homo sapien
cttaaggtcaagtgacatagatttt

SEQ ID NO: 898240 - DNA, 25 bp, Homo sapien
taagtcaatagcagagagattgttg

SEQ ID NO: 898241 - DNA, 25 bp, Homo sapien
gcctgctgaactggttaagtactac

SEQ ID NO: 898242 - DNA, 25 bp, Homo sapien
tagggaggctaacaataacctactg

SEQ ID NO: 898243 - DNA, 25 bp, Homo sapien
gagattgggttaacacctctagcca

SEQ ID NO: 898244 - DNA, 25 bp, Homo sapien
ccaaacagccttgtattggcaaagg

SEQ ID NO: 898245 - DNA, 25 bp, Homo sapien
catggtgccatggtaagtctctgga

SEQ ID NO: 898246 - DNA, 25 bp, Homo sapien
ttggcctgaacatttgccccatggg

SEQ ID NO: 898247 - DNA, 25 bp, Homo sapien
gaatgttcaaagtttagtgtcagcc

SEQ ID NO: 898248 - DNA, 25 bp, Homo sapien
catttcaccgggagatttgcacgta

SEQ ID NO: 898249 - DNA, 25 bp, Homo sapien
tgttctctcttcgaggtgggccacc

SEQ ID NO: 898250 - DNA, 25 bp, Homo sapien
tccaagtgtgttgcaagggagcagc

SEQ ID NO: 898251 - DNA, 25 bp, Homo sapien
gatgctgtttgtggacctgccgaaa

SEQ ID NO: 898252 - DNA, 25 bp, Homo sapien
agtatatgtgctaccaaagcgtgca

SEQ ID NO: 898253 - DNA, 25 bp, Homo sapien
caaatatggaacgcaacacaaattt

SEQ ID NO: 898254 - DNA, 25 bp, Homo sapien
tggaacgcaacacaaatttgcatgt

SEQ ID NO: 898255 - DNA, 25 bp, Homo sapien
gtatatgtgctaccaaagcgtgcac

SEQ ID NO: 898256 - DNA, 25 bp, Homo sapien
ctccgcctcccgggtgccaccacac

SEQ ID NO: 898257 - DNA, 25 bp, Homo sapien
gcagtggcatgatctccgctcactg

SEQ ID NO: 898258 - DNA, 25 bp, Homo sapien
tgaacgagctgctcatctacagcat

SEQ ID NO: 898259 - DNA, 25 bp, Homo sapien
cttccgtgatggtgcgaacgccgtc

SEQ ID NO: 898260 - DNA, 25 bp, Homo sapien
cagtacttgggcgttagcgtcctcc

SEQ ID NO: 898261 - DNA, 25 bp, Homo sapien
ttgatgtatcgtcccggcctgtggc

SEQ ID NO: 898262 - DNA, 25 bp, Homo sapien
tccccgtgtgcactctcaggggcgg

SEQ ID NO: 898263 - DNA, 25 bp, Homo sapien
accctccccgtgtgcactctcaggg

SEQ ID NO: 898264 - DNA, 25 bp, Homo sapien
tgtgcactctcaggggcggcgccca

SEQ ID NO: 898265 - DNA, 25 bp, Homo sapien
ccgtgtgcactctcaggggcggcgc

SEQ ID NO: 898266 - DNA, 25 bp, Homo sapien
ccacgtcttcaggtcgtactgcggg

SEQ ID NO: 898267 - DNA, 25 bp, Homo sapien
tgctcccacgtcttcaggtcgtact

SEQ ID NO: 898268 - DNA, 25 bp, Homo sapien
ggctcctgctcccacgtcttcaggt

SEQ ID NO: 898269 - DNA, 25 bp, Homo sapien
tcccacgtcttcaggtcgtactgcg

SEQ ID NO: 898270 - DNA, 25 bp, Homo sapien
ttagacatcaccctgggaggccgct

SEQ ID NO: 898271 - DNA, 25 bp, Homo sapien
agggactttagacatcaccctggga

SEQ ID NO: 898272 - DNA, 25 bp, Homo sapien
ctgccagggactttagacatcaccc

SEQ ID NO: 898273 - DNA, 25 bp, Homo sapien
actttagacatcaccctgggaggcc

SEQ ID NO: 898274 - DNA, 25 bp, Homo sapien
cacaaagctgcttactctgccctgg

SEQ ID NO: 898275 - DNA, 25 bp, Homo sapien
tgcccgcggaccaccctctgtgtct

SEQ ID NO: 898276 - DNA, 25 bp, Homo sapien
ctgccacaaagctgcttactctgcc

SEQ ID NO: 898277 - DNA, 25 bp, Homo sapien
tcaccttggattgtgtagatgcagt

SEQ ID NO: 898278 - DNA, 25 bp, Homo sapien
tggatttctggggaggaacctccat

SEQ ID NO: 898279 - DNA, 25 bp, Homo sapien
gtatgtcctgcagatgctgtggatt

SEQ ID NO: 898280 - DNA, 25 bp, Homo sapien
tcctgcagatgctgtggatttctgg

SEQ ID NO: 898281 - DNA, 25 bp, Homo sapien
cctgttcctgtagggctgtatgtcc

SEQ ID NO: 898282 - DNA, 25 bp, Homo sapien
tggccgtagggtcccccagtattgc

SEQ ID NO: 898283 - DNA, 25 bp, Homo sapien
gggcagaggaagagaccccgggcca

SEQ ID NO: 898284 - DNA, 25 bp, Homo sapien
aggagccctgctcatggcaccaggc

SEQ ID NO: 898285 - DNA, 25 bp, Homo sapien
agtattgctgttgctacgaggtcgg

SEQ ID NO: 898286 - DNA, 25 bp, Homo sapien
ggcctctgtgggtgtgtaacagtca

SEQ ID NO: 898287 - DNA, 25 bp, Homo sapien
caggaggccagagacgaaggcctct

SEQ ID NO: 898288 - DNA, 25 bp, Homo sapien
tccaggaggccagagacgaaggcct

SEQ ID NO: 898289 - DNA, 25 bp, Homo sapien
atgccccagatcttgtccaggaggc

SEQ ID NO: 898290 - DNA, 25 bp, Homo sapien
catccacatcaatctccagttctgg

SEQ ID NO: 898291 - DNA, 25 bp, Homo sapien
tccacatcaatctccagttctggga

SEQ ID NO: 898292 - DNA, 25 bp, Homo sapien
gcccaggcatcgtcagtctccatgt

SEQ ID NO: 898293 - DNA, 25 bp, Homo sapien
ctggcagcccaggcatcgtcagtct

SEQ ID NO: 898294 - DNA, 25 bp, Homo sapien
taggttgaggcgcttccgtagctcc

SEQ ID NO: 898295 - DNA, 25 bp, Homo sapien
tcctggcagtcgcagaggcacgtga

SEQ ID NO: 898296 - DNA, 25 bp, Homo sapien
ccgtcatacttgacggtgaccttcc

SEQ ID NO: 898297 - DNA, 25 bp, Homo sapien
tagctccttgccgtcatacttgacg

SEQ ID NO: 898298 - DNA, 25 bp, Homo sapien
tgtctcctgcggccccagaggggct

SEQ ID NO: 898299 - DNA, 25 bp, Homo sapien
tgggctgtctcctgcggccccagag

SEQ ID NO: 898300 - DNA, 25 bp, Homo sapien
gggctgtctcctgcggccccagagg

SEQ ID NO: 898301 - DNA, 25 bp, Homo sapien
gctgtctcctgcggccccagagggg

SEQ ID NO: 898302 - DNA, 25 bp, Homo sapien
gggggccagggccgccaacgcagcg

SEQ ID NO: 898303 - DNA, 25 bp, Homo sapien
tccgccttggcggccgccgggacca

SEQ ID NO: 898304 - DNA, 25 bp, Homo sapien
gccgctgtccgccttggcggccgcc

SEQ ID NO: 898305 - DNA, 25 bp, Homo sapien
aacgcagcgcccccgcgcggtgccg

SEQ ID NO: 898306 - DNA, 25 bp, Homo sapien
agcacgcgtcgggccgttccctgcg

SEQ ID NO: 898307 - DNA, 25 bp, Homo sapien
cacgcgtcgggccgttccctgcgcc

SEQ ID NO: 898308 - DNA, 25 bp, Homo sapien
gcacgcgtcgggccgttccctgcgc

SEQ ID NO: 898309 - DNA, 25 bp, Homo sapien
gagcacgcgtcgggccgttccctgc

SEQ ID NO: 898310 - DNA, 25 bp, Homo sapien
ccatgctgctcggcggcgagggcag

SEQ ID NO: 898311 - DNA, 25 bp, Homo sapien
ggcctttgaatcagactcacccata

SEQ ID NO: 898312 - DNA, 25 bp, Homo sapien
tgcaccagatccaggcataacaggt

SEQ ID NO: 898313 - DNA, 25 bp, Homo sapien
gcacctcggatagcctgcaaatctg

SEQ ID NO: 898314 - DNA, 25 bp, Homo sapien
ctccagtaaggagggtggtacagat

SEQ ID NO: 898315 - DNA, 25 bp, Homo sapien
tttccgtagatggaaagatgcagca

SEQ ID NO: 898316 - DNA, 25 bp, Homo sapien
gcagatgcgtgatgctctggcttcc

SEQ ID NO: 898317 - DNA, 25 bp, Homo sapien
tccatggccacagatggcccggaac

SEQ ID NO: 898318 - DNA, 25 bp, Homo sapien
cggaacagtcactagctagtttgtc

SEQ ID NO: 898319 - DNA, 25 bp, Homo sapien
gagaggtcagctgttgcatactgtg

SEQ ID NO: 898320 - DNA, 25 bp, Homo sapien
ggcaaaaagaggcagaacggatgcc

SEQ ID NO: 898321 - DNA, 25 bp, Homo sapien
aaggctgatgccctgtcatggcaaa

SEQ ID NO: 898322 - DNA, 25 bp, Homo sapien
gccttgtgttgtggagactcgaaaa

SEQ ID NO: 898323 - DNA, 25 bp, Homo sapien
ctgcgcaggcccagtggggagggcg

SEQ ID NO: 898324 - DNA, 25 bp, Homo sapien
gcgggggtggcctggagcccttctc

SEQ ID NO: 898325 - DNA, 25 bp, Homo sapien
tgcgcaggcccagtggggagggcgg

SEQ ID NO: 898326 - DNA, 25 bp, Homo sapien
tggcctggagcccttctccttggca

SEQ ID NO: 898327 - DNA, 25 bp, Homo sapien
ggtcgcctggcgatcgcgtaggttc

SEQ ID NO: 898328 - DNA, 25 bp, Homo sapien
cctggcacctggatggatttgtgtg

SEQ ID NO: 898329 - DNA, 25 bp, Homo sapien
accctggcacctggatggatttgtg

SEQ ID NO: 898330 - DNA, 25 bp, Homo sapien
tgtgtgggtcgcctggcgatcgcgt

SEQ ID NO: 898331 - DNA, 25 bp, Homo sapien
tggtcccaaagtcatcttggaagca

SEQ ID NO: 898332 - DNA, 25 bp, Homo sapien
ctggtcccaaagtcatcttggaagc

SEQ ID NO: 898333 - DNA, 25 bp, Homo sapien
ttcacaattgcacttaagggagtag

SEQ ID NO: 898334 - DNA, 25 bp, Homo sapien
caattgcacttaagggagtagataa

SEQ ID NO: 898335 - DNA, 25 bp, Homo sapien
tgcacttaagggagtagataaaatt

SEQ ID NO: 898336 - DNA, 25 bp, Homo sapien
atgaattcacaattgcacttaaggg

SEQ ID NO: 898337 - DNA, 25 bp, Homo sapien
ttagtcctgaaagcgtcaacctctg

SEQ ID NO: 898338 - DNA, 25 bp, Homo sapien
tgctggccagaatgactggagccct

SEQ ID NO: 898339 - DNA, 25 bp, Homo sapien
cagacagtgaatgcctcggaaagct

SEQ ID NO: 898340 - DNA, 25 bp, Homo sapien
tcaccagttttgtcagcctcatccg

SEQ ID NO: 898341 - DNA, 25 bp, Homo sapien
agtcgttaccgcctccaagtcctgg

SEQ ID NO: 898342 - DNA, 25 bp, Homo sapien
gtggttttagggcccgcacctcaca

SEQ ID NO: 898343 - DNA, 25 bp, Homo sapien
tcacagtcgttaccgcctccaagtc

SEQ ID NO: 898344 - DNA, 25 bp, Homo sapien
ttagggcccgcacctcacagtcgtt

SEQ ID NO: 898345 - DNA, 25 bp, Homo sapien
aactgcagcccagctaattgctact

SEQ ID NO: 898346 - DNA, 25 bp, Homo sapien
aaatatataatgagccctgtaccgc

SEQ ID NO: 898347 - DNA, 25 bp, Homo sapien
cagccagtaatgtgctccaactgaa

SEQ ID NO: 898348 - DNA, 25 bp, Homo sapien
ttcaggatgctcattccagccagta

SEQ ID NO: 898349 - DNA, 25 bp, Homo sapien
tgtgtggagctggctttagtttcca

SEQ ID NO: 898350 - DNA, 25 bp, Homo sapien
gaattgagagtgttctccaagggcc

SEQ ID NO: 898351 - DNA, 25 bp, Homo sapien
gctccaatctcagacctgggggtca

SEQ ID NO: 898352 - DNA, 25 bp, Homo sapien
gaagctgccggaattgagagtgttc

SEQ ID NO: 898353 - DNA, 25 bp, Homo sapien
gccggaattgagagtgttctccaag

SEQ ID NO: 898354 - DNA, 25 bp, Homo sapien
aatgatggacgggtagagagacccc

SEQ ID NO: 898355 - DNA, 25 bp, Homo sapien
tgtcctggccataactgacagccag

SEQ ID NO: 898356 - DNA, 25 bp, Homo sapien
gtatccttaaccctcagcactgtgc

SEQ ID NO: 898357 - DNA, 25 bp, Homo sapien
tgaatgcacctcagcgttgcctggt

SEQ ID NO: 898358 - DNA, 25 bp, Homo sapien
aaaccatggaatagttggcagctgc

SEQ ID NO: 898359 - DNA, 25 bp, Homo sapien
ctttgtatgttggtgccagcctggg

SEQ ID NO: 898360 - DNA, 25 bp, Homo sapien
taacagcacatttttgaccactttg

SEQ ID NO: 898361 - DNA, 25 bp, Homo sapien
gccccttgaagggtaacagcacatt

SEQ ID NO: 898362 - DNA, 25 bp, Homo sapien
taaatgtgttaagtccagggctgtc

SEQ ID NO: 898363 - DNA, 25 bp, Homo sapien
cagcccctccgtgaccatctttggg

SEQ ID NO: 898364 - DNA, 25 bp, Homo sapien
caaattggggactctctcgccgaaa

SEQ ID NO: 898365 - DNA, 25 bp, Homo sapien
tggggactctctcgccgaaacctgt

SEQ ID NO: 898366 - DNA, 25 bp, Homo sapien
gggcgtgcatcagagaaagccacac

SEQ ID NO: 898367 - DNA, 25 bp, Homo sapien
tacagagatgaacgaggccaagtac

SEQ ID NO: 898368 - DNA, 25 bp, Homo sapien
caaagtccagcacacctctccttgg

SEQ ID NO: 898369 - DNA, 25 bp, Homo sapien
ctctccttggcgtaggggcgtgcat

SEQ ID NO: 898370 - DNA, 25 bp, Homo sapien
gcgattgtcagcactgttgcccggg

SEQ ID NO: 898371 - DNA, 25 bp, Homo sapien
caccctcgtgactgcctagagagag

SEQ ID NO: 898372 - DNA, 25 bp, Homo sapien
ctgaacattctggaagacgtgtgct

SEQ ID NO: 898373 - DNA, 25 bp, Homo sapien
tgcccactgtttggagactttccac

SEQ ID NO: 898374 - DNA, 25 bp, Homo sapien
gtagggcaaattgcattctaggtgg

SEQ ID NO: 898375 - DNA, 25 bp, Homo sapien
agggcaaattgcattctaggtggag

SEQ ID NO: 898376 - DNA, 25 bp, Homo sapien
gagtagggcaaattgcattctaggt

SEQ ID NO: 898377 - DNA, 25 bp, Homo sapien
tggagtagggcaaattgcattctag

SEQ ID NO: 898378 - DNA, 25 bp, Homo sapien
tccctgccgatgcattgactgggac

SEQ ID NO: 898379 - DNA, 25 bp, Homo sapien
cctgccgatgcattgactgggacat

SEQ ID NO: 898380 - DNA, 25 bp, Homo sapien
ccctgccgatgcattgactgggaca

SEQ ID NO: 898381 - DNA, 25 bp, Homo sapien
tgccgatgcattgactgggacatca

SEQ ID NO: 898382 - DNA, 25 bp, Homo sapien
tggcataagtgaagggccctgcagc

SEQ ID NO: 898383 - DNA, 25 bp, Homo sapien
aaatggcataagtgaagggccctgc

SEQ ID NO: 898384 - DNA, 25 bp, Homo sapien
atgagaaaaagttacacccatgacc

SEQ ID NO: 898385 - DNA, 25 bp, Homo sapien
gaatgagaaaaagttacacccatga

SEQ ID NO: 898386 - DNA, 25 bp, Homo sapien
tgaaaagagttgacgggctgttctc

SEQ ID NO: 898387 - DNA, 25 bp, Homo sapien
cttctcaagttgctccacaaagggc

SEQ ID NO: 898388 - DNA, 25 bp, Homo sapien
agtgacaaatactgccgctccctct

SEQ ID NO: 898389 - DNA, 25 bp, Homo sapien
tcgcctcggcagcagcattgacaag

SEQ ID NO: 898390 - DNA, 25 bp, Homo sapien
tgctttcgccaaatggaggtccact

SEQ ID NO: 898391 - DNA, 25 bp, Homo sapien
tttcgccaaatggaggtccactcat

SEQ ID NO: 898392 - DNA, 25 bp, Homo sapien
gctttcgccaaatggaggtccactc

SEQ ID NO: 898393 - DNA, 25 bp, Homo sapien
gctgctttcgccaaatggaggtcca

SEQ ID NO: 898394 - DNA, 25 bp, Homo sapien
ccagcattatttcttaaaaattcca

SEQ ID NO: 898395 - DNA, 25 bp, Homo sapien
cagcattatttcttaaaaattccat

SEQ ID NO: 898396 - DNA, 25 bp, Homo sapien
aggagtttcacatggtacaggcccc

SEQ ID NO: 898397 - DNA, 25 bp, Homo sapien
gacccctggttaagtgcagactcca

SEQ ID NO: 898398 - DNA, 25 bp, Homo sapien
caggttttgcagtcaatgtcgttac

SEQ ID NO: 898399 - DNA, 25 bp, Homo sapien
gttcctccggatcttactgctggca

SEQ ID NO: 898400 - DNA, 25 bp, Homo sapien
agccaggaaggtcactgcccacctt

SEQ ID NO: 898401 - DNA, 25 bp, Homo sapien
tgggatcctcccgaaaccacaggat

SEQ ID NO: 898402 - DNA, 25 bp, Homo sapien
cctgggaagcaccagaagccctttc

SEQ ID NO: 898403 - DNA, 25 bp, Homo sapien
accacaggatttttccaacgcaaag

SEQ ID NO: 898404 - DNA, 25 bp, Homo sapien
ccaggttgaccaaattttccctgct

SEQ ID NO: 898405 - DNA, 25 bp, Homo sapien
catggcgaaacataatggcaccgac

SEQ ID NO: 898406 - DNA, 25 bp, Homo sapien
gcgaaacataatggcaccgacactg

SEQ ID NO: 898407 - DNA, 25 bp, Homo sapien
aggtcagggcatggcgaaacataat

SEQ ID NO: 898408 - DNA, 25 bp, Homo sapien
ctctttatctgtgagaacagaaagc

SEQ ID NO: 898409 - DNA, 25 bp, Homo sapien
tctttatctgtgagaacagaaagcg

SEQ ID NO: 898410 - DNA, 25 bp, Homo sapien
ctttatctgtgagaacagaaagcgt

SEQ ID NO: 898411 - DNA, 25 bp, Homo sapien
ttatctgtgagaacagaaagcgtac

SEQ ID NO: 898412 - DNA, 25 bp, Homo sapien
gggtggaaaccagccagcgtgtctg

SEQ ID NO: 898413 - DNA, 25 bp, Homo sapien
ccattcattgaactaacttctggtc

SEQ ID NO: 898414 - DNA, 25 bp, Homo sapien
gtcagtgcgattctgagagtcctgc

SEQ ID NO: 898415 - DNA, 25 bp, Homo sapien
ttctggtctgggctggtcagtgcga

SEQ ID NO: 898416 - DNA, 25 bp, Homo sapien
tggagtggctgcgtcagcaggggga

SEQ ID NO: 898417 - DNA, 25 bp, Homo sapien
gagtggctgcgtcagcagggggagc

SEQ ID NO: 898418 - DNA, 25 bp, Homo sapien
gctggagtggctgcgtcagcagggg

SEQ ID NO: 898419 - DNA, 25 bp, Homo sapien
gcagggggagctgagagcagtaagt

SEQ ID NO: 898420 - DNA, 25 bp, Homo sapien
gaagcaagatcggagttcacatgga

SEQ ID NO: 898421 - DNA, 25 bp, Homo sapien
gggaagcaagatcggagttcacatg

SEQ ID NO: 898422 - DNA, 25 bp, Homo sapien
gcaagatcggagttcacatggagga

SEQ ID NO: 898423 - DNA, 25 bp, Homo sapien
ctgggaagcaagatcggagttcaca

SEQ ID NO: 898424 - DNA, 25 bp, Homo sapien
tgatccatgagcaaaacactgagcc

SEQ ID NO: 898425 - DNA, 25 bp, Homo sapien
ccactgctggagttaatgatccatg

SEQ ID NO: 898426 - DNA, 25 bp, Homo sapien
cacactggccgctggcggatggaca

SEQ ID NO: 898427 - DNA, 25 bp, Homo sapien
gccgctggcggatggacaccgccat

SEQ ID NO: 898428 - DNA, 25 bp, Homo sapien
tgtgcggtcgcccggggagcaccgg

SEQ ID NO: 898429 - DNA, 25 bp, Homo sapien
tctgtgcggtcgcccggggagcacc

SEQ ID NO: 898430 - DNA, 25 bp, Homo sapien
tgcggtcgcccggggagcaccgggc

SEQ ID NO: 898431 - DNA, 25 bp, Homo sapien
agatctgtgcggtcgcccggggagc

SEQ ID NO: 898432 - DNA, 25 bp, Homo sapien
cacgcggtgcatgcgaagtcagcag

SEQ ID NO: 898433 - DNA, 25 bp, Homo sapien
aataggcacaatgggccggaccagt

SEQ ID NO: 898434 - DNA, 25 bp, Homo sapien
cagtcaccctgagcattgtacggga

SEQ ID NO: 898435 - DNA, 25 bp, Homo sapien
taactgctcgtctgtgctgcaaccc

SEQ ID NO: 898436 - DNA, 25 bp, Homo sapien
tttagggctctagctgacaacccag

SEQ ID NO: 898437 - DNA, 25 bp, Homo sapien
tggccactgccccttaggacatagt

SEQ ID NO: 898438 - DNA, 25 bp, Homo sapien
tcagaatgtgaggagacccagggaa

SEQ ID NO: 898439 - DNA, 25 bp, Homo sapien
gacgatgtcaaagggcagaggttac

SEQ ID NO: 898440 - DNA, 25 bp, Homo sapien
tgtacagacactcagccaggaatcc

SEQ ID NO: 898441 - DNA, 25 bp, Homo sapien
tcttctatacataacatgaattctg

SEQ ID NO: 898442 - DNA, 25 bp, Homo sapien
tccacttctctaaaggagtccagtg

SEQ ID NO: 898443 - DNA, 25 bp, Homo sapien
gtgccttgctgcataacagtgtgtg

SEQ ID NO: 898444 - DNA, 25 bp, Homo sapien
taaaggtaggaatggcaggctcact

SEQ ID NO: 898445 - DNA, 25 bp, Homo sapien
tcagttgcaggcattagtttcaggg

SEQ ID NO: 898446 - DNA, 25 bp, Homo sapien
gttggcagggatgatacactgtacc

SEQ ID NO: 898447 - DNA, 25 bp, Homo sapien
gttgttccttcgactattctcagag

SEQ ID NO: 898448 - DNA, 25 bp, Homo sapien
tcaccgtgctcagagtacaaagccc

SEQ ID NO: 898449 - DNA, 25 bp, Homo sapien
ttttgccggctcaataaacatggct

SEQ ID NO: 898450 - DNA, 25 bp, Homo sapien
cagttttgccggctcaataaacatg

SEQ ID NO: 898451 - DNA, 25 bp, Homo sapien
aggctttgtagcctcaccgtgctca

SEQ ID NO: 898452 - DNA, 25 bp, Homo sapien
ggtctgagctctgcctatcctgaga

SEQ ID NO: 898453 - DNA, 25 bp, Homo sapien
cagaacttctgtcctgacttgacgc

SEQ ID NO: 898454 - DNA, 25 bp, Homo sapien
ttgacgcccactcggcatgaagaaa

SEQ ID NO: 898455 - DNA, 25 bp, Homo sapien
ctgatctttcaagtggtgcctcaga

SEQ ID NO: 898456 - DNA, 25 bp, Homo sapien
cgaggccctgaggccttcccctcca

SEQ ID NO: 898457 - DNA, 25 bp, Homo sapien
ctgaggccttcccctccacccatac

SEQ ID NO: 898458 - DNA, 25 bp, Homo sapien
agcgaggccctgaggccttcccctc

SEQ ID NO: 898459 - DNA, 25 bp, Homo sapien
ctagcgaggccctgaggccttcccc

SEQ ID NO: 898460 - DNA, 25 bp, Homo sapien
ggaaactaactgcacactgggcagc

SEQ ID NO: 898461 - DNA, 25 bp, Homo sapien
tagtggagccccaaatggaaccaac

SEQ ID NO: 898462 - DNA, 25 bp, Homo sapien
ggcatctcctacagaggaaactaac

SEQ ID NO: 898463 - DNA, 25 bp, Homo sapien
agcagcagtagtggagccccaaatg

SEQ ID NO: 898464 - DNA, 25 bp, Homo sapien
gaatttgccctgaggtatgacccag

SEQ ID NO: 898465 - DNA, 25 bp, Homo sapien
ctgcaggaccagtagaatttgccct

SEQ ID NO: 898466 - DNA, 25 bp, Homo sapien
ccagtagaatttgccctgaggtatg

SEQ ID NO: 898467 - DNA, 25 bp, Homo sapien
tgccctgaggtatgacccagccttt

SEQ ID NO: 898468 - DNA, 25 bp, Homo sapien
aagcattgtccccaagataagtgct

SEQ ID NO: 898469 - DNA, 25 bp, Homo sapien
ttcaaaagcattgtccccaagataa

SEQ ID NO: 898470 - DNA, 25 bp, Homo sapien
cattgtccccaagataagtgctgac

SEQ ID NO: 898471 - DNA, 25 bp, Homo sapien
caaaagcattgtccccaagataagt

SEQ ID NO: 898472 - DNA, 25 bp, Homo sapien
caagaaaggagggtggcccctctgc

SEQ ID NO: 898473 - DNA, 25 bp, Homo sapien
aagctttgttcattgcccctctcca

SEQ ID NO: 898474 - DNA, 25 bp, Homo sapien
tgtgtagaagatgaagctttgttca

SEQ ID NO: 898475 - DNA, 25 bp, Homo sapien
gaagctttgttcattgcccctctcc

SEQ ID NO: 898476 - DNA, 25 bp, Homo sapien
ctgtgtgtagaagatgaagctttgt

SEQ ID NO: 898477 - DNA, 25 bp, Homo sapien
tgtttactcacagcgctaaatgtgc

SEQ ID NO: 898478 - DNA, 25 bp, Homo sapien
caaaggagcaaacctgtatttgacc

SEQ ID NO: 898479 - DNA, 25 bp, Homo sapien
gtatttgacctatgcgaacacacag

SEQ ID NO: 898480 - DNA, 25 bp, Homo sapien
tttccctccttcgtaatgattagac

SEQ ID NO: 898481 - DNA, 25 bp, Homo sapien
ctaggagcacaatgcgtcgctggcg

SEQ ID NO: 898482 - DNA, 25 bp, Homo sapien
ctctgagcggagcaaaggtaataca

SEQ ID NO: 898483 - DNA, 25 bp, Homo sapien
cgctggcgttattagaggacatctc

SEQ ID NO: 898484 - DNA, 25 bp, Homo sapien
gaggacatctctctgagcggagcaa

SEQ ID NO: 898485 - DNA, 25 bp, Homo sapien
tacagcgatgcactctcagggactg

SEQ ID NO: 898486 - DNA, 25 bp, Homo sapien
aagcagctgagcagatctcgcctcg

SEQ ID NO: 898487 - DNA, 25 bp, Homo sapien
gtgagaccctggacctacagcgatg

SEQ ID NO: 898488 - DNA, 25 bp, Homo sapien
gaacgttctgcaaaattccgtgaga

SEQ ID NO: 898489 - DNA, 25 bp, Homo sapien
tggctcctcctctcgcacgccaggg

SEQ ID NO: 898490 - DNA, 25 bp, Homo sapien
tctggttcgttctccaccctcttga

SEQ ID NO: 898491 - DNA, 25 bp, Homo sapien
ttgagccttgatgccgccccctctt

SEQ ID NO: 898492 - DNA, 25 bp, Homo sapien
cctcccctcgcgctctctggttcgt

SEQ ID NO: 898493 - DNA, 25 bp, Homo sapien
gaactgctcggagaaccgatgaata

SEQ ID NO: 898494 - DNA, 25 bp, Homo sapien
tcagcaatgcagatgaactgctcgg

SEQ ID NO: 898495 - DNA, 25 bp, Homo sapien
gcaatgcagatgaactgctcggaga

SEQ ID NO: 898496 - DNA, 25 bp, Homo sapien
cagatgaactgctcggagaaccgat

SEQ ID NO: 898497 - DNA, 25 bp, Homo sapien
gcagcagcctccagtttgccaagtt

SEQ ID NO: 898498 - DNA, 25 bp, Homo sapien
ccttggctacaggtaatgttgatgc

SEQ ID NO: 898499 - DNA, 25 bp, Homo sapien
caatttcaggtagagatttagtgcc

SEQ ID NO: 898500 - DNA, 25 bp, Homo sapien
gttgatgcataagtttgccaaaccc

SEQ ID NO: 898501 - DNA, 25 bp, Homo sapien
tactgttggaatactgggaatcctg

SEQ ID NO: 898502 - DNA, 25 bp, Homo sapien
ccctccttggccttactgttggaat

SEQ ID NO: 898503 - DNA, 25 bp, Homo sapien
ggccttactgttggaatactgggaa

SEQ ID NO: 898504 - DNA, 25 bp, Homo sapien
atactgggaatcctgtgactgtacc

SEQ ID NO: 898505 - DNA, 25 bp, Homo sapien
cctggaccaccaccccacactttca

SEQ ID NO: 898506 - DNA, 25 bp, Homo sapien
cccctcagtcggctcctggcctctc

SEQ ID NO: 898507 - DNA, 25 bp, Homo sapien
cctcatcatgcacctggacttctgc

SEQ ID NO: 898508 - DNA, 25 bp, Homo sapien
tccagggtgacctggaccaccaccc

SEQ ID NO: 898509 - DNA, 25 bp, Homo sapien
catgctttgtaaagttgtgcttcat

SEQ ID NO: 898510 - DNA, 25 bp, Homo sapien
agttaaatccagtatcttgggtctt

SEQ ID NO: 898511 - DNA, 25 bp, Homo sapien
cagtatcttgggtcttttcatgctt

SEQ ID NO: 898512 - DNA, 25 bp, Homo sapien
aatccagtatcttgggtcttttcat

SEQ ID NO: 898513 - DNA, 25 bp, Homo sapien
gattctgtcaggctcattcaaggac

SEQ ID NO: 898514 - DNA, 25 bp, Homo sapien
ctcctatatagtcatcttgtgaaaa

SEQ ID NO: 898515 - DNA, 25 bp, Homo sapien
ttagaggattctgtcaggctcattc

SEQ ID NO: 898516 - DNA, 25 bp, Homo sapien
ggacagcaaaaatgcatcgccacat

SEQ ID NO: 898517 - DNA, 25 bp, Homo sapien
aattctgtaagctgtggaggaacac

SEQ ID NO: 898518 - DNA, 25 bp, Homo sapien
ggtcgttgctgccactagggtatat

SEQ ID NO: 898519 - DNA, 25 bp, Homo sapien
ccagtgtttccccagcatgtttata

SEQ ID NO: 898520 - DNA, 25 bp, Homo sapien
caggttagctcatctactgttacga

SEQ ID NO: 898521 - DNA, 25 bp, Homo sapien
cttgtccttcttggtttgcattggc

SEQ ID NO: 898522 - DNA, 25 bp, Homo sapien
tttgcattggccgtggctctgttcc

SEQ ID NO: 898523 - DNA, 25 bp, Homo sapien
cgtggctctgttccagaagtgattt

SEQ ID NO: 898524 - DNA, 25 bp, Homo sapien
tcttggtttgcattggccgtggctc

SEQ ID NO: 898525 - DNA, 25 bp, Homo sapien
aacacagagcatccgagtgggaagc

SEQ ID NO: 898526 - DNA, 25 bp, Homo sapien
cagatctccggaccaggtggaaggc

SEQ ID NO: 898527 - DNA, 25 bp, Homo sapien
caggattccgtggacattggcagca

SEQ ID NO: 898528 - DNA, 25 bp, Homo sapien
tccttggctccagtagcctggttgg

SEQ ID NO: 898529 - DNA, 25 bp, Homo sapien
gaagaactgatgaggaatgccaagg

SEQ ID NO: 898530 - DNA, 25 bp, Homo sapien
gagttcccgagagggagagtgtgca

SEQ ID NO: 898531 - DNA, 25 bp, Homo sapien
actgatgaggaatgccaaggtggaa

SEQ ID NO: 898532 - DNA, 25 bp, Homo sapien
cagagagcagagttcccgagaggga

SEQ ID NO: 898533 - DNA, 25 bp, Homo sapien
gggaggaatgaaggcgggatgaggt

SEQ ID NO: 898534 - DNA, 25 bp, Homo sapien
gcagctagatgaggagagaacagcc

SEQ ID NO: 898535 - DNA, 25 bp, Homo sapien
gcgggatgaggtatggccagagagc

SEQ ID NO: 898536 - DNA, 25 bp, Homo sapien
cttcatgccagccttgggaggtccc

SEQ ID NO: 898537 - DNA, 25 bp, Homo sapien
ccagccagtccaagcaggaggcaca

SEQ ID NO: 898538 - DNA, 25 bp, Homo sapien
gctcttttgctttccgggaaatcca

SEQ ID NO: 898539 - DNA, 25 bp, Homo sapien
actggaatctgggagctcttttgct

SEQ ID NO: 898540 - DNA, 25 bp, Homo sapien
cagtccaagcaggaggcacacattt

SEQ ID NO: 898541 - DNA, 25 bp, Homo sapien
tagtattgcatcaccattaggttcc

SEQ ID NO: 898542 - DNA, 25 bp, Homo sapien
caaccaacacgccaaatctgagagg

SEQ ID NO: 898543 - DNA, 25 bp, Homo sapien
gatgacctgagttaacatcacctgt

SEQ ID NO: 898544 - DNA, 25 bp, Homo sapien
actaaatacgctgttgggaccctgg

SEQ ID NO: 898545 - DNA, 25 bp, Homo sapien
cacggtaaacttttgctgccagagc

SEQ ID NO: 898546 - DNA, 25 bp, Homo sapien
gcctccacacggtaaacttttgctg

SEQ ID NO: 898547 - DNA, 25 bp, Homo sapien
gagcaactcacaaccaggactgtag

SEQ ID NO: 898548 - DNA, 25 bp, Homo sapien
tttctcatcctgttcgctagccggg

SEQ ID NO: 898549 - DNA, 25 bp, Homo sapien
tctttatgcaaggtctttaggacgg

SEQ ID NO: 898550 - DNA, 25 bp, Homo sapien
tcgatcaggtgacctcaattccagg

SEQ ID NO: 898551 - DNA, 25 bp, Homo sapien
gggtcctttcctgcgtgcagctacc

SEQ ID NO: 898552 - DNA, 25 bp, Homo sapien
cagccctagaacctgctcgatcagg

SEQ ID NO: 898553 - DNA, 25 bp, Homo sapien
ccagtggctttgacagttgtctcca

SEQ ID NO: 898554 - DNA, 25 bp, Homo sapien
aggcccagtggctttgacagttgtc

SEQ ID NO: 898555 - DNA, 25 bp, Homo sapien
ctgtggatgcaattcaggcccagtg

SEQ ID NO: 898556 - DNA, 25 bp, Homo sapien
tggatgcaattcaggcccagtggct

SEQ ID NO: 898557 - DNA, 25 bp, Homo sapien
tgtgatagataggaggatattcgtg

SEQ ID NO: 898558 - DNA, 25 bp, Homo sapien
tgattaagtcctcctcaaccaccta

SEQ ID NO: 898559 - DNA, 25 bp, Homo sapien
gtgccaggcattagggaggttcctt

SEQ ID NO: 898560 - DNA, 25 bp, Homo sapien
actagggctgttattaaggatgaaa

SEQ ID NO: 898561 - DNA, 25 bp, Homo sapien
cctgcaaatggtgattatactctga

SEQ ID NO: 898562 - DNA, 25 bp, Homo sapien
caaatcctgcaaatggtgattatac

SEQ ID NO: 898563 - DNA, 25 bp, Homo sapien
gcaaatggtgattatactctgagag

SEQ ID NO: 898564 - DNA, 25 bp, Homo sapien
atcctgcaaatggtgattatactct

SEQ ID NO: 898565 - DNA, 25 bp, Homo sapien
cataagtgtctctatagttgagggt

SEQ ID NO: 898566 - DNA, 25 bp, Homo sapien
gggtgaatcctgactctagcatcct

SEQ ID NO: 898567 - DNA, 25 bp, Homo sapien
aacgcagtgggaactcaaagtgcca

SEQ ID NO: 898568 - DNA, 25 bp, Homo sapien
tagcacccaggagtgcctcgtgcat

SEQ ID NO: 898569 - DNA, 25 bp, Homo sapien
ctattccgtagaacctgtgcgggtt

SEQ ID NO: 898570 - DNA, 25 bp, Homo sapien
tattccgtagaacctgtgcgggttg

SEQ ID NO: 898571 - DNA, 25 bp, Homo sapien
gctgtagcctcagttcaggcacctg

SEQ ID NO: 898572 - DNA, 25 bp, Homo sapien
gcacctgcactggaaaccagctagt

SEQ ID NO: 898573 - DNA, 25 bp, Homo sapien
ctctgtgatcgccttttttcccagc

SEQ ID NO: 898574 - DNA, 25 bp, Homo sapien
ttggagcctctatagacctcctctg

SEQ ID NO: 898575 - DNA, 25 bp, Homo sapien
ttctttgcccagtgtcttaaggtgg

SEQ ID NO: 898576 - DNA, 25 bp, Homo sapien
gctaaacttctcaaagaacatttgg

SEQ ID NO: 898577 - DNA, 25 bp, Homo sapien
ctaaacttctcaaagaacatttggt

SEQ ID NO: 898578 - DNA, 25 bp, Homo sapien
ggtttagtttgatcttctttgccca

SEQ ID NO: 898579 - DNA, 25 bp, Homo sapien
tttctgaccaccaggctatgacgtt

SEQ ID NO: 898580 - DNA, 25 bp, Homo sapien
ttaactgtgatcaggcactctgctc

SEQ ID NO: 898581 - DNA, 25 bp, Homo sapien
attgggctggctgtccgctgctgac

SEQ ID NO: 898582 - DNA, 25 bp, Homo sapien
tctggatgccacagacctgagcagc

SEQ ID NO: 898583 - DNA, 25 bp, Homo sapien
tcatctaaaggtgaaacctccccta

SEQ ID NO: 898584 - DNA, 25 bp, Homo sapien
cagggagcacatcgtttctggtgcc

SEQ ID NO: 898585 - DNA, 25 bp, Homo sapien
agccggatgtcccaaatccctttag

SEQ ID NO: 898586 - DNA, 25 bp, Homo sapien
ttctggtgcctcatctaaaggtgaa

SEQ ID NO: 898587 - DNA, 25 bp, Homo sapien
ctgcctcccttggattgtttctgtg

SEQ ID NO: 898588 - DNA, 25 bp, Homo sapien
ttggattgtttctgtgccttccccg

SEQ ID NO: 898589 - DNA, 25 bp, Homo sapien
cctcccttggattgtttctgtgcct

SEQ ID NO: 898590 - DNA, 25 bp, Homo sapien
gattgtttctgtgccttccccggag

SEQ ID NO: 898591 - DNA, 25 bp, Homo sapien
catcttccaagattgtctgagaagg

SEQ ID NO: 898592 - DNA, 25 bp, Homo sapien
agctccacccacaaatgcggcattt

SEQ ID NO: 898593 - DNA, 25 bp, Homo sapien
cgaaggactttgttggagaagccaa

SEQ ID NO: 898594 - DNA, 25 bp, Homo sapien
caaatgcggcatttctgagtccacc

SEQ ID NO: 898595 - DNA, 25 bp, Homo sapien
aggcccagcctctccaaggagtgtc

SEQ ID NO: 898596 - DNA, 25 bp, Homo sapien
gccactgggtgaattcctgtgggga

SEQ ID NO: 898597 - DNA, 25 bp, Homo sapien
tctccaaggagtgtccgcagagcag

SEQ ID NO: 898598 - DNA, 25 bp, Homo sapien
cagcctctccaaggagtgtccgcag

SEQ ID NO: 898599 - DNA, 25 bp, Homo sapien
gacacattgtgagtggtgttgtgag

SEQ ID NO: 898600 - DNA, 25 bp, Homo sapien
cagacacattgtgagtggtgttgtg

SEQ ID NO: 898601 - DNA, 25 bp, Homo sapien
acacattgtgagtggtgttgtgagg

SEQ ID NO: 898602 - DNA, 25 bp, Homo sapien
agacacattgtgagtggtgttgtga

SEQ ID NO: 898603 - DNA, 25 bp, Homo sapien
ttcattaatgggcttaagcagcctg

SEQ ID NO: 898604 - DNA, 25 bp, Homo sapien
agcctgaggcctgttggattttcgg

SEQ ID NO: 898605 - DNA, 25 bp, Homo sapien
tcttgggcttgattcctacttctcc

SEQ ID NO: 898606 - DNA, 25 bp, Homo sapien
caaggctgcattagcagttcagtgc

SEQ ID NO: 898607 - DNA, 25 bp, Homo sapien
ccaggcagacgatgatactaggaag

SEQ ID NO: 898608 - DNA, 25 bp, Homo sapien
ctgcatcctggaaaagcactttggt

SEQ ID NO: 898609 - DNA, 25 bp, Homo sapien
tgaccacagtgagtgccccgtgtga

SEQ ID NO: 898610 - DNA, 25 bp, Homo sapien
tggtttggcctcgagtcactgtcct

SEQ ID NO: 898611 - DNA, 25 bp, Homo sapien
ctttttgtgcgttaatcacctgttg

SEQ ID NO: 898612 - DNA, 25 bp, Homo sapien
ggtatacggtctccagtgcagcgct

SEQ ID NO: 898613 - DNA, 25 bp, Homo sapien
tccctggtctgggtatacggtctcc

SEQ ID NO: 898614 - DNA, 25 bp, Homo sapien
ctgttgggcacccaccaggataggc

SEQ ID NO: 898615 - DNA, 25 bp, Homo sapien
gatggctctcgttgccggcatatta

SEQ ID NO: 898616 - DNA, 25 bp, Homo sapien
caagagcttaggacgagatatggag

SEQ ID NO: 898617 - DNA, 25 bp, Homo sapien
ggcatattattgtgcggtccttcgg

SEQ ID NO: 898618 - DNA, 25 bp, Homo sapien
cagaaaaacgtttgcagcggagata

SEQ ID NO: 898619 - DNA, 25 bp, Homo sapien
caggttggtcacactagtctcagag

SEQ ID NO: 898620 - DNA, 25 bp, Homo sapien
gttggtcacactagtctcagagaaa

SEQ ID NO: 898621 - DNA, 25 bp, Homo sapien
ggttggtcacactagtctcagagaa

SEQ ID NO: 898622 - DNA, 25 bp, Homo sapien
tggtcacactagtctcagagaaagg

SEQ ID NO: 898623 - DNA, 25 bp, Homo sapien
tggtaatgtggaaaacttgggtctg

SEQ ID NO: 898624 - DNA, 25 bp, Homo sapien
agagatggttcaccgactccctcct

SEQ ID NO: 898625 - DNA, 25 bp, Homo sapien
ctgggcttggtaatgtggaaaactt

SEQ ID NO: 898626 - DNA, 25 bp, Homo sapien
aggaaaagagatggttcaccgactc

SEQ ID NO: 898627 - DNA, 25 bp, Homo sapien
ggaacacaaggactaggccgtcgat

SEQ ID NO: 898628 - DNA, 25 bp, Homo sapien
tatccagcaaggagaatttttcccg

SEQ ID NO: 898629 - DNA, 25 bp, Homo sapien
aggccgtcgataccaccagacttgc

SEQ ID NO: 898630 - DNA, 25 bp, Homo sapien
ctgttctatgcatgaagggttccta

SEQ ID NO: 898631 - DNA, 25 bp, Homo sapien
aagaatcacccgtgggacttcctga

SEQ ID NO: 898632 - DNA, 25 bp, Homo sapien
agaatcacccgtgggacttcctgac

SEQ ID NO: 898633 - DNA, 25 bp, Homo sapien
cagctctaggaatttctctgaagtt

SEQ ID NO: 898634 - DNA, 25 bp, Homo sapien
gaactggtaagcaactgcagctcta

SEQ ID NO: 898635 - DNA, 25 bp, Homo sapien
caactgcagctctaggaatttctct

SEQ ID NO: 898636 - DNA, 25 bp, Homo sapien
cagaactggtaagcaactgcagctc

SEQ ID NO: 898637 - DNA, 25 bp, Homo sapien
catgcatacatagccacacacttca

SEQ ID NO: 898638 - DNA, 25 bp, Homo sapien
agttacatgcatacatagccacaca

SEQ ID NO: 898639 - DNA, 25 bp, Homo sapien
aagttacatgcatacatagccacac

SEQ ID NO: 898640 - DNA, 25 bp, Homo sapien
gaaattccagcagcaatcttgagtg

SEQ ID NO: 898641 - DNA, 25 bp, Homo sapien
gaacctttgggcaccagctagagta

SEQ ID NO: 898642 - DNA, 25 bp, Homo sapien
tatttaggcagaagcactaggccag

SEQ ID NO: 898643 - DNA, 25 bp, Homo sapien
gaactgctgcaaatgatccgaccaa

SEQ ID NO: 898644 - DNA, 25 bp, Homo sapien
tgccaatccttttaagcgatccaca

SEQ ID NO: 898645 - DNA, 25 bp, Homo sapien
tgagggaccctcatgttttcggtaa

SEQ ID NO: 898646 - DNA, 25 bp, Homo sapien
ccatatatcggccatggtcctgcag

SEQ ID NO: 898647 - DNA, 25 bp, Homo sapien
tatataagatctttcagttccctgt

SEQ ID NO: 898648 - DNA, 25 bp, Homo sapien
ccatccaagtatacctggtctttac

SEQ ID NO: 898649 - DNA, 25 bp, Homo sapien
aagtctatggtatctctgtatcgga

SEQ ID NO: 898650 - DNA, 25 bp, Homo sapien
tggaagtctatggtatctctgtatc

SEQ ID NO: 898651 - DNA, 25 bp, Homo sapien
ctgtatcggaggatttgaagaattc

SEQ ID NO: 898652 - DNA, 25 bp, Homo sapien
gggtccttgacaaacctgccaatat

SEQ ID NO: 898653 - DNA, 25 bp, Homo sapien
gaacactgtgaatgcttgctagtcc

SEQ ID NO: 898654 - DNA, 25 bp, Homo sapien
agtccaactgttccatggctgctgg

SEQ ID NO: 898655 - DNA, 25 bp, Homo sapien
gaagtatcagtccatcccctcttgg

SEQ ID NO: 898656 - DNA, 25 bp, Homo sapien
tttcatgcctcagcattccctccag

SEQ ID NO: 898657 - DNA, 25 bp, Homo sapien
agcattccctccagccaatgctcac

SEQ ID NO: 898658 - DNA, 25 bp, Homo sapien
tgcctcagcattccctccagccaat

SEQ ID NO: 898659 - DNA, 25 bp, Homo sapien
ctatttcatgcctcagcattccctc

SEQ ID NO: 898660 - DNA, 25 bp, Homo sapien
tttactactgtcattgacgctcggg

SEQ ID NO: 898661 - DNA, 25 bp, Homo sapien
attgacgctcgggaaagcaggtcct

SEQ ID NO: 898662 - DNA, 25 bp, Homo sapien
tgcagtggacacattgatagtcaga

SEQ ID NO: 898663 - DNA, 25 bp, Homo sapien
gagtcggacatccatttactactgt

SEQ ID NO: 898664 - DNA, 25 bp, Homo sapien
tgatgcagaagaagatacaggtgcc

SEQ ID NO: 898665 - DNA, 25 bp, Homo sapien
ccaaggctttgagactgaccactaa

SEQ ID NO: 898666 - DNA, 25 bp, Homo sapien
actaataagagaggcttctcgggca

SEQ ID NO: 898667 - DNA, 25 bp, Homo sapien
ctctgaggtgtcgtaaatacgctcc

SEQ ID NO: 898668 - DNA, 25 bp, Homo sapien
tagagagcaagctaccaccagtggc

SEQ ID NO: 898669 - DNA, 25 bp, Homo sapien
tccagattcgagttttagagagcaa

SEQ ID NO: 898670 - DNA, 25 bp, Homo sapien
ccatatttctgtaaagtcagttcca

SEQ ID NO: 898671 - DNA, 25 bp, Homo sapien
acttcctaacgtgactccagattcg

SEQ ID NO: 898672 - DNA, 25 bp, Homo sapien
aacagcctcatattactttgagatg

SEQ ID NO: 898673 - DNA, 25 bp, Homo sapien
tactttgagatgtcataagctagct

SEQ ID NO: 898674 - DNA, 25 bp, Homo sapien
catattactttgagatgtcataagc

SEQ ID NO: 898675 - DNA, 25 bp, Homo sapien
gagatgtcataagctagctatgtta

SEQ ID NO: 898676 - DNA, 25 bp, Homo sapien
agaaaagggaaaagagtagagcaag

SEQ ID NO: 898677 - DNA, 25 bp, Homo sapien
aggagtttgacctgtaactgatgtg

SEQ ID NO: 898678 - DNA, 25 bp, Homo sapien
agtttgacctgtaactgatgtgaac

SEQ ID NO: 898679 - DNA, 25 bp, Homo sapien
ttgacctgtaactgatgtgaacaat

SEQ ID NO: 898680 - DNA, 25 bp, Homo sapien
tacccctcttgtattctcggctgaa

SEQ ID NO: 898681 - DNA, 25 bp, Homo sapien
tatacccctcttgtattctcggctg

SEQ ID NO: 898682 - DNA, 25 bp, Homo sapien
cctcttgtattctcggctgaatttc

SEQ ID NO: 898683 - DNA, 25 bp, Homo sapien
tgtattctcggctgaatttctgtgt

SEQ ID NO: 898684 - DNA, 25 bp, Homo sapien
gaaccagggattgcatgctccatct

SEQ ID NO: 898685 - DNA, 25 bp, Homo sapien
cacaggcgagagaaccatgcagttt

SEQ ID NO: 898686 - DNA, 25 bp, Homo sapien
ttaccggagcctaagcaagccagga

SEQ ID NO: 898687 - DNA, 25 bp, Homo sapien
aaaataggacatgcaccacaggcga

SEQ ID NO: 898688 - DNA, 25 bp, Homo sapien
tgtttttgcttataagatcacagat

SEQ ID NO: 898689 - DNA, 25 bp, Homo sapien
tcttgtcgcacatttacatgtcctg

SEQ ID NO: 898690 - DNA, 25 bp, Homo sapien
aatgcaatggagtttatatacaggt

SEQ ID NO: 898691 - DNA, 25 bp, Homo sapien
gagtgggaattaaccataacataga

SEQ ID NO: 898692 - DNA, 25 bp, Homo sapien
cttggcagagcaggattggcatact

SEQ ID NO: 898693 - DNA, 25 bp, Homo sapien
ttaagaaatcggtcagatgcgtggc

SEQ ID NO: 898694 - DNA, 25 bp, Homo sapien
tcaaagcttctagacagctgaggct

SEQ ID NO: 898695 - DNA, 25 bp, Homo sapien
tatgcttagctaatacgcttggcag

SEQ ID NO: 898696 - DNA, 25 bp, Homo sapien
cgaggatctttgctacgagaagtgt

SEQ ID NO: 898697 - DNA, 25 bp, Homo sapien
ctagtgacaaaaacagcaggccgcc

SEQ ID NO: 898698 - DNA, 25 bp, Homo sapien
tacaggacttgacactgaactagtg

SEQ ID NO: 898699 - DNA, 25 bp, Homo sapien
aaatgtcttttagcactcccgagga

SEQ ID NO: 898700 - DNA, 25 bp, Homo sapien
tgtatctcttcttcgaagtacttta

SEQ ID NO: 898701 - DNA, 25 bp, Homo sapien
tatctcttcttcgaagtactttatc

SEQ ID NO: 898702 - DNA, 25 bp, Homo sapien
tctcttcttcgaagtactttatcat

SEQ ID NO: 898703 - DNA, 25 bp, Homo sapien
cttgtatctcttcttcgaagtactt

SEQ ID NO: 898704 - DNA, 25 bp, Homo sapien
ggcacagggctctagaattatttca

SEQ ID NO: 898705 - DNA, 25 bp, Homo sapien
caatgaatcgtgagggaatgaccag

SEQ ID NO: 898706 - DNA, 25 bp, Homo sapien
ccgcctgggcgctcaagtgatactc

SEQ ID NO: 898707 - DNA, 25 bp, Homo sapien
cactgccaaattgtctacctcaggg

SEQ ID NO: 898708 - DNA, 25 bp, Homo sapien
tggattgtacctttgtaagaccagc

SEQ ID NO: 898709 - DNA, 25 bp, Homo sapien
gaagcttaatcacacacctagcgtg

SEQ ID NO: 898710 - DNA, 25 bp, Homo sapien
tataatccgtactgtaaaatggcct

SEQ ID NO: 898711 - DNA, 25 bp, Homo sapien
tcttttccacgagattccacagcag

SEQ ID NO: 898712 - DNA, 25 bp, Homo sapien
gataataagtgacgaaaggataagg

SEQ ID NO: 898713 - DNA, 25 bp, Homo sapien
gggtggagtcccgagcggcgcgccc

SEQ ID NO: 898714 - DNA, 25 bp, Homo sapien
aggtttttcgcgagcgcctcctgcg

SEQ ID NO: 898715 - DNA, 25 bp, Homo sapien
gataaggggccgatttctctcttcc

SEQ ID NO: 898716 - DNA, 25 bp, Homo sapien
gcacccccgccgcggccagcccttc

SEQ ID NO: 898717 - DNA, 25 bp, Homo sapien
cgcggccagcccttcccggcactca

SEQ ID NO: 898718 - DNA, 25 bp, Homo sapien
gccccgcacccccgccgcggccagc

SEQ ID NO: 898719 - DNA, 25 bp, Homo sapien
ccgccgcggccagcccttcccggca

SEQ ID NO: 898720 - DNA, 25 bp, Homo sapien
ggcctctagcctctgacccgggcct

SEQ ID NO: 898721 - DNA, 25 bp, Homo sapien
gggcgggcggcctctagcctctgac

SEQ ID NO: 898722 - DNA, 25 bp, Homo sapien
tccgctacctggagcaggataagga

SEQ ID NO: 898723 - DNA, 25 bp, Homo sapien
ggcggctctccgctacctggagcag

SEQ ID NO: 898724 - DNA, 25 bp, Homo sapien
cgacactgactgtgagcagcgcttc

SEQ ID NO: 898725 - DNA, 25 bp, Homo sapien
actgactgtgagcagcgcttccacc

SEQ ID NO: 898726 - DNA, 25 bp, Homo sapien
acactgactgtgagcagcgcttcca

SEQ ID NO: 898727 - DNA, 25 bp, Homo sapien
tgactgtgagcagcgcttccaccag

SEQ ID NO: 898728 - DNA, 25 bp, Homo sapien
gcccagcagcgcttagaacctgcca

SEQ ID NO: 898729 - DNA, 25 bp, Homo sapien
gtacacacggcggccttacggtgcc

SEQ ID NO: 898730 - DNA, 25 bp, Homo sapien
gtgcccagcagcgcttagaacctgc

SEQ ID NO: 898731 - DNA, 25 bp, Homo sapien
acggcggccttacggtgcccagcag

SEQ ID NO: 898732 - DNA, 25 bp, Homo sapien
tcctcaaggctaagacatggaaata

SEQ ID NO: 898733 - DNA, 25 bp, Homo sapien
tggcaactgtcagtcttcagacagt

SEQ ID NO: 898734 - DNA, 25 bp, Homo sapien
gagctgagatagtgctggcaactgt

SEQ ID NO: 898735 - DNA, 25 bp, Homo sapien
ttctcttcatcctcaaggctaagac

SEQ ID NO: 898736 - DNA, 25 bp, Homo sapien
aggtagagaacttgagtttagctct

SEQ ID NO: 898737 - DNA, 25 bp, Homo sapien
ctgaggtagagaacttgagtttagc

SEQ ID NO: 898738 - DNA, 25 bp, Homo sapien
gaggtagagaacttgagtttagctc

SEQ ID NO: 898739 - DNA, 25 bp, Homo sapien
tgaggtagagaacttgagtttagct

SEQ ID NO: 898740 - DNA, 25 bp, Homo sapien
gttgtgggagagttcccccgcctca

SEQ ID NO: 898741 - DNA, 25 bp, Homo sapien
tgtgggagagttcccccgcctcaga

SEQ ID NO: 898742 - DNA, 25 bp, Homo sapien
ttgtgggagagttcccccgcctcag

SEQ ID NO: 898743 - DNA, 25 bp, Homo sapien
tcctgaatttgaaccaccgtttcca

SEQ ID NO: 898744 - DNA, 25 bp, Homo sapien
accgtttccatcgtctcgtagtccg

SEQ ID NO: 898745 - DNA, 25 bp, Homo sapien
cctgaatttgaaccaccgtttccat

SEQ ID NO: 898746 - DNA, 25 bp, Homo sapien
tttccatcgtctcgtagtccgacgc

SEQ ID NO: 898747 - DNA, 25 bp, Homo sapien
ctggggcgatggatccgtttacgga

SEQ ID NO: 898748 - DNA, 25 bp, Homo sapien
gtgagtgagtttgcgggtgcagcca

SEQ ID NO: 898749 - DNA, 25 bp, Homo sapien
aggtgagtgagtttgcgggtgcagc

SEQ ID NO: 898750 - DNA, 25 bp, Homo sapien
atccgtttacggaggtgagtgagtt

SEQ ID NO: 898751 - DNA, 25 bp, Homo sapien
gcaggcctgcggaacgggtcctgct

SEQ ID NO: 898752 - DNA, 25 bp, Homo sapien
ggtatgtgtagctttagattgtccc

SEQ ID NO: 898753 - DNA, 25 bp, Homo sapien
acttgccttttttgggtcagtatgg

SEQ ID NO: 898754 - DNA, 25 bp, Homo sapien
aaacaatatatgttgctgcaattgc

SEQ ID NO: 898755 - DNA, 25 bp, Homo sapien
ttatacgtgccaattaattatctcc

SEQ ID NO: 898756 - DNA, 25 bp, Homo sapien
taagtcacctatcacctttaaacgc

SEQ ID NO: 898757 - DNA, 25 bp, Homo sapien
agtaaactgttatgaagctgctatg

SEQ ID NO: 898758 - DNA, 25 bp, Homo sapien
tataaaatattgtaaagcagggtct

SEQ ID NO: 898759 - DNA, 25 bp, Homo sapien
tctactcctacaagtgtaaattgaa

SEQ ID NO: 898760 - DNA, 25 bp, Homo sapien
catgtttagctcaccgttctctcct

SEQ ID NO: 898761 - DNA, 25 bp, Homo sapien
tccttgagaaggagaaccactggag

SEQ ID NO: 898762 - DNA, 25 bp, Homo sapien
tattgagtagcgatggtgcccttcc

SEQ ID NO: 898763 - DNA, 25 bp, Homo sapien
cctgcaggcagcgaggtgttcgctt

SEQ ID NO: 898764 - DNA, 25 bp, Homo sapien
tgcttattatgggttggccaccaga

SEQ ID NO: 898765 - DNA, 25 bp, Homo sapien
cactttgagggaatccgggagaaca

SEQ ID NO: 898766 - DNA, 25 bp, Homo sapien
tgtagaaatccgagccaactggcac

SEQ ID NO: 898767 - DNA, 25 bp, Homo sapien
tgacagagaggccaaaagtggcacc

SEQ ID NO: 898768 - DNA, 25 bp, Homo sapien
ttccaaaatcctgtttttgatgcct

SEQ ID NO: 898769 - DNA, 25 bp, Homo sapien
cctgtttttgatgccttttcttccg

SEQ ID NO: 898770 - DNA, 25 bp, Homo sapien
cttccaaaatcctgtttttgatgcc

SEQ ID NO: 898771 - DNA, 25 bp, Homo sapien
ttgatgccttttcttccgttttcat

SEQ ID NO: 898772 - DNA, 25 bp, Homo sapien
aaaagcatggacgagagctcttttt

SEQ ID NO: 898773 - DNA, 25 bp, Homo sapien
aagcatggacgagagctctttttat

SEQ ID NO: 898774 - DNA, 25 bp, Homo sapien
agcatggacgagagctctttttata

SEQ ID NO: 898775 - DNA, 25 bp, Homo sapien
aaagcatggacgagagctcttttta

SEQ ID NO: 898776 - DNA, 25 bp, Homo sapien
ccccagatgagattggttggcaaag

SEQ ID NO: 898777 - DNA, 25 bp, Homo sapien
taatgtatacttgtggcgcctttgc

SEQ ID NO: 898778 - DNA, 25 bp, Homo sapien
gtgcccatgcacagaccaatgacaa

SEQ ID NO: 898779 - DNA, 25 bp, Homo sapien
gatatagttgatcggcatcgttcac

SEQ ID NO: 898780 - DNA, 25 bp, Homo sapien
ccagggcctgaacccaaaaggctca

SEQ ID NO: 898781 - DNA, 25 bp, Homo sapien
tttcaatagtgtagggcaagccagg

SEQ ID NO: 898782 - DNA, 25 bp, Homo sapien
tactcatgtggcaaatagtgagctc

SEQ ID NO: 898783 - DNA, 25 bp, Homo sapien
gattcaggtccggtcacattgtgta

SEQ ID NO: 898784 - DNA, 25 bp, Homo sapien
tggacacaggagtacacatgaccgg

SEQ ID NO: 898785 - DNA, 25 bp, Homo sapien
gtacgcaaagcacagggacggcatt

SEQ ID NO: 898786 - DNA, 25 bp, Homo sapien
cgaggagcgtgattcaatgggtcta

SEQ ID NO: 898787 - DNA, 25 bp, Homo sapien
ttctcaccgtgatgagcgaggagcg

SEQ ID NO: 898788 - DNA, 25 bp, Homo sapien
taggtgattccccaaggttgtgagt

SEQ ID NO: 898789 - DNA, 25 bp, Homo sapien
gatctgtcagacactaggccttatt

SEQ ID NO: 898790 - DNA, 25 bp, Homo sapien
ctcagagtaaggtcaaagctcagga

SEQ ID NO: 898791 - DNA, 25 bp, Homo sapien
tggtcaggcctaagagaatttaaac

SEQ ID NO: 898792 - DNA, 25 bp, Homo sapien
tgctgaagaagagtcctttgggcct

SEQ ID NO: 898793 - DNA, 25 bp, Homo sapien
cacagcattgcacagtcgtccagat

SEQ ID NO: 898794 - DNA, 25 bp, Homo sapien
gaagggttactgatcccgggagcac

SEQ ID NO: 898795 - DNA, 25 bp, Homo sapien
tgtaaagggcacagatactctcttg

SEQ ID NO: 898796 - DNA, 25 bp, Homo sapien
cagaaatgatccgccaacaacagca

SEQ ID NO: 898797 - DNA, 25 bp, Homo sapien
tccagaaatgatccgccaacaacag

SEQ ID NO: 898798 - DNA, 25 bp, Homo sapien
gaaatgatccgccaacaacagcaaa

SEQ ID NO: 898799 - DNA, 25 bp, Homo sapien
agaaatgatccgccaacaacagcaa

SEQ ID NO: 898800 - DNA, 25 bp, Homo sapien
ctgtcgcatgtcaggtttcccttta

SEQ ID NO: 898801 - DNA, 25 bp, Homo sapien
agctgggtccattcttggttgtcca

SEQ ID NO: 898802 - DNA, 25 bp, Homo sapien
tctctggttctgctgtcgcatgtca

SEQ ID NO: 898803 - DNA, 25 bp, Homo sapien
tttatccatgatgttagctgggtcc

SEQ ID NO: 898804 - DNA, 25 bp, Homo sapien
gccaggcctgcagactccagatggc

SEQ ID NO: 898805 - DNA, 25 bp, Homo sapien
ttagcaaatgggacctggccaggcc

SEQ ID NO: 898806 - DNA, 25 bp, Homo sapien
agcaaatgggacctggccaggcctg

SEQ ID NO: 898807 - DNA, 25 bp, Homo sapien
gcctgcagactccagatggctccat

SEQ ID NO: 898808 - DNA, 25 bp, Homo sapien
tatggaagccatggcttactgcccc

SEQ ID NO: 898809 - DNA, 25 bp, Homo sapien
tctactttatttccctatggtccca

SEQ ID NO: 898810 - DNA, 25 bp, Homo sapien
tttagcatcgcacagagctgccctt

SEQ ID NO: 898811 - DNA, 25 bp, Homo sapien
tgcccttctggcagtttctcaggaa

SEQ ID NO: 898812 - DNA, 25 bp, Homo sapien
gcagccaccatgtgactgtgcttac

SEQ ID NO: 898813 - DNA, 25 bp, Homo sapien
ctgcagccaccatgtgactgtgctt

SEQ ID NO: 898814 - DNA, 25 bp, Homo sapien
tgcagccaccatgtgactgtgctta

SEQ ID NO: 898815 - DNA, 25 bp, Homo sapien
ggaatccatccacgggctcgatgag

SEQ ID NO: 898816 - DNA, 25 bp, Homo sapien
tccacgggctcgatgagctgccagg

SEQ ID NO: 898817 - DNA, 25 bp, Homo sapien
gggtggaatccatccacgggctcga

SEQ ID NO: 898818 - DNA, 25 bp, Homo sapien
tccatccacgggctcgatgagctgc

SEQ ID NO: 898819 - DNA, 25 bp, Homo sapien
ttgcacaagcaacggccaatatcca

SEQ ID NO: 898820 - DNA, 25 bp, Homo sapien
gggttacagacacacttgcacaagc

SEQ ID NO: 898821 - DNA, 25 bp, Homo sapien
ctgcagggcacataacgagagggtt

SEQ ID NO: 898822 - DNA, 25 bp, Homo sapien
gcaacggccaatatccaaggacaag

SEQ ID NO: 898823 - DNA, 25 bp, Homo sapien
tacagtcagtaagaactcctcaagg

SEQ ID NO: 898824 - DNA, 25 bp, Homo sapien
ttcaaatccctaggaagcctccgga

SEQ ID NO: 898825 - DNA, 25 bp, Homo sapien
gaaaactcaagaacataggtctgtg

SEQ ID NO: 898826 - DNA, 25 bp, Homo sapien
tctcatcccaaaggaaggacggaaa

SEQ ID NO: 898827 - DNA, 25 bp, Homo sapien
ggagtcctacacactgaatcgccag

SEQ ID NO: 898828 - DNA, 25 bp, Homo sapien
gagctgcatcgatgcttaaacagca

SEQ ID NO: 898829 - DNA, 25 bp, Homo sapien
aagtttatttgttctgccaagccag

SEQ ID NO: 898830 - DNA, 25 bp, Homo sapien
cactgtgttatatggtgtccgccac

SEQ ID NO: 898831 - DNA, 25 bp, Homo sapien
ccaggtatgctaataacagcaggcc

SEQ ID NO: 898832 - DNA, 25 bp, Homo sapien
ggccaatgggaattgagcctcatca

SEQ ID NO: 898833 - DNA, 25 bp, Homo sapien
taaatagatgcacagcaaaccatgg

SEQ ID NO: 898834 - DNA, 25 bp, Homo sapien
gaagttggcagtcggcaacacggaa

SEQ ID NO: 898835 - DNA, 25 bp, Homo sapien
tgttgaatcaaagcccatgcctgag

SEQ ID NO: 898836 - DNA, 25 bp, Homo sapien
gagagttgaatgacatgttgaatca

SEQ ID NO: 898837 - DNA, 25 bp, Homo sapien
gacatgttgaatcaaagcccatgcc

SEQ ID NO: 898838 - DNA, 25 bp, Homo sapien
gcaaagagagttgaatgacatgttg

SEQ ID NO: 898839 - DNA, 25 bp, Homo sapien
taagggagcttcagtaactcacagg

SEQ ID NO: 898840 - DNA, 25 bp, Homo sapien
cacatacatgtagccatcaggacag

SEQ ID NO: 898841 - DNA, 25 bp, Homo sapien
agagccaggtttatgccaattgagc

SEQ ID NO: 898842 - DNA, 25 bp, Homo sapien
ggagaaatgcaataccagacactgg

SEQ ID NO: 898843 - DNA, 25 bp, Homo sapien
taatgggcatagagatgacctgtgg

SEQ ID NO: 898844 - DNA, 25 bp, Homo sapien
tgttgacgattatgttcccagcacc

SEQ ID NO: 898845 - DNA, 25 bp, Homo sapien
ttccaagcatatcagttcaccagtg

SEQ ID NO: 898846 - DNA, 25 bp, Homo sapien
tatcctccacagagataaggactct

SEQ ID NO: 898847 - DNA, 25 bp, Homo sapien
aggcaaaatccatgtagaaaagatt

SEQ ID NO: 898848 - DNA, 25 bp, Homo sapien
cagtgtgttggagagttgctctgct

SEQ ID NO: 898849 - DNA, 25 bp, Homo sapien
gtgtgttggagagttgctctgctct

SEQ ID NO: 898850 - DNA, 25 bp, Homo sapien
agattgaagtttgtaaatttctcac

SEQ ID NO: 898851 - DNA, 25 bp, Homo sapien
agaaatcgatcttccccatcctact

SEQ ID NO: 898852 - DNA, 25 bp, Homo sapien
ggctttagtgagacaattcaggcag

SEQ ID NO: 898853 - DNA, 25 bp, Homo sapien
ttcaggcagaacaaagaaatcgatc

SEQ ID NO: 898854 - DNA, 25 bp, Homo sapien
gaatttcatgaaatctagactttgg

SEQ ID NO: 898855 - DNA, 25 bp, Homo sapien
gagagtccgcaacgtcttgttggaa

SEQ ID NO: 898856 - DNA, 25 bp, Homo sapien
tccgcaacgtcttgttggaagacat

SEQ ID NO: 898857 - DNA, 25 bp, Homo sapien
tctgaagtgagagtccgcaacgtct

SEQ ID NO: 898858 - DNA, 25 bp, Homo sapien
agtgagagtccgcaacgtcttgttg

SEQ ID NO: 898859 - DNA, 25 bp, Homo sapien
caactgcgcataggtcatgtcttta

SEQ ID NO: 898860 - DNA, 25 bp, Homo sapien
agtacaactgcgcataggtcatgtc

SEQ ID NO: 898861 - DNA, 25 bp, Homo sapien
gcagttcaggaaggagtacaactgc

SEQ ID NO: 898862 - DNA, 25 bp, Homo sapien
agttcaggaaggagtacaactgcgc

SEQ ID NO: 898863 - DNA, 25 bp, Homo sapien
tctggtagattgcatccactcggca

SEQ ID NO: 898864 - DNA, 25 bp, Homo sapien
ttttcatgcagcattgctcttgaag

SEQ ID NO: 898865 - DNA, 25 bp, Homo sapien
gcagaaagtcactatttccagggtg

SEQ ID NO: 898866 - DNA, 25 bp, Homo sapien
atagcagcatttagaggcacctggg

SEQ ID NO: 898867 - DNA, 25 bp, Homo sapien
ttgaggaggagccctgaggaactca

SEQ ID NO: 898868 - DNA, 25 bp, Homo sapien
ttcagacccagagttgaggaggagc

SEQ ID NO: 898869 - DNA, 25 bp, Homo sapien
ctagaaattcagacccagagttgag

SEQ ID NO: 898870 - DNA, 25 bp, Homo sapien
gaaattcagacccagagttgaggag

SEQ ID NO: 898871 - DNA, 25 bp, Homo sapien
ccccgctgaagcaatttgactttca

SEQ ID NO: 898872 - DNA, 25 bp, Homo sapien
ttccagcatatccaccccgctgaag

SEQ ID NO: 898873 - DNA, 25 bp, Homo sapien
ttctgaacatcagctatagtcccag

SEQ ID NO: 898874 - DNA, 25 bp, Homo sapien
atatccaccccgctgaagcaatttg

SEQ ID NO: 898875 - DNA, 25 bp, Homo sapien
ggtgaatgactgacactgtatccat

SEQ ID NO: 898876 - DNA, 25 bp, Homo sapien
tgtatccattaacactcctcacact

SEQ ID NO: 898877 - DNA, 25 bp, Homo sapien
ctccccaaatctcgggggtgaatga

SEQ ID NO: 898878 - DNA, 25 bp, Homo sapien
tgtggctgacacacaaaatccaggt

SEQ ID NO: 898879 - DNA, 25 bp, Homo sapien
agaggggccggagtttgtcctgctc

SEQ ID NO: 898880 - DNA, 25 bp, Homo sapien
tcctgtgacactgggaacttcattg

SEQ ID NO: 898881 - DNA, 25 bp, Homo sapien
ccagaggggccggagtttgtcctgc

SEQ ID NO: 898882 - DNA, 25 bp, Homo sapien
tgacactgggaacttcattgttggc

SEQ ID NO: 898883 - DNA, 25 bp, Homo sapien
gtccttctgctgatggccagcacag

SEQ ID NO: 898884 - DNA, 25 bp, Homo sapien
gatggccagcacagctcccaatgag

SEQ ID NO: 898885 - DNA, 25 bp, Homo sapien
tgagaatgggaacatccttagtgtg

SEQ ID NO: 898886 - DNA, 25 bp, Homo sapien
ttgctccacgctgcctgatgccctc

SEQ ID NO: 898887 - DNA, 25 bp, Homo sapien
aaccctgccttcactggttgctcag

SEQ ID NO: 898888 - DNA, 25 bp, Homo sapien
tggcatctaaccctgccttcactgg

SEQ ID NO: 898889 - DNA, 25 bp, Homo sapien
cctctgagtgtcctgctgcgtgggt

SEQ ID NO: 898890 - DNA, 25 bp, Homo sapien
cgtgggtgctgtggcatctaaccct

SEQ ID NO: 898891 - DNA, 25 bp, Homo sapien
agagcagtctctcaaccttgcatga

SEQ ID NO: 898892 - DNA, 25 bp, Homo sapien
gcaaaggcaaaatctagagcagtct

SEQ ID NO: 898893 - DNA, 25 bp, Homo sapien
tagatgctagttgcacccctcttgt

SEQ ID NO: 898894 - DNA, 25 bp, Homo sapien
catgctagggtgtgattagcagcca

SEQ ID NO: 898895 - DNA, 25 bp, Homo sapien
tagatgcttcagagtctgcatgacg

SEQ ID NO: 898896 - DNA, 25 bp, Homo sapien
catgacgttggagtagagtttctca

SEQ ID NO: 898897 - DNA, 25 bp, Homo sapien
ggcaggtgggaatttagatgcttca

SEQ ID NO: 898898 - DNA, 25 bp, Homo sapien
tccatctggtaagccatacaaaata

SEQ ID NO: 898899 - DNA, 25 bp, Homo sapien
gcctgtcccgccctaatgaattgtg

SEQ ID NO: 898900 - DNA, 25 bp, Homo sapien
gcctgtgcagaaaaccagcttcctg

SEQ ID NO: 898901 - DNA, 25 bp, Homo sapien
ccttccaaggaagaaactgatcagc

SEQ ID NO: 898902 - DNA, 25 bp, Homo sapien
gggttagcccttttcttcatgccag

SEQ ID NO: 898903 - DNA, 25 bp, Homo sapien
gatgaggacttccatattaccccat

SEQ ID NO: 898904 - DNA, 25 bp, Homo sapien
gaataaatagcatggattgtttctc

SEQ ID NO: 898905 - DNA, 25 bp, Homo sapien
gaggcatcttgatacagactgggaa

SEQ ID NO: 898906 - DNA, 25 bp, Homo sapien
tgctggctggttggaacttccttat

SEQ ID NO: 898907 - DNA, 25 bp, Homo sapien
ggttcatggcagtccttaaagggtg

SEQ ID NO: 898908 - DNA, 25 bp, Homo sapien
ctcttggttcatggcagtccttaaa

SEQ ID NO: 898909 - DNA, 25 bp, Homo sapien
ggcagtccttaaagggtgtttgcca

SEQ ID NO: 898910 - DNA, 25 bp, Homo sapien
ccttggtgcccagaatgtagccttg

SEQ ID NO: 898911 - DNA, 25 bp, Homo sapien
catatataacgatggcgggatagtc

SEQ ID NO: 898912 - DNA, 25 bp, Homo sapien
gcgggatagtccaacaccttgtttc

SEQ ID NO: 898913 - DNA, 25 bp, Homo sapien
tccaatcatggcatatataacgatg

SEQ ID NO: 898914 - DNA, 25 bp, Homo sapien
taacgatggcgggatagtccaacac

SEQ ID NO: 898915 - DNA, 25 bp, Homo sapien
tttcttcaggtttcgggaagatgca

SEQ ID NO: 898916 - DNA, 25 bp, Homo sapien
ttcttcaggtttcgggaagatgcac

SEQ ID NO: 898917 - DNA, 25 bp, Homo sapien
ttattcttgcacactcccaaggctc

SEQ ID NO: 898918 - DNA, 25 bp, Homo sapien
tcaacacaaggttcagattgtagag

SEQ ID NO: 898919 - DNA, 25 bp, Homo sapien
tttcaactcttgtaatgatatgcat

SEQ ID NO: 898920 - DNA, 25 bp, Homo sapien
caaggttcagattgtagagttgata

SEQ ID NO: 898921 - DNA, 25 bp, Homo sapien
aacactattgcctgatctatagacc

SEQ ID NO: 898922 - DNA, 25 bp, Homo sapien
agagggatctcgctatgcgcagact

SEQ ID NO: 898923 - DNA, 25 bp, Homo sapien
caataattatagaacaatgaggaca

SEQ ID NO: 898924 - DNA, 25 bp, Homo sapien
tcgctatgcgcagacttgtcttgaa

SEQ ID NO: 898925 - DNA, 25 bp, Homo sapien
gagcctcaaacatcctgtgccttgg

SEQ ID NO: 898926 - DNA, 25 bp, Homo sapien
ccttggccttgctagaactttgctg

SEQ ID NO: 898927 - DNA, 25 bp, Homo sapien
caatggcattggaagggagaccgtt

SEQ ID NO: 898928 - DNA, 25 bp, Homo sapien
tctcctttgctgtgggtaaatggct

SEQ ID NO: 898929 - DNA, 25 bp, Homo sapien
ccataagcgaaggtaaatagatttt

SEQ ID NO: 898930 - DNA, 25 bp, Homo sapien
ttgaaatattctggtagtccctgtg

SEQ ID NO: 898931 - DNA, 25 bp, Homo sapien
tcttttccataagcgaaggtaaata

SEQ ID NO: 898932 - DNA, 25 bp, Homo sapien
tagtccctgtgattacagtggtttc

SEQ ID NO: 898933 - DNA, 25 bp, Homo sapien
gccatgtgtcatgtactgtgccagg

SEQ ID NO: 898934 - DNA, 25 bp, Homo sapien
gatatccttatgagctggttcagca

SEQ ID NO: 898935 - DNA, 25 bp, Homo sapien
taaagcactctacatgggcaaactg

SEQ ID NO: 898936 - DNA, 25 bp, Homo sapien
tagataggacaaagacaacgggcga

SEQ ID NO: 898937 - DNA, 25 bp, Homo sapien
tccattaaaaggagttggtatattc

SEQ ID NO: 898938 - DNA, 25 bp, Homo sapien
gcagcaaacacaggcacagtacaca

SEQ ID NO: 898939 - DNA, 25 bp, Homo sapien
actgaggctaggactcagaaagtcc

SEQ ID NO: 898940 - DNA, 25 bp, Homo sapien
ccagatgtctgtgcttattgggacc

SEQ ID NO: 898941 - DNA, 25 bp, Homo sapien
cttctataaacctgctttggctggg

SEQ ID NO: 898942 - DNA, 25 bp, Homo sapien
ggatgtgttccaggtaaagacaaca

SEQ ID NO: 898943 - DNA, 25 bp, Homo sapien
caggccctgcttaccttccagagat

SEQ ID NO: 898944 - DNA, 25 bp, Homo sapien
gccagtcaagctcgttggtaagggc

SEQ ID NO: 898945 - DNA, 25 bp, Homo sapien
ttggggccagtcaagctcgttggta

SEQ ID NO: 898946 - DNA, 25 bp, Homo sapien
gctgttggtagattgatgaaagagt

SEQ ID NO: 898947 - DNA, 25 bp, Homo sapien
tcctgtagcaccagagagttggggc

SEQ ID NO: 898948 - DNA, 25 bp, Homo sapien
cagctcttgtgaaacatgcagaaca

SEQ ID NO: 898949 - DNA, 25 bp, Homo sapien
agggaagtcacaatgatcagcacca

SEQ ID NO: 898950 - DNA, 25 bp, Homo sapien
gtcacaatgatcagcaccacccttg

SEQ ID NO: 898951 - DNA, 25 bp, Homo sapien
cacccttgacctggcttccgctcag

SEQ ID NO: 898952 - DNA, 25 bp, Homo sapien
cacatgccacgaaacctccatcctt

SEQ ID NO: 898953 - DNA, 25 bp, Homo sapien
cctccttccacacatgccacgaaac

SEQ ID NO: 898954 - DNA, 25 bp, Homo sapien
catccttattcttatcctaagtgtg

SEQ ID NO: 898955 - DNA, 25 bp, Homo sapien
ccatccttattcttatcctaagtgt

SEQ ID NO: 898956 - DNA, 25 bp, Homo sapien
cccactccctcacctttttctctgt

SEQ ID NO: 898957 - DNA, 25 bp, Homo sapien
aagaatgatatggttcttttccacc

SEQ ID NO: 898958 - DNA, 25 bp, Homo sapien
actccctcacctttttctctgtcat

SEQ ID NO: 898959 - DNA, 25 bp, Homo sapien
agaatgatatggttcttttccaccc

SEQ ID NO: 898960 - DNA, 25 bp, Homo sapien
ttcctggttgcctgtttagggggca

SEQ ID NO: 898961 - DNA, 25 bp, Homo sapien
agctgccaaatcccataaaatcaca

SEQ ID NO: 898962 - DNA, 25 bp, Homo sapien
ttagggggcagtctcccagatactg

SEQ ID NO: 898963 - DNA, 25 bp, Homo sapien
tagtccttgaacgtgaggcttcctg

SEQ ID NO: 898964 - DNA, 25 bp, Homo sapien
caatgactggccatgtagggaaacc

SEQ ID NO: 898965 - DNA, 25 bp, Homo sapien
ccctctgggcatacacatctgctgg

SEQ ID NO: 898966 - DNA, 25 bp, Homo sapien
gaataagtgccctacctgactgcaa

SEQ ID NO: 898967 - DNA, 25 bp, Homo sapien
tcactttataccaagaggctgtccc

SEQ ID NO: 898968 - DNA, 25 bp, Homo sapien
ttacttctctcagtaggcagcaggg

SEQ ID NO: 898969 - DNA, 25 bp, Homo sapien
gccaagatgatggatgttcccatga

SEQ ID NO: 898970 - DNA, 25 bp, Homo sapien
tgggagtgcaccctacatggctggc

SEQ ID NO: 898971 - DNA, 25 bp, Homo sapien
tgtagttttcataacaactggtgtt

SEQ ID NO: 898972 - DNA, 25 bp, Homo sapien
tcagaattcaagaacggcctgtctg

SEQ ID NO: 898973 - DNA, 25 bp, Homo sapien
gaagggcatcgagttgatcagaatt

SEQ ID NO: 898974 - DNA, 25 bp, Homo sapien
agaattcaagaacggcctgtctggc

SEQ ID NO: 898975 - DNA, 25 bp, Homo sapien
ggagagaagggcatcgagttgatca

SEQ ID NO: 898976 - DNA, 25 bp, Homo sapien
tagctgtaaacaggactcccgggtg

SEQ ID NO: 898977 - DNA, 25 bp, Homo sapien
tgcttgccagacaatacgatcaggt

SEQ ID NO: 898978 - DNA, 25 bp, Homo sapien
gaacgaaacatgtctgggcttcctg

SEQ ID NO: 898979 - DNA, 25 bp, Homo sapien
gggtgccccactacttaagcagagg

SEQ ID NO: 898980 - DNA, 25 bp, Homo sapien
tcctcttgctggctgagacttgcgg

SEQ ID NO: 898981 - DNA, 25 bp, Homo sapien
aaagctgactttctataatgagggc

SEQ ID NO: 898982 - DNA, 25 bp, Homo sapien
cccagggatgggaatgtggtccact

SEQ ID NO: 898983 - DNA, 25 bp, Homo sapien
gtgtgattgcctctagccgggcaga

SEQ ID NO: 898984 - DNA, 25 bp, Homo sapien
cagctggaggttaagccctgtgaag

SEQ ID NO: 898985 - DNA, 25 bp, Homo sapien
ctagtcacttaagtttgctgcttca

SEQ ID NO: 898986 - DNA, 25 bp, Homo sapien
agtcacttaagtttgctgcttcagc

SEQ ID NO: 898987 - DNA, 25 bp, Homo sapien
agctggaggttaagccctgtgaagt

SEQ ID NO: 898988 - DNA, 25 bp, Homo sapien
tcttacattccccatgggggtgtcc

SEQ ID NO: 898989 - DNA, 25 bp, Homo sapien
tgctgcctcggtcactgctcttaca

SEQ ID NO: 898990 - DNA, 25 bp, Homo sapien
tgtccagggcccacgctctttctgt

SEQ ID NO: 898991 - DNA, 25 bp, Homo sapien
cccatgggggtgtccaacaccagtc

SEQ ID NO: 898992 - DNA, 25 bp, Homo sapien
gccattcccagcctcaactcttctg

SEQ ID NO: 898993 - DNA, 25 bp, Homo sapien
cagattgccttgttgcgctttgaca

SEQ ID NO: 898994 - DNA, 25 bp, Homo sapien
tcaccatgacaagaagacgctctgg

SEQ ID NO: 898995 - DNA, 25 bp, Homo sapien
tccaaaatgttaaggtgactctctc

SEQ ID NO: 898996 - DNA, 25 bp, Homo sapien
gacgctctggatagattgcccagcc

SEQ ID NO: 898997 - DNA, 25 bp, Homo sapien
ctccaccttcttgactccccactgc

SEQ ID NO: 898998 - DNA, 25 bp, Homo sapien
gctgccttcagggttcctggcagca

SEQ ID NO: 898999 - DNA, 25 bp, Homo sapien
accttcttgactccccactgctgcc

SEQ ID NO: 899000 - DNA, 25 bp, Homo sapien
cccggtgggctttgtcctttctgtg

SEQ ID NO: 899001 - DNA, 25 bp, Homo sapien
gaggtgagtagaaggaaccttttgc

SEQ ID NO: 899002 - DNA, 25 bp, Homo sapien
tagaaggaaccttttgccatttgtc

SEQ ID NO: 899003 - DNA, 25 bp, Homo sapien
tgaaatgactgtggatatgcctttc

SEQ ID NO: 899004 - DNA, 25 bp, Homo sapien
gactgtggatatgcctttcatggca

SEQ ID NO: 899005 - DNA, 25 bp, Homo sapien
tgcgacgctgtgatccattcaggag

SEQ ID NO: 899006 - DNA, 25 bp, Homo sapien
acatctgcgacgctgtgatccattc

SEQ ID NO: 899007 - DNA, 25 bp, Homo sapien
aaagacatctgcgacgctgtgatcc

SEQ ID NO: 899008 - DNA, 25 bp, Homo sapien
tctgcgacgctgtgatccattcagg

SEQ ID NO: 899009 - DNA, 25 bp, Homo sapien
ctcatatggaactccatcttttgga

SEQ ID NO: 899010 - DNA, 25 bp, Homo sapien
tcatatggaactccatcttttggat

SEQ ID NO: 899011 - DNA, 25 bp, Homo sapien
atttcttctcatatggaactccatc

SEQ ID NO: 899012 - DNA, 25 bp, Homo sapien
cattacagtttgaatcctgatggac

SEQ ID NO: 899013 - DNA, 25 bp, Homo sapien
ccaaatgccattacagtttgaatcc

SEQ ID NO: 899014 - DNA, 25 bp, Homo sapien
tgccattacagtttgaatcctgatg

SEQ ID NO: 899015 - DNA, 25 bp, Homo sapien
aatgccattacagtttgaatcctga

SEQ ID NO: 899016 - DNA, 25 bp, Homo sapien
tcattgactatattcatggaccgca

SEQ ID NO: 899017 - DNA, 25 bp, Homo sapien
tttgggatatttgccggaagctccg

SEQ ID NO: 899018 - DNA, 25 bp, Homo sapien
accgcattgttgtggaatggtgccg

SEQ ID NO: 899019 - DNA, 25 bp, Homo sapien
ggaagctccggaccaaatcctgtct

SEQ ID NO: 899020 - DNA, 25 bp, Homo sapien
aataactggtttatttaatgctttg

SEQ ID NO: 899021 - DNA, 25 bp, Homo sapien
aactggtttatttaatgctttgaca

SEQ ID NO: 899022 - DNA, 25 bp, Homo sapien
ctaaatgcccaaataactggtttat

SEQ ID NO: 899023 - DNA, 25 bp, Homo sapien
caaataactggtttatttaatgctt

SEQ ID NO: 899024 - DNA, 25 bp, Homo sapien
tatagtcacaacaaaggcgagggct

SEQ ID NO: 899025 - DNA, 25 bp, Homo sapien
agtcacaacaaaggcgagggctagc

SEQ ID NO: 899026 - DNA, 25 bp, Homo sapien
cacaacaaaggcgagggctagcata

SEQ ID NO: 899027 - DNA, 25 bp, Homo sapien
acaacaaaggcgagggctagcatat

SEQ ID NO: 899028 - DNA, 25 bp, Homo sapien
cttctacctgggtacactgactcgt

SEQ ID NO: 899029 - DNA, 25 bp, Homo sapien
ggtacactgactcgtcgctgtcatt

SEQ ID NO: 899030 - DNA, 25 bp, Homo sapien
gactcgtcgctgtcattacagtctc

SEQ ID NO: 899031 - DNA, 25 bp, Homo sapien
cccgccagtgatagccccgcagtgt

SEQ ID NO: 899032 - DNA, 25 bp, Homo sapien
gaaaacgctgtatttgtctgaatcc

SEQ ID NO: 899033 - DNA, 25 bp, Homo sapien
aacgctgtatttgtctgaatccaca

SEQ ID NO: 899034 - DNA, 25 bp, Homo sapien
gctgtatttgtctgaatccacatct

SEQ ID NO: 899035 - DNA, 25 bp, Homo sapien
aaaacgctgtatttgtctgaatcca

SEQ ID NO: 899036 - DNA, 25 bp, Homo sapien
tctggatgttcccttcagtgactct

SEQ ID NO: 899037 - DNA, 25 bp, Homo sapien
tggtttcccgctctgtctttctctc

SEQ ID NO: 899038 - DNA, 25 bp, Homo sapien
gagaagttggtttcccgctctgtct

SEQ ID NO: 899039 - DNA, 25 bp, Homo sapien
gatgttcccttcagtgactctacct

SEQ ID NO: 899040 - DNA, 25 bp, Homo sapien
aagattgtccaggaacagttcaggt

SEQ ID NO: 899041 - DNA, 25 bp, Homo sapien
gaaggtggaagattgtccaggaaca

SEQ ID NO: 899042 - DNA, 25 bp, Homo sapien
aggaaaagtgagaaccagccttggg

SEQ ID NO: 899043 - DNA, 25 bp, Homo sapien
ggtggaagattgtccaggaacagtt

SEQ ID NO: 899044 - DNA, 25 bp, Homo sapien
caaggctgagctagcacaggctaaa

SEQ ID NO: 899045 - DNA, 25 bp, Homo sapien
atccacaaggctgagctagcacagg

SEQ ID NO: 899046 - DNA, 25 bp, Homo sapien
cacaaggctgagctagcacaggcta

SEQ ID NO: 899047 - DNA, 25 bp, Homo sapien
ctgagctagcacaggctaaagtaat

SEQ ID NO: 899048 - DNA, 25 bp, Homo sapien
cagatcttggccaaaaccgggagtg

SEQ ID NO: 899049 - DNA, 25 bp, Homo sapien
gatcttggccaaaaccgggagtgaa

SEQ ID NO: 899050 - DNA, 25 bp, Homo sapien
agatcttggccaaaaccgggagtga

SEQ ID NO: 899051 - DNA, 25 bp, Homo sapien
cagaggccaaggcactagcacgtgt

SEQ ID NO: 899052 - DNA, 25 bp, Homo sapien
gcactagcacgtgtctctaggaacc

SEQ ID NO: 899053 - DNA, 25 bp, Homo sapien
tgtctctaggaacctggaggagaat

SEQ ID NO: 899054 - DNA, 25 bp, Homo sapien
tctaggaacctggaggagaatgcag

SEQ ID NO: 899055 - DNA, 25 bp, Homo sapien
tgtgctgaaatgatatggaacctac

SEQ ID NO: 899056 - DNA, 25 bp, Homo sapien
taggctgtgctgaaatgatatggaa

SEQ ID NO: 899057 - DNA, 25 bp, Homo sapien
ccgataggctgtgctgaaatgatat

SEQ ID NO: 899058 - DNA, 25 bp, Homo sapien
caaccgataggctgtgctgaaatga

SEQ ID NO: 899059 - DNA, 25 bp, Homo sapien
cctggccaggtctgaagttatatca

SEQ ID NO: 899060 - DNA, 25 bp, Homo sapien
catcacagtggaattattaattact

SEQ ID NO: 899061 - DNA, 25 bp, Homo sapien
ttatttttgccttgatagctgtaat

SEQ ID NO: 899062 - DNA, 25 bp, Homo sapien
tactctccgagcagttttttcagac

SEQ ID NO: 899063 - DNA, 25 bp, Homo sapien
aatgatgagctagccagcagggaga

SEQ ID NO: 899064 - DNA, 25 bp, Homo sapien
ggtgaatgatgagctagccagcagg

SEQ ID NO: 899065 - DNA, 25 bp, Homo sapien
aatgtagtgtatcaaggtgaatgat

SEQ ID NO: 899066 - DNA, 25 bp, Homo sapien
aaatgtagtgtatcaaggtgaatga

SEQ ID NO: 899067 - DNA, 25 bp, Homo sapien
gtgctttaaagatctacttttctgc

SEQ ID NO: 899068 - DNA, 25 bp, Homo sapien
cattgaggataatgtcgtgctttaa

SEQ ID NO: 899069 - DNA, 25 bp, Homo sapien
agtatctttggcattgaggataatg

SEQ ID NO: 899070 - DNA, 25 bp, Homo sapien
taatgtcgtgctttaaagatctact

SEQ ID NO: 899071 - DNA, 25 bp, Homo sapien
cgtaagcctgcgagaactgatctga

SEQ ID NO: 899072 - DNA, 25 bp, Homo sapien
taagtcaaatacgtaagcctgcgag

SEQ ID NO: 899073 - DNA, 25 bp, Homo sapien
tgcaaccagggcctaagtcaaatac

SEQ ID NO: 899074 - DNA, 25 bp, Homo sapien
cagggcctaagtcaaatacgtaagc

SEQ ID NO: 899075 - DNA, 25 bp, Homo sapien
tcttgccttctgtagtgtaaatttc

SEQ ID NO: 899076 - DNA, 25 bp, Homo sapien
cagaatcggggacttcttgacaatt

SEQ ID NO: 899077 - DNA, 25 bp, Homo sapien
tgccttctgtagtgtaaatttccat

SEQ ID NO: 899078 - DNA, 25 bp, Homo sapien
ttcttgacaatttgtcttgccttct

SEQ ID NO: 899079 - DNA, 25 bp, Homo sapien
aaatgtctagtctttagtccactgt

SEQ ID NO: 899080 - DNA, 25 bp, Homo sapien
tttctgtgtctagaaggccttgtca

SEQ ID NO: 899081 - DNA, 25 bp, Homo sapien
gaatctcaaatgcattgggatatat

SEQ ID NO: 899082 - DNA, 25 bp, Homo sapien
tcaattatacaacgttacaaccaac

SEQ ID NO: 899083 - DNA, 25 bp, Homo sapien
cggttctcttctgtgacccatggtt

SEQ ID NO: 899084 - DNA, 25 bp, Homo sapien
catcttggaagtggcttctgccatc

SEQ ID NO: 899085 - DNA, 25 bp, Homo sapien
ttggaagtggcttctgccatcttgg

SEQ ID NO: 899086 - DNA, 25 bp, Homo sapien
gacccatggtttctaatagagctat

SEQ ID NO: 899087 - DNA, 25 bp, Homo sapien
tctaaaacttctagttctctctgtc

SEQ ID NO: 899088 - DNA, 25 bp, Homo sapien
gtctaaaacttctagttctctctgt

SEQ ID NO: 899089 - DNA, 25 bp, Homo sapien
tgagaaaatccgtagaaaaagaatg

SEQ ID NO: 899090 - DNA, 25 bp, Homo sapien
gagaaaatccgtagaaaaagaatga

SEQ ID NO: 899091 - DNA, 25 bp, Homo sapien
cacagtagatagtggtagggagaca

SEQ ID NO: 899092 - DNA, 25 bp, Homo sapien
tgtgagccccaaatgcagttccacc

SEQ ID NO: 899093 - DNA, 25 bp, Homo sapien
tctgcttgcttctgcgctatgagct

SEQ ID NO: 899094 - DNA, 25 bp, Homo sapien
cacaggaccggcaagaagtgggcct

SEQ ID NO: 899095 - DNA, 25 bp, Homo sapien
gtgacataccacatcagcattcata

SEQ ID NO: 899096 - DNA, 25 bp, Homo sapien
gttctgtttacaaaactccagagtg

SEQ ID NO: 899097 - DNA, 25 bp, Homo sapien
gacacaatggttggccagtgttctg

SEQ ID NO: 899098 - DNA, 25 bp, Homo sapien
ggtagagatgacacaatggttggcc

SEQ ID NO: 899099 - DNA, 25 bp, Homo sapien
ccaggtggactgagtatctggaaag

SEQ ID NO: 899100 - DNA, 25 bp, Homo sapien
cagaataagagaagctcgagtgagc

SEQ ID NO: 899101 - DNA, 25 bp, Homo sapien
ctcgagtgagctgggatagtgctgt

SEQ ID NO: 899102 - DNA, 25 bp, Homo sapien
gatagtgctgtcgtaatttcctgcc

SEQ ID NO: 899103 - DNA, 25 bp, Homo sapien
gacgaaggatccaaattaggttcca

SEQ ID NO: 899104 - DNA, 25 bp, Homo sapien
cactattactaagagctggaataac

SEQ ID NO: 899105 - DNA, 25 bp, Homo sapien
agcctttgcgtagagtgacgaagga

SEQ ID NO: 899106 - DNA, 25 bp, Homo sapien
ataacacctcgagccctgtccagaa

SEQ ID NO: 899107 - DNA, 25 bp, Homo sapien
gtcaatgactaaatagcaggtggtt

SEQ ID NO: 899108 - DNA, 25 bp, Homo sapien
aatgactaaatagcaggtggttttc

SEQ ID NO: 899109 - DNA, 25 bp, Homo sapien
ttttatgatgtctgatccaaacttg

SEQ ID NO: 899110 - DNA, 25 bp, Homo sapien
tctgatccaaacttgtcaatgacta

SEQ ID NO: 899111 - DNA, 25 bp, Homo sapien
ccatttgaatagtttccggtagtct

SEQ ID NO: 899112 - DNA, 25 bp, Homo sapien
ttgttagcttgagaggcccctggag

SEQ ID NO: 899113 - DNA, 25 bp, Homo sapien
gagcagaaccatttgaatagtttcc

SEQ ID NO: 899114 - DNA, 25 bp, Homo sapien
gcccctggagcaatggctgatatgg

SEQ ID NO: 899115 - DNA, 25 bp, Homo sapien
cagaccctcagcagtatgactcgtc

SEQ ID NO: 899116 - DNA, 25 bp, Homo sapien
tcttctctgtaagtgtgggcaggaa

SEQ ID NO: 899117 - DNA, 25 bp, Homo sapien
gactcatgagtgagaggacaagcag

SEQ ID NO: 899118 - DNA, 25 bp, Homo sapien
aggaagtaaaggcagtcatcatgac

SEQ ID NO: 899119 - DNA, 25 bp, Homo sapien
cacagtctctccatcgaggcctgga

SEQ ID NO: 899120 - DNA, 25 bp, Homo sapien
aagctgttctattacagacaccacc

SEQ ID NO: 899121 - DNA, 25 bp, Homo sapien
gtgaacttgagcaagctgttctatt

SEQ ID NO: 899122 - DNA, 25 bp, Homo sapien
cctggaccgtcgagttgtgaacttg

SEQ ID NO: 899123 - DNA, 25 bp, Homo sapien
cagggaggagaagaacatgtaatct

SEQ ID NO: 899124 - DNA, 25 bp, Homo sapien
ccaagttgcttcctctctgttccag

SEQ ID NO: 899125 - DNA, 25 bp, Homo sapien
tctctgttccagtctccacttgtgg

SEQ ID NO: 899126 - DNA, 25 bp, Homo sapien
tctgttccagtctccacttgtggac

SEQ ID NO: 899127 - DNA, 25 bp, Homo sapien
tcctctctgttccagtctccacttg

SEQ ID NO: 899128 - DNA, 25 bp, Homo sapien
cagcagcttctatagcaagtggtca

SEQ ID NO: 899129 - DNA, 25 bp, Homo sapien
gtgtcctctctagagccaaacagca

SEQ ID NO: 899130 - DNA, 25 bp, Homo sapien
tccactccttattctggcatgaaac

SEQ ID NO: 899131 - DNA, 25 bp, Homo sapien
tggcatgaaacaaccagtgtcctct

SEQ ID NO: 899132 - DNA, 25 bp, Homo sapien
gtatgttcccggtgtctttgtcaaa

SEQ ID NO: 899133 - DNA, 25 bp, Homo sapien
tatggtaagagacaagggtctagtc

SEQ ID NO: 899134 - DNA, 25 bp, Homo sapien
cattcttatgcacgtggctatccag

SEQ ID NO: 899135 - DNA, 25 bp, Homo sapien
ttctttgctcagactaatgtcctgg

SEQ ID NO: 899136 - DNA, 25 bp, Homo sapien
ctctgagcattttaagtatgggtat

SEQ ID NO: 899137 - DNA, 25 bp, Homo sapien
aagcaaataactcaatagtcacatg

SEQ ID NO: 899138 - DNA, 25 bp, Homo sapien
tgcctcgatgttgttggttgttgac

SEQ ID NO: 899139 - DNA, 25 bp, Homo sapien
aaacttgctagagatcatctgagcc

SEQ ID NO: 899140 - DNA, 25 bp, Homo sapien
catttatatcacatctgcagtttca

SEQ ID NO: 899141 - DNA, 25 bp, Homo sapien
agggctggaatcaacgtttgccaaa

SEQ ID NO: 899142 - DNA, 25 bp, Homo sapien
tttatatcacatctgcagtttcacc

SEQ ID NO: 899143 - DNA, 25 bp, Homo sapien
gccatttatatcacatctgcagttt

SEQ ID NO: 899144 - DNA, 25 bp, Homo sapien
ttctaactggatgcaagttaccatg

SEQ ID NO: 899145 - DNA, 25 bp, Homo sapien
caagttaccatgtggtgttattttc

SEQ ID NO: 899146 - DNA, 25 bp, Homo sapien
caccattctaactggatgcaagtta

SEQ ID NO: 899147 - DNA, 25 bp, Homo sapien
tggatgcaagttaccatgtggtgtt

SEQ ID NO: 899148 - DNA, 25 bp, Homo sapien
aatgtagagttttttacatctctgc

SEQ ID NO: 899149 - DNA, 25 bp, Homo sapien
gcctggctttctaaggatcactcct

SEQ ID NO: 899150 - DNA, 25 bp, Homo sapien
caactgtggatctgtttaccccgga

SEQ ID NO: 899151 - DNA, 25 bp, Homo sapien
tctaaggatcactcctgtgtctaca

SEQ ID NO: 899152 - DNA, 25 bp, Homo sapien
tgctctcgcatattcagtggccatg

SEQ ID NO: 899153 - DNA, 25 bp, Homo sapien
ccatgtgagaactgagtgcgcggaa

SEQ ID NO: 899154 - DNA, 25 bp, Homo sapien
cactaagggcccagttcaacattca

SEQ ID NO: 899155 - DNA, 25 bp, Homo sapien
gggtattatcaagggcactaagggc

SEQ ID NO: 899156 - DNA, 25 bp, Homo sapien
taaggattttccagggggactgcat

SEQ ID NO: 899157 - DNA, 25 bp, Homo sapien
cacaggtgtgcccattcgagaggct

SEQ ID NO: 899158 - DNA, 25 bp, Homo sapien
ctacacaggtgtgcccattcgagag

SEQ ID NO: 899159 - DNA, 25 bp, Homo sapien
gcaagaatagaggcgccaccgtaag

SEQ ID NO: 899160 - DNA, 25 bp, Homo sapien
gatcacccggctttggaagctccca

SEQ ID NO: 899161 - DNA, 25 bp, Homo sapien
gaagttagtgtgcataaaccccgtg

SEQ ID NO: 899162 - DNA, 25 bp, Homo sapien
tcccaactgagggatgctggagctg

SEQ ID NO: 899163 - DNA, 25 bp, Homo sapien
cagcttgctcttgttggaccctgag

SEQ ID NO: 899164 - DNA, 25 bp, Homo sapien
agggggcagccagacggatgttcgc

SEQ ID NO: 899165 - DNA, 25 bp, Homo sapien
aagggggcagccagacggatgttcg

SEQ ID NO: 899166 - DNA, 25 bp, Homo sapien
ccttagacaggtccgaatttggctg

SEQ ID NO: 899167 - DNA, 25 bp, Homo sapien
agaaaatgcggtcctcccaggtcct

SEQ ID NO: 899168 - DNA, 25 bp, Homo sapien
tgaggccaactcagacattcccagg

SEQ ID NO: 899169 - DNA, 25 bp, Homo sapien
tatgtaggcagcaattcacagggca

SEQ ID NO: 899170 - DNA, 25 bp, Homo sapien
cactctgtgcctttagactctgaac

SEQ ID NO: 899171 - DNA, 25 bp, Homo sapien
tagaccaaatatcctcccctgtaag

SEQ ID NO: 899172 - DNA, 25 bp, Homo sapien
gatatctgcctgaaataaattctca

SEQ ID NO: 899173 - DNA, 25 bp, Homo sapien
tgtaagggccaatctcaatagcagg

SEQ ID NO: 899174 - DNA, 25 bp, Homo sapien
taagggctagctgctcatgcaaagg

SEQ ID NO: 899175 - DNA, 25 bp, Homo sapien
tgctgatccagtgcagaaccccatg

SEQ ID NO: 899176 - DNA, 25 bp, Homo sapien
tgttagagatattgtccccagcttg

SEQ ID NO: 899177 - DNA, 25 bp, Homo sapien
gagttaggcacaggctaggtcacct

SEQ ID NO: 899178 - DNA, 25 bp, Homo sapien
aggcaacaccaactctggcgttggc

SEQ ID NO: 899179 - DNA, 25 bp, Homo sapien
tttgctgactggataagggatgtgg

SEQ ID NO: 899180 - DNA, 25 bp, Homo sapien
gaaggtgatgcaggcaacaccaact

SEQ ID NO: 899181 - DNA, 25 bp, Homo sapien
tgatgcaggcaacaccaactctggc

SEQ ID NO: 899182 - DNA, 25 bp, Homo sapien
caggtcgaaggatttggcaacatgc

SEQ ID NO: 899183 - DNA, 25 bp, Homo sapien
gaacaggtcgaaggatttggcaaca

SEQ ID NO: 899184 - DNA, 25 bp, Homo sapien
tcatccatcccatgaacaggtcgaa

SEQ ID NO: 899185 - DNA, 25 bp, Homo sapien
tcccatgaacaggtcgaaggatttg

SEQ ID NO: 899186 - DNA, 25 bp, Homo sapien
tttacatctcgcacagtcctcatca

SEQ ID NO: 899187 - DNA, 25 bp, Homo sapien
gcttttacatctcgcacagtcctca

SEQ ID NO: 899188 - DNA, 25 bp, Homo sapien
tacatctcgcacagtcctcatcaat

SEQ ID NO: 899189 - DNA, 25 bp, Homo sapien
agcttttacatctcgcacagtcctc

SEQ ID NO: 899190 - DNA, 25 bp, Homo sapien
gcgcttctcgaagccttaataagaa

SEQ ID NO: 899191 - DNA, 25 bp, Homo sapien
gatggaggccatcaaatcaggtgag

SEQ ID NO: 899192 - DNA, 25 bp, Homo sapien
tcaggtgaggagttcatattattac

SEQ ID NO: 899193 - DNA, 25 bp, Homo sapien
ggcaatggagtatcaccaaagaagc

SEQ ID NO: 899194 - DNA, 25 bp, Homo sapien
aggaagatccgagggtgcaaagggc

SEQ ID NO: 899195 - DNA, 25 bp, Homo sapien
agcctacgtattataggaagatccg

SEQ ID NO: 899196 - DNA, 25 bp, Homo sapien
gggagcctacgtattataggaagat

SEQ ID NO: 899197 - DNA, 25 bp, Homo sapien
tagggggagcctacgtattatagga

SEQ ID NO: 899198 - DNA, 25 bp, Homo sapien
gtcaccgtgagcaatttcttctgca

SEQ ID NO: 899199 - DNA, 25 bp, Homo sapien
gaatcacatcagtcaccgtgagcaa

SEQ ID NO: 899200 - DNA, 25 bp, Homo sapien
ttggaatcacatcagtcaccgtgag

SEQ ID NO: 899201 - DNA, 25 bp, Homo sapien
catcagtcaccgtgagcaatttctt

SEQ ID NO: 899202 - DNA, 25 bp, Homo sapien
ccagaatgaggcgtccagtgtacag

SEQ ID NO: 899203 - DNA, 25 bp, Homo sapien
ttccaacctgccaacaaatttatct

SEQ ID NO: 899204 - DNA, 25 bp, Homo sapien
gcgtccagtgtacaggtttgatcat

SEQ ID NO: 899205 - DNA, 25 bp, Homo sapien
gttaccagaatgaggcgtccagtgt

SEQ ID NO: 899206 - DNA, 25 bp, Homo sapien
tcagggttgatgttcagctgctttc

SEQ ID NO: 899207 - DNA, 25 bp, Homo sapien
cttggatctcttgatactttctgac

SEQ ID NO: 899208 - DNA, 25 bp, Homo sapien
gatctcttgatactttctgacaagt

SEQ ID NO: 899209 - DNA, 25 bp, Homo sapien
tctcttgatactttctgacaagtta

SEQ ID NO: 899210 - DNA, 25 bp, Homo sapien
tggatctcttgatactttctgacaa

SEQ ID NO: 899211 - DNA, 25 bp, Homo sapien
agaatgcgtttgtgtcctttgcaga

SEQ ID NO: 899212 - DNA, 25 bp, Homo sapien
gaaggtgatcgtctttctctctagg

SEQ ID NO: 899213 - DNA, 25 bp, Homo sapien
tactgaagtagcaacctctgttagt

SEQ ID NO: 899214 - DNA, 25 bp, Homo sapien
catatttacttatcttgcttgggac

SEQ ID NO: 899215 - DNA, 25 bp, Homo sapien
tttgaagtctctacctaaggaatgg

SEQ ID NO: 899216 - DNA, 25 bp, Homo sapien
cagagggtctgcaacttacaatggt

SEQ ID NO: 899217 - DNA, 25 bp, Homo sapien
tgcagtcactcggtcacggttcact

SEQ ID NO: 899218 - DNA, 25 bp, Homo sapien
tcaacgtgaaagagtacagagggtc

SEQ ID NO: 899219 - DNA, 25 bp, Homo sapien
gatggcatactcttcagatctcaca

SEQ ID NO: 899220 - DNA, 25 bp, Homo sapien
gaatgcaacttggacttcacgacaa

SEQ ID NO: 899221 - DNA, 25 bp, Homo sapien
tctcacaggtccaaaggagggtcta

SEQ ID NO: 899222 - DNA, 25 bp, Homo sapien
ccttggatttggctgagttgcccag

SEQ ID NO: 899223 - DNA, 25 bp, Homo sapien
aatcagggcggtgagcaagatgcca

SEQ ID NO: 899224 - DNA, 25 bp, Homo sapien
tggaacttgagttgcagcaggacct

SEQ ID NO: 899225 - DNA, 25 bp, Homo sapien
gatagcaacagtccgtcctagaggc

SEQ ID NO: 899226 - DNA, 25 bp, Homo sapien
tcacagtgcagacgcaaagtgggca

SEQ ID NO: 899227 - DNA, 25 bp, Homo sapien
tgtccaggtcattccgcgtcaggtc

SEQ ID NO: 899228 - DNA, 25 bp, Homo sapien
gcgcattcagtccatccgtccagat

SEQ ID NO: 899229 - DNA, 25 bp, Homo sapien
tgtccttcccgagtagcgcattcag

SEQ ID NO: 899230 - DNA, 25 bp, Homo sapien
tcatagacgaagtcatagttgctgg

SEQ ID NO: 899231 - DNA, 25 bp, Homo sapien
tctttaacctactttggcactgtgg

SEQ ID NO: 899232 - DNA, 25 bp, Homo sapien
tattccatggtagcagatctcaacg

SEQ ID NO: 899233 - DNA, 25 bp, Homo sapien
tagttcaagcggcaattccagaccc

SEQ ID NO: 899234 - DNA, 25 bp, Homo sapien
ggaaatcttccgtgatgcacatcag

SEQ ID NO: 899235 - DNA, 25 bp, Homo sapien
tttaagcaccgttctaaatgcagga

SEQ ID NO: 899236 - DNA, 25 bp, Homo sapien
aaagctgtttatgcaaccacacgca

SEQ ID NO: 899237 - DNA, 25 bp, Homo sapien
cagcaaactaaatgtcaagtgacac

SEQ ID NO: 899238 - DNA, 25 bp, Homo sapien
tcaagcatgatgttgggttccagtt

SEQ ID NO: 899239 - DNA, 25 bp, Homo sapien
tggagaaagcgagttcaagcacctc

SEQ ID NO: 899240 - DNA, 25 bp, Homo sapien
ctcatgcttgtcaggagcgatgaag

SEQ ID NO: 899241 - DNA, 25 bp, Homo sapien
gagcgatgaagttcagttggcagtt

SEQ ID NO: 899242 - DNA, 25 bp, Homo sapien
gatggagaaagcgagttcaagcacc

SEQ ID NO: 899243 - DNA, 25 bp, Homo sapien
tgcacattgaccatggcatagggcc

SEQ ID NO: 899244 - DNA, 25 bp, Homo sapien
gcagcccatgtagcaagtgttttca

SEQ ID NO: 899245 - DNA, 25 bp, Homo sapien
tgagtgtccaaggtgacagcaccgc

SEQ ID NO: 899246 - DNA, 25 bp, Homo sapien
gcatagggccagcttgtctagccaa

SEQ ID NO: 899247 - DNA, 25 bp, Homo sapien
gtctcacactcaaaaggtctcctca

SEQ ID NO: 899248 - DNA, 25 bp, Homo sapien
gcaggtcttgttctgaggatagatc

SEQ ID NO: 899249 - DNA, 25 bp, Homo sapien
tccagctgtccctcattgagagggg

SEQ ID NO: 899250 - DNA, 25 bp, Homo sapien
gaggatagatctaccagcgtctcac

SEQ ID NO: 899251 - DNA, 25 bp, Homo sapien
gaccacagtgtcagcgtggttattg

SEQ ID NO: 899252 - DNA, 25 bp, Homo sapien
tgcagcccagatgtgctccggacag

SEQ ID NO: 899253 - DNA, 25 bp, Homo sapien
ctccggacagggtgctgaagtcact

SEQ ID NO: 899254 - DNA, 25 bp, Homo sapien
caagagccggtgtgaacagcactgc

SEQ ID NO: 899255 - DNA, 25 bp, Homo sapien
ttgccaccttgtcatgtggaggaag

SEQ ID NO: 899256 - DNA, 25 bp, Homo sapien
caccttgtcatgtggaggaagcctg

SEQ ID NO: 899257 - DNA, 25 bp, Homo sapien
cttgtcatgtggaggaagcctgagt

SEQ ID NO: 899258 - DNA, 25 bp, Homo sapien
tgccaccttgtcatgtggaggaagc

SEQ ID NO: 899259 - DNA, 25 bp, Homo sapien
ttctggtcaattctccttttaggct

SEQ ID NO: 899260 - DNA, 25 bp, Homo sapien
ctggaactgtgggttatttacaagt

SEQ ID NO: 899261 - DNA, 25 bp, Homo sapien
cttttctaatgtagtcattcaatgc

SEQ ID NO: 899262 - DNA, 25 bp, Homo sapien
ccttccttagtgtcctgaggtggaa

SEQ ID NO: 899263 - DNA, 25 bp, Homo sapien
ttcctggaactgtgggttatttaca

SEQ ID NO: 899264 - DNA, 25 bp, Homo sapien
ctttcccgtcaccacggctttgata

SEQ ID NO: 899265 - DNA, 25 bp, Homo sapien
tctttcatatgagggcagtcctttc

SEQ ID NO: 899266 - DNA, 25 bp, Homo sapien
acggctttgatatctgccaccggca

SEQ ID NO: 899267 - DNA, 25 bp, Homo sapien
tctctttcatatgagggcagtcctt

SEQ ID NO: 899268 - DNA, 25 bp, Homo sapien
tcagggtcaccagtgaagaacgcac

SEQ ID NO: 899269 - DNA, 25 bp, Homo sapien
gatgaggccttttgtgtggaagcaa

SEQ ID NO: 899270 - DNA, 25 bp, Homo sapien
gaagcaagataaagaagtgggctcc

SEQ ID NO: 899271 - DNA, 25 bp, Homo sapien
tctagatgcaccagaagattaggca

SEQ ID NO: 899272 - DNA, 25 bp, Homo sapien
tcagtggccactgcgaaaagctgtg

SEQ ID NO: 899273 - DNA, 25 bp, Homo sapien
cacatatgtgcagaaggatacagtc

SEQ ID NO: 899274 - DNA, 25 bp, Homo sapien
tacttgtgcagataaatagatccac

SEQ ID NO: 899275 - DNA, 25 bp, Homo sapien
cacactctcccacaaggtgtggata

SEQ ID NO: 899276 - DNA, 25 bp, Homo sapien
ctggaactgtgaaaggaggatcctc

SEQ ID NO: 899277 - DNA, 25 bp, Homo sapien
cagggaccacgtttagagaaccgct

SEQ ID NO: 899278 - DNA, 25 bp, Homo sapien
gaaacttgtgcatgtcagaactggc

SEQ ID NO: 899279 - DNA, 25 bp, Homo sapien
gaaccgctggtctagcttggccaag

SEQ ID NO: 899280 - DNA, 25 bp, Homo sapien
ctcttctaagtctccgtaatgcagg

SEQ ID NO: 899281 - DNA, 25 bp, Homo sapien
gtctccgtaatgcaggactttgtga

SEQ ID NO: 899282 - DNA, 25 bp, Homo sapien
gaatcgtggggcacttctccctgag

SEQ ID NO: 899283 - DNA, 25 bp, Homo sapien
tggcgaaagccgacaataccaaaac

SEQ ID NO: 899284 - DNA, 25 bp, Homo sapien
cctgccctacgtggctgtgatgacc

SEQ ID NO: 899285 - DNA, 25 bp, Homo sapien
catctaggtgatacgtttggctgtg

SEQ ID NO: 899286 - DNA, 25 bp, Homo sapien
ctgtgtgagcgactaaagggtgata

SEQ ID NO: 899287 - DNA, 25 bp, Homo sapien
gccaactggagaaatctgctataaa

SEQ ID NO: 899288 - DNA, 25 bp, Homo sapien
aaggcttagacgttgtgtatttctg

SEQ ID NO: 899289 - DNA, 25 bp, Homo sapien
tgtgtatttctgtcttgaagggaga

SEQ ID NO: 899290 - DNA, 25 bp, Homo sapien
tagcatcagcacagtgcgtcgacat

SEQ ID NO: 899291 - DNA, 25 bp, Homo sapien
tgaagggagagccactacaaggata

SEQ ID NO: 899292 - DNA, 25 bp, Homo sapien
ggtgagacagtttcagtgtcagcca

SEQ ID NO: 899293 - DNA, 25 bp, Homo sapien
gttgggtgagacagtttcagtgtca

SEQ ID NO: 899294 - DNA, 25 bp, Homo sapien
tgagacagtttcagtgtcagccacc

SEQ ID NO: 899295 - DNA, 25 bp, Homo sapien
gacagtttcagtgtcagccaccagc

SEQ ID NO: 899296 - DNA, 25 bp, Homo sapien
ctaggagagtgtggtatgaagactc

SEQ ID NO: 899297 - DNA, 25 bp, Homo sapien
ccataactggtgttcttagtatagc

SEQ ID NO: 899298 - DNA, 25 bp, Homo sapien
tgcttctaggagagtgtggtatgaa

SEQ ID NO: 899299 - DNA, 25 bp, Homo sapien
cttagtatagctgctaatgcctgtg

SEQ ID NO: 899300 - DNA, 25 bp, Homo sapien
ccgtaaaccaacaccatgcccttgt

SEQ ID NO: 899301 - DNA, 25 bp, Homo sapien
aaccaacaccatgcccttgtgattc

SEQ ID NO: 899302 - DNA, 25 bp, Homo sapien
taaaccaacaccatgcccttgtgat

SEQ ID NO: 899303 - DNA, 25 bp, Homo sapien
gtaaaccaacaccatgcccttgtga

SEQ ID NO: 899304 - DNA, 25 bp, Homo sapien
tccaagtttggagtgtccccagaaa

SEQ ID NO: 899305 - DNA, 25 bp, Homo sapien
cctatccaagtttggagtgtcccca

SEQ ID NO: 899306 - DNA, 25 bp, Homo sapien
tttggagtgtccccagaaacaatac

SEQ ID NO: 899307 - DNA, 25 bp, Homo sapien
agtttggagtgtccccagaaacaat

SEQ ID NO: 899308 - DNA, 25 bp, Homo sapien
caaggcggttcaggcgttgctgttt

SEQ ID NO: 899309 - DNA, 25 bp, Homo sapien
ttgcctccgccgggcattgagtttc

SEQ ID NO: 899310 - DNA, 25 bp, Homo sapien
ccacaaggcggttcaggcgttgctg

SEQ ID NO: 899311 - DNA, 25 bp, Homo sapien
cattgagtttcctaaagcaggtccc

SEQ ID NO: 899312 - DNA, 25 bp, Homo sapien
gagcatctaatacctccaacttggt

SEQ ID NO: 899313 - DNA, 25 bp, Homo sapien
gggcatcatgggcatacgggcaggg

SEQ ID NO: 899314 - DNA, 25 bp, Homo sapien
agtgtggcttggtgggcatcatggg

SEQ ID NO: 899315 - DNA, 25 bp, Homo sapien
aaaacacatattccacagcatgcct

SEQ ID NO: 899316 - DNA, 25 bp, Homo sapien
tctttagcgaggatgcagatttgca

SEQ ID NO: 899317 - DNA, 25 bp, Homo sapien
tttcagtgaagcatgcggctgatct

SEQ ID NO: 899318 - DNA, 25 bp, Homo sapien
ctttcccatggatttctattgtcct

SEQ ID NO: 899319 - DNA, 25 bp, Homo sapien
gcggctgatctttagcgaggatgca

SEQ ID NO: 899320 - DNA, 25 bp, Homo sapien
tcttgtcaaggctagctggtgctca

SEQ ID NO: 899321 - DNA, 25 bp, Homo sapien
tctggctgaggaccaatgcaaaacc

SEQ ID NO: 899322 - DNA, 25 bp, Homo sapien
gaagggttctactccacagtttcca

SEQ ID NO: 899323 - DNA, 25 bp, Homo sapien
tcatgccaactagtctgaagggttc

SEQ ID NO: 899324 - DNA, 25 bp, Homo sapien
taggcttggttgtaagtgctctcat

SEQ ID NO: 899325 - DNA, 25 bp, Homo sapien
aaatcttcctggttcatcctctcgg

SEQ ID NO: 899326 - DNA, 25 bp, Homo sapien
cggactggcggattttcaggatctc

SEQ ID NO: 899327 - DNA, 25 bp, Homo sapien
tcgggcgggactggaaatcttcctg

SEQ ID NO: 899328 - DNA, 25 bp, Homo sapien
aatgccccacatcctttatggtaca

SEQ ID NO: 899329 - DNA, 25 bp, Homo sapien
tatagccaaagtacctaatatactg

SEQ ID NO: 899330 - DNA, 25 bp, Homo sapien
ccttagtttgctcattgtagagtgc

SEQ ID NO: 899331 - DNA, 25 bp, Homo sapien
gcatcagctggccacttggtaggaa

SEQ ID NO: 899332 - DNA, 25 bp, Homo sapien
gccaacaaggtttataaagcacact

SEQ ID NO: 899333 - DNA, 25 bp, Homo sapien
ccaaagaacaaagcccgtggccgtg

SEQ ID NO: 899334 - DNA, 25 bp, Homo sapien
gatggcatcttagggctccagaggt

SEQ ID NO: 899335 - DNA, 25 bp, Homo sapien
cagaattatgagtctgccaacaagg

SEQ ID NO: 899336 - DNA, 25 bp, Homo sapien
gggatagatctacagccaagtggag

SEQ ID NO: 899337 - DNA, 25 bp, Homo sapien
gttggaaggggatagatctacagcc

SEQ ID NO: 899338 - DNA, 25 bp, Homo sapien
tttgggcttgcttccagggcagagt

SEQ ID NO: 899339 - DNA, 25 bp, Homo sapien
tagatctacagccaagtggagggtt

SEQ ID NO: 899340 - DNA, 25 bp, Homo sapien
ggagtagcagttgaggtttctgaat

SEQ ID NO: 899341 - DNA, 25 bp, Homo sapien
tgcatgcaggacattttgctgagtg

SEQ ID NO: 899342 - DNA, 25 bp, Homo sapien
tcgtgcatattaaaatgaaggagag

SEQ ID NO: 899343 - DNA, 25 bp, Homo sapien
cattttgctgagtggtgtcgtgcat

SEQ ID NO: 899344 - DNA, 25 bp, Homo sapien
cctgagttattcttgaatgcaaacc

SEQ ID NO: 899345 - DNA, 25 bp, Homo sapien
tcttcctgagttattcttgaatgca

SEQ ID NO: 899346 - DNA, 25 bp, Homo sapien
gagttattcttgaatgcaaaccact

SEQ ID NO: 899347 - DNA, 25 bp, Homo sapien
tattcttgaatgcaaaccactgaca

SEQ ID NO: 899348 - DNA, 25 bp, Homo sapien
atttgtgaccatccgtaactctgag

SEQ ID NO: 899349 - DNA, 25 bp, Homo sapien
tgaccatccgtaactctgagggtgt

SEQ ID NO: 899350 - DNA, 25 bp, Homo sapien
ctggatttgtgaccatccgtaactc

SEQ ID NO: 899351 - DNA, 25 bp, Homo sapien
ttgtgaccatccgtaactctgaggg

SEQ ID NO: 899352 - DNA, 25 bp, Homo sapien
aataatgaaacttcttgagcttggg

SEQ ID NO: 899353 - DNA, 25 bp, Homo sapien
tgatggcaagtgatgtagcaatgat

SEQ ID NO: 899354 - DNA, 25 bp, Homo sapien
tgcatgttgacgaaagtcaggaatt

SEQ ID NO: 899355 - DNA, 25 bp, Homo sapien
agcttgggaacctgcatgttgacga

SEQ ID NO: 899356 - DNA, 25 bp, Homo sapien
cttgttactgcccacagttttccta

SEQ ID NO: 899357 - DNA, 25 bp, Homo sapien
aaagagctgagtcctccgcttgtta

SEQ ID NO: 899358 - DNA, 25 bp, Homo sapien
tgttactgcccacagttttcctaaa

SEQ ID NO: 899359 - DNA, 25 bp, Homo sapien
tgagtcctccgcttgttactgccca

SEQ ID NO: 899360 - DNA, 25 bp, Homo sapien
gacagcacggataggattggtactc

SEQ ID NO: 899361 - DNA, 25 bp, Homo sapien
tgagaagcatgtggagggcatcagg

SEQ ID NO: 899362 - DNA, 25 bp, Homo sapien
gacaccacctgctacttgaggccag

SEQ ID NO: 899363 - DNA, 25 bp, Homo sapien
ctgcttgggcgggtccctcagacac

SEQ ID NO: 899364 - DNA, 25 bp, Homo sapien
gatcaggcactgtgtagggacctgc

SEQ ID NO: 899365 - DNA, 25 bp, Homo sapien
cactgtgtagggacctgctttagca

SEQ ID NO: 899366 - DNA, 25 bp, Homo sapien
ctggatcaggcactgtgtagggacc

SEQ ID NO: 899367 - DNA, 25 bp, Homo sapien
ctgctttagcaagggcagccaacat

SEQ ID NO: 899368 - DNA, 25 bp, Homo sapien
tgttctctgccaggaacaaccaccc

SEQ ID NO: 899369 - DNA, 25 bp, Homo sapien
gttctctgccaggaacaaccaccca

SEQ ID NO: 899370 - DNA, 25 bp, Homo sapien
ttctctgccaggaacaaccacccac

SEQ ID NO: 899371 - DNA, 25 bp, Homo sapien
gtgttctctgccaggaacaaccacc

SEQ ID NO: 899372 - DNA, 25 bp, Homo sapien
gagaaagggatctattctggaaagg

SEQ ID NO: 899373 - DNA, 25 bp, Homo sapien
gatcaatgcgtcctttcctcgctgc

SEQ ID NO: 899374 - DNA, 25 bp, Homo sapien
cactaaaaggatggcaccccaagca

SEQ ID NO: 899375 - DNA, 25 bp, Homo sapien
tgtgcttggttttgccatgccacta

SEQ ID NO: 899376 - DNA, 25 bp, Homo sapien
ccagtggcagctaggtacaggaagc

SEQ ID NO: 899377 - DNA, 25 bp, Homo sapien
actgaaactggccagtggcagctag

SEQ ID NO: 899378 - DNA, 25 bp, Homo sapien
gtggcagctaggtacaggaagctat

SEQ ID NO: 899379 - DNA, 25 bp, Homo sapien
tgctggggctttgactgaaactggc

SEQ ID NO: 899380 - DNA, 25 bp, Homo sapien
ctatggaaagtgttcagagtctccc

SEQ ID NO: 899381 - DNA, 25 bp, Homo sapien
aagtgttcagagtctcccaatgcac

SEQ ID NO: 899382 - DNA, 25 bp, Homo sapien
ggaaagtgttcagagtctcccaatg

SEQ ID NO: 899383 - DNA, 25 bp, Homo sapien
tatggaaagtgttcagagtctccca

SEQ ID NO: 899384 - DNA, 25 bp, Homo sapien
caagttccagtacctgtctccatgg

SEQ ID NO: 899385 - DNA, 25 bp, Homo sapien
tggtcatggaggatgggcacaccac

SEQ ID NO: 899386 - DNA, 25 bp, Homo sapien
gaaggctgtgtctagactttcccac

SEQ ID NO: 899387 - DNA, 25 bp, Homo sapien
tccagtaggctctctcaagttccag

SEQ ID NO: 899388 - DNA, 25 bp, Homo sapien
cctccttttcctgaacgtgttacat

SEQ ID NO: 899389 - DNA, 25 bp, Homo sapien
ggaagaaccccaaattccagactga

SEQ ID NO: 899390 - DNA, 25 bp, Homo sapien
gaagaaccccaaattccagactgag

SEQ ID NO: 899391 - DNA, 25 bp, Homo sapien
ttcctgaacgtgttacataaggaag

SEQ ID NO: 899392 - DNA, 25 bp, Homo sapien
ctgccagaaaggcagcgggcctgag

SEQ ID NO: 899393 - DNA, 25 bp, Homo sapien
aaaggcagcgggcctgaggcttcat

SEQ ID NO: 899394 - DNA, 25 bp, Homo sapien
cagaaaggcagcgggcctgaggctt

SEQ ID NO: 899395 - DNA, 25 bp, Homo sapien
gccagaaaggcagcgggcctgaggc

SEQ ID NO: 899396 - DNA, 25 bp, Homo sapien
gcaggacttcaagttgcccgtccca

SEQ ID NO: 899397 - DNA, 25 bp, Homo sapien
tatttactgagtttccgctaagcct

SEQ ID NO: 899398 - DNA, 25 bp, Homo sapien
tcccatctgaatgacaacagctctg

SEQ ID NO: 899399 - DNA, 25 bp, Homo sapien
ttggtatggaaaggtctgaaatgtg

SEQ ID NO: 899400 - DNA, 25 bp, Homo sapien
cagagtagatcctattccaacttgg

SEQ ID NO: 899401 - DNA, 25 bp, Homo sapien
gggctcaagtactcatagaacaact

SEQ ID NO: 899402 - DNA, 25 bp, Homo sapien
gatctgctccaagacttaacctagt

SEQ ID NO: 899403 - DNA, 25 bp, Homo sapien
gacttggccacttaccgaagacaga

SEQ ID NO: 899404 - DNA, 25 bp, Homo sapien
gcatgatgagagaccctatcactga

SEQ ID NO: 899405 - DNA, 25 bp, Homo sapien
gattttcacggagactcacacaaga

SEQ ID NO: 899406 - DNA, 25 bp, Homo sapien
tggaaacggcaccacttcttattcc

SEQ ID NO: 899407 - DNA, 25 bp, Homo sapien
tctgctgattttcacggagactcac

SEQ ID NO: 899408 - DNA, 25 bp, Homo sapien
tgactggcatgctcattattaacat

SEQ ID NO: 899409 - DNA, 25 bp, Homo sapien
actgggtggattgactggcatgctc

SEQ ID NO: 899410 - DNA, 25 bp, Homo sapien
catcaacaaggtgcccgggacagct

SEQ ID NO: 899411 - DNA, 25 bp, Homo sapien
ggagatgagcgactcctgactgggt

SEQ ID NO: 899412 - DNA, 25 bp, Homo sapien
gcctctcttgacatactactcttga

SEQ ID NO: 899413 - DNA, 25 bp, Homo sapien
gctctgtcgccccagctaaagtaca

SEQ ID NO: 899414 - DNA, 25 bp, Homo sapien
aagatggacatcacacaagagcccc

SEQ ID NO: 899415 - DNA, 25 bp, Homo sapien
atattttaggtctgcagctgaagtc

SEQ ID NO: 899416 - DNA, 25 bp, Homo sapien
tcacagcaatgctgcagcccaggtg

SEQ ID NO: 899417 - DNA, 25 bp, Homo sapien
gcatctacatacaagttcctgaggg

SEQ ID NO: 899418 - DNA, 25 bp, Homo sapien
tgctagcagcaagcagggtaatctg

SEQ ID NO: 899419 - DNA, 25 bp, Homo sapien
ttcatgatctggacagcagacccca

SEQ ID NO: 899420 - DNA, 25 bp, Homo sapien
catctaactgctcaaaaatcttttt

SEQ ID NO: 899421 - DNA, 25 bp, Homo sapien
ggtttgatatttatgaataccttgc

SEQ ID NO: 899422 - DNA, 25 bp, Homo sapien
cattaattgaatggaaacatctaac

SEQ ID NO: 899423 - DNA, 25 bp, Homo sapien
tggtttgatatttatgaataccttg

SEQ ID NO: 899424 - DNA, 25 bp, Homo sapien
tgaaggcacggatttgaagaccaaa

SEQ ID NO: 899425 - DNA, 25 bp, Homo sapien
aacagagttaccttctcagttatgg

SEQ ID NO: 899426 - DNA, 25 bp, Homo sapien
gatagcaattaaatcactccttagc

SEQ ID NO: 899427 - DNA, 25 bp, Homo sapien
gcctgaatttatacttgtcttcatg

SEQ ID NO: 899428 - DNA, 25 bp, Homo sapien
gaaatggacattgactctaacgagc

SEQ ID NO: 899429 - DNA, 25 bp, Homo sapien
ggtgccagcacttcgctcatgtaaa

SEQ ID NO: 899430 - DNA, 25 bp, Homo sapien
gacttcctcaaaatcgagcatcgag

SEQ ID NO: 899431 - DNA, 25 bp, Homo sapien
tcattcttaccaacaggtgccagca

SEQ ID NO: 899432 - DNA, 25 bp, Homo sapien
tcggtgcttgggttgcatcttgcca

SEQ ID NO: 899433 - DNA, 25 bp, Homo sapien
tagaagggtccctacaggcaaagag

SEQ ID NO: 899434 - DNA, 25 bp, Homo sapien
gattataactcgtctggaatcctgc

SEQ ID NO: 899435 - DNA, 25 bp, Homo sapien
aaagagtttctcgttccccacgctg

SEQ ID NO: 899436 - DNA, 25 bp, Homo sapien
caacacaatcaagcggctccgggct

SEQ ID NO: 899437 - DNA, 25 bp, Homo sapien
aacacaatcaagcggctccgggctc

SEQ ID NO: 899438 - DNA, 25 bp, Homo sapien
agcaacacaatcaagcggctccggg

SEQ ID NO: 899439 - DNA, 25 bp, Homo sapien
gcaacacaatcaagcggctccgggc

SEQ ID NO: 899440 - DNA, 25 bp, Homo sapien
cacatgtgtgagacggaggtttact

SEQ ID NO: 899441 - DNA, 25 bp, Homo sapien
tctcggcagacaataggacaaagct

SEQ ID NO: 899442 - DNA, 25 bp, Homo sapien
tacagtcagctacaaatcggatcag

SEQ ID NO: 899443 - DNA, 25 bp, Homo sapien
tcatgggaacccttgaatgcccgct

SEQ ID NO: 899444 - DNA, 25 bp, Homo sapien
aaatactgattctaagctgctgcca

SEQ ID NO: 899445 - DNA, 25 bp, Homo sapien
gctgccaccacaaagcgacttagag

SEQ ID NO: 899446 - DNA, 25 bp, Homo sapien
caaagggcgcctccatttcagggaa

SEQ ID NO: 899447 - DNA, 25 bp, Homo sapien
gaaagatcagccaatcaaagggcgc

SEQ ID NO: 899448 - DNA, 25 bp, Homo sapien
actgccctagtaaggagactcctga

SEQ ID NO: 899449 - DNA, 25 bp, Homo sapien
gataaacaacgctgagtcctcccag

SEQ ID NO: 899450 - DNA, 25 bp, Homo sapien
gcgccgtctgcaccactatgaagtt

SEQ ID NO: 899451 - DNA, 25 bp, Homo sapien
tcatgatgagacttacagaccacct

SEQ ID NO: 899452 - DNA, 25 bp, Homo sapien
ctcaaaggatctgtcgtgggtgaag

SEQ ID NO: 899453 - DNA, 25 bp, Homo sapien
tggaagtcgttgcaggtctcactag

SEQ ID NO: 899454 - DNA, 25 bp, Homo sapien
ggtgaagaacatcgggtggaagtcg

SEQ ID NO: 899455 - DNA, 25 bp, Homo sapien
aaggatctgtcgtgggtgaagaaca

SEQ ID NO: 899456 - DNA, 25 bp, Homo sapien
cacagcaagtgcgtagccagtgcct

SEQ ID NO: 899457 - DNA, 25 bp, Homo sapien
cgcaccgggcactgaatgatggact

SEQ ID NO: 899458 - DNA, 25 bp, Homo sapien
tgctgactgagaacactcggccatg

SEQ ID NO: 899459 - DNA, 25 bp, Homo sapien
tcggccatgagatagcagtaccaag

SEQ ID NO: 899460 - DNA, 25 bp, Homo sapien
tggcataggcttagtaaacggtggc

SEQ ID NO: 899461 - DNA, 25 bp, Homo sapien
aatctggtgaatggcctttagggtc

SEQ ID NO: 899462 - DNA, 25 bp, Homo sapien
ctttagggtcccatagataagcggg

SEQ ID NO: 899463 - DNA, 25 bp, Homo sapien
cataagccatcaggcacagctagtt

SEQ ID NO: 899464 - DNA, 25 bp, Homo sapien
gagtatccctgaacatacaccacag

SEQ ID NO: 899465 - DNA, 25 bp, Homo sapien
gcacagatcgtggagtatccctgaa

SEQ ID NO: 899466 - DNA, 25 bp, Homo sapien
tgttccacttcaggcacagatcgtg

SEQ ID NO: 899467 - DNA, 25 bp, Homo sapien
acatgcttttcttctatgtggcttt

SEQ ID NO: 899468 - DNA, 25 bp, Homo sapien
gaattcccggtattttgctgctcac

SEQ ID NO: 899469 - DNA, 25 bp, Homo sapien
tgctgctcactggagaagtatttcc

SEQ ID NO: 899470 - DNA, 25 bp, Homo sapien
cacagaactaacaagagggagagcc

SEQ ID NO: 899471 - DNA, 25 bp, Homo sapien
gagtaaaggatcttgcccagactca

SEQ ID NO: 899472 - DNA, 25 bp, Homo sapien
tcgtgttcacggcagtgtgaatttt

SEQ ID NO: 899473 - DNA, 25 bp, Homo sapien
caaggctggatcgtgttcacggcag

SEQ ID NO: 899474 - DNA, 25 bp, Homo sapien
tggatcgtgttcacggcagtgtgaa

SEQ ID NO: 899475 - DNA, 25 bp, Homo sapien
cacactgcaaggctggatcgtgttc

SEQ ID NO: 899476 - DNA, 25 bp, Homo sapien
ttactacgccggtatgaagctatga

SEQ ID NO: 899477 - DNA, 25 bp, Homo sapien
tacagctaagctctgggatggaggt

SEQ ID NO: 899478 - DNA, 25 bp, Homo sapien
tactagcatcgtcaatagagaccct

SEQ ID NO: 899479 - DNA, 25 bp, Homo sapien
gacatgggaactcagtgtgctctct

SEQ ID NO: 899480 - DNA, 25 bp, Homo sapien
ctgcttcctgcaaatcccgtgattg

SEQ ID NO: 899481 - DNA, 25 bp, Homo sapien
tatctagataacaaccactatgagg

SEQ ID NO: 899482 - DNA, 25 bp, Homo sapien
tatctcataggctctgagaggcgaa

SEQ ID NO: 899483 - DNA, 25 bp, Homo sapien
gatagccttcctaggtaggcagagc

SEQ ID NO: 899484 - DNA, 25 bp, Homo sapien
taatgtaccaccttggactcaggac

SEQ ID NO: 899485 - DNA, 25 bp, Homo sapien
gggccgggattcttctctgaccata

SEQ ID NO: 899486 - DNA, 25 bp, Homo sapien
taaaactatgtgatgcgtccagctc

SEQ ID NO: 899487 - DNA, 25 bp, Homo sapien
catgttttaagagcgaccaccctgt

SEQ ID NO: 899488 - DNA, 25 bp, Homo sapien
gctcaagcaattctggtgccccaac

SEQ ID NO: 899489 - DNA, 25 bp, Homo sapien
tgggacaacacaccaccacacacag

SEQ ID NO: 899490 - DNA, 25 bp, Homo sapien
tagctgggacaacacaccaccacac

SEQ ID NO: 899491 - DNA, 25 bp, Homo sapien
gagcctccgcgcccagccttttttg

SEQ ID NO: 899492 - DNA, 25 bp, Homo sapien
tgtcttctgtgcaggtttttataaa

SEQ ID NO: 899493 - DNA, 25 bp, Homo sapien
tcaaagtagtcacggtaccagctgg

SEQ ID NO: 899494 - DNA, 25 bp, Homo sapien
gaattatcagataaacaggcaagag

SEQ ID NO: 899495 - DNA, 25 bp, Homo sapien
cacagctccttatccaaatctcaaa

SEQ ID NO: 899496 - DNA, 25 bp, Homo sapien
caggcaagaggtgcaacctgaattg

SEQ ID NO: 899497 - DNA, 25 bp, Homo sapien
ggcactactatgtagcaatctccag

SEQ ID NO: 899498 - DNA, 25 bp, Homo sapien
tcttgtcctagcaggaatgctactg

SEQ ID NO: 899499 - DNA, 25 bp, Homo sapien
catgcatgcctacagtaattcagag

SEQ ID NO: 899500 - DNA, 25 bp, Homo sapien
aaccccttgtagatagcatgcatgc

SEQ ID NO: 899501 - DNA, 25 bp, Homo sapien
ctcccttcagccatgtcaaaaagcg

SEQ ID NO: 899502 - DNA, 25 bp, Homo sapien
ttcccactacatccacgtctccctt

SEQ ID NO: 899503 - DNA, 25 bp, Homo sapien
cagccatgtcaaaaagcggttgtga

SEQ ID NO: 899504 - DNA, 25 bp, Homo sapien
tgtcaaaaagcggttgtgactcatc

SEQ ID NO: 899505 - DNA, 25 bp, Homo sapien
ggcttctgtgaccagtggatgcaga

SEQ ID NO: 899506 - DNA, 25 bp, Homo sapien
gaccagtggatgcagatacagaaat

SEQ ID NO: 899507 - DNA, 25 bp, Homo sapien
tgtgaccagtggatgcagatacaga

SEQ ID NO: 899508 - DNA, 25 bp, Homo sapien
cagtggatgcagatacagaaatgac

SEQ ID NO: 899509 - DNA, 25 bp, Homo sapien
tgcagtacccacaactggaccactg

SEQ ID NO: 899510 - DNA, 25 bp, Homo sapien
gagtggtgccaattctagtgggcac

SEQ ID NO: 899511 - DNA, 25 bp, Homo sapien
cacatctgtgttaagccttgggtcc

SEQ ID NO: 899512 - DNA, 25 bp, Homo sapien
cactgcatccagttgagtggtgcca

SEQ ID NO: 899513 - DNA, 25 bp, Homo sapien
tgactcccttagtgatcaccagaag

SEQ ID NO: 899514 - DNA, 25 bp, Homo sapien
atttgtggcgggctttacaccctga

SEQ ID NO: 899515 - DNA, 25 bp, Homo sapien
tgaagtgttagaagactgactccct

SEQ ID NO: 899516 - DNA, 25 bp, Homo sapien
gggaaattatattaccaatcgcagg

SEQ ID NO: 899517 - DNA, 25 bp, Homo sapien
agggaatctgtccaggctttcatca

SEQ ID NO: 899518 - DNA, 25 bp, Homo sapien
tttcatcagactgactggaggtact

SEQ ID NO: 899519 - DNA, 25 bp, Homo sapien
tgactggaggtactgacgcgaaatg

SEQ ID NO: 899520 - DNA, 25 bp, Homo sapien
ggtactgacgcgaaatgattctgtg

SEQ ID NO: 899521 - DNA, 25 bp, Homo sapien
ctcatctgagagtacttggttaaag

SEQ ID NO: 899522 - DNA, 25 bp, Homo sapien
ttagttagcagtgtgatatcatcca

SEQ ID NO: 899523 - DNA, 25 bp, Homo sapien
gattgtgaaatgttccgaaaatctt

SEQ ID NO: 899524 - DNA, 25 bp, Homo sapien
taggaaaccaactggccctgattcc

SEQ ID NO: 899525 - DNA, 25 bp, Homo sapien
tggggacacccaagaaatgaccaag

SEQ ID NO: 899526 - DNA, 25 bp, Homo sapien
tacccattaggcacagtatcgccac

SEQ ID NO: 899527 - DNA, 25 bp, Homo sapien
attggctcaggatgtcccactcggg

SEQ ID NO: 899528 - DNA, 25 bp, Homo sapien
aggcatcccattggctcaggatgtc

SEQ ID NO: 899529 - DNA, 25 bp, Homo sapien
gatcccaatggctccaaattaccac

SEQ ID NO: 899530 - DNA, 25 bp, Homo sapien
attttctcattagatcccaatggct

SEQ ID NO: 899531 - DNA, 25 bp, Homo sapien
ttctcattagatcccaatggctcca

SEQ ID NO: 899532 - DNA, 25 bp, Homo sapien
aatggctccaaattaccactcagag

SEQ ID NO: 899533 - DNA, 25 bp, Homo sapien
ggtaccctaaggagactatgctgtc

SEQ ID NO: 899534 - DNA, 25 bp, Homo sapien
tgactttggacacagataaaccctg

SEQ ID NO: 899535 - DNA, 25 bp, Homo sapien
ttatgtggcctagaaatgcagtgca

SEQ ID NO: 899536 - DNA, 25 bp, Homo sapien
tacagcaggcctaacgaatagtgga

SEQ ID NO: 899537 - DNA, 25 bp, Homo sapien
aaatttcttacgtggatctctggga

SEQ ID NO: 899538 - DNA, 25 bp, Homo sapien
ctgtcaaaaccagcaccaaaggtgg

SEQ ID NO: 899539 - DNA, 25 bp, Homo sapien
gggaagtggtttagacacgtgcatc

SEQ ID NO: 899540 - DNA, 25 bp, Homo sapien
cagagtacataaagccatgttaagt

SEQ ID NO: 899541 - DNA, 25 bp, Homo sapien
agataaactgggctgtgaaattaaa

SEQ ID NO: 899542 - DNA, 25 bp, Homo sapien
tctcctttccccaacaataatccat

SEQ ID NO: 899543 - DNA, 25 bp, Homo sapien
tcagataaactgggctgtgaaatta

SEQ ID NO: 899544 - DNA, 25 bp, Homo sapien
aaactgggctgtgaaattaaatcct

SEQ ID NO: 899545 - DNA, 25 bp, Homo sapien
taaattcatatatagggtataaata

SEQ ID NO: 899546 - DNA, 25 bp, Homo sapien
ctgcacctgaccactaaaattttta

SEQ ID NO: 899547 - DNA, 25 bp, Homo sapien
actctgcacctgaccactaaaattt

SEQ ID NO: 899548 - DNA, 25 bp, Homo sapien
gaattcaagaacaattatgtgacta

SEQ ID NO: 899549 - DNA, 25 bp, Homo sapien
gttccattggtgagtatctagcagc

SEQ ID NO: 899550 - DNA, 25 bp, Homo sapien
cgactgccagtgatggtatcatcct

SEQ ID NO: 899551 - DNA, 25 bp, Homo sapien
tgagggtgcacaacgctccaccaca

SEQ ID NO: 899552 - DNA, 25 bp, Homo sapien
gtgagtatctagcagcagcaggacc

SEQ ID NO: 899553 - DNA, 25 bp, Homo sapien
ggcactgcggctaagagccttccca

SEQ ID NO: 899554 - DNA, 25 bp, Homo sapien
tgtgtatctggcactgcggctaaga

SEQ ID NO: 899555 - DNA, 25 bp, Homo sapien
ctactatctcatgtaactgcctgtg

SEQ ID NO: 899556 - DNA, 25 bp, Homo sapien
gatgatagtgacaggcaatatctgc

SEQ ID NO: 899557 - DNA, 25 bp, Homo sapien
tatataataatgaatccgggcacga

SEQ ID NO: 899558 - DNA, 25 bp, Homo sapien
gcccatgatgctttcagaggcccct

SEQ ID NO: 899559 - DNA, 25 bp, Homo sapien
tcagaaggaaaacgtaaatagaata

SEQ ID NO: 899560 - DNA, 25 bp, Homo sapien
ggatgacctagtcaggaggcccagc

SEQ ID NO: 899561 - DNA, 25 bp, Homo sapien
gccccagtgctaacatgttaagtgt

SEQ ID NO: 899562 - DNA, 25 bp, Homo sapien
taaatacctgtcaatgggagacata

SEQ ID NO: 899563 - DNA, 25 bp, Homo sapien
ctgagcaaatgttcatcccggtgct

SEQ ID NO: 899564 - DNA, 25 bp, Homo sapien
tgggagataactgaaacacgggagc

SEQ ID NO: 899565 - DNA, 25 bp, Homo sapien
tagataccgctgtttccacgtaaag

SEQ ID NO: 899566 - DNA, 25 bp, Homo sapien
ggcattataatggagtggccaccaa

SEQ ID NO: 899567 - DNA, 25 bp, Homo sapien
ggataggtatgacttgcagaaatgt

SEQ ID NO: 899568 - DNA, 25 bp, Homo sapien
caaacctagcccagaggatgcttgc

SEQ ID NO: 899569 - DNA, 25 bp, Homo sapien
tgaggttgcctattccccaggagcc

SEQ ID NO: 899570 - DNA, 25 bp, Homo sapien
tccgtgctttgaggttgcctattcc

SEQ ID NO: 899571 - DNA, 25 bp, Homo sapien
ctttggtccgtgctttgaggttgcc

SEQ ID NO: 899572 - DNA, 25 bp, Homo sapien
agaggtaagtcctttggtccgtgct

SEQ ID NO: 899573 - DNA, 25 bp, Homo sapien
gccaccatctgaagggacctggctc

SEQ ID NO: 899574 - DNA, 25 bp, Homo sapien
ctacagccaccatctgaagggacct

SEQ ID NO: 899575 - DNA, 25 bp, Homo sapien
gagctgcccctgatagcctggcttc

SEQ ID NO: 899576 - DNA, 25 bp, Homo sapien
gacaggcagccagaagacctgccag

SEQ ID NO: 899577 - DNA, 25 bp, Homo sapien
taacccgtgggtccaagcttgagat

SEQ ID NO: 899578 - DNA, 25 bp, Homo sapien
ggaaaacgacatccactagcattgg

SEQ ID NO: 899579 - DNA, 25 bp, Homo sapien
aacaccgttgacctgctttgggaag

SEQ ID NO: 899580 - DNA, 25 bp, Homo sapien
gaattaggcggcagtgcgtctctct

SEQ ID NO: 899581 - DNA, 25 bp, Homo sapien
agcatctgggttttcacattgagct

SEQ ID NO: 899582 - DNA, 25 bp, Homo sapien
cttgcttccctgagacaaatgaata

SEQ ID NO: 899583 - DNA, 25 bp, Homo sapien
aatatttgagccaaattcagtgtcc

SEQ ID NO: 899584 - DNA, 25 bp, Homo sapien
tcatgtgagatggagcactgacctg

SEQ ID NO: 899585 - DNA, 25 bp, Homo sapien
tgcataagcaagagtacaagctcgt

SEQ ID NO: 899586 - DNA, 25 bp, Homo sapien
caagatctgagagcattccactttg

SEQ ID NO: 899587 - DNA, 25 bp, Homo sapien
ccaatgtcccagagttaagtgtcta

SEQ ID NO: 899588 - DNA, 25 bp, Homo sapien
attatacaaggtgctccactcggca

SEQ ID NO: 899589 - DNA, 25 bp, Homo sapien
aaattactcatcttctaactaggac

SEQ ID NO: 899590 - DNA, 25 bp, Homo sapien
acacatccggccctaaaattactca

SEQ ID NO: 899591 - DNA, 25 bp, Homo sapien
cattatctcatttcaggctccaacc

SEQ ID NO: 899592 - DNA, 25 bp, Homo sapien
taactaggacaacatccattatctc

SEQ ID NO: 899593 - DNA, 25 bp, Homo sapien
gagagtgttacagccttcaactgaa

SEQ ID NO: 899594 - DNA, 25 bp, Homo sapien
cctaaattccagtttgagctcagta

SEQ ID NO: 899595 - DNA, 25 bp, Homo sapien
taaactcagatacgcagtaggtgca

SEQ ID NO: 899596 - DNA, 25 bp, Homo sapien
ccacgctattagaggtaacatttgc

SEQ ID NO: 899597 - DNA, 25 bp, Homo sapien
tcttggtcagctctatactactgcg

SEQ ID NO: 899598 - DNA, 25 bp, Homo sapien
cgcccactttcaagatctcacatag

SEQ ID NO: 899599 - DNA, 25 bp, Homo sapien
gacattcatgcttgtcttctcgact

SEQ ID NO: 899600 - DNA, 25 bp, Homo sapien
tactactgcggccaaagggacattc

SEQ ID NO: 899601 - DNA, 25 bp, Homo sapien
ggaatagtatcaggcaactccccag

SEQ ID NO: 899602 - DNA, 25 bp, Homo sapien
tcctcttatggagactcgggagtca

SEQ ID NO: 899603 - DNA, 25 bp, Homo sapien
taaagcgttccagccaccatagggc

SEQ ID NO: 899604 - DNA, 25 bp, Homo sapien
ggtgtttctggcaataaagtcctca

SEQ ID NO: 899605 - DNA, 25 bp, Homo sapien
tgggtttcctcaagttcttttagca

SEQ ID NO: 899606 - DNA, 25 bp, Homo sapien
ggacaatgcggccacgtggatgaaa

SEQ ID NO: 899607 - DNA, 25 bp, Homo sapien
caatgcggccacgtggatgaaaaca

SEQ ID NO: 899608 - DNA, 25 bp, Homo sapien
tgcggccacgtggatgaaaacactc

SEQ ID NO: 899609 - DNA, 25 bp, Homo sapien
atgtgcctggtgtgcccccagggac

SEQ ID NO: 899610 - DNA, 25 bp, Homo sapien
tctgacagtaggttccttggggctc

SEQ ID NO: 899611 - DNA, 25 bp, Homo sapien
ctgtccagatcctcttttgtttgta

SEQ ID NO: 899612 - DNA, 25 bp, Homo sapien
cttcctgtccagatcctcttttgtt

SEQ ID NO: 899613 - DNA, 25 bp, Homo sapien
cattctgacagtaggttccttgggg

SEQ ID NO: 899614 - DNA, 25 bp, Homo sapien
gagcgtgttccagatagagatctac

SEQ ID NO: 899615 - DNA, 25 bp, Homo sapien
atccagagaggttagagcgtgttcc

SEQ ID NO: 899616 - DNA, 25 bp, Homo sapien
actccaggacggacaaaggccagaa

SEQ ID NO: 899617 - DNA, 25 bp, Homo sapien
cagatagagatctacttctgtggtt

SEQ ID NO: 899618 - DNA, 25 bp, Homo sapien
tattctaaactgaatcctttctcca

SEQ ID NO: 899619 - DNA, 25 bp, Homo sapien
ttattctaaactgaatcctttctcc

SEQ ID NO: 899620 - DNA, 25 bp, Homo sapien
ttctaaactgaatcctttctccaca

SEQ ID NO: 899621 - DNA, 25 bp, Homo sapien
ctaaactgaatcctttctccacatc

SEQ ID NO: 899622 - DNA, 25 bp, Homo sapien
tgcagcgcaccaagcgtgacccgaa

SEQ ID NO: 899623 - DNA, 25 bp, Homo sapien
cagctttgttgagtaggattttatc

SEQ ID NO: 899624 - DNA, 25 bp, Homo sapien
tatacaaattccgttgggtaacagc

SEQ ID NO: 899625 - DNA, 25 bp, Homo sapien
ttgcctcacccgacaaacgcaaggg

SEQ ID NO: 899626 - DNA, 25 bp, Homo sapien
taggtacataacaaaatgaaagtag

SEQ ID NO: 899627 - DNA, 25 bp, Homo sapien
aatgaaagtagaaataaagatgtac

SEQ ID NO: 899628 - DNA, 25 bp, Homo sapien
aaagtagaaataaagatgtactttg

SEQ ID NO: 899629 - DNA, 25 bp, Homo sapien
agtagaaataaagatgtactttgaa

SEQ ID NO: 899630 - DNA, 25 bp, Homo sapien
tattccagttccacctttgagagag

SEQ ID NO: 899631 - DNA, 25 bp, Homo sapien
agccctaggtttccttgccattgct

SEQ ID NO: 899632 - DNA, 25 bp, Homo sapien
ttccagttccacctttgagagagcc

SEQ ID NO: 899633 - DNA, 25 bp, Homo sapien
cctaggtttccttgccattgcttcc

SEQ ID NO: 899634 - DNA, 25 bp, Homo sapien
tacctcatcctgactgaatctgggt

SEQ ID NO: 899635 - DNA, 25 bp, Homo sapien
gatctcaatcttggatctacctcat

SEQ ID NO: 899636 - DNA, 25 bp, Homo sapien
tcttggatctacctcatcctgactg

SEQ ID NO: 899637 - DNA, 25 bp, Homo sapien
tatccttccctgatctcaatcttgg

SEQ ID NO: 899638 - DNA, 25 bp, Homo sapien
tgaaattaacattgagtaggaaaca

SEQ ID NO: 899639 - DNA, 25 bp, Homo sapien
aatccctccgtatttgtgagtttga

SEQ ID NO: 899640 - DNA, 25 bp, Homo sapien
aattaacattgagtaggaaacacac

SEQ ID NO: 899641 - DNA, 25 bp, Homo sapien
aaggtaatccctccgtatttgtgag

SEQ ID NO: 899642 - DNA, 25 bp, Homo sapien
atctgaaaaggggcttcttgcttac

SEQ ID NO: 899643 - DNA, 25 bp, Homo sapien
aatatctgaaaaggggcttcttgct

SEQ ID NO: 899644 - DNA, 25 bp, Homo sapien
atatctgaaaaggggcttcttgctt

SEQ ID NO: 899645 - DNA, 25 bp, Homo sapien
tatctgaaaaggggcttcttgctta

SEQ ID NO: 899646 - DNA, 25 bp, Homo sapien
caggtggagtctgcgtgaagtccat

SEQ ID NO: 899647 - DNA, 25 bp, Homo sapien
cccaggtggagtctgcgtgaagtcc

SEQ ID NO: 899648 - DNA, 25 bp, Homo sapien
cagagccaacatcccaggtggagtc

SEQ ID NO: 899649 - DNA, 25 bp, Homo sapien
atgttgtccagagccaacatcccag

SEQ ID NO: 899650 - DNA, 25 bp, Homo sapien
cagagatctgatttccctcctcaag

SEQ ID NO: 899651 - DNA, 25 bp, Homo sapien
tcttcagcagattttaccaaccacc

SEQ ID NO: 899652 - DNA, 25 bp, Homo sapien
gaagtgctacaaggtaaggtccaaa

SEQ ID NO: 899653 - DNA, 25 bp, Homo sapien
cctcctcaagagtgaagtgctacaa

SEQ ID NO: 899654 - DNA, 25 bp, Homo sapien
gaacaaccgcaggaacataccagga

SEQ ID NO: 899655 - DNA, 25 bp, Homo sapien
gactagttgcagcttccatttggaa

SEQ ID NO: 899656 - DNA, 25 bp, Homo sapien
tgggaggcaaccagcacactaaaca

SEQ ID NO: 899657 - DNA, 25 bp, Homo sapien
agaaggccgggctgatctgaactct

SEQ ID NO: 899658 - DNA, 25 bp, Homo sapien
ggtgtgataccccaggttcaatgaa

SEQ ID NO: 899659 - DNA, 25 bp, Homo sapien
gttcaatgaagctctaagaccacct

SEQ ID NO: 899660 - DNA, 25 bp, Homo sapien
gaccacctccaagtgtcactaaggg

SEQ ID NO: 899661 - DNA, 25 bp, Homo sapien
taagggaatatcctccctgaaaatg

SEQ ID NO: 899662 - DNA, 25 bp, Homo sapien
catggattagcagtatcaagacaaa

SEQ ID NO: 899663 - DNA, 25 bp, Homo sapien
gacatttgaacccaaccgtccagag

SEQ ID NO: 899664 - DNA, 25 bp, Homo sapien
gttaactacatgatggaaaatcgac

SEQ ID NO: 899665 - DNA, 25 bp, Homo sapien
gaaaatcgactgtagggaacactat

SEQ ID NO: 899666 - DNA, 25 bp, Homo sapien
cattggtatgaaatcctcccctgtg

SEQ ID NO: 899667 - DNA, 25 bp, Homo sapien
atatgcacagtctttgtaaaaccat

SEQ ID NO: 899668 - DNA, 25 bp, Homo sapien
tcccctgtgtagaaaatagcatgct

SEQ ID NO: 899669 - DNA, 25 bp, Homo sapien
aaaccattctgaacacattggtatg

SEQ ID NO: 899670 - DNA, 25 bp, Homo sapien
ggtcacgtgccgacatcatcacaag

SEQ ID NO: 899671 - DNA, 25 bp, Homo sapien
acgtgccgacatcatcacaagattt

SEQ ID NO: 899672 - DNA, 25 bp, Homo sapien
tcacgtgccgacatcatcacaagat

SEQ ID NO: 899673 - DNA, 25 bp, Homo sapien
gggtcacgtgccgacatcatcacaa

SEQ ID NO: 899674 - DNA, 25 bp, Homo sapien
gctgagcctcccagattcatgccat

SEQ ID NO: 899675 - DNA, 25 bp, Homo sapien
caagctgagcctcccagattcatgc

SEQ ID NO: 899676 - DNA, 25 bp, Homo sapien
agctgagcctcccagattcatgcca

SEQ ID NO: 899677 - DNA, 25 bp, Homo sapien
tgcaagctgagcctcccagattcat

SEQ ID NO: 899678 - DNA, 25 bp, Homo sapien
tagaagctaggagttatcagagcct

SEQ ID NO: 899679 - DNA, 25 bp, Homo sapien
cagagctgacttagagtgagtacac

SEQ ID NO: 899680 - DNA, 25 bp, Homo sapien
tcctccccttcgttgaaaatcgctg

SEQ ID NO: 899681 - DNA, 25 bp, Homo sapien
ctccaatgactatcctgtaagaaaa

SEQ ID NO: 899682 - DNA, 25 bp, Homo sapien
gaaccgtctctgaaactactccaag

SEQ ID NO: 899683 - DNA, 25 bp, Homo sapien
tccaaggtagtactccaggctaagt

SEQ ID NO: 899684 - DNA, 25 bp, Homo sapien
ctaagtcaccgagaaggaggatgcc

SEQ ID NO: 899685 - DNA, 25 bp, Homo sapien
caagagactctccataattccaggg

SEQ ID NO: 899686 - DNA, 25 bp, Homo sapien
tttgcagattggatggcctttgagc

SEQ ID NO: 899687 - DNA, 25 bp, Homo sapien
gattggatggcctttgagcgtcctt

SEQ ID NO: 899688 - DNA, 25 bp, Homo sapien
cctttgagcgtccttgtataagcca

SEQ ID NO: 899689 - DNA, 25 bp, Homo sapien
cttgtatttgcagattggatggcct

SEQ ID NO: 899690 - DNA, 25 bp, Homo sapien
taaactgaggtttgattgcaggtca

SEQ ID NO: 899691 - DNA, 25 bp, Homo sapien
tataaagaccattaaacacaggaca

SEQ ID NO: 899692 - DNA, 25 bp, Homo sapien
cacagatgagtatgtgatgctcaga

SEQ ID NO: 899693 - DNA, 25 bp, Homo sapien
ttgcaggtcagctgactaaagtcag

SEQ ID NO: 899694 - DNA, 25 bp, Homo sapien
taagaggtgaccagctaaggcatgg

SEQ ID NO: 899695 - DNA, 25 bp, Homo sapien
gatacggtagggcagattctaagca

SEQ ID NO: 899696 - DNA, 25 bp, Homo sapien
taagtccaaaggcatgggaaggtgc

SEQ ID NO: 899697 - DNA, 25 bp, Homo sapien
gagttttatacaccggcagatacgg

SEQ ID NO: 899698 - DNA, 25 bp, Homo sapien
cacggaagctaggtttgaaatgcag

SEQ ID NO: 899699 - DNA, 25 bp, Homo sapien
cctgttactcaggacccagaagaga

SEQ ID NO: 899700 - DNA, 25 bp, Homo sapien
tctatcgagagtgagcaacacgttc

SEQ ID NO: 899701 - DNA, 25 bp, Homo sapien
gcagagaccagcttgcatggagtca

SEQ ID NO: 899702 - DNA, 25 bp, Homo sapien
tgcgaaggatttatagcatccctgg

SEQ ID NO: 899703 - DNA, 25 bp, Homo sapien
tcaggaaggacgatgctctgtgcat

SEQ ID NO: 899704 - DNA, 25 bp, Homo sapien
tgaatgtaaagagcgactgagacct

SEQ ID NO: 899705 - DNA, 25 bp, Homo sapien
cagatagaaacgtggccttgctcct

SEQ ID NO: 899706 - DNA, 25 bp, Homo sapien
tatcgtggatggagtcatccaattg

SEQ ID NO: 899707 - DNA, 25 bp, Homo sapien
ctaggtccaaggcactctccaaagg

SEQ ID NO: 899708 - DNA, 25 bp, Homo sapien
tctgtcctagcactgtccagcctag

SEQ ID NO: 899709 - DNA, 25 bp, Homo sapien
gcactctccaaagggtatcgtggat

SEQ ID NO: 899710 - DNA, 25 bp, Homo sapien
gatggtgcccttttgctccaaagcg

SEQ ID NO: 899711 - DNA, 25 bp, Homo sapien
tccaaagcgccatgtgcaaagaaag

SEQ ID NO: 899712 - DNA, 25 bp, Homo sapien
cactcagggacgaaggattgacact

SEQ ID NO: 899713 - DNA, 25 bp, Homo sapien
gaagtttgcacaatacactcaggga

SEQ ID NO: 899714 - DNA, 25 bp, Homo sapien
actgtgcccaactagcagctacaac

SEQ ID NO: 899715 - DNA, 25 bp, Homo sapien
cactgtgcccaactagcagctacaa

SEQ ID NO: 899716 - DNA, 25 bp, Homo sapien
ctgtgcccaactagcagctacaact

SEQ ID NO: 899717 - DNA, 25 bp, Homo sapien
cacctgccaatcagtgaagtgtgca

SEQ ID NO: 899718 - DNA, 25 bp, Homo sapien
ggtgctggcaatcctctcttcacct

SEQ ID NO: 899719 - DNA, 25 bp, Homo sapien
cctgtgacgaatgggccacctgaaa

SEQ ID NO: 899720 - DNA, 25 bp, Homo sapien
cagcacagaggcaaccctgaacatg

SEQ ID NO: 899721 - DNA, 25 bp, Homo sapien
tagtctcaccgcctggcgatgggcg

SEQ ID NO: 899722 - DNA, 25 bp, Homo sapien
ggcgatgggcgatggtcccatctgg

SEQ ID NO: 899723 - DNA, 25 bp, Homo sapien
catttggcaataggcattagtctca

SEQ ID NO: 899724 - DNA, 25 bp, Homo sapien
ggcattagtctcaccgcctggcgat

SEQ ID NO: 899725 - DNA, 25 bp, Homo sapien
gaatttgatattagccgaaggtcac

SEQ ID NO: 899726 - DNA, 25 bp, Homo sapien
ctaatcaccgaagccaaaatctcag

SEQ ID NO: 899727 - DNA, 25 bp, Homo sapien
ggaactataaaataatgcctggtga

SEQ ID NO: 899728 - DNA, 25 bp, Homo sapien
taaagcatgataccatttgtcaaac

SEQ ID NO: 899729 - DNA, 25 bp, Homo sapien
taatgaagtcgagatacattccggg

SEQ ID NO: 899730 - DNA, 25 bp, Homo sapien
tactctcggttacacttaatcagaa

SEQ ID NO: 899731 - DNA, 25 bp, Homo sapien
cgggctaactactctcggttacact

SEQ ID NO: 899732 - DNA, 25 bp, Homo sapien
tcgagatacattccgggctaactac

SEQ ID NO: 899733 - DNA, 25 bp, Homo sapien
gccagaagagattttcatgtgatcc

SEQ ID NO: 899734 - DNA, 25 bp, Homo sapien
aagaggaccacacgctcggaagaga

SEQ ID NO: 899735 - DNA, 25 bp, Homo sapien
gaaactattccgtaaagcgcaagag

SEQ ID NO: 899736 - DNA, 25 bp, Homo sapien
tcggaagagacatcagttatgtggc

SEQ ID NO: 899737 - DNA, 25 bp, Homo sapien
ggagagcgcatactggagatagctt

SEQ ID NO: 899738 - DNA, 25 bp, Homo sapien
agagcgcatactggagatagcttac

SEQ ID NO: 899739 - DNA, 25 bp, Homo sapien
ggagggagagcgcatactggagata

SEQ ID NO: 899740 - DNA, 25 bp, Homo sapien
agggagagcgcatactggagatagc

SEQ ID NO: 899741 - DNA, 25 bp, Homo sapien
atggacttgcgtttctccatgctgc

SEQ ID NO: 899742 - DNA, 25 bp, Homo sapien
taggttcagactcagcatcaaaagc

SEQ ID NO: 899743 - DNA, 25 bp, Homo sapien
tgaacccaagcttcttataatctcg

SEQ ID NO: 899744 - DNA, 25 bp, Homo sapien
taatctcgcgtgtacatggacttgc

SEQ ID NO: 899745 - DNA, 25 bp, Homo sapien
gaacatacagctggtgcgccatctc

SEQ ID NO: 899746 - DNA, 25 bp, Homo sapien
aggaggttaaaggtgagcacttgta

SEQ ID NO: 899747 - DNA, 25 bp, Homo sapien
aaggtgagcacttgtagaacataca

SEQ ID NO: 899748 - DNA, 25 bp, Homo sapien
gccatctcattgttgatggcccgct

SEQ ID NO: 899749 - DNA, 25 bp, Homo sapien
tgtaagcagggcaatcaatcaacct

SEQ ID NO: 899750 - DNA, 25 bp, Homo sapien
tttaaggtcatcttgcatcgcagcg

SEQ ID NO: 899751 - DNA, 25 bp, Homo sapien
catcgcagcgaatgagtggctccta

SEQ ID NO: 899752 - DNA, 25 bp, Homo sapien
caaatagcgggtaaggcctcaggaa

SEQ ID NO: 899753 - DNA, 25 bp, Homo sapien
tagagttcctactgcttcaccacag

SEQ ID NO: 899754 - DNA, 25 bp, Homo sapien
gttcctactgcttcaccacagaagg

SEQ ID NO: 899755 - DNA, 25 bp, Homo sapien
tttccttcattagagttcctactgc

SEQ ID NO: 899756 - DNA, 25 bp, Homo sapien
cattagagttcctactgcttcacca

SEQ ID NO: 899757 - DNA, 25 bp, Homo sapien
aaaatgatggaacgcagttgcttct

SEQ ID NO: 899758 - DNA, 25 bp, Homo sapien
taaaatgatggaacgcagttgcttc

SEQ ID NO: 899759 - DNA, 25 bp, Homo sapien
tgatggaacgcagttgcttctgagc

SEQ ID NO: 899760 - DNA, 25 bp, Homo sapien
tgttaaaatgatggaacgcagttgc

SEQ ID NO: 899761 - DNA, 25 bp, Homo sapien
aggtgactcaaaaaagctagatggc

SEQ ID NO: 899762 - DNA, 25 bp, Homo sapien
tgatcttcatagaaaggcccactgg

SEQ ID NO: 899763 - DNA, 25 bp, Homo sapien
tgaccactgtatttgaacgcccctg

SEQ ID NO: 899764 - DNA, 25 bp, Homo sapien
tccacgaggcatagaaagcagggct

SEQ ID NO: 899765 - DNA, 25 bp, Homo sapien
aatccacagcaacccacatgatgtc

SEQ ID NO: 899766 - DNA, 25 bp, Homo sapien
ttacttagaacatagagcccagact

SEQ ID NO: 899767 - DNA, 25 bp, Homo sapien
gactaaggcatacaagctcagctgt

SEQ ID NO: 899768 - DNA, 25 bp, Homo sapien
gatgtcaccagttagctcagtcttc

SEQ ID NO: 899769 - DNA, 25 bp, Homo sapien
aatcactgcaatagtataggtttgg

SEQ ID NO: 899770 - DNA, 25 bp, Homo sapien
cactgcaatagtataggtttggatt

SEQ ID NO: 899771 - DNA, 25 bp, Homo sapien
ccttcaggaaaagcgcattaatcac

SEQ ID NO: 899772 - DNA, 25 bp, Homo sapien
gaaaagcgcattaatcactgcaata

SEQ ID NO: 899773 - DNA, 25 bp, Homo sapien
tagaggtcatggctattgagcacca

SEQ ID NO: 899774 - DNA, 25 bp, Homo sapien
tgagctggccgatggtgatctcctg

SEQ ID NO: 899775 - DNA, 25 bp, Homo sapien
gatctcctgcgccactttctggtag

SEQ ID NO: 899776 - DNA, 25 bp, Homo sapien
caggatcgagatgtctatggctgac

SEQ ID NO: 899777 - DNA, 25 bp, Homo sapien
tgaaaatccaagtgggacacaattg

SEQ ID NO: 899778 - DNA, 25 bp, Homo sapien
gaaaatccaagtgggacacaattga

SEQ ID NO: 899779 - DNA, 25 bp, Homo sapien
ctgaaaatccaagtgggacacaatt

SEQ ID NO: 899780 - DNA, 25 bp, Homo sapien
cttcttaatgaacgccaccgaaaat

SEQ ID NO: 899781 - DNA, 25 bp, Homo sapien
tgtatcccaggacactatgccatgg

SEQ ID NO: 899782 - DNA, 25 bp, Homo sapien
gaacgccaccgaaaatgtatcccag

SEQ ID NO: 899783 - DNA, 25 bp, Homo sapien
cagctcaacgaaggccgtcagggtg

SEQ ID NO: 899784 - DNA, 25 bp, Homo sapien
gacaatgatccaaagctgccggaga

SEQ ID NO: 899785 - DNA, 25 bp, Homo sapien
gaattatgccagtcaggatctgtac

SEQ ID NO: 899786 - DNA, 25 bp, Homo sapien
ccctaagtgggcaagttatgcacca

SEQ ID NO: 899787 - DNA, 25 bp, Homo sapien
gatgcaaccagctaaacgaaaacgg

SEQ ID NO: 899788 - DNA, 25 bp, Homo sapien
aacggaagattatacactaggaagc

SEQ ID NO: 899789 - DNA, 25 bp, Homo sapien
gactctgtgtattacaatgtgcacc

SEQ ID NO: 899790 - DNA, 25 bp, Homo sapien
tattaatgtctacttaaacggaaga

SEQ ID NO: 899791 - DNA, 25 bp, Homo sapien
gtgttttggcctatgcttccttgca

SEQ ID NO: 899792 - DNA, 25 bp, Homo sapien
caaggcttcatgatcttctgcaatt

SEQ ID NO: 899793 - DNA, 25 bp, Homo sapien
atgatcttctgcaatttctggtatc

SEQ ID NO: 899794 - DNA, 25 bp, Homo sapien
aggcttcatgatcttctgcaatttc

SEQ ID NO: 899795 - DNA, 25 bp, Homo sapien
gatcttctgcaatttctggtatcgc

SEQ ID NO: 899796 - DNA, 25 bp, Homo sapien
tgcttgagggctaggactctgcact

SEQ ID NO: 899797 - DNA, 25 bp, Homo sapien
ggcacatccagagtagggactgaat

SEQ ID NO: 899798 - DNA, 25 bp, Homo sapien
ggactgaatacacggttgacaaacg

SEQ ID NO: 899799 - DNA, 25 bp, Homo sapien
gacaatagcgtaatgtgaggcacat

SEQ ID NO: 899800 - DNA, 25 bp, Homo sapien
acgtgcatggtgtcagctggccttg

SEQ ID NO: 899801 - DNA, 25 bp, Homo sapien
tgaggaggtaaagtgcaaaacgtgc

SEQ ID NO: 899802 - DNA, 25 bp, Homo sapien
taaagtgcaaaacgtgcatggtgtc

SEQ ID NO: 899803 - DNA, 25 bp, Homo sapien
tggcctctgaggaggtaaagtgcaa

SEQ ID NO: 899804 - DNA, 25 bp, Homo sapien
atgtgtcataaagtaaggccacagc

SEQ ID NO: 899805 - DNA, 25 bp, Homo sapien
agatgtgtcataaagtaaggccaca

SEQ ID NO: 899806 - DNA, 25 bp, Homo sapien
gggtctgaggaatagtgaatctttt

SEQ ID NO: 899807 - DNA, 25 bp, Homo sapien
gaatagtgaatcttttggactgttc

SEQ ID NO: 899808 - DNA, 25 bp, Homo sapien
caaacgtgacatcccgggagaggct

SEQ ID NO: 899809 - DNA, 25 bp, Homo sapien
tccaccatctgcgtgaggagagaga

SEQ ID NO: 899810 - DNA, 25 bp, Homo sapien
gagagagataccgtccaggtttata

SEQ ID NO: 899811 - DNA, 25 bp, Homo sapien
cagcttggcatccatactcgaggac

SEQ ID NO: 899812 - DNA, 25 bp, Homo sapien
ctctgagtaataactgcctacacat

SEQ ID NO: 899813 - DNA, 25 bp, Homo sapien
aatactctgagtaataactgcctac

SEQ ID NO: 899814 - DNA, 25 bp, Homo sapien
tactctgagtaataactgcctacac

SEQ ID NO: 899815 - DNA, 25 bp, Homo sapien
actctgagtaataactgcctacaca

SEQ ID NO: 899816 - DNA, 25 bp, Homo sapien
tgtgaattcaaagctatcctgggcc

SEQ ID NO: 899817 - DNA, 25 bp, Homo sapien
caaggtctactttttctgtccagca

SEQ ID NO: 899818 - DNA, 25 bp, Homo sapien
ccaattggtacaggtgagtgatccc

SEQ ID NO: 899819 - DNA, 25 bp, Homo sapien
caaagtcagacgaaaacgcctcagc

SEQ ID NO: 899820 - DNA, 25 bp, Homo sapien
tggagatgtggttaatcgaaggata

SEQ ID NO: 899821 - DNA, 25 bp, Homo sapien
aaggatagtgccattttttatctca

SEQ ID NO: 899822 - DNA, 25 bp, Homo sapien
taatcgaaggatagtgccatttttt

SEQ ID NO: 899823 - DNA, 25 bp, Homo sapien
gatgtggttaatcgaaggatagtgc

SEQ ID NO: 899824 - DNA, 25 bp, Homo sapien
gtccacagggaggaaggcttccgat

SEQ ID NO: 899825 - DNA, 25 bp, Homo sapien
aaggacaacaggaggtccacaggga

SEQ ID NO: 899826 - DNA, 25 bp, Homo sapien
ggaggaaggcttccgatcctctgcg

SEQ ID NO: 899827 - DNA, 25 bp, Homo sapien
cacagggaggaaggcttccgatcct

SEQ ID NO: 899828 - DNA, 25 bp, Homo sapien
gaccctgggcatgtcaatttgcttc

SEQ ID NO: 899829 - DNA, 25 bp, Homo sapien
tgtcaatttgcttcagaccctcaac

SEQ ID NO: 899830 - DNA, 25 bp, Homo sapien
tcaatttgcttcagaccctcaacaa

SEQ ID NO: 899831 - DNA, 25 bp, Homo sapien
cgtgaccctgggcatgtcaatttgc

SEQ ID NO: 899832 - DNA, 25 bp, Homo sapien
cagggactgcttcaaagcagttctg

SEQ ID NO: 899833 - DNA, 25 bp, Homo sapien
ggactgcttcaaagcagttctgcct

SEQ ID NO: 899834 - DNA, 25 bp, Homo sapien
agggactgcttcaaagcagttctgc

SEQ ID NO: 899835 - DNA, 25 bp, Homo sapien
actgcttcaaagcagttctgcctac

SEQ ID NO: 899836 - DNA, 25 bp, Homo sapien
gacacgtctatagtgctgcacagcc

SEQ ID NO: 899837 - DNA, 25 bp, Homo sapien
gggtggtgatgtccctgtggtggcc

SEQ ID NO: 899838 - DNA, 25 bp, Homo sapien
tggcaacagagacacgtctatagtg

SEQ ID NO: 899839 - DNA, 25 bp, Homo sapien
agtttctgcatcacccgtgggtggt

SEQ ID NO: 899840 - DNA, 25 bp, Homo sapien
tataaacctctgtttgacaaaagac

SEQ ID NO: 899841 - DNA, 25 bp, Homo sapien
tcctgtaaatccatgacaatgaaac

SEQ ID NO: 899842 - DNA, 25 bp, Homo sapien
gaaacactccaaacccactattgga

SEQ ID NO: 899843 - DNA, 25 bp, Homo sapien
tattggacaaagaatgtataggcag

SEQ ID NO: 899844 - DNA, 25 bp, Homo sapien
ttgaagaatggcccctttagcactg

SEQ ID NO: 899845 - DNA, 25 bp, Homo sapien
tttgaagaatggcccctttagcact

SEQ ID NO: 899846 - DNA, 25 bp, Homo sapien
ttgtagagcaaagagtgtaatgaaa

SEQ ID NO: 899847 - DNA, 25 bp, Homo sapien
cttgtagagcaaagagtgtaatgaa

SEQ ID NO: 899848 - DNA, 25 bp, Homo sapien
taatgctggtggcggtcgctgccct

SEQ ID NO: 899849 - DNA, 25 bp, Homo sapien
cctgctcttccgagctccctctcat

SEQ ID NO: 899850 - DNA, 25 bp, Homo sapien
gctgccctgctcttccgagctccct

SEQ ID NO: 899851 - DNA, 25 bp, Homo sapien
cgacatctgagtaatgctggtggcg

SEQ ID NO: 899852 - DNA, 25 bp, Homo sapien
tgcgtgctgagctccgtgacacatg

SEQ ID NO: 899853 - DNA, 25 bp, Homo sapien
gcagcccaggatcgaccctgtggag

SEQ ID NO: 899854 - DNA, 25 bp, Homo sapien
gaaggcagcccaggatcgaccctgt

SEQ ID NO: 899855 - DNA, 25 bp, Homo sapien
tggacaaagcagcaaactgaaggca

SEQ ID NO: 899856 - DNA, 25 bp, Homo sapien
gaataatctctgctacagcccactg

SEQ ID NO: 899857 - DNA, 25 bp, Homo sapien
gacagactttgtggccagtccttta

SEQ ID NO: 899858 - DNA, 25 bp, Homo sapien
gcatgaggaagagcaatgacaccgt

SEQ ID NO: 899859 - DNA, 25 bp, Homo sapien
tacaaacaaagaactacgataggga

SEQ ID NO: 899860 - DNA, 25 bp, Homo sapien
tctgtgatatagaagtttgaactat

SEQ ID NO: 899861 - DNA, 25 bp, Homo sapien
atattcatggttggcaagagaccac

SEQ ID NO: 899862 - DNA, 25 bp, Homo sapien
aaaatattcatggttggcaagagac

SEQ ID NO: 899863 - DNA, 25 bp, Homo sapien
aagtttgaactatcggcatgctgga

SEQ ID NO: 899864 - DNA, 25 bp, Homo sapien
tttagtgttggatgaactaagcacc

SEQ ID NO: 899865 - DNA, 25 bp, Homo sapien
ttttttagtgttggatgaactaagc

SEQ ID NO: 899866 - DNA, 25 bp, Homo sapien
aaaatacaagcgtatactgattaga

SEQ ID NO: 899867 - DNA, 25 bp, Homo sapien
tacaagcgtatactgattagaaaaa

SEQ ID NO: 899868 - DNA, 25 bp, Homo sapien
cccaacatataccacaatgcagttc

SEQ ID NO: 899869 - DNA, 25 bp, Homo sapien
caacatataccacaatgcagttcct

SEQ ID NO: 899870 - DNA, 25 bp, Homo sapien
tataccacaatgcagttcctaaagc

SEQ ID NO: 899871 - DNA, 25 bp, Homo sapien
acaatgcagttcctaaagcaaaatg

SEQ ID NO: 899872 - DNA, 25 bp, Homo sapien
taggcctactgctcacctttaagca

SEQ ID NO: 899873 - DNA, 25 bp, Homo sapien
cttccattaccctgagaccaatcat

SEQ ID NO: 899874 - DNA, 25 bp, Homo sapien
ttaccctgagaccaatcatttcatg

SEQ ID NO: 899875 - DNA, 25 bp, Homo sapien
tcatgtgtagactgtctagacctga

SEQ ID NO: 899876 - DNA, 25 bp, Homo sapien
tttattattgcagacagtggttttt

SEQ ID NO: 899877 - DNA, 25 bp, Homo sapien
ccatcacagacttcctttattattg

SEQ ID NO: 899878 - DNA, 25 bp, Homo sapien
cacagacttcctttattattgcaga

SEQ ID NO: 899879 - DNA, 25 bp, Homo sapien
ttattattgcagacagtggtttttt

SEQ ID NO: 899880 - DNA, 25 bp, Homo sapien
tactttcagcagatctttgaggcac

SEQ ID NO: 899881 - DNA, 25 bp, Homo sapien
ctacactcaacttgcctactttcag

SEQ ID NO: 899882 - DNA, 25 bp, Homo sapien
cacatttctagcgaacttgtccttg

SEQ ID NO: 899883 - DNA, 25 bp, Homo sapien
tccatcagttcctacactcaacttg

SEQ ID NO: 899884 - DNA, 25 bp, Homo sapien
ttgttctaaagatcccatcaccagg

SEQ ID NO: 899885 - DNA, 25 bp, Homo sapien
cacctttgttctaaagatcccatca

SEQ ID NO: 899886 - DNA, 25 bp, Homo sapien
gtccctgcagataagtctccacatc

SEQ ID NO: 899887 - DNA, 25 bp, Homo sapien
tccctgcagataagtctccacatct

SEQ ID NO: 899888 - DNA, 25 bp, Homo sapien
gttttagccactatggagcatgggc

SEQ ID NO: 899889 - DNA, 25 bp, Homo sapien
cttggagagctcaagtctgttgctg

SEQ ID NO: 899890 - DNA, 25 bp, Homo sapien
actggcctgctgagactggcagcgc

SEQ ID NO: 899891 - DNA, 25 bp, Homo sapien
agcatgggctgccgttctcagctct

SEQ ID NO: 899892 - DNA, 25 bp, Homo sapien
tttcaggaagggtctaaactatgca

SEQ ID NO: 899893 - DNA, 25 bp, Homo sapien
taatggtggcaacctcaggcagaac

SEQ ID NO: 899894 - DNA, 25 bp, Homo sapien
cactaatgagcaaaccatatgaggg

SEQ ID NO: 899895 - DNA, 25 bp, Homo sapien
ctttgctactagttggtctgcgtgc

SEQ ID NO: 899896 - DNA, 25 bp, Homo sapien
tcttctagtttgtcagaatataaac

SEQ ID NO: 899897 - DNA, 25 bp, Homo sapien
tccggagtgactctcaaagctgtcc

SEQ ID NO: 899898 - DNA, 25 bp, Homo sapien
tgtcctgccaatgcagtccggagtg

SEQ ID NO: 899899 - DNA, 25 bp, Homo sapien
gggagcaagcacaagtcagtgctat

SEQ ID NO: 899900 - DNA, 25 bp, Homo sapien
tgctgccataccatgatagttgatc

SEQ ID NO: 899901 - DNA, 25 bp, Homo sapien
actaagtgactaacaaatgggaagt

SEQ ID NO: 899902 - DNA, 25 bp, Homo sapien
gatctgataacggaaatggctacta

SEQ ID NO: 899903 - DNA, 25 bp, Homo sapien
tttgagagcaaaacgagcatgaatt

SEQ ID NO: 899904 - DNA, 25 bp, Homo sapien
ctgtttgtgtagatattatgctctc

SEQ ID NO: 899905 - DNA, 25 bp, Homo sapien
tacacctgttcacaatttataccca

SEQ ID NO: 899906 - DNA, 25 bp, Homo sapien
tataagatgtctaattggctctttc

SEQ ID NO: 899907 - DNA, 25 bp, Homo sapien
tttgctttgtcctcataatctcctg

SEQ ID NO: 899908 - DNA, 25 bp, Homo sapien
ccaccttgacgatgtccgcgggtgg

SEQ ID NO: 899909 - DNA, 25 bp, Homo sapien
caccttgacgatgtccgcgggtggc

SEQ ID NO: 899910 - DNA, 25 bp, Homo sapien
cggccattctatggccaccttgacg

SEQ ID NO: 899911 - DNA, 25 bp, Homo sapien
gtaggcgcccggccattctatggcc

SEQ ID NO: 899912 - DNA, 25 bp, Homo sapien
tgttcaaagccagtgggaatgagga

SEQ ID NO: 899913 - DNA, 25 bp, Homo sapien
cccaaaatgttcaaagccagtggga

SEQ ID NO: 899914 - DNA, 25 bp, Homo sapien
aatgaggatcctacagcgtaaacgg

SEQ ID NO: 899915 - DNA, 25 bp, Homo sapien
gcgtaaacggccacacgtgtctata

SEQ ID NO: 899916 - DNA, 25 bp, Homo sapien
cttcctgttttcactggtggtttgg

SEQ ID NO: 899917 - DNA, 25 bp, Homo sapien
gagaagtcactcagtgcagatgcag

SEQ ID NO: 899918 - DNA, 25 bp, Homo sapien
tatgaaaaacggctccccttggtgc

SEQ ID NO: 899919 - DNA, 25 bp, Homo sapien
gtgaattttgcttcatcacttcctg

SEQ ID NO: 899920 - DNA, 25 bp, Homo sapien
gaatctgaaccaacagcccttgctg

SEQ ID NO: 899921 - DNA, 25 bp, Homo sapien
tggtcttcgtttctaaaggctccca

SEQ ID NO: 899922 - DNA, 25 bp, Homo sapien
tactgccattaggtcacaccctttg

SEQ ID NO: 899923 - DNA, 25 bp, Homo sapien
tgaaacctaggaaggtcactctctt

SEQ ID NO: 899924 - DNA, 25 bp, Homo sapien
ttgtaaactctttgtgccaaggcac

SEQ ID NO: 899925 - DNA, 25 bp, Homo sapien
gaacctgttaacgattcctggatga

SEQ ID NO: 899926 - DNA, 25 bp, Homo sapien
ggtaccagacaactaaggatatcgg

SEQ ID NO: 899927 - DNA, 25 bp, Homo sapien
ggaaggagagcaaactcaagtgctt

SEQ ID NO: 899928 - DNA, 25 bp, Homo sapien
cacactggctgggaaaaccaaatgt

SEQ ID NO: 899929 - DNA, 25 bp, Homo sapien
tctgcatgtcaacaagagctttggg

SEQ ID NO: 899930 - DNA, 25 bp, Homo sapien
gatccccataccatcttggagaaag

SEQ ID NO: 899931 - DNA, 25 bp, Homo sapien
gcagtcactccatgatgccagggca

SEQ ID NO: 899932 - DNA, 25 bp, Homo sapien
tgcagtgagtcgagacggcaccatt

SEQ ID NO: 899933 - DNA, 25 bp, Homo sapien
actccagcctggatgacagagcaag

SEQ ID NO: 899934 - DNA, 25 bp, Homo sapien
cagtgagtcgagacggcaccattgc

SEQ ID NO: 899935 - DNA, 25 bp, Homo sapien
ccagcctggatgacagagcaagact

SEQ ID NO: 899936 - DNA, 25 bp, Homo sapien
cctctaccagagaagtcgcatgtct

SEQ ID NO: 899937 - DNA, 25 bp, Homo sapien
gaaagtgatgatgcccttcccttaa

SEQ ID NO: 899938 - DNA, 25 bp, Homo sapien
tcttctcagggaaatacggacttgg

SEQ ID NO: 899939 - DNA, 25 bp, Homo sapien
caaagcaaactaagaggccaggtgc

SEQ ID NO: 899940 - DNA, 25 bp, Homo sapien
acaccactatgggatggctgaaaac

SEQ ID NO: 899941 - DNA, 25 bp, Homo sapien
gaggctttgggtactccagcagagt

SEQ ID NO: 899942 - DNA, 25 bp, Homo sapien
tggaggctttgggtactccagcaga

SEQ ID NO: 899943 - DNA, 25 bp, Homo sapien
ctttgggtactccagcagagtttcc

SEQ ID NO: 899944 - DNA, 25 bp, Homo sapien
cttggaggctttgggtactccagca

SEQ ID NO: 899945 - DNA, 25 bp, Homo sapien
caggatccaacttgtcttctttcca

SEQ ID NO: 899946 - DNA, 25 bp, Homo sapien
tcaggatccaacttgtcttctttcc

SEQ ID NO: 899947 - DNA, 25 bp, Homo sapien
ctaagggatggatttgcaaaacacc

SEQ ID NO: 899948 - DNA, 25 bp, Homo sapien
attccacatccattccgggtgctgc

SEQ ID NO: 899949 - DNA, 25 bp, Homo sapien
catccattccgggtgctgcagacta

SEQ ID NO: 899950 - DNA, 25 bp, Homo sapien
ttccgggtgctgcagactaagggat

SEQ ID NO: 899951 - DNA, 25 bp, Homo sapien
ttaggatgtgaaggatgaggaatgg

SEQ ID NO: 899952 - DNA, 25 bp, Homo sapien
gcattaggatgtgaaggatgaggaa

SEQ ID NO: 899953 - DNA, 25 bp, Homo sapien
taggatgtgaaggatgaggaatgga

SEQ ID NO: 899954 - DNA, 25 bp, Homo sapien
cattaggatgtgaaggatgaggaat

SEQ ID NO: 899955 - DNA, 25 bp, Homo sapien
gacggtgctcttttacacactcctg

SEQ ID NO: 899956 - DNA, 25 bp, Homo sapien
tatgacaacgcttatgactggaagg

SEQ ID NO: 899957 - DNA, 25 bp, Homo sapien
gtaatggtttgctgccccgacggtg

SEQ ID NO: 899958 - DNA, 25 bp, Homo sapien
tccagacgccgagtctcagactgtt

SEQ ID NO: 899959 - DNA, 25 bp, Homo sapien
gttctccagttcagtaccctcctga

SEQ ID NO: 899960 - DNA, 25 bp, Homo sapien
tcagtaccctcctgacacaacccct

SEQ ID NO: 899961 - DNA, 25 bp, Homo sapien
gtcccagcagtccaggtcattttct

SEQ ID NO: 899962 - DNA, 25 bp, Homo sapien
cagttcagtaccctcctgacacaac

SEQ ID NO: 899963 - DNA, 25 bp, Homo sapien
cgccaccattgaaggggaactggag

SEQ ID NO: 899964 - DNA, 25 bp, Homo sapien
ttcccggcgatcagagctccggcga

SEQ ID NO: 899965 - DNA, 25 bp, Homo sapien
ggacagcagcggcaagggttcccgg

SEQ ID NO: 899966 - DNA, 25 bp, Homo sapien
ggcgacccgccaccattgaagggga

SEQ ID NO: 899967 - DNA, 25 bp, Homo sapien
tttgcatctgcaaggcatccggaga

SEQ ID NO: 899968 - DNA, 25 bp, Homo sapien
gatgagctcacacacggcgtttgga

SEQ ID NO: 899969 - DNA, 25 bp, Homo sapien
caggacactcgtggtctgcgcgttc

SEQ ID NO: 899970 - DNA, 25 bp, Homo sapien
tgtcaaacaccatgcatgcctcaga

SEQ ID NO: 899971 - DNA, 25 bp, Homo sapien
agctccaggaagccgctacaccagg

SEQ ID NO: 899972 - DNA, 25 bp, Homo sapien
aggaagccgctacaccagggataat

SEQ ID NO: 899973 - DNA, 25 bp, Homo sapien
tccaggaagccgctacaccagggat

SEQ ID NO: 899974 - DNA, 25 bp, Homo sapien
ggcagacacctgcaatttagagcca

SEQ ID NO: 899975 - DNA, 25 bp, Homo sapien
gacatgccggtagtttatctccagt

SEQ ID NO: 899976 - DNA, 25 bp, Homo sapien
agaagaagaaatggattgccaggtg

SEQ ID NO: 899977 - DNA, 25 bp, Homo sapien
gagcccctccatttcaacccagttg

SEQ ID NO: 899978 - DNA, 25 bp, Homo sapien
tgcaactggtgatcccggagaagaa

SEQ ID NO: 899979 - DNA, 25 bp, Homo sapien
cacattttccaaccgcccgtcctgg

SEQ ID NO: 899980 - DNA, 25 bp, Homo sapien
caggcactgtgagccattttgctct

SEQ ID NO: 899981 - DNA, 25 bp, Homo sapien
tttgaaacactgttacctcttcttc

SEQ ID NO: 899982 - DNA, 25 bp, Homo sapien
atttgcaccctccagagaccactca

SEQ ID NO: 899983 - DNA, 25 bp, Homo sapien
ctatcattcctatgggacttggcga

SEQ ID NO: 899984 - DNA, 25 bp, Homo sapien
ttagtgtctatcattcctatgggac

SEQ ID NO: 899985 - DNA, 25 bp, Homo sapien
gggacttggcgaatcagcaaaggaa

SEQ ID NO: 899986 - DNA, 25 bp, Homo sapien
tcctatgggacttggcgaatcagca

SEQ ID NO: 899987 - DNA, 25 bp, Homo sapien
aacaaggcaccagtgtgctctaggg

SEQ ID NO: 899988 - DNA, 25 bp, Homo sapien
tgctcatctgcgcaaggttgctttg

SEQ ID NO: 899989 - DNA, 25 bp, Homo sapien
gttgctcaaggtggagatttcccgg

SEQ ID NO: 899990 - DNA, 25 bp, Homo sapien
ggagcattgtgcctgaaaacaaggc

SEQ ID NO: 899991 - DNA, 25 bp, Homo sapien
cagttttatggcagacttcttcggc

SEQ ID NO: 899992 - DNA, 25 bp, Homo sapien
ggctttcatctagggcatttctgct

SEQ ID NO: 899993 - DNA, 25 bp, Homo sapien
cttcagtgggctttcatctagggca

SEQ ID NO: 899994 - DNA, 25 bp, Homo sapien
cacatttcatgcagttttatggcag

SEQ ID NO: 899995 - DNA, 25 bp, Homo sapien
taatcaacagccagattcgactttc

SEQ ID NO: 899996 - DNA, 25 bp, Homo sapien
gacatgttgttgttatgagatctat

SEQ ID NO: 899997 - DNA, 25 bp, Homo sapien
gattcgactttctgtatgggatttt

SEQ ID NO: 899998 - DNA, 25 bp, Homo sapien
gatctataatcaacagccagattcg

SEQ ID NO: 899999 - DNA, 25 bp, Homo sapien
atgaagtagaaaggccatctgcatc

SEQ ID NO: 900000 - DNA, 25 bp, Homo sapien
taatggatggttgggacttgaatca

SEQ ID NO: 900001 - DNA, 25 bp, Homo sapien
gaactgtctgggcagatattgctgc

SEQ ID NO: 900002 - DNA, 25 bp, Homo sapien
ttttaactcgatgccgagtggcagc

SEQ ID NO: 900003 - DNA, 25 bp, Homo sapien
tctcctggcatctggactgatgtac

SEQ ID NO: 900004 - DNA, 25 bp, Homo sapien
gactgatgtactttggttgccctcc

SEQ ID NO: 900005 - DNA, 25 bp, Homo sapien
tggactgatgtactttggttgccct

SEQ ID NO: 900006 - DNA, 25 bp, Homo sapien
ctggcatctggactgatgtactttg

SEQ ID NO: 900007 - DNA, 25 bp, Homo sapien
ctgtgcaattcctggagagatgttc

SEQ ID NO: 900008 - DNA, 25 bp, Homo sapien
gaccttctcactgtcggttccggca

SEQ ID NO: 900009 - DNA, 25 bp, Homo sapien
gcatttctaacgctctagctgccga

SEQ ID NO: 900010 - DNA, 25 bp, Homo sapien
tacaacagcaaacagagtgaccttc

SEQ ID NO: 900011 - DNA, 25 bp, Homo sapien
ctgggagagtttgatagttttaaca

SEQ ID NO: 900012 - DNA, 25 bp, Homo sapien
tgggagagtttgatagttttaacag

SEQ ID NO: 900013 - DNA, 25 bp, Homo sapien
gggagagtttgatagttttaacaga

SEQ ID NO: 900014 - DNA, 25 bp, Homo sapien
ggtctgtgtgcaagccgatcctgaa

SEQ ID NO: 900015 - DNA, 25 bp, Homo sapien
tgcacacagttgtgcaggtctgtgt

SEQ ID NO: 900016 - DNA, 25 bp, Homo sapien
tctttagaagacatgtgcacacagt

SEQ ID NO: 900017 - DNA, 25 bp, Homo sapien
tgtgcaagccgatcctgaaggttgg

SEQ ID NO: 900018 - DNA, 25 bp, Homo sapien
ctttgaagacttctacttaaggcaa

SEQ ID NO: 900019 - DNA, 25 bp, Homo sapien
aggaagggcatgggaatatgtaatg

SEQ ID NO: 900020 - DNA, 25 bp, Homo sapien
aaggaagggcatgggaatatgtaat

SEQ ID NO: 900021 - DNA, 25 bp, Homo sapien
tgaagacttctacttaaggcaaaaa

SEQ ID NO: 900022 - DNA, 25 bp, Homo sapien
cttgcagtgtacaaagcccactttg

SEQ ID NO: 900023 - DNA, 25 bp, Homo sapien
tcctgtccttgcagtgtacaaagcc

SEQ ID NO: 900024 - DNA, 25 bp, Homo sapien
tgtccttgcagtgtacaaagcccac

SEQ ID NO: 900025 - DNA, 25 bp, Homo sapien
tcattcctgtccttgcagtgtacaa

SEQ ID NO: 900026 - DNA, 25 bp, Homo sapien
aaactcttgacagccattggcagaa

SEQ ID NO: 900027 - DNA, 25 bp, Homo sapien
tatttgggtccaccatttagtgtga

SEQ ID NO: 900028 - DNA, 25 bp, Homo sapien
cctaaatctattacaagctgcctag

SEQ ID NO: 900029 - DNA, 25 bp, Homo sapien
cctaatccattgtctatggtgacag

SEQ ID NO: 900030 - DNA, 25 bp, Homo sapien
tggccattcgaaagccagtaattag

SEQ ID NO: 900031 - DNA, 25 bp, Homo sapien
gtctagcctggccattcgaaagcca

SEQ ID NO: 900032 - DNA, 25 bp, Homo sapien
ccagtaattagaaggctagggtatg

SEQ ID NO: 900033 - DNA, 25 bp, Homo sapien
ttttctttagtctggtctagcctgg

SEQ ID NO: 900034 - DNA, 25 bp, Homo sapien
gcagactctccgacatggccatgtg

SEQ ID NO: 900035 - DNA, 25 bp, Homo sapien
agcatagcttggcagactctccgac

SEQ ID NO: 900036 - DNA, 25 bp, Homo sapien
gtgcagttgcaagttgtcacttggg

SEQ ID NO: 900037 - DNA, 25 bp, Homo sapien
cacttgggtaataaaggagaaggag

SEQ ID NO: 900038 - DNA, 25 bp, Homo sapien
aaggttaatgagatgatgcagctgc

SEQ ID NO: 900039 - DNA, 25 bp, Homo sapien
tgctgagtgaaggttaatgagatga

SEQ ID NO: 900040 - DNA, 25 bp, Homo sapien
ctccaggaatgctgagtgaaggtta

SEQ ID NO: 900041 - DNA, 25 bp, Homo sapien
ccaggaatgctgagtgaaggttaat

SEQ ID NO: 900042 - DNA, 25 bp, Homo sapien
tggtgtccaagatctagtcctggtg

SEQ ID NO: 900043 - DNA, 25 bp, Homo sapien
tggtgaggtctgactcaacatcttt

SEQ ID NO: 900044 - DNA, 25 bp, Homo sapien
tcttgtcctttacactatgaagcaa

SEQ ID NO: 900045 - DNA, 25 bp, Homo sapien
tctagtcctggtgaggtctgactca

SEQ ID NO: 900046 - DNA, 25 bp, Homo sapien
gaatggcttgtaatgccacagcccc

SEQ ID NO: 900047 - DNA, 25 bp, Homo sapien
cccactgtctgctgtttgtggttgt

SEQ ID NO: 900048 - DNA, 25 bp, Homo sapien
tcaggaatggcttgtaatgccacag

SEQ ID NO: 900049 - DNA, 25 bp, Homo sapien
ggaatggcttgtaatgccacagccc

SEQ ID NO: 900050 - DNA, 25 bp, Homo sapien
tctttagggcactcatgtcagtgcc

SEQ ID NO: 900051 - DNA, 25 bp, Homo sapien
ctctgtttcatcctgaggtctcagc

SEQ ID NO: 900052 - DNA, 25 bp, Homo sapien
ctgggcctgtgctccatttctttag

SEQ ID NO: 900053 - DNA, 25 bp, Homo sapien
atttctttagggcactcatgtcagt

SEQ ID NO: 900054 - DNA, 25 bp, Homo sapien
gctcttgggcttgacagctttatct

SEQ ID NO: 900055 - DNA, 25 bp, Homo sapien
cagctcttgggcttgacagctttat

SEQ ID NO: 900056 - DNA, 25 bp, Homo sapien
agcagctcttgggcttgacagcttt

SEQ ID NO: 900057 - DNA, 25 bp, Homo sapien
ctcttgggcttgacagctttatctt

SEQ ID NO: 900058 - DNA, 25 bp, Homo sapien
ggagaatccaaatctaaaaggatat

SEQ ID NO: 900059 - DNA, 25 bp, Homo sapien
gcaggagaatccaaatctaaaagga

SEQ ID NO: 900060 - DNA, 25 bp, Homo sapien
acccagttggatggctgtggtgcct

SEQ ID NO: 900061 - DNA, 25 bp, Homo sapien
tggacccagttggatggctgtggtg

SEQ ID NO: 900062 - DNA, 25 bp, Homo sapien
cctggtggggatgcgagtaagctca

SEQ ID NO: 900063 - DNA, 25 bp, Homo sapien
aatactgacttggcctcctggtggg

SEQ ID NO: 900064 - DNA, 25 bp, Homo sapien
acagtgggggaatactgacttggcc

SEQ ID NO: 900065 - DNA, 25 bp, Homo sapien
ggatgcgagtaagctcaggccccca

SEQ ID NO: 900066 - DNA, 25 bp, Homo sapien
tgttccccgtactcaacttgatggt

SEQ ID NO: 900067 - DNA, 25 bp, Homo sapien
gaaatgattcggaggtgaacagtcc

SEQ ID NO: 900068 - DNA, 25 bp, Homo sapien
ggcttagaagcacatccattcttgg

SEQ ID NO: 900069 - DNA, 25 bp, Homo sapien
tactggtatctgagtgaagagctcc

SEQ ID NO: 900070 - DNA, 25 bp, Homo sapien
gctgtcctggtggtatactgccata

SEQ ID NO: 900071 - DNA, 25 bp, Homo sapien
cacctgatagggcaatgacagacaa

SEQ ID NO: 900072 - DNA, 25 bp, Homo sapien
tgctcagggcagataaggaatctcc

SEQ ID NO: 900073 - DNA, 25 bp, Homo sapien
cgaatacaagagaaaggctacctgg

SEQ ID NO: 900074 - DNA, 25 bp, Homo sapien
gagtggtatttgagtcactggtgtt

SEQ ID NO: 900075 - DNA, 25 bp, Homo sapien
aaaggtagacgatattgattgctcc

SEQ ID NO: 900076 - DNA, 25 bp, Homo sapien
tgcaatctgtgaatcccttcaatgg

SEQ ID NO: 900077 - DNA, 25 bp, Homo sapien
ctggtgttttcttcgtgacaagtac

SEQ ID NO: 900078 - DNA, 25 bp, Homo sapien
tctggacctacgctgttaagtacaa

SEQ ID NO: 900079 - DNA, 25 bp, Homo sapien
gacctacgctgttaagtacaatgcc

SEQ ID NO: 900080 - DNA, 25 bp, Homo sapien
cagcttctggacctacgctgttaag

SEQ ID NO: 900081 - DNA, 25 bp, Homo sapien
cctacgctgttaagtacaatgcctg

SEQ ID NO: 900082 - DNA, 25 bp, Homo sapien
tataacacgcgtcaaagccatcagt

SEQ ID NO: 900083 - DNA, 25 bp, Homo sapien
ggcaggttctgtatataacacgcgt

SEQ ID NO: 900084 - DNA, 25 bp, Homo sapien
gtcaaagccatcagttgcacttgtt

SEQ ID NO: 900085 - DNA, 25 bp, Homo sapien
tgttttaaccacacttggcaggttc

SEQ ID NO: 900086 - DNA, 25 bp, Homo sapien
gaggtgattgtccagctctgctggt

SEQ ID NO: 900087 - DNA, 25 bp, Homo sapien
ctggtcgggcactggatgtagtcat

SEQ ID NO: 900088 - DNA, 25 bp, Homo sapien
ctgcataggtggggaggtgattgtc

SEQ ID NO: 900089 - DNA, 25 bp, Homo sapien
ctctgctggtcgggcactggatgta

SEQ ID NO: 900090 - DNA, 25 bp, Homo sapien
cgagtgtactattaaagagtcaaac

SEQ ID NO: 900091 - DNA, 25 bp, Homo sapien
ctgttgctgtaggacacccctggtc

SEQ ID NO: 900092 - DNA, 25 bp, Homo sapien
agaactgttgggtgttgcgtcctgt

SEQ ID NO: 900093 - DNA, 25 bp, Homo sapien
taggacacccctggtcgagtgtact

SEQ ID NO: 900094 - DNA, 25 bp, Homo sapien
cccagcttagagctgtgggatcaca

SEQ ID NO: 900095 - DNA, 25 bp, Homo sapien
agcttagagctgtgggatcacactg

SEQ ID NO: 900096 - DNA, 25 bp, Homo sapien
cacactggcttactgctcgctgggt

SEQ ID NO: 900097 - DNA, 25 bp, Homo sapien
ctggcttactgctcgctgggtccca

SEQ ID NO: 900098 - DNA, 25 bp, Homo sapien
ctggtgtaaatgtgttgtcaggtac

SEQ ID NO: 900099 - DNA, 25 bp, Homo sapien
actggtgtaaatgtgttgtcaggta

SEQ ID NO: 900100 - DNA, 25 bp, Homo sapien
ttactggtgtaaatgtgttgtcagg

SEQ ID NO: 900101 - DNA, 25 bp, Homo sapien
tactggtgtaaatgtgttgtcaggt

SEQ ID NO: 900102 - DNA, 25 bp, Homo sapien
ctcctaatcctcttgtggatccata

SEQ ID NO: 900103 - DNA, 25 bp, Homo sapien
gcagaccacccatctcactttgatt

SEQ ID NO: 900104 - DNA, 25 bp, Homo sapien
gtggatccatatactttcttctgtt

SEQ ID NO: 900105 - DNA, 25 bp, Homo sapien
cctaatcctcttgtggatccatata

SEQ ID NO: 900106 - DNA, 25 bp, Homo sapien
tcctccagatctgcctcctgctgac

SEQ ID NO: 900107 - DNA, 25 bp, Homo sapien
caggctcctccagatctgcctcctg

SEQ ID NO: 900108 - DNA, 25 bp, Homo sapien
ggctcctccagatctgcctcctgct

SEQ ID NO: 900109 - DNA, 25 bp, Homo sapien
gctcctccagatctgcctcctgctg

SEQ ID NO: 900110 - DNA, 25 bp, Homo sapien
gctggcccctctcacgacagggtca

SEQ ID NO: 900111 - DNA, 25 bp, Homo sapien
gacagggtcatcgcacaggctccct

SEQ ID NO: 900112 - DNA, 25 bp, Homo sapien
ttgtacccagctgcagcgacaccga

SEQ ID NO: 900113 - DNA, 25 bp, Homo sapien
agcttcccaaagtgggctggcccct

SEQ ID NO: 900114 - DNA, 25 bp, Homo sapien
gataatacatatgttcacgtcaata

SEQ ID NO: 900115 - DNA, 25 bp, Homo sapien
cgtcaatatacaaccatttggcaca

SEQ ID NO: 900116 - DNA, 25 bp, Homo sapien
catatgttcacgtcaatatacaacc

SEQ ID NO: 900117 - DNA, 25 bp, Homo sapien
gttcacgtcaatatacaaccatttg

SEQ ID NO: 900118 - DNA, 25 bp, Homo sapien
caatctacaacaagataattgaggg

SEQ ID NO: 900119 - DNA, 25 bp, Homo sapien
taattgagggaggaacacggaatgt

SEQ ID NO: 900120 - DNA, 25 bp, Homo sapien
agagtaggagagatcaaataaagcc

SEQ ID NO: 900121 - DNA, 25 bp, Homo sapien
ctgatcttccggaaaagatttaagg

SEQ ID NO: 900122 - DNA, 25 bp, Homo sapien
taggtagtaaaagcatggcctggac

SEQ ID NO: 900123 - DNA, 25 bp, Homo sapien
tgaatttcggctggactttaggtag

SEQ ID NO: 900124 - DNA, 25 bp, Homo sapien
ggtcttgaatttcggctggacttta

SEQ ID NO: 900125 - DNA, 25 bp, Homo sapien
gtagtaaaagcatggcctggaccac

SEQ ID NO: 900126 - DNA, 25 bp, Homo sapien
aatgctctccagtaccttctttgga

SEQ ID NO: 900127 - DNA, 25 bp, Homo sapien
tgctctccagtaccttctttggatg

SEQ ID NO: 900128 - DNA, 25 bp, Homo sapien
ctctccagtaccttctttggatgcc

SEQ ID NO: 900129 - DNA, 25 bp, Homo sapien
ctaatgctctccagtaccttctttg

SEQ ID NO: 900130 - DNA, 25 bp, Homo sapien
caaaatttggcactcacatgaaggc

SEQ ID NO: 900131 - DNA, 25 bp, Homo sapien
tcctaatggtacagacaaactcact

SEQ ID NO: 900132 - DNA, 25 bp, Homo sapien
caataaagggccaagcaaaggaggc

SEQ ID NO: 900133 - DNA, 25 bp, Homo sapien
tcctgggaagtaagatgagtgacat

SEQ ID NO: 900134 - DNA, 25 bp, Homo sapien
aaaacatcactaacattgcaacaac

SEQ ID NO: 900135 - DNA, 25 bp, Homo sapien
ttaaaacatcactaacattgcaaca

SEQ ID NO: 900136 - DNA, 25 bp, Homo sapien
aaacatcactaacattgcaacaaca

SEQ ID NO: 900137 - DNA, 25 bp, Homo sapien
taaaacatcactaacattgcaacaa

SEQ ID NO: 900138 - DNA, 25 bp, Homo sapien
ggtcgaattgtaacaagcattattt

SEQ ID NO: 900139 - DNA, 25 bp, Homo sapien
catattaggtcgaattgtaacaagc

SEQ ID NO: 900140 - DNA, 25 bp, Homo sapien
tattttacaatgcacatattaggtc

SEQ ID NO: 900141 - DNA, 25 bp, Homo sapien
tacaatgcacatattaggtcgaatt

SEQ ID NO: 900142 - DNA, 25 bp, Homo sapien
tctagagtatgcacacaggttactc

SEQ ID NO: 900143 - DNA, 25 bp, Homo sapien
caccagctttaactcaccttctgta

SEQ ID NO: 900144 - DNA, 25 bp, Homo sapien
cacaggttactctgaatgcaatgca

SEQ ID NO: 900145 - DNA, 25 bp, Homo sapien
tcaccttctgtaccaaagggcaaac

SEQ ID NO: 900146 - DNA, 25 bp, Homo sapien
tcggaagtctccgctttggaaacta

SEQ ID NO: 900147 - DNA, 25 bp, Homo sapien
gagcactgcagtgagttgttagggc

SEQ ID NO: 900148 - DNA, 25 bp, Homo sapien
tgagttgttagggcaaggggcacat

SEQ ID NO: 900149 - DNA, 25 bp, Homo sapien
aaggaagtcggaagtctccgctttg

SEQ ID NO: 900150 - DNA, 25 bp, Homo sapien
tcacactcttttcgggtttgttctc

SEQ ID NO: 900151 - DNA, 25 bp, Homo sapien
cacactcttttcgggtttgttctct

SEQ ID NO: 900152 - DNA, 25 bp, Homo sapien
gggattactacgactggtgcgcccg

SEQ ID NO: 900153 - DNA, 25 bp, Homo sapien
cctgaactgttctccgctgttcctg

SEQ ID NO: 900154 - DNA, 25 bp, Homo sapien
cttgggactggctggtttgggagca

SEQ ID NO: 900155 - DNA, 25 bp, Homo sapien
tgttcttcttgggactggctggttt

SEQ ID NO: 900156 - DNA, 25 bp, Homo sapien
tacacctagtcatccgctaacgtgc

SEQ ID NO: 900157 - DNA, 25 bp, Homo sapien
ttccaaataggcaccactgacaggg

SEQ ID NO: 900158 - DNA, 25 bp, Homo sapien
gctagctatccagaaccattgggaa

SEQ ID NO: 900159 - DNA, 25 bp, Homo sapien
cagatgtgcctgcttggctagagtc

SEQ ID NO: 900160 - DNA, 25 bp, Homo sapien
taataaactcactatggtatgttgc

SEQ ID NO: 900161 - DNA, 25 bp, Homo sapien
gctgggtattattctaggcactagg

SEQ ID NO: 900162 - DNA, 25 bp, Homo sapien
gacacacttctagtctattctaaaa

SEQ ID NO: 900163 - DNA, 25 bp, Homo sapien
cccactgtgctatgacacacttcta

SEQ ID NO: 900164 - DNA, 25 bp, Homo sapien
ccatcttcacagcattgttcatgat

SEQ ID NO: 900165 - DNA, 25 bp, Homo sapien
tcacagcattgttcatgatacttac

SEQ ID NO: 900166 - DNA, 25 bp, Homo sapien
atccatcttcacagcattgttcatg

SEQ ID NO: 900167 - DNA, 25 bp, Homo sapien
tcttcacagcattgttcatgatact

SEQ ID NO: 900168 - DNA, 25 bp, Homo sapien
agctgatctctccatttttcaacta

SEQ ID NO: 900169 - DNA, 25 bp, Homo sapien
tcttttactaagctgatctctccat

SEQ ID NO: 900170 - DNA, 25 bp, Homo sapien
gctgatctctccatttttcaactaa

SEQ ID NO: 900171 - DNA, 25 bp, Homo sapien
ttactaagctgatctctccattttt

SEQ ID NO: 900172 - DNA, 25 bp, Homo sapien
taccccataatccacacatccacca

SEQ ID NO: 900173 - DNA, 25 bp, Homo sapien
ctttaccccataatccacacatcca

SEQ ID NO: 900174 - DNA, 25 bp, Homo sapien
ttaccccataatccacacatccacc

SEQ ID NO: 900175 - DNA, 25 bp, Homo sapien
atcctttaccccataatccacacat

SEQ ID NO: 900176 - DNA, 25 bp, Homo sapien
tgagcgccactcgtaacacatgatg

SEQ ID NO: 900177 - DNA, 25 bp, Homo sapien
gtgatgaggacttgaagatctcttt

SEQ ID NO: 900178 - DNA, 25 bp, Homo sapien
gaatttgtaatgagcgggacttgag

SEQ ID NO: 900179 - DNA, 25 bp, Homo sapien
cttttacatccaccaccgttgtgac

SEQ ID NO: 900180 - DNA, 25 bp, Homo sapien
gtttttgctgagatacgttgccaaa

SEQ ID NO: 900181 - DNA, 25 bp, Homo sapien
gatacgttgccaaagttggcttcac

SEQ ID NO: 900182 - DNA, 25 bp, Homo sapien
gcttcacctttttacacttgcaccg

SEQ ID NO: 900183 - DNA, 25 bp, Homo sapien
gttggcttcacctttttacacttgc

SEQ ID NO: 900184 - DNA, 25 bp, Homo sapien
ggcgtttacagtcaacatcaagagg

SEQ ID NO: 900185 - DNA, 25 bp, Homo sapien
gggcttaggcgtttacagtcaacat

SEQ ID NO: 900186 - DNA, 25 bp, Homo sapien
tacagtcaacatcaagaggcctttc

SEQ ID NO: 900187 - DNA, 25 bp, Homo sapien
agtcaacatcaagaggcctttcctg

SEQ ID NO: 900188 - DNA, 25 bp, Homo sapien
ggtgtgatgtctatccacttaacat

SEQ ID NO: 900189 - DNA, 25 bp, Homo sapien
ctggtgtgatgtctatccacttaac

SEQ ID NO: 900190 - DNA, 25 bp, Homo sapien
tggtgtgatgtctatccacttaaca

SEQ ID NO: 900191 - DNA, 25 bp, Homo sapien
cctgttcacttaaccactcctcctt

SEQ ID NO: 900192 - DNA, 25 bp, Homo sapien
ccagttctcgattggcagccacagc

SEQ ID NO: 900193 - DNA, 25 bp, Homo sapien
tggccgcccagttctcgattggcag

SEQ ID NO: 900194 - DNA, 25 bp, Homo sapien
ttaggtgtggccgcccagttctcga

SEQ ID NO: 900195 - DNA, 25 bp, Homo sapien
ggtgtggccgcccagttctcgattg

SEQ ID NO: 900196 - DNA, 25 bp, Homo sapien
catgtgccggcacatagggatgcgc

SEQ ID NO: 900197 - DNA, 25 bp, Homo sapien
cttgatagggtcgtgcaggaactcc

SEQ ID NO: 900198 - DNA, 25 bp, Homo sapien
tccagggtgcaaatgggcgcgtaca

SEQ ID NO: 900199 - DNA, 25 bp, Homo sapien
tccgcgtgatgttccagggcatgtg

SEQ ID NO: 900200 - DNA, 25 bp, Homo sapien
atctttcgctgtcccttcgccgagg

SEQ ID NO: 900201 - DNA, 25 bp, Homo sapien
ttcgccgaggaagaaatcctctggg

SEQ ID NO: 900202 - DNA, 25 bp, Homo sapien
ggcagacagaaagcgcccttctctt

SEQ ID NO: 900203 - DNA, 25 bp, Homo sapien
ccaaactccagtcggcagcaaagcg

SEQ ID NO: 900204 - DNA, 25 bp, Homo sapien
cagctctcagccttcggggcgcgaa

SEQ ID NO: 900205 - DNA, 25 bp, Homo sapien
agctctcagccttcggggcgcgaac

SEQ ID NO: 900206 - DNA, 25 bp, Homo sapien
ctccgcagctcggagcgcagccagc

SEQ ID NO: 900207 - DNA, 25 bp, Homo sapien
acacctcccctgacgtgggctcgga

SEQ ID NO: 900208 - DNA, 25 bp, Homo sapien
tgcgggaccctatttatcccgacac

SEQ ID NO: 900209 - DNA, 25 bp, Homo sapien
cccgtcggtgcagaagcggtgacat

SEQ ID NO: 900210 - DNA, 25 bp, Homo sapien
gatcacctgattgactgttgtctgc

SEQ ID NO: 900211 - DNA, 25 bp, Homo sapien
gggataatactctgttccaattgca

SEQ ID NO: 900212 - DNA, 25 bp, Homo sapien
gcaggaatatcagggataatactct

SEQ ID NO: 900213 - DNA, 25 bp, Homo sapien
tcctgatgttcactttgatcacctg

SEQ ID NO: 900214 - DNA, 25 bp, Homo sapien
ctacccatccttagaggcattgtgg

SEQ ID NO: 900215 - DNA, 25 bp, Homo sapien
gaacatcccttgtgtcctggggcat

SEQ ID NO: 900216 - DNA, 25 bp, Homo sapien
tagaagagctgtcactcacacgcat

SEQ ID NO: 900217 - DNA, 25 bp, Homo sapien
cattgtggctgaaggtgagaacatc

SEQ ID NO: 900218 - DNA, 25 bp, Homo sapien
ccagagacaccatgcacagggcatt

SEQ ID NO: 900219 - DNA, 25 bp, Homo sapien
gttgaaacttctatatgatccagag

SEQ ID NO: 900220 - DNA, 25 bp, Homo sapien
tcctagtagacttggaggcttgcag

SEQ ID NO: 900221 - DNA, 25 bp, Homo sapien
tggaataggaccaacctgttgaaac

SEQ ID NO: 900222 - DNA, 25 bp, Homo sapien
actcagatgctccaacgctgaagcc

SEQ ID NO: 900223 - DNA, 25 bp, Homo sapien
ggtactcagatgctccaacgctgaa

SEQ ID NO: 900224 - DNA, 25 bp, Homo sapien
tggctggtactcagatgctccaacg

SEQ ID NO: 900225 - DNA, 25 bp, Homo sapien
tggtactcagatgctccaacgctga

SEQ ID NO: 900226 - DNA, 25 bp, Homo sapien
gcctccattacccatgcactttaaa

SEQ ID NO: 900227 - DNA, 25 bp, Homo sapien
ggaggtttatgtcctcataataagc

SEQ ID NO: 900228 - DNA, 25 bp, Homo sapien
taagctctagccgtgacttccaggt

SEQ ID NO: 900229 - DNA, 25 bp, Homo sapien
taccggtgaatcattccatgcccca

SEQ ID NO: 900230 - DNA, 25 bp, Homo sapien
tgagttaggctctttcaatagggcc

SEQ ID NO: 900231 - DNA, 25 bp, Homo sapien
tacaaggttttgtgtcttggcagca

SEQ ID NO: 900232 - DNA, 25 bp, Homo sapien
tagggcctaaacacactaccaattg

SEQ ID NO: 900233 - DNA, 25 bp, Homo sapien
tctgcatggtcaagacataaaagcc

SEQ ID NO: 900234 - DNA, 25 bp, Homo sapien
tactaaaagcttattgttacaaatg

SEQ ID NO: 900235 - DNA, 25 bp, Homo sapien
actaaaagcttattgttacaaatgt

SEQ ID NO: 900236 - DNA, 25 bp, Homo sapien
ctagaataagaaccaccagactgcc

SEQ ID NO: 900237 - DNA, 25 bp, Homo sapien
ccccgactcattcctagaataagaa

SEQ ID NO: 900238 - DNA, 25 bp, Homo sapien
cccgactcattcctagaataagaac

SEQ ID NO: 900239 - DNA, 25 bp, Homo sapien
tcctcaaaccctgtcaccgtccaca

SEQ ID NO: 900240 - DNA, 25 bp, Homo sapien
tctgtactaatggctaagactttca

SEQ ID NO: 900241 - DNA, 25 bp, Homo sapien
cggcgtctcaagttaagtttgaaga

SEQ ID NO: 900242 - DNA, 25 bp, Homo sapien
tgctttgtcggcgtctcaagttaag

SEQ ID NO: 900243 - DNA, 25 bp, Homo sapien
aattcataatgctttgtcggcgtct

SEQ ID NO: 900244 - DNA, 25 bp, Homo sapien
tcatggttgtattatgattccttca

SEQ ID NO: 900245 - DNA, 25 bp, Homo sapien
agacaagttgaccgtcagcgcagca

SEQ ID NO: 900246 - DNA, 25 bp, Homo sapien
tagacaagttgaccgtcagcgcagc

SEQ ID NO: 900247 - DNA, 25 bp, Homo sapien
gacaagttgaccgtcagcgcagcag

SEQ ID NO: 900248 - DNA, 25 bp, Homo sapien
ttagacaagttgaccgtcagcgcag

SEQ ID NO: 900249 - DNA, 25 bp, Homo sapien
tggagggcattgatggcccatgggc

SEQ ID NO: 900250 - DNA, 25 bp, Homo sapien
gagggcattgatggcccatgggcat

SEQ ID NO: 900251 - DNA, 25 bp, Homo sapien
ggagggcattgatggcccatgggca

SEQ ID NO: 900252 - DNA, 25 bp, Homo sapien
ctggagggcattgatggcccatggg

SEQ ID NO: 900253 - DNA, 25 bp, Homo sapien
ttacatagtctacccacatccaggg

SEQ ID NO: 900254 - DNA, 25 bp, Homo sapien
gaaagtaaagccgtgcacaaataaa

SEQ ID NO: 900255 - DNA, 25 bp, Homo sapien
tatctgatgcctctaagaagagttg

SEQ ID NO: 900256 - DNA, 25 bp, Homo sapien
ccagggagtagagtccagttttagc

SEQ ID NO: 900257 - DNA, 25 bp, Homo sapien
gatgtctgcacttgatagaagatga

SEQ ID NO: 900258 - DNA, 25 bp, Homo sapien
atggcctggatgtctgcacttgata

SEQ ID NO: 900259 - DNA, 25 bp, Homo sapien
gtctgcacttgatagaagatgaata

SEQ ID NO: 900260 - DNA, 25 bp, Homo sapien
gcctggatgtctgcacttgatagaa

SEQ ID NO: 900261 - DNA, 25 bp, Homo sapien
gcattcttctagttgtctgcaggtt

SEQ ID NO: 900262 - DNA, 25 bp, Homo sapien
cgagcatggcacgtggatgtgtcta

SEQ ID NO: 900263 - DNA, 25 bp, Homo sapien
tgagaacattggcagccaccaagag

SEQ ID NO: 900264 - DNA, 25 bp, Homo sapien
tgccaatttgcagtagtctttgact

SEQ ID NO: 900265 - DNA, 25 bp, Homo sapien
taaactaccaccaattgtctccaat

SEQ ID NO: 900266 - DNA, 25 bp, Homo sapien
ttattataaactaccaccaattgtc

SEQ ID NO: 900267 - DNA, 25 bp, Homo sapien
aattcattaggttgccttttgtgtc

SEQ ID NO: 900268 - DNA, 25 bp, Homo sapien
attgtctccaattcattaggttgcc

SEQ ID NO: 900269 - DNA, 25 bp, Homo sapien
tgaggaggacttcgatcactctcct

SEQ ID NO: 900270 - DNA, 25 bp, Homo sapien
tctcctggctatcatacaaagataa

SEQ ID NO: 900271 - DNA, 25 bp, Homo sapien
ggacttcgatcactctcctggctat

SEQ ID NO: 900272 - DNA, 25 bp, Homo sapien
gatcactctcctggctatcatacaa

SEQ ID NO: 900273 - DNA, 25 bp, Homo sapien
tgaaccaagacagtcctatcccagg

SEQ ID NO: 900274 - DNA, 25 bp, Homo sapien
gggcgttgacatcgagaaatgcaat

SEQ ID NO: 900275 - DNA, 25 bp, Homo sapien
cacctgcaagtgaggactagcgaga

SEQ ID NO: 900276 - DNA, 25 bp, Homo sapien
gcgagaatgggctttcggtatccac

SEQ ID NO: 900277 - DNA, 25 bp, Homo sapien
gagcccagaggacaattttcctttc

SEQ ID NO: 900278 - DNA, 25 bp, Homo sapien
agattacagtcctgttttatccctt

SEQ ID NO: 900279 - DNA, 25 bp, Homo sapien
acgagcccagaggacaattttcctt

SEQ ID NO: 900280 - DNA, 25 bp, Homo sapien
cgagcccagaggacaattttccttt

SEQ ID NO: 900281 - DNA, 25 bp, Homo sapien
gatgggctatctaagcaaaataaca

SEQ ID NO: 900282 - DNA, 25 bp, Homo sapien
tattgccttgtctaagagcctgaga

SEQ ID NO: 900283 - DNA, 25 bp, Homo sapien
tagcagcagctgacttcttgaatgg

SEQ ID NO: 900284 - DNA, 25 bp, Homo sapien
atggtttgtattttgatgggctatc

SEQ ID NO: 900285 - DNA, 25 bp, Homo sapien
cattctccaaattctcgaggactct

SEQ ID NO: 900286 - DNA, 25 bp, Homo sapien
tgtgaagttgtttctttaactggct

SEQ ID NO: 900287 - DNA, 25 bp, Homo sapien
ctagactgtgaagttgtttctttaa

SEQ ID NO: 900288 - DNA, 25 bp, Homo sapien
ccaaattctcgaggactcttgctcc

SEQ ID NO: 900289 - DNA, 25 bp, Homo sapien
tctgctgctgtgtgtaggtaagatt

SEQ ID NO: 900290 - DNA, 25 bp, Homo sapien
ctgctgctgtgtgtaggtaagattc

SEQ ID NO: 900291 - DNA, 25 bp, Homo sapien
gctgtgtgtaggtaagattcataca

SEQ ID NO: 900292 - DNA, 25 bp, Homo sapien
gctgctgtgtgtaggtaagattcat

SEQ ID NO: 900293 - DNA, 25 bp, Homo sapien
gaaagccactcttctttataattgc

SEQ ID NO: 900294 - DNA, 25 bp, Homo sapien
acagtattgttgctgagtaccaggc

SEQ ID NO: 900295 - DNA, 25 bp, Homo sapien
acacggtgtcgctgttgaaacacag

SEQ ID NO: 900296 - DNA, 25 bp, Homo sapien
agggaacatagccacccaggtatgg

SEQ ID NO: 900297 - DNA, 25 bp, Homo sapien
ctgttccatacctggagctcactgg

SEQ ID NO: 900298 - DNA, 25 bp, Homo sapien
tggagctcactgggactaaatccat

SEQ ID NO: 900299 - DNA, 25 bp, Homo sapien
cataatctgttccatacctggagct

SEQ ID NO: 900300 - DNA, 25 bp, Homo sapien
ttaacataatctgttccatacctgg

SEQ ID NO: 900301 - DNA, 25 bp, Homo sapien
tgtaactgaaaatgtccaagggcaa

SEQ ID NO: 900302 - DNA, 25 bp, Homo sapien
ctgtaactgaaaatgtccaagggca

SEQ ID NO: 900303 - DNA, 25 bp, Homo sapien
cttgactttacccccagagccatcc

SEQ ID NO: 900304 - DNA, 25 bp, Homo sapien
tgactttacccccagagccatcccc

SEQ ID NO: 900305 - DNA, 25 bp, Homo sapien
gagccatcccctcctggactcctca

SEQ ID NO: 900306 - DNA, 25 bp, Homo sapien
cagagccatcccctcctggactcct

SEQ ID NO: 900307 - DNA, 25 bp, Homo sapien
ctgcactataaatgctagggttcat

SEQ ID NO: 900308 - DNA, 25 bp, Homo sapien
catctgcactataaatgctagggtt

SEQ ID NO: 900309 - DNA, 25 bp, Homo sapien
tacatctgcactataaatgctaggg

SEQ ID NO: 900310 - DNA, 25 bp, Homo sapien
cttctacatctgcactataaatgct

SEQ ID NO: 900311 - DNA, 25 bp, Homo sapien
acttagcagtgggttgaagcctgca

SEQ ID NO: 900312 - DNA, 25 bp, Homo sapien
tcagtaattgttccctcagacttag

SEQ ID NO: 900313 - DNA, 25 bp, Homo sapien
cacagcgtgctcaaattcagtaatt

SEQ ID NO: 900314 - DNA, 25 bp, Homo sapien
taagtcacagcgtgctcaaattcag

SEQ ID NO: 900315 - DNA, 25 bp, Homo sapien
atctttctcatactctcctggtcaa

SEQ ID NO: 900316 - DNA, 25 bp, Homo sapien
tctcctggtcaaaatcaatatattc

SEQ ID NO: 900317 - DNA, 25 bp, Homo sapien
aaatcaatatattcctcccctctat

SEQ ID NO: 900318 - DNA, 25 bp, Homo sapien
catactctcctggtcaaaatcaata

SEQ ID NO: 900319 - DNA, 25 bp, Homo sapien
gacccgcggacggaggccatatcct

SEQ ID NO: 900320 - DNA, 25 bp, Homo sapien
gcggacggaggccatatcctggtcc

SEQ ID NO: 900321 - DNA, 25 bp, Homo sapien
cccgcggacggaggccatatcctgg

SEQ ID NO: 900322 - DNA, 25 bp, Homo sapien
gacggaggccatatcctggtcctgt

SEQ ID NO: 900323 - DNA, 25 bp, Homo sapien
ggctctaaacaggacttttgtgtca

SEQ ID NO: 900324 - DNA, 25 bp, Homo sapien
gccatggcagtctgtcctttgggac

SEQ ID NO: 900325 - DNA, 25 bp, Homo sapien
gtcctttgggactctcaaatcccat

SEQ ID NO: 900326 - DNA, 25 bp, Homo sapien
cattaaccaggtctcataacagtgg

SEQ ID NO: 900327 - DNA, 25 bp, Homo sapien
tgtatttcgcacaccatgtgaacac

SEQ ID NO: 900328 - DNA, 25 bp, Homo sapien
gactgtatttcgcacaccatgtgaa

SEQ ID NO: 900329 - DNA, 25 bp, Homo sapien
actgtatttcgcacaccatgtgaac

SEQ ID NO: 900330 - DNA, 25 bp, Homo sapien
ctgtatttcgcacaccatgtgaaca

SEQ ID NO: 900331 - DNA, 25 bp, Homo sapien
ggctcctgtaaaatgcaagtagtgg

SEQ ID NO: 900332 - DNA, 25 bp, Homo sapien
tggtagctcctgctccatagcagct

SEQ ID NO: 900333 - DNA, 25 bp, Homo sapien
taaaatgcaagtagtggtagctcct

SEQ ID NO: 900334 - DNA, 25 bp, Homo sapien
ctgagagattgtggggctcctgtaa

SEQ ID NO: 900335 - DNA, 25 bp, Homo sapien
tctttagggatggtgaggttggaaa

SEQ ID NO: 900336 - DNA, 25 bp, Homo sapien
tctctttagggatggtgaggttgga

SEQ ID NO: 900337 - DNA, 25 bp, Homo sapien
tgaggttggaaaaaggctcctgtaa

SEQ ID NO: 900338 - DNA, 25 bp, Homo sapien
gatggtgaggttggaaaaaggctcc

SEQ ID NO: 900339 - DNA, 25 bp, Homo sapien
cacaactcatggccaggattgagtc

SEQ ID NO: 900340 - DNA, 25 bp, Homo sapien
gaagacatggagaacgctctcaccg

SEQ ID NO: 900341 - DNA, 25 bp, Homo sapien
agagctcccatgcttctctgcgcaa

SEQ ID NO: 900342 - DNA, 25 bp, Homo sapien
caggatgaaccacctgccagaagac

SEQ ID NO: 900343 - DNA, 25 bp, Homo sapien
tagtatgattgtttttcgatgccca

SEQ ID NO: 900344 - DNA, 25 bp, Homo sapien
gacctggtgttttcactacacgcag

SEQ ID NO: 900345 - DNA, 25 bp, Homo sapien
caccaggcctagcaatttagaaatg

SEQ ID NO: 900346 - DNA, 25 bp, Homo sapien
gaaaagggtatatgatcaagcaaga

SEQ ID NO: 900347 - DNA, 25 bp, Homo sapien
catttaccaaatgccagagaacagg

SEQ ID NO: 900348 - DNA, 25 bp, Homo sapien
aaatgtcataaagggtgcttagagc

SEQ ID NO: 900349 - DNA, 25 bp, Homo sapien
gagctttagaatatggagaaccagc

SEQ ID NO: 900350 - DNA, 25 bp, Homo sapien
taattcaggtgttgcaagctctacc

SEQ ID NO: 900351 - DNA, 25 bp, Homo sapien
ttccctcttatccaggtctctggtt

SEQ ID NO: 900352 - DNA, 25 bp, Homo sapien
tcttatccaggtctctggttaactg

SEQ ID NO: 900353 - DNA, 25 bp, Homo sapien
ggtctctggttaactgtccttccat

SEQ ID NO: 900354 - DNA, 25 bp, Homo sapien
ggcaactttcattcgaatttgaacc

SEQ ID NO: 900355 - DNA, 25 bp, Homo sapien
ctgtggctggtaaggtaatgtcatg

SEQ ID NO: 900356 - DNA, 25 bp, Homo sapien
tatccatgcacatttagttgcctgc

SEQ ID NO: 900357 - DNA, 25 bp, Homo sapien
gagactgagcctgatgtgttaacaa

SEQ ID NO: 900358 - DNA, 25 bp, Homo sapien
aagtcttgtgctgtattcctaatca

SEQ ID NO: 900359 - DNA, 25 bp, Homo sapien
tcatgtttcctttgcgttcagccaa

SEQ ID NO: 900360 - DNA, 25 bp, Homo sapien
gactcaagggaagtcaggatgtctg

SEQ ID NO: 900361 - DNA, 25 bp, Homo sapien
tatggcctgaagtgttggacttgca

SEQ ID NO: 900362 - DNA, 25 bp, Homo sapien
catgcacatgtgctctttgtacagt

SEQ ID NO: 900363 - DNA, 25 bp, Homo sapien
ctctgtagagggacttgatgtgatt

SEQ ID NO: 900364 - DNA, 25 bp, Homo sapien
cctatatgatggatgggagctcagc

SEQ ID NO: 900365 - DNA, 25 bp, Homo sapien
aattagtgacaaaccagtggcctgg

SEQ ID NO: 900366 - DNA, 25 bp, Homo sapien
catagaaggtaagagcggaggtcct

SEQ ID NO: 900367 - DNA, 25 bp, Homo sapien
tgagtgaacacgtccttaagccagg

SEQ ID NO: 900368 - DNA, 25 bp, Homo sapien
tacataattggcagttcccctacct

SEQ ID NO: 900369 - DNA, 25 bp, Homo sapien
tttgtgcctaaacagagagctacag

SEQ ID NO: 900370 - DNA, 25 bp, Homo sapien
ttgattgaggcctgtgtcagacact

SEQ ID NO: 900371 - DNA, 25 bp, Homo sapien
tgtctctagagcaccaacagtgcgt

SEQ ID NO: 900372 - DNA, 25 bp, Homo sapien
ctggtgacctttcaaacagaagcca

SEQ ID NO: 900373 - DNA, 25 bp, Homo sapien
tggtgacctttcaaacagaagccac

SEQ ID NO: 900374 - DNA, 25 bp, Homo sapien
tctggtgacctttcaaacagaagcc

SEQ ID NO: 900375 - DNA, 25 bp, Homo sapien
agggacaaggctagaagccgcaggc

SEQ ID NO: 900376 - DNA, 25 bp, Homo sapien
agagattggtgctggagatcgccat

SEQ ID NO: 900377 - DNA, 25 bp, Homo sapien
acaaggctagaagccgcaggctgtc

SEQ ID NO: 900378 - DNA, 25 bp, Homo sapien
tggtgctggagatcgccatggctat

SEQ ID NO: 900379 - DNA, 25 bp, Homo sapien
tcttctaagcagacagcaggtgatg

SEQ ID NO: 900380 - DNA, 25 bp, Homo sapien
agcagaaagccgttcttctaagcag

SEQ ID NO: 900381 - DNA, 25 bp, Homo sapien
gatggcaaaatagaccacactcttg

SEQ ID NO: 900382 - DNA, 25 bp, Homo sapien
taatatgcagaggtgtttgtgagct

SEQ ID NO: 900383 - DNA, 25 bp, Homo sapien
atctcatacccgaagcagtagttag

SEQ ID NO: 900384 - DNA, 25 bp, Homo sapien
tcatctcatacccgaagcagtagtt

SEQ ID NO: 900385 - DNA, 25 bp, Homo sapien
catctcatacccgaagcagtagtta

SEQ ID NO: 900386 - DNA, 25 bp, Homo sapien
tctcatacccgaagcagtagttagg

SEQ ID NO: 900387 - DNA, 25 bp, Homo sapien
gcatcttttgaccaattgtctttgg

SEQ ID NO: 900388 - DNA, 25 bp, Homo sapien
tcttttgaccaattgtctttgggat

SEQ ID NO: 900389 - DNA, 25 bp, Homo sapien
catcttttgaccaattgtctttggg

SEQ ID NO: 900390 - DNA, 25 bp, Homo sapien
ttgcatcttttgaccaattgtcttt

SEQ ID NO: 900391 - DNA, 25 bp, Homo sapien
ttacacccttcagcacacactgctg

SEQ ID NO: 900392 - DNA, 25 bp, Homo sapien
ctactttacacccttcagcacacac

SEQ ID NO: 900393 - DNA, 25 bp, Homo sapien
tttacacccttcagcacacactgct

SEQ ID NO: 900394 - DNA, 25 bp, Homo sapien
actttacacccttcagcacacactg

SEQ ID NO: 900395 - DNA, 25 bp, Homo sapien
cagcatttcagtgcgattctttctg

SEQ ID NO: 900396 - DNA, 25 bp, Homo sapien
catttcagtgcgattctttctggga

SEQ ID NO: 900397 - DNA, 25 bp, Homo sapien
tcagcatttcagtgcgattctttct

SEQ ID NO: 900398 - DNA, 25 bp, Homo sapien
gcatttcagtgcgattctttctggg

SEQ ID NO: 900399 - DNA, 25 bp, Homo sapien
gcagtagttaggtttgttaatacaa

SEQ ID NO: 900400 - DNA, 25 bp, Homo sapien
gaagcagtagttaggtttgttaata

SEQ ID NO: 900401 - DNA, 25 bp, Homo sapien
agcagtagttaggtttgttaataca

SEQ ID NO: 900402 - DNA, 25 bp, Homo sapien
tcctttgaataattgtatttgggat

SEQ ID NO: 900403 - DNA, 25 bp, Homo sapien
ctttgaataattgtatttgggatcc

SEQ ID NO: 900404 - DNA, 25 bp, Homo sapien
cctttgaataattgtatttgggatc

SEQ ID NO: 900405 - DNA, 25 bp, Homo sapien
atcctttgaataattgtatttggga

SEQ ID NO: 900406 - DNA, 25 bp, Homo sapien
tctcatgtctgacgatacatctgtg

SEQ ID NO: 900407 - DNA, 25 bp, Homo sapien
taaccagctaaatttcatgtatgtg

SEQ ID NO: 900408 - DNA, 25 bp, Homo sapien
ttctggcaccgttaaccagctaaat

SEQ ID NO: 900409 - DNA, 25 bp, Homo sapien
catgtctgacgatacatctgtgttc

SEQ ID NO: 900410 - DNA, 25 bp, Homo sapien
agaagacaaaggtatgttccagcct

SEQ ID NO: 900411 - DNA, 25 bp, Homo sapien
cccagaatcgtgttgctcttctttt

SEQ ID NO: 900412 - DNA, 25 bp, Homo sapien
aatagtgggcttgggggaaacatct

SEQ ID NO: 900413 - DNA, 25 bp, Homo sapien
ttttcttgccaatgtatcttaataa

SEQ ID NO: 900414 - DNA, 25 bp, Homo sapien
ctgtgacaacaagtgttgttccact

SEQ ID NO: 900415 - DNA, 25 bp, Homo sapien
gtgattcagtccatatcaaaaactc

SEQ ID NO: 900416 - DNA, 25 bp, Homo sapien
ttccctgagttcttcaaattctggt

SEQ ID NO: 900417 - DNA, 25 bp, Homo sapien
cagtgattcagtccatatcaaaaac

SEQ ID NO: 900418 - DNA, 25 bp, Homo sapien
agtgattcagtccatatcaaaaact

SEQ ID NO: 900419 - DNA, 25 bp, Homo sapien
tcaaaagaccagggttccagtcctg

SEQ ID NO: 900420 - DNA, 25 bp, Homo sapien
caaaagaccagggttccagtcctgg

SEQ ID NO: 900421 - DNA, 25 bp, Homo sapien
ctcaaaagaccagggttccagtcct

SEQ ID NO: 900422 - DNA, 25 bp, Homo sapien
cattcagctaccctgaaaaattgct

SEQ ID NO: 900423 - DNA, 25 bp, Homo sapien
gaaaaattgctgttcgtatactgag

SEQ ID NO: 900424 - DNA, 25 bp, Homo sapien
aaaattgctgttcgtatactgaggc

SEQ ID NO: 900425 - DNA, 25 bp, Homo sapien
ttcagctaccctgaaaaattgctgt

SEQ ID NO: 900426 - DNA, 25 bp, Homo sapien
gagcctagtcccttttgcaaacgtc

SEQ ID NO: 900427 - DNA, 25 bp, Homo sapien
caggcgaagttactatgagcctagt

SEQ ID NO: 900428 - DNA, 25 bp, Homo sapien
tcccttttgcaaacgtcttgatcca

SEQ ID NO: 900429 - DNA, 25 bp, Homo sapien
cgaagttactatgagcctagtccct

SEQ ID NO: 900430 - DNA, 25 bp, Homo sapien
tctgatcctcatgacatgactagca

SEQ ID NO: 900431 - DNA, 25 bp, Homo sapien
ctcatgacatgactagcaatccaac

SEQ ID NO: 900432 - DNA, 25 bp, Homo sapien
ccttctgatcctcatgacatgacta

SEQ ID NO: 900433 - DNA, 25 bp, Homo sapien
tcctcataaattgcctgctttcttc

SEQ ID NO: 900434 - DNA, 25 bp, Homo sapien
gtgatagatggaatgacgcccactc

SEQ ID NO: 900435 - DNA, 25 bp, Homo sapien
gatagatggaatgacgcccactcaa

SEQ ID NO: 900436 - DNA, 25 bp, Homo sapien
tgatagatggaatgacgcccactca

SEQ ID NO: 900437 - DNA, 25 bp, Homo sapien
tagatggaatgacgcccactcaatc

SEQ ID NO: 900438 - DNA, 25 bp, Homo sapien
gacagagtggctgcagcaataaaca

SEQ ID NO: 900439 - DNA, 25 bp, Homo sapien
ggtggtcaccataagccaataagag

SEQ ID NO: 900440 - DNA, 25 bp, Homo sapien
ggcactccccaggacagcaatttgg

SEQ ID NO: 900441 - DNA, 25 bp, Homo sapien
gagtagagctaccaacagtgcgtgc

SEQ ID NO: 900442 - DNA, 25 bp, Homo sapien
tgaggtcacacagatacgaaacacc

SEQ ID NO: 900443 - DNA, 25 bp, Homo sapien
tcacacagatacgaaacaccatacc

SEQ ID NO: 900444 - DNA, 25 bp, Homo sapien
gaggtcacacagatacgaaacacca

SEQ ID NO: 900445 - DNA, 25 bp, Homo sapien
ggtcacacagatacgaaacaccata

SEQ ID NO: 900446 - DNA, 25 bp, Homo sapien
agatagtgtcctatagccactggaa

SEQ ID NO: 900447 - DNA, 25 bp, Homo sapien
ggtatcgtgaggatcaggaaacaca

SEQ ID NO: 900448 - DNA, 25 bp, Homo sapien
gctgagctcacacggtacgcgtcac

SEQ ID NO: 900449 - DNA, 25 bp, Homo sapien
tacgcgtcacagtagatagtgtcct

SEQ ID NO: 900450 - DNA, 25 bp, Homo sapien
catgctgtttcttaccttggatgtt

SEQ ID NO: 900451 - DNA, 25 bp, Homo sapien
cttaccttggatgttcaatttgatg

SEQ ID NO: 900452 - DNA, 25 bp, Homo sapien
agcccaattgccatgctgtttctta

SEQ ID NO: 900453 - DNA, 25 bp, Homo sapien
aattccacagcccaattgccatgct

SEQ ID NO: 900454 - DNA, 25 bp, Homo sapien
gagagattggtgctggagatcgccg

SEQ ID NO: 900455 - DNA, 25 bp, Homo sapien
agggacaaggctagaagccgcagga

SEQ ID NO: 900456 - DNA, 25 bp, Homo sapien
acaaggctagaagccgcaggatgtc

SEQ ID NO: 900457 - DNA, 25 bp, Homo sapien
tggtgctggagatcgccgtggctat

SEQ ID NO: 900458 - DNA, 25 bp, Homo sapien
taatatgcagaggtgtttgtgagct

SEQ ID NO: 900459 - DNA, 25 bp, Homo sapien
agcagaaagccgttcttctaagcag

SEQ ID NO: 900460 - DNA, 25 bp, Homo sapien
gatggcaaaatagaccacactcttg

SEQ ID NO: 900461 - DNA, 25 bp, Homo sapien
tcttctaagcagacagcaggtgatg

SEQ ID NO: 900462 - DNA, 25 bp, Homo sapien
cattaatgcgagaggggttcacaaa

SEQ ID NO: 900463 - DNA, 25 bp, Homo sapien
agatacattaatgcgagaggggttc

SEQ ID NO: 900464 - DNA, 25 bp, Homo sapien
tacattaatgcgagaggggttcaca

SEQ ID NO: 900465 - DNA, 25 bp, Homo sapien
ataagatacattaatgcgagagggg

SEQ ID NO: 900466 - DNA, 25 bp, Homo sapien
ttgtctttgggatccattgtgatga

SEQ ID NO: 900467 - DNA, 25 bp, Homo sapien
gcatcttttgaacaattgtctttgg

SEQ ID NO: 900468 - DNA, 25 bp, Homo sapien
tttgcatcttttgaacaattgtctt

SEQ ID NO: 900469 - DNA, 25 bp, Homo sapien
tgtctttgggatccattgtgatgac

SEQ ID NO: 900470 - DNA, 25 bp, Homo sapien
tgactgccacaaagtatgtttttga

SEQ ID NO: 900471 - DNA, 25 bp, Homo sapien
gagtatagtacggtgtcatcacggc

SEQ ID NO: 900472 - DNA, 25 bp, Homo sapien
ttccttctgtattcatagctcctag

SEQ ID NO: 900473 - DNA, 25 bp, Homo sapien
gctcctagcatagtgactgccacaa

SEQ ID NO: 900474 - DNA, 25 bp, Homo sapien
tctcatgtctgacgatacatctgtg

SEQ ID NO: 900475 - DNA, 25 bp, Homo sapien
taaccagctaaatttcatgtatgtg

SEQ ID NO: 900476 - DNA, 25 bp, Homo sapien
ttctggcaccgttaaccagctaaat

SEQ ID NO: 900477 - DNA, 25 bp, Homo sapien
catgtctgacgatacatctgtgttc

SEQ ID NO: 900478 - DNA, 25 bp, Homo sapien
cccagaatcgtgttgctcttctttt

SEQ ID NO: 900479 - DNA, 25 bp, Homo sapien
agaagacaaaggtatgttccagcct

SEQ ID NO: 900480 - DNA, 25 bp, Homo sapien
ttttcttgccaatgtatcttaataa

SEQ ID NO: 900481 - DNA, 25 bp, Homo sapien
agacaaaggtatgttccagccttct

SEQ ID NO: 900482 - DNA, 25 bp, Homo sapien
ctgtgacaacaagtgttgttccact

SEQ ID NO: 900483 - DNA, 25 bp, Homo sapien
ttccctgagttcttcaaattctggt

SEQ ID NO: 900484 - DNA, 25 bp, Homo sapien
cacagtgattcagtccatatcaaaa

SEQ ID NO: 900485 - DNA, 25 bp, Homo sapien
cagtgattcagtccatatcaaaaac

SEQ ID NO: 900486 - DNA, 25 bp, Homo sapien
gtgattcagtccatatcaaaaactc

SEQ ID NO: 900487 - DNA, 25 bp, Homo sapien
caaaagaccagggttccagtcctgg

SEQ ID NO: 900488 - DNA, 25 bp, Homo sapien
ctcaaaagaccagggttccagtcct

SEQ ID NO: 900489 - DNA, 25 bp, Homo sapien
tggttcattttgctcataacaagtt

SEQ ID NO: 900490 - DNA, 25 bp, Homo sapien
ccagtcctggttcattttgctcata

SEQ ID NO: 900491 - DNA, 25 bp, Homo sapien
aatcagttcaacatcgctaccagca

SEQ ID NO: 900492 - DNA, 25 bp, Homo sapien
ttcaaaatcagttcaacatcgctac

SEQ ID NO: 900493 - DNA, 25 bp, Homo sapien
caaaatcagttcaacatcgctacca

SEQ ID NO: 900494 - DNA, 25 bp, Homo sapien
aaatcagttcaacatcgctaccagc

SEQ ID NO: 900495 - DNA, 25 bp, Homo sapien
tcaccatgattagtgaccaaggagg

SEQ ID NO: 900496 - DNA, 25 bp, Homo sapien
ttagtaatgtctcccatgctagggc

SEQ ID NO: 900497 - DNA, 25 bp, Homo sapien
gatttgcagttggtctaagctcctt

SEQ ID NO: 900498 - DNA, 25 bp, Homo sapien
gaaaagttctgactcctaaggcatg

SEQ ID NO: 900499 - DNA, 25 bp, Homo sapien
ctatgagcttagtcccttcagcaaa

SEQ ID NO: 900500 - DNA, 25 bp, Homo sapien
tatgagcttagtcccttcagcaaat

SEQ ID NO: 900501 - DNA, 25 bp, Homo sapien
tactatgagcttagtcccttcagca

SEQ ID NO: 900502 - DNA, 25 bp, Homo sapien
agttactatgagcttagtcccttca

SEQ ID NO: 900503 - DNA, 25 bp, Homo sapien
taagcttctacaaaaatctcagcct

SEQ ID NO: 900504 - DNA, 25 bp, Homo sapien
agcttctacaaaaatctcagccttc

SEQ ID NO: 900505 - DNA, 25 bp, Homo sapien
cttctacaaaaatctcagccttctg

SEQ ID NO: 900506 - DNA, 25 bp, Homo sapien
ctaagcttctacaaaaatctcagcc

SEQ ID NO: 900507 - DNA, 25 bp, Homo sapien
agcaggtttaatgggtcaacccact

SEQ ID NO: 900508 - DNA, 25 bp, Homo sapien
cagcaggtttaatgggtcaacccac

SEQ ID NO: 900509 - DNA, 25 bp, Homo sapien
agtaattcttgaaaagcaccaacag

SEQ ID NO: 900510 - DNA, 25 bp, Homo sapien
aggtttaatgggtcaacccactgct

SEQ ID NO: 900511 - DNA, 25 bp, Homo sapien
ctgtcaatatttcaagagccatgaa

SEQ ID NO: 900512 - DNA, 25 bp, Homo sapien
tgtcaatatttcaagagccatgaag

SEQ ID NO: 900513 - DNA, 25 bp, Homo sapien
ctgctgcaggatgacaatccatggg

SEQ ID NO: 900514 - DNA, 25 bp, Homo sapien
ctgcaggatgacaatccatgggcct

SEQ ID NO: 900515 - DNA, 25 bp, Homo sapien
ggatgacaatccatgggcctgtgct

SEQ ID NO: 900516 - DNA, 25 bp, Homo sapien
agggaaactgctctgattagtaagg

SEQ ID NO: 900517 - DNA, 25 bp, Homo sapien
taagggatttcagaacagttaggaa

SEQ ID NO: 900518 - DNA, 25 bp, Homo sapien
ctgctctgattagtaagggatttca

SEQ ID NO: 900519 - DNA, 25 bp, Homo sapien
gattagtaagggatttcagaacagt

SEQ ID NO: 900520 - DNA, 25 bp, Homo sapien
tgtagaaacaaagggcagtaaatag

SEQ ID NO: 900521 - DNA, 25 bp, Homo sapien
ctgtagaaacaaagggcagtaaata

SEQ ID NO: 900522 - DNA, 25 bp, Homo sapien
gagaatttatcttgtaggtcaaaac

SEQ ID NO: 900523 - DNA, 25 bp, Homo sapien
gattccagcaagcacataactatct

SEQ ID NO: 900524 - DNA, 25 bp, Homo sapien
gattctgtgcgggtgtcctgacatc

SEQ ID NO: 900525 - DNA, 25 bp, Homo sapien
taaagagggattctgtgcgggtgtc

SEQ ID NO: 900526 - DNA, 25 bp, Homo sapien
gcctaatccagcaggcacagtggta

SEQ ID NO: 900527 - DNA, 25 bp, Homo sapien
gtgcctaatccagcaggcacagtgg

SEQ ID NO: 900528 - DNA, 25 bp, Homo sapien
tgcctaatccagcaggcacagtggt

SEQ ID NO: 900529 - DNA, 25 bp, Homo sapien
cctaatccagcaggcacagtggtac

SEQ ID NO: 900530 - DNA, 25 bp, Homo sapien
tggaagtgtgagcatttttacttac

SEQ ID NO: 900531 - DNA, 25 bp, Homo sapien
aagtggaagtgtgagcatttttact

SEQ ID NO: 900532 - DNA, 25 bp, Homo sapien
ggaagtggaagtgtgagcattttta

SEQ ID NO: 900533 - DNA, 25 bp, Homo sapien
gtggaagtgtgagcatttttactta

SEQ ID NO: 900534 - DNA, 25 bp, Homo sapien
tgccagtaccagtgtatgattttac

SEQ ID NO: 900535 - DNA, 25 bp, Homo sapien
tatgtgggcactcttatttgctggt

SEQ ID NO: 900536 - DNA, 25 bp, Homo sapien
tggatgccttccaagatatgtgggc

SEQ ID NO: 900537 - DNA, 25 bp, Homo sapien
gtttctgccagtaccagtgtatgat

SEQ ID NO: 900538 - DNA, 25 bp, Homo sapien
gaagataacagctactaccagtggc

SEQ ID NO: 900539 - DNA, 25 bp, Homo sapien
gaaattcccataagccaacgatacg

SEQ ID NO: 900540 - DNA, 25 bp, Homo sapien
taccagtggcatgctttctgccagt

SEQ ID NO: 900541 - DNA, 25 bp, Homo sapien
tcttctgtagactgaaatgattagg

SEQ ID NO: 900542 - DNA, 25 bp, Homo sapien
tatgagcagttccagggtttcctgc

SEQ ID NO: 900543 - DNA, 25 bp, Homo sapien
catcccatgagtgctgggcagatcg

SEQ ID NO: 900544 - DNA, 25 bp, Homo sapien
cagggtttcctgcatcccatgagtg

SEQ ID NO: 900545 - DNA, 25 bp, Homo sapien
cagttatgagcagttccagggtttc

SEQ ID NO: 900546 - DNA, 25 bp, Homo sapien
tgcaaacaaaaaagagaaatcccca

SEQ ID NO: 900547 - DNA, 25 bp, Homo sapien
caactgcaaacaaaaaagagaaatc

SEQ ID NO: 900548 - DNA, 25 bp, Homo sapien
ttcaactgcaaacaaaaaagagaaa

SEQ ID NO: 900549 - DNA, 25 bp, Homo sapien
caaacaaaaaagagaaatccccatg

SEQ ID NO: 900550 - DNA, 25 bp, Homo sapien
tgtctgctgagccatatccccagga

SEQ ID NO: 900551 - DNA, 25 bp, Homo sapien
gctggctggccccagtcagtgggga

SEQ ID NO: 900552 - DNA, 25 bp, Homo sapien
aaaatatgaatattctcagcaggga

SEQ ID NO: 900553 - DNA, 25 bp, Homo sapien
ggagaaggaccctggttgctggctg

SEQ ID NO: 900554 - DNA, 25 bp, Homo sapien
agaaggcgagcctgagtctgggagc

SEQ ID NO: 900555 - DNA, 25 bp, Homo sapien
aaggcgagcctgagtctgggagccc

SEQ ID NO: 900556 - DNA, 25 bp, Homo sapien
gaaggcgagcctgagtctgggagcc

SEQ ID NO: 900557 - DNA, 25 bp, Homo sapien
gtttcaacagttctagtatggtgta

SEQ ID NO: 900558 - DNA, 25 bp, Homo sapien
agcacagtagtaaacggccatgtct

SEQ ID NO: 900559 - DNA, 25 bp, Homo sapien
cacagtagtaaacggccatgtcttc

SEQ ID NO: 900560 - DNA, 25 bp, Homo sapien
cagtagtaaacggccatgtcttctt

SEQ ID NO: 900561 - DNA, 25 bp, Homo sapien
gtagtaaacggccatgtcttctttc

SEQ ID NO: 900562 - DNA, 25 bp, Homo sapien
atggtaaggattgaagtgagagttt

SEQ ID NO: 900563 - DNA, 25 bp, Homo sapien
gattgaagtgagagtttgagaattc

SEQ ID NO: 900564 - DNA, 25 bp, Homo sapien
cttgcctccactttgttgcttgtct

SEQ ID NO: 900565 - DNA, 25 bp, Homo sapien
gcctccactttgttgcttgtcttac

SEQ ID NO: 900566 - DNA, 25 bp, Homo sapien
cgagctgcggattttgttgagacaa

SEQ ID NO: 900567 - DNA, 25 bp, Homo sapien
tttctgccggtaccagtgaatgaca

SEQ ID NO: 900568 - DNA, 25 bp, Homo sapien
gacttccgtggaaatggatagctgg

SEQ ID NO: 900569 - DNA, 25 bp, Homo sapien
caaagcctgatttggtttctgccgg

SEQ ID NO: 900570 - DNA, 25 bp, Homo sapien
aaaagaggagaatttccaatgaaca

SEQ ID NO: 900571 - DNA, 25 bp, Homo sapien
gtaaaagaggagaatttccaatgaa

SEQ ID NO: 900572 - DNA, 25 bp, Homo sapien
agtaaaagaggagaatttccaatga

SEQ ID NO: 900573 - DNA, 25 bp, Homo sapien
taaaagaggagaatttccaatgaac

SEQ ID NO: 900574 - DNA, 25 bp, Homo sapien
cattgaagaatgattttggtcacgc

SEQ ID NO: 900575 - DNA, 25 bp, Homo sapien
aaatgttcggacagcaactcaggag

SEQ ID NO: 900576 - DNA, 25 bp, Homo sapien
gcagctagactgaaatgttcggaca

SEQ ID NO: 900577 - DNA, 25 bp, Homo sapien
gaatgattttggtcacgcagctaga

SEQ ID NO: 900578 - DNA, 25 bp, Homo sapien
cgtgttttgtgggacaggtatgaac

SEQ ID NO: 900579 - DNA, 25 bp, Homo sapien
tgggacaggtatgaactccgacagc

SEQ ID NO: 900580 - DNA, 25 bp, Homo sapien
caggtatgaactccgacagcttggg

SEQ ID NO: 900581 - DNA, 25 bp, Homo sapien
tatgaactccgacagcttgggtcct

SEQ ID NO: 900582 - DNA, 25 bp, Homo sapien
aaacaaataaagtgaacaaaggcag

SEQ ID NO: 900583 - DNA, 25 bp, Homo sapien
caaataaagtgaacaaaggcagaat

SEQ ID NO: 900584 - DNA, 25 bp, Homo sapien
tcaaacaaataaagtgaacaaaggc

SEQ ID NO: 900585 - DNA, 25 bp, Homo sapien
caaaggcagaatttatattattgaa

SEQ ID NO: 900586 - DNA, 25 bp, Homo sapien
taaatggttcaagcagggactgcca

SEQ ID NO: 900587 - DNA, 25 bp, Homo sapien
aaatagaagctttgacctagcaggc

SEQ ID NO: 900588 - DNA, 25 bp, Homo sapien
tctggcaggagttaagtgacaggac

SEQ ID NO: 900589 - DNA, 25 bp, Homo sapien
taatttgcgacagagggtctaactc

SEQ ID NO: 900590 - DNA, 25 bp, Homo sapien
tcctcacaagcgtcactggagtggg

SEQ ID NO: 900591 - DNA, 25 bp, Homo sapien
caccatggtgtcacttgtgcgaatg

SEQ ID NO: 900592 - DNA, 25 bp, Homo sapien
tggagtgggcactaccatctctgca

SEQ ID NO: 900593 - DNA, 25 bp, Homo sapien
gatgctcaggttgactcaagccctc

SEQ ID NO: 900594 - DNA, 25 bp, Homo sapien
atagtttccaccaggttagagcagc

SEQ ID NO: 900595 - DNA, 25 bp, Homo sapien
caggttagagcagcctctttcagac

SEQ ID NO: 900596 - DNA, 25 bp, Homo sapien
tttccaccaggttagagcagcctct

SEQ ID NO: 900597 - DNA, 25 bp, Homo sapien
caccaggttagagcagcctctttca

SEQ ID NO: 900598 - DNA, 25 bp, Homo sapien
gcctgcttaggcttttctgcgtttc

SEQ ID NO: 900599 - DNA, 25 bp, Homo sapien
gcttaggcttttctgcgtttctctg

SEQ ID NO: 900600 - DNA, 25 bp, Homo sapien
gtggtgcctgcttaggcttttctgc

SEQ ID NO: 900601 - DNA, 25 bp, Homo sapien
tctttgtggtgcctgcttaggcttt

SEQ ID NO: 900602 - DNA, 25 bp, Homo sapien
agcattttgccctgctgatcttggg

SEQ ID NO: 900603 - DNA, 25 bp, Homo sapien
gcatcctcgacaacttccagcattt

SEQ ID NO: 900604 - DNA, 25 bp, Homo sapien
ctgctactctctgcatcctcgacaa

SEQ ID NO: 900605 - DNA, 25 bp, Homo sapien
gagtgagttctcagaggtgtcttcc

SEQ ID NO: 900606 - DNA, 25 bp, Homo sapien
ccagactgaacttgccactattgac

SEQ ID NO: 900607 - DNA, 25 bp, Homo sapien
accagactgaacttgccactattga

SEQ ID NO: 900608 - DNA, 25 bp, Homo sapien
cagactgaacttgccactattgact

SEQ ID NO: 900609 - DNA, 25 bp, Homo sapien
tggccccctcagtagctttgtatcc

SEQ ID NO: 900610 - DNA, 25 bp, Homo sapien
cagtagctttgtatcctctcagaga

SEQ ID NO: 900611 - DNA, 25 bp, Homo sapien
tatcctctcagagaccctgagaagc

SEQ ID NO: 900612 - DNA, 25 bp, Homo sapien
catgcccttggggtgcaaagttccc

SEQ ID NO: 900613 - DNA, 25 bp, Homo sapien
gaaaggggtgctggtttgggctcac

SEQ ID NO: 900614 - DNA, 25 bp, Homo sapien
ctgtgtggaaaggggtgctggtttg

SEQ ID NO: 900615 - DNA, 25 bp, Homo sapien
tggaaaggggtgctggtttgggctc

SEQ ID NO: 900616 - DNA, 25 bp, Homo sapien
tgtggaaaggggtgctggtttgggc

SEQ ID NO: 900617 - DNA, 25 bp, Homo sapien
gttgatgaagttctaccagggctgt

SEQ ID NO: 900618 - DNA, 25 bp, Homo sapien
gaagttctaccagggctgtattagg

SEQ ID NO: 900619 - DNA, 25 bp, Homo sapien
ttagggaagcttgacaggagacaga

SEQ ID NO: 900620 - DNA, 25 bp, Homo sapien
cagggctgtattagggaagcttgac

SEQ ID NO: 900621 - DNA, 25 bp, Homo sapien
tttctatcccctctggcataagacc

SEQ ID NO: 900622 - DNA, 25 bp, Homo sapien
tggcataagaccctcagacgcaagg

SEQ ID NO: 900623 - DNA, 25 bp, Homo sapien
gggaagtacctccacataatgctct

SEQ ID NO: 900624 - DNA, 25 bp, Homo sapien
tcagacgcaagggaaccgggaagta

SEQ ID NO: 900625 - DNA, 25 bp, Homo sapien
gagtcttcatatctagcagctgtaa

SEQ ID NO: 900626 - DNA, 25 bp, Homo sapien
tctccctgggaaggtattaacgtca

SEQ ID NO: 900627 - DNA, 25 bp, Homo sapien
tgttgttactttgccagtgtggcct

SEQ ID NO: 900628 - DNA, 25 bp, Homo sapien
ttaacgtcaccgatatcatatgctg

SEQ ID NO: 900629 - DNA, 25 bp, Homo sapien
gaatcacaactatagaaaactcttt

SEQ ID NO: 900630 - DNA, 25 bp, Homo sapien
cacaattaattcaaaaagtgagttt

SEQ ID NO: 900631 - DNA, 25 bp, Homo sapien
tcaaaaagtgagtttgtggcaggct

SEQ ID NO: 900632 - DNA, 25 bp, Homo sapien
gattttcaagcccaacatctcacaa

SEQ ID NO: 900633 - DNA, 25 bp, Homo sapien
tccaatgtcatgctagtttcctggg

SEQ ID NO: 900634 - DNA, 25 bp, Homo sapien
cctgggggccattatattgggtcat

SEQ ID NO: 900635 - DNA, 25 bp, Homo sapien
gctccaatgtcatgctagtttcctg

SEQ ID NO: 900636 - DNA, 25 bp, Homo sapien
cagctccaatgtcatgctagtttcc

SEQ ID NO: 900637 - DNA, 25 bp, Homo sapien
ctgtcatttaagatcgcccgggtcc

SEQ ID NO: 900638 - DNA, 25 bp, Homo sapien
tgtcatttaagatcgcccgggtccc

SEQ ID NO: 900639 - DNA, 25 bp, Homo sapien
ccgccccttccggccagccgagcct

SEQ ID NO: 900640 - DNA, 25 bp, Homo sapien
gccccttccggccagccgagcctca

SEQ ID NO: 900641 - DNA, 25 bp, Homo sapien
cgccccttccggccagccgagcctc

SEQ ID NO: 900642 - DNA, 25 bp, Homo sapien
tccgccccttccggccagccgagcc

SEQ ID NO: 900643 - DNA, 25 bp, Homo sapien
ggccgcaggggtagccgtgggctcg

SEQ ID NO: 900644 - DNA, 25 bp, Homo sapien
ctgagccttcagatgggggagctcg

SEQ ID NO: 900645 - DNA, 25 bp, Homo sapien
gggtcctgcgcctacgagatccggc

SEQ ID NO: 900646 - DNA, 25 bp, Homo sapien
ggactgttcgaccacgcagagtgac

SEQ ID NO: 900647 - DNA, 25 bp, Homo sapien
ctgtccctgtgtgaaggcttcagcg

SEQ ID NO: 900648 - DNA, 25 bp, Homo sapien
tacgagatccggcagttcctggact

SEQ ID NO: 900649 - DNA, 25 bp, Homo sapien
ctgaagcagtgcaagtacaaccatg

SEQ ID NO: 900650 - DNA, 25 bp, Homo sapien
gcaagtacaaccatggtctgagctc

SEQ ID NO: 900651 - DNA, 25 bp, Homo sapien
agcagtgcaagtacaaccatggtct

SEQ ID NO: 900652 - DNA, 25 bp, Homo sapien
caagtacaaccatggtctgagctcc

SEQ ID NO: 900653 - DNA, 25 bp, Homo sapien
tctgaagaggttggtgcagactggg

SEQ ID NO: 900654 - DNA, 25 bp, Homo sapien
gctctgaagaggttggtgcagactg

SEQ ID NO: 900655 - DNA, 25 bp, Homo sapien
ctctgaagaggttggtgcagactgg

SEQ ID NO: 900656 - DNA, 25 bp, Homo sapien
caccagattgtaccagatggctggg

SEQ ID NO: 900657 - DNA, 25 bp, Homo sapien
acaccagattgtaccagatggctgg

SEQ ID NO: 900658 - DNA, 25 bp, Homo sapien
tctgtgcatgtaaactcactgattt

SEQ ID NO: 900659 - DNA, 25 bp, Homo sapien
tgccatgcacataagaagtactcaa

SEQ ID NO: 900660 - DNA, 25 bp, Homo sapien
tctttcagagaatagtctgtacatt

SEQ ID NO: 900661 - DNA, 25 bp, Homo sapien
aagcatgcagtataaagtgccatgc

SEQ ID NO: 900662 - DNA, 25 bp, Homo sapien
aatctgctgacctatggactgcaaa

SEQ ID NO: 900663 - DNA, 25 bp, Homo sapien
atctgctgacctatggactgcaaat

SEQ ID NO: 900664 - DNA, 25 bp, Homo sapien
tctgctgacctatggactgcaaatt

SEQ ID NO: 900665 - DNA, 25 bp, Homo sapien
catactatcgattcatgaagcacta

SEQ ID NO: 900666 - DNA, 25 bp, Homo sapien
taaagaacactacgagcacaattgg

SEQ ID NO: 900667 - DNA, 25 bp, Homo sapien
tctacttgacatgaacgtgacaggc

SEQ ID NO: 900668 - DNA, 25 bp, Homo sapien
tgaagcactacaagcataaagcact

SEQ ID NO: 900669 - DNA, 25 bp, Homo sapien
tataatggtcatctgcactatgcac

SEQ ID NO: 900670 - DNA, 25 bp, Homo sapien
tttttcccctataatggtcatctgc

SEQ ID NO: 900671 - DNA, 25 bp, Homo sapien
atggtcatctgcactatgcacaagg

SEQ ID NO: 900672 - DNA, 25 bp, Homo sapien
tcccctataatggtcatctgcacta

SEQ ID NO: 900673 - DNA, 25 bp, Homo sapien
taaaaactgtttacaagcacactgg

SEQ ID NO: 900674 - DNA, 25 bp, Homo sapien
tttggcaactccaagtagagtcacc

SEQ ID NO: 900675 - DNA, 25 bp, Homo sapien
tataatgagtaggagaggttgaacc

SEQ ID NO: 900676 - DNA, 25 bp, Homo sapien
taagcatgggtgacctagaaaagct

SEQ ID NO: 900677 - DNA, 25 bp, Homo sapien
tgaatgggatggctcaaactgtctg

SEQ ID NO: 900678 - DNA, 25 bp, Homo sapien
tattgaatgggatggctcaaactgt

SEQ ID NO: 900679 - DNA, 25 bp, Homo sapien
atgggatggctcaaactgtctgctg

SEQ ID NO: 900680 - DNA, 25 bp, Homo sapien
tttattgaatgggatggctcaaact

SEQ ID NO: 900681 - DNA, 25 bp, Homo sapien
gacagtgccgtcatatgaaatggac

SEQ ID NO: 900682 - DNA, 25 bp, Homo sapien
caaatttgcctgacggaatgccgga

SEQ ID NO: 900683 - DNA, 25 bp, Homo sapien
aaatttgaggttgctctaggtgacc

SEQ ID NO: 900684 - DNA, 25 bp, Homo sapien
caggaactgtatgacttcaccaggt

SEQ ID NO: 900685 - DNA, 25 bp, Homo sapien
caaggactgccagcgttgatgtgtg

SEQ ID NO: 900686 - DNA, 25 bp, Homo sapien
agccccaaggactgccagcgttgat

SEQ ID NO: 900687 - DNA, 25 bp, Homo sapien
cccaaggactgccagcgttgatgtg

SEQ ID NO: 900688 - DNA, 25 bp, Homo sapien
actgccagcgttgatgtgtggagca

SEQ ID NO: 900689 - DNA, 25 bp, Homo sapien
tctgcaggcactgtgctttctgcca

SEQ ID NO: 900690 - DNA, 25 bp, Homo sapien
caggcactgtgctttctgccagggc

SEQ ID NO: 900691 - DNA, 25 bp, Homo sapien
gcactgtgctttctgccagggcagc

SEQ ID NO: 900692 - DNA, 25 bp, Homo sapien
gtctgcaggcactgtgctttctgcc

SEQ ID NO: 900693 - DNA, 25 bp, Homo sapien
cccctgcatcgttgtaaagcggtgt

SEQ ID NO: 900694 - DNA, 25 bp, Homo sapien
aagcgttagacctctgtggcttggc

SEQ ID NO: 900695 - DNA, 25 bp, Homo sapien
ctgaaatcaccgcagagaagcgtta

SEQ ID NO: 900696 - DNA, 25 bp, Homo sapien
catcgttgtaaagcggtgtcctcac

SEQ ID NO: 900697 - DNA, 25 bp, Homo sapien
caagtacgtctgacatgggatctca

SEQ ID NO: 900698 - DNA, 25 bp, Homo sapien
gatgttggtccgtcaagccgcttag

SEQ ID NO: 900699 - DNA, 25 bp, Homo sapien
tcagaccacatagtttagacggcca

SEQ ID NO: 900700 - DNA, 25 bp, Homo sapien
tgggatctcaaacaaagtctgctca

SEQ ID NO: 900701 - DNA, 25 bp, Homo sapien
agatgaagtccagagttcttaggat

SEQ ID NO: 900702 - DNA, 25 bp, Homo sapien
gacccacttctatggattgacttga

SEQ ID NO: 900703 - DNA, 25 bp, Homo sapien
tggccactagactgacctggtcctt

SEQ ID NO: 900704 - DNA, 25 bp, Homo sapien
ctggaattccacgacccacttctat

SEQ ID NO: 900705 - DNA, 25 bp, Homo sapien
tagttcatgccctcgatgcctgtct

SEQ ID NO: 900706 - DNA, 25 bp, Homo sapien
tgtagctgatcctggtgcggaccac

SEQ ID NO: 900707 - DNA, 25 bp, Homo sapien
tatgccacagggaaacccaagggac

SEQ ID NO: 900708 - DNA, 25 bp, Homo sapien
gaccaagagtaagtgaaaatgccca

SEQ ID NO: 900709 - DNA, 25 bp, Homo sapien
gaaacaggatgacccaaaggaaggc

SEQ ID NO: 900710 - DNA, 25 bp, Homo sapien
tgacccaaaggaaggcagggcagcc

SEQ ID NO: 900711 - DNA, 25 bp, Homo sapien
ctggaaacaggatgacccaaaggaa

SEQ ID NO: 900712 - DNA, 25 bp, Homo sapien
cccaaaggaaggcagggcagcccac

SEQ ID NO: 900713 - DNA, 25 bp, Homo sapien
cagcttagggcctgaactgctattt

SEQ ID NO: 900714 - DNA, 25 bp, Homo sapien
tcaaactatggacctgagccacact

SEQ ID NO: 900715 - DNA, 25 bp, Homo sapien
ttcctgagttatggtagcgaccagc

SEQ ID NO: 900716 - DNA, 25 bp, Homo sapien
tgctatttccctggtggtgcaagga

SEQ ID NO: 900717 - DNA, 25 bp, Homo sapien
taaatctgtattttgtgggaattag

SEQ ID NO: 900718 - DNA, 25 bp, Homo sapien
taagcttcaagtgtacaatatagta

SEQ ID NO: 900719 - DNA, 25 bp, Homo sapien
tcaagctaattaatacatagttccc

SEQ ID NO: 900720 - DNA, 25 bp, Homo sapien
tctttcagtaagcttcaagtgtaca

SEQ ID NO: 900721 - DNA, 25 bp, Homo sapien
gccaggactataaggctgattcaag

SEQ ID NO: 900722 - DNA, 25 bp, Homo sapien
tataaggctgattcaaggtttaggg

SEQ ID NO: 900723 - DNA, 25 bp, Homo sapien
aggtggtccgtggagtacactttga

SEQ ID NO: 900724 - DNA, 25 bp, Homo sapien
acactcttctaggagccaggactat

SEQ ID NO: 900725 - DNA, 25 bp, Homo sapien
taagacaggttacaatagccagact

SEQ ID NO: 900726 - DNA, 25 bp, Homo sapien
gaaaaggctcggagaatcactgcca

SEQ ID NO: 900727 - DNA, 25 bp, Homo sapien
gggaccacgttgacagtatgcattt

SEQ ID NO: 900728 - DNA, 25 bp, Homo sapien
gagaccagataaacatgaacccagc

SEQ ID NO: 900729 - DNA, 25 bp, Homo sapien
ggctgtagtgttcctcaatggccca

SEQ ID NO: 900730 - DNA, 25 bp, Homo sapien
tcatgtcatgcgaccaaggtttcct

SEQ ID NO: 900731 - DNA, 25 bp, Homo sapien
ttctaggcacgttctccatgtcggc

SEQ ID NO: 900732 - DNA, 25 bp, Homo sapien
ccaacaccaggagccctgtcagggt

SEQ ID NO: 900733 - DNA, 25 bp, Homo sapien
ctaaatgaatccctttacagaccag

SEQ ID NO: 900734 - DNA, 25 bp, Homo sapien
gcaggtggaatgggtctccaccagc

SEQ ID NO: 900735 - DNA, 25 bp, Homo sapien
aaatgaatccctttacagaccagtc

SEQ ID NO: 900736 - DNA, 25 bp, Homo sapien
tgtctgtcttaggaagcaggtggaa

SEQ ID NO: 900737 - DNA, 25 bp, Homo sapien
tgtacagaatacagtgaattcatgg

SEQ ID NO: 900738 - DNA, 25 bp, Homo sapien
ttgtacagaatacagtgaattcatg

SEQ ID NO: 900739 - DNA, 25 bp, Homo sapien
tctctttgtacagaatacagtgaat

SEQ ID NO: 900740 - DNA, 25 bp, Homo sapien
gtttctctttgtacagaatacagtg

SEQ ID NO: 900741 - DNA, 25 bp, Homo sapien
gagtagtcacaaggcagattttcag

SEQ ID NO: 900742 - DNA, 25 bp, Homo sapien
aggagtagtcacaaggcagattttc

SEQ ID NO: 900743 - DNA, 25 bp, Homo sapien
ttttcagtgtggtgtagcacaggtc

SEQ ID NO: 900744 - DNA, 25 bp, Homo sapien
tggtgtagcacaggtctgaatcact

SEQ ID NO: 900745 - DNA, 25 bp, Homo sapien
gatacttttctcgactgattcctga

SEQ ID NO: 900746 - DNA, 25 bp, Homo sapien
cacgttcaattagattttccagtat

SEQ ID NO: 900747 - DNA, 25 bp, Homo sapien
cacagtaatagaccccagagtcacg

SEQ ID NO: 900748 - DNA, 25 bp, Homo sapien
tccagtataaatttaaggctcttcc

SEQ ID NO: 900749 - DNA, 25 bp, Homo sapien
gctagaagcagagctagagccaaca

SEQ ID NO: 900750 - DNA, 25 bp, Homo sapien
aagctagaagcagagctagagccaa

SEQ ID NO: 900751 - DNA, 25 bp, Homo sapien
aaagctagaagcagagctagagcca

SEQ ID NO: 900752 - DNA, 25 bp, Homo sapien
tagaagcagagctagagccaacagc

SEQ ID NO: 900753 - DNA, 25 bp, Homo sapien
cttggaagtaagggaccagacgaag

SEQ ID NO: 900754 - DNA, 25 bp, Homo sapien
agtaagggaccagacgaagaggagc

SEQ ID NO: 900755 - DNA, 25 bp, Homo sapien
aacaaggaagtgatccctaacacag

SEQ ID NO: 900756 - DNA, 25 bp, Homo sapien
caaggaagtgatccctaacacagaa

SEQ ID NO: 900757 - DNA, 25 bp, Homo sapien
tctgaaccccagagcttggattgca

SEQ ID NO: 900758 - DNA, 25 bp, Homo sapien
gttacctatagggtgagacacagaa

SEQ ID NO: 900759 - DNA, 25 bp, Homo sapien
agtacagtaactaccggaaagtcag

SEQ ID NO: 900760 - DNA, 25 bp, Homo sapien
gaagtatgttcacctttccaagtag

SEQ ID NO: 900761 - DNA, 25 bp, Homo sapien
tttgctgtccaaaatatctcgcttc

SEQ ID NO: 900762 - DNA, 25 bp, Homo sapien
atttgctgtccaaaatatctcgctt

SEQ ID NO: 900763 - DNA, 25 bp, Homo sapien
ctcggagagctgagagagtcttgct

SEQ ID NO: 900764 - DNA, 25 bp, Homo sapien
aagatgacagcttgtcttcaggaaa

SEQ ID NO: 900765 - DNA, 25 bp, Homo sapien
gaagatgacagcttgtcttcaggaa

SEQ ID NO: 900766 - DNA, 25 bp, Homo sapien
atgtcctcggagagctgagagagtc

SEQ ID NO: 900767 - DNA, 25 bp, Homo sapien
aatacagtaaattcggtggcaacaa

SEQ ID NO: 900768 - DNA, 25 bp, Homo sapien
cagtaaattcggtggcaacaaatga

SEQ ID NO: 900769 - DNA, 25 bp, Homo sapien
agaatacagtaaattcggtggcaac

SEQ ID NO: 900770 - DNA, 25 bp, Homo sapien
gagtgtgatattaggggagagatca

SEQ ID NO: 900771 - DNA, 25 bp, Homo sapien
atactttcctctactgattcttgat

SEQ ID NO: 900772 - DNA, 25 bp, Homo sapien
ttattacagtaagatcacaagtgat

SEQ ID NO: 900773 - DNA, 25 bp, Homo sapien
tgcaggtaccagtggatgtagaagg

SEQ ID NO: 900774 - DNA, 25 bp, Homo sapien
tagtaggggtcatagtatggaagat

SEQ ID NO: 900775 - DNA, 25 bp, Homo sapien
caagtgattacagcagatgacccag

SEQ ID NO: 900776 - DNA, 25 bp, Homo sapien
agaagcagggctggggcccaccgca

SEQ ID NO: 900777 - DNA, 25 bp, Homo sapien
gaagcagggctggggcccaccgcat

SEQ ID NO: 900778 - DNA, 25 bp, Homo sapien
aagaggcaggaaagctagaagcagg

SEQ ID NO: 900779 - DNA, 25 bp, Homo sapien
aggcaggaaagctagaagcagggct

SEQ ID NO: 900780 - DNA, 25 bp, Homo sapien
tgaagaggagcagaagacgctttca

SEQ ID NO: 900781 - DNA, 25 bp, Homo sapien
agaaacaaaggcaattaaccatttg

SEQ ID NO: 900782 - DNA, 25 bp, Homo sapien
ggtccagaatgggtagccagagtta

SEQ ID NO: 900783 - DNA, 25 bp, Homo sapien
gccagagttagattataggattgcc

SEQ ID NO: 900784 - DNA, 25 bp, Homo sapien
actcttcaaggcgggaaatacctga

SEQ ID NO: 900785 - DNA, 25 bp, Homo sapien
taagtatcatgctttcctgactgac

SEQ ID NO: 900786 - DNA, 25 bp, Homo sapien
tccataagtatcatgctttcctgac

SEQ ID NO: 900787 - DNA, 25 bp, Homo sapien
cttctacttccataagtatcatgct

SEQ ID NO: 900788 - DNA, 25 bp, Homo sapien
tacttccataagtatcatgctttcc

SEQ ID NO: 900789 - DNA, 25 bp, Homo sapien
caacatatccctggagttgcagatg

SEQ ID NO: 900790 - DNA, 25 bp, Homo sapien
tgcagatgtcatagtacagaagatg

SEQ ID NO: 900791 - DNA, 25 bp, Homo sapien
cagatgtcatagtacagaagatgct

SEQ ID NO: 900792 - DNA, 25 bp, Homo sapien
atccctggagttgcagatgtcatag

SEQ ID NO: 900793 - DNA, 25 bp, Homo sapien
ttattttcgcttccaagttagtaga

SEQ ID NO: 900794 - DNA, 25 bp, Homo sapien
gcctgactttattttcgcttccaag

SEQ ID NO: 900795 - DNA, 25 bp, Homo sapien
caggtgattacagcagatgacccca

SEQ ID NO: 900796 - DNA, 25 bp, Homo sapien
aggtgattacagcagatgaccccat

SEQ ID NO: 900797 - DNA, 25 bp, Homo sapien
aggaaagctagaagcagggctaggg

SEQ ID NO: 900798 - DNA, 25 bp, Homo sapien
caagagacaggaaagctagaagcag

SEQ ID NO: 900799 - DNA, 25 bp, Homo sapien
aaagctagaagcagggctagggccc

SEQ ID NO: 900800 - DNA, 25 bp, Homo sapien
agaagcagggctagggcccaccaca

SEQ ID NO: 900801 - DNA, 25 bp, Homo sapien
aatatctagattcgcagctggaccc

SEQ ID NO: 900802 - DNA, 25 bp, Homo sapien
tctgctatgacaaacagagtgaaac

SEQ ID NO: 900803 - DNA, 25 bp, Homo sapien
gctggaccctagttgtacctgtctg

SEQ ID NO: 900804 - DNA, 25 bp, Homo sapien
gtgatctctggaccatgactggata

SEQ ID NO: 900805 - DNA, 25 bp, Homo sapien
ggagggagatcaggagttaagctgt

SEQ ID NO: 900806 - DNA, 25 bp, Homo sapien
cagcttgatcttcaggaaagttgtg

SEQ ID NO: 900807 - DNA, 25 bp, Homo sapien
gcttgatcttcaggaaagttgtggg

SEQ ID NO: 900808 - DNA, 25 bp, Homo sapien
acagtgtgatattaggagggagatc

SEQ ID NO: 900809 - DNA, 25 bp, Homo sapien
aagactgagacctgattccaacaca

SEQ ID NO: 900810 - DNA, 25 bp, Homo sapien
cttgagttggagacatcatagtgca

SEQ ID NO: 900811 - DNA, 25 bp, Homo sapien
agtataatactttccaagactgaga

SEQ ID NO: 900812 - DNA, 25 bp, Homo sapien
tactttccaagactgagacctgatt

SEQ ID NO: 900813 - DNA, 25 bp, Homo sapien
tctcccttccaagttggaagatttc

SEQ ID NO: 900814 - DNA, 25 bp, Homo sapien
aaggagtagaagatcctctcaaaac

SEQ ID NO: 900815 - DNA, 25 bp, Homo sapien
aaaggagtagaagatcctctcaaaa

SEQ ID NO: 900816 - DNA, 25 bp, Homo sapien
ccttcagagttgcagcagctaatgc

SEQ ID NO: 900817 - DNA, 25 bp, Homo sapien
cttcagagttgcagcagctaatgct

SEQ ID NO: 900818 - DNA, 25 bp, Homo sapien
ttccttttcgcatctgcagacacat

SEQ ID NO: 900819 - DNA, 25 bp, Homo sapien
ggagggagatcaggagttaagctgt

SEQ ID NO: 900820 - DNA, 25 bp, Homo sapien
cagcttgatcttcaggaaagttgtg

SEQ ID NO: 900821 - DNA, 25 bp, Homo sapien
acagtgtgatattaggagggagatc

SEQ ID NO: 900822 - DNA, 25 bp, Homo sapien
gcttgatcttcaggaaagttgtggg

SEQ ID NO: 900823 - DNA, 25 bp, Homo sapien
ggcctcgtgactgacttcgttcccc

SEQ ID NO: 900824 - DNA, 25 bp, Homo sapien
tagtcggcctcgtgactgacttcgt

SEQ ID NO: 900825 - DNA, 25 bp, Homo sapien
ctagtcggcctcgtgactgacttcg

SEQ ID NO: 900826 - DNA, 25 bp, Homo sapien
tcggcctcgtgactgacttcgttcc

SEQ ID NO: 900827 - DNA, 25 bp, Homo sapien
gaagcaccagtagggcccaccgcat

SEQ ID NO: 900828 - DNA, 25 bp, Homo sapien
tagaagcaccagtagggcccaccgc

SEQ ID NO: 900829 - DNA, 25 bp, Homo sapien
aagctagaagcaccagtagggccca

SEQ ID NO: 900830 - DNA, 25 bp, Homo sapien
gctagaagcaccagtagggcccacc

SEQ ID NO: 900831 - DNA, 25 bp, Homo sapien
caacaaggaagtgatccctagcaca

SEQ ID NO: 900832 - DNA, 25 bp, Homo sapien
ggaagtgatccctagcacagaagac

SEQ ID NO: 900833 - DNA, 25 bp, Homo sapien
tgatccctagcacagaagacagtag

SEQ ID NO: 900834 - DNA, 25 bp, Homo sapien
tccctagcacagaagacagtaggag

SEQ ID NO: 900835 - DNA, 25 bp, Homo sapien
gggggcagtcccatagcaggctccc

SEQ ID NO: 900836 - DNA, 25 bp, Homo sapien
ggggcagtcccatagcaggctccca

SEQ ID NO: 900837 - DNA, 25 bp, Homo sapien
ggagggggcagtcccatagcaggct

SEQ ID NO: 900838 - DNA, 25 bp, Homo sapien
gggcagtcccatagcaggctcccac

SEQ ID NO: 900839 - DNA, 25 bp, Homo sapien
gccctgaaccaagttccttttcgca

SEQ ID NO: 900840 - DNA, 25 bp, Homo sapien
ttccttttcgcatctgcagactcat

SEQ ID NO: 900841 - DNA, 25 bp, Homo sapien
tgattagggccctgaaccaagttcc

SEQ ID NO: 900842 - DNA, 25 bp, Homo sapien
ggaagcctctgattagggccctgaa

SEQ ID NO: 900843 - DNA, 25 bp, Homo sapien
cacacggtaaatttggtggcaggaa

SEQ ID NO: 900844 - DNA, 25 bp, Homo sapien
ttctcttgttcagcacacggtaaat

SEQ ID NO: 900845 - DNA, 25 bp, Homo sapien
tcagcacacggtaaatttggtggca

SEQ ID NO: 900846 - DNA, 25 bp, Homo sapien
caggggagatcaggagttaagcaat

SEQ ID NO: 900847 - DNA, 25 bp, Homo sapien
tcagtgtggtgtagggcggatctga

SEQ ID NO: 900848 - DNA, 25 bp, Homo sapien
tggtgtagggcggatctgaatcact

SEQ ID NO: 900849 - DNA, 25 bp, Homo sapien
tgtggtgtagggcggatctgaatca

SEQ ID NO: 900850 - DNA, 25 bp, Homo sapien
cagtgtggtgtagggcggatctgaa

SEQ ID NO: 900851 - DNA, 25 bp, Homo sapien
taccagtggatgtagccggtacttc

SEQ ID NO: 900852 - DNA, 25 bp, Homo sapien
accagtggatgtagccggtacttcc

SEQ ID NO: 900853 - DNA, 25 bp, Homo sapien
tcttccttgtgcttccgtaagtatc

SEQ ID NO: 900854 - DNA, 25 bp, Homo sapien
aggtaccagtggatgtagccggtac

SEQ ID NO: 900855 - DNA, 25 bp, Homo sapien
aggaaagctagaagcaccgctaggg

SEQ ID NO: 900856 - DNA, 25 bp, Homo sapien
tagaagcaccgctagggcccactgc

SEQ ID NO: 900857 - DNA, 25 bp, Homo sapien
aaagctagaagcaccgctagggccc

SEQ ID NO: 900858 - DNA, 25 bp, Homo sapien
gaagcaccgctagggcccactgcat

SEQ ID NO: 900859 - DNA, 25 bp, Homo sapien
ctgtctaagaggactcccaagcctt

SEQ ID NO: 900860 - DNA, 25 bp, Homo sapien
gatctgtctaagaggactcccaagc

SEQ ID NO: 900861 - DNA, 25 bp, Homo sapien
gaggatctgtctaagaggactccca

SEQ ID NO: 900862 - DNA, 25 bp, Homo sapien
ggatctgtctaagaggactcccaag

SEQ ID NO: 900863 - DNA, 25 bp, Homo sapien
cagagggaatgcagatgtagcggaa

SEQ ID NO: 900864 - DNA, 25 bp, Homo sapien
gcagatgtagcggaagctgaccctg

SEQ ID NO: 900865 - DNA, 25 bp, Homo sapien
gggaatgcagatgtagcggaagctg

SEQ ID NO: 900866 - DNA, 25 bp, Homo sapien
cagcagagggaatgcagatgtagcg

SEQ ID NO: 900867 - DNA, 25 bp, Homo sapien
acagctctgaaagctgagttctcgg

SEQ ID NO: 900868 - DNA, 25 bp, Homo sapien
ggggctccggttggtctccctctgc

SEQ ID NO: 900869 - DNA, 25 bp, Homo sapien
tgagttctcgggtccttgtgaagga

SEQ ID NO: 900870 - DNA, 25 bp, Homo sapien
aagcttgcctgccttggagcgtgaa

SEQ ID NO: 900871 - DNA, 25 bp, Homo sapien
tagaagtaagacacacagtccagac

SEQ ID NO: 900872 - DNA, 25 bp, Homo sapien
tgctgtccaaaatatctcgcttcac

SEQ ID NO: 900873 - DNA, 25 bp, Homo sapien
tactccgctatgacaaacagtgaaa

SEQ ID NO: 900874 - DNA, 25 bp, Homo sapien
ccatgttcaactgcatacctgggcc

SEQ ID NO: 900875 - DNA, 25 bp, Homo sapien
cagcttgatcttcaggaaagttgtg

SEQ ID NO: 900876 - DNA, 25 bp, Homo sapien
gcttgatcttcaggaaagttgtggg

SEQ ID NO: 900877 - DNA, 25 bp, Homo sapien
acagtgtgatattaggagggagatc

SEQ ID NO: 900878 - DNA, 25 bp, Homo sapien
ggagggagatcaggagttaagctgt

SEQ ID NO: 900879 - DNA, 25 bp, Homo sapien
cagattttcagtgtggtgtaggaca

SEQ ID NO: 900880 - DNA, 25 bp, Homo sapien
cagccacaaggcagattttcagtgt

SEQ ID NO: 900881 - DNA, 25 bp, Homo sapien
tggtgtaggacaggtctgaatcact

SEQ ID NO: 900882 - DNA, 25 bp, Homo sapien
aggcagccacaaggcagattttcag

SEQ ID NO: 900883 - DNA, 25 bp, Homo sapien
caacacatcccttgcggtggagacg

SEQ ID NO: 900884 - DNA, 25 bp, Homo sapien
aacacatcccttgcggtggagacgt

SEQ ID NO: 900885 - DNA, 25 bp, Homo sapien
acacatcccttgcggtggagacgtc

SEQ ID NO: 900886 - DNA, 25 bp, Homo sapien
gttacagtaagatcgcaagtgattt

SEQ ID NO: 900887 - DNA, 25 bp, Homo sapien
aagctagaagcaccagtagggccca

SEQ ID NO: 900888 - DNA, 25 bp, Homo sapien
gaagcaccagtagggcccaccgcat

SEQ ID NO: 900889 - DNA, 25 bp, Homo sapien
gctagaagcaccagtagggcccacc

SEQ ID NO: 900890 - DNA, 25 bp, Homo sapien
tagaagcaccagtagggcccaccgc

SEQ ID NO: 900891 - DNA, 25 bp, Homo sapien
caacaaggaagtgatccctagcaca

SEQ ID NO: 900892 - DNA, 25 bp, Homo sapien
agatcctcttaaaactcaggcccca

SEQ ID NO: 900893 - DNA, 25 bp, Homo sapien
gaagaggagcagaagatcctcttaa

SEQ ID NO: 900894 - DNA, 25 bp, Homo sapien
tccctagcacagaagacagtaggag

SEQ ID NO: 900895 - DNA, 25 bp, Homo sapien
gggggcagtcccatagcaggctccc

SEQ ID NO: 900896 - DNA, 25 bp, Homo sapien
ggggcagtcccatagcaggctccca

SEQ ID NO: 900897 - DNA, 25 bp, Homo sapien
ggagggggcagtcccatagcaggct

SEQ ID NO: 900898 - DNA, 25 bp, Homo sapien
gggcagtcccatagcaggctcccac

SEQ ID NO: 900899 - DNA, 25 bp, Homo sapien
gcctctgattagggcccggaaccaa

SEQ ID NO: 900900 - DNA, 25 bp, Homo sapien
gaagcctctgattagggcccggaac

SEQ ID NO: 900901 - DNA, 25 bp, Homo sapien
agcctctgattagggcccggaacca

SEQ ID NO: 900902 - DNA, 25 bp, Homo sapien
aggaagcctctgattagggcccgga

SEQ ID NO: 900903 - DNA, 25 bp, Homo sapien
agttgttgtgttgggctagctcaga

SEQ ID NO: 900904 - DNA, 25 bp, Homo sapien
ggctagctcagagagttcagtttct

SEQ ID NO: 900905 - DNA, 25 bp, Homo sapien
tgtgttgggctagctcagagagttc

SEQ ID NO: 900906 - DNA, 25 bp, Homo sapien
tcagttgttgtgttgggctagctca

SEQ ID NO: 900907 - DNA, 25 bp, Homo sapien
catgtcctaggagagctaagagaac

SEQ ID NO: 900908 - DNA, 25 bp, Homo sapien
cacacggtaaatttggtggcaggaa

SEQ ID NO: 900909 - DNA, 25 bp, Homo sapien
ttctcttgttcagcacacggtaaat

SEQ ID NO: 900910 - DNA, 25 bp, Homo sapien
caggggagatcaggagttaagcaat

SEQ ID NO: 900911 - DNA, 25 bp, Homo sapien
tcagcacacggtaaatttggtggca

SEQ ID NO: 900912 - DNA, 25 bp, Homo sapien
tggtgtagggcggatctgaatcact

SEQ ID NO: 900913 - DNA, 25 bp, Homo sapien
tcagtgtggtgtagggcggatctga

SEQ ID NO: 900914 - DNA, 25 bp, Homo sapien
tgtggtgtagggcggatctgaatca

SEQ ID NO: 900915 - DNA, 25 bp, Homo sapien
cagtgtggtgtagggcggatctgaa

SEQ ID NO: 900916 - DNA, 25 bp, Homo sapien
gttccttgtgcttgcgtaagtataa

SEQ ID NO: 900917 - DNA, 25 bp, Homo sapien
tgttccttgtgcttgcgtaagtata

SEQ ID NO: 900918 - DNA, 25 bp, Homo sapien
accagtggatgtagccgttacttcc

SEQ ID NO: 900919 - DNA, 25 bp, Homo sapien
ggtaccagtggatgtagccgttact

SEQ ID NO: 900920 - DNA, 25 bp, Homo sapien
taccagtggatgtagccgttacttc

SEQ ID NO: 900921 - DNA, 25 bp, Homo sapien
gtaggtaccagtggatgtagccgtt

SEQ ID NO: 900922 - DNA, 25 bp, Homo sapien
tgaggaattccttagtatggtactc

SEQ ID NO: 900923 - DNA, 25 bp, Homo sapien
cacaaaatataatgaggaattcctt

SEQ ID NO: 900924 - DNA, 25 bp, Homo sapien
gggaacaacacaaaatataatgagg

SEQ ID NO: 900925 - DNA, 25 bp, Homo sapien
ctgcaatgggaacaacacaaaatat

SEQ ID NO: 900926 - DNA, 25 bp, Homo sapien
caaaacccgtgatcctctctgtagg

SEQ ID NO: 900927 - DNA, 25 bp, Homo sapien
aacaaaacccgtgatcctctctgta

SEQ ID NO: 900928 - DNA, 25 bp, Homo sapien
aaacccgtgatcctctctgtaggca

SEQ ID NO: 900929 - DNA, 25 bp, Homo sapien
aaaacccgtgatcctctctgtaggc

SEQ ID NO: 900930 - DNA, 25 bp, Homo sapien
gaagcaccgctagggcccactgcat

SEQ ID NO: 900931 - DNA, 25 bp, Homo sapien
aaagctagaagcaccgctagggccc

SEQ ID NO: 900932 - DNA, 25 bp, Homo sapien
aggaaagctagaagcaccgctaggg

SEQ ID NO: 900933 - DNA, 25 bp, Homo sapien
tagaagcaccgctagggcccactgc

SEQ ID NO: 900934 - DNA, 25 bp, Homo sapien
caacaaggaagtgatccctagcaca

SEQ ID NO: 900935 - DNA, 25 bp, Homo sapien
ctgaggatctgtctaagaggactcc

SEQ ID NO: 900936 - DNA, 25 bp, Homo sapien
gaagaggagcagaagatcctcttaa

SEQ ID NO: 900937 - DNA, 25 bp, Homo sapien
tccctagcacagaagacagtaggag

SEQ ID NO: 900938 - DNA, 25 bp, Homo sapien
caggtccgttctccggcgccctctt

SEQ ID NO: 900939 - DNA, 25 bp, Homo sapien
gtccgttctccggcgccctcttgtg

SEQ ID NO: 900940 - DNA, 25 bp, Homo sapien
tccgttctccggcgccctcttgtgg

SEQ ID NO: 900941 - DNA, 25 bp, Homo sapien
gctcaggtccgttctccggcgccct

SEQ ID NO: 900942 - DNA, 25 bp, Homo sapien
agcagctatatcaatgttggcatga

SEQ ID NO: 900943 - DNA, 25 bp, Homo sapien
tttagaagtaagacacacaatccag

SEQ ID NO: 900944 - DNA, 25 bp, Homo sapien
tgacttcagttccaactaaatgttt

SEQ ID NO: 900945 - DNA, 25 bp, Homo sapien
catactgcgctatgacagagtgaaa

SEQ ID NO: 900946 - DNA, 25 bp, Homo sapien
ccccatgttctaggagagctgagag

SEQ ID NO: 900947 - DNA, 25 bp, Homo sapien
cttggaggtggcagcttggtcttca

SEQ ID NO: 900948 - DNA, 25 bp, Homo sapien
gagtgagtgggccttccccatgttc

SEQ ID NO: 900949 - DNA, 25 bp, Homo sapien
ctgtctgtcctaggaagcagagtga

SEQ ID NO: 900950 - DNA, 25 bp, Homo sapien
ccagtgtcatactttcctggagtga

SEQ ID NO: 900951 - DNA, 25 bp, Homo sapien
ggttcatagtacagaagacactgtg

SEQ ID NO: 900952 - DNA, 25 bp, Homo sapien
tcaaattccaattgctccttgtgct

SEQ ID NO: 900953 - DNA, 25 bp, Homo sapien
aaccctggagtagtagggttcatag

SEQ ID NO: 900954 - DNA, 25 bp, Homo sapien
aagctagaagcaccgctagggccca

SEQ ID NO: 900955 - DNA, 25 bp, Homo sapien
aggaaagctagaagcaccgctaggg

SEQ ID NO: 900956 - DNA, 25 bp, Homo sapien
gaaagctagaagcaccgctagggcc

SEQ ID NO: 900957 - DNA, 25 bp, Homo sapien
aaagctagaagcaccgctagggccc

SEQ ID NO: 900958 - DNA, 25 bp, Homo sapien
gccactgccactcagattgcctggg

SEQ ID NO: 900959 - DNA, 25 bp, Homo sapien
tgctgccactgccactcagattgcc

SEQ ID NO: 900960 - DNA, 25 bp, Homo sapien
tgcacgggggcttggatcaatgcct

SEQ ID NO: 900961 - DNA, 25 bp, Homo sapien
tggatcaatgcctgaatccagtgtt

SEQ ID NO: 900962 - DNA, 25 bp, Homo sapien
ggtgagctttgaccatcctggagaa

SEQ ID NO: 900963 - DNA, 25 bp, Homo sapien
tctgggtgagctttgaccatcctgg

SEQ ID NO: 900964 - DNA, 25 bp, Homo sapien
tggcagcccctgcattccatccatc

SEQ ID NO: 900965 - DNA, 25 bp, Homo sapien
cagcccctgcattccatccatccat

SEQ ID NO: 900966 - DNA, 25 bp, Homo sapien
agcccctgcattccatccatccatt

SEQ ID NO: 900967 - DNA, 25 bp, Homo sapien
catccattcccccaaacatgggcat

SEQ ID NO: 900968 - DNA, 25 bp, Homo sapien
aagtcttccaagagaatattggtca

SEQ ID NO: 900969 - DNA, 25 bp, Homo sapien
ctggatctccattttctaagtcttc

SEQ ID NO: 900970 - DNA, 25 bp, Homo sapien
tggatctccattttctaagtcttcc

SEQ ID NO: 900971 - DNA, 25 bp, Homo sapien
tctaagtcttccaagagaatattgg

SEQ ID NO: 900972 - DNA, 25 bp, Homo sapien
cagtgattcacggactgggagtcta

SEQ ID NO: 900973 - DNA, 25 bp, Homo sapien
tatgaaggtcgtaagattatcagtg

SEQ ID NO: 900974 - DNA, 25 bp, Homo sapien
tcacggactgggagtctacagccgg

SEQ ID NO: 900975 - DNA, 25 bp, Homo sapien
gattatcagtgattcacggactggg

SEQ ID NO: 900976 - DNA, 25 bp, Homo sapien
aagggctctccgttggcagctgtta

SEQ ID NO: 900977 - DNA, 25 bp, Homo sapien
agggaacaccgagtgaccagcaatg

SEQ ID NO: 900978 - DNA, 25 bp, Homo sapien
gcagctgttattggtgctgcagtaa

SEQ ID NO: 900979 - DNA, 25 bp, Homo sapien
ggtgctgcagtaattgctggatgtc

SEQ ID NO: 900980 - DNA, 25 bp, Homo sapien
tttctacccaatctcataaaggcag

SEQ ID NO: 900981 - DNA, 25 bp, Homo sapien
tagaggagctgtttttatagtgttc

SEQ ID NO: 900982 - DNA, 25 bp, Homo sapien
tgagttgcataaatagaaagaggtg

SEQ ID NO: 900983 - DNA, 25 bp, Homo sapien
tgatttgtggatacagcatacacca

SEQ ID NO: 900984 - DNA, 25 bp, Homo sapien
gactcttttgccaatgggatggctg

SEQ ID NO: 900985 - DNA, 25 bp, Homo sapien
agggtgcctcagtgtagtcgtgcta

SEQ ID NO: 900986 - DNA, 25 bp, Homo sapien
gccacagcggctggacagctagata

SEQ ID NO: 900987 - DNA, 25 bp, Homo sapien
acagtacaaacacagatactgttga

SEQ ID NO: 900988 - DNA, 25 bp, Homo sapien
ggatcaagtacaagagtctccacag

SEQ ID NO: 900989 - DNA, 25 bp, Homo sapien
aactagcttgcgtgactgtgtgtcc

SEQ ID NO: 900990 - DNA, 25 bp, Homo sapien
cagggcagccactcaatacgataca

SEQ ID NO: 900991 - DNA, 25 bp, Homo sapien
aacctgaaagggagcgagagcacgt

SEQ ID NO: 900992 - DNA, 25 bp, Homo sapien
taagcgtcgggtgaagttctctgga

SEQ ID NO: 900993 - DNA, 25 bp, Homo sapien
ccagtctgattccttcactcccacc

SEQ ID NO: 900994 - DNA, 25 bp, Homo sapien
caaggtctctgtactgaagccagtc

SEQ ID NO: 900995 - DNA, 25 bp, Homo sapien
ctggaaagaggcctttgtaggtggc

SEQ ID NO: 900996 - DNA, 25 bp, Homo sapien
ccacatcacccctttgtaaggtaag

SEQ ID NO: 900997 - DNA, 25 bp, Homo sapien
cccctttgtaaggtaagttcatcag

SEQ ID NO: 900998 - DNA, 25 bp, Homo sapien
ttctgaatctgaggggaccaccagc

SEQ ID NO: 900999 - DNA, 25 bp, Homo sapien
gtaaggtaagttcatcagaatttgc

SEQ ID NO: 901000 - DNA, 25 bp, Homo sapien
tcctggataggcttctgctccgtag

SEQ ID NO: 901001 - DNA, 25 bp, Homo sapien
gggctctgcacctatagttatttcg

SEQ ID NO: 901002 - DNA, 25 bp, Homo sapien
aggcctcccttgcagatgctagctg

SEQ ID NO: 901003 - DNA, 25 bp, Homo sapien
ctcggtggtctccttgggctctgca

SEQ ID NO: 901004 - DNA, 25 bp, Homo sapien
tctatgaccaccgaaggaatgacct

SEQ ID NO: 901005 - DNA, 25 bp, Homo sapien
tatgaccaccgaaggaatgaccttc

SEQ ID NO: 901006 - DNA, 25 bp, Homo sapien
tgaccaccgaaggaatgaccttctc

SEQ ID NO: 901007 - DNA, 25 bp, Homo sapien
ctctatgaccaccgaaggaatgacc

SEQ ID NO: 901008 - DNA, 25 bp, Homo sapien
tggcctcctctaaacttactccttc

SEQ ID NO: 901009 - DNA, 25 bp, Homo sapien
tgggcactctctgcaccctcagtgg

SEQ ID NO: 901010 - DNA, 25 bp, Homo sapien
cttcaggttgggcactctctgcacc

SEQ ID NO: 901011 - DNA, 25 bp, Homo sapien
aggttgggcactctctgcaccctca

SEQ ID NO: 901012 - DNA, 25 bp, Homo sapien
ctcagctgctgacaccaaggttcca

SEQ ID NO: 901013 - DNA, 25 bp, Homo sapien
aaggttccaacagctgcatcagcat

SEQ ID NO: 901014 - DNA, 25 bp, Homo sapien
catcagcatcagctccaggtatgat

SEQ ID NO: 901015 - DNA, 25 bp, Homo sapien
gctgctgacaccaaggttccaacag

SEQ ID NO: 901016 - DNA, 25 bp, Homo sapien
gcaggccacgtctgcatctccatgg

SEQ ID NO: 901017 - DNA, 25 bp, Homo sapien
gccacgtctgcatctccatgggcct

SEQ ID NO: 901018 - DNA, 25 bp, Homo sapien
cagaaaccagcaggccacgtctgca

SEQ ID NO: 901019 - DNA, 25 bp, Homo sapien
aaaccagcaggccacgtctgcatct

SEQ ID NO: 901020 - DNA, 25 bp, Homo sapien
cattccaaggtccagaccaacggca

SEQ ID NO: 901021 - DNA, 25 bp, Homo sapien
ccagaccaacggcaggtgtgacagc

SEQ ID NO: 901022 - DNA, 25 bp, Homo sapien
aaggtccagaccaacggcaggtgtg

SEQ ID NO: 901023 - DNA, 25 bp, Homo sapien
ttccaaggtccagaccaacggcagg

SEQ ID NO: 901024 - DNA, 25 bp, Homo sapien
tagataacattacagaatactggac

SEQ ID NO: 901025 - DNA, 25 bp, Homo sapien
tagaggaaaaagattcaacaggtaa

SEQ ID NO: 901026 - DNA, 25 bp, Homo sapien
ggcaactagcttcatgaaatccgtg

SEQ ID NO: 901027 - DNA, 25 bp, Homo sapien
tctttgtcatcccataggcaactag

SEQ ID NO: 901028 - DNA, 25 bp, Homo sapien
ttaccatcatcaagactgtcatttc

SEQ ID NO: 901029 - DNA, 25 bp, Homo sapien
ccatcatcaagactgtcatttccct

SEQ ID NO: 901030 - DNA, 25 bp, Homo sapien
aatcttattaagcttctgctttacc

SEQ ID NO: 901031 - DNA, 25 bp, Homo sapien
atcttattaagcttctgctttacca

SEQ ID NO: 901032 - DNA, 25 bp, Homo sapien
gagaaaggattctaggaggacccac

SEQ ID NO: 901033 - DNA, 25 bp, Homo sapien
gaggacccacaattacttgccagtg

SEQ ID NO: 901034 - DNA, 25 bp, Homo sapien
gagtaaggaagaaatcgcagggcac

SEQ ID NO: 901035 - DNA, 25 bp, Homo sapien
gaaccacagggcagtattctccatg

SEQ ID NO: 901036 - DNA, 25 bp, Homo sapien
aatatttgcaccagagtctgggttt

SEQ ID NO: 901037 - DNA, 25 bp, Homo sapien
aaaatatttgcaccagagtctgggt

SEQ ID NO: 901038 - DNA, 25 bp, Homo sapien
gatcgaagccagatgagaagccaag

SEQ ID NO: 901039 - DNA, 25 bp, Homo sapien
aaaaatatttgcaccagagtctggg

SEQ ID NO: 901040 - DNA, 25 bp, Homo sapien
tcttgctcctgggaagatcgtgtac

SEQ ID NO: 901041 - DNA, 25 bp, Homo sapien
gaatagtcaatgagccaaacactgg

SEQ ID NO: 901042 - DNA, 25 bp, Homo sapien
aacactggggcgttttcttgctcct

SEQ ID NO: 901043 - DNA, 25 bp, Homo sapien
ctgggagacatcagttcactgtgat

SEQ ID NO: 901044 - DNA, 25 bp, Homo sapien
tggatattcaaactctagacagcct

SEQ ID NO: 901045 - DNA, 25 bp, Homo sapien
cagtgataactaacaacttcctgag

SEQ ID NO: 901046 - DNA, 25 bp, Homo sapien
tgtgcctgtgtgaatagaaataacc

SEQ ID NO: 901047 - DNA, 25 bp, Homo sapien
ggagactagtttttgctggaatcac

SEQ ID NO: 901048 - DNA, 25 bp, Homo sapien
caagttgcagatcatactctggtct

SEQ ID NO: 901049 - DNA, 25 bp, Homo sapien
atccattaaatgaaccaccagaagc

SEQ ID NO: 901050 - DNA, 25 bp, Homo sapien
tgtgtgaatccattaaatgaaccac

SEQ ID NO: 901051 - DNA, 25 bp, Homo sapien
tgaatccattaaatgaaccaccaga

SEQ ID NO: 901052 - DNA, 25 bp, Homo sapien
ctgtgtgaatccattaaatgaacca

SEQ ID NO: 901053 - DNA, 25 bp, Homo sapien
aacccactttctctataatgagaag

SEQ ID NO: 901054 - DNA, 25 bp, Homo sapien
cattatcattttgtaggaccagtaa

SEQ ID NO: 901055 - DNA, 25 bp, Homo sapien
cagaaacgaaaatcagattgtgtta

SEQ ID NO: 901056 - DNA, 25 bp, Homo sapien
tgattccagaaaagggccattagga

SEQ ID NO: 901057 - DNA, 25 bp, Homo sapien
tagactgtcattaattcccaacaca

SEQ ID NO: 901058 - DNA, 25 bp, Homo sapien
cctgcatagtaaaagtgaaagtagg

SEQ ID NO: 901059 - DNA, 25 bp, Homo sapien
ccacttcaggaacagtaaattagtc

SEQ ID NO: 901060 - DNA, 25 bp, Homo sapien
tagcacatttttagtacctgcatag

SEQ ID NO: 901061 - DNA, 25 bp, Homo sapien
gtgtttggtttgcacagatttcaag

SEQ ID NO: 901062 - DNA, 25 bp, Homo sapien
agtgatggataatgaagtaggtgac

SEQ ID NO: 901063 - DNA, 25 bp, Homo sapien
cctagaagatagtgatggataatga

SEQ ID NO: 901064 - DNA, 25 bp, Homo sapien
ttagagagatcaggcctcctagaag

SEQ ID NO: 901065 - DNA, 25 bp, Homo sapien
tctatgctacagaccagggtaagta

SEQ ID NO: 901066 - DNA, 25 bp, Homo sapien
ctagtctatgctacagaccagggta

SEQ ID NO: 901067 - DNA, 25 bp, Homo sapien
ctatgctacagaccagggtaagtac

SEQ ID NO: 901068 - DNA, 25 bp, Homo sapien
agtctatgctacagaccagggtaag

SEQ ID NO: 901069 - DNA, 25 bp, Homo sapien
tcccagcagctagcaatggcttgtt

SEQ ID NO: 901070 - DNA, 25 bp, Homo sapien
tcagtgctagcattccaggaggtcc

SEQ ID NO: 901071 - DNA, 25 bp, Homo sapien
cattgctgaatccaagcttggctgc

SEQ ID NO: 901072 - DNA, 25 bp, Homo sapien
gtctcgggaactagcagaactctca

SEQ ID NO: 901073 - DNA, 25 bp, Homo sapien
tagtcaaatcccatccctcagggct

SEQ ID NO: 901074 - DNA, 25 bp, Homo sapien
catctgtactgtcttgtgctgggta

SEQ ID NO: 901075 - DNA, 25 bp, Homo sapien
ggtgattggcaggtttggctccaaa

SEQ ID NO: 901076 - DNA, 25 bp, Homo sapien
tatcatggttgggagtgtctattgc

SEQ ID NO: 901077 - DNA, 25 bp, Homo sapien
ttcattggcgtttgtactttcctta

SEQ ID NO: 901078 - DNA, 25 bp, Homo sapien
taccctgctcttagatcttttctag

SEQ ID NO: 901079 - DNA, 25 bp, Homo sapien
aaattcctctgtaccttctagtgtc

SEQ ID NO: 901080 - DNA, 25 bp, Homo sapien
cttggtctctgtcactaagttcttt

SEQ ID NO: 901081 - DNA, 25 bp, Homo sapien
tcttcagctacagtgggccagtcag

SEQ ID NO: 901082 - DNA, 25 bp, Homo sapien
tttcggagggacatgcagagtcttc

SEQ ID NO: 901083 - DNA, 25 bp, Homo sapien
catgtctgagtcaagtgggtcatac

SEQ ID NO: 901084 - DNA, 25 bp, Homo sapien
tgactttctttgaacaggccagctg

SEQ ID NO: 901085 - DNA, 25 bp, Homo sapien
gtaacttcttggctgaccctgtctg

SEQ ID NO: 901086 - DNA, 25 bp, Homo sapien
gggccccaagtaaatgcacctatat

SEQ ID NO: 901087 - DNA, 25 bp, Homo sapien
gatctttgaatttcttcggccaacc

SEQ ID NO: 901088 - DNA, 25 bp, Homo sapien
tctgtactagcgtcagggccccaag

SEQ ID NO: 901089 - DNA, 25 bp, Homo sapien
gatcaggttacacaaggaaagactt

SEQ ID NO: 901090 - DNA, 25 bp, Homo sapien
ggttacacaaggaaagactttctga

SEQ ID NO: 901091 - DNA, 25 bp, Homo sapien
cacaaggaaagactttctgaagagt

SEQ ID NO: 901092 - DNA, 25 bp, Homo sapien
aggaaagactttctgaagagtcagt

SEQ ID NO: 901093 - DNA, 25 bp, Homo sapien
tcagaacgatcaacactgaaaacgg

SEQ ID NO: 901094 - DNA, 25 bp, Homo sapien
gatcaacactgaaaacggcttctgc

SEQ ID NO: 901095 - DNA, 25 bp, Homo sapien
gaacgatcaacactgaaaacggctt

SEQ ID NO: 901096 - DNA, 25 bp, Homo sapien
aagttcagaacgatcaacactgaaa

SEQ ID NO: 901097 - DNA, 25 bp, Homo sapien
taaaatgtatcctgtaaacctgaac

SEQ ID NO: 901098 - DNA, 25 bp, Homo sapien
caacgtgggcactggtaacaattac

SEQ ID NO: 901099 - DNA, 25 bp, Homo sapien
tgaacagttctgagtgcaacgtggg

SEQ ID NO: 901100 - DNA, 25 bp, Homo sapien
catccagggaaaccataaaatgtat

SEQ ID NO: 901101 - DNA, 25 bp, Homo sapien
caaacatccaaaaagcacctgatac

SEQ ID NO: 901102 - DNA, 25 bp, Homo sapien
tctccaaacatccaaaaagcacctg

SEQ ID NO: 901103 - DNA, 25 bp, Homo sapien
ttatgaaatatctccaaacatccaa

SEQ ID NO: 901104 - DNA, 25 bp, Homo sapien
aatatctccaaacatccaaaaagca

SEQ ID NO: 901105 - DNA, 25 bp, Homo sapien
acatgggtgagtgggtcactccagc

SEQ ID NO: 901106 - DNA, 25 bp, Homo sapien
tgcaggtgtcacctcgggcttgaaa

SEQ ID NO: 901107 - DNA, 25 bp, Homo sapien
gcaggtgtcacctcgggcttgaaag

SEQ ID NO: 901108 - DNA, 25 bp, Homo sapien
ctgagacatgggtgagtgggtcact

SEQ ID NO: 901109 - DNA, 25 bp, Homo sapien
tgctaatatcaacactcaaacgagt

SEQ ID NO: 901110 - DNA, 25 bp, Homo sapien
aacgagttctagagaacctgcatcc

SEQ ID NO: 901111 - DNA, 25 bp, Homo sapien
actgatatgtaacaacctgaagaac

SEQ ID NO: 901112 - DNA, 25 bp, Homo sapien
ggtatttaccaataatgcactgata

SEQ ID NO: 901113 - DNA, 25 bp, Homo sapien
agttgtcctcaaagaaactgatgat

SEQ ID NO: 901114 - DNA, 25 bp, Homo sapien
gttgtcctcaaagaaactgatgatg

SEQ ID NO: 901115 - DNA, 25 bp, Homo sapien
tggaacaaagttgtcctcaaagaaa

SEQ ID NO: 901116 - DNA, 25 bp, Homo sapien
aagttgtcctcaaagaaactgatga

SEQ ID NO: 901117 - DNA, 25 bp, Homo sapien
ccagttagccctgtgatcacgaggg

SEQ ID NO: 901118 - DNA, 25 bp, Homo sapien
ttctcggcgcgtttaaggtaggctg

SEQ ID NO: 901119 - DNA, 25 bp, Homo sapien
acaagaaagcttgaactggactggg

SEQ ID NO: 901120 - DNA, 25 bp, Homo sapien
ccctttgtaaggcaagcagcatctg

SEQ ID NO: 901121 - DNA, 25 bp, Homo sapien
tgtctttgcaatgcggagaggaccc

SEQ ID NO: 901122 - DNA, 25 bp, Homo sapien
cctcaggcggtgatggtgtctttgc

SEQ ID NO: 901123 - DNA, 25 bp, Homo sapien
ctgtgaaggtgaccgaggccgtgct

SEQ ID NO: 901124 - DNA, 25 bp, Homo sapien
ggagacgcaggtgctaatgtatgat

SEQ ID NO: 901125 - DNA, 25 bp, Homo sapien
taacaatctctagagggatccaaac

SEQ ID NO: 901126 - DNA, 25 bp, Homo sapien
gaaaaccgaaagctgggtcttctga

SEQ ID NO: 901127 - DNA, 25 bp, Homo sapien
gacaggtcacctatggatcattggg

SEQ ID NO: 901128 - DNA, 25 bp, Homo sapien
tgttcaccagatcaagagtcaggag

SEQ ID NO: 901129 - DNA, 25 bp, Homo sapien
tatcaggcctcatggaaagcagaga

SEQ ID NO: 901130 - DNA, 25 bp, Homo sapien
tcctagttgggtcactgaaggccag

SEQ ID NO: 901131 - DNA, 25 bp, Homo sapien
cattacaggtgctccaatgagcagg

SEQ ID NO: 901132 - DNA, 25 bp, Homo sapien
cagcttctagggtgaaaaggctcct

SEQ ID NO: 901133 - DNA, 25 bp, Homo sapien
gatggtgaaggccttgtcggcgtgc

SEQ ID NO: 901134 - DNA, 25 bp, Homo sapien
gctggtcacccagttttgtcatcac

SEQ ID NO: 901135 - DNA, 25 bp, Homo sapien
ggccttgtcggcgtgctggtcaccc

SEQ ID NO: 901136 - DNA, 25 bp, Homo sapien
tcggcgtgctggtcacccagttttg

SEQ ID NO: 901137 - DNA, 25 bp, Homo sapien
cttcaaggctggagacgtttttgaa

SEQ ID NO: 901138 - DNA, 25 bp, Homo sapien
caccgcaatttccttatgaaacttg

SEQ ID NO: 901139 - DNA, 25 bp, Homo sapien
tatgaaacttggcttcaaggctgga

SEQ ID NO: 901140 - DNA, 25 bp, Homo sapien
caaggctggagacgtttttgaaagt

SEQ ID NO: 901141 - DNA, 25 bp, Homo sapien
atgatggtaactcttcttgtaagtc

SEQ ID NO: 901142 - DNA, 25 bp, Homo sapien
tgaccataatgatggtaactcttct

SEQ ID NO: 901143 - DNA, 25 bp, Homo sapien
ttgtaagtcaacgttaaactcttca

SEQ ID NO: 901144 - DNA, 25 bp, Homo sapien
tgtaagtcaacgttaaactcttcaa

SEQ ID NO: 901145 - DNA, 25 bp, Homo sapien
tagagattcgactctcatccttcct

SEQ ID NO: 901146 - DNA, 25 bp, Homo sapien
ttagagattcgactctcatccttcc

SEQ ID NO: 901147 - DNA, 25 bp, Homo sapien
tgtcatagtccactagcttcctgct

SEQ ID NO: 901148 - DNA, 25 bp, Homo sapien
cttagagattcgactctcatccttc

SEQ ID NO: 901149 - DNA, 25 bp, Homo sapien
tccaaatctctacatggttcagaaa

SEQ ID NO: 901150 - DNA, 25 bp, Homo sapien
atgatattgtttccaaatctctaca

SEQ ID NO: 901151 - DNA, 25 bp, Homo sapien
tagatgatattgtttccaaatctct

SEQ ID NO: 901152 - DNA, 25 bp, Homo sapien
gatgatattgtttccaaatctctac

SEQ ID NO: 901153 - DNA, 25 bp, Homo sapien
caaggacccatccacgagtttttga

SEQ ID NO: 901154 - DNA, 25 bp, Homo sapien
gccccaggtaggtatccagtgttag

SEQ ID NO: 901155 - DNA, 25 bp, Homo sapien
cagtgttagcaaggacccatccacg

SEQ ID NO: 901156 - DNA, 25 bp, Homo sapien
tttttgatggaagtcttcccacagc

SEQ ID NO: 901157 - DNA, 25 bp, Homo sapien
gtgagtagaccctctgaacatgcag

SEQ ID NO: 901158 - DNA, 25 bp, Homo sapien
cttcatcatcacaagagcctatgtt

SEQ ID NO: 901159 - DNA, 25 bp, Homo sapien
gaccctctgaacatgcagtattcag

SEQ ID NO: 901160 - DNA, 25 bp, Homo sapien
tgcaactgaggattccaaaaaaccg

SEQ ID NO: 901161 - DNA, 25 bp, Homo sapien
tcaggctcatagacttcatgcagcg

SEQ ID NO: 901162 - DNA, 25 bp, Homo sapien
ttttcacatcttcccgcccatacca

SEQ ID NO: 901163 - DNA, 25 bp, Homo sapien
catgcagcgactctgtgagcttcat

SEQ ID NO: 901164 - DNA, 25 bp, Homo sapien
cgcccataccagtcaggctcataga

SEQ ID NO: 901165 - DNA, 25 bp, Homo sapien
cctgtatatctttgggacgtgggag

SEQ ID NO: 901166 - DNA, 25 bp, Homo sapien
gccagtaaacttcacctgtatatct

SEQ ID NO: 901167 - DNA, 25 bp, Homo sapien
cagggtgcacttacaaacccacact

SEQ ID NO: 901168 - DNA, 25 bp, Homo sapien
atcgcagggtgcacttacaaaccca

SEQ ID NO: 901169 - DNA, 25 bp, Homo sapien
cacattgatgtcttggcctttgtca

SEQ ID NO: 901170 - DNA, 25 bp, Homo sapien
cacgaagacagctcatggctgagag

SEQ ID NO: 901171 - DNA, 25 bp, Homo sapien
ttggagatgcgcctccggcagaaga

SEQ ID NO: 901172 - DNA, 25 bp, Homo sapien
tatgcttctgagcacaacatggtga

SEQ ID NO: 901173 - DNA, 25 bp, Homo sapien
tattaatgacaccacgtgcactgtg

SEQ ID NO: 901174 - DNA, 25 bp, Homo sapien
aagacagcagctgcctcaaaggaaa

SEQ ID NO: 901175 - DNA, 25 bp, Homo sapien
tcatcatccctgtgtctggcctctg

SEQ ID NO: 901176 - DNA, 25 bp, Homo sapien
aataggcagttggtgaggtagctca

SEQ ID NO: 901177 - DNA, 25 bp, Homo sapien
gctgctaaatatcctcggagttctc

SEQ ID NO: 901178 - DNA, 25 bp, Homo sapien
taaatatcctcggagttctcgctga

SEQ ID NO: 901179 - DNA, 25 bp, Homo sapien
tctcgctgaagtctggtaccctctg

SEQ ID NO: 901180 - DNA, 25 bp, Homo sapien
tcggagttctcgctgaagtctggta

SEQ ID NO: 901181 - DNA, 25 bp, Homo sapien
gacttataaggtgcatcatgggcat

SEQ ID NO: 901182 - DNA, 25 bp, Homo sapien
gaggagacttgacttataaggtgca

SEQ ID NO: 901183 - DNA, 25 bp, Homo sapien
ctgtgtgtgaggagacttgacttat

SEQ ID NO: 901184 - DNA, 25 bp, Homo sapien
gacttgacttataaggtgcatcatg

SEQ ID NO: 901185 - DNA, 25 bp, Homo sapien
taatagctagagcacagtatttaat

SEQ ID NO: 901186 - DNA, 25 bp, Homo sapien
cttaatagctagagcacagtattta

SEQ ID NO: 901187 - DNA, 25 bp, Homo sapien
aatagctagagcacagtatttaata

SEQ ID NO: 901188 - DNA, 25 bp, Homo sapien
atagctagagcacagtatttaatat

SEQ ID NO: 901189 - DNA, 25 bp, Homo sapien
aactgttgataaatgaggataatgt

SEQ ID NO: 901190 - DNA, 25 bp, Homo sapien
caactgttgataaatgaggataatg

SEQ ID NO: 901191 - DNA, 25 bp, Homo sapien
ggataaagctgcccaacaagaagca

SEQ ID NO: 901192 - DNA, 25 bp, Homo sapien
ctgttgataaatgaggataatgtaa

SEQ ID NO: 901193 - DNA, 25 bp, Homo sapien
gcaggaacccaattagcatagcaca

SEQ ID NO: 901194 - DNA, 25 bp, Homo sapien
atgctgaaattagtgcaggaaccca

SEQ ID NO: 901195 - DNA, 25 bp, Homo sapien
tttacaggcacgatcccagcactga

SEQ ID NO: 901196 - DNA, 25 bp, Homo sapien
gatcctccagcgtcaccctgctgag

SEQ ID NO: 901197 - DNA, 25 bp, Homo sapien
cgaactgttcgtcttttgtctcatc

SEQ ID NO: 901198 - DNA, 25 bp, Homo sapien
gaactgttcgtcttttgtctcatca

SEQ ID NO: 901199 - DNA, 25 bp, Homo sapien
tgcattagccatcacgtcatcaaag

SEQ ID NO: 901200 - DNA, 25 bp, Homo sapien
cagtgcattagccatcacgtcatca

SEQ ID NO: 901201 - DNA, 25 bp, Homo sapien
gcattagccatcacgtcatcaaagc

SEQ ID NO: 901202 - DNA, 25 bp, Homo sapien
agtgcattagccatcacgtcatcaa

SEQ ID NO: 901203 - DNA, 25 bp, Homo sapien
tgtctgacagggagaggccatgcta

SEQ ID NO: 901204 - DNA, 25 bp, Homo sapien
catgaaagtgacagatccgaggcaa

SEQ ID NO: 901205 - DNA, 25 bp, Homo sapien
caaaaacggtgggacttcagatgag

SEQ ID NO: 901206 - DNA, 25 bp, Homo sapien
tcagcaaggtaagcacagagcaacc

SEQ ID NO: 901207 - DNA, 25 bp, Homo sapien
gaatgtttctgtaagttctccttac

SEQ ID NO: 901208 - DNA, 25 bp, Homo sapien
aatgtttctgtaagttctccttact

SEQ ID NO: 901209 - DNA, 25 bp, Homo sapien
gttttgagtctaagaatctggcccc

SEQ ID NO: 901210 - DNA, 25 bp, Homo sapien
tcaggcctatcactacacatgcaga

SEQ ID NO: 901211 - DNA, 25 bp, Homo sapien
gaggctatgagctccacaaaaggaa

SEQ ID NO: 901212 - DNA, 25 bp, Homo sapien
caggatctgaatagctgtgagctac

SEQ ID NO: 901213 - DNA, 25 bp, Homo sapien
tgagtatctgagcacggctcccggt

SEQ ID NO: 901214 - DNA, 25 bp, Homo sapien
tgtgcataagacacagcctgggtgg

SEQ ID NO: 901215 - DNA, 25 bp, Homo sapien
gctcctggtgtcctcatgggtaaaa

SEQ ID NO: 901216 - DNA, 25 bp, Homo sapien
taaaactgaaggcaacgtgctctct

SEQ ID NO: 901217 - DNA, 25 bp, Homo sapien
gcagtcagtgaagaattgggtccaa

SEQ ID NO: 901218 - DNA, 25 bp, Homo sapien
tccaagtggaccgaaccaagaggtg

SEQ ID NO: 901219 - DNA, 25 bp, Homo sapien
acactgtagagagcctgaggacatc

SEQ ID NO: 901220 - DNA, 25 bp, Homo sapien
tgggtccaaacaatggtccatcctt

SEQ ID NO: 901221 - DNA, 25 bp, Homo sapien
tgccactggagtttcacagggggct

SEQ ID NO: 901222 - DNA, 25 bp, Homo sapien
aatgccactggagtttcacaggggg

SEQ ID NO: 901223 - DNA, 25 bp, Homo sapien
aggctggtgtcttttacatcttacc

SEQ ID NO: 901224 - DNA, 25 bp, Homo sapien
ggcaaggctggtgtcttttacatct

SEQ ID NO: 901225 - DNA, 25 bp, Homo sapien
tctatggaaatactacataccgtgc

SEQ ID NO: 901226 - DNA, 25 bp, Homo sapien
tacataccgtgccagtacttaaaat

SEQ ID NO: 901227 - DNA, 25 bp, Homo sapien
ggaaatactacataccgtgccagta

SEQ ID NO: 901228 - DNA, 25 bp, Homo sapien
tacattctatggaaatactacatac

SEQ ID NO: 901229 - DNA, 25 bp, Homo sapien
tggaatgaacgtgcccccttcatcc

SEQ ID NO: 901230 - DNA, 25 bp, Homo sapien
cttcattaagtctaaaaagggagat

SEQ ID NO: 901231 - DNA, 25 bp, Homo sapien
ccaaagtggaatgaacgtgccccct

SEQ ID NO: 901232 - DNA, 25 bp, Homo sapien
aagtggaatgaacgtgcccccttca

SEQ ID NO: 901233 - DNA, 25 bp, Homo sapien
catgtagtgaagacacagcaggtta

SEQ ID NO: 901234 - DNA, 25 bp, Homo sapien
agccagtgggtgcatgccatgccac

SEQ ID NO: 901235 - DNA, 25 bp, Homo sapien
caggttagctactgtagcagtggcc

SEQ ID NO: 901236 - DNA, 25 bp, Homo sapien
cagtggccacgtggttctgtagcaa

SEQ ID NO: 901237 - DNA, 25 bp, Homo sapien
aaaagggatcagtgccccctctgct

SEQ ID NO: 901238 - DNA, 25 bp, Homo sapien
agattgggtctgaagagggaaattc

SEQ ID NO: 901239 - DNA, 25 bp, Homo sapien
tcagcaactcatggtcagccggaac

SEQ ID NO: 901240 - DNA, 25 bp, Homo sapien
caggaaaacgctaaacaccccatat

SEQ ID NO: 901241 - DNA, 25 bp, Homo sapien
tcctgcgcgcggttgagtcgcttct

SEQ ID NO: 901242 - DNA, 25 bp, Homo sapien
aagatgcccgtcttgatgtcggcca

SEQ ID NO: 901243 - DNA, 25 bp, Homo sapien
tcttggcgaagatgcccgtcttgat

SEQ ID NO: 901244 - DNA, 25 bp, Homo sapien
ctggacgttcttggcgaagatgccc

SEQ ID NO: 901245 - DNA, 25 bp, Homo sapien
aggagcgggaggaggagcgggagga

SEQ ID NO: 901246 - DNA, 25 bp, Homo sapien
cggaggagcgggaggaggagcggga

SEQ ID NO: 901247 - DNA, 25 bp, Homo sapien
ctgcgaagagcagagcgcgcagcgg

SEQ ID NO: 901248 - DNA, 25 bp, Homo sapien
gggctggcggcggcgcggaggagcg

SEQ ID NO: 901249 - DNA, 25 bp, Homo sapien
ggaagcgctgactgaagagatcagc

SEQ ID NO: 901250 - DNA, 25 bp, Homo sapien
tggaagcgctgactgaagagatcag

SEQ ID NO: 901251 - DNA, 25 bp, Homo sapien
gaagcgctgactgaagagatcagct

SEQ ID NO: 901252 - DNA, 25 bp, Homo sapien
agcgctgactgaagagatcagcttc

SEQ ID NO: 901253 - DNA, 25 bp, Homo sapien
tctactctgtgagatgaagagcttc

SEQ ID NO: 901254 - DNA, 25 bp, Homo sapien
cacctctactctgtgagatgaagag

SEQ ID NO: 901255 - DNA, 25 bp, Homo sapien
cctctactctgtgagatgaagagct

SEQ ID NO: 901256 - DNA, 25 bp, Homo sapien
acctctactctgtgagatgaagagc

SEQ ID NO: 901257 - DNA, 25 bp, Homo sapien
gcactggtgttccaatctttgggca

SEQ ID NO: 901258 - DNA, 25 bp, Homo sapien
actggtgttccaatctttgggcagc

SEQ ID NO: 901259 - DNA, 25 bp, Homo sapien
tggtgttccaatctttgggcagcat

SEQ ID NO: 901260 - DNA, 25 bp, Homo sapien
cactggtgttccaatctttgggcag

SEQ ID NO: 901261 - DNA, 25 bp, Homo sapien
acttggccttggcactcaactgcag

SEQ ID NO: 901262 - DNA, 25 bp, Homo sapien
actcaactgcagcagtttccctcag

SEQ ID NO: 901263 - DNA, 25 bp, Homo sapien
cttgggtggaaatgtgagggagtca

SEQ ID NO: 901264 - DNA, 25 bp, Homo sapien
atttccatccacatcgacttggcct

SEQ ID NO: 901265 - DNA, 25 bp, Homo sapien
ggcagtcctgatgtcagaaacagca

SEQ ID NO: 901266 - DNA, 25 bp, Homo sapien
gaaagccgtctttctgacaactcct

SEQ ID NO: 901267 - DNA, 25 bp, Homo sapien
gatgtgtttctagagcccagattcc

SEQ ID NO: 901268 - DNA, 25 bp, Homo sapien
cactgagacctccattactccaggg

SEQ ID NO: 901269 - DNA, 25 bp, Homo sapien
cggatgtgtattgtagctgcttttt

SEQ ID NO: 901270 - DNA, 25 bp, Homo sapien
ttgtagtttaatgtccctgtgtgct

SEQ ID NO: 901271 - DNA, 25 bp, Homo sapien
acacttgagctccaaggcggatgtg

SEQ ID NO: 901272 - DNA, 25 bp, Homo sapien
cagacacaatctggggatacagatc

SEQ ID NO: 901273 - DNA, 25 bp, Homo sapien
gcaccagcaaggcagaattcacaac

SEQ ID NO: 901274 - DNA, 25 bp, Homo sapien
tcccctgaagtacgctgatcctcaa

SEQ ID NO: 901275 - DNA, 25 bp, Homo sapien
gtgtccttacttggccaggcaccag

SEQ ID NO: 901276 - DNA, 25 bp, Homo sapien
cgctgatcctcaagtgctggttttg

SEQ ID NO: 901277 - DNA, 25 bp, Homo sapien
ctcattcacgtctgcctcatcctcc

SEQ ID NO: 901278 - DNA, 25 bp, Homo sapien
tatttagggcattaaatccagggcc

SEQ ID NO: 901279 - DNA, 25 bp, Homo sapien
tcaagagagctgtcatacactgtag

SEQ ID NO: 901280 - DNA, 25 bp, Homo sapien
tgtgagatactcgatttaaccattc

SEQ ID NO: 901281 - DNA, 25 bp, Homo sapien
cttctaggcagtggatatttagggc

SEQ ID NO: 901282 - DNA, 25 bp, Homo sapien
tctgggtcgaccaaggcttctgagt

SEQ ID NO: 901283 - DNA, 25 bp, Homo sapien
gaccctgaagtggttcatcctgtgg

SEQ ID NO: 901284 - DNA, 25 bp, Homo sapien
catcctgtggtcacggcgttctggg

SEQ ID NO: 901285 - DNA, 25 bp, Homo sapien
tcctcgtaatcctgtgaaccttgcg

SEQ ID NO: 901286 - DNA, 25 bp, Homo sapien
ctttgaggtacagctcccgcaagat

SEQ ID NO: 901287 - DNA, 25 bp, Homo sapien
ggtacagctcccgcaagatctggtt

SEQ ID NO: 901288 - DNA, 25 bp, Homo sapien
ttgaggtacagctcccgcaagatct

SEQ ID NO: 901289 - DNA, 25 bp, Homo sapien
tgaggtacagctcccgcaagatctg

SEQ ID NO: 901290 - DNA, 25 bp, Homo sapien
cgtgggtccggggctctctcggcgt

SEQ ID NO: 901291 - DNA, 25 bp, Homo sapien
tccgtgggtccggggctctctcggc

SEQ ID NO: 901292 - DNA, 25 bp, Homo sapien
gctgctccgtgggtccggggctctc

SEQ ID NO: 901293 - DNA, 25 bp, Homo sapien
tgctccgtgggtccggggctctctc

SEQ ID NO: 901294 - DNA, 25 bp, Homo sapien
gaaccgcctctggatactgccagga

SEQ ID NO: 901295 - DNA, 25 bp, Homo sapien
tatgataccgctctggcctctcgga

SEQ ID NO: 901296 - DNA, 25 bp, Homo sapien
caggcaacggcgttcgtatgatacc

SEQ ID NO: 901297 - DNA, 25 bp, Homo sapien
tctgcagtctctaggcaatggcacc

SEQ ID NO: 901298 - DNA, 25 bp, Homo sapien
tagacctcacgttgtccaatcacct

SEQ ID NO: 901299 - DNA, 25 bp, Homo sapien
taaaactagacctcacgttgtccaa

SEQ ID NO: 901300 - DNA, 25 bp, Homo sapien
ctccttgagaacagattcgatgctt

SEQ ID NO: 901301 - DNA, 25 bp, Homo sapien
caaacccaggagataatgaacataa

SEQ ID NO: 901302 - DNA, 25 bp, Homo sapien
ctggcaattctggaccgcctgggaa

SEQ ID NO: 901303 - DNA, 25 bp, Homo sapien
gaatgttcgcttgccatggtcttgg

SEQ ID NO: 901304 - DNA, 25 bp, Homo sapien
ggagaagccagttcaaatgcagagg

SEQ ID NO: 901305 - DNA, 25 bp, Homo sapien
tacaaaccaagttccacggagaagc

SEQ ID NO: 901306 - DNA, 25 bp, Homo sapien
ccagggtgagatttgcaagccgtca

SEQ ID NO: 901307 - DNA, 25 bp, Homo sapien
ggtgagatttgcaagccgtcaggtc

SEQ ID NO: 901308 - DNA, 25 bp, Homo sapien
tttgcaagccgtcaggtctggttgg

SEQ ID NO: 901309 - DNA, 25 bp, Homo sapien
tgagatttgcaagccgtcaggtctg

SEQ ID NO: 901310 - DNA, 25 bp, Homo sapien
ctgacggcaggaagtttgaggagta

SEQ ID NO: 901311 - DNA, 25 bp, Homo sapien
tagggcagaaaatcgaacaacttgg

SEQ ID NO: 901312 - DNA, 25 bp, Homo sapien
gcaggaagttccttgaggtagggta

SEQ ID NO: 901313 - DNA, 25 bp, Homo sapien
cctggtagtaacagaggaagggccg

SEQ ID NO: 901314 - DNA, 25 bp, Homo sapien
ctggaagacgagagcgggaaggaac

SEQ ID NO: 901315 - DNA, 25 bp, Homo sapien
aggccgagaaattggaggtagcttt

SEQ ID NO: 901316 - DNA, 25 bp, Homo sapien
ccaaatcagcgctgtagtaactcac

SEQ ID NO: 901317 - DNA, 25 bp, Homo sapien
gaaattggaggtagctttctagtca

SEQ ID NO: 901318 - DNA, 25 bp, Homo sapien
caaacgagtcaaaatgagtaactga

SEQ ID NO: 901319 - DNA, 25 bp, Homo sapien
actgagatgtgctgagaccgactcc

SEQ ID NO: 901320 - DNA, 25 bp, Homo sapien
ctgagaccgactccagcttttatcc

SEQ ID NO: 901321 - DNA, 25 bp, Homo sapien
ttgtccaaacgagtcaaaatgagta

SEQ ID NO: 901322 - DNA, 25 bp, Homo sapien
tcccttggtttgatgacttaatctt

SEQ ID NO: 901323 - DNA, 25 bp, Homo sapien
tcttggtccctgtgctcccttggtt

SEQ ID NO: 901324 - DNA, 25 bp, Homo sapien
ctcttggtccctgtgctcccttggt

SEQ ID NO: 901325 - DNA, 25 bp, Homo sapien
cctgtgttccgaatcaagccaactc

SEQ ID NO: 901326 - DNA, 25 bp, Homo sapien
ggcttcaaataggaacaccctgtgt

SEQ ID NO: 901327 - DNA, 25 bp, Homo sapien
gttccgaatcaagccaactcatggg

SEQ ID NO: 901328 - DNA, 25 bp, Homo sapien
tctgtttcagaaaggtaggctttcc

SEQ ID NO: 901329 - DNA, 25 bp, Homo sapien
agctcgctgggggattgatgctcca

SEQ ID NO: 901330 - DNA, 25 bp, Homo sapien
caggtgtggcctaacagctccatct

SEQ ID NO: 901331 - DNA, 25 bp, Homo sapien
agcgctgctgggaaacgctggacca

SEQ ID NO: 901332 - DNA, 25 bp, Homo sapien
tgttctgcaggtgtggcctaacagc

SEQ ID NO: 901333 - DNA, 25 bp, Homo sapien
tgctggtggtaacacgtacataaga

SEQ ID NO: 901334 - DNA, 25 bp, Homo sapien
ctgctggtggtaacacgtacataag

SEQ ID NO: 901335 - DNA, 25 bp, Homo sapien
tgtctccttactcaatagaccaagc

SEQ ID NO: 901336 - DNA, 25 bp, Homo sapien
tactcaatagaccaagcttttgcat

SEQ ID NO: 901337 - DNA, 25 bp, Homo sapien
cttcccgctgcttacaaaggtctgt

SEQ ID NO: 901338 - DNA, 25 bp, Homo sapien
cgctgcttacaaaggtctgttaatg

SEQ ID NO: 901339 - DNA, 25 bp, Homo sapien
ctgattaggaggcgagaaacaggac

SEQ ID NO: 901340 - DNA, 25 bp, Homo sapien
ttaggaggcgagaaacaggactctg

SEQ ID NO: 901341 - DNA, 25 bp, Homo sapien
gattaggaggcgagaaacaggactc

SEQ ID NO: 901342 - DNA, 25 bp, Homo sapien
taggaggcgagaaacaggactctgc

SEQ ID NO: 901343 - DNA, 25 bp, Homo sapien
tctcacacagttcagaagatgatca

SEQ ID NO: 901344 - DNA, 25 bp, Homo sapien
caacatggcttctttcagacggcat

SEQ ID NO: 901345 - DNA, 25 bp, Homo sapien
gactctgaggatttgacagtaacag

SEQ ID NO: 901346 - DNA, 25 bp, Homo sapien
ggtggttctagctcacagcctatca

SEQ ID NO: 901347 - DNA, 25 bp, Homo sapien
cggtgggatgatggcattccagcca

SEQ ID NO: 901348 - DNA, 25 bp, Homo sapien
caaggactgatgaccacagctggct

SEQ ID NO: 901349 - DNA, 25 bp, Homo sapien
ctgcctccttctaattgattctggg

SEQ ID NO: 901350 - DNA, 25 bp, Homo sapien
gggcacaaggagaccattcctgcca

SEQ ID NO: 901351 - DNA, 25 bp, Homo sapien
ctaactactaatagactactgtgga

SEQ ID NO: 901352 - DNA, 25 bp, Homo sapien
gtgctgacaccccatgcagtcaaaa

SEQ ID NO: 901353 - DNA, 25 bp, Homo sapien
ttaaaatacagtagaaccttgaaca

SEQ ID NO: 901354 - DNA, 25 bp, Homo sapien
gccttactggtgacataaatagacc

SEQ ID NO: 901355 - DNA, 25 bp, Homo sapien
agggcctggtcttgccgtctcaagg

SEQ ID NO: 901356 - DNA, 25 bp, Homo sapien
gtataagtggatccttgcagttcca

SEQ ID NO: 901357 - DNA, 25 bp, Homo sapien
tataagtggatccttgcagttccaa

SEQ ID NO: 901358 - DNA, 25 bp, Homo sapien
gggagggcctggtcttgccgtctca

SEQ ID NO: 901359 - DNA, 25 bp, Homo sapien
caaatctgttggaaacttctcaaaa

SEQ ID NO: 901360 - DNA, 25 bp, Homo sapien
acaaatctgttggaaacttctcaaa

SEQ ID NO: 901361 - DNA, 25 bp, Homo sapien
tatgaaatccctttggctaaaaaca

SEQ ID NO: 901362 - DNA, 25 bp, Homo sapien
taagcccttataggttgatgaaaag

SEQ ID NO: 901363 - DNA, 25 bp, Homo sapien
ttttaaattgggctagtcacacatg

SEQ ID NO: 901364 - DNA, 25 bp, Homo sapien
gcacctggctgttttacacttcaag

SEQ ID NO: 901365 - DNA, 25 bp, Homo sapien
cacccaatactgtttattcaaaaga

SEQ ID NO: 901366 - DNA, 25 bp, Homo sapien
tcacccaatactgtttattcaaaag

SEQ ID NO: 901367 - DNA, 25 bp, Homo sapien
taaatcacccaatactgtttattca

SEQ ID NO: 901368 - DNA, 25 bp, Homo sapien
aatcacccaatactgtttattcaaa

SEQ ID NO: 901369 - DNA, 25 bp, Homo sapien
tcctggcgacgctgtgacaattaaa

SEQ ID NO: 901370 - DNA, 25 bp, Homo sapien
tccttacaagggtgccagaattctt

SEQ ID NO: 901371 - DNA, 25 bp, Homo sapien
gctctgaagttaggcagtcacctct

SEQ ID NO: 901372 - DNA, 25 bp, Homo sapien
tgatatgctctgttccatgagggca

SEQ ID NO: 901373 - DNA, 25 bp, Homo sapien
aatcgtagccagcagagcacgtgga

SEQ ID NO: 901374 - DNA, 25 bp, Homo sapien
cacagttggcgacgctttcaggcag

SEQ ID NO: 901375 - DNA, 25 bp, Homo sapien
caacaaatgctgagtgtccgccatg

SEQ ID NO: 901376 - DNA, 25 bp, Homo sapien
caacgtccaagttgcaggtagcagc

SEQ ID NO: 901377 - DNA, 25 bp, Homo sapien
tcctggtccacggttcttagcactg

SEQ ID NO: 901378 - DNA, 25 bp, Homo sapien
cactgcagatgttgcagaactgtgc

SEQ ID NO: 901379 - DNA, 25 bp, Homo sapien
tccacggttcttagcactgcagatg

SEQ ID NO: 901380 - DNA, 25 bp, Homo sapien
cacttcctggtccacggttcttagc

SEQ ID NO: 901381 - DNA, 25 bp, Homo sapien
gatacacaatggctctctactgttg

SEQ ID NO: 901382 - DNA, 25 bp, Homo sapien
gacagctgtcaactgggcctgaatg

SEQ ID NO: 901383 - DNA, 25 bp, Homo sapien
agaatacgtctaatgtgacctggag

SEQ ID NO: 901384 - DNA, 25 bp, Homo sapien
tagcatcatggaacacaaatcaggc

SEQ ID NO: 901385 - DNA, 25 bp, Homo sapien
tccttgtggaacatgtgccggcaat

SEQ ID NO: 901386 - DNA, 25 bp, Homo sapien
caccacgctgaagggcttagctgca

SEQ ID NO: 901387 - DNA, 25 bp, Homo sapien
ggcaatggaagaccaccacgctgaa

SEQ ID NO: 901388 - DNA, 25 bp, Homo sapien
atgggcaggcactccttgtggaaca

SEQ ID NO: 901389 - DNA, 25 bp, Homo sapien
taaaccaatcccgactgaaagtcga

SEQ ID NO: 901390 - DNA, 25 bp, Homo sapien
acttaatgcaacaagcaagatcatt

SEQ ID NO: 901391 - DNA, 25 bp, Homo sapien
gtttaattttcagcaataaggtgcc

SEQ ID NO: 901392 - DNA, 25 bp, Homo sapien
taaggtgcctttagagaatggctta

SEQ ID NO: 901393 - DNA, 25 bp, Homo sapien
gcaggatggaagccacaacacttct

SEQ ID NO: 901394 - DNA, 25 bp, Homo sapien
cctagagcttgagaacctcagctct

SEQ ID NO: 901395 - DNA, 25 bp, Homo sapien
ggatggaagccacaacacttctctc

SEQ ID NO: 901396 - DNA, 25 bp, Homo sapien
gatggaagccacaacacttctctcc

SEQ ID NO: 901397 - DNA, 25 bp, Homo sapien
aggcacgactcacagatgttctcct

SEQ ID NO: 901398 - DNA, 25 bp, Homo sapien
aaggcacgactcacagatgttctcc

SEQ ID NO: 901399 - DNA, 25 bp, Homo sapien
gagaatcttcttgcagccttcacga

SEQ ID NO: 901400 - DNA, 25 bp, Homo sapien
caagaacacctttcatttgagttcg

SEQ ID NO: 901401 - DNA, 25 bp, Homo sapien
catttgagttcggtgcattttcttc

SEQ ID NO: 901402 - DNA, 25 bp, Homo sapien
cttcagtaaggacaaagagtcagct

SEQ ID NO: 901403 - DNA, 25 bp, Homo sapien
catagtgctatgaatgtggtgtgtg

SEQ ID NO: 901404 - DNA, 25 bp, Homo sapien
gagacatcacaatgctttggcagcc

SEQ ID NO: 901405 - DNA, 25 bp, Homo sapien
gcacacagtggaggatgatgcccat

SEQ ID NO: 901406 - DNA, 25 bp, Homo sapien
gcagggacaggcgacactttacctt

SEQ ID NO: 901407 - DNA, 25 bp, Homo sapien
agcatgtgtctttcacgggcaagtg

SEQ ID NO: 901408 - DNA, 25 bp, Homo sapien
gctctgaggctgagaagcatgtgtc

SEQ ID NO: 901409 - DNA, 25 bp, Homo sapien
tctcgacttgacaagctagatgggc

SEQ ID NO: 901410 - DNA, 25 bp, Homo sapien
catacgcagttatgtgcagttacac

SEQ ID NO: 901411 - DNA, 25 bp, Homo sapien
tcctacattaattgagaaactgcct

SEQ ID NO: 901412 - DNA, 25 bp, Homo sapien
tgggtgaatccagccgaaagccttt

SEQ ID NO: 901413 - DNA, 25 bp, Homo sapien
aaagttctatgcctgccatttctag

SEQ ID NO: 901414 - DNA, 25 bp, Homo sapien
gcattaaaacatacaggtagaagag

SEQ ID NO: 901415 - DNA, 25 bp, Homo sapien
tccgcctgcagatagcattttctag

SEQ ID NO: 901416 - DNA, 25 bp, Homo sapien
caggaaggagccatatcctcagcag

SEQ ID NO: 901417 - DNA, 25 bp, Homo sapien
tctaaacaggtacaatctgtccgcc

SEQ ID NO: 901418 - DNA, 25 bp, Homo sapien
tggctctgactctcgtgggtgctcc

SEQ ID NO: 901419 - DNA, 25 bp, Homo sapien
gatattttcccacgtgcttcagatc

SEQ ID NO: 901420 - DNA, 25 bp, Homo sapien
tgaggtacactctcctgttaatgca

SEQ ID NO: 901421 - DNA, 25 bp, Homo sapien
gaggttatgtccagtttagggctac

SEQ ID NO: 901422 - DNA, 25 bp, Homo sapien
ggatgtaaagcctagtgatacggca

SEQ ID NO: 901423 - DNA, 25 bp, Homo sapien
agtatgtctaactggcctttcaaag

SEQ ID NO: 901424 - DNA, 25 bp, Homo sapien
caatcggatggttgtggtagctcac

SEQ ID NO: 901425 - DNA, 25 bp, Homo sapien
tatgtcctccttcacaccaaaagta

SEQ ID NO: 901426 - DNA, 25 bp, Homo sapien
ctgaaggtttatagactacagaagc

SEQ ID NO: 901427 - DNA, 25 bp, Homo sapien
tgtctcgctcatccccaggtctatg

SEQ ID NO: 901428 - DNA, 25 bp, Homo sapien
gtctatgagaccaaatggaggccct

SEQ ID NO: 901429 - DNA, 25 bp, Homo sapien
cagcatgaacaaagggctgtgtctc

SEQ ID NO: 901430 - DNA, 25 bp, Homo sapien
tcaatttagatcatgagcagcatga

SEQ ID NO: 901431 - DNA, 25 bp, Homo sapien
ctatagaagttaccagcatcctgaa

SEQ ID NO: 901432 - DNA, 25 bp, Homo sapien
tcaagttctatagaagttaccagca

SEQ ID NO: 901433 - DNA, 25 bp, Homo sapien
agttctatagaagttaccagcatcc

SEQ ID NO: 901434 - DNA, 25 bp, Homo sapien
ttctatagaagttaccagcatcctg

SEQ ID NO: 901435 - DNA, 25 bp, Homo sapien
gcagaattttaaccaaggaatctct

SEQ ID NO: 901436 - DNA, 25 bp, Homo sapien
tgcaaattgtagtcttgcagaattt

SEQ ID NO: 901437 - DNA, 25 bp, Homo sapien
tccttaatacggtgaatcagtagaa

SEQ ID NO: 901438 - DNA, 25 bp, Homo sapien
tagaattgggtcaacatgtgtgcca

SEQ ID NO: 901439 - DNA, 25 bp, Homo sapien
catcatgtaattcctccataatcat

SEQ ID NO: 901440 - DNA, 25 bp, Homo sapien
caacatcatgtaattcctccataat

SEQ ID NO: 901441 - DNA, 25 bp, Homo sapien
ggcacttcggctattacccattcgg

SEQ ID NO: 901442 - DNA, 25 bp, Homo sapien
cataatcatcttcagggcacttcgg

SEQ ID NO: 901443 - DNA, 25 bp, Homo sapien
tgcaggaactagtaaaggatcttga

SEQ ID NO: 901444 - DNA, 25 bp, Homo sapien
tctctgggcttgcaggaactagtaa

SEQ ID NO: 901445 - DNA, 25 bp, Homo sapien
ggcttgcaggaactagtaaaggatc

SEQ ID NO: 901446 - DNA, 25 bp, Homo sapien
cctgtctctgggcttgcaggaacta

SEQ ID NO: 901447 - DNA, 25 bp, Homo sapien
caaagtttctctgttgacagatctc

SEQ ID NO: 901448 - DNA, 25 bp, Homo sapien
ctgtctcttctacaaagtttctctg

SEQ ID NO: 901449 - DNA, 25 bp, Homo sapien
aactgtctcttctacaaagtttctc

SEQ ID NO: 901450 - DNA, 25 bp, Homo sapien
tgtctcttctacaaagtttctctgt

SEQ ID NO: 901451 - DNA, 25 bp, Homo sapien
aaataaagaacacatctccctagaa

SEQ ID NO: 901452 - DNA, 25 bp, Homo sapien
aaacaaataaagaacacatctccct

SEQ ID NO: 901453 - DNA, 25 bp, Homo sapien
agcaaacaaataaagaacacatctc

SEQ ID NO: 901454 - DNA, 25 bp, Homo sapien
acaaataaagaacacatctccctag

SEQ ID NO: 901455 - DNA, 25 bp, Homo sapien
gaatgcttaagaacatgctagtctc

SEQ ID NO: 901456 - DNA, 25 bp, Homo sapien
ttatagttgagtgggactgccattc

SEQ ID NO: 901457 - DNA, 25 bp, Homo sapien
gaagcctcacctgagttatccaaga

SEQ ID NO: 901458 - DNA, 25 bp, Homo sapien
ccattcaagatttcagacagaacca

SEQ ID NO: 901459 - DNA, 25 bp, Homo sapien
tgagtagctatgaatactgactggc

SEQ ID NO: 901460 - DNA, 25 bp, Homo sapien
taaggaaaacggagtgagaatcttg

SEQ ID NO: 901461 - DNA, 25 bp, Homo sapien
agttttgctttctcgcctaggccgg

SEQ ID NO: 901462 - DNA, 25 bp, Homo sapien
ttttgctttctcgcctaggccggag

SEQ ID NO: 901463 - DNA, 25 bp, Homo sapien
ctacttctttgagagcaacagtctt

SEQ ID NO: 901464 - DNA, 25 bp, Homo sapien
acttctttgagagcaacagtcttcc

SEQ ID NO: 901465 - DNA, 25 bp, Homo sapien
cttctttgagagcaacagtcttccc

SEQ ID NO: 901466 - DNA, 25 bp, Homo sapien
ttctttgagagcaacagtcttcccc

SEQ ID NO: 901467 - DNA, 25 bp, Homo sapien
cttcatccaaagtgtacaagtcggg

SEQ ID NO: 901468 - DNA, 25 bp, Homo sapien
cctcttcatccaaagtgtacaagtc

SEQ ID NO: 901469 - DNA, 25 bp, Homo sapien
caaagtgtacaagtcggggagtctg

SEQ ID NO: 901470 - DNA, 25 bp, Homo sapien
catcaatgacaacctcttcatccaa

SEQ ID NO: 901471 - DNA, 25 bp, Homo sapien
taagtttggtcgatcatattcagca

SEQ ID NO: 901472 - DNA, 25 bp, Homo sapien
taacgctgccccttatggtggtctc

SEQ ID NO: 901473 - DNA, 25 bp, Homo sapien
tcaagtgggcaatgggtactgtctc

SEQ ID NO: 901474 - DNA, 25 bp, Homo sapien
ggtctctcttgaaaagcttatgcaa

SEQ ID NO: 901475 - DNA, 25 bp, Homo sapien
cacatgctgtagctctggtctgtct

SEQ ID NO: 901476 - DNA, 25 bp, Homo sapien
tgtcttccaattcttccactacctt

SEQ ID NO: 901477 - DNA, 25 bp, Homo sapien
ggtctgtcttccaattcttccacta

SEQ ID NO: 901478 - DNA, 25 bp, Homo sapien
acatgctgtagctctggtctgtctt

SEQ ID NO: 901479 - DNA, 25 bp, Homo sapien
attgtccaaaagcatgtcaacagct

SEQ ID NO: 901480 - DNA, 25 bp, Homo sapien
tgaaattttatcttcattgtccaaa

SEQ ID NO: 901481 - DNA, 25 bp, Homo sapien
aaattttatcttcattgtccaaaag

SEQ ID NO: 901482 - DNA, 25 bp, Homo sapien
tgtccaaaagcatgtcaacagcttt

SEQ ID NO: 901483 - DNA, 25 bp, Homo sapien
cacaggaacatatgcaaaacgagct

SEQ ID NO: 901484 - DNA, 25 bp, Homo sapien
gatcacattctagaatagcaattag

SEQ ID NO: 901485 - DNA, 25 bp, Homo sapien
atctggatcacattctagaatagca

SEQ ID NO: 901486 - DNA, 25 bp, Homo sapien
tttccacaggaacatatgcaaaacg

SEQ ID NO: 901487 - DNA, 25 bp, Homo sapien
caattttatccttgatagaactgaa

SEQ ID NO: 901488 - DNA, 25 bp, Homo sapien
gccatagttcttgtcataggtgtac

SEQ ID NO: 901489 - DNA, 25 bp, Homo sapien
ggatcaactgaaaaacgtctttatg

SEQ ID NO: 901490 - DNA, 25 bp, Homo sapien
gaactgaaaagattatgcttgtgga

SEQ ID NO: 901491 - DNA, 25 bp, Homo sapien
tctttcttcaaatgatcccgaactg

SEQ ID NO: 901492 - DNA, 25 bp, Homo sapien
taaagtcttgttctgactatctttc

SEQ ID NO: 901493 - DNA, 25 bp, Homo sapien
ccgaactgcttgaactatgactgaa

SEQ ID NO: 901494 - DNA, 25 bp, Homo sapien
cattctcggatcaatgtggcaaaac

SEQ ID NO: 901495 - DNA, 25 bp, Homo sapien
ccagtcggaagtacaggtgacagcc

SEQ ID NO: 901496 - DNA, 25 bp, Homo sapien
gcaaatgagtcaaatctaaggaggt

SEQ ID NO: 901497 - DNA, 25 bp, Homo sapien
cacaggatagactgagacaggatta

SEQ ID NO: 901498 - DNA, 25 bp, Homo sapien
ccagtttatagttgaccagtcggaa

SEQ ID NO: 901499 - DNA, 25 bp, Homo sapien
ggtcccactccgtcacctaagctgg

SEQ ID NO: 901500 - DNA, 25 bp, Homo sapien
ctcagcctctagggtcaagtgatcc

SEQ ID NO: 901501 - DNA, 25 bp, Homo sapien
caggcatatgtcacagcactcagct

SEQ ID NO: 901502 - DNA, 25 bp, Homo sapien
ttgtgagaaagggtcccactccgtc

SEQ ID NO: 901503 - DNA, 25 bp, Homo sapien
ctcccatcgagaacaagtaaatatg

SEQ ID NO: 901504 - DNA, 25 bp, Homo sapien
atatgaccacatcagaacaccatac

SEQ ID NO: 901505 - DNA, 25 bp, Homo sapien
atcgagaacaagtaaatatgaccac

SEQ ID NO: 901506 - DNA, 25 bp, Homo sapien
aatatgaccacatcagaacaccata

SEQ ID NO: 901507 - DNA, 25 bp, Homo sapien
ctcataatcactctccaaaaattca

SEQ ID NO: 901508 - DNA, 25 bp, Homo sapien
cagaactggatcacctcttggcaaa

SEQ ID NO: 901509 - DNA, 25 bp, Homo sapien
tcatgtaagatcatttcatagatga

SEQ ID NO: 901510 - DNA, 25 bp, Homo sapien
catagatgagtggtttcagaactgg

SEQ ID NO: 901511 - DNA, 25 bp, Homo sapien
aaatttataaacttcatattcccag

SEQ ID NO: 901512 - DNA, 25 bp, Homo sapien
cttaagctgtccaatttctttaaat

SEQ ID NO: 901513 - DNA, 25 bp, Homo sapien
agagtgctgcatttttcccaagaat

SEQ ID NO: 901514 - DNA, 25 bp, Homo sapien
taaacttcatattcccagagtgctg

SEQ ID NO: 901515 - DNA, 25 bp, Homo sapien
cagtaaaaacatcccaggcagaaag

SEQ ID NO: 901516 - DNA, 25 bp, Homo sapien
ctggcagtaaaaacatcccaggcag

SEQ ID NO: 901517 - DNA, 25 bp, Homo sapien
aacatcccaggcagaaagaaagtat

SEQ ID NO: 901518 - DNA, 25 bp, Homo sapien
caggcagaaagaaagtatatattaa

SEQ ID NO: 901519 - DNA, 25 bp, Homo sapien
gctgctatgtcatagtctcctctct

SEQ ID NO: 901520 - DNA, 25 bp, Homo sapien
tctccaccaggtgatttatatatgc

SEQ ID NO: 901521 - DNA, 25 bp, Homo sapien
cgtgctgctatgtcatagtctcctc

SEQ ID NO: 901522 - DNA, 25 bp, Homo sapien
ggtgatttatatatgccaagccaat

SEQ ID NO: 901523 - DNA, 25 bp, Homo sapien
ctgggttctgaaaggatttggggtg

SEQ ID NO: 901524 - DNA, 25 bp, Homo sapien
gacagctcttgcttgatctccccat

SEQ ID NO: 901525 - DNA, 25 bp, Homo sapien
gaggacagctcttgcttgatctccc

SEQ ID NO: 901526 - DNA, 25 bp, Homo sapien
ggacagctcttgcttgatctcccca

SEQ ID NO: 901527 - DNA, 25 bp, Homo sapien
gggaggacagctcttgcttgatctc

SEQ ID NO: 901528 - DNA, 25 bp, Homo sapien
tataggactaatgtacaggacatgc

SEQ ID NO: 901529 - DNA, 25 bp, Homo sapien
tcaagagtgaagcaaaatacccatc

SEQ ID NO: 901530 - DNA, 25 bp, Homo sapien
tctggaaacagatcacacgtaacaa

SEQ ID NO: 901531 - DNA, 25 bp, Homo sapien
caggacatgcccatttcaagagtga

SEQ ID NO: 901532 - DNA, 25 bp, Homo sapien
ttttggctaatttcagctgccatca

SEQ ID NO: 901533 - DNA, 25 bp, Homo sapien
ccatcctaagtgagtaaaaatgtga

SEQ ID NO: 901534 - DNA, 25 bp, Homo sapien
tccaaactgatagttcaaaccatcc

SEQ ID NO: 901535 - DNA, 25 bp, Homo sapien
caaattaatctaagccaaacctcaa

SEQ ID NO: 901536 - DNA, 25 bp, Homo sapien
gacaacatcattctatccaaactga

SEQ ID NO: 901537 - DNA, 25 bp, Homo sapien
cttctctctctatgctgtagatgag

SEQ ID NO: 901538 - DNA, 25 bp, Homo sapien
tctctatgctgtagatgagtcaata

SEQ ID NO: 901539 - DNA, 25 bp, Homo sapien
tctctctatgctgtagatgagtcaa

SEQ ID NO: 901540 - DNA, 25 bp, Homo sapien
tctatgctgtagatgagtcaatact

SEQ ID NO: 901541 - DNA, 25 bp, Homo sapien
tgtaaaaaagtgattccccttcaga

SEQ ID NO: 901542 - DNA, 25 bp, Homo sapien
tacaacatctctcggactcacgatg

SEQ ID NO: 901543 - DNA, 25 bp, Homo sapien
aaggagccagtcaatgtgatcatct

SEQ ID NO: 901544 - DNA, 25 bp, Homo sapien
tcgttccttggccactacaacatct

SEQ ID NO: 901545 - DNA, 25 bp, Homo sapien
aaaagagaggaacgacttggtgact

SEQ ID NO: 901546 - DNA, 25 bp, Homo sapien
agaaaagagaggaacgacttggtga

SEQ ID NO: 901547 - DNA, 25 bp, Homo sapien
gagaggaacgacttggtgactgaac

SEQ ID NO: 901548 - DNA, 25 bp, Homo sapien
ggaacgacttggtgactgaacagca

SEQ ID NO: 901549 - DNA, 25 bp, Homo sapien
gaagagatctcttcacaagtctcag

SEQ ID NO: 901550 - DNA, 25 bp, Homo sapien
tctctacattcattctcctgaaagc

SEQ ID NO: 901551 - DNA, 25 bp, Homo sapien
tgatgtccagtctaggcctggcaca

SEQ ID NO: 901552 - DNA, 25 bp, Homo sapien
cctgaaagcctctgactgtcaaagc

SEQ ID NO: 901553 - DNA, 25 bp, Homo sapien
ccagagcttcaggttactatagtga

SEQ ID NO: 901554 - DNA, 25 bp, Homo sapien
tagtgatggcttcctaatgcaagtg

SEQ ID NO: 901555 - DNA, 25 bp, Homo sapien
tcctaatgcaagtgcttgctcagag

SEQ ID NO: 901556 - DNA, 25 bp, Homo sapien
ctcagagaaacgctcaagagcagct

SEQ ID NO: 901557 - DNA, 25 bp, Homo sapien
tttttctgaaatctcctttacatac

SEQ ID NO: 901558 - DNA, 25 bp, Homo sapien
ttttttctgaaatctcctttacata

SEQ ID NO: 901559 - DNA, 25 bp, Homo sapien
gaaagtacaacaagctgatcacaga

SEQ ID NO: 901560 - DNA, 25 bp, Homo sapien
gaggtgcaagtccactgatgtagaa

SEQ ID NO: 901561 - DNA, 25 bp, Homo sapien
ctgatcacagagaggtgcaagtcca

SEQ ID NO: 901562 - DNA, 25 bp, Homo sapien
gtccactgatgtagaattcagtttc

SEQ ID NO: 901563 - DNA, 25 bp, Homo sapien
agcaacttgggtgaagagcagagaa

SEQ ID NO: 901564 - DNA, 25 bp, Homo sapien
gcaacttgggtgaagagcagagaat

SEQ ID NO: 901565 - DNA, 25 bp, Homo sapien
cacagacacctaagggaaaacgtct

SEQ ID NO: 901566 - DNA, 25 bp, Homo sapien
tgctgatttagggaaatgtctgcag

SEQ ID NO: 901567 - DNA, 25 bp, Homo sapien
cagggttagagtcacaaatagatca

SEQ ID NO: 901568 - DNA, 25 bp, Homo sapien
ctgcttttatgggaggactaggtag

SEQ ID NO: 901569 - DNA, 25 bp, Homo sapien
gctgatatcaccctgcagcgatcag

SEQ ID NO: 901570 - DNA, 25 bp, Homo sapien
cagtgtctggccctcgatagcatac

SEQ ID NO: 901571 - DNA, 25 bp, Homo sapien
gaaagagttgttacatccctcccaa

SEQ ID NO: 901572 - DNA, 25 bp, Homo sapien
tgcagaatcctggaggttctattca

SEQ ID NO: 901573 - DNA, 25 bp, Homo sapien
gatcccactactgtaacccatatag

SEQ ID NO: 901574 - DNA, 25 bp, Homo sapien
taacaggtggataaagagagatact

SEQ ID NO: 901575 - DNA, 25 bp, Homo sapien
ctaccataccacagagatcatggaa

SEQ ID NO: 901576 - DNA, 25 bp, Homo sapien
actttggtgaaaagtaccagaggct

SEQ ID NO: 901577 - DNA, 25 bp, Homo sapien
tccaactaccataccacagagatca

SEQ ID NO: 901578 - DNA, 25 bp, Homo sapien
tttggtgaaaagtaccagaggctca

SEQ ID NO: 901579 - DNA, 25 bp, Homo sapien
tttcactggcatgccgttccttcac

SEQ ID NO: 901580 - DNA, 25 bp, Homo sapien
tcatttcactggcatgccgttcctt

SEQ ID NO: 901581 - DNA, 25 bp, Homo sapien
aacatatcgacttggcaaatccctc

SEQ ID NO: 901582 - DNA, 25 bp, Homo sapien
ctatttcaacatatcgacttggcaa

SEQ ID NO: 901583 - DNA, 25 bp, Homo sapien
ggttttgcatccatgaattctacat

SEQ ID NO: 901584 - DNA, 25 bp, Homo sapien
aaaacttgaccttgctgtacaccaa

SEQ ID NO: 901585 - DNA, 25 bp, Homo sapien
tgttataatacagtgagccctccat

SEQ ID NO: 901586 - DNA, 25 bp, Homo sapien
caaacaaggatcagaaatattcagg

SEQ ID NO: 901587 - DNA, 25 bp, Homo sapien
tcttgtccgtttcatataactgcct

SEQ ID NO: 901588 - DNA, 25 bp, Homo sapien
cagtgaatgcagagtgcccactttc

SEQ ID NO: 901589 - DNA, 25 bp, Homo sapien
tagtatactgagttgctgcccagca

SEQ ID NO: 901590 - DNA, 25 bp, Homo sapien
cagcaacactgcagcgactcagtga

SEQ ID NO: 901591 - DNA, 25 bp, Homo sapien
taaccacacacgtgggacagggagc

SEQ ID NO: 901592 - DNA, 25 bp, Homo sapien
gagaacaattagcactaccactttg

SEQ ID NO: 901593 - DNA, 25 bp, Homo sapien
tcctacgatataggcacagtttcct

SEQ ID NO: 901594 - DNA, 25 bp, Homo sapien
gaatccctttttccatcctacgata

SEQ ID NO: 901595 - DNA, 25 bp, Homo sapien
gtggatctataacaacacggactta

SEQ ID NO: 901596 - DNA, 25 bp, Homo sapien
taacaacacggacttattataaaga

SEQ ID NO: 901597 - DNA, 25 bp, Homo sapien
acaacacggacttattataaagaca

SEQ ID NO: 901598 - DNA, 25 bp, Homo sapien
gatctataacaacacggacttatta

SEQ ID NO: 901599 - DNA, 25 bp, Homo sapien
cagggatacatgtctgggcgaagac

SEQ ID NO: 901600 - DNA, 25 bp, Homo sapien
ccccagccaataatcagtgtcacat

SEQ ID NO: 901601 - DNA, 25 bp, Homo sapien
ggcacattggtgattctttgctttg

SEQ ID NO: 901602 - DNA, 25 bp, Homo sapien
agtgtcacattgtccttccagcaga

SEQ ID NO: 901603 - DNA, 25 bp, Homo sapien
tttcttggctactctccatgcctca

SEQ ID NO: 901604 - DNA, 25 bp, Homo sapien
ccttcaattattaagatagcttttc

SEQ ID NO: 901605 - DNA, 25 bp, Homo sapien
gacccattcccaatgcagtccttca

SEQ ID NO: 901606 - DNA, 25 bp, Homo sapien
aagacccattcccaatgcagtcctt

SEQ ID NO: 901607 - DNA, 25 bp, Homo sapien
ttccatctgttcatccaagaccgtt

SEQ ID NO: 901608 - DNA, 25 bp, Homo sapien
tccaagaccgttcaaacagtagcag

SEQ ID NO: 901609 - DNA, 25 bp, Homo sapien
catgcagaacagcagacttccatct

SEQ ID NO: 901610 - DNA, 25 bp, Homo sapien
tattattggcccaagcaatcagatg

SEQ ID NO: 901611 - DNA, 25 bp, Homo sapien
gacccagactgctgcatgcacactg

SEQ ID NO: 901612 - DNA, 25 bp, Homo sapien
tgacccagactgctgcatgcacact

SEQ ID NO: 901613 - DNA, 25 bp, Homo sapien
cactgtcctttctacggatgtctgc

SEQ ID NO: 901614 - DNA, 25 bp, Homo sapien
cctttctacggatgtctgcaaatga

SEQ ID NO: 901615 - DNA, 25 bp, Homo sapien
taaaagtttatcaaggcccgcaaga

SEQ ID NO: 901616 - DNA, 25 bp, Homo sapien
aaagtttatcaaggcccgcaagaga

SEQ ID NO: 901617 - DNA, 25 bp, Homo sapien
ctaaaagtttatcaaggcccgcaag

SEQ ID NO: 901618 - DNA, 25 bp, Homo sapien
agtttatcaaggcccgcaagagatt

SEQ ID NO: 901619 - DNA, 25 bp, Homo sapien
gtcacaaactgcttgcaactggatc

SEQ ID NO: 901620 - DNA, 25 bp, Homo sapien
ttcttccctccggtcacaaactgct

SEQ ID NO: 901621 - DNA, 25 bp, Homo sapien
cacgaaatgtgggtgcacagcaata

SEQ ID NO: 901622 - DNA, 25 bp, Homo sapien
gcttgcaactggatctcacgaaatg

SEQ ID NO: 901623 - DNA, 25 bp, Homo sapien
acagaacccaactctggtttaggag

SEQ ID NO: 901624 - DNA, 25 bp, Homo sapien
cagaacccaactctggtttaggagt

SEQ ID NO: 901625 - DNA, 25 bp, Homo sapien
agttctagtttctggctgaggaccc

SEQ ID NO: 901626 - DNA, 25 bp, Homo sapien
ggtcaaagctcaaagagtaggataa

SEQ ID NO: 901627 - DNA, 25 bp, Homo sapien
ccaggtcaaagctcaaagagtagga

SEQ ID NO: 901628 - DNA, 25 bp, Homo sapien
gaggacccctataagtggatgtcac

SEQ ID NO: 901629 - DNA, 25 bp, Homo sapien
aaaagtctcgtgaaattcttctcca

SEQ ID NO: 901630 - DNA, 25 bp, Homo sapien
cctcatgaaacagtaagggatgtaa

SEQ ID NO: 901631 - DNA, 25 bp, Homo sapien
cagtaagggatgtaatcattctcca

SEQ ID NO: 901632 - DNA, 25 bp, Homo sapien
tctccactttagcatgaaactctat

SEQ ID NO: 901633 - DNA, 25 bp, Homo sapien
tttgccaaccagaacactgggcaac

SEQ ID NO: 901634 - DNA, 25 bp, Homo sapien
tatagtaagcaaggtgctgttccga

SEQ ID NO: 901635 - DNA, 25 bp, Homo sapien
tagtaagcaaggtgctgttccgatc

SEQ ID NO: 901636 - DNA, 25 bp, Homo sapien
ttatatagtaagcaaggtgctgttc

SEQ ID NO: 901637 - DNA, 25 bp, Homo sapien
gtaagcaaggtgctgttccgatcac

SEQ ID NO: 901638 - DNA, 25 bp, Homo sapien
gaactctctgcatgaccacatcttt

SEQ ID NO: 901639 - DNA, 25 bp, Homo sapien
ctgcatgaccacatctttgccatac

SEQ ID NO: 901640 - DNA, 25 bp, Homo sapien
cagaactctctgcatgaccacatct

SEQ ID NO: 901641 - DNA, 25 bp, Homo sapien
agaactctctgcatgaccacatctt

SEQ ID NO: 901642 - DNA, 25 bp, Homo sapien
ctccactttcatccaagctaatctg

SEQ ID NO: 901643 - DNA, 25 bp, Homo sapien
cactttcatccaagctaatctgatt

SEQ ID NO: 901644 - DNA, 25 bp, Homo sapien
ccactttcatccaagctaatctgat

SEQ ID NO: 901645 - DNA, 25 bp, Homo sapien
tccactttcatccaagctaatctga

SEQ ID NO: 901646 - DNA, 25 bp, Homo sapien
aactgagtatcatcactatgcacat

SEQ ID NO: 901647 - DNA, 25 bp, Homo sapien
caatattacaactgtcaatgttgca

SEQ ID NO: 901648 - DNA, 25 bp, Homo sapien
catgcaactagcctggcatccataa

SEQ ID NO: 901649 - DNA, 25 bp, Homo sapien
ttttgagtgataactgagtatcatc

SEQ ID NO: 901650 - DNA, 25 bp, Homo sapien
taaggctcctctgactaacaaatgg

SEQ ID NO: 901651 - DNA, 25 bp, Homo sapien
tccatgtgtgaaaagcaaacgtctg

SEQ ID NO: 901652 - DNA, 25 bp, Homo sapien
aattcacggtcatttcgaaagctgc

SEQ ID NO: 901653 - DNA, 25 bp, Homo sapien
gatgatacacccaggagggaagcaa

SEQ ID NO: 901654 - DNA, 25 bp, Homo sapien
tctgcatgagtcatcaagggccatg

SEQ ID NO: 901655 - DNA, 25 bp, Homo sapien
gatgacaccgataatttgcgtacgc

SEQ ID NO: 901656 - DNA, 25 bp, Homo sapien
tggatacagtgtaggcgcaatgcag

SEQ ID NO: 901657 - DNA, 25 bp, Homo sapien
gaaagtgcattccaacgagagccaa

SEQ ID NO: 901658 - DNA, 25 bp, Homo sapien
aaactaatgaacgtgtggcagggct

SEQ ID NO: 901659 - DNA, 25 bp, Homo sapien
ctggctggcgtctgaccccaagcct

SEQ ID NO: 901660 - DNA, 25 bp, Homo sapien
tggctggcgtctgaccccaagcctg

SEQ ID NO: 901661 - DNA, 25 bp, Homo sapien
actaatgaacgtgtggcagggctgg

SEQ ID NO: 901662 - DNA, 25 bp, Homo sapien
taaaggaacactgaatcttcacgat

SEQ ID NO: 901663 - DNA, 25 bp, Homo sapien
ggaacactgaatcttcacgatgata

SEQ ID NO: 901664 - DNA, 25 bp, Homo sapien
aaggaacactgaatcttcacgatga

SEQ ID NO: 901665 - DNA, 25 bp, Homo sapien
ttaaaggaacactgaatcttcacga

SEQ ID NO: 901666 - DNA, 25 bp, Homo sapien
gttcccctggacatcaagtaaataa

SEQ ID NO: 901667 - DNA, 25 bp, Homo sapien
taaaccttgccataatgtgtgccca

SEQ ID NO: 901668 - DNA, 25 bp, Homo sapien
gtaaataaaccttgccataatgtgt

SEQ ID NO: 901669 - DNA, 25 bp, Homo sapien
gccataatgtgtgcccaatgccaaa

SEQ ID NO: 901670 - DNA, 25 bp, Homo sapien
taccccattggaaagcctttcatac

SEQ ID NO: 901671 - DNA, 25 bp, Homo sapien
accccattggaaagcctttcatact

SEQ ID NO: 901672 - DNA, 25 bp, Homo sapien
ttaccccattggaaagcctttcata

SEQ ID NO: 901673 - DNA, 25 bp, Homo sapien
ggtccataaactcagtagaatcagt

SEQ ID NO: 901674 - DNA, 25 bp, Homo sapien
ctgactactttgctggtccataaac

SEQ ID NO: 901675 - DNA, 25 bp, Homo sapien
tatctaggagagtaactgttttcat

SEQ ID NO: 901676 - DNA, 25 bp, Homo sapien
cctaaacctggtccatcaacatcct

SEQ ID NO: 901677 - DNA, 25 bp, Homo sapien
ctagaggcagcggggggcacggagg

SEQ ID NO: 901678 - DNA, 25 bp, Homo sapien
tttctgcattttcttttctaggagg

SEQ ID NO: 901679 - DNA, 25 bp, Homo sapien
caggtttctgcattttcttttctag

SEQ ID NO: 901680 - DNA, 25 bp, Homo sapien
aggtttctgcattttcttttctagg

SEQ ID NO: 901681 - DNA, 25 bp, Homo sapien
ctgcattttcttttctaggaggcat

SEQ ID NO: 901682 - DNA, 25 bp, Homo sapien
aatggaaatccttattaatgaaaat

SEQ ID NO: 901683 - DNA, 25 bp, Homo sapien
cagaagccccacagtaatggaaatc

SEQ ID NO: 901684 - DNA, 25 bp, Homo sapien
gaaatccttattaatgaaaatgtta

SEQ ID NO: 901685 - DNA, 25 bp, Homo sapien
tattaatgaaaatgttagaaaccat

SEQ ID NO: 901686 - DNA, 25 bp, Homo sapien
tcagcccctgggaatgttgcattta

SEQ ID NO: 901687 - DNA, 25 bp, Homo sapien
caaagaagcgcaactcaagagaaca

SEQ ID NO: 901688 - DNA, 25 bp, Homo sapien
aaggcttagttacctatcgccctgc

SEQ ID NO: 901689 - DNA, 25 bp, Homo sapien
cgtggtgagctacaaatccgagggc

SEQ ID NO: 901690 - DNA, 25 bp, Homo sapien
gactcatctgtagattcttcaaggg

SEQ ID NO: 901691 - DNA, 25 bp, Homo sapien
ctgtagattcttcaagggacccagt

SEQ ID NO: 901692 - DNA, 25 bp, Homo sapien
ctcagactcatctgtagattcttca

SEQ ID NO: 901693 - DNA, 25 bp, Homo sapien
tcatctgtagattcttcaagggacc

SEQ ID NO: 901694 - DNA, 25 bp, Homo sapien
tggtcagaagagatgataaaagaat

SEQ ID NO: 901695 - DNA, 25 bp, Homo sapien
gggaaagagtcctcatgttcctact

SEQ ID NO: 901696 - DNA, 25 bp, Homo sapien
catttgcaaggggaaagagtcctca

SEQ ID NO: 901697 - DNA, 25 bp, Homo sapien
tcatgttcctactaccacgcatctg

SEQ ID NO: 901698 - DNA, 25 bp, Homo sapien
gaggttgagtttaatgacttctaac

SEQ ID NO: 901699 - DNA, 25 bp, Homo sapien
ttccatctctgtgagtcgctgaata

SEQ ID NO: 901700 - DNA, 25 bp, Homo sapien
tattgcactacatgatagctgtcca

SEQ ID NO: 901701 - DNA, 25 bp, Homo sapien
ggttttagtcctcttactgtactga

SEQ ID NO: 901702 - DNA, 25 bp, Homo sapien
gcgccacgggagagtcacctgacag

SEQ ID NO: 901703 - DNA, 25 bp, Homo sapien
ggcgccacgggagagtcacctgaca

SEQ ID NO: 901704 - DNA, 25 bp, Homo sapien
aaataaaacactgagtaaattgtca

SEQ ID NO: 901705 - DNA, 25 bp, Homo sapien
acactgagtaaattgtcaaaaaaga

SEQ ID NO: 901706 - DNA, 25 bp, Homo sapien
taaaacactgagtaaattgtcaaaa

SEQ ID NO: 901707 - DNA, 25 bp, Homo sapien
cactgagtaaattgtcaaaaaagat

SEQ ID NO: 901708 - DNA, 25 bp, Homo sapien
ttattgcactctctcgtcagcatcc

SEQ ID NO: 901709 - DNA, 25 bp, Homo sapien
cactctctcgtcagcatcccttctt

SEQ ID NO: 901710 - DNA, 25 bp, Homo sapien
tggctccttagtgtccctaccaaca

SEQ ID NO: 901711 - DNA, 25 bp, Homo sapien
tccttagtgtccctaccaacagcat

SEQ ID NO: 901712 - DNA, 25 bp, Homo sapien
tagctgcttcgcgatcaaggagtgg

SEQ ID NO: 901713 - DNA, 25 bp, Homo sapien
catcactgctgccttgcctacaaga

SEQ ID NO: 901714 - DNA, 25 bp, Homo sapien
caagagtatcttggaaaaggacata

SEQ ID NO: 901715 - DNA, 25 bp, Homo sapien
gaaaaggacatatctagctgcttcg

SEQ ID NO: 901716 - DNA, 25 bp, Homo sapien
tttggtggagcagcttgactttttt

SEQ ID NO: 901717 - DNA, 25 bp, Homo sapien
gatggattgctatctctcagcgcag

SEQ ID NO: 901718 - DNA, 25 bp, Homo sapien
taattggtcaggtatggagtcagcc

SEQ ID NO: 901719 - DNA, 25 bp, Homo sapien
gattgacagatgcatgccagaaacc

SEQ ID NO: 901720 - DNA, 25 bp, Homo sapien
tatctactcagcaggtgtgaacaag

SEQ ID NO: 901721 - DNA, 25 bp, Homo sapien
tgaaagattcccatgaagtatgagc

SEQ ID NO: 901722 - DNA, 25 bp, Homo sapien
tgatccagctcaggacacagcgctg

SEQ ID NO: 901723 - DNA, 25 bp, Homo sapien
cagattagttcatcagtactgcgga

SEQ ID NO: 901724 - DNA, 25 bp, Homo sapien
tacagtcgggtcactgtgtccaata

SEQ ID NO: 901725 - DNA, 25 bp, Homo sapien
ggtcactgtgtccaatactccttct

SEQ ID NO: 901726 - DNA, 25 bp, Homo sapien
ccagaggacttaggcagcccaccat

SEQ ID NO: 901727 - DNA, 25 bp, Homo sapien
ctcatctcatacagtcgggtcactg

SEQ ID NO: 901728 - DNA, 25 bp, Homo sapien
tggcttcacgtctatagactgactt

SEQ ID NO: 901729 - DNA, 25 bp, Homo sapien
tgagtaataagtgaaaagcgaaatc

SEQ ID NO: 901730 - DNA, 25 bp, Homo sapien
gcgaaatctttgtgggcttcccagg

SEQ ID NO: 901731 - DNA, 25 bp, Homo sapien
ccagagtcagtttgatgagtaataa

SEQ ID NO: 901732 - DNA, 25 bp, Homo sapien
tcttttccactgtgaaccagagtca

SEQ ID NO: 901733 - DNA, 25 bp, Homo sapien
gtttttagcattgatcagaactcag

SEQ ID NO: 901734 - DNA, 25 bp, Homo sapien
tgtttttagcattgatcagaactca

SEQ ID NO: 901735 - DNA, 25 bp, Homo sapien
taatcctcacgccaggtctgtaagg

SEQ ID NO: 901736 - DNA, 25 bp, Homo sapien
gaggctaaggacgtggcgcaaggcc

SEQ ID NO: 901737 - DNA, 25 bp, Homo sapien
agctgaggctaaggacgtggcgcaa

SEQ ID NO: 901738 - DNA, 25 bp, Homo sapien
ttaatcctcacgccaggtctgtaag

SEQ ID NO: 901739 - DNA, 25 bp, Homo sapien
cgtagcattccgtggaagaagaaca

SEQ ID NO: 901740 - DNA, 25 bp, Homo sapien
tgcgtatttcggagcactggcctct

SEQ ID NO: 901741 - DNA, 25 bp, Homo sapien
catgcctggtgttctgagtgcgtat

SEQ ID NO: 901742 - DNA, 25 bp, Homo sapien
ggcctcttgctggtccaaaggagta

SEQ ID NO: 901743 - DNA, 25 bp, Homo sapien
tgatgtgcctgagtgaataaacaac

SEQ ID NO: 901744 - DNA, 25 bp, Homo sapien
ctgatgtgcctgagtgaataaacaa

SEQ ID NO: 901745 - DNA, 25 bp, Homo sapien
atgcccgtgacagggttggtgagca

SEQ ID NO: 901746 - DNA, 25 bp, Homo sapien
tgcccgtgacagggttggtgagcag

SEQ ID NO: 901747 - DNA, 25 bp, Homo sapien
catgcccgtgacagggttggtgagc

SEQ ID NO: 901748 - DNA, 25 bp, Homo sapien
gcccgtgacagggttggtgagcaga

SEQ ID NO: 901749 - DNA, 25 bp, Homo sapien
gaccttgcaagttcccaagattggg

SEQ ID NO: 901750 - DNA, 25 bp, Homo sapien
tctcctagaccttgcaagttcccaa

SEQ ID NO: 901751 - DNA, 25 bp, Homo sapien
ctgtgacatctcctagaccttgcaa

SEQ ID NO: 901752 - DNA, 25 bp, Homo sapien
tgacatctcctagaccttgcaagtt

SEQ ID NO: 901753 - DNA, 25 bp, Homo sapien
gcaagcaatacttctagagtttacg

SEQ ID NO: 901754 - DNA, 25 bp, Homo sapien
aaacaatttactcttgaatgtacac

SEQ ID NO: 901755 - DNA, 25 bp, Homo sapien
aatgtacactttgtggcaaaggagc

SEQ ID NO: 901756 - DNA, 25 bp, Homo sapien
tacttctagagtttacgcattttct

SEQ ID NO: 901757 - DNA, 25 bp, Homo sapien
aaccctcgccagtgcgcctgtttca

SEQ ID NO: 901758 - DNA, 25 bp, Homo sapien
gctgctcaccctggtattgatcgtg

SEQ ID NO: 901759 - DNA, 25 bp, Homo sapien
ttcctcacaaccctcgccagtgcgc

SEQ ID NO: 901760 - DNA, 25 bp, Homo sapien
cctggtattgatcgtgtcactggct

SEQ ID NO: 901761 - DNA, 25 bp, Homo sapien
tgtggactggagctgttcctatgcg

SEQ ID NO: 901762 - DNA, 25 bp, Homo sapien
ggactggagctgttcctatgcggcc

SEQ ID NO: 901763 - DNA, 25 bp, Homo sapien
gctgtggactggagctgttcctatg

SEQ ID NO: 901764 - DNA, 25 bp, Homo sapien
tggactggagctgttcctatgcggc

SEQ ID NO: 901765 - DNA, 25 bp, Homo sapien
aatacatccttggtgtaataaatga

SEQ ID NO: 901766 - DNA, 25 bp, Homo sapien
tttcacagttgactatacaaataca

SEQ ID NO: 901767 - DNA, 25 bp, Homo sapien
acatccttggtgtaataaatgatgg

SEQ ID NO: 901768 - DNA, 25 bp, Homo sapien
ctctcacaaatgctggagagctctt

SEQ ID NO: 901769 - DNA, 25 bp, Homo sapien
gaaccgtttccatgaagctgtgcct

SEQ ID NO: 901770 - DNA, 25 bp, Homo sapien
tgggcagaaggatggtacaccataa

SEQ ID NO: 901771 - DNA, 25 bp, Homo sapien
gctgttgactcctctattagttgga

SEQ ID NO: 901772 - DNA, 25 bp, Homo sapien
tagttggagacaagagcctttgggc

SEQ ID NO: 901773 - DNA, 25 bp, Homo sapien
gaatgtcataaatgcctttgggagg

SEQ ID NO: 901774 - DNA, 25 bp, Homo sapien
gctggaggtgttgccctcagatgct

SEQ ID NO: 901775 - DNA, 25 bp, Homo sapien
ctatcccatggcctagcttagtgcc

SEQ ID NO: 901776 - DNA, 25 bp, Homo sapien
gcttagtgcctaataggtggatgct

SEQ ID NO: 901777 - DNA, 25 bp, Homo sapien
taactttcttcaagccgtacacgtc

SEQ ID NO: 901778 - DNA, 25 bp, Homo sapien
taagcagccgacatgttatattgaa

SEQ ID NO: 901779 - DNA, 25 bp, Homo sapien
ccctgctctcattatgggagtaacc

SEQ ID NO: 901780 - DNA, 25 bp, Homo sapien
agtaacctaggtagctaagcagccg

SEQ ID NO: 901781 - DNA, 25 bp, Homo sapien
gtcagattgggttcgctctgggctt

SEQ ID NO: 901782 - DNA, 25 bp, Homo sapien
catatctatggagacaatggcatgg

SEQ ID NO: 901783 - DNA, 25 bp, Homo sapien
gtaagtagctcctgtctcttgatat

SEQ ID NO: 901784 - DNA, 25 bp, Homo sapien
gaccaaaatgagtcctgagtttcag

SEQ ID NO: 901785 - DNA, 25 bp, Homo sapien
tagtcttttagaatatgcttccatt

SEQ ID NO: 901786 - DNA, 25 bp, Homo sapien
ttagaatatgcttccattgggtagc

SEQ ID NO: 901787 - DNA, 25 bp, Homo sapien
ctcaggaatcagaaatactatgtaa

SEQ ID NO: 901788 - DNA, 25 bp, Homo sapien
tgcttccattgggtagcaccttcaa

SEQ ID NO: 901789 - DNA, 25 bp, Homo sapien
tcttggctagtgtagaatacgtccc

SEQ ID NO: 901790 - DNA, 25 bp, Homo sapien
ggctagtgtagaatacgtcccattg

SEQ ID NO: 901791 - DNA, 25 bp, Homo sapien
gaatacgtcccattggaagcaacag

SEQ ID NO: 901792 - DNA, 25 bp, Homo sapien
tgtagaatacgtcccattggaagca

SEQ ID NO: 901793 - DNA, 25 bp, Homo sapien
tttgtgatttgtctcaggcatatga

SEQ ID NO: 901794 - DNA, 25 bp, Homo sapien
ttgtgatttgtctcaggcatatgag

SEQ ID NO: 901795 - DNA, 25 bp, Homo sapien
atgagagagcttcttcttaccccag

SEQ ID NO: 901796 - DNA, 25 bp, Homo sapien
gagagcttcttcttaccccagtatc

SEQ ID NO: 901797 - DNA, 25 bp, Homo sapien
ggtaaatggatcttatcagagtctg

SEQ ID NO: 901798 - DNA, 25 bp, Homo sapien
caatctccaagtggtaaatggatct

SEQ ID NO: 901799 - DNA, 25 bp, Homo sapien
ccaagtggtaaatggatcttatcag

SEQ ID NO: 901800 - DNA, 25 bp, Homo sapien
gtcaatctccaagtggtaaatggat

SEQ ID NO: 901801 - DNA, 25 bp, Homo sapien
gatatctgcgatctcatcctttcca

SEQ ID NO: 901802 - DNA, 25 bp, Homo sapien
gctctgctcttgatatgataaaacc

SEQ ID NO: 901803 - DNA, 25 bp, Homo sapien
gatgaaagatgatatctgcgatctc

SEQ ID NO: 901804 - DNA, 25 bp, Homo sapien
tgtcagcattatgaaagctcggctc

SEQ ID NO: 901805 - DNA, 25 bp, Homo sapien
tttcaaagccatgaatcctttccac

SEQ ID NO: 901806 - DNA, 25 bp, Homo sapien
atcatccacacttagccaatattta

SEQ ID NO: 901807 - DNA, 25 bp, Homo sapien
gacatcatccacacttagccaatat

SEQ ID NO: 901808 - DNA, 25 bp, Homo sapien
ggacatcatccacacttagccaata

SEQ ID NO: 901809 - DNA, 25 bp, Homo sapien
agtccagaaagcatgacattccttg

SEQ ID NO: 901810 - DNA, 25 bp, Homo sapien
gcgctgaaccactttcacagtccag

SEQ ID NO: 901811 - DNA, 25 bp, Homo sapien
gacattccttgttaccagtgggagg

SEQ ID NO: 901812 - DNA, 25 bp, Homo sapien
ggaaaggctaattgagaagtgtgta

SEQ ID NO: 901813 - DNA, 25 bp, Homo sapien
aattttccccacgtcgattggcacg

SEQ ID NO: 901814 - DNA, 25 bp, Homo sapien
cccacgtcgattggcacggctcaga

SEQ ID NO: 901815 - DNA, 25 bp, Homo sapien
tttccccacgtcgattggcacggct

SEQ ID NO: 901816 - DNA, 25 bp, Homo sapien
cgattggcacggctcagattcccgc

SEQ ID NO: 901817 - DNA, 25 bp, Homo sapien
tcgctgccatcaagggagtgttctt

SEQ ID NO: 901818 - DNA, 25 bp, Homo sapien
tgctgtaacggctcacaagggccga

SEQ ID NO: 901819 - DNA, 25 bp, Homo sapien
taatacttcagggagccatttgcaa

SEQ ID NO: 901820 - DNA, 25 bp, Homo sapien
tttttgactgcctgaactgaccgag

SEQ ID NO: 901821 - DNA, 25 bp, Homo sapien
aacacattttcaggactgccttttt

SEQ ID NO: 901822 - DNA, 25 bp, Homo sapien
tctggaacacattttcaggactgcc

SEQ ID NO: 901823 - DNA, 25 bp, Homo sapien
gaacacattttcaggactgcctttt

SEQ ID NO: 901824 - DNA, 25 bp, Homo sapien
tggaacacattttcaggactgcctt

SEQ ID NO: 901825 - DNA, 25 bp, Homo sapien
tgtccaagggtatattcttcttcca

SEQ ID NO: 901826 - DNA, 25 bp, Homo sapien
gagtatttgatctatggtagcctcc

SEQ ID NO: 901827 - DNA, 25 bp, Homo sapien
cagggcattagacacactgcaggaa

SEQ ID NO: 901828 - DNA, 25 bp, Homo sapien
cctggaggagtatttgatctatggt

SEQ ID NO: 901829 - DNA, 25 bp, Homo sapien
cattagtccagaagtcgctgggacc

SEQ ID NO: 901830 - DNA, 25 bp, Homo sapien
tccctgttgagctgatgtagctctt

SEQ ID NO: 901831 - DNA, 25 bp, Homo sapien
tgtcgtgcagagatttctatgatgc

SEQ ID NO: 901832 - DNA, 25 bp, Homo sapien
gagcttcacatagtttgtcgtgcag

SEQ ID NO: 901833 - DNA, 25 bp, Homo sapien
tacacaaagatatataaccgctttt

SEQ ID NO: 901834 - DNA, 25 bp, Homo sapien
ccaagaagaggtattagacaaaagc

SEQ ID NO: 901835 - DNA, 25 bp, Homo sapien
acaaaagctcccctgcatctaagca

SEQ ID NO: 901836 - DNA, 25 bp, Homo sapien
aatccattcttcaacgctcatccaa

SEQ ID NO: 901837 - DNA, 25 bp, Homo sapien
tgcagctcctaggtgatcattcttg

SEQ ID NO: 901838 - DNA, 25 bp, Homo sapien
cacatccttcggagaaccttttcca

SEQ ID NO: 901839 - DNA, 25 bp, Homo sapien
tttgtagtaagcaaaccacatcctt

SEQ ID NO: 901840 - DNA, 25 bp, Homo sapien
aatccatgtagtacattgcagctcc

SEQ ID NO: 901841 - DNA, 25 bp, Homo sapien
tctggcctgacgtaatggttgtgac

SEQ ID NO: 901842 - DNA, 25 bp, Homo sapien
gatacaggcttaactggagtggtgc

SEQ ID NO: 901843 - DNA, 25 bp, Homo sapien
gacagtggaaaattgctagcacaat

SEQ ID NO: 901844 - DNA, 25 bp, Homo sapien
tgaatgctgtacagctgcgcccatg

SEQ ID NO: 901845 - DNA, 25 bp, Homo sapien
ttggaccaatgaggcaacactaggg

SEQ ID NO: 901846 - DNA, 25 bp, Homo sapien
ttccaaaatatgcttcctggatcat

SEQ ID NO: 901847 - DNA, 25 bp, Homo sapien
ttttccagaaagatagggagagcct

SEQ ID NO: 901848 - DNA, 25 bp, Homo sapien
catctgatgaattcccatttgctcc

SEQ ID NO: 901849 - DNA, 25 bp, Homo sapien
tgtgaaataagtgagttctgtgccc

SEQ ID NO: 901850 - DNA, 25 bp, Homo sapien
aagtgagttctgtgccctctcgtac

SEQ ID NO: 901851 - DNA, 25 bp, Homo sapien
gaaataagtgagttctgtgccctct

SEQ ID NO: 901852 - DNA, 25 bp, Homo sapien
aataagtgagttctgtgccctctcg

SEQ ID NO: 901853 - DNA, 25 bp, Homo sapien
gtaccatccatcatcagctacactg

SEQ ID NO: 901854 - DNA, 25 bp, Homo sapien
catcagctacactgggtctctccat

SEQ ID NO: 901855 - DNA, 25 bp, Homo sapien
tggcctctgatgactgtaagcaagc

SEQ ID NO: 901856 - DNA, 25 bp, Homo sapien
gggctttggcctctgatgactgtaa

SEQ ID NO: 901857 - DNA, 25 bp, Homo sapien
cattgtgatgcttgggcctgctgct

SEQ ID NO: 901858 - DNA, 25 bp, Homo sapien
gtgtatgatgtattgctaatgtgca

SEQ ID NO: 901859 - DNA, 25 bp, Homo sapien
tgtagccatcgagggcaaggtcagc

SEQ ID NO: 901860 - DNA, 25 bp, Homo sapien
cctttctgagcattttgggtgatgc

SEQ ID NO: 901861 - DNA, 25 bp, Homo sapien
gagcctgttctgtagtacattatcc

SEQ ID NO: 901862 - DNA, 25 bp, Homo sapien
ttgaagcgggtgtcactgaggcact

SEQ ID NO: 901863 - DNA, 25 bp, Homo sapien
agtacattatccttgaagcgggtgt

SEQ ID NO: 901864 - DNA, 25 bp, Homo sapien
ctggagagcctgttctgtagtacat

SEQ ID NO: 901865 - DNA, 25 bp, Homo sapien
gcagcagccgcgactggagttttat

SEQ ID NO: 901866 - DNA, 25 bp, Homo sapien
tattgtataagccacattcagaagg

SEQ ID NO: 901867 - DNA, 25 bp, Homo sapien
tatgaaaccgtgaaaggtgtgccac

SEQ ID NO: 901868 - DNA, 25 bp, Homo sapien
tggtaacatgaagacacagtgctat

SEQ ID NO: 901869 - DNA, 25 bp, Homo sapien
cacagattgcctacaatataggatt

SEQ ID NO: 901870 - DNA, 25 bp, Homo sapien
gaaatgaaaagggtgttatcacaga

SEQ ID NO: 901871 - DNA, 25 bp, Homo sapien
tttatctgtgttctgcatgagttgt

SEQ ID NO: 901872 - DNA, 25 bp, Homo sapien
taatgttagtggtaattttatggga

SEQ ID NO: 901873 - DNA, 25 bp, Homo sapien
tatggcccatgtcgtttgcctgaac

SEQ ID NO: 901874 - DNA, 25 bp, Homo sapien
tcagaagtagttatggcccatgtcg

SEQ ID NO: 901875 - DNA, 25 bp, Homo sapien
tgaactaatgcacatgctaaaggca

SEQ ID NO: 901876 - DNA, 25 bp, Homo sapien
aaggaatcttctgatttgggatcaa

SEQ ID NO: 901877 - DNA, 25 bp, Homo sapien
tgtcctcctcttgtgttttccgggc

SEQ ID NO: 901878 - DNA, 25 bp, Homo sapien
ttccgggcttctggttgtgaaatca

SEQ ID NO: 901879 - DNA, 25 bp, Homo sapien
tatcaatccatctgcgtggttgtcc

SEQ ID NO: 901880 - DNA, 25 bp, Homo sapien
tattcggcgcagagaaaggcattgc

SEQ ID NO: 901881 - DNA, 25 bp, Homo sapien
tccaatcgagagcatcatttgatga

SEQ ID NO: 901882 - DNA, 25 bp, Homo sapien
tgtcttctttccaatcgagagcatc

SEQ ID NO: 901883 - DNA, 25 bp, Homo sapien
tgtcacttgatgcaaacacatgtgg

SEQ ID NO: 901884 - DNA, 25 bp, Homo sapien
catgtgggggaaaatgagcctgtac

SEQ ID NO: 901885 - DNA, 25 bp, Homo sapien
tatattgtcctggtggaaaatttca

SEQ ID NO: 901886 - DNA, 25 bp, Homo sapien
cttgtccgcatcttgagcaagcttg

SEQ ID NO: 901887 - DNA, 25 bp, Homo sapien
cttgtgatgatatattgtcctggtg

SEQ ID NO: 901888 - DNA, 25 bp, Homo sapien
cttgagcaagcttgtaagtttccag

SEQ ID NO: 901889 - DNA, 25 bp, Homo sapien
atgtgaatgaaagctgtggatcttc

SEQ ID NO: 901890 - DNA, 25 bp, Homo sapien
tctctctaggccctggttgttcttg

SEQ ID NO: 901891 - DNA, 25 bp, Homo sapien
tttgaatcgcagtctttgagatgtg

SEQ ID NO: 901892 - DNA, 25 bp, Homo sapien
catttctcgtgttgatggaactctc

SEQ ID NO: 901893 - DNA, 25 bp, Homo sapien
gagctttctcaggccacagtttaac

SEQ ID NO: 901894 - DNA, 25 bp, Homo sapien
gctttctcaggccacagtttaactg

SEQ ID NO: 901895 - DNA, 25 bp, Homo sapien
aggagctttctcaggccacagttta

SEQ ID NO: 901896 - DNA, 25 bp, Homo sapien
ggagctttctcaggccacagtttaa

SEQ ID NO: 901897 - DNA, 25 bp, Homo sapien
aatctgcaggcattaaagcgtgggc

SEQ ID NO: 901898 - DNA, 25 bp, Homo sapien
agagagggccgcatcagcagtgcca

SEQ ID NO: 901899 - DNA, 25 bp, Homo sapien
gtgggctctcgcagcactgaaggac

SEQ ID NO: 901900 - DNA, 25 bp, Homo sapien
acaaaagctggatcgagagagggcc

SEQ ID NO: 901901 - DNA, 25 bp, Homo sapien
cagtgaccgtgatcttgactgtgca

SEQ ID NO: 901902 - DNA, 25 bp, Homo sapien
tggaaaacagtgaccgtgatcttga

SEQ ID NO: 901903 - DNA, 25 bp, Homo sapien
gcacgcatcttatcatctgcaccca

SEQ ID NO: 901904 - DNA, 25 bp, Homo sapien
atcttgactgtgcagcccacccaaa

SEQ ID NO: 901905 - DNA, 25 bp, Homo sapien
cctgtccgcccaatttctatctgaa

SEQ ID NO: 901906 - DNA, 25 bp, Homo sapien
acatgccgcgagtgtgtggctatcc

SEQ ID NO: 901907 - DNA, 25 bp, Homo sapien
tgttgcctctgatccatccctgtgt

SEQ ID NO: 901908 - DNA, 25 bp, Homo sapien
tgttgtttctctcatgctcctcaga

SEQ ID NO: 901909 - DNA, 25 bp, Homo sapien
gcaagctccttatcacagcatctca

SEQ ID NO: 901910 - DNA, 25 bp, Homo sapien
cttgagaagccaccaggaaccaatg

SEQ ID NO: 901911 - DNA, 25 bp, Homo sapien
gaaccaatgtcacgcttccagcatc

SEQ ID NO: 901912 - DNA, 25 bp, Homo sapien
atccgcaagctccttatcacagcat

SEQ ID NO: 901913 - DNA, 25 bp, Homo sapien
tccatgcagaagatatgaaaacggt

SEQ ID NO: 901914 - DNA, 25 bp, Homo sapien
agtccatgcagaagatatgaaaacg

SEQ ID NO: 901915 - DNA, 25 bp, Homo sapien
gtccatgcagaagatatgaaaacgg

SEQ ID NO: 901916 - DNA, 25 bp, Homo sapien
tggaaaagacccagtgtcctaggcc

SEQ ID NO: 901917 - DNA, 25 bp, Homo sapien
gagtaaaactgcatcggaatcccac

SEQ ID NO: 901918 - DNA, 25 bp, Homo sapien
gagctagacctacgggactttcaag

SEQ ID NO: 901919 - DNA, 25 bp, Homo sapien
ggaatcccacctctgttgcgcagtg

SEQ ID NO: 901920 - DNA, 25 bp, Homo sapien
ttgccactccagtgagttacatcgg

SEQ ID NO: 901921 - DNA, 25 bp, Homo sapien
agtgagttacatcggcccaggcccg

SEQ ID NO: 901922 - DNA, 25 bp, Homo sapien
tcataatgtcgggttacagctgtag

SEQ ID NO: 901923 - DNA, 25 bp, Homo sapien
aaggaagctggctttacgctgatcc

SEQ ID NO: 901924 - DNA, 25 bp, Homo sapien
aattgcattttcagatagtatcttc

SEQ ID NO: 901925 - DNA, 25 bp, Homo sapien
tattcaggtacttttcaacagggta

SEQ ID NO: 901926 - DNA, 25 bp, Homo sapien
tgtttgcagtgaagtattcaggtac

SEQ ID NO: 901927 - DNA, 25 bp, Homo sapien
ttcaacagggtagttaacatcctta

SEQ ID NO: 901928 - DNA, 25 bp, Homo sapien
gatcttctatggtgatctgtgggca

SEQ ID NO: 901929 - DNA, 25 bp, Homo sapien
cgtatcatacccataaaaggtggca

SEQ ID NO: 901930 - DNA, 25 bp, Homo sapien
tctattccctgaggcactacaatgt

SEQ ID NO: 901931 - DNA, 25 bp, Homo sapien
tctttgcaagtagggcagtttttac

SEQ ID NO: 901932 - DNA, 25 bp, Homo sapien
agtatgccaagagccaacagtcatg

SEQ ID NO: 901933 - DNA, 25 bp, Homo sapien
gccaagagccaacagtcatgttcct

SEQ ID NO: 901934 - DNA, 25 bp, Homo sapien
tatgccaagagccaacagtcatgtt

SEQ ID NO: 901935 - DNA, 25 bp, Homo sapien
ttagtatgccaagagccaacagtca

SEQ ID NO: 901936 - DNA, 25 bp, Homo sapien
gtcagattctggctgggtgaaccca

SEQ ID NO: 901937 - DNA, 25 bp, Homo sapien
ccaaacagcggaatattgaggacat

SEQ ID NO: 901938 - DNA, 25 bp, Homo sapien
acattttcaggtggcagtcagattc

SEQ ID NO: 901939 - DNA, 25 bp, Homo sapien
tcttattactgcagcaatgccgtct

SEQ ID NO: 901940 - DNA, 25 bp, Homo sapien
ttaaagctgcagcagtgtggaaact

SEQ ID NO: 901941 - DNA, 25 bp, Homo sapien
taaagctgcagcagtgtggaaactc

SEQ ID NO: 901942 - DNA, 25 bp, Homo sapien
acatttagccccaagagacataccc

SEQ ID NO: 901943 - DNA, 25 bp, Homo sapien
tgcccctttcaagtaggcagtaggg

SEQ ID NO: 901944 - DNA, 25 bp, Homo sapien
gagaagcagttagccctaaaggaga

SEQ ID NO: 901945 - DNA, 25 bp, Homo sapien
aactttaacacagtccccacaggag

SEQ ID NO: 901946 - DNA, 25 bp, Homo sapien
ccttggaagacaatccatctcttat

SEQ ID NO: 901947 - DNA, 25 bp, Homo sapien
ggaagacaatccatctcttataatg

SEQ ID NO: 901948 - DNA, 25 bp, Homo sapien
ccatctcttataatgatgagaatat

SEQ ID NO: 901949 - DNA, 25 bp, Homo sapien
caatccatctcttataatgatgaga

SEQ ID NO: 901950 - DNA, 25 bp, Homo sapien
ctccttcccatccttccttatccat

SEQ ID NO: 901951 - DNA, 25 bp, Homo sapien
catttgttccactaaagtctggaga

SEQ ID NO: 901952 - DNA, 25 bp, Homo sapien
aatacttgcaattggtttggatcaa

SEQ ID NO: 901953 - DNA, 25 bp, Homo sapien
tctggagaaaggaattttattggtc

SEQ ID NO: 901954 - DNA, 25 bp, Homo sapien
attggtcgtggctcataaaataata

SEQ ID NO: 901955 - DNA, 25 bp, Homo sapien
tgtaccggcagttcggagacagtat

SEQ ID NO: 901956 - DNA, 25 bp, Homo sapien
gaaatgcaaacatggcaattgacag

SEQ ID NO: 901957 - DNA, 25 bp, Homo sapien
ccaatgggcagtgtctgtaccggca

SEQ ID NO: 901958 - DNA, 25 bp, Homo sapien
cggagacagtatttcccaagcagtc

SEQ ID NO: 901959 - DNA, 25 bp, Homo sapien
tttctctttaggctgatgagtgaga

SEQ ID NO: 901960 - DNA, 25 bp, Homo sapien
catggtggtaatctgggataagaca

SEQ ID NO: 901961 - DNA, 25 bp, Homo sapien
ctttaggctgatgagtgagaatttt

SEQ ID NO: 901962 - DNA, 25 bp, Homo sapien
attttaaatcccatggtggtaatct

SEQ ID NO: 901963 - DNA, 25 bp, Homo sapien
cttctcccctcaaacaagaaagtgg

SEQ ID NO: 901964 - DNA, 25 bp, Homo sapien
tgagagcacggaggccataaattcc

SEQ ID NO: 901965 - DNA, 25 bp, Homo sapien
tccatttctactggctttggtttcc

SEQ ID NO: 901966 - DNA, 25 bp, Homo sapien
tggaacacctgcctcgctcgatgtc

SEQ ID NO: 901967 - DNA, 25 bp, Homo sapien
tcttcaaagccctctctggtgttgt

SEQ ID NO: 901968 - DNA, 25 bp, Homo sapien
ctttcatgagttcttttgaggccca

SEQ ID NO: 901969 - DNA, 25 bp, Homo sapien
gatgctctcgaccagtcaggttgag

SEQ ID NO: 901970 - DNA, 25 bp, Homo sapien
gagagaccagcggataagaatagca

SEQ ID NO: 901971 - DNA, 25 bp, Homo sapien
tgaatatattaaacaccctggcagt

SEQ ID NO: 901972 - DNA, 25 bp, Homo sapien
agcaagcctgtgagagccagtagga

SEQ ID NO: 901973 - DNA, 25 bp, Homo sapien
ccaagaaagcctttacagtgtgctg

SEQ ID NO: 901974 - DNA, 25 bp, Homo sapien
gatataccgcataacacacagaaga

SEQ ID NO: 901975 - DNA, 25 bp, Homo sapien
tttcacctaagtccgaggaatgagg

SEQ ID NO: 901976 - DNA, 25 bp, Homo sapien
gagtttccatagttctcagcccaga

SEQ ID NO: 901977 - DNA, 25 bp, Homo sapien
tactgaaattgatgggctattgcgc

SEQ ID NO: 901978 - DNA, 25 bp, Homo sapien
gagaatggctttgctacaggcagga

SEQ ID NO: 901979 - DNA, 25 bp, Homo sapien
ctgacacgctcaagatactggacaa

SEQ ID NO: 901980 - DNA, 25 bp, Homo sapien
tccatctaaacctgacacgctcaag

SEQ ID NO: 901981 - DNA, 25 bp, Homo sapien
aaacctgacacgctcaagatactgg

SEQ ID NO: 901982 - DNA, 25 bp, Homo sapien
ctgacacttccatctaaacctgaca

SEQ ID NO: 901983 - DNA, 25 bp, Homo sapien
tgtaaagacattctagtaacccctg

SEQ ID NO: 901984 - DNA, 25 bp, Homo sapien
gggtatgcatgtatctctaagcatg

SEQ ID NO: 901985 - DNA, 25 bp, Homo sapien
tgggagaaacccatggtgggtgccc

SEQ ID NO: 901986 - DNA, 25 bp, Homo sapien
atggacgccctgacaccagaggcgg

SEQ ID NO: 901987 - DNA, 25 bp, Homo sapien
cagtcctccggcataagggttgagg

SEQ ID NO: 901988 - DNA, 25 bp, Homo sapien
ccacagtcctccggcataagggttg

SEQ ID NO: 901989 - DNA, 25 bp, Homo sapien
tgccacagtcctccggcataagggt

SEQ ID NO: 901990 - DNA, 25 bp, Homo sapien
acagtcctccggcataagggttgag

SEQ ID NO: 901991 - DNA, 25 bp, Homo sapien
taagagcccttggtcaacacggaac

SEQ ID NO: 901992 - DNA, 25 bp, Homo sapien
taacaacctgatgcacgaccaatgc

SEQ ID NO: 901993 - DNA, 25 bp, Homo sapien
ttcagagtgcagcatagccatggcc

SEQ ID NO: 901994 - DNA, 25 bp, Homo sapien
gcaacccagtgtgtttgtaaggcca

SEQ ID NO: 901995 - DNA, 25 bp, Homo sapien
gttaaattagggagtacagactcca

SEQ ID NO: 901996 - DNA, 25 bp, Homo sapien
ttaattcgcgaccaaaggcttctgc

SEQ ID NO: 901997 - DNA, 25 bp, Homo sapien
ggtagctgtgtgaattagtgcccca

SEQ ID NO: 901998 - DNA, 25 bp, Homo sapien
tacttgatggaagattgctccccgg

SEQ ID NO: 901999 - DNA, 25 bp, Homo sapien
tagactagaaacacacccagccttt

SEQ ID NO: 902000 - DNA, 25 bp, Homo sapien
gcagaacatagggactggaatgcca

SEQ ID NO: 902001 - DNA, 25 bp, Homo sapien
catggttactgatacgctaggatta

SEQ ID NO: 902002 - DNA, 25 bp, Homo sapien
agttggcgttataattgactacacc

SEQ ID NO: 902003 - DNA, 25 bp, Homo sapien
caaggcttgacagacttaatgaggg

SEQ ID NO: 902004 - DNA, 25 bp, Homo sapien
cagagcaggcaattcaagagagcaa

SEQ ID NO: 902005 - DNA, 25 bp, Homo sapien
cagtttttgaagctaggaggtccaa

SEQ ID NO: 902006 - DNA, 25 bp, Homo sapien
cagagcctctcgtgaagttacattc

SEQ ID NO: 902007 - DNA, 25 bp, Homo sapien
ttttacgtttacttgcagcgaggct

SEQ ID NO: 902008 - DNA, 25 bp, Homo sapien
cagcgaggctttttacttcacttcc

SEQ ID NO: 902009 - DNA, 25 bp, Homo sapien
caatgtcccagtaactctgcccaag

SEQ ID NO: 902010 - DNA, 25 bp, Homo sapien
gctatccccttagaaagccggtgga

SEQ ID NO: 902011 - DNA, 25 bp, Homo sapien
ttcccatgttcctgtgctgtccggc

SEQ ID NO: 902012 - DNA, 25 bp, Homo sapien
tgtgtttgcctcgttgctgactccg

SEQ ID NO: 902013 - DNA, 25 bp, Homo sapien
gggtggcaaattcccaagtccatcc

SEQ ID NO: 902014 - DNA, 25 bp, Homo sapien
tgactccgttttgatcccctcttgt

SEQ ID NO: 902015 - DNA, 25 bp, Homo sapien
gatcgcagaaagagaaatcggtcac

SEQ ID NO: 902016 - DNA, 25 bp, Homo sapien
gaagcgtgctatgctctgaagctgc

SEQ ID NO: 902017 - DNA, 25 bp, Homo sapien
tattttggacctacagactgtgctg

SEQ ID NO: 902018 - DNA, 25 bp, Homo sapien
taatgtgcccagcaaacgtgcactg

SEQ ID NO: 902019 - DNA, 25 bp, Homo sapien
gaattcctacttcctggttttgagc

SEQ ID NO: 902020 - DNA, 25 bp, Homo sapien
ttctctcaagtgtaagaattcctac

SEQ ID NO: 902021 - DNA, 25 bp, Homo sapien
ccgatgatttccaaaaccaagtcct

SEQ ID NO: 902022 - DNA, 25 bp, Homo sapien
cgatgatttccaaaaccaagtcctg

SEQ ID NO: 902023 - DNA, 25 bp, Homo sapien
aataaaagtggtctcaaaatcagga

SEQ ID NO: 902024 - DNA, 25 bp, Homo sapien
ggagcacatcccttcctaaaaatag

SEQ ID NO: 902025 - DNA, 25 bp, Homo sapien
gctcaatggagcacatcccttccta

SEQ ID NO: 902026 - DNA, 25 bp, Homo sapien
tcaaaatcaggagctcaatggagca

SEQ ID NO: 902027 - DNA, 25 bp, Homo sapien
atgaacaaattcattctagatgatg

SEQ ID NO: 902028 - DNA, 25 bp, Homo sapien
aaatgaacaaattcattctagatga

SEQ ID NO: 902029 - DNA, 25 bp, Homo sapien
gaacaaattcattctagatgatgaa

SEQ ID NO: 902030 - DNA, 25 bp, Homo sapien
aaggaaagcatctttagatcttgaa

SEQ ID NO: 902031 - DNA, 25 bp, Homo sapien
cccaatttcttgttttgcccagaat

SEQ ID NO: 902032 - DNA, 25 bp, Homo sapien
ccaatttcttgttttgcccagaatc

SEQ ID NO: 902033 - DNA, 25 bp, Homo sapien
aaatcaccgcaagcgaaaggctccg

SEQ ID NO: 902034 - DNA, 25 bp, Homo sapien
taatagtgactaccagatgccctct

SEQ ID NO: 902035 - DNA, 25 bp, Homo sapien
tttaatagtttaccaaagcgcgcga

SEQ ID NO: 902036 - DNA, 25 bp, Homo sapien
gcgcgaatgtaaaacccagaccatg

SEQ ID NO: 902037 - DNA, 25 bp, Homo sapien
ccagaatgcagagttgctaaaggaa

SEQ ID NO: 902038 - DNA, 25 bp, Homo sapien
tctactttcacaacattaacctcag

SEQ ID NO: 902039 - DNA, 25 bp, Homo sapien
aacagtccagaatgcagagttgcta

SEQ ID NO: 902040 - DNA, 25 bp, Homo sapien
caagtcctgatccacgtagatagct

SEQ ID NO: 902041 - DNA, 25 bp, Homo sapien
cttgtctgtgatgatgcgtacgttg

SEQ ID NO: 902042 - DNA, 25 bp, Homo sapien
gcgtacgttgctctgccgcctgtgg

SEQ ID NO: 902043 - DNA, 25 bp, Homo sapien
ctctctccagttcttgtctgtgatg

SEQ ID NO: 902044 - DNA, 25 bp, Homo sapien
tgtgatgatgcgtacgttgctctgc

SEQ ID NO: 902045 - DNA, 25 bp, Homo sapien
tggactccattgaggatatggacct

SEQ ID NO: 902046 - DNA, 25 bp, Homo sapien
tggccagtgtgaagagtatgtgctc

SEQ ID NO: 902047 - DNA, 25 bp, Homo sapien
tcactccaccgtcccatgttgtaga

SEQ ID NO: 902048 - DNA, 25 bp, Homo sapien
tagcaagagccatagtgggatagat

SEQ ID NO: 902049 - DNA, 25 bp, Homo sapien
tgttccatgaacatgagcctctgta

SEQ ID NO: 902050 - DNA, 25 bp, Homo sapien
tctcttgccttgcctcacatgttgt

SEQ ID NO: 902051 - DNA, 25 bp, Homo sapien
aaagagcttactggccttgggtctc

SEQ ID NO: 902052 - DNA, 25 bp, Homo sapien
gcctctgtactagaaccaagaatga

SEQ ID NO: 902053 - DNA, 25 bp, Homo sapien
ttagtttctagcaggatccctggtg

SEQ ID NO: 902054 - DNA, 25 bp, Homo sapien
cctggtgcatagttctaataacagt

SEQ ID NO: 902055 - DNA, 25 bp, Homo sapien
tccctggtgcatagttctaataaca

SEQ ID NO: 902056 - DNA, 25 bp, Homo sapien
gtttctagcaggatccctggtgcat

SEQ ID NO: 902057 - DNA, 25 bp, Homo sapien
taatgtgccctttgcttagacctca

SEQ ID NO: 902058 - DNA, 25 bp, Homo sapien
gctcgtgcaccctgataagttagca

SEQ ID NO: 902059 - DNA, 25 bp, Homo sapien
agttagcacgtgtttcattccttgg

SEQ ID NO: 902060 - DNA, 25 bp, Homo sapien
gttgagttagttcaaggccactagg

SEQ ID NO: 902061 - DNA, 25 bp, Homo sapien
tcacacatgagcagattatgcgacc

SEQ ID NO: 902062 - DNA, 25 bp, Homo sapien
caaactagcagagcaatacgagtcg

SEQ ID NO: 902063 - DNA, 25 bp, Homo sapien
cctccggcaagctagaacaatatgt

SEQ ID NO: 902064 - DNA, 25 bp, Homo sapien
tatgcgaccatgtgggacaagccca

SEQ ID NO: 902065 - DNA, 25 bp, Homo sapien
cttgaggagagttcgtgatcagcct

SEQ ID NO: 902066 - DNA, 25 bp, Homo sapien
gggactgttcaccaggcacaaaata

SEQ ID NO: 902067 - DNA, 25 bp, Homo sapien
ttcaccaggcacaaaataggaatca

SEQ ID NO: 902068 - DNA, 25 bp, Homo sapien
atcgcttgaggagagttcgtgatca

SEQ ID NO: 902069 - DNA, 25 bp, Homo sapien
taagcactctatggatgttagctca

SEQ ID NO: 902070 - DNA, 25 bp, Homo sapien
caatggagacttattcgttgaaccg

SEQ ID NO: 902071 - DNA, 25 bp, Homo sapien
tgtaaccccaggcaaagtgaatgcc

SEQ ID NO: 902072 - DNA, 25 bp, Homo sapien
gttacacctaattaccatgtgccag

SEQ ID NO: 902073 - DNA, 25 bp, Homo sapien
gataatgctcataactctaataaat

SEQ ID NO: 902074 - DNA, 25 bp, Homo sapien
tcatgaatcttatagataatgctca

SEQ ID NO: 902075 - DNA, 25 bp, Homo sapien
caccaagtcatggtgtcatgaatct

SEQ ID NO: 902076 - DNA, 25 bp, Homo sapien
gctgttcccagatgtatagttaata

SEQ ID NO: 902077 - DNA, 25 bp, Homo sapien
cacctttcgtccacggcgcccaagt

SEQ ID NO: 902078 - DNA, 25 bp, Homo sapien
tcagttggcctcgtccgaaggtcac

SEQ ID NO: 902079 - DNA, 25 bp, Homo sapien
tcaccccgcacctttcgtccacggc

SEQ ID NO: 902080 - DNA, 25 bp, Homo sapien
gtctcagttggcctcgtccgaaggt

SEQ ID NO: 902081 - DNA, 25 bp, Homo sapien
cactgtactaggcaaataataggca

SEQ ID NO: 902082 - DNA, 25 bp, Homo sapien
taaagtgtaaaggaagcatataacc

SEQ ID NO: 902083 - DNA, 25 bp, Homo sapien
aaaagtccatttatcgtcagtaaag

SEQ ID NO: 902084 - DNA, 25 bp, Homo sapien
gacagtgtggtatagtgacatgagc

SEQ ID NO: 902085 - DNA, 25 bp, Homo sapien
taggaatttgataacggagatgcat

SEQ ID NO: 902086 - DNA, 25 bp, Homo sapien
gagatgcatcaggttgagtttgaca

SEQ ID NO: 902087 - DNA, 25 bp, Homo sapien
gaccacaggaggacgaataggaatt

SEQ ID NO: 902088 - DNA, 25 bp, Homo sapien
gaaagctttccataagtgaccacag

SEQ ID NO: 902089 - DNA, 25 bp, Homo sapien
caaaattatctctggtgaaaggcta

SEQ ID NO: 902090 - DNA, 25 bp, Homo sapien
caggaggttgtaggcagatcataaa

SEQ ID NO: 902091 - DNA, 25 bp, Homo sapien
gatttgcctttagacagacttggac

SEQ ID NO: 902092 - DNA, 25 bp, Homo sapien
gacttggaccattctcaacttcaga

SEQ ID NO: 902093 - DNA, 25 bp, Homo sapien
ctaacctttgtgtaaggtcattctt

SEQ ID NO: 902094 - DNA, 25 bp, Homo sapien
gtgccacccgtgagaattatctttt

SEQ ID NO: 902095 - DNA, 25 bp, Homo sapien
ttttctgtgccacccgtgagaatta

SEQ ID NO: 902096 - DNA, 25 bp, Homo sapien
ttgtgtaaggtcattcttactagtt

SEQ ID NO: 902097 - DNA, 25 bp, Homo sapien
tgatgtatttaggaacaccagcaac

SEQ ID NO: 902098 - DNA, 25 bp, Homo sapien
tcaaaacaatatctagaccagggct

SEQ ID NO: 902099 - DNA, 25 bp, Homo sapien
tagctgtgacatgattataactgcc

SEQ ID NO: 902100 - DNA, 25 bp, Homo sapien
gcactttggaaaaacatccttggaa

SEQ ID NO: 902101 - DNA, 25 bp, Homo sapien
gaaagcttcaagtctaggcactgga

SEQ ID NO: 902102 - DNA, 25 bp, Homo sapien
cacagtggaaatggcttggctctgc

SEQ ID NO: 902103 - DNA, 25 bp, Homo sapien
gatagtcacaaagtctcacctaggt

SEQ ID NO: 902104 - DNA, 25 bp, Homo sapien
tgaaggcttgttcgcacatgtctgg

SEQ ID NO: 902105 - DNA, 25 bp, Homo sapien
tactgggagtattccaataattaca

SEQ ID NO: 902106 - DNA, 25 bp, Homo sapien
tcctgtcctagctagttagccagag

SEQ ID NO: 902107 - DNA, 25 bp, Homo sapien
tttagtcagaatcgagacctcctgt

SEQ ID NO: 902108 - DNA, 25 bp, Homo sapien
tagtcactgtacgttatatgtttca

SEQ ID NO: 902109 - DNA, 25 bp, Homo sapien
tgccatgtgcggaattcaagttacc

SEQ ID NO: 902110 - DNA, 25 bp, Homo sapien
ttaacatcaagccatcaaacctggg

SEQ ID NO: 902111 - DNA, 25 bp, Homo sapien
accaatgtaacactggccagcgggc

SEQ ID NO: 902112 - DNA, 25 bp, Homo sapien
taggctgatgccactacccgatttg

SEQ ID NO: 902113 - DNA, 25 bp, Homo sapien
gatggggatatggagcataaggacc

SEQ ID NO: 902114 - DNA, 25 bp, Homo sapien
tatctggagttcctgccaggaagat

SEQ ID NO: 902115 - DNA, 25 bp, Homo sapien
gtatctttcatcaatatctggagtt

SEQ ID NO: 902116 - DNA, 25 bp, Homo sapien
caggaagatggggatatggagcata

SEQ ID NO: 902117 - DNA, 25 bp, Homo sapien
atactacatctaggtgaatgctcat

SEQ ID NO: 902118 - DNA, 25 bp, Homo sapien
tctgatactacatctaggtgaatgc

SEQ ID NO: 902119 - DNA, 25 bp, Homo sapien
tgatactacatctaggtgaatgctc

SEQ ID NO: 902120 - DNA, 25 bp, Homo sapien
ttctgatactacatctaggtgaatg

SEQ ID NO: 902121 - DNA, 25 bp, Homo sapien
tgtcctcactattcccaaagacaag

SEQ ID NO: 902122 - DNA, 25 bp, Homo sapien
ccctgtctcttacattccctctgtc

SEQ ID NO: 902123 - DNA, 25 bp, Homo sapien
gtctcttacattccctctgtcctca

SEQ ID NO: 902124 - DNA, 25 bp, Homo sapien
tttactgtaatctgctgtaaaatgg

SEQ ID NO: 902125 - DNA, 25 bp, Homo sapien
gtgcacaaattatagtttgatgaaa

SEQ ID NO: 902126 - DNA, 25 bp, Homo sapien
gacccagattaagatatagagaaac

SEQ ID NO: 902127 - DNA, 25 bp, Homo sapien
tacctatatatttgacccagattaa

SEQ ID NO: 902128 - DNA, 25 bp, Homo sapien
tgaaagtgcacaaattatagtttga

SEQ ID NO: 902129 - DNA, 25 bp, Homo sapien
gacaaagccctggagattcatgatc

SEQ ID NO: 902130 - DNA, 25 bp, Homo sapien
catgattcatgatcatggacggtac

SEQ ID NO: 902131 - DNA, 25 bp, Homo sapien
tgatcatggacggtactgctcccac

SEQ ID NO: 902132 - DNA, 25 bp, Homo sapien
gatcaggtggtgattcatgattcat

SEQ ID NO: 902133 - DNA, 25 bp, Homo sapien
gattaggaggaaatcgaacattcat

SEQ ID NO: 902134 - DNA, 25 bp, Homo sapien
ttcatggtcaccctcatttgttgag

SEQ ID NO: 902135 - DNA, 25 bp, Homo sapien
tcaccctcatttgttgagctcctgc

SEQ ID NO: 902136 - DNA, 25 bp, Homo sapien
aaaaggcagtgcactgatctcatcc

SEQ ID NO: 902137 - DNA, 25 bp, Homo sapien
cacatgaggaacatttactgagctc

SEQ ID NO: 902138 - DNA, 25 bp, Homo sapien
cccacatgaggaacatttactgagc

SEQ ID NO: 902139 - DNA, 25 bp, Homo sapien
catgaggaacatttactgagctctg

SEQ ID NO: 902140 - DNA, 25 bp, Homo sapien
atgaggaacatttactgagctctgc

SEQ ID NO: 902141 - DNA, 25 bp, Homo sapien
gaacagagcacctttactaggaaca

SEQ ID NO: 902142 - DNA, 25 bp, Homo sapien
acagagcacctttactaggaacatg

SEQ ID NO: 902143 - DNA, 25 bp, Homo sapien
aacagagcacctttactaggaacat

SEQ ID NO: 902144 - DNA, 25 bp, Homo sapien
tgaacagagcacctttactaggaac

SEQ ID NO: 902145 - DNA, 25 bp, Homo sapien
tgttgtatagatgcaagttgggcat

SEQ ID NO: 902146 - DNA, 25 bp, Homo sapien
ccaagtatcagaggcatctgttgtt

SEQ ID NO: 902147 - DNA, 25 bp, Homo sapien
tttgttgtatagatgcaagttgggc

SEQ ID NO: 902148 - DNA, 25 bp, Homo sapien
tgtctctctttagccaagtatcaga

SEQ ID NO: 902149 - DNA, 25 bp, Homo sapien
cacagtaacttgtgccaggtactga

SEQ ID NO: 902150 - DNA, 25 bp, Homo sapien
ccacagtaacttgtgccaggtactg

SEQ ID NO: 902151 - DNA, 25 bp, Homo sapien
agaggagccgaagctagccaggaag

SEQ ID NO: 902152 - DNA, 25 bp, Homo sapien
agccgaagctagccaggaagagagt

SEQ ID NO: 902153 - DNA, 25 bp, Homo sapien
ctgctgcacgaacatggccagtgtc

SEQ ID NO: 902154 - DNA, 25 bp, Homo sapien
gtatgtcatatcatgacatactgct

SEQ ID NO: 902155 - DNA, 25 bp, Homo sapien
gctgctgcacgaacatggccagtgt

SEQ ID NO: 902156 - DNA, 25 bp, Homo sapien
tgtcatatcatgacatactgctgct

SEQ ID NO: 902157 - DNA, 25 bp, Homo sapien
tcagaaactccagaaagtcaattgt

SEQ ID NO: 902158 - DNA, 25 bp, Homo sapien
ctattaaacatgtagaatgctttcc

SEQ ID NO: 902159 - DNA, 25 bp, Homo sapien
gcattttccttacttttattgtcag

SEQ ID NO: 902160 - DNA, 25 bp, Homo sapien
gtagaatgctttcctaatttctctt

SEQ ID NO: 902161 - DNA, 25 bp, Homo sapien
ggccagcactggtccagggcgcgtg

SEQ ID NO: 902162 - DNA, 25 bp, Homo sapien
ccagcactggtccagggcgcgtgca

SEQ ID NO: 902163 - DNA, 25 bp, Homo sapien
cagcactggtccagggcgcgtgcag

SEQ ID NO: 902164 - DNA, 25 bp, Homo sapien
agggccagcactggtccagggcgcg

SEQ ID NO: 902165 - DNA, 25 bp, Homo sapien
ctaggaaagccttagtgttgggagg

SEQ ID NO: 902166 - DNA, 25 bp, Homo sapien
gcgatgactgaggggcctggtagct

SEQ ID NO: 902167 - DNA, 25 bp, Homo sapien
ggagggactgcgatgactgaggggc

SEQ ID NO: 902168 - DNA, 25 bp, Homo sapien
aaagccttagtgttgggagggactg

SEQ ID NO: 902169 - DNA, 25 bp, Homo sapien
tcaggtctcttgcaccacaaggtgg

SEQ ID NO: 902170 - DNA, 25 bp, Homo sapien
tttcaggtctcttgcaccacaaggt

SEQ ID NO: 902171 - DNA, 25 bp, Homo sapien
gaggaaacaggtcgccttggaaggc

SEQ ID NO: 902172 - DNA, 25 bp, Homo sapien
tcgccttggaaggcgtccctgggcc

SEQ ID NO: 902173 - DNA, 25 bp, Homo sapien
aggaggaagcatccgagtatgtgta

SEQ ID NO: 902174 - DNA, 25 bp, Homo sapien
gtgggaccatagactttgccaaaaa

SEQ ID NO: 902175 - DNA, 25 bp, Homo sapien
tccgagtatgtgtaggaggaggacg

SEQ ID NO: 902176 - DNA, 25 bp, Homo sapien
gacggggtgggaccatagactttgc

SEQ ID NO: 902177 - DNA, 25 bp, Homo sapien
actcaggatccagcaaggggcggca

SEQ ID NO: 902178 - DNA, 25 bp, Homo sapien
acccgggggactcaggatccagcaa

SEQ ID NO: 902179 - DNA, 25 bp, Homo sapien
gaatgacaggtgcaaataccttccc

SEQ ID NO: 902180 - DNA, 25 bp, Homo sapien
ggcggcaggagtaaaggaagaagga

SEQ ID NO: 902181 - DNA, 25 bp, Homo sapien
agtgtcagtggtgctaaagccgtca

SEQ ID NO: 902182 - DNA, 25 bp, Homo sapien
atcagtgtcagtggtgctaaagccg

SEQ ID NO: 902183 - DNA, 25 bp, Homo sapien
ctggccatgtgctgggaatgagcag

SEQ ID NO: 902184 - DNA, 25 bp, Homo sapien
tcgtcactcgctatgacctcgctgg

SEQ ID NO: 902185 - DNA, 25 bp, Homo sapien
cttaggtgggcagcagcagggctgc

SEQ ID NO: 902186 - DNA, 25 bp, Homo sapien
agcagcagggctgcccactggtcac

SEQ ID NO: 902187 - DNA, 25 bp, Homo sapien
gcagcagcagggctgcccactggtc

SEQ ID NO: 902188 - DNA, 25 bp, Homo sapien
gggcagcagcagggctgcccactgg

SEQ ID NO: 902189 - DNA, 25 bp, Homo sapien
ctgtagtgcccgatggtctatttcc

SEQ ID NO: 902190 - DNA, 25 bp, Homo sapien
gtgtcagttcctgtagtgcccgatg

SEQ ID NO: 902191 - DNA, 25 bp, Homo sapien
agtgcccgtctgtgatatgctctgc

SEQ ID NO: 902192 - DNA, 25 bp, Homo sapien
tgcccgtctgtgatatgctctgctc

SEQ ID NO: 902193 - DNA, 25 bp, Homo sapien
cttgttgcaagtgggccaccttcac

SEQ ID NO: 902194 - DNA, 25 bp, Homo sapien
ccaggtcgtggtacttctgcgtctc

SEQ ID NO: 902195 - DNA, 25 bp, Homo sapien
gaaggccaggtcgtggtacttctgc

SEQ ID NO: 902196 - DNA, 25 bp, Homo sapien
ggccaggtcgtggtacttctgcgtc

SEQ ID NO: 902197 - DNA, 25 bp, Homo sapien
aaggccaggtcgtggtacttctgcg

SEQ ID NO: 902198 - DNA, 25 bp, Homo sapien
tgccaggatctggtgccacttgctg

SEQ ID NO: 902199 - DNA, 25 bp, Homo sapien
ccctgccaggatctggtgccacttg

SEQ ID NO: 902200 - DNA, 25 bp, Homo sapien
aggatctggtgccacttgctgaaga

SEQ ID NO: 902201 - DNA, 25 bp, Homo sapien
ccaggatctggtgccacttgctgaa

SEQ ID NO: 902202 - DNA, 25 bp, Homo sapien
caggtggatccagggggctgccgaa

SEQ ID NO: 902203 - DNA, 25 bp, Homo sapien
cagggggctgccgaaggtcagcact

SEQ ID NO: 902204 - DNA, 25 bp, Homo sapien
ggctgccgaaggtcagcactccctg

SEQ ID NO: 902205 - DNA, 25 bp, Homo sapien
gatccagggggctgccgaaggtcag

SEQ ID NO: 902206 - DNA, 25 bp, Homo sapien
cactcgtgagcaacagctgctgact

SEQ ID NO: 902207 - DNA, 25 bp, Homo sapien
ctgctgacttggcaggttctttgct

SEQ ID NO: 902208 - DNA, 25 bp, Homo sapien
tcgtgagcaacagctgctgacttgg

SEQ ID NO: 902209 - DNA, 25 bp, Homo sapien
tggacactcgtgagcaacagctgct

SEQ ID NO: 902210 - DNA, 25 bp, Homo sapien
gttggaggccactgagtgactggca

SEQ ID NO: 902211 - DNA, 25 bp, Homo sapien
tggttggaggccactgagtgactgg

SEQ ID NO: 902212 - DNA, 25 bp, Homo sapien
ctggttggaggccactgagtgactg

SEQ ID NO: 902213 - DNA, 25 bp, Homo sapien
tggaggccactgagtgactggcagg

SEQ ID NO: 902214 - DNA, 25 bp, Homo sapien
gaggcctcgctggacgcagacatca

SEQ ID NO: 902215 - DNA, 25 bp, Homo sapien
ctcgctggacgcagacatcaggggc

SEQ ID NO: 902216 - DNA, 25 bp, Homo sapien
cagagcaaggttccacgttcctcca

SEQ ID NO: 902217 - DNA, 25 bp, Homo sapien
agcaaggttccacgttcctccacac

SEQ ID NO: 902218 - DNA, 25 bp, Homo sapien
aattccatacttgggcacagtaagc

SEQ ID NO: 902219 - DNA, 25 bp, Homo sapien
gcaattccatacttgggcacagtaa

SEQ ID NO: 902220 - DNA, 25 bp, Homo sapien
ctgcaattccatacttgggcacagt

SEQ ID NO: 902221 - DNA, 25 bp, Homo sapien
cacagtaagcacagaatcagagatg

SEQ ID NO: 902222 - DNA, 25 bp, Homo sapien
cttcttgccaacaactgcagctctg

SEQ ID NO: 902223 - DNA, 25 bp, Homo sapien
gcagctctggggtgagtacttctag

SEQ ID NO: 902224 - DNA, 25 bp, Homo sapien
ctggggtgagtacttctagctggaa

SEQ ID NO: 902225 - DNA, 25 bp, Homo sapien
gtcttcttgccaacaactgcagctc

SEQ ID NO: 902226 - DNA, 25 bp, Homo sapien
gaagagtacaaacatcaacagtctt

SEQ ID NO: 902227 - DNA, 25 bp, Homo sapien
aaagtgtgatctggtagtccacaag

SEQ ID NO: 902228 - DNA, 25 bp, Homo sapien
aaacatcaacagtcttgtccccagg

SEQ ID NO: 902229 - DNA, 25 bp, Homo sapien
tagtccacaagcttcccatgagcat

SEQ ID NO: 902230 - DNA, 25 bp, Homo sapien
cacgtaagagtacagaaatctgcag

SEQ ID NO: 902231 - DNA, 25 bp, Homo sapien
gagaccttcttgtcggagattcgat

SEQ ID NO: 902232 - DNA, 25 bp, Homo sapien
agaggctcggcggtgccctcggatg

SEQ ID NO: 902233 - DNA, 25 bp, Homo sapien
cgcggcccgggctgacgctttgaca

SEQ ID NO: 902234 - DNA, 25 bp, Homo sapien
cagatgacggcaatattgatgaggc

SEQ ID NO: 902235 - DNA, 25 bp, Homo sapien
tgttcttaaagctgggcgcatatac

SEQ ID NO: 902236 - DNA, 25 bp, Homo sapien
taataagaggtaccaccatcaccag

SEQ ID NO: 902237 - DNA, 25 bp, Homo sapien
tcagacccaagctgcacaggtgtaa

SEQ ID NO: 902238 - DNA, 25 bp, Homo sapien
catccaccaggataagatcatttaa

SEQ ID NO: 902239 - DNA, 25 bp, Homo sapien
cccatcctggtatatgcaagagaaa

SEQ ID NO: 902240 - DNA, 25 bp, Homo sapien
aaggcatcttttactcccatcctgg

SEQ ID NO: 902241 - DNA, 25 bp, Homo sapien
ttcactgagtactccgctccactgg

SEQ ID NO: 902242 - DNA, 25 bp, Homo sapien
tacaacaagatctcttcatgaactt

SEQ ID NO: 902243 - DNA, 25 bp, Homo sapien
cattttcaccttttattaaggcaag

SEQ ID NO: 902244 - DNA, 25 bp, Homo sapien
aatgctctttccttgtctcaaattc

SEQ ID NO: 902245 - DNA, 25 bp, Homo sapien
gaaaatagtaatgaaagattttgaa

SEQ ID NO: 902246 - DNA, 25 bp, Homo sapien
aacccagttccagcctcgaggaagt

SEQ ID NO: 902247 - DNA, 25 bp, Homo sapien
atcaacccagttccagcctcgagga

SEQ ID NO: 902248 - DNA, 25 bp, Homo sapien
agcctcgaggaagttctcctttgtg

SEQ ID NO: 902249 - DNA, 25 bp, Homo sapien
gttccagcctcgaggaagttctcct

SEQ ID NO: 902250 - DNA, 25 bp, Homo sapien
gatggggctgtattaggagtttcaa

SEQ ID NO: 902251 - DNA, 25 bp, Homo sapien
atgggattgtgattctccatgaact

SEQ ID NO: 902252 - DNA, 25 bp, Homo sapien
gctgtattaggagtttcaattgaga

SEQ ID NO: 902253 - DNA, 25 bp, Homo sapien
caattgagatgatattgcttatcga

SEQ ID NO: 902254 - DNA, 25 bp, Homo sapien
aaaaaagcgttcatagatagaattg

SEQ ID NO: 902255 - DNA, 25 bp, Homo sapien
cgttcatagatagaattggaggtgt

SEQ ID NO: 902256 - DNA, 25 bp, Homo sapien
gcgttcatagatagaattggaggtg

SEQ ID NO: 902257 - DNA, 25 bp, Homo sapien
aaagcgttcatagatagaattggag

SEQ ID NO: 902258 - DNA, 25 bp, Homo sapien
aaggctttgggatcaccattttcac

SEQ ID NO: 902259 - DNA, 25 bp, Homo sapien
attaagaaggctttgggatcaccat

SEQ ID NO: 902260 - DNA, 25 bp, Homo sapien
agaaggctttgggatcaccattttc

SEQ ID NO: 902261 - DNA, 25 bp, Homo sapien
taagaaggctttgggatcaccattt

SEQ ID NO: 902262 - DNA, 25 bp, Homo sapien
aatagagcgtaatgcttctagttcc

SEQ ID NO: 902263 - DNA, 25 bp, Homo sapien
taaatagagcgtaatgcttctagtt

SEQ ID NO: 902264 - DNA, 25 bp, Homo sapien
tagagcgtaatgcttctagttccat

SEQ ID NO: 902265 - DNA, 25 bp, Homo sapien
cataaatagagcgtaatgcttctag

SEQ ID NO: 902266 - DNA, 25 bp, Homo sapien
tcttggcactggcagacgccaactg

SEQ ID NO: 902267 - DNA, 25 bp, Homo sapien
gacggcgttcgcaacaacgaagaga

SEQ ID NO: 902268 - DNA, 25 bp, Homo sapien
gcctcctgagcggacggcgttcgca

SEQ ID NO: 902269 - DNA, 25 bp, Homo sapien
ttggcactggcagacgccaactgcg

SEQ ID NO: 902270 - DNA, 25 bp, Homo sapien
actgccatgaccactgatacctcac

SEQ ID NO: 902271 - DNA, 25 bp, Homo sapien
actgcctcagccacgtccactgcca

SEQ ID NO: 902272 - DNA, 25 bp, Homo sapien
acgtccactgccatgaccactgata

SEQ ID NO: 902273 - DNA, 25 bp, Homo sapien
agccacgtccactgccatgaccact

SEQ ID NO: 902274 - DNA, 25 bp, Homo sapien
aggataatttgcaccttggatttca

SEQ ID NO: 902275 - DNA, 25 bp, Homo sapien
gcaccttggatttcagatgctgata

SEQ ID NO: 902276 - DNA, 25 bp, Homo sapien
gatttcagatgctgataactggttt

SEQ ID NO: 902277 - DNA, 25 bp, Homo sapien
taatttgcaccttggatttcagatg

SEQ ID NO: 902278 - DNA, 25 bp, Homo sapien
tagttatgtctaccacactgtttat

SEQ ID NO: 902279 - DNA, 25 bp, Homo sapien
caaacacagttatgatgaacagaga

SEQ ID NO: 902280 - DNA, 25 bp, Homo sapien
ggatgtcacataaatgacagtgtag

SEQ ID NO: 902281 - DNA, 25 bp, Homo sapien
cccagaggggtcattatcccaatca

SEQ ID NO: 902282 - DNA, 25 bp, Homo sapien
taggaagtcagatcctgagagtcct

SEQ ID NO: 902283 - DNA, 25 bp, Homo sapien
tacttaagcctcataatggtgacaa

SEQ ID NO: 902284 - DNA, 25 bp, Homo sapien
ccaatttcttaagcagtaagttatt

SEQ ID NO: 902285 - DNA, 25 bp, Homo sapien
tcttttcctccagatggaatagtag

SEQ ID NO: 902286 - DNA, 25 bp, Homo sapien
cttgtaaggaagtcccaatctctcc

SEQ ID NO: 902287 - DNA, 25 bp, Homo sapien
caggaaaggctgaacacgaaggccc

SEQ ID NO: 902288 - DNA, 25 bp, Homo sapien
tgggccgagctgcagaagtctctcc

SEQ ID NO: 902289 - DNA, 25 bp, Homo sapien
gtctctcctctaagatctgttggca

SEQ ID NO: 902290 - DNA, 25 bp, Homo sapien
ttaggagaccagacgagctccaccg

SEQ ID NO: 902291 - DNA, 25 bp, Homo sapien
agacgagctccaccgagcaagaggc

SEQ ID NO: 902292 - DNA, 25 bp, Homo sapien
tggtgttaggagaccagacgagctc

SEQ ID NO: 902293 - DNA, 25 bp, Homo sapien
agcaagaggccaaggtccaagggta

SEQ ID NO: 902294 - DNA, 25 bp, Homo sapien
catttttattccgcagcaagtcttt

SEQ ID NO: 902295 - DNA, 25 bp, Homo sapien
ttttattccgcagcaagtctttcat

SEQ ID NO: 902296 - DNA, 25 bp, Homo sapien
tatatggctatgtttggcaacccca

SEQ ID NO: 902297 - DNA, 25 bp, Homo sapien
taggaggctggctacaggaccttca

SEQ ID NO: 902298 - DNA, 25 bp, Homo sapien
cacgtgggcaggtatcttgagctca

SEQ ID NO: 902299 - DNA, 25 bp, Homo sapien
tattagtgtttccaaccacgtgggc

SEQ ID NO: 902300 - DNA, 25 bp, Homo sapien
tttctctgagcgtgaattgcgggcg

SEQ ID NO: 902301 - DNA, 25 bp, Homo sapien
gacctttcgctcaacaggcaggcag

SEQ ID NO: 902302 - DNA, 25 bp, Homo sapien
tcgaactttggcgtacgtgagacaa

SEQ ID NO: 902303 - DNA, 25 bp, Homo sapien
gaagccgagcggtttctacatcatg

SEQ ID NO: 902304 - DNA, 25 bp, Homo sapien
aggagccgccttcggcctacaagga

SEQ ID NO: 902305 - DNA, 25 bp, Homo sapien
gcagccggactaagtcgtccaagga

SEQ ID NO: 902306 - DNA, 25 bp, Homo sapien
agtagcagccgcaaggaccgggact

SEQ ID NO: 902307 - DNA, 25 bp, Homo sapien
caagaccgagcctaaggcctacagg

SEQ ID NO: 902308 - DNA, 25 bp, Homo sapien
ttagtgagaggaaccgaaaatggta

SEQ ID NO: 902309 - DNA, 25 bp, Homo sapien
aagtaccaagctaaaatcagaagca

SEQ ID NO: 902310 - DNA, 25 bp, Homo sapien
ggtaaatgatctacacgcctccctg

SEQ ID NO: 902311 - DNA, 25 bp, Homo sapien
aaaaccagttggaagtgaatgttgc

SEQ ID NO: 902312 - DNA, 25 bp, Homo sapien
catagagtagcctagcatagtgcat

SEQ ID NO: 902313 - DNA, 25 bp, Homo sapien
gatgctgcctgtctatggactacac

SEQ ID NO: 902314 - DNA, 25 bp, Homo sapien
gagattttggccgtaactggaagga

SEQ ID NO: 902315 - DNA, 25 bp, Homo sapien
tctgacaagctcacaattggtgctg

SEQ ID NO: 902316 - DNA, 25 bp, Homo sapien
tggaatagatatgtttcagaaaagc

SEQ ID NO: 902317 - DNA, 25 bp, Homo sapien
tatggaatggaaaacagctaattac

SEQ ID NO: 902318 - DNA, 25 bp, Homo sapien
gaaattttgagtttagagaaccaga

SEQ ID NO: 902319 - DNA, 25 bp, Homo sapien
tccctgttgccctgctggattgatg

SEQ ID NO: 902320 - DNA, 25 bp, Homo sapien
caaatggtgactgcttcaatacagc

SEQ ID NO: 902321 - DNA, 25 bp, Homo sapien
cccctgtgcacaattaagattattt

SEQ ID NO: 902322 - DNA, 25 bp, Homo sapien
tttaaccataccaccaagtcaaatg

SEQ ID NO: 902323 - DNA, 25 bp, Homo sapien
tttgagcagttgttgcttacccctg

SEQ ID NO: 902324 - DNA, 25 bp, Homo sapien
atatattaatagaggaaggaactcc

SEQ ID NO: 902325 - DNA, 25 bp, Homo sapien
tccaaaacgttgaaatactataggc

SEQ ID NO: 902326 - DNA, 25 bp, Homo sapien
ttacatatgctaaaaaatcctggat

SEQ ID NO: 902327 - DNA, 25 bp, Homo sapien
gaagaatagttgtcttagaccacac

SEQ ID NO: 902328 - DNA, 25 bp, Homo sapien
tctggtcttgggtttattcacacat

SEQ ID NO: 902329 - DNA, 25 bp, Homo sapien
aacaacaaattagctagtcattgga

SEQ ID NO: 902330 - DNA, 25 bp, Homo sapien
attagctagtcattggagggtgagc

SEQ ID NO: 902331 - DNA, 25 bp, Homo sapien
tagtctactagtttaacttcatatg

SEQ ID NO: 902332 - DNA, 25 bp, Homo sapien
cttctctttatagttaagaaaactg

SEQ ID NO: 902333 - DNA, 25 bp, Homo sapien
gctaggtgttaccttaggatctaaa

SEQ ID NO: 902334 - DNA, 25 bp, Homo sapien
tcgtccagggtcataaaactagcaa

SEQ ID NO: 902335 - DNA, 25 bp, Homo sapien
tgaaccttagagaggtgaagaattc

SEQ ID NO: 902336 - DNA, 25 bp, Homo sapien
gagccgagattgctctgccgcgctc

SEQ ID NO: 902337 - DNA, 25 bp, Homo sapien
cctcaggaggctgaaacacaataat

SEQ ID NO: 902338 - DNA, 25 bp, Homo sapien
gtgagccgagattgctctgccgcgc

SEQ ID NO: 902339 - DNA, 25 bp, Homo sapien
caggaggctgaaacacaataattgc

SEQ ID NO: 902340 - DNA, 25 bp, Homo sapien
tacgtgtccacttcagactacaagg

SEQ ID NO: 902341 - DNA, 25 bp, Homo sapien
tagattatcggacagaaaaccagca

SEQ ID NO: 902342 - DNA, 25 bp, Homo sapien
taactgaccctcatgccggagtgaa

SEQ ID NO: 902343 - DNA, 25 bp, Homo sapien
ttatcaagcaggagacacttacgtg

SEQ ID NO: 902344 - DNA, 25 bp, Homo sapien
tattagcacatcaactggcagaggc

SEQ ID NO: 902345 - DNA, 25 bp, Homo sapien
gagagtactcatcctttgccagcaa

SEQ ID NO: 902346 - DNA, 25 bp, Homo sapien
gcccaaggacctggatattcacaag

SEQ ID NO: 902347 - DNA, 25 bp, Homo sapien
ttacaggaaaatccgagtggcccca

SEQ ID NO: 902348 - DNA, 25 bp, Homo sapien
gatccaaatcgctctagggaaaagt

SEQ ID NO: 902349 - DNA, 25 bp, Homo sapien
gccaggtcttttattaactattcag

SEQ ID NO: 902350 - DNA, 25 bp, Homo sapien
tattgctttatagaggaaccatact

SEQ ID NO: 902351 - DNA, 25 bp, Homo sapien
tggattactagtgaagtccaacact

SEQ ID NO: 902352 - DNA, 25 bp, Homo sapien
gtcaccacttatattgtaaagctga

SEQ ID NO: 902353 - DNA, 25 bp, Homo sapien
tttgttgcttttagatatggactcc

SEQ ID NO: 902354 - DNA, 25 bp, Homo sapien
gatatggactcctcgtattataata

SEQ ID NO: 902355 - DNA, 25 bp, Homo sapien
taaagctgattcttaattgttgttg

SEQ ID NO: 902356 - DNA, 25 bp, Homo sapien
ttttacaatctgataaccgaggcag

SEQ ID NO: 902357 - DNA, 25 bp, Homo sapien
gatccaagactcaccacttagtgcc

SEQ ID NO: 902358 - DNA, 25 bp, Homo sapien
ccgaggcagctacaagtgactaatg

SEQ ID NO: 902359 - DNA, 25 bp, Homo sapien
tagtaccgaaccctgcataatactg

SEQ ID NO: 902360 - DNA, 25 bp, Homo sapien
agtcctttttcatgccagtgtaaca

SEQ ID NO: 902361 - DNA, 25 bp, Homo sapien
taacagatgcagcaaaagacaacgt

SEQ ID NO: 902362 - DNA, 25 bp, Homo sapien
caaaagacaacgtacagagactcca

SEQ ID NO: 902363 - DNA, 25 bp, Homo sapien
caagctcagggccaataaattcagg

SEQ ID NO: 902364 - DNA, 25 bp, Homo sapien
ctatatctaaagcatgttaccttca

SEQ ID NO: 902365 - DNA, 25 bp, Homo sapien
tcatgttgtatcaaatggctctaat

SEQ ID NO: 902366 - DNA, 25 bp, Homo sapien
tgaagcttgtatctccctgaaccca

SEQ ID NO: 902367 - DNA, 25 bp, Homo sapien
tttggttgacttgaaatacatatcc

SEQ ID NO: 902368 - DNA, 25 bp, Homo sapien
gagaagcggggggaagacgagaaca

SEQ ID NO: 902369 - DNA, 25 bp, Homo sapien
tgagaagcggggggaagacgagaac

SEQ ID NO: 902370 - DNA, 25 bp, Homo sapien
cagtgagaagcggggggaagacgag

SEQ ID NO: 902371 - DNA, 25 bp, Homo sapien
gtgagaagcggggggaagacgagaa

SEQ ID NO: 902372 - DNA, 25 bp, Homo sapien
tagaacctaataataaatgtactgg

SEQ ID NO: 902373 - DNA, 25 bp, Homo sapien
tactggcaagggttaatgaaaatgt

SEQ ID NO: 902374 - DNA, 25 bp, Homo sapien
gagaaatggttgagtgacaatagca

SEQ ID NO: 902375 - DNA, 25 bp, Homo sapien
ggagactttggcctatgtaaaacaa

SEQ ID NO: 902376 - DNA, 25 bp, Homo sapien
tatgcctgcatatcccttagaaagt

SEQ ID NO: 902377 - DNA, 25 bp, Homo sapien
taaaggatttacatgggcactgcga

SEQ ID NO: 902378 - DNA, 25 bp, Homo sapien
gaccagtgattaccaaaaggcagca

SEQ ID NO: 902379 - DNA, 25 bp, Homo sapien
gaactggcatgatcccttgatatgg

SEQ ID NO: 902380 - DNA, 25 bp, Homo sapien
tgtggtaggtacttccagagctaaa

SEQ ID NO: 902381 - DNA, 25 bp, Homo sapien
tgttcctgacacatgaagcttccag

SEQ ID NO: 902382 - DNA, 25 bp, Homo sapien
cagagctaaatgttgcaagttatcc

SEQ ID NO: 902383 - DNA, 25 bp, Homo sapien
tgtccattatgtaaccaggaatgtt

SEQ ID NO: 902384 - DNA, 25 bp, Homo sapien
ggcttatatccactacagatactgg

SEQ ID NO: 902385 - DNA, 25 bp, Homo sapien
ttgcctgtgaatgtttgagtattgc

SEQ ID NO: 902386 - DNA, 25 bp, Homo sapien
tgagtattgctgtattgttggctta

SEQ ID NO: 902387 - DNA, 25 bp, Homo sapien
tattgttggcttatatccactacag

SEQ ID NO: 902388 - DNA, 25 bp, Homo sapien
ggatcttcaagcattgaaggcttga

SEQ ID NO: 902389 - DNA, 25 bp, Homo sapien
tttttctctaacacgccctgatcca

SEQ ID NO: 902390 - DNA, 25 bp, Homo sapien
ccctgatccaaatggtgtagatgtc

SEQ ID NO: 902391 - DNA, 25 bp, Homo sapien
gcccaaggatcttcaagcattgaag

SEQ ID NO: 902392 - DNA, 25 bp, Homo sapien
acacttagtaaagataattggtact

SEQ ID NO: 902393 - DNA, 25 bp, Homo sapien
agttgtgacttgaacctaaataatg

SEQ ID NO: 902394 - DNA, 25 bp, Homo sapien
aggttagcgggaatcacattgctgc

SEQ ID NO: 902395 - DNA, 25 bp, Homo sapien
gcttcctttaatcaagtgttcctat

SEQ ID NO: 902396 - DNA, 25 bp, Homo sapien
tttgtatttactctcactaaaggaa

SEQ ID NO: 902397 - DNA, 25 bp, Homo sapien
gaatacagcaagttggaaaaccacg

SEQ ID NO: 902398 - DNA, 25 bp, Homo sapien
cagaaatcccagacatgctagagat

SEQ ID NO: 902399 - DNA, 25 bp, Homo sapien
cacgtagttgcaagttgtaaaccac

SEQ ID NO: 902400 - DNA, 25 bp, Homo sapien
tgcctgccataaagtaagagctcgg

SEQ ID NO: 902401 - DNA, 25 bp, Homo sapien
gggaatattagtaccgtgcctgcca

SEQ ID NO: 902402 - DNA, 25 bp, Homo sapien
tattggttaaaagcacgagggctcg

SEQ ID NO: 902403 - DNA, 25 bp, Homo sapien
cgagggctcgaaaacagaacgtacg

SEQ ID NO: 902404 - DNA, 25 bp, Homo sapien
agtagccgaattgctgctgggaccc

SEQ ID NO: 902405 - DNA, 25 bp, Homo sapien
tggagtaggagccagggtagccgcc

SEQ ID NO: 902406 - DNA, 25 bp, Homo sapien
cgtacggcggcgtgtggtgcggact

SEQ ID NO: 902407 - DNA, 25 bp, Homo sapien
gagagtgactgctcccgtacggcct

SEQ ID NO: 902408 - DNA, 25 bp, Homo sapien
ttgggggccgaaaattctgtcgctg

SEQ ID NO: 902409 - DNA, 25 bp, Homo sapien
ccggaagctgcttccgctaccccaa

SEQ ID NO: 902410 - DNA, 25 bp, Homo sapien
ggggccgaaaattctgtcgctgcat

SEQ ID NO: 902411 - DNA, 25 bp, Homo sapien
aagctgcttccgctaccccaacctc

SEQ ID NO: 902412 - DNA, 25 bp, Homo sapien
cgaaaacctcgcagccgcgttctcc

SEQ ID NO: 902413 - DNA, 25 bp, Homo sapien
ccaaagccgaaaacctcgcagccgc

SEQ ID NO: 902414 - DNA, 25 bp, Homo sapien
aagccgaaaacctcgcagccgcgtt

SEQ ID NO: 902415 - DNA, 25 bp, Homo sapien
gaaaacctcgcagccgcgttctccc

SEQ ID NO: 902416 - DNA, 25 bp, Homo sapien
cggaactgtatcaaccggccctccg

SEQ ID NO: 902417 - DNA, 25 bp, Homo sapien
gagaactgctagtcctttaccaaaa

SEQ ID NO: 902418 - DNA, 25 bp, Homo sapien
taccaaaacagtcctccgaccgcag

SEQ ID NO: 902419 - DNA, 25 bp, Homo sapien
cggccctccgcagagaactgctagt

SEQ ID NO: 902420 - DNA, 25 bp, Homo sapien
tcagttccggcgtcacaaaggttcc

SEQ ID NO: 902421 - DNA, 25 bp, Homo sapien
ctgacttggcgagagactcagtgga

SEQ ID NO: 902422 - DNA, 25 bp, Homo sapien
gagacaggaaaggacggacacccaa

SEQ ID NO: 902423 - DNA, 25 bp, Homo sapien
ggcggcgggattacctaaatcactg

SEQ ID NO: 902424 - DNA, 25 bp, Homo sapien
accgggaccgatgccatctgagacg

SEQ ID NO: 902425 - DNA, 25 bp, Homo sapien
ggtggcagctctgcgcagaacctgc

SEQ ID NO: 902426 - DNA, 25 bp, Homo sapien
agacgcacgcgatgctggcgacgct

SEQ ID NO: 902427 - DNA, 25 bp, Homo sapien
ggagttcgccgcttgcaccgggacc

SEQ ID NO: 902428 - DNA, 25 bp, Homo sapien
agtcaggtaccctccgagattcggt

SEQ ID NO: 902429 - DNA, 25 bp, Homo sapien
taccctccgagattcggtctgggtg

SEQ ID NO: 902430 - DNA, 25 bp, Homo sapien
ccgagattcggtctgggtggctaaa

SEQ ID NO: 902431 - DNA, 25 bp, Homo sapien
tggactggccgcccgcagtcaggta

SEQ ID NO: 902432 - DNA, 25 bp, Homo sapien
ccttagcggtggctttgctcgcctc

SEQ ID NO: 902433 - DNA, 25 bp, Homo sapien
ggtggctttgctcgcctccctgcaa

SEQ ID NO: 902434 - DNA, 25 bp, Homo sapien
cccttagcggtggctttgctcgcct

SEQ ID NO: 902435 - DNA, 25 bp, Homo sapien
tagcggtggctttgctcgcctccct

SEQ ID NO: 902436 - DNA, 25 bp, Homo sapien
tgtgaccgagggctccgtgcgccgt

SEQ ID NO: 902437 - DNA, 25 bp, Homo sapien
tactcctgtcctttcgtccgccaag

SEQ ID NO: 902438 - DNA, 25 bp, Homo sapien
taagtaacttcgaaaatgcacacca

SEQ ID NO: 902439 - DNA, 25 bp, Homo sapien
tgtcccgtgcgttgttgtgaccgag

SEQ ID NO: 902440 - DNA, 25 bp, Homo sapien
gcagctttggcaagcatagaattga

SEQ ID NO: 902441 - DNA, 25 bp, Homo sapien
ggcaagcatagaattgatggcagct

SEQ ID NO: 902442 - DNA, 25 bp, Homo sapien
ctttgcatggttgaccagctgtatc

SEQ ID NO: 902443 - DNA, 25 bp, Homo sapien
gctgtatcatcataatagctttcca

SEQ ID NO: 902444 - DNA, 25 bp, Homo sapien
ctgggcgtggtggcgtgtgcctgta

SEQ ID NO: 902445 - DNA, 25 bp, Homo sapien
gaggcatgtgaatcgcctgaacccg

SEQ ID NO: 902446 - DNA, 25 bp, Homo sapien
tcctggccaatatggcgataccccg

SEQ ID NO: 902447 - DNA, 25 bp, Homo sapien
tctctactaaaaatacaaacattag

SEQ ID NO: 902448 - DNA, 25 bp, Homo sapien
tatcgttgtctccacacctgcttac

SEQ ID NO: 902449 - DNA, 25 bp, Homo sapien
ttatcgttgtctccacacctgctta

SEQ ID NO: 902450 - DNA, 25 bp, Homo sapien
tgtgtactggtaactcggaatctct

SEQ ID NO: 902451 - DNA, 25 bp, Homo sapien
tctcctctgttgtgtactggtaact

SEQ ID NO: 902452 - DNA, 25 bp, Homo sapien
gtgctgttcctcaggtatcaaagca

SEQ ID NO: 902453 - DNA, 25 bp, Homo sapien
ctggtaactcggaatctctgaatgg

SEQ ID NO: 902454 - DNA, 25 bp, Homo sapien
cagtccctcaaccttatatccagcc

SEQ ID NO: 902455 - DNA, 25 bp, Homo sapien
agtccctcaaccttatatccagcca

SEQ ID NO: 902456 - DNA, 25 bp, Homo sapien
tctccagtccctcaaccttatatcc

SEQ ID NO: 902457 - DNA, 25 bp, Homo sapien
tccagtccctcaaccttatatccag

SEQ ID NO: 902458 - DNA, 25 bp, Homo sapien
ctttcaagtccataacctaagtttg

SEQ ID NO: 902459 - DNA, 25 bp, Homo sapien
caagtccataacctaagtttgttct

SEQ ID NO: 902460 - DNA, 25 bp, Homo sapien
tgttaataggaccaatttgtatgac

SEQ ID NO: 902461 - DNA, 25 bp, Homo sapien
gttgttaataggaccaatttgtatg

SEQ ID NO: 902462 - DNA, 25 bp, Homo sapien
tcataaaagttatatcactaggtgg

SEQ ID NO: 902463 - DNA, 25 bp, Homo sapien
atttcataaaagttatatcactagg

SEQ ID NO: 902464 - DNA, 25 bp, Homo sapien
tatcactaggtggttctactttgtt

SEQ ID NO: 902465 - DNA, 25 bp, Homo sapien
aaagttatatcactaggtggttcta

SEQ ID NO: 902466 - DNA, 25 bp, Homo sapien
accagggatggtgtcccaggcttct

SEQ ID NO: 902467 - DNA, 25 bp, Homo sapien
cactgaaccagggatggtgtcccag

SEQ ID NO: 902468 - DNA, 25 bp, Homo sapien
ctgcaaacactgaaccagggatggt

SEQ ID NO: 902469 - DNA, 25 bp, Homo sapien
caaacactgaaccagggatggtgtc

SEQ ID NO: 902470 - DNA, 25 bp, Homo sapien
atctatgcacatactctctttccca

SEQ ID NO: 902471 - DNA, 25 bp, Homo sapien
ctaaaatctatgcacatactctctt

SEQ ID NO: 902472 - DNA, 25 bp, Homo sapien
ggttctataacctatgccaacatcc

SEQ ID NO: 902473 - DNA, 25 bp, Homo sapien
tatgccaacatccactccacttcta

SEQ ID NO: 902474 - DNA, 25 bp, Homo sapien
gcaattccactgaagacagttttcc

SEQ ID NO: 902475 - DNA, 25 bp, Homo sapien
tgttctctatgcttgcaattccact

SEQ ID NO: 902476 - DNA, 25 bp, Homo sapien
tttgttctctatgcttgcaattcca

SEQ ID NO: 902477 - DNA, 25 bp, Homo sapien
cactgaagacagttttcctgctagt

SEQ ID NO: 902478 - DNA, 25 bp, Homo sapien
tcttcttgcacctgggaatacttag

SEQ ID NO: 902479 - DNA, 25 bp, Homo sapien
gattttgtcttcttgcacctgggaa

SEQ ID NO: 902480 - DNA, 25 bp, Homo sapien
gcacctgggaatacttaggcacttt

SEQ ID NO: 902481 - DNA, 25 bp, Homo sapien
tacttaggcactttacagtcacagt

SEQ ID NO: 902482 - DNA, 25 bp, Homo sapien
aatctgtgaggaaagcagttgtgta

SEQ ID NO: 902483 - DNA, 25 bp, Homo sapien
caaatctgtgaggaaagcagttgtg

SEQ ID NO: 902484 - DNA, 25 bp, Homo sapien
cccgtgaatgtacaaatctgtgagg

SEQ ID NO: 902485 - DNA, 25 bp, Homo sapien
tgagaaaagcccgtgaatgtacaaa

SEQ ID NO: 902486 - DNA, 25 bp, Homo sapien
ggatagacgacaattcagatgcatt

SEQ ID NO: 902487 - DNA, 25 bp, Homo sapien
gatagacgacaattcagatgcattt

SEQ ID NO: 902488 - DNA, 25 bp, Homo sapien
aggatagacgacaattcagatgcat

SEQ ID NO: 902489 - DNA, 25 bp, Homo sapien
ctttaggagtgtttaggagctcttc

SEQ ID NO: 902490 - DNA, 25 bp, Homo sapien
gagtgtttaggagctcttcatctga

SEQ ID NO: 902491 - DNA, 25 bp, Homo sapien
taggagtgtttaggagctcttcatc

SEQ ID NO: 902492 - DNA, 25 bp, Homo sapien
gtctttaggagtgtttaggagctct

SEQ ID NO: 902493 - DNA, 25 bp, Homo sapien
tgcagcttgatcctcattcggtgga

SEQ ID NO: 902494 - DNA, 25 bp, Homo sapien
tgagatccattttgaccaccccatt

SEQ ID NO: 902495 - DNA, 25 bp, Homo sapien
ggtgacagacaccatgtgactgctt

SEQ ID NO: 902496 - DNA, 25 bp, Homo sapien
tcacacttggttgtccttttggaga

SEQ ID NO: 902497 - DNA, 25 bp, Homo sapien
taaacattgagttgctaagtttagc

SEQ ID NO: 902498 - DNA, 25 bp, Homo sapien
cctttaaacattgagttgctaagtt

SEQ ID NO: 902499 - DNA, 25 bp, Homo sapien
cccctttaaacattgagttgctaag

SEQ ID NO: 902500 - DNA, 25 bp, Homo sapien
aacattgagttgctaagtttagcca

SEQ ID NO: 902501 - DNA, 25 bp, Homo sapien
tggcaaacgctcctacctctaagtc

SEQ ID NO: 902502 - DNA, 25 bp, Homo sapien
ctggcaaacgctcctacctctaagt

SEQ ID NO: 902503 - DNA, 25 bp, Homo sapien
gctggcaaacgctcctacctctaag

SEQ ID NO: 902504 - DNA, 25 bp, Homo sapien
ctgctggcaaacgctcctacctcta

SEQ ID NO: 902505 - DNA, 25 bp, Homo sapien
ttctgtaatgctgaattttactctt

SEQ ID NO: 902506 - DNA, 25 bp, Homo sapien
cccattttctgtaatgctgaatttt

SEQ ID NO: 902507 - DNA, 25 bp, Homo sapien
gtaatgctgaattttactcttttac

SEQ ID NO: 902508 - DNA, 25 bp, Homo sapien
atgctgaattttactcttttaccct

SEQ ID NO: 902509 - DNA, 25 bp, Homo sapien
tttttgctgatgtgttggatttctg

SEQ ID NO: 902510 - DNA, 25 bp, Homo sapien
acctactttcagggtccttcgatag

SEQ ID NO: 902511 - DNA, 25 bp, Homo sapien
cctactttcagggtccttcgatagt

SEQ ID NO: 902512 - DNA, 25 bp, Homo sapien
ctttcagggtccttcgatagtcata

SEQ ID NO: 902513 - DNA, 25 bp, Homo sapien
tactttcagggtccttcgatagtca

SEQ ID NO: 902514 - DNA, 25 bp, Homo sapien
tcagtctgcagtttgggtagctccc

SEQ ID NO: 902515 - DNA, 25 bp, Homo sapien
cagtttgggtagctccctctccata

SEQ ID NO: 902516 - DNA, 25 bp, Homo sapien
ggtagctccctctccatattttctt

SEQ ID NO: 902517 - DNA, 25 bp, Homo sapien
tctgcagtttgggtagctccctctc

SEQ ID NO: 902518 - DNA, 25 bp, Homo sapien
aagagcgtgctcatctctttgtgaa

SEQ ID NO: 902519 - DNA, 25 bp, Homo sapien
gaaatgatgaatccgttcaagagcg

SEQ ID NO: 902520 - DNA, 25 bp, Homo sapien
gaatccgttcaagagcgtgctcatc

SEQ ID NO: 902521 - DNA, 25 bp, Homo sapien
gtgggaggaaatgatgaatccgttc

SEQ ID NO: 902522 - DNA, 25 bp, Homo sapien
tagttgagatactgcaggctgctgt

SEQ ID NO: 902523 - DNA, 25 bp, Homo sapien
aaccttcggagtatcagcagctggg

SEQ ID NO: 902524 - DNA, 25 bp, Homo sapien
gaaagtgtcaaaggcacattggggt

SEQ ID NO: 902525 - DNA, 25 bp, Homo sapien
gaggagaaccttcggagtatcagca

SEQ ID NO: 902526 - DNA, 25 bp, Homo sapien
agaagaggagaaccttcggagtatc

SEQ ID NO: 902527 - DNA, 25 bp, Homo sapien
tagctggacttccaaatactgtgat

SEQ ID NO: 902528 - DNA, 25 bp, Homo sapien
ccttttaggaatagctggacttcca

SEQ ID NO: 902529 - DNA, 25 bp, Homo sapien
taatgttactgctgatgcatgtcat

SEQ ID NO: 902530 - DNA, 25 bp, Homo sapien
tactgtgattagtgtctgtggaaag

SEQ ID NO: 902531 - DNA, 25 bp, Homo sapien
tctgctgaatgagctgagtagccat

SEQ ID NO: 902532 - DNA, 25 bp, Homo sapien
tgaatgagctgagtagccattcaca

SEQ ID NO: 902533 - DNA, 25 bp, Homo sapien
aatgagctgagtagccattcacact

SEQ ID NO: 902534 - DNA, 25 bp, Homo sapien
tgctgaatgagctgagtagccattc

SEQ ID NO: 902535 - DNA, 25 bp, Homo sapien
tggtctcctgtgaggcaatgcttgg

SEQ ID NO: 902536 - DNA, 25 bp, Homo sapien
gaggaggtttctcacgatgagcgta

SEQ ID NO: 902537 - DNA, 25 bp, Homo sapien
tcgggagtaatacaatctggtctcc

SEQ ID NO: 902538 - DNA, 25 bp, Homo sapien
gaaggatgtctttcttcgggagtaa

SEQ ID NO: 902539 - DNA, 25 bp, Homo sapien
ttcctccacggtagttcaaatagtg

SEQ ID NO: 902540 - DNA, 25 bp, Homo sapien
ttggtactgccgttaaaacacagac

SEQ ID NO: 902541 - DNA, 25 bp, Homo sapien
gaccacagatagagcccttggctgc

SEQ ID NO: 902542 - DNA, 25 bp, Homo sapien
aaggaggtcacatcatcattggtac

SEQ ID NO: 902543 - DNA, 25 bp, Homo sapien
caaaggacggccctgctatagtcac

SEQ ID NO: 902544 - DNA, 25 bp, Homo sapien
gcttctcagaattaccactattctg

SEQ ID NO: 902545 - DNA, 25 bp, Homo sapien
tatagtcaccctcccaattggttta

SEQ ID NO: 902546 - DNA, 25 bp, Homo sapien
atgtttccaaaggacggccctgcta

SEQ ID NO: 902547 - DNA, 25 bp, Homo sapien
aggagaggcctaatgataagcatta

SEQ ID NO: 902548 - DNA, 25 bp, Homo sapien
gagtgactcaaagtatcagaaacat

SEQ ID NO: 902549 - DNA, 25 bp, Homo sapien
gccttatactccttgagtgaccatc

SEQ ID NO: 902550 - DNA, 25 bp, Homo sapien
gaaaatttagccatgccttatactc

SEQ ID NO: 902551 - DNA, 25 bp, Homo sapien
cataagcactgcatgtagacaaggt

SEQ ID NO: 902552 - DNA, 25 bp, Homo sapien
caagtgtcacgcgtttcataagatc

SEQ ID NO: 902553 - DNA, 25 bp, Homo sapien
tgaagagagactgactaggatgcct

SEQ ID NO: 902554 - DNA, 25 bp, Homo sapien
tcttcactggcactaaagggagaca

SEQ ID NO: 902555 - DNA, 25 bp, Homo sapien
cagcatggtgcaatcaagaaaggag

SEQ ID NO: 902556 - DNA, 25 bp, Homo sapien
taatggcgcagacattctagagaac

SEQ ID NO: 902557 - DNA, 25 bp, Homo sapien
caaaagtgtgggcagtaagcattat

SEQ ID NO: 902558 - DNA, 25 bp, Homo sapien
gcaagagctctatcacagaatccag

SEQ ID NO: 902559 - DNA, 25 bp, Homo sapien
gcatagtagcccagctgaagttaga

SEQ ID NO: 902560 - DNA, 25 bp, Homo sapien
ttcctgagactgacaatctgccctt

SEQ ID NO: 902561 - DNA, 25 bp, Homo sapien
gctccgctctgcatgccattataag

SEQ ID NO: 902562 - DNA, 25 bp, Homo sapien
tgaagttagaactcagtcctgttga

SEQ ID NO: 902563 - DNA, 25 bp, Homo sapien
cttcatcttgatagagccagcacat

SEQ ID NO: 902564 - DNA, 25 bp, Homo sapien
tctgttttcactggcaacttggggc

SEQ ID NO: 902565 - DNA, 25 bp, Homo sapien
tgcaggaaatactctgcagtctttc

SEQ ID NO: 902566 - DNA, 25 bp, Homo sapien
caacttggggccattgaaaagctgg

SEQ ID NO: 902567 - DNA, 25 bp, Homo sapien
ccacgatggaatccccctggtggtc

SEQ ID NO: 902568 - DNA, 25 bp, Homo sapien
caaataaaataatggtgactgctgc

SEQ ID NO: 902569 - DNA, 25 bp, Homo sapien
ttgcagaccataagatgaggcatcc

SEQ ID NO: 902570 - DNA, 25 bp, Homo sapien
tattgttaactgaggtcccatagga

SEQ ID NO: 902571 - DNA, 25 bp, Homo sapien
tatgggccgtccaatttagctattg

SEQ ID NO: 902572 - DNA, 25 bp, Homo sapien
tttgtctggaagagacatccatcct

SEQ ID NO: 902573 - DNA, 25 bp, Homo sapien
cctctccggttgactgtctgggtct

SEQ ID NO: 902574 - DNA, 25 bp, Homo sapien
tagagcactggttgtttgtctggaa

SEQ ID NO: 902575 - DNA, 25 bp, Homo sapien
gacatccatcctctccggttgactg

SEQ ID NO: 902576 - DNA, 25 bp, Homo sapien
tgtgggtagagagcatgcagggaag

SEQ ID NO: 902577 - DNA, 25 bp, Homo sapien
gattgtgggtagagagcatgcaggg

SEQ ID NO: 902578 - DNA, 25 bp, Homo sapien
cagagggattgtgggtagagagcat

SEQ ID NO: 902579 - DNA, 25 bp, Homo sapien
ctgagcagagggattgtgggtagag

SEQ ID NO: 902580 - DNA, 25 bp, Homo sapien
tgccaagttgctaggaatttgccca

SEQ ID NO: 902581 - DNA, 25 bp, Homo sapien
tcatatccagttattatgacaggaa

SEQ ID NO: 902582 - DNA, 25 bp, Homo sapien
tatgaaatgtgatcgcccttccttt

SEQ ID NO: 902583 - DNA, 25 bp, Homo sapien
acaggaacctccacttgccaagttg

SEQ ID NO: 902584 - DNA, 25 bp, Homo sapien
ggagctggacacatacacaattaat

SEQ ID NO: 902585 - DNA, 25 bp, Homo sapien
agggagctggacacatacacaatta

SEQ ID NO: 902586 - DNA, 25 bp, Homo sapien
ttcactaccaaaagggacgaaatca

SEQ ID NO: 902587 - DNA, 25 bp, Homo sapien
tcaacgtcttgaaccttgttcaggg

SEQ ID NO: 902588 - DNA, 25 bp, Homo sapien
aatgaaatactgtctcttgttgctg

SEQ ID NO: 902589 - DNA, 25 bp, Homo sapien
ttgctgctgccaacttccgatgcca

SEQ ID NO: 902590 - DNA, 25 bp, Homo sapien
gaaatactgtctcttgttgctgctg

SEQ ID NO: 902591 - DNA, 25 bp, Homo sapien
ccaacttccgatgccacgggaagca

SEQ ID NO: 902592 - DNA, 25 bp, Homo sapien
caggtcacatgtgaggagaatgctt

SEQ ID NO: 902593 - DNA, 25 bp, Homo sapien
aggtcacatgtgaggagaatgcttc

SEQ ID NO: 902594 - DNA, 25 bp, Homo sapien
ggtcacatgtgaggagaatgcttct

SEQ ID NO: 902595 - DNA, 25 bp, Homo sapien
gtcacatgtgaggagaatgcttctc

SEQ ID NO: 902596 - DNA, 25 bp, Homo sapien
ttgtgcccgtcagcagttcttcttt

SEQ ID NO: 902597 - DNA, 25 bp, Homo sapien
aacatttcttgtgcccgtcagcagt

SEQ ID NO: 902598 - DNA, 25 bp, Homo sapien
agaaacatttcttgtgcccgtcagc

SEQ ID NO: 902599 - DNA, 25 bp, Homo sapien
tttcttgtgcccgtcagcagttctt

SEQ ID NO: 902600 - DNA, 25 bp, Homo sapien
gagagatctgggatctgcagacacc

SEQ ID NO: 902601 - DNA, 25 bp, Homo sapien
gacctgaagttcctagctcatttga

SEQ ID NO: 902602 - DNA, 25 bp, Homo sapien
gttcccctgtggactgtaaccgtca

SEQ ID NO: 902603 - DNA, 25 bp, Homo sapien
tttgaggtactcatgtaatggattt

SEQ ID NO: 902604 - DNA, 25 bp, Homo sapien
accacaaagtaccctggctttatgc

SEQ ID NO: 902605 - DNA, 25 bp, Homo sapien
aaccacaaagtaccctggctttatg

SEQ ID NO: 902606 - DNA, 25 bp, Homo sapien
tagcataaatatatgactggagaat

SEQ ID NO: 902607 - DNA, 25 bp, Homo sapien
gactggagaatgtggttaataatta

SEQ ID NO: 902608 - DNA, 25 bp, Homo sapien
gatactgaacaatgtatttacatgt

SEQ ID NO: 902609 - DNA, 25 bp, Homo sapien
tgaagaaaccaggaactaggtatgt

SEQ ID NO: 902610 - DNA, 25 bp, Homo sapien
gggaagagtgggttggagtagctac

SEQ ID NO: 902611 - DNA, 25 bp, Homo sapien
ttgaggcttgaacgcacaaagtctc

SEQ ID NO: 902612 - DNA, 25 bp, Homo sapien
aggcttgaacgcacaaagtctccag

SEQ ID NO: 902613 - DNA, 25 bp, Homo sapien
gcttgaggcttgaacgcacaaagtc

SEQ ID NO: 902614 - DNA, 25 bp, Homo sapien
acttttttcattgatctcagactta

SEQ ID NO: 902615 - DNA, 25 bp, Homo sapien
tatgaagaccatccaaaatgtggaa

SEQ ID NO: 902616 - DNA, 25 bp, Homo sapien
tgatctcagacttaactgccctcat

SEQ ID NO: 902617 - DNA, 25 bp, Homo sapien
gctgctcggtcagcaatatgaagac

SEQ ID NO: 902618 - DNA, 25 bp, Homo sapien
gaaatggtttgataacctcatatct

SEQ ID NO: 902619 - DNA, 25 bp, Homo sapien
ggtttgataacctcatatctatatg

SEQ ID NO: 902620 - DNA, 25 bp, Homo sapien
tggaaatggtttgataacctcatat

SEQ ID NO: 902621 - DNA, 25 bp, Homo sapien
aatggtttgataacctcatatctat

SEQ ID NO: 902622 - DNA, 25 bp, Homo sapien
taaactgcgatggttagactcctat

SEQ ID NO: 902623 - DNA, 25 bp, Homo sapien
ttaactaatgtgctgataagctgcc

SEQ ID NO: 902624 - DNA, 25 bp, Homo sapien
aatcaagtaggtagggcccctgact

SEQ ID NO: 902625 - DNA, 25 bp, Homo sapien
caatctgatttgagaccttgtgtgc

SEQ ID NO: 902626 - DNA, 25 bp, Homo sapien
ggcacaatcagtcttggcccaacag

SEQ ID NO: 902627 - DNA, 25 bp, Homo sapien
cctttgataagcagagacctcggga

SEQ ID NO: 902628 - DNA, 25 bp, Homo sapien
gacctcgggactgccatggcacaat

SEQ ID NO: 902629 - DNA, 25 bp, Homo sapien
catgtgacaatgttgcagttgaagc

SEQ ID NO: 902630 - DNA, 25 bp, Homo sapien
cgaaatatacttgggccttttgcac

SEQ ID NO: 902631 - DNA, 25 bp, Homo sapien
gagcccatctggacgaaatatactt

SEQ ID NO: 902632 - DNA, 25 bp, Homo sapien
gaaaaggcaagagcccatctggacg

SEQ ID NO: 902633 - DNA, 25 bp, Homo sapien
ttgcacttggctgtctgatatttcc

SEQ ID NO: 902634 - DNA, 25 bp, Homo sapien
tctccagctatagctctgggctgcc

SEQ ID NO: 902635 - DNA, 25 bp, Homo sapien
ggctcctggcaaaaccctgaggaga

SEQ ID NO: 902636 - DNA, 25 bp, Homo sapien
ggtctgccctaacataactgtgatg

SEQ ID NO: 902637 - DNA, 25 bp, Homo sapien
ccgttgtgcgaaaagctgacatgga

SEQ ID NO: 902638 - DNA, 25 bp, Homo sapien
tgtctccagacttatcagatgtccc

SEQ ID NO: 902639 - DNA, 25 bp, Homo sapien
aatggcagagttagttctacaaggc

SEQ ID NO: 902640 - DNA, 25 bp, Homo sapien
tactcactagatgccggtaggaacc

SEQ ID NO: 902641 - DNA, 25 bp, Homo sapien
tcaggatgtgataacgtaatggcaa

SEQ ID NO: 902642 - DNA, 25 bp, Homo sapien
tgaaaaggccctgacattcccagat

SEQ ID NO: 902643 - DNA, 25 bp, Homo sapien
gatatggcaacatgtcctcaggcta

SEQ ID NO: 902644 - DNA, 25 bp, Homo sapien
ttcgggctataccagaaattagagc

SEQ ID NO: 902645 - DNA, 25 bp, Homo sapien
cagatcattccaagactttcgggct

SEQ ID NO: 902646 - DNA, 25 bp, Homo sapien
ctgtgggcgtcagcttcgctcctac

SEQ ID NO: 902647 - DNA, 25 bp, Homo sapien
agctgagctcatccgccattccagt

SEQ ID NO: 902648 - DNA, 25 bp, Homo sapien
gagagctgagctcatccgccattcc

SEQ ID NO: 902649 - DNA, 25 bp, Homo sapien
gtcagcttcgctcctacagcactgg

SEQ ID NO: 902650 - DNA, 25 bp, Homo sapien
tctctgcttcttggactatgggcat

SEQ ID NO: 902651 - DNA, 25 bp, Homo sapien
ttctctgcttcttggactatgggca

SEQ ID NO: 902652 - DNA, 25 bp, Homo sapien
cttctctgcttcttggactatgggc

SEQ ID NO: 902653 - DNA, 25 bp, Homo sapien
tcatttgtttcggaaggtgttttga

SEQ ID NO: 902654 - DNA, 25 bp, Homo sapien
gaatgaatgtatatgcgtgtttttc

SEQ ID NO: 902655 - DNA, 25 bp, Homo sapien
gttgtcatcatataacacaagaatg

SEQ ID NO: 902656 - DNA, 25 bp, Homo sapien
ttatcatttcctaaagaggcactcc

SEQ ID NO: 902657 - DNA, 25 bp, Homo sapien
tatgttctctgtgtttagagtgtga

SEQ ID NO: 902658 - DNA, 25 bp, Homo sapien
aaagatgccatctaaaataaactca

SEQ ID NO: 902659 - DNA, 25 bp, Homo sapien
tgttacaggataagctgctgccagt

SEQ ID NO: 902660 - DNA, 25 bp, Homo sapien
gtgtgaaatgcagccgttaaggtgt

SEQ ID NO: 902661 - DNA, 25 bp, Homo sapien
ttgtcctgcacccctggccccagtt

SEQ ID NO: 902662 - DNA, 25 bp, Homo sapien
gtcctgcacccctggccccagttac

SEQ ID NO: 902663 - DNA, 25 bp, Homo sapien
tgtcctgcacccctggccccagtta

SEQ ID NO: 902664 - DNA, 25 bp, Homo sapien
cactagctggcgttctgaagtcaga

SEQ ID NO: 902665 - DNA, 25 bp, Homo sapien
agcgcttgttattgacttatctttc

SEQ ID NO: 902666 - DNA, 25 bp, Homo sapien
gattgcattttgtagcgcttgttat

SEQ ID NO: 902667 - DNA, 25 bp, Homo sapien
cctcttggaccatagttttcttctt

SEQ ID NO: 902668 - DNA, 25 bp, Homo sapien
atctgaaactatcttctttgaatcc

SEQ ID NO: 902669 - DNA, 25 bp, Homo sapien
tgagtttctgcatgctcatatttcc

SEQ ID NO: 902670 - DNA, 25 bp, Homo sapien
tacccaaatgacacaatgcgttttc

SEQ ID NO: 902671 - DNA, 25 bp, Homo sapien
tgcgttttccgtgaacccttgccca

SEQ ID NO: 902672 - DNA, 25 bp, Homo sapien
gccaccgtgaggacacacactgtac

SEQ ID NO: 902673 - DNA, 25 bp, Homo sapien
cgccaccgtgaggacacacactgta

SEQ ID NO: 902674 - DNA, 25 bp, Homo sapien
tggaataagaattttcgtgggagga

SEQ ID NO: 902675 - DNA, 25 bp, Homo sapien
gtgctgcttggaataagaattttcg

SEQ ID NO: 902676 - DNA, 25 bp, Homo sapien
gatcatcagggaaggggttagtacc

SEQ ID NO: 902677 - DNA, 25 bp, Homo sapien
gtacccgtagccaaaggactgtgca

SEQ ID NO: 902678 - DNA, 25 bp, Homo sapien
gactgtccacccctgacaagtcaca

SEQ ID NO: 902679 - DNA, 25 bp, Homo sapien
actgtccacccctgacaagtcacac

SEQ ID NO: 902680 - DNA, 25 bp, Homo sapien
tggttggactgtccacccctgacaa

SEQ ID NO: 902681 - DNA, 25 bp, Homo sapien
ttggactgtccacccctgacaagtc

SEQ ID NO: 902682 - DNA, 25 bp, Homo sapien
tattacaagaatcctgaagtccaca

SEQ ID NO: 902683 - DNA, 25 bp, Homo sapien
caaaagtcagcaatgtcagtgggtg

SEQ ID NO: 902684 - DNA, 25 bp, Homo sapien
taaaggtcggacatccaaaagtcag

SEQ ID NO: 902685 - DNA, 25 bp, Homo sapien
cacagtaggtgggagatagaataga

SEQ ID NO: 902686 - DNA, 25 bp, Homo sapien
gagatttagcacctcccgttggcat

SEQ ID NO: 902687 - DNA, 25 bp, Homo sapien
gaagaatgattcagtgtgcagataa

SEQ ID NO: 902688 - DNA, 25 bp, Homo sapien
tgttcctgtcctcagtagaactgag

SEQ ID NO: 902689 - DNA, 25 bp, Homo sapien
gcaacagagatacgaggagagaaga

SEQ ID NO: 902690 - DNA, 25 bp, Homo sapien
tgtgtaccaccccagtgtgctgctc

SEQ ID NO: 902691 - DNA, 25 bp, Homo sapien
ccataaggttatgcaggaaaaggct

SEQ ID NO: 902692 - DNA, 25 bp, Homo sapien
tgaccttggccgagtcctgccataa

SEQ ID NO: 902693 - DNA, 25 bp, Homo sapien
tcagctgcttatttgcttgtcacag

SEQ ID NO: 902694 - DNA, 25 bp, Homo sapien
tgtaatcacgtgctcacaaaagtac

SEQ ID NO: 902695 - DNA, 25 bp, Homo sapien
tagctctaaggagtgtcggattgcc

SEQ ID NO: 902696 - DNA, 25 bp, Homo sapien
tatggcattgtgtcttagctctaag

SEQ ID NO: 902697 - DNA, 25 bp, Homo sapien
caggttgatagtaataggtatggcc

SEQ ID NO: 902698 - DNA, 25 bp, Homo sapien
tcttgcaatcacaccggtctttggc

SEQ ID NO: 902699 - DNA, 25 bp, Homo sapien
tccaccaagccattcactatttgca

SEQ ID NO: 902700 - DNA, 25 bp, Homo sapien
cctttgagccagagtggagcatgct

SEQ ID NO: 902701 - DNA, 25 bp, Homo sapien
tatttgtgactttagtgggaagatc

SEQ ID NO: 902702 - DNA, 25 bp, Homo sapien
catttgattctagttgcacttctgg

SEQ ID NO: 902703 - DNA, 25 bp, Homo sapien
cattggtgctgagtgccaaacttca

SEQ ID NO: 902704 - DNA, 25 bp, Homo sapien
tacttcctgtgaatgtgcattgcag

SEQ ID NO: 902705 - DNA, 25 bp, Homo sapien
gaggtgccaagttagcattggtgct

SEQ ID NO: 902706 - DNA, 25 bp, Homo sapien
atcaatcagtgtattctcaggtgac

SEQ ID NO: 902707 - DNA, 25 bp, Homo sapien
cccatggcagggtactgagtgaaat

SEQ ID NO: 902708 - DNA, 25 bp, Homo sapien
taacaataaggtggggtagtagaca

SEQ ID NO: 902709 - DNA, 25 bp, Homo sapien
aggtgacttgccattgagtgcctgg

SEQ ID NO: 902710 - DNA, 25 bp, Homo sapien
aaagtgggttctttctgctatgaca

SEQ ID NO: 902711 - DNA, 25 bp, Homo sapien
agctcaagggtccaatgttcccggg

SEQ ID NO: 902712 - DNA, 25 bp, Homo sapien
tatgacagcggaatacccatgaaca

SEQ ID NO: 902713 - DNA, 25 bp, Homo sapien
tttagctcaagggtccaatgttccc

SEQ ID NO: 902714 - DNA, 25 bp, Homo sapien
tggccaggagcacgccccggggaac

SEQ ID NO: 902715 - DNA, 25 bp, Homo sapien
ctgggcgggagagggttggccagga

SEQ ID NO: 902716 - DNA, 25 bp, Homo sapien
gagagggttggccaggagcacgccc

SEQ ID NO: 902717 - DNA, 25 bp, Homo sapien
gggcgggagagggttggccaggagc

SEQ ID NO: 902718 - DNA, 25 bp, Homo sapien
gagcttggaccaagaatgccccata

SEQ ID NO: 902719 - DNA, 25 bp, Homo sapien
gaagacatagtgaggactggccatg

SEQ ID NO: 902720 - DNA, 25 bp, Homo sapien
catgactgcgtctgaagacatagtg

SEQ ID NO: 902721 - DNA, 25 bp, Homo sapien
ttggaccaagaatgccccatactcc

SEQ ID NO: 902722 - DNA, 25 bp, Homo sapien
gaggcacatgtgagtgccacgttgt

SEQ ID NO: 902723 - DNA, 25 bp, Homo sapien
cacagaagtttgatggggaggcaca

SEQ ID NO: 902724 - DNA, 25 bp, Homo sapien
cagtaccctgtattggaaggcaggt

SEQ ID NO: 902725 - DNA, 25 bp, Homo sapien
tccaaacaccagtaccctgtattgg

SEQ ID NO: 902726 - DNA, 25 bp, Homo sapien
aagagatgccacataacaaatgcaa

SEQ ID NO: 902727 - DNA, 25 bp, Homo sapien
tatttgagagtcattcagagttgct

SEQ ID NO: 902728 - DNA, 25 bp, Homo sapien
ttattggggtttctacacagaagag

SEQ ID NO: 902729 - DNA, 25 bp, Homo sapien
cagaagagatgccacataacaaatg

SEQ ID NO: 902730 - DNA, 25 bp, Homo sapien
cgggatcaactagtggagaggccat

SEQ ID NO: 902731 - DNA, 25 bp, Homo sapien
gatcaactagtggagaggccatgag

SEQ ID NO: 902732 - DNA, 25 bp, Homo sapien
catgggcatcgggatcaactagtgg

SEQ ID NO: 902733 - DNA, 25 bp, Homo sapien
catcgggatcaactagtggagaggc

SEQ ID NO: 902734 - DNA, 25 bp, Homo sapien
tcagtgatacttcataatgattttg

SEQ ID NO: 902735 - DNA, 25 bp, Homo sapien
gaatgtccaaattgcttgaagtact

SEQ ID NO: 902736 - DNA, 25 bp, Homo sapien
gaagaatgtccaaattgcttgaagt

SEQ ID NO: 902737 - DNA, 25 bp, Homo sapien
agaatgtccaaattgcttgaagtac

SEQ ID NO: 902738 - DNA, 25 bp, Homo sapien
tgaaccaggagctacactaggagcc

SEQ ID NO: 902739 - DNA, 25 bp, Homo sapien
gaaagctgggtctgcttgggactgg

SEQ ID NO: 902740 - DNA, 25 bp, Homo sapien
cctcttctgggagtcctggcattgc

SEQ ID NO: 902741 - DNA, 25 bp, Homo sapien
ggagccagcctcttctgggagtcct

SEQ ID NO: 902742 - DNA, 25 bp, Homo sapien
gactaccccagaagatctttaatct

SEQ ID NO: 902743 - DNA, 25 bp, Homo sapien
taccccagaagatctttaatctttc

SEQ ID NO: 902744 - DNA, 25 bp, Homo sapien
gttggactaccccagaagatcttta

SEQ ID NO: 902745 - DNA, 25 bp, Homo sapien
tggactaccccagaagatctttaat

SEQ ID NO: 902746 - DNA, 25 bp, Homo sapien
ctgtgaaggaggattgattgaaagt

SEQ ID NO: 902747 - DNA, 25 bp, Homo sapien
tgaaggaggattgattgaaagtttg

SEQ ID NO: 902748 - DNA, 25 bp, Homo sapien
aggaggattgattgaaagtttgtgc

SEQ ID NO: 902749 - DNA, 25 bp, Homo sapien
tgtgaaggaggattgattgaaagtt

SEQ ID NO: 902750 - DNA, 25 bp, Homo sapien
tagaatcgtgacaatctacttgatt

SEQ ID NO: 902751 - DNA, 25 bp, Homo sapien
tggctagattagaatcgtgacaatc

SEQ ID NO: 902752 - DNA, 25 bp, Homo sapien
gatgatggctagattagaatcgtga

SEQ ID NO: 902753 - DNA, 25 bp, Homo sapien
cccttggggtgtgagaatataatga

SEQ ID NO: 902754 - DNA, 25 bp, Homo sapien
taaggtacagtgctgtcggcaaact

SEQ ID NO: 902755 - DNA, 25 bp, Homo sapien
cagtgctgtcggcaaactgtgtgga

SEQ ID NO: 902756 - DNA, 25 bp, Homo sapien
ggcaaactgtgtggaagccattgac

SEQ ID NO: 902757 - DNA, 25 bp, Homo sapien
ggctctgtaaggtacagtgctgtcg

SEQ ID NO: 902758 - DNA, 25 bp, Homo sapien
cagtttgagcttagaaggcactagc

SEQ ID NO: 902759 - DNA, 25 bp, Homo sapien
gccacataacccagtttgagcttag

SEQ ID NO: 902760 - DNA, 25 bp, Homo sapien
cactagctccttaatgccaagtaaa

SEQ ID NO: 902761 - DNA, 25 bp, Homo sapien
ggctagggccacataacccagtttg

SEQ ID NO: 902762 - DNA, 25 bp, Homo sapien
gaaaaacttccatgtgactctgcct

SEQ ID NO: 902763 - DNA, 25 bp, Homo sapien
caaactctgggtagtcacaacatcc

SEQ ID NO: 902764 - DNA, 25 bp, Homo sapien
gagacacccagccagaaatgcaatg

SEQ ID NO: 902765 - DNA, 25 bp, Homo sapien
tttgagcataagcttcttcctggcg

SEQ ID NO: 902766 - DNA, 25 bp, Homo sapien
aagagaagcaggtagtttggagcca

SEQ ID NO: 902767 - DNA, 25 bp, Homo sapien
tatcaaaacttagttctgctccact

SEQ ID NO: 902768 - DNA, 25 bp, Homo sapien
ggtagtgagtttcatagctttatca

SEQ ID NO: 902769 - DNA, 25 bp, Homo sapien
tgagcatggcttccgggcaaagaga

SEQ ID NO: 902770 - DNA, 25 bp, Homo sapien
tggaaaagccttatccttggcacta

SEQ ID NO: 902771 - DNA, 25 bp, Homo sapien
gaaaagccttatccttggcactagc

SEQ ID NO: 902772 - DNA, 25 bp, Homo sapien
aacctggcatggaaaagccttatcc

SEQ ID NO: 902773 - DNA, 25 bp, Homo sapien
ctggcatggaaaagccttatccttg

SEQ ID NO: 902774 - DNA, 25 bp, Homo sapien
ctccatgccttggatgatgggtgtg

SEQ ID NO: 902775 - DNA, 25 bp, Homo sapien
ctgatgctccatgccttggatgatg

SEQ ID NO: 902776 - DNA, 25 bp, Homo sapien
ggtgtggccttgtttgagagtggct

SEQ ID NO: 902777 - DNA, 25 bp, Homo sapien
ttacataacgttgggggctgcagca

SEQ ID NO: 902778 - DNA, 25 bp, Homo sapien
gcccaactggtccacttccagccat

SEQ ID NO: 902779 - DNA, 25 bp, Homo sapien
agcccaactggtccacttccagcca

SEQ ID NO: 902780 - DNA, 25 bp, Homo sapien
tgtaccaggatctctgcacaggaag

SEQ ID NO: 902781 - DNA, 25 bp, Homo sapien
tcaggctgctgaactaaatgagtgg

SEQ ID NO: 902782 - DNA, 25 bp, Homo sapien
ggcaagagctctgctgtaccacagt

SEQ ID NO: 902783 - DNA, 25 bp, Homo sapien
gtaccacagtctatgcccaggaagg

SEQ ID NO: 902784 - DNA, 25 bp, Homo sapien
ccaaacattgcctgttcggtgaagg

SEQ ID NO: 902785 - DNA, 25 bp, Homo sapien
aaacattgcctgttcggtgaaggct

SEQ ID NO: 902786 - DNA, 25 bp, Homo sapien
caaacattgcctgttcggtgaaggc

SEQ ID NO: 902787 - DNA, 25 bp, Homo sapien
tcaaagctcatttgaggtaagagcc

SEQ ID NO: 902788 - DNA, 25 bp, Homo sapien
gaatcgaaacgtgatctggcttctc

SEQ ID NO: 902789 - DNA, 25 bp, Homo sapien
tactatagctctgtttagttgctcc

SEQ ID NO: 902790 - DNA, 25 bp, Homo sapien
acagataagcacctactatagctct

SEQ ID NO: 902791 - DNA, 25 bp, Homo sapien
ggacgcctggtcccgtaagcagtgc

SEQ ID NO: 902792 - DNA, 25 bp, Homo sapien
agtgccatggattgagttcttctgt

SEQ ID NO: 902793 - DNA, 25 bp, Homo sapien
gggacgcctggtcccgtaagcagtg

SEQ ID NO: 902794 - DNA, 25 bp, Homo sapien
agcagtgccatggattgagttcttc

SEQ ID NO: 902795 - DNA, 25 bp, Homo sapien
gagtcttcatgacgggaacaccagc

SEQ ID NO: 902796 - DNA, 25 bp, Homo sapien
gtgatgagcgagtcagatgagcact

SEQ ID NO: 902797 - DNA, 25 bp, Homo sapien
agcttccaaataggcccggcacaaa

SEQ ID NO: 902798 - DNA, 25 bp, Homo sapien
cccggcacaaattagcttcatccat

SEQ ID NO: 902799 - DNA, 25 bp, Homo sapien
tcagcgctggagtggtggaccaaca

SEQ ID NO: 902800 - DNA, 25 bp, Homo sapien
cctgaaggaggtcctgagatacgat

SEQ ID NO: 902801 - DNA, 25 bp, Homo sapien
tcctgagatacgatgacagggccat

SEQ ID NO: 902802 - DNA, 25 bp, Homo sapien
ggagtggtggaccaacatgaaactc

SEQ ID NO: 902803 - DNA, 25 bp, Homo sapien
ctcgatccgaatacactggcaaagg

SEQ ID NO: 902804 - DNA, 25 bp, Homo sapien
tcgatccgaatacactggcaaaggc

SEQ ID NO: 902805 - DNA, 25 bp, Homo sapien
cctcgatccgaatacactggcaaag

SEQ ID NO: 902806 - DNA, 25 bp, Homo sapien
aacctcgatccgaatacactggcaa

SEQ ID NO: 902807 - DNA, 25 bp, Homo sapien
tccacattcttttccatgtccacag

SEQ ID NO: 902808 - DNA, 25 bp, Homo sapien
gtccacattcttttccatgtccaca

SEQ ID NO: 902809 - DNA, 25 bp, Homo sapien
acattcttttccatgtccacagcca

SEQ ID NO: 902810 - DNA, 25 bp, Homo sapien
cattccatgtccacattcttttcca

SEQ ID NO: 902811 - DNA, 25 bp, Homo sapien
tttgtccttttgatgacccctgacg

SEQ ID NO: 902812 - DNA, 25 bp, Homo sapien
ggagcccacctccatcctatgattg

SEQ ID NO: 902813 - DNA, 25 bp, Homo sapien
cagaatgactcatcaacccagagtt

SEQ ID NO: 902814 - DNA, 25 bp, Homo sapien
gacccctgacgtcttcctgagatgg

SEQ ID NO: 902815 - DNA, 25 bp, Homo sapien
ctccaagccactcttgtagaacccc

SEQ ID NO: 902816 - DNA, 25 bp, Homo sapien
cgtccggctcttaggcattgttatt

SEQ ID NO: 902817 - DNA, 25 bp, Homo sapien
ccggctcttaggcattgttattcct

SEQ ID NO: 902818 - DNA, 25 bp, Homo sapien
ccacgtccggctcttaggcattgtt

SEQ ID NO: 902819 - DNA, 25 bp, Homo sapien
tctcgctttgctcccttaacttgtg

SEQ ID NO: 902820 - DNA, 25 bp, Homo sapien
cgctttgctcccttaacttgtgctg

SEQ ID NO: 902821 - DNA, 25 bp, Homo sapien
tgacctttctgagaacagactggca

SEQ ID NO: 902822 - DNA, 25 bp, Homo sapien
tcttcctctcgctttgctcccttaa

SEQ ID NO: 902823 - DNA, 25 bp, Homo sapien
gctgtgcagctggacggaggtgaga

SEQ ID NO: 902824 - DNA, 25 bp, Homo sapien
caggtatcacttgagggacagctct

SEQ ID NO: 902825 - DNA, 25 bp, Homo sapien
agctctcagtgcaaggatccccact

SEQ ID NO: 902826 - DNA, 25 bp, Homo sapien
gagagggagctctaaatgggctcca

SEQ ID NO: 902827 - DNA, 25 bp, Homo sapien
gcttggcgcagcttacatcacgcat

SEQ ID NO: 902828 - DNA, 25 bp, Homo sapien
tcttggaaggcagtactggatggcc

SEQ ID NO: 902829 - DNA, 25 bp, Homo sapien
gatatatttgggaattgaggaccac

SEQ ID NO: 902830 - DNA, 25 bp, Homo sapien
tggcagggttctcgccagcaatcat

SEQ ID NO: 902831 - DNA, 25 bp, Homo sapien
caacagttccttctcgggtcacctg

SEQ ID NO: 902832 - DNA, 25 bp, Homo sapien
tgtgggccaatgtttagttcctgaa

SEQ ID NO: 902833 - DNA, 25 bp, Homo sapien
tgggctgtgggccaatgtttagttc

SEQ ID NO: 902834 - DNA, 25 bp, Homo sapien
tgctctgaagcatggctacatgtca

SEQ ID NO: 902835 - DNA, 25 bp, Homo sapien
tgtcaccccggggttcgctaggctc

SEQ ID NO: 902836 - DNA, 25 bp, Homo sapien
tcttgagttagctcagacaacacca

SEQ ID NO: 902837 - DNA, 25 bp, Homo sapien
gacaacaccacttctacgtatctaa

SEQ ID NO: 902838 - DNA, 25 bp, Homo sapien
caccacttctacgtatctaattttt

SEQ ID NO: 902839 - DNA, 25 bp, Homo sapien
ccacttctacgtatctaatttttgt

SEQ ID NO: 902840 - DNA, 25 bp, Homo sapien
tcttttataactcagcctgggagca

SEQ ID NO: 902841 - DNA, 25 bp, Homo sapien
tcttgctgatccagtgtgtggctca

SEQ ID NO: 902842 - DNA, 25 bp, Homo sapien
ttagctccaattgcctgaacacatc

SEQ ID NO: 902843 - DNA, 25 bp, Homo sapien
gtttttatcatggtgttgcctcctt

SEQ ID NO: 902844 - DNA, 25 bp, Homo sapien
cttctcggaggtatctttcttgact

SEQ ID NO: 902845 - DNA, 25 bp, Homo sapien
ttctcggaggtatctttcttgacta

SEQ ID NO: 902846 - DNA, 25 bp, Homo sapien
ttggatgttattggcaccttcctgc

SEQ ID NO: 902847 - DNA, 25 bp, Homo sapien
ctgttagctccacactctatgcctg

SEQ ID NO: 902848 - DNA, 25 bp, Homo sapien
tgcctgtatctcccatcacaggttg

SEQ ID NO: 902849 - DNA, 25 bp, Homo sapien
tcaggtactgttagctccacactct

SEQ ID NO: 902850 - DNA, 25 bp, Homo sapien
tctttgcctgtgctttttaagacct

SEQ ID NO: 902851 - DNA, 25 bp, Homo sapien
ctccaagtcctaatttcaggaaact

SEQ ID NO: 902852 - DNA, 25 bp, Homo sapien
caaaagttgtctgcgttcacgctca

SEQ ID NO: 902853 - DNA, 25 bp, Homo sapien
cagtatgcaaaaggtgctgccaggc

SEQ ID NO: 902854 - DNA, 25 bp, Homo sapien
gcataggactgcataggccatcaca

SEQ ID NO: 902855 - DNA, 25 bp, Homo sapien
aaaatacattcgcttcccctgagga

SEQ ID NO: 902856 - DNA, 25 bp, Homo sapien
tcttgtccacagctttaagtcttat

SEQ ID NO: 902857 - DNA, 25 bp, Homo sapien
tgtccacagctttaagtcttatttg

SEQ ID NO: 902858 - DNA, 25 bp, Homo sapien
cacagctttaagtcttatttgcata

SEQ ID NO: 902859 - DNA, 25 bp, Homo sapien
ccacagctttaagtcttatttgcat

SEQ ID NO: 902860 - DNA, 25 bp, Homo sapien
taacccaggaatggcctctctcatc

SEQ ID NO: 902861 - DNA, 25 bp, Homo sapien
gaatggcctctctcatctgagcact

SEQ ID NO: 902862 - DNA, 25 bp, Homo sapien
ctctcatctgagcactcagatccat

SEQ ID NO: 902863 - DNA, 25 bp, Homo sapien
tctctcatctgagcactcagatcca

SEQ ID NO: 902864 - DNA, 25 bp, Homo sapien
ccatttggccgatcctctggcggct

SEQ ID NO: 902865 - DNA, 25 bp, Homo sapien
tcagggccatttggccgatcctctg

SEQ ID NO: 902866 - DNA, 25 bp, Homo sapien
ggccatttggccgatcctctggcgg

SEQ ID NO: 902867 - DNA, 25 bp, Homo sapien
agggccatttggccgatcctctggc

SEQ ID NO: 902868 - DNA, 25 bp, Homo sapien
taggtactaaagacgcatttgcatt

SEQ ID NO: 902869 - DNA, 25 bp, Homo sapien
tgcatttttctccaagtgctctggc

SEQ ID NO: 902870 - DNA, 25 bp, Homo sapien
ctttatgtaggtactaaagacgcat

SEQ ID NO: 902871 - DNA, 25 bp, Homo sapien
tactaaagacgcatttgcatttttc

SEQ ID NO: 902872 - DNA, 25 bp, Homo sapien
gtgtgactcatcagcgggtcttcct

SEQ ID NO: 902873 - DNA, 25 bp, Homo sapien
ccagcagcacggtggtctgatgagt

SEQ ID NO: 902874 - DNA, 25 bp, Homo sapien
gcatctggtgaaacttccttttgac

SEQ ID NO: 902875 - DNA, 25 bp, Homo sapien
tggattggagtgtgactcatcagcg

SEQ ID NO: 902876 - DNA, 25 bp, Homo sapien
ggaaatttctgtcccactactcaga

SEQ ID NO: 902877 - DNA, 25 bp, Homo sapien
gaaaaatcctcaggtaaggcttcca

SEQ ID NO: 902878 - DNA, 25 bp, Homo sapien
caagcacctggaacctgaaatcaag

SEQ ID NO: 902879 - DNA, 25 bp, Homo sapien
ctacacagcttcatgaggagaaggg

SEQ ID NO: 902880 - DNA, 25 bp, Homo sapien
taatcatcacgtaaaatggctagca

SEQ ID NO: 902881 - DNA, 25 bp, Homo sapien
accttacagcccttcatggcaatag

SEQ ID NO: 902882 - DNA, 25 bp, Homo sapien
tcatggcaatagctccctggcaatc

SEQ ID NO: 902883 - DNA, 25 bp, Homo sapien
tgtggagaacttaaaaccttacagc

SEQ ID NO: 902884 - DNA, 25 bp, Homo sapien
catttcccggtcacagttggagcag

SEQ ID NO: 902885 - DNA, 25 bp, Homo sapien
tgtgggctgagcgatctggaatata

SEQ ID NO: 902886 - DNA, 25 bp, Homo sapien
cccgccagtctgcacgtgaaatttg

SEQ ID NO: 902887 - DNA, 25 bp, Homo sapien
cagtgagatttgacctttagaaggc

SEQ ID NO: 902888 - DNA, 25 bp, Homo sapien
cagagactgctgtactgtgagctgc

SEQ ID NO: 902889 - DNA, 25 bp, Homo sapien
ttcactgcgcccctaatgactgtgg

SEQ ID NO: 902890 - DNA, 25 bp, Homo sapien
tgagctgccgaagtgacacactttg

SEQ ID NO: 902891 - DNA, 25 bp, Homo sapien
agcaagaccaaccatcactgaggag

SEQ ID NO: 902892 - DNA, 25 bp, Homo sapien
tcaggccctgaatatgtaggccagt

SEQ ID NO: 902893 - DNA, 25 bp, Homo sapien
ctgactgcttctcattaggcccatt

SEQ ID NO: 902894 - DNA, 25 bp, Homo sapien
attaggcccattgcctcaacttctt

SEQ ID NO: 902895 - DNA, 25 bp, Homo sapien
tgggcactgttctgattcttcctgg

SEQ ID NO: 902896 - DNA, 25 bp, Homo sapien
tctaggagtttccatgcaagtgctg

SEQ ID NO: 902897 - DNA, 25 bp, Homo sapien
tcctgaacgcagccttgtctgccat

SEQ ID NO: 902898 - DNA, 25 bp, Homo sapien
ctgggagggcatctcaggtctccac

SEQ ID NO: 902899 - DNA, 25 bp, Homo sapien
tgcctcgtggtcacccgaagggatg

SEQ ID NO: 902900 - DNA, 25 bp, Homo sapien
gcttgttggcagtgtgtccctcctg

SEQ ID NO: 902901 - DNA, 25 bp, Homo sapien
tggtcccacccgaagggatggtgtc

SEQ ID NO: 902902 - DNA, 25 bp, Homo sapien
ccgaagggatggtatctggtcccac

SEQ ID NO: 902903 - DNA, 25 bp, Homo sapien
gaatatgatggtatctctgtttcca

SEQ ID NO: 902904 - DNA, 25 bp, Homo sapien
tcttgcgagaatatgatggtatctc

SEQ ID NO: 902905 - DNA, 25 bp, Homo sapien
tatgatggtatctctgtttccagta

SEQ ID NO: 902906 - DNA, 25 bp, Homo sapien
cttgttgggtcttgcgagaatatga

SEQ ID NO: 902907 - DNA, 25 bp, Homo sapien
agaaatgagaagtaaatagtttagc

SEQ ID NO: 902908 - DNA, 25 bp, Homo sapien
aaatgagaagtaaatagtttagcaa

SEQ ID NO: 902909 - DNA, 25 bp, Homo sapien
caagaaatgagaagtaaatagttta

SEQ ID NO: 902910 - DNA, 25 bp, Homo sapien
acaagaaatgagaagtaaatagttt

SEQ ID NO: 902911 - DNA, 25 bp, Homo sapien
gaaggcatcaaacactctaacatat

SEQ ID NO: 902912 - DNA, 25 bp, Homo sapien
ccagagtccctttcgtaattcaaag

SEQ ID NO: 902913 - DNA, 25 bp, Homo sapien
tataactctctgttctgtcaacgtg

SEQ ID NO: 902914 - DNA, 25 bp, Homo sapien
ttgccgttgaaagccaatctctcag

SEQ ID NO: 902915 - DNA, 25 bp, Homo sapien
cacaggattgcctttgtttactccc

SEQ ID NO: 902916 - DNA, 25 bp, Homo sapien
actgggcacttaggcatttttgaat

SEQ ID NO: 902917 - DNA, 25 bp, Homo sapien
tgtctcctggtctcgctgtgctgga

SEQ ID NO: 902918 - DNA, 25 bp, Homo sapien
ggcagccatcagctctagaatggca

SEQ ID NO: 902919 - DNA, 25 bp, Homo sapien
gcatgaacgccccacgatgggtgca

SEQ ID NO: 902920 - DNA, 25 bp, Homo sapien
gaacttgaagattagcagggtcacc

SEQ ID NO: 902921 - DNA, 25 bp, Homo sapien
tgtgtcagcacctgacaagtgctga

SEQ ID NO: 902922 - DNA, 25 bp, Homo sapien
tgagggtagatgaaaaaaccacctg

SEQ ID NO: 902923 - DNA, 25 bp, Homo sapien
acaggcttcggcgacaatgcacagg

SEQ ID NO: 902924 - DNA, 25 bp, Homo sapien
ccatagtgacaacaggcttcggcga

SEQ ID NO: 902925 - DNA, 25 bp, Homo sapien
cggcgacaatgcacaggcttcataa

SEQ ID NO: 902926 - DNA, 25 bp, Homo sapien
caggcttcataatcagctgagcata

SEQ ID NO: 902927 - DNA, 25 bp, Homo sapien
gttgcagaatgacaaatgcacatgc

SEQ ID NO: 902928 - DNA, 25 bp, Homo sapien
aatgacaaatgcacatgctttgacc

SEQ ID NO: 902929 - DNA, 25 bp, Homo sapien
ctgtcttttgaacagttgcagaatg

SEQ ID NO: 902930 - DNA, 25 bp, Homo sapien
tgaacagttgcagaatgacaaatgc

SEQ ID NO: 902931 - DNA, 25 bp, Homo sapien
gggagagggaagcttcaccctccac

SEQ ID NO: 902932 - DNA, 25 bp, Homo sapien
ttcaccctccacaatctgtctgatc

SEQ ID NO: 902933 - DNA, 25 bp, Homo sapien
caatctgtctgatccagcacagctg

SEQ ID NO: 902934 - DNA, 25 bp, Homo sapien
tccacaatctgtctgatccagcaca

SEQ ID NO: 902935 - DNA, 25 bp, Homo sapien
ggttgatatactgtaccatctttgg

SEQ ID NO: 902936 - DNA, 25 bp, Homo sapien
gagaactggacaagtttcctgagcc

SEQ ID NO: 902937 - DNA, 25 bp, Homo sapien
ctgagccctgggttgatatactgta

SEQ ID NO: 902938 - DNA, 25 bp, Homo sapien
tttctcattcttgagaactggacaa

SEQ ID NO: 902939 - DNA, 25 bp, Homo sapien
tgctgccctgatgtagaaggctctg

SEQ ID NO: 902940 - DNA, 25 bp, Homo sapien
gatagtgaccacttgtgactgccga

SEQ ID NO: 902941 - DNA, 25 bp, Homo sapien
tgtcaaatgtcagtgaactgctgcg

SEQ ID NO: 902942 - DNA, 25 bp, Homo sapien
caaatagtaatccttgatagtgacc

SEQ ID NO: 902943 - DNA, 25 bp, Homo sapien
agatgggcttgagttatgaataagc

SEQ ID NO: 902944 - DNA, 25 bp, Homo sapien
aaaagagattcgcaggggtgagcca

SEQ ID NO: 902945 - DNA, 25 bp, Homo sapien
gagttatgaataagcagcaaatgtg

SEQ ID NO: 902946 - DNA, 25 bp, Homo sapien
gcttgcttcgtgcaaaaccggttaa

SEQ ID NO: 902947 - DNA, 25 bp, Homo sapien
ctcaactaacttctcaccaatgtct

SEQ ID NO: 902948 - DNA, 25 bp, Homo sapien
tatatttaggagagcgttccttcat

SEQ ID NO: 902949 - DNA, 25 bp, Homo sapien
tcaatccggtgctttcaaaccaatg

SEQ ID NO: 902950 - DNA, 25 bp, Homo sapien
gcggcacgattccttccttgtttgt

SEQ ID NO: 902951 - DNA, 25 bp, Homo sapien
ggtgctttcaaaccaatgctgagcg

SEQ ID NO: 902952 - DNA, 25 bp, Homo sapien
aaccaatgctgagcggcacgattcc

SEQ ID NO: 902953 - DNA, 25 bp, Homo sapien
tctgatgactgttttagggtgtatc

SEQ ID NO: 902954 - DNA, 25 bp, Homo sapien
taagaagaggtcgtcccaaatagag

SEQ ID NO: 902955 - DNA, 25 bp, Homo sapien
gtcccaaatagagacgcaaaatgtc

SEQ ID NO: 902956 - DNA, 25 bp, Homo sapien
gagtctatgaacttccccagagagg

SEQ ID NO: 902957 - DNA, 25 bp, Homo sapien
ttaactgtgttcttcactagaggac

SEQ ID NO: 902958 - DNA, 25 bp, Homo sapien
cctccagaaagctacattgttcttt

SEQ ID NO: 902959 - DNA, 25 bp, Homo sapien
aacctccagaaagctacattgttct

SEQ ID NO: 902960 - DNA, 25 bp, Homo sapien
ggtgtcaagcatgctggcaaggtac

SEQ ID NO: 902961 - DNA, 25 bp, Homo sapien
caagcatgctggcaaggtactggct

SEQ ID NO: 902962 - DNA, 25 bp, Homo sapien
tgaacattccagttcaaggtttact

SEQ ID NO: 902963 - DNA, 25 bp, Homo sapien
acattccagttcaaggtttacttca

SEQ ID NO: 902964 - DNA, 25 bp, Homo sapien
cattccagttcaaggtttacttcaa

SEQ ID NO: 902965 - DNA, 25 bp, Homo sapien
attccagttcaaggtttacttcaat

SEQ ID NO: 902966 - DNA, 25 bp, Homo sapien
tatagttgtacaaggtccaatcaca

SEQ ID NO: 902967 - DNA, 25 bp, Homo sapien
cctctatgtcgtttatagttgtaca

SEQ ID NO: 902968 - DNA, 25 bp, Homo sapien
catttgcccctctatgtcgtttata

SEQ ID NO: 902969 - DNA, 25 bp, Homo sapien
tcacaacctgatcactgctattagt

SEQ ID NO: 902970 - DNA, 25 bp, Homo sapien
gataccgggtcactttccttaatca

SEQ ID NO: 902971 - DNA, 25 bp, Homo sapien
ctaaattcaacgataccgggtcact

SEQ ID NO: 902972 - DNA, 25 bp, Homo sapien
ttctaaattcaacgataccgggtca

SEQ ID NO: 902973 - DNA, 25 bp, Homo sapien
cgggtcactttccttaatcagagcc

SEQ ID NO: 902974 - DNA, 25 bp, Homo sapien
gtcctgtgggagaaatccatctgtt

SEQ ID NO: 902975 - DNA, 25 bp, Homo sapien
gatggtatgatgacctgtcctgtgg

SEQ ID NO: 902976 - DNA, 25 bp, Homo sapien
gccaactcattttcccccgatggta

SEQ ID NO: 902977 - DNA, 25 bp, Homo sapien
aattatgtgcatagcaatgacttca

SEQ ID NO: 902978 - DNA, 25 bp, Homo sapien
gaagaagccgcatcgggactgtgat

SEQ ID NO: 902979 - DNA, 25 bp, Homo sapien
aagccgcatcgggactgtgatcctg

SEQ ID NO: 902980 - DNA, 25 bp, Homo sapien
aagaagccgcatcgggactgtgatc

SEQ ID NO: 902981 - DNA, 25 bp, Homo sapien
gaagccgcatcgggactgtgatcct

SEQ ID NO: 902982 - DNA, 25 bp, Homo sapien
tccaggtctgcaaaactcggctgaa

SEQ ID NO: 902983 - DNA, 25 bp, Homo sapien
cgagtccgcccgtttgttgaaatca

SEQ ID NO: 902984 - DNA, 25 bp, Homo sapien
tttctttccgcagtattcttccttg

SEQ ID NO: 902985 - DNA, 25 bp, Homo sapien
tcttccttggatgaaaggactagga

SEQ ID NO: 902986 - DNA, 25 bp, Homo sapien
cccatgacaccgtgggggcctgtgt

SEQ ID NO: 902987 - DNA, 25 bp, Homo sapien
gtttacgcatatgcagaggaggcag

SEQ ID NO: 902988 - DNA, 25 bp, Homo sapien
gacagctggtttacgcatatgcaga

SEQ ID NO: 902989 - DNA, 25 bp, Homo sapien
tcccaaggacagctggtttacgcat

SEQ ID NO: 902990 - DNA, 25 bp, Homo sapien
agtcccatcctgtcccctgaacctg

SEQ ID NO: 902991 - DNA, 25 bp, Homo sapien
gctgccctggactccaggtgccacc

SEQ ID NO: 902992 - DNA, 25 bp, Homo sapien
cacctatgtgctggctatagctgat

SEQ ID NO: 902993 - DNA, 25 bp, Homo sapien
ccaggtgccacctatgtgctggcta

SEQ ID NO: 902994 - DNA, 25 bp, Homo sapien
aagggactaattgccatcaggcatg

SEQ ID NO: 902995 - DNA, 25 bp, Homo sapien
gatgacaaccaatgatctgccaaag

SEQ ID NO: 902996 - DNA, 25 bp, Homo sapien
taggtttgatgacaaccaatgatct

SEQ ID NO: 902997 - DNA, 25 bp, Homo sapien
tgtaggtggaattcctggcagggag

SEQ ID NO: 902998 - DNA, 25 bp, Homo sapien
tccatcatcacaggataatatccca

SEQ ID NO: 902999 - DNA, 25 bp, Homo sapien
ggataatatcccatcagaattcagg

SEQ ID NO: 903000 - DNA, 25 bp, Homo sapien
tcccatcagaattcaggcaatgcct

SEQ ID NO: 903001 - DNA, 25 bp, Homo sapien
tcatcacaggataatatcccatcag

SEQ ID NO: 903002 - DNA, 25 bp, Homo sapien
gtatgccctggtgactttacaaacc

SEQ ID NO: 903003 - DNA, 25 bp, Homo sapien
caggatgatgtaccaagttcatcca

SEQ ID NO: 903004 - DNA, 25 bp, Homo sapien
atttgaaaccccaggatgatgtacc

SEQ ID NO: 903005 - DNA, 25 bp, Homo sapien
tacaaaccactacctcagagttcat

SEQ ID NO: 903006 - DNA, 25 bp, Homo sapien
ttgatgaccccatgatggaaaacat

SEQ ID NO: 903007 - DNA, 25 bp, Homo sapien
ccttccgggcatggtttgacagcct

SEQ ID NO: 903008 - DNA, 25 bp, Homo sapien
gaaaggatttgagcctattaccaag

SEQ ID NO: 903009 - DNA, 25 bp, Homo sapien
aaaacaattgtctcagagtcacgtg

SEQ ID NO: 903010 - DNA, 25 bp, Homo sapien
gagtcacgtgaagtgctacaaaagc

SEQ ID NO: 903011 - DNA, 25 bp, Homo sapien
tctcctcacagtcagggcgaagccg

SEQ ID NO: 903012 - DNA, 25 bp, Homo sapien
ggcctgcgtgtgaggcctctcctca

SEQ ID NO: 903013 - DNA, 25 bp, Homo sapien
tcacaaagccaatacacttggcctg

SEQ ID NO: 903014 - DNA, 25 bp, Homo sapien
cagcagcatggttcgcaccacagtc

SEQ ID NO: 903015 - DNA, 25 bp, Homo sapien
tcctctgccattcccgtgggggctg

SEQ ID NO: 903016 - DNA, 25 bp, Homo sapien
tgtctcgttaggccctgctcctctg

SEQ ID NO: 903017 - DNA, 25 bp, Homo sapien
tccaccctcgctcttgtgggcgtgg

SEQ ID NO: 903018 - DNA, 25 bp, Homo sapien
tgctgggtagggctccggtctccac

SEQ ID NO: 903019 - DNA, 25 bp, Homo sapien
gaattgtctaaagatcttgatcccc

SEQ ID NO: 903020 - DNA, 25 bp, Homo sapien
ccttctgagtttatagttctcctgt

SEQ ID NO: 903021 - DNA, 25 bp, Homo sapien
ttctctgaccaagtttgactgctgt

SEQ ID NO: 903022 - DNA, 25 bp, Homo sapien
gagtttatagttctcctgtctcctc

SEQ ID NO: 903023 - DNA, 25 bp, Homo sapien
ctctggacactcgtccagaaggatc

SEQ ID NO: 903024 - DNA, 25 bp, Homo sapien
gagctccatggagagtgtctacttt

SEQ ID NO: 903025 - DNA, 25 bp, Homo sapien
agtgtctactttagaaggatcagga

SEQ ID NO: 903026 - DNA, 25 bp, Homo sapien
ctatgtgacaaagggtgattcagga

SEQ ID NO: 903027 - DNA, 25 bp, Homo sapien
attctgaagtttgcgatttcttagt

SEQ ID NO: 903028 - DNA, 25 bp, Homo sapien
ttcttagttggtgtcccaatctcac

SEQ ID NO: 903029 - DNA, 25 bp, Homo sapien
aagccatagagattttaggataaat

SEQ ID NO: 903030 - DNA, 25 bp, Homo sapien
tgattctgaagtttgcgatttctta

SEQ ID NO: 903031 - DNA, 25 bp, Homo sapien
cttgtaaacttctaattgtcctgcg

SEQ ID NO: 903032 - DNA, 25 bp, Homo sapien
tgtaaacttctaattgtcctgcgtt

SEQ ID NO: 903033 - DNA, 25 bp, Homo sapien
ttgtaaacttctaattgtcctgcgt

SEQ ID NO: 903034 - DNA, 25 bp, Homo sapien
gtaaacttctaattgtcctgcgttc

SEQ ID NO: 903035 - DNA, 25 bp, Homo sapien
caaagggatgccaaatatgtgtgtt

SEQ ID NO: 903036 - DNA, 25 bp, Homo sapien
gtttttagatgtatcagccgttcat

SEQ ID NO: 903037 - DNA, 25 bp, Homo sapien
agtgcaaagggatgccaaatatgtg

SEQ ID NO: 903038 - DNA, 25 bp, Homo sapien
tgtatcagccgttcatctacaaaat

SEQ ID NO: 903039 - DNA, 25 bp, Homo sapien
taacctttcggatggcttcctatta

SEQ ID NO: 903040 - DNA, 25 bp, Homo sapien
ttaaatagggtttggatgctgaaaa

SEQ ID NO: 903041 - DNA, 25 bp, Homo sapien
tatctgtcagatttaacctttcgga

SEQ ID NO: 903042 - DNA, 25 bp, Homo sapien
ctaaggcacagagggcggctatctg

SEQ ID NO: 903043 - DNA, 25 bp, Homo sapien
atttgcaatcatggttctgggctgc

SEQ ID NO: 903044 - DNA, 25 bp, Homo sapien
ctctcttgaggccagactctgctca

SEQ ID NO: 903045 - DNA, 25 bp, Homo sapien
ctcatttgcaatcatggttctgggc

SEQ ID NO: 903046 - DNA, 25 bp, Homo sapien
gaggccagactctgctcatttgcaa

SEQ ID NO: 903047 - DNA, 25 bp, Homo sapien
tggcaaccgccagtcagtgggactg

SEQ ID NO: 903048 - DNA, 25 bp, Homo sapien
tatggcaaccgccagtcagtgggac

SEQ ID NO: 903049 - DNA, 25 bp, Homo sapien
gcctccctcgtgtgcgcaatgtcgt

SEQ ID NO: 903050 - DNA, 25 bp, Homo sapien
tgcgcaatgtcgttatggcaaccgc

SEQ ID NO: 903051 - DNA, 25 bp, Homo sapien
gggggctgataaggccaaagtgttg

SEQ ID NO: 903052 - DNA, 25 bp, Homo sapien
gggctgataaggccaaagtgttggg

SEQ ID NO: 903053 - DNA, 25 bp, Homo sapien
ggctgataaggccaaagtgttgggt

SEQ ID NO: 903054 - DNA, 25 bp, Homo sapien
ggggctgataaggccaaagtgttgg

SEQ ID NO: 903055 - DNA, 25 bp, Homo sapien
gttattactgggaaacagctgtcca

SEQ ID NO: 903056 - DNA, 25 bp, Homo sapien
tatgaagtgtttgccgaccggatga

SEQ ID NO: 903057 - DNA, 25 bp, Homo sapien
aaaaatcttgcatctacatgaggcc

SEQ ID NO: 903058 - DNA, 25 bp, Homo sapien
tgccagggccatggtgattatgaag

SEQ ID NO: 903059 - DNA, 25 bp, Homo sapien
tggtgatgttacaacatgaaaagac

SEQ ID NO: 903060 - DNA, 25 bp, Homo sapien
ctggtgatgttacaacatgaaaaga

SEQ ID NO: 903061 - DNA, 25 bp, Homo sapien
ggatgtgagttccaaaaggagcccc

SEQ ID NO: 903062 - DNA, 25 bp, Homo sapien
ggggatgtgagttccaaaaggagcc

SEQ ID NO: 903063 - DNA, 25 bp, Homo sapien
gatgtgagttccaaaaggagccccc

SEQ ID NO: 903064 - DNA, 25 bp, Homo sapien
tgtgagttccaaaaggagcccccat

SEQ ID NO: 903065 - DNA, 25 bp, Homo sapien
tctcggcgggaactctgatattgca

SEQ ID NO: 903066 - DNA, 25 bp, Homo sapien
taaagcgtcatttccacggccatct

SEQ ID NO: 903067 - DNA, 25 bp, Homo sapien
tatggatgggcaggcctgccatctg

SEQ ID NO: 903068 - DNA, 25 bp, Homo sapien
gaactgagctgcagtgtcgaggaca

SEQ ID NO: 903069 - DNA, 25 bp, Homo sapien
caactgctccaaacgcattctggag

SEQ ID NO: 903070 - DNA, 25 bp, Homo sapien
tctggagctttcgttctgagtgaat

SEQ ID NO: 903071 - DNA, 25 bp, Homo sapien
gaataattctcccttgtatcaccag

SEQ ID NO: 903072 - DNA, 25 bp, Homo sapien
gatgtaattgtatctgcttccaact

SEQ ID NO: 903073 - DNA, 25 bp, Homo sapien
tccctgtaaatttcaggtagttctc

SEQ ID NO: 903074 - DNA, 25 bp, Homo sapien
aactgtccttggattcttccctgta

SEQ ID NO: 903075 - DNA, 25 bp, Homo sapien
tctgcaactgtccttggattcttcc

SEQ ID NO: 903076 - DNA, 25 bp, Homo sapien
aaatttcaggtagttctcagctttc

SEQ ID NO: 903077 - DNA, 25 bp, Homo sapien
ttaaagccaatcgtaaggcattcgc

SEQ ID NO: 903078 - DNA, 25 bp, Homo sapien
cacaaatttccaagtaactccttgg

SEQ ID NO: 903079 - DNA, 25 bp, Homo sapien
atttccaagtaactccttggccctg

SEQ ID NO: 903080 - DNA, 25 bp, Homo sapien
aatcgtaaggcattcgccgtctctc

SEQ ID NO: 903081 - DNA, 25 bp, Homo sapien
tttgttatagccattgccaatggac

SEQ ID NO: 903082 - DNA, 25 bp, Homo sapien
caatggacatttctgagttcaaggg

SEQ ID NO: 903083 - DNA, 25 bp, Homo sapien
gacacaatggtcttgcaggtgtgag

SEQ ID NO: 903084 - DNA, 25 bp, Homo sapien
agtcgcagagtcatcccctcttgag

SEQ ID NO: 903085 - DNA, 25 bp, Homo sapien
gagtccccaggtcgtgatcagttcc

SEQ ID NO: 903086 - DNA, 25 bp, Homo sapien
caggagtccccaggtcgtgatcagt

SEQ ID NO: 903087 - DNA, 25 bp, Homo sapien
ccaggagtccccaggtcgtgatcag

SEQ ID NO: 903088 - DNA, 25 bp, Homo sapien
tccccaggtcgtgatcagttccaga

SEQ ID NO: 903089 - DNA, 25 bp, Homo sapien
ccaatgtgattgcataaagcacttt

SEQ ID NO: 903090 - DNA, 25 bp, Homo sapien
ggactctgccagattccaatgtgat

SEQ ID NO: 903091 - DNA, 25 bp, Homo sapien
tcgtccatttgactttcaatggcct

SEQ ID NO: 903092 - DNA, 25 bp, Homo sapien
catagtaagactaaattcgtccatt

SEQ ID NO: 903093 - DNA, 25 bp, Homo sapien
tcctttgttagtttccagccacaat

SEQ ID NO: 903094 - DNA, 25 bp, Homo sapien
ctcagtggcctcgttcacctccatg

SEQ ID NO: 903095 - DNA, 25 bp, Homo sapien
gttcacctccatgcctaagcctttg

SEQ ID NO: 903096 - DNA, 25 bp, Homo sapien
aatgacttgcagctcattcacagtt

SEQ ID NO: 903097 - DNA, 25 bp, Homo sapien
gatgagagcacattgcaattgagga

SEQ ID NO: 903098 - DNA, 25 bp, Homo sapien
taaacatgcacttggtcaactaggg

SEQ ID NO: 903099 - DNA, 25 bp, Homo sapien
taaataactgtatcccaggaatgtg

SEQ ID NO: 903100 - DNA, 25 bp, Homo sapien
caactagggattggttatgctactc

SEQ ID NO: 903101 - DNA, 25 bp, Homo sapien
tcaccgcatggctgtggactggcgt

SEQ ID NO: 903102 - DNA, 25 bp, Homo sapien
tggactggcgtccatgcagtttgtg

SEQ ID NO: 903103 - DNA, 25 bp, Homo sapien
tgttctctaggacacactccaggag

SEQ ID NO: 903104 - DNA, 25 bp, Homo sapien
tgcagtttgtgcctagtgccaaagc

SEQ ID NO: 903105 - DNA, 25 bp, Homo sapien
caggctcatatgagtaacagcagca

SEQ ID NO: 903106 - DNA, 25 bp, Homo sapien
taaacacttgcagattgagatggac

SEQ ID NO: 903107 - DNA, 25 bp, Homo sapien
aacctgatgtgctcaatgtctctgt

SEQ ID NO: 903108 - DNA, 25 bp, Homo sapien
tcatggcaacctgatgtgctcaatg

SEQ ID NO: 903109 - DNA, 25 bp, Homo sapien
aaggtctgaccagaccagattggcc

SEQ ID NO: 903110 - DNA, 25 bp, Homo sapien
cagcaatgcaccagcgtgcaggcag

SEQ ID NO: 903111 - DNA, 25 bp, Homo sapien
aggatggctgcagatcccctaccac

SEQ ID NO: 903112 - DNA, 25 bp, Homo sapien
cagcatagagacgaaggaacaggag

SEQ ID NO: 903113 - DNA, 25 bp, Homo sapien
gcttattgccaatgcatgaattcag

SEQ ID NO: 903114 - DNA, 25 bp, Homo sapien
caatacttggaatactctgctctct

SEQ ID NO: 903115 - DNA, 25 bp, Homo sapien
tctttccctacagccttgattgtca

SEQ ID NO: 903116 - DNA, 25 bp, Homo sapien
tgaattcagattccccatggcaatc

SEQ ID NO: 903117 - DNA, 25 bp, Homo sapien
ctgctggtgttttcatggactcttc

SEQ ID NO: 903118 - DNA, 25 bp, Homo sapien
gcagatgtcacatcagagtcacact

SEQ ID NO: 903119 - DNA, 25 bp, Homo sapien
cacactgaccatattcacagatggg

SEQ ID NO: 903120 - DNA, 25 bp, Homo sapien
cactgaaggcagatgtcacatcaga

SEQ ID NO: 903121 - DNA, 25 bp, Homo sapien
gcacactgaaggcagatgtcacatc

SEQ ID NO: 903122 - DNA, 25 bp, Homo sapien
agcccattttctccctgatactgaa

SEQ ID NO: 903123 - DNA, 25 bp, Homo sapien
cctgatactgaagggaagccataac

SEQ ID NO: 903124 - DNA, 25 bp, Homo sapien
tcatcgggagcatgaagagtgtttg

SEQ ID NO: 903125 - DNA, 25 bp, Homo sapien
gaagggaagccataacatcatcggg

SEQ ID NO: 903126 - DNA, 25 bp, Homo sapien
tagggctttcatacttagcctctgc

SEQ ID NO: 903127 - DNA, 25 bp, Homo sapien
ttttcttagggctttcatacttagc

SEQ ID NO: 903128 - DNA, 25 bp, Homo sapien
gattcccctagaagttcagttccat

SEQ ID NO: 903129 - DNA, 25 bp, Homo sapien
tttgtcaagtactggtctggtctga

SEQ ID NO: 903130 - DNA, 25 bp, Homo sapien
tctttccattacagtaacttcacac

SEQ ID NO: 903131 - DNA, 25 bp, Homo sapien
tttccattacagtaacttcacacat

SEQ ID NO: 903132 - DNA, 25 bp, Homo sapien
ctttccattacagtaacttcacaca

SEQ ID NO: 903133 - DNA, 25 bp, Homo sapien
tggcagatgctagaaccgtggccac

SEQ ID NO: 903134 - DNA, 25 bp, Homo sapien
agaaaactgaaatgccctggcagat

SEQ ID NO: 903135 - DNA, 25 bp, Homo sapien
tgctagaaccgtggccacagtcaca

SEQ ID NO: 903136 - DNA, 25 bp, Homo sapien
cagatgctagaaccgtggccacagt

SEQ ID NO: 903137 - DNA, 25 bp, Homo sapien
ttgtgatcattcacaatgactatgg

SEQ ID NO: 903138 - DNA, 25 bp, Homo sapien
atgactatggtttgagtgattaatt

SEQ ID NO: 903139 - DNA, 25 bp, Homo sapien
tcttacatcgtcttcacccacatcc

SEQ ID NO: 903140 - DNA, 25 bp, Homo sapien
tcacccacatccttgtgatcattca

SEQ ID NO: 903141 - DNA, 25 bp, Homo sapien
agtgtcgcgtaggtttctctgaaga

SEQ ID NO: 903142 - DNA, 25 bp, Homo sapien
tcgcgtaggtttctctgaagagcaa

SEQ ID NO: 903143 - DNA, 25 bp, Homo sapien
tgtcgcgtaggtttctctgaagagc

SEQ ID NO: 903144 - DNA, 25 bp, Homo sapien
cagtgtcgcgtaggtttctctgaag

SEQ ID NO: 903145 - DNA, 25 bp, Homo sapien
catcctggctgctcggtgatctcaa

SEQ ID NO: 903146 - DNA, 25 bp, Homo sapien
tccatcctggctgctcggtgatctc

SEQ ID NO: 903147 - DNA, 25 bp, Homo sapien
tctcaaacggatccccactttctgg

SEQ ID NO: 903148 - DNA, 25 bp, Homo sapien
tcggtgatctcaaacggatccccac

SEQ ID NO: 903149 - DNA, 25 bp, Homo sapien
tccagacgacttctcatttggctga

SEQ ID NO: 903150 - DNA, 25 bp, Homo sapien
tagtaagacctgggtgggattcttg

SEQ ID NO: 903151 - DNA, 25 bp, Homo sapien
ggaagcatttcataacgtcagccaa

SEQ ID NO: 903152 - DNA, 25 bp, Homo sapien
tgtgtacactaaaaggatgaatcct

SEQ ID NO: 903153 - DNA, 25 bp, Homo sapien
caagtgcctgctatcttttgttgaa

SEQ ID NO: 903154 - DNA, 25 bp, Homo sapien
gaaaggagatattgagacaagtgcc

SEQ ID NO: 903155 - DNA, 25 bp, Homo sapien
tttcctgatggcttcgcctggtgga

SEQ ID NO: 903156 - DNA, 25 bp, Homo sapien
ttagctaatgtctttgtggaatgca

SEQ ID NO: 903157 - DNA, 25 bp, Homo sapien
ggtttaagctccaggcttggctgct

SEQ ID NO: 903158 - DNA, 25 bp, Homo sapien
tgcaatgcttcctttcggttaagaa

SEQ ID NO: 903159 - DNA, 25 bp, Homo sapien
cccataaatgtatgatttgcaacac

SEQ ID NO: 903160 - DNA, 25 bp, Homo sapien
catggtctgtcttgcaggtttaagc

SEQ ID NO: 903161 - DNA, 25 bp, Homo sapien
gctgcccgcacaccctttgatgaga

SEQ ID NO: 903162 - DNA, 25 bp, Homo sapien
atgtgtagggcccacgaagccacct

SEQ ID NO: 903163 - DNA, 25 bp, Homo sapien
tgctgcccgcacaccctttgatgag

SEQ ID NO: 903164 - DNA, 25 bp, Homo sapien
gtcctgaaggcaatgtgtagggccc

SEQ ID NO: 903165 - DNA, 25 bp, Homo sapien
tggctctccccaccataccaagcat

SEQ ID NO: 903166 - DNA, 25 bp, Homo sapien
gggtgtagtggaggcagtctggctc

SEQ ID NO: 903167 - DNA, 25 bp, Homo sapien
ccccaccataccaagcatatttagt

SEQ ID NO: 903168 - DNA, 25 bp, Homo sapien
gtcaacaaagggtgtagtggaggca

SEQ ID NO: 903169 - DNA, 25 bp, Homo sapien
agagagcttagcaccatttggattg

SEQ ID NO: 903170 - DNA, 25 bp, Homo sapien
tctacatcataccaaggagagagct

SEQ ID NO: 903171 - DNA, 25 bp, Homo sapien
gaatctcaggtctacagggtcccct

SEQ ID NO: 903172 - DNA, 25 bp, Homo sapien
gaccccaggtaggagaaataatcat

SEQ ID NO: 903173 - DNA, 25 bp, Homo sapien
gatcaccaggtctctcatcttcggt

SEQ ID NO: 903174 - DNA, 25 bp, Homo sapien
caccaggtctctcatcttcggtcat

SEQ ID NO: 903175 - DNA, 25 bp, Homo sapien
ctgatcaccaggtctctcatcttcg

SEQ ID NO: 903176 - DNA, 25 bp, Homo sapien
tcaccaggtctctcatcttcggtca

SEQ ID NO: 903177 - DNA, 25 bp, Homo sapien
attgctcagtgatgccaggccagga

SEQ ID NO: 903178 - DNA, 25 bp, Homo sapien
gtgatgccaggccaggactttccat

SEQ ID NO: 903179 - DNA, 25 bp, Homo sapien
gaatttcaccattgctcagtgatgc

SEQ ID NO: 903180 - DNA, 25 bp, Homo sapien
tctgtgttgctgaatttcaccattg

SEQ ID NO: 903181 - DNA, 25 bp, Homo sapien
tcctgcagcaggtgattatccatgc

SEQ ID NO: 903182 - DNA, 25 bp, Homo sapien
gtcctgcagcaggtgattatccatg

SEQ ID NO: 903183 - DNA, 25 bp, Homo sapien
aaaaagaagatcacaagacaggaat

SEQ ID NO: 903184 - DNA, 25 bp, Homo sapien
cttcagtgacactggtggtaggaga

SEQ ID NO: 903185 - DNA, 25 bp, Homo sapien
taggagagtgagtctgggcaagaaa

SEQ ID NO: 903186 - DNA, 25 bp, Homo sapien
tacttctctggattggccccagcat

SEQ ID NO: 903187 - DNA, 25 bp, Homo sapien
aatcaagaagttaattttggctggg

SEQ ID NO: 903188 - DNA, 25 bp, Homo sapien
atctaatcaagaagttaattttggc

SEQ ID NO: 903189 - DNA, 25 bp, Homo sapien
taaataggggcaaatctaatcaaga

SEQ ID NO: 903190 - DNA, 25 bp, Homo sapien
tctaaataggggcaaatctaatcaa

SEQ ID NO: 903191 - DNA, 25 bp, Homo sapien
tgaaagtcaaaatccaggctgtgtc

SEQ ID NO: 903192 - DNA, 25 bp, Homo sapien
ctgaaagtcaaaatccaggctgtgt

SEQ ID NO: 903193 - DNA, 25 bp, Homo sapien
gaaagtcaaaatccaggctgtgtca

SEQ ID NO: 903194 - DNA, 25 bp, Homo sapien
aaagtcaaaatccaggctgtgtcac

SEQ ID NO: 903195 - DNA, 25 bp, Homo sapien
gttgccgcagaaggatagaatggct

SEQ ID NO: 903196 - DNA, 25 bp, Homo sapien
ttatgacaaggctctctttcaacca

SEQ ID NO: 903197 - DNA, 25 bp, Homo sapien
gagccaccagaagttgccgcagaag

SEQ ID NO: 903198 - DNA, 25 bp, Homo sapien
ctttcttatgacaaggctctctttc

SEQ ID NO: 903199 - DNA, 25 bp, Homo sapien
acaatccagcacagtttgtaaacat

SEQ ID NO: 903200 - DNA, 25 bp, Homo sapien
tatagtccctggtattattcctggg

SEQ ID NO: 903201 - DNA, 25 bp, Homo sapien
cttatatagtccctggtattattcc

SEQ ID NO: 903202 - DNA, 25 bp, Homo sapien
gaaacattttggattcaacaatcca

SEQ ID NO: 903203 - DNA, 25 bp, Homo sapien
aaacaacttggctccttgggaccag

SEQ ID NO: 903204 - DNA, 25 bp, Homo sapien
aacttggctccttgggaccagtgac

SEQ ID NO: 903205 - DNA, 25 bp, Homo sapien
caacttggctccttgggaccagtga

SEQ ID NO: 903206 - DNA, 25 bp, Homo sapien
aacaacttggctccttgggaccagt

SEQ ID NO: 903207 - DNA, 25 bp, Homo sapien
cccacgtagctttttcgtgtggcca

SEQ ID NO: 903208 - DNA, 25 bp, Homo sapien
cacccacgtagctttttcgtgtggc

SEQ ID NO: 903209 - DNA, 25 bp, Homo sapien
ccacgtagctttttcgtgtggccat

SEQ ID NO: 903210 - DNA, 25 bp, Homo sapien
caaaagcttgtatgagaatagtttc

SEQ ID NO: 903211 - DNA, 25 bp, Homo sapien
cctcgaaagccgagacaaaagcttg

SEQ ID NO: 903212 - DNA, 25 bp, Homo sapien
ttgggccataatttagcctggattc

SEQ ID NO: 903213 - DNA, 25 bp, Homo sapien
tcacctctcagtatggttatttgct

SEQ ID NO: 903214 - DNA, 25 bp, Homo sapien
gggtcagcaaaaatctgtggcagaa

SEQ ID NO: 903215 - DNA, 25 bp, Homo sapien
cagagggtcagcaaaaatctgtggc

SEQ ID NO: 903216 - DNA, 25 bp, Homo sapien
gtcagcaaaaatctgtggcagaagc

SEQ ID NO: 903217 - DNA, 25 bp, Homo sapien
gagggtcagcaaaaatctgtggcag

SEQ ID NO: 903218 - DNA, 25 bp, Homo sapien
tgagcagacatgtggtccagcatgg

SEQ ID NO: 903219 - DNA, 25 bp, Homo sapien
ttcaaggtctaccacactgctggtg

SEQ ID NO: 903220 - DNA, 25 bp, Homo sapien
aagggcctccacaaaaggcaagtgg

SEQ ID NO: 903221 - DNA, 25 bp, Homo sapien
aggcaagtggagaatgagcagacat

SEQ ID NO: 903222 - DNA, 25 bp, Homo sapien
gtcccgtggtctcgcaaaggtcctc

SEQ ID NO: 903223 - DNA, 25 bp, Homo sapien
tgtgtcccgtggtctcgcaaaggtc

SEQ ID NO: 903224 - DNA, 25 bp, Homo sapien
gtgtcccgtggtctcgcaaaggtcc

SEQ ID NO: 903225 - DNA, 25 bp, Homo sapien
tttgtgtcccgtggtctcgcaaagg

SEQ ID NO: 903226 - DNA, 25 bp, Homo sapien
caggccattgaatgaacgctacatt

SEQ ID NO: 903227 - DNA, 25 bp, Homo sapien
gggcactaatgaccaggaactcctt

SEQ ID NO: 903228 - DNA, 25 bp, Homo sapien
tctttctttggctcgtaatgcccaa

SEQ ID NO: 903229 - DNA, 25 bp, Homo sapien
ccaatagccagcatagacggtgttt

SEQ ID NO: 903230 - DNA, 25 bp, Homo sapien
gagtcatcagttttccagaccccat

SEQ ID NO: 903231 - DNA, 25 bp, Homo sapien
gtctgagtcatcagttttccagacc

SEQ ID NO: 903232 - DNA, 25 bp, Homo sapien
ctgagtcatcagttttccagacccc

SEQ ID NO: 903233 - DNA, 25 bp, Homo sapien
aagtctgagtcatcagttttccaga

SEQ ID NO: 903234 - DNA, 25 bp, Homo sapien
caccagtggtcatccccttaaccat

SEQ ID NO: 903235 - DNA, 25 bp, Homo sapien
gacaccagtggtcatccccttaacc

SEQ ID NO: 903236 - DNA, 25 bp, Homo sapien
agacaccagtggtcatccccttaac

SEQ ID NO: 903237 - DNA, 25 bp, Homo sapien
gagacaccagtggtcatccccttaa

SEQ ID NO: 903238 - DNA, 25 bp, Homo sapien
ccaccgcacttggttcttcactctt

SEQ ID NO: 903239 - DNA, 25 bp, Homo sapien
ttggttcttcactcttggaaatcat

SEQ ID NO: 903240 - DNA, 25 bp, Homo sapien
cttggttcttcactcttggaaatca

SEQ ID NO: 903241 - DNA, 25 bp, Homo sapien
ccgcacttggttcttcactcttgga

SEQ ID NO: 903242 - DNA, 25 bp, Homo sapien
taaggacattgggtgtgaactgatg

SEQ ID NO: 903243 - DNA, 25 bp, Homo sapien
ttcacctttaaggacattgggtgtg

SEQ ID NO: 903244 - DNA, 25 bp, Homo sapien
ccatccccatcagcacgcttaagtc

SEQ ID NO: 903245 - DNA, 25 bp, Homo sapien
ggtgtgaactgatgtctaggctctg

SEQ ID NO: 903246 - DNA, 25 bp, Homo sapien
gaaaaggtctgactacatggcagag

SEQ ID NO: 903247 - DNA, 25 bp, Homo sapien
tatcacagactgctgagatccgaac

SEQ ID NO: 903248 - DNA, 25 bp, Homo sapien
cacaggttgtgtcagagccacgaaa

SEQ ID NO: 903249 - DNA, 25 bp, Homo sapien
gatccgaactcttgtgattgggcca

SEQ ID NO: 903250 - DNA, 25 bp, Homo sapien
ccatccttggtgaggcacagggaga

SEQ ID NO: 903251 - DNA, 25 bp, Homo sapien
ctttcttagtttgtccatatccatt

SEQ ID NO: 903252 - DNA, 25 bp, Homo sapien
taatatcttagcagggtccttttca

SEQ ID NO: 903253 - DNA, 25 bp, Homo sapien
gacaacaacacagaagcccaggaga

SEQ ID NO: 903254 - DNA, 25 bp, Homo sapien
tacggagtctttcagccagaacctc

SEQ ID NO: 903255 - DNA, 25 bp, Homo sapien
cagggttgttggctacggagtcttt

SEQ ID NO: 903256 - DNA, 25 bp, Homo sapien
tccaaagagagtgcacatggacagc

SEQ ID NO: 903257 - DNA, 25 bp, Homo sapien
tcagccagaacctctctccaaagag

SEQ ID NO: 903258 - DNA, 25 bp, Homo sapien
gccccttcctgttggagcgttcacc

SEQ ID NO: 903259 - DNA, 25 bp, Homo sapien
tgagggtgcatattccatagggaag

SEQ ID NO: 903260 - DNA, 25 bp, Homo sapien
tttgaagtgagggtgcatattccat

SEQ ID NO: 903261 - DNA, 25 bp, Homo sapien
cttcctgttggagcgttcaccacca

SEQ ID NO: 903262 - DNA, 25 bp, Homo sapien
cactagctatggctgtcacaaaaac

SEQ ID NO: 903263 - DNA, 25 bp, Homo sapien
agtttatcgaatggcactgactcca

SEQ ID NO: 903264 - DNA, 25 bp, Homo sapien
cagtattctttatgaacagttccac

SEQ ID NO: 903265 - DNA, 25 bp, Homo sapien
actgactccaagtaacagtattctt

SEQ ID NO: 903266 - DNA, 25 bp, Homo sapien
tcatgttgatcaagacctgaaggac

SEQ ID NO: 903267 - DNA, 25 bp, Homo sapien
ggagcatggagccatctcagatggt

SEQ ID NO: 903268 - DNA, 25 bp, Homo sapien
gaaggctttcctgaggtcatgttga

SEQ ID NO: 903269 - DNA, 25 bp, Homo sapien
ttcctgaggtcatgttgatcaagac

SEQ ID NO: 903270 - DNA, 25 bp, Homo sapien
aatagccactccgtgttcctgggtg

SEQ ID NO: 903271 - DNA, 25 bp, Homo sapien
gctttgccaactggaggagattaga

SEQ ID NO: 903272 - DNA, 25 bp, Homo sapien
tagagctcctaatagccactccgtg

SEQ ID NO: 903273 - DNA, 25 bp, Homo sapien
tcttcttgcttagtttatgtgtggt

SEQ ID NO: 903274 - DNA, 25 bp, Homo sapien
gaaccaagagggcagctaagaacct

SEQ ID NO: 903275 - DNA, 25 bp, Homo sapien
ggattggacactgggctgcagctct

SEQ ID NO: 903276 - DNA, 25 bp, Homo sapien
ttttaatgttagatcctgtgcaggg

SEQ ID NO: 903277 - DNA, 25 bp, Homo sapien
tcaagatgcctaggcttgggacaac

SEQ ID NO: 903278 - DNA, 25 bp, Homo sapien
cattaggccacaggcccaaagaaat

SEQ ID NO: 903279 - DNA, 25 bp, Homo sapien
ccttctgatgaatcctgtcatcaca

SEQ ID NO: 903280 - DNA, 25 bp, Homo sapien
ttcattaggccacaggcccaaagaa

SEQ ID NO: 903281 - DNA, 25 bp, Homo sapien
caattcattaggccacaggcccaaa

SEQ ID NO: 903282 - DNA, 25 bp, Homo sapien
gagaataagcagtattttgttttct

SEQ ID NO: 903283 - DNA, 25 bp, Homo sapien
gcattaatttgcttagggtagtggc

SEQ ID NO: 903284 - DNA, 25 bp, Homo sapien
atttgcttagggtagtggcctccag

SEQ ID NO: 903285 - DNA, 25 bp, Homo sapien
agtgagaataagcagtattttgttt

SEQ ID NO: 903286 - DNA, 25 bp, Homo sapien
tgaaagtgagtccacaaagattgca

SEQ ID NO: 903287 - DNA, 25 bp, Homo sapien
aaccactgtagctaggataatcccc

SEQ ID NO: 903288 - DNA, 25 bp, Homo sapien
ggtccttatgtagatctggcttgtc

SEQ ID NO: 903289 - DNA, 25 bp, Homo sapien
tctcaccaacaagtaaccaacaagt

SEQ ID NO: 903290 - DNA, 25 bp, Homo sapien
tcatttgtgaaagatcttcaataaa

SEQ ID NO: 903291 - DNA, 25 bp, Homo sapien
aagatcttcaataaagagtatattt

SEQ ID NO: 903292 - DNA, 25 bp, Homo sapien
ttgtgaaagatcttcaataaagagt

SEQ ID NO: 903293 - DNA, 25 bp, Homo sapien
catttgtgaaagatcttcaataaag

SEQ ID NO: 903294 - DNA, 25 bp, Homo sapien
caaggaagttttggatagctctttc

SEQ ID NO: 903295 - DNA, 25 bp, Homo sapien
gatggcccagagatcatttgagtcc

SEQ ID NO: 903296 - DNA, 25 bp, Homo sapien
tattttgaaccagcgaaagtccctc

SEQ ID NO: 903297 - DNA, 25 bp, Homo sapien
agtatatgatggtttgatggcccag

SEQ ID NO: 903298 - DNA, 25 bp, Homo sapien
tccctggaagctcttagccaaggac

SEQ ID NO: 903299 - DNA, 25 bp, Homo sapien
gtttgcagctgcagttgacggagct

SEQ ID NO: 903300 - DNA, 25 bp, Homo sapien
ggaaataaaccgaagatgaagctgt

SEQ ID NO: 903301 - DNA, 25 bp, Homo sapien
agctgttagccatccccgagctcct

SEQ ID NO: 903302 - DNA, 25 bp, Homo sapien
gggagctggattgaaggtcacctct

SEQ ID NO: 903303 - DNA, 25 bp, Homo sapien
ctgtagggagctggattgaaggtca

SEQ ID NO: 903304 - DNA, 25 bp, Homo sapien
gctggattgaaggtcacctctttcc

SEQ ID NO: 903305 - DNA, 25 bp, Homo sapien
tagggagctggattgaaggtcacct

SEQ ID NO: 903306 - DNA, 25 bp, Homo sapien
tggcacatcccattgaagaccagct

SEQ ID NO: 903307 - DNA, 25 bp, Homo sapien
aaggtactgcttatggcacatccca

SEQ ID NO: 903308 - DNA, 25 bp, Homo sapien
ttgtagaaggtactgcttatggcac

SEQ ID NO: 903309 - DNA, 25 bp, Homo sapien
tactgcttatggcacatcccattga

SEQ ID NO: 903310 - DNA, 25 bp, Homo sapien
aaattagcatactgttggcagggtg

SEQ ID NO: 903311 - DNA, 25 bp, Homo sapien
aattagcatactgttggcagggtgt

SEQ ID NO: 903312 - DNA, 25 bp, Homo sapien
aaaattagcatactgttggcagggt

SEQ ID NO: 903313 - DNA, 25 bp, Homo sapien
ttagcatactgttggcagggtgtgg

SEQ ID NO: 903314 - DNA, 25 bp, Homo sapien
ttttggacccaagtgtaggatctta

SEQ ID NO: 903315 - DNA, 25 bp, Homo sapien
tctggttctgacatacaatgtgttc

SEQ ID NO: 903316 - DNA, 25 bp, Homo sapien
catcccattgctacagactgacaag

SEQ ID NO: 903317 - DNA, 25 bp, Homo sapien
tgccaggcttcatgccatctacata

SEQ ID NO: 903318 - DNA, 25 bp, Homo sapien
ctctaaaatggaagctgactgttgt

SEQ ID NO: 903319 - DNA, 25 bp, Homo sapien
aagctgactgttgtcttttatagcc

SEQ ID NO: 903320 - DNA, 25 bp, Homo sapien
gcctgaactaagaatttcctcgttg

SEQ ID NO: 903321 - DNA, 25 bp, Homo sapien
ttttatagcctgaactaagaatttc

SEQ ID NO: 903322 - DNA, 25 bp, Homo sapien
ctgctggcacctgtcacttctagtt

SEQ ID NO: 903323 - DNA, 25 bp, Homo sapien
gtcttcgtctgtggcctttgggtcc

SEQ ID NO: 903324 - DNA, 25 bp, Homo sapien
gtcctttccattttgcctgtcttcg

SEQ ID NO: 903325 - DNA, 25 bp, Homo sapien
gctggcacctgtcacttctagtttg

SEQ ID NO: 903326 - DNA, 25 bp, Homo sapien
aaaagggtttggctttcacacatca

SEQ ID NO: 903327 - DNA, 25 bp, Homo sapien
tacacccgtggattcaggagagact

SEQ ID NO: 903328 - DNA, 25 bp, Homo sapien
aaagtttgtaacatctcctgctgta

SEQ ID NO: 903329 - DNA, 25 bp, Homo sapien
tgtattgcagcaaagtccaggttag

SEQ ID NO: 903330 - DNA, 25 bp, Homo sapien
cttggagtaggtggatggtgagact

SEQ ID NO: 903331 - DNA, 25 bp, Homo sapien
acagaaggtcgaaactcaatggcca

SEQ ID NO: 903332 - DNA, 25 bp, Homo sapien
ccctgtgtgaccagtgtgggcagca

SEQ ID NO: 903333 - DNA, 25 bp, Homo sapien
ccacttcctgtacatagccttggag

SEQ ID NO: 903334 - DNA, 25 bp, Homo sapien
gcattctgaactgtgccaagctgtg

SEQ ID NO: 903335 - DNA, 25 bp, Homo sapien
tgaaattgagatctctgtaaggtgg

SEQ ID NO: 903336 - DNA, 25 bp, Homo sapien
ttgagatctctgtaaggtggcccat

SEQ ID NO: 903337 - DNA, 25 bp, Homo sapien
tggactcgcattctgaactgtgcca

SEQ ID NO: 903338 - DNA, 25 bp, Homo sapien
ctctgcctcagcgtagtgcctgcaa

SEQ ID NO: 903339 - DNA, 25 bp, Homo sapien
tgcctcagcgtagtgcctgcaacag

SEQ ID NO: 903340 - DNA, 25 bp, Homo sapien
cagcgtagtgcctgcaacaggccat

SEQ ID NO: 903341 - DNA, 25 bp, Homo sapien
gtcctctgcctcagcgtagtgcctg

SEQ ID NO: 903342 - DNA, 25 bp, Homo sapien
cttgtctctgtagtctggccagctc

SEQ ID NO: 903343 - DNA, 25 bp, Homo sapien
gtctctgtagtctggccagctccca

SEQ ID NO: 903344 - DNA, 25 bp, Homo sapien
agtctggccagctcccatgaactcg

SEQ ID NO: 903345 - DNA, 25 bp, Homo sapien
tgtagtctggccagctcccatgaac

SEQ ID NO: 903346 - DNA, 25 bp, Homo sapien
aacttgcccttacatttgcctgaga

SEQ ID NO: 903347 - DNA, 25 bp, Homo sapien
ctaagggaacttgcccttacatttg

SEQ ID NO: 903348 - DNA, 25 bp, Homo sapien
gggaacttgcccttacatttgcctg

SEQ ID NO: 903349 - DNA, 25 bp, Homo sapien
tgcccttacatttgcctgagaaaga

SEQ ID NO: 903350 - DNA, 25 bp, Homo sapien
tcaaccttttctctgccgtaaggac

SEQ ID NO: 903351 - DNA, 25 bp, Homo sapien
tttccatattcgtctctccctgaat

SEQ ID NO: 903352 - DNA, 25 bp, Homo sapien
cttccctcgggtacttgatccactt

SEQ ID NO: 903353 - DNA, 25 bp, Homo sapien
catctccagagttggttttggcatc

SEQ ID NO: 903354 - DNA, 25 bp, Homo sapien
tacttgatccacttctactgcctgc

SEQ ID NO: 903355 - DNA, 25 bp, Homo sapien
aaatctctcacagctgacccgtgag

SEQ ID NO: 903356 - DNA, 25 bp, Homo sapien
cagatggagctttgtccagttccca

SEQ ID NO: 903357 - DNA, 25 bp, Homo sapien
ctaaactatcagaacagtgcagcca

SEQ ID NO: 903358 - DNA, 25 bp, Homo sapien
ccagcaggattgttttgtatgtaga

SEQ ID NO: 903359 - DNA, 25 bp, Homo sapien
tggcagcctgtaatactgagcaaag

SEQ ID NO: 903360 - DNA, 25 bp, Homo sapien
gagaaactacactatctggcagcct

SEQ ID NO: 903361 - DNA, 25 bp, Homo sapien
tccctggtgttactgtgcctacgag

SEQ ID NO: 903362 - DNA, 25 bp, Homo sapien
tagaggtctgtgcaagtctccacgt

SEQ ID NO: 903363 - DNA, 25 bp, Homo sapien
tttcctgagtgaattcagggttcca

SEQ ID NO: 903364 - DNA, 25 bp, Homo sapien
tctctgaactgtagatacattcaag

SEQ ID NO: 903365 - DNA, 25 bp, Homo sapien
tgtagatacattcaagaaaggccat

SEQ ID NO: 903366 - DNA, 25 bp, Homo sapien
cagggttccagttgcaggctgaatt

SEQ ID NO: 903367 - DNA, 25 bp, Homo sapien
gaacattcttatgacggcctctgta

SEQ ID NO: 903368 - DNA, 25 bp, Homo sapien
gatcttactgaactgaacaatccca

SEQ ID NO: 903369 - DNA, 25 bp, Homo sapien
tgaactaacgccctaccttgtagga

SEQ ID NO: 903370 - DNA, 25 bp, Homo sapien
caatcccaagggtacatatatctac

SEQ ID NO: 903371 - DNA, 25 bp, Homo sapien
tttctgccagagaacaggcacatct

SEQ ID NO: 903372 - DNA, 25 bp, Homo sapien
ggtcagccgtgtctgttctctggca

SEQ ID NO: 903373 - DNA, 25 bp, Homo sapien
acatctgtccactggaaaggtcagc

SEQ ID NO: 903374 - DNA, 25 bp, Homo sapien
cggagatgggtgtagagaaaaagcc

SEQ ID NO: 903375 - DNA, 25 bp, Homo sapien
ctttggatacctgctaaatctgaca

SEQ ID NO: 903376 - DNA, 25 bp, Homo sapien
tttggatacctgctaaatctgacaa

SEQ ID NO: 903377 - DNA, 25 bp, Homo sapien
ctaaatctgacaacctgctgtacat

SEQ ID NO: 903378 - DNA, 25 bp, Homo sapien
gagtctgaggctcctatccttttgc

SEQ ID NO: 903379 - DNA, 25 bp, Homo sapien
gctctgtaaattggcagtgaggctt

SEQ ID NO: 903380 - DNA, 25 bp, Homo sapien
gggaagctgcaacccatatcatttt

SEQ ID NO: 903381 - DNA, 25 bp, Homo sapien
tatccttttgctcgttacaactggg

SEQ ID NO: 903382 - DNA, 25 bp, Homo sapien
tggcttcacttggcggttgaaagaa

SEQ ID NO: 903383 - DNA, 25 bp, Homo sapien
tgaatgataccatcataagacatgg

SEQ ID NO: 903384 - DNA, 25 bp, Homo sapien
aaaattgttgaatgataccatcata

SEQ ID NO: 903385 - DNA, 25 bp, Homo sapien
tcacttggcggttgaaagaatacaa

SEQ ID NO: 903386 - DNA, 25 bp, Homo sapien
tgtgcgagtctactgtaaatggagt

SEQ ID NO: 903387 - DNA, 25 bp, Homo sapien
tgtgtcactgtgtgcgagtctactg

SEQ ID NO: 903388 - DNA, 25 bp, Homo sapien
ttaaggatctaccacacttttctgt

SEQ ID NO: 903389 - DNA, 25 bp, Homo sapien
tggagttccttccactcttacaagt

SEQ ID NO: 903390 - DNA, 25 bp, Homo sapien
gatgtaaaaggattcttccattgct

SEQ ID NO: 903391 - DNA, 25 bp, Homo sapien
tgatgtaaaaggattcttccattgc

SEQ ID NO: 903392 - DNA, 25 bp, Homo sapien
ttgagttcttgatgtaaaaggattc

SEQ ID NO: 903393 - DNA, 25 bp, Homo sapien
ttcttgatgtaaaaggattcttcca

SEQ ID NO: 903394 - DNA, 25 bp, Homo sapien
cacatgcatgatatccaaggtcgac

SEQ ID NO: 903395 - DNA, 25 bp, Homo sapien
gaccatctttgctactgcgcagtga

SEQ ID NO: 903396 - DNA, 25 bp, Homo sapien
caggttccggtaccaaagaagatgc

SEQ ID NO: 903397 - DNA, 25 bp, Homo sapien
tttctgcataagaaagggctgcctc

SEQ ID NO: 903398 - DNA, 25 bp, Homo sapien
cctgtacaatgaaagagggccttgc

SEQ ID NO: 903399 - DNA, 25 bp, Homo sapien
gcgcccacctagttcagagtaaaag

SEQ ID NO: 903400 - DNA, 25 bp, Homo sapien
taagttggaaaaacatcagcccaga

SEQ ID NO: 903401 - DNA, 25 bp, Homo sapien
tattccaggcaagctaagtactaga

SEQ ID NO: 903402 - DNA, 25 bp, Homo sapien
gagccctggctaaggattttttcca

SEQ ID NO: 903403 - DNA, 25 bp, Homo sapien
taggaaagtgcctgtgatgggccct

SEQ ID NO: 903404 - DNA, 25 bp, Homo sapien
gatgggccctttcaaactcatggct

SEQ ID NO: 903405 - DNA, 25 bp, Homo sapien
tgattcaaggctcacaagggaacct

SEQ ID NO: 903406 - DNA, 25 bp, Homo sapien
gacgtgcctgctatatggctcgggc

SEQ ID NO: 903407 - DNA, 25 bp, Homo sapien
catgggtctcagcttggtgggcaca

SEQ ID NO: 903408 - DNA, 25 bp, Homo sapien
cacacagcacgatttgaggttggca

SEQ ID NO: 903409 - DNA, 25 bp, Homo sapien
caccctcgcagtagttggcatgata

SEQ ID NO: 903410 - DNA, 25 bp, Homo sapien
gaggaaaggtctgtgcgactgctcc

SEQ ID NO: 903411 - DNA, 25 bp, Homo sapien
aggtctgtgcgactgctccttttcc

SEQ ID NO: 903412 - DNA, 25 bp, Homo sapien
ggaaaggtctgtgcgactgctcctt

SEQ ID NO: 903413 - DNA, 25 bp, Homo sapien
aaaggtctgtgcgactgctcctttt

SEQ ID NO: 903414 - DNA, 25 bp, Homo sapien
gctggcgccactctcctggcactgc

SEQ ID NO: 903415 - DNA, 25 bp, Homo sapien
caagctggcgccactctcctggcac

SEQ ID NO: 903416 - DNA, 25 bp, Homo sapien
tggcgccactctcctggcactgctc

SEQ ID NO: 903417 - DNA, 25 bp, Homo sapien
gcgccactctcctggcactgctcac

SEQ ID NO: 903418 - DNA, 25 bp, Homo sapien
aagacatgccaggtgctcttccgag

SEQ ID NO: 903419 - DNA, 25 bp, Homo sapien
cgtctactactttttcagagagcaa

SEQ ID NO: 903420 - DNA, 25 bp, Homo sapien
atccgaacgtccagggagctcttgc

SEQ ID NO: 903421 - DNA, 25 bp, Homo sapien
cctggtccagcaaccgctggatgct

SEQ ID NO: 903422 - DNA, 25 bp, Homo sapien
ttggaaatctcgaagtgcagcgtct

SEQ ID NO: 903423 - DNA, 25 bp, Homo sapien
tccaccactgacaggtcactgcctt

SEQ ID NO: 903424 - DNA, 25 bp, Homo sapien
cttcccctgtgtccaagctgccctg

SEQ ID NO: 903425 - DNA, 25 bp, Homo sapien
tttaggaagagccagacttctgcac

SEQ ID NO: 903426 - DNA, 25 bp, Homo sapien
gcactcgtaaatttcaggcaagcag

SEQ ID NO: 903427 - DNA, 25 bp, Homo sapien
gaataggggtcaacaaatgacagcc

SEQ ID NO: 903428 - DNA, 25 bp, Homo sapien
catttacatgcactcgtaaatttca

SEQ ID NO: 903429 - DNA, 25 bp, Homo sapien
tgtgacagaccctcttgaatagggg

SEQ ID NO: 903430 - DNA, 25 bp, Homo sapien
ggaaatccccacattgtcagggcag

SEQ ID NO: 903431 - DNA, 25 bp, Homo sapien
taatgggcaccagaaacatatgtca

SEQ ID NO: 903432 - DNA, 25 bp, Homo sapien
tgccagcctggtttagaatgcccgg

SEQ ID NO: 903433 - DNA, 25 bp, Homo sapien
gaatttagcaaccactcagttccag

SEQ ID NO: 903434 - DNA, 25 bp, Homo sapien
tacatgtatcccatgcacaaatctg

SEQ ID NO: 903435 - DNA, 25 bp, Homo sapien
tcttttccatgaccgtggacctcct

SEQ ID NO: 903436 - DNA, 25 bp, Homo sapien
caactgtctgctgtacatgtatccc

SEQ ID NO: 903437 - DNA, 25 bp, Homo sapien
tggacctccttacaactgtctgctg

SEQ ID NO: 903438 - DNA, 25 bp, Homo sapien
tttctatagttaacggaaatccagc

SEQ ID NO: 903439 - DNA, 25 bp, Homo sapien
gatttctatagttaacggaaatcca

SEQ ID NO: 903440 - DNA, 25 bp, Homo sapien
ttgcaactccctgggaggatctccc

SEQ ID NO: 903441 - DNA, 25 bp, Homo sapien
gcaactccctgggaggatctccctg

SEQ ID NO: 903442 - DNA, 25 bp, Homo sapien
ataaattttaggcacagtttcaagt

SEQ ID NO: 903443 - DNA, 25 bp, Homo sapien
ctataaattttaggcacagtttcaa

SEQ ID NO: 903444 - DNA, 25 bp, Homo sapien
aattttaggcacagtttcaagttct

SEQ ID NO: 903445 - DNA, 25 bp, Homo sapien
tataaattttaggcacagtttcaag

SEQ ID NO: 903446 - DNA, 25 bp, Homo sapien
tcttaatttaacacactctgcacac

SEQ ID NO: 903447 - DNA, 25 bp, Homo sapien
gtggtaaattcactgaggcaagggc

SEQ ID NO: 903448 - DNA, 25 bp, Homo sapien
gcattgcgtactgtggattctgttc

SEQ ID NO: 903449 - DNA, 25 bp, Homo sapien
gattatgatagtggtaaattcactg

SEQ ID NO: 903450 - DNA, 25 bp, Homo sapien
taaggggagttcctctgactccgac

SEQ ID NO: 903451 - DNA, 25 bp, Homo sapien
gggagttcctctgactccgacctca

SEQ ID NO: 903452 - DNA, 25 bp, Homo sapien
gtggtaaggggagttcctctgactc

SEQ ID NO: 903453 - DNA, 25 bp, Homo sapien
ggagttcctctgactccgacctcat

SEQ ID NO: 903454 - DNA, 25 bp, Homo sapien
caagccttggataactagcctggag

SEQ ID NO: 903455 - DNA, 25 bp, Homo sapien
tagatagaataccagagcagagaga

SEQ ID NO: 903456 - DNA, 25 bp, Homo sapien
tcagcagttgattttagggtggcag

SEQ ID NO: 903457 - DNA, 25 bp, Homo sapien
gaattcgatattcccctttgctaag

SEQ ID NO: 903458 - DNA, 25 bp, Homo sapien
aaatgctgttgccataatgctcagg

SEQ ID NO: 903459 - DNA, 25 bp, Homo sapien
gatgagactgctggaaactgacgtg

SEQ ID NO: 903460 - DNA, 25 bp, Homo sapien
cagtgacactttcaagatgccccaa

SEQ ID NO: 903461 - DNA, 25 bp, Homo sapien
tatattaagcctcggaatgtcctag

SEQ ID NO: 903462 - DNA, 25 bp, Homo sapien
gagcaggcggtaactgataatcacc

SEQ ID NO: 903463 - DNA, 25 bp, Homo sapien
gagagcgtgtaacccctaaaggcat

SEQ ID NO: 903464 - DNA, 25 bp, Homo sapien
gcaaaagtctttggaacgcgccctc

SEQ ID NO: 903465 - DNA, 25 bp, Homo sapien
tcaccaagattagggcgctacagac

SEQ ID NO: 903466 - DNA, 25 bp, Homo sapien
tatacaaagacaggaagcaaccctc

SEQ ID NO: 903467 - DNA, 25 bp, Homo sapien
catattgctagtaacggtagtgcgg

SEQ ID NO: 903468 - DNA, 25 bp, Homo sapien
taaaggcaactggatacgagctgtc

SEQ ID NO: 903469 - DNA, 25 bp, Homo sapien
caagtccagtaagtcagaaagaggg

SEQ ID NO: 903470 - DNA, 25 bp, Homo sapien
agccaaactgggaagcttgtaggac

SEQ ID NO: 903471 - DNA, 25 bp, Homo sapien
gtgagagagccaaactgggaagctt

SEQ ID NO: 903472 - DNA, 25 bp, Homo sapien
gagagccaaactgggaagcttgtag

SEQ ID NO: 903473 - DNA, 25 bp, Homo sapien
tgcacccccggaaagatgccctggt

SEQ ID NO: 903474 - DNA, 25 bp, Homo sapien
gtggtgcctgtgcacttatagacat

SEQ ID NO: 903475 - DNA, 25 bp, Homo sapien
tctaaaggtaaaaatgactgtcact

SEQ ID NO: 903476 - DNA, 25 bp, Homo sapien
tagctcttccctgtcttgaatgtgg

SEQ ID NO: 903477 - DNA, 25 bp, Homo sapien
aagtaactgctggttcaatgacaac

SEQ ID NO: 903478 - DNA, 25 bp, Homo sapien
gaaaatgccgcggctttcctccggc

SEQ ID NO: 903479 - DNA, 25 bp, Homo sapien
tctgctcccctagcacccgaaaatg

SEQ ID NO: 903480 - DNA, 25 bp, Homo sapien
ccctagcacccgaaaatgccgcggc

SEQ ID NO: 903481 - DNA, 25 bp, Homo sapien
aaaatgccgcggctttcctccggct

SEQ ID NO: 903482 - DNA, 25 bp, Homo sapien
gtcatctccaggcagagctcgaccg

SEQ ID NO: 903483 - DNA, 25 bp, Homo sapien
gagctcgaccgagaattccttttct

SEQ ID NO: 903484 - DNA, 25 bp, Homo sapien
tgacccgctgggtttagtaagtgta

SEQ ID NO: 903485 - DNA, 25 bp, Homo sapien
ggctagtccgctaccatcacctaat

SEQ ID NO: 903486 - DNA, 25 bp, Homo sapien
tctggctgagagttgggtacatcct

SEQ ID NO: 903487 - DNA, 25 bp, Homo sapien
tgactcggcaaacgtgatgatctcc

SEQ ID NO: 903488 - DNA, 25 bp, Homo sapien
ttaaaatgtgcttcttgacggcctc

SEQ ID NO: 903489 - DNA, 25 bp, Homo sapien
gatgatctccgaggtctgctccata

SEQ ID NO: 903490 - DNA, 25 bp, Homo sapien
aacagaaatcctctcagccaaagca

SEQ ID NO: 903491 - DNA, 25 bp, Homo sapien
ccagcaacttgccaacagaaatcct

SEQ ID NO: 903492 - DNA, 25 bp, Homo sapien
ttgccaacagaaatcctctcagcca

SEQ ID NO: 903493 - DNA, 25 bp, Homo sapien
caacttgccaacagaaatcctctca

SEQ ID NO: 903494 - DNA, 25 bp, Homo sapien
gcagcaaaagttgttgtgattgcct

SEQ ID NO: 903495 - DNA, 25 bp, Homo sapien
cctcacgcgcaggtttttttgtgtg

SEQ ID NO: 903496 - DNA, 25 bp, Homo sapien
tggcagcaaaagttgttgtgattgc

SEQ ID NO: 903497 - DNA, 25 bp, Homo sapien
ccctcacgcgcaggtttttttgtgt

SEQ ID NO: 903498 - DNA, 25 bp, Homo sapien
gactgtctccgagtaagagagaagg

SEQ ID NO: 903499 - DNA, 25 bp, Homo sapien
tcagggaggagagttctgactgtct

SEQ ID NO: 903500 - DNA, 25 bp, Homo sapien
gagttctgactgtctccgagtaaga

SEQ ID NO: 903501 - DNA, 25 bp, Homo sapien
ggtttgtggctgtcagggaggagag

SEQ ID NO: 903502 - DNA, 25 bp, Homo sapien
cacctagtgtgttcatagcattaca

SEQ ID NO: 903503 - DNA, 25 bp, Homo sapien
tacagtttgcacaggttaacaatgc

SEQ ID NO: 903504 - DNA, 25 bp, Homo sapien
gggtttcagctccagaaacatcaat

SEQ ID NO: 903505 - DNA, 25 bp, Homo sapien
tagcattacagtcaagcaatgcagt

SEQ ID NO: 903506 - DNA, 25 bp, Homo sapien
ccggctcttgtatcatgtggtaaga

SEQ ID NO: 903507 - DNA, 25 bp, Homo sapien
tctgagctcctcttcatggtattgg

SEQ ID NO: 903508 - DNA, 25 bp, Homo sapien
actcttccaccagccggctcttgta

SEQ ID NO: 903509 - DNA, 25 bp, Homo sapien
gagctcctcttcatggtattggcac

SEQ ID NO: 903510 - DNA, 25 bp, Homo sapien
ccattaggacaccagaagttttctg

SEQ ID NO: 903511 - DNA, 25 bp, Homo sapien
tccattaggacaccagaagttttct

SEQ ID NO: 903512 - DNA, 25 bp, Homo sapien
attaggacaccagaagttttctgtg

SEQ ID NO: 903513 - DNA, 25 bp, Homo sapien
ttccattaggacaccagaagttttc

SEQ ID NO: 903514 - DNA, 25 bp, Homo sapien
tggcagcttccagggatcacgccgg

SEQ ID NO: 903515 - DNA, 25 bp, Homo sapien
gggcaacttcttttaagagcagctc

SEQ ID NO: 903516 - DNA, 25 bp, Homo sapien
gagccagggccaagccggtctaagc

SEQ ID NO: 903517 - DNA, 25 bp, Homo sapien
aagcggcagcctctatttttaccct

SEQ ID NO: 903518 - DNA, 25 bp, Homo sapien
tccacgctggagcatttgcatggct

SEQ ID NO: 903519 - DNA, 25 bp, Homo sapien
agccactagcgaacccggtggagca

SEQ ID NO: 903520 - DNA, 25 bp, Homo sapien
tctgttctcgcctcgaggagcagcc

SEQ ID NO: 903521 - DNA, 25 bp, Homo sapien
tgatttactggcgacttcacaaacc

SEQ ID NO: 903522 - DNA, 25 bp, Homo sapien
tgacacctagcttagggccacggcc

SEQ ID NO: 903523 - DNA, 25 bp, Homo sapien
acacctagcttagggccacggccaa

SEQ ID NO: 903524 - DNA, 25 bp, Homo sapien
cacctagcttagggccacggccaac

SEQ ID NO: 903525 - DNA, 25 bp, Homo sapien
ggtgacacctagcttagggccacgg

SEQ ID NO: 903526 - DNA, 25 bp, Homo sapien
agctttcatccacgctattaactgg

SEQ ID NO: 903527 - DNA, 25 bp, Homo sapien
ccttcagctttcatccacgctatta

SEQ ID NO: 903528 - DNA, 25 bp, Homo sapien
ttaactggtctctttcctcactact

SEQ ID NO: 903529 - DNA, 25 bp, Homo sapien
ttcatccacgctattaactggtctc

SEQ ID NO: 903530 - DNA, 25 bp, Homo sapien
gaagacatggtggtttagcacgtag

SEQ ID NO: 903531 - DNA, 25 bp, Homo sapien
ccattggactgataagagagcagca

SEQ ID NO: 903532 - DNA, 25 bp, Homo sapien
gagcagcaatcttgatttgcatcca

SEQ ID NO: 903533 - DNA, 25 bp, Homo sapien
taagttccattggtgacttgaagac

SEQ ID NO: 903534 - DNA, 25 bp, Homo sapien
tataagcactctactaggtgagagg

SEQ ID NO: 903535 - DNA, 25 bp, Homo sapien
cccctaactggtaccatgaagaaca

SEQ ID NO: 903536 - DNA, 25 bp, Homo sapien
gaacctgtttgttgcgattaaggca

SEQ ID NO: 903537 - DNA, 25 bp, Homo sapien
ggaactgtcagaccatgtcacatga

SEQ ID NO: 903538 - DNA, 25 bp, Homo sapien
gcagacctgaacattccagacttac

SEQ ID NO: 903539 - DNA, 25 bp, Homo sapien
tgcagacctgaacattccagactta

SEQ ID NO: 903540 - DNA, 25 bp, Homo sapien
ctgcagacctgaacattccagactt

SEQ ID NO: 903541 - DNA, 25 bp, Homo sapien
cttctggtgcatctgaatagtaaga

SEQ ID NO: 903542 - DNA, 25 bp, Homo sapien
agctgtctgtcagcgggaagaggct

SEQ ID NO: 903543 - DNA, 25 bp, Homo sapien
ggaagaggctgaggcgcccccttct

SEQ ID NO: 903544 - DNA, 25 bp, Homo sapien
cagctgtctgtcagcgggaagaggc

SEQ ID NO: 903545 - DNA, 25 bp, Homo sapien
gttgaagacgcagaacaaaaaatgt

SEQ ID NO: 903546 - DNA, 25 bp, Homo sapien
gaaaccctgtagcaattgggcacct

SEQ ID NO: 903547 - DNA, 25 bp, Homo sapien
taaatgacatccatcctaagcttaa

SEQ ID NO: 903548 - DNA, 25 bp, Homo sapien
tgtctgcttccaataccaaaaattg

SEQ ID NO: 903549 - DNA, 25 bp, Homo sapien
tgtgacaaagcctctgttcctccat

SEQ ID NO: 903550 - DNA, 25 bp, Homo sapien
ctgtgacaaagcctctgttcctcca

SEQ ID NO: 903551 - DNA, 25 bp, Homo sapien
ggccatgtccagttcattttccttt

SEQ ID NO: 903552 - DNA, 25 bp, Homo sapien
tggccatgtccagttcattttcctt

SEQ ID NO: 903553 - DNA, 25 bp, Homo sapien
tgccagatacccaccattgcctgtt

SEQ ID NO: 903554 - DNA, 25 bp, Homo sapien
gtgccagatacccaccattgcctgt

SEQ ID NO: 903555 - DNA, 25 bp, Homo sapien
gccagatacccaccattgcctgttc

SEQ ID NO: 903556 - DNA, 25 bp, Homo sapien
caactttcatttggatgaggcactt

SEQ ID NO: 903557 - DNA, 25 bp, Homo sapien
aactttcatttggatgaggcacttc

SEQ ID NO: 903558 - DNA, 25 bp, Homo sapien
tcctgtgcgaaccaccaggttccct

SEQ ID NO: 903559 - DNA, 25 bp, Homo sapien
tcaggttcacggtcatttgatcccc

SEQ ID NO: 903560 - DNA, 25 bp, Homo sapien
accaggttccctctttccattgtca

SEQ ID NO: 903561 - DNA, 25 bp, Homo sapien
tgtaacttcatttgcagccacccct

SEQ ID NO: 903562 - DNA, 25 bp, Homo sapien
tatttctagttttagcagcacaaca

SEQ ID NO: 903563 - DNA, 25 bp, Homo sapien
tcaaacagctccagttatttctagt

SEQ ID NO: 903564 - DNA, 25 bp, Homo sapien
tctagttttagcagcacaacaaata

SEQ ID NO: 903565 - DNA, 25 bp, Homo sapien
tagttttagcagcacaacaaataat

SEQ ID NO: 903566 - DNA, 25 bp, Homo sapien
agttgctgaggcacaattttcccag

SEQ ID NO: 903567 - DNA, 25 bp, Homo sapien
ggtggataaagctgggcactgcccc

SEQ ID NO: 903568 - DNA, 25 bp, Homo sapien
catgatcttgtgaatatagcaagtt

SEQ ID NO: 903569 - DNA, 25 bp, Homo sapien
gaggcacaattttcccaggtggata

SEQ ID NO: 903570 - DNA, 25 bp, Homo sapien
tcccgctgacaaagcactcaccatg

SEQ ID NO: 903571 - DNA, 25 bp, Homo sapien
catcccgctgacaaagcactcacca

SEQ ID NO: 903572 - DNA, 25 bp, Homo sapien
tgccatcccgctgacaaagcactca

SEQ ID NO: 903573 - DNA, 25 bp, Homo sapien
actgccatcccgctgacaaagcact

SEQ ID NO: 903574 - DNA, 25 bp, Homo sapien
tagggacacagcttgtcatacttaa

SEQ ID NO: 903575 - DNA, 25 bp, Homo sapien
gtatggcccatttgttactaacact

SEQ ID NO: 903576 - DNA, 25 bp, Homo sapien
tgtgaggcataagaatccgattgat

SEQ ID NO: 903577 - DNA, 25 bp, Homo sapien
gaatccgattgatatcagtgtgtat

SEQ ID NO: 903578 - DNA, 25 bp, Homo sapien
tccagtaagaagacgactgtgacca

SEQ ID NO: 903579 - DNA, 25 bp, Homo sapien
catcagagaagtgtgcagttggcag

SEQ ID NO: 903580 - DNA, 25 bp, Homo sapien
cagttggcaggcgtagtgagcctct

SEQ ID NO: 903581 - DNA, 25 bp, Homo sapien
atacccaccccgtagagggcagtgc

SEQ ID NO: 903582 - DNA, 25 bp, Homo sapien
ggctggctacgaagaacatacggct

SEQ ID NO: 903583 - DNA, 25 bp, Homo sapien
tgtttagttaacagggatacttgca

SEQ ID NO: 903584 - DNA, 25 bp, Homo sapien
gctctgcacttcactagccacatat

SEQ ID NO: 903585 - DNA, 25 bp, Homo sapien
tgtattgttcgtatgaagcaggctg

SEQ ID NO: 903586 - DNA, 25 bp, Homo sapien
gactcctctaggttgatatcctggg

SEQ ID NO: 903587 - DNA, 25 bp, Homo sapien
ctaggttgatatcctgggccagagg

SEQ ID NO: 903588 - DNA, 25 bp, Homo sapien
cagcatagcagactcctctaggttg

SEQ ID NO: 903589 - DNA, 25 bp, Homo sapien
tgttggggtggtatccagcatagca

SEQ ID NO: 903590 - DNA, 25 bp, Homo sapien
ctctgaaacagtagggattgcggga

SEQ ID NO: 903591 - DNA, 25 bp, Homo sapien
gactggcagttacccgccatgagga

SEQ ID NO: 903592 - DNA, 25 bp, Homo sapien
gggtgagcacacgtccagtgaactg

SEQ ID NO: 903593 - DNA, 25 bp, Homo sapien
tgcaggcccacggatgtcagatctt

SEQ ID NO: 903594 - DNA, 25 bp, Homo sapien
caagtgccatgaagggcatagcaga

SEQ ID NO: 903595 - DNA, 25 bp, Homo sapien
cacttactataggtccaacataggg

SEQ ID NO: 903596 - DNA, 25 bp, Homo sapien
gactaacctgatccagagggtctta

SEQ ID NO: 903597 - DNA, 25 bp, Homo sapien
tgccctagttgaaatgcagcagtaa

SEQ ID NO: 903598 - DNA, 25 bp, Homo sapien
ctgggctggctgcaattaggactgg

SEQ ID NO: 903599 - DNA, 25 bp, Homo sapien
ggctggctgcaattaggactggcta

SEQ ID NO: 903600 - DNA, 25 bp, Homo sapien
ctggcccctaaactggtttctgagt

SEQ ID NO: 903601 - DNA, 25 bp, Homo sapien
ggctgcaattaggactggctatacc

SEQ ID NO: 903602 - DNA, 25 bp, Homo sapien
caccagtcgcctaaatgccaactgg

SEQ ID NO: 903603 - DNA, 25 bp, Homo sapien
accagtcgcctaaatgccaactggt

SEQ ID NO: 903604 - DNA, 25 bp, Homo sapien
tcacaatagcacgagtgaatgtcgt

SEQ ID NO: 903605 - DNA, 25 bp, Homo sapien
tagcacgagtgaatgtcgtgccttc

SEQ ID NO: 903606 - DNA, 25 bp, Homo sapien
caatagcacgagtgaatgtcgtgcc

SEQ ID NO: 903607 - DNA, 25 bp, Homo sapien
ctgcagcgtcttcacaatagcacga

SEQ ID NO: 903608 - DNA, 25 bp, Homo sapien
gtgcatgaccagctggaaactccag

SEQ ID NO: 903609 - DNA, 25 bp, Homo sapien
gagggaccgtacaaactcacaggcc

SEQ ID NO: 903610 - DNA, 25 bp, Homo sapien
catcaaagtagtgcctctcatctgt

SEQ ID NO: 903611 - DNA, 25 bp, Homo sapien
acaggccacatcaaagtagtgcctc

SEQ ID NO: 903612 - DNA, 25 bp, Homo sapien
ctgcccaaaggtttgctttgcctct

SEQ ID NO: 903613 - DNA, 25 bp, Homo sapien
gcttctgtccttgaccggtctcttc

SEQ ID NO: 903614 - DNA, 25 bp, Homo sapien
tcttctgtctgagacccaagggcct

SEQ ID NO: 903615 - DNA, 25 bp, Homo sapien
gctgcccaaaggtttgctttgcctc

SEQ ID NO: 903616 - DNA, 25 bp, Homo sapien
ctttcttgtggtcacaaaaaggatc

SEQ ID NO: 903617 - DNA, 25 bp, Homo sapien
cttgtggtcacaaaaaggatccctg

SEQ ID NO: 903618 - DNA, 25 bp, Homo sapien
ttcttgtggtcacaaaaaggatccc

SEQ ID NO: 903619 - DNA, 25 bp, Homo sapien
aatctttcttgtggtcacaaaaagg

SEQ ID NO: 903620 - DNA, 25 bp, Homo sapien
atcacaagtttccatcagctctttt

SEQ ID NO: 903621 - DNA, 25 bp, Homo sapien
cccatcacaagtttccatcagctct

SEQ ID NO: 903622 - DNA, 25 bp, Homo sapien
ccatcacaagtttccatcagctctt

SEQ ID NO: 903623 - DNA, 25 bp, Homo sapien
ccctgtgcaacctggatgcattttc

SEQ ID NO: 903624 - DNA, 25 bp, Homo sapien
tcttcagacatcaagtttaccccaa

SEQ ID NO: 903625 - DNA, 25 bp, Homo sapien
cctgtgcaacctggatgcattttct

SEQ ID NO: 903626 - DNA, 25 bp, Homo sapien
gacatcaagtttaccccaactggat

SEQ ID NO: 903627 - DNA, 25 bp, Homo sapien
tcctccgtgtctgttttagattccc

SEQ ID NO: 903628 - DNA, 25 bp, Homo sapien
cctcctccgtgtctgttttagattc

SEQ ID NO: 903629 - DNA, 25 bp, Homo sapien
ctcctccgtgtctgttttagattcc

SEQ ID NO: 903630 - DNA, 25 bp, Homo sapien
tcttccatattcttgttctgtctca

SEQ ID NO: 903631 - DNA, 25 bp, Homo sapien
ccatattcttgttctgtctcaaaat

SEQ ID NO: 903632 - DNA, 25 bp, Homo sapien
ttcttgttctgtctcaaaataccca

SEQ ID NO: 903633 - DNA, 25 bp, Homo sapien
ttctgtctcaaaatacccaagaata

SEQ ID NO: 903634 - DNA, 25 bp, Homo sapien
ccccgccatgctaagagttgcttga

SEQ ID NO: 903635 - DNA, 25 bp, Homo sapien
cactgcagtcgagttatttgccaca

SEQ ID NO: 903636 - DNA, 25 bp, Homo sapien
tgcttgagggcagcagtagtctcct

SEQ ID NO: 903637 - DNA, 25 bp, Homo sapien
caatgagctccaaggaatccacaca

SEQ ID NO: 903638 - DNA, 25 bp, Homo sapien
atgtatgtaacagaacctccttcat

SEQ ID NO: 903639 - DNA, 25 bp, Homo sapien
tgtatgtaacagaacctccttcatt

SEQ ID NO: 903640 - DNA, 25 bp, Homo sapien
gtatgtaacagaacctccttcattt

SEQ ID NO: 903641 - DNA, 25 bp, Homo sapien
ggaacagtgcatttgtatcttaatc

SEQ ID NO: 903642 - DNA, 25 bp, Homo sapien
gggaacagtgcatttgtatcttaat

SEQ ID NO: 903643 - DNA, 25 bp, Homo sapien
gaacagtgcatttgtatcttaatca

SEQ ID NO: 903644 - DNA, 25 bp, Homo sapien
aacagtgcatttgtatcttaatcat

SEQ ID NO: 903645 - DNA, 25 bp, Homo sapien
gctgtgtgttaacctgaacctggtt

SEQ ID NO: 903646 - DNA, 25 bp, Homo sapien
gcatcatcaatgtggaattcaggca

SEQ ID NO: 903647 - DNA, 25 bp, Homo sapien
tggaaagactccttcatcagttctc

SEQ ID NO: 903648 - DNA, 25 bp, Homo sapien
ttcaggcaatgcttttactctaagg

SEQ ID NO: 903649 - DNA, 25 bp, Homo sapien
gctctcatcattaagcacaactcct

SEQ ID NO: 903650 - DNA, 25 bp, Homo sapien
cattaagcacaactccttcatgtct

SEQ ID NO: 903651 - DNA, 25 bp, Homo sapien
tcatgtctttcaaatgtaggggaca

SEQ ID NO: 903652 - DNA, 25 bp, Homo sapien
caacgctctcatcattaagcacaac

SEQ ID NO: 903653 - DNA, 25 bp, Homo sapien
tgaatagggcaatggattacacgca

SEQ ID NO: 903654 - DNA, 25 bp, Homo sapien
agatgtgcttaggagcagtgactga

SEQ ID NO: 903655 - DNA, 25 bp, Homo sapien
tttgaaaagggcactggctcctaga

SEQ ID NO: 903656 - DNA, 25 bp, Homo sapien
caggcatgtgaaagagtcagcttgt

SEQ ID NO: 903657 - DNA, 25 bp, Homo sapien
cgcctgctggcccagaattctctca

SEQ ID NO: 903658 - DNA, 25 bp, Homo sapien
ctttgcctgatactttgcccgcgca

SEQ ID NO: 903659 - DNA, 25 bp, Homo sapien
cccgcgcatacaggattatggaaga

SEQ ID NO: 903660 - DNA, 25 bp, Homo sapien
tggaagaaatatatggccgcctgct

SEQ ID NO: 903661 - DNA, 25 bp, Homo sapien
gtgccacaacatccgtatccagaaa

SEQ ID NO: 903662 - DNA, 25 bp, Homo sapien
gggcgactcccctgagcattgatga

SEQ ID NO: 903663 - DNA, 25 bp, Homo sapien
cagctatccccatttcgaatactgg

SEQ ID NO: 903664 - DNA, 25 bp, Homo sapien
catactcagaatagaatagacgtgc

SEQ ID NO: 903665 - DNA, 25 bp, Homo sapien
gaagcttcccttgaggctagtgccc

SEQ ID NO: 903666 - DNA, 25 bp, Homo sapien
tagtgccccctgttacccctggaga

SEQ ID NO: 903667 - DNA, 25 bp, Homo sapien
gctgcttcattcagtggtctcctgg

SEQ ID NO: 903668 - DNA, 25 bp, Homo sapien
cctgaaggacacctctgacatgccc

SEQ ID NO: 903669 - DNA, 25 bp, Homo sapien
tggcataattaatctttgaaacttc

SEQ ID NO: 903670 - DNA, 25 bp, Homo sapien
tactgtgctctcaaaatcaatgtgt

SEQ ID NO: 903671 - DNA, 25 bp, Homo sapien
gggttatcatagatggcataattaa

SEQ ID NO: 903672 - DNA, 25 bp, Homo sapien
gaaacttcactaaaggatactgtgc

SEQ ID NO: 903673 - DNA, 25 bp, Homo sapien
tggtagtcaccgagtctttggtacg

SEQ ID NO: 903674 - DNA, 25 bp, Homo sapien
cgtaccaaagactcggtgactacca

SEQ ID NO: 903675 - DNA, 25 bp, Homo sapien
cacagtctgcaagggccaaaaatag

SEQ ID NO: 903676 - DNA, 25 bp, Homo sapien
tacacagtctgcaagggccaaaaat

SEQ ID NO: 903677 - DNA, 25 bp, Homo sapien
agagattcctaatatttacacagtc

SEQ ID NO: 903678 - DNA, 25 bp, Homo sapien
gattcctaatatttacacagtctgc

SEQ ID NO: 903679 - DNA, 25 bp, Homo sapien
tctttcactcccaaacagtgtgagg

SEQ ID NO: 903680 - DNA, 25 bp, Homo sapien
tgaggaattctggtgaccggtttca

SEQ ID NO: 903681 - DNA, 25 bp, Homo sapien
tctggtgaccggtttcaatttggtc

SEQ ID NO: 903682 - DNA, 25 bp, Homo sapien
ggtctaatgtgagttgcatgcccat

SEQ ID NO: 903683 - DNA, 25 bp, Homo sapien
tcaaatttcttcgtttccgtagcca

SEQ ID NO: 903684 - DNA, 25 bp, Homo sapien
tcagggtccatgtcctaattacagt

SEQ ID NO: 903685 - DNA, 25 bp, Homo sapien
ccacagcattccataagaggtcaca

SEQ ID NO: 903686 - DNA, 25 bp, Homo sapien
cgtagccaatggaacctcaggactt

SEQ ID NO: 903687 - DNA, 25 bp, Homo sapien
tgagtaggcagagatcagatttccg

SEQ ID NO: 903688 - DNA, 25 bp, Homo sapien
cctcagataaaaagaagcgttcagc

SEQ ID NO: 903689 - DNA, 25 bp, Homo sapien
ggtatgaccagatctgcacttagga

SEQ ID NO: 903690 - DNA, 25 bp, Homo sapien
ctgtatcagtgaggctagcatgggt

SEQ ID NO: 903691 - DNA, 25 bp, Homo sapien
gagggagacacgcaagtccggaggt

SEQ ID NO: 903692 - DNA, 25 bp, Homo sapien
gggagacacgcaagtccggaggtta

SEQ ID NO: 903693 - DNA, 25 bp, Homo sapien
ttggagggagacacgcaagtccgga

SEQ ID NO: 903694 - DNA, 25 bp, Homo sapien
ctttggagggagacacgcaagtccg

SEQ ID NO: 903695 - DNA, 25 bp, Homo sapien
ctctgactccattagccttttatgg

SEQ ID NO: 903696 - DNA, 25 bp, Homo sapien
gaatgccgtcactatctctgactcc

SEQ ID NO: 903697 - DNA, 25 bp, Homo sapien
gactccattagccttttatggtctt

SEQ ID NO: 903698 - DNA, 25 bp, Homo sapien
cagtgcccttgaatgccgtcactat

SEQ ID NO: 903699 - DNA, 25 bp, Homo sapien
tctgcacagatgagcgggttagaga

SEQ ID NO: 903700 - DNA, 25 bp, Homo sapien
cctggttgccgtgttcccagacaca

SEQ ID NO: 903701 - DNA, 25 bp, Homo sapien
gaaaagccaggtgggtctgcacaga

SEQ ID NO: 903702 - DNA, 25 bp, Homo sapien
tctgtaaccagctcacgaatctcat

SEQ ID NO: 903703 - DNA, 25 bp, Homo sapien
gaagtcgatgttccagtcactgagg

SEQ ID NO: 903704 - DNA, 25 bp, Homo sapien
tcggtgcctaacatttgctggttca

SEQ ID NO: 903705 - DNA, 25 bp, Homo sapien
ctgctgatgacagaagtcgatgttc

SEQ ID NO: 903706 - DNA, 25 bp, Homo sapien
tcacctggttcacttcggtgcctaa

SEQ ID NO: 903707 - DNA, 25 bp, Homo sapien
ttcccccgtgaaatgcaaaatgcca

SEQ ID NO: 903708 - DNA, 25 bp, Homo sapien
cttcccccgtgaaatgcaaaatgcc

SEQ ID NO: 903709 - DNA, 25 bp, Homo sapien
tgagtcccctcataagtcaccaact

SEQ ID NO: 903710 - DNA, 25 bp, Homo sapien
gagtcccctcataagtcaccaactc

SEQ ID NO: 903711 - DNA, 25 bp, Homo sapien
ttgagtcccctcataagtcaccaac

SEQ ID NO: 903712 - DNA, 25 bp, Homo sapien
agtcccctcataagtcaccaactcc

SEQ ID NO: 903713 - DNA, 25 bp, Homo sapien
ttacatgcttcttttggcacagagt

SEQ ID NO: 903714 - DNA, 25 bp, Homo sapien
tatccatgtttgaagtgattgcccg

SEQ ID NO: 903715 - DNA, 25 bp, Homo sapien
gggtcactgcctaactcgctgcaat

SEQ ID NO: 903716 - DNA, 25 bp, Homo sapien
tgattgcccggacatgaatataagg

SEQ ID NO: 903717 - DNA, 25 bp, Homo sapien
tcagaactaacagcaggtggatggg

SEQ ID NO: 903718 - DNA, 25 bp, Homo sapien
ctggagagtataggcctcaatgcac

SEQ ID NO: 903719 - DNA, 25 bp, Homo sapien
tcttcctgcatattgtgggccttct

SEQ ID NO: 903720 - DNA, 25 bp, Homo sapien
cacccctttgcgagggcttctggct

SEQ ID NO: 903721 - DNA, 25 bp, Homo sapien
taaatctacttgatttaggatagcc

SEQ ID NO: 903722 - DNA, 25 bp, Homo sapien
ccttttggctcagtgttaaatctac

SEQ ID NO: 903723 - DNA, 25 bp, Homo sapien
gaaaccctgtgactgaatgaagcta

SEQ ID NO: 903724 - DNA, 25 bp, Homo sapien
taggatagcctcagaatgcatttca

SEQ ID NO: 903725 - DNA, 25 bp, Homo sapien
aaaactgcagagctagtgaagaaac

SEQ ID NO: 903726 - DNA, 25 bp, Homo sapien
taaaactgcagagctagtgaagaaa

SEQ ID NO: 903727 - DNA, 25 bp, Homo sapien
ctgttccttgaccttcggtcttgca

SEQ ID NO: 903728 - DNA, 25 bp, Homo sapien
tgaccttcggtcttgcaggtcagca

SEQ ID NO: 903729 - DNA, 25 bp, Homo sapien
tggctcttgcaagccctgaagggct

SEQ ID NO: 903730 - DNA, 25 bp, Homo sapien
aacttctgagcatggatcatgtcgg

SEQ ID NO: 903731 - DNA, 25 bp, Homo sapien
atgtcgggaccctggaatttctgag

SEQ ID NO: 903732 - DNA, 25 bp, Homo sapien
tttggctcttgcaagccctgaaggg

SEQ ID NO: 903733 - DNA, 25 bp, Homo sapien
caggggaagaacactcatctggagg

SEQ ID NO: 903734 - DNA, 25 bp, Homo sapien
ctgcaggggaagaacactcatctgg

SEQ ID NO: 903735 - DNA, 25 bp, Homo sapien
ggggaagaacactcatctggaggca

SEQ ID NO: 903736 - DNA, 25 bp, Homo sapien
tgcaggggaagaacactcatctgga

SEQ ID NO: 903737 - DNA, 25 bp, Homo sapien
ggaattccacatacagttccctcct

SEQ ID NO: 903738 - DNA, 25 bp, Homo sapien
ggggaattccacatacagttccctc

SEQ ID NO: 903739 - DNA, 25 bp, Homo sapien
attccacatacagttccctccttac

SEQ ID NO: 903740 - DNA, 25 bp, Homo sapien
gaattccacatacagttccctcctt

SEQ ID NO: 903741 - DNA, 25 bp, Homo sapien
tccccagcatcccacctctgtggtc

SEQ ID NO: 903742 - DNA, 25 bp, Homo sapien
atcccacctctgtggtcacggtctt

SEQ ID NO: 903743 - DNA, 25 bp, Homo sapien
gtggtcacggtcttcctttgcaggg

SEQ ID NO: 903744 - DNA, 25 bp, Homo sapien
tctgtggtcacggtcttcctttgca

SEQ ID NO: 903745 - DNA, 25 bp, Homo sapien
ggccccatgagagtccgagggcacc

SEQ ID NO: 903746 - DNA, 25 bp, Homo sapien
gaggggggtctggccgcttgaggaa

SEQ ID NO: 903747 - DNA, 25 bp, Homo sapien
ggaggggggtctggccgcttgagga

SEQ ID NO: 903748 - DNA, 25 bp, Homo sapien
atgagagtccgagggcaccccaacc

SEQ ID NO: 903749 - DNA, 25 bp, Homo sapien
tgccaaagggtgttttacagaatta

SEQ ID NO: 903750 - DNA, 25 bp, Homo sapien
gaagtgtaaccccttggtcacaagc

SEQ ID NO: 903751 - DNA, 25 bp, Homo sapien
aatgcaggcttgtccgaggaacgcc

SEQ ID NO: 903752 - DNA, 25 bp, Homo sapien
ccttggagtgctgattgggcaacac

SEQ ID NO: 903753 - DNA, 25 bp, Homo sapien
caagatatgagatgcctagcctaca

SEQ ID NO: 903754 - DNA, 25 bp, Homo sapien
aagagggtggtttgagtgtaacaat

SEQ ID NO: 903755 - DNA, 25 bp, Homo sapien
tcagttaggtgagatgagattgcta

SEQ ID NO: 903756 - DNA, 25 bp, Homo sapien
gtttgagtgtaacaatactgattca

SEQ ID NO: 903757 - DNA, 25 bp, Homo sapien
cacatctcagttaggtgagatgaga

SEQ ID NO: 903758 - DNA, 25 bp, Homo sapien
actcctattgatttccgttggttgc

SEQ ID NO: 903759 - DNA, 25 bp, Homo sapien
tattgatttccgttggttgcagtct

SEQ ID NO: 903760 - DNA, 25 bp, Homo sapien
tcaactcctattgatttccgttggt

SEQ ID NO: 903761 - DNA, 25 bp, Homo sapien
tcctattgatttccgttggttgcag

SEQ ID NO: 903762 - DNA, 25 bp, Homo sapien
gaatttgctttcttccgctagggag

SEQ ID NO: 903763 - DNA, 25 bp, Homo sapien
gagctatgggaaaggttctgaatga

SEQ ID NO: 903764 - DNA, 25 bp, Homo sapien
ccgatagccatgttggtggtgctca

SEQ ID NO: 903765 - DNA, 25 bp, Homo sapien
aaagaactcatgtccccgatagcca

SEQ ID NO: 903766 - DNA, 25 bp, Homo sapien
ccctcgggccgcgtgtaattctgaa

SEQ ID NO: 903767 - DNA, 25 bp, Homo sapien
taattctgcagattagagcacagcg

SEQ ID NO: 903768 - DNA, 25 bp, Homo sapien
gctttgaggcttgaatcccggcacc

SEQ ID NO: 903769 - DNA, 25 bp, Homo sapien
taattctgaagcacgagactgcgct

SEQ ID NO: 903770 - DNA, 25 bp, Homo sapien
tttcctatgagaggagagaccgcag

SEQ ID NO: 903771 - DNA, 25 bp, Homo sapien
tccatcggtcagaggaagctcgagc

SEQ ID NO: 903772 - DNA, 25 bp, Homo sapien
tttcatcgatggcactgaggtctcc

SEQ ID NO: 903773 - DNA, 25 bp, Homo sapien
tgcatgaagactgaccaccagggct

SEQ ID NO: 903774 - DNA, 25 bp, Homo sapien
gtgcatccggcagtctgagcatgaa

SEQ ID NO: 903775 - DNA, 25 bp, Homo sapien
actcatgaattcataggctctccat

SEQ ID NO: 903776 - DNA, 25 bp, Homo sapien
taggctctccatccgatagactgct

SEQ ID NO: 903777 - DNA, 25 bp, Homo sapien
ctgattgtttccgtgcatccggcag

SEQ ID NO: 903778 - DNA, 25 bp, Homo sapien
tcttcacatgtttccggagggagct

SEQ ID NO: 903779 - DNA, 25 bp, Homo sapien
tctgtgtaacgcttagtgcagcctg

SEQ ID NO: 903780 - DNA, 25 bp, Homo sapien
ccttgacggttttcacctggaggca

SEQ ID NO: 903781 - DNA, 25 bp, Homo sapien
ggaggcattcttcccgctttgaggt

SEQ ID NO: 903782 - DNA, 25 bp, Homo sapien
tacatgaagtgcttaccaggatgca

SEQ ID NO: 903783 - DNA, 25 bp, Homo sapien
gctaggataatcatgggaggcatca

SEQ ID NO: 903784 - DNA, 25 bp, Homo sapien
taatgcccagctcacgggattatca

SEQ ID NO: 903785 - DNA, 25 bp, Homo sapien
cctcagcaaaggtccagtggcagaa

SEQ ID NO: 903786 - DNA, 25 bp, Homo sapien
tgtttggcgcgatcagaggcatttg

SEQ ID NO: 903787 - DNA, 25 bp, Homo sapien
caagttttctagtctcgagtaggcc

SEQ ID NO: 903788 - DNA, 25 bp, Homo sapien
ttcgtgctcacagacgtatggtttc

SEQ ID NO: 903789 - DNA, 25 bp, Homo sapien
gagaaagccttgttgcaaccttcgt

SEQ ID NO: 903790 - DNA, 25 bp, Homo sapien
ccatgaatatggtcgttatttatat

SEQ ID NO: 903791 - DNA, 25 bp, Homo sapien
cttctctccatgaatatggtcgtta

SEQ ID NO: 903792 - DNA, 25 bp, Homo sapien
gtcttctcatatgcactaccaacat

SEQ ID NO: 903793 - DNA, 25 bp, Homo sapien
tgcactaccaacatatactgggctt

SEQ ID NO: 903794 - DNA, 25 bp, Homo sapien
ccccaggggaaagccaggcttgcat

SEQ ID NO: 903795 - DNA, 25 bp, Homo sapien
acaccccaggggaaagccaggcttg

SEQ ID NO: 903796 - DNA, 25 bp, Homo sapien
atacaccccaggggaaagccaggct

SEQ ID NO: 903797 - DNA, 25 bp, Homo sapien
accccaggggaaagccaggcttgca

SEQ ID NO: 903798 - DNA, 25 bp, Homo sapien
agaaaagccaagtcccgacactgag

SEQ ID NO: 903799 - DNA, 25 bp, Homo sapien
gtggcatgccaactctctcggcgca

SEQ ID NO: 903800 - DNA, 25 bp, Homo sapien
caagcattagccttagggaactggt

SEQ ID NO: 903801 - DNA, 25 bp, Homo sapien
tagacatgcaatttgccagaggccc

SEQ ID NO: 903802 - DNA, 25 bp, Homo sapien
aagcattgctaaaaacagtggaggg

SEQ ID NO: 903803 - DNA, 25 bp, Homo sapien
tcaggctcaaccctcaccagtttcc

SEQ ID NO: 903804 - DNA, 25 bp, Homo sapien
tggaggggggaaacgcgaagcttca

SEQ ID NO: 903805 - DNA, 25 bp, Homo sapien
gtttccagacagctcccctgcgcat

SEQ ID NO: 903806 - DNA, 25 bp, Homo sapien
ttattacattcctgacccaagagaa

SEQ ID NO: 903807 - DNA, 25 bp, Homo sapien
tattacattcctgacccaagagaaa

SEQ ID NO: 903808 - DNA, 25 bp, Homo sapien
cttattacattcctgacccaagaga

SEQ ID NO: 903809 - DNA, 25 bp, Homo sapien
gttcaccaatccagatgcactgaaa

SEQ ID NO: 903810 - DNA, 25 bp, Homo sapien
tgttttcttgctctacgtcagagga

SEQ ID NO: 903811 - DNA, 25 bp, Homo sapien
tttcattgtagctgcagttaagccg

SEQ ID NO: 903812 - DNA, 25 bp, Homo sapien
tgctctacgtcagaggagggaagct

SEQ ID NO: 903813 - DNA, 25 bp, Homo sapien
tagaatacagcccaggtgctcgcct

SEQ ID NO: 903814 - DNA, 25 bp, Homo sapien
tgcctccctagaatacagcccaggt

SEQ ID NO: 903815 - DNA, 25 bp, Homo sapien
tgttcagacaccgacccattgggct

SEQ ID NO: 903816 - DNA, 25 bp, Homo sapien
ggtctcctgtccactgttcagacac

SEQ ID NO: 903817 - DNA, 25 bp, Homo sapien
caatcaacgatcttactcttgtgtc

SEQ ID NO: 903818 - DNA, 25 bp, Homo sapien
atcaacgatcttactcttgtgtcag

SEQ ID NO: 903819 - DNA, 25 bp, Homo sapien
aatcaacgatcttactcttgtgtca

SEQ ID NO: 903820 - DNA, 25 bp, Homo sapien
ctgtgttttgatcaaagagtctgaa

SEQ ID NO: 903821 - DNA, 25 bp, Homo sapien
ctaactggccataaacatgtgggaa

SEQ ID NO: 903822 - DNA, 25 bp, Homo sapien
gtttctgatgaagtgttatattcgc

SEQ ID NO: 903823 - DNA, 25 bp, Homo sapien
cgctttcaatggtatctaactggcc

SEQ ID NO: 903824 - DNA, 25 bp, Homo sapien
tctttaatacactgtacttgcaact

SEQ ID NO: 903825 - DNA, 25 bp, Homo sapien
tgccctctttaatacactgtacttg

SEQ ID NO: 903826 - DNA, 25 bp, Homo sapien
ctgtacttgcaacttgccaggtttt

SEQ ID NO: 903827 - DNA, 25 bp, Homo sapien
tgcaacttgccaggttttgcaaggc

SEQ ID NO: 903828 - DNA, 25 bp, Homo sapien
cacactacgcgacaagaggaaatat

SEQ ID NO: 903829 - DNA, 25 bp, Homo sapien
ttctttctccacactacgcgacaag

SEQ ID NO: 903830 - DNA, 25 bp, Homo sapien
ttgtcatgacgagggagggaatgcg

SEQ ID NO: 903831 - DNA, 25 bp, Homo sapien
tactgtctcccagggacatctgaca

SEQ ID NO: 903832 - DNA, 25 bp, Homo sapien
cacatgaacaggagagatggaatct

SEQ ID NO: 903833 - DNA, 25 bp, Homo sapien
gcttttatacgtgacatgcatggac

SEQ ID NO: 903834 - DNA, 25 bp, Homo sapien
tctccgcactgcagaaaagcacaag

SEQ ID NO: 903835 - DNA, 25 bp, Homo sapien
gaatgatctgcccttatgtgctaca

SEQ ID NO: 903836 - DNA, 25 bp, Homo sapien
caatgcttcacggagacaaatggag

SEQ ID NO: 903837 - DNA, 25 bp, Homo sapien
gactgagtgacctcttcgagaccct

SEQ ID NO: 903838 - DNA, 25 bp, Homo sapien
cactcagaatcctagctgggcctgg

SEQ ID NO: 903839 - DNA, 25 bp, Homo sapien
gattacagagacttgaacgccaccc

SEQ ID NO: 903840 - DNA, 25 bp, Homo sapien
tcttacacagaaatacggggttgga

SEQ ID NO: 903841 - DNA, 25 bp, Homo sapien
ttttcaagcataaccagccactcag

SEQ ID NO: 903842 - DNA, 25 bp, Homo sapien
caaacaggtggacatgaagtatggt

SEQ ID NO: 903843 - DNA, 25 bp, Homo sapien
tctttcgatctcagcactgatgttt

SEQ ID NO: 903844 - DNA, 25 bp, Homo sapien
aatgggtcacggctataaataaggc

SEQ ID NO: 903845 - DNA, 25 bp, Homo sapien
cagagaacctgagactaacgtgtgc

SEQ ID NO: 903846 - DNA, 25 bp, Homo sapien
gaaatcagactacctggcgggcaaa

SEQ ID NO: 903847 - DNA, 25 bp, Homo sapien
acttgctttagcaggcagtcgggac

SEQ ID NO: 903848 - DNA, 25 bp, Homo sapien
aagtaattaggtggacttgaagtag

SEQ ID NO: 903849 - DNA, 25 bp, Homo sapien
gtaattaggtggacttgaagtagct

SEQ ID NO: 903850 - DNA, 25 bp, Homo sapien
agtaattaggtggacttgaagtagc

SEQ ID NO: 903851 - DNA, 25 bp, Homo sapien
tccacgtcagccaatcctggtccca

SEQ ID NO: 903852 - DNA, 25 bp, Homo sapien
tcatctaaatgccctccacgtcagc

SEQ ID NO: 903853 - DNA, 25 bp, Homo sapien
tccactggccttcaagaaagtgcca

SEQ ID NO: 903854 - DNA, 25 bp, Homo sapien
aactccactggccttcaagaaagtg

SEQ ID NO: 903855 - DNA, 25 bp, Homo sapien
gactgaacaggtcaagcaccgtggc

SEQ ID NO: 903856 - DNA, 25 bp, Homo sapien
aacaggtcaagcaccgtggctccga

SEQ ID NO: 903857 - DNA, 25 bp, Homo sapien
gccctctccagttcgcaatgcggct

SEQ ID NO: 903858 - DNA, 25 bp, Homo sapien
gctttagctgactgaacaggtcaag

SEQ ID NO: 903859 - DNA, 25 bp, Homo sapien
gaaacttgactcagctcagggtcag

SEQ ID NO: 903860 - DNA, 25 bp, Homo sapien
ctaagaaacttgactcagctcaggg

SEQ ID NO: 903861 - DNA, 25 bp, Homo sapien
aagaaacttgactcagctcagggtc

SEQ ID NO: 903862 - DNA, 25 bp, Homo sapien
cttgactcagctcagggtcagagag

SEQ ID NO: 903863 - DNA, 25 bp, Homo sapien
ctgtaaagctcggttcctgaatacc

SEQ ID NO: 903864 - DNA, 25 bp, Homo sapien
cggttcctgaataccatccacttac

SEQ ID NO: 903865 - DNA, 25 bp, Homo sapien
taaagctcggttcctgaataccatc

SEQ ID NO: 903866 - DNA, 25 bp, Homo sapien
gtcacagagctgtaaagctcggttc

SEQ ID NO: 903867 - DNA, 25 bp, Homo sapien
gctgctcttgggtgtcgaactccct

SEQ ID NO: 903868 - DNA, 25 bp, Homo sapien
tcaggctcctgtttgctttcatctt

SEQ ID NO: 903869 - DNA, 25 bp, Homo sapien
ctccttgacaagggttgttccttcg

SEQ ID NO: 903870 - DNA, 25 bp, Homo sapien
ttgggtgtcgaactccctcgcgcag

SEQ ID NO: 903871 - DNA, 25 bp, Homo sapien
tcagagcccgtgacacaatttactc

SEQ ID NO: 903872 - DNA, 25 bp, Homo sapien
ggtcccaatccagggctagatgata

SEQ ID NO: 903873 - DNA, 25 bp, Homo sapien
gctgtctggcgatatgcaagaggaa

SEQ ID NO: 903874 - DNA, 25 bp, Homo sapien
tatgcaggcattgaagtgtaaccag

SEQ ID NO: 903875 - DNA, 25 bp, Homo sapien
caagcagtctgaggtttgggctgaa

SEQ ID NO: 903876 - DNA, 25 bp, Homo sapien
atttgggcaagcagtctgaggtttg

SEQ ID NO: 903877 - DNA, 25 bp, Homo sapien
aaaggaaatttgggcaagcagtctg

SEQ ID NO: 903878 - DNA, 25 bp, Homo sapien
gaaatttgggcaagcagtctgaggt

SEQ ID NO: 903879 - DNA, 25 bp, Homo sapien
cgctggcctgtgcggcctcggtgtc

SEQ ID NO: 903880 - DNA, 25 bp, Homo sapien
caccagtcttgggaggagtgggcgc

SEQ ID NO: 903881 - DNA, 25 bp, Homo sapien
ccagtcttgggaggagtgggcgctg

SEQ ID NO: 903882 - DNA, 25 bp, Homo sapien
ggcctgtgcggcctcggtgtcctac

SEQ ID NO: 903883 - DNA, 25 bp, Homo sapien
actgcagactcactcgtgggcttgt

SEQ ID NO: 903884 - DNA, 25 bp, Homo sapien
cttggacctcttgttgtgcatcggg

SEQ ID NO: 903885 - DNA, 25 bp, Homo sapien
tgtgcatcgggtcaccagtgctgct

SEQ ID NO: 903886 - DNA, 25 bp, Homo sapien
gggaggtcttcatcgggtttgatct

SEQ ID NO: 903887 - DNA, 25 bp, Homo sapien
cagtgaagccttatcaagcagcctg

SEQ ID NO: 903888 - DNA, 25 bp, Homo sapien
gcaggttacagatggcaccaggtca

SEQ ID NO: 903889 - DNA, 25 bp, Homo sapien
ctgctatgcccatgggaaaatgacc

SEQ ID NO: 903890 - DNA, 25 bp, Homo sapien
tgggatgcaggttacagatggcacc

SEQ ID NO: 903891 - DNA, 25 bp, Homo sapien
tagggatccctggaataggcctctg

SEQ ID NO: 903892 - DNA, 25 bp, Homo sapien
ctgtgaggactcagaagggccggag

SEQ ID NO: 903893 - DNA, 25 bp, Homo sapien
tgttgtcggcttaggatctgctgat

SEQ ID NO: 903894 - DNA, 25 bp, Homo sapien
tgtccaaaggctgaacctaagctct

SEQ ID NO: 903895 - DNA, 25 bp, Homo sapien
gagacgggcgcggaagagtaggtga

SEQ ID NO: 903896 - DNA, 25 bp, Homo sapien
cgggcgcggaagagtaggtgaagct

SEQ ID NO: 903897 - DNA, 25 bp, Homo sapien
agagtaggtgaagctcaaggcaggg

SEQ ID NO: 903898 - DNA, 25 bp, Homo sapien
cggaagagtaggtgaagctcaaggc

SEQ ID NO: 903899 - DNA, 25 bp, Homo sapien
agaccaggagaccgtaaggactaag

SEQ ID NO: 903900 - DNA, 25 bp, Homo sapien
caggagaccgtaaggactaaggagg

SEQ ID NO: 903901 - DNA, 25 bp, Homo sapien
ggagaccaggagaccgtaaggacta

SEQ ID NO: 903902 - DNA, 25 bp, Homo sapien
ccaggagaccgtaaggactaaggag

SEQ ID NO: 903903 - DNA, 25 bp, Homo sapien
ttgcagataagtgaccataggagcc

SEQ ID NO: 903904 - DNA, 25 bp, Homo sapien
tcaaagctatgatcggagagtggtg

SEQ ID NO: 903905 - DNA, 25 bp, Homo sapien
gaagagctgctacgggaattattga

SEQ ID NO: 903906 - DNA, 25 bp, Homo sapien
gacagtgtacgttttcggctcggcc

SEQ ID NO: 903907 - DNA, 25 bp, Homo sapien
ggcttttgctgatgtatgacttgga

SEQ ID NO: 903908 - DNA, 25 bp, Homo sapien
tgctttaggatcacttcagagcgcc

SEQ ID NO: 903909 - DNA, 25 bp, Homo sapien
ttgcaaacggatgtgtccttaaagg

SEQ ID NO: 903910 - DNA, 25 bp, Homo sapien
tcagagcgccttgcaaacggatgtg

SEQ ID NO: 903911 - DNA, 25 bp, Homo sapien
gaagagatgagcgctctggaatgct

SEQ ID NO: 903912 - DNA, 25 bp, Homo sapien
tgaagagatgagcgctctggaatgc

SEQ ID NO: 903913 - DNA, 25 bp, Homo sapien
ctgaagagatgagcgctctggaatg

SEQ ID NO: 903914 - DNA, 25 bp, Homo sapien
tgatagtattctgctgggctgactc

SEQ ID NO: 903915 - DNA, 25 bp, Homo sapien
tggccagttagcagggccatctgat

SEQ ID NO: 903916 - DNA, 25 bp, Homo sapien
cagctgagggaataatgtctgcata

SEQ ID NO: 903917 - DNA, 25 bp, Homo sapien
tatccatagcatgaagatattccat

SEQ ID NO: 903918 - DNA, 25 bp, Homo sapien
tagggctactagataaggcggaagt

SEQ ID NO: 903919 - DNA, 25 bp, Homo sapien
gcccacgggttgctgagatcatgga

SEQ ID NO: 903920 - DNA, 25 bp, Homo sapien
catctgtagggctcagcccacgggt

SEQ ID NO: 903921 - DNA, 25 bp, Homo sapien
gcaggtccggatacgtagggctact

SEQ ID NO: 903922 - DNA, 25 bp, Homo sapien
atggccagtctgcataacctcctgg

SEQ ID NO: 903923 - DNA, 25 bp, Homo sapien
ggccagtctgcataacctcctggac

SEQ ID NO: 903924 - DNA, 25 bp, Homo sapien
cttgctaccacgatatcctgatctg

SEQ ID NO: 903925 - DNA, 25 bp, Homo sapien
ttgctaccacgatatcctgatctgc

SEQ ID NO: 903926 - DNA, 25 bp, Homo sapien
tcctagagctctgggttggttaagg

SEQ ID NO: 903927 - DNA, 25 bp, Homo sapien
gtcacctggcttccgttgccttgtt

SEQ ID NO: 903928 - DNA, 25 bp, Homo sapien
gccttgttgagtactgatttccctc

SEQ ID NO: 903929 - DNA, 25 bp, Homo sapien
tctgggttggttaaggccaaagtca

SEQ ID NO: 903930 - DNA, 25 bp, Homo sapien
cccgcaacaggtttgacagcagcct

SEQ ID NO: 903931 - DNA, 25 bp, Homo sapien
cagtgaacgtgaatacctcagtcaa

SEQ ID NO: 903932 - DNA, 25 bp, Homo sapien
gcctctatagagtcggcggcttccg

SEQ ID NO: 903933 - DNA, 25 bp, Homo sapien
cggcggcttccggttcagtgaacgt

SEQ ID NO: 903934 - DNA, 25 bp, Homo sapien
ctatttccagtgcactctgtctcac

SEQ ID NO: 903935 - DNA, 25 bp, Homo sapien
gtctcacagctgatattaatgatct

SEQ ID NO: 903936 - DNA, 25 bp, Homo sapien
cacagctgatattaatgatcttcat

SEQ ID NO: 903937 - DNA, 25 bp, Homo sapien
cagctgatattaatgatcttcataa

SEQ ID NO: 903938 - DNA, 25 bp, Homo sapien
gaaaactcaaaggatcagtcacaag

SEQ ID NO: 903939 - DNA, 25 bp, Homo sapien
agtgaaaactcaaaggatcagtcac

SEQ ID NO: 903940 - DNA, 25 bp, Homo sapien
aactcaaaggatcagtcacaagttt

SEQ ID NO: 903941 - DNA, 25 bp, Homo sapien
aaaggatcagtcacaagtttctgca

SEQ ID NO: 903942 - DNA, 25 bp, Homo sapien
ataaatacccacttctcctttaatg

SEQ ID NO: 903943 - DNA, 25 bp, Homo sapien
taaatacccacttctcctttaatgc

SEQ ID NO: 903944 - DNA, 25 bp, Homo sapien
ctctctataaatacccacttctcct

SEQ ID NO: 903945 - DNA, 25 bp, Homo sapien
tctataaatacccacttctccttta

SEQ ID NO: 903946 - DNA, 25 bp, Homo sapien
gagatggatcgtaatggtaacggcc

SEQ ID NO: 903947 - DNA, 25 bp, Homo sapien
atatgcaatggaggaatcggagatg

SEQ ID NO: 903948 - DNA, 25 bp, Homo sapien
ggatcgtaatggtaacggccctcat

SEQ ID NO: 903949 - DNA, 25 bp, Homo sapien
aatcggagatggatcgtaatggtaa

SEQ ID NO: 903950 - DNA, 25 bp, Homo sapien
atgtctggcatcaattggtacagga

SEQ ID NO: 903951 - DNA, 25 bp, Homo sapien
gatgtctggcatcaattggtacagg

SEQ ID NO: 903952 - DNA, 25 bp, Homo sapien
tgtctggcatcaattggtacaggag

SEQ ID NO: 903953 - DNA, 25 bp, Homo sapien
tgtcgtttctatgtggctcagcggc

SEQ ID NO: 903954 - DNA, 25 bp, Homo sapien
catcatcggcccaaaaagctgtcca

SEQ ID NO: 903955 - DNA, 25 bp, Homo sapien
gctcagcggcatattccatcatcgg

SEQ ID NO: 903956 - DNA, 25 bp, Homo sapien
ccacatgacgagaacaggcccttgt

SEQ ID NO: 903957 - DNA, 25 bp, Homo sapien
gatggctccacaaaccagctgctaa

SEQ ID NO: 903958 - DNA, 25 bp, Homo sapien
tgtaataagttactgcaccgcagcc

SEQ ID NO: 903959 - DNA, 25 bp, Homo sapien
tctccaaagtcaggcgaaaactgct

SEQ ID NO: 903960 - DNA, 25 bp, Homo sapien
tctactgtcagcaaactaacgggct

SEQ ID NO: 903961 - DNA, 25 bp, Homo sapien
accccacgacgatgctctcttgctg

SEQ ID NO: 903962 - DNA, 25 bp, Homo sapien
ctgtcctgagggctaattgggcttg

SEQ ID NO: 903963 - DNA, 25 bp, Homo sapien
ggcctgcgcacactgtgctaacaca

SEQ ID NO: 903964 - DNA, 25 bp, Homo sapien
tagaccgaacacagcagaagtccct

SEQ ID NO: 903965 - DNA, 25 bp, Homo sapien
aaagcggtcacacctttgctgccca

SEQ ID NO: 903966 - DNA, 25 bp, Homo sapien
aactgctaagatcctccaagagcgg

SEQ ID NO: 903967 - DNA, 25 bp, Homo sapien
cagggcattcctcttgggagtttca

SEQ ID NO: 903968 - DNA, 25 bp, Homo sapien
ccaagagcgggtgttcagggtccct

SEQ ID NO: 903969 - DNA, 25 bp, Homo sapien
tggctctgatagcagacggcctctg

SEQ ID NO: 903970 - DNA, 25 bp, Homo sapien
tctgatagcagacggcctctgctga

SEQ ID NO: 903971 - DNA, 25 bp, Homo sapien
gctctgatagcagacggcctctgct

SEQ ID NO: 903972 - DNA, 25 bp, Homo sapien
ctggctctgatagcagacggcctct

SEQ ID NO: 903973 - DNA, 25 bp, Homo sapien
tcactgtaaatgtctgatatctgca

SEQ ID NO: 903974 - DNA, 25 bp, Homo sapien
aggcatcctcatgcagcccgcagtt

SEQ ID NO: 903975 - DNA, 25 bp, Homo sapien
tgcagcccgcagtttccatgctgct

SEQ ID NO: 903976 - DNA, 25 bp, Homo sapien
tcatgcagcccgcagtttccatgct

SEQ ID NO: 903977 - DNA, 25 bp, Homo sapien
gggcataagaaacaggtcgcaggac

SEQ ID NO: 903978 - DNA, 25 bp, Homo sapien
ggacagcgagagttctgcccttgct

SEQ ID NO: 903979 - DNA, 25 bp, Homo sapien
gcccttgctgactgagaatggcact

SEQ ID NO: 903980 - DNA, 25 bp, Homo sapien
gtcgcaggacaacagtcacagggct

SEQ ID NO: 903981 - DNA, 25 bp, Homo sapien
agtgtaagtctgagaatccaaaggg

SEQ ID NO: 903982 - DNA, 25 bp, Homo sapien
tgtgcctcacattcataaatcctca

SEQ ID NO: 903983 - DNA, 25 bp, Homo sapien
tcaaccaaatttattgcccctgagg

SEQ ID NO: 903984 - DNA, 25 bp, Homo sapien
tattgcccctgaggattgagggtga

SEQ ID NO: 903985 - DNA, 25 bp, Homo sapien
gaagagacgcctactgacaaagaca

SEQ ID NO: 903986 - DNA, 25 bp, Homo sapien
ataagatgaagagacgcctactgac

SEQ ID NO: 903987 - DNA, 25 bp, Homo sapien
caaagacaaattccataccctggaa

SEQ ID NO: 903988 - DNA, 25 bp, Homo sapien
acaaagacaaattccataccctgga

SEQ ID NO: 903989 - DNA, 25 bp, Homo sapien
ttgttgccagcatgcccaagagaaa

SEQ ID NO: 903990 - DNA, 25 bp, Homo sapien
tacgtcccgtcgctgttgttgccag

SEQ ID NO: 903991 - DNA, 25 bp, Homo sapien
tgttgttgccagcatgcccaagaga

SEQ ID NO: 903992 - DNA, 25 bp, Homo sapien
tgtgcccagcacctacgtcccgtcg

SEQ ID NO: 903993 - DNA, 25 bp, Homo sapien
aacttccatgtcccaggttcaagcg

SEQ ID NO: 903994 - DNA, 25 bp, Homo sapien
ccatgtcccaggttcaagcgattct

SEQ ID NO: 903995 - DNA, 25 bp, Homo sapien
cactctgacggtaaaattcattatc

SEQ ID NO: 903996 - DNA, 25 bp, Homo sapien
catatcactgcagattccgtggtca

SEQ ID NO: 903997 - DNA, 25 bp, Homo sapien
tggaaggacggcaccatagttaatt

SEQ ID NO: 903998 - DNA, 25 bp, Homo sapien
cagattccgtggtcagggagatgct

SEQ ID NO: 903999 - DNA, 25 bp, Homo sapien
cctggaccctcgcacttatagaggg

SEQ ID NO: 904000 - DNA, 25 bp, Homo sapien
ccctcgcacttatagagggagttgt

SEQ ID NO: 904001 - DNA, 25 bp, Homo sapien
tgtctccatctgtatttgacaaccc

SEQ ID NO: 904002 - DNA, 25 bp, Homo sapien
tctgtatttgacaacccggtgccat

SEQ ID NO: 904003 - DNA, 25 bp, Homo sapien
tgggagcagcaatctctctaatacg

SEQ ID NO: 904004 - DNA, 25 bp, Homo sapien
tattccagcttgtgccgaggttgaa

SEQ ID NO: 904005 - DNA, 25 bp, Homo sapien
gctgatttctctaaggccgggagtg

SEQ ID NO: 904006 - DNA, 25 bp, Homo sapien
gaaatctgcccgaactctgattggg

SEQ ID NO: 904007 - DNA, 25 bp, Homo sapien
ggacaccactactgtgattgtcttg

SEQ ID NO: 904008 - DNA, 25 bp, Homo sapien
cagatagcaggcttccacggcaatc

SEQ ID NO: 904009 - DNA, 25 bp, Homo sapien
ggctccagcggacaccactactgtg

SEQ ID NO: 904010 - DNA, 25 bp, Homo sapien
acggcaatcccttatctcggctcca

SEQ ID NO: 904011 - DNA, 25 bp, Homo sapien
ctttgaaggcaacgctaagcctctg

SEQ ID NO: 904012 - DNA, 25 bp, Homo sapien
ccaggcatctttgaaggcaacgcta

SEQ ID NO: 904013 - DNA, 25 bp, Homo sapien
tctgatggatctgacctccttgagc

SEQ ID NO: 904014 - DNA, 25 bp, Homo sapien
caacgctaagcctctgatggatctg

SEQ ID NO: 904015 - DNA, 25 bp, Homo sapien
ttctctagcagggagcgaggtcaca

SEQ ID NO: 904016 - DNA, 25 bp, Homo sapien
gacaccaagttggagtggatcacag

SEQ ID NO: 904017 - DNA, 25 bp, Homo sapien
ctatatatgagaggtaaactgcaca

SEQ ID NO: 904018 - DNA, 25 bp, Homo sapien
tgatcaaaaggtcaacccacttggt

SEQ ID NO: 904019 - DNA, 25 bp, Homo sapien
ttttcaaagcgtacaacaagaatcc

SEQ ID NO: 904020 - DNA, 25 bp, Homo sapien
gatccttttcaaagcgtacaacaag

SEQ ID NO: 904021 - DNA, 25 bp, Homo sapien
gaagttggatccttttcaaagcgta

SEQ ID NO: 904022 - DNA, 25 bp, Homo sapien
agttggatccttttcaaagcgtaca

SEQ ID NO: 904023 - DNA, 25 bp, Homo sapien
taggcatcttggagagtctacaatt

SEQ ID NO: 904024 - DNA, 25 bp, Homo sapien
ggaagcctgcccacactttagaaat

SEQ ID NO: 904025 - DNA, 25 bp, Homo sapien
tctgaagatgcaacattgcataccc

SEQ ID NO: 904026 - DNA, 25 bp, Homo sapien
ttttccggtcttacaggaagcctgc

SEQ ID NO: 904027 - DNA, 25 bp, Homo sapien
gaaactggtctcaggcaagcaggtg

SEQ ID NO: 904028 - DNA, 25 bp, Homo sapien
gcttgtattgttgacagggcccacg

SEQ ID NO: 904029 - DNA, 25 bp, Homo sapien
ttatgttcagaaggccacagtgcac

SEQ ID NO: 904030 - DNA, 25 bp, Homo sapien
gggcccacgactgagacaagctatg

SEQ ID NO: 904031 - DNA, 25 bp, Homo sapien
acaaacatgacttagagagtcaact

SEQ ID NO: 904032 - DNA, 25 bp, Homo sapien
caaacatgacttagagagtcaactt

SEQ ID NO: 904033 - DNA, 25 bp, Homo sapien
cacaaacatgacttagagagtcaac

SEQ ID NO: 904034 - DNA, 25 bp, Homo sapien
tcacaaacatgacttagagagtcaa

SEQ ID NO: 904035 - DNA, 25 bp, Homo sapien
gaactaccttaatacatttgaggca

SEQ ID NO: 904036 - DNA, 25 bp, Homo sapien
atttccacaagaacaccatggagca

SEQ ID NO: 904037 - DNA, 25 bp, Homo sapien
cttaacatgtgccagagattttagt

SEQ ID NO: 904038 - DNA, 25 bp, Homo sapien
gcagtcatattatcaccctatccca

SEQ ID NO: 904039 - DNA, 25 bp, Homo sapien
taggagtccctcacattttctgcat

SEQ ID NO: 904040 - DNA, 25 bp, Homo sapien
aagttaacggttatctgctcactac

SEQ ID NO: 904041 - DNA, 25 bp, Homo sapien
tgctcactactgtcagccaaaaaag

SEQ ID NO: 904042 - DNA, 25 bp, Homo sapien
caagggtcccaggtgtagagagctc

SEQ ID NO: 904043 - DNA, 25 bp, Homo sapien
tttcttgatcaatgaggccctctcg

SEQ ID NO: 904044 - DNA, 25 bp, Homo sapien
cgtcactcgatgttgaaggttcctc

SEQ ID NO: 904045 - DNA, 25 bp, Homo sapien
atggcaaacaccgtcccgcggtacg

SEQ ID NO: 904046 - DNA, 25 bp, Homo sapien
gggacccatggatctctttcttgat

SEQ ID NO: 904047 - DNA, 25 bp, Homo sapien
gataagtctgtccaggactttcatc

SEQ ID NO: 904048 - DNA, 25 bp, Homo sapien
tctctctctgtgataagtctgtcca

SEQ ID NO: 904049 - DNA, 25 bp, Homo sapien
ttctctctctgtgataagtctgtcc

SEQ ID NO: 904050 - DNA, 25 bp, Homo sapien
cttctctctctgtgataagtctgtc

SEQ ID NO: 904051 - DNA, 25 bp, Homo sapien
tcgtgagatacttcctgcttctgtc

SEQ ID NO: 904052 - DNA, 25 bp, Homo sapien
gcctctcgtgagatacttcctgctt

SEQ ID NO: 904053 - DNA, 25 bp, Homo sapien
agagcctctcgtgagatacttcctg

SEQ ID NO: 904054 - DNA, 25 bp, Homo sapien
tctcgtgagatacttcctgcttctg

SEQ ID NO: 904055 - DNA, 25 bp, Homo sapien
cccaggctctggctagctactttgc

SEQ ID NO: 904056 - DNA, 25 bp, Homo sapien
ggctctggctagctactttgcgcca

SEQ ID NO: 904057 - DNA, 25 bp, Homo sapien
ggctagctactttgcgccaacttct

SEQ ID NO: 904058 - DNA, 25 bp, Homo sapien
gctactttgcgccaacttctcttgg

SEQ ID NO: 904059 - DNA, 25 bp, Homo sapien
gattccataacgagatccacggcca

SEQ ID NO: 904060 - DNA, 25 bp, Homo sapien
tggccagaggacttacagcttggtt

SEQ ID NO: 904061 - DNA, 25 bp, Homo sapien
cctatcactctggagatctggccca

SEQ ID NO: 904062 - DNA, 25 bp, Homo sapien
gcatcctccgatgggaatgatccta

SEQ ID NO: 904063 - DNA, 25 bp, Homo sapien
cttatgcccttgcaggaatcaggcg

SEQ ID NO: 904064 - DNA, 25 bp, Homo sapien
gaagatcacggaatgagaaagcctg

SEQ ID NO: 904065 - DNA, 25 bp, Homo sapien
gaatcaggcgctcctggagagtgca

SEQ ID NO: 904066 - DNA, 25 bp, Homo sapien
tattgtaccaaaaggagctagaggc

SEQ ID NO: 904067 - DNA, 25 bp, Homo sapien
caagaggatctgtggctgagtcgtt

SEQ ID NO: 904068 - DNA, 25 bp, Homo sapien
tcccgcacctaggtaaatgtatggg

SEQ ID NO: 904069 - DNA, 25 bp, Homo sapien
tgtacgcattctttggagcttcccc

SEQ ID NO: 904070 - DNA, 25 bp, Homo sapien
tggacagcgcggatgcatccaatcc

SEQ ID NO: 904071 - DNA, 25 bp, Homo sapien
agggccatagcaagggcccaggaca

SEQ ID NO: 904072 - DNA, 25 bp, Homo sapien
ggcccaggacaatcaagctttgaaa

SEQ ID NO: 904073 - DNA, 25 bp, Homo sapien
tcaagctttgaaaagtggacaattt

SEQ ID NO: 904074 - DNA, 25 bp, Homo sapien
ggccatagcaagggcccaggacaat

SEQ ID NO: 904075 - DNA, 25 bp, Homo sapien
catgggcttatgctgcagaagctgg

SEQ ID NO: 904076 - DNA, 25 bp, Homo sapien
cattcacacaacagggagatggttg

SEQ ID NO: 904077 - DNA, 25 bp, Homo sapien
gagaacatgcaacgtacaaaaatcc

SEQ ID NO: 904078 - DNA, 25 bp, Homo sapien
tataatccagccaatcaatgggatg

SEQ ID NO: 904079 - DNA, 25 bp, Homo sapien
ttaaaccactaaggtgaatgacttc

SEQ ID NO: 904080 - DNA, 25 bp, Homo sapien
tggcagtcccttctctaccacttag

SEQ ID NO: 904081 - DNA, 25 bp, Homo sapien
caccttgaattcgtgcctttggcag

SEQ ID NO: 904082 - DNA, 25 bp, Homo sapien
gaattcgtgcctttggcagtccctt

SEQ ID NO: 904083 - DNA, 25 bp, Homo sapien
gagcaccaccttgaattcgtgcctt

SEQ ID NO: 904084 - DNA, 25 bp, Homo sapien
ctatgttccggtcagcgggaggtac

SEQ ID NO: 904085 - DNA, 25 bp, Homo sapien
tatgttccggtcagcgggaggtaca

SEQ ID NO: 904086 - DNA, 25 bp, Homo sapien
gtcagcgggaggtacagttcgctac

SEQ ID NO: 904087 - DNA, 25 bp, Homo sapien
gcgggaggtacagttcgctactcac

SEQ ID NO: 904088 - DNA, 25 bp, Homo sapien
cctgctcatgcattgagactgaaac

SEQ ID NO: 904089 - DNA, 25 bp, Homo sapien
catgcattgagactgaaacaatggt

SEQ ID NO: 904090 - DNA, 25 bp, Homo sapien
aggcctaaaagcagtgtcgggctta

SEQ ID NO: 904091 - DNA, 25 bp, Homo sapien
cgggcttagctaccccagacaggag

SEQ ID NO: 904092 - DNA, 25 bp, Homo sapien
tgagatctccgttgcagagccaatc

SEQ ID NO: 904093 - DNA, 25 bp, Homo sapien
cgtcctgagatctccgttgcagagc

SEQ ID NO: 904094 - DNA, 25 bp, Homo sapien
gatctccgttgcagagccaatcctg

SEQ ID NO: 904095 - DNA, 25 bp, Homo sapien
gaggagccgtcctgagatctccgtt

SEQ ID NO: 904096 - DNA, 25 bp, Homo sapien
agtatgccactatgtatataacaca

SEQ ID NO: 904097 - DNA, 25 bp, Homo sapien
aagcagatggtatcccaccactctg

SEQ ID NO: 904098 - DNA, 25 bp, Homo sapien
ttaaagcagatggtatcccaccact

SEQ ID NO: 904099 - DNA, 25 bp, Homo sapien
gtatcttgcccattgtgaataaggc

SEQ ID NO: 904100 - DNA, 25 bp, Homo sapien
ccaccaataggactcatatacctct

SEQ ID NO: 904101 - DNA, 25 bp, Homo sapien
aggatggagcccaaagtgtctagca

SEQ ID NO: 904102 - DNA, 25 bp, Homo sapien
caataggactcatatacctctccat

SEQ ID NO: 904103 - DNA, 25 bp, Homo sapien
gtctagcatcgccttcatgggcctc

SEQ ID NO: 904104 - DNA, 25 bp, Homo sapien
aagcaagccctcctcgaccttgggg

SEQ ID NO: 904105 - DNA, 25 bp, Homo sapien
ctcctcgaccttgggggtcagagca

SEQ ID NO: 904106 - DNA, 25 bp, Homo sapien
ctatgtaaacaaggtaacagggagt

SEQ ID NO: 904107 - DNA, 25 bp, Homo sapien
tgcttttactatcacccagtctccc

SEQ ID NO: 904108 - DNA, 25 bp, Homo sapien
catttcgccgcttaagcatccacta

SEQ ID NO: 904109 - DNA, 25 bp, Homo sapien
gccgcttaagcatccactatttggt

SEQ ID NO: 904110 - DNA, 25 bp, Homo sapien
catcatcaccatttcgccgcttaag

SEQ ID NO: 904111 - DNA, 25 bp, Homo sapien
tcatcaccatttcgccgcttaagca

SEQ ID NO: 904112 - DNA, 25 bp, Homo sapien
ggactgcagttaccttccaaaggag

SEQ ID NO: 904113 - DNA, 25 bp, Homo sapien
tggtccaggtgcaaacgctcaattc

SEQ ID NO: 904114 - DNA, 25 bp, Homo sapien
aaagcacactcatgaaaccgggtga

SEQ ID NO: 904115 - DNA, 25 bp, Homo sapien
tagcgtctcctagaacaaacactgg

SEQ ID NO: 904116 - DNA, 25 bp, Homo sapien
tggaggcaacggctttctcgctcac

SEQ ID NO: 904117 - DNA, 25 bp, Homo sapien
tggtgctggaggcaacggctttctc

SEQ ID NO: 904118 - DNA, 25 bp, Homo sapien
cattagaagtggtgctggaggcaac

SEQ ID NO: 904119 - DNA, 25 bp, Homo sapien
tgctggaggcaacggctttctcgct

SEQ ID NO: 904120 - DNA, 25 bp, Homo sapien
cactatggaattctcaacttttttc

SEQ ID NO: 904121 - DNA, 25 bp, Homo sapien
gtggtcgtggagctgtgggactggg

SEQ ID NO: 904122 - DNA, 25 bp, Homo sapien
atctgttcgagtggagcacttcact

SEQ ID NO: 904123 - DNA, 25 bp, Homo sapien
gttcgagtggagcacttcactatgg

SEQ ID NO: 904124 - DNA, 25 bp, Homo sapien
ttcagctctcttcgaccaaaaatgc

SEQ ID NO: 904125 - DNA, 25 bp, Homo sapien
tcagctctcttcgaccaaaaatgcc

SEQ ID NO: 904126 - DNA, 25 bp, Homo sapien
tcctctttagagtcgtcacttagac

SEQ ID NO: 904127 - DNA, 25 bp, Homo sapien
ttaaacagcacttgcacacagacgc

SEQ ID NO: 904128 - DNA, 25 bp, Homo sapien
cttgcacacagacgcctcaagtcgt

SEQ ID NO: 904129 - DNA, 25 bp, Homo sapien
gacgcctcaagtcgtcctctttaga

SEQ ID NO: 904130 - DNA, 25 bp, Homo sapien
cctggttgcgttcagagggctcttt

SEQ ID NO: 904131 - DNA, 25 bp, Homo sapien
caaactctacagttggcccagccaa

SEQ ID NO: 904132 - DNA, 25 bp, Homo sapien
ccttccaggtactttgcaatgcaac

SEQ ID NO: 904133 - DNA, 25 bp, Homo sapien
gctcctcggaatattcacgggcatt

SEQ ID NO: 904134 - DNA, 25 bp, Homo sapien
tgaaggcagcactaatacactgatg

SEQ ID NO: 904135 - DNA, 25 bp, Homo sapien
tatgatgccaacacggcccttaaga

SEQ ID NO: 904136 - DNA, 25 bp, Homo sapien
actgatgactaatggctgggcccgg

SEQ ID NO: 904137 - DNA, 25 bp, Homo sapien
tgggcccgggcagacaatgaatttg

SEQ ID NO: 904138 - DNA, 25 bp, Homo sapien
ttagaactaataataccagcccggc

SEQ ID NO: 904139 - DNA, 25 bp, Homo sapien
tgtgctctggaaagcctaactggag

SEQ ID NO: 904140 - DNA, 25 bp, Homo sapien
tgccatgtatttgcacagcggccgg

SEQ ID NO: 904141 - DNA, 25 bp, Homo sapien
tttgacttggagacgcagacagtcc

SEQ ID NO: 904142 - DNA, 25 bp, Homo sapien
gggtgcgcccgccgcgggcatggtg

SEQ ID NO: 904143 - DNA, 25 bp, Homo sapien
cgaacttcccatagacccgcggacg

SEQ ID NO: 904144 - DNA, 25 bp, Homo sapien
ggcggctacggctaccgcgagcggc

SEQ ID NO: 904145 - DNA, 25 bp, Homo sapien
gcggcagcggctgtcaagtccccga

SEQ ID NO: 904146 - DNA, 25 bp, Homo sapien
tgccctcggggccaaatccgcgaag

SEQ ID NO: 904147 - DNA, 25 bp, Homo sapien
ggccaaatccgcgaagcgaggagga

SEQ ID NO: 904148 - DNA, 25 bp, Homo sapien
tccaccggactcgtctgccctcggg

SEQ ID NO: 904149 - DNA, 25 bp, Homo sapien
ccctctcgcgggatgatgcctttgg

SEQ ID NO: 904150 - DNA, 25 bp, Homo sapien
tttaggcaaccgaggaaggtggcca

SEQ ID NO: 904151 - DNA, 25 bp, Homo sapien
cataatcaatctgagagtttgcatt

SEQ ID NO: 904152 - DNA, 25 bp, Homo sapien
cctggtgattttgcgtgttctgcac

SEQ ID NO: 904153 - DNA, 25 bp, Homo sapien
ggatccgatattccccttggccagg

SEQ ID NO: 904154 - DNA, 25 bp, Homo sapien
catcttcctggaacattgggattat

SEQ ID NO: 904155 - DNA, 25 bp, Homo sapien
ggattataaatgtaacccagatgtc

SEQ ID NO: 904156 - DNA, 25 bp, Homo sapien
tcagcacccgcgtaacttgttcttc

SEQ ID NO: 904157 - DNA, 25 bp, Homo sapien
gatgtagctataattggcttggacc

SEQ ID NO: 904158 - DNA, 25 bp, Homo sapien
tttgctacctttgccctaaacaatc

SEQ ID NO: 904159 - DNA, 25 bp, Homo sapien
tcactcctggaaacgtaggtttgct

SEQ ID NO: 904160 - DNA, 25 bp, Homo sapien
ttgctacctttgccctaaacaatcc

SEQ ID NO: 904161 - DNA, 25 bp, Homo sapien
cactcctggaaacgtaggtttgcta

SEQ ID NO: 904162 - DNA, 25 bp, Homo sapien
ataaactgcaggttttaccaaatct

SEQ ID NO: 904163 - DNA, 25 bp, Homo sapien
ctgcaggttttaccaaatctttccg

SEQ ID NO: 904164 - DNA, 25 bp, Homo sapien
tgcaggttttaccaaatctttccga

SEQ ID NO: 904165 - DNA, 25 bp, Homo sapien
aacttccacctcatgtggttctgca

SEQ ID NO: 904166 - DNA, 25 bp, Homo sapien
gttctgcagttgtgcattcaaacac

SEQ ID NO: 904167 - DNA, 25 bp, Homo sapien
tcataaactctaaatccctgagatc

SEQ ID NO: 904168 - DNA, 25 bp, Homo sapien
cacacgataacatgctgctgtggat

SEQ ID NO: 904169 - DNA, 25 bp, Homo sapien
tccaggctacctgatgattaagaac

SEQ ID NO: 904170 - DNA, 25 bp, Homo sapien
tattgagagacagcaattcttccgc

SEQ ID NO: 904171 - DNA, 25 bp, Homo sapien
gttgtggcttgtaacccaaacacca

SEQ ID NO: 904172 - DNA, 25 bp, Homo sapien
tttctgcaaccaccgatgtccttct

SEQ ID NO: 904173 - DNA, 25 bp, Homo sapien
ctgactgagtcagaatccagagcct

SEQ ID NO: 904174 - DNA, 25 bp, Homo sapien
agcaccttgttcacagtgcacagtg

SEQ ID NO: 904175 - DNA, 25 bp, Homo sapien
gcaccttgttcacagtgcacagtgg

SEQ ID NO: 904176 - DNA, 25 bp, Homo sapien
tccaagcctggtgtgctcagcgcat

SEQ ID NO: 904177 - DNA, 25 bp, Homo sapien
tgctgctcggggagacatccaagcc

SEQ ID NO: 904178 - DNA, 25 bp, Homo sapien
acatccaagcctggtgtgctcagcg

SEQ ID NO: 904179 - DNA, 25 bp, Homo sapien
gggagacatccaagcctggtgtgct

SEQ ID NO: 904180 - DNA, 25 bp, Homo sapien
catgagatgggctgtccaggcatcc

SEQ ID NO: 904181 - DNA, 25 bp, Homo sapien
ctgggatcgcttcactctgattgtg

SEQ ID NO: 904182 - DNA, 25 bp, Homo sapien
cactctgattgtgttggctgtctcg

SEQ ID NO: 904183 - DNA, 25 bp, Homo sapien
tctcgtcatggtcatgagatgggct

SEQ ID NO: 904184 - DNA, 25 bp, Homo sapien
ggcagccctcagtggatggctgtct

SEQ ID NO: 904185 - DNA, 25 bp, Homo sapien
agccctcagtggatggctgtctcca

SEQ ID NO: 904186 - DNA, 25 bp, Homo sapien
cagccctcagtggatggctgtctcc

SEQ ID NO: 904187 - DNA, 25 bp, Homo sapien
tggcagccctcagtggatggctgtc

SEQ ID NO: 904188 - DNA, 25 bp, Homo sapien
catggggagcgtgggagtctggtct

SEQ ID NO: 904189 - DNA, 25 bp, Homo sapien
gtaggccttggcttggcatgcacag

SEQ ID NO: 904190 - DNA, 25 bp, Homo sapien
agaagtccacatggggagcgtggga

SEQ ID NO: 904191 - DNA, 25 bp, Homo sapien
gccttggagtctgggagaagtccac

SEQ ID NO: 904192 - DNA, 25 bp, Homo sapien
ccatagggttttctaagagtgggat

SEQ ID NO: 904193 - DNA, 25 bp, Homo sapien
gtggcctttgtcatcactattaata

SEQ ID NO: 904194 - DNA, 25 bp, Homo sapien
ctagcaggtactcatactaattatg

SEQ ID NO: 904195 - DNA, 25 bp, Homo sapien
tgtaataaagtgatacccatagggt

SEQ ID NO: 904196 - DNA, 25 bp, Homo sapien
cctttcacttagcacaccctggaga

SEQ ID NO: 904197 - DNA, 25 bp, Homo sapien
aggctgcccaggtagtaatctgctc

SEQ ID NO: 904198 - DNA, 25 bp, Homo sapien
ggagaattttccatagtgttccatt

SEQ ID NO: 904199 - DNA, 25 bp, Homo sapien
tttgcattgcaacccaatatcaggt

SEQ ID NO: 904200 - DNA, 25 bp, Homo sapien
atcatttgcttcattatcctgtttc

SEQ ID NO: 904201 - DNA, 25 bp, Homo sapien
tatcctgtttctgcaaactagtttt

SEQ ID NO: 904202 - DNA, 25 bp, Homo sapien
tttgcttcattatcctgtttctgca

SEQ ID NO: 904203 - DNA, 25 bp, Homo sapien
tgtttctgcaaactagtttttgtac

SEQ ID NO: 904204 - DNA, 25 bp, Homo sapien
tcccacaatctgtttcgtgcttgtc

SEQ ID NO: 904205 - DNA, 25 bp, Homo sapien
atcttcccaatgcaagtccgtgtcc

SEQ ID NO: 904206 - DNA, 25 bp, Homo sapien
tgtcctctgcgagtttggcattgca

SEQ ID NO: 904207 - DNA, 25 bp, Homo sapien
cacaatctgtttcgtgcttgtctgt

SEQ ID NO: 904208 - DNA, 25 bp, Homo sapien
tctacgacccccacgtttgtgctgt

SEQ ID NO: 904209 - DNA, 25 bp, Homo sapien
tgctgtgtccgtctcgatgtgctca

SEQ ID NO: 904210 - DNA, 25 bp, Homo sapien
tcatcctgctgctgtctacgacccc

SEQ ID NO: 904211 - DNA, 25 bp, Homo sapien
ctgtgtgctccctgactggcaatcc

SEQ ID NO: 904212 - DNA, 25 bp, Homo sapien
caggcttcagaaatgccaatagcac

SEQ ID NO: 904213 - DNA, 25 bp, Homo sapien
aagtcaggcttcagaaatgccaata

SEQ ID NO: 904214 - DNA, 25 bp, Homo sapien
gtcaggcttcagaaatgccaatagc

SEQ ID NO: 904215 - DNA, 25 bp, Homo sapien
tcaggcttcagaaatgccaatagca

SEQ ID NO: 904216 - DNA, 25 bp, Homo sapien
gcaaatgtagggaccagtgcaaaat

SEQ ID NO: 904217 - DNA, 25 bp, Homo sapien
tgaccccatgaagcaaatgtaggga

SEQ ID NO: 904218 - DNA, 25 bp, Homo sapien
ttatcccaggaagtaggctttgtgg

SEQ ID NO: 904219 - DNA, 25 bp, Homo sapien
agaacctgctgggtcgactgacccc

SEQ ID NO: 904220 - DNA, 25 bp, Homo sapien
tcactggatagagcctgcacccagg

SEQ ID NO: 904221 - DNA, 25 bp, Homo sapien
atgggtagtacctccattcctcttt

SEQ ID NO: 904222 - DNA, 25 bp, Homo sapien
tttttaatatcatgggtagtacctc

SEQ ID NO: 904223 - DNA, 25 bp, Homo sapien
ctttttaatatcatgggtagtacct

SEQ ID NO: 904224 - DNA, 25 bp, Homo sapien
tttgaagcacaccttgagggtactc

SEQ ID NO: 904225 - DNA, 25 bp, Homo sapien
aaatgtatttcccagtttgcagctc

SEQ ID NO: 904226 - DNA, 25 bp, Homo sapien
gtatttcccagtttgcagctccttc

SEQ ID NO: 904227 - DNA, 25 bp, Homo sapien
ctcatgttgaagttcaaaggagtct

SEQ ID NO: 904228 - DNA, 25 bp, Homo sapien
cgtttgaaccctcggccaaaatgct

SEQ ID NO: 904229 - DNA, 25 bp, Homo sapien
caaaatgcttgtgcagataactgat

SEQ ID NO: 904230 - DNA, 25 bp, Homo sapien
tctaacttcttgaggctcagcgttt

SEQ ID NO: 904231 - DNA, 25 bp, Homo sapien
tgcttgtgcagataactgattcaac

SEQ ID NO: 904232 - DNA, 25 bp, Homo sapien
tgggcccgtttgctgaaccatgtct

SEQ ID NO: 904233 - DNA, 25 bp, Homo sapien
tccctggctggcaagtgctaatctt

SEQ ID NO: 904234 - DNA, 25 bp, Homo sapien
tgctgaaggatatcgatggtggctc

SEQ ID NO: 904235 - DNA, 25 bp, Homo sapien
gcttgagtcccatgatgatagccac

SEQ ID NO: 904236 - DNA, 25 bp, Homo sapien
tcagtgagcttctccttttgctcca

SEQ ID NO: 904237 - DNA, 25 bp, Homo sapien
cagtgagcttctccttttgctccat

SEQ ID NO: 904238 - DNA, 25 bp, Homo sapien
cttcagtgagcttctccttttgctc

SEQ ID NO: 904239 - DNA, 25 bp, Homo sapien
ttcagtgagcttctccttttgctcc

SEQ ID NO: 904240 - DNA, 25 bp, Homo sapien
gcagggtcaaaacacacacgctagt

SEQ ID NO: 904241 - DNA, 25 bp, Homo sapien
tatggcaacagaacctgcaacagct

SEQ ID NO: 904242 - DNA, 25 bp, Homo sapien
aatctccctgggaatatcagctgcc

SEQ ID NO: 904243 - DNA, 25 bp, Homo sapien
tgtaatgtatgcacaggcagggtca

SEQ ID NO: 904244 - DNA, 25 bp, Homo sapien
aaaatctacagatttccaatggaaa

SEQ ID NO: 904245 - DNA, 25 bp, Homo sapien
taaaacaaagaagcgctgctttccc

SEQ ID NO: 904246 - DNA, 25 bp, Homo sapien
tatctcgggttcattttttctctga

SEQ ID NO: 904247 - DNA, 25 bp, Homo sapien
ccttgggcttggcacctatctcggg

SEQ ID NO: 904248 - DNA, 25 bp, Homo sapien
gagtatcggttgcttaaccccacag

SEQ ID NO: 904249 - DNA, 25 bp, Homo sapien
ccatcttctggtattgggacaggga

SEQ ID NO: 904250 - DNA, 25 bp, Homo sapien
tgagtcttcagagtacagagggagc

SEQ ID NO: 904251 - DNA, 25 bp, Homo sapien
cccatgtgcatgtaggctcaggctt

SEQ ID NO: 904252 - DNA, 25 bp, Homo sapien
ctgggagactctttcccacggcttt

SEQ ID NO: 904253 - DNA, 25 bp, Homo sapien
gagactctttcccacggcttttgta

SEQ ID NO: 904254 - DNA, 25 bp, Homo sapien
actgggagactctttcccacggctt

SEQ ID NO: 904255 - DNA, 25 bp, Homo sapien
gactgggagactctttcccacggct

SEQ ID NO: 904256 - DNA, 25 bp, Homo sapien
tggccctgagcgtacttggcaaagt

SEQ ID NO: 904257 - DNA, 25 bp, Homo sapien
cacaggaagttgtcgctcagcctct

SEQ ID NO: 904258 - DNA, 25 bp, Homo sapien
caaagtccaattgcccggaggtaag

SEQ ID NO: 904259 - DNA, 25 bp, Homo sapien
tccccagagttcctgtcttcaagca

SEQ ID NO: 904260 - DNA, 25 bp, Homo sapien
gcccaagccagatgctgctcagact

SEQ ID NO: 904261 - DNA, 25 bp, Homo sapien
cagactctgcgctgccatgggccat

SEQ ID NO: 904262 - DNA, 25 bp, Homo sapien
tacagaccagcccaagccagatgct

SEQ ID NO: 904263 - DNA, 25 bp, Homo sapien
atgctgctcagactctgcgctgcca

SEQ ID NO: 904264 - DNA, 25 bp, Homo sapien
caggtctgacttcttaaggcttaga

SEQ ID NO: 904265 - DNA, 25 bp, Homo sapien
gaaaaaggctggcaggtctgacttc

SEQ ID NO: 904266 - DNA, 25 bp, Homo sapien
cttagatagaagcacttagcgagca

SEQ ID NO: 904267 - DNA, 25 bp, Homo sapien
tgatggatccaaacaggtcagactg

SEQ ID NO: 904268 - DNA, 25 bp, Homo sapien
cctgttgtttgtgttcacgggtgag

SEQ ID NO: 904269 - DNA, 25 bp, Homo sapien
cacgggtgagtttgggctcgtcgcc

SEQ ID NO: 904270 - DNA, 25 bp, Homo sapien
ccctggcggaatggacaaatgatgc

SEQ ID NO: 904271 - DNA, 25 bp, Homo sapien
tgatgccaggctcattagcacagca

SEQ ID NO: 904272 - DNA, 25 bp, Homo sapien
aggaggatgctttggcctctgacat

SEQ ID NO: 904273 - DNA, 25 bp, Homo sapien
tctgaggccaccttaataaggagga

SEQ ID NO: 904274 - DNA, 25 bp, Homo sapien
taaggaggatgctttggcctctgac

SEQ ID NO: 904275 - DNA, 25 bp, Homo sapien
gaggccaccttaataaggaggatgc

SEQ ID NO: 904276 - DNA, 25 bp, Homo sapien
acagcaagtgcaactcggcaagaac

SEQ ID NO: 904277 - DNA, 25 bp, Homo sapien
ctattttagctccatatttacacag

SEQ ID NO: 904278 - DNA, 25 bp, Homo sapien
gcaagtgcaactcggcaagaaccat

SEQ ID NO: 904279 - DNA, 25 bp, Homo sapien
gccctggctgaggatctattttagc

SEQ ID NO: 904280 - DNA, 25 bp, Homo sapien
tgttcccggggatgttttgttggca

SEQ ID NO: 904281 - DNA, 25 bp, Homo sapien
ctgtggctgttcctcgttgtgatct

SEQ ID NO: 904282 - DNA, 25 bp, Homo sapien
ggctgttcctcgttgtgatctgtct

SEQ ID NO: 904283 - DNA, 25 bp, Homo sapien
tcctcgttgtgatctgtctcttttt

SEQ ID NO: 904284 - DNA, 25 bp, Homo sapien
taacacttgtagcttaagcatcggg

SEQ ID NO: 904285 - DNA, 25 bp, Homo sapien
taagcatcgggcagtctgagttcag

SEQ ID NO: 904286 - DNA, 25 bp, Homo sapien
gcagtctgagttcagatgccagctg

SEQ ID NO: 904287 - DNA, 25 bp, Homo sapien
gcaggaattaacacttgtagcttaa

SEQ ID NO: 904288 - DNA, 25 bp, Homo sapien
aatatattccccagttcacgtgggg

SEQ ID NO: 904289 - DNA, 25 bp, Homo sapien
tggggagcccaattctggctcctca

SEQ ID NO: 904290 - DNA, 25 bp, Homo sapien
ttcacgtggggagcccaattctggc

SEQ ID NO: 904291 - DNA, 25 bp, Homo sapien
cccagttcacgtggggagcccaatt

SEQ ID NO: 904292 - DNA, 25 bp, Homo sapien
acaggctcttgattctgtgccagga

SEQ ID NO: 904293 - DNA, 25 bp, Homo sapien
tggccaaggagtgagcgtgaactct

SEQ ID NO: 904294 - DNA, 25 bp, Homo sapien
tgccttcctcggagacgtgatccac

SEQ ID NO: 904295 - DNA, 25 bp, Homo sapien
tagttcaggctcaagatggccaagg

SEQ ID NO: 904296 - DNA, 25 bp, Homo sapien
aggactgcagagatgaaacattttg

SEQ ID NO: 904297 - DNA, 25 bp, Homo sapien
ctgcagagatgaaacattttgggcc

SEQ ID NO: 904298 - DNA, 25 bp, Homo sapien
gcagagatgaaacattttgggccat

SEQ ID NO: 904299 - DNA, 25 bp, Homo sapien
gactgcagagatgaaacattttggg

SEQ ID NO: 904300 - DNA, 25 bp, Homo sapien
tttgcatatgccgatttttagacac

SEQ ID NO: 904301 - DNA, 25 bp, Homo sapien
tgatgttaattttgcatatgccgat

SEQ ID NO: 904302 - DNA, 25 bp, Homo sapien
gacactcattgaaggcataattgca

SEQ ID NO: 904303 - DNA, 25 bp, Homo sapien
gatttttagacactcattgaaggca

SEQ ID NO: 904304 - DNA, 25 bp, Homo sapien
ttgcttccctgagatagtccctggt

SEQ ID NO: 904305 - DNA, 25 bp, Homo sapien
cgtggaacagtttctaatacgtggt

SEQ ID NO: 904306 - DNA, 25 bp, Homo sapien
tctgcaaactccatcgaaggaagca

SEQ ID NO: 904307 - DNA, 25 bp, Homo sapien
tacgtggtttgccaaaacattgagg

SEQ ID NO: 904308 - DNA, 25 bp, Homo sapien
cagaggagctgctaataacctgaaa

SEQ ID NO: 904309 - DNA, 25 bp, Homo sapien
tacaaaggacgggtaaagactgatc

SEQ ID NO: 904310 - DNA, 25 bp, Homo sapien
aaggacgggtaaagactgatcagag

SEQ ID NO: 904311 - DNA, 25 bp, Homo sapien
gatcagaggagctgctaataacctg

SEQ ID NO: 904312 - DNA, 25 bp, Homo sapien
atatcctcttacaaacatgtctata

SEQ ID NO: 904313 - DNA, 25 bp, Homo sapien
catgtctatacaagttttgcttgct

SEQ ID NO: 904314 - DNA, 25 bp, Homo sapien
aaatatcctcttacaaacatgtcta

SEQ ID NO: 904315 - DNA, 25 bp, Homo sapien
aacatgtctatacaagttttgcttg

SEQ ID NO: 904316 - DNA, 25 bp, Homo sapien
cagcacctagtgcaattacctggca

SEQ ID NO: 904317 - DNA, 25 bp, Homo sapien
gaaaagacctcttgtcccatgatcg

SEQ ID NO: 904318 - DNA, 25 bp, Homo sapien
gaaatgggcctcttagccagggttc

SEQ ID NO: 904319 - DNA, 25 bp, Homo sapien
gaatatcaggtgagcagatcagcag

SEQ ID NO: 904320 - DNA, 25 bp, Homo sapien
caagctccagtcttggcataatggg

SEQ ID NO: 904321 - DNA, 25 bp, Homo sapien
tgtcttggtgtcgaagtgggaattc

SEQ ID NO: 904322 - DNA, 25 bp, Homo sapien
tgttggcagcattcgatgacatcat

SEQ ID NO: 904323 - DNA, 25 bp, Homo sapien
tgatataacagcactgttgttggca

SEQ ID NO: 904324 - DNA, 25 bp, Homo sapien
ctttgttcaagctcaatgttcaggc

SEQ ID NO: 904325 - DNA, 25 bp, Homo sapien
ttgttcaagctcaatgttcaggctg

SEQ ID NO: 904326 - DNA, 25 bp, Homo sapien
tctttgttcaagctcaatgttcagg

SEQ ID NO: 904327 - DNA, 25 bp, Homo sapien
gttcaagctcaatgttcaggctggg

SEQ ID NO: 904328 - DNA, 25 bp, Homo sapien
taaagactgaccatatcgagcattg

SEQ ID NO: 904329 - DNA, 25 bp, Homo sapien
tgtgaatgtggaggaatagactccc

SEQ ID NO: 904330 - DNA, 25 bp, Homo sapien
caccacgagctgaaggaataaacat

SEQ ID NO: 904331 - DNA, 25 bp, Homo sapien
cagaaactttgggagcacgtggaca

SEQ ID NO: 904332 - DNA, 25 bp, Homo sapien
ctgggcagactcctccaggagaagc

SEQ ID NO: 904333 - DNA, 25 bp, Homo sapien
aggactgggcagactcctccaggag

SEQ ID NO: 904334 - DNA, 25 bp, Homo sapien
tcaggactgggcagactcctccagg

SEQ ID NO: 904335 - DNA, 25 bp, Homo sapien
gactgggcagactcctccaggagaa

SEQ ID NO: 904336 - DNA, 25 bp, Homo sapien
gctctgttagcacatccagctgttt

SEQ ID NO: 904337 - DNA, 25 bp, Homo sapien
gaagtagccaatctaggatccacct

SEQ ID NO: 904338 - DNA, 25 bp, Homo sapien
gatccacctgattccaagtctgatg

SEQ ID NO: 904339 - DNA, 25 bp, Homo sapien
taaagtggatttcactgcattgtgt

SEQ ID NO: 904340 - DNA, 25 bp, Homo sapien
gtagggaagactcatgaagacattc

SEQ ID NO: 904341 - DNA, 25 bp, Homo sapien
ggtatcagctccgtattcctcagct

SEQ ID NO: 904342 - DNA, 25 bp, Homo sapien
catattttcagtcctagcaatggca

SEQ ID NO: 904343 - DNA, 25 bp, Homo sapien
tattcctcagctctttgcctatggt

SEQ ID NO: 904344 - DNA, 25 bp, Homo sapien
gcagcttgttcttaggctgctgcag

SEQ ID NO: 904345 - DNA, 25 bp, Homo sapien
aggcagcttgttcttaggctgctgc

SEQ ID NO: 904346 - DNA, 25 bp, Homo sapien
ggcagcttgttcttaggctgctgca

SEQ ID NO: 904347 - DNA, 25 bp, Homo sapien
cagcttgttcttaggctgctgcagg

SEQ ID NO: 904348 - DNA, 25 bp, Homo sapien
ccggccctccagacacctggcttac

SEQ ID NO: 904349 - DNA, 25 bp, Homo sapien
agacacctggcttacaccatcacca

SEQ ID NO: 904350 - DNA, 25 bp, Homo sapien
acctggcttacaccatcaccatcca

SEQ ID NO: 904351 - DNA, 25 bp, Homo sapien
gccctccagacacctggcttacacc

SEQ ID NO: 904352 - DNA, 25 bp, Homo sapien
tctgaaatttattgttgcaggactt

SEQ ID NO: 904353 - DNA, 25 bp, Homo sapien
agtgctcaaggactcatctggtgct

SEQ ID NO: 904354 - DNA, 25 bp, Homo sapien
tgctgtgtttctgttgggggtaatc

SEQ ID NO: 904355 - DNA, 25 bp, Homo sapien
tatgtcttcagtgctcaaggactca

SEQ ID NO: 904356 - DNA, 25 bp, Homo sapien
tcttcagtgctcaaggactcatctg

SEQ ID NO: 904357 - DNA, 25 bp, Homo sapien
gggattgaattgtctatggactctg

SEQ ID NO: 904358 - DNA, 25 bp, Homo sapien
tatagataaagggattgaattgtct

SEQ ID NO: 904359 - DNA, 25 bp, Homo sapien
gactccatgtggcaccaggaagtgg

SEQ ID NO: 904360 - DNA, 25 bp, Homo sapien
ctgttgatggactccatgtggcacc

SEQ ID NO: 904361 - DNA, 25 bp, Homo sapien
gaaacttggaatgtgggtagtattg

SEQ ID NO: 904362 - DNA, 25 bp, Homo sapien
taagaaacttggaatgtgggtagta

SEQ ID NO: 904363 - DNA, 25 bp, Homo sapien
tggaatgtgggtagtattgaggcac

SEQ ID NO: 904364 - DNA, 25 bp, Homo sapien
aacttggaatgtgggtagtattgag

SEQ ID NO: 904365 - DNA, 25 bp, Homo sapien
tctccatactttctgccactcgatg

SEQ ID NO: 904366 - DNA, 25 bp, Homo sapien
gagttaccatgtgtcagctgctccc

SEQ ID NO: 904367 - DNA, 25 bp, Homo sapien
ggatctcagccaggatctgttgtga

SEQ ID NO: 904368 - DNA, 25 bp, Homo sapien
tgccactcgatggatctcagccagg

SEQ ID NO: 904369 - DNA, 25 bp, Homo sapien
caatgagtccccaaagacagacatc

SEQ ID NO: 904370 - DNA, 25 bp, Homo sapien
tcatgttgagagaataagcacaggc

SEQ ID NO: 904371 - DNA, 25 bp, Homo sapien
aggtggagattccaatgagtcccca

SEQ ID NO: 904372 - DNA, 25 bp, Homo sapien
gtggtggtgaggcaaggtccaaaaa

SEQ ID NO: 904373 - DNA, 25 bp, Homo sapien
gtttctgttgaatatcaactgcccc

SEQ ID NO: 904374 - DNA, 25 bp, Homo sapien
tctgttgaatatcaactgccccttc

SEQ ID NO: 904375 - DNA, 25 bp, Homo sapien
cgaggttgatccttccctctggctc

SEQ ID NO: 904376 - DNA, 25 bp, Homo sapien
ctctccttgtcgaggttgatccttc

SEQ ID NO: 904377 - DNA, 25 bp, Homo sapien
tggctggtgcatccgtccgccacat

SEQ ID NO: 904378 - DNA, 25 bp, Homo sapien
cgtccgccacatgacaagcagtggg

SEQ ID NO: 904379 - DNA, 25 bp, Homo sapien
gggaagtcaatagcaccctcgcccg

SEQ ID NO: 904380 - DNA, 25 bp, Homo sapien
cagtggggaagtcaatagcaccctc

SEQ ID NO: 904381 - DNA, 25 bp, Homo sapien
tgctttctatacgaagtgcataaat

SEQ ID NO: 904382 - DNA, 25 bp, Homo sapien
gtgtccacatctgtacacagtcttg

SEQ ID NO: 904383 - DNA, 25 bp, Homo sapien
cactttggtgaagacataatcatta

SEQ ID NO: 904384 - DNA, 25 bp, Homo sapien
gggtctaggtgacatatagttttgc

SEQ ID NO: 904385 - DNA, 25 bp, Homo sapien
tagtggaatcacaagaccgaggact

SEQ ID NO: 904386 - DNA, 25 bp, Homo sapien
tattggcccaaacacttgtctgagg

SEQ ID NO: 904387 - DNA, 25 bp, Homo sapien
tacactgcgttgaattattggccca

SEQ ID NO: 904388 - DNA, 25 bp, Homo sapien
tttgtgcgttttcaggacaatggcc

SEQ ID NO: 904389 - DNA, 25 bp, Homo sapien
acaaagctcactgtgctgtaacatc

SEQ ID NO: 904390 - DNA, 25 bp, Homo sapien
tagatgaattagctgtttctgcctc

SEQ ID NO: 904391 - DNA, 25 bp, Homo sapien
gcagatttcgtgactcttccataga

SEQ ID NO: 904392 - DNA, 25 bp, Homo sapien
aacatctgcagatttcgtgactctt

SEQ ID NO: 904393 - DNA, 25 bp, Homo sapien
gcagctagatggataatctgtgctt

SEQ ID NO: 904394 - DNA, 25 bp, Homo sapien
ctagatggataatctgtgcttgcat

SEQ ID NO: 904395 - DNA, 25 bp, Homo sapien
cctctgcagctagatggataatctg

SEQ ID NO: 904396 - DNA, 25 bp, Homo sapien
tccacctctgcagctagatggataa

SEQ ID NO: 904397 - DNA, 25 bp, Homo sapien
atagccttagggttgaagttgttca

SEQ ID NO: 904398 - DNA, 25 bp, Homo sapien
catataaaacatgatggtaatagcc

SEQ ID NO: 904399 - DNA, 25 bp, Homo sapien
taaaacatgatggtaatagccttag

SEQ ID NO: 904400 - DNA, 25 bp, Homo sapien
gatggtaatagccttagggttgaag

SEQ ID NO: 904401 - DNA, 25 bp, Homo sapien
tctgcacctccgaccacgaccttca

SEQ ID NO: 904402 - DNA, 25 bp, Homo sapien
ctgcacctccgaccacgaccttcat

SEQ ID NO: 904403 - DNA, 25 bp, Homo sapien
gtctgcacctccgaccacgaccttc

SEQ ID NO: 904404 - DNA, 25 bp, Homo sapien
gactacagttccctcgctctgcttc

SEQ ID NO: 904405 - DNA, 25 bp, Homo sapien
actacagttccctcgctctgcttcc

SEQ ID NO: 904406 - DNA, 25 bp, Homo sapien
ctacagttccctcgctctgcttcct

SEQ ID NO: 904407 - DNA, 25 bp, Homo sapien
tggatgctgtgtcgacgaccttcgg

SEQ ID NO: 904408 - DNA, 25 bp, Homo sapien
tttggagacaagattatcctctgtg

SEQ ID NO: 904409 - DNA, 25 bp, Homo sapien
tatcctctgtgttatagcctgctac

SEQ ID NO: 904410 - DNA, 25 bp, Homo sapien
tcgcggcagcgtcttggtccatctt

SEQ ID NO: 904411 - DNA, 25 bp, Homo sapien
tactaacggtggtgcaccatcctga

SEQ ID NO: 904412 - DNA, 25 bp, Homo sapien
gaattcaacgtgtaccgctgccgtg

SEQ ID NO: 904413 - DNA, 25 bp, Homo sapien
gaaaatagacttgggttgagcacct

SEQ ID NO: 904414 - DNA, 25 bp, Homo sapien
ctcttggagaatcgctcgggttcgc

SEQ ID NO: 904415 - DNA, 25 bp, Homo sapien
tcgtcccagccccttacccgtcctg

SEQ ID NO: 904416 - DNA, 25 bp, Homo sapien
caggacgggtaaggggctgggacga

SEQ ID NO: 904417 - DNA, 25 bp, Homo sapien
gaacgtgaacaagggcaacgcgaag

SEQ ID NO: 904418 - DNA, 25 bp, Homo sapien
ctttggcacctcttttagcttttat

SEQ ID NO: 904419 - DNA, 25 bp, Homo sapien
tattaaggcgaacgtgaacaagggc

SEQ ID NO: 904420 - DNA, 25 bp, Homo sapien
tagcttttattaaggcgaacgtgaa

SEQ ID NO: 904421 - DNA, 25 bp, Homo sapien
ccacacatcttcctcattgttcatt

SEQ ID NO: 904422 - DNA, 25 bp, Homo sapien
catcttcctcattgttcattttcat

SEQ ID NO: 904423 - DNA, 25 bp, Homo sapien
tggcttccttttccacacatcttcc

SEQ ID NO: 904424 - DNA, 25 bp, Homo sapien
ttccacacatcttcctcattgttca

SEQ ID NO: 904425 - DNA, 25 bp, Homo sapien
cctgtttctgctcagggactccaga

SEQ ID NO: 904426 - DNA, 25 bp, Homo sapien
ctgtttctgctcagggactccagag

SEQ ID NO: 904427 - DNA, 25 bp, Homo sapien
tttctgctcagggactccagagtct

SEQ ID NO: 904428 - DNA, 25 bp, Homo sapien
tctgctcagggactccagagtctcc

SEQ ID NO: 904429 - DNA, 25 bp, Homo sapien
tcatttgccgtaggtcttgttttcc

SEQ ID NO: 904430 - DNA, 25 bp, Homo sapien
ttccagagctatctccaactttgcc

SEQ ID NO: 904431 - DNA, 25 bp, Homo sapien
gaattgggacgactcaggatatctg

SEQ ID NO: 904432 - DNA, 25 bp, Homo sapien
gggacgactcaggatatctgattag

SEQ ID NO: 904433 - DNA, 25 bp, Homo sapien
taagaattgggacgactcaggatat

SEQ ID NO: 904434 - DNA, 25 bp, Homo sapien
tctaagaattgggacgactcaggat

SEQ ID NO: 904435 - DNA, 25 bp, Homo sapien
tcatcccagtcctgaagaatataat

SEQ ID NO: 904436 - DNA, 25 bp, Homo sapien
aacaagataacttcattcacctctg

SEQ ID NO: 904437 - DNA, 25 bp, Homo sapien
tattgcgatacatataaagctccat

SEQ ID NO: 904438 - DNA, 25 bp, Homo sapien
tccaggcatcaagaacgacatcttt

SEQ ID NO: 904439 - DNA, 25 bp, Homo sapien
cattgtcccctcgagtctggctgag

SEQ ID NO: 904440 - DNA, 25 bp, Homo sapien
cattcatagcgcctaggctgttcat

SEQ ID NO: 904441 - DNA, 25 bp, Homo sapien
tccacagctggcaggtcattgtccc

SEQ ID NO: 904442 - DNA, 25 bp, Homo sapien
aggcttcagacactctgcagtttga

SEQ ID NO: 904443 - DNA, 25 bp, Homo sapien
caggaagactatgaggctgcattga

SEQ ID NO: 904444 - DNA, 25 bp, Homo sapien
tcttacaaacgacttatatctagca

SEQ ID NO: 904445 - DNA, 25 bp, Homo sapien
gacaacccagttaaatgataagtaa

SEQ ID NO: 904446 - DNA, 25 bp, Homo sapien
taacagaacacttgctcatgaaaag

SEQ ID NO: 904447 - DNA, 25 bp, Homo sapien
gcagagggcttgctaccttgctgta

SEQ ID NO: 904448 - DNA, 25 bp, Homo sapien
gcaggtagatcccatgctgatgctc

SEQ ID NO: 904449 - DNA, 25 bp, Homo sapien
caggattgcagtcgcggcttggaca

SEQ ID NO: 904450 - DNA, 25 bp, Homo sapien
aattgccgggctaaactgataaagt

SEQ ID NO: 904451 - DNA, 25 bp, Homo sapien
caggtctggggccgcgcgctgctta

SEQ ID NO: 904452 - DNA, 25 bp, Homo sapien
aggtctggggccgcgcgctgcttac

SEQ ID NO: 904453 - DNA, 25 bp, Homo sapien
ctaggtcctgctgtcgtccgagtcg

SEQ ID NO: 904454 - DNA, 25 bp, Homo sapien
aattgtagcggctgtagccggctcc

SEQ ID NO: 904455 - DNA, 25 bp, Homo sapien
cctccgggactctccggaattgtag

SEQ ID NO: 904456 - DNA, 25 bp, Homo sapien
tggatctcgctgctcgtcgctgcgc

SEQ ID NO: 904457 - DNA, 25 bp, Homo sapien
gaaaggatcatatggcctaacccta

SEQ ID NO: 904458 - DNA, 25 bp, Homo sapien
tcactgtgctcgtgaagcggagcca

SEQ ID NO: 904459 - DNA, 25 bp, Homo sapien
cacagtcagagagggtgatgcgaca

SEQ ID NO: 904460 - DNA, 25 bp, Homo sapien
ctccattggaggatgcgttgtccct

SEQ ID NO: 904461 - DNA, 25 bp, Homo sapien
ccgcaagagtgacgctgccaggcag

SEQ ID NO: 904462 - DNA, 25 bp, Homo sapien
tgctgtcgctcctcgctccccacca

SEQ ID NO: 904463 - DNA, 25 bp, Homo sapien
agctccggtgggtcaccatggaaag

SEQ ID NO: 904464 - DNA, 25 bp, Homo sapien
ggcgccgccctgttcggttcctgct

SEQ ID NO: 904465 - DNA, 25 bp, Homo sapien
cagcagacacagaggtcaccctcca

SEQ ID NO: 904466 - DNA, 25 bp, Homo sapien
agcagacacagaggtcaccctccaa

SEQ ID NO: 904467 - DNA, 25 bp, Homo sapien
gtaaggacagaacaccaggaggcta

SEQ ID NO: 904468 - DNA, 25 bp, Homo sapien
ctgtaaggacagaacaccaggaggc

SEQ ID NO: 904469 - DNA, 25 bp, Homo sapien
ggacagaacaccaggaggctactcc

SEQ ID NO: 904470 - DNA, 25 bp, Homo sapien
acagaacaccaggaggctactccta

SEQ ID NO: 904471 - DNA, 25 bp, Homo sapien
tttaaatacttagcagctgccaggt

SEQ ID NO: 904472 - DNA, 25 bp, Homo sapien
aaaggacacgtactggctttgtgct

SEQ ID NO: 904473 - DNA, 25 bp, Homo sapien
tgctagccctagatcacttactgat

SEQ ID NO: 904474 - DNA, 25 bp, Homo sapien
tgtgcttctacaaggtcagttctaa

SEQ ID NO: 904475 - DNA, 25 bp, Homo sapien
tgaacattcacagtggcgccaaagc

SEQ ID NO: 904476 - DNA, 25 bp, Homo sapien
ttccaggtctcaggcagaaagcacg

SEQ ID NO: 904477 - DNA, 25 bp, Homo sapien
tgaacgcgtttctactggccaaagt

SEQ ID NO: 904478 - DNA, 25 bp, Homo sapien
tgccacgaactaggaaaggctcctt

SEQ ID NO: 904479 - DNA, 25 bp, Homo sapien
tcctgcgggaagcatatgtcagcac

SEQ ID NO: 904480 - DNA, 25 bp, Homo sapien
tctccaccatgctatctaattgtct

SEQ ID NO: 904481 - DNA, 25 bp, Homo sapien
gtggcttaaataaattgggattgat

SEQ ID NO: 904482 - DNA, 25 bp, Homo sapien
ttccacatagcaagaagtcctgcgg

SEQ ID NO: 904483 - DNA, 25 bp, Homo sapien
gtacagccatcgaccacatcggacc

SEQ ID NO: 904484 - DNA, 25 bp, Homo sapien
gcaagtacagccatcgaccacatcg

SEQ ID NO: 904485 - DNA, 25 bp, Homo sapien
agtacagccatcgaccacatcggac

SEQ ID NO: 904486 - DNA, 25 bp, Homo sapien
aagtacagccatcgaccacatcgga

SEQ ID NO: 904487 - DNA, 25 bp, Homo sapien
ttgtctgccagaacctttgatggag

SEQ ID NO: 904488 - DNA, 25 bp, Homo sapien
tgcaacactgggagcatgaggcttt

SEQ ID NO: 904489 - DNA, 25 bp, Homo sapien
ggatgggaacccgactttgtgctca

SEQ ID NO: 904490 - DNA, 25 bp, Homo sapien
tgcacttccactcgtgtctcagagg

SEQ ID NO: 904491 - DNA, 25 bp, Homo sapien
tttcagacgaatgcctggaggcttg

SEQ ID NO: 904492 - DNA, 25 bp, Homo sapien
gttatatcccccagcatatgcctgg

SEQ ID NO: 904493 - DNA, 25 bp, Homo sapien
cagggaagtggaggcgttatatccc

SEQ ID NO: 904494 - DNA, 25 bp, Homo sapien
tgtatttgattgcaagtttcagacg

SEQ ID NO: 904495 - DNA, 25 bp, Homo sapien
taatatttaagctccaggactcaaa

SEQ ID NO: 904496 - DNA, 25 bp, Homo sapien
aatttttaaatgtggtgaatacata

SEQ ID NO: 904497 - DNA, 25 bp, Homo sapien
gctccaggactcaaattccaaattt

SEQ ID NO: 904498 - DNA, 25 bp, Homo sapien
agttaatatttaagctccaggactc

SEQ ID NO: 904499 - DNA, 25 bp, Homo sapien
taaggtaatgcagttgtcacttgcc

SEQ ID NO: 904500 - DNA, 25 bp, Homo sapien
tagcgcaatgtagccatagaagtgt

SEQ ID NO: 904501 - DNA, 25 bp, Homo sapien
tcacaaaggtctaccaatgggttca

SEQ ID NO: 904502 - DNA, 25 bp, Homo sapien
ttgattaccaacgactacctcccag

SEQ ID NO: 904503 - DNA, 25 bp, Homo sapien
tgagagacaaagaaactctactggt

SEQ ID NO: 904504 - DNA, 25 bp, Homo sapien
ccaccagtttagatgggaagaccca

SEQ ID NO: 904505 - DNA, 25 bp, Homo sapien
tcggttcttaattgcactaatgcag

SEQ ID NO: 904506 - DNA, 25 bp, Homo sapien
gagttgtagccctatcgaatcaaag

SEQ ID NO: 904507 - DNA, 25 bp, Homo sapien
tagtctcaaggcacgctcagaaggc

SEQ ID NO: 904508 - DNA, 25 bp, Homo sapien
tggcgattcgttcacagagcatgga

SEQ ID NO: 904509 - DNA, 25 bp, Homo sapien
cagggtgatctaacagagcgttgac

SEQ ID NO: 904510 - DNA, 25 bp, Homo sapien
ggttgctatactgcactggctgctg

SEQ ID NO: 904511 - DNA, 25 bp, Homo sapien
gaacccgggcttgtgtatgtctcat

SEQ ID NO: 904512 - DNA, 25 bp, Homo sapien
caacacagcttatggagggtgagtc

SEQ ID NO: 904513 - DNA, 25 bp, Homo sapien
taattcccttatgtctatcagcggc

SEQ ID NO: 904514 - DNA, 25 bp, Homo sapien
gacacagcatggtcctaggttagga

SEQ ID NO: 904515 - DNA, 25 bp, Homo sapien
ctccttcccgagttggtctccttca

SEQ ID NO: 904516 - DNA, 25 bp, Homo sapien
tccttcccgagttggtctccttcaa

SEQ ID NO: 904517 - DNA, 25 bp, Homo sapien
atttctgcatttgacgtcaacccag

SEQ ID NO: 904518 - DNA, 25 bp, Homo sapien
ctcagggaccaggcgctgatagcgc

SEQ ID NO: 904519 - DNA, 25 bp, Homo sapien
cactccgactctgaaggaaaatccg

SEQ ID NO: 904520 - DNA, 25 bp, Homo sapien
agatgaaactaaactccaaggctgc

SEQ ID NO: 904521 - DNA, 25 bp, Homo sapien
acctcctgcatcacgtggttccggg

SEQ ID NO: 904522 - DNA, 25 bp, Homo sapien
aaacctgcgattcccaagcggcagc

SEQ ID NO: 904523 - DNA, 25 bp, Homo sapien
tcccgagccgggttgacgctggcgt

SEQ ID NO: 904524 - DNA, 25 bp, Homo sapien
gccgggaaatctcaaccgggcagcc

SEQ ID NO: 904525 - DNA, 25 bp, Homo sapien
catctccatgtttcactgctattaa

SEQ ID NO: 904526 - DNA, 25 bp, Homo sapien
taaattcatggttcagtagaactgg

SEQ ID NO: 904527 - DNA, 25 bp, Homo sapien
tctttattgcctgtgtatgtgaatt

SEQ ID NO: 904528 - DNA, 25 bp, Homo sapien
cttgagtgttatcagcacttgataa

SEQ ID NO: 904529 - DNA, 25 bp, Homo sapien
taaacatgtttacctacttgtggag

SEQ ID NO: 904530 - DNA, 25 bp, Homo sapien
tacctacttgtggagacaccaacag

SEQ ID NO: 904531 - DNA, 25 bp, Homo sapien
cattttatttcaagcacttatgctc

SEQ ID NO: 904532 - DNA, 25 bp, Homo sapien
tatttcaagcacttatgctcatcct

SEQ ID NO: 904533 - DNA, 25 bp, Homo sapien
tagagcaccctaggatttcactgat

SEQ ID NO: 904534 - DNA, 25 bp, Homo sapien
catggagacctatttggcttaccac

SEQ ID NO: 904535 - DNA, 25 bp, Homo sapien
ttccatgaatccgtgaaagtctgca

SEQ ID NO: 904536 - DNA, 25 bp, Homo sapien
gcaacatctgatagcgaagagggca

SEQ ID NO: 904537 - DNA, 25 bp, Homo sapien
ttaaccaaaattgcctgacaacgaa

SEQ ID NO: 904538 - DNA, 25 bp, Homo sapien
gcttggcaatgtagtcttcagaaat

SEQ ID NO: 904539 - DNA, 25 bp, Homo sapien
attgcctgacaacgaaaaagtcatt

SEQ ID NO: 904540 - DNA, 25 bp, Homo sapien
cttggcaatgtagtcttcagaaatc

SEQ ID NO: 904541 - DNA, 25 bp, Homo sapien
tttagcaactcctaaaaggctggaa

SEQ ID NO: 904542 - DNA, 25 bp, Homo sapien
attttagcaactcctaaaaggctgg

SEQ ID NO: 904543 - DNA, 25 bp, Homo sapien
ttttagcaactcctaaaaggctgga

SEQ ID NO: 904544 - DNA, 25 bp, Homo sapien
ccatgtagaaataagtatgcaaaaa

SEQ ID NO: 904545 - DNA, 25 bp, Homo sapien
gtagaaataagtatgcaaaaagtct

SEQ ID NO: 904546 - DNA, 25 bp, Homo sapien
tgtagaaataagtatgcaaaaagtc

SEQ ID NO: 904547 - DNA, 25 bp, Homo sapien
catgtagaaataagtatgcaaaaag

SEQ ID NO: 904548 - DNA, 25 bp, Homo sapien
gtttaagtagatagattatctgaaa

SEQ ID NO: 904549 - DNA, 25 bp, Homo sapien
atgtttaagtagatagattatctga

SEQ ID NO: 904550 - DNA, 25 bp, Homo sapien
gtagatagattatctgaaattctgg

SEQ ID NO: 904551 - DNA, 25 bp, Homo sapien
taagtagatagattatctgaaattc

SEQ ID NO: 904552 - DNA, 25 bp, Homo sapien
gctatggcagccaagtaatccttaa

SEQ ID NO: 904553 - DNA, 25 bp, Homo sapien
ctctgtcatttgcccttcaaagctt

SEQ ID NO: 904554 - DNA, 25 bp, Homo sapien
ccaacttctatgttatcctctgtca

SEQ ID NO: 904555 - DNA, 25 bp, Homo sapien
ggagtaagcctcctaaatccagctt

SEQ ID NO: 904556 - DNA, 25 bp, Homo sapien
ctttagggttaagatggctgtatga

SEQ ID NO: 904557 - DNA, 25 bp, Homo sapien
ttaagatggctgtatgaatggcatc

SEQ ID NO: 904558 - DNA, 25 bp, Homo sapien
tcttcaagttccagatcttcattat

SEQ ID NO: 904559 - DNA, 25 bp, Homo sapien
tagggttaagatggctgtatgaatg

SEQ ID NO: 904560 - DNA, 25 bp, Homo sapien
ccgggcgctgtaccagaggagaaaa

SEQ ID NO: 904561 - DNA, 25 bp, Homo sapien
ttttaacaatcaggatgtggtggca

SEQ ID NO: 904562 - DNA, 25 bp, Homo sapien
ccgataccagtgtggacggtgcgaa

SEQ ID NO: 904563 - DNA, 25 bp, Homo sapien
tcagcccgtgttagggtgaagcctg

SEQ ID NO: 904564 - DNA, 25 bp, Homo sapien
caccacctccatagcaatgagactg

SEQ ID NO: 904565 - DNA, 25 bp, Homo sapien
gttcaccacctccatagcaatgaga

SEQ ID NO: 904566 - DNA, 25 bp, Homo sapien
tagcaatgagactgatgctgctcac

SEQ ID NO: 904567 - DNA, 25 bp, Homo sapien
tgggttcaccacctccatagcaatg

SEQ ID NO: 904568 - DNA, 25 bp, Homo sapien
ctgttctggccacatatggcccgtg

SEQ ID NO: 904569 - DNA, 25 bp, Homo sapien
gcccgtggctgacttggccttcagt

SEQ ID NO: 904570 - DNA, 25 bp, Homo sapien
gacttggccttcagtggcatcatgc

SEQ ID NO: 904571 - DNA, 25 bp, Homo sapien
cacatatggcccgtggctgacttgg

SEQ ID NO: 904572 - DNA, 25 bp, Homo sapien
tatgacttgaacaaacccgaagcag

SEQ ID NO: 904573 - DNA, 25 bp, Homo sapien
gctatgccagggagatacaggagac

SEQ ID NO: 904574 - DNA, 25 bp, Homo sapien
tacaactggactagaacgagcaagc

SEQ ID NO: 904575 - DNA, 25 bp, Homo sapien
taaaaaggccctatggtacagtgag

SEQ ID NO: 904576 - DNA, 25 bp, Homo sapien
ttgctgtagctttccaggcaaagta

SEQ ID NO: 904577 - DNA, 25 bp, Homo sapien
tctcaaggaaagtcttcccattcac

SEQ ID NO: 904578 - DNA, 25 bp, Homo sapien
ctttcccattgctgtagctttccag

SEQ ID NO: 904579 - DNA, 25 bp, Homo sapien
tcccattgctgtagctttccaggca

SEQ ID NO: 904580 - DNA, 25 bp, Homo sapien
caggcatttacatatatcagaactc

SEQ ID NO: 904581 - DNA, 25 bp, Homo sapien
agtgaattaaaaagagagcatctca

SEQ ID NO: 904582 - DNA, 25 bp, Homo sapien
tggcttctgctaccttctggaaagg

SEQ ID NO: 904583 - DNA, 25 bp, Homo sapien
gatgagctggtgatgatgcaattaa

SEQ ID NO: 904584 - DNA, 25 bp, Homo sapien
atatggtcgtccctcattccaacca

SEQ ID NO: 904585 - DNA, 25 bp, Homo sapien
actgaaataaatatggtcgtccctc

SEQ ID NO: 904586 - DNA, 25 bp, Homo sapien
agaaactccaaatggacgaacacca

SEQ ID NO: 904587 - DNA, 25 bp, Homo sapien
tcattccaaccacaaataagtaaag

SEQ ID NO: 904588 - DNA, 25 bp, Homo sapien
gttgagctagttttcgagctctgtg

SEQ ID NO: 904589 - DNA, 25 bp, Homo sapien
cacagaagctactctctgtaccagc

SEQ ID NO: 904590 - DNA, 25 bp, Homo sapien
acagaagctactctctgtaccagct

SEQ ID NO: 904591 - DNA, 25 bp, Homo sapien
gctagttttcgagctctgtgcacaa

SEQ ID NO: 904592 - DNA, 25 bp, Homo sapien
aataagatttaattacacagaacat

SEQ ID NO: 904593 - DNA, 25 bp, Homo sapien
aaataagatttaattacacagaaca

SEQ ID NO: 904594 - DNA, 25 bp, Homo sapien
gatggtgagaaacactataaaaagt

SEQ ID NO: 904595 - DNA, 25 bp, Homo sapien
gtgagaaacactataaaaagtataa

SEQ ID NO: 904596 - DNA, 25 bp, Homo sapien
tggtgagaaacactataaaaagtat

SEQ ID NO: 904597 - DNA, 25 bp, Homo sapien
agatggtgagaaacactataaaaag

SEQ ID NO: 904598 - DNA, 25 bp, Homo sapien
aatcggggcccatgccactgtacac

SEQ ID NO: 904599 - DNA, 25 bp, Homo sapien
ctgtaatcggggcccatgccactgt

SEQ ID NO: 904600 - DNA, 25 bp, Homo sapien
taatcggggcccatgccactgtaca

SEQ ID NO: 904601 - DNA, 25 bp, Homo sapien
gtaatcggggcccatgccactgtac

SEQ ID NO: 904602 - DNA, 25 bp, Homo sapien
tccagctacagcagccaaagcatat

SEQ ID NO: 904603 - DNA, 25 bp, Homo sapien
ggacggggctcctccagctacagca

SEQ ID NO: 904604 - DNA, 25 bp, Homo sapien
gggctcctccagctacagcagccaa

SEQ ID NO: 904605 - DNA, 25 bp, Homo sapien
gctacagcagccaaagcatattcaa

SEQ ID NO: 904606 - DNA, 25 bp, Homo sapien
aatacctaattcatatacccctggg

SEQ ID NO: 904607 - DNA, 25 bp, Homo sapien
caattattgttcaatacctaattca

SEQ ID NO: 904608 - DNA, 25 bp, Homo sapien
gtaacatttaaaggctcatgtaaac

SEQ ID NO: 904609 - DNA, 25 bp, Homo sapien
ccctgggtaacatttaaaggctcat

SEQ ID NO: 904610 - DNA, 25 bp, Homo sapien
gataactgaaatagccttctaactg

SEQ ID NO: 904611 - DNA, 25 bp, Homo sapien
tgcgtgaaagctcactaacctgtga

SEQ ID NO: 904612 - DNA, 25 bp, Homo sapien
ctggctgagcaatcaaccatcttta

SEQ ID NO: 904613 - DNA, 25 bp, Homo sapien
gcatcagcatccctacatgggataa

SEQ ID NO: 904614 - DNA, 25 bp, Homo sapien
ttgtttaatttgtacaagctgcggt

SEQ ID NO: 904615 - DNA, 25 bp, Homo sapien
gctgcggttagttcatctgtaagaa

SEQ ID NO: 904616 - DNA, 25 bp, Homo sapien
gtacaagctgcggttagttcatctg

SEQ ID NO: 904617 - DNA, 25 bp, Homo sapien
aatttgtacaagctgcggttagttc

SEQ ID NO: 904618 - DNA, 25 bp, Homo sapien
gtcagcgaaaagctgtacccgcgct

SEQ ID NO: 904619 - DNA, 25 bp, Homo sapien
tagtcagcgaaaagctgtacccgcg

SEQ ID NO: 904620 - DNA, 25 bp, Homo sapien
aaaagctgtacccgcgctccgccat

SEQ ID NO: 904621 - DNA, 25 bp, Homo sapien
agcgaaaagctgtacccgcgctccg

SEQ ID NO: 904622 - DNA, 25 bp, Homo sapien
tactgggagcgactgctacggaagc

SEQ ID NO: 904623 - DNA, 25 bp, Homo sapien
gattctgtgcctgtgcgcatgctga

SEQ ID NO: 904624 - DNA, 25 bp, Homo sapien
ggagtgcttcgaaactactgggagc

SEQ ID NO: 904625 - DNA, 25 bp, Homo sapien
tagttctaagaagcgaggcttgccc

SEQ ID NO: 904626 - DNA, 25 bp, Homo sapien
gctcccaaaaatagacgcaccattg

SEQ ID NO: 904627 - DNA, 25 bp, Homo sapien
accggtgtaggagaagaaatccgca

SEQ ID NO: 904628 - DNA, 25 bp, Homo sapien
taaagagaattccagccttttggac

SEQ ID NO: 904629 - DNA, 25 bp, Homo sapien
agccttttggacagtatcttttgga

SEQ ID NO: 904630 - DNA, 25 bp, Homo sapien
tatgatgacctcatgtagcctgaac

SEQ ID NO: 904631 - DNA, 25 bp, Homo sapien
ggatcattgaacgagacagaaagcg

SEQ ID NO: 904632 - DNA, 25 bp, Homo sapien
tgtacacgggagagacaccgtctga

SEQ ID NO: 904633 - DNA, 25 bp, Homo sapien
gcaaggagactgcagaaatcagacg

SEQ ID NO: 904634 - DNA, 25 bp, Homo sapien
tggccccggtgacggtctgtgcact

SEQ ID NO: 904635 - DNA, 25 bp, Homo sapien
cacctcctccacgtttgtggagtcg

SEQ ID NO: 904636 - DNA, 25 bp, Homo sapien
tgctggccccggtgacggtctgtgc

SEQ ID NO: 904637 - DNA, 25 bp, Homo sapien
gccccggtgacggtctgtgcactca

SEQ ID NO: 904638 - DNA, 25 bp, Homo sapien
gctggggacattgtctgtttctgcc

SEQ ID NO: 904639 - DNA, 25 bp, Homo sapien
taggcatcagcaagccgctccacta

SEQ ID NO: 904640 - DNA, 25 bp, Homo sapien
taataaaccatcaggtacagcaatg

SEQ ID NO: 904641 - DNA, 25 bp, Homo sapien
aaccatcaggtacagcaatgctggg

SEQ ID NO: 904642 - DNA, 25 bp, Homo sapien
ccatcttgagaatgggttgacacca

SEQ ID NO: 904643 - DNA, 25 bp, Homo sapien
tcttgggcaaaatgctagggtttaa

SEQ ID NO: 904644 - DNA, 25 bp, Homo sapien
tgacaccatctcaggcttgaccagg

SEQ ID NO: 904645 - DNA, 25 bp, Homo sapien
ggagataattccataggcacccaga

SEQ ID NO: 904646 - DNA, 25 bp, Homo sapien
gctttagcttgtaaggcctcagtaa

SEQ ID NO: 904647 - DNA, 25 bp, Homo sapien
agcttgtaaggcctcagtaaaaagg

SEQ ID NO: 904648 - DNA, 25 bp, Homo sapien
aggcctcagtaaaaaggtagcagca

SEQ ID NO: 904649 - DNA, 25 bp, Homo sapien
ggaataagctttagcttgtaaggcc

SEQ ID NO: 904650 - DNA, 25 bp, Homo sapien
taactgaaaccatgccattccagtc

SEQ ID NO: 904651 - DNA, 25 bp, Homo sapien
tctgtttataactgaaaccatgcca

SEQ ID NO: 904652 - DNA, 25 bp, Homo sapien
actatatagacaagaggtgaggcca

SEQ ID NO: 904653 - DNA, 25 bp, Homo sapien
gaaacctatatagggactatataga

SEQ ID NO: 904654 - DNA, 25 bp, Homo sapien
tgtccaggagcatactctgcttatt

SEQ ID NO: 904655 - DNA, 25 bp, Homo sapien
ttccagttgtccaggagcatactct

SEQ ID NO: 904656 - DNA, 25 bp, Homo sapien
cagttgtccaggagcatactctgct

SEQ ID NO: 904657 - DNA, 25 bp, Homo sapien
gttgtccaggagcatactctgctta

SEQ ID NO: 904658 - DNA, 25 bp, Homo sapien
ataagctagcaatgcaagggagtgc

SEQ ID NO: 904659 - DNA, 25 bp, Homo sapien
gggataattccataggcacctggat

SEQ ID NO: 904660 - DNA, 25 bp, Homo sapien
tgcaggcttgaagtaatctcctggt

SEQ ID NO: 904661 - DNA, 25 bp, Homo sapien
aattagataagctagcaatgcaagg

SEQ ID NO: 904662 - DNA, 25 bp, Homo sapien
ctcttaaaccagtatataggaaata

SEQ ID NO: 904663 - DNA, 25 bp, Homo sapien
tcttaagatggaatgttaaacatac

SEQ ID NO: 904664 - DNA, 25 bp, Homo sapien
ataggaaatataatcctgttaaatt

SEQ ID NO: 904665 - DNA, 25 bp, Homo sapien
ttgttataactcttaaaccagtata

SEQ ID NO: 904666 - DNA, 25 bp, Homo sapien
gctatctaaaagcttgccaaactct

SEQ ID NO: 904667 - DNA, 25 bp, Homo sapien
gcccagaagttccaaccctataatc

SEQ ID NO: 904668 - DNA, 25 bp, Homo sapien
gatcagtctgtctttcagccccgct

SEQ ID NO: 904669 - DNA, 25 bp, Homo sapien
catcctgaagctatcagtgaacatt

SEQ ID NO: 904670 - DNA, 25 bp, Homo sapien
tgctcacagtttcctcaaggtcgag

SEQ ID NO: 904671 - DNA, 25 bp, Homo sapien
ggtgaacttaggcatcctggctcct

SEQ ID NO: 904672 - DNA, 25 bp, Homo sapien
gaatagatcaacacagagcattgtc

SEQ ID NO: 904673 - DNA, 25 bp, Homo sapien
ttggctagaacaagtcatgtgaccc

SEQ ID NO: 904674 - DNA, 25 bp, Homo sapien
ttttagagggcgcagtgaatcatcc

SEQ ID NO: 904675 - DNA, 25 bp, Homo sapien
gcaaatatagaattccctgtgacct

SEQ ID NO: 904676 - DNA, 25 bp, Homo sapien
gcaaatggtcccactatgtctgctg

SEQ ID NO: 904677 - DNA, 25 bp, Homo sapien
aagttcagccgctccttttagaggg

SEQ ID NO: 904678 - DNA, 25 bp, Homo sapien
aaccatcactatttatcccaggccc

SEQ ID NO: 904679 - DNA, 25 bp, Homo sapien
gctctgctaattacatctgggaaag

SEQ ID NO: 904680 - DNA, 25 bp, Homo sapien
ccaggcccaatgggagtcagacaga

SEQ ID NO: 904681 - DNA, 25 bp, Homo sapien
agtaatttattgcaagcaaccatca

SEQ ID NO: 904682 - DNA, 25 bp, Homo sapien
tttaagattgtaggcattgtgaagt

SEQ ID NO: 904683 - DNA, 25 bp, Homo sapien
gcattgtgaagttctgggtaatgac

SEQ ID NO: 904684 - DNA, 25 bp, Homo sapien
aggcattgtgaagttctgggtaatg

SEQ ID NO: 904685 - DNA, 25 bp, Homo sapien
ttatgggaatttaagattgtaggca

SEQ ID NO: 904686 - DNA, 25 bp, Homo sapien
gaccataaaggccactggtggcctc

SEQ ID NO: 904687 - DNA, 25 bp, Homo sapien
ccataaaggccactggtggcctcat

SEQ ID NO: 904688 - DNA, 25 bp, Homo sapien
gctcctgggaccataaaggccactg

SEQ ID NO: 904689 - DNA, 25 bp, Homo sapien
cacagctcctgggaccataaaggcc

SEQ ID NO: 904690 - DNA, 25 bp, Homo sapien
cagagtggctttcaggctgcttaac

SEQ ID NO: 904691 - DNA, 25 bp, Homo sapien
ggcctccttgtggacttagtttgga

SEQ ID NO: 904692 - DNA, 25 bp, Homo sapien
tatctgtgtgtctaactagacatgt

SEQ ID NO: 904693 - DNA, 25 bp, Homo sapien
cccagggcacctttgagcttgctgt

SEQ ID NO: 904694 - DNA, 25 bp, Homo sapien
tccacactctgacaaatgccgattt

SEQ ID NO: 904695 - DNA, 25 bp, Homo sapien
acactctgacaaatgccgatttctc

SEQ ID NO: 904696 - DNA, 25 bp, Homo sapien
ttctccaggactccacactctgaca

SEQ ID NO: 904697 - DNA, 25 bp, Homo sapien
actccacactctgacaaatgccgat

SEQ ID NO: 904698 - DNA, 25 bp, Homo sapien
tgcagctgcaactcccatggccatg

SEQ ID NO: 904699 - DNA, 25 bp, Homo sapien
tgcaactcccatggccatgtggcag

SEQ ID NO: 904700 - DNA, 25 bp, Homo sapien
ctgcagctgcaactcccatggccat

SEQ ID NO: 904701 - DNA, 25 bp, Homo sapien
agctgcaactcccatggccatgtgg

SEQ ID NO: 904702 - DNA, 25 bp, Homo sapien
tcacagccacttccacgtccctgac

SEQ ID NO: 904703 - DNA, 25 bp, Homo sapien
cttcacagccacttccacgtccctg

SEQ ID NO: 904704 - DNA, 25 bp, Homo sapien
ttcacagccacttccacgtccctga

SEQ ID NO: 904705 - DNA, 25 bp, Homo sapien
agatgtcttgagatgtaaaatccca

SEQ ID NO: 904706 - DNA, 25 bp, Homo sapien
ggagatgtcttgagatgtaaaatcc

SEQ ID NO: 904707 - DNA, 25 bp, Homo sapien
ttgagatgtaaaatcccatcctttg

SEQ ID NO: 904708 - DNA, 25 bp, Homo sapien
gagatgtaaaatcccatcctttggg

SEQ ID NO: 904709 - DNA, 25 bp, Homo sapien
gaggttactacaagcaactatatgc

SEQ ID NO: 904710 - DNA, 25 bp, Homo sapien
ggaggacccagacatattaagcaaa

SEQ ID NO: 904711 - DNA, 25 bp, Homo sapien
ataagtatatatgcactcaacactg

SEQ ID NO: 904712 - DNA, 25 bp, Homo sapien
tatagaccaaatgggccaaaattaa

SEQ ID NO: 904713 - DNA, 25 bp, Homo sapien
taaaaattgggcagacacagtggtt

SEQ ID NO: 904714 - DNA, 25 bp, Homo sapien
aaaattaaaaattgggcagacacag

SEQ ID NO: 904715 - DNA, 25 bp, Homo sapien
attaaaaattgggcagacacagtgg

SEQ ID NO: 904716 - DNA, 25 bp, Homo sapien
aaaaattgggcagacacagtggttc

SEQ ID NO: 904717 - DNA, 25 bp, Homo sapien
ctaagacttaggtgtttaatagaag

SEQ ID NO: 904718 - DNA, 25 bp, Homo sapien
ttaatagaaggaaggagtgtcaatg

SEQ ID NO: 904719 - DNA, 25 bp, Homo sapien
ctggcctaagacttaggtgtttaat

SEQ ID NO: 904720 - DNA, 25 bp, Homo sapien
tagaaggaaggagtgtcaatggagt

SEQ ID NO: 904721 - DNA, 25 bp, Homo sapien
tttacagatgtactgaacatacagc

SEQ ID NO: 904722 - DNA, 25 bp, Homo sapien
tgcagatgggccatttacagatgta

SEQ ID NO: 904723 - DNA, 25 bp, Homo sapien
ctcatctgcagatgggccatttaca

SEQ ID NO: 904724 - DNA, 25 bp, Homo sapien
acatacagcagagtaacccgccctt

SEQ ID NO: 904725 - DNA, 25 bp, Homo sapien
agaagagcaacctttctctctccca

SEQ ID NO: 904726 - DNA, 25 bp, Homo sapien
aagaagagcaacctttctctctccc

SEQ ID NO: 904727 - DNA, 25 bp, Homo sapien
gaagagcaacctttctctctcccac

SEQ ID NO: 904728 - DNA, 25 bp, Homo sapien
cactttacgccattatataaggtta

SEQ ID NO: 904729 - DNA, 25 bp, Homo sapien
ctaggatggctttaagattcatgcc

SEQ ID NO: 904730 - DNA, 25 bp, Homo sapien
tacagaactaacatagcctttttgc

SEQ ID NO: 904731 - DNA, 25 bp, Homo sapien
taaaataggatcatgctacccagac

SEQ ID NO: 904732 - DNA, 25 bp, Homo sapien
gaagctgccttcacatcgtccaaag

SEQ ID NO: 904733 - DNA, 25 bp, Homo sapien
tacggaaagagaagggctgtgcctc

SEQ ID NO: 904734 - DNA, 25 bp, Homo sapien
gacaagtccgtactcaggtcttcag

SEQ ID NO: 904735 - DNA, 25 bp, Homo sapien
actgagaaactagccactgtgggtg

SEQ ID NO: 904736 - DNA, 25 bp, Homo sapien
accccggcttgggtactgcaggcgc

SEQ ID NO: 904737 - DNA, 25 bp, Homo sapien
tggcgaccccggcttgggtactgca

SEQ ID NO: 904738 - DNA, 25 bp, Homo sapien
ttgggtactgcaggcgcacccggcc

SEQ ID NO: 904739 - DNA, 25 bp, Homo sapien
cggcttgggtactgcaggcgcaccc

SEQ ID NO: 904740 - DNA, 25 bp, Homo sapien
acctgagttttagcgggagcagtca

SEQ ID NO: 904741 - DNA, 25 bp, Homo sapien
ccacctgagttttagcgggagcagt

SEQ ID NO: 904742 - DNA, 25 bp, Homo sapien
gagttttagcgggagcagtcatgtc

SEQ ID NO: 904743 - DNA, 25 bp, Homo sapien
gttttagcgggagcagtcatgtcgc

SEQ ID NO: 904744 - DNA, 25 bp, Homo sapien
cgtattgcgacttgcagacaggcag

SEQ ID NO: 904745 - DNA, 25 bp, Homo sapien
ggaatgcgtccggtccatttttggc

SEQ ID NO: 904746 - DNA, 25 bp, Homo sapien
aatgcgtccggtccatttttggctg

SEQ ID NO: 904747 - DNA, 25 bp, Homo sapien
gaatgcgtccggtccatttttggct

SEQ ID NO: 904748 - DNA, 25 bp, Homo sapien
gattttcagagccatgatgcgcggt

SEQ ID NO: 904749 - DNA, 25 bp, Homo sapien
tctgcattgggctgacaccagagag

SEQ ID NO: 904750 - DNA, 25 bp, Homo sapien
tctgattgctctgccgctttgacgt

SEQ ID NO: 904751 - DNA, 25 bp, Homo sapien
tgacaatgcagcaaaatccgagggc

SEQ ID NO: 904752 - DNA, 25 bp, Homo sapien
gtgtcccctctacatgaccgggcat

SEQ ID NO: 904753 - DNA, 25 bp, Homo sapien
tcccctctacatgaccgggcatagg

SEQ ID NO: 904754 - DNA, 25 bp, Homo sapien
ttggtgtcccctctacatgaccggg

SEQ ID NO: 904755 - DNA, 25 bp, Homo sapien
ccctctacatgaccgggcataggac

SEQ ID NO: 904756 - DNA, 25 bp, Homo sapien
tcagcatccacttgatagcttcctg

SEQ ID NO: 904757 - DNA, 25 bp, Homo sapien
gagcacagggtgtaaaatcgacagg

SEQ ID NO: 904758 - DNA, 25 bp, Homo sapien
gacaggtcccagatctgtaaaatcg

SEQ ID NO: 904759 - DNA, 25 bp, Homo sapien
cctgtgccttatgctcagaagcggg

SEQ ID NO: 904760 - DNA, 25 bp, Homo sapien
gaagctttcttcaactatctggtgg

SEQ ID NO: 904761 - DNA, 25 bp, Homo sapien
ctgtggtcacatttaggaatgagat

SEQ ID NO: 904762 - DNA, 25 bp, Homo sapien
aaatcgtaacaatccagaactaaag

SEQ ID NO: 904763 - DNA, 25 bp, Homo sapien
tgagctctctcttataagggtacaa

SEQ ID NO: 904764 - DNA, 25 bp, Homo sapien
tccagaacacattggcagccatgtg

SEQ ID NO: 904765 - DNA, 25 bp, Homo sapien
gccatgtgcatacaatttccaactt

SEQ ID NO: 904766 - DNA, 25 bp, Homo sapien
gaacacattggcagccatgtgcata

SEQ ID NO: 904767 - DNA, 25 bp, Homo sapien
cattggcagccatgtgcatacaatt

SEQ ID NO: 904768 - DNA, 25 bp, Homo sapien
gccagggagggcagcacaggcccag

SEQ ID NO: 904769 - DNA, 25 bp, Homo sapien
tggggccagggagggcagcacaggc

SEQ ID NO: 904770 - DNA, 25 bp, Homo sapien
cagcacaggactgagggtggggcca

SEQ ID NO: 904771 - DNA, 25 bp, Homo sapien
gcacaggactgagggtggggccagg

SEQ ID NO: 904772 - DNA, 25 bp, Homo sapien
cacttttggtcagccactgcgtgct

SEQ ID NO: 904773 - DNA, 25 bp, Homo sapien
gaaaggacaatgctcaggagctcca

SEQ ID NO: 904774 - DNA, 25 bp, Homo sapien
ctccaaggaaagacgaccctcaggg

SEQ ID NO: 904775 - DNA, 25 bp, Homo sapien
cgttgaaaagtttgggcatcacact

SEQ ID NO: 904776 - DNA, 25 bp, Homo sapien
ttatgcaagatgcactttgcagagc

SEQ ID NO: 904777 - DNA, 25 bp, Homo sapien
taaatggctgaatgtcccatcagtg

SEQ ID NO: 904778 - DNA, 25 bp, Homo sapien
gcctttttggcaccgtagcacatac

SEQ ID NO: 904779 - DNA, 25 bp, Homo sapien
ttaccaagcaggcactaaatggctg

SEQ ID NO: 904780 - DNA, 25 bp, Homo sapien
tcagtggactccgtgaagaccccac

SEQ ID NO: 904781 - DNA, 25 bp, Homo sapien
tgtggttccagactgaggatgtctc

SEQ ID NO: 904782 - DNA, 25 bp, Homo sapien
gcagaatgtggttccagactgagga

SEQ ID NO: 904783 - DNA, 25 bp, Homo sapien
ttcgtggctcaccagtttcttcagc

SEQ ID NO: 904784 - DNA, 25 bp, Homo sapien
ttcaaagggattgttttcgtggctc

SEQ ID NO: 904785 - DNA, 25 bp, Homo sapien
gcaggtgtgttgcagaaatgaacac

SEQ ID NO: 904786 - DNA, 25 bp, Homo sapien
cttactgttccaattctggcaggtg

SEQ ID NO: 904787 - DNA, 25 bp, Homo sapien
ccaattctggcaggtgtgttgcaga

SEQ ID NO: 904788 - DNA, 25 bp, Homo sapien
tactgttccaattctggcaggtgtg

SEQ ID NO: 904789 - DNA, 25 bp, Homo sapien
ttattatcctgagttattggggtta

SEQ ID NO: 904790 - DNA, 25 bp, Homo sapien
tattatcctgagttattggggttaa

SEQ ID NO: 904791 - DNA, 25 bp, Homo sapien
caggggagagctcacattcatctct

SEQ ID NO: 904792 - DNA, 25 bp, Homo sapien
gggtctgggcctggcagtatctcca

SEQ ID NO: 904793 - DNA, 25 bp, Homo sapien
gcagtatctccaggggagagctcac

SEQ ID NO: 904794 - DNA, 25 bp, Homo sapien
ctgggccttgtaggattcagcagtt

SEQ ID NO: 904795 - DNA, 25 bp, Homo sapien
catgatcgccatcgtggtaaatggt

SEQ ID NO: 904796 - DNA, 25 bp, Homo sapien
gcccatgatcgccatcgtggtaaat

SEQ ID NO: 904797 - DNA, 25 bp, Homo sapien
atcgccatcgtggtaaatggtttcc

SEQ ID NO: 904798 - DNA, 25 bp, Homo sapien
aatcttgcccatgatcgccatcgtg

SEQ ID NO: 904799 - DNA, 25 bp, Homo sapien
cagagctgatgatgcctcgcaggca

SEQ ID NO: 904800 - DNA, 25 bp, Homo sapien
atgcctcgcaggcaagtgtcctcag

SEQ ID NO: 904801 - DNA, 25 bp, Homo sapien
gatgatgcctcgcaggcaagtgtcc

SEQ ID NO: 904802 - DNA, 25 bp, Homo sapien
cagagccagagctgatgatgcctcg

SEQ ID NO: 904803 - DNA, 25 bp, Homo sapien
tgcgggtgtgtgacactctgcaggc

SEQ ID NO: 904804 - DNA, 25 bp, Homo sapien
agcctctcactctggatccggttct

SEQ ID NO: 904805 - DNA, 25 bp, Homo sapien
tgtgtgacactctgcaggcaccagg

SEQ ID NO: 904806 - DNA, 25 bp, Homo sapien
tgcaggcaccaggcatcactctgct

SEQ ID NO: 904807 - DNA, 25 bp, Homo sapien
tgtcaaatttacaagagagcttctc

SEQ ID NO: 904808 - DNA, 25 bp, Homo sapien
gaatttgcaagaaagagcctccttg

SEQ ID NO: 904809 - DNA, 25 bp, Homo sapien
gagagtgattttgcagccaggctac

SEQ ID NO: 904810 - DNA, 25 bp, Homo sapien
tgggtaagatttgatggagacgtac

SEQ ID NO: 904811 - DNA, 25 bp, Homo sapien
tgcgaagcctggagtatcaatgtct

SEQ ID NO: 904812 - DNA, 25 bp, Homo sapien
aagcctggagtatcaatgtctttcc

SEQ ID NO: 904813 - DNA, 25 bp, Homo sapien
agatgcgaagcctggagtatcaatg

SEQ ID NO: 904814 - DNA, 25 bp, Homo sapien
gagtatcaatgtctttccacaagtg

SEQ ID NO: 904815 - DNA, 25 bp, Homo sapien
tcctgtgtttattggagctctccag

SEQ ID NO: 904816 - DNA, 25 bp, Homo sapien
gcctgcaccagtcagtctcaaagcc

SEQ ID NO: 904817 - DNA, 25 bp, Homo sapien
tgtgtttattggagctctccagttc

SEQ ID NO: 904818 - DNA, 25 bp, Homo sapien
gcaccagtcagtctcaaagcctcca

SEQ ID NO: 904819 - DNA, 25 bp, Homo sapien
catcgcaggtagcgagatgagcagg

SEQ ID NO: 904820 - DNA, 25 bp, Homo sapien
tcatcgcaggtagcgagatgagcag

SEQ ID NO: 904821 - DNA, 25 bp, Homo sapien
gcaagagcagcgtgcaatatacggg

SEQ ID NO: 904822 - DNA, 25 bp, Homo sapien
agagcagcgtgcaatatacgggttg

SEQ ID NO: 904823 - DNA, 25 bp, Homo sapien
ctgcaagagcagcgtgcaatatacg

SEQ ID NO: 904824 - DNA, 25 bp, Homo sapien
caagagcagcgtgcaatatacgggt

SEQ ID NO: 904825 - DNA, 25 bp, Homo sapien
ttgacttctcatgtgacttttccct

SEQ ID NO: 904826 - DNA, 25 bp, Homo sapien
tgacttctcatgtgacttttccctc

SEQ ID NO: 904827 - DNA, 25 bp, Homo sapien
cttgacttctcatgtgacttttccc

SEQ ID NO: 904828 - DNA, 25 bp, Homo sapien
gctatccagtctggctgatggctga

SEQ ID NO: 904829 - DNA, 25 bp, Homo sapien
gaacttccaacgtgagaccagacgg

SEQ ID NO: 904830 - DNA, 25 bp, Homo sapien
tgatggctgatgaatatttgctgtg

SEQ ID NO: 904831 - DNA, 25 bp, Homo sapien
tcagccaaaagggagacgatctagt

SEQ ID NO: 904832 - DNA, 25 bp, Homo sapien
tgtttgtcgtccgtatggcttggct

SEQ ID NO: 904833 - DNA, 25 bp, Homo sapien
ttcatcatattgtttgtcgtccgta

SEQ ID NO: 904834 - DNA, 25 bp, Homo sapien
gggttctgagtgacctttcatcata

SEQ ID NO: 904835 - DNA, 25 bp, Homo sapien
tgtcgtccgtatggcttggcttttc

SEQ ID NO: 904836 - DNA, 25 bp, Homo sapien
tgtgccgagcactcctagaggattt

SEQ ID NO: 904837 - DNA, 25 bp, Homo sapien
cagcgttgatgagtagtgacaggcc

SEQ ID NO: 904838 - DNA, 25 bp, Homo sapien
gacctatgaagaagtggcctcaggc

SEQ ID NO: 904839 - DNA, 25 bp, Homo sapien
gagggtcatggccacttgagtccaa

SEQ ID NO: 904840 - DNA, 25 bp, Homo sapien
tttcctctacttgaaatctgtgcac

SEQ ID NO: 904841 - DNA, 25 bp, Homo sapien
atttcctctacttgaaatctgtgca

SEQ ID NO: 904842 - DNA, 25 bp, Homo sapien
ggatttcctctacttgaaatctgtg

SEQ ID NO: 904843 - DNA, 25 bp, Homo sapien
gatttcctctacttgaaatctgtgc

SEQ ID NO: 904844 - DNA, 25 bp, Homo sapien
ccgtgcagatctgtgtagctgaagg

SEQ ID NO: 904845 - DNA, 25 bp, Homo sapien
gctgtcaggctggatcccatatggc

SEQ ID NO: 904846 - DNA, 25 bp, Homo sapien
tggatcccatatggcagaagcaagg

SEQ ID NO: 904847 - DNA, 25 bp, Homo sapien
ggccgtgcagatctgtgtagctgaa

SEQ ID NO: 904848 - DNA, 25 bp, Homo sapien
tccttgggctccagtttattcctga

SEQ ID NO: 904849 - DNA, 25 bp, Homo sapien
gacaggtcacttggtccccatctga

SEQ ID NO: 904850 - DNA, 25 bp, Homo sapien
tccagagtcaagctttgcagttaaa

SEQ ID NO: 904851 - DNA, 25 bp, Homo sapien
ttattcctgatgaaagagggttcca

SEQ ID NO: 904852 - DNA, 25 bp, Homo sapien
gacagatgatgccgtcagcaactgt

SEQ ID NO: 904853 - DNA, 25 bp, Homo sapien
gatgatgccgtcagcaactgtccca

SEQ ID NO: 904854 - DNA, 25 bp, Homo sapien
ctgacagatgatgccgtcagcaact

SEQ ID NO: 904855 - DNA, 25 bp, Homo sapien
cagatgatgccgtcagcaactgtcc

SEQ ID NO: 904856 - DNA, 25 bp, Homo sapien
caagtcctgtatgctaattttggac

SEQ ID NO: 904857 - DNA, 25 bp, Homo sapien
gctcaagtcctgtatgctaattttg

SEQ ID NO: 904858 - DNA, 25 bp, Homo sapien
agtcctgtatgctaattttggacat

SEQ ID NO: 904859 - DNA, 25 bp, Homo sapien
tcaagtcctgtatgctaattttgga

SEQ ID NO: 904860 - DNA, 25 bp, Homo sapien
ccccaggaattgatgcgcgtacacg

SEQ ID NO: 904861 - DNA, 25 bp, Homo sapien
gatgcgcgtacacgtggtgggtcat

SEQ ID NO: 904862 - DNA, 25 bp, Homo sapien
ttttccccaggaattgatgcgcgta

SEQ ID NO: 904863 - DNA, 25 bp, Homo sapien
ccaggaattgatgcgcgtacacgtg

SEQ ID NO: 904864 - DNA, 25 bp, Homo sapien
tgggtgtgactccgccactaacatt

SEQ ID NO: 904865 - DNA, 25 bp, Homo sapien
gtgtgactccgccactaacattttc

SEQ ID NO: 904866 - DNA, 25 bp, Homo sapien
ctgggtgtgactccgccactaacat

SEQ ID NO: 904867 - DNA, 25 bp, Homo sapien
gggtgtgactccgccactaacattt

SEQ ID NO: 904868 - DNA, 25 bp, Homo sapien
gggcagctctgaactccaggaacat

SEQ ID NO: 904869 - DNA, 25 bp, Homo sapien
taaacaggagccttatgtctagagc

SEQ ID NO: 904870 - DNA, 25 bp, Homo sapien
ccaagcatgttctttgaagagggca

SEQ ID NO: 904871 - DNA, 25 bp, Homo sapien
ccaagtgcaaggcagtttaaaccct

SEQ ID NO: 904872 - DNA, 25 bp, Homo sapien
agcctgctgttggagggagactttc

SEQ ID NO: 904873 - DNA, 25 bp, Homo sapien
gacaccaatactgaatacggagaag

SEQ ID NO: 904874 - DNA, 25 bp, Homo sapien
gcctgctgttggagggagactttcc

SEQ ID NO: 904875 - DNA, 25 bp, Homo sapien
gttccactgtcatgccatccttgat

SEQ ID NO: 904876 - DNA, 25 bp, Homo sapien
cactgtggttctgggaggtgaacac

SEQ ID NO: 904877 - DNA, 25 bp, Homo sapien
tgcaggtatcagtaggtaaagagga

SEQ ID NO: 904878 - DNA, 25 bp, Homo sapien
ctgtatggtccgcagggctcctgga

SEQ ID NO: 904879 - DNA, 25 bp, Homo sapien
tccactttcaatcaggctagtgcct

SEQ ID NO: 904880 - DNA, 25 bp, Homo sapien
ctggtggcgtaacaaagccgagtgt

SEQ ID NO: 904881 - DNA, 25 bp, Homo sapien
ccgagtgtaggatagcaaaagctgc

SEQ ID NO: 904882 - DNA, 25 bp, Homo sapien
taacaaagccgagtgtaggatagca

SEQ ID NO: 904883 - DNA, 25 bp, Homo sapien
gtaggatagcaaaagctgcaggcat

SEQ ID NO: 904884 - DNA, 25 bp, Homo sapien
atttttgattccttggtgtagaggc

SEQ ID NO: 904885 - DNA, 25 bp, Homo sapien
aatttttgattccttggtgtagagg

SEQ ID NO: 904886 - DNA, 25 bp, Homo sapien
gatgaggtcttgtccgaaaactttc

SEQ ID NO: 904887 - DNA, 25 bp, Homo sapien
gccagctcgtactttgtggaacgtg

SEQ ID NO: 904888 - DNA, 25 bp, Homo sapien
atttgttcccgttgcactgcctcca

SEQ ID NO: 904889 - DNA, 25 bp, Homo sapien
gatcatctggaagatcgatgccagc

SEQ ID NO: 904890 - DNA, 25 bp, Homo sapien
ttgtcacacaaatcagtagacactt

SEQ ID NO: 904891 - DNA, 25 bp, Homo sapien
gctgtcaccctgatttttatctcct

SEQ ID NO: 904892 - DNA, 25 bp, Homo sapien
attgctgtcaccctgatttttatct

SEQ ID NO: 904893 - DNA, 25 bp, Homo sapien
tgtcacacaaatcagtagacacttg

SEQ ID NO: 904894 - DNA, 25 bp, Homo sapien
agatagttgtaggtatgcggtgtta

SEQ ID NO: 904895 - DNA, 25 bp, Homo sapien
tagttgtaggtatgcggtgttattt

SEQ ID NO: 904896 - DNA, 25 bp, Homo sapien
gatcagatagttgtaggtatgcggt

SEQ ID NO: 904897 - DNA, 25 bp, Homo sapien
tcagatagttgtaggtatgcggtgt

SEQ ID NO: 904898 - DNA, 25 bp, Homo sapien
cctgaatatccaaaggtggtcactc

SEQ ID NO: 904899 - DNA, 25 bp, Homo sapien
ggtccctacatgtggagccctgcaa

SEQ ID NO: 904900 - DNA, 25 bp, Homo sapien
tggtgttaagtggaactcacaagcc

SEQ ID NO: 904901 - DNA, 25 bp, Homo sapien
agaattcagcccacgagtcttgctc

SEQ ID NO: 904902 - DNA, 25 bp, Homo sapien
tccccctgatagagaagctcctctt

SEQ ID NO: 904903 - DNA, 25 bp, Homo sapien
gttgctgtccccctgatagagaagc

SEQ ID NO: 904904 - DNA, 25 bp, Homo sapien
ctgtccccctgatagagaagctcct

SEQ ID NO: 904905 - DNA, 25 bp, Homo sapien
aagccaggttgctgtccccctgata

SEQ ID NO: 904906 - DNA, 25 bp, Homo sapien
gcagtgtccccgatggtccagggaa

SEQ ID NO: 904907 - DNA, 25 bp, Homo sapien
catgaacaacctgatggaaagcggc

SEQ ID NO: 904908 - DNA, 25 bp, Homo sapien
ctggcccaggtgcaaaaggacatcc

SEQ ID NO: 904909 - DNA, 25 bp, Homo sapien
agatttccctgagtaccgagcctga

SEQ ID NO: 904910 - DNA, 25 bp, Homo sapien
agctgccaccattagttttaaaacg

SEQ ID NO: 904911 - DNA, 25 bp, Homo sapien
tggaaactgtcttccagtcaagtga

SEQ ID NO: 904912 - DNA, 25 bp, Homo sapien
tgttctttcttagtcatgcctgtgg

SEQ ID NO: 904913 - DNA, 25 bp, Homo sapien
tgaaattagcctccaacaaaaggcg

SEQ ID NO: 904914 - DNA, 25 bp, Homo sapien
tactgcttcattcagctactgagca

SEQ ID NO: 904915 - DNA, 25 bp, Homo sapien
cccagtaaaggctctattgctctta

SEQ ID NO: 904916 - DNA, 25 bp, Homo sapien
ttatagtcactacttagaaactcca

SEQ ID NO: 904917 - DNA, 25 bp, Homo sapien
aattactagtattatcttaacccag

SEQ ID NO: 904918 - DNA, 25 bp, Homo sapien
gaggctccgaagttacagcgctgga

SEQ ID NO: 904919 - DNA, 25 bp, Homo sapien
gagatccctacacttatggctggag

SEQ ID NO: 904920 - DNA, 25 bp, Homo sapien
cctcctgaggcctgtcatgtgtgaa

SEQ ID NO: 904921 - DNA, 25 bp, Homo sapien
tagaagaatgatgaccgggacaccc

SEQ ID NO: 904922 - DNA, 25 bp, Homo sapien
gaagtaggcaccattaatgaatttc

SEQ ID NO: 904923 - DNA, 25 bp, Homo sapien
cctttgggctaactggacttcagct

SEQ ID NO: 904924 - DNA, 25 bp, Homo sapien
tctggctcagctttacccgtgagtg

SEQ ID NO: 904925 - DNA, 25 bp, Homo sapien
tgggtgacctcagaagtaggcacca

SEQ ID NO: 904926 - DNA, 25 bp, Homo sapien
aatattcaaacatctttttccttcg

SEQ ID NO: 904927 - DNA, 25 bp, Homo sapien
ctctccaacgttccaaaatctggag

SEQ ID NO: 904928 - DNA, 25 bp, Homo sapien
atattcaaacatctttttccttcgg

SEQ ID NO: 904929 - DNA, 25 bp, Homo sapien
ttactctccaacgttccaaaatctg

SEQ ID NO: 904930 - DNA, 25 bp, Homo sapien
gatctggtcattttgctgaggtagg

SEQ ID NO: 904931 - DNA, 25 bp, Homo sapien
cattcggactgagggtaatcacggg

SEQ ID NO: 904932 - DNA, 25 bp, Homo sapien
taatcacgggcttgagaagttgtcc

SEQ ID NO: 904933 - DNA, 25 bp, Homo sapien
gaagttgtcctgtgatgcggatctg

SEQ ID NO: 904934 - DNA, 25 bp, Homo sapien
tggcattcactccaaagagcagagg

SEQ ID NO: 904935 - DNA, 25 bp, Homo sapien
gaataattgcctactgagaagacgc

SEQ ID NO: 904936 - DNA, 25 bp, Homo sapien
tacacatcgagggtttggcacaaga

SEQ ID NO: 904937 - DNA, 25 bp, Homo sapien
tggacgggcccaagaatggaatctg

SEQ ID NO: 904938 - DNA, 25 bp, Homo sapien
tagcaatctaaactgagcccacggt

SEQ ID NO: 904939 - DNA, 25 bp, Homo sapien
gacagtgcctgtcctcgaaatgcag

SEQ ID NO: 904940 - DNA, 25 bp, Homo sapien
tgatcgctcacgactggtaccactg

SEQ ID NO: 904941 - DNA, 25 bp, Homo sapien
caattgcaggtagctttctgagccg

SEQ ID NO: 904942 - DNA, 25 bp, Homo sapien
ttattgttcaggtttgccctctgca

SEQ ID NO: 904943 - DNA, 25 bp, Homo sapien
tattgttcaggtttgccctctgcag

SEQ ID NO: 904944 - DNA, 25 bp, Homo sapien
gattccctgctagtccatccagaag

SEQ ID NO: 904945 - DNA, 25 bp, Homo sapien
gagtctcggtgcagttagtccactg

SEQ ID NO: 904946 - DNA, 25 bp, Homo sapien
caagtaatgaccaggtgagtctcgg

SEQ ID NO: 904947 - DNA, 25 bp, Homo sapien
tttgcttcccaagacagttgcctcc

SEQ ID NO: 904948 - DNA, 25 bp, Homo sapien
ctgcagctgcgcaggagttctagac

SEQ ID NO: 904949 - DNA, 25 bp, Homo sapien
agctgcgcaggagttctagacacca

SEQ ID NO: 904950 - DNA, 25 bp, Homo sapien
gcagctgcgcaggagttctagacac

SEQ ID NO: 904951 - DNA, 25 bp, Homo sapien
gctgcgcaggagttctagacaccat

SEQ ID NO: 904952 - DNA, 25 bp, Homo sapien
aagcatctttgagggccagagtggt

SEQ ID NO: 904953 - DNA, 25 bp, Homo sapien
gagggccagagtggtaacatacctg

SEQ ID NO: 904954 - DNA, 25 bp, Homo sapien
tctttgagggccagagtggtaacat

SEQ ID NO: 904955 - DNA, 25 bp, Homo sapien
ccagagtggtaacatacctggacac

SEQ ID NO: 904956 - DNA, 25 bp, Homo sapien
tctgtctcctcatagtctggcatgg

SEQ ID NO: 904957 - DNA, 25 bp, Homo sapien
ttcattccctgcacacccaattccc

SEQ ID NO: 904958 - DNA, 25 bp, Homo sapien
gtctcctcatagtctggcatggcct

SEQ ID NO: 904959 - DNA, 25 bp, Homo sapien
gattctctgtctcctcatagtctgg

SEQ ID NO: 904960 - DNA, 25 bp, Homo sapien
caagccacttcttcctgtcatcctt

SEQ ID NO: 904961 - DNA, 25 bp, Homo sapien
catccttctcttctgctgctgctca

SEQ ID NO: 904962 - DNA, 25 bp, Homo sapien
tcttcctgtcatccttctcttctgc

SEQ ID NO: 904963 - DNA, 25 bp, Homo sapien
atccttctcttctgctgctgctcac

SEQ ID NO: 904964 - DNA, 25 bp, Homo sapien
tgtcctgctgatttacctccaaatt

SEQ ID NO: 904965 - DNA, 25 bp, Homo sapien
gtcctgctgatttacctccaaattg

SEQ ID NO: 904966 - DNA, 25 bp, Homo sapien
gcgtaggtcaagttcatctcccaga

SEQ ID NO: 904967 - DNA, 25 bp, Homo sapien
agttcacagtcccagtgcacactgg

SEQ ID NO: 904968 - DNA, 25 bp, Homo sapien
gatgtgcgcgcaccaagagtgacat

SEQ ID NO: 904969 - DNA, 25 bp, Homo sapien
gccgtaagagccctccatgtgtttt

SEQ ID NO: 904970 - DNA, 25 bp, Homo sapien
gccctgtgatttgagtgacctggaa

SEQ ID NO: 904971 - DNA, 25 bp, Homo sapien
ccaattttcatgcagagtccctgag

SEQ ID NO: 904972 - DNA, 25 bp, Homo sapien
caccagagtttgcagtggatgaagg

SEQ ID NO: 904973 - DNA, 25 bp, Homo sapien
actgaattcacccaggccctgtgat

SEQ ID NO: 904974 - DNA, 25 bp, Homo sapien
tgttccccgctcatgaaggcttgtg

SEQ ID NO: 904975 - DNA, 25 bp, Homo sapien
cagaatcattctgagagggagcatt

SEQ ID NO: 904976 - DNA, 25 bp, Homo sapien
caaaatactgtgaggtgggtggctt

SEQ ID NO: 904977 - DNA, 25 bp, Homo sapien
cattaggagtggagcatgcgattct

SEQ ID NO: 904978 - DNA, 25 bp, Homo sapien
ctgtcctggccaaagggtggtgctg

SEQ ID NO: 904979 - DNA, 25 bp, Homo sapien
ggccgtcccgaaagctgcaccttct

SEQ ID NO: 904980 - DNA, 25 bp, Homo sapien
ggtgctgtgagtcgcctccagcctc

SEQ ID NO: 904981 - DNA, 25 bp, Homo sapien
agcctccgggccgtcccgaaagctg

SEQ ID NO: 904982 - DNA, 25 bp, Homo sapien
gagagcgggtgtttgaaggctccgc

SEQ ID NO: 904983 - DNA, 25 bp, Homo sapien
tcggagtgaacaggcggccaggaaa

SEQ ID NO: 904984 - DNA, 25 bp, Homo sapien
ggccaggaaagaagcgggcctgaac

SEQ ID NO: 904985 - DNA, 25 bp, Homo sapien
tgaccctccggctgctcggagtgaa

SEQ ID NO: 904986 - DNA, 25 bp, Homo sapien
acaaacttgggtgccgacggcaagt

SEQ ID NO: 904987 - DNA, 25 bp, Homo sapien
cccagcaagcgagtggtggtaactc

SEQ ID NO: 904988 - DNA, 25 bp, Homo sapien
gataacgcgcgttgtgacttggcac

SEQ ID NO: 904989 - DNA, 25 bp, Homo sapien
gaagtggcgttgctgctgccgataa

SEQ ID NO: 904990 - DNA, 25 bp, Homo sapien
tagattgatggctgtaggtaatagc

SEQ ID NO: 904991 - DNA, 25 bp, Homo sapien
acttaagcgtgtgtcataagttatc

SEQ ID NO: 904992 - DNA, 25 bp, Homo sapien
gattgatggctgtaggtaatagctt

SEQ ID NO: 904993 - DNA, 25 bp, Homo sapien
atctgacaagaacttaagcgtgtgt

SEQ ID NO: 904994 - DNA, 25 bp, Homo sapien
ttcagcgataaggaagacaaaatcc

SEQ ID NO: 904995 - DNA, 25 bp, Homo sapien
ggtcctttcagcgataaggaagaca

SEQ ID NO: 904996 - DNA, 25 bp, Homo sapien
cagcgataaggaagacaaaatccat

SEQ ID NO: 904997 - DNA, 25 bp, Homo sapien
ccttggtcctttcagcgataaggaa

SEQ ID NO: 904998 - DNA, 25 bp, Homo sapien
tcatctgttcatgggccaatacccc

SEQ ID NO: 904999 - DNA, 25 bp, Homo sapien
acttgttaaaagaatagtctggatt

SEQ ID NO: 905000 - DNA, 25 bp, Homo sapien
tcagctttgactcttatgtcttgcc

SEQ ID NO: 905001 - DNA, 25 bp, Homo sapien
cttctatgctaaaattccttcctca

SEQ ID NO: 905002 - DNA, 25 bp, Homo sapien
tgtcatcagtgtcataggctccaac

SEQ ID NO: 905003 - DNA, 25 bp, Homo sapien
tgagccaggaatattcgagaagcag

SEQ ID NO: 905004 - DNA, 25 bp, Homo sapien
ttcctttcaagtgatcagggtgcca

SEQ ID NO: 905005 - DNA, 25 bp, Homo sapien
cctaacctttacgtggactgagtga

SEQ ID NO: 905006 - DNA, 25 bp, Homo sapien
caggtgtctgtggtaggcaagttta

SEQ ID NO: 905007 - DNA, 25 bp, Homo sapien
ttcttagtatattcctgcaggtgtc

SEQ ID NO: 905008 - DNA, 25 bp, Homo sapien
aaaggtccactatgatgattcttag

SEQ ID NO: 905009 - DNA, 25 bp, Homo sapien
tactttcatatcaagtccaggtgca

SEQ ID NO: 905010 - DNA, 25 bp, Homo sapien
taatacaaattgctaggccacaacc

SEQ ID NO: 905011 - DNA, 25 bp, Homo sapien
tggtaacctgagaaggccgaagcct

SEQ ID NO: 905012 - DNA, 25 bp, Homo sapien
tgtagtatcccctctagcagaaagt

SEQ ID NO: 905013 - DNA, 25 bp, Homo sapien
taatggcagtgttctctgacccaga

SEQ ID NO: 905014 - DNA, 25 bp, Homo sapien
gaattagtcattcagtacagcggcc

SEQ ID NO: 905015 - DNA, 25 bp, Homo sapien
tcagcagtgttagtacagtcagccc

SEQ ID NO: 905016 - DNA, 25 bp, Homo sapien
gataccatgggacaactatactagg

SEQ ID NO: 905017 - DNA, 25 bp, Homo sapien
aaaagtagactagaagaaggccagg

SEQ ID NO: 905018 - DNA, 25 bp, Homo sapien
tcaccatcgaagaactaacagagct

SEQ ID NO: 905019 - DNA, 25 bp, Homo sapien
taatgaactggattccctagaaagg

SEQ ID NO: 905020 - DNA, 25 bp, Homo sapien
tagaactagattttgtgtgccacaa

SEQ ID NO: 905021 - DNA, 25 bp, Homo sapien
catctatttacggaccgtctgcagg

SEQ ID NO: 905022 - DNA, 25 bp, Homo sapien
ttgtgctgtcgtccagccacacagg

SEQ ID NO: 905023 - DNA, 25 bp, Homo sapien
agaaaacgtggcctgccttctgcca

SEQ ID NO: 905024 - DNA, 25 bp, Homo sapien
aaaagtctgaggactcatagtcatg

SEQ ID NO: 905025 - DNA, 25 bp, Homo sapien
tccagaatagcctacaaagccctgt

SEQ ID NO: 905026 - DNA, 25 bp, Homo sapien
aaaggtgagtttatgcctcccacag

SEQ ID NO: 905027 - DNA, 25 bp, Homo sapien
acagcaacccaagtgttttagccaa

SEQ ID NO: 905028 - DNA, 25 bp, Homo sapien
tatgcgtcatgaccactaagttagt

SEQ ID NO: 905029 - DNA, 25 bp, Homo sapien
tataatggaagtacaagctcaatcc

SEQ ID NO: 905030 - DNA, 25 bp, Homo sapien
tatgtgtggcagcaatttactttat

SEQ ID NO: 905031 - DNA, 25 bp, Homo sapien
tcctgaatccttgcatatttgacag

SEQ ID NO: 905032 - DNA, 25 bp, Homo sapien
tagtttagcctccttatttgtatag

SEQ ID NO: 905033 - DNA, 25 bp, Homo sapien
tgtggattcagtacttattgactgc

SEQ ID NO: 905034 - DNA, 25 bp, Homo sapien
gtgctgggtacccagcctcaaagca

SEQ ID NO: 905035 - DNA, 25 bp, Homo sapien
tgctgggtacccagcctcaaagcat

SEQ ID NO: 905036 - DNA, 25 bp, Homo sapien
aaagtgctgggtacccagcctcaaa

SEQ ID NO: 905037 - DNA, 25 bp, Homo sapien
aagtgctgggtacccagcctcaaag

SEQ ID NO: 905038 - DNA, 25 bp, Homo sapien
tcaagagagcgtttcagacataact

SEQ ID NO: 905039 - DNA, 25 bp, Homo sapien
caaatgtgtcatggcagtaaatagc

SEQ ID NO: 905040 - DNA, 25 bp, Homo sapien
tcagcattgtgggaaattgcaccca

SEQ ID NO: 905041 - DNA, 25 bp, Homo sapien
tgtcatgcttacaggaatatcacct

SEQ ID NO: 905042 - DNA, 25 bp, Homo sapien
acctgtgtgctgtgtaccgtggcca

SEQ ID NO: 905043 - DNA, 25 bp, Homo sapien
tcaggcacttcagacaaccaggttg

SEQ ID NO: 905044 - DNA, 25 bp, Homo sapien
cacggtctgattagggtgtcacaca

SEQ ID NO: 905045 - DNA, 25 bp, Homo sapien
gagagtgtcttcatgccaaccacag

SEQ ID NO: 905046 - DNA, 25 bp, Homo sapien
tgatctcaggtaaaacagacgttct

SEQ ID NO: 905047 - DNA, 25 bp, Homo sapien
tgaacgttcagtggttccagcacca

SEQ ID NO: 905048 - DNA, 25 bp, Homo sapien
tggtgcccggtctaaaatcatttga

SEQ ID NO: 905049 - DNA, 25 bp, Homo sapien
ccatgcttctggatatgtggcggta

SEQ ID NO: 905050 - DNA, 25 bp, Homo sapien
gatgcaataatggaatcgcagaggg

SEQ ID NO: 905051 - DNA, 25 bp, Homo sapien
tcatcatgcctaaccagaactatgt

SEQ ID NO: 905052 - DNA, 25 bp, Homo sapien
caaaattggatggaatccctcctct

SEQ ID NO: 905053 - DNA, 25 bp, Homo sapien
tcagtgcagagatcctatatatcct

SEQ ID NO: 905054 - DNA, 25 bp, Homo sapien
accgcgcgggtgaacagttgtgaca

SEQ ID NO: 905055 - DNA, 25 bp, Homo sapien
ttgtgacagagatctgaaggcccgt

SEQ ID NO: 905056 - DNA, 25 bp, Homo sapien
tacctccgtggattctacctttggc

SEQ ID NO: 905057 - DNA, 25 bp, Homo sapien
tgcagaggtcagcatactgtggcct

SEQ ID NO: 905058 - DNA, 25 bp, Homo sapien
gatacatctttacgtaactacagga

SEQ ID NO: 905059 - DNA, 25 bp, Homo sapien
tacagggagttgaaaagacagtaca

SEQ ID NO: 905060 - DNA, 25 bp, Homo sapien
gagatatgtttaatcctcagctgca

SEQ ID NO: 905061 - DNA, 25 bp, Homo sapien
tcagctgcaattattcaggtgagga

SEQ ID NO: 905062 - DNA, 25 bp, Homo sapien
cttttcaaggtctatagggtagact

SEQ ID NO: 905063 - DNA, 25 bp, Homo sapien
tagttttctatcaaccgagaatgtt

SEQ ID NO: 905064 - DNA, 25 bp, Homo sapien
tctatagggtagactcattcaacaa

SEQ ID NO: 905065 - DNA, 25 bp, Homo sapien
tgctgtttccatcgttattcctgac

SEQ ID NO: 905066 - DNA, 25 bp, Homo sapien
tctggcactaaaagaacttgtctca

SEQ ID NO: 905067 - DNA, 25 bp, Homo sapien
caggcataactcagaaatacgcatc

SEQ ID NO: 905068 - DNA, 25 bp, Homo sapien
tcagaagtctgtcctatcatggact

SEQ ID NO: 905069 - DNA, 25 bp, Homo sapien
tcagcttcttaaatacaggcataac

SEQ ID NO: 905070 - DNA, 25 bp, Homo sapien
tcaaaccctggccacagctaagttt

SEQ ID NO: 905071 - DNA, 25 bp, Homo sapien
acttttaaatgcgagaggagggtag

SEQ ID NO: 905072 - DNA, 25 bp, Homo sapien
gaaaagataagttgctgaagcctgc

SEQ ID NO: 905073 - DNA, 25 bp, Homo sapien
taaatgagcagcagtgttatgccta

SEQ ID NO: 905074 - DNA, 25 bp, Homo sapien
gtaaacagacccaacgtcatccagg

SEQ ID NO: 905075 - DNA, 25 bp, Homo sapien
tacagcatatcttaagggccctggg

SEQ ID NO: 905076 - DNA, 25 bp, Homo sapien
aaggttttgaactgactgcccagaa

SEQ ID NO: 905077 - DNA, 25 bp, Homo sapien
gatggtccaagctagatcttctgtg

SEQ ID NO: 905078 - DNA, 25 bp, Homo sapien
tatgctccgtgtcccactgtgggtc

SEQ ID NO: 905079 - DNA, 25 bp, Homo sapien
cctaagttcaacgaggcagggatgt

SEQ ID NO: 905080 - DNA, 25 bp, Homo sapien
ggagaagcaccaacctatttcgtga

SEQ ID NO: 905081 - DNA, 25 bp, Homo sapien
cattaccaatcttagggacgaaggc

SEQ ID NO: 905082 - DNA, 25 bp, Homo sapien
tcagaactgccgcttcttgagcatt

SEQ ID NO: 905083 - DNA, 25 bp, Homo sapien
agaactgccgcttcttgagcatttc

SEQ ID NO: 905084 - DNA, 25 bp, Homo sapien
cagaactgccgcttcttgagcattt

SEQ ID NO: 905085 - DNA, 25 bp, Homo sapien
gaactgccgcttcttgagcatttcc

SEQ ID NO: 905086 - DNA, 25 bp, Homo sapien
gctcatctacacgctgtccaaactg

SEQ ID NO: 905087 - DNA, 25 bp, Homo sapien
ctgcgctcatctacacgctgtccaa

SEQ ID NO: 905088 - DNA, 25 bp, Homo sapien
ctcatctacacgctgtccaaactgg

SEQ ID NO: 905089 - DNA, 25 bp, Homo sapien
gcgctcatctacacgctgtccaaac

SEQ ID NO: 905090 - DNA, 25 bp, Homo sapien
ttaagcctgctaatgctaagagggt

SEQ ID NO: 905091 - DNA, 25 bp, Homo sapien
cagccagatgctgttagcttcaaac

SEQ ID NO: 905092 - DNA, 25 bp, Homo sapien
tgcaaatcttcaactgggcagatgg

SEQ ID NO: 905093 - DNA, 25 bp, Homo sapien
gacaaccacaatggcattaagcctg

SEQ ID NO: 905094 - DNA, 25 bp, Homo sapien
tgttgtgcccaagttagaattacac

SEQ ID NO: 905095 - DNA, 25 bp, Homo sapien
tacaccaaaattaccatgtgctggc

SEQ ID NO: 905096 - DNA, 25 bp, Homo sapien
tataataggagtttctttcggattc

SEQ ID NO: 905097 - DNA, 25 bp, Homo sapien
aagcactttcaaatacattacatta

SEQ ID NO: 905098 - DNA, 25 bp, Homo sapien
gaaggatggactagaagcaagctgg

SEQ ID NO: 905099 - DNA, 25 bp, Homo sapien
caccccagtggccatatggtagaga

SEQ ID NO: 905100 - DNA, 25 bp, Homo sapien
aaaactgggttgcaggagtgtctgt

SEQ ID NO: 905101 - DNA, 25 bp, Homo sapien
ggtggctggaaaactgggttgcagg

SEQ ID NO: 905102 - DNA, 25 bp, Homo sapien
tttcacttcatcaccgttttcccca

SEQ ID NO: 905103 - DNA, 25 bp, Homo sapien
acttcatcaccgttttccccactga

SEQ ID NO: 905104 - DNA, 25 bp, Homo sapien
ttccccactgagcttgaacacagga

SEQ ID NO: 905105 - DNA, 25 bp, Homo sapien
gaacacaggaatctgctgaccatcc

SEQ ID NO: 905106 - DNA, 25 bp, Homo sapien
cagcttcgacttcaaggcaggctta

SEQ ID NO: 905107 - DNA, 25 bp, Homo sapien
catgggctctcattatttaaccagc

SEQ ID NO: 905108 - DNA, 25 bp, Homo sapien
tatagtatctctaatctatgaaggc

SEQ ID NO: 905109 - DNA, 25 bp, Homo sapien
ggcgcggaaagcagttgttttgaat

SEQ ID NO: 905110 - DNA, 25 bp, Homo sapien
aaattcaacggcataaggagagggc

SEQ ID NO: 905111 - DNA, 25 bp, Homo sapien
gcccaggccacgaagctttcagctt

SEQ ID NO: 905112 - DNA, 25 bp, Homo sapien
aaactggactcagctaagagccgca

SEQ ID NO: 905113 - DNA, 25 bp, Homo sapien
tattggcaaccagacaagcaaagcc

SEQ ID NO: 905114 - DNA, 25 bp, Homo sapien
ctttcatcaggaagtcttcctcccg

SEQ ID NO: 905115 - DNA, 25 bp, Homo sapien
ggttgctttcatcaggaagtcttcc

SEQ ID NO: 905116 - DNA, 25 bp, Homo sapien
aacggagttggggttgctttcatca

SEQ ID NO: 905117 - DNA, 25 bp, Homo sapien
ccgctcccccactgccgtcaccttc

SEQ ID NO: 905118 - DNA, 25 bp, Homo sapien
tggatgagtggacgtagagaaggcc

SEQ ID NO: 905119 - DNA, 25 bp, Homo sapien
ggacgtagagaaggccctctgattt

SEQ ID NO: 905120 - DNA, 25 bp, Homo sapien
atgagtggacgtagagaaggccctc

SEQ ID NO: 905121 - DNA, 25 bp, Homo sapien
agtggacgtagagaaggccctctga

SEQ ID NO: 905122 - DNA, 25 bp, Homo sapien
tatgtcaatgctctgggtacttcca

SEQ ID NO: 905123 - DNA, 25 bp, Homo sapien
ccaaagggctttacacaggaggagt

SEQ ID NO: 905124 - DNA, 25 bp, Homo sapien
ggtacttccaatgatcgctcaaaag

SEQ ID NO: 905125 - DNA, 25 bp, Homo sapien
cctgatacacggagcaacatcgatg

SEQ ID NO: 905126 - DNA, 25 bp, Homo sapien
cctgagagcccgtaagcagttgatc

SEQ ID NO: 905127 - DNA, 25 bp, Homo sapien
gcagttgatcacactccgattgaga

SEQ ID NO: 905128 - DNA, 25 bp, Homo sapien
gtgatggccaaagatacctcccggg

SEQ ID NO: 905129 - DNA, 25 bp, Homo sapien
caaagaaggtatgagcctcgcgaag

SEQ ID NO: 905130 - DNA, 25 bp, Homo sapien
tagaattaagcaacagagtatacac

SEQ ID NO: 905131 - DNA, 25 bp, Homo sapien
tatagaattaagcaacagagtatac

SEQ ID NO: 905132 - DNA, 25 bp, Homo sapien
caaattttcagggtcccactgtttg

SEQ ID NO: 905133 - DNA, 25 bp, Homo sapien
tgtttgagtcaagctacagcttttc

SEQ ID NO: 905134 - DNA, 25 bp, Homo sapien
agccccagcaaaggcgcctttggca

SEQ ID NO: 905135 - DNA, 25 bp, Homo sapien
tcctggagcaccagatcatggatgc

SEQ ID NO: 905136 - DNA, 25 bp, Homo sapien
caattcctcagtgctacagctgggc

SEQ ID NO: 905137 - DNA, 25 bp, Homo sapien
atggatgctgcatcaaccagcccca

SEQ ID NO: 905138 - DNA, 25 bp, Homo sapien
ccacacccacctcgcccacctgtgc

SEQ ID NO: 905139 - DNA, 25 bp, Homo sapien
cacctgtgcctccactgccgtatca

SEQ ID NO: 905140 - DNA, 25 bp, Homo sapien
tgcccacacccacctcgcccacctg

SEQ ID NO: 905141 - DNA, 25 bp, Homo sapien
acctgtgcctccactgccgtatcac

SEQ ID NO: 905142 - DNA, 25 bp, Homo sapien
cctgcggttcgcagggaaagcacat

SEQ ID NO: 905143 - DNA, 25 bp, Homo sapien
gcggttcgcagggaaagcacattac

SEQ ID NO: 905144 - DNA, 25 bp, Homo sapien
tccaggagacagtagactctcctct

SEQ ID NO: 905145 - DNA, 25 bp, Homo sapien
caccagcctgcggttcgcagggaaa

SEQ ID NO: 905146 - DNA, 25 bp, Homo sapien
atcaacaatgtccacgaagttttcc

SEQ ID NO: 905147 - DNA, 25 bp, Homo sapien
cctgtgcctcgggatggctctgcag

SEQ ID NO: 905148 - DNA, 25 bp, Homo sapien
ttttccctgtcgatgagcttgagat

SEQ ID NO: 905149 - DNA, 25 bp, Homo sapien
tgagcttgagataatggatgttgag

SEQ ID NO: 905150 - DNA, 25 bp, Homo sapien
ctgctccactgccaacttgtaatat

SEQ ID NO: 905151 - DNA, 25 bp, Homo sapien
gctccactgccaacttgtaatataa

SEQ ID NO: 905152 - DNA, 25 bp, Homo sapien
tgctccactgccaacttgtaatata

SEQ ID NO: 905153 - DNA, 25 bp, Homo sapien
cagtttggccgcagaaagtgcttct

SEQ ID NO: 905154 - DNA, 25 bp, Homo sapien
gaaggtcccatcacactaatgaagg

SEQ ID NO: 905155 - DNA, 25 bp, Homo sapien
gatacagggaataccacaggcatga

SEQ ID NO: 905156 - DNA, 25 bp, Homo sapien
gaacacggtgccagctatgatagga

SEQ ID NO: 905157 - DNA, 25 bp, Homo sapien
cgcaggcggctagcaggatacttac

SEQ ID NO: 905158 - DNA, 25 bp, Homo sapien
ggatacagaggaagctatagccaac

SEQ ID NO: 905159 - DNA, 25 bp, Homo sapien
tatttgtactcgttgctcctggaaa

SEQ ID NO: 905160 - DNA, 25 bp, Homo sapien
tggtggactagcctttaaaatcacc

SEQ ID NO: 905161 - DNA, 25 bp, Homo sapien
gaggtaatacacaatggcaaagccc

SEQ ID NO: 905162 - DNA, 25 bp, Homo sapien
tcccagaggcattgaccgcctgctt

SEQ ID NO: 905163 - DNA, 25 bp, Homo sapien
caccgtggaaaaggatccttgctcc

SEQ ID NO: 905164 - DNA, 25 bp, Homo sapien
ccccggcatagaacacaccgtggaa

SEQ ID NO: 905165 - DNA, 25 bp, Homo sapien
taggattcccagttttgtgccaagg

SEQ ID NO: 905166 - DNA, 25 bp, Homo sapien
gtgccaaggggatttgcccggcttg

SEQ ID NO: 905167 - DNA, 25 bp, Homo sapien
acaaatttattgtaggattcccagt

SEQ ID NO: 905168 - DNA, 25 bp, Homo sapien
gattcccagttttgtgccaagggga

SEQ ID NO: 905169 - DNA, 25 bp, Homo sapien
cacagcccagactgtgtgccaagcc

SEQ ID NO: 905170 - DNA, 25 bp, Homo sapien
acacagcccagactgtgtgccaagc

SEQ ID NO: 905171 - DNA, 25 bp, Homo sapien
ttgaaaatcatcaaaggcaagttgt

SEQ ID NO: 905172 - DNA, 25 bp, Homo sapien
cttgaaaatcatcaaaggcaagttg

SEQ ID NO: 905173 - DNA, 25 bp, Homo sapien
caaaggtgcctttgggctagcagca

SEQ ID NO: 905174 - DNA, 25 bp, Homo sapien
gaaccggtgtgcacaagggagaacc

SEQ ID NO: 905175 - DNA, 25 bp, Homo sapien
tgattactgctaagaaagaccctcg

SEQ ID NO: 905176 - DNA, 25 bp, Homo sapien
tgcagggcatcagcggaggtttcac

SEQ ID NO: 905177 - DNA, 25 bp, Homo sapien
gagctacaaggtccagagtgtccgt

SEQ ID NO: 905178 - DNA, 25 bp, Homo sapien
tcctatctgctcaatagacagggaa

SEQ ID NO: 905179 - DNA, 25 bp, Homo sapien
tgccacatatttgacacggcttcct

SEQ ID NO: 905180 - DNA, 25 bp, Homo sapien
gacagggaagcttgaggagctacaa

SEQ ID NO: 905181 - DNA, 25 bp, Homo sapien
caacagctgctaacacacgaagcct

SEQ ID NO: 905182 - DNA, 25 bp, Homo sapien
ctcgccaggactcagagattctctc

SEQ ID NO: 905183 - DNA, 25 bp, Homo sapien
tcgagtgactcgtgtggcaaacatc

SEQ ID NO: 905184 - DNA, 25 bp, Homo sapien
gctgctaacacacgaagcctcagaa

SEQ ID NO: 905185 - DNA, 25 bp, Homo sapien
cattctagtttaagtgggctaccag

SEQ ID NO: 905186 - DNA, 25 bp, Homo sapien
cagcagaacatccatgggacaaaag

SEQ ID NO: 905187 - DNA, 25 bp, Homo sapien
ctaccagatgactgcagtaccagca

SEQ ID NO: 905188 - DNA, 25 bp, Homo sapien
gaaccatcagctgatccaagtcaac

SEQ ID NO: 905189 - DNA, 25 bp, Homo sapien
tgcccagtcctgtgactactccggg

SEQ ID NO: 905190 - DNA, 25 bp, Homo sapien
tcctgtgactactccgggaaagtaa

SEQ ID NO: 905191 - DNA, 25 bp, Homo sapien
tcactgcccagtcctgtgactactc

SEQ ID NO: 905192 - DNA, 25 bp, Homo sapien
gactactccgggaaagtaaatctga

SEQ ID NO: 905193 - DNA, 25 bp, Homo sapien
tcaggaaatgacacagtatgacttg

SEQ ID NO: 905194 - DNA, 25 bp, Homo sapien
gggtcttcatcatgcaggttttgta

SEQ ID NO: 905195 - DNA, 25 bp, Homo sapien
gccacaggctcggtatcttcaagaa

SEQ ID NO: 905196 - DNA, 25 bp, Homo sapien
tagggagtctggattttactcaaag

SEQ ID NO: 905197 - DNA, 25 bp, Homo sapien
tcttgaatgagttggcaccatcctc

SEQ ID NO: 905198 - DNA, 25 bp, Homo sapien
tcctgctcttgccatatgatgtacc

SEQ ID NO: 905199 - DNA, 25 bp, Homo sapien
tcttgccatatgatgtacctggtcc

SEQ ID NO: 905200 - DNA, 25 bp, Homo sapien
gtttctaaagtcttgatatagtttg

SEQ ID NO: 905201 - DNA, 25 bp, Homo sapien
tatgcaagcatactggaagtctgtg

SEQ ID NO: 905202 - DNA, 25 bp, Homo sapien
tcctgacctgtgtggcgattacaga

SEQ ID NO: 905203 - DNA, 25 bp, Homo sapien
tatgaacagcttcaacaagcctgct

SEQ ID NO: 905204 - DNA, 25 bp, Homo sapien
aatttatgaacaggtggcacactgc

SEQ ID NO: 905205 - DNA, 25 bp, Homo sapien
ccctctccagtgttaaatctgtcag

SEQ ID NO: 905206 - DNA, 25 bp, Homo sapien
agagctggagaatcaggctatgaag

SEQ ID NO: 905207 - DNA, 25 bp, Homo sapien
tcaaatgatttggaaagactagagt

SEQ ID NO: 905208 - DNA, 25 bp, Homo sapien
gactagagtagaattgagagagctg

SEQ ID NO: 905209 - DNA, 25 bp, Homo sapien
tcttgcttcctaattcactaagaaa

SEQ ID NO: 905210 - DNA, 25 bp, Homo sapien
cagcaacaaggatctaccagttcac

SEQ ID NO: 905211 - DNA, 25 bp, Homo sapien
tatggaccacaatcatacgtatgga

SEQ ID NO: 905212 - DNA, 25 bp, Homo sapien
cagatacacaaatgcaagggcttgg

SEQ ID NO: 905213 - DNA, 25 bp, Homo sapien
tcttagaagttatggccaaaggcac

SEQ ID NO: 905214 - DNA, 25 bp, Homo sapien
taatggagcttgtccaaattggcct

SEQ ID NO: 905215 - DNA, 25 bp, Homo sapien
gatctattctgttattaacacttcc

SEQ ID NO: 905216 - DNA, 25 bp, Homo sapien
ttctgttattaacacttccaattgc

SEQ ID NO: 905217 - DNA, 25 bp, Homo sapien
gttattaacacttccaattgcattc

SEQ ID NO: 905218 - DNA, 25 bp, Homo sapien
tattaacacttccaattgcattctg

SEQ ID NO: 905219 - DNA, 25 bp, Homo sapien
ggtaacaaagcaagaacacatctta

SEQ ID NO: 905220 - DNA, 25 bp, Homo sapien
ggcaaggtcagcaggtcacttgagc

SEQ ID NO: 905221 - DNA, 25 bp, Homo sapien
cagaactttaggagggcaaggtcag

SEQ ID NO: 905222 - DNA, 25 bp, Homo sapien
aagcaagaacacatcttaaaaaata

SEQ ID NO: 905223 - DNA, 25 bp, Homo sapien
tggagatgcctatcttttctaaaaa

SEQ ID NO: 905224 - DNA, 25 bp, Homo sapien
agggcaaagccttgctggctaaaac

SEQ ID NO: 905225 - DNA, 25 bp, Homo sapien
gcaaagccttgctggctaaaactgt

SEQ ID NO: 905226 - DNA, 25 bp, Homo sapien
gggcaaagccttgctggctaaaact

SEQ ID NO: 905227 - DNA, 25 bp, Homo sapien
taagggtcactagcatacacctggg

SEQ ID NO: 905228 - DNA, 25 bp, Homo sapien
ttacaatttcagtgcagtgacagca

SEQ ID NO: 905229 - DNA, 25 bp, Homo sapien
tatttagaaaatctctggccagagc

SEQ ID NO: 905230 - DNA, 25 bp, Homo sapien
tacacctgggtgtaactaatcagag

SEQ ID NO: 905231 - DNA, 25 bp, Homo sapien
ttttagagtctgtcatgatgggtaa

SEQ ID NO: 905232 - DNA, 25 bp, Homo sapien
ctccattttagagtctgtcatgatg

SEQ ID NO: 905233 - DNA, 25 bp, Homo sapien
cattttagagtctgtcatgatgggt

SEQ ID NO: 905234 - DNA, 25 bp, Homo sapien
tagagtctgtcatgatgggtaattt

SEQ ID NO: 905235 - DNA, 25 bp, Homo sapien
gagagttgctacttctatccaaacg

SEQ ID NO: 905236 - DNA, 25 bp, Homo sapien
tgaggcaccgctacgttttaaatgg

SEQ ID NO: 905237 - DNA, 25 bp, Homo sapien
taaatggtgaactctacggtaggtg

SEQ ID NO: 905238 - DNA, 25 bp, Homo sapien
gcagaatcaagaccctgtaggccct

SEQ ID NO: 905239 - DNA, 25 bp, Homo sapien
cttttgcagtcagcccctgttggga

SEQ ID NO: 905240 - DNA, 25 bp, Homo sapien
gcagcgtactcctcagggtgttgaa

SEQ ID NO: 905241 - DNA, 25 bp, Homo sapien
tcccaactcttcgagaggaccctaa

SEQ ID NO: 905242 - DNA, 25 bp, Homo sapien
aaggttagctcgacacagcctccta

SEQ ID NO: 905243 - DNA, 25 bp, Homo sapien
tccgcgatgtgacccgtgagggaac

SEQ ID NO: 905244 - DNA, 25 bp, Homo sapien
gcgaacctccgcgatgtgacccgtg

SEQ ID NO: 905245 - DNA, 25 bp, Homo sapien
gacccgtgagggaactctccaagaa

SEQ ID NO: 905246 - DNA, 25 bp, Homo sapien
agggaactctccaagaagcagcgca

SEQ ID NO: 905247 - DNA, 25 bp, Homo sapien
gagactcttataccgcgggagacta

SEQ ID NO: 905248 - DNA, 25 bp, Homo sapien
gaagacggagactcttataccgcgg

SEQ ID NO: 905249 - DNA, 25 bp, Homo sapien
gggaagacggagactcttataccgc

SEQ ID NO: 905250 - DNA, 25 bp, Homo sapien
gacggagactcttataccgcgggag

SEQ ID NO: 905251 - DNA, 25 bp, Homo sapien
catgacgagttcttccaggcttggg

SEQ ID NO: 905252 - DNA, 25 bp, Homo sapien
tgtaaatgctaacacgggtcctccg

SEQ ID NO: 905253 - DNA, 25 bp, Homo sapien
gaagcaccacgctacaaagagcatg

SEQ ID NO: 905254 - DNA, 25 bp, Homo sapien
gatccagaacttaggtcgccgggac

SEQ ID NO: 905255 - DNA, 25 bp, Homo sapien
gaaatctgagaacttggagcgcctt

SEQ ID NO: 905256 - DNA, 25 bp, Homo sapien
tgagaacttggagcgccttaaaaaa

SEQ ID NO: 905257 - DNA, 25 bp, Homo sapien
aatctgagaacttggagcgccttaa

SEQ ID NO: 905258 - DNA, 25 bp, Homo sapien
tctgagaacttggagcgccttaaaa

SEQ ID NO: 905259 - DNA, 25 bp, Homo sapien
gaaagctcattagcatctacactga

SEQ ID NO: 905260 - DNA, 25 bp, Homo sapien
ggaatgaaggctcatgacagtgaca

SEQ ID NO: 905261 - DNA, 25 bp, Homo sapien
aatcttatatatctggaggcgccct

SEQ ID NO: 905262 - DNA, 25 bp, Homo sapien
tatgctgctattgttgccgtggtca

SEQ ID NO: 905263 - DNA, 25 bp, Homo sapien
gtgcaagctccaagggagacttgaa

SEQ ID NO: 905264 - DNA, 25 bp, Homo sapien
acagaagtaaagcacagtagggtgt

SEQ ID NO: 905265 - DNA, 25 bp, Homo sapien
ctccaagggagacttgaatgaaagt

SEQ ID NO: 905266 - DNA, 25 bp, Homo sapien
caagggagacttgaatgaaagttct

SEQ ID NO: 905267 - DNA, 25 bp, Homo sapien
tatggtttagcagcagtggacagtc

SEQ ID NO: 905268 - DNA, 25 bp, Homo sapien
gaagccaggaactaggtctcccaga

SEQ ID NO: 905269 - DNA, 25 bp, Homo sapien
cagttcagtcagatgtgtgagccaa

SEQ ID NO: 905270 - DNA, 25 bp, Homo sapien
ggactcccaggaaacttgcaaggct

SEQ ID NO: 905271 - DNA, 25 bp, Homo sapien
gagatgatagagtcaccgcccttct

SEQ ID NO: 905272 - DNA, 25 bp, Homo sapien
cacgcaggtcatgtgccactgtggc

SEQ ID NO: 905273 - DNA, 25 bp, Homo sapien
tgaacagaaccctccgagatgatag

SEQ ID NO: 905274 - DNA, 25 bp, Homo sapien
gccctatctaccctgcaggttgctg

SEQ ID NO: 905275 - DNA, 25 bp, Homo sapien
gaaagttggactatggtgactgtct

SEQ ID NO: 905276 - DNA, 25 bp, Homo sapien
cctggaaagttggactatggtgact

SEQ ID NO: 905277 - DNA, 25 bp, Homo sapien
agttggactatggtgactgtcttca

SEQ ID NO: 905278 - DNA, 25 bp, Homo sapien
gactatggtgactgtcttcaaagag

SEQ ID NO: 905279 - DNA, 25 bp, Homo sapien
gccagggacaaggtgacagtcaaat

SEQ ID NO: 905280 - DNA, 25 bp, Homo sapien
cttcagttaggttcatggtgccagc

SEQ ID NO: 905281 - DNA, 25 bp, Homo sapien
ggtgacagtcaaattcagtgttagg

SEQ ID NO: 905282 - DNA, 25 bp, Homo sapien
cagtgttaggatcagagaaagggac

SEQ ID NO: 905283 - DNA, 25 bp, Homo sapien
atgagagactatgcctcagtcctct

SEQ ID NO: 905284 - DNA, 25 bp, Homo sapien
gagagactatgcctcagtcctctga

SEQ ID NO: 905285 - DNA, 25 bp, Homo sapien
tgagagactatgcctcagtcctctg

SEQ ID NO: 905286 - DNA, 25 bp, Homo sapien
ttctctgcaggctacagcttgatgg

SEQ ID NO: 905287 - DNA, 25 bp, Homo sapien
cattctctgcaggctacagcttgat

SEQ ID NO: 905288 - DNA, 25 bp, Homo sapien
ctctgcaggctacagcttgatggaa

SEQ ID NO: 905289 - DNA, 25 bp, Homo sapien
cacataccattcctttcccacgttt

SEQ ID NO: 905290 - DNA, 25 bp, Homo sapien
gtgtggagacaactgcctcaggacc

SEQ ID NO: 905291 - DNA, 25 bp, Homo sapien
agatctccaactggttaccccggcg

SEQ ID NO: 905292 - DNA, 25 bp, Homo sapien
tccaccgttcgctctgcggcatggt

SEQ ID NO: 905293 - DNA, 25 bp, Homo sapien
cggcgctttaaaaccagctggtcag

SEQ ID NO: 905294 - DNA, 25 bp, Homo sapien
ggcataatagaagaatcagcctcat

SEQ ID NO: 905295 - DNA, 25 bp, Homo sapien
gaatcagcctcattgccccagggcc

SEQ ID NO: 905296 - DNA, 25 bp, Homo sapien
aagagggaagggcataatagaagaa

SEQ ID NO: 905297 - DNA, 25 bp, Homo sapien
aagaatcagcctcattgccccaggg

SEQ ID NO: 905298 - DNA, 25 bp, Homo sapien
gagccttgtcgacctcagctcggga

SEQ ID NO: 905299 - DNA, 25 bp, Homo sapien
tacagtacgagagctgaaactaggc

SEQ ID NO: 905300 - DNA, 25 bp, Homo sapien
agtgaccttgagagtgcccagagtg

SEQ ID NO: 905301 - DNA, 25 bp, Homo sapien
gattctagaccataaaaaggacacc

SEQ ID NO: 905302 - DNA, 25 bp, Homo sapien
ctgtgtgcagcgacagccagccttt

SEQ ID NO: 905303 - DNA, 25 bp, Homo sapien
cagcctttacggtgggcgatgtagt

SEQ ID NO: 905304 - DNA, 25 bp, Homo sapien
ttgcttacgcgtactcgggccgccc

SEQ ID NO: 905305 - DNA, 25 bp, Homo sapien
ggcttgtcccccttgcttacgcgta

SEQ ID NO: 905306 - DNA, 25 bp, Homo sapien
actccacgagatccccgatccagac

SEQ ID NO: 905307 - DNA, 25 bp, Homo sapien
cgtgactccacgagatccccgatcc

SEQ ID NO: 905308 - DNA, 25 bp, Homo sapien
cacgagatccccgatccagacccct

SEQ ID NO: 905309 - DNA, 25 bp, Homo sapien
gatccccgatccagacccctacttc

SEQ ID NO: 905310 - DNA, 25 bp, Homo sapien
ggcagctctcggctccaggacagca

SEQ ID NO: 905311 - DNA, 25 bp, Homo sapien
aagcgcaaggcagctctcggctcca

SEQ ID NO: 905312 - DNA, 25 bp, Homo sapien
tgcagggcgcgccaagcgcaaggca

SEQ ID NO: 905313 - DNA, 25 bp, Homo sapien
gcgccaagcgcaaggcagctctcgg

SEQ ID NO: 905314 - DNA, 25 bp, Homo sapien
gagggagggcgcgtgaggcggaaac

SEQ ID NO: 905315 - DNA, 25 bp, Homo sapien
gagggcgcgtgaggcggaaactagg

SEQ ID NO: 905316 - DNA, 25 bp, Homo sapien
gtggagggagggcgcgtgaggcgga

SEQ ID NO: 905317 - DNA, 25 bp, Homo sapien
gcgcgtgaggcggaaactagggacc

SEQ ID NO: 905318 - DNA, 25 bp, Homo sapien
cgactcgcagggacctgccgagtcg

SEQ ID NO: 905319 - DNA, 25 bp, Homo sapien
gggacctgccgagtcgccccactca

SEQ ID NO: 905320 - DNA, 25 bp, Homo sapien
ctccgactcgcagggacctgccgag

SEQ ID NO: 905321 - DNA, 25 bp, Homo sapien
gactcgcagggacctgccgagtcgc

SEQ ID NO: 905322 - DNA, 25 bp, Homo sapien
ccagcaacccgctgcacacggaggc

SEQ ID NO: 905323 - DNA, 25 bp, Homo sapien
ggccccagcaacccgctgcacacgg

SEQ ID NO: 905324 - DNA, 25 bp, Homo sapien
ccccagcaacccgctgcacacggag

SEQ ID NO: 905325 - DNA, 25 bp, Homo sapien
cccagcaacccgctgcacacggagg

SEQ ID NO: 905326 - DNA, 25 bp, Homo sapien
ttgggccaagcggagcgcgggacgt

SEQ ID NO: 905327 - DNA, 25 bp, Homo sapien
gggccaagcggagcgcgggacgtac

SEQ ID NO: 905328 - DNA, 25 bp, Homo sapien
cttgggccaagcggagcgcgggacg

SEQ ID NO: 905329 - DNA, 25 bp, Homo sapien
tgggccaagcggagcgcgggacgta

SEQ ID NO: 905330 - DNA, 25 bp, Homo sapien
caagtcggagctcgtactctgtact

SEQ ID NO: 905331 - DNA, 25 bp, Homo sapien
gagaccaagtcggagctcgtactct

SEQ ID NO: 905332 - DNA, 25 bp, Homo sapien
ccgcggacgagaccaagtcggagct

SEQ ID NO: 905333 - DNA, 25 bp, Homo sapien
ggacgaccgcggacgagaccaagtc

SEQ ID NO: 905334 - DNA, 25 bp, Homo sapien
ttcgacaacctcacgctagtacggg

SEQ ID NO: 905335 - DNA, 25 bp, Homo sapien
gccctgtgaatgctcagccttgtga

SEQ ID NO: 905336 - DNA, 25 bp, Homo sapien
ccggaaatttgaggatgcgaaacgt

SEQ ID NO: 905337 - DNA, 25 bp, Homo sapien
tctcccgcggttgctgcttgcatag

SEQ ID NO: 905338 - DNA, 25 bp, Homo sapien
tacatcattccccttaatggtacag

SEQ ID NO: 905339 - DNA, 25 bp, Homo sapien
tttggttgagtgatgtgaaattgcc

SEQ ID NO: 905340 - DNA, 25 bp, Homo sapien
tcaatgatgggttgtgtttggttga

SEQ ID NO: 905341 - DNA, 25 bp, Homo sapien
tggccgttctgggtctacatcattc

SEQ ID NO: 905342 - DNA, 25 bp, Homo sapien
cagaccaccaccagttctgctaggt

SEQ ID NO: 905343 - DNA, 25 bp, Homo sapien
tatattgtataaactgcagaccacc

SEQ ID NO: 905344 - DNA, 25 bp, Homo sapien
ggctgcaaattatcttaaggtacca

SEQ ID NO: 905345 - DNA, 25 bp, Homo sapien
ttttactgggctaatacaccacacc

SEQ ID NO: 905346 - DNA, 25 bp, Homo sapien
ttggaatcctaagagcagcactgac

SEQ ID NO: 905347 - DNA, 25 bp, Homo sapien
cagtagccccatggcaaattctggg

SEQ ID NO: 905348 - DNA, 25 bp, Homo sapien
cacaagagaggcgaagacacgcttg

SEQ ID NO: 905349 - DNA, 25 bp, Homo sapien
aaacaggaccccttgtgagcacacg

SEQ ID NO: 905350 - DNA, 25 bp, Homo sapien
gcaaggactccagcgggaaaactga

SEQ ID NO: 905351 - DNA, 25 bp, Homo sapien
gtctagaaggctggtgagctcccga

SEQ ID NO: 905352 - DNA, 25 bp, Homo sapien
taaaggctcccttgctgtgtctagt

SEQ ID NO: 905353 - DNA, 25 bp, Homo sapien
gaggctccaaggtctaagcaaggcc

SEQ ID NO: 905354 - DNA, 25 bp, Homo sapien
tgcccatccaggtgtaagctctggg

SEQ ID NO: 905355 - DNA, 25 bp, Homo sapien
gaaagacctcagagttactgtgaag

SEQ ID NO: 905356 - DNA, 25 bp, Homo sapien
gtgacagtggaaagacctcagagtt

SEQ ID NO: 905357 - DNA, 25 bp, Homo sapien
gggattacctgctctaggcttcctt

SEQ ID NO: 905358 - DNA, 25 bp, Homo sapien
gagaaacaggagaattaaggcacag

SEQ ID NO: 905359 - DNA, 25 bp, Homo sapien
gacagatgctgctatcctctttgag

SEQ ID NO: 905360 - DNA, 25 bp, Homo sapien
accgtacaccctcctcagacagatg

SEQ ID NO: 905361 - DNA, 25 bp, Homo sapien
cattccagatactgcctgtaccgta

SEQ ID NO: 905362 - DNA, 25 bp, Homo sapien
taaacacatgagttacaacgcgctg

SEQ ID NO: 905363 - DNA, 25 bp, Homo sapien
gagctggagaatgtacagtccctgc

SEQ ID NO: 905364 - DNA, 25 bp, Homo sapien
gggcacaacagagcgaccagtgaac

SEQ ID NO: 905365 - DNA, 25 bp, Homo sapien
cagtcaataaatacggtgccatggg

SEQ ID NO: 905366 - DNA, 25 bp, Homo sapien
gatattcttggtaacatctctgagc

SEQ ID NO: 905367 - DNA, 25 bp, Homo sapien
acatcttgaatgctggtccactgga

SEQ ID NO: 905368 - DNA, 25 bp, Homo sapien
cagagagcagctatacagagggccc

SEQ ID NO: 905369 - DNA, 25 bp, Homo sapien
ttctcatgtcgattgggcaccagcc

SEQ ID NO: 905370 - DNA, 25 bp, Homo sapien
ttttggttcgacaagccgttcctga

SEQ ID NO: 905371 - DNA, 25 bp, Homo sapien
taggccaagctcactgcggccatgg

SEQ ID NO: 905372 - DNA, 25 bp, Homo sapien
caatgagctgctggatgtttttgtt

SEQ ID NO: 905373 - DNA, 25 bp, Homo sapien
gatgttttcgagtaggcatctcttc

SEQ ID NO: 905374 - DNA, 25 bp, Homo sapien
ttgaggtcccgatgccagaagcagt

SEQ ID NO: 905375 - DNA, 25 bp, Homo sapien
caaactggtagttgggcatgtgccc

SEQ ID NO: 905376 - DNA, 25 bp, Homo sapien
gagttgctactgacgtccatgcgca

SEQ ID NO: 905377 - DNA, 25 bp, Homo sapien
cagtcaatataaacacagcggagga

SEQ ID NO: 905378 - DNA, 25 bp, Homo sapien
ctactcagagtcaccgggaagttcc

SEQ ID NO: 905379 - DNA, 25 bp, Homo sapien
ctctggctttctagttaatgttttt

SEQ ID NO: 905380 - DNA, 25 bp, Homo sapien
cgtgggctactcagagtcaccggga

SEQ ID NO: 905381 - DNA, 25 bp, Homo sapien
tgttgcttccgtgggctactcagag

SEQ ID NO: 905382 - DNA, 25 bp, Homo sapien
gcctgtttcccaagaaggtcaagtg

SEQ ID NO: 905383 - DNA, 25 bp, Homo sapien
taagtgagcacttacttgcgcagat

SEQ ID NO: 905384 - DNA, 25 bp, Homo sapien
ggcaccgtgctgagtcactttaaat

SEQ ID NO: 905385 - DNA, 25 bp, Homo sapien
gaaacagtattgctacctctgaaga

SEQ ID NO: 905386 - DNA, 25 bp, Homo sapien
caggttgtttggaagctctgggccc

SEQ ID NO: 905387 - DNA, 25 bp, Homo sapien
gaagctctgggcccagtatcctgat

SEQ ID NO: 905388 - DNA, 25 bp, Homo sapien
gaaaacacttctgcccagtgtgtgg

SEQ ID NO: 905389 - DNA, 25 bp, Homo sapien
ttaagtagcatggtagtaaaaggca

SEQ ID NO: 905390 - DNA, 25 bp, Homo sapien
gctggcctagatgataacccccttt

SEQ ID NO: 905391 - DNA, 25 bp, Homo sapien
tgataaccccctttcatagaacaga

SEQ ID NO: 905392 - DNA, 25 bp, Homo sapien
tttgatacagtcaggtgtgggaact

SEQ ID NO: 905393 - DNA, 25 bp, Homo sapien
ccccaggtgatttgatacagtcagg

SEQ ID NO: 905394 - DNA, 25 bp, Homo sapien
ctgttggaaaatcattgtcctgagc

SEQ ID NO: 905395 - DNA, 25 bp, Homo sapien
gttggaaaatcattgtcctgagcct

SEQ ID NO: 905396 - DNA, 25 bp, Homo sapien
tgttggaaaatcattgtcctgagcc

SEQ ID NO: 905397 - DNA, 25 bp, Homo sapien
ggcaacttctcccaattgttctaaa

SEQ ID NO: 905398 - DNA, 25 bp, Homo sapien
ggctgacacaaattaattgaagcta

SEQ ID NO: 905399 - DNA, 25 bp, Homo sapien
agaacccttctttctcaccaagatg

SEQ ID NO: 905400 - DNA, 25 bp, Homo sapien
aaataatgcacccttggctgacaca

SEQ ID NO: 905401 - DNA, 25 bp, Homo sapien
tccataacggaactcgcaatcatct

SEQ ID NO: 905402 - DNA, 25 bp, Homo sapien
ccataacggaactcgcaatcatctc

SEQ ID NO: 905403 - DNA, 25 bp, Homo sapien
cataacggaactcgcaatcatctcc

SEQ ID NO: 905404 - DNA, 25 bp, Homo sapien
ctccataacggaactcgcaatcatc

SEQ ID NO: 905405 - DNA, 25 bp, Homo sapien
aatcctataggcttaaaaccttgct

SEQ ID NO: 905406 - DNA, 25 bp, Homo sapien
ctggaggtttattcagtagagagag

SEQ ID NO: 905407 - DNA, 25 bp, Homo sapien
agaggaactcacataactcatgaag

SEQ ID NO: 905408 - DNA, 25 bp, Homo sapien
caacttgtttttaatcctataggct

SEQ ID NO: 905409 - DNA, 25 bp, Homo sapien
aatggccacagctgttcgtctctct

SEQ ID NO: 905410 - DNA, 25 bp, Homo sapien
tggccacagctgttcgtctctctga

SEQ ID NO: 905411 - DNA, 25 bp, Homo sapien
cagctgttcgtctctctgatgcttt

SEQ ID NO: 905412 - DNA, 25 bp, Homo sapien
gccacagctgttcgtctctctgatg

SEQ ID NO: 905413 - DNA, 25 bp, Homo sapien
gattctgatatgcacccacagttga

SEQ ID NO: 905414 - DNA, 25 bp, Homo sapien
tggccagagcacaaatacagtcatt

SEQ ID NO: 905415 - DNA, 25 bp, Homo sapien
gggtcacaccccagatccatgaaac

SEQ ID NO: 905416 - DNA, 25 bp, Homo sapien
actttcacctatcaaactggccgca

SEQ ID NO: 905417 - DNA, 25 bp, Homo sapien
gaaggctctcttgctcacatcagaa

SEQ ID NO: 905418 - DNA, 25 bp, Homo sapien
taaatgtattgattctgccaggagc

SEQ ID NO: 905419 - DNA, 25 bp, Homo sapien
tcctaactgtccacggaaagggcca

SEQ ID NO: 905420 - DNA, 25 bp, Homo sapien
tacatgggcagaaagagaaggctct

SEQ ID NO: 905421 - DNA, 25 bp, Homo sapien
tctggaggccatctgtcttgctgac

SEQ ID NO: 905422 - DNA, 25 bp, Homo sapien
gctgaaccctacttccggcaggtct

SEQ ID NO: 905423 - DNA, 25 bp, Homo sapien
gattctgatttagcagacctgggtg

SEQ ID NO: 905424 - DNA, 25 bp, Homo sapien
gaagacaatgcagggttaactttcc

SEQ ID NO: 905425 - DNA, 25 bp, Homo sapien
agaatatggcactccctggacagtc

SEQ ID NO: 905426 - DNA, 25 bp, Homo sapien
gcactccctggacagtccatccatg

SEQ ID NO: 905427 - DNA, 25 bp, Homo sapien
ctcagaatatggcactccctggaca

SEQ ID NO: 905428 - DNA, 25 bp, Homo sapien
tatggcactccctggacagtccatc

SEQ ID NO: 905429 - DNA, 25 bp, Homo sapien
taatcctcctgcgtaaataagtcac

SEQ ID NO: 905430 - DNA, 25 bp, Homo sapien
cacataagctgtaagtctgcctttc

SEQ ID NO: 905431 - DNA, 25 bp, Homo sapien
gaaaacagcacgaacaccatcctat

SEQ ID NO: 905432 - DNA, 25 bp, Homo sapien
caaccttggcattatcagtactgca

SEQ ID NO: 905433 - DNA, 25 bp, Homo sapien
tgaatgtaattatggcactttggaa

SEQ ID NO: 905434 - DNA, 25 bp, Homo sapien
tcaataatgagaactcttgaggcca

SEQ ID NO: 905435 - DNA, 25 bp, Homo sapien
cgaaacagccaacagagtgaagaca

SEQ ID NO: 905436 - DNA, 25 bp, Homo sapien
caaagggactatgtcaaactaaaag

SEQ ID NO: 905437 - DNA, 25 bp, Homo sapien
tgtgctacaaggatccaaagggact

SEQ ID NO: 905438 - DNA, 25 bp, Homo sapien
tgaggctgatcatccctgacacaca

SEQ ID NO: 905439 - DNA, 25 bp, Homo sapien
tggtttacagttcaacaaggcaagg

SEQ ID NO: 905440 - DNA, 25 bp, Homo sapien
cccatacaatggaaaatagagcttt

SEQ ID NO: 905441 - DNA, 25 bp, Homo sapien
tcccagaaataggtccaaatgcagt

SEQ ID NO: 905442 - DNA, 25 bp, Homo sapien
ggtatcgtccactctgtcaacacag

SEQ ID NO: 905443 - DNA, 25 bp, Homo sapien
gaatacctgagcacagcagattgag

SEQ ID NO: 905444 - DNA, 25 bp, Homo sapien
cacagcttcttactcacgtgggcca

SEQ ID NO: 905445 - DNA, 25 bp, Homo sapien
ttgatgccttcatatcctttgattg

SEQ ID NO: 905446 - DNA, 25 bp, Homo sapien
tgccttcatatcctttgattgccat

SEQ ID NO: 905447 - DNA, 25 bp, Homo sapien
ctttgatgccttcatatcctttgat

SEQ ID NO: 905448 - DNA, 25 bp, Homo sapien
gatgccttcatatcctttgattgcc

SEQ ID NO: 905449 - DNA, 25 bp, Homo sapien
tgaacccctaggtcaatcagcctgg

SEQ ID NO: 905450 - DNA, 25 bp, Homo sapien
ggcctggtcccggaaatgaccactg

SEQ ID NO: 905451 - DNA, 25 bp, Homo sapien
tcaggcctcatctggaggaggcacg

SEQ ID NO: 905452 - DNA, 25 bp, Homo sapien
gccccaaagcctagaaagacagcag

SEQ ID NO: 905453 - DNA, 25 bp, Homo sapien
gatccaagaccctctgaatgatggg

SEQ ID NO: 905454 - DNA, 25 bp, Homo sapien
taatatcaaaataagcgcagccacc

SEQ ID NO: 905455 - DNA, 25 bp, Homo sapien
gacattctgggtacgtctcaacgac

SEQ ID NO: 905456 - DNA, 25 bp, Homo sapien
taaaacccaggaacatcgataccag

SEQ ID NO: 905457 - DNA, 25 bp, Homo sapien
cgcagcgaggtctccgctcccgcct

SEQ ID NO: 905458 - DNA, 25 bp, Homo sapien
taatttctgcggattaagccaagcc

SEQ ID NO: 905459 - DNA, 25 bp, Homo sapien
ggaagcgtgacctgtaaccacatgg

SEQ ID NO: 905460 - DNA, 25 bp, Homo sapien
tattacttagaacggcgaggactgt

SEQ ID NO: 905461 - DNA, 25 bp, Homo sapien
tttgacacccatgggaggcatcctg

SEQ ID NO: 905462 - DNA, 25 bp, Homo sapien
gaacagaaaaggtgccatgcatgcc

SEQ ID NO: 905463 - DNA, 25 bp, Homo sapien
tgctacccttaatgcatgcacgagg

SEQ ID NO: 905464 - DNA, 25 bp, Homo sapien
gctatccccatgtattgggccctga

SEQ ID NO: 905465 - DNA, 25 bp, Homo sapien
gcacgaggccctaaaataatttctg

SEQ ID NO: 905466 - DNA, 25 bp, Homo sapien
gcttcagcctcccaactggctgaga

SEQ ID NO: 905467 - DNA, 25 bp, Homo sapien
cagtggtacaatctcggctcattgc

SEQ ID NO: 905468 - DNA, 25 bp, Homo sapien
tctttcttttagaaggagtctcgct

SEQ ID NO: 905469 - DNA, 25 bp, Homo sapien
ctctgttgcccaggctgctggagtg

SEQ ID NO: 905470 - DNA, 25 bp, Homo sapien
gaaacattacatataagcatgctaa

SEQ ID NO: 905471 - DNA, 25 bp, Homo sapien
tacatataagcatgctaaaaagttt

SEQ ID NO: 905472 - DNA, 25 bp, Homo sapien
tgcacctgaccaattgtgtattatt

SEQ ID NO: 905473 - DNA, 25 bp, Homo sapien
tatgcactaaactaccaacagggaa

SEQ ID NO: 905474 - DNA, 25 bp, Homo sapien
tgaggtacgactgaacacggagatc

SEQ ID NO: 905475 - DNA, 25 bp, Homo sapien
tgaacaactctgacctagacgcctg

SEQ ID NO: 905476 - DNA, 25 bp, Homo sapien
tgcatagtctaaggccagggttctc

SEQ ID NO: 905477 - DNA, 25 bp, Homo sapien
cagccataaggcgtacgagggtata

SEQ ID NO: 905478 - DNA, 25 bp, Homo sapien
aactctttgggtgtccgaagcgtcg

SEQ ID NO: 905479 - DNA, 25 bp, Homo sapien
ccgctgccgtgaagtgaaaggtgac

SEQ ID NO: 905480 - DNA, 25 bp, Homo sapien
gatccagaaggtacgcactttccca

SEQ ID NO: 905481 - DNA, 25 bp, Homo sapien
tgactagtggtcgaagccacaggac

SEQ ID NO: 905482 - DNA, 25 bp, Homo sapien
tactggtatctagtcggcaaaggcc

SEQ ID NO: 905483 - DNA, 25 bp, Homo sapien
tattgaaaagggctcatgggccacc

SEQ ID NO: 905484 - DNA, 25 bp, Homo sapien
tagcatgtcttgtgcaccgcaggtc

SEQ ID NO: 905485 - DNA, 25 bp, Homo sapien
cagataatgatcagccccaagtgtc

SEQ ID NO: 905486 - DNA, 25 bp, Homo sapien
catccctgggagaggtaccatgtac

SEQ ID NO: 905487 - DNA, 25 bp, Homo sapien
agagcaccttgcacatcacagacag

SEQ ID NO: 905488 - DNA, 25 bp, Homo sapien
tcacagacagcggactcttcatggg

SEQ ID NO: 905489 - DNA, 25 bp, Homo sapien
taggctcctatagcagtacaagctg

SEQ ID NO: 905490 - DNA, 25 bp, Homo sapien
cagcagatagttatggagaatcaac

SEQ ID NO: 905491 - DNA, 25 bp, Homo sapien
gctgaggactgtactgatgcacacc

SEQ ID NO: 905492 - DNA, 25 bp, Homo sapien
tgctggacggcctgtaactagtaca

SEQ ID NO: 905493 - DNA, 25 bp, Homo sapien
caaggcagatactttccccatggca

SEQ ID NO: 905494 - DNA, 25 bp, Homo sapien
catttcaagtgagggtgtcacttcc

SEQ ID NO: 905495 - DNA, 25 bp, Homo sapien
agccgtagatgtttgacaagcagca

SEQ ID NO: 905496 - DNA, 25 bp, Homo sapien
agcagcagcattccccacatcagtc

SEQ ID NO: 905497 - DNA, 25 bp, Homo sapien
ccatcagccgtagatgtttgacaag

SEQ ID NO: 905498 - DNA, 25 bp, Homo sapien
gatgccaaatcagcaaccattgttg

SEQ ID NO: 905499 - DNA, 25 bp, Homo sapien
gccttttagaactcagtgccatcct

SEQ ID NO: 905500 - DNA, 25 bp, Homo sapien
gcaattacggctttgacagtgccac

SEQ ID NO: 905501 - DNA, 25 bp, Homo sapien
tgttcgcacctcatctgctgcagaa

SEQ ID NO: 905502 - DNA, 25 bp, Homo sapien
caagtgtagtagctgatgattccca

SEQ ID NO: 905503 - DNA, 25 bp, Homo sapien
tgctgttaccagtgtcctctaggaa

SEQ ID NO: 905504 - DNA, 25 bp, Homo sapien
gattcacatgttagagacaggtcag

SEQ ID NO: 905505 - DNA, 25 bp, Homo sapien
aatgtaacccacttgtgcagaagcc

SEQ ID NO: 905506 - DNA, 25 bp, Homo sapien
gaatgcaaatgtccaacaggcctgg

SEQ ID NO: 905507 - DNA, 25 bp, Homo sapien
gaaggtgcttccaagactgtctgca

SEQ ID NO: 905508 - DNA, 25 bp, Homo sapien
tgatccgctatcagactccagaaag

SEQ ID NO: 905509 - DNA, 25 bp, Homo sapien
gaaaaagccttaagtgccagagaag

SEQ ID NO: 905510 - DNA, 25 bp, Homo sapien
taaacagtagtgaagtcaaagtaga

SEQ ID NO: 905511 - DNA, 25 bp, Homo sapien
taatgtaaacagtagtgaagtcaaa

SEQ ID NO: 905512 - DNA, 25 bp, Homo sapien
gtagtgaagtcaaagtagagaagta

SEQ ID NO: 905513 - DNA, 25 bp, Homo sapien
tctaatgtaaacagtagtgaagtca

SEQ ID NO: 905514 - DNA, 25 bp, Homo sapien
cagcctcattggttgtggaaaggga

SEQ ID NO: 905515 - DNA, 25 bp, Homo sapien
ggttacttgatgtacacccttgtaa

SEQ ID NO: 905516 - DNA, 25 bp, Homo sapien
ggaagtagccaaacaaactctgact

SEQ ID NO: 905517 - DNA, 25 bp, Homo sapien
gtaaatgaagtagtgcccacaatca

SEQ ID NO: 905518 - DNA, 25 bp, Homo sapien
aagagcttgagcaggttcgtggcca

SEQ ID NO: 905519 - DNA, 25 bp, Homo sapien
tcctggcgacactcggtgctggttg

SEQ ID NO: 905520 - DNA, 25 bp, Homo sapien
tctcctcgatgagtgggatcagctg

SEQ ID NO: 905521 - DNA, 25 bp, Homo sapien
tggccacgtcctggcgacactcggt

SEQ ID NO: 905522 - DNA, 25 bp, Homo sapien
tggagggcagcaccgtctcgtcccg

SEQ ID NO: 905523 - DNA, 25 bp, Homo sapien
tgcaccagtggctggtagtagctgg

SEQ ID NO: 905524 - DNA, 25 bp, Homo sapien
gcccagcttgacctcgtggcacagc

SEQ ID NO: 905525 - DNA, 25 bp, Homo sapien
ctggagggcagcaccgtctcgtccc

SEQ ID NO: 905526 - DNA, 25 bp, Homo sapien
gagctgccagccttgaatctatcaa

SEQ ID NO: 905527 - DNA, 25 bp, Homo sapien
gccacattagattgagcttcccagc

SEQ ID NO: 905528 - DNA, 25 bp, Homo sapien
catgggtacactttacagcagaagc

SEQ ID NO: 905529 - DNA, 25 bp, Homo sapien
tctatctgtcttcgaggtgtggctc

SEQ ID NO: 905530 - DNA, 25 bp, Homo sapien
gctggacacacagccgtccacctgc

SEQ ID NO: 905531 - DNA, 25 bp, Homo sapien
ttgtgctggacacacagccgtccac

SEQ ID NO: 905532 - DNA, 25 bp, Homo sapien
cttgtgctggacacacagccgtcca

SEQ ID NO: 905533 - DNA, 25 bp, Homo sapien
gtgctggacacacagccgtccacct

SEQ ID NO: 905534 - DNA, 25 bp, Homo sapien
ttcctggagaatctggcatagggag

SEQ ID NO: 905535 - DNA, 25 bp, Homo sapien
cttatctcacaaccctattcctgga

SEQ ID NO: 905536 - DNA, 25 bp, Homo sapien
gctcctggccaacggtgtcctatct

SEQ ID NO: 905537 - DNA, 25 bp, Homo sapien
cctggagaatctggcatagggagtt

SEQ ID NO: 905538 - DNA, 25 bp, Homo sapien
gcagaaagcaggagacctgtacaac

SEQ ID NO: 905539 - DNA, 25 bp, Homo sapien
gaaaatgtctgagtacttgtttcag

SEQ ID NO: 905540 - DNA, 25 bp, Homo sapien
tcaaagggaaaatgtctgagtactt

SEQ ID NO: 905541 - DNA, 25 bp, Homo sapien
aggagacctgtacaacctgtgagct

SEQ ID NO: 905542 - DNA, 25 bp, Homo sapien
gcgccacccgcagtctctggacatc

SEQ ID NO: 905543 - DNA, 25 bp, Homo sapien
actggtcgggctgcagccggaacca

SEQ ID NO: 905544 - DNA, 25 bp, Homo sapien
atgctgccggctcttggactggtcg

SEQ ID NO: 905545 - DNA, 25 bp, Homo sapien
gcagtctctggacatcgatcaccac

SEQ ID NO: 905546 - DNA, 25 bp, Homo sapien
caaattcaaacgtctcattccagcg

SEQ ID NO: 905547 - DNA, 25 bp, Homo sapien
caggaagtcgtttcggctgacaagg

SEQ ID NO: 905548 - DNA, 25 bp, Homo sapien
tttgcccaggaagtcgtttcggctg

SEQ ID NO: 905549 - DNA, 25 bp, Homo sapien
cagcgtgggtagcatgacttcttca

SEQ ID NO: 905550 - DNA, 25 bp, Homo sapien
gatgccactggactccccaggctgg

SEQ ID NO: 905551 - DNA, 25 bp, Homo sapien
tgggagggggttaggctgatgccac

SEQ ID NO: 905552 - DNA, 25 bp, Homo sapien
tgatgccactggactccccaggctg

SEQ ID NO: 905553 - DNA, 25 bp, Homo sapien
ggtgggagggggttaggctgatgcc

SEQ ID NO: 905554 - DNA, 25 bp, Homo sapien
catctccgtgggtgacgatgggtgc

SEQ ID NO: 905555 - DNA, 25 bp, Homo sapien
ggcagggagcaacttggggaggtgg

SEQ ID NO: 905556 - DNA, 25 bp, Homo sapien
aggcagggagcaacttggggaggtg

SEQ ID NO: 905557 - DNA, 25 bp, Homo sapien
cagggagcaacttggggaggtgggt

SEQ ID NO: 905558 - DNA, 25 bp, Homo sapien
gcagggagcaacttggggaggtggg

SEQ ID NO: 905559 - DNA, 25 bp, Homo sapien
gcacagagcagcgtagctggcaggc

SEQ ID NO: 905560 - DNA, 25 bp, Homo sapien
acagagcagcgtagctggcaggccc

SEQ ID NO: 905561 - DNA, 25 bp, Homo sapien
tccagcacagagcagcgtagctggc

SEQ ID NO: 905562 - DNA, 25 bp, Homo sapien
cagcacagagcagcgtagctggcag

SEQ ID NO: 905563 - DNA, 25 bp, Homo sapien
ctcatcagggtcaacctccgtcagg

SEQ ID NO: 905564 - DNA, 25 bp, Homo sapien
gtcaggtgggcccacccgctgaaac

SEQ ID NO: 905565 - DNA, 25 bp, Homo sapien
ttccagccgcaggtggatctcgccc

SEQ ID NO: 905566 - DNA, 25 bp, Homo sapien
cagggtcaacctccgtcaggtgggc

SEQ ID NO: 905567 - DNA, 25 bp, Homo sapien
caggcaccttgaggcacctccataa

SEQ ID NO: 905568 - DNA, 25 bp, Homo sapien
tgggaatcccctaggcacccgtgaa

SEQ ID NO: 905569 - DNA, 25 bp, Homo sapien
agctcagccagggacacggccctga

SEQ ID NO: 905570 - DNA, 25 bp, Homo sapien
tgtgccctcactattgtgtcatttt

SEQ ID NO: 905571 - DNA, 25 bp, Homo sapien
gacacagtagtactagggcccagat

SEQ ID NO: 905572 - DNA, 25 bp, Homo sapien
taggccaacccttcagacttaggac

SEQ ID NO: 905573 - DNA, 25 bp, Homo sapien
tagagtgtaaggaggccccttcttc

SEQ ID NO: 905574 - DNA, 25 bp, Homo sapien
caggcttgggaacatgctgcagaac

SEQ ID NO: 905575 - DNA, 25 bp, Homo sapien
ctatggtgtcccttgtaaggcagac

SEQ ID NO: 905576 - DNA, 25 bp, Homo sapien
gctatggtgtcccttgtaaggcaga

SEQ ID NO: 905577 - DNA, 25 bp, Homo sapien
tgagggcatcctcatccatgacgta

SEQ ID NO: 905578 - DNA, 25 bp, Homo sapien
tccatgacgtagaaagccacagcgt

SEQ ID NO: 905579 - DNA, 25 bp, Homo sapien
gacgtagaaagccacagcgtggaag

SEQ ID NO: 905580 - DNA, 25 bp, Homo sapien
tcctcatccatgacgtagaaagcca

SEQ ID NO: 905581 - DNA, 25 bp, Homo sapien
gggcacagggtcttccacactgtgg

SEQ ID NO: 905582 - DNA, 25 bp, Homo sapien
cttggtactcctcaccccagaaggg

SEQ ID NO: 905583 - DNA, 25 bp, Homo sapien
cagggtcttccacactgtggctgtc

SEQ ID NO: 905584 - DNA, 25 bp, Homo sapien
ccagaaggggcacagggtcttccac

SEQ ID NO: 905585 - DNA, 25 bp, Homo sapien
gcaggagagaaccctcagcatgtgc

SEQ ID NO: 905586 - DNA, 25 bp, Homo sapien
tgcaggagagaaccctcagcatgtg

SEQ ID NO: 905587 - DNA, 25 bp, Homo sapien
ctgcaggagagaaccctcagcatgt

SEQ ID NO: 905588 - DNA, 25 bp, Homo sapien
tcaagatattcctttgtattcgata

SEQ ID NO: 905589 - DNA, 25 bp, Homo sapien
tattcaagatattcctttgtattcg

SEQ ID NO: 905590 - DNA, 25 bp, Homo sapien
gatattcctttgtattcgatatact

SEQ ID NO: 905591 - DNA, 25 bp, Homo sapien
tcctttgtattcgatatactctttt

SEQ ID NO: 905592 - DNA, 25 bp, Homo sapien
tttcatggctcaagatcattgtccc

SEQ ID NO: 905593 - DNA, 25 bp, Homo sapien
ttcccacggcgtgtcagagttaaaa

SEQ ID NO: 905594 - DNA, 25 bp, Homo sapien
cattgtccctaagtctgttttccca

SEQ ID NO: 905595 - DNA, 25 bp, Homo sapien
tcaggctgatgtcaggtggcacaag

SEQ ID NO: 905596 - DNA, 25 bp, Homo sapien
ctgagatggactggccttgatggcc

SEQ ID NO: 905597 - DNA, 25 bp, Homo sapien
tgtgcatgtctagatgccactgaga

SEQ ID NO: 905598 - DNA, 25 bp, Homo sapien
cagcatggctagctgaagtcagtgg

SEQ ID NO: 905599 - DNA, 25 bp, Homo sapien
gatggccgggactctatgtcttagc

SEQ ID NO: 905600 - DNA, 25 bp, Homo sapien
agggtcattagtccacatgggagct

SEQ ID NO: 905601 - DNA, 25 bp, Homo sapien
ctttcgtgtactctaggaaaggatt

SEQ ID NO: 905602 - DNA, 25 bp, Homo sapien
ctaggaaaggattggaggaagtgga

SEQ ID NO: 905603 - DNA, 25 bp, Homo sapien
cttttgcctttcgtgtactctagga

SEQ ID NO: 905604 - DNA, 25 bp, Homo sapien
tgaagtcctccagccaacagggggc

SEQ ID NO: 905605 - DNA, 25 bp, Homo sapien
tagaaacaatctctctcgccagact

SEQ ID NO: 905606 - DNA, 25 bp, Homo sapien
aatctctctcgccagacttgatggc

SEQ ID NO: 905607 - DNA, 25 bp, Homo sapien
caagctttgggctaaggacacccgc

SEQ ID NO: 905608 - DNA, 25 bp, Homo sapien
ttctgatagagactggcacaagctt

SEQ ID NO: 905609 - DNA, 25 bp, Homo sapien
tctgggcctgatagggaagtgctcc

SEQ ID NO: 905610 - DNA, 25 bp, Homo sapien
agtgctgaacgcgaggtgcgtggtg

SEQ ID NO: 905611 - DNA, 25 bp, Homo sapien
gaggtgcgtggtgtatcttctcaca

SEQ ID NO: 905612 - DNA, 25 bp, Homo sapien
ctcctctgggcctgatagggaagtg

SEQ ID NO: 905613 - DNA, 25 bp, Homo sapien
agagcttggtgtgaaagcaattcac

SEQ ID NO: 905614 - DNA, 25 bp, Homo sapien
tcagagcttggtgtgaaagcaattc

SEQ ID NO: 905615 - DNA, 25 bp, Homo sapien
cagagcttggtgtgaaagcaattca

SEQ ID NO: 905616 - DNA, 25 bp, Homo sapien
acttgcaatcccagatgctgccacc

SEQ ID NO: 905617 - DNA, 25 bp, Homo sapien
tcctccttgggcgcctccccgactg

SEQ ID NO: 905618 - DNA, 25 bp, Homo sapien
cacttgcaatcccagatgctgccac

SEQ ID NO: 905619 - DNA, 25 bp, Homo sapien
gcctccccgactggggtgtccgcag

SEQ ID NO: 905620 - DNA, 25 bp, Homo sapien
cttggaaggtgggcaggggcgggcg

SEQ ID NO: 905621 - DNA, 25 bp, Homo sapien
gacggccaggaggatagacaggatg

SEQ ID NO: 905622 - DNA, 25 bp, Homo sapien
atgatgaccacggtgcccgggctct

SEQ ID NO: 905623 - DNA, 25 bp, Homo sapien
ggaggatagacaggatggcgatgat

SEQ ID NO: 905624 - DNA, 25 bp, Homo sapien
gcgatgatgaccacggtgcccgggc

SEQ ID NO: 905625 - DNA, 25 bp, Homo sapien
ctttgtttcagccacgggtcctttg

SEQ ID NO: 905626 - DNA, 25 bp, Homo sapien
gtgttgctggaccactttgtttcag

SEQ ID NO: 905627 - DNA, 25 bp, Homo sapien
ctgcaggcgagtgttgctggaccac

SEQ ID NO: 905628 - DNA, 25 bp, Homo sapien
gccacgggtcctttgtcattcatca

SEQ ID NO: 905629 - DNA, 25 bp, Homo sapien
cagtgtgagatagtagcccctctgg

SEQ ID NO: 905630 - DNA, 25 bp, Homo sapien
ccctcagtgtgagatagtagcccct

SEQ ID NO: 905631 - DNA, 25 bp, Homo sapien
acccggttggccctcagtgtgagat

SEQ ID NO: 905632 - DNA, 25 bp, Homo sapien
ttggttggcagtgggtatcattgcc

SEQ ID NO: 905633 - DNA, 25 bp, Homo sapien
tgaactggcctagaggctgctccag

SEQ ID NO: 905634 - DNA, 25 bp, Homo sapien
tcagagatgttgtggctgctgaact

SEQ ID NO: 905635 - DNA, 25 bp, Homo sapien
gccagatggtatccaagtcagagat

SEQ ID NO: 905636 - DNA, 25 bp, Homo sapien
tccagcgtgaaggtggacagggtga

SEQ ID NO: 905637 - DNA, 25 bp, Homo sapien
gctggacacgggtcagtagcagcaa

SEQ ID NO: 905638 - DNA, 25 bp, Homo sapien
aatctgccagcccagtgaatctggc

SEQ ID NO: 905639 - DNA, 25 bp, Homo sapien
tgtccgtccgtctgcagtgtctgca

SEQ ID NO: 905640 - DNA, 25 bp, Homo sapien
tttgggggcagaatctgccagccca

SEQ ID NO: 905641 - DNA, 25 bp, Homo sapien
acagaaaattaccagatggaagtcc

SEQ ID NO: 905642 - DNA, 25 bp, Homo sapien
gacagaaaattaccagatggaagtc

SEQ ID NO: 905643 - DNA, 25 bp, Homo sapien
cagaaaattaccagatggaagtcca

SEQ ID NO: 905644 - DNA, 25 bp, Homo sapien
agacagaaaattaccagatggaagt

SEQ ID NO: 905645 - DNA, 25 bp, Homo sapien
gcaatttcggctcgttgcagcctct

SEQ ID NO: 905646 - DNA, 25 bp, Homo sapien
tatcctttccctatttgaactgaaa

SEQ ID NO: 905647 - DNA, 25 bp, Homo sapien
gaaagatgtatcctttccctatttg

SEQ ID NO: 905648 - DNA, 25 bp, Homo sapien
ggcgcacaccaccaacccacataat

SEQ ID NO: 905649 - DNA, 25 bp, Homo sapien
ggacacaggccagtctgagggacac

SEQ ID NO: 905650 - DNA, 25 bp, Homo sapien
ctgcggctgccagccccttgaatag

SEQ ID NO: 905651 - DNA, 25 bp, Homo sapien
gcacagtaagcacctcccagcaatg

SEQ ID NO: 905652 - DNA, 25 bp, Homo sapien
gcaggttcttggacctgtggtcaac

SEQ ID NO: 905653 - DNA, 25 bp, Homo sapien
gccagccccttgaataggcacagta

SEQ ID NO: 905654 - DNA, 25 bp, Homo sapien
gggtctggcacaataattgtgtcca

SEQ ID NO: 905655 - DNA, 25 bp, Homo sapien
tcagcttccttagtacctggattac

SEQ ID NO: 905656 - DNA, 25 bp, Homo sapien
tctgtttagttctcccactgaatcc

SEQ ID NO: 905657 - DNA, 25 bp, Homo sapien
ctgaatcctcactgttaacctaggg

SEQ ID NO: 905658 - DNA, 25 bp, Homo sapien
tcatgaatgcgaatttgaactccag

SEQ ID NO: 905659 - DNA, 25 bp, Homo sapien
tgcgaatttgaactccagaaaagca

SEQ ID NO: 905660 - DNA, 25 bp, Homo sapien
tgccttttctatgagcgagagactc

SEQ ID NO: 905661 - DNA, 25 bp, Homo sapien
gagcttcctaacaatgggacttcca

SEQ ID NO: 905662 - DNA, 25 bp, Homo sapien
aatatgtgtgagctccattggaaat

SEQ ID NO: 905663 - DNA, 25 bp, Homo sapien
atatgtgtgagctccattggaaata

SEQ ID NO: 905664 - DNA, 25 bp, Homo sapien
tcctaggcttgagaattgataacat

SEQ ID NO: 905665 - DNA, 25 bp, Homo sapien
gaaggccatggacagaacggagact

SEQ ID NO: 905666 - DNA, 25 bp, Homo sapien
tgcctggagatcagttggacaacag

SEQ ID NO: 905667 - DNA, 25 bp, Homo sapien
gacagattacgggaaagatcacgac

SEQ ID NO: 905668 - DNA, 25 bp, Homo sapien
taggattgactaagacgaaggaagg

SEQ ID NO: 905669 - DNA, 25 bp, Homo sapien
gaggtgggataggattgactaagac

SEQ ID NO: 905670 - DNA, 25 bp, Homo sapien
ttagccaagtggtagtggtgcacac

SEQ ID NO: 905671 - DNA, 25 bp, Homo sapien
tgggataggattgactaagacgaag

SEQ ID NO: 905672 - DNA, 25 bp, Homo sapien
ggtcgggctctagtgtgatcaactg

SEQ ID NO: 905673 - DNA, 25 bp, Homo sapien
ttttgggtcgggctctagtgtgatc

SEQ ID NO: 905674 - DNA, 25 bp, Homo sapien
gtcgggctctagtgtgatcaactgc

SEQ ID NO: 905675 - DNA, 25 bp, Homo sapien
tgggtcgggctctagtgtgatcaac

SEQ ID NO: 905676 - DNA, 25 bp, Homo sapien
taggtcaacttgataaaggtcagcg

SEQ ID NO: 905677 - DNA, 25 bp, Homo sapien
gataagaaagcttggtttcgggcca

SEQ ID NO: 905678 - DNA, 25 bp, Homo sapien
tgaagtgatcactcatgagggacac

SEQ ID NO: 905679 - DNA, 25 bp, Homo sapien
caatgggaaaaataggccccagtgg

SEQ ID NO: 905680 - DNA, 25 bp, Homo sapien
tcccgcaatttccaaatgagtacag

SEQ ID NO: 905681 - DNA, 25 bp, Homo sapien
atagcgtatttcagccgagccggct

SEQ ID NO: 905682 - DNA, 25 bp, Homo sapien
tcagctcttcgggacagttctctgc

SEQ ID NO: 905683 - DNA, 25 bp, Homo sapien
cagtatctccttgctatggtcatag

SEQ ID NO: 905684 - DNA, 25 bp, Homo sapien
gagaggattatactatcatagactg

SEQ ID NO: 905685 - DNA, 25 bp, Homo sapien
gaggattatactatcatagactgtt

SEQ ID NO: 905686 - DNA, 25 bp, Homo sapien
aagagaggattatactatcatagac

SEQ ID NO: 905687 - DNA, 25 bp, Homo sapien
aaaaagagaggattatactatcata

SEQ ID NO: 905688 - DNA, 25 bp, Homo sapien
gctaggcctaacaggtgtgccatcg

SEQ ID NO: 905689 - DNA, 25 bp, Homo sapien
tagctccgactacagggctgtgcca

SEQ ID NO: 905690 - DNA, 25 bp, Homo sapien
accgtgtctggcatatttcttatat

SEQ ID NO: 905691 - DNA, 25 bp, Homo sapien
tcagcttctttattagctccgacta

SEQ ID NO: 905692 - DNA, 25 bp, Homo sapien
gacgaggactccaaacaaaacatct

SEQ ID NO: 905693 - DNA, 25 bp, Homo sapien
gacgacgaggactccaaacaaaaca

SEQ ID NO: 905694 - DNA, 25 bp, Homo sapien
gaggacgacgaggactccaaacaaa

SEQ ID NO: 905695 - DNA, 25 bp, Homo sapien
gtgcccctgagcagcaacctgattc

SEQ ID NO: 905696 - DNA, 25 bp, Homo sapien
tcggttccagttacgccgttgcatg

SEQ ID NO: 905697 - DNA, 25 bp, Homo sapien
cgtcggttccagttacgccgttgca

SEQ ID NO: 905698 - DNA, 25 bp, Homo sapien
gtcggttccagttacgccgttgcat

SEQ ID NO: 905699 - DNA, 25 bp, Homo sapien
cggttccagttacgccgttgcatga

SEQ ID NO: 905700 - DNA, 25 bp, Homo sapien
gaacctggaccattcttgatggagc

SEQ ID NO: 905701 - DNA, 25 bp, Homo sapien
ttcttgatggagctgaatacagtga

SEQ ID NO: 905702 - DNA, 25 bp, Homo sapien
tggagctgaatacagtgatcacgtt

SEQ ID NO: 905703 - DNA, 25 bp, Homo sapien
tgatcacgttgtcctcctaggagca

SEQ ID NO: 905704 - DNA, 25 bp, Homo sapien
gcgcccagatgccaagctagagttt

SEQ ID NO: 905705 - DNA, 25 bp, Homo sapien
caccatgccctcaagttcgataact

SEQ ID NO: 905706 - DNA, 25 bp, Homo sapien
cactagcagagattgtgtctcctca

SEQ ID NO: 905707 - DNA, 25 bp, Homo sapien
tcacgcccatgatctcagcaggagt

SEQ ID NO: 905708 - DNA, 25 bp, Homo sapien
tgtacagaaagcgtggctggggagg

SEQ ID NO: 905709 - DNA, 25 bp, Homo sapien
gcaggctgtacagaaagcgtggctg

SEQ ID NO: 905710 - DNA, 25 bp, Homo sapien
tgcaggctgtacagaaagcgtggct

SEQ ID NO: 905711 - DNA, 25 bp, Homo sapien
ggctgtacagaaagcgtggctgggg

SEQ ID NO: 905712 - DNA, 25 bp, Homo sapien
ccgacaagggacatagaagagcacc

SEQ ID NO: 905713 - DNA, 25 bp, Homo sapien
gcctgtggtggaagtccctgctctt

SEQ ID NO: 905714 - DNA, 25 bp, Homo sapien
tgcagcactacagaagtcccatggg

SEQ ID NO: 905715 - DNA, 25 bp, Homo sapien
aggacctccgaagaaacaggccagg

SEQ ID NO: 905716 - DNA, 25 bp, Homo sapien
ctgtagtccggcgtggtctgcactc

SEQ ID NO: 905717 - DNA, 25 bp, Homo sapien
tccagcagggacagctcactgatga

SEQ ID NO: 905718 - DNA, 25 bp, Homo sapien
tgatggcgttggtaaaggcttcctg

SEQ ID NO: 905719 - DNA, 25 bp, Homo sapien
tcggatgatgatcttgtgctccaag

SEQ ID NO: 905720 - DNA, 25 bp, Homo sapien
gtttcccagtgtgtggtcttctttg

SEQ ID NO: 905721 - DNA, 25 bp, Homo sapien
taaacaggcattgggtaccttggtg

SEQ ID NO: 905722 - DNA, 25 bp, Homo sapien
tggtgaataaacaggcattgggtac

SEQ ID NO: 905723 - DNA, 25 bp, Homo sapien
ggcattgggtaccttggtgtccttg

SEQ ID NO: 905724 - DNA, 25 bp, Homo sapien
gaagagcaagaacgactcgaaggct

SEQ ID NO: 905725 - DNA, 25 bp, Homo sapien
ctcgccctcgaagagcaagaacgac

SEQ ID NO: 905726 - DNA, 25 bp, Homo sapien
gccctcgaagagcaagaacgactcg

SEQ ID NO: 905727 - DNA, 25 bp, Homo sapien
agcaagaacgactcgaaggctggag

SEQ ID NO: 905728 - DNA, 25 bp, Homo sapien
cctccgttgcgtccagaccccaagt

SEQ ID NO: 905729 - DNA, 25 bp, Homo sapien
gctcccgcctccgttgcgtccagac

SEQ ID NO: 905730 - DNA, 25 bp, Homo sapien
cgcctccgttgcgtccagaccccaa

SEQ ID NO: 905731 - DNA, 25 bp, Homo sapien
tccgttgcgtccagaccccaagtgt

SEQ ID NO: 905732 - DNA, 25 bp, Homo sapien
tcccccgtgggcgcttttcggcgca

SEQ ID NO: 905733 - DNA, 25 bp, Homo sapien
cccccgtgggcgcttttcggcgcat

SEQ ID NO: 905734 - DNA, 25 bp, Homo sapien
tgggaagacacctgttgccaagccg

SEQ ID NO: 905735 - DNA, 25 bp, Homo sapien
gaagacacctgttgccaagccgacc

SEQ ID NO: 905736 - DNA, 25 bp, Homo sapien
gacacctgttgccaagccgaccgtg

SEQ ID NO: 905737 - DNA, 25 bp, Homo sapien
aagacaaagagtgcgagctttctgt

SEQ ID NO: 905738 - DNA, 25 bp, Homo sapien
ggaccaggccatgtatactttttaa

SEQ ID NO: 905739 - DNA, 25 bp, Homo sapien
gtctgtaattatcagctcgtggcta

SEQ ID NO: 905740 - DNA, 25 bp, Homo sapien
gatatacaaagatagactatgcagg

SEQ ID NO: 905741 - DNA, 25 bp, Homo sapien
ggtttccctgtttggagctctccaa

SEQ ID NO: 905742 - DNA, 25 bp, Homo sapien
tattataaagttctggccatgcaca

SEQ ID NO: 905743 - DNA, 25 bp, Homo sapien
accgtcacacccagcttcaagtctc

SEQ ID NO: 905744 - DNA, 25 bp, Homo sapien
ttattataaagttctggccatgcac

SEQ ID NO: 905745 - DNA, 25 bp, Homo sapien
gtcacacccagcttcaagtctcttt

SEQ ID NO: 905746 - DNA, 25 bp, Homo sapien
ctgcaccctaatgaggaggaccggg

SEQ ID NO: 905747 - DNA, 25 bp, Homo sapien
cctgtggcacccaagggtagcgggt

SEQ ID NO: 905748 - DNA, 25 bp, Homo sapien
catcctagcagtggttctggctggg

SEQ ID NO: 905749 - DNA, 25 bp, Homo sapien
tcccattctctaggtccctggaggc

SEQ ID NO: 905750 - DNA, 25 bp, Homo sapien
agctatgggcctcgcggaggtcctg

SEQ ID NO: 905751 - DNA, 25 bp, Homo sapien
gctggagctatgggcctcgcggagg

SEQ ID NO: 905752 - DNA, 25 bp, Homo sapien
tcgcggaggtcctgcagcacccgga

SEQ ID NO: 905753 - DNA, 25 bp, Homo sapien
ctcgcggaggtcctgcagcacccgg

SEQ ID NO: 905754 - DNA, 25 bp, Homo sapien
cccgctcagctcccggtgcctctcc

SEQ ID NO: 905755 - DNA, 25 bp, Homo sapien
ggcctcgtgctgcagagaggtactc

SEQ ID NO: 905756 - DNA, 25 bp, Homo sapien
acatggcatgaagcaggcatggccc

SEQ ID NO: 905757 - DNA, 25 bp, Homo sapien
tctgtcctaacctgagctggcctcg

SEQ ID NO: 905758 - DNA, 25 bp, Homo sapien
cagatgtggccaattacaagagagg

SEQ ID NO: 905759 - DNA, 25 bp, Homo sapien
tgggcctcaaggtcatggtcaagag

SEQ ID NO: 905760 - DNA, 25 bp, Homo sapien
tcctgcagggtcacccgtgaccggg

SEQ ID NO: 905761 - DNA, 25 bp, Homo sapien
tggtcaagagggtcattccactcct

SEQ ID NO: 905762 - DNA, 25 bp, Homo sapien
caggtgccggtagatgagctgggcc

SEQ ID NO: 905763 - DNA, 25 bp, Homo sapien
catgccttagaatgagctggtcctg

SEQ ID NO: 905764 - DNA, 25 bp, Homo sapien
ttgcaaagagtcaccaagaggccag

SEQ ID NO: 905765 - DNA, 25 bp, Homo sapien
gggagcaggctgaaacgttaacatc

SEQ ID NO: 905766 - DNA, 25 bp, Homo sapien
gtatcgctctgatggttacaggcag

SEQ ID NO: 905767 - DNA, 25 bp, Homo sapien
tccggattcagatggccagcattgg

SEQ ID NO: 905768 - DNA, 25 bp, Homo sapien
tcaagtgctcaagaaccacaggtgc

SEQ ID NO: 905769 - DNA, 25 bp, Homo sapien
ccagcattggagtgtgcgaacccag

SEQ ID NO: 905770 - DNA, 25 bp, Homo sapien
cacagtatggcgtccttctagaagc

SEQ ID NO: 905771 - DNA, 25 bp, Homo sapien
gcttgcgcctgtagtacttgggagg

SEQ ID NO: 905772 - DNA, 25 bp, Homo sapien
cagtggcttgcgcctgtagtacttg

SEQ ID NO: 905773 - DNA, 25 bp, Homo sapien
tggcttgcgcctgtagtacttggga

SEQ ID NO: 905774 - DNA, 25 bp, Homo sapien
agtggcttgcgcctgtagtacttgg

SEQ ID NO: 905775 - DNA, 25 bp, Homo sapien
gagcgagacttggtatcaaacaaca

SEQ ID NO: 905776 - DNA, 25 bp, Homo sapien
tgtgcttcacacacatcacgtggca

SEQ ID NO: 905777 - DNA, 25 bp, Homo sapien
tctcgcagtggacggatgcagagcc

SEQ ID NO: 905778 - DNA, 25 bp, Homo sapien
gagccttcagcgaattcactcatgt

SEQ ID NO: 905779 - DNA, 25 bp, Homo sapien
cagacagccactggttaagctcatt

SEQ ID NO: 905780 - DNA, 25 bp, Homo sapien
cccagcagtccggtgttgttgatgc

SEQ ID NO: 905781 - DNA, 25 bp, Homo sapien
agacagccactggttaagctcattc

SEQ ID NO: 905782 - DNA, 25 bp, Homo sapien
atgttggctaacttgatgagggcgc

SEQ ID NO: 905783 - DNA, 25 bp, Homo sapien
tggctaacttgatgagggcgctttt

SEQ ID NO: 905784 - DNA, 25 bp, Homo sapien
gctgcccggatgttggctaacttga

SEQ ID NO: 905785 - DNA, 25 bp, Homo sapien
ggcgtcgtccgtgtagatgacctgc

SEQ ID NO: 905786 - DNA, 25 bp, Homo sapien
ccttgcccttggtcctgtggatgaa

SEQ ID NO: 905787 - DNA, 25 bp, Homo sapien
aggtggcgcctgcaaactcagcgtc

SEQ ID NO: 905788 - DNA, 25 bp, Homo sapien
tagagcttcttgaaggaggaggaca

SEQ ID NO: 905789 - DNA, 25 bp, Homo sapien
gcgtcttcgcgaagctgagggcctc

SEQ ID NO: 905790 - DNA, 25 bp, Homo sapien
cacaaacagtggtgcgtgggtctat

SEQ ID NO: 905791 - DNA, 25 bp, Homo sapien
ccacgagaggaacaaacagcggtgg

SEQ ID NO: 905792 - DNA, 25 bp, Homo sapien
gcggagcaaacgtcagcagtaggct

SEQ ID NO: 905793 - DNA, 25 bp, Homo sapien
gggcaaacgtcaacagcaggcagtg

SEQ ID NO: 905794 - DNA, 25 bp, Homo sapien
ctggaagccggcgtgtccatgttgc

SEQ ID NO: 905795 - DNA, 25 bp, Homo sapien
acgccctggcgcacggtgggctgca

SEQ ID NO: 905796 - DNA, 25 bp, Homo sapien
agtccttcagctgcgccacgccctg

SEQ ID NO: 905797 - DNA, 25 bp, Homo sapien
cgtgtccatgttgcccacgttctgg

SEQ ID NO: 905798 - DNA, 25 bp, Homo sapien
ggccaacaggagcagggtgcggctg

SEQ ID NO: 905799 - DNA, 25 bp, Homo sapien
ccaacaggagcagggtgcggctggt

SEQ ID NO: 905800 - DNA, 25 bp, Homo sapien
gggcgtccgcgtggcgctcccgcag

SEQ ID NO: 905801 - DNA, 25 bp, Homo sapien
ggaagagcttgggcgacatgatggc

SEQ ID NO: 905802 - DNA, 25 bp, Homo sapien
tggaggggtgcggaagagcgcgggc

SEQ ID NO: 905803 - DNA, 25 bp, Homo sapien
gaggggtgcggaagagcgcgggctg

SEQ ID NO: 905804 - DNA, 25 bp, Homo sapien
ctggaggggtgcggaagagcgcggg

SEQ ID NO: 905805 - DNA, 25 bp, Homo sapien
aggggtgcggaagagcgcgggctgg

SEQ ID NO: 905806 - DNA, 25 bp, Homo sapien
gaaccgagcggctgagcgcgctcag

SEQ ID NO: 905807 - DNA, 25 bp, Homo sapien
tcggcctcggtctgcgggcggtgca

SEQ ID NO: 905808 - DNA, 25 bp, Homo sapien
tcgcgcacgcgccggaagagctggc

SEQ ID NO: 905809 - DNA, 25 bp, Homo sapien
caggtgggcgcgcagcgtctgcgcg

SEQ ID NO: 905810 - DNA, 25 bp, Homo sapien
caggacgccgtgcaggtactgcatc

SEQ ID NO: 905811 - DNA, 25 bp, Homo sapien
taacttccactttgctggggtccag

SEQ ID NO: 905812 - DNA, 25 bp, Homo sapien
acgccgtgcaggtactgcatcccgg

SEQ ID NO: 905813 - DNA, 25 bp, Homo sapien
gcccaggacgccgtgcaggtactgc

SEQ ID NO: 905814 - DNA, 25 bp, Homo sapien
caggcttccaagtcgagctgccgtt

SEQ ID NO: 905815 - DNA, 25 bp, Homo sapien
gatcaaactgttgagggtccacaaa

SEQ ID NO: 905816 - DNA, 25 bp, Homo sapien
gatcgttcaaataagcgcatcgaca

SEQ ID NO: 905817 - DNA, 25 bp, Homo sapien
gggacctgcatgctagaccagctgg

SEQ ID NO: 905818 - DNA, 25 bp, Homo sapien
cagcgaaagccggtagccatcctgc

SEQ ID NO: 905819 - DNA, 25 bp, Homo sapien
cagtcagaagaataggttctgcttt

SEQ ID NO: 905820 - DNA, 25 bp, Homo sapien
aaattcatgaaatgcccccacagcg

SEQ ID NO: 905821 - DNA, 25 bp, Homo sapien
gggaacttacctcacccatgtgatg

SEQ ID NO: 905822 - DNA, 25 bp, Homo sapien
gaatttgtcttgttggagcctgctc

SEQ ID NO: 905823 - DNA, 25 bp, Homo sapien
caccctgggtattcaaaaacggcag

SEQ ID NO: 905824 - DNA, 25 bp, Homo sapien
cactgtttagaatgacccttgggaa

SEQ ID NO: 905825 - DNA, 25 bp, Homo sapien
ctgacaggatactgagccaagccct

SEQ ID NO: 905826 - DNA, 25 bp, Homo sapien
gagcctggcatgcacggctgcgctg

SEQ ID NO: 905827 - DNA, 25 bp, Homo sapien
tgagcctggcatgcacggctgcgct

SEQ ID NO: 905828 - DNA, 25 bp, Homo sapien
ggaggtgcctttattgcccaagccc

SEQ ID NO: 905829 - DNA, 25 bp, Homo sapien
ggggaggtgcctttattgcccaagc

SEQ ID NO: 905830 - DNA, 25 bp, Homo sapien
gaggtgcctttattgcccaagccca

SEQ ID NO: 905831 - DNA, 25 bp, Homo sapien
ggtgcctttattgcccaagcccacc

SEQ ID NO: 905832 - DNA, 25 bp, Homo sapien
tccatgatcgcctggtctgacatcc

SEQ ID NO: 905833 - DNA, 25 bp, Homo sapien
agctccttgttcagctcatacacaa

SEQ ID NO: 905834 - DNA, 25 bp, Homo sapien
tacacaatggggatccccgtgggca

SEQ ID NO: 905835 - DNA, 25 bp, Homo sapien
gccttccgcaccgtttcctcatcac

SEQ ID NO: 905836 - DNA, 25 bp, Homo sapien
ctatgccggaaggaataggtgtcct

SEQ ID NO: 905837 - DNA, 25 bp, Homo sapien
ataggtgtccttagcccctctgtcc

SEQ ID NO: 905838 - DNA, 25 bp, Homo sapien
gccggaaggaataggtgtccttagc

SEQ ID NO: 905839 - DNA, 25 bp, Homo sapien
aggaataggtgtccttagcccctct

SEQ ID NO: 905840 - DNA, 25 bp, Homo sapien
tgcccaggctcctgaaggtggcctc

SEQ ID NO: 905841 - DNA, 25 bp, Homo sapien
ctgcccaggctcctgaaggtggcct

SEQ ID NO: 905842 - DNA, 25 bp, Homo sapien
accctgcccaggctcctgaaggtgg

SEQ ID NO: 905843 - DNA, 25 bp, Homo sapien
ccaccctgcccaggctcctgaaggt

SEQ ID NO: 905844 - DNA, 25 bp, Homo sapien
gggcccgggcaatggtgtccttgag

SEQ ID NO: 905845 - DNA, 25 bp, Homo sapien
tgagcactcgcttgccggccttgat

SEQ ID NO: 905846 - DNA, 25 bp, Homo sapien
tgatctggggaacaatctcctcgtt

SEQ ID NO: 905847 - DNA, 25 bp, Homo sapien
ggagttccccgggcttcaggcctgc

SEQ ID NO: 905848 - DNA, 25 bp, Homo sapien
gggggacacaggcacgctgctttcc

SEQ ID NO: 905849 - DNA, 25 bp, Homo sapien
ggggacacaggcacgctgctttccc

SEQ ID NO: 905850 - DNA, 25 bp, Homo sapien
tcagcactgacgtgtagcagatgtc

SEQ ID NO: 905851 - DNA, 25 bp, Homo sapien
catctggtccgtgccgtccaggatg

SEQ ID NO: 905852 - DNA, 25 bp, Homo sapien
tctgccttgttgaggcctgtgaggc

SEQ ID NO: 905853 - DNA, 25 bp, Homo sapien
cagaaacggttctcctggttccatg

SEQ ID NO: 905854 - DNA, 25 bp, Homo sapien
ctctggacggggacggctgcttccc

SEQ ID NO: 905855 - DNA, 25 bp, Homo sapien
acggggacggctgcttcccaacact

SEQ ID NO: 905856 - DNA, 25 bp, Homo sapien
ggacggggacggctgcttcccaaca

SEQ ID NO: 905857 - DNA, 25 bp, Homo sapien
ctggacggggacggctgcttcccaa

SEQ ID NO: 905858 - DNA, 25 bp, Homo sapien
gctttgatgagaacaaggccgctta

SEQ ID NO: 905859 - DNA, 25 bp, Homo sapien
tgatgagaacaaggccgcttagcca

SEQ ID NO: 905860 - DNA, 25 bp, Homo sapien
cagctttgatgagaacaaggccgct

SEQ ID NO: 905861 - DNA, 25 bp, Homo sapien
tttgatgagaacaaggccgcttagc

SEQ ID NO: 905862 - DNA, 25 bp, Homo sapien
ccagaaactatagaggccagaaaga

SEQ ID NO: 905863 - DNA, 25 bp, Homo sapien
gaaatgacaaagcatggagtccata

SEQ ID NO: 905864 - DNA, 25 bp, Homo sapien
cattctcaaatgaaggcaagctgag

SEQ ID NO: 905865 - DNA, 25 bp, Homo sapien
gaagctcagtgaaccacacaactgg

SEQ ID NO: 905866 - DNA, 25 bp, Homo sapien
cctagatggtagtgaggtttctaca

SEQ ID NO: 905867 - DNA, 25 bp, Homo sapien
gatactgtctgatggaggcttcagt

SEQ ID NO: 905868 - DNA, 25 bp, Homo sapien
tgtaagagtatgtgtatttggccgg

SEQ ID NO: 905869 - DNA, 25 bp, Homo sapien
tatacagatgtaagacaactagaac

SEQ ID NO: 905870 - DNA, 25 bp, Homo sapien
ccacgtgcaaaacaatgaatcccca

SEQ ID NO: 905871 - DNA, 25 bp, Homo sapien
aaggtaacaactcattctctgaggg

SEQ ID NO: 905872 - DNA, 25 bp, Homo sapien
taccagtcaccatagtggcacataa

SEQ ID NO: 905873 - DNA, 25 bp, Homo sapien
gaagaaagatagtctacacactggg

SEQ ID NO: 905874 - DNA, 25 bp, Homo sapien
gactgcaaaatgacagacgcactcg

SEQ ID NO: 905875 - DNA, 25 bp, Homo sapien
tgctcacaacgctggtggactgcaa

SEQ ID NO: 905876 - DNA, 25 bp, Homo sapien
gacccatgtgttacacgaaaacctg

SEQ ID NO: 905877 - DNA, 25 bp, Homo sapien
acgcactcgggacaacaacttggct

SEQ ID NO: 905878 - DNA, 25 bp, Homo sapien
tgtgccctacgtgtgcaaaaactgc

SEQ ID NO: 905879 - DNA, 25 bp, Homo sapien
ggtggagaagcacatgaccacaata

SEQ ID NO: 905880 - DNA, 25 bp, Homo sapien
caaaactatagggatgtagcaccgc

SEQ ID NO: 905881 - DNA, 25 bp, Homo sapien
tgaccacaataggacagcatgggaa

SEQ ID NO: 905882 - DNA, 25 bp, Homo sapien
gacagtaggctccttgctggcacga

SEQ ID NO: 905883 - DNA, 25 bp, Homo sapien
gatgagtggtctgggaaatcctcgc

SEQ ID NO: 905884 - DNA, 25 bp, Homo sapien
accattaaagggctctgcgacggga

SEQ ID NO: 905885 - DNA, 25 bp, Homo sapien
catcaaataggaagccggtgagtca

SEQ ID NO: 905886 - DNA, 25 bp, Homo sapien
tcacacagtgatgaggctggcactg

SEQ ID NO: 905887 - DNA, 25 bp, Homo sapien
cacacagtgatgaggctggcactga

SEQ ID NO: 905888 - DNA, 25 bp, Homo sapien
gctggcactgagggctcccacctca

SEQ ID NO: 905889 - DNA, 25 bp, Homo sapien
gaggctggcactgagggctcccacc

SEQ ID NO: 905890 - DNA, 25 bp, Homo sapien
ggcacaattgacctccggaagagcc

SEQ ID NO: 905891 - DNA, 25 bp, Homo sapien
tcctgcaggcacaattgacctccgg

SEQ ID NO: 905892 - DNA, 25 bp, Homo sapien
tgcaggcacaattgacctccggaag

SEQ ID NO: 905893 - DNA, 25 bp, Homo sapien
gatcctgcaggcacaattgacctcc

SEQ ID NO: 905894 - DNA, 25 bp, Homo sapien
gcagcccaatttcctgagtggaagt

SEQ ID NO: 905895 - DNA, 25 bp, Homo sapien
gcccaatttcctgagtggaagtggg

SEQ ID NO: 905896 - DNA, 25 bp, Homo sapien
ctggagacattcagtggccaggttg

SEQ ID NO: 905897 - DNA, 25 bp, Homo sapien
cagcccaatttcctgagtggaagtg

SEQ ID NO: 905898 - DNA, 25 bp, Homo sapien
tctgaagccgcttggaaaaatgtct

SEQ ID NO: 905899 - DNA, 25 bp, Homo sapien
gtcttcctctgaagccgcttggaaa

SEQ ID NO: 905900 - DNA, 25 bp, Homo sapien
gcccaggtgtctgaagatgtcttcc

SEQ ID NO: 905901 - DNA, 25 bp, Homo sapien
tggaggaaggtactcaaggcccagg

SEQ ID NO: 905902 - DNA, 25 bp, Homo sapien
tccgtgacctaggagtcttgccact

SEQ ID NO: 905903 - DNA, 25 bp, Homo sapien
tgacctaggagtcttgccactgctg

SEQ ID NO: 905904 - DNA, 25 bp, Homo sapien
agcaggacttccgtgacctaggagt

SEQ ID NO: 905905 - DNA, 25 bp, Homo sapien
taggagtcttgccactgctgcttcc

SEQ ID NO: 905906 - DNA, 25 bp, Homo sapien
tgtggagacccagattcgggtccta

SEQ ID NO: 905907 - DNA, 25 bp, Homo sapien
ttcagattgtgggtcagggagcgga

SEQ ID NO: 905908 - DNA, 25 bp, Homo sapien
tcagggagcggactatgggtgctgt

SEQ ID NO: 905909 - DNA, 25 bp, Homo sapien
gattcgggtcctatgggtttcaggc

SEQ ID NO: 905910 - DNA, 25 bp, Homo sapien
cttccggctgaagcggcgcagctcc

SEQ ID NO: 905911 - DNA, 25 bp, Homo sapien
ccttccggctgaagcggcgcagctc

SEQ ID NO: 905912 - DNA, 25 bp, Homo sapien
ttggagccagtccaaccgagcaggg

SEQ ID NO: 905913 - DNA, 25 bp, Homo sapien
tggctgacgggtgcaactaccaagt

SEQ ID NO: 905914 - DNA, 25 bp, Homo sapien
tgtggtaggcggaaaatgcagaaac

SEQ ID NO: 905915 - DNA, 25 bp, Homo sapien
cagaaacttctctcaaaagcgtcca

SEQ ID NO: 905916 - DNA, 25 bp, Homo sapien
aggcgggtaggggactcacagcagc

SEQ ID NO: 905917 - DNA, 25 bp, Homo sapien
ggcgggtaggggactcacagcagct

SEQ ID NO: 905918 - DNA, 25 bp, Homo sapien
ggctgagaccatccggtggtgtgga

SEQ ID NO: 905919 - DNA, 25 bp, Homo sapien
gcgtggctgagaccatccggtggtg

SEQ ID NO: 905920 - DNA, 25 bp, Homo sapien
cgtggctgagaccatccggtggtgt

SEQ ID NO: 905921 - DNA, 25 bp, Homo sapien
ctgagaccatccggtggtgtggaga

SEQ ID NO: 905922 - DNA, 25 bp, Homo sapien
gcaggcggcacatcactctaggcag

SEQ ID NO: 905923 - DNA, 25 bp, Homo sapien
ctgcaggcggcacatcactctaggc

SEQ ID NO: 905924 - DNA, 25 bp, Homo sapien
tcctgcaggcggcacatcactctag

SEQ ID NO: 905925 - DNA, 25 bp, Homo sapien
tgatgaggaagtccacgtcatggcc

SEQ ID NO: 905926 - DNA, 25 bp, Homo sapien
tcagggacacggcctgctcactcca

SEQ ID NO: 905927 - DNA, 25 bp, Homo sapien
tgactcagggacacggcctgctcac

SEQ ID NO: 905928 - DNA, 25 bp, Homo sapien
actctgactcagggacacggcctgc

SEQ ID NO: 905929 - DNA, 25 bp, Homo sapien
tctgactcagggacacggcctgctc

SEQ ID NO: 905930 - DNA, 25 bp, Homo sapien
gccaagccagaggggcacgtcgggc

SEQ ID NO: 905931 - DNA, 25 bp, Homo sapien
cagaggggcacgtcgggccttctta

SEQ ID NO: 905932 - DNA, 25 bp, Homo sapien
aagccagaggggcacgtcgggcctt

SEQ ID NO: 905933 - DNA, 25 bp, Homo sapien
cttccaacgagtgggcccgcttcag

SEQ ID NO: 905934 - DNA, 25 bp, Homo sapien
ctgcagggcatctacatcggaccgc

SEQ ID NO: 905935 - DNA, 25 bp, Homo sapien
gggcatctacatcggaccgcaggac

SEQ ID NO: 905936 - DNA, 25 bp, Homo sapien
cagggcatctacatcggaccgcagg

SEQ ID NO: 905937 - DNA, 25 bp, Homo sapien
ggaagccgccggtcagcgtgacggt

SEQ ID NO: 905938 - DNA, 25 bp, Homo sapien
aaagaaatagcacagagggagatcc

SEQ ID NO: 905939 - DNA, 25 bp, Homo sapien
gttgatacagtcatgccacaggcta

SEQ ID NO: 905940 - DNA, 25 bp, Homo sapien
gagatcccaatctaagcctgacact

SEQ ID NO: 905941 - DNA, 25 bp, Homo sapien
gagacagttgtagattcactcgcag

SEQ ID NO: 905942 - DNA, 25 bp, Homo sapien
tcttgggcaatggtcacctacctgg

SEQ ID NO: 905943 - DNA, 25 bp, Homo sapien
tttgatagatcctgactgcactggg

SEQ ID NO: 905944 - DNA, 25 bp, Homo sapien
catatcatggaagttgctgtggtca

SEQ ID NO: 905945 - DNA, 25 bp, Homo sapien
tcagcatcgtccactgagaaaaggc

SEQ ID NO: 905946 - DNA, 25 bp, Homo sapien
atctaaggttcgcagtccttcccgg

SEQ ID NO: 905947 - DNA, 25 bp, Homo sapien
ttcccggtaccaccggtcagcagtc

SEQ ID NO: 905948 - DNA, 25 bp, Homo sapien
ctttctgctgttgggttagtttctg

SEQ ID NO: 905949 - DNA, 25 bp, Homo sapien
acaccgaccccgaagatctgggtga

SEQ ID NO: 905950 - DNA, 25 bp, Homo sapien
tgtggcagccgagcaccttttgtgg

SEQ ID NO: 905951 - DNA, 25 bp, Homo sapien
gacggcatttccctatcagaccagg

SEQ ID NO: 905952 - DNA, 25 bp, Homo sapien
cacataaggtcctgcagaaggcggg

SEQ ID NO: 905953 - DNA, 25 bp, Homo sapien
tgaaagggacttacacagctctagc

SEQ ID NO: 905954 - DNA, 25 bp, Homo sapien
gctgtgatcgcaccactgtactcca

SEQ ID NO: 905955 - DNA, 25 bp, Homo sapien
aggaagtcaaggctgccgtgagctg

SEQ ID NO: 905956 - DNA, 25 bp, Homo sapien
tgtgatcgcaccactgtactccagc

SEQ ID NO: 905957 - DNA, 25 bp, Homo sapien
aggatggtttgagcccaggaagtca

SEQ ID NO: 905958 - DNA, 25 bp, Homo sapien
tagctgccacttcctcggcaagacc

SEQ ID NO: 905959 - DNA, 25 bp, Homo sapien
ccacttggctgccttgtgcatatca

SEQ ID NO: 905960 - DNA, 25 bp, Homo sapien
gctgccttgtgcatatcaggtatca

SEQ ID NO: 905961 - DNA, 25 bp, Homo sapien
ccttgtgcatatcaggtatcagctt

SEQ ID NO: 905962 - DNA, 25 bp, Homo sapien
ctccccgtgcatggtgtggactgtg

SEQ ID NO: 905963 - DNA, 25 bp, Homo sapien
gacattcctggggtaggtccgagcc

SEQ ID NO: 905964 - DNA, 25 bp, Homo sapien
ttcctggggtaggtccgagccctgc

SEQ ID NO: 905965 - DNA, 25 bp, Homo sapien
agctgcccctgtttgcctccccgtg

SEQ ID NO: 905966 - DNA, 25 bp, Homo sapien
ctctctgagcgccgaactctctcca

SEQ ID NO: 905967 - DNA, 25 bp, Homo sapien
ctctgagcgccgaactctctccacc

SEQ ID NO: 905968 - DNA, 25 bp, Homo sapien
tctgagcgccgaactctctccacct

SEQ ID NO: 905969 - DNA, 25 bp, Homo sapien
tctctgagcgccgaactctctccac

SEQ ID NO: 905970 - DNA, 25 bp, Homo sapien
tgaggaggcggccctcactgccttc

SEQ ID NO: 905971 - DNA, 25 bp, Homo sapien
aagggccttgagcaccgaggctgct

SEQ ID NO: 905972 - DNA, 25 bp, Homo sapien
ctagaggagtgttctccaaagtggg

SEQ ID NO: 905973 - DNA, 25 bp, Homo sapien
ctggacaaccctagaggagtgttct

SEQ ID NO: 905974 - DNA, 25 bp, Homo sapien
tgtggtgtgtgaggggcgtagggcg

SEQ ID NO: 905975 - DNA, 25 bp, Homo sapien
tgtgaggggcgtagggcgctggcag

SEQ ID NO: 905976 - DNA, 25 bp, Homo sapien
gctggcaggcataggcaggcatcca

SEQ ID NO: 905977 - DNA, 25 bp, Homo sapien
gcataggcaggcatccatgctgggc

SEQ ID NO: 905978 - DNA, 25 bp, Homo sapien
cagaggccgggagccttatagcatc

SEQ ID NO: 905979 - DNA, 25 bp, Homo sapien
gagccttatagcatccagaggacag

SEQ ID NO: 905980 - DNA, 25 bp, Homo sapien
tgggtcatcccgctcggagttgctg

SEQ ID NO: 905981 - DNA, 25 bp, Homo sapien
aggctcctgctaacccatgggtcat

SEQ ID NO: 905982 - DNA, 25 bp, Homo sapien
cttccatcacaacatgtgtcgcttc

SEQ ID NO: 905983 - DNA, 25 bp, Homo sapien
tcctgccagctgacggcctcctctg

SEQ ID NO: 905984 - DNA, 25 bp, Homo sapien
tgttaaccagcttatgtccagcaga

SEQ ID NO: 905985 - DNA, 25 bp, Homo sapien
catcacaacatgtgtcgcttcggag

SEQ ID NO: 905986 - DNA, 25 bp, Homo sapien
gcggcgtggaggaagcggcatcgcc

SEQ ID NO: 905987 - DNA, 25 bp, Homo sapien
acgcggaagcctttggagcgcgcca

SEQ ID NO: 905988 - DNA, 25 bp, Homo sapien
ctcgaccaggtagatggcgactccc

SEQ ID NO: 905989 - DNA, 25 bp, Homo sapien
cggctgcgacccatgcgaggctcga

SEQ ID NO: 905990 - DNA, 25 bp, Homo sapien
cggagcgaacgcagagggaaactcc

SEQ ID NO: 905991 - DNA, 25 bp, Homo sapien
ccagcagcgcggagcgaacgcagag

SEQ ID NO: 905992 - DNA, 25 bp, Homo sapien
gagggaaactccgagcgagacggaa

SEQ ID NO: 905993 - DNA, 25 bp, Homo sapien
aaactccgagcgagacggaaggaag

SEQ ID NO: 905994 - DNA, 25 bp, Homo sapien
tggattccctcacccgtctcgatcc

SEQ ID NO: 905995 - DNA, 25 bp, Homo sapien
ccgcagacggtgctgaccgacgacg

SEQ ID NO: 905996 - DNA, 25 bp, Homo sapien
tgctgaccgacgacgagatcgagga

SEQ ID NO: 905997 - DNA, 25 bp, Homo sapien
gatcgaggagttcctcgagggcttc

SEQ ID NO: 905998 - DNA, 25 bp, Homo sapien
cacctgccagtctcgtaagagatgg

SEQ ID NO: 905999 - DNA, 25 bp, Homo sapien
tagagacctacacagtgaactttgg

SEQ ID NO: 906000 - DNA, 25 bp, Homo sapien
gaaggcccctggtatggacactgaa

SEQ ID NO: 906001 - DNA, 25 bp, Homo sapien
tgcaaacatgactgggacctaagag

SEQ ID NO: 906002 - DNA, 25 bp, Homo sapien
tcccatagccagagtgcccagggct

SEQ ID NO: 906003 - DNA, 25 bp, Homo sapien
gggctatggtcactgtgggcacccc

SEQ ID NO: 906004 - DNA, 25 bp, Homo sapien
gagggagaccggctggtgggtgcat

SEQ ID NO: 906005 - DNA, 25 bp, Homo sapien
gcacccctgcaggagtcccatagcc

SEQ ID NO: 906006 - DNA, 25 bp, Homo sapien
ctctctggtcaaaaccacttttttg

SEQ ID NO: 906007 - DNA, 25 bp, Homo sapien
tctctggtcaaaaccacttttttga

SEQ ID NO: 906008 - DNA, 25 bp, Homo sapien
tgggcctctctggtcaaaaccactt

SEQ ID NO: 906009 - DNA, 25 bp, Homo sapien
atctgggcctctctggtcaaaacca

SEQ ID NO: 906010 - DNA, 25 bp, Homo sapien
aaggcaggcggtctgcgtggcactg

SEQ ID NO: 906011 - DNA, 25 bp, Homo sapien
gtcagggacagtcaccaacagcact

SEQ ID NO: 906012 - DNA, 25 bp, Homo sapien
agtcagggacagtcaccaacagcac

SEQ ID NO: 906013 - DNA, 25 bp, Homo sapien
cagggacagtcaccaacagcactgt

SEQ ID NO: 906014 - DNA, 25 bp, Homo sapien
tcagggacagtcaccaacagcactg

SEQ ID NO: 906015 - DNA, 25 bp, Homo sapien
cataggacccactgtaggttccaag

SEQ ID NO: 906016 - DNA, 25 bp, Homo sapien
aataaacaggagtccccattggcac

SEQ ID NO: 906017 - DNA, 25 bp, Homo sapien
gaccagagattagccttgagaggca

SEQ ID NO: 906018 - DNA, 25 bp, Homo sapien
ggttccaagtaagtcctgcctcaaa

SEQ ID NO: 906019 - DNA, 25 bp, Homo sapien
ccacaaaagtagacatgcgggcact

SEQ ID NO: 906020 - DNA, 25 bp, Homo sapien
gccacaaaagtagacatgcgggcac

SEQ ID NO: 906021 - DNA, 25 bp, Homo sapien
ctgggaagatgaacgggtcagtttt

SEQ ID NO: 906022 - DNA, 25 bp, Homo sapien
gaagatgaacgggtcagttttgtag

SEQ ID NO: 906023 - DNA, 25 bp, Homo sapien
gatgaacgggtcagttttgtagaag

SEQ ID NO: 906024 - DNA, 25 bp, Homo sapien
ggaagatgaacgggtcagttttgta

SEQ ID NO: 906025 - DNA, 25 bp, Homo sapien
aggggcagctctgaggagggttccg

SEQ ID NO: 906026 - DNA, 25 bp, Homo sapien
gaaggggcagctctgaggagggttc

SEQ ID NO: 906027 - DNA, 25 bp, Homo sapien
ctggaggagaaggggcagctctgag

SEQ ID NO: 906028 - DNA, 25 bp, Homo sapien
gaggagaaggggcagctctgaggag

SEQ ID NO: 906029 - DNA, 25 bp, Homo sapien
tcctccatgctgctgtatcggaaaa

SEQ ID NO: 906030 - DNA, 25 bp, Homo sapien
tccatgctgctgtatcggaaaatgt

SEQ ID NO: 906031 - DNA, 25 bp, Homo sapien
atgctgctgtatcggaaaatgtcac

SEQ ID NO: 906032 - DNA, 25 bp, Homo sapien
gatcctccatgctgctgtatcggaa

SEQ ID NO: 906033 - DNA, 25 bp, Homo sapien
tgactccatcaatggtggcctggta

SEQ ID NO: 906034 - DNA, 25 bp, Homo sapien
ctgactccatcaatggtggcctggt

SEQ ID NO: 906035 - DNA, 25 bp, Homo sapien
ttggtgggatcaaactcgcctggca

SEQ ID NO: 906036 - DNA, 25 bp, Homo sapien
tgggatcaaactcgcctggcatcac

SEQ ID NO: 906037 - DNA, 25 bp, Homo sapien
gatcaaactcgcctggcatcacgtc

SEQ ID NO: 906038 - DNA, 25 bp, Homo sapien
ggtgggatcaaactcgcctggcatc

SEQ ID NO: 906039 - DNA, 25 bp, Homo sapien
tccacgctggctgcctgggttttct

SEQ ID NO: 906040 - DNA, 25 bp, Homo sapien
agcatcttaacagcctccacgctgg

SEQ ID NO: 906041 - DNA, 25 bp, Homo sapien
ggaggatctcatccagcatcttaac

SEQ ID NO: 906042 - DNA, 25 bp, Homo sapien
cagctgcaggaggatctcatccagc

SEQ ID NO: 906043 - DNA, 25 bp, Homo sapien
aagatgcagttgttgtcccatagac

SEQ ID NO: 906044 - DNA, 25 bp, Homo sapien
cccattgcaggaggccccagagtca

SEQ ID NO: 906045 - DNA, 25 bp, Homo sapien
aggcccaggcgagtcccaggctcag

SEQ ID NO: 906046 - DNA, 25 bp, Homo sapien
cctgggcatgaggagccccattgca

SEQ ID NO: 906047 - DNA, 25 bp, Homo sapien
cccgggagacgtgggcggcgctgca

SEQ ID NO: 906048 - DNA, 25 bp, Homo sapien
gaggaggttgccagcgaggataacc

SEQ ID NO: 906049 - DNA, 25 bp, Homo sapien
ccagcgaggataacccgggagacgt

SEQ ID NO: 906050 - DNA, 25 bp, Homo sapien
ttgccagcgaggataacccgggaga

SEQ ID NO: 906051 - DNA, 25 bp, Homo sapien
cactgaccatgagctggttccagct

SEQ ID NO: 906052 - DNA, 25 bp, Homo sapien
ctggttccagctcccgagaactgct

SEQ ID NO: 906053 - DNA, 25 bp, Homo sapien
catgagctggttccagctcccgaga

SEQ ID NO: 906054 - DNA, 25 bp, Homo sapien
agattccactgaccatgagctggtt

SEQ ID NO: 906055 - DNA, 25 bp, Homo sapien
tcgtctctcacggagccaaacacag

SEQ ID NO: 906056 - DNA, 25 bp, Homo sapien
cgggcttctggggagcaaggtcagc

SEQ ID NO: 906057 - DNA, 25 bp, Homo sapien
cagcaaagcaatagtcctccaccag

SEQ ID NO: 906058 - DNA, 25 bp, Homo sapien
gaaacttcccgtcgtctctcacgga

SEQ ID NO: 906059 - DNA, 25 bp, Homo sapien
aacacaccaccgctgggctcttcac

SEQ ID NO: 906060 - DNA, 25 bp, Homo sapien
tcacaccatccctaacacaccaccg

SEQ ID NO: 906061 - DNA, 25 bp, Homo sapien
atccctaacacaccaccgctgggct

SEQ ID NO: 906062 - DNA, 25 bp, Homo sapien
ccactcacaccatccctaacacacc

SEQ ID NO: 906063 - DNA, 25 bp, Homo sapien
cacatcctctcattgggctccctac

SEQ ID NO: 906064 - DNA, 25 bp, Homo sapien
tgacacgtcaatggtgccttttagt

SEQ ID NO: 906065 - DNA, 25 bp, Homo sapien
gacacgtcaatggtgccttttagtt

SEQ ID NO: 906066 - DNA, 25 bp, Homo sapien
tcccgcaggatggagggctgcagcg

SEQ ID NO: 906067 - DNA, 25 bp, Homo sapien
ctcctcgctgacctcccgcaggatg

SEQ ID NO: 906068 - DNA, 25 bp, Homo sapien
ggcatggccttgaacagagtgccca

SEQ ID NO: 906069 - DNA, 25 bp, Homo sapien
tcctcaggctgcagttcacacagct

SEQ ID NO: 906070 - DNA, 25 bp, Homo sapien
gggtacagactcagagatgaagtag

SEQ ID NO: 906071 - DNA, 25 bp, Homo sapien
gagagaacatcaagtacaaggaccc

SEQ ID NO: 906072 - DNA, 25 bp, Homo sapien
gcactccatgagaggccaatcacag

SEQ ID NO: 906073 - DNA, 25 bp, Homo sapien
ctggacttcacggtgacagtaaaaa

SEQ ID NO: 906074 - DNA, 25 bp, Homo sapien
tccacacggtgttgacggagggacc

SEQ ID NO: 906075 - DNA, 25 bp, Homo sapien
gaaatcgctatcgtccatcactggg

SEQ ID NO: 906076 - DNA, 25 bp, Homo sapien
ggatccaagtgtatgcccctgagca

SEQ ID NO: 906077 - DNA, 25 bp, Homo sapien
tgtacatgtaactcagccaacgctg

SEQ ID NO: 906078 - DNA, 25 bp, Homo sapien
gcatactgccggctaaagctgcgct

SEQ ID NO: 906079 - DNA, 25 bp, Homo sapien
cacccgggcaaaggtggcattgttg

SEQ ID NO: 906080 - DNA, 25 bp, Homo sapien
cgggtggcataaatgtgggcatact

SEQ ID NO: 906081 - DNA, 25 bp, Homo sapien
ctctcctagccggaagggttgtgag

SEQ ID NO: 906082 - DNA, 25 bp, Homo sapien
gacagtagagtgtgggccctctggg

SEQ ID NO: 906083 - DNA, 25 bp, Homo sapien
ggggacagtagagtgtgggccctct

SEQ ID NO: 906084 - DNA, 25 bp, Homo sapien
acagtagagtgtgggccctctgggc

SEQ ID NO: 906085 - DNA, 25 bp, Homo sapien
ggacagtagagtgtgggccctctgg

SEQ ID NO: 906086 - DNA, 25 bp, Homo sapien
ctgacttgcttggtccacacagctt

SEQ ID NO: 906087 - DNA, 25 bp, Homo sapien
agcttcgcccaggccaaggaggttc

SEQ ID NO: 906088 - DNA, 25 bp, Homo sapien
acacagcttcgcccaggccaaggag

SEQ ID NO: 906089 - DNA, 25 bp, Homo sapien
ggccacactcctgacttgcttggtc

SEQ ID NO: 906090 - DNA, 25 bp, Homo sapien
aaaacacaaaggcattcctgctgcc

SEQ ID NO: 906091 - DNA, 25 bp, Homo sapien
aacacaaaggcattcctgctgcccc

SEQ ID NO: 906092 - DNA, 25 bp, Homo sapien
aaacacaaaggcattcctgctgccc

SEQ ID NO: 906093 - DNA, 25 bp, Homo sapien
gaaatttatcgtgcctggataccga

SEQ ID NO: 906094 - DNA, 25 bp, Homo sapien
tgtccacttggaaatttatcgtgcc

SEQ ID NO: 906095 - DNA, 25 bp, Homo sapien
tcgtgcctggataccgatgtctcac

SEQ ID NO: 906096 - DNA, 25 bp, Homo sapien
gacattgtgtccacttggaaattta

SEQ ID NO: 906097 - DNA, 25 bp, Homo sapien
ttgccccaaatggaattcccgatct

SEQ ID NO: 906098 - DNA, 25 bp, Homo sapien
tgttccatctggacaactaccaggg

SEQ ID NO: 906099 - DNA, 25 bp, Homo sapien
gagtgtttgtcccatctggagttct

SEQ ID NO: 906100 - DNA, 25 bp, Homo sapien
taccagggtctcaatcaagttcagt

SEQ ID NO: 906101 - DNA, 25 bp, Homo sapien
aactctccccagtacttcaactgtt

SEQ ID NO: 906102 - DNA, 25 bp, Homo sapien
cccagtacttcaactgttattgttg

SEQ ID NO: 906103 - DNA, 25 bp, Homo sapien
tacaactgcaactctccccagtact

SEQ ID NO: 906104 - DNA, 25 bp, Homo sapien
tcaactgttattgttgtttacaaca

SEQ ID NO: 906105 - DNA, 25 bp, Homo sapien
taaaaaattccctagcggcttgcaa

SEQ ID NO: 906106 - DNA, 25 bp, Homo sapien
tcgaacgtgcttgatggcggcagca

SEQ ID NO: 906107 - DNA, 25 bp, Homo sapien
gctccgcacacgtgtctaacgagtg

SEQ ID NO: 906108 - DNA, 25 bp, Homo sapien
gcttgcaatctatctccacgggaca

SEQ ID NO: 906109 - DNA, 25 bp, Homo sapien
gcggcgcgccgcatcccgccaatcc

SEQ ID NO: 906110 - DNA, 25 bp, Homo sapien
atcccgccaatccccgcgcgcctgc

SEQ ID NO: 906111 - DNA, 25 bp, Homo sapien
cgcgcggcgcgccgcatcccgccaa

SEQ ID NO: 906112 - DNA, 25 bp, Homo sapien
ggcgcgccgcatcccgccaatcccc

SEQ ID NO: 906113 - DNA, 25 bp, Homo sapien
tcaagagacgcttccccactaagct

SEQ ID NO: 906114 - DNA, 25 bp, Homo sapien
atcaagagacgcttccccactaagc

SEQ ID NO: 906115 - DNA, 25 bp, Homo sapien
cccatcaagagacgcttccccacta

SEQ ID NO: 906116 - DNA, 25 bp, Homo sapien
cagagaccggtccacaaaggaggta

SEQ ID NO: 906117 - DNA, 25 bp, Homo sapien
gattcttctgctatcagactgaacg

SEQ ID NO: 906118 - DNA, 25 bp, Homo sapien
gggaaaatccagagaccggtccaca

SEQ ID NO: 906119 - DNA, 25 bp, Homo sapien
tctgctatcagactgaacgtgagtt

SEQ ID NO: 906120 - DNA, 25 bp, Homo sapien
tttgcaacagagtttattgaggtgc

SEQ ID NO: 906121 - DNA, 25 bp, Homo sapien
gcaacagagtttattgaggtgcccc

SEQ ID NO: 906122 - DNA, 25 bp, Homo sapien
attgaggtgcccccccgtgggcctg

SEQ ID NO: 906123 - DNA, 25 bp, Homo sapien
aattttgcaacagagtttattgagg

SEQ ID NO: 906124 - DNA, 25 bp, Homo sapien
ctttctcgtctccatgggtgatgat

SEQ ID NO: 906125 - DNA, 25 bp, Homo sapien
tctcgtctccatgggtgatgatgta

SEQ ID NO: 906126 - DNA, 25 bp, Homo sapien
gtagtcgatgttccccgccaggtcc

SEQ ID NO: 906127 - DNA, 25 bp, Homo sapien
tgggtgtcagggcgaacatctgctc

SEQ ID NO: 906128 - DNA, 25 bp, Homo sapien
ccatgggtgtcagggcgaacatctg

SEQ ID NO: 906129 - DNA, 25 bp, Homo sapien
ttgtagtcgatgttccccgccaggt

SEQ ID NO: 906130 - DNA, 25 bp, Homo sapien
ccgagtgtacgaaacctctccctat

SEQ ID NO: 906131 - DNA, 25 bp, Homo sapien
aagaggcaaaggacgcccctccagc

SEQ ID NO: 906132 - DNA, 25 bp, Homo sapien
cggcagagacctcacctgagtcctg

SEQ ID NO: 906133 - DNA, 25 bp, Homo sapien
tcagtgcaaatgtgggccaagaggc

SEQ ID NO: 906134 - DNA, 25 bp, Homo sapien
tccagcaactgcctcactggtactg

SEQ ID NO: 906135 - DNA, 25 bp, Homo sapien
gtactgggctctgggtcatgggtga

SEQ ID NO: 906136 - DNA, 25 bp, Homo sapien
gtcatgggtgaaggcccagagaagg

SEQ ID NO: 906137 - DNA, 25 bp, Homo sapien
atgagtattgaaggggctgggcagc

SEQ ID NO: 906138 - DNA, 25 bp, Homo sapien
agaacttgtctgcctgggtcaggag

SEQ ID NO: 906139 - DNA, 25 bp, Homo sapien
agagaacttgtctgcctgggtcagg

SEQ ID NO: 906140 - DNA, 25 bp, Homo sapien
ggagagaacttgtctgcctgggtca

SEQ ID NO: 906141 - DNA, 25 bp, Homo sapien
ctggagagaacttgtctgcctgggt

SEQ ID NO: 906142 - DNA, 25 bp, Homo sapien
aaggtgggtacggaggctcccatgg

SEQ ID NO: 906143 - DNA, 25 bp, Homo sapien
cacagggaaggtgggtacggaggct

SEQ ID NO: 906144 - DNA, 25 bp, Homo sapien
gggtacggaggctcccatggcgcag

SEQ ID NO: 906145 - DNA, 25 bp, Homo sapien
gagactgcgggggagtgactgcaca

SEQ ID NO: 906146 - DNA, 25 bp, Homo sapien
tcaaacatgcggaaggcactcagga

SEQ ID NO: 906147 - DNA, 25 bp, Homo sapien
caccacccctttgccgctggggtca

SEQ ID NO: 906148 - DNA, 25 bp, Homo sapien
ccttgttcaccacccctttgccgct

SEQ ID NO: 906149 - DNA, 25 bp, Homo sapien
cccctttgccgctggggtcaaacat

SEQ ID NO: 906150 - DNA, 25 bp, Homo sapien
tgagcttctccccaaagagcgtgag

SEQ ID NO: 906151 - DNA, 25 bp, Homo sapien
ttgagcttctccccaaagagcgtga

SEQ ID NO: 906152 - DNA, 25 bp, Homo sapien
agcttctccccaaagagcgtgagga

SEQ ID NO: 906153 - DNA, 25 bp, Homo sapien
cattgagcttctccccaaagagcgt

SEQ ID NO: 906154 - DNA, 25 bp, Homo sapien
ggtggggcatgaggtgcacacaggg

SEQ ID NO: 906155 - DNA, 25 bp, Homo sapien
gggcatgaggtgcacacagggaccc

SEQ ID NO: 906156 - DNA, 25 bp, Homo sapien
actcccacccgcccagcagctcaga

SEQ ID NO: 906157 - DNA, 25 bp, Homo sapien
aagtggaagcaaggcgtgacaaggg

SEQ ID NO: 906158 - DNA, 25 bp, Homo sapien
catcacgattctggtcgatacagct

SEQ ID NO: 906159 - DNA, 25 bp, Homo sapien
cacgattctggtcgatacagctgaa

SEQ ID NO: 906160 - DNA, 25 bp, Homo sapien
cgattctggtcgatacagctgaagg

SEQ ID NO: 906161 - DNA, 25 bp, Homo sapien
gattctggtcgatacagctgaaggc

SEQ ID NO: 906162 - DNA, 25 bp, Homo sapien
tgggatgggggccttcaggtgggag

SEQ ID NO: 906163 - DNA, 25 bp, Homo sapien
gtgggatgggggccttcaggtggga

SEQ ID NO: 906164 - DNA, 25 bp, Homo sapien
ctgtgggatgggggccttcaggtgg

SEQ ID NO: 906165 - DNA, 25 bp, Homo sapien
tgtgggatgggggccttcaggtggg

SEQ ID NO: 906166 - DNA, 25 bp, Homo sapien
tatctgggcttgttcaaacatggaa

SEQ ID NO: 906167 - DNA, 25 bp, Homo sapien
gaagaaccacgttgggcctgcttgg

SEQ ID NO: 906168 - DNA, 25 bp, Homo sapien
cgttggaagaaccacgttgggcctg

SEQ ID NO: 906169 - DNA, 25 bp, Homo sapien
cttggtggctgccaccttgccccgg

SEQ ID NO: 906170 - DNA, 25 bp, Homo sapien
ccacccatcatgcacagtcccagag

SEQ ID NO: 906171 - DNA, 25 bp, Homo sapien
ccaccccacccatcatgcacagtcc

SEQ ID NO: 906172 - DNA, 25 bp, Homo sapien
gcacctgggagaccgctagcctttc

SEQ ID NO: 906173 - DNA, 25 bp, Homo sapien
agcacctgggagaccgctagccttt

SEQ ID NO: 906174 - DNA, 25 bp, Homo sapien
ggctgctgtcgtggtggcagggccc

SEQ ID NO: 906175 - DNA, 25 bp, Homo sapien
tggctgctgtcgtggtggcagggcc

SEQ ID NO: 906176 - DNA, 25 bp, Homo sapien
gctgctgtcgtggtggcagggccca

SEQ ID NO: 906177 - DNA, 25 bp, Homo sapien
gcctgcgtgatgctgttccagagaa

SEQ ID NO: 906178 - DNA, 25 bp, Homo sapien
ggcaggcctgcgtgatgctgttcca

SEQ ID NO: 906179 - DNA, 25 bp, Homo sapien
ctggtgcacagtgggccgatgggca

SEQ ID NO: 906180 - DNA, 25 bp, Homo sapien
tccagagaagcagtctcgccagctt

SEQ ID NO: 906181 - DNA, 25 bp, Homo sapien
ctggggccgagggcacagcagaggg

SEQ ID NO: 906182 - DNA, 25 bp, Homo sapien
tggggccgagggcacagcagagggg

SEQ ID NO: 906183 - DNA, 25 bp, Homo sapien
gacaggacggtgctgagactgacct

SEQ ID NO: 906184 - DNA, 25 bp, Homo sapien
ggcaaacctaagtgactctgactgg

SEQ ID NO: 906185 - DNA, 25 bp, Homo sapien
gactctgactggacaggacggtgct

SEQ ID NO: 906186 - DNA, 25 bp, Homo sapien
aggacggtgctgagactgacctgca

SEQ ID NO: 906187 - DNA, 25 bp, Homo sapien
gctgtcccaccgaaaaactgaggga

SEQ ID NO: 906188 - DNA, 25 bp, Homo sapien
gagggtccatcccagaatcacaagc

SEQ ID NO: 906189 - DNA, 25 bp, Homo sapien
cacacaggatgagttcccagggaag

SEQ ID NO: 906190 - DNA, 25 bp, Homo sapien
gctctgttccccagcggtatggcag

SEQ ID NO: 906191 - DNA, 25 bp, Homo sapien
tggcccagcatacaggccttcttac

SEQ ID NO: 906192 - DNA, 25 bp, Homo sapien
acgctggcatggaaccgctccttga

SEQ ID NO: 906193 - DNA, 25 bp, Homo sapien
agctgggcgtcagcctgcgcacgct

SEQ ID NO: 906194 - DNA, 25 bp, Homo sapien
aaggtgatctcgcagctgggcgtca

SEQ ID NO: 906195 - DNA, 25 bp, Homo sapien
tgccctcctccgactcgatgaaggt

SEQ ID NO: 906196 - DNA, 25 bp, Homo sapien
cacagtgatgcgcattacgtcctcg

SEQ ID NO: 906197 - DNA, 25 bp, Homo sapien
agcacatgtgcgcagcgcgcgtaga

SEQ ID NO: 906198 - DNA, 25 bp, Homo sapien
gatctgcttgcggtcgcccgtgtcg

SEQ ID NO: 906199 - DNA, 25 bp, Homo sapien
cccagcgtgctcaggatgttgtaga

SEQ ID NO: 906200 - DNA, 25 bp, Homo sapien
tccagcggcggcctctcgttctcca

SEQ ID NO: 906201 - DNA, 25 bp, Homo sapien
gctgagtgtcgctccgacagtccat

SEQ ID NO: 906202 - DNA, 25 bp, Homo sapien
cgggaggaggtagggcggtcgctga

SEQ ID NO: 906203 - DNA, 25 bp, Homo sapien
gctgagccgggacccctctctggag

SEQ ID NO: 906204 - DNA, 25 bp, Homo sapien
gccagggactggttagtactgcccc

SEQ ID NO: 906205 - DNA, 25 bp, Homo sapien
ggtgtcaaccatgccgcgccttggg

SEQ ID NO: 906206 - DNA, 25 bp, Homo sapien
ccagccaaagcgtttccgccaggga

SEQ ID NO: 906207 - DNA, 25 bp, Homo sapien
tctccgtcctaacgtgggggtgtca

SEQ ID NO: 906208 - DNA, 25 bp, Homo sapien
tggggaccagtgcccggacgcaggc

SEQ ID NO: 906209 - DNA, 25 bp, Homo sapien
agtgcccggacgcaggctcgctccc

SEQ ID NO: 906210 - DNA, 25 bp, Homo sapien
cagtgcccggacgcaggctcgctcc

SEQ ID NO: 906211 - DNA, 25 bp, Homo sapien
ttttcgtccacgagcctgagcagca

SEQ ID NO: 906212 - DNA, 25 bp, Homo sapien
ctccccgtggaagagcaggttttcg

SEQ ID NO: 906213 - DNA, 25 bp, Homo sapien
gtctcgaaggctccgcgtgtgcgca

SEQ ID NO: 906214 - DNA, 25 bp, Homo sapien
ctgcgacacgaagcgcgtctcgaag

SEQ ID NO: 906215 - DNA, 25 bp, Homo sapien
gatggagcttacgaacggattgtca

SEQ ID NO: 906216 - DNA, 25 bp, Homo sapien
tgggcttatcacatcacaactggga

SEQ ID NO: 906217 - DNA, 25 bp, Homo sapien
tataataatagaggcctgcgagcgg

SEQ ID NO: 906218 - DNA, 25 bp, Homo sapien
tgcacgatcacctgtcggaaggaaa

SEQ ID NO: 906219 - DNA, 25 bp, Homo sapien
aggaactcgtccagctcgccggagt

SEQ ID NO: 906220 - DNA, 25 bp, Homo sapien
ggtattgacgcacatgcggccctcg

SEQ ID NO: 906221 - DNA, 25 bp, Homo sapien
gtttgcagagctctcgtccaccagg

SEQ ID NO: 906222 - DNA, 25 bp, Homo sapien
caccaggcggtcatactccagcagg

SEQ ID NO: 906223 - DNA, 25 bp, Homo sapien
tcggggggactgtcagcgagagctg

SEQ ID NO: 906224 - DNA, 25 bp, Homo sapien
ggaggtcggggggactgtcagcgag

SEQ ID NO: 906225 - DNA, 25 bp, Homo sapien
cggggggactgtcagcgagagctgc

SEQ ID NO: 906226 - DNA, 25 bp, Homo sapien
ggtcggggggactgtcagcgagagc

SEQ ID NO: 906227 - DNA, 25 bp, Homo sapien
gatcatgccgacctcgcactgatgg

SEQ ID NO: 906228 - DNA, 25 bp, Homo sapien
tgatggtcttcgtagtagcaggaga

SEQ ID NO: 906229 - DNA, 25 bp, Homo sapien
agcaggagatcatcgtggccaccgt

SEQ ID NO: 906230 - DNA, 25 bp, Homo sapien
gtggccaccgtgtcattcaccattg

SEQ ID NO: 906231 - DNA, 25 bp, Homo sapien
tgccaagaagcacagaagctgcagt

SEQ ID NO: 906232 - DNA, 25 bp, Homo sapien
gccaagaagcacagaagctgcagtg

SEQ ID NO: 906233 - DNA, 25 bp, Homo sapien
agaagccccacgacattgttccctt

SEQ ID NO: 906234 - DNA, 25 bp, Homo sapien
cctctccgtttgatagcgtctcgca

SEQ ID NO: 906235 - DNA, 25 bp, Homo sapien
ttgatagcgtctcgcagaagcccca

SEQ ID NO: 906236 - DNA, 25 bp, Homo sapien
tcgcagaagccccacgacattgttc

SEQ ID NO: 906237 - DNA, 25 bp, Homo sapien
gagagataggcctcgtggctgctaa

SEQ ID NO: 906238 - DNA, 25 bp, Homo sapien
gggtgctagggcctgtcactacctc

SEQ ID NO: 906239 - DNA, 25 bp, Homo sapien
gcctcgtggctgctaacatatactg

SEQ ID NO: 906240 - DNA, 25 bp, Homo sapien
taacatatactggaggcagggtgct

SEQ ID NO: 906241 - DNA, 25 bp, Homo sapien
cgatgtcttcgtgcctcacaggaaa

SEQ ID NO: 906242 - DNA, 25 bp, Homo sapien
cttatcgatgtcttcgtgcctcaca

SEQ ID NO: 906243 - DNA, 25 bp, Homo sapien
tcgatgtcttcgtgcctcacaggaa

SEQ ID NO: 906244 - DNA, 25 bp, Homo sapien
tatcgatgtcttcgtgcctcacagg

SEQ ID NO: 906245 - DNA, 25 bp, Homo sapien
ggaagatgcacgccatggtgaccat

SEQ ID NO: 906246 - DNA, 25 bp, Homo sapien
ctggaagatgcacgccatggtgacc

SEQ ID NO: 906247 - DNA, 25 bp, Homo sapien
tggaagatgcacgccatggtgacca

SEQ ID NO: 906248 - DNA, 25 bp, Homo sapien
catctcagcagtgccggtcatggcg

SEQ ID NO: 906249 - DNA, 25 bp, Homo sapien
catctggtgtttggtcttcacgctc

SEQ ID NO: 906250 - DNA, 25 bp, Homo sapien
cagcatcaccctgaagttagtgcca

SEQ ID NO: 906251 - DNA, 25 bp, Homo sapien
tcctcggggatggagtacatctggt

SEQ ID NO: 906252 - DNA, 25 bp, Homo sapien
acactggcctcttcatgggtctcca

SEQ ID NO: 906253 - DNA, 25 bp, Homo sapien
ggaactctgccaggatctgctctac

SEQ ID NO: 906254 - DNA, 25 bp, Homo sapien
gggtggagcgcacgtaggtgggcag

SEQ ID NO: 906255 - DNA, 25 bp, Homo sapien
ggtgggcagcatcttcacactggcc

SEQ ID NO: 906256 - DNA, 25 bp, Homo sapien
ctgaagccatctgtggcatgggcac

SEQ ID NO: 906257 - DNA, 25 bp, Homo sapien
gaacaaagagggtccctatgcactg

SEQ ID NO: 906258 - DNA, 25 bp, Homo sapien
ccatctgtggcatgggcacactggg

SEQ ID NO: 906259 - DNA, 25 bp, Homo sapien
gagggtccctatgcactgatgtgag

SEQ ID NO: 906260 - DNA, 25 bp, Homo sapien
aggccgtgagtgcagatgtgactct

SEQ ID NO: 906261 - DNA, 25 bp, Homo sapien
ggcagtgtgaggacaggccgtgagt

SEQ ID NO: 906262 - DNA, 25 bp, Homo sapien
ccacatggcagtgtgaggacaggcc

SEQ ID NO: 906263 - DNA, 25 bp, Homo sapien
gacaggccgtgagtgcagatgtgac

SEQ ID NO: 906264 - DNA, 25 bp, Homo sapien
tgaaggagacgtataggcataagtg

SEQ ID NO: 906265 - DNA, 25 bp, Homo sapien
gcctttcccgtgaaggagacgtata

SEQ ID NO: 906266 - DNA, 25 bp, Homo sapien
agtgaaaacgtgagatgggacctga

SEQ ID NO: 906267 - DNA, 25 bp, Homo sapien
aggcataagtgaaaacgtgagatgg

SEQ ID NO: 906268 - DNA, 25 bp, Homo sapien
gatgggagcaggggacctgcactga

SEQ ID NO: 906269 - DNA, 25 bp, Homo sapien
agatgggagcaggggacctgcactg

SEQ ID NO: 906270 - DNA, 25 bp, Homo sapien
atgggagcaggggacctgcactgag

SEQ ID NO: 906271 - DNA, 25 bp, Homo sapien
tgggagcaggggacctgcactgagg

SEQ ID NO: 906272 - DNA, 25 bp, Homo sapien
gggagttgggatcttggtctgggca

SEQ ID NO: 906273 - DNA, 25 bp, Homo sapien
ggttgtgggagttgggatcttggtc

SEQ ID NO: 906274 - DNA, 25 bp, Homo sapien
ttgggttgtgggagttgggatcttg

SEQ ID NO: 906275 - DNA, 25 bp, Homo sapien
tgtgggagttgggatcttggtctgg

SEQ ID NO: 906276 - DNA, 25 bp, Homo sapien
caaggggcgatttgttccaagtagc

SEQ ID NO: 906277 - DNA, 25 bp, Homo sapien
tccaagtagcagttggccatgtgag

SEQ ID NO: 906278 - DNA, 25 bp, Homo sapien
tctgccagccaaggggcgatttgtt

SEQ ID NO: 906279 - DNA, 25 bp, Homo sapien
ttggccatgtgaggcccgagttcag

SEQ ID NO: 906280 - DNA, 25 bp, Homo sapien
agtcaaggctgtctgggcctggctc

SEQ ID NO: 906281 - DNA, 25 bp, Homo sapien
ggctccttgtgacatccatcgccat

SEQ ID NO: 906282 - DNA, 25 bp, Homo sapien
cagagtcaaggctgtctgggcctgg

SEQ ID NO: 906283 - DNA, 25 bp, Homo sapien
tgggcctggctccttgtgacatcca

SEQ ID NO: 906284 - DNA, 25 bp, Homo sapien
cctgtggcagcaacggctgcttgga

SEQ ID NO: 906285 - DNA, 25 bp, Homo sapien
tgctgtagccttggagcgtaaggcc

SEQ ID NO: 906286 - DNA, 25 bp, Homo sapien
ctctccgaggggctaagaggtagat

SEQ ID NO: 906287 - DNA, 25 bp, Homo sapien
gccttggagcgtaaggcccgcctgt

SEQ ID NO: 906288 - DNA, 25 bp, Homo sapien
caggtctggacttgctcttggaggc

SEQ ID NO: 906289 - DNA, 25 bp, Homo sapien
cccgcgctggtgcaggtctggactt

SEQ ID NO: 906290 - DNA, 25 bp, Homo sapien
tgcaggtctggacttgctcttggag

SEQ ID NO: 906291 - DNA, 25 bp, Homo sapien
tggcccgcgctggtgcaggtctgga

SEQ ID NO: 906292 - DNA, 25 bp, Homo sapien
tgcagagaggttcgatttgcatttc

SEQ ID NO: 906293 - DNA, 25 bp, Homo sapien
tcgatttgcatttcatacaatccag

SEQ ID NO: 906294 - DNA, 25 bp, Homo sapien
ctgcagagaggttcgatttgcattt

SEQ ID NO: 906295 - DNA, 25 bp, Homo sapien
gcatttcatacaatccaggggtctg

SEQ ID NO: 906296 - DNA, 25 bp, Homo sapien
cttgtcctgtctcagtgcctcttct

SEQ ID NO: 906297 - DNA, 25 bp, Homo sapien
tcaggataaggggtgacaccaacag

SEQ ID NO: 906298 - DNA, 25 bp, Homo sapien
gtctgtactgcactggagttgagag

SEQ ID NO: 906299 - DNA, 25 bp, Homo sapien
gtgacaccaacagtctgtactgcac

SEQ ID NO: 906300 - DNA, 25 bp, Homo sapien
ttccaggaattttggaagggcaaga

SEQ ID NO: 906301 - DNA, 25 bp, Homo sapien
gcaggaacagttcctgctttccagg

SEQ ID NO: 906302 - DNA, 25 bp, Homo sapien
tgtagcaggaacagttcctgctttc

SEQ ID NO: 906303 - DNA, 25 bp, Homo sapien
ttggaagggcaagactgtccagaac

SEQ ID NO: 906304 - DNA, 25 bp, Homo sapien
agctgtgagggggctaaaggaggaa

SEQ ID NO: 906305 - DNA, 25 bp, Homo sapien
catggcagtatgggggggcatctct

SEQ ID NO: 906306 - DNA, 25 bp, Homo sapien
tgtgggtaagcatgatggagtgcac

SEQ ID NO: 906307 - DNA, 25 bp, Homo sapien
tgccagggatgtgggtaagcatgat

SEQ ID NO: 906308 - DNA, 25 bp, Homo sapien
tgctggggcccaggacaattcctgc

SEQ ID NO: 906309 - DNA, 25 bp, Homo sapien
cacttctgagcctgctccttcaatg

SEQ ID NO: 906310 - DNA, 25 bp, Homo sapien
ctgctccttcaatggggcaaaggtg

SEQ ID NO: 906311 - DNA, 25 bp, Homo sapien
ttattccatcctcattccacttctg

SEQ ID NO: 906312 - DNA, 25 bp, Homo sapien
tattccatcctcattccacttctga

SEQ ID NO: 906313 - DNA, 25 bp, Homo sapien
cctccatcctggctctgtcgtccag

SEQ ID NO: 906314 - DNA, 25 bp, Homo sapien
ccatcctggctctgtcgtccagcat

SEQ ID NO: 906315 - DNA, 25 bp, Homo sapien
tcttggcggcctccatcctggctct

SEQ ID NO: 906316 - DNA, 25 bp, Homo sapien
ttcttggcggcctccatcctggctc

SEQ ID NO: 906317 - DNA, 25 bp, Homo sapien
ttccccagtaggcttctgaagtgga

SEQ ID NO: 906318 - DNA, 25 bp, Homo sapien
tatccaaggcttctccgccgcaggg

SEQ ID NO: 906319 - DNA, 25 bp, Homo sapien
tcagccttccccagtaggcttctga

SEQ ID NO: 906320 - DNA, 25 bp, Homo sapien
tggaaatatccaaggcttctccgcc

SEQ ID NO: 906321 - DNA, 25 bp, Homo sapien
tcattgttctccaacgagtcggcaa

SEQ ID NO: 906322 - DNA, 25 bp, Homo sapien
gagtcggcaagcattcccttctgga

SEQ ID NO: 906323 - DNA, 25 bp, Homo sapien
ctctcctggttgtgttgagctgtgg

SEQ ID NO: 906324 - DNA, 25 bp, Homo sapien
ggtgactgtgtctctcacatcctag

SEQ ID NO: 906325 - DNA, 25 bp, Homo sapien
cacctcacatcctcgcctttcttct

SEQ ID NO: 906326 - DNA, 25 bp, Homo sapien
gcgtgcaccgccattatgagggcac

SEQ ID NO: 906327 - DNA, 25 bp, Homo sapien
acacctcacatcctcgcctttcttc

SEQ ID NO: 906328 - DNA, 25 bp, Homo sapien
gctttgctctgattggatggcctac

SEQ ID NO: 906329 - DNA, 25 bp, Homo sapien
tgattggctgaagcttgcatcaggt

SEQ ID NO: 906330 - DNA, 25 bp, Homo sapien
tgcatcaggtgcctatccaaagacc

SEQ ID NO: 906331 - DNA, 25 bp, Homo sapien
ttaagagtcgaagaaagtcctgggc

SEQ ID NO: 906332 - DNA, 25 bp, Homo sapien
cttgtgttcttggccttcctctgca

SEQ ID NO: 906333 - DNA, 25 bp, Homo sapien
gtgttcttggccttcctctgcatcc

SEQ ID NO: 906334 - DNA, 25 bp, Homo sapien
tcctctgcatccttctttctgctct

SEQ ID NO: 906335 - DNA, 25 bp, Homo sapien
ctctgcatccttctttctgctctca

SEQ ID NO: 906336 - DNA, 25 bp, Homo sapien
ccctgagaacgggtcccgcagctgg

SEQ ID NO: 906337 - DNA, 25 bp, Homo sapien
tccggaagtggattgcgagccagga

SEQ ID NO: 906338 - DNA, 25 bp, Homo sapien
gtggtgctgctcaaagccgcatacg

SEQ ID NO: 906339 - DNA, 25 bp, Homo sapien
caaagccgcatacgatgtgtcttcc

SEQ ID NO: 906340 - DNA, 25 bp, Homo sapien
ttggtgtccaaatccgaggtgctgg

SEQ ID NO: 906341 - DNA, 25 bp, Homo sapien
cttggtgtccaaatccgaggtgctg

SEQ ID NO: 906342 - DNA, 25 bp, Homo sapien
ggtgtccaaatccgaggtgctggga

SEQ ID NO: 906343 - DNA, 25 bp, Homo sapien
acttggtgtccaaatccgaggtgct

SEQ ID NO: 906344 - DNA, 25 bp, Homo sapien
ggctctttttcagctaaccctggga

SEQ ID NO: 906345 - DNA, 25 bp, Homo sapien
agacagccatagacgaggagccaga

SEQ ID NO: 906346 - DNA, 25 bp, Homo sapien
cagcaagtagactaggaactgagcc

SEQ ID NO: 906347 - DNA, 25 bp, Homo sapien
gaggcccaatgctggaatggcacca

SEQ ID NO: 906348 - DNA, 25 bp, Homo sapien
gagcccggcagatgtttaccctgtg

SEQ ID NO: 906349 - DNA, 25 bp, Homo sapien
gacggaagatggtgtccactctgag

SEQ ID NO: 906350 - DNA, 25 bp, Homo sapien
caaattatcccagacaggcagctcc

SEQ ID NO: 906351 - DNA, 25 bp, Homo sapien
cctagctagcagaccggtgtggctt

SEQ ID NO: 906352 - DNA, 25 bp, Homo sapien
cgaggcccgcagtcctttgtcaaaa

SEQ ID NO: 906353 - DNA, 25 bp, Homo sapien
aactctcaggcacaactagcgggaa

SEQ ID NO: 906354 - DNA, 25 bp, Homo sapien
gacgaatatgcccagacacaaagcc

SEQ ID NO: 906355 - DNA, 25 bp, Homo sapien
ggcgagaggcccaaaactaagctgt

SEQ ID NO: 906356 - DNA, 25 bp, Homo sapien
caaactaacaccgttcagcacgcga

SEQ ID NO: 906357 - DNA, 25 bp, Homo sapien
cagacacaaacatgcgacaggcagg

SEQ ID NO: 906358 - DNA, 25 bp, Homo sapien
ggagtggccccacgaatgccagtga

SEQ ID NO: 906359 - DNA, 25 bp, Homo sapien
ttgtttttctgcagacacaggcacc

SEQ ID NO: 906360 - DNA, 25 bp, Homo sapien
taacagtcctcacaaacagggcatg

SEQ ID NO: 906361 - DNA, 25 bp, Homo sapien
gagagaggttcaaggtgcccaaccc

SEQ ID NO: 906362 - DNA, 25 bp, Homo sapien
tctggccagtgtggactgctcaggc

SEQ ID NO: 906363 - DNA, 25 bp, Homo sapien
tatccctgtaaaactgggctctggg

SEQ ID NO: 906364 - DNA, 25 bp, Homo sapien
gatgtaagcgatgcaggcggcatcc

SEQ ID NO: 906365 - DNA, 25 bp, Homo sapien
caatgtactgcgtgagccggatgta

SEQ ID NO: 906366 - DNA, 25 bp, Homo sapien
tcctctccaatgacgtgcacgtgtg

SEQ ID NO: 906367 - DNA, 25 bp, Homo sapien
gcagtggaagtgcacgttctgccac

SEQ ID NO: 906368 - DNA, 25 bp, Homo sapien
caccagcctaatcctttccctctct

SEQ ID NO: 906369 - DNA, 25 bp, Homo sapien
ggacagggcttccataggcagccac

SEQ ID NO: 906370 - DNA, 25 bp, Homo sapien
catgggcccctccaagagtgggatt

SEQ ID NO: 906371 - DNA, 25 bp, Homo sapien
gtctcgggttaccatgactgccctg

SEQ ID NO: 906372 - DNA, 25 bp, Homo sapien
gtgcttcaggctcaaacgaggtcag

SEQ ID NO: 906373 - DNA, 25 bp, Homo sapien
ccatcccttcaaccaggttgcccag

SEQ ID NO: 906374 - DNA, 25 bp, Homo sapien
ttcaggctcaaacgaggtcagccct

SEQ ID NO: 906375 - DNA, 25 bp, Homo sapien
aggctcaaacgaggtcagccctggg

SEQ ID NO: 906376 - DNA, 25 bp, Homo sapien
gtggacccctgactctgagcaggcc

SEQ ID NO: 906377 - DNA, 25 bp, Homo sapien
ctgggggccaaatccaagtgaggag

SEQ ID NO: 906378 - DNA, 25 bp, Homo sapien
cccaagggtcccacatccttgtcct

SEQ ID NO: 906379 - DNA, 25 bp, Homo sapien
gggccccgtggacccctgactctga

SEQ ID NO: 906380 - DNA, 25 bp, Homo sapien
tgctccgtggtcttaatgatctcct

SEQ ID NO: 906381 - DNA, 25 bp, Homo sapien
cgtaggcctcaaagtcaccgttgtt

SEQ ID NO: 906382 - DNA, 25 bp, Homo sapien
gcgtaggcctcaaagtcaccgttgt

SEQ ID NO: 906383 - DNA, 25 bp, Homo sapien
gttgacggcctcgatgagctgctcc

SEQ ID NO: 906384 - DNA, 25 bp, Homo sapien
tgccgtgttcctgccgctatttgca

SEQ ID NO: 906385 - DNA, 25 bp, Homo sapien
ggcttcctcattttcaagtgcaaca

SEQ ID NO: 906386 - DNA, 25 bp, Homo sapien
gctatttgcagaagaggtcctctcc

SEQ ID NO: 906387 - DNA, 25 bp, Homo sapien
gcgcgagctgcatccatgccgtgtt

SEQ ID NO: 906388 - DNA, 25 bp, Homo sapien
cagcaggaagaacgagcgtggtctc

SEQ ID NO: 906389 - DNA, 25 bp, Homo sapien
ctcagagaaggagccgtcagcaagg

SEQ ID NO: 906390 - DNA, 25 bp, Homo sapien
tcataggagccgcatccggctggct

SEQ ID NO: 906391 - DNA, 25 bp, Homo sapien
gttccccggagcgatgaccagggct

SEQ ID NO: 906392 - DNA, 25 bp, Homo sapien
agacatccctgttgccccgcacccc

SEQ ID NO: 906393 - DNA, 25 bp, Homo sapien
tgaacaggagcctttgcattgcctg

SEQ ID NO: 906394 - DNA, 25 bp, Homo sapien
taatccgcgattagagagcgtgggt

SEQ ID NO: 906395 - DNA, 25 bp, Homo sapien
tctcttggggtgaggcaacaggtcc

SEQ ID NO: 906396 - DNA, 25 bp, Homo sapien
gatcaggctggattgtgtataatcc

SEQ ID NO: 906397 - DNA, 25 bp, Homo sapien
cccagggcagtacccagactcttcc

SEQ ID NO: 906398 - DNA, 25 bp, Homo sapien
tttccctgagttccggaacatctca

SEQ ID NO: 906399 - DNA, 25 bp, Homo sapien
ccaggagggccacacgaatctccat

SEQ ID NO: 906400 - DNA, 25 bp, Homo sapien
gagggccacacgaatctccatcctg

SEQ ID NO: 906401 - DNA, 25 bp, Homo sapien
tcctcgagccgctgctcctgtgggt

SEQ ID NO: 906402 - DNA, 25 bp, Homo sapien
ccctcctcgagccgctgctcctgtg

SEQ ID NO: 906403 - DNA, 25 bp, Homo sapien
cctcctcgagccgctgctcctgtgg

SEQ ID NO: 906404 - DNA, 25 bp, Homo sapien
ctcctcgagccgctgctcctgtggg

SEQ ID NO: 906405 - DNA, 25 bp, Homo sapien
ctgccctgccatgccgagcccgtgg

SEQ ID NO: 906406 - DNA, 25 bp, Homo sapien
ctagccactgccctgccatgccgag

SEQ ID NO: 906407 - DNA, 25 bp, Homo sapien
ccactgccctgccatgccgagcccg

SEQ ID NO: 906408 - DNA, 25 bp, Homo sapien
cctgccatgccgagcccgtggccca

SEQ ID NO: 906409 - DNA, 25 bp, Homo sapien
ccacccccagtctggtgtctcccca

SEQ ID NO: 906410 - DNA, 25 bp, Homo sapien
agtctggtgtctccccacaggtggg

SEQ ID NO: 906411 - DNA, 25 bp, Homo sapien
ccagtctggtgtctccccacaggtg

SEQ ID NO: 906412 - DNA, 25 bp, Homo sapien
ccccagtctggtgtctccccacagg

SEQ ID NO: 906413 - DNA, 25 bp, Homo sapien
ggccagggatagtcggagatgggca

SEQ ID NO: 906414 - DNA, 25 bp, Homo sapien
gggatagtcggagatgggcagggcg

SEQ ID NO: 906415 - DNA, 25 bp, Homo sapien
gatagtcggagatgggcagggcggg

SEQ ID NO: 906416 - DNA, 25 bp, Homo sapien
cagggggccagggatagtcggagat

SEQ ID NO: 906417 - DNA, 25 bp, Homo sapien
acagcgtggtgcgtggagaggaggc

SEQ ID NO: 906418 - DNA, 25 bp, Homo sapien
ctgcggacagcgtggtgcgtggaga

SEQ ID NO: 906419 - DNA, 25 bp, Homo sapien
gagggtgctgctgcggacagcgtgg

SEQ ID NO: 906420 - DNA, 25 bp, Homo sapien
ggcagatgctctggctgtcgggtgg

SEQ ID NO: 906421 - DNA, 25 bp, Homo sapien
gcctaggagagccggagacaggcag

SEQ ID NO: 906422 - DNA, 25 bp, Homo sapien
ggcctaggagagccggagacaggca

SEQ ID NO: 906423 - DNA, 25 bp, Homo sapien
gggcctaggagagccggagacaggc

SEQ ID NO: 906424 - DNA, 25 bp, Homo sapien
ggggcctaggagagccggagacagg

SEQ ID NO: 906425 - DNA, 25 bp, Homo sapien
tgaagactggaattgaggcccgagc

SEQ ID NO: 906426 - DNA, 25 bp, Homo sapien
tgcccagtggccttgagcaggaaag

SEQ ID NO: 906427 - DNA, 25 bp, Homo sapien
gaatcagagcctgcctcaatagcag

SEQ ID NO: 906428 - DNA, 25 bp, Homo sapien
gacgtgaacatgaggcagacagaca

SEQ ID NO: 906429 - DNA, 25 bp, Homo sapien
ctgagctcaggatgtcggggaccct

SEQ ID NO: 906430 - DNA, 25 bp, Homo sapien
cttctggggctcccgagcccctcct

SEQ ID NO: 906431 - DNA, 25 bp, Homo sapien
gggctaaagggagccggagatgggc

SEQ ID NO: 906432 - DNA, 25 bp, Homo sapien
cctcctcactgagctcaggatgtcg

SEQ ID NO: 906433 - DNA, 25 bp, Homo sapien
caaggctatgctttggacaggtgag

SEQ ID NO: 906434 - DNA, 25 bp, Homo sapien
tgatggagaacctctggacagcctt

SEQ ID NO: 906435 - DNA, 25 bp, Homo sapien
gctggcaaggcttctttctgcacgg

SEQ ID NO: 906436 - DNA, 25 bp, Homo sapien
gcagagtggctgaccctttttgggc

SEQ ID NO: 906437 - DNA, 25 bp, Homo sapien
cctctatggtggtattggcactgtc

SEQ ID NO: 906438 - DNA, 25 bp, Homo sapien
catcctctatggtggtattggcact

SEQ ID NO: 906439 - DNA, 25 bp, Homo sapien
cttcatcctctatggtggtattggc

SEQ ID NO: 906440 - DNA, 25 bp, Homo sapien
tctatggtggtattggcactgtcag

SEQ ID NO: 906441 - DNA, 25 bp, Homo sapien
gaggaaacacgggaggcagcgggtc

SEQ ID NO: 906442 - DNA, 25 bp, Homo sapien
aggcagcgggtcaggatgcggccaa

SEQ ID NO: 906443 - DNA, 25 bp, Homo sapien
aacacgggaggcagcgggtcaggat

SEQ ID NO: 906444 - DNA, 25 bp, Homo sapien
tcaggatgcggccaaggataggtgg

SEQ ID NO: 906445 - DNA, 25 bp, Homo sapien
gctggttccaatgaagcagcagccg

SEQ ID NO: 906446 - DNA, 25 bp, Homo sapien
tggcagagagactggtatgctcagc

SEQ ID NO: 906447 - DNA, 25 bp, Homo sapien
gcagcagccggtgtcatccaaaata

SEQ ID NO: 906448 - DNA, 25 bp, Homo sapien
aatacagggtgaggcgttcccagga

SEQ ID NO: 906449 - DNA, 25 bp, Homo sapien
agtctgtcctgttgttgcccacgaa

SEQ ID NO: 906450 - DNA, 25 bp, Homo sapien
ggacacgcagagccctggtctgaga

SEQ ID NO: 906451 - DNA, 25 bp, Homo sapien
gggaccgggcgcaactgtgccaagc

SEQ ID NO: 906452 - DNA, 25 bp, Homo sapien
tgcctgccgtaggtgggacacgcag

SEQ ID NO: 906453 - DNA, 25 bp, Homo sapien
tatggatgacggtggtttgaggctc

SEQ ID NO: 906454 - DNA, 25 bp, Homo sapien
ggttatggatgacggtggtttgagg

SEQ ID NO: 906455 - DNA, 25 bp, Homo sapien
taatcccgtccactgggttatggat

SEQ ID NO: 906456 - DNA, 25 bp, Homo sapien
cttaatcccgtccactgggttatgg

SEQ ID NO: 906457 - DNA, 25 bp, Homo sapien
gctgtcagacaggccaggcggggcc

SEQ ID NO: 906458 - DNA, 25 bp, Homo sapien
ctgtcagacaggccaggcggggcca

SEQ ID NO: 906459 - DNA, 25 bp, Homo sapien
cagcggcaatcacacagccaggggc

SEQ ID NO: 906460 - DNA, 25 bp, Homo sapien
aggcagaatttgaggagctcagtac

SEQ ID NO: 906461 - DNA, 25 bp, Homo sapien
ggctgagaggcagaatttgaggagc

SEQ ID NO: 906462 - DNA, 25 bp, Homo sapien
caatcacacagccaggggcgtagga

SEQ ID NO: 906463 - DNA, 25 bp, Homo sapien
ctgtttttggtgctattcgtctggg

SEQ ID NO: 906464 - DNA, 25 bp, Homo sapien
tggtggcggctgcactgtttttggt

SEQ ID NO: 906465 - DNA, 25 bp, Homo sapien
gctgcactgtttttggtgctattcg

SEQ ID NO: 906466 - DNA, 25 bp, Homo sapien
gcaggaggaagcgtccctttggggc

SEQ ID NO: 906467 - DNA, 25 bp, Homo sapien
tcactcgccattccctgtcccgtgt

SEQ ID NO: 906468 - DNA, 25 bp, Homo sapien
tgggagaagcccctcactcgccatt

SEQ ID NO: 906469 - DNA, 25 bp, Homo sapien
ggaagaggaactcttaggtgggaga

SEQ ID NO: 906470 - DNA, 25 bp, Homo sapien
ttaggtgggagaagcccctcactcg

SEQ ID NO: 906471 - DNA, 25 bp, Homo sapien
atctgctttcttgttgagtaaactc

SEQ ID NO: 906472 - DNA, 25 bp, Homo sapien
gctttcttgttgagtaaactcttgg

SEQ ID NO: 906473 - DNA, 25 bp, Homo sapien
tgactccatctgctttcttgttgag

SEQ ID NO: 906474 - DNA, 25 bp, Homo sapien
tctgctttcttgttgagtaaactct

SEQ ID NO: 906475 - DNA, 25 bp, Homo sapien
aggaagaaggtatggtgagtgatgg

SEQ ID NO: 906476 - DNA, 25 bp, Homo sapien
ggaagaaggtatggtgagtgatggg

SEQ ID NO: 906477 - DNA, 25 bp, Homo sapien
gccatgcggccagccggtacagcag

SEQ ID NO: 906478 - DNA, 25 bp, Homo sapien
ggccatgcggccagccggtacagca

SEQ ID NO: 906479 - DNA, 25 bp, Homo sapien
tcctggaccacgctcaccaaaaaga

SEQ ID NO: 906480 - DNA, 25 bp, Homo sapien
gaccacgctcaccaaaaagagccag

SEQ ID NO: 906481 - DNA, 25 bp, Homo sapien
gccaacccagcggtacttccagcca

SEQ ID NO: 906482 - DNA, 25 bp, Homo sapien
cagccaggctctgcattggaaccgg

SEQ ID NO: 906483 - DNA, 25 bp, Homo sapien
tctgcattggaaccggggccagcat

SEQ ID NO: 906484 - DNA, 25 bp, Homo sapien
gggacagtcaggcacgtagcctccg

SEQ ID NO: 906485 - DNA, 25 bp, Homo sapien
tccccgggcatgtcctcagaagatt

SEQ ID NO: 906486 - DNA, 25 bp, Homo sapien
agcagaactgagctctttccccggg

SEQ ID NO: 906487 - DNA, 25 bp, Homo sapien
gaactgagctctttccccgggcatg

SEQ ID NO: 906488 - DNA, 25 bp, Homo sapien
agcagcagaactgagctctttcccc

SEQ ID NO: 906489 - DNA, 25 bp, Homo sapien
gctgcctccctgcccttgtggtggg

SEQ ID NO: 906490 - DNA, 25 bp, Homo sapien
ccctgcccttgtggtgggctctgct

SEQ ID NO: 906491 - DNA, 25 bp, Homo sapien
gggctgcctccctgcccttgtggtg

SEQ ID NO: 906492 - DNA, 25 bp, Homo sapien
tgcctccctgcccttgtggtgggct

SEQ ID NO: 906493 - DNA, 25 bp, Homo sapien
cggccagcggctgcgtgcagcaggg

SEQ ID NO: 906494 - DNA, 25 bp, Homo sapien
ctcccgggggcctggcggcctctgg

SEQ ID NO: 906495 - DNA, 25 bp, Homo sapien
cccggccagcggctgcgtgcagcag

SEQ ID NO: 906496 - DNA, 25 bp, Homo sapien
tggagcccggccagcggctgcgtgc

SEQ ID NO: 906497 - DNA, 25 bp, Homo sapien
atggtggtgccggaggccgcggtgg

SEQ ID NO: 906498 - DNA, 25 bp, Homo sapien
cggaggccgcggtggacattgtggc

SEQ ID NO: 906499 - DNA, 25 bp, Homo sapien
tggccggagcggtggtctgtctgcc

SEQ ID NO: 906500 - DNA, 25 bp, Homo sapien
acattgtggccggagcggtggtctg

SEQ ID NO: 906501 - DNA, 25 bp, Homo sapien
agaaattccgtgtggccagcatggt

SEQ ID NO: 906502 - DNA, 25 bp, Homo sapien
gccagcatggtggtgaggatggctc

SEQ ID NO: 906503 - DNA, 25 bp, Homo sapien
ccagcatggtggtgaggatggctcc

SEQ ID NO: 906504 - DNA, 25 bp, Homo sapien
ctgagaaattccgtgtggccagcat

SEQ ID NO: 906505 - DNA, 25 bp, Homo sapien
ctgtgcatcatggatgctaccgtgg

SEQ ID NO: 906506 - DNA, 25 bp, Homo sapien
tctgtgcatcatggatgctaccgtg

SEQ ID NO: 906507 - DNA, 25 bp, Homo sapien
tcaggagtgacggtgtcccactcag

SEQ ID NO: 906508 - DNA, 25 bp, Homo sapien
gcttcaggagtgacggtgtcccact

SEQ ID NO: 906509 - DNA, 25 bp, Homo sapien
caggagtgacggtgtcccactcagg

SEQ ID NO: 906510 - DNA, 25 bp, Homo sapien
gcctcatgggctgtgatgcgcttgg

SEQ ID NO: 906511 - DNA, 25 bp, Homo sapien
gcgccccggccgggcctgaagctcc

SEQ ID NO: 906512 - DNA, 25 bp, Homo sapien
cagcgccccggccgggcctgaagct

SEQ ID NO: 906513 - DNA, 25 bp, Homo sapien
aacagcgccccggccgggcctgaag

SEQ ID NO: 906514 - DNA, 25 bp, Homo sapien
gaaacagcgccccggccgggcctga

SEQ ID NO: 906515 - DNA, 25 bp, Homo sapien
ggtgggtagcccacgagcaggatgt

SEQ ID NO: 906516 - DNA, 25 bp, Homo sapien
tcctcgtcccagaagggtgggtagc

SEQ ID NO: 906517 - DNA, 25 bp, Homo sapien
gtagcccacgagcaggatgtacagg

SEQ ID NO: 906518 - DNA, 25 bp, Homo sapien
tgggtagcccacgagcaggatgtac

SEQ ID NO: 906519 - DNA, 25 bp, Homo sapien
agcgcaggcgagcactggggtgcgc

SEQ ID NO: 906520 - DNA, 25 bp, Homo sapien
catacgcctctttgcgaaggacctc

SEQ ID NO: 906521 - DNA, 25 bp, Homo sapien
cacaggcttgccatacgcctctttg

SEQ ID NO: 906522 - DNA, 25 bp, Homo sapien
ttgccatacgcctctttgcgaagga

SEQ ID NO: 906523 - DNA, 25 bp, Homo sapien
cgcctctttgcgaaggacctcaggg

SEQ ID NO: 906524 - DNA, 25 bp, Homo sapien
agcccctttgcacttgctggccaga

SEQ ID NO: 906525 - DNA, 25 bp, Homo sapien
tgcacctcgatagctaggccgaagt

SEQ ID NO: 906526 - DNA, 25 bp, Homo sapien
cctgcacctcgatagctaggccgaa

SEQ ID NO: 906527 - DNA, 25 bp, Homo sapien
cctttgcacttgctggccagaagca

SEQ ID NO: 906528 - DNA, 25 bp, Homo sapien
ttttgccaacgtgagtgggtggagg

SEQ ID NO: 906529 - DNA, 25 bp, Homo sapien
gggcacacgcatccgtgtccaccga

SEQ ID NO: 906530 - DNA, 25 bp, Homo sapien
ggtgattttgccaacgtgagtgggt

SEQ ID NO: 906531 - DNA, 25 bp, Homo sapien
gtccaccgagcaccaatccacaggc

SEQ ID NO: 906532 - DNA, 25 bp, Homo sapien
cacagcctagaactgctttgcccag

SEQ ID NO: 906533 - DNA, 25 bp, Homo sapien
acagcctagaactgctttgcccaga

SEQ ID NO: 906534 - DNA, 25 bp, Homo sapien
catttggtgacaatggagaacggcc

SEQ ID NO: 906535 - DNA, 25 bp, Homo sapien
ggtgacaatggagaacggcctccag

SEQ ID NO: 906536 - DNA, 25 bp, Homo sapien
ctgtggacgacccccatttggtgac

SEQ ID NO: 906537 - DNA, 25 bp, Homo sapien
tttggtgacaatggagaacggcctc

SEQ ID NO: 906538 - DNA, 25 bp, Homo sapien
ctgtggcaaacagcaggtgggttag

SEQ ID NO: 906539 - DNA, 25 bp, Homo sapien
tggcaaacagcaggtgggttagtgc

SEQ ID NO: 906540 - DNA, 25 bp, Homo sapien
agcaggtgggttagtgcgagtggcc

SEQ ID NO: 906541 - DNA, 25 bp, Homo sapien
caaacagcaggtgggttagtgcgag

SEQ ID NO: 906542 - DNA, 25 bp, Homo sapien
gggagcagcaagaggaggcactggg

SEQ ID NO: 906543 - DNA, 25 bp, Homo sapien
gggcaggggcaatggtgctgtgtgg

SEQ ID NO: 906544 - DNA, 25 bp, Homo sapien
agcagcaagaggaggcactgggggc

SEQ ID NO: 906545 - DNA, 25 bp, Homo sapien
tgggggcaggggcaatggtgctgtg

SEQ ID NO: 906546 - DNA, 25 bp, Homo sapien
ggtgtctggatgggccaccagggac

SEQ ID NO: 906547 - DNA, 25 bp, Homo sapien
gcaggtgtctggatgggccaccagg

SEQ ID NO: 906548 - DNA, 25 bp, Homo sapien
caggtgtctggatgggccaccaggg

SEQ ID NO: 906549 - DNA, 25 bp, Homo sapien
gccccagcaggtgtctggatgggcc

SEQ ID NO: 906550 - DNA, 25 bp, Homo sapien
tgcgggccatgtcacgatgggcagt

SEQ ID NO: 906551 - DNA, 25 bp, Homo sapien
tgcccatcagggatgcgggccatgt

SEQ ID NO: 906552 - DNA, 25 bp, Homo sapien
gggccatgtcacgatgggcagtttc

SEQ ID NO: 906553 - DNA, 25 bp, Homo sapien
gatgcgggccatgtcacgatgggca

SEQ ID NO: 906554 - DNA, 25 bp, Homo sapien
ctcgctgtagtactctctcgccaca

SEQ ID NO: 906555 - DNA, 25 bp, Homo sapien
gcatcagcctcgctgtagtactctc

SEQ ID NO: 906556 - DNA, 25 bp, Homo sapien
gcctcgctgtagtactctctcgcca

SEQ ID NO: 906557 - DNA, 25 bp, Homo sapien
tcagcctcgctgtagtactctctcg

SEQ ID NO: 906558 - DNA, 25 bp, Homo sapien
agatcgaagaccaggtagtggaagc

SEQ ID NO: 906559 - DNA, 25 bp, Homo sapien
tcgaagaccaggtagtggaagccct

SEQ ID NO: 906560 - DNA, 25 bp, Homo sapien
tcggagatgctgtcgtggagacgca

SEQ ID NO: 906561 - DNA, 25 bp, Homo sapien
gaagaccaggtagtggaagccctcc

SEQ ID NO: 906562 - DNA, 25 bp, Homo sapien
gattcctggactccagcagccccat

SEQ ID NO: 906563 - DNA, 25 bp, Homo sapien
ttgcagattcctggactccagcagc

SEQ ID NO: 906564 - DNA, 25 bp, Homo sapien
cttgcagattcctggactccagcag

SEQ ID NO: 906565 - DNA, 25 bp, Homo sapien
gcagattcctggactccagcagccc

SEQ ID NO: 906566 - DNA, 25 bp, Homo sapien
ccaataagcccagttgggggcccag

SEQ ID NO: 906567 - DNA, 25 bp, Homo sapien
gggctgcccaataagcccagttggg

SEQ ID NO: 906568 - DNA, 25 bp, Homo sapien
ttccagtgggggctgcccaataagc

SEQ ID NO: 906569 - DNA, 25 bp, Homo sapien
tggcccctctgagctgccccacctg

SEQ ID NO: 906570 - DNA, 25 bp, Homo sapien
agggttcagcgaccttcggagccag

SEQ ID NO: 906571 - DNA, 25 bp, Homo sapien
catcagatgaggcgaggtggttcca

SEQ ID NO: 906572 - DNA, 25 bp, Homo sapien
taacactgtgggcagcatacagagg

SEQ ID NO: 906573 - DNA, 25 bp, Homo sapien
tcctttggaacaagcatgcctgggc

SEQ ID NO: 906574 - DNA, 25 bp, Homo sapien
tgaaagtctgatagagaaaccggaa

SEQ ID NO: 906575 - DNA, 25 bp, Homo sapien
gtcacatacgacaaagtcctcaagg

SEQ ID NO: 906576 - DNA, 25 bp, Homo sapien
gagaaaccggaatgggctgctgtcc

SEQ ID NO: 906577 - DNA, 25 bp, Homo sapien
aatgccaccgacaagacccaaagga

SEQ ID NO: 906578 - DNA, 25 bp, Homo sapien
ttcagaaggcggcagatccgagcct

SEQ ID NO: 906579 - DNA, 25 bp, Homo sapien
aatgcttcagaaggcggcagatccg

SEQ ID NO: 906580 - DNA, 25 bp, Homo sapien
aaggcggcagatccgagcctctctc

SEQ ID NO: 906581 - DNA, 25 bp, Homo sapien
ggaatgcttcagaaggcggcagatc

SEQ ID NO: 906582 - DNA, 25 bp, Homo sapien
cccattcgggtagtgagcgctgcta

SEQ ID NO: 906583 - DNA, 25 bp, Homo sapien
cccagggatcgtccatgtcaggaga

SEQ ID NO: 906584 - DNA, 25 bp, Homo sapien
atgattctaagtcagcggtgcactg

SEQ ID NO: 906585 - DNA, 25 bp, Homo sapien
caccaagggaacacccttcgtggca

SEQ ID NO: 906586 - DNA, 25 bp, Homo sapien
gtcctggcaccaggtgtccactcat

SEQ ID NO: 906587 - DNA, 25 bp, Homo sapien
tctgatatttacagcctgcagatgc

SEQ ID NO: 906588 - DNA, 25 bp, Homo sapien
tatgccatttggtctgccttccctg

SEQ ID NO: 906589 - DNA, 25 bp, Homo sapien
gcgcaggggctctctgtgatatgcc

SEQ ID NO: 906590 - DNA, 25 bp, Homo sapien
aggacgccgaagacgccctggactg

SEQ ID NO: 906591 - DNA, 25 bp, Homo sapien
aatgaccctatgagtcccttcaggg

SEQ ID NO: 906592 - DNA, 25 bp, Homo sapien
ttcagggtagtgacttctgtgtgct

SEQ ID NO: 906593 - DNA, 25 bp, Homo sapien
cctgtgagctgctcatggcacccat

SEQ ID NO: 906594 - DNA, 25 bp, Homo sapien
tggcacccatgaaacagggctgttg

SEQ ID NO: 906595 - DNA, 25 bp, Homo sapien
gagtgtttctggagtggcatcctcc

SEQ ID NO: 906596 - DNA, 25 bp, Homo sapien
tggagctgcatgctaccagccgctt

SEQ ID NO: 906597 - DNA, 25 bp, Homo sapien
tccgcgtggccgagtatttcggtaa

SEQ ID NO: 906598 - DNA, 25 bp, Homo sapien
tgcagttctgcagtgtccgcgtggc

SEQ ID NO: 906599 - DNA, 25 bp, Homo sapien
tccctgaatagcaggggggaaggcc

SEQ ID NO: 906600 - DNA, 25 bp, Homo sapien
gcaggggggaaggccattgctctct

SEQ ID NO: 906601 - DNA, 25 bp, Homo sapien
ccctgaatagcaggggggaaggcca

SEQ ID NO: 906602 - DNA, 25 bp, Homo sapien
gaaggccattgctctctgggtcccc

SEQ ID NO: 906603 - DNA, 25 bp, Homo sapien
tgctgtcatcgcagggtggccgtgg

SEQ ID NO: 906604 - DNA, 25 bp, Homo sapien
ggaggcgctggctttaacatgactg

SEQ ID NO: 906605 - DNA, 25 bp, Homo sapien
gcacacagcaaccacgcgggaggcg

SEQ ID NO: 906606 - DNA, 25 bp, Homo sapien
gcgggaggcgctggctttaacatga

SEQ ID NO: 906607 - DNA, 25 bp, Homo sapien
cccggtatggcagcccactcagggt

SEQ ID NO: 906608 - DNA, 25 bp, Homo sapien
actcccagcggcacagctttgcagg

SEQ ID NO: 906609 - DNA, 25 bp, Homo sapien
tcggatcctgtggtcccggtatggc

SEQ ID NO: 906610 - DNA, 25 bp, Homo sapien
actcagcagacaccccaggaccctg

SEQ ID NO: 906611 - DNA, 25 bp, Homo sapien
ggtacgctcacgcacacatagacct

SEQ ID NO: 906612 - DNA, 25 bp, Homo sapien
acatgcatgtgcacgtagacacgtg

SEQ ID NO: 906613 - DNA, 25 bp, Homo sapien
tagacacgtgtgtgaacatgcacag

SEQ ID NO: 906614 - DNA, 25 bp, Homo sapien
tgtgtgaacatgcacaggtacgctc

SEQ ID NO: 906615 - DNA, 25 bp, Homo sapien
tcatcagatttgctgtgtgctgatt

SEQ ID NO: 906616 - DNA, 25 bp, Homo sapien
tcagatttgctgtgtgctgattttg

SEQ ID NO: 906617 - DNA, 25 bp, Homo sapien
catcatcatcagatttgctgtgtgc

SEQ ID NO: 906618 - DNA, 25 bp, Homo sapien
catcatcagatttgctgtgtgctga

SEQ ID NO: 906619 - DNA, 25 bp, Homo sapien
cagatgacaccacccaaccaccatg

SEQ ID NO: 906620 - DNA, 25 bp, Homo sapien
ccacccaaccaccatggcggcctgg

SEQ ID NO: 906621 - DNA, 25 bp, Homo sapien
gagctctcatctggcccacggctct

SEQ ID NO: 906622 - DNA, 25 bp, Homo sapien
tgagctctcatctggcccacggctc

SEQ ID NO: 906623 - DNA, 25 bp, Homo sapien
gacacagcgtcggaccacagagaaa

SEQ ID NO: 906624 - DNA, 25 bp, Homo sapien
tggctgcatactcatggccggtgca

SEQ ID NO: 906625 - DNA, 25 bp, Homo sapien
agagcttgacacagcgtcggaccac

SEQ ID NO: 906626 - DNA, 25 bp, Homo sapien
ctgcatactcatggccggtgcagag

SEQ ID NO: 906627 - DNA, 25 bp, Homo sapien
tccttgtgggtcggctggaccaaga

SEQ ID NO: 906628 - DNA, 25 bp, Homo sapien
tatccttgtgggtcggctggaccaa

SEQ ID NO: 906629 - DNA, 25 bp, Homo sapien
atccttgtgggtcggctggaccaag

SEQ ID NO: 906630 - DNA, 25 bp, Homo sapien
cttgtgggtcggctggaccaagagt

SEQ ID NO: 906631 - DNA, 25 bp, Homo sapien
ttatattgggatttgtgcagtcaga

SEQ ID NO: 906632 - DNA, 25 bp, Homo sapien
gggctctgtaccacgtccatgaggc

SEQ ID NO: 906633 - DNA, 25 bp, Homo sapien
ctccagagggcagttatattgggat

SEQ ID NO: 906634 - DNA, 25 bp, Homo sapien
aataaagctggccttgtctggaagg

SEQ ID NO: 906635 - DNA, 25 bp, Homo sapien
cttctccgttctctcaggtgaacca

SEQ ID NO: 906636 - DNA, 25 bp, Homo sapien
cacttctccgttctctcaggtgaac

SEQ ID NO: 906637 - DNA, 25 bp, Homo sapien
cctttagcaaccccacaggagctgt

SEQ ID NO: 906638 - DNA, 25 bp, Homo sapien
acttctccgttctctcaggtgaacc

SEQ ID NO: 906639 - DNA, 25 bp, Homo sapien
agaagtgcccatggtaggtggagcc

SEQ ID NO: 906640 - DNA, 25 bp, Homo sapien
ctgtgggatgaaagaagtgcccatg

SEQ ID NO: 906641 - DNA, 25 bp, Homo sapien
gaagtgcccatggtaggtggagcca

SEQ ID NO: 906642 - DNA, 25 bp, Homo sapien
gatgaaagaagtgcccatggtaggt

SEQ ID NO: 906643 - DNA, 25 bp, Homo sapien
tgctgtgcactgtcccagaggagtg

SEQ ID NO: 906644 - DNA, 25 bp, Homo sapien
aaaccactgcgactgtgctgtgcac

SEQ ID NO: 906645 - DNA, 25 bp, Homo sapien
aacgcggattccacaaaccactgcg

SEQ ID NO: 906646 - DNA, 25 bp, Homo sapien
gagagagtggtctcaccacagccag

SEQ ID NO: 906647 - DNA, 25 bp, Homo sapien
gggcccaggccatctgcgctcctgg

SEQ ID NO: 906648 - DNA, 25 bp, Homo sapien
ctggggcccaggccatctgcgctcc

SEQ ID NO: 906649 - DNA, 25 bp, Homo sapien
tggggcccaggccatctgcgctcct

SEQ ID NO: 906650 - DNA, 25 bp, Homo sapien
ggcccaggccatctgcgctcctggc

SEQ ID NO: 906651 - DNA, 25 bp, Homo sapien
caaaggcggcgcttaagagccggtc

SEQ ID NO: 906652 - DNA, 25 bp, Homo sapien
ccttgcagcgaccttcaaaggcggc

SEQ ID NO: 906653 - DNA, 25 bp, Homo sapien
ctagcagtgggacctgagtggatcc

SEQ ID NO: 906654 - DNA, 25 bp, Homo sapien
gacaccagcccatcggaagaaactg

SEQ ID NO: 906655 - DNA, 25 bp, Homo sapien
ctggtatggtatgtagccgttatct

SEQ ID NO: 906656 - DNA, 25 bp, Homo sapien
gcgaagacacttcgcagcagaggct

SEQ ID NO: 906657 - DNA, 25 bp, Homo sapien
tggccaaagccgcatttctgctggg

SEQ ID NO: 906658 - DNA, 25 bp, Homo sapien
gcccagagggctggctaagtttaga

SEQ ID NO: 906659 - DNA, 25 bp, Homo sapien
tagagatgctgtcatccggcaccag

SEQ ID NO: 906660 - DNA, 25 bp, Homo sapien
aatgcagctctcgacaacttggatg

SEQ ID NO: 906661 - DNA, 25 bp, Homo sapien
gataccccatttccctagtgtctgg

SEQ ID NO: 906662 - DNA, 25 bp, Homo sapien
tcaaattcatgcctaggtgggctct

SEQ ID NO: 906663 - DNA, 25 bp, Homo sapien
tgcagagtctaggtatgcagtgccc

SEQ ID NO: 906664 - DNA, 25 bp, Homo sapien
gcagctgtgggcctgaggccaagcc

SEQ ID NO: 906665 - DNA, 25 bp, Homo sapien
gctgtgggcctgaggccaagccctt

SEQ ID NO: 906666 - DNA, 25 bp, Homo sapien
ctgtgggcctgaggccaagcccttc

SEQ ID NO: 906667 - DNA, 25 bp, Homo sapien
atgagcagctgtgggcctgaggcca

SEQ ID NO: 906668 - DNA, 25 bp, Homo sapien
tcccagtgctttcgctcaggaggcc

SEQ ID NO: 906669 - DNA, 25 bp, Homo sapien
cattctctggcttgacagagaagcc

SEQ ID NO: 906670 - DNA, 25 bp, Homo sapien
ggacatccagctgcgctggaatcgg

SEQ ID NO: 906671 - DNA, 25 bp, Homo sapien
ggaggccacactcgctcctttccag

SEQ ID NO: 906672 - DNA, 25 bp, Homo sapien
ttgccaatatcctcgtagagctggt

SEQ ID NO: 906673 - DNA, 25 bp, Homo sapien
tagagctggtactcgtcggtgaagc

SEQ ID NO: 906674 - DNA, 25 bp, Homo sapien
tatcctcgtagagctggtactcgtc

SEQ ID NO: 906675 - DNA, 25 bp, Homo sapien
gaagcgggtgcaggtcaccgtggtg

SEQ ID NO: 906676 - DNA, 25 bp, Homo sapien
gctcggcgtgcgctcggctgcgctc

SEQ ID NO: 906677 - DNA, 25 bp, Homo sapien
gcggacgggctcggcgtgcgctcgg

SEQ ID NO: 906678 - DNA, 25 bp, Homo sapien
tgctcgctccgtcctcgccaggagc

SEQ ID NO: 906679 - DNA, 25 bp, Homo sapien
gagcgcacgcgagatctgctcgctc

SEQ ID NO: 906680 - DNA, 25 bp, Homo sapien
agcgcgccgcacacctacgcgcggg

SEQ ID NO: 906681 - DNA, 25 bp, Homo sapien
gggcggcgagcgcacgcgagatctg

SEQ ID NO: 906682 - DNA, 25 bp, Homo sapien
ccgacccctcgctctcacataacac

SEQ ID NO: 906683 - DNA, 25 bp, Homo sapien
ctgccgacccctcgctctcacataa

SEQ ID NO: 906684 - DNA, 25 bp, Homo sapien
gccgacccctcgctctcacataaca

SEQ ID NO: 906685 - DNA, 25 bp, Homo sapien
cgcgcacgcaggccacttgctgctg

SEQ ID NO: 906686 - DNA, 25 bp, Homo sapien
cacactcttctctgacggggtccat

SEQ ID NO: 906687 - DNA, 25 bp, Homo sapien
gctgctgtccagaaccgggacttta

SEQ ID NO: 906688 - DNA, 25 bp, Homo sapien
cagaaccgggactttagaccactgg

SEQ ID NO: 906689 - DNA, 25 bp, Homo sapien
agcatccccacactcttctctgacg

SEQ ID NO: 906690 - DNA, 25 bp, Homo sapien
catcaaaacgcttctaggatttggg

SEQ ID NO: 906691 - DNA, 25 bp, Homo sapien
caaatatgggatatatccttccact

SEQ ID NO: 906692 - DNA, 25 bp, Homo sapien
ggtgtgtgtgcactaaaactatagc

SEQ ID NO: 906693 - DNA, 25 bp, Homo sapien
ttagaatcagtatgtcatttacaca

SEQ ID NO: 906694 - DNA, 25 bp, Homo sapien
aggagcactggcagctcaacaaatc

SEQ ID NO: 906695 - DNA, 25 bp, Homo sapien
gaagccctgatgaaaaggcaggagc

SEQ ID NO: 906696 - DNA, 25 bp, Homo sapien
ctgggtgaggaaccaacatttggcc

SEQ ID NO: 906697 - DNA, 25 bp, Homo sapien
tggtggcactcagcttgtcccctgg

SEQ ID NO: 906698 - DNA, 25 bp, Homo sapien
gtgaggggatcttgttggctttcct

SEQ ID NO: 906699 - DNA, 25 bp, Homo sapien
gaggggatcttgttggctttcctgg

SEQ ID NO: 906700 - DNA, 25 bp, Homo sapien
ctctggcaggcagttagggggcagt

SEQ ID NO: 906701 - DNA, 25 bp, Homo sapien
ctggcaggcagttagggggcagtgg

SEQ ID NO: 906702 - DNA, 25 bp, Homo sapien
gaattcaccagtaaaccagccttgc

SEQ ID NO: 906703 - DNA, 25 bp, Homo sapien
attgccagccaggaatattaaccca

SEQ ID NO: 906704 - DNA, 25 bp, Homo sapien
caccaagtcacatatagaggaatcc

SEQ ID NO: 906705 - DNA, 25 bp, Homo sapien
aatgctcaggagttctacatctgga

SEQ ID NO: 906706 - DNA, 25 bp, Homo sapien
tgtccctctcggaaagctgaaccca

SEQ ID NO: 906707 - DNA, 25 bp, Homo sapien
aggttcaacacagtgtccatcacca

SEQ ID NO: 906708 - DNA, 25 bp, Homo sapien
ctctggacaggtgtccctctcggaa

SEQ ID NO: 906709 - DNA, 25 bp, Homo sapien
aagtccacaggcttgtgtttggcaa

SEQ ID NO: 906710 - DNA, 25 bp, Homo sapien
cacctgccttggtttcctcagctgt

SEQ ID NO: 906711 - DNA, 25 bp, Homo sapien
ctgccttggtttcctcagctgtcat

SEQ ID NO: 906712 - DNA, 25 bp, Homo sapien
ttcaggttctggcaccttccacctg

SEQ ID NO: 906713 - DNA, 25 bp, Homo sapien
cttcaggttctggcaccttccacct

SEQ ID NO: 906714 - DNA, 25 bp, Homo sapien
gtgttggtggcttccactggaaccc

SEQ ID NO: 906715 - DNA, 25 bp, Homo sapien
gtgccagcggcaggtgacattccca

SEQ ID NO: 906716 - DNA, 25 bp, Homo sapien
tggaaccccaacgtgagaccacctc

SEQ ID NO: 906717 - DNA, 25 bp, Homo sapien
tccagtgccagcggcaggtgacatt

SEQ ID NO: 906718 - DNA, 25 bp, Homo sapien
tagaggcagcttctatcccaaatgc

SEQ ID NO: 906719 - DNA, 25 bp, Homo sapien
gtctgacaggtcacgaatgggccca

SEQ ID NO: 906720 - DNA, 25 bp, Homo sapien
taaggagtgatcctcaagtatgccc

SEQ ID NO: 906721 - DNA, 25 bp, Homo sapien
cttgggcacaggcagacttactggg

SEQ ID NO: 906722 - DNA, 25 bp, Homo sapien
acagtgaaaaatgacaccatcaagc

SEQ ID NO: 906723 - DNA, 25 bp, Homo sapien
cagtgaaaaatgacaccatcaagcc

SEQ ID NO: 906724 - DNA, 25 bp, Homo sapien
ggagtcctagctgctctgaagtcgt

SEQ ID NO: 906725 - DNA, 25 bp, Homo sapien
ctagctgctctgaagtcgtgagtgg

SEQ ID NO: 906726 - DNA, 25 bp, Homo sapien
gacagcagagcctgttcaggaggct

SEQ ID NO: 906727 - DNA, 25 bp, Homo sapien
tcacaggagtcctagctgctctgaa

SEQ ID NO: 906728 - DNA, 25 bp, Homo sapien
tctactgttgctgtctggatatcac

SEQ ID NO: 906729 - DNA, 25 bp, Homo sapien
agcctggagtgtcgaggagtcacca

SEQ ID NO: 906730 - DNA, 25 bp, Homo sapien
ccaatgggaggttaccagcaggaga

SEQ ID NO: 906731 - DNA, 25 bp, Homo sapien
accacggccctgcactcagttaatg

SEQ ID NO: 906732 - DNA, 25 bp, Homo sapien
cacagagagtgtggcatggccagga

SEQ ID NO: 906733 - DNA, 25 bp, Homo sapien
acagagagtgtggcatggccaggac

SEQ ID NO: 906734 - DNA, 25 bp, Homo sapien
cacagtcagacggtagagaggagcc

SEQ ID NO: 906735 - DNA, 25 bp, Homo sapien
gcctggtttaaatgcctgttcccca

SEQ ID NO: 906736 - DNA, 25 bp, Homo sapien
ttcttcaggaccgtgggccacatgg

SEQ ID NO: 906737 - DNA, 25 bp, Homo sapien
tctctctgagatagtgaccacactg

SEQ ID NO: 906738 - DNA, 25 bp, Homo sapien
aacttcgtgcttttcatcgacaaag

SEQ ID NO: 906739 - DNA, 25 bp, Homo sapien
gctgacaacttcgtgcttttcatcg

SEQ ID NO: 906740 - DNA, 25 bp, Homo sapien
tctgtgctgacaacttcgtgctttt

SEQ ID NO: 906741 - DNA, 25 bp, Homo sapien
gcttttcatcgacaaagcgagtcat

SEQ ID NO: 906742 - DNA, 25 bp, Homo sapien
tgcgagggctcagcaaagttaacag

SEQ ID NO: 906743 - DNA, 25 bp, Homo sapien
gccctgggagtatgctaggcaattc

SEQ ID NO: 906744 - DNA, 25 bp, Homo sapien
tgggagacttctgtgtcagacacgg

SEQ ID NO: 906745 - DNA, 25 bp, Homo sapien
gacacggcgttatgtcctggaggaa

SEQ ID NO: 906746 - DNA, 25 bp, Homo sapien
cctgggacctcaaggctagaatgca

SEQ ID NO: 906747 - DNA, 25 bp, Homo sapien
gctgtattgagatcttgcccagtgc

SEQ ID NO: 906748 - DNA, 25 bp, Homo sapien
caaaggtggcccttcagtggaatca

SEQ ID NO: 906749 - DNA, 25 bp, Homo sapien
taatgaccatgcacagacagaactg

SEQ ID NO: 906750 - DNA, 25 bp, Homo sapien
taccaatttattgcaaaccaacacc

SEQ ID NO: 906751 - DNA, 25 bp, Homo sapien
gcttaaataccaatttattgcaaac

SEQ ID NO: 906752 - DNA, 25 bp, Homo sapien
gcaaaccaacaccaaggagctggaa

SEQ ID NO: 906753 - DNA, 25 bp, Homo sapien
aaggagctggaatagctttgcaggc

SEQ ID NO: 906754 - DNA, 25 bp, Homo sapien
gctggccaaactgcggctgttgtgt

SEQ ID NO: 906755 - DNA, 25 bp, Homo sapien
cgctttcctcggacctcagctggtg

SEQ ID NO: 906756 - DNA, 25 bp, Homo sapien
tctcctcgggccctggacaagggaa

SEQ ID NO: 906757 - DNA, 25 bp, Homo sapien
tcagctggtgggacttagtggctgg

SEQ ID NO: 906758 - DNA, 25 bp, Homo sapien
agacagcgtggctcaacgggagcaa

SEQ ID NO: 906759 - DNA, 25 bp, Homo sapien
gaatcacccaccagacagcgtggct

SEQ ID NO: 906760 - DNA, 25 bp, Homo sapien
agagaatcacccaccagacagcgtg

SEQ ID NO: 906761 - DNA, 25 bp, Homo sapien
caacgggagcaaggcgcgcagggac

SEQ ID NO: 906762 - DNA, 25 bp, Homo sapien
tgtggcaccgggaccagatgcaagt

SEQ ID NO: 906763 - DNA, 25 bp, Homo sapien
cattcttcctagatattggtttgct

SEQ ID NO: 906764 - DNA, 25 bp, Homo sapien
tgcaagtggctgttcctgccatggg

SEQ ID NO: 906765 - DNA, 25 bp, Homo sapien
accaagcaccgcagtgtggcaccgg

SEQ ID NO: 906766 - DNA, 25 bp, Homo sapien
tgagtacttggaacacaggcctgag

SEQ ID NO: 906767 - DNA, 25 bp, Homo sapien
tagaacgtgcaaacagggctccagt

SEQ ID NO: 906768 - DNA, 25 bp, Homo sapien
gacagtggtgtgcaaatcctaggac

SEQ ID NO: 906769 - DNA, 25 bp, Homo sapien
caataggccctcttagcatctgcgg

SEQ ID NO: 906770 - DNA, 25 bp, Homo sapien
agatgttgaacatggcagggtcgaa

SEQ ID NO: 906771 - DNA, 25 bp, Homo sapien
gctggcctcggaagggagaaccttc

SEQ ID NO: 906772 - DNA, 25 bp, Homo sapien
atggcagggtcgaatcgctggcctc

SEQ ID NO: 906773 - DNA, 25 bp, Homo sapien
tcggaagggagaaccttcagcatcc

SEQ ID NO: 906774 - DNA, 25 bp, Homo sapien
tgcgtagagaaagtgctcaagcccc

SEQ ID NO: 906775 - DNA, 25 bp, Homo sapien
tagcataggcccagaaaacgaggct

SEQ ID NO: 906776 - DNA, 25 bp, Homo sapien
cactgagggctagggatgatctctc

SEQ ID NO: 906777 - DNA, 25 bp, Homo sapien
tctgactgcaggtagagagccttct

SEQ ID NO: 906778 - DNA, 25 bp, Homo sapien
ggcaactcacatcagagactttgga

SEQ ID NO: 906779 - DNA, 25 bp, Homo sapien
tagggcaaatgacacctgtggagcc

SEQ ID NO: 906780 - DNA, 25 bp, Homo sapien
gacctaagtgatgcaacaacaagca

SEQ ID NO: 906781 - DNA, 25 bp, Homo sapien
cagagaagactacatgaagcccctc

SEQ ID NO: 906782 - DNA, 25 bp, Homo sapien
taggatgcccagagtgcaaagggca

SEQ ID NO: 906783 - DNA, 25 bp, Homo sapien
ttacaacagagggatcctagggtgc

SEQ ID NO: 906784 - DNA, 25 bp, Homo sapien
tgccaagatcagcactcagaccttt

SEQ ID NO: 906785 - DNA, 25 bp, Homo sapien
caaagggcagattagtagacttgat

SEQ ID NO: 906786 - DNA, 25 bp, Homo sapien
catgctaatgctatctgcctatgag

SEQ ID NO: 906787 - DNA, 25 bp, Homo sapien
gagatgtcacaattactgttagggt

SEQ ID NO: 906788 - DNA, 25 bp, Homo sapien
ttagggtgaatcctaccaggctgaa

SEQ ID NO: 906789 - DNA, 25 bp, Homo sapien
tgctatctgcctatgagatgtcaca

SEQ ID NO: 906790 - DNA, 25 bp, Homo sapien
ggtcaatctcagggagagggtcact

SEQ ID NO: 906791 - DNA, 25 bp, Homo sapien
tcagggagagggtcactctgggacc

SEQ ID NO: 906792 - DNA, 25 bp, Homo sapien
tcaatctcagggagagggtcactct

SEQ ID NO: 906793 - DNA, 25 bp, Homo sapien
aatctcagggagagggtcactctgg

SEQ ID NO: 906794 - DNA, 25 bp, Homo sapien
cctgcatgtcgctgaagatctccca

SEQ ID NO: 906795 - DNA, 25 bp, Homo sapien
ctgcatgtcgctgaagatctcccag

SEQ ID NO: 906796 - DNA, 25 bp, Homo sapien
tcctgcatgtcgctgaagatctccc

SEQ ID NO: 906797 - DNA, 25 bp, Homo sapien
tgaagatctcccagggcactttact

SEQ ID NO: 906798 - DNA, 25 bp, Homo sapien
tggaatgagccataaccaggcaggt

SEQ ID NO: 906799 - DNA, 25 bp, Homo sapien
gatgtgagaaaccacctgaccttag

SEQ ID NO: 906800 - DNA, 25 bp, Homo sapien
tcctgtggcacaaaaagacacttct

SEQ ID NO: 906801 - DNA, 25 bp, Homo sapien
ccacagggcaaaggttcaaaggctg

SEQ ID NO: 906802 - DNA, 25 bp, Homo sapien
tttaagcttgccatgccccgggtgg

SEQ ID NO: 906803 - DNA, 25 bp, Homo sapien
tgcatggacgtaggccaagcaaaga

SEQ ID NO: 906804 - DNA, 25 bp, Homo sapien
cattctcttccatagagacaagggc

SEQ ID NO: 906805 - DNA, 25 bp, Homo sapien
gaggcttcaaactctgcatggacgt

SEQ ID NO: 906806 - DNA, 25 bp, Homo sapien
aatcagaggtcaaaccccatccctg

SEQ ID NO: 906807 - DNA, 25 bp, Homo sapien
tgaggacagacaggtgtgaaatcaa

SEQ ID NO: 906808 - DNA, 25 bp, Homo sapien
gacagacaggtgtgaaatcaaatca

SEQ ID NO: 906809 - DNA, 25 bp, Homo sapien
tgtgaaatcaaatcagaggtcaaac

SEQ ID NO: 906810 - DNA, 25 bp, Homo sapien
gaggagaacatgttgacactcctct

SEQ ID NO: 906811 - DNA, 25 bp, Homo sapien
gacaggttccttgctaggctaggac

SEQ ID NO: 906812 - DNA, 25 bp, Homo sapien
caggaagggcagatctcatgacacc

SEQ ID NO: 906813 - DNA, 25 bp, Homo sapien
gaccagagtgcacctgtgaggcagt

SEQ ID NO: 906814 - DNA, 25 bp, Homo sapien
tcatgacacccttcgaggtcctgtt

SEQ ID NO: 906815 - DNA, 25 bp, Homo sapien
tcaccagcacaagggcctaaagggt

SEQ ID NO: 906816 - DNA, 25 bp, Homo sapien
cacaagggcctaaagggtggactct

SEQ ID NO: 906817 - DNA, 25 bp, Homo sapien
agggcctaaagggtggactctccag

SEQ ID NO: 906818 - DNA, 25 bp, Homo sapien
gccactatcggccttgtcaccagca

SEQ ID NO: 906819 - DNA, 25 bp, Homo sapien
cagcttctggtggtagtcaaaggta

SEQ ID NO: 906820 - DNA, 25 bp, Homo sapien
ttgtcaatgtcgatgggctcttctc

SEQ ID NO: 906821 - DNA, 25 bp, Homo sapien
aggatggcgttccaccaatactcgc

SEQ ID NO: 906822 - DNA, 25 bp, Homo sapien
gtaagcctgtccaacaccgcctgtt

SEQ ID NO: 906823 - DNA, 25 bp, Homo sapien
agtggctgggctcaaaattcttacc

SEQ ID NO: 906824 - DNA, 25 bp, Homo sapien
tcttaccagagtggccaagaagcaa

SEQ ID NO: 906825 - DNA, 25 bp, Homo sapien
tctcatccatggaggtggcagccac

SEQ ID NO: 906826 - DNA, 25 bp, Homo sapien
caggacacttactgaccaggtgggc

SEQ ID NO: 906827 - DNA, 25 bp, Homo sapien
cagtaaatgacgctgctctgccagt

SEQ ID NO: 906828 - DNA, 25 bp, Homo sapien
tctgctaagctggtttgtcgttgac

SEQ ID NO: 906829 - DNA, 25 bp, Homo sapien
tccagattgcccagcatgaagaggc

SEQ ID NO: 906830 - DNA, 25 bp, Homo sapien
taccaagctgatgcaatgaaaacct

SEQ ID NO: 906831 - DNA, 25 bp, Homo sapien
ggcacagtgggagatggacctgaag

SEQ ID NO: 906832 - DNA, 25 bp, Homo sapien
cagtgggagatggacctgaagacaa

SEQ ID NO: 906833 - DNA, 25 bp, Homo sapien
ccaggggacggtgctggtgctctca

SEQ ID NO: 906834 - DNA, 25 bp, Homo sapien
tctcaggccttttggcactccacag

SEQ ID NO: 906835 - DNA, 25 bp, Homo sapien
taattcagttctccagtcacgtgag

SEQ ID NO: 906836 - DNA, 25 bp, Homo sapien
tattttatgaggagatgtgagccga

SEQ ID NO: 906837 - DNA, 25 bp, Homo sapien
cagacgtcacgcatgtgcatcagtg

SEQ ID NO: 906838 - DNA, 25 bp, Homo sapien
gaagccctgtgccaattatcagtca

SEQ ID NO: 906839 - DNA, 25 bp, Homo sapien
ggcccacgcctcgtaagtcattgag

SEQ ID NO: 906840 - DNA, 25 bp, Homo sapien
tacagagcatacaggtcttgcaggg

SEQ ID NO: 906841 - DNA, 25 bp, Homo sapien
caatgttcctaggatggagttcaaa

SEQ ID NO: 906842 - DNA, 25 bp, Homo sapien
cttagagtaatgcttctgggaggcc

SEQ ID NO: 906843 - DNA, 25 bp, Homo sapien
taccagtagcacagaagagcaccag

SEQ ID NO: 906844 - DNA, 25 bp, Homo sapien
tgttgggtcacgtgatgtcagctac

SEQ ID NO: 906845 - DNA, 25 bp, Homo sapien
catccagcatgtccgtgtccagaat

SEQ ID NO: 906846 - DNA, 25 bp, Homo sapien
tttgcaatcaggtagagagctgctg

SEQ ID NO: 906847 - DNA, 25 bp, Homo sapien
tattgctgtcagtactgacccctgg

SEQ ID NO: 906848 - DNA, 25 bp, Homo sapien
tatgatgatttacggaacagggtcc

SEQ ID NO: 906849 - DNA, 25 bp, Homo sapien
ccatctgtcccacgaaggctgggaa

SEQ ID NO: 906850 - DNA, 25 bp, Homo sapien
gaataggttgcattcatcttggccc

SEQ ID NO: 906851 - DNA, 25 bp, Homo sapien
gctctgctcagcacattccttccac

SEQ ID NO: 906852 - DNA, 25 bp, Homo sapien
tctgctcagcacattccttccactc

SEQ ID NO: 906853 - DNA, 25 bp, Homo sapien
gccggctctgctcagcacattcctt

SEQ ID NO: 906854 - DNA, 25 bp, Homo sapien
tgctcagcacattccttccactcac

SEQ ID NO: 906855 - DNA, 25 bp, Homo sapien
cgccttctgttaaatctgtaagctt

SEQ ID NO: 906856 - DNA, 25 bp, Homo sapien
gtaagcttcagctcttccctactgg

SEQ ID NO: 906857 - DNA, 25 bp, Homo sapien
gggctaccgccttctgttaaatctg

SEQ ID NO: 906858 - DNA, 25 bp, Homo sapien
ttcccctgaaaaacgctgagggctc

SEQ ID NO: 906859 - DNA, 25 bp, Homo sapien
gggctcttgccaaaatgctaaggta

SEQ ID NO: 906860 - DNA, 25 bp, Homo sapien
gggactcaggaaagtggctcgccaa

SEQ ID NO: 906861 - DNA, 25 bp, Homo sapien
tagagacatcacttgcactgaaggc

SEQ ID NO: 906862 - DNA, 25 bp, Homo sapien
ggcttaagggctcacattacattca

SEQ ID NO: 906863 - DNA, 25 bp, Homo sapien
tgaagaagtgtatatggaacggcat

SEQ ID NO: 906864 - DNA, 25 bp, Homo sapien
tacatgaagaagtgtatatggaacg

SEQ ID NO: 906865 - DNA, 25 bp, Homo sapien
gaagtgtatatggaacggcattcac

SEQ ID NO: 906866 - DNA, 25 bp, Homo sapien
tcaatacatgaagaagtgtatatgg

SEQ ID NO: 906867 - DNA, 25 bp, Homo sapien
tacaacgaccatctcaagcatagcc

SEQ ID NO: 906868 - DNA, 25 bp, Homo sapien
atacagctacaacgaccatctcaag

SEQ ID NO: 906869 - DNA, 25 bp, Homo sapien
aagcatagccatgtccaagagcccc

SEQ ID NO: 906870 - DNA, 25 bp, Homo sapien
catctcaagcatagccatgtccaag

SEQ ID NO: 906871 - DNA, 25 bp, Homo sapien
ctgagttcacccaacggaaggcagg

SEQ ID NO: 906872 - DNA, 25 bp, Homo sapien
tgcaccttcagagggcaagctagcc

SEQ ID NO: 906873 - DNA, 25 bp, Homo sapien
ctagtgtaatacaggcggccagggc

SEQ ID NO: 906874 - DNA, 25 bp, Homo sapien
gaaccaacttgagagcatcgtgacc

SEQ ID NO: 906875 - DNA, 25 bp, Homo sapien
gaatacactcctttcggtacctggc

SEQ ID NO: 906876 - DNA, 25 bp, Homo sapien
tgtgtagccagagtgagctccattg

SEQ ID NO: 906877 - DNA, 25 bp, Homo sapien
gagcatgttgtctgtgcccaggttg

SEQ ID NO: 906878 - DNA, 25 bp, Homo sapien
gagctccattgtccaggtttgatat

SEQ ID NO: 906879 - DNA, 25 bp, Homo sapien
ccgggctcgagactccagagagaac

SEQ ID NO: 906880 - DNA, 25 bp, Homo sapien
acttcccgggctcgagactccagag

SEQ ID NO: 906881 - DNA, 25 bp, Homo sapien
atggccacacgaatggagctgctgc

SEQ ID NO: 906882 - DNA, 25 bp, Homo sapien
cagcatggccacacgaatggagctg

SEQ ID NO: 906883 - DNA, 25 bp, Homo sapien
ctgcacactacagcgctgtcatcag

SEQ ID NO: 906884 - DNA, 25 bp, Homo sapien
cactacagcgctgtcatcaggctca

SEQ ID NO: 906885 - DNA, 25 bp, Homo sapien
ctgactgcacactacagcgctgtca

SEQ ID NO: 906886 - DNA, 25 bp, Homo sapien
cacactacagcgctgtcatcaggct

SEQ ID NO: 906887 - DNA, 25 bp, Homo sapien
gcctgaacaacacagggagactcca

SEQ ID NO: 906888 - DNA, 25 bp, Homo sapien
ctgaacaacacagggagactccatt

SEQ ID NO: 906889 - DNA, 25 bp, Homo sapien
tgaacaacacagggagactccattt

SEQ ID NO: 906890 - DNA, 25 bp, Homo sapien
agcctgaacaacacagggagactcc

SEQ ID NO: 906891 - DNA, 25 bp, Homo sapien
cctaggcaatagcattcaggaacag

SEQ ID NO: 906892 - DNA, 25 bp, Homo sapien
aatagcattcaggaacaggcatggg

SEQ ID NO: 906893 - DNA, 25 bp, Homo sapien
taggcaatagcattcaggaacaggc

SEQ ID NO: 906894 - DNA, 25 bp, Homo sapien
agctcatcatctctgttcattagag

SEQ ID NO: 906895 - DNA, 25 bp, Homo sapien
ctcaagttgcgaatgttacaggtac

SEQ ID NO: 906896 - DNA, 25 bp, Homo sapien
cagaaactttagtgtttgaaactca

SEQ ID NO: 906897 - DNA, 25 bp, Homo sapien
ggtacttataggacatggctccctg

SEQ ID NO: 906898 - DNA, 25 bp, Homo sapien
catcgctgtgacctgggttctttgc

SEQ ID NO: 906899 - DNA, 25 bp, Homo sapien
gaccgggtgtttgtagctgaagaaa

SEQ ID NO: 906900 - DNA, 25 bp, Homo sapien
ggggtgaccgggtgtttgtagctga

SEQ ID NO: 906901 - DNA, 25 bp, Homo sapien
ggtgaccgggtgtttgtagctgaag

SEQ ID NO: 906902 - DNA, 25 bp, Homo sapien
tgaccgggtgtttgtagctgaagaa

SEQ ID NO: 906903 - DNA, 25 bp, Homo sapien
ttcaccacgtgcttgggtactggca

SEQ ID NO: 906904 - DNA, 25 bp, Homo sapien
tgacctccaggtcagtatagtcctg

SEQ ID NO: 906905 - DNA, 25 bp, Homo sapien
gcaccattgtaactgtcgggatttt

SEQ ID NO: 906906 - DNA, 25 bp, Homo sapien
gaccaggtgtagttctctcggacag

SEQ ID NO: 906907 - DNA, 25 bp, Homo sapien
gccactgtgattacattattctcaa

SEQ ID NO: 906908 - DNA, 25 bp, Homo sapien
aacaacctcatatggctccccacgg

SEQ ID NO: 906909 - DNA, 25 bp, Homo sapien
gccatggctgcgtctcttctcagtt

SEQ ID NO: 906910 - DNA, 25 bp, Homo sapien
gcctcagcaaggcactcgaggtagc

SEQ ID NO: 906911 - DNA, 25 bp, Homo sapien
caccatgacatcaaatgacaacgta

SEQ ID NO: 906912 - DNA, 25 bp, Homo sapien
ttatgtttacttatgcaaccaagag

SEQ ID NO: 906913 - DNA, 25 bp, Homo sapien
tgacaacgtattcacacagaaagca

SEQ ID NO: 906914 - DNA, 25 bp, Homo sapien
tctttatagcaccttcatacttaac

SEQ ID NO: 906915 - DNA, 25 bp, Homo sapien
ttgactgtctaggtgaagacctggg

SEQ ID NO: 906916 - DNA, 25 bp, Homo sapien
gaaatgcctgtgtttgcaagcaaaa

SEQ ID NO: 906917 - DNA, 25 bp, Homo sapien
ggatagtggagaagagaccccacct

SEQ ID NO: 906918 - DNA, 25 bp, Homo sapien
tctcctgggaggtggtttactgtaa

SEQ ID NO: 906919 - DNA, 25 bp, Homo sapien
ctccaagacctgtccgaggtgtccc

SEQ ID NO: 906920 - DNA, 25 bp, Homo sapien
cagataatcacaaaggtttgctccc

SEQ ID NO: 906921 - DNA, 25 bp, Homo sapien
gataatcacaaaggtttgctccctc

SEQ ID NO: 906922 - DNA, 25 bp, Homo sapien
caagacctgtccgaggtgtcccagg

SEQ ID NO: 906923 - DNA, 25 bp, Homo sapien
gctttccacagagcccccagaacac

SEQ ID NO: 906924 - DNA, 25 bp, Homo sapien
caactagaggctttccacagagccc

SEQ ID NO: 906925 - DNA, 25 bp, Homo sapien
ccaactagaggctttccacagagcc

SEQ ID NO: 906926 - DNA, 25 bp, Homo sapien
gaggctttccacagagcccccagaa

SEQ ID NO: 906927 - DNA, 25 bp, Homo sapien
cgaggcgccggagagatagtaactg

SEQ ID NO: 906928 - DNA, 25 bp, Homo sapien
agatagtaactgtgatgtaattctg

SEQ ID NO: 906929 - DNA, 25 bp, Homo sapien
gcgccggagagatagtaactgtgat

SEQ ID NO: 906930 - DNA, 25 bp, Homo sapien
cggagagatagtaactgtgatgtaa

SEQ ID NO: 906931 - DNA, 25 bp, Homo sapien
tgatggtatacttctcaatgttgct

SEQ ID NO: 906932 - DNA, 25 bp, Homo sapien
tgatgatggtatacttctcaatgtt

SEQ ID NO: 906933 - DNA, 25 bp, Homo sapien
atggtatacttctcaatgttgctgg

SEQ ID NO: 906934 - DNA, 25 bp, Homo sapien
gatgatggtatacttctcaatgttg

SEQ ID NO: 906935 - DNA, 25 bp, Homo sapien
tgttgtgttgttttgggagtattat

SEQ ID NO: 906936 - DNA, 25 bp, Homo sapien
tgcaaggacacatctcagtatactg

SEQ ID NO: 906937 - DNA, 25 bp, Homo sapien
aggtgtgcaaggacatctcacagta

SEQ ID NO: 906938 - DNA, 25 bp, Homo sapien
tgcaaggacatctcacagtatattg

SEQ ID NO: 906939 - DNA, 25 bp, Homo sapien
caccatgcctagacctgtggtcatg

SEQ ID NO: 906940 - DNA, 25 bp, Homo sapien
caactgctttcctaactgtcacaca

SEQ ID NO: 906941 - DNA, 25 bp, Homo sapien
aacatatggtggagaagaagatacc

SEQ ID NO: 906942 - DNA, 25 bp, Homo sapien
taatttttcaagacgggatctcact

SEQ ID NO: 906943 - DNA, 25 bp, Homo sapien
gcactgacaacagggttcgtagaag

SEQ ID NO: 906944 - DNA, 25 bp, Homo sapien
aactggcggaaacccagaggcactg

SEQ ID NO: 906945 - DNA, 25 bp, Homo sapien
agaggcactgacaacagggttcgta

SEQ ID NO: 906946 - DNA, 25 bp, Homo sapien
gaggcactgacaacagggttcgtag

SEQ ID NO: 906947 - DNA, 25 bp, Homo sapien
aggaaatgctaaggatactctgttc

SEQ ID NO: 906948 - DNA, 25 bp, Homo sapien
ggcaacacagggagtctcgtctcta

SEQ ID NO: 906949 - DNA, 25 bp, Homo sapien
aaggatactctgttcagcataaaag

SEQ ID NO: 906950 - DNA, 25 bp, Homo sapien
aacacagggagtctcgtctctacaa

SEQ ID NO: 906951 - DNA, 25 bp, Homo sapien
tccctcgtgaatatgagtagtggcc

SEQ ID NO: 906952 - DNA, 25 bp, Homo sapien
tacacacggaaagaagtctcaggcc

SEQ ID NO: 906953 - DNA, 25 bp, Homo sapien
cctgaaaaagcctcgactagtaaag

SEQ ID NO: 906954 - DNA, 25 bp, Homo sapien
catgtgacagctcgatgagaagaca

SEQ ID NO: 906955 - DNA, 25 bp, Homo sapien
taatttataggataaaccatcctga

SEQ ID NO: 906956 - DNA, 25 bp, Homo sapien
taaaccatcctgaacactggtggga

SEQ ID NO: 906957 - DNA, 25 bp, Homo sapien
tataggataaaccatcctgaacact

SEQ ID NO: 906958 - DNA, 25 bp, Homo sapien
gataaaccatcctgaacactggtgg

SEQ ID NO: 906959 - DNA, 25 bp, Homo sapien
tctgctgcgctcttcaggctttcag

SEQ ID NO: 906960 - DNA, 25 bp, Homo sapien
caggctttcagctgatagatcaggc

SEQ ID NO: 906961 - DNA, 25 bp, Homo sapien
catagcaggccaatgtggaactctc

SEQ ID NO: 906962 - DNA, 25 bp, Homo sapien
cagctgctgtccatcggagaaattt

SEQ ID NO: 906963 - DNA, 25 bp, Homo sapien
gatgtgaatccagtcacctaaaaca

SEQ ID NO: 906964 - DNA, 25 bp, Homo sapien
aaggttatactgcttgttcaaggta

SEQ ID NO: 906965 - DNA, 25 bp, Homo sapien
gcggcatagcgaggatgtgaatcca

SEQ ID NO: 906966 - DNA, 25 bp, Homo sapien
gtaatacattcaggaagcggcatag

SEQ ID NO: 906967 - DNA, 25 bp, Homo sapien
gcatcatgagcaaatcctagcagtg

SEQ ID NO: 906968 - DNA, 25 bp, Homo sapien
tcaggcatcatgagcaaatcctagc

SEQ ID NO: 906969 - DNA, 25 bp, Homo sapien
ggcatcatgagcaaatcctagcagt

SEQ ID NO: 906970 - DNA, 25 bp, Homo sapien
caggcatcatgagcaaatcctagca

SEQ ID NO: 906971 - DNA, 25 bp, Homo sapien
attggtggttccctagggacttcag

SEQ ID NO: 906972 - DNA, 25 bp, Homo sapien
ttggtggttccctagggacttcagc

SEQ ID NO: 906973 - DNA, 25 bp, Homo sapien
ttctgcctcctgtgaaccatgggcc

SEQ ID NO: 906974 - DNA, 25 bp, Homo sapien
ctgcctcctgtgaaccatgggccat

SEQ ID NO: 906975 - DNA, 25 bp, Homo sapien
gcttctgcctcctgtgaaccatggg

SEQ ID NO: 906976 - DNA, 25 bp, Homo sapien
cagcaactgctcctggagcttctgc

SEQ ID NO: 906977 - DNA, 25 bp, Homo sapien
cgggccatgtggtcaaaggttttga

SEQ ID NO: 906978 - DNA, 25 bp, Homo sapien
gatgcccatccaattctgtggtgga

SEQ ID NO: 906979 - DNA, 25 bp, Homo sapien
tcttctcatcatcctgacgggccat

SEQ ID NO: 906980 - DNA, 25 bp, Homo sapien
tatttcctggactggaactgggact

SEQ ID NO: 906981 - DNA, 25 bp, Homo sapien
tacagttagatggtctttgttgtca

SEQ ID NO: 906982 - DNA, 25 bp, Homo sapien
tcacaatgcaaagaatacacggtcc

SEQ ID NO: 906983 - DNA, 25 bp, Homo sapien
gcaaagaatacacggtcctggtaca

SEQ ID NO: 906984 - DNA, 25 bp, Homo sapien
ctaaaagatgtacagttagatggtc

SEQ ID NO: 906985 - DNA, 25 bp, Homo sapien
gctcccaaaagatctagtccagtaa

SEQ ID NO: 906986 - DNA, 25 bp, Homo sapien
tctccaccaagattattccccaagg

SEQ ID NO: 906987 - DNA, 25 bp, Homo sapien
ccaatagcctatgggcagggactcc

SEQ ID NO: 906988 - DNA, 25 bp, Homo sapien
taagcgatgctgatggttgagaacc

SEQ ID NO: 906989 - DNA, 25 bp, Homo sapien
ttaccaggttaatgagtgctctgtc

SEQ ID NO: 906990 - DNA, 25 bp, Homo sapien
gctgaattggtacgtaaacttgaaa

SEQ ID NO: 906991 - DNA, 25 bp, Homo sapien
tggtcaccaaatcctaacctatgga

SEQ ID NO: 906992 - DNA, 25 bp, Homo sapien
tagtttcagctctacggtgaactgg

SEQ ID NO: 906993 - DNA, 25 bp, Homo sapien
ttctgaaacctcaggacgtccggag

SEQ ID NO: 906994 - DNA, 25 bp, Homo sapien
ggagcgaacacctcagcggaataag

SEQ ID NO: 906995 - DNA, 25 bp, Homo sapien
tgagtagggctcttaacagtcggct

SEQ ID NO: 906996 - DNA, 25 bp, Homo sapien
tctgtctggcctgcatggatttcgc

SEQ ID NO: 906997 - DNA, 25 bp, Homo sapien
tctgtcttgcggtagaggaagccaa

SEQ ID NO: 906998 - DNA, 25 bp, Homo sapien
ggcgcagcaagcgatagaagtctgt

SEQ ID NO: 906999 - DNA, 25 bp, Homo sapien
gcgcaggaaatcctggacgttgccc

SEQ ID NO: 907000 - DNA, 25 bp, Homo sapien
catgcggtccgatgggtggcgcagc

SEQ ID NO: 907001 - DNA, 25 bp, Homo sapien
aaagggcctggtcatacagctcggc

SEQ ID NO: 907002 - DNA, 25 bp, Homo sapien
ggtcatacagctcggccgcccctgt

SEQ ID NO: 907003 - DNA, 25 bp, Homo sapien
tggtcatacagctcggccgcccctg

SEQ ID NO: 907004 - DNA, 25 bp, Homo sapien
gggcctggtcatacagctcggccgc

SEQ ID NO: 907005 - DNA, 25 bp, Homo sapien
tcccgccctaggtacgcttcacaca

SEQ ID NO: 907006 - DNA, 25 bp, Homo sapien
taggtacgcttcacacacacagcgc

SEQ ID NO: 907007 - DNA, 25 bp, Homo sapien
ccctaggtacgcttcacacacacag

SEQ ID NO: 907008 - DNA, 25 bp, Homo sapien
tcgcctcccgccctaggtacgcttc

SEQ ID NO: 907009 - DNA, 25 bp, Homo sapien
gctgcggaacttccggtccgtgctc

SEQ ID NO: 907010 - DNA, 25 bp, Homo sapien
ttccggcgtccgcagccaacggctc

SEQ ID NO: 907011 - DNA, 25 bp, Homo sapien
tgccccacgggctttgccttgaggt

SEQ ID NO: 907012 - DNA, 25 bp, Homo sapien
cggacggcgcggctgcggaacttcc

SEQ ID NO: 907013 - DNA, 25 bp, Homo sapien
tgtatttgataccatatacatgcat

SEQ ID NO: 907014 - DNA, 25 bp, Homo sapien
tgtaccattgtaattttagtatgtg

SEQ ID NO: 907015 - DNA, 25 bp, Homo sapien
tctgtaccattgtaattttagtatg

SEQ ID NO: 907016 - DNA, 25 bp, Homo sapien
ctgtaccattgtaattttagtatgt

SEQ ID NO: 907017 - DNA, 25 bp, Homo sapien
gtaccattgtaattttagtatgtgt

SEQ ID NO: 907018 - DNA, 25 bp, Homo sapien
ttagaactggatcacttggcccttg

SEQ ID NO: 907019 - DNA, 25 bp, Homo sapien
tagaactggatcacttggcccttgc

SEQ ID NO: 907020 - DNA, 25 bp, Homo sapien
tggatcacttggcccttgctcttct

SEQ ID NO: 907021 - DNA, 25 bp, Homo sapien
atcacttggcccttgctcttcttac

SEQ ID NO: 907022 - DNA, 25 bp, Homo sapien
gcagttgggcttcatgcactcaaaa

SEQ ID NO: 907023 - DNA, 25 bp, Homo sapien
cagttgggcttcatgcactcaaaac

SEQ ID NO: 907024 - DNA, 25 bp, Homo sapien
gttgggcttcatgcactcaaaactt

SEQ ID NO: 907025 - DNA, 25 bp, Homo sapien
ttgggcttcatgcactcaaaactta

SEQ ID NO: 907026 - DNA, 25 bp, Homo sapien
gcactattggcactctttgtgtttt

SEQ ID NO: 907027 - DNA, 25 bp, Homo sapien
agcactattggcactctttgtgttt

SEQ ID NO: 907028 - DNA, 25 bp, Homo sapien
ggagcactattggcactctttgtgt

SEQ ID NO: 907029 - DNA, 25 bp, Homo sapien
gagcactattggcactctttgtgtt

SEQ ID NO: 907030 - DNA, 25 bp, Homo sapien
cacacccagggtagtggtcattgtc

SEQ ID NO: 907031 - DNA, 25 bp, Homo sapien
cttcctgggccttatgagagcatcc

SEQ ID NO: 907032 - DNA, 25 bp, Homo sapien
aaaaggccgtggatggcagacctgc

SEQ ID NO: 907033 - DNA, 25 bp, Homo sapien
gggctaatccatgaccaaggtgctt

SEQ ID NO: 907034 - DNA, 25 bp, Homo sapien
tcctccagtgacaggcagtctcatg

SEQ ID NO: 907035 - DNA, 25 bp, Homo sapien
tgacaggcagtctcatgggaatggc

SEQ ID NO: 907036 - DNA, 25 bp, Homo sapien
ggcagtctcatgggaatggcctccc

SEQ ID NO: 907037 - DNA, 25 bp, Homo sapien
caggccatcctccagtgacaggcag

SEQ ID NO: 907038 - DNA, 25 bp, Homo sapien
tcaaggggcagtcacaaggaagatc

SEQ ID NO: 907039 - DNA, 25 bp, Homo sapien
agatccccataaccctttggttcag

SEQ ID NO: 907040 - DNA, 25 bp, Homo sapien
ccctttggttcagggccatagagcc

SEQ ID NO: 907041 - DNA, 25 bp, Homo sapien
ggccatagagcctagacagggcctc

SEQ ID NO: 907042 - DNA, 25 bp, Homo sapien
tcagaactgccgcccattgttgggc

SEQ ID NO: 907043 - DNA, 25 bp, Homo sapien
gaactgccgcccattgttgggcaag

SEQ ID NO: 907044 - DNA, 25 bp, Homo sapien
agaactgccgcccattgttgggcaa

SEQ ID NO: 907045 - DNA, 25 bp, Homo sapien
aactgccgcccattgttgggcaaga

SEQ ID NO: 907046 - DNA, 25 bp, Homo sapien
tgccagagccgggttaacgtcaggc

SEQ ID NO: 907047 - DNA, 25 bp, Homo sapien
atttgggcaagaggccaccatgact

SEQ ID NO: 907048 - DNA, 25 bp, Homo sapien
ttgatagaaccttcaaagctgtggt

SEQ ID NO: 907049 - DNA, 25 bp, Homo sapien
tgacatagatgttgtcagctgtgga

SEQ ID NO: 907050 - DNA, 25 bp, Homo sapien
ccacgtagctgaggatgacgggcag

SEQ ID NO: 907051 - DNA, 25 bp, Homo sapien
gttggtcatggccacacctgcaaac

SEQ ID NO: 907052 - DNA, 25 bp, Homo sapien
gaagaagatctgaatgagctgggcc

SEQ ID NO: 907053 - DNA, 25 bp, Homo sapien
ccaggacaaggatgccaggcaggtt

SEQ ID NO: 907054 - DNA, 25 bp, Homo sapien
gagcgggtaatgtgggacacaaact

SEQ ID NO: 907055 - DNA, 25 bp, Homo sapien
caaaggagcgggtaatgtgggacac

SEQ ID NO: 907056 - DNA, 25 bp, Homo sapien
tgatggcaaaggagcgggtaatgtg

SEQ ID NO: 907057 - DNA, 25 bp, Homo sapien
ggtaatgtgggacacaaactccaca

SEQ ID NO: 907058 - DNA, 25 bp, Homo sapien
cgagaccaggttgatgagggacaca

SEQ ID NO: 907059 - DNA, 25 bp, Homo sapien
acagcattgtaactgatgccccaca

SEQ ID NO: 907060 - DNA, 25 bp, Homo sapien
cagggccatgaagccgacagtgtcc

SEQ ID NO: 907061 - DNA, 25 bp, Homo sapien
agccgacagtgtccacgaggatcat

SEQ ID NO: 907062 - DNA, 25 bp, Homo sapien
gagacagcgaaggtgggcacaaggc

SEQ ID NO: 907063 - DNA, 25 bp, Homo sapien
acagcgaaggtgggcacaaggcaga

SEQ ID NO: 907064 - DNA, 25 bp, Homo sapien
caggagacagcgaaggtgggcacaa

SEQ ID NO: 907065 - DNA, 25 bp, Homo sapien
ctgctcataaaacacattggtgatc

SEQ ID NO: 907066 - DNA, 25 bp, Homo sapien
gcagagcttctgtgtaatcctgtga

SEQ ID NO: 907067 - DNA, 25 bp, Homo sapien
tccgcaggtcagcagtgatgttggc

SEQ ID NO: 907068 - DNA, 25 bp, Homo sapien
caggggcttgtgataggccatgaac

SEQ ID NO: 907069 - DNA, 25 bp, Homo sapien
caaaagccgggtctgttccaggcac

SEQ ID NO: 907070 - DNA, 25 bp, Homo sapien
ctgggtgacagaatggcaactgtgt

SEQ ID NO: 907071 - DNA, 25 bp, Homo sapien
gctctagactaacctagtgcacaca

SEQ ID NO: 907072 - DNA, 25 bp, Homo sapien
ttatgggggcttggctctactgtgt

SEQ ID NO: 907073 - DNA, 25 bp, Homo sapien
taacctagtgcacacacaagaagac

SEQ ID NO: 907074 - DNA, 25 bp, Homo sapien
gctgcagcacctagctggaacttca

SEQ ID NO: 907075 - DNA, 25 bp, Homo sapien
cagaggtgctgtatgctgccaggcc

SEQ ID NO: 907076 - DNA, 25 bp, Homo sapien
aaaacctggccatctgaagtcaagt

SEQ ID NO: 907077 - DNA, 25 bp, Homo sapien
aaacctggccatctgaagtcaagtt

SEQ ID NO: 907078 - DNA, 25 bp, Homo sapien
agaggtgctgtatgctgccaggccg

SEQ ID NO: 907079 - DNA, 25 bp, Homo sapien
tgcagttctttaggcagttcagaga

SEQ ID NO: 907080 - DNA, 25 bp, Homo sapien
gcccatcgtgatgctcatgcagttc

SEQ ID NO: 907081 - DNA, 25 bp, Homo sapien
cctttgggacatttgatgttgggcc

SEQ ID NO: 907082 - DNA, 25 bp, Homo sapien
gaagatacttatggaactgctccac

SEQ ID NO: 907083 - DNA, 25 bp, Homo sapien
ttggggccagatatataaaggcggc

SEQ ID NO: 907084 - DNA, 25 bp, Homo sapien
ccagatatataaaggcggcagcagg

SEQ ID NO: 907085 - DNA, 25 bp, Homo sapien
ggtcgaggggcagaacttgtcctta

SEQ ID NO: 907086 - DNA, 25 bp, Homo sapien
cagaacttgtccttattggggccag

SEQ ID NO: 907087 - DNA, 25 bp, Homo sapien
cagcctcgctggagaagttgtagcc

SEQ ID NO: 907088 - DNA, 25 bp, Homo sapien
ggaaatagtcaagcaggtacgagtc

SEQ ID NO: 907089 - DNA, 25 bp, Homo sapien
cccacctcgaagtagcggttcagaa

SEQ ID NO: 907090 - DNA, 25 bp, Homo sapien
aaggagaagttgttgcagcctgcac

SEQ ID NO: 907091 - DNA, 25 bp, Homo sapien
aggctcactccgaacagggcgagaa

SEQ ID NO: 907092 - DNA, 25 bp, Homo sapien
ccgaacagggcgagaaacagcagca

SEQ ID NO: 907093 - DNA, 25 bp, Homo sapien
atgtggcacatggagtagaggctca

SEQ ID NO: 907094 - DNA, 25 bp, Homo sapien
gagtagaggctcactccgaacaggg

SEQ ID NO: 907095 - DNA, 25 bp, Homo sapien
aacacctcgagtgatccagtgcagc

SEQ ID NO: 907096 - DNA, 25 bp, Homo sapien
cacaacacctcgagtgatccagtgc

SEQ ID NO: 907097 - DNA, 25 bp, Homo sapien
caacacctcgagtgatccagtgcag

SEQ ID NO: 907098 - DNA, 25 bp, Homo sapien
agcagcagacgtccaaccgggaggc

SEQ ID NO: 907099 - DNA, 25 bp, Homo sapien
gtaggaaattggagaatacatggcc

SEQ ID NO: 907100 - DNA, 25 bp, Homo sapien
aatattactctcctggcacaatgcc

SEQ ID NO: 907101 - DNA, 25 bp, Homo sapien
tctctgggccatctctgtggtggta

SEQ ID NO: 907102 - DNA, 25 bp, Homo sapien
tgtggtggtaaagccaccccatctc

SEQ ID NO: 907103 - DNA, 25 bp, Homo sapien
agagcagggccacaaaggctgacat

SEQ ID NO: 907104 - DNA, 25 bp, Homo sapien
tgcctcttgctgtccagggagagca

SEQ ID NO: 907105 - DNA, 25 bp, Homo sapien
gggagagcagggccacaaaggctga

SEQ ID NO: 907106 - DNA, 25 bp, Homo sapien
gcctcttgctgtccagggagagcag

SEQ ID NO: 907107 - DNA, 25 bp, Homo sapien
ggcaaaggtccgcacagctggcatg

SEQ ID NO: 907108 - DNA, 25 bp, Homo sapien
cagggcaaaggtccgcacagctggc

SEQ ID NO: 907109 - DNA, 25 bp, Homo sapien
gtcagggcaaaggtccgcacagctg

SEQ ID NO: 907110 - DNA, 25 bp, Homo sapien
caaaggtccgcacagctggcatggg

SEQ ID NO: 907111 - DNA, 25 bp, Homo sapien
cctgcctagggctcgcccaatgtgg

SEQ ID NO: 907112 - DNA, 25 bp, Homo sapien
ggctcgcccaatgtggacctctcgt

SEQ ID NO: 907113 - DNA, 25 bp, Homo sapien
gcccaatgtggacctctcgtggctc

SEQ ID NO: 907114 - DNA, 25 bp, Homo sapien
ctagggctcgcccaatgtggacctc

SEQ ID NO: 907115 - DNA, 25 bp, Homo sapien
caaagatgaagatgttatcagcccc

SEQ ID NO: 907116 - DNA, 25 bp, Homo sapien
gaggagcggatacccaagtaggaga

SEQ ID NO: 907117 - DNA, 25 bp, Homo sapien
ctggtactcgagaacaaagatgaag

SEQ ID NO: 907118 - DNA, 25 bp, Homo sapien
gaaaggaaccacttgcaggatgacc

SEQ ID NO: 907119 - DNA, 25 bp, Homo sapien
gacaatgtagctggtggcaaagatg

SEQ ID NO: 907120 - DNA, 25 bp, Homo sapien
caaagatgggcaggtcttcagctgt

SEQ ID NO: 907121 - DNA, 25 bp, Homo sapien
ttcagctgtggtgcgattgatctcg

SEQ ID NO: 907122 - DNA, 25 bp, Homo sapien
ggaatatgacaatgtagctggtggc

SEQ ID NO: 907123 - DNA, 25 bp, Homo sapien
gcatttcctctaagaaggcctcctc

SEQ ID NO: 907124 - DNA, 25 bp, Homo sapien
cgctggaaggctcgcatttcctcta

SEQ ID NO: 907125 - DNA, 25 bp, Homo sapien
gagaacgtcatgatcagggcctctg

SEQ ID NO: 907126 - DNA, 25 bp, Homo sapien
gaacatgccagccatccgacgctgg

SEQ ID NO: 907127 - DNA, 25 bp, Homo sapien
gacaggggccccgtagtcagccatg

SEQ ID NO: 907128 - DNA, 25 bp, Homo sapien
ggggccccgtagtcagccatgcagc

SEQ ID NO: 907129 - DNA, 25 bp, Homo sapien
aggggccccgtagtcagccatgcag

SEQ ID NO: 907130 - DNA, 25 bp, Homo sapien
gaagacaggggccccgtagtcagcc

SEQ ID NO: 907131 - DNA, 25 bp, Homo sapien
tcatagaaggcgcagtagccaggct

SEQ ID NO: 907132 - DNA, 25 bp, Homo sapien
tgaccacagcgaagacagagcagag

SEQ ID NO: 907133 - DNA, 25 bp, Homo sapien
tagctggaccggttaggagccgtca

SEQ ID NO: 907134 - DNA, 25 bp, Homo sapien
caggagtcatagctctgctcggcaa

SEQ ID NO: 907135 - DNA, 25 bp, Homo sapien
agcccctcaggccggcctccgccat

SEQ ID NO: 907136 - DNA, 25 bp, Homo sapien
agccagcccctcaggccggcctccg

SEQ ID NO: 907137 - DNA, 25 bp, Homo sapien
caagcgcaggagcagggcccacagc

SEQ ID NO: 907138 - DNA, 25 bp, Homo sapien
agcagccagcccctcaggccggcct

SEQ ID NO: 907139 - DNA, 25 bp, Homo sapien
aggccaggcctcaggaacagccaag

SEQ ID NO: 907140 - DNA, 25 bp, Homo sapien
cccaggtctgggaaggggtcagcgg

SEQ ID NO: 907141 - DNA, 25 bp, Homo sapien
aaggggtcagcggggagccaggcca

SEQ ID NO: 907142 - DNA, 25 bp, Homo sapien
ccaggccaggcctcaggaacagcca

SEQ ID NO: 907143 - DNA, 25 bp, Homo sapien
cctgcaagctgatgggtagccttca

SEQ ID NO: 907144 - DNA, 25 bp, Homo sapien
gatggtccccctcaacacaaaactg

SEQ ID NO: 907145 - DNA, 25 bp, Homo sapien
tgggtagccttcatcctggaccctt

SEQ ID NO: 907146 - DNA, 25 bp, Homo sapien
tgatgggtagccttcatcctggacc

SEQ ID NO: 907147 - DNA, 25 bp, Homo sapien
cttgaaccaacaagttgtacagtga

SEQ ID NO: 907148 - DNA, 25 bp, Homo sapien
ttgaaccaacaagttgtacagtgag

SEQ ID NO: 907149 - DNA, 25 bp, Homo sapien
cggggggcacagagtccagctccat

SEQ ID NO: 907150 - DNA, 25 bp, Homo sapien
gacaaacatgagacccgtggaggac

SEQ ID NO: 907151 - DNA, 25 bp, Homo sapien
tgagacccgtggaggacgaggatga

SEQ ID NO: 907152 - DNA, 25 bp, Homo sapien
ctgcacggggggcacagagtccagc

SEQ ID NO: 907153 - DNA, 25 bp, Homo sapien
tgaatactgctaaccaccaaactgc

SEQ ID NO: 907154 - DNA, 25 bp, Homo sapien
tcagcactccatgaagccaggtggg

SEQ ID NO: 907155 - DNA, 25 bp, Homo sapien
catacacactggcttcgtggaaatc

SEQ ID NO: 907156 - DNA, 25 bp, Homo sapien
gcagcgatgcccactgatagggtct

SEQ ID NO: 907157 - DNA, 25 bp, Homo sapien
tgccccggctcctctaaggaagagc

SEQ ID NO: 907158 - DNA, 25 bp, Homo sapien
cacagctgtcttccgaagtttcccg

SEQ ID NO: 907159 - DNA, 25 bp, Homo sapien
tcaacagttgttcagaaagggacca

SEQ ID NO: 907160 - DNA, 25 bp, Homo sapien
ggcagctcggcacagctgacctctg

SEQ ID NO: 907161 - DNA, 25 bp, Homo sapien
agagcctcgcctgtccacgaagggt

SEQ ID NO: 907162 - DNA, 25 bp, Homo sapien
tgtgcagtaagcaccagagcctcgc

SEQ ID NO: 907163 - DNA, 25 bp, Homo sapien
ccacaatgtgctcagctccagagag

SEQ ID NO: 907164 - DNA, 25 bp, Homo sapien
tccacgaagggtgtaagcctgtgct

SEQ ID NO: 907165 - DNA, 25 bp, Homo sapien
gggcttggctgtgggtctgaatttc

SEQ ID NO: 907166 - DNA, 25 bp, Homo sapien
cttgaagctgcgcagtgggttctgg

SEQ ID NO: 907167 - DNA, 25 bp, Homo sapien
cttggctgtgggtctgaatttcttt

SEQ ID NO: 907168 - DNA, 25 bp, Homo sapien
tgcgcagtgggttctgggactttgc

SEQ ID NO: 907169 - DNA, 25 bp, Homo sapien
cggcaactggccaacacgaccagaa

SEQ ID NO: 907170 - DNA, 25 bp, Homo sapien
gcaactggccaacacgaccagaagg

SEQ ID NO: 907171 - DNA, 25 bp, Homo sapien
aactggccaacacgaccagaaggtg

SEQ ID NO: 907172 - DNA, 25 bp, Homo sapien
gagccgtgccggcaactggccaaca

SEQ ID NO: 907173 - DNA, 25 bp, Homo sapien
ttccgcttcttgtgagggcgcacca

SEQ ID NO: 907174 - DNA, 25 bp, Homo sapien
cgcttcttgtgagggcgcaccaggc

SEQ ID NO: 907175 - DNA, 25 bp, Homo sapien
ttcttccgcttcttgtgagggcgca

SEQ ID NO: 907176 - DNA, 25 bp, Homo sapien
tcttccgcttcttgtgagggcgcac

SEQ ID NO: 907177 - DNA, 25 bp, Homo sapien
agcagctgctaatcttgagtctttt

SEQ ID NO: 907178 - DNA, 25 bp, Homo sapien
ttcagcagctgctaatcttgagtct

SEQ ID NO: 907179 - DNA, 25 bp, Homo sapien
cttcagcagctgctaatcttgagtc

SEQ ID NO: 907180 - DNA, 25 bp, Homo sapien
gggtgcaaaggtaggtcatgccgca

SEQ ID NO: 907181 - DNA, 25 bp, Homo sapien
gtcatgccgcagcagctggaggtcc

SEQ ID NO: 907182 - DNA, 25 bp, Homo sapien
tgcaaaggtaggtcatgccgcagca

SEQ ID NO: 907183 - DNA, 25 bp, Homo sapien
aaggtaggtcatgccgcagcagctg

SEQ ID NO: 907184 - DNA, 25 bp, Homo sapien
gaagctcttccttgatctccttcaa

SEQ ID NO: 907185 - DNA, 25 bp, Homo sapien
ttgcctcccgaatggcctgcttagt

SEQ ID NO: 907186 - DNA, 25 bp, Homo sapien
gcttagtcactgagcgcatggcatc

SEQ ID NO: 907187 - DNA, 25 bp, Homo sapien
tccttcaatcttgcctcccgaatgg

SEQ ID NO: 907188 - DNA, 25 bp, Homo sapien
tcctccatccggaactggtagggga

SEQ ID NO: 907189 - DNA, 25 bp, Homo sapien
tccatccggaactggtaggggagca

SEQ ID NO: 907190 - DNA, 25 bp, Homo sapien
cctgcagcgatagcggaagccctcg

SEQ ID NO: 907191 - DNA, 25 bp, Homo sapien
agcgatagcggaagccctcgatctc

SEQ ID NO: 907192 - DNA, 25 bp, Homo sapien
cactcaacgctcatgaggcagacag

SEQ ID NO: 907193 - DNA, 25 bp, Homo sapien
tctcccaaggagtaccccatggtat

SEQ ID NO: 907194 - DNA, 25 bp, Homo sapien
tgggatgccgaacatgcaggttagc

SEQ ID NO: 907195 - DNA, 25 bp, Homo sapien
cccatggtattccttgggagtcaag

SEQ ID NO: 907196 - DNA, 25 bp, Homo sapien
ggaactgctccgtgggaagcacaaa

SEQ ID NO: 907197 - DNA, 25 bp, Homo sapien
tatgcctgggttgttagcgcgtgct

SEQ ID NO: 907198 - DNA, 25 bp, Homo sapien
gcacaaaggttaagactatgcctgg

SEQ ID NO: 907199 - DNA, 25 bp, Homo sapien
cctcaatcttgcctaagtggaactg

SEQ ID NO: 907200 - DNA, 25 bp, Homo sapien
tgcagatgcctgggccgtcacacta

SEQ ID NO: 907201 - DNA, 25 bp, Homo sapien
gatgcctgggccgtcacactactac

SEQ ID NO: 907202 - DNA, 25 bp, Homo sapien
catgcagatgcctgggccgtcacac

SEQ ID NO: 907203 - DNA, 25 bp, Homo sapien
cagatgcctgggccgtcacactact

SEQ ID NO: 907204 - DNA, 25 bp, Homo sapien
gaagatcaaagttgagcacagcaga

SEQ ID NO: 907205 - DNA, 25 bp, Homo sapien
ttgagcacagcagacacatggtgga

SEQ ID NO: 907206 - DNA, 25 bp, Homo sapien
cagctcgatggatgtaggcctcagg

SEQ ID NO: 907207 - DNA, 25 bp, Homo sapien
atggtggaagtctatgccccgggcc

SEQ ID NO: 907208 - DNA, 25 bp, Homo sapien
tatgacacagtcgtagaagccttgg

SEQ ID NO: 907209 - DNA, 25 bp, Homo sapien
tcggccccgacgcttgcccttgact

SEQ ID NO: 907210 - DNA, 25 bp, Homo sapien
aagccttggttgaactgtgagatga

SEQ ID NO: 907211 - DNA, 25 bp, Homo sapien
agcatcagttgctatgacacagtcg

SEQ ID NO: 907212 - DNA, 25 bp, Homo sapien
ccaagaacaggcgtagccggtaact

SEQ ID NO: 907213 - DNA, 25 bp, Homo sapien
tgaaactgctgtaactggtctggcc

SEQ ID NO: 907214 - DNA, 25 bp, Homo sapien
tctagagtgttgacaaagagcagag

SEQ ID NO: 907215 - DNA, 25 bp, Homo sapien
gagacttgccccgaatcaatgacag

SEQ ID NO: 907216 - DNA, 25 bp, Homo sapien
aagcctggtaaatccggggcaagtg

SEQ ID NO: 907217 - DNA, 25 bp, Homo sapien
gagtgcttgtacgtcctcgttaaaa

SEQ ID NO: 907218 - DNA, 25 bp, Homo sapien
gtaatatcagctccttgagtgcttg

SEQ ID NO: 907219 - DNA, 25 bp, Homo sapien
gtcctcgttaaaagtagctgacatg

SEQ ID NO: 907220 - DNA, 25 bp, Homo sapien
agaaggtcagcttcgtccaccacca

SEQ ID NO: 907221 - DNA, 25 bp, Homo sapien
aaagaaggtcagcttcgtccaccac

SEQ ID NO: 907222 - DNA, 25 bp, Homo sapien
ggtcagcttcgtccaccaccaaaag

SEQ ID NO: 907223 - DNA, 25 bp, Homo sapien
gagactcttgagctcttcttcaaag

SEQ ID NO: 907224 - DNA, 25 bp, Homo sapien
agcacagtaggtagccagctgctga

SEQ ID NO: 907225 - DNA, 25 bp, Homo sapien
cgtgccagctccttggtaggaacaa

SEQ ID NO: 907226 - DNA, 25 bp, Homo sapien
gccgtgccagctccttggtaggaac

SEQ ID NO: 907227 - DNA, 25 bp, Homo sapien
ggactgtgcttgccgtgccagctcc

SEQ ID NO: 907228 - DNA, 25 bp, Homo sapien
ccttctagggccagtgggatggcct

SEQ ID NO: 907229 - DNA, 25 bp, Homo sapien
aggtcgcgaccagcccagatcggtg

SEQ ID NO: 907230 - DNA, 25 bp, Homo sapien
ttctcctggatcagcgtaggtcgcg

SEQ ID NO: 907231 - DNA, 25 bp, Homo sapien
cagcatcggaatagcataagcggcc

SEQ ID NO: 907232 - DNA, 25 bp, Homo sapien
cgcagagcccgtaagccggctcccc

SEQ ID NO: 907233 - DNA, 25 bp, Homo sapien
gtgaagagcgatggcgcgccccgca

SEQ ID NO: 907234 - DNA, 25 bp, Homo sapien
tttaagcggcgtgaagagcgatggc

SEQ ID NO: 907235 - DNA, 25 bp, Homo sapien
ggagaccaggagtgcggtttaagcg

SEQ ID NO: 907236 - DNA, 25 bp, Homo sapien
ggatcgaggcccatgtgttcgaagc

SEQ ID NO: 907237 - DNA, 25 bp, Homo sapien
gaggcccatgtgttcgaagcccagt

SEQ ID NO: 907238 - DNA, 25 bp, Homo sapien
cccatgtgttcgaagcccagtgctt

SEQ ID NO: 907239 - DNA, 25 bp, Homo sapien
tcgaggcccatgtgttcgaagccca

SEQ ID NO: 907240 - DNA, 25 bp, Homo sapien
tgctcagtagcgcagcacgcacgcg

SEQ ID NO: 907241 - DNA, 25 bp, Homo sapien
ggcgctgctcagtagcgcagcacgc

SEQ ID NO: 907242 - DNA, 25 bp, Homo sapien
gctgctcagtagcgcagcacgcacg

SEQ ID NO: 907243 - DNA, 25 bp, Homo sapien
gcgctgctcagtagcgcagcacgca

SEQ ID NO: 907244 - DNA, 25 bp, Homo sapien
ttccggtactcggacggagctctgc

SEQ ID NO: 907245 - DNA, 25 bp, Homo sapien
caaccaatcggcttcggagacgaag

SEQ ID NO: 907246 - DNA, 25 bp, Homo sapien
ttggactacagagccgctccactgg

SEQ ID NO: 907247 - DNA, 25 bp, Homo sapien
tgcgactgcgcagtccctaggactg

SEQ ID NO: 907248 - DNA, 25 bp, Homo sapien
cgacctgcaggagaagcctcggccg

SEQ ID NO: 907249 - DNA, 25 bp, Homo sapien
ttctcgcgacctgcaggagaagcct

SEQ ID NO: 907250 - DNA, 25 bp, Homo sapien
cgagggccgaggtcgtgacgggcat

SEQ ID NO: 907251 - DNA, 25 bp, Homo sapien
ctgattctcgcgacctgcaggagaa

SEQ ID NO: 907252 - DNA, 25 bp, Homo sapien
tcaccctatgaatggagccactgag

SEQ ID NO: 907253 - DNA, 25 bp, Homo sapien
tcaacccacccttgctggaggaagg

SEQ ID NO: 907254 - DNA, 25 bp, Homo sapien
taaccggactgcctgtcagaaacct

SEQ ID NO: 907255 - DNA, 25 bp, Homo sapien
gaataatgagccatggcagcaactg

SEQ ID NO: 907256 - DNA, 25 bp, Homo sapien
tgaaggctggctcaaccctaatctg

SEQ ID NO: 907257 - DNA, 25 bp, Homo sapien
taggtacaactagtcccagtgagag

SEQ ID NO: 907258 - DNA, 25 bp, Homo sapien
caacaggtagtcatgctgggaccaa

SEQ ID NO: 907259 - DNA, 25 bp, Homo sapien
taagaatggagtgtcccctcaaccc

SEQ ID NO: 907260 - DNA, 25 bp, Homo sapien
gtgaagtccactccaggttatctgc

SEQ ID NO: 907261 - DNA, 25 bp, Homo sapien
tgactgagagggctaagaaggtact

SEQ ID NO: 907262 - DNA, 25 bp, Homo sapien
caggccaagccttagtaccacgagt

SEQ ID NO: 907263 - DNA, 25 bp, Homo sapien
tatctgcataggtagcccaggcacc

SEQ ID NO: 907264 - DNA, 25 bp, Homo sapien
catgttttatttcactggaaaattc

SEQ ID NO: 907265 - DNA, 25 bp, Homo sapien
tgttttatttcactggaaaattctg

SEQ ID NO: 907266 - DNA, 25 bp, Homo sapien
aacatgttttatttcactggaaaat

SEQ ID NO: 907267 - DNA, 25 bp, Homo sapien
acaacatgttttatttcactggaaa

SEQ ID NO: 907268 - DNA, 25 bp, Homo sapien
cacctactgcgtaagtggacaaaga

SEQ ID NO: 907269 - DNA, 25 bp, Homo sapien
ctgaaatcctaggagctgccatggg

SEQ ID NO: 907270 - DNA, 25 bp, Homo sapien
tgatacggccttgaggtcagccctg

SEQ ID NO: 907271 - DNA, 25 bp, Homo sapien
gaaaatcactcgaggcaaaagaagc

SEQ ID NO: 907272 - DNA, 25 bp, Homo sapien
tgaggtgacgcatctgccagatgcc

SEQ ID NO: 907273 - DNA, 25 bp, Homo sapien
taggaccctctggttggtgctctcg

SEQ ID NO: 907274 - DNA, 25 bp, Homo sapien
tcgctcgtcagtcggaagcgctctt

SEQ ID NO: 907275 - DNA, 25 bp, Homo sapien
tgagcaatggaccaccataggaccc

SEQ ID NO: 907276 - DNA, 25 bp, Homo sapien
atagggtagtcaggatcatagagac

SEQ ID NO: 907277 - DNA, 25 bp, Homo sapien
tgactactgaaagcgaaatgtggca

SEQ ID NO: 907278 - DNA, 25 bp, Homo sapien
taagtacagatttgctgggtgcagt

SEQ ID NO: 907279 - DNA, 25 bp, Homo sapien
gatgatggtgttggtagcacaacat

SEQ ID NO: 907280 - DNA, 25 bp, Homo sapien
atagtgggtataaaggtcaactgcc

SEQ ID NO: 907281 - DNA, 25 bp, Homo sapien
caaacaacctatctaaaccaatact

SEQ ID NO: 907282 - DNA, 25 bp, Homo sapien
gaaacttgagtaggtatagtgggta

SEQ ID NO: 907283 - DNA, 25 bp, Homo sapien
ccaatacttctcattccattctctg

SEQ ID NO: 907284 - DNA, 25 bp, Homo sapien
ggtaatcctgctccttctgaatctg

SEQ ID NO: 907285 - DNA, 25 bp, Homo sapien
ttggtaatcctgctccttctgaatc

SEQ ID NO: 907286 - DNA, 25 bp, Homo sapien
cctttggtaatcctgctccttctga

SEQ ID NO: 907287 - DNA, 25 bp, Homo sapien
ctttggtaatcctgctccttctgaa

SEQ ID NO: 907288 - DNA, 25 bp, Homo sapien
tcttttgcagcaatctcagggtagt

SEQ ID NO: 907289 - DNA, 25 bp, Homo sapien
ccccaacctggatgtcgagatgcac

SEQ ID NO: 907290 - DNA, 25 bp, Homo sapien
ggagctgtagctccgtcagcttatc

SEQ ID NO: 907291 - DNA, 25 bp, Homo sapien
tagttgttggcatgctccccaacct

SEQ ID NO: 907292 - DNA, 25 bp, Homo sapien
agtttgccaccagcgaagagagcca

SEQ ID NO: 907293 - DNA, 25 bp, Homo sapien
cagtttgccaccagcgaagagagcc

SEQ ID NO: 907294 - DNA, 25 bp, Homo sapien
gtttgccaccagcgaagagagccat

SEQ ID NO: 907295 - DNA, 25 bp, Homo sapien
cctggtagaattggagtgcagacag

SEQ ID NO: 907296 - DNA, 25 bp, Homo sapien
tgtgggaggtgaacgtgaagcggcc

SEQ ID NO: 907297 - DNA, 25 bp, Homo sapien
gaattggagtgcagacagatttgat

SEQ ID NO: 907298 - DNA, 25 bp, Homo sapien
cagatttgatggtcaccgggcgtgt

SEQ ID NO: 907299 - DNA, 25 bp, Homo sapien
agccgtactgccgggacagcaccac

SEQ ID NO: 907300 - DNA, 25 bp, Homo sapien
ccgagccgtactgccgggacagcac

SEQ ID NO: 907301 - DNA, 25 bp, Homo sapien
gagccgtactgccgggacagcacca

SEQ ID NO: 907302 - DNA, 25 bp, Homo sapien
ctccgagccgtactgccgggacagc

SEQ ID NO: 907303 - DNA, 25 bp, Homo sapien
tcccacatctgggtacgatagttgc

SEQ ID NO: 907304 - DNA, 25 bp, Homo sapien
ttcacttccacgtgcatgcccaggc

SEQ ID NO: 907305 - DNA, 25 bp, Homo sapien
tctgcttatcccacatctgggtacg

SEQ ID NO: 907306 - DNA, 25 bp, Homo sapien
gacctccttctgcttatcccacatc

SEQ ID NO: 907307 - DNA, 25 bp, Homo sapien
tgagctgggtacaaagggcctcccc

SEQ ID NO: 907308 - DNA, 25 bp, Homo sapien
caccctcaggctaggtactggggga

SEQ ID NO: 907309 - DNA, 25 bp, Homo sapien
tccgacgtgcggcccggagctctag

SEQ ID NO: 907310 - DNA, 25 bp, Homo sapien
acatagtcacgaccggccctagtgg

SEQ ID NO: 907311 - DNA, 25 bp, Homo sapien
gcgcctgtggcgcacagcgcgagaa

SEQ ID NO: 907312 - DNA, 25 bp, Homo sapien
gggatttcctcgatgaaacagcgct

SEQ ID NO: 907313 - DNA, 25 bp, Homo sapien
tgaaacagcgcttctcggtctcgcc

SEQ ID NO: 907314 - DNA, 25 bp, Homo sapien
tcgccgatgtggaagtagagcccct

SEQ ID NO: 907315 - DNA, 25 bp, Homo sapien
gcccctaagcgcctgcgcacatttg

SEQ ID NO: 907316 - DNA, 25 bp, Homo sapien
atttgcgcatcgctctgcgcctgcg

SEQ ID NO: 907317 - DNA, 25 bp, Homo sapien
ctgcgcacatttgcgcatcgctctg

SEQ ID NO: 907318 - DNA, 25 bp, Homo sapien
taagcgcctgcgcacatttgcgcat

SEQ ID NO: 907319 - DNA, 25 bp, Homo sapien
aagccttcagtggaaactgtctcca

SEQ ID NO: 907320 - DNA, 25 bp, Homo sapien
caagtggcacccaaaacctgcactg

SEQ ID NO: 907321 - DNA, 25 bp, Homo sapien
gagactgcgtcagaaagtgctgcca

SEQ ID NO: 907322 - DNA, 25 bp, Homo sapien
tgacagagtgccaggcgcattccat

SEQ ID NO: 907323 - DNA, 25 bp, Homo sapien
gacaggtaaccgtgcgctgtcgccg

SEQ ID NO: 907324 - DNA, 25 bp, Homo sapien
agtgccgggtgtcgcggcgcttggc

SEQ ID NO: 907325 - DNA, 25 bp, Homo sapien
tcattcgggtggagctgagccggag

SEQ ID NO: 907326 - DNA, 25 bp, Homo sapien
ccgcgcccgtcccagtgccgggtgt

SEQ ID NO: 907327 - DNA, 25 bp, Homo sapien
gaaagacagtgtggcctgctcgagt

SEQ ID NO: 907328 - DNA, 25 bp, Homo sapien
gactgcctgtttggattaccgcgca

SEQ ID NO: 907329 - DNA, 25 bp, Homo sapien
gaccgcgtcgctttgtccgaaagac

SEQ ID NO: 907330 - DNA, 25 bp, Homo sapien
cgaacagattgaccgagatgaagct

SEQ ID NO: 907331 - DNA, 25 bp, Homo sapien
taagagtaccggagtctgcaccatg

SEQ ID NO: 907332 - DNA, 25 bp, Homo sapien
tgttgagttgaagaactctttgcct

SEQ ID NO: 907333 - DNA, 25 bp, Homo sapien
tcaggtgatccggtgatcctcacac

SEQ ID NO: 907334 - DNA, 25 bp, Homo sapien
tgcctagcccaaattcctgaagatt

SEQ ID NO: 907335 - DNA, 25 bp, Homo sapien
cataaggtaaggctcgcagggctgt

SEQ ID NO: 907336 - DNA, 25 bp, Homo sapien
ctttctcagtgggactagttcgaac

SEQ ID NO: 907337 - DNA, 25 bp, Homo sapien
ttcgaactatgtggaggagatgtac

SEQ ID NO: 907338 - DNA, 25 bp, Homo sapien
taggacatttcaacagattcggtgc

SEQ ID NO: 907339 - DNA, 25 bp, Homo sapien
ggattggcgtccagcagtagacact

SEQ ID NO: 907340 - DNA, 25 bp, Homo sapien
gacactgtgcttaactctgcgagga

SEQ ID NO: 907341 - DNA, 25 bp, Homo sapien
tgaagaagcatgtgtgtgaccctcc

SEQ ID NO: 907342 - DNA, 25 bp, Homo sapien
taagtgtgtgcgtcctgaggagtca

SEQ ID NO: 907343 - DNA, 25 bp, Homo sapien
gaacagaatccggttaactagctga

SEQ ID NO: 907344 - DNA, 25 bp, Homo sapien
cagaatccggttaactagctgacct

SEQ ID NO: 907345 - DNA, 25 bp, Homo sapien
cccagaacagaatccggttaactag

SEQ ID NO: 907346 - DNA, 25 bp, Homo sapien
aatccggttaactagctgacctggg

SEQ ID NO: 907347 - DNA, 25 bp, Homo sapien
cagctgtagcatggtgttgagttcc

SEQ ID NO: 907348 - DNA, 25 bp, Homo sapien
ctggggcctgttgttcttctcccaa

SEQ ID NO: 907349 - DNA, 25 bp, Homo sapien
tgtagcatggtgttgagttccttgt

SEQ ID NO: 907350 - DNA, 25 bp, Homo sapien
ctacagctgtagcatggtgttgagt

SEQ ID NO: 907351 - DNA, 25 bp, Homo sapien
cattggtggtcagagaattaactgt

SEQ ID NO: 907352 - DNA, 25 bp, Homo sapien
acattgtcattggtggtcagagaat

SEQ ID NO: 907353 - DNA, 25 bp, Homo sapien
ccccttatcagtgacattgtcattg

SEQ ID NO: 907354 - DNA, 25 bp, Homo sapien
ttttcccccttatcagtgacattgt

SEQ ID NO: 907355 - DNA, 25 bp, Homo sapien
ttagttgtgcaacagaagccaatta

SEQ ID NO: 907356 - DNA, 25 bp, Homo sapien
gagattggagagatgaataacacta

SEQ ID NO: 907357 - DNA, 25 bp, Homo sapien
cactagtgatgggttgcaacttggg

SEQ ID NO: 907358 - DNA, 25 bp, Homo sapien
gttattagttgtgcaacagaagcca

SEQ ID NO: 907359 - DNA, 25 bp, Homo sapien
caaaacattcgaacaggagaggagc

SEQ ID NO: 907360 - DNA, 25 bp, Homo sapien
actgtgcacgttagtataaccaggg

SEQ ID NO: 907361 - DNA, 25 bp, Homo sapien
ttccagaacctgcattgtcccagct

SEQ ID NO: 907362 - DNA, 25 bp, Homo sapien
gcagatgaagtgactgacttctccc

SEQ ID NO: 907363 - DNA, 25 bp, Homo sapien
tatccctgaatggatccagtcagag

SEQ ID NO: 907364 - DNA, 25 bp, Homo sapien
tagtggcagcccaacgtcttctggt

SEQ ID NO: 907365 - DNA, 25 bp, Homo sapien
cactggctcttgaagaagggtcatc

SEQ ID NO: 907366 - DNA, 25 bp, Homo sapien
ccatagtgaggttccttgacagcaa

SEQ ID NO: 907367 - DNA, 25 bp, Homo sapien
tcaaccagccttggattagtggaat

SEQ ID NO: 907368 - DNA, 25 bp, Homo sapien
taagagtggatagccttatgccctg

SEQ ID NO: 907369 - DNA, 25 bp, Homo sapien
ttaatgctaatgtcgtggtagacga

SEQ ID NO: 907370 - DNA, 25 bp, Homo sapien
taagggtaaaagcactgagtctttc

SEQ ID NO: 907371 - DNA, 25 bp, Homo sapien
ccttcgctgaaacctctgtgatggg

SEQ ID NO: 907372 - DNA, 25 bp, Homo sapien
ttgtagacactgttccccactgtgg

SEQ ID NO: 907373 - DNA, 25 bp, Homo sapien
caccaccttgttattgccagcagag

SEQ ID NO: 907374 - DNA, 25 bp, Homo sapien
tggaagtccttctcccactcaagta

SEQ ID NO: 907375 - DNA, 25 bp, Homo sapien
tcactgtgttgaccatgttgactgg

SEQ ID NO: 907376 - DNA, 25 bp, Homo sapien
cactgtgttgaccatgttgactggt

SEQ ID NO: 907377 - DNA, 25 bp, Homo sapien
taacccaatggagactttctgatgc

SEQ ID NO: 907378 - DNA, 25 bp, Homo sapien
tgctgtgccaaagcaggtcagaaga

SEQ ID NO: 907379 - DNA, 25 bp, Homo sapien
ctgatgcatcgttttctttgctgtg

SEQ ID NO: 907380 - DNA, 25 bp, Homo sapien
gctgcccctcatttatcactctgac

SEQ ID NO: 907381 - DNA, 25 bp, Homo sapien
gacagggggagtgatgaccaccacc

SEQ ID NO: 907382 - DNA, 25 bp, Homo sapien
gaaaaagtactctgcactctgtgcc

SEQ ID NO: 907383 - DNA, 25 bp, Homo sapien
gctccaccttgaaaaagtactctgc

SEQ ID NO: 907384 - DNA, 25 bp, Homo sapien
ggcaaagccgtcattgtgaatgcgg

SEQ ID NO: 907385 - DNA, 25 bp, Homo sapien
tcctgttgtcgctttgcagcatggc

SEQ ID NO: 907386 - DNA, 25 bp, Homo sapien
aaggttcttctgatggaagcatgac

SEQ ID NO: 907387 - DNA, 25 bp, Homo sapien
ttcttctgatggaagcatgaccacc

SEQ ID NO: 907388 - DNA, 25 bp, Homo sapien
ctgggtccccggatttgtcctgttg

SEQ ID NO: 907389 - DNA, 25 bp, Homo sapien
acccaagtactactgctggtgatgg

SEQ ID NO: 907390 - DNA, 25 bp, Homo sapien
aaggtacttctggatccgaaatatc

SEQ ID NO: 907391 - DNA, 25 bp, Homo sapien
tatctaagctagatgtgagagcgtc

SEQ ID NO: 907392 - DNA, 25 bp, Homo sapien
gccaacatccttgcgcttttctgga

SEQ ID NO: 907393 - DNA, 25 bp, Homo sapien
tccccagcagtctggttgcttaggg

SEQ ID NO: 907394 - DNA, 25 bp, Homo sapien
tccaggctgcacaaagaggacctgg

SEQ ID NO: 907395 - DNA, 25 bp, Homo sapien
gacctggagaggaactaggtggccc

SEQ ID NO: 907396 - DNA, 25 bp, Homo sapien
ttgcttagggggctgtcctccctcc

SEQ ID NO: 907397 - DNA, 25 bp, Homo sapien
gtagtgggtacagaagatcaggggc

SEQ ID NO: 907398 - DNA, 25 bp, Homo sapien
cagtagtgggtacagaagatcaggg

SEQ ID NO: 907399 - DNA, 25 bp, Homo sapien
tcagtagtgggtacagaagatcagg

SEQ ID NO: 907400 - DNA, 25 bp, Homo sapien
agtagtgggtacagaagatcagggg

SEQ ID NO: 907401 - DNA, 25 bp, Homo sapien
ccaggggcctgctggtcatgggcaa

SEQ ID NO: 907402 - DNA, 25 bp, Homo sapien
cctgagtctttgttggaggctggcc

SEQ ID NO: 907403 - DNA, 25 bp, Homo sapien
gtgggcgtcagggtcatccagccct

SEQ ID NO: 907404 - DNA, 25 bp, Homo sapien
gtcttgggcaggctcggccccgtgg

SEQ ID NO: 907405 - DNA, 25 bp, Homo sapien
cacgcgtgcgtcgtggtcttgggca

SEQ ID NO: 907406 - DNA, 25 bp, Homo sapien
gggccgtctgaggccgtcacctgct

SEQ ID NO: 907407 - DNA, 25 bp, Homo sapien
ctgctcgcggaggagctgttccgct

SEQ ID NO: 907408 - DNA, 25 bp, Homo sapien
gccgtcacctgctcgcggaggagct

SEQ ID NO: 907409 - DNA, 25 bp, Homo sapien
cacctgctcgcggaggagctgttcc

SEQ ID NO: 907410 - DNA, 25 bp, Homo sapien
tgggctgaacgacgctgagcggcca

SEQ ID NO: 907411 - DNA, 25 bp, Homo sapien
ctgggctgaacgacgctgagcggcc

SEQ ID NO: 907412 - DNA, 25 bp, Homo sapien
caagttctggcaagctagaaccaga

SEQ ID NO: 907413 - DNA, 25 bp, Homo sapien
accaagttctggcaagctagaacca

SEQ ID NO: 907414 - DNA, 25 bp, Homo sapien
ttctggcaagctagaaccagagggc

SEQ ID NO: 907415 - DNA, 25 bp, Homo sapien
ctggcaagctagaaccagagggcat

SEQ ID NO: 907416 - DNA, 25 bp, Homo sapien
ccaaggaccccgctcctgcaacatt

SEQ ID NO: 907417 - DNA, 25 bp, Homo sapien
tttgctaccaaggaccccgctcctg

SEQ ID NO: 907418 - DNA, 25 bp, Homo sapien
tgctaccaaggaccccgctcctgca

SEQ ID NO: 907419 - DNA, 25 bp, Homo sapien
aaggaccccgctcctgcaacattcc

SEQ ID NO: 907420 - DNA, 25 bp, Homo sapien
tagctgcttgcttagttccatatga

SEQ ID NO: 907421 - DNA, 25 bp, Homo sapien
ccactagtaatgtgtgagagatcca

SEQ ID NO: 907422 - DNA, 25 bp, Homo sapien
tgagataaatgcgtacaagtgcagt

SEQ ID NO: 907423 - DNA, 25 bp, Homo sapien
atatgatacggccagactgtttccc

SEQ ID NO: 907424 - DNA, 25 bp, Homo sapien
gatcagggaggaacctccaatgggt

SEQ ID NO: 907425 - DNA, 25 bp, Homo sapien
gattcagctctgtgtaaagattctc

SEQ ID NO: 907426 - DNA, 25 bp, Homo sapien
taaagattctctagcgggctgcgct

SEQ ID NO: 907427 - DNA, 25 bp, Homo sapien
gacagtgagcttcggcctggccgag

SEQ ID NO: 907428 - DNA, 25 bp, Homo sapien
cataggtagaaccagtcatcaaaag

SEQ ID NO: 907429 - DNA, 25 bp, Homo sapien
tctgaaccaacctaaaacacatagg

SEQ ID NO: 907430 - DNA, 25 bp, Homo sapien
ctaattccccgtattcatgtgaggg

SEQ ID NO: 907431 - DNA, 25 bp, Homo sapien
gggccattgagacagcccatcctgc

SEQ ID NO: 907432 - DNA, 25 bp, Homo sapien
tggtggccagtgtaggacatgtcca

SEQ ID NO: 907433 - DNA, 25 bp, Homo sapien
acagcccccatggtggccagtgtag

SEQ ID NO: 907434 - DNA, 25 bp, Homo sapien
cagcaagttcccactagaactctgg

SEQ ID NO: 907435 - DNA, 25 bp, Homo sapien
caggcctcagttctcttgtcacagc

SEQ ID NO: 907436 - DNA, 25 bp, Homo sapien
gaattacaggcgtgatccaccgcac

SEQ ID NO: 907437 - DNA, 25 bp, Homo sapien
agtgcagtggcgccatctctgctcg

SEQ ID NO: 907438 - DNA, 25 bp, Homo sapien
acggagtctctgtctctcaggctgg

SEQ ID NO: 907439 - DNA, 25 bp, Homo sapien
ctgcaacctccacctcctgggttcc

SEQ ID NO: 907440 - DNA, 25 bp, Homo sapien
cgcctggcctacaagtgcattttaa

SEQ ID NO: 907441 - DNA, 25 bp, Homo sapien
tcctaaagcgccaggtatgagccac

SEQ ID NO: 907442 - DNA, 25 bp, Homo sapien
tgtcgaactcctaagatgaagcgat

SEQ ID NO: 907443 - DNA, 25 bp, Homo sapien
taatctctcaaaaccggagactgct

SEQ ID NO: 907444 - DNA, 25 bp, Homo sapien
atcgcttgacaacggccgaagagcc

SEQ ID NO: 907445 - DNA, 25 bp, Homo sapien
aaaacagcgatgctcaaaggcaacc

SEQ ID NO: 907446 - DNA, 25 bp, Homo sapien
tgacattgcctggtaggacgcgacg

SEQ ID NO: 907447 - DNA, 25 bp, Homo sapien
acgcaaggctgctcctaggtctcgg

SEQ ID NO: 907448 - DNA, 25 bp, Homo sapien
cactgtcactctggcgaagtcgcag

SEQ ID NO: 907449 - DNA, 25 bp, Homo sapien
tcagcgccggcttccgtctataggc

SEQ ID NO: 907450 - DNA, 25 bp, Homo sapien
gaggccaggctcgtgccgttttgca

SEQ ID NO: 907451 - DNA, 25 bp, Homo sapien
tctataggccagatgcactgtcact

SEQ ID NO: 907452 - DNA, 25 bp, Homo sapien
gaggaggccgggacggcggcggaca

SEQ ID NO: 907453 - DNA, 25 bp, Homo sapien
ctgcggcgccatttcctgacgaggg

SEQ ID NO: 907454 - DNA, 25 bp, Homo sapien
ccattttgggaggtccgcgagtcgc

SEQ ID NO: 907455 - DNA, 25 bp, Homo sapien
ggcgcggggcgaccctgcttgaggg

SEQ ID NO: 907456 - DNA, 25 bp, Homo sapien
gctttcgtggaaacttggcctgacc

SEQ ID NO: 907457 - DNA, 25 bp, Homo sapien
ttttctcaaggatcgaggcgcggtg

SEQ ID NO: 907458 - DNA, 25 bp, Homo sapien
catagtatctaaacttggcgcgtgt

SEQ ID NO: 907459 - DNA, 25 bp, Homo sapien
taaacgtaccgactataaagctctg

SEQ ID NO: 907460 - DNA, 25 bp, Homo sapien
gcagacaaggtcccaaagacagcag

SEQ ID NO: 907461 - DNA, 25 bp, Homo sapien
ttgcagacaaggtcccaaagacagc

SEQ ID NO: 907462 - DNA, 25 bp, Homo sapien
tttgcagacaaggtcccaaagacag

SEQ ID NO: 907463 - DNA, 25 bp, Homo sapien
ctgtttgcagacaaggtcccaaaga

SEQ ID NO: 907464 - DNA, 25 bp, Homo sapien
actggagagaaaggatttggttata

SEQ ID NO: 907465 - DNA, 25 bp, Homo sapien
ttggttataagggttcctgctttca

SEQ ID NO: 907466 - DNA, 25 bp, Homo sapien
aaaattttcgtgctctgagcactgg

SEQ ID NO: 907467 - DNA, 25 bp, Homo sapien
ggttataagggttcctgctttcaca

SEQ ID NO: 907468 - DNA, 25 bp, Homo sapien
tgaactgttactctaccatttcggt

SEQ ID NO: 907469 - DNA, 25 bp, Homo sapien
gtttgaaccttgcagatttggcaca

SEQ ID NO: 907470 - DNA, 25 bp, Homo sapien
cccttcatttgggattgagccagaa

SEQ ID NO: 907471 - DNA, 25 bp, Homo sapien
tcaggatacacatatctgaactgtt

SEQ ID NO: 907472 - DNA, 25 bp, Homo sapien
tgagaacttcatcctaaagcatacg

SEQ ID NO: 907473 - DNA, 25 bp, Homo sapien
acttcatcctaaagcatacgggtcc

SEQ ID NO: 907474 - DNA, 25 bp, Homo sapien
tcatcctaaagcatacgggtcctgg

SEQ ID NO: 907475 - DNA, 25 bp, Homo sapien
tcctaaagcatacgggtcctggcat

SEQ ID NO: 907476 - DNA, 25 bp, Homo sapien
cctagctggattgcagagttaagtt

SEQ ID NO: 907477 - DNA, 25 bp, Homo sapien
ttgttccctcccatgcctagctgga

SEQ ID NO: 907478 - DNA, 25 bp, Homo sapien
cctagaatctttgtgctctcgctgc

SEQ ID NO: 907479 - DNA, 25 bp, Homo sapien
gcatgtggtgtttggcaaagtgaaa

SEQ ID NO: 907480 - DNA, 25 bp, Homo sapien
tgcttgtagcatatagagcctctcc

SEQ ID NO: 907481 - DNA, 25 bp, Homo sapien
tgcagagggttaaggcgcagactac

SEQ ID NO: 907482 - DNA, 25 bp, Homo sapien
tacagtcagtctccctgcagagggt

SEQ ID NO: 907483 - DNA, 25 bp, Homo sapien
taagatctggtcaaagggataccct

SEQ ID NO: 907484 - DNA, 25 bp, Homo sapien
tgctgtgtcacccactctggagtac

SEQ ID NO: 907485 - DNA, 25 bp, Homo sapien
gctcactgcagcttccacctcccag

SEQ ID NO: 907486 - DNA, 25 bp, Homo sapien
tctggagtacagtggcgtgatctcg

SEQ ID NO: 907487 - DNA, 25 bp, Homo sapien
gttcaagcaattctactgcctcagt

SEQ ID NO: 907488 - DNA, 25 bp, Homo sapien
tacaatagatcaaatgaagcacaca

SEQ ID NO: 907489 - DNA, 25 bp, Homo sapien
tgtgatcacgagctacatacaatag

SEQ ID NO: 907490 - DNA, 25 bp, Homo sapien
tccatcatataagctaggaacaatg

SEQ ID NO: 907491 - DNA, 25 bp, Homo sapien
tatacatgaatgcagacgtttgaag

SEQ ID NO: 907492 - DNA, 25 bp, Homo sapien
tactcatgcaaggaaaagcgctctg

SEQ ID NO: 907493 - DNA, 25 bp, Homo sapien
taaaggactcctcgtgaagagcagg

SEQ ID NO: 907494 - DNA, 25 bp, Homo sapien
ttcataggcataacactgggcaggg

SEQ ID NO: 907495 - DNA, 25 bp, Homo sapien
tgttcagcacattcgggcagttcct

SEQ ID NO: 907496 - DNA, 25 bp, Homo sapien
gaaatactttctacgccaggcacag

SEQ ID NO: 907497 - DNA, 25 bp, Homo sapien
gagctaagcccagagtacatgacct

SEQ ID NO: 907498 - DNA, 25 bp, Homo sapien
gactcaaactgatccctgtgggttg

SEQ ID NO: 907499 - DNA, 25 bp, Homo sapien
ggttggcaacctctaatggaatccc

SEQ ID NO: 907500 - DNA, 25 bp, Homo sapien
gctgttggaggatgggtacacagag

SEQ ID NO: 907501 - DNA, 25 bp, Homo sapien
gggatgcaggtaaacaagactgacc

SEQ ID NO: 907502 - DNA, 25 bp, Homo sapien
cagctgttggaggatgggtacacag

SEQ ID NO: 907503 - DNA, 25 bp, Homo sapien
tggggatgcaggtaaacaagactga

SEQ ID NO: 907504 - DNA, 25 bp, Homo sapien
ggtcagtagagcactctgcaaaggg

SEQ ID NO: 907505 - DNA, 25 bp, Homo sapien
taacagttacttagcgcagggcatg

SEQ ID NO: 907506 - DNA, 25 bp, Homo sapien
aacacacgggagaaacctagccaat

SEQ ID NO: 907507 - DNA, 25 bp, Homo sapien
caggcgtaaaccacaatgccaggcc

SEQ ID NO: 907508 - DNA, 25 bp, Homo sapien
ctgtcccttctttccaatcagagat

SEQ ID NO: 907509 - DNA, 25 bp, Homo sapien
aatcagagatttgtggatgtgaggg

SEQ ID NO: 907510 - DNA, 25 bp, Homo sapien
ctaagcagttttctgctgtcccttc

SEQ ID NO: 907511 - DNA, 25 bp, Homo sapien
atcagagatttgtggatgtgaggga

SEQ ID NO: 907512 - DNA, 25 bp, Homo sapien
ctataccaatggctacaccccaggg

SEQ ID NO: 907513 - DNA, 25 bp, Homo sapien
cattacatatggctagaaggtgaaa

SEQ ID NO: 907514 - DNA, 25 bp, Homo sapien
cacgaggttctttgagggttatcca

SEQ ID NO: 907515 - DNA, 25 bp, Homo sapien
tgtaaccacagctttcacgaggttc

SEQ ID NO: 907516 - DNA, 25 bp, Homo sapien
ggtagccttgataagagaatccaac

SEQ ID NO: 907517 - DNA, 25 bp, Homo sapien
atacaacagacattcctgtacaaac

SEQ ID NO: 907518 - DNA, 25 bp, Homo sapien
agaatcgcagcactgtacacggcag

SEQ ID NO: 907519 - DNA, 25 bp, Homo sapien
tccagaatcgcagcactgtacacgg

SEQ ID NO: 907520 - DNA, 25 bp, Homo sapien
agtgaggtactccagaatcgcagca

SEQ ID NO: 907521 - DNA, 25 bp, Homo sapien
ggtactccagaatcgcagcactgta

SEQ ID NO: 907522 - DNA, 25 bp, Homo sapien
gtggtgcgagtcttcaagtgtctgt

SEQ ID NO: 907523 - DNA, 25 bp, Homo sapien
ttgtggtgcgagtcttcaagtgtct

SEQ ID NO: 907524 - DNA, 25 bp, Homo sapien
caagtgtctgtggatgcggcccaca

SEQ ID NO: 907525 - DNA, 25 bp, Homo sapien
gcttgtggtgcgagtcttcaagtgt

SEQ ID NO: 907526 - DNA, 25 bp, Homo sapien
agctctctgtgagcgagatactgcc

SEQ ID NO: 907527 - DNA, 25 bp, Homo sapien
cgagatactgccttagccttggcct

SEQ ID NO: 907528 - DNA, 25 bp, Homo sapien
gcccagctctctgtgagcgagatac

SEQ ID NO: 907529 - DNA, 25 bp, Homo sapien
gcgagatactgccttagccttggcc

SEQ ID NO: 907530 - DNA, 25 bp, Homo sapien
taagcaggtagctcccgttgaagta

SEQ ID NO: 907531 - DNA, 25 bp, Homo sapien
gcaactcagagcgtatcctttagca

SEQ ID NO: 907532 - DNA, 25 bp, Homo sapien
gaatgcttaaagcacgaataccggc

SEQ ID NO: 907533 - DNA, 25 bp, Homo sapien
taatgaaaaccgcaaactgcaaggg

SEQ ID NO: 907534 - DNA, 25 bp, Homo sapien
cgccggagccggacaataccccgtg

SEQ ID NO: 907535 - DNA, 25 bp, Homo sapien
gacaataccccgtgcccgcctcgcg

SEQ ID NO: 907536 - DNA, 25 bp, Homo sapien
cgcctcgcgctgctgtggccaatgc

SEQ ID NO: 907537 - DNA, 25 bp, Homo sapien
gccgctctcgcagcaccgaccgccg

SEQ ID NO: 907538 - DNA, 25 bp, Homo sapien
gcgatgtcaactcactgcaacttct

SEQ ID NO: 907539 - DNA, 25 bp, Homo sapien
gcttgctgtgtcacgctggaatgca

SEQ ID NO: 907540 - DNA, 25 bp, Homo sapien
aggcttgctgtgtcacgctggaatg

SEQ ID NO: 907541 - DNA, 25 bp, Homo sapien
gtgcgatgtcaactcactgcaactt

SEQ ID NO: 907542 - DNA, 25 bp, Homo sapien
cagagtgacattatggctttgggct

SEQ ID NO: 907543 - DNA, 25 bp, Homo sapien
tcatgtgggtggaccttgatctcaa

SEQ ID NO: 907544 - DNA, 25 bp, Homo sapien
tggatacctagcagatacaaagatg

SEQ ID NO: 907545 - DNA, 25 bp, Homo sapien
gaaacattgcgagacttcatcttaa

SEQ ID NO: 907546 - DNA, 25 bp, Homo sapien
tctaccgaaacgtgcaaaaccatgg

SEQ ID NO: 907547 - DNA, 25 bp, Homo sapien
agtgagatcaacagcccgtctggac

SEQ ID NO: 907548 - DNA, 25 bp, Homo sapien
gagcttcaacctacaggcagtgaga

SEQ ID NO: 907549 - DNA, 25 bp, Homo sapien
tacacccctgtaaagccagtcaagg

SEQ ID NO: 907550 - DNA, 25 bp, Homo sapien
ccctagtgactggagtgaagatcag

SEQ ID NO: 907551 - DNA, 25 bp, Homo sapien
tgattagctgggatgtttgccaagc

SEQ ID NO: 907552 - DNA, 25 bp, Homo sapien
ggaagagaggccatgaaccatccct

SEQ ID NO: 907553 - DNA, 25 bp, Homo sapien
tataccacgtatatgcctccgatag

SEQ ID NO: 907554 - DNA, 25 bp, Homo sapien
tgaaaagggcaccaatgtttgtggc

SEQ ID NO: 907555 - DNA, 25 bp, Homo sapien
tatagcttagtagccactggtgaag

SEQ ID NO: 907556 - DNA, 25 bp, Homo sapien
cttaaaaaggagaggtactgcacct

SEQ ID NO: 907557 - DNA, 25 bp, Homo sapien
taggaatttgttctccgcagcaaag

SEQ ID NO: 907558 - DNA, 25 bp, Homo sapien
gaacaactttagtgagcagcaacca

SEQ ID NO: 907559 - DNA, 25 bp, Homo sapien
tccaccgggtgcactgcttgaatca

SEQ ID NO: 907560 - DNA, 25 bp, Homo sapien
gatagacaccgcaacagtgaggcct

SEQ ID NO: 907561 - DNA, 25 bp, Homo sapien
cttttatgccagattacccaggtgc

SEQ ID NO: 907562 - DNA, 25 bp, Homo sapien
gttccttggaacttgactgcttttc

SEQ ID NO: 907563 - DNA, 25 bp, Homo sapien
gctgagacaattttacgcaggtgag

SEQ ID NO: 907564 - DNA, 25 bp, Homo sapien
cactgttctcttacgattatttctc

SEQ ID NO: 907565 - DNA, 25 bp, Homo sapien
tttctcaagttgtccgtcactgttc

SEQ ID NO: 907566 - DNA, 25 bp, Homo sapien
aagcttatccctctgtcgttcctgg

SEQ ID NO: 907567 - DNA, 25 bp, Homo sapien
gaaacaccccgtatttgttgcagcc

SEQ ID NO: 907568 - DNA, 25 bp, Homo sapien
tctcatccgcataccggcaaaaggc

SEQ ID NO: 907569 - DNA, 25 bp, Homo sapien
tggcattgcggtaggacggcttcac

SEQ ID NO: 907570 - DNA, 25 bp, Homo sapien
gagtccacggtgatggaggtgccct

SEQ ID NO: 907571 - DNA, 25 bp, Homo sapien
ccacggtgatggaggtgccctccgg

SEQ ID NO: 907572 - DNA, 25 bp, Homo sapien
ggagtccacggtgatggaggtgccc

SEQ ID NO: 907573 - DNA, 25 bp, Homo sapien
ggtgatggaggtgccctccgggagc

SEQ ID NO: 907574 - DNA, 25 bp, Homo sapien
tagtcgtctatgagcttcgccagcg

SEQ ID NO: 907575 - DNA, 25 bp, Homo sapien
cgcgtcgcggaactcgatgaggccc

SEQ ID NO: 907576 - DNA, 25 bp, Homo sapien
caggcagcgcgatggtctggccgct

SEQ ID NO: 907577 - DNA, 25 bp, Homo sapien
gtcctcgcctccgtagtcgtctatg

SEQ ID NO: 907578 - DNA, 25 bp, Homo sapien
gttctatgaagtcgcccagcgagtc

SEQ ID NO: 907579 - DNA, 25 bp, Homo sapien
agaattcgctcttgagcgcgcgccg

SEQ ID NO: 907580 - DNA, 25 bp, Homo sapien
ccaccgccatggacagcgtgaggcg

SEQ ID NO: 907581 - DNA, 25 bp, Homo sapien
cgtgaggcggctcttggaaccgccc

SEQ ID NO: 907582 - DNA, 25 bp, Homo sapien
tctgcttcacatctaagtagaagcg

SEQ ID NO: 907583 - DNA, 25 bp, Homo sapien
ggcgttctgcttcacatctaagtag

SEQ ID NO: 907584 - DNA, 25 bp, Homo sapien
ttcacatctaagtagaagcgcttgt

SEQ ID NO: 907585 - DNA, 25 bp, Homo sapien
gcgttctgcttcacatctaagtaga

SEQ ID NO: 907586 - DNA, 25 bp, Homo sapien
ctgcgtctcttgctcgccgccgccg

SEQ ID NO: 907587 - DNA, 25 bp, Homo sapien
ttgctcgccgccgccgcgggacgcg

SEQ ID NO: 907588 - DNA, 25 bp, Homo sapien
tcttgctcgccgccgccgcgggacg

SEQ ID NO: 907589 - DNA, 25 bp, Homo sapien
gctcgccgccgccgcgggacgcggg

SEQ ID NO: 907590 - DNA, 25 bp, Homo sapien
tggaacccgcacggcccaccgccgc

SEQ ID NO: 907591 - DNA, 25 bp, Homo sapien
ctggaacccgcacggcccaccgccg

SEQ ID NO: 907592 - DNA, 25 bp, Homo sapien
tatgatcacacagtttgtatgaccc

SEQ ID NO: 907593 - DNA, 25 bp, Homo sapien
atgatcacacagtttgtatgacccc

SEQ ID NO: 907594 - DNA, 25 bp, Homo sapien
gtatgatcacacagtttgtatgacc

SEQ ID NO: 907595 - DNA, 25 bp, Homo sapien
agtatgatcacacagtttgtatgac

SEQ ID NO: 907596 - DNA, 25 bp, Homo sapien
ttgaggaggtatttcatgtggcaga

SEQ ID NO: 907597 - DNA, 25 bp, Homo sapien
attgaggaggtatttcatgtggcag

SEQ ID NO: 907598 - DNA, 25 bp, Homo sapien
taaacttacagaacagctgcaataa

SEQ ID NO: 907599 - DNA, 25 bp, Homo sapien
aaaatgttaacatcacggtgtttgt

SEQ ID NO: 907600 - DNA, 25 bp, Homo sapien
ggtgtttgtgtcattacgcttttca

SEQ ID NO: 907601 - DNA, 25 bp, Homo sapien
catgagctcggccttccttttaaac

SEQ ID NO: 907602 - DNA, 25 bp, Homo sapien
attagagcaagggtctcgcacaggc

SEQ ID NO: 907603 - DNA, 25 bp, Homo sapien
taacagcctgaactatatccatgac

SEQ ID NO: 907604 - DNA, 25 bp, Homo sapien
tctgtgctgagcacaaaacaaggcc

SEQ ID NO: 907605 - DNA, 25 bp, Homo sapien
tacagaaagagggaagattaggaca

SEQ ID NO: 907606 - DNA, 25 bp, Homo sapien
tggctgtccccaccatcaggggcct

SEQ ID NO: 907607 - DNA, 25 bp, Homo sapien
gtccccaccatcaggggcctggcca

SEQ ID NO: 907608 - DNA, 25 bp, Homo sapien
ctggctgtccccaccatcaggggcc

SEQ ID NO: 907609 - DNA, 25 bp, Homo sapien
gctgtccccaccatcaggggcctgg

SEQ ID NO: 907610 - DNA, 25 bp, Homo sapien
agaaattaggtgggtgggtatggtg

SEQ ID NO: 907611 - DNA, 25 bp, Homo sapien
agtagaaattaggtgggtgggtatg

SEQ ID NO: 907612 - DNA, 25 bp, Homo sapien
cgtgtcctgccctgatctctcatgg

SEQ ID NO: 907613 - DNA, 25 bp, Homo sapien
tcagtctggggtgaccgttgaagct

SEQ ID NO: 907614 - DNA, 25 bp, Homo sapien
tctctcatggcttctggccggtggt

SEQ ID NO: 907615 - DNA, 25 bp, Homo sapien
gaagctgcccgtgtcctgccctgat

SEQ ID NO: 907616 - DNA, 25 bp, Homo sapien
cccctggttgtgcacctgccccagg

SEQ ID NO: 907617 - DNA, 25 bp, Homo sapien
tgcaaaggggcagagtcgcctccat

SEQ ID NO: 907618 - DNA, 25 bp, Homo sapien
ctggcttttgatggcctgctgcaaa

SEQ ID NO: 907619 - DNA, 25 bp, Homo sapien
cggctggcttttgatggcctgctgc

SEQ ID NO: 907620 - DNA, 25 bp, Homo sapien
ttgccggctggcttttgatggcctg

SEQ ID NO: 907621 - DNA, 25 bp, Homo sapien
tgctttgtgaagtatattgagctgc

SEQ ID NO: 907622 - DNA, 25 bp, Homo sapien
tcaatgctttgtgaagtatattgag

SEQ ID NO: 907623 - DNA, 25 bp, Homo sapien
tgtgaagtatattgagctgcagaaa

SEQ ID NO: 907624 - DNA, 25 bp, Homo sapien
ctttgtgaagtatattgagctgcag

SEQ ID NO: 907625 - DNA, 25 bp, Homo sapien
gaaaagtggccggcagcagatggtt

SEQ ID NO: 907626 - DNA, 25 bp, Homo sapien
aaaagtggccggcagcagatggttg

SEQ ID NO: 907627 - DNA, 25 bp, Homo sapien
ggcctgcgatcatctacaggatagc

SEQ ID NO: 907628 - DNA, 25 bp, Homo sapien
caggatagcccagtgttgacacagg

SEQ ID NO: 907629 - DNA, 25 bp, Homo sapien
tgcgatcatctacaggatagcccag

SEQ ID NO: 907630 - DNA, 25 bp, Homo sapien
catctacaggatagcccagtgttga

SEQ ID NO: 907631 - DNA, 25 bp, Homo sapien
gagtctgcaggtggtgagctaaact

SEQ ID NO: 907632 - DNA, 25 bp, Homo sapien
tggcgcaggtcctttggttgcagca

SEQ ID NO: 907633 - DNA, 25 bp, Homo sapien
tctgtgtgccttcacgggagatgct

SEQ ID NO: 907634 - DNA, 25 bp, Homo sapien
tggttgatgcttgggtctgtgtgcc

SEQ ID NO: 907635 - DNA, 25 bp, Homo sapien
tgtttctctggcctaaaatgatgga

SEQ ID NO: 907636 - DNA, 25 bp, Homo sapien
aatgatggagcatagggtgtagcca

SEQ ID NO: 907637 - DNA, 25 bp, Homo sapien
cctaaaatgatggagcatagggtgt

SEQ ID NO: 907638 - DNA, 25 bp, Homo sapien
gcatagggtgtagccagtggagcag

SEQ ID NO: 907639 - DNA, 25 bp, Homo sapien
caagtgcagcatgaaggctcttttt

SEQ ID NO: 907640 - DNA, 25 bp, Homo sapien
caaaccatagcgttctgctccatac

SEQ ID NO: 907641 - DNA, 25 bp, Homo sapien
gaaggagccctcatggcgtaatcac

SEQ ID NO: 907642 - DNA, 25 bp, Homo sapien
tcaagttgccaccatcgggtgaggg

SEQ ID NO: 907643 - DNA, 25 bp, Homo sapien
taaagtgatttgtgcaggcctctca

SEQ ID NO: 907644 - DNA, 25 bp, Homo sapien
gaatattctgaccttttgtagcctg

SEQ ID NO: 907645 - DNA, 25 bp, Homo sapien
ttggacttctctaccaggtgctgga

SEQ ID NO: 907646 - DNA, 25 bp, Homo sapien
gatacggaccttgtgatgtgcagca

SEQ ID NO: 907647 - DNA, 25 bp, Homo sapien
tgcaggtgcctagccattcaacagg

SEQ ID NO: 907648 - DNA, 25 bp, Homo sapien
caatgatgccatcccagtgctcagg

SEQ ID NO: 907649 - DNA, 25 bp, Homo sapien
aacaagtgggtagaagctggactcc

SEQ ID NO: 907650 - DNA, 25 bp, Homo sapien
cctgcatgctggaaaaaggatctcc

SEQ ID NO: 907651 - DNA, 25 bp, Homo sapien
gcaggtggacctgaccgaggaggcg

SEQ ID NO: 907652 - DNA, 25 bp, Homo sapien
gcccctgcgggtgaggcgggagcgg

SEQ ID NO: 907653 - DNA, 25 bp, Homo sapien
ggacctgaccgaggaggcggccgga

SEQ ID NO: 907654 - DNA, 25 bp, Homo sapien
cccctgcgggtgaggcgggagcggc

SEQ ID NO: 907655 - DNA, 25 bp, Homo sapien
ctgactcagaaggtttatttgcagc

SEQ ID NO: 907656 - DNA, 25 bp, Homo sapien
gctggcggggcggacaattggcggc

SEQ ID NO: 907657 - DNA, 25 bp, Homo sapien
cggggcggacaattggcggcctcgg

SEQ ID NO: 907658 - DNA, 25 bp, Homo sapien
agaaggtttatttgcagcgctggcg

SEQ ID NO: 907659 - DNA, 25 bp, Homo sapien
ccccgcgatggcttagtgggatgca

SEQ ID NO: 907660 - DNA, 25 bp, Homo sapien
agtcggagacgcgaacctccagggt

SEQ ID NO: 907661 - DNA, 25 bp, Homo sapien
gcgcagcggaaatcgggctctggct

SEQ ID NO: 907662 - DNA, 25 bp, Homo sapien
tgggctccacggagatgaggcgccg

SEQ ID NO: 907663 - DNA, 25 bp, Homo sapien
aggcacaccacgaggtcgtcctggc

SEQ ID NO: 907664 - DNA, 25 bp, Homo sapien
ggtctcctccgctggtcacgctcag

SEQ ID NO: 907665 - DNA, 25 bp, Homo sapien
ccctggcagtgtgcggccagcacgc

SEQ ID NO: 907666 - DNA, 25 bp, Homo sapien
tccccaacgcggttgtccaatggcg

SEQ ID NO: 907667 - DNA, 25 bp, Homo sapien
ggcgggacgctgcacaatacgattt

SEQ ID NO: 907668 - DNA, 25 bp, Homo sapien
tattgggacagtcatgggacccctg

SEQ ID NO: 907669 - DNA, 25 bp, Homo sapien
taatgaagggagcaagtaggccaca

SEQ ID NO: 907670 - DNA, 25 bp, Homo sapien
ggatgggacctttcactctgtgggc

SEQ ID NO: 907671 - DNA, 25 bp, Homo sapien
gcccggttccggatcttgtggaagc

SEQ ID NO: 907672 - DNA, 25 bp, Homo sapien
ttccggatcttgtggaagcggttca

SEQ ID NO: 907673 - DNA, 25 bp, Homo sapien
tccagcttgtagaggtgctggtctg

SEQ ID NO: 907674 - DNA, 25 bp, Homo sapien
ggtactgccggtcagggtccagctt

SEQ ID NO: 907675 - DNA, 25 bp, Homo sapien
aagccatccttgtcccttgtctaac

SEQ ID NO: 907676 - DNA, 25 bp, Homo sapien
cagacgtggctagaaaaagagcaca

SEQ ID NO: 907677 - DNA, 25 bp, Homo sapien
ttgcagacgtggctagaaaaagagc

SEQ ID NO: 907678 - DNA, 25 bp, Homo sapien
agagcacagccctgaagccatcctt

SEQ ID NO: 907679 - DNA, 25 bp, Homo sapien
tctttagtcgctgagcaaacaggct

SEQ ID NO: 907680 - DNA, 25 bp, Homo sapien
tgtcctgaagtgtctttagtcgctg

SEQ ID NO: 907681 - DNA, 25 bp, Homo sapien
caaacaggcttgatgctgtgggatt

SEQ ID NO: 907682 - DNA, 25 bp, Homo sapien
ggacatggcttgaaaagagcacagc

SEQ ID NO: 907683 - DNA, 25 bp, Homo sapien
agaggacaggtagtctcgggcccag

SEQ ID NO: 907684 - DNA, 25 bp, Homo sapien
agccccagtcctgacgaagcccttg

SEQ ID NO: 907685 - DNA, 25 bp, Homo sapien
cctgacgaagcccttgcagggcccc

SEQ ID NO: 907686 - DNA, 25 bp, Homo sapien
gggcatgtctgaaggggggatgttc

SEQ ID NO: 907687 - DNA, 25 bp, Homo sapien
gtgagcccgcaccttgtgtctccgg

SEQ ID NO: 907688 - DNA, 25 bp, Homo sapien
gatggtgtagatagccctcagcctc

SEQ ID NO: 907689 - DNA, 25 bp, Homo sapien
cacacaaggtcacgcccgtagagtg

SEQ ID NO: 907690 - DNA, 25 bp, Homo sapien
ccggaaccagcgcatgatggtgtag

SEQ ID NO: 907691 - DNA, 25 bp, Homo sapien
tgggccaggtgggatgggatacgca

SEQ ID NO: 907692 - DNA, 25 bp, Homo sapien
ggatgggatacgcagtcaaattcaa

SEQ ID NO: 907693 - DNA, 25 bp, Homo sapien
caggtgggatgggatacgcagtcaa

SEQ ID NO: 907694 - DNA, 25 bp, Homo sapien
tgggatacgcagtcaaattcaatca

SEQ ID NO: 907695 - DNA, 25 bp, Homo sapien
gggtgagcggatgaacagcttgctg

SEQ ID NO: 907696 - DNA, 25 bp, Homo sapien
acggctgccttgtcggagcccagca

SEQ ID NO: 907697 - DNA, 25 bp, Homo sapien
tgctccaggagagcgctcacggctg

SEQ ID NO: 907698 - DNA, 25 bp, Homo sapien
ggtggttgggccatgtgtattcaca

SEQ ID NO: 907699 - DNA, 25 bp, Homo sapien
caggacagggcagtgtggcccaggc

SEQ ID NO: 907700 - DNA, 25 bp, Homo sapien
tgtcaccacaggacagggcagtgtg

SEQ ID NO: 907701 - DNA, 25 bp, Homo sapien
caccacaggacagggcagtgtggcc

SEQ ID NO: 907702 - DNA, 25 bp, Homo sapien
ctgtcaccacaggacagggcagtgt

SEQ ID NO: 907703 - DNA, 25 bp, Homo sapien
ggagagatgatggagcccaccctgc

SEQ ID NO: 907704 - DNA, 25 bp, Homo sapien
ggggagagatgatggagcccaccct

SEQ ID NO: 907705 - DNA, 25 bp, Homo sapien
tgggggagagatgatggagcccacc

SEQ ID NO: 907706 - DNA, 25 bp, Homo sapien
ctgggggagagatgatggagcccac

SEQ ID NO: 907707 - DNA, 25 bp, Homo sapien
ggagcacttatgacacctgtgcaca

SEQ ID NO: 907708 - DNA, 25 bp, Homo sapien
cagatattttggtgtcttgaggcca

SEQ ID NO: 907709 - DNA, 25 bp, Homo sapien
ctgtatgtccccacatgcatgtgct

SEQ ID NO: 907710 - DNA, 25 bp, Homo sapien
tgtatcgatgtttgcgacgtgctgt

SEQ ID NO: 907711 - DNA, 25 bp, Homo sapien
ggcccatggagtgatgggtgtcagg

SEQ ID NO: 907712 - DNA, 25 bp, Homo sapien
tatggcccatggagtgatgggtgtc

SEQ ID NO: 907713 - DNA, 25 bp, Homo sapien
gactatggcccatggagtgatgggt

SEQ ID NO: 907714 - DNA, 25 bp, Homo sapien
cacagggactatggcccatggagtg

SEQ ID NO: 907715 - DNA, 25 bp, Homo sapien
gaatcgagagtagggctggcgggaa

SEQ ID NO: 907716 - DNA, 25 bp, Homo sapien
ccaggtatgcgacctggtggcgaca

SEQ ID NO: 907717 - DNA, 25 bp, Homo sapien
gctaccttgtcctcattgggcttga

SEQ ID NO: 907718 - DNA, 25 bp, Homo sapien
ctggcgggaagcgaagccagccctg

SEQ ID NO: 907719 - DNA, 25 bp, Homo sapien
cttggaggcaaggttctccaccagg

SEQ ID NO: 907720 - DNA, 25 bp, Homo sapien
tctgtgatgtcctgctgcccgtccg

SEQ ID NO: 907721 - DNA, 25 bp, Homo sapien
cgtcagggggcgcttggtcacctct

SEQ ID NO: 907722 - DNA, 25 bp, Homo sapien
gtccggccacatggcccgtagagtg

SEQ ID NO: 907723 - DNA, 25 bp, Homo sapien
cttgtcgatgaagccttccacggag

SEQ ID NO: 907724 - DNA, 25 bp, Homo sapien
ttgtcgatgaagccttccacggagt

SEQ ID NO: 907725 - DNA, 25 bp, Homo sapien
tgtcgatgaagccttccacggagta

SEQ ID NO: 907726 - DNA, 25 bp, Homo sapien
gtcgatgaagccttccacggagtac

SEQ ID NO: 907727 - DNA, 25 bp, Homo sapien
ttttgcgaacagataaaggtagatg

SEQ ID NO: 907728 - DNA, 25 bp, Homo sapien
gaaacacttataccttgatgtgagt

SEQ ID NO: 907729 - DNA, 25 bp, Homo sapien
gggctgctttgttgtcatcatctat

SEQ ID NO: 907730 - DNA, 25 bp, Homo sapien
cctcatgggtgtagattttgcgaac

SEQ ID NO: 907731 - DNA, 25 bp, Homo sapien
gaagtggccataacacctgtctccg

SEQ ID NO: 907732 - DNA, 25 bp, Homo sapien
tgccatggtgcctgtgggaaagcca

SEQ ID NO: 907733 - DNA, 25 bp, Homo sapien
tccaagtatggtagcgaggcctcac

SEQ ID NO: 907734 - DNA, 25 bp, Homo sapien
aaatcgttttgggatgcggcaagca

SEQ ID NO: 907735 - DNA, 25 bp, Homo sapien
ccctgcatagtgcttgatccggaag

SEQ ID NO: 907736 - DNA, 25 bp, Homo sapien
tgcatagtgcttgatccggaagtct

SEQ ID NO: 907737 - DNA, 25 bp, Homo sapien
gaagtctcggccaaactccatggtc

SEQ ID NO: 907738 - DNA, 25 bp, Homo sapien
atagtgcttgatccggaagtctcgg

SEQ ID NO: 907739 - DNA, 25 bp, Homo sapien
agagaaggttgccacagtgacgaca

SEQ ID NO: 907740 - DNA, 25 bp, Homo sapien
aaccaggccccacgaggcatgggca

SEQ ID NO: 907741 - DNA, 25 bp, Homo sapien
cagtgacgacaatggcaccaaagct

SEQ ID NO: 907742 - DNA, 25 bp, Homo sapien
gtatgaagggatagccctgcctccc

SEQ ID NO: 907743 - DNA, 25 bp, Homo sapien
cagcccactgtggtggcactgggac

SEQ ID NO: 907744 - DNA, 25 bp, Homo sapien
aggaagattcggtcagtgatggtgc

SEQ ID NO: 907745 - DNA, 25 bp, Homo sapien
aatggtggcgttgttgaaatactca

SEQ ID NO: 907746 - DNA, 25 bp, Homo sapien
gatccacaatggtggcgttgttgaa

SEQ ID NO: 907747 - DNA, 25 bp, Homo sapien
cgctccaccagatccacaatggtgg

SEQ ID NO: 907748 - DNA, 25 bp, Homo sapien
ttcaggatgagctggatgaatagct

SEQ ID NO: 907749 - DNA, 25 bp, Homo sapien
caggatgagctggatgaatagctgc

SEQ ID NO: 907750 - DNA, 25 bp, Homo sapien
atgagctggatgaatagctgctgca

SEQ ID NO: 907751 - DNA, 25 bp, Homo sapien
ctcgcgctcgtactcttcctgttcc

SEQ ID NO: 907752 - DNA, 25 bp, Homo sapien
tgtccagcacgccaatgactgtgtc

SEQ ID NO: 907753 - DNA, 25 bp, Homo sapien
gccccggggttccatgacactgttg

SEQ ID NO: 907754 - DNA, 25 bp, Homo sapien
tgttgacgggaaacacctcgaagcc

SEQ ID NO: 907755 - DNA, 25 bp, Homo sapien
gtgtccttgccatcacgccgaggat

SEQ ID NO: 907756 - DNA, 25 bp, Homo sapien
tgcctcccgaggcaactgtgcgagc

SEQ ID NO: 907757 - DNA, 25 bp, Homo sapien
tgtggcccttctctatgagttccct

SEQ ID NO: 907758 - DNA, 25 bp, Homo sapien
agctcagccacatggtccaccagtg

SEQ ID NO: 907759 - DNA, 25 bp, Homo sapien
atcccgggcatagctggcctcagct

SEQ ID NO: 907760 - DNA, 25 bp, Homo sapien
tcttcaggactgaagccgatgaccc

SEQ ID NO: 907761 - DNA, 25 bp, Homo sapien
aagccgatgaccctcatggcctcgg

SEQ ID NO: 907762 - DNA, 25 bp, Homo sapien
cagccaggatgcgatgcacagactc

SEQ ID NO: 907763 - DNA, 25 bp, Homo sapien
gcctcggtcactgcctggtggctct

SEQ ID NO: 907764 - DNA, 25 bp, Homo sapien
tccaagtgcagttcatgcagctgct

SEQ ID NO: 907765 - DNA, 25 bp, Homo sapien
tgtgtgaaattgtatacagcagggt

SEQ ID NO: 907766 - DNA, 25 bp, Homo sapien
tgtgcacagtcatgttgagtcctgc

SEQ ID NO: 907767 - DNA, 25 bp, Homo sapien
tgaaattgtatacagcagggtttct

SEQ ID NO: 907768 - DNA, 25 bp, Homo sapien
ctagaggacacaggcatcctttaga

SEQ ID NO: 907769 - DNA, 25 bp, Homo sapien
gacaaataagctcccaggatgtccc

SEQ ID NO: 907770 - DNA, 25 bp, Homo sapien
tttagacaaataagctcccaggatg

SEQ ID NO: 907771 - DNA, 25 bp, Homo sapien
ggcatcctttagacaaataagctcc

SEQ ID NO: 907772 - DNA, 25 bp, Homo sapien
caatggtcatgtcgcagagagcttc

SEQ ID NO: 907773 - DNA, 25 bp, Homo sapien
cagagtccgtggagacactgcttca

SEQ ID NO: 907774 - DNA, 25 bp, Homo sapien
cctcagtagggagcacaggttccgt

SEQ ID NO: 907775 - DNA, 25 bp, Homo sapien
gacactgactgattcccagggagct

SEQ ID NO: 907776 - DNA, 25 bp, Homo sapien
tgcagggaactcctaactcagtggg

SEQ ID NO: 907777 - DNA, 25 bp, Homo sapien
tgctccagtcatagggtgctcccag

SEQ ID NO: 907778 - DNA, 25 bp, Homo sapien
tggaaacaccgcctgtgtaccaggg

SEQ ID NO: 907779 - DNA, 25 bp, Homo sapien
caagtccctagagacactgctccag

SEQ ID NO: 907780 - DNA, 25 bp, Homo sapien
tgatggaagggtcacaagctggtcc

SEQ ID NO: 907781 - DNA, 25 bp, Homo sapien
cagtttgcaaacacaccgctggcgt

SEQ ID NO: 907782 - DNA, 25 bp, Homo sapien
tgggcgcgcctatctcacagaggtg

SEQ ID NO: 907783 - DNA, 25 bp, Homo sapien
tcaaagcttgtggagacagtccctg

SEQ ID NO: 907784 - DNA, 25 bp, Homo sapien
gtttctttcacccacgtgctgcttg

SEQ ID NO: 907785 - DNA, 25 bp, Homo sapien
gaagtttctttcacccacgtgctgc

SEQ ID NO: 907786 - DNA, 25 bp, Homo sapien
ttctttcacccacgtgctgcttgag

SEQ ID NO: 907787 - DNA, 25 bp, Homo sapien
gtagaaggcgtggaagtttctttca

SEQ ID NO: 907788 - DNA, 25 bp, Homo sapien
tgattgcggttggtgcgggcattgc

SEQ ID NO: 907789 - DNA, 25 bp, Homo sapien
tggatgtgtcctccgatcgggtccc

SEQ ID NO: 907790 - DNA, 25 bp, Homo sapien
agtaggtagctgtggatgtgtcctc

SEQ ID NO: 907791 - DNA, 25 bp, Homo sapien
tgatgtccatgtacttgccaaagcg

SEQ ID NO: 907792 - DNA, 25 bp, Homo sapien
cagcagcgatgtactgcatgatgtg

SEQ ID NO: 907793 - DNA, 25 bp, Homo sapien
cagcgatgtactgcatgatgtgctt

SEQ ID NO: 907794 - DNA, 25 bp, Homo sapien
ggtgacagcagcgatgtactgcatg

SEQ ID NO: 907795 - DNA, 25 bp, Homo sapien
tggattggtgacagcagcgatgtac

SEQ ID NO: 907796 - DNA, 25 bp, Homo sapien
tgagatgacgatgcaggtgtccctg

SEQ ID NO: 907797 - DNA, 25 bp, Homo sapien
cattgccttgtaggcggcgttggcc

SEQ ID NO: 907798 - DNA, 25 bp, Homo sapien
cctggaccggtgcttcattgccttg

SEQ ID NO: 907799 - DNA, 25 bp, Homo sapien
tcaccgatgtaggtgtagatgcggc

SEQ ID NO: 907800 - DNA, 25 bp, Homo sapien
cctccatggtcacttggtccaaaag

SEQ ID NO: 907801 - DNA, 25 bp, Homo sapien
gcacaaagtcaggtttgccatactc

SEQ ID NO: 907802 - DNA, 25 bp, Homo sapien
aaagcacaaagtcaggtttgccata

SEQ ID NO: 907803 - DNA, 25 bp, Homo sapien
cacaaagtcaggtttgccatactca

SEQ ID NO: 907804 - DNA, 25 bp, Homo sapien
ccttcctgtgcctgctggaaggaca

SEQ ID NO: 907805 - DNA, 25 bp, Homo sapien
ctggaaacaccttgcctcaccttcc

SEQ ID NO: 907806 - DNA, 25 bp, Homo sapien
tcaccttcctgtgcctgctggaagg

SEQ ID NO: 907807 - DNA, 25 bp, Homo sapien
cctgtgcctgctggaaggacagtga

SEQ ID NO: 907808 - DNA, 25 bp, Homo sapien
gctcaattaaggtgccaaggcttgc

SEQ ID NO: 907809 - DNA, 25 bp, Homo sapien
tgtttttcattcaggagataccaga

SEQ ID NO: 907810 - DNA, 25 bp, Homo sapien
ctaggtgtattaacacaggcaggcc

SEQ ID NO: 907811 - DNA, 25 bp, Homo sapien
cttccagaagggcaacaagcgaggt

SEQ ID NO: 907812 - DNA, 25 bp, Homo sapien
caagaatcagggttcatgagtccaa

SEQ ID NO: 907813 - DNA, 25 bp, Homo sapien
tcaatcacctgacttaccatacggg

SEQ ID NO: 907814 - DNA, 25 bp, Homo sapien
tgaaacactggccactgacctaagg

SEQ ID NO: 907815 - DNA, 25 bp, Homo sapien
caaacccctgttgccatcggtggca

SEQ ID NO: 907816 - DNA, 25 bp, Homo sapien
ctgtagaaacactgacggatggcag

SEQ ID NO: 907817 - DNA, 25 bp, Homo sapien
agggacacagagtgaagccactggt

SEQ ID NO: 907818 - DNA, 25 bp, Homo sapien
acacagagtgaagccactggtgaga

SEQ ID NO: 907819 - DNA, 25 bp, Homo sapien
agctaacacggtcgcctcccagttt

SEQ ID NO: 907820 - DNA, 25 bp, Homo sapien
caggaactggcagctaacacggtcg

SEQ ID NO: 907821 - DNA, 25 bp, Homo sapien
caatagccagagcatcagcattttc

SEQ ID NO: 907822 - DNA, 25 bp, Homo sapien
tcctcgattagggacaagggaccac

SEQ ID NO: 907823 - DNA, 25 bp, Homo sapien
tcagaggcacctgcatgagccattg

SEQ ID NO: 907824 - DNA, 25 bp, Homo sapien
gaaaggagcgcaggactctaccctt

SEQ ID NO: 907825 - DNA, 25 bp, Homo sapien
ctcaaggagggacctcagcaggcct

SEQ ID NO: 907826 - DNA, 25 bp, Homo sapien
catgagactcaaggagggacctcag

SEQ ID NO: 907827 - DNA, 25 bp, Homo sapien
aagactgcttgaacatgagactcaa

SEQ ID NO: 907828 - DNA, 25 bp, Homo sapien
agcaggcctggggtgttcagcaact

SEQ ID NO: 907829 - DNA, 25 bp, Homo sapien
ggctaccacattagatggcacggat

SEQ ID NO: 907830 - DNA, 25 bp, Homo sapien
gacacataattctgaccttgggccc

SEQ ID NO: 907831 - DNA, 25 bp, Homo sapien
gaaatgccctctaatctgtgcggtc

SEQ ID NO: 907832 - DNA, 25 bp, Homo sapien
tattccatgagtctctcagggcagg

SEQ ID NO: 907833 - DNA, 25 bp, Homo sapien
aatgcatagggtcaccgcagaccca

SEQ ID NO: 907834 - DNA, 25 bp, Homo sapien
aaggaatgcatagggtcaccgcaga

SEQ ID NO: 907835 - DNA, 25 bp, Homo sapien
actgaaggaatgcatagggtcaccg

SEQ ID NO: 907836 - DNA, 25 bp, Homo sapien
tagggtcaccgcagacccaagcacg

SEQ ID NO: 907837 - DNA, 25 bp, Homo sapien
gagctactaatgactctcagggaaa

SEQ ID NO: 907838 - DNA, 25 bp, Homo sapien
gaccagagttcaattaggcacctga

SEQ ID NO: 907839 - DNA, 25 bp, Homo sapien
ggaaagatcctttctggctgaggaa

SEQ ID NO: 907840 - DNA, 25 bp, Homo sapien
gaatctggcagtccactctcactaa

SEQ ID NO: 907841 - DNA, 25 bp, Homo sapien
gaaataatggttcagagaaaacgca

SEQ ID NO: 907842 - DNA, 25 bp, Homo sapien
ttctgaaggagtaagtagaccaggc

SEQ ID NO: 907843 - DNA, 25 bp, Homo sapien
caggcacatgaagtagatttcattt

SEQ ID NO: 907844 - DNA, 25 bp, Homo sapien
acgcaggcctagttccaggaaggca

SEQ ID NO: 907845 - DNA, 25 bp, Homo sapien
ttccactttgagaccgtcacctcag

SEQ ID NO: 907846 - DNA, 25 bp, Homo sapien
tttgagaccgtcacctcagccacgg

SEQ ID NO: 907847 - DNA, 25 bp, Homo sapien
gagttgctgtgacagtaagctcttc

SEQ ID NO: 907848 - DNA, 25 bp, Homo sapien
cttgcaaaggagttgctgtgacagt

SEQ ID NO: 907849 - DNA, 25 bp, Homo sapien
cacgtgtagtgaaggcttggtctcc

SEQ ID NO: 907850 - DNA, 25 bp, Homo sapien
tctacagcctctcttgcggcaggtc

SEQ ID NO: 907851 - DNA, 25 bp, Homo sapien
gaagccccacttctcggctgaaaga

SEQ ID NO: 907852 - DNA, 25 bp, Homo sapien
gggtaaaatgttccgaacgcgctca

SEQ ID NO: 907853 - DNA, 25 bp, Homo sapien
gcgccgctgcgactacgaagtacgg

SEQ ID NO: 907854 - DNA, 25 bp, Homo sapien
tggatgactagactgccgaagaccg

SEQ ID NO: 907855 - DNA, 25 bp, Homo sapien
acaggtctgccagccaagactgacg

SEQ ID NO: 907856 - DNA, 25 bp, Homo sapien
tacggagtacggagtacaggtctgc

SEQ ID NO: 907857 - DNA, 25 bp, Homo sapien
gaaaaagacccggagaagcacacaa

SEQ ID NO: 907858 - DNA, 25 bp, Homo sapien
cacacaaaacaagttgctgccttct

SEQ ID NO: 907859 - DNA, 25 bp, Homo sapien
gacacccttacaaagagcgatttct

SEQ ID NO: 907860 - DNA, 25 bp, Homo sapien
aaacaaatggagctatattaacatg

SEQ ID NO: 907861 - DNA, 25 bp, Homo sapien
taggacactttacagccaaggtgtg

SEQ ID NO: 907862 - DNA, 25 bp, Homo sapien
tttgttcaagatgtaggagccacac

SEQ ID NO: 907863 - DNA, 25 bp, Homo sapien
ggttattggtaagaaagcagtaatc

SEQ ID NO: 907864 - DNA, 25 bp, Homo sapien
atcataagtaggtggctgttaggac

SEQ ID NO: 907865 - DNA, 25 bp, Homo sapien
tactagaaaacggattccctgtggc

SEQ ID NO: 907866 - DNA, 25 bp, Homo sapien
tgatagggtctgcacatccttgtgg

SEQ ID NO: 907867 - DNA, 25 bp, Homo sapien
aaggcaggcagactttataacagag

SEQ ID NO: 907868 - DNA, 25 bp, Homo sapien
ccggatgactggtaaggttctacga

SEQ ID NO: 907869 - DNA, 25 bp, Homo sapien
tatcgccgagtgttcacattagcac

SEQ ID NO: 907870 - DNA, 25 bp, Homo sapien
cagtgtatcttgatttatcgccgag

SEQ ID NO: 907871 - DNA, 25 bp, Homo sapien
cattagcacacataaaactgcctcg

SEQ ID NO: 907872 - DNA, 25 bp, Homo sapien
agaaatcatgtgcaccctccgtggg

SEQ ID NO: 907873 - DNA, 25 bp, Homo sapien
gacagaccacacatatgacaatggt

SEQ ID NO: 907874 - DNA, 25 bp, Homo sapien
tccattgcctagtgacatagctgtc

SEQ ID NO: 907875 - DNA, 25 bp, Homo sapien
tacagtcttggccatataacaacat

SEQ ID NO: 907876 - DNA, 25 bp, Homo sapien
taacaacatattggtcaacgacaga

SEQ ID NO: 907877 - DNA, 25 bp, Homo sapien
acctgtccttgagagagttgcacca

SEQ ID NO: 907878 - DNA, 25 bp, Homo sapien
tgctgtctgctaggccaggtcttcc

SEQ ID NO: 907879 - DNA, 25 bp, Homo sapien
caggttgtttacacggagtccacca

SEQ ID NO: 907880 - DNA, 25 bp, Homo sapien
gttgcaccaggtcagcgctatggct

SEQ ID NO: 907881 - DNA, 25 bp, Homo sapien
tacgttaagagtccattgtgggtcc

SEQ ID NO: 907882 - DNA, 25 bp, Homo sapien
ctgtgttctctctactacagctatg

SEQ ID NO: 907883 - DNA, 25 bp, Homo sapien
tccccgtgggatccacacacagatg

SEQ ID NO: 907884 - DNA, 25 bp, Homo sapien
acagctatgccaaaacatagcagca

SEQ ID NO: 907885 - DNA, 25 bp, Homo sapien
caaatgcgttgtctggtgttgtcca

SEQ ID NO: 907886 - DNA, 25 bp, Homo sapien
tgcggtgggacacgcaccaaatgcg

SEQ ID NO: 907887 - DNA, 25 bp, Homo sapien
tacccagcttagtgaatggctgagg

SEQ ID NO: 907888 - DNA, 25 bp, Homo sapien
tctcctcgtagacttctagagccct

SEQ ID NO: 907889 - DNA, 25 bp, Homo sapien
caagaccatcagtgagagcgagctg

SEQ ID NO: 907890 - DNA, 25 bp, Homo sapien
ccatcagtgagagcgagctgagcgc

SEQ ID NO: 907891 - DNA, 25 bp, Homo sapien
ccacagcaagaccatcagtgagagc

SEQ ID NO: 907892 - DNA, 25 bp, Homo sapien
cagcaagaccatcagtgagagcgag

SEQ ID NO: 907893 - DNA, 25 bp, Homo sapien
gcaacaggctcttgtgccacaggaa

SEQ ID NO: 907894 - DNA, 25 bp, Homo sapien
cagttgggtgaaagccatcggtgcc

SEQ ID NO: 907895 - DNA, 25 bp, Homo sapien
gagatctcgtcaccttggagcctgg

SEQ ID NO: 907896 - DNA, 25 bp, Homo sapien
cactaccccgtggaacagaaatgct

SEQ ID NO: 907897 - DNA, 25 bp, Homo sapien
tattgggacatcagagagtattggg

SEQ ID NO: 907898 - DNA, 25 bp, Homo sapien
aatggacatgccctggaagcatcag

SEQ ID NO: 907899 - DNA, 25 bp, Homo sapien
ccttgcatgggccttctgtgtggag

SEQ ID NO: 907900 - DNA, 25 bp, Homo sapien
cctgtgccagaaggttcagtgtccc

SEQ ID NO: 907901 - DNA, 25 bp, Homo sapien
gaagggacaccgatttattgagtag

SEQ ID NO: 907902 - DNA, 25 bp, Homo sapien
gaaggcgtaggatggctccagcttc

SEQ ID NO: 907903 - DNA, 25 bp, Homo sapien
cttccggtcagtggctacatggtca

SEQ ID NO: 907904 - DNA, 25 bp, Homo sapien
acaccgatttattgagtagcagagc

SEQ ID NO: 907905 - DNA, 25 bp, Homo sapien
ttggccctggacacattggcctgcg

SEQ ID NO: 907906 - DNA, 25 bp, Homo sapien
accagctcaatgtcacgcagttcca

SEQ ID NO: 907907 - DNA, 25 bp, Homo sapien
agctcaatgtcacgcagttccagcc

SEQ ID NO: 907908 - DNA, 25 bp, Homo sapien
tgtggttgtctctcagagcccgcac

SEQ ID NO: 907909 - DNA, 25 bp, Homo sapien
cctcctcttcctcttccttgcactc

SEQ ID NO: 907910 - DNA, 25 bp, Homo sapien
ctcctcttcctcttccttgcactcc

SEQ ID NO: 907911 - DNA, 25 bp, Homo sapien
cctcttcctcttccttgcactccag

SEQ ID NO: 907912 - DNA, 25 bp, Homo sapien
tcttcctcttccttgcactccagcc

SEQ ID NO: 907913 - DNA, 25 bp, Homo sapien
tcagctgcggctttgtgcacttgct

SEQ ID NO: 907914 - DNA, 25 bp, Homo sapien
ctctgagggcaccttaaacttctca

SEQ ID NO: 907915 - DNA, 25 bp, Homo sapien
taaacttctcagctgcggctttgtg

SEQ ID NO: 907916 - DNA, 25 bp, Homo sapien
tttgtgcacttgctgggacaggtcc

SEQ ID NO: 907917 - DNA, 25 bp, Homo sapien
ggcctcgccaaagaccacataagtg

SEQ ID NO: 907918 - DNA, 25 bp, Homo sapien
ctggtgactccctgaatctgccgca

SEQ ID NO: 907919 - DNA, 25 bp, Homo sapien
gaatctgccgcaagcccagctttga

SEQ ID NO: 907920 - DNA, 25 bp, Homo sapien
gacatcaggcttggcgatgacaaag

SEQ ID NO: 907921 - DNA, 25 bp, Homo sapien
agacctggtgttgacccacgtcggg

SEQ ID NO: 907922 - DNA, 25 bp, Homo sapien
ctggtgttgacccacgtcgggggag

SEQ ID NO: 907923 - DNA, 25 bp, Homo sapien
ggcaaagtctccaccgccaacttcc

SEQ ID NO: 907924 - DNA, 25 bp, Homo sapien
gcaaagtctccaccgccaacttccc

SEQ ID NO: 907925 - DNA, 25 bp, Homo sapien
ttggctttggcgatggtctcctcac

SEQ ID NO: 907926 - DNA, 25 bp, Homo sapien
tggctttggcgatggtctcctcact

SEQ ID NO: 907927 - DNA, 25 bp, Homo sapien
ggctggacactgcacggtctgagga

SEQ ID NO: 907928 - DNA, 25 bp, Homo sapien
cagctcggctgatgactccccgtgg

SEQ ID NO: 907929 - DNA, 25 bp, Homo sapien
tggctatccgaatgctggcccgagc

SEQ ID NO: 907930 - DNA, 25 bp, Homo sapien
ctccccgtggctatccgaatgctgg

SEQ ID NO: 907931 - DNA, 25 bp, Homo sapien
cgagaggctgactcgcggcccagtc

SEQ ID NO: 907932 - DNA, 25 bp, Homo sapien
gagtgaggcgagaggctgactcgcg

SEQ ID NO: 907933 - DNA, 25 bp, Homo sapien
tcatcctcttgctgctcgggggctg

SEQ ID NO: 907934 - DNA, 25 bp, Homo sapien
gcaaggcggcaagatctgcaaggcc

SEQ ID NO: 907935 - DNA, 25 bp, Homo sapien
gactcttggcctaagatctcgctga

SEQ ID NO: 907936 - DNA, 25 bp, Homo sapien
cagattcttgtccagcggtggagtc

SEQ ID NO: 907937 - DNA, 25 bp, Homo sapien
tgtctctgggacagataggcccctc

SEQ ID NO: 907938 - DNA, 25 bp, Homo sapien
ggtcatcctgttggacctggtccaa

SEQ ID NO: 907939 - DNA, 25 bp, Homo sapien
tcatcatctgcctctgcgtaggagg

SEQ ID NO: 907940 - DNA, 25 bp, Homo sapien
cagaggtgtcgtcccggaaggcaaa

SEQ ID NO: 907941 - DNA, 25 bp, Homo sapien
tccatgccctccgtgatggacaggt

SEQ ID NO: 907942 - DNA, 25 bp, Homo sapien
ccgtgatggacaggtcagacagtga

SEQ ID NO: 907943 - DNA, 25 bp, Homo sapien
ggaggcagacgtgctgtcctcctca

SEQ ID NO: 907944 - DNA, 25 bp, Homo sapien
gaaggaggcagacgtgctgtcctcc

SEQ ID NO: 907945 - DNA, 25 bp, Homo sapien
caggaaggaggcagacgtgctgtcc

SEQ ID NO: 907946 - DNA, 25 bp, Homo sapien
gcaggaaggaggcagacgtgctgtc

SEQ ID NO: 907947 - DNA, 25 bp, Homo sapien
ctgggtcgggatccgccacagcctc

SEQ ID NO: 907948 - DNA, 25 bp, Homo sapien
tcgggatccgccacagcctcctctt

SEQ ID NO: 907949 - DNA, 25 bp, Homo sapien
cttcctctggggatagcggtgtcac

SEQ ID NO: 907950 - DNA, 25 bp, Homo sapien
ttcttcctctggggatagcggtgtc

SEQ ID NO: 907951 - DNA, 25 bp, Homo sapien
ccaggtcgaagaagtggccctcctg

SEQ ID NO: 907952 - DNA, 25 bp, Homo sapien
gggtgcagctctcgttcatccacca

SEQ ID NO: 907953 - DNA, 25 bp, Homo sapien
gccaggaagtccaggtcgaagaagt

SEQ ID NO: 907954 - DNA, 25 bp, Homo sapien
catcggccgtaatgtaggagcccga

SEQ ID NO: 907955 - DNA, 25 bp, Homo sapien
gaaagatcaccctgagaacacagct

SEQ ID NO: 907956 - DNA, 25 bp, Homo sapien
ggtgggtctgggcttgcgtgcccac

SEQ ID NO: 907957 - DNA, 25 bp, Homo sapien
cacagctcggggggtgggtctgggc

SEQ ID NO: 907958 - DNA, 25 bp, Homo sapien
gaaggcacagaaagatcaccctgag

SEQ ID NO: 907959 - DNA, 25 bp, Homo sapien
ctggtccctgagcgctgtccgggca

SEQ ID NO: 907960 - DNA, 25 bp, Homo sapien
catcacaatccggggctccagggtg

SEQ ID NO: 907961 - DNA, 25 bp, Homo sapien
aggagcctccgtggacagagcctgg

SEQ ID NO: 907962 - DNA, 25 bp, Homo sapien
ggagggcctggcacgtctcctctcc

SEQ ID NO: 907963 - DNA, 25 bp, Homo sapien
ggcagcggccgcatcgcaggacaga

SEQ ID NO: 907964 - DNA, 25 bp, Homo sapien
gcagcggccgcatcgcaggacagat

SEQ ID NO: 907965 - DNA, 25 bp, Homo sapien
aatcagtgtggttcagctgggctcg

SEQ ID NO: 907966 - DNA, 25 bp, Homo sapien
tctggcggcttttctcaaggacacc

SEQ ID NO: 907967 - DNA, 25 bp, Homo sapien
caaggacacctcagcaaagaactag

SEQ ID NO: 907968 - DNA, 25 bp, Homo sapien
tgggagtcatgaacagacctgtctg

SEQ ID NO: 907969 - DNA, 25 bp, Homo sapien
tacacttgaggccaacatgtcaggg

SEQ ID NO: 907970 - DNA, 25 bp, Homo sapien
tgggcttcatgcctcgctctgcctc

SEQ ID NO: 907971 - DNA, 25 bp, Homo sapien
gcgcagctcgaacactctgggcttc

SEQ ID NO: 907972 - DNA, 25 bp, Homo sapien
gctgtccttgctacctacacttgag

SEQ ID NO: 907973 - DNA, 25 bp, Homo sapien
acccgctgggcaggcttcagtatga

SEQ ID NO: 907974 - DNA, 25 bp, Homo sapien
gaagtagccctcatgggtcagaaag

SEQ ID NO: 907975 - DNA, 25 bp, Homo sapien
tatcacaggcgagatcacattgcac

SEQ ID NO: 907976 - DNA, 25 bp, Homo sapien
aaggcacctctgtttgaagcatcca

SEQ ID NO: 907977 - DNA, 25 bp, Homo sapien
ggacaacatctcttgcacctcagct

SEQ ID NO: 907978 - DNA, 25 bp, Homo sapien
tttgttgacccagcctaaggacagg

SEQ ID NO: 907979 - DNA, 25 bp, Homo sapien
ggtcaccaagcaagccagaacagag

SEQ ID NO: 907980 - DNA, 25 bp, Homo sapien
acacccagggccattgctaatcagg

SEQ ID NO: 907981 - DNA, 25 bp, Homo sapien
atccgggcttcctaggctctggcca

SEQ ID NO: 907982 - DNA, 25 bp, Homo sapien
tggcagctcggtgcaaacaacggga

SEQ ID NO: 907983 - DNA, 25 bp, Homo sapien
tgcaactgaggaccctcccggtggt

SEQ ID NO: 907984 - DNA, 25 bp, Homo sapien
ttctttctggctcgcggcgggcact

SEQ ID NO: 907985 - DNA, 25 bp, Homo sapien
ccggtggtcacctgatcgtactggg

SEQ ID NO: 907986 - DNA, 25 bp, Homo sapien
gagaggcggtagcagggttcagatg

SEQ ID NO: 907987 - DNA, 25 bp, Homo sapien
ggtgaaaggtgagcgatggaaagag

SEQ ID NO: 907988 - DNA, 25 bp, Homo sapien
ggtagcagggttcagatggagggaa

SEQ ID NO: 907989 - DNA, 25 bp, Homo sapien
gggtgaaaggtgagcgatggaaaga

SEQ ID NO: 907990 - DNA, 25 bp, Homo sapien
gggtcggtccgcctcgggcagcagc

SEQ ID NO: 907991 - DNA, 25 bp, Homo sapien
agcagcagctcggcgcgggcagcct

SEQ ID NO: 907992 - DNA, 25 bp, Homo sapien
ccgggtcggtccgcctcgggcagca

SEQ ID NO: 907993 - DNA, 25 bp, Homo sapien
tcggcgcgggcagcctccccaggca

SEQ ID NO: 907994 - DNA, 25 bp, Homo sapien
ccgtgcgcccgcccgtccctcagtc

SEQ ID NO: 907995 - DNA, 25 bp, Homo sapien
tgcgcccgcccgtccctcagtcctt

SEQ ID NO: 907996 - DNA, 25 bp, Homo sapien
gtgcgcccgcccgtccctcagtcct

SEQ ID NO: 907997 - DNA, 25 bp, Homo sapien
cgtgcgcccgcccgtccctcagtcc

SEQ ID NO: 907998 - DNA, 25 bp, Homo sapien
aacagcctagggttgggagcctaca

SEQ ID NO: 907999 - DNA, 25 bp, Homo sapien
tagggcaggagttcccaacaaccag

SEQ ID NO: 908000 - DNA, 25 bp, Homo sapien
caggcaggtaacaacccaggtctgt

SEQ ID NO: 908001 - DNA, 25 bp, Homo sapien
cacatgctgtcagggtgcctttcac

SEQ ID NO: 908002 - DNA, 25 bp, Homo sapien
acacaagaggacgttctgtccctca

SEQ ID NO: 908003 - DNA, 25 bp, Homo sapien
gtttattatacacaagaggacgttc

SEQ ID NO: 908004 - DNA, 25 bp, Homo sapien
tattatacacaagaggacgttctgt

SEQ ID NO: 908005 - DNA, 25 bp, Homo sapien
tatacacaagaggacgttctgtccc

SEQ ID NO: 908006 - DNA, 25 bp, Homo sapien
ctccggcggagaggcacgcagtcca

SEQ ID NO: 908007 - DNA, 25 bp, Homo sapien
ttcttggccgcccacagctagacct

SEQ ID NO: 908008 - DNA, 25 bp, Homo sapien
cctcaagggtgacccttcttggccg

SEQ ID NO: 908009 - DNA, 25 bp, Homo sapien
ccacagctagacctccggcggagag

SEQ ID NO: 908010 - DNA, 25 bp, Homo sapien
cagccaccgctttgcgcatcttgtc

SEQ ID NO: 908011 - DNA, 25 bp, Homo sapien
ttgtccttgaggtaggcgcctttct

SEQ ID NO: 908012 - DNA, 25 bp, Homo sapien
tgaggtaggcgcctttctgccattc

SEQ ID NO: 908013 - DNA, 25 bp, Homo sapien
ctgccattcagacttgagttccagc

SEQ ID NO: 908014 - DNA, 25 bp, Homo sapien
cagaacccttgtgtggctcatgaag

SEQ ID NO: 908015 - DNA, 25 bp, Homo sapien
tctgcaaactactcggaggcccaag

SEQ ID NO: 908016 - DNA, 25 bp, Homo sapien
tcacatgggcaaggagatcccttcc

SEQ ID NO: 908017 - DNA, 25 bp, Homo sapien
catgtgtctatacctgctggctcag

SEQ ID NO: 908018 - DNA, 25 bp, Homo sapien
gtccactatcaggaagcctgcagcc

SEQ ID NO: 908019 - DNA, 25 bp, Homo sapien
tccactatcaggaagcctgcagcca

SEQ ID NO: 908020 - DNA, 25 bp, Homo sapien
agaacaaagcgacccagcaagtcct

SEQ ID NO: 908021 - DNA, 25 bp, Homo sapien
gggaactcccaccgcaagaacgcta

SEQ ID NO: 908022 - DNA, 25 bp, Homo sapien
gggccagaacaaagcgacccagcaa

SEQ ID NO: 908023 - DNA, 25 bp, Homo sapien
ctatgtgtcgccgggccagaacaaa

SEQ ID NO: 908024 - DNA, 25 bp, Homo sapien
gtgccacaaagtcccttacgggcag

SEQ ID NO: 908025 - DNA, 25 bp, Homo sapien
ccttacgggcagaaactcgccgtca

SEQ ID NO: 908026 - DNA, 25 bp, Homo sapien
gaaactcgccgtcactgtccagcag

SEQ ID NO: 908027 - DNA, 25 bp, Homo sapien
gctgggcaaggtgaggtgccacaaa

SEQ ID NO: 908028 - DNA, 25 bp, Homo sapien
ctgtgccaaccagggggagccctca

SEQ ID NO: 908029 - DNA, 25 bp, Homo sapien
tgcagctccctaggtcagtacttgc

SEQ ID NO: 908030 - DNA, 25 bp, Homo sapien
ggttagaagagtcccgttagactca

SEQ ID NO: 908031 - DNA, 25 bp, Homo sapien
gagtcccgttagactcaggcaatgc

SEQ ID NO: 908032 - DNA, 25 bp, Homo sapien
ccagcacccagccatactgcgtggc

SEQ ID NO: 908033 - DNA, 25 bp, Homo sapien
gcacccagccatactgcgtggccac

SEQ ID NO: 908034 - DNA, 25 bp, Homo sapien
agcacccagccatactgcgtggcca

SEQ ID NO: 908035 - DNA, 25 bp, Homo sapien
cagcacccagccatactgcgtggcc

SEQ ID NO: 908036 - DNA, 25 bp, Homo sapien
tccagcagggcagtggcgttgatgt

SEQ ID NO: 908037 - DNA, 25 bp, Homo sapien
gggtcaccttcctgtcaagggctga

SEQ ID NO: 908038 - DNA, 25 bp, Homo sapien
gcagtggcgttgatgtggagcagct

SEQ ID NO: 908039 - DNA, 25 bp, Homo sapien
tcgaggctgcccttgtcggcgctcc

SEQ ID NO: 908040 - DNA, 25 bp, Homo sapien
cagcagagttacggtctgctggcca

SEQ ID NO: 908041 - DNA, 25 bp, Homo sapien
agcagagttacggtctgctggccac

SEQ ID NO: 908042 - DNA, 25 bp, Homo sapien
ggcagcagagttacggtctgctggc

SEQ ID NO: 908043 - DNA, 25 bp, Homo sapien
gcagcagagttacggtctgctggcc

SEQ ID NO: 908044 - DNA, 25 bp, Homo sapien
cagttccagtagtactaggggcagg

SEQ ID NO: 908045 - DNA, 25 bp, Homo sapien
ggcactaggcagacaagaccaggca

SEQ ID NO: 908046 - DNA, 25 bp, Homo sapien
ctggcactaggcagacaagaccagg

SEQ ID NO: 908047 - DNA, 25 bp, Homo sapien
tcccagttccagtagtactaggggc

SEQ ID NO: 908048 - DNA, 25 bp, Homo sapien
gtgaaattcagggtggaggacggct

SEQ ID NO: 908049 - DNA, 25 bp, Homo sapien
ggaggacggcttgcagctctgcttc

SEQ ID NO: 908050 - DNA, 25 bp, Homo sapien
aaattcagggtggaggacggcttgc

SEQ ID NO: 908051 - DNA, 25 bp, Homo sapien
ggtggaggacggcttgcagctctgc

SEQ ID NO: 908052 - DNA, 25 bp, Homo sapien
tactacaaccaacctactggcaggg

SEQ ID NO: 908053 - DNA, 25 bp, Homo sapien
actgtgccagacaaacccctgatgg

SEQ ID NO: 908054 - DNA, 25 bp, Homo sapien
taatgtctccaagtgagcacctggg

SEQ ID NO: 908055 - DNA, 25 bp, Homo sapien
tactaggtaacaagaggcagaaccc

SEQ ID NO: 908056 - DNA, 25 bp, Homo sapien
tagcccgagctgatcttgggaggac

SEQ ID NO: 908057 - DNA, 25 bp, Homo sapien
tcagtaatccctaggatgcctggct

SEQ ID NO: 908058 - DNA, 25 bp, Homo sapien
gaggacggttcatgagccattagct

SEQ ID NO: 908059 - DNA, 25 bp, Homo sapien
ataaaggtcgagcagtgggagccca

SEQ ID NO: 908060 - DNA, 25 bp, Homo sapien
gggtgatgtcctgcgctctgttcag

SEQ ID NO: 908061 - DNA, 25 bp, Homo sapien
tgatcctcttggtctggatggaagt

SEQ ID NO: 908062 - DNA, 25 bp, Homo sapien
gttcagacgcgcaaaagccagaagt

SEQ ID NO: 908063 - DNA, 25 bp, Homo sapien
aaagccagaagtacgctgcacaggt

SEQ ID NO: 908064 - DNA, 25 bp, Homo sapien
ggtcacacataaacgtaactgcagg

SEQ ID NO: 908065 - DNA, 25 bp, Homo sapien
agagaaggacttacacaggcccaga

SEQ ID NO: 908066 - DNA, 25 bp, Homo sapien
ctgctacagctaccccaaaatggat

SEQ ID NO: 908067 - DNA, 25 bp, Homo sapien
cagactggctttactttcccgacta

SEQ ID NO: 908068 - DNA, 25 bp, Homo sapien
cttgagtaaggcgaaggacttggca

SEQ ID NO: 908069 - DNA, 25 bp, Homo sapien
ggcgaaggacttggcacagtgggcc

SEQ ID NO: 908070 - DNA, 25 bp, Homo sapien
ccacttgagtaaggcgaaggacttg

SEQ ID NO: 908071 - DNA, 25 bp, Homo sapien
agtaaggcgaaggacttggcacagt

SEQ ID NO: 908072 - DNA, 25 bp, Homo sapien
ctgggcatgagggatagcaggtcgg

SEQ ID NO: 908073 - DNA, 25 bp, Homo sapien
ggcatgagggatagcaggtcggtgg

SEQ ID NO: 908074 - DNA, 25 bp, Homo sapien
gcatgagggatagcaggtcggtggc

SEQ ID NO: 908075 - DNA, 25 bp, Homo sapien
tgggcatgagggatagcaggtcggt

SEQ ID NO: 908076 - DNA, 25 bp, Homo sapien
tcaggacagagcagatcacagggtt

SEQ ID NO: 908077 - DNA, 25 bp, Homo sapien
ggacagagcagatcacagggtttag

SEQ ID NO: 908078 - DNA, 25 bp, Homo sapien
gacacaggaacagggcccatgagtc

SEQ ID NO: 908079 - DNA, 25 bp, Homo sapien
catgcataggacaggtactgaattt

SEQ ID NO: 908080 - DNA, 25 bp, Homo sapien
cataggacaggtactgaatttgaca

SEQ ID NO: 908081 - DNA, 25 bp, Homo sapien
gacaggtactgaatttgacacggct

SEQ ID NO: 908082 - DNA, 25 bp, Homo sapien
aggtactgaatttgacacggctgca

SEQ ID NO: 908083 - DNA, 25 bp, Homo sapien
cagggccagcgctcccctctctcca

SEQ ID NO: 908084 - DNA, 25 bp, Homo sapien
ccctctctccaccgttctgtccaaa

SEQ ID NO: 908085 - DNA, 25 bp, Homo sapien
tctctccaccgttctgtccaaaggg

SEQ ID NO: 908086 - DNA, 25 bp, Homo sapien
gcatctgcagggccagcgctcccct

SEQ ID NO: 908087 - DNA, 25 bp, Homo sapien
agcaagggcacggaccgccggctct

SEQ ID NO: 908088 - DNA, 25 bp, Homo sapien
gcaccaggtggtaggagatggcccg

SEQ ID NO: 908089 - DNA, 25 bp, Homo sapien
gagcacatctttcgtcagagagaag

SEQ ID NO: 908090 - DNA, 25 bp, Homo sapien
taggcataggccacgtccaagagca

SEQ ID NO: 908091 - DNA, 25 bp, Homo sapien
gctatgacagaaacgggcactgaat

SEQ ID NO: 908092 - DNA, 25 bp, Homo sapien
aacgggcactgaatttgacttgact

SEQ ID NO: 908093 - DNA, 25 bp, Homo sapien
ccccgctatgacagaaacgggcact

SEQ ID NO: 908094 - DNA, 25 bp, Homo sapien
gacagaaacgggcactgaatttgac

SEQ ID NO: 908095 - DNA, 25 bp, Homo sapien
cggttcattagtggctccgagaggt

SEQ ID NO: 908096 - DNA, 25 bp, Homo sapien
gtcttccaggcggttcattagtggc

SEQ ID NO: 908097 - DNA, 25 bp, Homo sapien
ttagtggctccgagaggtgtcccac

SEQ ID NO: 908098 - DNA, 25 bp, Homo sapien
ccaggcggttcattagtggctccga

SEQ ID NO: 908099 - DNA, 25 bp, Homo sapien
tcccagcagcttcgagagggtacca

SEQ ID NO: 908100 - DNA, 25 bp, Homo sapien
ttgtacttgagcttccgcatgcgcc

SEQ ID NO: 908101 - DNA, 25 bp, Homo sapien
caacgcctttccaggtgtgtgagca

SEQ ID NO: 908102 - DNA, 25 bp, Homo sapien
agggtaccatgccagaccgaggcaa

SEQ ID NO: 908103 - DNA, 25 bp, Homo sapien
actccattgtaacagggccccagtg

SEQ ID NO: 908104 - DNA, 25 bp, Homo sapien
gagctggaggctacctctctgaacc

SEQ ID NO: 908105 - DNA, 25 bp, Homo sapien
cttgctcagcctcgaggcctagacg

SEQ ID NO: 908106 - DNA, 25 bp, Homo sapien
gaagacagtatcagttccccactcc

SEQ ID NO: 908107 - DNA, 25 bp, Homo sapien
tcttctgggccagtgcctaccatag

SEQ ID NO: 908108 - DNA, 25 bp, Homo sapien
gcctgggacacagtaacagggcctg

SEQ ID NO: 908109 - DNA, 25 bp, Homo sapien
ggacacagtaacagggcctgtgagt

SEQ ID NO: 908110 - DNA, 25 bp, Homo sapien
ggcaggcactgaatttgacatggct

SEQ ID NO: 908111 - DNA, 25 bp, Homo sapien
tagtgggcacgtagacttcagctgc

SEQ ID NO: 908112 - DNA, 25 bp, Homo sapien
cctcctagggatgaccaagctgctg

SEQ ID NO: 908113 - DNA, 25 bp, Homo sapien
tgtcaacatgggtggctctagagcc

SEQ ID NO: 908114 - DNA, 25 bp, Homo sapien
caggagtccctgcagtgcgttaggc

SEQ ID NO: 908115 - DNA, 25 bp, Homo sapien
gactgccaccaagtagctccaggag

SEQ ID NO: 908116 - DNA, 25 bp, Homo sapien
ccggataagtaccattgctgcttga

SEQ ID NO: 908117 - DNA, 25 bp, Homo sapien
cagcaagtgagagagccggataagt

SEQ ID NO: 908118 - DNA, 25 bp, Homo sapien
aagtgggcatcctgtatgagcaagc

SEQ ID NO: 908119 - DNA, 25 bp, Homo sapien
tatgtagggagtagatgctcgttcc

SEQ ID NO: 908120 - DNA, 25 bp, Homo sapien
ctgcttctctatgtagggagtagat

SEQ ID NO: 908121 - DNA, 25 bp, Homo sapien
gggagtagatgctcgttccttctcc

SEQ ID NO: 908122 - DNA, 25 bp, Homo sapien
tctctatgtagggagtagatgctcg

SEQ ID NO: 908123 - DNA, 25 bp, Homo sapien
gggcctgacgagcagcttctctcag

SEQ ID NO: 908124 - DNA, 25 bp, Homo sapien
gcaagtctcagtcggccaactggag

SEQ ID NO: 908125 - DNA, 25 bp, Homo sapien
tatgggctacccaggcaagtctcag

SEQ ID NO: 908126 - DNA, 25 bp, Homo sapien
aagtcagagtcttatgggctaccca

SEQ ID NO: 908127 - DNA, 25 bp, Homo sapien
gagagacaagactcctagcaagtga

SEQ ID NO: 908128 - DNA, 25 bp, Homo sapien
cagagagacaagactcctagcaagt

SEQ ID NO: 908129 - DNA, 25 bp, Homo sapien
agagagacaagactcctagcaagtg

SEQ ID NO: 908130 - DNA, 25 bp, Homo sapien
gttacatatagccttgatgttgctt

SEQ ID NO: 908131 - DNA, 25 bp, Homo sapien
gtgttacatatagccttgatgttgc

SEQ ID NO: 908132 - DNA, 25 bp, Homo sapien
tgttacatatagccttgatgttgct

SEQ ID NO: 908133 - DNA, 25 bp, Homo sapien
tgtgttacatatagccttgatgttg

SEQ ID NO: 908134 - DNA, 25 bp, Homo sapien
gccccttctccccgtgccacaagac

SEQ ID NO: 908135 - DNA, 25 bp, Homo sapien
cgccccttctccccgtgccacaaga

SEQ ID NO: 908136 - DNA, 25 bp, Homo sapien
taactgtccccggaaccatgaggtg

SEQ ID NO: 908137 - DNA, 25 bp, Homo sapien
gcgcttccctacgtcactcggagcg

SEQ ID NO: 908138 - DNA, 25 bp, Homo sapien
cgccggcggaaacgagacgagcctc

SEQ ID NO: 908139 - DNA, 25 bp, Homo sapien
acgtccggaagccacgcctccagct

SEQ ID NO: 908140 - DNA, 25 bp, Homo sapien
cacataaccagtgagcgtggctctc

SEQ ID NO: 908141 - DNA, 25 bp, Homo sapien
gctctcatggatgtgggctcctcat

SEQ ID NO: 908142 - DNA, 25 bp, Homo sapien
ctcctcatgagtgtgggctcccgga

SEQ ID NO: 908143 - DNA, 25 bp, Homo sapien
tcccggagaatctaggcttgctgtg

SEQ ID NO: 908144 - DNA, 25 bp, Homo sapien
tggtttctgtcgagcagacttgggt

SEQ ID NO: 908145 - DNA, 25 bp, Homo sapien
tagcagccgtagaaggcatcatgca

SEQ ID NO: 908146 - DNA, 25 bp, Homo sapien
gcactctctggatccaagagagatg

SEQ ID NO: 908147 - DNA, 25 bp, Homo sapien
ttttaaattagcagccgtagaaggc

SEQ ID NO: 908148 - DNA, 25 bp, Homo sapien
ggctgaagcggcacttcttttctcc

SEQ ID NO: 908149 - DNA, 25 bp, Homo sapien
agcggctgaagcggcacttcttttc

SEQ ID NO: 908150 - DNA, 25 bp, Homo sapien
ttctccctaacacccgccgtccatg

SEQ ID NO: 908151 - DNA, 25 bp, Homo sapien
cctaacacccgccgtccatggagca

SEQ ID NO: 908152 - DNA, 25 bp, Homo sapien
agggccaggtggagtattaccaatg

SEQ ID NO: 908153 - DNA, 25 bp, Homo sapien
tgacgcagggcacctcctcggagga

SEQ ID NO: 908154 - DNA, 25 bp, Homo sapien
tgctgttgccaagacagtcattgta

SEQ ID NO: 908155 - DNA, 25 bp, Homo sapien
aggcaggttttgacgcagggcacct

SEQ ID NO: 908156 - DNA, 25 bp, Homo sapien
tgggagtgtcccctagagaggttac

SEQ ID NO: 908157 - DNA, 25 bp, Homo sapien
ctgggagtgtcccctagagaggtta

SEQ ID NO: 908158 - DNA, 25 bp, Homo sapien
agacagtgtatggtggcgggtggca

SEQ ID NO: 908159 - DNA, 25 bp, Homo sapien
cacagcaagggtcactttcagggca

SEQ ID NO: 908160 - DNA, 25 bp, Homo sapien
gggccacagcaagggtcactttcag

SEQ ID NO: 908161 - DNA, 25 bp, Homo sapien
aagggtcactttcagggcaagcagg

SEQ ID NO: 908162 - DNA, 25 bp, Homo sapien
gattgtcggctgacaacggccagca

SEQ ID NO: 908163 - DNA, 25 bp, Homo sapien
gcttccgtgtggctttgtgggaacc

SEQ ID NO: 908164 - DNA, 25 bp, Homo sapien
cacagagcctgattgtcggctgaca

SEQ ID NO: 908165 - DNA, 25 bp, Homo sapien
agcaccatccattgttgcactgcct

SEQ ID NO: 908166 - DNA, 25 bp, Homo sapien
cttgcctggacacgtggactccggg

SEQ ID NO: 908167 - DNA, 25 bp, Homo sapien
gcccttgcctggacacgtggactcc

SEQ ID NO: 908168 - DNA, 25 bp, Homo sapien
gtggactccgggcagaagcattact

SEQ ID NO: 908169 - DNA, 25 bp, Homo sapien
cctggacacgtggactccgggcaga

SEQ ID NO: 908170 - DNA, 25 bp, Homo sapien
ggagatcttggtcgctatagtggaa

SEQ ID NO: 908171 - DNA, 25 bp, Homo sapien
cagtatcaaattgagaaggaccaca

SEQ ID NO: 908172 - DNA, 25 bp, Homo sapien
gaaggtcctctcaattcattctggg

SEQ ID NO: 908173 - DNA, 25 bp, Homo sapien
cagtgagcgccccttaggtggagat

SEQ ID NO: 908174 - DNA, 25 bp, Homo sapien
gatcttcttgctggatcccaggacc

SEQ ID NO: 908175 - DNA, 25 bp, Homo sapien
catgtgggctgttggatccaggatc

SEQ ID NO: 908176 - DNA, 25 bp, Homo sapien
caggctccagttctgtggacctgtg

SEQ ID NO: 908177 - DNA, 25 bp, Homo sapien
caggtggaggggctttatctccagg

SEQ ID NO: 908178 - DNA, 25 bp, Homo sapien
tgtgtagacacagcgatggagcagc

SEQ ID NO: 908179 - DNA, 25 bp, Homo sapien
tgggctcgtgcatcacaggcattgc

SEQ ID NO: 908180 - DNA, 25 bp, Homo sapien
tacacgcctggcatatgtgtagaca

SEQ ID NO: 908181 - DNA, 25 bp, Homo sapien
catgtgtcagctttggttacacgcc

SEQ ID NO: 908182 - DNA, 25 bp, Homo sapien
ggcaggcctatcatggacacctggg

SEQ ID NO: 908183 - DNA, 25 bp, Homo sapien
taatgagccggcaggcctatcatgg

SEQ ID NO: 908184 - DNA, 25 bp, Homo sapien
ttatcaacatggtaatgagccggca

SEQ ID NO: 908185 - DNA, 25 bp, Homo sapien
ctttggacctctgggtattatcaac

SEQ ID NO: 908186 - DNA, 25 bp, Homo sapien
aagccagcagggcagttggaccgct

SEQ ID NO: 908187 - DNA, 25 bp, Homo sapien
cacaggatgcgatgacatagggcag

SEQ ID NO: 908188 - DNA, 25 bp, Homo sapien
gttggaccgctgagtctggaccttg

SEQ ID NO: 908189 - DNA, 25 bp, Homo sapien
gatggtgaagaccagacaggaagtc

SEQ ID NO: 908190 - DNA, 25 bp, Homo sapien
tcaggggggtacatgagctcaggtg

SEQ ID NO: 908191 - DNA, 25 bp, Homo sapien
tagatgttgatatcaggggggtaca

SEQ ID NO: 908192 - DNA, 25 bp, Homo sapien
ttagatgttgatatcaggggggtac

SEQ ID NO: 908193 - DNA, 25 bp, Homo sapien
ggtacatgagctcaggtgtcatggg

SEQ ID NO: 908194 - DNA, 25 bp, Homo sapien
cctgtgatgagctgcctgtgaggaa

SEQ ID NO: 908195 - DNA, 25 bp, Homo sapien
cccgacatcccgcacagcctccatc

SEQ ID NO: 908196 - DNA, 25 bp, Homo sapien
cgacatcccgcacagcctccatcca

SEQ ID NO: 908197 - DNA, 25 bp, Homo sapien
aagcttggcttgtgggcggtcgatg

SEQ ID NO: 908198 - DNA, 25 bp, Homo sapien
tgaggaatacatgaaagtgactttc

SEQ ID NO: 908199 - DNA, 25 bp, Homo sapien
ttcagaggcaatgtggacgtcccca

SEQ ID NO: 908200 - DNA, 25 bp, Homo sapien
aggaatacatgaaagtgactttcag

SEQ ID NO: 908201 - DNA, 25 bp, Homo sapien
tcagaggcaatgtggacgtccccat

SEQ ID NO: 908202 - DNA, 25 bp, Homo sapien
tcagatgatcgtctgacctggtgcc

SEQ ID NO: 908203 - DNA, 25 bp, Homo sapien
gatcgtctgacctggtgccttcact

SEQ ID NO: 908204 - DNA, 25 bp, Homo sapien
cttcactctgtgtggctctgatgtc

SEQ ID NO: 908205 - DNA, 25 bp, Homo sapien
gacctggtgccttcactctgtgtgg

SEQ ID NO: 908206 - DNA, 25 bp, Homo sapien
taggcccaaagtcttctgtttcaca

SEQ ID NO: 908207 - DNA, 25 bp, Homo sapien
agctgataggcccaaagtcttctgt

SEQ ID NO: 908208 - DNA, 25 bp, Homo sapien
gataggcccaaagtcttctgtttca

SEQ ID NO: 908209 - DNA, 25 bp, Homo sapien
acatctcatcctcccgttctgagct

SEQ ID NO: 908210 - DNA, 25 bp, Homo sapien
gcttgtctcaggagtgatttcccca

SEQ ID NO: 908211 - DNA, 25 bp, Homo sapien
tgtctcaggagtgatttccccagtg

SEQ ID NO: 908212 - DNA, 25 bp, Homo sapien
tctcaggagtgatttccccagtgcc

SEQ ID NO: 908213 - DNA, 25 bp, Homo sapien
ctttgcttgtctcaggagtgatttc

SEQ ID NO: 908214 - DNA, 25 bp, Homo sapien
gagctgtcctctctcctctgctcac

SEQ ID NO: 908215 - DNA, 25 bp, Homo sapien
ctctggagctgtcctctctcctctg

SEQ ID NO: 908216 - DNA, 25 bp, Homo sapien
tggagctgtcctctctcctctgctc

SEQ ID NO: 908217 - DNA, 25 bp, Homo sapien
tctggagctgtcctctctcctctgc

SEQ ID NO: 908218 - DNA, 25 bp, Homo sapien
ctgtcctgaaccccggagaagctgc

SEQ ID NO: 908219 - DNA, 25 bp, Homo sapien
gctgtcactaaagggttgaagcggt

SEQ ID NO: 908220 - DNA, 25 bp, Homo sapien
ctgtcactaaagggttgaagcggtt

SEQ ID NO: 908221 - DNA, 25 bp, Homo sapien
tgctgtcactaaagggttgaagcgg

SEQ ID NO: 908222 - DNA, 25 bp, Homo sapien
ggagcatcctcacttgcttcaggca

SEQ ID NO: 908223 - DNA, 25 bp, Homo sapien
tggggagcatcctcacttgcttcag

SEQ ID NO: 908224 - DNA, 25 bp, Homo sapien
aggacgctgtgctcagggaggacct

SEQ ID NO: 908225 - DNA, 25 bp, Homo sapien
ggacgctgtgctcagggaggacctg

SEQ ID NO: 908226 - DNA, 25 bp, Homo sapien
ctataaccgcatcaataccacttct

SEQ ID NO: 908227 - DNA, 25 bp, Homo sapien
acctataaccgcatcaataccactt

SEQ ID NO: 908228 - DNA, 25 bp, Homo sapien
cctataaccgcatcaataccacttc

SEQ ID NO: 908229 - DNA, 25 bp, Homo sapien
aggcttgcttgacatagatataatg

SEQ ID NO: 908230 - DNA, 25 bp, Homo sapien
ggattttgagagtcctccacgccag

SEQ ID NO: 908231 - DNA, 25 bp, Homo sapien
attttgagagtcctccacgccagag

SEQ ID NO: 908232 - DNA, 25 bp, Homo sapien
caaactttgaaacaaggattttgag

SEQ ID NO: 908233 - DNA, 25 bp, Homo sapien
cacatgctggctgccgacaccacaa

SEQ ID NO: 908234 - DNA, 25 bp, Homo sapien
gccacatgctggctgccgacaccac

SEQ ID NO: 908235 - DNA, 25 bp, Homo sapien
aaggccacatgctggctgccgacac

SEQ ID NO: 908236 - DNA, 25 bp, Homo sapien
tggaaggccacatgctggctgccga

SEQ ID NO: 908237 - DNA, 25 bp, Homo sapien
gggggtgaccgggtgctcatgaaag

SEQ ID NO: 908238 - DNA, 25 bp, Homo sapien
gtcagggggtgaccgggtgctcatg

SEQ ID NO: 908239 - DNA, 25 bp, Homo sapien
tcctgtcagggggtgaccgggtgct

SEQ ID NO: 908240 - DNA, 25 bp, Homo sapien
gggtgaccgggtgctcatgaaagga

SEQ ID NO: 908241 - DNA, 25 bp, Homo sapien
gggcacagatgtccctcttgagctt

SEQ ID NO: 908242 - DNA, 25 bp, Homo sapien
gtgggggcacagatgtccctcttga

SEQ ID NO: 908243 - DNA, 25 bp, Homo sapien
cacagatgtccctcttgagcttgcc

SEQ ID NO: 908244 - DNA, 25 bp, Homo sapien
cagatgtccctcttgagcttgcccc

SEQ ID NO: 908245 - DNA, 25 bp, Homo sapien
gggttcaggcttctgtaccatccag

SEQ ID NO: 908246 - DNA, 25 bp, Homo sapien
ggccacttaggaccatgacacctga

SEQ ID NO: 908247 - DNA, 25 bp, Homo sapien
tctgcagagtgttgtgggcaagacc

SEQ ID NO: 908248 - DNA, 25 bp, Homo sapien
tccagagagctctaccctgtcaggc

SEQ ID NO: 908249 - DNA, 25 bp, Homo sapien
ccactcctgtggagtctcaatacct

SEQ ID NO: 908250 - DNA, 25 bp, Homo sapien
cccatttgttgaggtctggccccac

SEQ ID NO: 908251 - DNA, 25 bp, Homo sapien
gaacaaggtgttcttccgagcagac

SEQ ID NO: 908252 - DNA, 25 bp, Homo sapien
gagccctccaggtaatcacagctgt

SEQ ID NO: 908253 - DNA, 25 bp, Homo sapien
ttcctgagagttggatgcccaggtg

SEQ ID NO: 908254 - DNA, 25 bp, Homo sapien
tacctggacaccagcgcaagatagg

SEQ ID NO: 908255 - DNA, 25 bp, Homo sapien
gaggttttgcttttgcgcagggcca

SEQ ID NO: 908256 - DNA, 25 bp, Homo sapien
cagaaggaccctgtagtggaggagt

SEQ ID NO: 908257 - DNA, 25 bp, Homo sapien
tgatttcccggacgccagctcggag

SEQ ID NO: 908258 - DNA, 25 bp, Homo sapien
tagagatttccaacaggttcactgg

SEQ ID NO: 908259 - DNA, 25 bp, Homo sapien
ttagagatttccaacaggttcactg

SEQ ID NO: 908260 - DNA, 25 bp, Homo sapien
gagatttccaacaggttcactggtc

SEQ ID NO: 908261 - DNA, 25 bp, Homo sapien
agagatttccaacaggttcactggt

SEQ ID NO: 908262 - DNA, 25 bp, Homo sapien
cctccaggtcttgggtcagatactg

SEQ ID NO: 908263 - DNA, 25 bp, Homo sapien
cttgggtcagatactgtttcctcag

SEQ ID NO: 908264 - DNA, 25 bp, Homo sapien
tccaggtcttgggtcagatactgtt

SEQ ID NO: 908265 - DNA, 25 bp, Homo sapien
aggtcttgggtcagatactgtttcc

SEQ ID NO: 908266 - DNA, 25 bp, Homo sapien
aaagagcaacgacactatgaagcaa

SEQ ID NO: 908267 - DNA, 25 bp, Homo sapien
taaagagcaacgacactatgaagca

SEQ ID NO: 908268 - DNA, 25 bp, Homo sapien
ataaagagcaacgacactatgaagc

SEQ ID NO: 908269 - DNA, 25 bp, Homo sapien
gttgttctcgtcctcgctgttatgc

SEQ ID NO: 908270 - DNA, 25 bp, Homo sapien
ggtgctcccttgatctgaacggcag

SEQ ID NO: 908271 - DNA, 25 bp, Homo sapien
tgcggaagccactgtcatttctatg

SEQ ID NO: 908272 - DNA, 25 bp, Homo sapien
tatgccatcgtctcagtgtgtaaag

SEQ ID NO: 908273 - DNA, 25 bp, Homo sapien
tcaaaggggccaatgacgagaaaca

SEQ ID NO: 908274 - DNA, 25 bp, Homo sapien
ggagacaaggtttgtgtacatcaaa

SEQ ID NO: 908275 - DNA, 25 bp, Homo sapien
acgagaaacacagggagtgatagca

SEQ ID NO: 908276 - DNA, 25 bp, Homo sapien
agggagtgatagcacccacagggcc

SEQ ID NO: 908277 - DNA, 25 bp, Homo sapien
gggcagaggcctctgcccacagcat

SEQ ID NO: 908278 - DNA, 25 bp, Homo sapien
gagaagggccctgggcagaggcctc

SEQ ID NO: 908279 - DNA, 25 bp, Homo sapien
tgggcagaggcctctgcccacagca

SEQ ID NO: 908280 - DNA, 25 bp, Homo sapien
ctgagagaagggccctgggcagagg

SEQ ID NO: 908281 - DNA, 25 bp, Homo sapien
cggtgattggccactggcaagtctt

SEQ ID NO: 908282 - DNA, 25 bp, Homo sapien
tgattggccactggcaagtcttcct

SEQ ID NO: 908283 - DNA, 25 bp, Homo sapien
gtgattggccactggcaagtcttcc

SEQ ID NO: 908284 - DNA, 25 bp, Homo sapien
ggtgattggccactggcaagtcttc

SEQ ID NO: 908285 - DNA, 25 bp, Homo sapien
gggcccagtgatgattgagccagct

SEQ ID NO: 908286 - DNA, 25 bp, Homo sapien
gaatagagagttgtaagggcccagt

SEQ ID NO: 908287 - DNA, 25 bp, Homo sapien
gctgtactacattctgcgcaggtga

SEQ ID NO: 908288 - DNA, 25 bp, Homo sapien
cgcaggtgatgccttgtgtggtttg

SEQ ID NO: 908289 - DNA, 25 bp, Homo sapien
tgcaattgaagaggggaacctgcga

SEQ ID NO: 908290 - DNA, 25 bp, Homo sapien
ctgtggtgcaattgaagaggggaac

SEQ ID NO: 908291 - DNA, 25 bp, Homo sapien
aagaggggaacctgcgaggccacaa

SEQ ID NO: 908292 - DNA, 25 bp, Homo sapien
aacctgcgaggccacaactgctcat

SEQ ID NO: 908293 - DNA, 25 bp, Homo sapien
tcacagctctgggtttttgtccttc

SEQ ID NO: 908294 - DNA, 25 bp, Homo sapien
tctgggtttttgtccttctggccta

SEQ ID NO: 908295 - DNA, 25 bp, Homo sapien
gctctgggtttttgtccttctggcc

SEQ ID NO: 908296 - DNA, 25 bp, Homo sapien
cagctctgggtttttgtccttctgg

SEQ ID NO: 908297 - DNA, 25 bp, Homo sapien
gggtgtgcatggctgtcaggaggca

SEQ ID NO: 908298 - DNA, 25 bp, Homo sapien
tgggccacatttgccatggcagagg

SEQ ID NO: 908299 - DNA, 25 bp, Homo sapien
gcctgggccacatttgccatggcag

SEQ ID NO: 908300 - DNA, 25 bp, Homo sapien
ggccacatttgccatggcagaggtg

SEQ ID NO: 908301 - DNA, 25 bp, Homo sapien
cagcctgggccacatttgccatggc

SEQ ID NO: 908302 - DNA, 25 bp, Homo sapien
cctggggtgggcaatcctcagtgga

SEQ ID NO: 908303 - DNA, 25 bp, Homo sapien
gggacgcaaacttgtgggtgagctt

SEQ ID NO: 908304 - DNA, 25 bp, Homo sapien
tggttggaattcgtgtcagtcttgt

SEQ ID NO: 908305 - DNA, 25 bp, Homo sapien
tgctgagctggttggaattcgtgtc

SEQ ID NO: 908306 - DNA, 25 bp, Homo sapien
tcttgtcataacagctccgcgaggc

SEQ ID NO: 908307 - DNA, 25 bp, Homo sapien
tgcatccaccggcttgaactcacca

SEQ ID NO: 908308 - DNA, 25 bp, Homo sapien
gcatccaccggcttgaactcaccac

SEQ ID NO: 908309 - DNA, 25 bp, Homo sapien
tccaccggcttgaactcaccaccat

SEQ ID NO: 908310 - DNA, 25 bp, Homo sapien
cccctctgcatccaccggcttgaac

SEQ ID NO: 908311 - DNA, 25 bp, Homo sapien
cccggaggtccaggagataacctgg

SEQ ID NO: 908312 - DNA, 25 bp, Homo sapien
ccggaggtccaggagataacctggc

SEQ ID NO: 908313 - DNA, 25 bp, Homo sapien
cggaggtccaggagataacctggcc

SEQ ID NO: 908314 - DNA, 25 bp, Homo sapien
tggtgaattgacacccacagtcatt

SEQ ID NO: 908315 - DNA, 25 bp, Homo sapien
gtgaattgacacccacagtcattcc

SEQ ID NO: 908316 - DNA, 25 bp, Homo sapien
cccacagtcattccaattcttgcca

SEQ ID NO: 908317 - DNA, 25 bp, Homo sapien
cacagtcattccaattcttgccagg

SEQ ID NO: 908318 - DNA, 25 bp, Homo sapien
ggcgccgccgatggcactccctggt

SEQ ID NO: 908319 - DNA, 25 bp, Homo sapien
agtgtcagcgctgagcacgtggaca

SEQ ID NO: 908320 - DNA, 25 bp, Homo sapien
catggccgactctctcctcaaaggg

SEQ ID NO: 908321 - DNA, 25 bp, Homo sapien
gatggcactccctggtcttgttttc

SEQ ID NO: 908322 - DNA, 25 bp, Homo sapien
gacaggctggtgtccacatgaaaca

SEQ ID NO: 908323 - DNA, 25 bp, Homo sapien
tggaaagctggacaactttagcttg

SEQ ID NO: 908324 - DNA, 25 bp, Homo sapien
caggcacttcacagatatcgtgtgc

SEQ ID NO: 908325 - DNA, 25 bp, Homo sapien
catggcattgccatatcccaggaca

SEQ ID NO: 908326 - DNA, 25 bp, Homo sapien
tagagagacgggagccagagttttc

SEQ ID NO: 908327 - DNA, 25 bp, Homo sapien
taaccactactgcatgacttacgaa

SEQ ID NO: 908328 - DNA, 25 bp, Homo sapien
tgactgacataggagggagcattgc

SEQ ID NO: 908329 - DNA, 25 bp, Homo sapien
caagcaacatacagcatcctgcagg

SEQ ID NO: 908330 - DNA, 25 bp, Homo sapien
tgagaatgaccctgaatgaccactt

SEQ ID NO: 908331 - DNA, 25 bp, Homo sapien
ccttagaacggcctgagaatgaccc

SEQ ID NO: 908332 - DNA, 25 bp, Homo sapien
gcaggaagagcctgcactgtccagt

SEQ ID NO: 908333 - DNA, 25 bp, Homo sapien
agtgccttagaacggcctgagaatg

SEQ ID NO: 908334 - DNA, 25 bp, Homo sapien
gagtatcatcaagaataggctggta

SEQ ID NO: 908335 - DNA, 25 bp, Homo sapien
taggctggtagctgacagtcaccat

SEQ ID NO: 908336 - DNA, 25 bp, Homo sapien
tctcgaaatgatcaaacagaggccc

SEQ ID NO: 908337 - DNA, 25 bp, Homo sapien
tctttctattgtctcgaaatgatca

SEQ ID NO: 908338 - DNA, 25 bp, Homo sapien
cctctttgaattgccgaagctaatg

SEQ ID NO: 908339 - DNA, 25 bp, Homo sapien
cgaagctaatggatttcctcaaaca

SEQ ID NO: 908340 - DNA, 25 bp, Homo sapien
aattgccgaagctaatggatttcct

SEQ ID NO: 908341 - DNA, 25 bp, Homo sapien
gctaatggatttcctcaaacaatct

SEQ ID NO: 908342 - DNA, 25 bp, Homo sapien
tattttgtcttcttcatttgaattc

SEQ ID NO: 908343 - DNA, 25 bp, Homo sapien
ttattttgtcttcttcatttgaatt

SEQ ID NO: 908344 - DNA, 25 bp, Homo sapien
tccccaggcatcagccaagctcctg

SEQ ID NO: 908345 - DNA, 25 bp, Homo sapien
gcacctggcagcgtgtagtcacaga

SEQ ID NO: 908346 - DNA, 25 bp, Homo sapien
cttcccgcagagaacggggccagca

SEQ ID NO: 908347 - DNA, 25 bp, Homo sapien
accctttgtacagttggtgatgggc

SEQ ID NO: 908348 - DNA, 25 bp, Homo sapien
tggtatgagcctctctgtgcttagc

SEQ ID NO: 908349 - DNA, 25 bp, Homo sapien
tcactggtatgagcctctctgtgct

SEQ ID NO: 908350 - DNA, 25 bp, Homo sapien
tatgagcctctctgtgcttagctgt

SEQ ID NO: 908351 - DNA, 25 bp, Homo sapien
atgagcctctctgtgcttagctgtg

SEQ ID NO: 908352 - DNA, 25 bp, Homo sapien
tccatcgcccaggagactggacacg

SEQ ID NO: 908353 - DNA, 25 bp, Homo sapien
caccatctccatcgcccaggagact

SEQ ID NO: 908354 - DNA, 25 bp, Homo sapien
gggcaggaggtgtacggtagagaca

SEQ ID NO: 908355 - DNA, 25 bp, Homo sapien
gaggtgtacggtagagacacgcagt

SEQ ID NO: 908356 - DNA, 25 bp, Homo sapien
agataaaagcaaggcaccccattca

SEQ ID NO: 908357 - DNA, 25 bp, Homo sapien
tgttgagataaaagcaaggcacccc

SEQ ID NO: 908358 - DNA, 25 bp, Homo sapien
ctgtgctgccccactgttgagataa

SEQ ID NO: 908359 - DNA, 25 bp, Homo sapien
actgttgagataaaagcaaggcacc

SEQ ID NO: 908360 - DNA, 25 bp, Homo sapien
tgacaatgcatcaggcactgagtgc

SEQ ID NO: 908361 - DNA, 25 bp, Homo sapien
tatggttacttcttgctgacaatgc

SEQ ID NO: 908362 - DNA, 25 bp, Homo sapien
gggtgaggccaagcacacacattgt

SEQ ID NO: 908363 - DNA, 25 bp, Homo sapien
cactgagtgcaatgagacttcttga

SEQ ID NO: 908364 - DNA, 25 bp, Homo sapien
tgcatctatcttccagctgtgtccc

SEQ ID NO: 908365 - DNA, 25 bp, Homo sapien
agggtgcatctatcttccagctgtg

SEQ ID NO: 908366 - DNA, 25 bp, Homo sapien
gggtgcatctatcttccagctgtgt

SEQ ID NO: 908367 - DNA, 25 bp, Homo sapien
ggtgcatctatcttccagctgtgtc

SEQ ID NO: 908368 - DNA, 25 bp, Homo sapien
ttgagtagtcaccacattggcttct

SEQ ID NO: 908369 - DNA, 25 bp, Homo sapien
aagattgagtagtcaccacattggc

SEQ ID NO: 908370 - DNA, 25 bp, Homo sapien
gagtagtcaccacattggcttcttt

SEQ ID NO: 908371 - DNA, 25 bp, Homo sapien
tgaagattgagtagtcaccacattg

SEQ ID NO: 908372 - DNA, 25 bp, Homo sapien
tagtcctggcaggaattggcaaaga

SEQ ID NO: 908373 - DNA, 25 bp, Homo sapien
agtcctggcaggaattggcaaagac

SEQ ID NO: 908374 - DNA, 25 bp, Homo sapien
agtagtcctggcaggaattggcaaa

SEQ ID NO: 908375 - DNA, 25 bp, Homo sapien
ctagtagtcctggcaggaattggca

SEQ ID NO: 908376 - DNA, 25 bp, Homo sapien
ggccctctccatgaacctcacggct

SEQ ID NO: 908377 - DNA, 25 bp, Homo sapien
cctggctctttagcatgagaagggc

SEQ ID NO: 908378 - DNA, 25 bp, Homo sapien
tctgctgagcggtctgccgagccgc

SEQ ID NO: 908379 - DNA, 25 bp, Homo sapien
cagaaccccaaaagcggccagcagg

SEQ ID NO: 908380 - DNA, 25 bp, Homo sapien
ggacatctggatcttatgttcagtt

SEQ ID NO: 908381 - DNA, 25 bp, Homo sapien
tctggatcttatgttcagtttgaaa

SEQ ID NO: 908382 - DNA, 25 bp, Homo sapien
ttaggacatctggatcttatgttca

SEQ ID NO: 908383 - DNA, 25 bp, Homo sapien
catctggatcttatgttcagtttga

SEQ ID NO: 908384 - DNA, 25 bp, Homo sapien
tgtcgcagcgcggtcgccgccgagg

SEQ ID NO: 908385 - DNA, 25 bp, Homo sapien
cgccgaggaccacggtcggggcgcg

SEQ ID NO: 908386 - DNA, 25 bp, Homo sapien
ggaggggacgcgctccgggcgcgcg

SEQ ID NO: 908387 - DNA, 25 bp, Homo sapien
ggctcggctgtcgcagcgcggtcgc

SEQ ID NO: 908388 - DNA, 25 bp, Homo sapien
ctggaggcgctgttccgcggctaca

SEQ ID NO: 908389 - DNA, 25 bp, Homo sapien
gcgacgaggagttcgcttgcccaga

SEQ ID NO: 908390 - DNA, 25 bp, Homo sapien
gctgctcgtggtaaccaacgtccgg

SEQ ID NO: 908391 - DNA, 25 bp, Homo sapien
ctgctctgctgtcctttcgcgctgg

SEQ ID NO: 908392 - DNA, 25 bp, Homo sapien
tccagaattgcccctgtcagggcag

SEQ ID NO: 908393 - DNA, 25 bp, Homo sapien
tcaagggcagttaactttaacataa

SEQ ID NO: 908394 - DNA, 25 bp, Homo sapien
cttccagaattgcccctgtcagggc

SEQ ID NO: 908395 - DNA, 25 bp, Homo sapien
agaattgcccctgtcagggcagctg

SEQ ID NO: 908396 - DNA, 25 bp, Homo sapien
catggtgtttggtgattctgagcgc

SEQ ID NO: 908397 - DNA, 25 bp, Homo sapien
tgaacacaccctaacatgctctgcg

SEQ ID NO: 908398 - DNA, 25 bp, Homo sapien
tgaccctttccagacatccatggtg

SEQ ID NO: 908399 - DNA, 25 bp, Homo sapien
gtttgtggaaaaagccggatctgag

SEQ ID NO: 908400 - DNA, 25 bp, Homo sapien
caccgagagggaagctaaatggccg

SEQ ID NO: 908401 - DNA, 25 bp, Homo sapien
tggagatcttcagggtcatagtgga

SEQ ID NO: 908402 - DNA, 25 bp, Homo sapien
acagctctgtcaaatgcaccgagag

SEQ ID NO: 908403 - DNA, 25 bp, Homo sapien
taaatggccgtgttcaggtcccatg

SEQ ID NO: 908404 - DNA, 25 bp, Homo sapien
tcagccccagcatccagtaggtggc

SEQ ID NO: 908405 - DNA, 25 bp, Homo sapien
cagcatccagtaggtggccaggagc

SEQ ID NO: 908406 - DNA, 25 bp, Homo sapien
catccagtaggtggccaggagctgc

SEQ ID NO: 908407 - DNA, 25 bp, Homo sapien
ctccctcctagagccgtctgggggc

SEQ ID NO: 908408 - DNA, 25 bp, Homo sapien
ttggtaaagcaccagaatctgtggc

SEQ ID NO: 908409 - DNA, 25 bp, Homo sapien
gataggtcttgtacagtctggccag

SEQ ID NO: 908410 - DNA, 25 bp, Homo sapien
ctgtggctgattggtgagagtctcc

SEQ ID NO: 908411 - DNA, 25 bp, Homo sapien
gctgcctgaagaacaagcctctatc

SEQ ID NO: 908412 - DNA, 25 bp, Homo sapien
tgcaatgcccttgcagtcttgtctg

SEQ ID NO: 908413 - DNA, 25 bp, Homo sapien
gcagccagtattgtgtcctgggcct

SEQ ID NO: 908414 - DNA, 25 bp, Homo sapien
tctgggctgtccactaggcttgtcc

SEQ ID NO: 908415 - DNA, 25 bp, Homo sapien
tctctctcaccgtgcttggagctga

SEQ ID NO: 908416 - DNA, 25 bp, Homo sapien
tttaaagacatccatacgccctgtg

SEQ ID NO: 908417 - DNA, 25 bp, Homo sapien
gcctctgggcggtggagtgtcctgg

SEQ ID NO: 908418 - DNA, 25 bp, Homo sapien
gctgtttctgggtagcagggctgac

SEQ ID NO: 908419 - DNA, 25 bp, Homo sapien
gctggccgcctttgttcttggggac

SEQ ID NO: 908420 - DNA, 25 bp, Homo sapien
agtgctggcagaggttaggatatca

SEQ ID NO: 908421 - DNA, 25 bp, Homo sapien
gaggttaggatatcattacagctgc

SEQ ID NO: 908422 - DNA, 25 bp, Homo sapien
ttcatgcagcccttgaattctgcca

SEQ ID NO: 908423 - DNA, 25 bp, Homo sapien
ttacagctgcaagatgccttcatgc

SEQ ID NO: 908424 - DNA, 25 bp, Homo sapien
cactcgtggggagatgcatctgcag

SEQ ID NO: 908425 - DNA, 25 bp, Homo sapien
cagaatccactcgtggggagatgca

SEQ ID NO: 908426 - DNA, 25 bp, Homo sapien
acaggctccagaatccactcgtggg

SEQ ID NO: 908427 - DNA, 25 bp, Homo sapien
tccactcgtggggagatgcatctgc

SEQ ID NO: 908428 - DNA, 25 bp, Homo sapien
gccaggatgggtcatatttagactg

SEQ ID NO: 908429 - DNA, 25 bp, Homo sapien
taaacttgtcataagtctgaggccc

SEQ ID NO: 908430 - DNA, 25 bp, Homo sapien
catgcatactgaagcccactggtag

SEQ ID NO: 908431 - DNA, 25 bp, Homo sapien
ggtttatagtgagtcgtggctgcca

SEQ ID NO: 908432 - DNA, 25 bp, Homo sapien
ggacaccatccacccgacactgttt

SEQ ID NO: 908433 - DNA, 25 bp, Homo sapien
tttcctttgagttgcaaggtccctg

SEQ ID NO: 908434 - DNA, 25 bp, Homo sapien
gagttgcaaggtccctgcgatcacc

SEQ ID NO: 908435 - DNA, 25 bp, Homo sapien
ttctagtctgggataaataaggcag

SEQ ID NO: 908436 - DNA, 25 bp, Homo sapien
agtggacaccggagcttcctcagtc

SEQ ID NO: 908437 - DNA, 25 bp, Homo sapien
tcttctcactacatgtctgatgcag

SEQ ID NO: 908438 - DNA, 25 bp, Homo sapien
tgcagtacagcaagaggatcatgtc

SEQ ID NO: 908439 - DNA, 25 bp, Homo sapien
ctaggttgcgcagcagtcgcaggcc

SEQ ID NO: 908440 - DNA, 25 bp, Homo sapien
cagacagccgctgcgtgggcagagt

SEQ ID NO: 908441 - DNA, 25 bp, Homo sapien
gagcatgacccagagtaagtcagca

SEQ ID NO: 908442 - DNA, 25 bp, Homo sapien
cagagtaagtcagcactgtgcccag

SEQ ID NO: 908443 - DNA, 25 bp, Homo sapien
tgcgtgggcagagtgtggctccagc

SEQ ID NO: 908444 - DNA, 25 bp, Homo sapien
caccggcactgtgtttgttcagaga

SEQ ID NO: 908445 - DNA, 25 bp, Homo sapien
tgttcagagaaaacgaagggtgtca

SEQ ID NO: 908446 - DNA, 25 bp, Homo sapien
tctgttgaatatgagcggctgtcac

SEQ ID NO: 908447 - DNA, 25 bp, Homo sapien
catttagcaacaacagtgtgaggct

SEQ ID NO: 908448 - DNA, 25 bp, Homo sapien
aaaggtgtccatgccccagttctaa

SEQ ID NO: 908449 - DNA, 25 bp, Homo sapien
cagaggagtgaaccccaaaggtgtc

SEQ ID NO: 908450 - DNA, 25 bp, Homo sapien
tatcccagccggatttaaagcagtc

SEQ ID NO: 908451 - DNA, 25 bp, Homo sapien
tgtccttgacccacgagctgttgag

SEQ ID NO: 908452 - DNA, 25 bp, Homo sapien
gtgtctgtgattctgtgtgaactga

SEQ ID NO: 908453 - DNA, 25 bp, Homo sapien
agctgaaggacaggccccggccttg

SEQ ID NO: 908454 - DNA, 25 bp, Homo sapien
ggaaggctcttctcatagttgtggt

SEQ ID NO: 908455 - DNA, 25 bp, Homo sapien
cacacggggtttgtctgtaagctgc

SEQ ID NO: 908456 - DNA, 25 bp, Homo sapien
ctttttgggttctcggtgtgcagag

SEQ ID NO: 908457 - DNA, 25 bp, Homo sapien
ctccagttaccaggagccgatttgg

SEQ ID NO: 908458 - DNA, 25 bp, Homo sapien
gctgcaggaattcggccctccagct

SEQ ID NO: 908459 - DNA, 25 bp, Homo sapien
tcagggcggtgaccgctgcaggaat

SEQ ID NO: 908460 - DNA, 25 bp, Homo sapien
ggttttgatggagaactctagctca

SEQ ID NO: 908461 - DNA, 25 bp, Homo sapien
aatgggtgagactcgctccaactgc

SEQ ID NO: 908462 - DNA, 25 bp, Homo sapien
ggcaggccttacctcacattgctaa

SEQ ID NO: 908463 - DNA, 25 bp, Homo sapien
gctcatccacatgctagtgcccaag

SEQ ID NO: 908464 - DNA, 25 bp, Homo sapien
aaatcacgccgcatgcacaaaggga

SEQ ID NO: 908465 - DNA, 25 bp, Homo sapien
gcactctggaactgcatgccgtgaa

SEQ ID NO: 908466 - DNA, 25 bp, Homo sapien
tgtgcaacagtagcccagagcatcc

SEQ ID NO: 908467 - DNA, 25 bp, Homo sapien
tgccgtgaaaactcctaatggtgtg

SEQ ID NO: 908468 - DNA, 25 bp, Homo sapien
gtttggctagatagggttgtgtccc

SEQ ID NO: 908469 - DNA, 25 bp, Homo sapien
gaccatctcgtagtggtacattcca

SEQ ID NO: 908470 - DNA, 25 bp, Homo sapien
tgtccttattatgatgaccatctcg

SEQ ID NO: 908471 - DNA, 25 bp, Homo sapien
gaaaagttgtgtaagcgcctgcgtt

SEQ ID NO: 908472 - DNA, 25 bp, Homo sapien
tcaagattgttaaattgagacaagt

SEQ ID NO: 908473 - DNA, 25 bp, Homo sapien
ttatgtcaactgaacactgtagggt

SEQ ID NO: 908474 - DNA, 25 bp, Homo sapien
cactgtagggtaccttccagtcttt

SEQ ID NO: 908475 - DNA, 25 bp, Homo sapien
caactgaacactgtagggtaccttc

SEQ ID NO: 908476 - DNA, 25 bp, Homo sapien
caagtttagttgaatggtgaagatg

SEQ ID NO: 908477 - DNA, 25 bp, Homo sapien
aatatcccattcaagtttagttgaa

SEQ ID NO: 908478 - DNA, 25 bp, Homo sapien
gaatcttctgtctatcgagttgttt

SEQ ID NO: 908479 - DNA, 25 bp, Homo sapien
agatgaaactgattacacgatcagt

SEQ ID NO: 908480 - DNA, 25 bp, Homo sapien
aagaaacagaaccaagagggcatgt

SEQ ID NO: 908481 - DNA, 25 bp, Homo sapien
acagaaccaagagggcatgtgtgtg

SEQ ID NO: 908482 - DNA, 25 bp, Homo sapien
gaaacagaaccaagagggcatgtgt

SEQ ID NO: 908483 - DNA, 25 bp, Homo sapien
ttcaaagaaacagaaccaagagggc

SEQ ID NO: 908484 - DNA, 25 bp, Homo sapien
ctgtcagaaagagagagggggcaaa

SEQ ID NO: 908485 - DNA, 25 bp, Homo sapien
agagagagggggcaaaaacaggaca

SEQ ID NO: 908486 - DNA, 25 bp, Homo sapien
agaaagagagagggggcaaaaacag

SEQ ID NO: 908487 - DNA, 25 bp, Homo sapien
caaaaacaggacagagaatttattt

SEQ ID NO: 908488 - DNA, 25 bp, Homo sapien
cagggaggaggttatgttgctactt

SEQ ID NO: 908489 - DNA, 25 bp, Homo sapien
ggcaagtctgaagtctataggaaag

SEQ ID NO: 908490 - DNA, 25 bp, Homo sapien
tccacattgtgacgggctatctgcc

SEQ ID NO: 908491 - DNA, 25 bp, Homo sapien
ccttcttcgtttgggatctcagtct

SEQ ID NO: 908492 - DNA, 25 bp, Homo sapien
catcatgagtggtctatagtttttc

SEQ ID NO: 908493 - DNA, 25 bp, Homo sapien
gccaagcacatataacaaccatcat

SEQ ID NO: 908494 - DNA, 25 bp, Homo sapien
gccggcctgatgtggttccagcaaa

SEQ ID NO: 908495 - DNA, 25 bp, Homo sapien
tgcaccttagcaggatccgggctct

SEQ ID NO: 908496 - DNA, 25 bp, Homo sapien
caggagggtgtcaggacttccaaac

SEQ ID NO: 908497 - DNA, 25 bp, Homo sapien
aacttaactgtctctcggccaggcg

SEQ ID NO: 908498 - DNA, 25 bp, Homo sapien
cagtgtttggcgtgtagcaactcag

SEQ ID NO: 908499 - DNA, 25 bp, Homo sapien
tacaagcagttacaagcagtagcag

SEQ ID NO: 908500 - DNA, 25 bp, Homo sapien
taatctttaacacccctactggcta

SEQ ID NO: 908501 - DNA, 25 bp, Homo sapien
gatcttacaacttagaagggctctg

SEQ ID NO: 908502 - DNA, 25 bp, Homo sapien
ctgatgccaggaaggtccgctgtac

SEQ ID NO: 908503 - DNA, 25 bp, Homo sapien
tctggaggcctttttctgatgccag

SEQ ID NO: 908504 - DNA, 25 bp, Homo sapien
tttctgatgccaggaaggtccgctg

SEQ ID NO: 908505 - DNA, 25 bp, Homo sapien
ttttctggaggcctttttctgatgc

SEQ ID NO: 908506 - DNA, 25 bp, Homo sapien
aggcaaagagaagtgccgagaccag

SEQ ID NO: 908507 - DNA, 25 bp, Homo sapien
ggcaaagagaagtgccgagaccagc

SEQ ID NO: 908508 - DNA, 25 bp, Homo sapien
cagaagggtcatgggtgcctatgcc

SEQ ID NO: 908509 - DNA, 25 bp, Homo sapien
ttcacgcgtcccaagctagggttgc

SEQ ID NO: 908510 - DNA, 25 bp, Homo sapien
cagctacggaggtggttcacgcgtc

SEQ ID NO: 908511 - DNA, 25 bp, Homo sapien
tcaaccatcatctcagggcggcttc

SEQ ID NO: 908512 - DNA, 25 bp, Homo sapien
taaataaggcccaacctgttagcaa

SEQ ID NO: 908513 - DNA, 25 bp, Homo sapien
ccaatgttgcgacgctaggagtttc

SEQ ID NO: 908514 - DNA, 25 bp, Homo sapien
tctatcaaactactgctctgtggat

SEQ ID NO: 908515 - DNA, 25 bp, Homo sapien
aatacactatgtccaagcacttatg

SEQ ID NO: 908516 - DNA, 25 bp, Homo sapien
aattttagctacttgctcccttctt

SEQ ID NO: 908517 - DNA, 25 bp, Homo sapien
tcagagtccttcagtttttgaactt

SEQ ID NO: 908518 - DNA, 25 bp, Homo sapien
tcttaattttagctacttgctccct

SEQ ID NO: 908519 - DNA, 25 bp, Homo sapien
ctttgaccttcatctcaaacacctg

SEQ ID NO: 908520 - DNA, 25 bp, Homo sapien
catgaatattaagggtaatcattaa

SEQ ID NO: 908521 - DNA, 25 bp, Homo sapien
gaatattaagggtaatcattaaatg

SEQ ID NO: 908522 - DNA, 25 bp, Homo sapien
tcatgaatattaagggtaatcatta

SEQ ID NO: 908523 - DNA, 25 bp, Homo sapien
ctgtcatgaatattaagggtaatca

SEQ ID NO: 908524 - DNA, 25 bp, Homo sapien
aaatgtgtttgccagcattcttcca

SEQ ID NO: 908525 - DNA, 25 bp, Homo sapien
tgccagcattcttccagtgaaaggg

SEQ ID NO: 908526 - DNA, 25 bp, Homo sapien
agtgtcagcgactgccctgaaacag

SEQ ID NO: 908527 - DNA, 25 bp, Homo sapien
catattaatggcaggtgttttttaa

SEQ ID NO: 908528 - DNA, 25 bp, Homo sapien
atatgattactgactacagaaagaa

SEQ ID NO: 908529 - DNA, 25 bp, Homo sapien
tattcttcttgttatcaactccatg

SEQ ID NO: 908530 - DNA, 25 bp, Homo sapien
agtgagctgccctttattcttcttg

SEQ ID NO: 908531 - DNA, 25 bp, Homo sapien
gctgccagttttctgattccatagt

SEQ ID NO: 908532 - DNA, 25 bp, Homo sapien
gattccatagttctcgtagtggaca

SEQ ID NO: 908533 - DNA, 25 bp, Homo sapien
aataaacggcaagagtttgcttcta

SEQ ID NO: 908534 - DNA, 25 bp, Homo sapien
tcataaataaacggcaagagtttgc

SEQ ID NO: 908535 - DNA, 25 bp, Homo sapien
aacggcaagagtttgcttctattaa

SEQ ID NO: 908536 - DNA, 25 bp, Homo sapien
taaataaacggcaagagtttgcttc

SEQ ID NO: 908537 - DNA, 25 bp, Homo sapien
tctcacgtcagttagaatggtgaac

SEQ ID NO: 908538 - DNA, 25 bp, Homo sapien
ctcacgtcagttagaatggtgaaca

SEQ ID NO: 908539 - DNA, 25 bp, Homo sapien
gaagcctagttctaacttttcctca

SEQ ID NO: 908540 - DNA, 25 bp, Homo sapien
aagcctagttctaacttttcctcag

SEQ ID NO: 908541 - DNA, 25 bp, Homo sapien
tactaaatatccactagacgccttt

SEQ ID NO: 908542 - DNA, 25 bp, Homo sapien
gcaatactggtattgtatttccttc

SEQ ID NO: 908543 - DNA, 25 bp, Homo sapien
catctttctaatacgtataacttta

SEQ ID NO: 908544 - DNA, 25 bp, Homo sapien
taatgcttatactagggaggaccct

SEQ ID NO: 908545 - DNA, 25 bp, Homo sapien
aaaactgtaaaatcacaatgttcac

SEQ ID NO: 908546 - DNA, 25 bp, Homo sapien
cttatcaacatatttcttaaaactg

SEQ ID NO: 908547 - DNA, 25 bp, Homo sapien
tcaacatatttcttaaaactgtaaa

SEQ ID NO: 908548 - DNA, 25 bp, Homo sapien
ttcttaaaactgtaaaatcacaatg

SEQ ID NO: 908549 - DNA, 25 bp, Homo sapien
attactacccaccacagcaagaggt

SEQ ID NO: 908550 - DNA, 25 bp, Homo sapien
tcagcaacactccaaggatactgcc

SEQ ID NO: 908551 - DNA, 25 bp, Homo sapien
ggatactgccttcctatgacccttt

SEQ ID NO: 908552 - DNA, 25 bp, Homo sapien
atgatagtattactacccaccacag

SEQ ID NO: 908553 - DNA, 25 bp, Homo sapien
atattttaactttatgttcttggat

SEQ ID NO: 908554 - DNA, 25 bp, Homo sapien
catcatctgtttctggaaattcata

SEQ ID NO: 908555 - DNA, 25 bp, Homo sapien
catctgtttctggaaattcatatat

SEQ ID NO: 908556 - DNA, 25 bp, Homo sapien
gtttctggaaattcatatattttaa

SEQ ID NO: 908557 - DNA, 25 bp, Homo sapien
gtagtcagcaaaagagcaccataca

SEQ ID NO: 908558 - DNA, 25 bp, Homo sapien
gaagtagtcagcaaaagagcaccat

SEQ ID NO: 908559 - DNA, 25 bp, Homo sapien
aagtagtcagcaaaagagcaccata

SEQ ID NO: 908560 - DNA, 25 bp, Homo sapien
tagtcagcaaaagagcaccatacat

SEQ ID NO: 908561 - DNA, 25 bp, Homo sapien
ctgcaaattatgagaatggtataag

SEQ ID NO: 908562 - DNA, 25 bp, Homo sapien
ctatgacaatgggtaagagctttga

SEQ ID NO: 908563 - DNA, 25 bp, Homo sapien
tacagtaaagcagtaagaggaatgg

SEQ ID NO: 908564 - DNA, 25 bp, Homo sapien
aaactaaggcagaagattcaagagt

SEQ ID NO: 908565 - DNA, 25 bp, Homo sapien
tttttcatgcaaatgctttgtaaac

SEQ ID NO: 908566 - DNA, 25 bp, Homo sapien
tctcaaatcttcatacgcagcccat

SEQ ID NO: 908567 - DNA, 25 bp, Homo sapien
cgcagcccatatcttactgttaagt

SEQ ID NO: 908568 - DNA, 25 bp, Homo sapien
ttatcttcagttggtcgactgactc

SEQ ID NO: 908569 - DNA, 25 bp, Homo sapien
aagttccacatttgtgtttacccag

SEQ ID NO: 908570 - DNA, 25 bp, Homo sapien
gtctggagttcagtggcgcaatctc

SEQ ID NO: 908571 - DNA, 25 bp, Homo sapien
cgctcttattgcccagtctggagtt

SEQ ID NO: 908572 - DNA, 25 bp, Homo sapien
cttcaggtgatccacctgcctcagc

SEQ ID NO: 908573 - DNA, 25 bp, Homo sapien
ttcaggtgatccacctgcctcagcc

SEQ ID NO: 908574 - DNA, 25 bp, Homo sapien
gcctcaaattctacagcataataaa

SEQ ID NO: 908575 - DNA, 25 bp, Homo sapien
tagcctcaaattctacagcataata

SEQ ID NO: 908576 - DNA, 25 bp, Homo sapien
aaattctacagcataataaacaact

SEQ ID NO: 908577 - DNA, 25 bp, Homo sapien
attctacagcataataaacaactac

SEQ ID NO: 908578 - DNA, 25 bp, Homo sapien
aggcaatgccaggtagttacaaaca

SEQ ID NO: 908579 - DNA, 25 bp, Homo sapien
tacccaatcctgcctgaaggtggga

SEQ ID NO: 908580 - DNA, 25 bp, Homo sapien
ctcaacaaaaggcaatgccaggtag

SEQ ID NO: 908581 - DNA, 25 bp, Homo sapien
acaaaaggcaatgccaggtagttac

SEQ ID NO: 908582 - DNA, 25 bp, Homo sapien
tataaacaacagtgcaccctgttac

SEQ ID NO: 908583 - DNA, 25 bp, Homo sapien
gagcaatgaagtataaacaacagtg

SEQ ID NO: 908584 - DNA, 25 bp, Homo sapien
aggagcaatgaagtataaacaacag

SEQ ID NO: 908585 - DNA, 25 bp, Homo sapien
tgaagtataaacaacagtgcaccct

SEQ ID NO: 908586 - DNA, 25 bp, Homo sapien
gacatctgttcacttgcgattctgc

SEQ ID NO: 908587 - DNA, 25 bp, Homo sapien
tcaatgtaattgataacaggctgcc

SEQ ID NO: 908588 - DNA, 25 bp, Homo sapien
catctgttcacttgcgattctgcat

SEQ ID NO: 908589 - DNA, 25 bp, Homo sapien
tctgacatctgttcacttgcgattc

SEQ ID NO: 908590 - DNA, 25 bp, Homo sapien
gcaactgaataccaccttctttgat

SEQ ID NO: 908591 - DNA, 25 bp, Homo sapien
caactattgtaagcagcaactgaat

SEQ ID NO: 908592 - DNA, 25 bp, Homo sapien
aaatcctggggtatcaactattgta

SEQ ID NO: 908593 - DNA, 25 bp, Homo sapien
tgattaaaactttggattgttccac

SEQ ID NO: 908594 - DNA, 25 bp, Homo sapien
gcttttacaagtatcctcatgggat

SEQ ID NO: 908595 - DNA, 25 bp, Homo sapien
tgcttttacaagtatcctcatggga

SEQ ID NO: 908596 - DNA, 25 bp, Homo sapien
aagaagtcagcgacatatggaagag

SEQ ID NO: 908597 - DNA, 25 bp, Homo sapien
tcagcgacatatggaagagatccag

SEQ ID NO: 908598 - DNA, 25 bp, Homo sapien
taattctctgagaaggacctggata

SEQ ID NO: 908599 - DNA, 25 bp, Homo sapien
gtcaactttcccagtccagattcac

SEQ ID NO: 908600 - DNA, 25 bp, Homo sapien
gacctggatactctggagaatacaa

SEQ ID NO: 908601 - DNA, 25 bp, Homo sapien
attaatgtcaactttcccagtccag

SEQ ID NO: 908602 - DNA, 25 bp, Homo sapien
gcagctggcgctggccattgaggag

SEQ ID NO: 908603 - DNA, 25 bp, Homo sapien
tcaggtgaggcgagtgggcagccgg

SEQ ID NO: 908604 - DNA, 25 bp, Homo sapien
ggtgaggcgagtgggcagccggggc

SEQ ID NO: 908605 - DNA, 25 bp, Homo sapien
agctggcgctggccattgaggagct

SEQ ID NO: 908606 - DNA, 25 bp, Homo sapien
gcgatcggttgcaccttctgcgaca

SEQ ID NO: 908607 - DNA, 25 bp, Homo sapien
ggttggcgcgcagcgcctgctagcg

SEQ ID NO: 908608 - DNA, 25 bp, Homo sapien
gcgcgacagtgcgatcggttgcacc

SEQ ID NO: 908609 - DNA, 25 bp, Homo sapien
agtgcgatcggttgcaccttctgcg

SEQ ID NO: 908610 - DNA, 25 bp, Homo sapien
ctctggccagcctcgagccgttgtg

SEQ ID NO: 908611 - DNA, 25 bp, Homo sapien
gccgttgtgggtccagcactttttc

SEQ ID NO: 908612 - DNA, 25 bp, Homo sapien
cagcctcgagccgttgtgggtccag

SEQ ID NO: 908613 - DNA, 25 bp, Homo sapien
tggttgtccttctgccttgaggcct

SEQ ID NO: 908614 - DNA, 25 bp, Homo sapien
aacttatgaattcaacaggtgaaga

SEQ ID NO: 908615 - DNA, 25 bp, Homo sapien
caacaggtgaagatttacaacttga

SEQ ID NO: 908616 - DNA, 25 bp, Homo sapien
aattcaacaggtgaagatttacaac

SEQ ID NO: 908617 - DNA, 25 bp, Homo sapien
tgaattcaacaggtgaagatttaca

SEQ ID NO: 908618 - DNA, 25 bp, Homo sapien
agagggagagaagcttccagttaag

SEQ ID NO: 908619 - DNA, 25 bp, Homo sapien
tggagagggagagaagcttccagtt

SEQ ID NO: 908620 - DNA, 25 bp, Homo sapien
aataatagtgcatgcatcaagtgca

SEQ ID NO: 908621 - DNA, 25 bp, Homo sapien
caaataatagtgcatgcatcaagtg

SEQ ID NO: 908622 - DNA, 25 bp, Homo sapien
gccctgtcatttaggatggagttca

SEQ ID NO: 908623 - DNA, 25 bp, Homo sapien
gcacctcaggatggagaggaccctg

SEQ ID NO: 908624 - DNA, 25 bp, Homo sapien
cttgtaggcacctcaggatggagag

SEQ ID NO: 908625 - DNA, 25 bp, Homo sapien
gatgtttactcgtttgcagagagag

SEQ ID NO: 908626 - DNA, 25 bp, Homo sapien
tcatatcatgacatactgccgctgc

SEQ ID NO: 908627 - DNA, 25 bp, Homo sapien
tccaaggtatgtcatatcatgacat

SEQ ID NO: 908628 - DNA, 25 bp, Homo sapien
tgtcatatcatgacatactgccgct

SEQ ID NO: 908629 - DNA, 25 bp, Homo sapien
tatgtcatatcatgacatactgccg

SEQ ID NO: 908630 - DNA, 25 bp, Homo sapien
ctattaaacatgtagaatgctttcc

SEQ ID NO: 908631 - DNA, 25 bp, Homo sapien
cttttattgtcagaaactccagaaa

SEQ ID NO: 908632 - DNA, 25 bp, Homo sapien
gtagaatgctttcctaatttctctt

SEQ ID NO: 908633 - DNA, 25 bp, Homo sapien
gcattttccttacttttattgtcag

SEQ ID NO: 908634 - DNA, 25 bp, Homo sapien
atttaggcccataccctacctcacg

SEQ ID NO: 908635 - DNA, 25 bp, Homo sapien
ggcccataccctacctcacggcagt

SEQ ID NO: 908636 - DNA, 25 bp, Homo sapien
ccataccctacctcacggcagtctc

SEQ ID NO: 908637 - DNA, 25 bp, Homo sapien
ctatttaggcccataccctacctca

SEQ ID NO: 908638 - DNA, 25 bp, Homo sapien
gaggatgtgtgcatagtgggcctgg

SEQ ID NO: 908639 - DNA, 25 bp, Homo sapien
ggatgtgtgcatagtgggcctggag

SEQ ID NO: 908640 - DNA, 25 bp, Homo sapien
gggaggatgtgtgcatagtgggcct

SEQ ID NO: 908641 - DNA, 25 bp, Homo sapien
cttggaggggaggatgtgtgcatag

SEQ ID NO: 908642 - DNA, 25 bp, Homo sapien
tgcagtgaagacactgccttctcgg

SEQ ID NO: 908643 - DNA, 25 bp, Homo sapien
cacgtgcagtgaagacactgccttc

SEQ ID NO: 908644 - DNA, 25 bp, Homo sapien
gtgaagacactgccttctcggtctc

SEQ ID NO: 908645 - DNA, 25 bp, Homo sapien
agacactgccttctcggtctctggt

SEQ ID NO: 908646 - DNA, 25 bp, Homo sapien
agtgtcagtggtgctaaagccgtca

SEQ ID NO: 908647 - DNA, 25 bp, Homo sapien
atgggctcctcgtcactcgctgtgt

SEQ ID NO: 908648 - DNA, 25 bp, Homo sapien
tcgctgtgtcctcaccggccatgtg

SEQ ID NO: 908649 - DNA, 25 bp, Homo sapien
atcagtgtcagtggtgctaaagccg

SEQ ID NO: 908650 - DNA, 25 bp, Homo sapien
tcggtccttgttgcaagtgggccac

SEQ ID NO: 908651 - DNA, 25 bp, Homo sapien
gagcccttgtacactcctgctagcc

SEQ ID NO: 908652 - DNA, 25 bp, Homo sapien
gcctctgagctggacttctttcggt

SEQ ID NO: 908653 - DNA, 25 bp, Homo sapien
cccttgtacactcctgctagcccct

SEQ ID NO: 908654 - DNA, 25 bp, Homo sapien
tggaaggccaggtcgtagcacttct

SEQ ID NO: 908655 - DNA, 25 bp, Homo sapien
ccaggtcgtagcacttctgcgtctc

SEQ ID NO: 908656 - DNA, 25 bp, Homo sapien
aaggccaggtcgtagcacttctgcg

SEQ ID NO: 908657 - DNA, 25 bp, Homo sapien
ggccaggtcgtagcacttctgcgtc

SEQ ID NO: 908658 - DNA, 25 bp, Homo sapien
tgccagagcctggtgccgcttgctg

SEQ ID NO: 908659 - DNA, 25 bp, Homo sapien
tgccgcttgctgaagatcatgacca

SEQ ID NO: 908660 - DNA, 25 bp, Homo sapien
ctgccagagcctggtgccgcttgct

SEQ ID NO: 908661 - DNA, 25 bp, Homo sapien
cttgctgaagatcatgaccaccact

SEQ ID NO: 908662 - DNA, 25 bp, Homo sapien
ccagggggccgcgcagggtcaacac

SEQ ID NO: 908663 - DNA, 25 bp, Homo sapien
atggtgggaggtgggcttttaccag

SEQ ID NO: 908664 - DNA, 25 bp, Homo sapien
catggtgggaggtgggcttttacca

SEQ ID NO: 908665 - DNA, 25 bp, Homo sapien
gctccagggggccgcgcagggtcaa

SEQ ID NO: 908666 - DNA, 25 bp, Homo sapien
agctgccaacttggcaggttgtttg

SEQ ID NO: 908667 - DNA, 25 bp, Homo sapien
tgactggcaggttgccgggcctcgt

SEQ ID NO: 908668 - DNA, 25 bp, Homo sapien
tggcaggttgccgggcctcgtgtgg

SEQ ID NO: 908669 - DNA, 25 bp, Homo sapien
gactggcaggttgccgggcctcgtg

SEQ ID NO: 908670 - DNA, 25 bp, Homo sapien
ctgcagggaggggtcaggaagggga

SEQ ID NO: 908671 - DNA, 25 bp, Homo sapien
tgcagggaggggtcaggaaggggac

SEQ ID NO: 908672 - DNA, 25 bp, Homo sapien
gttccacattcctccacatgaacat

SEQ ID NO: 908673 - DNA, 25 bp, Homo sapien
ggccacagagcgaggttccacattc

SEQ ID NO: 908674 - DNA, 25 bp, Homo sapien
cgaggttccacattcctccacatga

SEQ ID NO: 908675 - DNA, 25 bp, Homo sapien
gaggttccacattcctccacatgaa

SEQ ID NO: 908676 - DNA, 25 bp, Homo sapien
tgtgggccgagtacttggtccgggc

SEQ ID NO: 908677 - DNA, 25 bp, Homo sapien
ctgacgccacgagaggcctcgctgg

SEQ ID NO: 908678 - DNA, 25 bp, Homo sapien
tcgctggacgcaggcctgtgggccg

SEQ ID NO: 908679 - DNA, 25 bp, Homo sapien
cacgagaggcctcgctggacgcagg

SEQ ID NO: 908680 - DNA, 25 bp, Homo sapien
tgcccgaattcgtctgccctcatgt

SEQ ID NO: 908681 - DNA, 25 bp, Homo sapien
ttggaccattctgcccgaattcgtc

SEQ ID NO: 908682 - DNA, 25 bp, Homo sapien
cgtctgccctcatgttgcggccttg

SEQ ID NO: 908683 - DNA, 25 bp, Homo sapien
cttggaccattctgcccgaattcgt

SEQ ID NO: 908684 - DNA, 25 bp, Homo sapien
ctcagccaccggcagaacttcctgc

SEQ ID NO: 908685 - DNA, 25 bp, Homo sapien
cagccaccggcagaacttcctgcat

SEQ ID NO: 908686 - DNA, 25 bp, Homo sapien
tcagccaccggcagaacttcctgca

SEQ ID NO: 908687 - DNA, 25 bp, Homo sapien
gttgttcaggtcatttaccttccac

SEQ ID NO: 908688 - DNA, 25 bp, Homo sapien
agactgcttataactgtgacgatgt

SEQ ID NO: 908689 - DNA, 25 bp, Homo sapien
tttgttgttcaggtcatttaccttc

SEQ ID NO: 908690 - DNA, 25 bp, Homo sapien
gtgacgatgtcatctaggcagatgg

SEQ ID NO: 908691 - DNA, 25 bp, Homo sapien
cagatgctcgtgtatttacccagtt

SEQ ID NO: 908692 - DNA, 25 bp, Homo sapien
ggttgctggcttcattgctcaagtc

SEQ ID NO: 908693 - DNA, 25 bp, Homo sapien
cagccggttgctggcttcattgctc

SEQ ID NO: 908694 - DNA, 25 bp, Homo sapien
ctgcaggccacaggagacagccggt

SEQ ID NO: 908695 - DNA, 25 bp, Homo sapien
tgggaattgggggacattcttgagc

SEQ ID NO: 908696 - DNA, 25 bp, Homo sapien
tgctgtgggaattgggggacattct

SEQ ID NO: 908697 - DNA, 25 bp, Homo sapien
ttctgctgtgggaattgggggacat

SEQ ID NO: 908698 - DNA, 25 bp, Homo sapien
gaattgggggacattcttgagccat

SEQ ID NO: 908699 - DNA, 25 bp, Homo sapien
acgccctcagggagtagcctggcat

SEQ ID NO: 908700 - DNA, 25 bp, Homo sapien
atgacgccctcagggagtagcctgg

SEQ ID NO: 908701 - DNA, 25 bp, Homo sapien
gtccacgtgggtgatgacgccctca

SEQ ID NO: 908702 - DNA, 25 bp, Homo sapien
gacgccctcagggagtagcctggca

SEQ ID NO: 908703 - DNA, 25 bp, Homo sapien
cattgttggtgttattaccagggct

SEQ ID NO: 908704 - DNA, 25 bp, Homo sapien
ccagggctattgtttagctgtttat

SEQ ID NO: 908705 - DNA, 25 bp, Homo sapien
tggtgttattaccagggctattgtt

SEQ ID NO: 908706 - DNA, 25 bp, Homo sapien
ctaagtgagcattgttggtgttatt

SEQ ID NO: 908707 - DNA, 25 bp, Homo sapien
tcttcgatggtgagctcatgctggg

SEQ ID NO: 908708 - DNA, 25 bp, Homo sapien
gctgggtggcttcctcaatgttctg

SEQ ID NO: 908709 - DNA, 25 bp, Homo sapien
tcagtcatcttcgatggtgagctca

SEQ ID NO: 908710 - DNA, 25 bp, Homo sapien
aagcacgtagatctcccactgtcgc

SEQ ID NO: 908711 - DNA, 25 bp, Homo sapien
agctgcccgcttcttcgggtctcgt

SEQ ID NO: 908712 - DNA, 25 bp, Homo sapien
ctgcccgcttcttcgggtctcgtct

SEQ ID NO: 908713 - DNA, 25 bp, Homo sapien
cgcagctgcccgcttcttcgggtct

SEQ ID NO: 908714 - DNA, 25 bp, Homo sapien
cagctgcccgcttcttcgggtctcg

SEQ ID NO: 908715 - DNA, 25 bp, Homo sapien
tctttgcccggagggactcttgctg

SEQ ID NO: 908716 - DNA, 25 bp, Homo sapien
tgagagatccaagctggactccttg

SEQ ID NO: 908717 - DNA, 25 bp, Homo sapien
tgttcaggatcccaggcaatccagg

SEQ ID NO: 908718 - DNA, 25 bp, Homo sapien
ccttttcctaacagtggctggaggg

SEQ ID NO: 908719 - DNA, 25 bp, Homo sapien
gtacatcgtttccttcagcaaagcc

SEQ ID NO: 908720 - DNA, 25 bp, Homo sapien
attttgtacatcgtttccttcagca

SEQ ID NO: 908721 - DNA, 25 bp, Homo sapien
tgttgctcttggagtatgtttattt

SEQ ID NO: 908722 - DNA, 25 bp, Homo sapien
ttgtacatcgtttccttcagcaaag

SEQ ID NO: 908723 - DNA, 25 bp, Homo sapien
gcagaagatctctcctgcaggccat

SEQ ID NO: 908724 - DNA, 25 bp, Homo sapien
ctgatgagatgtggaagcccaaggg

SEQ ID NO: 908725 - DNA, 25 bp, Homo sapien
gcccaagggctctggcagaagatct

SEQ ID NO: 908726 - DNA, 25 bp, Homo sapien
gatgagatgtggaagcccaagggct

SEQ ID NO: 908727 - DNA, 25 bp, Homo sapien
caaggctgtatagagcagcagggcc

SEQ ID NO: 908728 - DNA, 25 bp, Homo sapien
atgtcccaaggctgtatagagcagc

SEQ ID NO: 908729 - DNA, 25 bp, Homo sapien
agctggagcagctgtaatacagggc

SEQ ID NO: 908730 - DNA, 25 bp, Homo sapien
ccacttttcaccatggctggagctg

SEQ ID NO: 908731 - DNA, 25 bp, Homo sapien
ctgtctgctgctcgcgcctggagat

SEQ ID NO: 908732 - DNA, 25 bp, Homo sapien
agaggtccccgttgctcgcgtctgg

SEQ ID NO: 908733 - DNA, 25 bp, Homo sapien
gcgtctggctggtactgctcctgct

SEQ ID NO: 908734 - DNA, 25 bp, Homo sapien
tgtccgcctcgtgctcggaggtcac

SEQ ID NO: 908735 - DNA, 25 bp, Homo sapien
gaagctgaggtttcgaggctcccta

SEQ ID NO: 908736 - DNA, 25 bp, Homo sapien
gctgttgggacataactcttcctgg

SEQ ID NO: 908737 - DNA, 25 bp, Homo sapien
gaaacttactattgtcaggaacaga

SEQ ID NO: 908738 - DNA, 25 bp, Homo sapien
taatgcggttaggaactgaactcta

SEQ ID NO: 908739 - DNA, 25 bp, Homo sapien
agtgatctcctgggggcccgaaagg

SEQ ID NO: 908740 - DNA, 25 bp, Homo sapien
ctgggggcccgaaaggggcagatgc

SEQ ID NO: 908741 - DNA, 25 bp, Homo sapien
cctgggggcccgaaaggggcagatg

SEQ ID NO: 908742 - DNA, 25 bp, Homo sapien
ggaagtgatctcctgggggcccgaa

SEQ ID NO: 908743 - DNA, 25 bp, Homo sapien
cagagagcacggagataactgagga

SEQ ID NO: 908744 - DNA, 25 bp, Homo sapien
cggagataactgaggaggagctcct

SEQ ID NO: 908745 - DNA, 25 bp, Homo sapien
ccagagagcacggagataactgagg

SEQ ID NO: 908746 - DNA, 25 bp, Homo sapien
agcacggagataactgaggaggagc

SEQ ID NO: 908747 - DNA, 25 bp, Homo sapien
gaattctaccacttgagggcgacag

SEQ ID NO: 908748 - DNA, 25 bp, Homo sapien
tggactttcaggagaggagcccact

SEQ ID NO: 908749 - DNA, 25 bp, Homo sapien
gagcccactggatgcaaagaaaatg

SEQ ID NO: 908750 - DNA, 25 bp, Homo sapien
tagttccggacgataggttacttca

SEQ ID NO: 908751 - DNA, 25 bp, Homo sapien
ggatcttgggttcctcacctataca

SEQ ID NO: 908752 - DNA, 25 bp, Homo sapien
aagcaagtatctatttggacagctc

SEQ ID NO: 908753 - DNA, 25 bp, Homo sapien
cctaacgcttggatcttgggttcct

SEQ ID NO: 908754 - DNA, 25 bp, Homo sapien
taggccccctaacgcttggatcttg

SEQ ID NO: 908755 - DNA, 25 bp, Homo sapien
aggagtgctttaggtctcagtgaag

SEQ ID NO: 908756 - DNA, 25 bp, Homo sapien
gcacacacgagacatgttccctctg

SEQ ID NO: 908757 - DNA, 25 bp, Homo sapien
ctcagtgaagtacaggttctgtaga

SEQ ID NO: 908758 - DNA, 25 bp, Homo sapien
gaacagtggggcacacacgagacat

SEQ ID NO: 908759 - DNA, 25 bp, Homo sapien
gctggtgcgtctacccttggaatgg

SEQ ID NO: 908760 - DNA, 25 bp, Homo sapien
cagctagtttgaaggaggacggtta

SEQ ID NO: 908761 - DNA, 25 bp, Homo sapien
gacggttaacttgtatattccacca

SEQ ID NO: 908762 - DNA, 25 bp, Homo sapien
gatgttgccacctgttaaaatgtac

SEQ ID NO: 908763 - DNA, 25 bp, Homo sapien
gaaatgtccctctagacaggctgcc

SEQ ID NO: 908764 - DNA, 25 bp, Homo sapien
tggaatcccattagggtaccctcat

SEQ ID NO: 908765 - DNA, 25 bp, Homo sapien
tacttaactgtctgtgcacgtctct

SEQ ID NO: 908766 - DNA, 25 bp, Homo sapien
tctccagtgggatgactagttcaag

SEQ ID NO: 908767 - DNA, 25 bp, Homo sapien
aaataattagtgatacaaagcccag

SEQ ID NO: 908768 - DNA, 25 bp, Homo sapien
aaatacattgcaagacaaacttctc

SEQ ID NO: 908769 - DNA, 25 bp, Homo sapien
taaatacattgcaagacaaacttct

SEQ ID NO: 908770 - DNA, 25 bp, Homo sapien
tgtgtccacaccgaggtctgcagca

SEQ ID NO: 908771 - DNA, 25 bp, Homo sapien
gagctctatgcagcgtgtgtccaca

SEQ ID NO: 908772 - DNA, 25 bp, Homo sapien
taataggtaggcagaatgtcttgag

SEQ ID NO: 908773 - DNA, 25 bp, Homo sapien
tgagacccctctgttttcaaggaga

SEQ ID NO: 908774 - DNA, 25 bp, Homo sapien
gggcgtgagctcctttcctcagtca

SEQ ID NO: 908775 - DNA, 25 bp, Homo sapien
ggccacagttgtatcatatagcatc

SEQ ID NO: 908776 - DNA, 25 bp, Homo sapien
tttggcctccgggagagcagcccag

SEQ ID NO: 908777 - DNA, 25 bp, Homo sapien
cagtctctgggcgtgagctcctttc

SEQ ID NO: 908778 - DNA, 25 bp, Homo sapien
gtcacaaagtcagtggtcggccgct

SEQ ID NO: 908779 - DNA, 25 bp, Homo sapien
aatagtccccaagcagtacaggtca

SEQ ID NO: 908780 - DNA, 25 bp, Homo sapien
tattctcgataaagcctgtgcgcac

SEQ ID NO: 908781 - DNA, 25 bp, Homo sapien
tgaagcgtgttctctacataggcaa

SEQ ID NO: 908782 - DNA, 25 bp, Homo sapien
cagacctcacgggtaaagcctaact

SEQ ID NO: 908783 - DNA, 25 bp, Homo sapien
aaatcaaaagggctcgactcttgcc

SEQ ID NO: 908784 - DNA, 25 bp, Homo sapien
gctaatggcactaggcctgcaagtg

SEQ ID NO: 908785 - DNA, 25 bp, Homo sapien
caacgagtaccagatgctgctcaca

SEQ ID NO: 908786 - DNA, 25 bp, Homo sapien
catgctgtagcagtgcacgtcctcc

SEQ ID NO: 908787 - DNA, 25 bp, Homo sapien
agaggctgcccatacttatccacac

SEQ ID NO: 908788 - DNA, 25 bp, Homo sapien
gctgtagcagtgcacgtcctccttc

SEQ ID NO: 908789 - DNA, 25 bp, Homo sapien
gcagtgcacgtcctccttccccttg

SEQ ID NO: 908790 - DNA, 25 bp, Homo sapien
tgagtcggaggaagaccacatggcc

SEQ ID NO: 908791 - DNA, 25 bp, Homo sapien
cacagctatgactttggagcccaca

SEQ ID NO: 908792 - DNA, 25 bp, Homo sapien
tttctaggagtataaggtggacacc

SEQ ID NO: 908793 - DNA, 25 bp, Homo sapien
tagtatatggtcaccctgaggccac

SEQ ID NO: 908794 - DNA, 25 bp, Homo sapien
gagtcaccaacatctagcaacagcc

SEQ ID NO: 908795 - DNA, 25 bp, Homo sapien
tatcgggaaggcatcagtaggaaag

SEQ ID NO: 908796 - DNA, 25 bp, Homo sapien
acgattgtgggatttcagggtaagc

SEQ ID NO: 908797 - DNA, 25 bp, Homo sapien
tcttaatattgcaacctgctcacta

SEQ ID NO: 908798 - DNA, 25 bp, Homo sapien
cttcaggtgattcagtgtgtcttcc

SEQ ID NO: 908799 - DNA, 25 bp, Homo sapien
ggaatgtgtacacccctgggactca

SEQ ID NO: 908800 - DNA, 25 bp, Homo sapien
ctgggactcagcacattgaggaact

SEQ ID NO: 908801 - DNA, 25 bp, Homo sapien
cttccatttctctacggcagggacc

SEQ ID NO: 908802 - DNA, 25 bp, Homo sapien
tagtcaactttgtagcgctggctgt

SEQ ID NO: 908803 - DNA, 25 bp, Homo sapien
gaagttctgggtatctgtgctctga

SEQ ID NO: 908804 - DNA, 25 bp, Homo sapien
tctgtctcccgcttggactcggagg

SEQ ID NO: 908805 - DNA, 25 bp, Homo sapien
tgtgctctgagactcgtagtcaact

SEQ ID NO: 908806 - DNA, 25 bp, Homo sapien
cggtcttcctccgactcactagcat

SEQ ID NO: 908807 - DNA, 25 bp, Homo sapien
ctgcggtcttcctccgactcactag

SEQ ID NO: 908808 - DNA, 25 bp, Homo sapien
gtcttcctccgactcactagcattt

SEQ ID NO: 908809 - DNA, 25 bp, Homo sapien
tgcggtcttcctccgactcactagc

SEQ ID NO: 908810 - DNA, 25 bp, Homo sapien
gactgttcatcctgctagccctaga

SEQ ID NO: 908811 - DNA, 25 bp, Homo sapien
gaggtcctgctgtaaagttccccaa

SEQ ID NO: 908812 - DNA, 25 bp, Homo sapien
ttcagattaagaagggagacagccc

SEQ ID NO: 908813 - DNA, 25 bp, Homo sapien
cagaaaataacttcacccgggcgtg

SEQ ID NO: 908814 - DNA, 25 bp, Homo sapien
tagagaatcgagcaagtagagggcc

SEQ ID NO: 908815 - DNA, 25 bp, Homo sapien
tatggtactgaaagtggcacgcgga

SEQ ID NO: 908816 - DNA, 25 bp, Homo sapien
gacataccgggactagacattgctt

SEQ ID NO: 908817 - DNA, 25 bp, Homo sapien
tgctttgcaaaccaaaaggctgtgc

SEQ ID NO: 908818 - DNA, 25 bp, Homo sapien
ggcggctgacggcactagcgttgac

SEQ ID NO: 908819 - DNA, 25 bp, Homo sapien
aggcggctgacggcactagcgttga

SEQ ID NO: 908820 - DNA, 25 bp, Homo sapien
caggcggctgacggcactagcgttg

SEQ ID NO: 908821 - DNA, 25 bp, Homo sapien
ggcgacggctggcagcgaaggccgg

SEQ ID NO: 908822 - DNA, 25 bp, Homo sapien
acggctggcagcgaaggccggagcc

SEQ ID NO: 908823 - DNA, 25 bp, Homo sapien
gctggcagcgaaggccggagccaca

SEQ ID NO: 908824 - DNA, 25 bp, Homo sapien
cgacggctggcagcgaaggccggag

SEQ ID NO: 908825 - DNA, 25 bp, Homo sapien
actgggccagtgcacgcgcgtcgca

SEQ ID NO: 908826 - DNA, 25 bp, Homo sapien
cactgggccagtgcacgcgcgtcgc

SEQ ID NO: 908827 - DNA, 25 bp, Homo sapien
ctgggccagtgcacgcgcgtcgcac

SEQ ID NO: 908828 - DNA, 25 bp, Homo sapien
cagcggcccagagcgtgggtcgcgc

SEQ ID NO: 908829 - DNA, 25 bp, Homo sapien
gcagcggcccagagcgtgggtcgcg

SEQ ID NO: 908830 - DNA, 25 bp, Homo sapien
cgcagcggcccagagcgtgggtcgc

SEQ ID NO: 908831 - DNA, 25 bp, Homo sapien
cggggcacgctgcttggcaggctgg

SEQ ID NO: 908832 - DNA, 25 bp, Homo sapien
ggggcacgctgcttggcaggctggg

SEQ ID NO: 908833 - DNA, 25 bp, Homo sapien
gggcacgctgcttggcaggctgggc

SEQ ID NO: 908834 - DNA, 25 bp, Homo sapien
cacggcgcgaagctgtggaatccag

SEQ ID NO: 908835 - DNA, 25 bp, Homo sapien
caggaagcggctgatcctcagcgcc

SEQ ID NO: 908836 - DNA, 25 bp, Homo sapien
gggcgacagtacacggcgcgaagct

SEQ ID NO: 908837 - DNA, 25 bp, Homo sapien
gaagcggctgatcctcagcgcccag

SEQ ID NO: 908838 - DNA, 25 bp, Homo sapien
ttggagaaacttgttcagtgccgaa

SEQ ID NO: 908839 - DNA, 25 bp, Homo sapien
cttttttccctcgcattgcagttgg

SEQ ID NO: 908840 - DNA, 25 bp, Homo sapien
gagaaacttgttcagtgccgaatgg

SEQ ID NO: 908841 - DNA, 25 bp, Homo sapien
tcttttttccctcgcattgcagttg

SEQ ID NO: 908842 - DNA, 25 bp, Homo sapien
catggtccagagacaggggctcctc

SEQ ID NO: 908843 - DNA, 25 bp, Homo sapien
gggctcctcagagttagtgctgtcc

SEQ ID NO: 908844 - DNA, 25 bp, Homo sapien
gaaatccatggtccagagacagggg

SEQ ID NO: 908845 - DNA, 25 bp, Homo sapien
gtgctgtcccgtgtcgtcagacaat

SEQ ID NO: 908846 - DNA, 25 bp, Homo sapien
tggagatagatgctccagagaaggg

SEQ ID NO: 908847 - DNA, 25 bp, Homo sapien
gggcctggacattgggagcccaccc

SEQ ID NO: 908848 - DNA, 25 bp, Homo sapien
atagatgctccagagaaggggcctg

SEQ ID NO: 908849 - DNA, 25 bp, Homo sapien
aaggggcctggacattgggagccca

SEQ ID NO: 908850 - DNA, 25 bp, Homo sapien
agcagccgaccggtgcatcaccgag

SEQ ID NO: 908851 - DNA, 25 bp, Homo sapien
agtttcgccattgccaaccacagag

SEQ ID NO: 908852 - DNA, 25 bp, Homo sapien
ctcggtcagctcgggtgggcttatt

SEQ ID NO: 908853 - DNA, 25 bp, Homo sapien
ggaagaggagcagtttcgccattgc

SEQ ID NO: 908854 - DNA, 25 bp, Homo sapien
cacagattccactgcaatggccgtc

SEQ ID NO: 908855 - DNA, 25 bp, Homo sapien
gagacaaagtcccatagacctgagc

SEQ ID NO: 908856 - DNA, 25 bp, Homo sapien
gtttgcataaatgaagaactcttgc

SEQ ID NO: 908857 - DNA, 25 bp, Homo sapien
ggccgtcaaagccatctgagatgta

SEQ ID NO: 908858 - DNA, 25 bp, Homo sapien
ttttctgacccaggcaagcttcttt

SEQ ID NO: 908859 - DNA, 25 bp, Homo sapien
tgctggggcacgcttgcttttctga

SEQ ID NO: 908860 - DNA, 25 bp, Homo sapien
ctgtgctctccgtcgctgctggaga

SEQ ID NO: 908861 - DNA, 25 bp, Homo sapien
tcaaatgtggaagttggaggtggcc

SEQ ID NO: 908862 - DNA, 25 bp, Homo sapien
aatttccatggtgcgagtggagaag

SEQ ID NO: 908863 - DNA, 25 bp, Homo sapien
tctacacttaacagaaagtaattta

SEQ ID NO: 908864 - DNA, 25 bp, Homo sapien
taatttattccaggggtgacaggga

SEQ ID NO: 908865 - DNA, 25 bp, Homo sapien
ctggattctacacttaacagaaagt

SEQ ID NO: 908866 - DNA, 25 bp, Homo sapien
gctgcatattcaatgctccttgctg

SEQ ID NO: 908867 - DNA, 25 bp, Homo sapien
gcttccattcgtatagtcctgccgc

SEQ ID NO: 908868 - DNA, 25 bp, Homo sapien
agcccatgaggaaagacgctttggg

SEQ ID NO: 908869 - DNA, 25 bp, Homo sapien
ttcctgtggccgctgcatattcaat

SEQ ID NO: 908870 - DNA, 25 bp, Homo sapien
cctctgatttatgatctttggcctc

SEQ ID NO: 908871 - DNA, 25 bp, Homo sapien
tctgatttatgatctttggcctcac

SEQ ID NO: 908872 - DNA, 25 bp, Homo sapien
ctctgatttatgatctttggcctca

SEQ ID NO: 908873 - DNA, 25 bp, Homo sapien
agaccaaagacaaggtccagcccag

SEQ ID NO: 908874 - DNA, 25 bp, Homo sapien
tttcctgcatggttggacccaaggt

SEQ ID NO: 908875 - DNA, 25 bp, Homo sapien
gacccaaggtccgtgagaccaaaga

SEQ ID NO: 908876 - DNA, 25 bp, Homo sapien
aacggccacagaggatgatggtgac

SEQ ID NO: 908877 - DNA, 25 bp, Homo sapien
gagcatagacgtggatgccacccac

SEQ ID NO: 908878 - DNA, 25 bp, Homo sapien
tcttttcggaggtgagacccaggat

SEQ ID NO: 908879 - DNA, 25 bp, Homo sapien
cacctgcgcttttctcattcggaaa

SEQ ID NO: 908880 - DNA, 25 bp, Homo sapien
cagagtcctgagctaagcacagaat

SEQ ID NO: 908881 - DNA, 25 bp, Homo sapien
cctctgtgcccactggcgcctggtt

SEQ ID NO: 908882 - DNA, 25 bp, Homo sapien
cttgaatgcactggcagatttccat

SEQ ID NO: 908883 - DNA, 25 bp, Homo sapien
actggcagatttccatgggcttcca

SEQ ID NO: 908884 - DNA, 25 bp, Homo sapien
tcctctgtgcccactggcgcctggt

SEQ ID NO: 908885 - DNA, 25 bp, Homo sapien
tggagtggagcatccaccagggccc

SEQ ID NO: 908886 - DNA, 25 bp, Homo sapien
gcctcagcatgacaggctcgatggc

SEQ ID NO: 908887 - DNA, 25 bp, Homo sapien
gggcccccaagaacttggcactgag

SEQ ID NO: 908888 - DNA, 25 bp, Homo sapien
gccccaggaggatgttccagcacct

SEQ ID NO: 908889 - DNA, 25 bp, Homo sapien
tgggaggtggagataggcactggtg

SEQ ID NO: 908890 - DNA, 25 bp, Homo sapien
gggaggtggagataggcactggtgc

SEQ ID NO: 908891 - DNA, 25 bp, Homo sapien
gaggtggagataggcactggtgctg

SEQ ID NO: 908892 - DNA, 25 bp, Homo sapien
ctctttccatgtctgcagctgccat

SEQ ID NO: 908893 - DNA, 25 bp, Homo sapien
ctttctctttccatgtctgcagctg

SEQ ID NO: 908894 - DNA, 25 bp, Homo sapien
ttctctttccatgtctgcagctgcc

SEQ ID NO: 908895 - DNA, 25 bp, Homo sapien
tgttttcctcataactttctctttc

SEQ ID NO: 908896 - DNA, 25 bp, Homo sapien
cacagttgagctgaatctggatcat

SEQ ID NO: 908897 - DNA, 25 bp, Homo sapien
tgagctgaatctggatcattctttt

SEQ ID NO: 908898 - DNA, 25 bp, Homo sapien
atctggatcattcttttgacctgta

SEQ ID NO: 908899 - DNA, 25 bp, Homo sapien
agttgagctgaatctggatcattct

SEQ ID NO: 908900 - DNA, 25 bp, Homo sapien
aaaggcactgtatttgccatctctc

SEQ ID NO: 908901 - DNA, 25 bp, Homo sapien
ggcactgtatttgccatctctcacc

SEQ ID NO: 908902 - DNA, 25 bp, Homo sapien
gggcatgcctaagagccgggagcca

SEQ ID NO: 908903 - DNA, 25 bp, Homo sapien
gcatgcctaagagccgggagccact

SEQ ID NO: 908904 - DNA, 25 bp, Homo sapien
gcctttcaaagagatactcgccagc

SEQ ID NO: 908905 - DNA, 25 bp, Homo sapien
ctttcaaagagatactcgccagccc

SEQ ID NO: 908906 - DNA, 25 bp, Homo sapien
tacttgaaggtgagcctttcaaaga

SEQ ID NO: 908907 - DNA, 25 bp, Homo sapien
gttgtacttgaaggtgagcctttca

SEQ ID NO: 908908 - DNA, 25 bp, Homo sapien
ttttgtatctttgagcgatgctcgg

SEQ ID NO: 908909 - DNA, 25 bp, Homo sapien
tgtgtagccagaactgagggcatga

SEQ ID NO: 908910 - DNA, 25 bp, Homo sapien
cacttatcttgagccggtttctgga

SEQ ID NO: 908911 - DNA, 25 bp, Homo sapien
catggcatccaaagttgtaccccac

SEQ ID NO: 908912 - DNA, 25 bp, Homo sapien
ggtgcacctttctcccccagagata

SEQ ID NO: 908913 - DNA, 25 bp, Homo sapien
tcttacctggtgcacctttctcccc

SEQ ID NO: 908914 - DNA, 25 bp, Homo sapien
cctggtgcacctttctcccccagag

SEQ ID NO: 908915 - DNA, 25 bp, Homo sapien
ttacctggtgcacctttctccccca

SEQ ID NO: 908916 - DNA, 25 bp, Homo sapien
tcaccaaacatcaccattagatgat

SEQ ID NO: 908917 - DNA, 25 bp, Homo sapien
caatatttttgctctaggtcccaag

SEQ ID NO: 908918 - DNA, 25 bp, Homo sapien
acagaccaaaaatgctggtgtcagg

SEQ ID NO: 908919 - DNA, 25 bp, Homo sapien
ccaaattatcagggcaatatttttg

SEQ ID NO: 908920 - DNA, 25 bp, Homo sapien
agtctggctccatgggggttctcag

SEQ ID NO: 908921 - DNA, 25 bp, Homo sapien
cagagctgagtccatccaggaaaag

SEQ ID NO: 908922 - DNA, 25 bp, Homo sapien
gggttctcagagctgagtccatcca

SEQ ID NO: 908923 - DNA, 25 bp, Homo sapien
gcctgccctggtcatctagactcag

SEQ ID NO: 908924 - DNA, 25 bp, Homo sapien
accttctgaggctgaaacttcatcc

SEQ ID NO: 908925 - DNA, 25 bp, Homo sapien
tcagcttgtctactttagccctcat

SEQ ID NO: 908926 - DNA, 25 bp, Homo sapien
ggtatcctggagtaaaacttcattc

SEQ ID NO: 908927 - DNA, 25 bp, Homo sapien
gatattcctagccttggtatcctgg

SEQ ID NO: 908928 - DNA, 25 bp, Homo sapien
ggcaaagtgtttcagttccagatgg

SEQ ID NO: 908929 - DNA, 25 bp, Homo sapien
ttcagttccagatggcataaggcac

SEQ ID NO: 908930 - DNA, 25 bp, Homo sapien
gtgtttcagttccagatggcataag

SEQ ID NO: 908931 - DNA, 25 bp, Homo sapien
tcagttcacagccttggcaaagtgt

SEQ ID NO: 908932 - DNA, 25 bp, Homo sapien
tgctttgaggtagcacggttttaac

SEQ ID NO: 908933 - DNA, 25 bp, Homo sapien
ttgctttgaggtagcacggttttaa

SEQ ID NO: 908934 - DNA, 25 bp, Homo sapien
ttctttaatccctcagtgtaggaaa

SEQ ID NO: 908935 - DNA, 25 bp, Homo sapien
cttctttaatccctcagtgtaggaa

SEQ ID NO: 908936 - DNA, 25 bp, Homo sapien
tcttctttaatccctcagtgtagga

SEQ ID NO: 908937 - DNA, 25 bp, Homo sapien
cttggcctgttctggagaatgctcc

SEQ ID NO: 908938 - DNA, 25 bp, Homo sapien
ttccaggaacaagtccgtggcatcg

SEQ ID NO: 908939 - DNA, 25 bp, Homo sapien
ttttccaggaacaagtccgtggcat

SEQ ID NO: 908940 - DNA, 25 bp, Homo sapien
cttttccaggaacaagtccgtggca

SEQ ID NO: 908941 - DNA, 25 bp, Homo sapien
tccaggaacaagtccgtggcatcgt

SEQ ID NO: 908942 - DNA, 25 bp, Homo sapien
gtcctgctcaggttactccataact

SEQ ID NO: 908943 - DNA, 25 bp, Homo sapien
tcaggttactccataactgatgccc

SEQ ID NO: 908944 - DNA, 25 bp, Homo sapien
cctgctcaggttactccataactga

SEQ ID NO: 908945 - DNA, 25 bp, Homo sapien
tgctcaggttactccataactgatg

SEQ ID NO: 908946 - DNA, 25 bp, Homo sapien
ggctggcccagtactgcaggggctt

SEQ ID NO: 908947 - DNA, 25 bp, Homo sapien
ctggcccagtactgcaggggcttca

SEQ ID NO: 908948 - DNA, 25 bp, Homo sapien
tggcccagtactgcaggggcttcat

SEQ ID NO: 908949 - DNA, 25 bp, Homo sapien
tcaattcttatcccggaatggcaag

SEQ ID NO: 908950 - DNA, 25 bp, Homo sapien
caattcttatcccggaatggcaaga

SEQ ID NO: 908951 - DNA, 25 bp, Homo sapien
ttgtaaaaacaggtcagccaccagc

SEQ ID NO: 908952 - DNA, 25 bp, Homo sapien
gtaaaaacaggtcagccaccagcat

SEQ ID NO: 908953 - DNA, 25 bp, Homo sapien
tgtaaaaacaggtcagccaccagca

SEQ ID NO: 908954 - DNA, 25 bp, Homo sapien
cttgtaaaaacaggtcagccaccag

SEQ ID NO: 908955 - DNA, 25 bp, Homo sapien
ggagtttctttctcggcatctggct

SEQ ID NO: 908956 - DNA, 25 bp, Homo sapien
ctgcaaccaggaggtcctcgagatc

SEQ ID NO: 908957 - DNA, 25 bp, Homo sapien
ctcgagatcctcccggagtttcttt

SEQ ID NO: 908958 - DNA, 25 bp, Homo sapien
tgcaaccaggaggtcctcgagatcc

SEQ ID NO: 908959 - DNA, 25 bp, Homo sapien
caaattctcccaatccctatcatag

SEQ ID NO: 908960 - DNA, 25 bp, Homo sapien
aaattctcccaatccctatcatagt

SEQ ID NO: 908961 - DNA, 25 bp, Homo sapien
tacacttagtgcacgtggcatctgg

SEQ ID NO: 908962 - DNA, 25 bp, Homo sapien
tctttcaggaagtaacgcaacgtaa

SEQ ID NO: 908963 - DNA, 25 bp, Homo sapien
ccagggagccagtcttgcagttctt

SEQ ID NO: 908964 - DNA, 25 bp, Homo sapien
catgtgcttctacaaatgcctgggc

SEQ ID NO: 908965 - DNA, 25 bp, Homo sapien
agcagacagggctgcgaacacccta

SEQ ID NO: 908966 - DNA, 25 bp, Homo sapien
cgaacaccctaatggtatagcaaca

SEQ ID NO: 908967 - DNA, 25 bp, Homo sapien
gacagggctgcgaacaccctaatgg

SEQ ID NO: 908968 - DNA, 25 bp, Homo sapien
gggctgcgaacaccctaatggtata

SEQ ID NO: 908969 - DNA, 25 bp, Homo sapien
tcatgactcacagcagtaggcaaat

SEQ ID NO: 908970 - DNA, 25 bp, Homo sapien
gggcacggcaaggatctgatcttca

SEQ ID NO: 908971 - DNA, 25 bp, Homo sapien
cagtttgattacaggtgagcttccc

SEQ ID NO: 908972 - DNA, 25 bp, Homo sapien
tctgatcttaccatcagggcacggc

SEQ ID NO: 908973 - DNA, 25 bp, Homo sapien
ctggtgagggtggctttcttcttct

SEQ ID NO: 908974 - DNA, 25 bp, Homo sapien
tctggtgagggtggctttcttcttc

SEQ ID NO: 908975 - DNA, 25 bp, Homo sapien
tggtgagggtggctttcttcttcta

SEQ ID NO: 908976 - DNA, 25 bp, Homo sapien
gaagctcaagaagcacagggtcaat

SEQ ID NO: 908977 - DNA, 25 bp, Homo sapien
cacagggtcaatctggaggctgcaa

SEQ ID NO: 908978 - DNA, 25 bp, Homo sapien
aatatgcagaagctcaagaagcaca

SEQ ID NO: 908979 - DNA, 25 bp, Homo sapien
tccaagggcaaatatgcagaagctc

SEQ ID NO: 908980 - DNA, 25 bp, Homo sapien
gcgctggaagctgattgtcgcagca

SEQ ID NO: 908981 - DNA, 25 bp, Homo sapien
aggcgctggaagctgattgtcgcag

SEQ ID NO: 908982 - DNA, 25 bp, Homo sapien
accaggcgctggaagctgattgtcg

SEQ ID NO: 908983 - DNA, 25 bp, Homo sapien
caggcgctggaagctgattgtcgca

SEQ ID NO: 908984 - DNA, 25 bp, Homo sapien
tggcattagtgtcctccaccccagt

SEQ ID NO: 908985 - DNA, 25 bp, Homo sapien
tagtgtcctccaccccagttgtgtg

SEQ ID NO: 908986 - DNA, 25 bp, Homo sapien
tgtggttgcgcagtcctttgtgcat

SEQ ID NO: 908987 - DNA, 25 bp, Homo sapien
caccccagttgtgtggttgcgcagt

SEQ ID NO: 908988 - DNA, 25 bp, Homo sapien
catggatgaggactccactccttag

SEQ ID NO: 908989 - DNA, 25 bp, Homo sapien
tgcatcggccttgacttggcatgaa

SEQ ID NO: 908990 - DNA, 25 bp, Homo sapien
tgatgagacttccacgacatggatg

SEQ ID NO: 908991 - DNA, 25 bp, Homo sapien
gtccacagttacttcctctgcatcg

SEQ ID NO: 908992 - DNA, 25 bp, Homo sapien
tgtgagtcacagtgaggctccaggc

SEQ ID NO: 908993 - DNA, 25 bp, Homo sapien
tgagcgatcgtgcaagcaccgactc

SEQ ID NO: 908994 - DNA, 25 bp, Homo sapien
catgtgagcgatcgtgcaagcaccg

SEQ ID NO: 908995 - DNA, 25 bp, Homo sapien
tccaggctccacatgtgagcgatcg

SEQ ID NO: 908996 - DNA, 25 bp, Homo sapien
aggcccagtcggtatcagcctcagc

SEQ ID NO: 908997 - DNA, 25 bp, Homo sapien
cagccatggccaaaggcccagtcgg

SEQ ID NO: 908998 - DNA, 25 bp, Homo sapien
aaaggcccagtcggtatcagcctca

SEQ ID NO: 908999 - DNA, 25 bp, Homo sapien
aaggcccagtcggtatcagcctcag

SEQ ID NO: 909000 - DNA, 25 bp, Homo sapien
tggcaagcacgcagaaaaaggcacc

SEQ ID NO: 909001 - DNA, 25 bp, Homo sapien
atcacttggttagagatgtgccaca

SEQ ID NO: 909002 - DNA, 25 bp, Homo sapien
gaagaccctggagtaggcatgtcca

SEQ ID NO: 909003 - DNA, 25 bp, Homo sapien
gccacagtatcttcacgtcctcaag

SEQ ID NO: 909004 - DNA, 25 bp, Homo sapien
cttggtgcaacattggaaggtaaag

SEQ ID NO: 909005 - DNA, 25 bp, Homo sapien
ctggaacttggtgcaacattggaag

SEQ ID NO: 909006 - DNA, 25 bp, Homo sapien
taaaggtggagtttccaagagaaca

SEQ ID NO: 909007 - DNA, 25 bp, Homo sapien
aaggtggagtttccaagagaacagc

SEQ ID NO: 909008 - DNA, 25 bp, Homo sapien
gaaagcacaagacaggaagagtctg

SEQ ID NO: 909009 - DNA, 25 bp, Homo sapien
ctgggaaagcacaagacaggaagag

SEQ ID NO: 909010 - DNA, 25 bp, Homo sapien
cacaagacaggaagagtctgtgcca

SEQ ID NO: 909011 - DNA, 25 bp, Homo sapien
caagacaggaagagtctgtgccaaa

SEQ ID NO: 909012 - DNA, 25 bp, Homo sapien
cctggtctatgcagctatcatcttc

SEQ ID NO: 909013 - DNA, 25 bp, Homo sapien
gtctatgcagctatcatcttcaacc

SEQ ID NO: 909014 - DNA, 25 bp, Homo sapien
tcctggtctatgcagctatcatctt

SEQ ID NO: 909015 - DNA, 25 bp, Homo sapien
tggtctatgcagctatcatcttcaa

SEQ ID NO: 909016 - DNA, 25 bp, Homo sapien
aacgacctgcacgttttctcccagg

SEQ ID NO: 909017 - DNA, 25 bp, Homo sapien
atgggtcagtgggacaacgacctgc

SEQ ID NO: 909018 - DNA, 25 bp, Homo sapien
tactaggcgctgtcccactgtaggg

SEQ ID NO: 909019 - DNA, 25 bp, Homo sapien
aaaacaaaacctgttatctgcagcc

SEQ ID NO: 909020 - DNA, 25 bp, Homo sapien
ccacatgtggaatgtaaacacaggc

SEQ ID NO: 909021 - DNA, 25 bp, Homo sapien
tacggacaccctcacgtttcttatg

SEQ ID NO: 909022 - DNA, 25 bp, Homo sapien
tcttatggtgcagcacaagcttccc

SEQ ID NO: 909023 - DNA, 25 bp, Homo sapien
actgccagacatctgcctacggaca

SEQ ID NO: 909024 - DNA, 25 bp, Homo sapien
cgtgattgttttggcacaatggagc

SEQ ID NO: 909025 - DNA, 25 bp, Homo sapien
tctgtttgcgtgattgttttggcac

SEQ ID NO: 909026 - DNA, 25 bp, Homo sapien
ttttggcacaatggagctgaacttg

SEQ ID NO: 909027 - DNA, 25 bp, Homo sapien
gttgtcttcagcctcaccgtgttgc

SEQ ID NO: 909028 - DNA, 25 bp, Homo sapien
ttctcagagccggcgatatctgagc

SEQ ID NO: 909029 - DNA, 25 bp, Homo sapien
cagagccggcgatatctgagcagca

SEQ ID NO: 909030 - DNA, 25 bp, Homo sapien
ctcagagccggcgatatctgagcag

SEQ ID NO: 909031 - DNA, 25 bp, Homo sapien
gagccggcgatatctgagcagcaag

SEQ ID NO: 909032 - DNA, 25 bp, Homo sapien
gaggtgggaagagcatttgcacagg

SEQ ID NO: 909033 - DNA, 25 bp, Homo sapien
gagcatttgcacaggcaggaccagc

SEQ ID NO: 909034 - DNA, 25 bp, Homo sapien
agccccagggggaacatgagaggtg

SEQ ID NO: 909035 - DNA, 25 bp, Homo sapien
gaggggagaagtggccagagcccca

SEQ ID NO: 909036 - DNA, 25 bp, Homo sapien
tacatacagccaacgagtctgcagg

SEQ ID NO: 909037 - DNA, 25 bp, Homo sapien
catacagccaacgagtctgcaggaa

SEQ ID NO: 909038 - DNA, 25 bp, Homo sapien
acagccaacgagtctgcaggaagcc

SEQ ID NO: 909039 - DNA, 25 bp, Homo sapien
tctccaggttggagtctgctttgta

SEQ ID NO: 909040 - DNA, 25 bp, Homo sapien
ggaaaacgatatggctttgtactgt

SEQ ID NO: 909041 - DNA, 25 bp, Homo sapien
aaacgatatggctttgtactgtaaa

SEQ ID NO: 909042 - DNA, 25 bp, Homo sapien
agtgcttgtggaaaacgatatggct

SEQ ID NO: 909043 - DNA, 25 bp, Homo sapien
gcttgtggaaaacgatatggctttg

SEQ ID NO: 909044 - DNA, 25 bp, Homo sapien
aaagcagctgcgaggaatgagggta

SEQ ID NO: 909045 - DNA, 25 bp, Homo sapien
caaagcagctgcgaggaatgagggt

SEQ ID NO: 909046 - DNA, 25 bp, Homo sapien
tcccaccaaggtcatgaatggcctt

SEQ ID NO: 909047 - DNA, 25 bp, Homo sapien
tgcaggtcccgttcatcttgtctcc

SEQ ID NO: 909048 - DNA, 25 bp, Homo sapien
caccatctctacaggtgcacatttc

SEQ ID NO: 909049 - DNA, 25 bp, Homo sapien
caaagatttgactatgattccctcc

SEQ ID NO: 909050 - DNA, 25 bp, Homo sapien
gtcccgttcatcttgtctcccaaag

SEQ ID NO: 909051 - DNA, 25 bp, Homo sapien
tgtccccagctgtggtcctctagga

SEQ ID NO: 909052 - DNA, 25 bp, Homo sapien
ggacccagtgaattctgtgaagctg

SEQ ID NO: 909053 - DNA, 25 bp, Homo sapien
ttgcactgggcgagtttaacaggcc

SEQ ID NO: 909054 - DNA, 25 bp, Homo sapien
ccacggatccctgcatgggcttgta

SEQ ID NO: 909055 - DNA, 25 bp, Homo sapien
cttgttgctagctccaaggctcaat

SEQ ID NO: 909056 - DNA, 25 bp, Homo sapien
cccttgttgctagctccaaggctca

SEQ ID NO: 909057 - DNA, 25 bp, Homo sapien
cttgcccttgttgctagctccaagg

SEQ ID NO: 909058 - DNA, 25 bp, Homo sapien
tgcccttgttgctagctccaaggct

SEQ ID NO: 909059 - DNA, 25 bp, Homo sapien
aaacctagattcttgaatcccagac

SEQ ID NO: 909060 - DNA, 25 bp, Homo sapien
gaatcccagacttcacattgtaagg

SEQ ID NO: 909061 - DNA, 25 bp, Homo sapien
cacattgtaaggatatttctcagac

SEQ ID NO: 909062 - DNA, 25 bp, Homo sapien
taatcctcaacaaacctagattctt

SEQ ID NO: 909063 - DNA, 25 bp, Homo sapien
agaggtaggcagaaccccacggctg

SEQ ID NO: 909064 - DNA, 25 bp, Homo sapien
gatgtctagggcaaccccagtgcct

SEQ ID NO: 909065 - DNA, 25 bp, Homo sapien
gaaccccacggctgtaggtcatgat

SEQ ID NO: 909066 - DNA, 25 bp, Homo sapien
tcacatggcctcgggctcagaggta

SEQ ID NO: 909067 - DNA, 25 bp, Homo sapien
cagctgtagaagagagactatctaa

SEQ ID NO: 909068 - DNA, 25 bp, Homo sapien
gaagagagactatctaaaacagaca

SEQ ID NO: 909069 - DNA, 25 bp, Homo sapien
cgcagacgattgcagctgtagaaga

SEQ ID NO: 909070 - DNA, 25 bp, Homo sapien
tgtggacatgacgcagacgattgca

SEQ ID NO: 909071 - DNA, 25 bp, Homo sapien
tttccaattacgcagtcgattttag

SEQ ID NO: 909072 - DNA, 25 bp, Homo sapien
caattacgcagtcgattttaggata

SEQ ID NO: 909073 - DNA, 25 bp, Homo sapien
tttatttccaattacgcagtcgatt

SEQ ID NO: 909074 - DNA, 25 bp, Homo sapien
cgcagtcgattttaggataagtggg

SEQ ID NO: 909075 - DNA, 25 bp, Homo sapien
aagtgtttcttctcatcacttcctc

SEQ ID NO: 909076 - DNA, 25 bp, Homo sapien
tcatcacttcctcctcccatgctgt

SEQ ID NO: 909077 - DNA, 25 bp, Homo sapien
tcacttcctcctcccatgctgttct

SEQ ID NO: 909078 - DNA, 25 bp, Homo sapien
agtgtttcttctcatcacttcctcc

SEQ ID NO: 909079 - DNA, 25 bp, Homo sapien
gtttcttcatagttttgcagctgcc

SEQ ID NO: 909080 - DNA, 25 bp, Homo sapien
tttcaaattcaggaacgtgtctctt

SEQ ID NO: 909081 - DNA, 25 bp, Homo sapien
attcaggaacgtgtctctttcatca

SEQ ID NO: 909082 - DNA, 25 bp, Homo sapien
ttgcagctgcctaataatgtgctta

SEQ ID NO: 909083 - DNA, 25 bp, Homo sapien
tggaattgttctgagtaacagcaat

SEQ ID NO: 909084 - DNA, 25 bp, Homo sapien
aattgttctgagtaacagcaatttc

SEQ ID NO: 909085 - DNA, 25 bp, Homo sapien
catctgtcttgtgatcaaattatgt

SEQ ID NO: 909086 - DNA, 25 bp, Homo sapien
tctgtcttgtgatcaaattatgtaa

SEQ ID NO: 909087 - DNA, 25 bp, Homo sapien
atccacctgagacccacatttccca

SEQ ID NO: 909088 - DNA, 25 bp, Homo sapien
ccctgcgggagggacatccacctga

SEQ ID NO: 909089 - DNA, 25 bp, Homo sapien
ccccctgcgggagggacatccacct

SEQ ID NO: 909090 - DNA, 25 bp, Homo sapien
tgcgggagggacatccacctgagac

SEQ ID NO: 909091 - DNA, 25 bp, Homo sapien
caaaatgaattgacggttaaggctc

SEQ ID NO: 909092 - DNA, 25 bp, Homo sapien
tgtctgtggacctggatcccctaaa

SEQ ID NO: 909093 - DNA, 25 bp, Homo sapien
catgagtcagacttttcagagcatc

SEQ ID NO: 909094 - DNA, 25 bp, Homo sapien
tgggaagcagaccaaaaacggcctc

SEQ ID NO: 909095 - DNA, 25 bp, Homo sapien
gacaccactctgtgctttgggctga

SEQ ID NO: 909096 - DNA, 25 bp, Homo sapien
acaccactctgtgctttgggctgac

SEQ ID NO: 909097 - DNA, 25 bp, Homo sapien
tgacaccactctgtgctttgggctg

SEQ ID NO: 909098 - DNA, 25 bp, Homo sapien
tcccatggagttgcatcctgactgg

SEQ ID NO: 909099 - DNA, 25 bp, Homo sapien
aattccatctgtgttgtcccatgga

SEQ ID NO: 909100 - DNA, 25 bp, Homo sapien
ctgagaattccatctgtgttgtccc

SEQ ID NO: 909101 - DNA, 25 bp, Homo sapien
tgtgttgtcccatggagttgcatcc

SEQ ID NO: 909102 - DNA, 25 bp, Homo sapien
aagagttggagagaggtggatttgg

SEQ ID NO: 909103 - DNA, 25 bp, Homo sapien
ttttggctgcaccactcttgacaga

SEQ ID NO: 909104 - DNA, 25 bp, Homo sapien
tggcaggggatgaacgtcttcaccc

SEQ ID NO: 909105 - DNA, 25 bp, Homo sapien
caccactcttgacagagtggcaggg

SEQ ID NO: 909106 - DNA, 25 bp, Homo sapien
ctttccaaagctcgactctagggag

SEQ ID NO: 909107 - DNA, 25 bp, Homo sapien
ctcgactctagggaggttgtgttcc

SEQ ID NO: 909108 - DNA, 25 bp, Homo sapien
tcgactctagggaggttgtgttcca

SEQ ID NO: 909109 - DNA, 25 bp, Homo sapien
caaagctcgactctagggaggttgt

SEQ ID NO: 909110 - DNA, 25 bp, Homo sapien
tggcggacggtggtcttcttctcac

SEQ ID NO: 909111 - DNA, 25 bp, Homo sapien
cagaagttctgcttgaggaccctac

SEQ ID NO: 909112 - DNA, 25 bp, Homo sapien
tctggcggacggtggtcttcttctc

SEQ ID NO: 909113 - DNA, 25 bp, Homo sapien
gaagttctgcttgaggaccctaccc

SEQ ID NO: 909114 - DNA, 25 bp, Homo sapien
cagcccatccacgactgttggggag

SEQ ID NO: 909115 - DNA, 25 bp, Homo sapien
gagtcttccacgggggctgaccttg

SEQ ID NO: 909116 - DNA, 25 bp, Homo sapien
acgactgttggggagtcttccacgg

SEQ ID NO: 909117 - DNA, 25 bp, Homo sapien
tccacgactgttggggagtcttcca

SEQ ID NO: 909118 - DNA, 25 bp, Homo sapien
tgtgagcgtccaaacactgggaggc

SEQ ID NO: 909119 - DNA, 25 bp, Homo sapien
tgtcttgtgagcgtccaaacactgg

SEQ ID NO: 909120 - DNA, 25 bp, Homo sapien
cggtgtgtccagtacctccttttct

SEQ ID NO: 909121 - DNA, 25 bp, Homo sapien
ggtgtgtccagtacctccttttctc

SEQ ID NO: 909122 - DNA, 25 bp, Homo sapien
tagaggctgaatgaaacctgtgcag

SEQ ID NO: 909123 - DNA, 25 bp, Homo sapien
gtaacacgaatctgttgaggtcctg

SEQ ID NO: 909124 - DNA, 25 bp, Homo sapien
ggtcctggagaggataagcatttga

SEQ ID NO: 909125 - DNA, 25 bp, Homo sapien
cacttctgacccattgggagaaagt

SEQ ID NO: 909126 - DNA, 25 bp, Homo sapien
gcaaatattctattcacatttaagg

SEQ ID NO: 909127 - DNA, 25 bp, Homo sapien
tggcaaatattctattcacatttaa

SEQ ID NO: 909128 - DNA, 25 bp, Homo sapien
ggcaaatattctattcacatttaag

SEQ ID NO: 909129 - DNA, 25 bp, Homo sapien
caaatattctattcacatttaaggt

SEQ ID NO: 909130 - DNA, 25 bp, Homo sapien
taaaggctgcagcatcctgtgaagc

SEQ ID NO: 909131 - DNA, 25 bp, Homo sapien
aggctgcagcatcctgtgaagcctc

SEQ ID NO: 909132 - DNA, 25 bp, Homo sapien
gcagcatcctgtgaagcctcctggg

SEQ ID NO: 909133 - DNA, 25 bp, Homo sapien
ctgcagcatcctgtgaagcctcctg

SEQ ID NO: 909134 - DNA, 25 bp, Homo sapien
gtaaactatgaatgatacatattac

SEQ ID NO: 909135 - DNA, 25 bp, Homo sapien
aagtaaactatgaatgatacatatt

SEQ ID NO: 909136 - DNA, 25 bp, Homo sapien
aatgtgatcgtgaaataactaaagt

SEQ ID NO: 909137 - DNA, 25 bp, Homo sapien
aactaaagtaaactatgaatgatac

SEQ ID NO: 909138 - DNA, 25 bp, Homo sapien
agggagaatgttaccttgagtacac

SEQ ID NO: 909139 - DNA, 25 bp, Homo sapien
tctaaaatgggttcgccgtgtggca

SEQ ID NO: 909140 - DNA, 25 bp, Homo sapien
cgccgtgtggcactcaaaacaaacg

SEQ ID NO: 909141 - DNA, 25 bp, Homo sapien
cttgaactagtagaccaggaagtag

SEQ ID NO: 909142 - DNA, 25 bp, Homo sapien
tggtgcagacatacatcttttggga

SEQ ID NO: 909143 - DNA, 25 bp, Homo sapien
tttcctttaattagctcttgtcact

SEQ ID NO: 909144 - DNA, 25 bp, Homo sapien
aaagaattgtctgttgggccatcaa

SEQ ID NO: 909145 - DNA, 25 bp, Homo sapien
ctcctgtcaagaaaaatgtggtgca

SEQ ID NO: 909146 - DNA, 25 bp, Homo sapien
gccctgagtggaacagccttataaa

SEQ ID NO: 909147 - DNA, 25 bp, Homo sapien
tatacccaggatttgtttacaacag

SEQ ID NO: 909148 - DNA, 25 bp, Homo sapien
gaagcaggaggcatgacataccaca

SEQ ID NO: 909149 - DNA, 25 bp, Homo sapien
tttgagtaatttcagcagggtctgg

SEQ ID NO: 909150 - DNA, 25 bp, Homo sapien
gagtagtctatttcctctcgccagc

SEQ ID NO: 909151 - DNA, 25 bp, Homo sapien
tgctctagtttcctaccagagtagt

SEQ ID NO: 909152 - DNA, 25 bp, Homo sapien
tctcgccagcttatctcatgaaaca

SEQ ID NO: 909153 - DNA, 25 bp, Homo sapien
catgaaacagctcttgatacttcca

SEQ ID NO: 909154 - DNA, 25 bp, Homo sapien
agatgtgttctttactggctgggag

SEQ ID NO: 909155 - DNA, 25 bp, Homo sapien
tgtgttctttactggctgggaggcc

SEQ ID NO: 909156 - DNA, 25 bp, Homo sapien
ctgccgggtgtaaaggcaaacagca

SEQ ID NO: 909157 - DNA, 25 bp, Homo sapien
gggtgtaaaggcaaacagcacctct

SEQ ID NO: 909158 - DNA, 25 bp, Homo sapien
ctccttggtggcccgaaggtcctca

SEQ ID NO: 909159 - DNA, 25 bp, Homo sapien
tccttggtggcccgaaggtcctcat

SEQ ID NO: 909160 - DNA, 25 bp, Homo sapien
caatgactagctgagtcccagttcc

SEQ ID NO: 909161 - DNA, 25 bp, Homo sapien
gagccaatgactagctgagtcccag

SEQ ID NO: 909162 - DNA, 25 bp, Homo sapien
agcaggagccaatgactagctgagt

SEQ ID NO: 909163 - DNA, 25 bp, Homo sapien
caggagccaatgactagctgagtcc

SEQ ID NO: 909164 - DNA, 25 bp, Homo sapien
actgtctgtgtaatgttgcgtgtaa

SEQ ID NO: 909165 - DNA, 25 bp, Homo sapien
cacgaaggcagtagttgatgaatgg

SEQ ID NO: 909166 - DNA, 25 bp, Homo sapien
ttgatgaatggagcgtaaactgtct

SEQ ID NO: 909167 - DNA, 25 bp, Homo sapien
tcatgaagatagttcacgaaggcag

SEQ ID NO: 909168 - DNA, 25 bp, Homo sapien
gaagttgatactgctgaatgtggtg

SEQ ID NO: 909169 - DNA, 25 bp, Homo sapien
gtgtttctgtagtacctccctgaag

SEQ ID NO: 909170 - DNA, 25 bp, Homo sapien
agaaggcacacgtttcttctcttag

SEQ ID NO: 909171 - DNA, 25 bp, Homo sapien
caaaagatccagcagaaggcacacg

SEQ ID NO: 909172 - DNA, 25 bp, Homo sapien
ctttgttgtttctgggagatccggt

SEQ ID NO: 909173 - DNA, 25 bp, Homo sapien
tgggagatccggtttacggccacca

SEQ ID NO: 909174 - DNA, 25 bp, Homo sapien
aatgatgtgttgatggctccaatgc

SEQ ID NO: 909175 - DNA, 25 bp, Homo sapien
ctctttcatgagcaacaaatgttaa

SEQ ID NO: 909176 - DNA, 25 bp, Homo sapien
atttacgtgaaatgatgaagcagca

SEQ ID NO: 909177 - DNA, 25 bp, Homo sapien
tctgggtccagttcaaatggatgga

SEQ ID NO: 909178 - DNA, 25 bp, Homo sapien
agcaaggatgaccttagccttctgg

SEQ ID NO: 909179 - DNA, 25 bp, Homo sapien
cactcatttacgtgaaatgatgaag

SEQ ID NO: 909180 - DNA, 25 bp, Homo sapien
caaacaggccaagcagagagtcagg

SEQ ID NO: 909181 - DNA, 25 bp, Homo sapien
acaggccaagcagagagtcaggcat

SEQ ID NO: 909182 - DNA, 25 bp, Homo sapien
tcccaaacaggccaagcagagagtc

SEQ ID NO: 909183 - DNA, 25 bp, Homo sapien
ccaaacaggccaagcagagagtcag

SEQ ID NO: 909184 - DNA, 25 bp, Homo sapien
tctcaagctctacagtggctgaggg

SEQ ID NO: 909185 - DNA, 25 bp, Homo sapien
tgggtccaatggctacatgctgctt

SEQ ID NO: 909186 - DNA, 25 bp, Homo sapien
gaatgaacatagtgggagccctctc

SEQ ID NO: 909187 - DNA, 25 bp, Homo sapien
tgtgagcccaggtagataataatcc

SEQ ID NO: 909188 - DNA, 25 bp, Homo sapien
cccagtgtagtcaaacaggctgaag

SEQ ID NO: 909189 - DNA, 25 bp, Homo sapien
catcagtgataatgattgtgcacat

SEQ ID NO: 909190 - DNA, 25 bp, Homo sapien
tgaagacacaggtacatcagtgata

SEQ ID NO: 909191 - DNA, 25 bp, Homo sapien
aacaggctgaagacacaggtacatc

SEQ ID NO: 909192 - DNA, 25 bp, Homo sapien
acctcaggatcatcgtgggaggtga

SEQ ID NO: 909193 - DNA, 25 bp, Homo sapien
agacctcaggatcatcgtgggaggt

SEQ ID NO: 909194 - DNA, 25 bp, Homo sapien
ggggagacctcaggatcatcgtggg

SEQ ID NO: 909195 - DNA, 25 bp, Homo sapien
ggagacctcaggatcatcgtgggag

SEQ ID NO: 909196 - DNA, 25 bp, Homo sapien
ttgtctctgctctgctaatggtgtt

SEQ ID NO: 909197 - DNA, 25 bp, Homo sapien
taatggtgttcgagatgcagtgact

SEQ ID NO: 909198 - DNA, 25 bp, Homo sapien
tttccagccaaaactcttgtctctg

SEQ ID NO: 909199 - DNA, 25 bp, Homo sapien
gactccattaatttagttggaagaa

SEQ ID NO: 909200 - DNA, 25 bp, Homo sapien
tgatctaatctcctcccttcgggtc

SEQ ID NO: 909201 - DNA, 25 bp, Homo sapien
caccggaccgtcctaaagattaatg

SEQ ID NO: 909202 - DNA, 25 bp, Homo sapien
cagagacaaatcatatcatcccact

SEQ ID NO: 909203 - DNA, 25 bp, Homo sapien
gattcacggttccacaggtttaaca

SEQ ID NO: 909204 - DNA, 25 bp, Homo sapien
tccaagccataagcagtgtctgaag

SEQ ID NO: 909205 - DNA, 25 bp, Homo sapien
gctacttcaaaagttattgcaggga

SEQ ID NO: 909206 - DNA, 25 bp, Homo sapien
tgcagatgagccctaagtccatttc

SEQ ID NO: 909207 - DNA, 25 bp, Homo sapien
tcagttctagcgagtgctttccaca

SEQ ID NO: 909208 - DNA, 25 bp, Homo sapien
ggctggctctccgaaaggtcaaata

SEQ ID NO: 909209 - DNA, 25 bp, Homo sapien
cataaatattgcacggaacacactt

SEQ ID NO: 909210 - DNA, 25 bp, Homo sapien
taaagattctgttagcccctggtat

SEQ ID NO: 909211 - DNA, 25 bp, Homo sapien
tgcttgaaggtctgctgtcagctca

SEQ ID NO: 909212 - DNA, 25 bp, Homo sapien
tcaaatgtggaactacgggtagaag

SEQ ID NO: 909213 - DNA, 25 bp, Homo sapien
ctctcgttggtccactcaaatgtgg

SEQ ID NO: 909214 - DNA, 25 bp, Homo sapien
ttggcatacagaaagggtcgcggca

SEQ ID NO: 909215 - DNA, 25 bp, Homo sapien
gatattgggcaatgcaattcccagc

SEQ ID NO: 909216 - DNA, 25 bp, Homo sapien
cttggcttgccttcatttactgagt

SEQ ID NO: 909217 - DNA, 25 bp, Homo sapien
tttactgagtaaggtaaaatgctgt

SEQ ID NO: 909218 - DNA, 25 bp, Homo sapien
gagtaaggtaaaatgctgtcacaaa

SEQ ID NO: 909219 - DNA, 25 bp, Homo sapien
aaatgctgtcacaaatgtttatcat

SEQ ID NO: 909220 - DNA, 25 bp, Homo sapien
gcaaaacaagcaagtctctgtaaga

SEQ ID NO: 909221 - DNA, 25 bp, Homo sapien
tgctcttgtacactgccttcatgac

SEQ ID NO: 909222 - DNA, 25 bp, Homo sapien
taattcattggttcttttggtctca

SEQ ID NO: 909223 - DNA, 25 bp, Homo sapien
ctcaggccgccattttgtaacttgc

SEQ ID NO: 909224 - DNA, 25 bp, Homo sapien
aggaggcctgcctttcatgatatgt

SEQ ID NO: 909225 - DNA, 25 bp, Homo sapien
ccagtaaaattatccttcagaaatg

SEQ ID NO: 909226 - DNA, 25 bp, Homo sapien
ttgagagaatttgtcaccaggaggc

SEQ ID NO: 909227 - DNA, 25 bp, Homo sapien
ttgaaattccatatccagtaaaatt

SEQ ID NO: 909228 - DNA, 25 bp, Homo sapien
ttattcagaggagctgtaggagcca

SEQ ID NO: 909229 - DNA, 25 bp, Homo sapien
attcagaggagctgtaggagccacc

SEQ ID NO: 909230 - DNA, 25 bp, Homo sapien
tattcagaggagctgtaggagccac

SEQ ID NO: 909231 - DNA, 25 bp, Homo sapien
ttgatgttggcattcctcaaaccca

SEQ ID NO: 909232 - DNA, 25 bp, Homo sapien
cagtaaacagaagacgattgcatgc

SEQ ID NO: 909233 - DNA, 25 bp, Homo sapien
catttgcctgtaatagactgtcata

SEQ ID NO: 909234 - DNA, 25 bp, Homo sapien
cagcgttactgagggttgttcagaa

SEQ ID NO: 909235 - DNA, 25 bp, Homo sapien
gaatgtggtacaagctgactctgga

SEQ ID NO: 909236 - DNA, 25 bp, Homo sapien
tggattggaccttgcacgtgctact

SEQ ID NO: 909237 - DNA, 25 bp, Homo sapien
caggatgtgtccagtctaaggcagc

SEQ ID NO: 909238 - DNA, 25 bp, Homo sapien
gaatcagccttaagtccagagagaa

SEQ ID NO: 909239 - DNA, 25 bp, Homo sapien
ctgaggagcaaaatggcaatccgtg

SEQ ID NO: 909240 - DNA, 25 bp, Homo sapien
gcaatccgtgtagcataatgcagag

SEQ ID NO: 909241 - DNA, 25 bp, Homo sapien
cagaacacgtcctcccttgtgcttt

SEQ ID NO: 909242 - DNA, 25 bp, Homo sapien
tagcataatgcagagagagtccaca

SEQ ID NO: 909243 - DNA, 25 bp, Homo sapien
cttgagaaagtctactgttttgatg

SEQ ID NO: 909244 - DNA, 25 bp, Homo sapien
gagaaagtctactgttttgatgtaa

SEQ ID NO: 909245 - DNA, 25 bp, Homo sapien
gaaagtctactgttttgatgtaatc

SEQ ID NO: 909246 - DNA, 25 bp, Homo sapien
gtctactgttttgatgtaatcatca

SEQ ID NO: 909247 - DNA, 25 bp, Homo sapien
tctggaattgagtctgaggggtaca

SEQ ID NO: 909248 - DNA, 25 bp, Homo sapien
tcttgacatgtcacagccgttggcc

SEQ ID NO: 909249 - DNA, 25 bp, Homo sapien
gcattttgcatatcttgacatgtca

SEQ ID NO: 909250 - DNA, 25 bp, Homo sapien
tctgtgattggtttctgaaagccct

SEQ ID NO: 909251 - DNA, 25 bp, Homo sapien
aaggtagtggcttccagtcagagac

SEQ ID NO: 909252 - DNA, 25 bp, Homo sapien
caaaacccagatgatccggtggcga

SEQ ID NO: 909253 - DNA, 25 bp, Homo sapien
gtgaagtagtcggagtccctgccct

SEQ ID NO: 909254 - DNA, 25 bp, Homo sapien
tccctgccctaaaggtagtggcttc

SEQ ID NO: 909255 - DNA, 25 bp, Homo sapien
tcacagaattaaggcttcatggata

SEQ ID NO: 909256 - DNA, 25 bp, Homo sapien
taactatagtatgtgctgggaatgc

SEQ ID NO: 909257 - DNA, 25 bp, Homo sapien
tcctgcttactcacagtgggagaga

SEQ ID NO: 909258 - DNA, 25 bp, Homo sapien
taaatgtagcctataacagtcacag

SEQ ID NO: 909259 - DNA, 25 bp, Homo sapien
gtactaactcctccaccattaagtc

SEQ ID NO: 909260 - DNA, 25 bp, Homo sapien
cagcatgaggcttttggtactaact

SEQ ID NO: 909261 - DNA, 25 bp, Homo sapien
gaggaagcctctaggatagacatag

SEQ ID NO: 909262 - DNA, 25 bp, Homo sapien
gggctaatggtgaaacttccagaat

SEQ ID NO: 909263 - DNA, 25 bp, Homo sapien
ggttatacactctcacctagttgga

SEQ ID NO: 909264 - DNA, 25 bp, Homo sapien
tctgagtggctatggtcttgaatcc

SEQ ID NO: 909265 - DNA, 25 bp, Homo sapien
gatagacagcatgtgaagctccctg

SEQ ID NO: 909266 - DNA, 25 bp, Homo sapien
caacttgttccctatgtgctggcca

SEQ ID NO: 909267 - DNA, 25 bp, Homo sapien
gtagaaattacacgatgaccttggg

SEQ ID NO: 909268 - DNA, 25 bp, Homo sapien
gaaactaaactaattgggcatggtc

SEQ ID NO: 909269 - DNA, 25 bp, Homo sapien
aatctgatctctattgctatgagag

SEQ ID NO: 909270 - DNA, 25 bp, Homo sapien
gagatgtgactagataatctatggt

SEQ ID NO: 909271 - DNA, 25 bp, Homo sapien
attatatcatattgctttttgtcca

SEQ ID NO: 909272 - DNA, 25 bp, Homo sapien
gtgtattatatcatattgctttttg

SEQ ID NO: 909273 - DNA, 25 bp, Homo sapien
cgaatacaaatggaaaaagtgatgt

SEQ ID NO: 909274 - DNA, 25 bp, Homo sapien
ggaaaaagtgatgtgtattatatca

SEQ ID NO: 909275 - DNA, 25 bp, Homo sapien
cagcttggtacttccatagacaaac

SEQ ID NO: 909276 - DNA, 25 bp, Homo sapien
agcttggtacttccatagacaaaca

SEQ ID NO: 909277 - DNA, 25 bp, Homo sapien
gcagcttggtacttccatagacaaa

SEQ ID NO: 909278 - DNA, 25 bp, Homo sapien
tcctgttgctgctgggactcatggc

SEQ ID NO: 909279 - DNA, 25 bp, Homo sapien
ctgttgctgctgggactcatggctt

SEQ ID NO: 909280 - DNA, 25 bp, Homo sapien
ctgggactcatggcttctcttgtgc

SEQ ID NO: 909281 - DNA, 25 bp, Homo sapien
tgggactcatggcttctcttgtgca

SEQ ID NO: 909282 - DNA, 25 bp, Homo sapien
tttgctcagggtctgctttagaggg

SEQ ID NO: 909283 - DNA, 25 bp, Homo sapien
gatcgtcttccaaatatatgcattg

SEQ ID NO: 909284 - DNA, 25 bp, Homo sapien
gacacagacacagcagtattcagag

SEQ ID NO: 909285 - DNA, 25 bp, Homo sapien
tcaacaaggcaaatcataacgtaca

SEQ ID NO: 909286 - DNA, 25 bp, Homo sapien
cttgattccatttcaactttccact

SEQ ID NO: 909287 - DNA, 25 bp, Homo sapien
ttcttgattccatttcaactttcca

SEQ ID NO: 909288 - DNA, 25 bp, Homo sapien
tttccactggccacaactgctcttt

SEQ ID NO: 909289 - DNA, 25 bp, Homo sapien
actggccacaactgctctttgcttc

SEQ ID NO: 909290 - DNA, 25 bp, Homo sapien
tggtaccttggttgaaagtagattc

SEQ ID NO: 909291 - DNA, 25 bp, Homo sapien
gaaagtagattcagtgcattgatag

SEQ ID NO: 909292 - DNA, 25 bp, Homo sapien
aataatcctgagagtgggccttaat

SEQ ID NO: 909293 - DNA, 25 bp, Homo sapien
gattcatgggtatgtgtggaagcca

SEQ ID NO: 909294 - DNA, 25 bp, Homo sapien
gaactcagacatatgatgctgaagc

SEQ ID NO: 909295 - DNA, 25 bp, Homo sapien
actcagacatatgatgctgaagcct

SEQ ID NO: 909296 - DNA, 25 bp, Homo sapien
tctcttatcctttatcccatgactc

SEQ ID NO: 909297 - DNA, 25 bp, Homo sapien
ctcttatcctttatcccatgactca

SEQ ID NO: 909298 - DNA, 25 bp, Homo sapien
ggtttgacaaggtgctgctggcaca

SEQ ID NO: 909299 - DNA, 25 bp, Homo sapien
cacagagattctgcaagctcttcaa

SEQ ID NO: 909300 - DNA, 25 bp, Homo sapien
caagaaccttggcaagcgtggcaca

SEQ ID NO: 909301 - DNA, 25 bp, Homo sapien
tgacagatgagggatgcaagaacct

SEQ ID NO: 909302 - DNA, 25 bp, Homo sapien
tctgtggcagcataagcaaaagtct

SEQ ID NO: 909303 - DNA, 25 bp, Homo sapien
atcagcaaagcatggacggcgaggc

SEQ ID NO: 909304 - DNA, 25 bp, Homo sapien
gatggaaatgtacaccgctagtagt

SEQ ID NO: 909305 - DNA, 25 bp, Homo sapien
tgctctgccgcacacaaggaagaga

SEQ ID NO: 909306 - DNA, 25 bp, Homo sapien
tgctgtagaaattcactcacatggc

SEQ ID NO: 909307 - DNA, 25 bp, Homo sapien
gaaattcactcacatggcctcctca

SEQ ID NO: 909308 - DNA, 25 bp, Homo sapien
tagaaattcactcacatggcctcct

SEQ ID NO: 909309 - DNA, 25 bp, Homo sapien
tgtagaaattcactcacatggcctc

SEQ ID NO: 909310 - DNA, 25 bp, Homo sapien
tgtggctcatgtagatgaggttcgt

SEQ ID NO: 909311 - DNA, 25 bp, Homo sapien
tgttcttggactgctgcattccctg

SEQ ID NO: 909312 - DNA, 25 bp, Homo sapien
gcaagccacgctcagtagtgtgtgg

SEQ ID NO: 909313 - DNA, 25 bp, Homo sapien
gatgaggttcgtgttcttggactgc

SEQ ID NO: 909314 - DNA, 25 bp, Homo sapien
tgaaacttcaaagacggagctccct

SEQ ID NO: 909315 - DNA, 25 bp, Homo sapien
acttcaaagacggagctcccttgac

SEQ ID NO: 909316 - DNA, 25 bp, Homo sapien
aatttgaaacttcaaagacggagct

SEQ ID NO: 909317 - DNA, 25 bp, Homo sapien
agtcaaatttgaaacttcaaagacg

SEQ ID NO: 909318 - DNA, 25 bp, Homo sapien
aagtattttatgacttcgccaccat

SEQ ID NO: 909319 - DNA, 25 bp, Homo sapien
ttttaagaacacttagcatggtggc

SEQ ID NO: 909320 - DNA, 25 bp, Homo sapien
gggcccatagactcactaacatgtc

SEQ ID NO: 909321 - DNA, 25 bp, Homo sapien
tgcagtagccaatatatgatgatgt

SEQ ID NO: 909322 - DNA, 25 bp, Homo sapien
gaagacttctatgttttgcaacaga

SEQ ID NO: 909323 - DNA, 25 bp, Homo sapien
tactctaactcttgaaacttctcta

SEQ ID NO: 909324 - DNA, 25 bp, Homo sapien
cactagggctctgagatatgggcgt

SEQ ID NO: 909325 - DNA, 25 bp, Homo sapien
gaaacttctctacaactcactaggg

SEQ ID NO: 909326 - DNA, 25 bp, Homo sapien
tttgcatctatgaaatttaacgaac

SEQ ID NO: 909327 - DNA, 25 bp, Homo sapien
gattatagattccaatgcttgccca

SEQ ID NO: 909328 - DNA, 25 bp, Homo sapien
ctaaagcatcatcccaggtggagca

SEQ ID NO: 909329 - DNA, 25 bp, Homo sapien
aacagtggactacagcttgaagagc

SEQ ID NO: 909330 - DNA, 25 bp, Homo sapien
taacaatagactgctccccaaggtg

SEQ ID NO: 909331 - DNA, 25 bp, Homo sapien
tactccaccagcagcccgatgacac

SEQ ID NO: 909332 - DNA, 25 bp, Homo sapien
taatactccaccagcagcccgatga

SEQ ID NO: 909333 - DNA, 25 bp, Homo sapien
atactccaccagcagcccgatgaca

SEQ ID NO: 909334 - DNA, 25 bp, Homo sapien
ttaatactccaccagcagcccgatg

SEQ ID NO: 909335 - DNA, 25 bp, Homo sapien
gtctttcagaccatctacattctta

SEQ ID NO: 909336 - DNA, 25 bp, Homo sapien
tgtctttcagaccatctacattctt

SEQ ID NO: 909337 - DNA, 25 bp, Homo sapien
tgagactgatactgcccacaacgat

SEQ ID NO: 909338 - DNA, 25 bp, Homo sapien
atgactgtgagactgatactgccca

SEQ ID NO: 909339 - DNA, 25 bp, Homo sapien
tgcccacaacgataccagtactgag

SEQ ID NO: 909340 - DNA, 25 bp, Homo sapien
ataccagtactgagtgatgaagaac

SEQ ID NO: 909341 - DNA, 25 bp, Homo sapien
gttctatcgtggtccttgcttaagg

SEQ ID NO: 909342 - DNA, 25 bp, Homo sapien
ctatcgtggtccttgcttaaggtac

SEQ ID NO: 909343 - DNA, 25 bp, Homo sapien
tgttctatcgtggtccttgcttaag

SEQ ID NO: 909344 - DNA, 25 bp, Homo sapien
gttgttctatcgtggtccttgctta

SEQ ID NO: 909345 - DNA, 25 bp, Homo sapien
gtcaagaaaagctctactttgtggc

SEQ ID NO: 909346 - DNA, 25 bp, Homo sapien
tcttcattgtcacgtacaggatctg

SEQ ID NO: 909347 - DNA, 25 bp, Homo sapien
tccacagaagcggtgcagcttacta

SEQ ID NO: 909348 - DNA, 25 bp, Homo sapien
cagcttactattgtgctgccatcag

SEQ ID NO: 909349 - DNA, 25 bp, Homo sapien
tgaagaatacatagatttataaaaa

SEQ ID NO: 909350 - DNA, 25 bp, Homo sapien
gaagaatacatagatttataaaaaa

SEQ ID NO: 909351 - DNA, 25 bp, Homo sapien
ctaacagtgaagaatacatagattt

SEQ ID NO: 909352 - DNA, 25 bp, Homo sapien
acagtgaagaatacatagatttata

SEQ ID NO: 909353 - DNA, 25 bp, Homo sapien
cttgagaatctgatggttgattcag

SEQ ID NO: 909354 - DNA, 25 bp, Homo sapien
agaatctgatggttgattcagctcc

SEQ ID NO: 909355 - DNA, 25 bp, Homo sapien
tgagaatctgatggttgattcagct

SEQ ID NO: 909356 - DNA, 25 bp, Homo sapien
gaatctgatggttgattcagctcct

SEQ ID NO: 909357 - DNA, 25 bp, Homo sapien
tgccttctgtgcttagagtttcttt

SEQ ID NO: 909358 - DNA, 25 bp, Homo sapien
ggttgaatatcaatgtttctgttct

SEQ ID NO: 909359 - DNA, 25 bp, Homo sapien
ctttgccttctgtgcttagagtttc

SEQ ID NO: 909360 - DNA, 25 bp, Homo sapien
tgtttcaaatggttgaatatcaatg

SEQ ID NO: 909361 - DNA, 25 bp, Homo sapien
ttccactcaagattacggtcttgtg

SEQ ID NO: 909362 - DNA, 25 bp, Homo sapien
tacggtcttgtgagaagtttgccac

SEQ ID NO: 909363 - DNA, 25 bp, Homo sapien
agtttgccacatagccataccccat

SEQ ID NO: 909364 - DNA, 25 bp, Homo sapien
gaagtttgccacatagccatacccc

SEQ ID NO: 909365 - DNA, 25 bp, Homo sapien
agaaagccacgctgatggttccaga

SEQ ID NO: 909366 - DNA, 25 bp, Homo sapien
tgcaaagatgagcagaatgagtact

SEQ ID NO: 909367 - DNA, 25 bp, Homo sapien
gaacctgttaattctaacatccaga

SEQ ID NO: 909368 - DNA, 25 bp, Homo sapien
aacctcctctactatgccgatctga

SEQ ID NO: 909369 - DNA, 25 bp, Homo sapien
tctgcaggtaggcaccactatacgg

SEQ ID NO: 909370 - DNA, 25 bp, Homo sapien
tgaggattgtcacccaacccagtgc

SEQ ID NO: 909371 - DNA, 25 bp, Homo sapien
caaagaactgtgtttacgaggactg

SEQ ID NO: 909372 - DNA, 25 bp, Homo sapien
cgtatcacagtgagcggtggagcaa

SEQ ID NO: 909373 - DNA, 25 bp, Homo sapien
cactttgtcaacagttacttccttg

SEQ ID NO: 909374 - DNA, 25 bp, Homo sapien
tctcactttgtcaacagttacttcc

SEQ ID NO: 909375 - DNA, 25 bp, Homo sapien
ctcactttgtcaacagttacttcct

SEQ ID NO: 909376 - DNA, 25 bp, Homo sapien
tcactttgtcaacagttacttcctt

SEQ ID NO: 909377 - DNA, 25 bp, Homo sapien
gtagaaggaggtaggccccacaagc

SEQ ID NO: 909378 - DNA, 25 bp, Homo sapien
tagaaggaggtaggccccacaagcc

SEQ ID NO: 909379 - DNA, 25 bp, Homo sapien
agaaggaggtaggccccacaagcca

SEQ ID NO: 909380 - DNA, 25 bp, Homo sapien
tgtagaaggaggtaggccccacaag

SEQ ID NO: 909381 - DNA, 25 bp, Homo sapien
aattgatccgtaacaaacacctcta

SEQ ID NO: 909382 - DNA, 25 bp, Homo sapien
gttctacttgaaattgatccgtaac

SEQ ID NO: 909383 - DNA, 25 bp, Homo sapien
aaacacctctatgtcctcattgtca

SEQ ID NO: 909384 - DNA, 25 bp, Homo sapien
cttgaaattgatccgtaacaaacac

SEQ ID NO: 909385 - DNA, 25 bp, Homo sapien
cctatattttgaactgtagccaccc

SEQ ID NO: 909386 - DNA, 25 bp, Homo sapien
tatattttgaactgtagccacccat

SEQ ID NO: 909387 - DNA, 25 bp, Homo sapien
caaacctatattttgaactgtagcc

SEQ ID NO: 909388 - DNA, 25 bp, Homo sapien
aacctatattttgaactgtagccac

SEQ ID NO: 909389 - DNA, 25 bp, Homo sapien
cgctggccctccttggtggccaggc

SEQ ID NO: 909390 - DNA, 25 bp, Homo sapien
gctggccctccttggtggccaggca

SEQ ID NO: 909391 - DNA, 25 bp, Homo sapien
ctggccctccttggtggccaggcat

SEQ ID NO: 909392 - DNA, 25 bp, Homo sapien
gccaaacttagtgtcgttctgccag

SEQ ID NO: 909393 - DNA, 25 bp, Homo sapien
tcgagtcggtccactcagggccagg

SEQ ID NO: 909394 - DNA, 25 bp, Homo sapien
tctgccagttgatggcctgccagtc

SEQ ID NO: 909395 - DNA, 25 bp, Homo sapien
caatgtgctcttacgccggtacgtt

SEQ ID NO: 909396 - DNA, 25 bp, Homo sapien
tgaaaaatacagcagctactacctg

SEQ ID NO: 909397 - DNA, 25 bp, Homo sapien
tcaggccaggcagaactgacaaagt

SEQ ID NO: 909398 - DNA, 25 bp, Homo sapien
aacatgaggcgtggagatcaggcca

SEQ ID NO: 909399 - DNA, 25 bp, Homo sapien
ggcttaaccacaactgctaacagtg

SEQ ID NO: 909400 - DNA, 25 bp, Homo sapien
tgccaactgtgcaaacttccaggtc

SEQ ID NO: 909401 - DNA, 25 bp, Homo sapien
agctctgtgtgccaactgtgcaaac

SEQ ID NO: 909402 - DNA, 25 bp, Homo sapien
gggtctgccagaggaagcaactttc

SEQ ID NO: 909403 - DNA, 25 bp, Homo sapien
ggaagcaactttcccagagcagcat

SEQ ID NO: 909404 - DNA, 25 bp, Homo sapien
gagatgcgctactcagacccatgaa

SEQ ID NO: 909405 - DNA, 25 bp, Homo sapien
tgcatcccacaggagtcatccacag

SEQ ID NO: 909406 - DNA, 25 bp, Homo sapien
ttttctgcaacgtcttcagcctgct

SEQ ID NO: 909407 - DNA, 25 bp, Homo sapien
gaagagaaggacttgtggcccagct

SEQ ID NO: 909408 - DNA, 25 bp, Homo sapien
tattaccctaacaagtgcaagccac

SEQ ID NO: 909409 - DNA, 25 bp, Homo sapien
acatatgtgactggaccctgggtca

SEQ ID NO: 909410 - DNA, 25 bp, Homo sapien
gtttgaaacagacactcacccattg

SEQ ID NO: 909411 - DNA, 25 bp, Homo sapien
caatttttgcaggagtcattgaagc

SEQ ID NO: 909412 - DNA, 25 bp, Homo sapien
ttgtagtttgttttggctcacttga

SEQ ID NO: 909413 - DNA, 25 bp, Homo sapien
tcttcaatataagaagtaccccttg

SEQ ID NO: 909414 - DNA, 25 bp, Homo sapien
gttttggctcacttgaacttagcag

SEQ ID NO: 909415 - DNA, 25 bp, Homo sapien
caatataagaagtaccccttgtagt

SEQ ID NO: 909416 - DNA, 25 bp, Homo sapien
tcaaagaaggacagatatttatact

SEQ ID NO: 909417 - DNA, 25 bp, Homo sapien
gacagatatttatacttggccttga

SEQ ID NO: 909418 - DNA, 25 bp, Homo sapien
gaaggacagatatttatacttggcc

SEQ ID NO: 909419 - DNA, 25 bp, Homo sapien
gagttgaggaactgatcctgagagt

SEQ ID NO: 909420 - DNA, 25 bp, Homo sapien
ggccaggagatgtacactcagggat

SEQ ID NO: 909421 - DNA, 25 bp, Homo sapien
ggatctgtccacgagtgtgaggtca

SEQ ID NO: 909422 - DNA, 25 bp, Homo sapien
gtccctctgcttgtgatagacacta

SEQ ID NO: 909423 - DNA, 25 bp, Homo sapien
tgaggtcatcttccagaacgtgtgg

SEQ ID NO: 909424 - DNA, 25 bp, Homo sapien
ttggcacacatgctaacataaactg

SEQ ID NO: 909425 - DNA, 25 bp, Homo sapien
cacatgctaacataaactgcattct

SEQ ID NO: 909426 - DNA, 25 bp, Homo sapien
aggacaagaattttggcacacatgc

SEQ ID NO: 909427 - DNA, 25 bp, Homo sapien
ttttatacatggtactatccttaaa

SEQ ID NO: 909428 - DNA, 25 bp, Homo sapien
tcagaattgccctggctccacacca

SEQ ID NO: 909429 - DNA, 25 bp, Homo sapien
tgtactcattacaacagtggatctg

SEQ ID NO: 909430 - DNA, 25 bp, Homo sapien
caatattcctttgtggtcaatccga

SEQ ID NO: 909431 - DNA, 25 bp, Homo sapien
gaaggctttcgatcatatctccaga

SEQ ID NO: 909432 - DNA, 25 bp, Homo sapien
ggatttatatccaggaggcaatgac

SEQ ID NO: 909433 - DNA, 25 bp, Homo sapien
ctctgaagatactcataatggaata

SEQ ID NO: 909434 - DNA, 25 bp, Homo sapien
tcttctctgaagatactcataatgg

SEQ ID NO: 909435 - DNA, 25 bp, Homo sapien
cttctctgaagatactcataatgga

SEQ ID NO: 909436 - DNA, 25 bp, Homo sapien
gttcttctctgaagatactcataat

SEQ ID NO: 909437 - DNA, 25 bp, Homo sapien
cctcacagggtaattggcccaacct

SEQ ID NO: 909438 - DNA, 25 bp, Homo sapien
gaagatcgatgggtgctctgctcaa

SEQ ID NO: 909439 - DNA, 25 bp, Homo sapien
tctccgtgcaaagcagaatgtgtgg

SEQ ID NO: 909440 - DNA, 25 bp, Homo sapien
ctcatggggcctcctgtcgggtgtc

SEQ ID NO: 909441 - DNA, 25 bp, Homo sapien
ctctttaagttgattcccagaaacg

SEQ ID NO: 909442 - DNA, 25 bp, Homo sapien
taggagaaggggatgcccattgaca

SEQ ID NO: 909443 - DNA, 25 bp, Homo sapien
ccagaaacggaacataggagaaggg

SEQ ID NO: 909444 - DNA, 25 bp, Homo sapien
acagggctcttgttacctagctgcc

SEQ ID NO: 909445 - DNA, 25 bp, Homo sapien
ttctttcaggagagagtgagtcatc

SEQ ID NO: 909446 - DNA, 25 bp, Homo sapien
aggcctcctgtgtctccggggcagt

SEQ ID NO: 909447 - DNA, 25 bp, Homo sapien
ccggggcagtgtggtcttctttcag

SEQ ID NO: 909448 - DNA, 25 bp, Homo sapien
tcttctttcaggagagagtgagtca

SEQ ID NO: 909449 - DNA, 25 bp, Homo sapien
ttgaccaaatcgtcctccttactca

SEQ ID NO: 909450 - DNA, 25 bp, Homo sapien
ctttgaccaaatcgtcctccttact

SEQ ID NO: 909451 - DNA, 25 bp, Homo sapien
tttgaccaaatcgtcctccttactc

SEQ ID NO: 909452 - DNA, 25 bp, Homo sapien
gagaaattgaaacttctgtataaga

SEQ ID NO: 909453 - DNA, 25 bp, Homo sapien
tagccaggatgcaaaagggggttac

SEQ ID NO: 909454 - DNA, 25 bp, Homo sapien
caggatgcaaaagggggttacttag

SEQ ID NO: 909455 - DNA, 25 bp, Homo sapien
aacatcactgtgaatcaccaaagaa

SEQ ID NO: 909456 - DNA, 25 bp, Homo sapien
tggctttaggttgtcaaagatgatc

SEQ ID NO: 909457 - DNA, 25 bp, Homo sapien
ctttaggttgtcaaagatgatcata

SEQ ID NO: 909458 - DNA, 25 bp, Homo sapien
tggcttcccccaactcatactcctt

SEQ ID NO: 909459 - DNA, 25 bp, Homo sapien
taggttgtcaaagatgatcatatct

SEQ ID NO: 909460 - DNA, 25 bp, Homo sapien
gcttattactgggtggtgaaataat

SEQ ID NO: 909461 - DNA, 25 bp, Homo sapien
ttattactgggtggtgaaataatct

SEQ ID NO: 909462 - DNA, 25 bp, Homo sapien
tatgcttattactgggtggtgaaat

SEQ ID NO: 909463 - DNA, 25 bp, Homo sapien
actatgcttattactgggtggtgaa

SEQ ID NO: 909464 - DNA, 25 bp, Homo sapien
agagcaactgtgccttcacaaccat

SEQ ID NO: 909465 - DNA, 25 bp, Homo sapien
aagagcaactgtgccttcacaacca

SEQ ID NO: 909466 - DNA, 25 bp, Homo sapien
ttgttcttaaattcacgtggaaaga

SEQ ID NO: 909467 - DNA, 25 bp, Homo sapien
gttcttaaattcacgtggaaagagc

SEQ ID NO: 909468 - DNA, 25 bp, Homo sapien
ggctgttttcagatccttgccagat

SEQ ID NO: 909469 - DNA, 25 bp, Homo sapien
gtttaatcgtcagagcctttcagcg

SEQ ID NO: 909470 - DNA, 25 bp, Homo sapien
gcagttggttcatcttgacgttggc

SEQ ID NO: 909471 - DNA, 25 bp, Homo sapien
tgccctgattctgcttagggagcag

SEQ ID NO: 909472 - DNA, 25 bp, Homo sapien
ttatactctgaatagagatgatatt

SEQ ID NO: 909473 - DNA, 25 bp, Homo sapien
gatgcccttgaccacgtttaccttg

SEQ ID NO: 909474 - DNA, 25 bp, Homo sapien
tagtaggaccctggctataacatgc

SEQ ID NO: 909475 - DNA, 25 bp, Homo sapien
catggctatagcttaacactggagg

SEQ ID NO: 909476 - DNA, 25 bp, Homo sapien
tataacatgcgttgggcacagttcg

SEQ ID NO: 909477 - DNA, 25 bp, Homo sapien
gccaatgagttcaaaaagcacgttt

SEQ ID NO: 909478 - DNA, 25 bp, Homo sapien
tggccaatgagttcaaaaagcacgt

SEQ ID NO: 909479 - DNA, 25 bp, Homo sapien
ctggccaatgagttcaaaaagcacg

SEQ ID NO: 909480 - DNA, 25 bp, Homo sapien
aatgagttcaaaaagcacgtttgca

SEQ ID NO: 909481 - DNA, 25 bp, Homo sapien
cgaggcatggcttcatgagggccat

SEQ ID NO: 909482 - DNA, 25 bp, Homo sapien
gccgtcgaggcatggcttcatgagg

SEQ ID NO: 909483 - DNA, 25 bp, Homo sapien
gtcgaggcatggcttcatgagggcc

SEQ ID NO: 909484 - DNA, 25 bp, Homo sapien
ccgtcgaggcatggcttcatgaggg

SEQ ID NO: 909485 - DNA, 25 bp, Homo sapien
taaacatgggtagagaccgtctcag

SEQ ID NO: 909486 - DNA, 25 bp, Homo sapien
aatttcgggctggatcgcaatcagg

SEQ ID NO: 909487 - DNA, 25 bp, Homo sapien
acttcaggtcgtgcagcttcaggcc

SEQ ID NO: 909488 - DNA, 25 bp, Homo sapien
tgaaaaaccgagatgctagaggcct

SEQ ID NO: 909489 - DNA, 25 bp, Homo sapien
gtctccaacgtggccaattcttccc

SEQ ID NO: 909490 - DNA, 25 bp, Homo sapien
tctccaacgtggccaattcttccca

SEQ ID NO: 909491 - DNA, 25 bp, Homo sapien
ggtctccaacgtggccaattcttcc

SEQ ID NO: 909492 - DNA, 25 bp, Homo sapien
ctccaacgtggccaattcttcccac

SEQ ID NO: 909493 - DNA, 25 bp, Homo sapien
cgttgtaggccctgctgtgttccag

SEQ ID NO: 909494 - DNA, 25 bp, Homo sapien
tgcacaaaccttcgtcaaacatacg

SEQ ID NO: 909495 - DNA, 25 bp, Homo sapien
tccagaagggcctgacttgcacaaa

SEQ ID NO: 909496 - DNA, 25 bp, Homo sapien
ccttctcagtttcgttagcatctcc

SEQ ID NO: 909497 - DNA, 25 bp, Homo sapien
gggaccacctcgtgttctgtgctgt

SEQ ID NO: 909498 - DNA, 25 bp, Homo sapien
catgtggctacagagatgtgtcaga

SEQ ID NO: 909499 - DNA, 25 bp, Homo sapien
tcttctacccaaaaagcatgtggct

SEQ ID NO: 909500 - DNA, 25 bp, Homo sapien
caggaaaggccaattcacggtgatg

SEQ ID NO: 909501 - DNA, 25 bp, Homo sapien
ctttgatacgaagttgacaatggca

SEQ ID NO: 909502 - DNA, 25 bp, Homo sapien
aggtggcacacattatccgtggcac

SEQ ID NO: 909503 - DNA, 25 bp, Homo sapien
ggtggcacacattatccgtggcact

SEQ ID NO: 909504 - DNA, 25 bp, Homo sapien
tggcacacattatccgtggcactgc

SEQ ID NO: 909505 - DNA, 25 bp, Homo sapien
cacacattatccgtggcactgccct

SEQ ID NO: 909506 - DNA, 25 bp, Homo sapien
tcccaaatggccaaaaaggctgtgc

SEQ ID NO: 909507 - DNA, 25 bp, Homo sapien
gaaggccctcctccgttgcatttgg

SEQ ID NO: 909508 - DNA, 25 bp, Homo sapien
cagtttccgcatcatgaagggacca

SEQ ID NO: 909509 - DNA, 25 bp, Homo sapien
cacagtctgcaaggcgagtggcaag

SEQ ID NO: 909510 - DNA, 25 bp, Homo sapien
tgaggaagggccatctttgatccac

SEQ ID NO: 909511 - DNA, 25 bp, Homo sapien
ttgaggaagggccatctttgatcca

SEQ ID NO: 909512 - DNA, 25 bp, Homo sapien
tttgaggaagggccatctttgatcc

SEQ ID NO: 909513 - DNA, 25 bp, Homo sapien
tcacggggtaatgcctccggaagaa

SEQ ID NO: 909514 - DNA, 25 bp, Homo sapien
ttcctgtcttgtgggtccaaggcac

SEQ ID NO: 909515 - DNA, 25 bp, Homo sapien
ttgtgggtccaaggcacagaaaatc

SEQ ID NO: 909516 - DNA, 25 bp, Homo sapien
aatcacactgttcacggggtaatgc

SEQ ID NO: 909517 - DNA, 25 bp, Homo sapien
tgttaccagtagacggaagcaccac

SEQ ID NO: 909518 - DNA, 25 bp, Homo sapien
tgagtgagccatgtagccgagccat

SEQ ID NO: 909519 - DNA, 25 bp, Homo sapien
ttctgggaatgactctgcaccggca

SEQ ID NO: 909520 - DNA, 25 bp, Homo sapien
gagtctaccatgtcgccaagctatg

SEQ ID NO: 909521 - DNA, 25 bp, Homo sapien
ggttgatgccaacgtgcctcctcaa

SEQ ID NO: 909522 - DNA, 25 bp, Homo sapien
ggcattcagtaaagatccacatgga

SEQ ID NO: 909523 - DNA, 25 bp, Homo sapien
tgcttctagggacatgggcaccaca

SEQ ID NO: 909524 - DNA, 25 bp, Homo sapien
tcatgctgctgccacggttgatgcc

SEQ ID NO: 909525 - DNA, 25 bp, Homo sapien
gagttcaagtaccacacattgcagg

SEQ ID NO: 909526 - DNA, 25 bp, Homo sapien
cacagagttcaagtaccacacattg

SEQ ID NO: 909527 - DNA, 25 bp, Homo sapien
accttgaagtgcacaactgtggaca

SEQ ID NO: 909528 - DNA, 25 bp, Homo sapien
ccttgaagtgcacaactgtggacac

SEQ ID NO: 909529 - DNA, 25 bp, Homo sapien
ccaagggagacacatgttagttgca

SEQ ID NO: 909530 - DNA, 25 bp, Homo sapien
accaagggagacacatgttagttgc

SEQ ID NO: 909531 - DNA, 25 bp, Homo sapien
caagggagacacatgttagttgcaa

SEQ ID NO: 909532 - DNA, 25 bp, Homo sapien
ggattaaactggagagcattacaag

SEQ ID NO: 909533 - DNA, 25 bp, Homo sapien
catccaggagtctaggactctaagt

SEQ ID NO: 909534 - DNA, 25 bp, Homo sapien
agattggaacaaaggcataatggcc

SEQ ID NO: 909535 - DNA, 25 bp, Homo sapien
tcaaagaacattgcacatccaggag

SEQ ID NO: 909536 - DNA, 25 bp, Homo sapien
cacctaccttgcatgaaaaacttaa

SEQ ID NO: 909537 - DNA, 25 bp, Homo sapien
tacacctgtaaactactctgcagat

SEQ ID NO: 909538 - DNA, 25 bp, Homo sapien
ggtttgaaagtcagcagtccccact

SEQ ID NO: 909539 - DNA, 25 bp, Homo sapien
tacaccttcattgtggagttacacc

SEQ ID NO: 909540 - DNA, 25 bp, Homo sapien
ggactagtgtctaaaatacaccaag

SEQ ID NO: 909541 - DNA, 25 bp, Homo sapien
tgaaactataaaatctagctggcct

SEQ ID NO: 909542 - DNA, 25 bp, Homo sapien
gccaaaggcctttatggacacctca

SEQ ID NO: 909543 - DNA, 25 bp, Homo sapien
tcaaaaggcctatcaggtaaaggac

SEQ ID NO: 909544 - DNA, 25 bp, Homo sapien
tcagctgctgaattggctgccgtct

SEQ ID NO: 909545 - DNA, 25 bp, Homo sapien
gccccctgcttcaacagctcagctg

SEQ ID NO: 909546 - DNA, 25 bp, Homo sapien
ctgccccctgcttcaacagctcagc

SEQ ID NO: 909547 - DNA, 25 bp, Homo sapien
agctgctgaattggctgccgtctgg

SEQ ID NO: 909548 - DNA, 25 bp, Homo sapien
aaggccaagggcgtgatggaatgct

SEQ ID NO: 909549 - DNA, 25 bp, Homo sapien
ggccaagggcgtgatggaatgctgg

SEQ ID NO: 909550 - DNA, 25 bp, Homo sapien
ctctctctgggataagcagcttgca

SEQ ID NO: 909551 - DNA, 25 bp, Homo sapien
gcagcttgcacggcaaggccaaggg

SEQ ID NO: 909552 - DNA, 25 bp, Homo sapien
aactgctgtagatgttgtgtgctca

SEQ ID NO: 909553 - DNA, 25 bp, Homo sapien
ctgcaaagtggacagacagcaaaca

SEQ ID NO: 909554 - DNA, 25 bp, Homo sapien
cagacagcaaacaagagtcaacaac

SEQ ID NO: 909555 - DNA, 25 bp, Homo sapien
gttgtgtgctcagccaatttatcag

SEQ ID NO: 909556 - DNA, 25 bp, Homo sapien
gtgccggacgagttcattggccaaa

SEQ ID NO: 909557 - DNA, 25 bp, Homo sapien
gggtacactcgatcaaaaagtgccg

SEQ ID NO: 909558 - DNA, 25 bp, Homo sapien
gttcattcgagcaccctttcaaccg

SEQ ID NO: 909559 - DNA, 25 bp, Homo sapien
gaaatatggttcattcgagcaccct

SEQ ID NO: 909560 - DNA, 25 bp, Homo sapien
tctgtggatgagctgaacagatcaa

SEQ ID NO: 909561 - DNA, 25 bp, Homo sapien
gatcaatagggagcagtaaccttac

SEQ ID NO: 909562 - DNA, 25 bp, Homo sapien
gaacagatcaatagggagcagtaac

SEQ ID NO: 909563 - DNA, 25 bp, Homo sapien
tgtggatgagctgaacagatcaata

SEQ ID NO: 909564 - DNA, 25 bp, Homo sapien
cgaacaatgaatgagcccggctcct

SEQ ID NO: 909565 - DNA, 25 bp, Homo sapien
cggaaggaatggctgtctcgaacaa

SEQ ID NO: 909566 - DNA, 25 bp, Homo sapien
atggccaggccataggcccctcgga

SEQ ID NO: 909567 - DNA, 25 bp, Homo sapien
tccttgtccttcaacatggcgatgg

SEQ ID NO: 909568 - DNA, 25 bp, Homo sapien
gacctggccgggatccctctgcttg

SEQ ID NO: 909569 - DNA, 25 bp, Homo sapien
gacaaaggtctatgcccactcataa

SEQ ID NO: 909570 - DNA, 25 bp, Homo sapien
cactcataaccttgggtaggtcctc

SEQ ID NO: 909571 - DNA, 25 bp, Homo sapien
acaagaaggtctgccgggtggacaa

SEQ ID NO: 909572 - DNA, 25 bp, Homo sapien
tctctaagtaggacaaaagatcact

SEQ ID NO: 909573 - DNA, 25 bp, Homo sapien
tcacgggactgagactttgggcacc

SEQ ID NO: 909574 - DNA, 25 bp, Homo sapien
gtttcaactgtgatatacctcagag

SEQ ID NO: 909575 - DNA, 25 bp, Homo sapien
taaagtgtagaagcctcacgggact

SEQ ID NO: 909576 - DNA, 25 bp, Homo sapien
cctgcacaggcaatgggagtaagag

SEQ ID NO: 909577 - DNA, 25 bp, Homo sapien
gttggaaaaacgagcgtccacacac

SEQ ID NO: 909578 - DNA, 25 bp, Homo sapien
taagaggagaattttagacccgctg

SEQ ID NO: 909579 - DNA, 25 bp, Homo sapien
caaacagaagtaggctgaggagcct

SEQ ID NO: 909580 - DNA, 25 bp, Homo sapien
cctggcactggcatcgcattcctca

SEQ ID NO: 909581 - DNA, 25 bp, Homo sapien
caccctggcactggcatcgcattcc

SEQ ID NO: 909582 - DNA, 25 bp, Homo sapien
agctgcgtgctccaccctggcactg

SEQ ID NO: 909583 - DNA, 25 bp, Homo sapien
gctgcgtgctccaccctggcactgg

SEQ ID NO: 909584 - DNA, 25 bp, Homo sapien
caactgggacagtagtacttaattt

SEQ ID NO: 909585 - DNA, 25 bp, Homo sapien
tcgcaccttctcacactgtcgcgcc

SEQ ID NO: 909586 - DNA, 25 bp, Homo sapien
gcaacaccccagaagtacaactggg

SEQ ID NO: 909587 - DNA, 25 bp, Homo sapien
ggcaagtgagtctcctcgcaccttc

SEQ ID NO: 909588 - DNA, 25 bp, Homo sapien
gaaatatccgccttgtaccagaact

SEQ ID NO: 909589 - DNA, 25 bp, Homo sapien
tttcacgatcacaagtttatcacct

SEQ ID NO: 909590 - DNA, 25 bp, Homo sapien
tctcttgaaatatccgccttgtacc

SEQ ID NO: 909591 - DNA, 25 bp, Homo sapien
agaacttggaagtgtcttgaacaaa

SEQ ID NO: 909592 - DNA, 25 bp, Homo sapien
tggtaccggagaactcagcgctgag

SEQ ID NO: 909593 - DNA, 25 bp, Homo sapien
gacaggaagccattgtcggcagccc

SEQ ID NO: 909594 - DNA, 25 bp, Homo sapien
gacgctccatgagaattggccagca

SEQ ID NO: 909595 - DNA, 25 bp, Homo sapien
caggcgccaccgtgagaaagttgtg

SEQ ID NO: 909596 - DNA, 25 bp, Homo sapien
aagacaagccgaccaagacagcatg

SEQ ID NO: 909597 - DNA, 25 bp, Homo sapien
ctgttcaaaagacaagccgaccaag

SEQ ID NO: 909598 - DNA, 25 bp, Homo sapien
gccgaccaagacagcatgtaaggta

SEQ ID NO: 909599 - DNA, 25 bp, Homo sapien
gacagcatgtaaggtacaaagagac

SEQ ID NO: 909600 - DNA, 25 bp, Homo sapien
ctgcccagggccgttgctggaaatg

SEQ ID NO: 909601 - DNA, 25 bp, Homo sapien
tgacatccccacagcgtgagtgagc

SEQ ID NO: 909602 - DNA, 25 bp, Homo sapien
ctgctgaaaggagggcgtcgaggac

SEQ ID NO: 909603 - DNA, 25 bp, Homo sapien
tcagcccggagcatcgtggatttgg

SEQ ID NO: 909604 - DNA, 25 bp, Homo sapien
cactatgagggtgcaaacccatgct

SEQ ID NO: 909605 - DNA, 25 bp, Homo sapien
ggtgggccagaacgcaaacctgctt

SEQ ID NO: 909606 - DNA, 25 bp, Homo sapien
gtaactgggccatcaacatcgagca

SEQ ID NO: 909607 - DNA, 25 bp, Homo sapien
gtgcagaagccaccctcgcaggtgg

SEQ ID NO: 909608 - DNA, 25 bp, Homo sapien
tatggatattcaatggtaccactac

SEQ ID NO: 909609 - DNA, 25 bp, Homo sapien
tagtatctgcctaatccagtcacaa

SEQ ID NO: 909610 - DNA, 25 bp, Homo sapien
cagccaaatgttaaatccatctagg

SEQ ID NO: 909611 - DNA, 25 bp, Homo sapien
gagtctgttgcctgtgcatatattc

SEQ ID NO: 909612 - DNA, 25 bp, Homo sapien
tcagttgaatacgtatggcggatcc

SEQ ID NO: 909613 - DNA, 25 bp, Homo sapien
cacatttgttaggaaggcctggagt

SEQ ID NO: 909614 - DNA, 25 bp, Homo sapien
tgcaagtcattgtggtcccctggag

SEQ ID NO: 909615 - DNA, 25 bp, Homo sapien
tgtctaggcggtaaactgggacaac

SEQ ID NO: 909616 - DNA, 25 bp, Homo sapien
tcagtgcagtcacttccagtgactg

SEQ ID NO: 909617 - DNA, 25 bp, Homo sapien
gtgcagtcacttccagtgactggga

SEQ ID NO: 909618 - DNA, 25 bp, Homo sapien
tcacatcttcaggtcagtgcagtca

SEQ ID NO: 909619 - DNA, 25 bp, Homo sapien
caggtcagtgcagtcacttccagtg

SEQ ID NO: 909620 - DNA, 25 bp, Homo sapien
gatgctgtttagaccgtgtgcacgc

SEQ ID NO: 909621 - DNA, 25 bp, Homo sapien
cggtgcaggccaacttctactaagg

SEQ ID NO: 909622 - DNA, 25 bp, Homo sapien
gatgggatttgcaccgtcttggaca

SEQ ID NO: 909623 - DNA, 25 bp, Homo sapien
tgtttccacaacgtgggaggctcca

SEQ ID NO: 909624 - DNA, 25 bp, Homo sapien
tccaacggccactatttacatgaca

SEQ ID NO: 909625 - DNA, 25 bp, Homo sapien
cagagcaggaggcataataccgtta

SEQ ID NO: 909626 - DNA, 25 bp, Homo sapien
tgggaagctggataccactcattct

SEQ ID NO: 909627 - DNA, 25 bp, Homo sapien
ctggtattccgcctaagcagctggt

SEQ ID NO: 909628 - DNA, 25 bp, Homo sapien
gatgacactgaagtggagctactga

SEQ ID NO: 909629 - DNA, 25 bp, Homo sapien
tgaggctgcctagagaccacatcaa

SEQ ID NO: 909630 - DNA, 25 bp, Homo sapien
tgaggccagttcctccagggactca

SEQ ID NO: 909631 - DNA, 25 bp, Homo sapien
catagtgagtgtttcccaagcagtt

SEQ ID NO: 909632 - DNA, 25 bp, Homo sapien
gcagaataattccagtctcataact

SEQ ID NO: 909633 - DNA, 25 bp, Homo sapien
aggcagaattcccagagaatctggc

SEQ ID NO: 909634 - DNA, 25 bp, Homo sapien
agaattcccagagaatctggctttc

SEQ ID NO: 909635 - DNA, 25 bp, Homo sapien
ttccaagtctttagtccgcagaata

SEQ ID NO: 909636 - DNA, 25 bp, Homo sapien
tggagcaggactcaaacatgattct

SEQ ID NO: 909637 - DNA, 25 bp, Homo sapien
gctggagcaggactcaaacatgatt

SEQ ID NO: 909638 - DNA, 25 bp, Homo sapien
ctggagcaggactcaaacatgattc

SEQ ID NO: 909639 - DNA, 25 bp, Homo sapien
ggagcaggactcaaacatgattctt

SEQ ID NO: 909640 - DNA, 25 bp, Homo sapien
tcattagcacgaacctcattccttt

SEQ ID NO: 909641 - DNA, 25 bp, Homo sapien
gctcattagcacgaacctcattcct

SEQ ID NO: 909642 - DNA, 25 bp, Homo sapien
ctctagctcattagcacgaacctca

SEQ ID NO: 909643 - DNA, 25 bp, Homo sapien
tagctcattagcacgaacctcattc

SEQ ID NO: 909644 - DNA, 25 bp, Homo sapien
tgatgcaagggtctcattctcaacc

SEQ ID NO: 909645 - DNA, 25 bp, Homo sapien
tcattctcaacccactggttttcgg

SEQ ID NO: 909646 - DNA, 25 bp, Homo sapien
gttcttcatgggcagcgtctccacg

SEQ ID NO: 909647 - DNA, 25 bp, Homo sapien
ggtggtaccattctccttcaggctg

SEQ ID NO: 909648 - DNA, 25 bp, Homo sapien
agaaaactatgtccgtcctaaccag

SEQ ID NO: 909649 - DNA, 25 bp, Homo sapien
gagcaatccatcaatcctggaaggg

SEQ ID NO: 909650 - DNA, 25 bp, Homo sapien
gaaaatcacccctctctcgaaatag

SEQ ID NO: 909651 - DNA, 25 bp, Homo sapien
gagcaacttagagccctgtcactga

SEQ ID NO: 909652 - DNA, 25 bp, Homo sapien
tctcattttagaacccagcgcctga

SEQ ID NO: 909653 - DNA, 25 bp, Homo sapien
tgaatctcagcaaagacaaagcatg

SEQ ID NO: 909654 - DNA, 25 bp, Homo sapien
gaaaagctgcacatctgtaaaccag

SEQ ID NO: 909655 - DNA, 25 bp, Homo sapien
tgcactgtgctaggaagcagtcctg

SEQ ID NO: 909656 - DNA, 25 bp, Homo sapien
gagtgtgatgaagactctgctctgg

SEQ ID NO: 909657 - DNA, 25 bp, Homo sapien
gatgccaggagtgtgatgaagactc

SEQ ID NO: 909658 - DNA, 25 bp, Homo sapien
caggagtgtgatgaagactctgctc

SEQ ID NO: 909659 - DNA, 25 bp, Homo sapien
tgccaggagtgtgatgaagactctg

SEQ ID NO: 909660 - DNA, 25 bp, Homo sapien
gagacttgagattaaacgactccca

SEQ ID NO: 909661 - DNA, 25 bp, Homo sapien
gattaaggatcagctaagaaacaga

SEQ ID NO: 909662 - DNA, 25 bp, Homo sapien
gattaaacgactcccattgttacat

SEQ ID NO: 909663 - DNA, 25 bp, Homo sapien
gcctggcgagaaccacgacttttta

SEQ ID NO: 909664 - DNA, 25 bp, Homo sapien
tctggcaagccccagctttgggcat

SEQ ID NO: 909665 - DNA, 25 bp, Homo sapien
gccttatggctaaactaagtgccca

SEQ ID NO: 909666 - DNA, 25 bp, Homo sapien
ggtcaccctattgcgttagcctgga

SEQ ID NO: 909667 - DNA, 25 bp, Homo sapien
acacagagaagcgtgcgggctgcat

SEQ ID NO: 909668 - DNA, 25 bp, Homo sapien
tgtatatccggtaatgggactgctg

SEQ ID NO: 909669 - DNA, 25 bp, Homo sapien
ccctccaacagtgtatacatgttct

SEQ ID NO: 909670 - DNA, 25 bp, Homo sapien
tcttttgggtgtatatccggtaatg

SEQ ID NO: 909671 - DNA, 25 bp, Homo sapien
tttacgtctgcggagtacttcgatg

SEQ ID NO: 909672 - DNA, 25 bp, Homo sapien
tctgtttcatgaacctaagtgtctg

SEQ ID NO: 909673 - DNA, 25 bp, Homo sapien
cagctctactaggttgagttttcca

SEQ ID NO: 909674 - DNA, 25 bp, Homo sapien
tatgcgatcatatgccacctctatg

SEQ ID NO: 909675 - DNA, 25 bp, Homo sapien
cacagaagtcttgtgcatggtttgc

SEQ ID NO: 909676 - DNA, 25 bp, Homo sapien
tgtttggacaatcatgtcagcagca

SEQ ID NO: 909677 - DNA, 25 bp, Homo sapien
ggctttctacgtagatgatcatgtc

SEQ ID NO: 909678 - DNA, 25 bp, Homo sapien
gttgaaaaagagtgctgtcagctgt

SEQ ID NO: 909679 - DNA, 25 bp, Homo sapien
agcagcagactcaagattccctggg

SEQ ID NO: 909680 - DNA, 25 bp, Homo sapien
ttcctattgggtgagttgtgacagt

SEQ ID NO: 909681 - DNA, 25 bp, Homo sapien
cagggtattcaagtagtctatttcc

SEQ ID NO: 909682 - DNA, 25 bp, Homo sapien
tctggaaggtattgcgtagaatcag

SEQ ID NO: 909683 - DNA, 25 bp, Homo sapien
tctgaatctgcgagggatattggtc

SEQ ID NO: 909684 - DNA, 25 bp, Homo sapien
tactcaggacaagttgaagccactg

SEQ ID NO: 909685 - DNA, 25 bp, Homo sapien
gctaatgtgaagttgaccctccctg

SEQ ID NO: 909686 - DNA, 25 bp, Homo sapien
gtcatgatcacaacactcctgggta

SEQ ID NO: 909687 - DNA, 25 bp, Homo sapien
aatacagtgatcttagaggcctccc

SEQ ID NO: 909688 - DNA, 25 bp, Homo sapien
acatttctgcatacgagttcttctc

SEQ ID NO: 909689 - DNA, 25 bp, Homo sapien
ttctctgtaaaaatggcgaccccgc

SEQ ID NO: 909690 - DNA, 25 bp, Homo sapien
caaggcttctgagatacgacacaaa

SEQ ID NO: 909691 - DNA, 25 bp, Homo sapien
tgtgacccgcgggtagatttcttac

SEQ ID NO: 909692 - DNA, 25 bp, Homo sapien
tgaacggaggatggcgcagcgctgt

SEQ ID NO: 909693 - DNA, 25 bp, Homo sapien
ggctcaggtgggctgaacggaggat

SEQ ID NO: 909694 - DNA, 25 bp, Homo sapien
ggaggatggcgcagcgctgttttca

SEQ ID NO: 909695 - DNA, 25 bp, Homo sapien
ctcaggtgggctgaacggaggatgg

SEQ ID NO: 909696 - DNA, 25 bp, Homo sapien
cacatggactccttgctacttaaaa

SEQ ID NO: 909697 - DNA, 25 bp, Homo sapien
aattctgccatcgataatatcgagg

SEQ ID NO: 909698 - DNA, 25 bp, Homo sapien
gactccttgctacttaaaattctgc

SEQ ID NO: 909699 - DNA, 25 bp, Homo sapien
ccatcgataatatcgaggtcctggg

SEQ ID NO: 909700 - DNA, 25 bp, Homo sapien
cggcaggtttggggcatagtccaca

SEQ ID NO: 909701 - DNA, 25 bp, Homo sapien
gctgccccccagcatcgttgtcgta

SEQ ID NO: 909702 - DNA, 25 bp, Homo sapien
ctttgacgtccgctggtgaggggaa

SEQ ID NO: 909703 - DNA, 25 bp, Homo sapien
tggtgaggggaatggcggcaggttt

SEQ ID NO: 909704 - DNA, 25 bp, Homo sapien
gcttcctgagtctcccgcccagggg

SEQ ID NO: 909705 - DNA, 25 bp, Homo sapien
cagcttcctgagtctcccgcccagg

SEQ ID NO: 909706 - DNA, 25 bp, Homo sapien
agcttcctgagtctcccgcccaggg

SEQ ID NO: 909707 - DNA, 25 bp, Homo sapien
ttcctgagtctcccgcccaggggct

SEQ ID NO: 909708 - DNA, 25 bp, Homo sapien
agcaggaccgctgtaaggtttcttg

SEQ ID NO: 909709 - DNA, 25 bp, Homo sapien
caggaccgctgtaaggtttcttgtt

SEQ ID NO: 909710 - DNA, 25 bp, Homo sapien
accgctgtaaggtttcttgtttctg

SEQ ID NO: 909711 - DNA, 25 bp, Homo sapien
aggagcagcaggaccgctgtaaggt

SEQ ID NO: 909712 - DNA, 25 bp, Homo sapien
gaggtcacaaagttgggctggcccc

SEQ ID NO: 909713 - DNA, 25 bp, Homo sapien
tcagctcagacgtggagtttgttcc

SEQ ID NO: 909714 - DNA, 25 bp, Homo sapien
agtcaaggtggcaggcgatagccct

SEQ ID NO: 909715 - DNA, 25 bp, Homo sapien
tccaagaatgagtttaaagagggct

SEQ ID NO: 909716 - DNA, 25 bp, Homo sapien
cagtacttctttgctaagtcggtga

SEQ ID NO: 909717 - DNA, 25 bp, Homo sapien
gtacttctttgctaagtcggtgagc

SEQ ID NO: 909718 - DNA, 25 bp, Homo sapien
tcagtacttctttgctaagtcggtg

SEQ ID NO: 909719 - DNA, 25 bp, Homo sapien
tacttctttgctaagtcggtgagct

SEQ ID NO: 909720 - DNA, 25 bp, Homo sapien
ggtcatgagtactcagtgcagaaat

SEQ ID NO: 909721 - DNA, 25 bp, Homo sapien
gtgcagaaatctcaggccccttgaa

SEQ ID NO: 909722 - DNA, 25 bp, Homo sapien
gatgtgcagcttcacccactccatg

SEQ ID NO: 909723 - DNA, 25 bp, Homo sapien
agtgaacacagaccccggtgatctg

SEQ ID NO: 909724 - DNA, 25 bp, Homo sapien
ccagtccttgactgggggcacccag

SEQ ID NO: 909725 - DNA, 25 bp, Homo sapien
cagtccttgactgggggcacccagg

SEQ ID NO: 909726 - DNA, 25 bp, Homo sapien
tttattatcccatgcctcagtacgg

SEQ ID NO: 909727 - DNA, 25 bp, Homo sapien
catgggctgcgctgaacataagtgt

SEQ ID NO: 909728 - DNA, 25 bp, Homo sapien
aatcactgtggcgtttattatccca

SEQ ID NO: 909729 - DNA, 25 bp, Homo sapien
ctcagtacggatacaaaagctgtcc

SEQ ID NO: 909730 - DNA, 25 bp, Homo sapien
gggctggaatccacacctcaaagtc

SEQ ID NO: 909731 - DNA, 25 bp, Homo sapien
gcctgaaccagtgaaggtcccttga

SEQ ID NO: 909732 - DNA, 25 bp, Homo sapien
tctcagaagagtaaagatggcgcta

SEQ ID NO: 909733 - DNA, 25 bp, Homo sapien
ccttgatgtagctatcacgggcagt

SEQ ID NO: 909734 - DNA, 25 bp, Homo sapien
actgacttttgctctactatgcagg

SEQ ID NO: 909735 - DNA, 25 bp, Homo sapien
tcagggcactgacttttgctctact

SEQ ID NO: 909736 - DNA, 25 bp, Homo sapien
cttttgctctactatgcaggtccca

SEQ ID NO: 909737 - DNA, 25 bp, Homo sapien
tctactatgcaggtcccatgtgaac

SEQ ID NO: 909738 - DNA, 25 bp, Homo sapien
cgactgtaaggcagagactggtgcc

SEQ ID NO: 909739 - DNA, 25 bp, Homo sapien
tgggcaggccacataatctactgac

SEQ ID NO: 909740 - DNA, 25 bp, Homo sapien
tactgacacctccatcaacacgact

SEQ ID NO: 909741 - DNA, 25 bp, Homo sapien
ttaggacgatgacatgggccagcac

SEQ ID NO: 909742 - DNA, 25 bp, Homo sapien
ctctcctgtgtcaggcagcctgctg

SEQ ID NO: 909743 - DNA, 25 bp, Homo sapien
tgtcaggcagcctgctgcttgcccg

SEQ ID NO: 909744 - DNA, 25 bp, Homo sapien
cttgccgcccggtggccctgctggg

SEQ ID NO: 909745 - DNA, 25 bp, Homo sapien
ggccctctcctgtgtcaggcagcct

SEQ ID NO: 909746 - DNA, 25 bp, Homo sapien
cctgggtttgaacgctttgctggga

SEQ ID NO: 909747 - DNA, 25 bp, Homo sapien
gcctggctaccgagggcgttcatgt

SEQ ID NO: 909748 - DNA, 25 bp, Homo sapien
tgggctcgaaggtgggatccagctc

SEQ ID NO: 909749 - DNA, 25 bp, Homo sapien
tgctcgatggactggtcgatgtcca

SEQ ID NO: 909750 - DNA, 25 bp, Homo sapien
ctgcctacacccctctggacagcca

SEQ ID NO: 909751 - DNA, 25 bp, Homo sapien
gggcctggacgaggccaggattgtc

SEQ ID NO: 909752 - DNA, 25 bp, Homo sapien
ccctactgctggtccctcgggtggg

SEQ ID NO: 909753 - DNA, 25 bp, Homo sapien
tggcccactgcctacacccctctgg

SEQ ID NO: 909754 - DNA, 25 bp, Homo sapien
gtcatttccttgagggagcttccag

SEQ ID NO: 909755 - DNA, 25 bp, Homo sapien
ggtcccactgtacttgcttcgagca

SEQ ID NO: 909756 - DNA, 25 bp, Homo sapien
tgcggatcttcaccaacgttgctgc

SEQ ID NO: 909757 - DNA, 25 bp, Homo sapien
atctgggcggacactgagggctttc

SEQ ID NO: 909758 - DNA, 25 bp, Homo sapien
ttcttcctcaccttcgcgtaaaggc

SEQ ID NO: 909759 - DNA, 25 bp, Homo sapien
ggatgccaggatccgaggagctttt

SEQ ID NO: 909760 - DNA, 25 bp, Homo sapien
ccttcgcgtaaaggctgccatcgac

SEQ ID NO: 909761 - DNA, 25 bp, Homo sapien
ctcaccttcgcgtaaaggctgccat

SEQ ID NO: 909762 - DNA, 25 bp, Homo sapien
agccaggtccagccatccgtgagag

SEQ ID NO: 909763 - DNA, 25 bp, Homo sapien
caggtccagccatccgtgagaggcg

SEQ ID NO: 909764 - DNA, 25 bp, Homo sapien
cagccatccgtgagaggcgggagca

SEQ ID NO: 909765 - DNA, 25 bp, Homo sapien
agccatccgtgagaggcgggagcag

SEQ ID NO: 909766 - DNA, 25 bp, Homo sapien
tgagcccagttttccttgacacagg

SEQ ID NO: 909767 - DNA, 25 bp, Homo sapien
catacctgggctataagtgcacgca

SEQ ID NO: 909768 - DNA, 25 bp, Homo sapien
caagttggtaaatctcagcaggcac

SEQ ID NO: 909769 - DNA, 25 bp, Homo sapien
cattcaacgtaggtgggcttcagac

SEQ ID NO: 909770 - DNA, 25 bp, Homo sapien
ttgaaagctgttgaccccaagagtg

SEQ ID NO: 909771 - DNA, 25 bp, Homo sapien
gttactcctaaggtcaacgccagca

SEQ ID NO: 909772 - DNA, 25 bp, Homo sapien
aggtcaacgccagcaccaagaacgt

SEQ ID NO: 909773 - DNA, 25 bp, Homo sapien
caagagtgttgttactcctaaggtc

SEQ ID NO: 909774 - DNA, 25 bp, Homo sapien
acccaattatggtacacggtgcacc

SEQ ID NO: 909775 - DNA, 25 bp, Homo sapien
tcctaattcctggtacccaattatg

SEQ ID NO: 909776 - DNA, 25 bp, Homo sapien
atctccttggattgtacaggcaaag

SEQ ID NO: 909777 - DNA, 25 bp, Homo sapien
cttggattgtacaggcaaagtggtt

SEQ ID NO: 909778 - DNA, 25 bp, Homo sapien
tgtgtgccgcgagatattcttccct

SEQ ID NO: 909779 - DNA, 25 bp, Homo sapien
ggctctctcgaggattaaaacacca

SEQ ID NO: 909780 - DNA, 25 bp, Homo sapien
agggaacactgacacgactgccgtc

SEQ ID NO: 909781 - DNA, 25 bp, Homo sapien
taaaacaccatagtgaggcttccgg

SEQ ID NO: 909782 - DNA, 25 bp, Homo sapien
ggcctccatgccaaagaggggctga

SEQ ID NO: 909783 - DNA, 25 bp, Homo sapien
accggcctccatgccaaagaggggc

SEQ ID NO: 909784 - DNA, 25 bp, Homo sapien
caccggcctccatgccaaagagggg

SEQ ID NO: 909785 - DNA, 25 bp, Homo sapien
ccggcctccatgccaaagaggggct

SEQ ID NO: 909786 - DNA, 25 bp, Homo sapien
ccctgggggtgctcatgggcttcag

SEQ ID NO: 909787 - DNA, 25 bp, Homo sapien
gctcatgggcttcagatatcatcga

SEQ ID NO: 909788 - DNA, 25 bp, Homo sapien
gggtgctcatgggcttcagatatca

SEQ ID NO: 909789 - DNA, 25 bp, Homo sapien
tgctcatgggcttcagatatcatcg

SEQ ID NO: 909790 - DNA, 25 bp, Homo sapien
gaaggtgtgattctggacctctgag

SEQ ID NO: 909791 - DNA, 25 bp, Homo sapien
aactcacaactgtgtcacacgaagg

SEQ ID NO: 909792 - DNA, 25 bp, Homo sapien
taactgcacacaagatgaacacacg

SEQ ID NO: 909793 - DNA, 25 bp, Homo sapien
gccttattctcacgaagaccctcaa

SEQ ID NO: 909794 - DNA, 25 bp, Homo sapien
tgttgtagtccacaatcacaccgtg

SEQ ID NO: 909795 - DNA, 25 bp, Homo sapien
cgtggtcgttgtacaagtgttcgga

SEQ ID NO: 909796 - DNA, 25 bp, Homo sapien
gtacgagtcccagcgtatcagtggg

SEQ ID NO: 909797 - DNA, 25 bp, Homo sapien
tgcactgaggttctcgtacgagtcc

SEQ ID NO: 909798 - DNA, 25 bp, Homo sapien
gagaagactaattcaaccttcccat

SEQ ID NO: 909799 - DNA, 25 bp, Homo sapien
ttcccatagtcaggaaaacggtcat

SEQ ID NO: 909800 - DNA, 25 bp, Homo sapien
tgaatcttctcaggcgtggcagaga

SEQ ID NO: 909801 - DNA, 25 bp, Homo sapien
ctcaggcgtggcagagaagactaat

SEQ ID NO: 909802 - DNA, 25 bp, Homo sapien
ctgcacagccccagtgtgaaactgc

SEQ ID NO: 909803 - DNA, 25 bp, Homo sapien
aaactgcaggcggaaaatgacgtca

SEQ ID NO: 909804 - DNA, 25 bp, Homo sapien
aaaatgacgtcacgggtggccgagc

SEQ ID NO: 909805 - DNA, 25 bp, Homo sapien
tggccgagcggtatttcttgtggta

SEQ ID NO: 909806 - DNA, 25 bp, Homo sapien
ttggtactcaaaaacatatagggtg

SEQ ID NO: 909807 - DNA, 25 bp, Homo sapien
caatgggaaggcctgtaagcactct

SEQ ID NO: 909808 - DNA, 25 bp, Homo sapien
tgaggcaattcagaaaccatcgcca

SEQ ID NO: 909809 - DNA, 25 bp, Homo sapien
tgttgacatcacaaatcgctgggag

SEQ ID NO: 909810 - DNA, 25 bp, Homo sapien
agatgttcgcaatattgtaattcat

SEQ ID NO: 909811 - DNA, 25 bp, Homo sapien
tcagatgttcgcaatattgtaattc

SEQ ID NO: 909812 - DNA, 25 bp, Homo sapien
cagatgttcgcaatattgtaattca

SEQ ID NO: 909813 - DNA, 25 bp, Homo sapien
gagcgaggttctagagccagcaacc

SEQ ID NO: 909814 - DNA, 25 bp, Homo sapien
tcactggagcgaggttctagagcca

SEQ ID NO: 909815 - DNA, 25 bp, Homo sapien
caagtggccgtggatttgtccaagc

SEQ ID NO: 909816 - DNA, 25 bp, Homo sapien
gccagcaaccatgaacacaaaattc

SEQ ID NO: 909817 - DNA, 25 bp, Homo sapien
tagccggtgctcaatacagactcag

SEQ ID NO: 909818 - DNA, 25 bp, Homo sapien
ttcgtccaacgatcccaggaagtgt

SEQ ID NO: 909819 - DNA, 25 bp, Homo sapien
ttaaagctggaacactagacccagt

SEQ ID NO: 909820 - DNA, 25 bp, Homo sapien
tagacccagttccagagtgggtgga

SEQ ID NO: 909821 - DNA, 25 bp, Homo sapien
gaacaccagagcggatgtttctctc

SEQ ID NO: 909822 - DNA, 25 bp, Homo sapien
accagagcggatgtttctctcccct

SEQ ID NO: 909823 - DNA, 25 bp, Homo sapien
acaccagagcggatgtttctctccc

SEQ ID NO: 909824 - DNA, 25 bp, Homo sapien
aggaacaccagagcggatgtttctc

SEQ ID NO: 909825 - DNA, 25 bp, Homo sapien
cagccacagggatgctgcaccatcg

SEQ ID NO: 909826 - DNA, 25 bp, Homo sapien
gatgctgcaccatcgctgcagcaca

SEQ ID NO: 909827 - DNA, 25 bp, Homo sapien
ccacagggatgctgcaccatcgctg

SEQ ID NO: 909828 - DNA, 25 bp, Homo sapien
acagggatgctgcaccatcgctgca

SEQ ID NO: 909829 - DNA, 25 bp, Homo sapien
agtagaacagagagctgaggaaacg

SEQ ID NO: 909830 - DNA, 25 bp, Homo sapien
ggacagtagaacagagagctgagga

SEQ ID NO: 909831 - DNA, 25 bp, Homo sapien
cttaggacagtagaacagagagctg

SEQ ID NO: 909832 - DNA, 25 bp, Homo sapien
cagtagaacagagagctgaggaaac

SEQ ID NO: 909833 - DNA, 25 bp, Homo sapien
ttataagaatctcatggcgccgctg

SEQ ID NO: 909834 - DNA, 25 bp, Homo sapien
tctgggaggcctgtgatcatgtgaa

SEQ ID NO: 909835 - DNA, 25 bp, Homo sapien
tgtgcaacctagatcgctcgcatac

SEQ ID NO: 909836 - DNA, 25 bp, Homo sapien
tgcaaattatagtcagaacacaggg

SEQ ID NO: 909837 - DNA, 25 bp, Homo sapien
ggccggctcgatgacgatgcagatc

SEQ ID NO: 909838 - DNA, 25 bp, Homo sapien
ccttcagaagctgggccggctcgat

SEQ ID NO: 909839 - DNA, 25 bp, Homo sapien
cccttcagaagctgggccggctcga

SEQ ID NO: 909840 - DNA, 25 bp, Homo sapien
gctcgatgacgatgcagatcctgct

SEQ ID NO: 909841 - DNA, 25 bp, Homo sapien
ttatgcaacttcatgattttgtggg

SEQ ID NO: 909842 - DNA, 25 bp, Homo sapien
gattttgtgggaagaatacatgtag

SEQ ID NO: 909843 - DNA, 25 bp, Homo sapien
tgtgggaagaatacatgtagagaaa

SEQ ID NO: 909844 - DNA, 25 bp, Homo sapien
gaaggtagatcattatgcaacttca

SEQ ID NO: 909845 - DNA, 25 bp, Homo sapien
tagatcccggaggtgtacacaggct

SEQ ID NO: 909846 - DNA, 25 bp, Homo sapien
ttcaaaaccaactagcagcttggca

SEQ ID NO: 909847 - DNA, 25 bp, Homo sapien
ccaactagcagcttggcaaggtcac

SEQ ID NO: 909848 - DNA, 25 bp, Homo sapien
gccaagctgcttcaaaaccaactag

SEQ ID NO: 909849 - DNA, 25 bp, Homo sapien
gcagcttggcaaggtcactctggcc

SEQ ID NO: 909850 - DNA, 25 bp, Homo sapien
gatccccagtcgtgtgctgtgctca

SEQ ID NO: 909851 - DNA, 25 bp, Homo sapien
cgtgatccccagtcgtgtgctgtgc

SEQ ID NO: 909852 - DNA, 25 bp, Homo sapien
atgtggagacagggccgtgatcccc

SEQ ID NO: 909853 - DNA, 25 bp, Homo sapien
gccgtgatccccagtcgtgtgctgt

SEQ ID NO: 909854 - DNA, 25 bp, Homo sapien
gaggcattcattttcaccgatccgg

SEQ ID NO: 909855 - DNA, 25 bp, Homo sapien
ctccacctgtgtcgaagttgggggt

SEQ ID NO: 909856 - DNA, 25 bp, Homo sapien
ggaacaggggagaggcattcatttt

SEQ ID NO: 909857 - DNA, 25 bp, Homo sapien
atccggacaggagcccactgaggaa

SEQ ID NO: 909858 - DNA, 25 bp, Homo sapien
gctccatggcgtttcagtgtaacaa

SEQ ID NO: 909859 - DNA, 25 bp, Homo sapien
gtaacaaagattgacctcccatcag

SEQ ID NO: 909860 - DNA, 25 bp, Homo sapien
taacacaatggtggtcatgagcacc

SEQ ID NO: 909861 - DNA, 25 bp, Homo sapien
catgtgagttttacgggtcagctcc

SEQ ID NO: 909862 - DNA, 25 bp, Homo sapien
aacttgcattgcatgtgggccctgt

SEQ ID NO: 909863 - DNA, 25 bp, Homo sapien
caagcattctgcatgggttactccc

SEQ ID NO: 909864 - DNA, 25 bp, Homo sapien
aagaaaagacgacagctggacttcc

SEQ ID NO: 909865 - DNA, 25 bp, Homo sapien
gagaaacagagccatgccattggaa

SEQ ID NO: 909866 - DNA, 25 bp, Homo sapien
ggttggctctaagtgtcaccatctg

SEQ ID NO: 909867 - DNA, 25 bp, Homo sapien
gacatagccctcagttgcactggag

SEQ ID NO: 909868 - DNA, 25 bp, Homo sapien
ttgaaatatgccatggagctacctg

SEQ ID NO: 909869 - DNA, 25 bp, Homo sapien
gcatacacaaggtcgggtgtgcaac

SEQ ID NO: 909870 - DNA, 25 bp, Homo sapien
aaaacttcttcattgcaaacctgtc

SEQ ID NO: 909871 - DNA, 25 bp, Homo sapien
gggaaggctgcattaaagctgaaac

SEQ ID NO: 909872 - DNA, 25 bp, Homo sapien
tcttcattgcaaacctgtcaagggc

SEQ ID NO: 909873 - DNA, 25 bp, Homo sapien
gaaggctgcattaaagctgaaactt

SEQ ID NO: 909874 - DNA, 25 bp, Homo sapien
tttagcacctcaagacagcgagctg

SEQ ID NO: 909875 - DNA, 25 bp, Homo sapien
catgcaggcccagcttttagcacct

SEQ ID NO: 909876 - DNA, 25 bp, Homo sapien
gtcagccgagcccttggtatccaga

SEQ ID NO: 909877 - DNA, 25 bp, Homo sapien
aaactgggtttctaggcactgacca

SEQ ID NO: 909878 - DNA, 25 bp, Homo sapien
ctggctgagacgttggtgaaatgca

SEQ ID NO: 909879 - DNA, 25 bp, Homo sapien
gcatgtaggatgatatgaccactcc

SEQ ID NO: 909880 - DNA, 25 bp, Homo sapien
tatgaccactcctatgcgtcctttc

SEQ ID NO: 909881 - DNA, 25 bp, Homo sapien
ttggtgaaatgcatgtaggatgata

SEQ ID NO: 909882 - DNA, 25 bp, Homo sapien
tacaacagcagattgcaaaccacag

SEQ ID NO: 909883 - DNA, 25 bp, Homo sapien
cccacaacttgtgagctaagagtta

SEQ ID NO: 909884 - DNA, 25 bp, Homo sapien
tctgtttacctacatccagggctgc

SEQ ID NO: 909885 - DNA, 25 bp, Homo sapien
ggagctacttctgcccattacctac

SEQ ID NO: 909886 - DNA, 25 bp, Homo sapien
catatggtacacatcttatccaggg

SEQ ID NO: 909887 - DNA, 25 bp, Homo sapien
agtgaatgacgaccacatgctggag

SEQ ID NO: 909888 - DNA, 25 bp, Homo sapien
ctggaggttgctgttcagccaggac

SEQ ID NO: 909889 - DNA, 25 bp, Homo sapien
gcgccttgcatatggtacacatctt

SEQ ID NO: 909890 - DNA, 25 bp, Homo sapien
gcttcgtaaggtcatatctcttttc

SEQ ID NO: 909891 - DNA, 25 bp, Homo sapien
ttgggttaagcttcgtaaggtcata

SEQ ID NO: 909892 - DNA, 25 bp, Homo sapien
taagcttcgtaaggtcatatctctt

SEQ ID NO: 909893 - DNA, 25 bp, Homo sapien
gggttaagcttcgtaaggtcatatc

SEQ ID NO: 909894 - DNA, 25 bp, Homo sapien
ttggacttgagcatgcgcgtgacct

SEQ ID NO: 909895 - DNA, 25 bp, Homo sapien
tccgtgatgtaagtgaggtccagcc

SEQ ID NO: 909896 - DNA, 25 bp, Homo sapien
gacacagcgatgatgcgctccgtga

SEQ ID NO: 909897 - DNA, 25 bp, Homo sapien
cgcgtgacctcctgtaggttgtgca

SEQ ID NO: 909898 - DNA, 25 bp, Homo sapien
tcgtgtccgtatgcggcatcctggg

SEQ ID NO: 909899 - DNA, 25 bp, Homo sapien
gcagaagccaaacatcagcaagcag

SEQ ID NO: 909900 - DNA, 25 bp, Homo sapien
tgaggtggccagctatggtcgtgga

SEQ ID NO: 909901 - DNA, 25 bp, Homo sapien
caaggatgaggctggtgaggtggcc

SEQ ID NO: 909902 - DNA, 25 bp, Homo sapien
gtttatcacggcagagagaactgga

SEQ ID NO: 909903 - DNA, 25 bp, Homo sapien
ggtttatcacggcagagagaactgg

SEQ ID NO: 909904 - DNA, 25 bp, Homo sapien
cgcagaggtttatcacggcagagag

SEQ ID NO: 909905 - DNA, 25 bp, Homo sapien
agaggtttatcacggcagagagaac

SEQ ID NO: 909906 - DNA, 25 bp, Homo sapien
gcctagcgccaattccaaaaccaca

SEQ ID NO: 909907 - DNA, 25 bp, Homo sapien
agcctagcgccaattccaaaaccac

SEQ ID NO: 909908 - DNA, 25 bp, Homo sapien
caagttaagggtccaccgcttggca

SEQ ID NO: 909909 - DNA, 25 bp, Homo sapien
cctagtgtgtcacagcagtgggcga

SEQ ID NO: 909910 - DNA, 25 bp, Homo sapien
ggagttagcaatccacgcatggcac

SEQ ID NO: 909911 - DNA, 25 bp, Homo sapien
cttttgggagaaagtagcctagcct

SEQ ID NO: 909912 - DNA, 25 bp, Homo sapien
cacatccacctaaagaaggcagaga

SEQ ID NO: 909913 - DNA, 25 bp, Homo sapien
cactgccaaagcacatttccagagc

SEQ ID NO: 909914 - DNA, 25 bp, Homo sapien
ggccactggagattccccaaggcca

SEQ ID NO: 909915 - DNA, 25 bp, Homo sapien
gacctgagcttcaaagagtctttct

SEQ ID NO: 909916 - DNA, 25 bp, Homo sapien
gcccagggaagtcactgctcgacgt

SEQ ID NO: 909917 - DNA, 25 bp, Homo sapien
ttgccgatacatccagttaaactgt

SEQ ID NO: 909918 - DNA, 25 bp, Homo sapien
tgtacagaatctctactgcccaggg

SEQ ID NO: 909919 - DNA, 25 bp, Homo sapien
gacgttcagcactgtgcgcctggca

SEQ ID NO: 909920 - DNA, 25 bp, Homo sapien
aatagcccaccaggtgggagagcct

SEQ ID NO: 909921 - DNA, 25 bp, Homo sapien
cagctctgggcataaaggaggcagc

SEQ ID NO: 909922 - DNA, 25 bp, Homo sapien
gaaacagctcctcctacgtttcgct

SEQ ID NO: 909923 - DNA, 25 bp, Homo sapien
gtgttaatgtctcggcagctctggg

SEQ ID NO: 909924 - DNA, 25 bp, Homo sapien
caatcccgcccagttcgaatgacag

SEQ ID NO: 909925 - DNA, 25 bp, Homo sapien
gggtgccacaaccacaggcatcagt

SEQ ID NO: 909926 - DNA, 25 bp, Homo sapien
catctcaccgtctcgtctctgggaa

SEQ ID NO: 909927 - DNA, 25 bp, Homo sapien
tcgtctttctcagcaggtcagtgaa

SEQ ID NO: 909928 - DNA, 25 bp, Homo sapien
cctgcaaggctaggtgtcagtgtca

SEQ ID NO: 909929 - DNA, 25 bp, Homo sapien
gactgtggccctaaacttgctccct

SEQ ID NO: 909930 - DNA, 25 bp, Homo sapien
cacgtgcacagggatatagggagaa

SEQ ID NO: 909931 - DNA, 25 bp, Homo sapien
ccatcaagagaaaggcacgtgcaca

SEQ ID NO: 909932 - DNA, 25 bp, Homo sapien
cagggatggcagcacgtgacctgca

SEQ ID NO: 909933 - DNA, 25 bp, Homo sapien
catccatttggtcagcattctttct

SEQ ID NO: 909934 - DNA, 25 bp, Homo sapien
ctgcaagacttcctgacagtcacat

SEQ ID NO: 909935 - DNA, 25 bp, Homo sapien
aatagcttcatgagactccatcacg

SEQ ID NO: 909936 - DNA, 25 bp, Homo sapien
tgcaaccggcatctttagagccagc

SEQ ID NO: 909937 - DNA, 25 bp, Homo sapien
gagcgagatctcttagcaaccacac

SEQ ID NO: 909938 - DNA, 25 bp, Homo sapien
tctaagcagccaggatgggcccttt

SEQ ID NO: 909939 - DNA, 25 bp, Homo sapien
ctctgatgtccagggctcaccaaca

SEQ ID NO: 909940 - DNA, 25 bp, Homo sapien
cggacttgcacaccgcagggaatca

SEQ ID NO: 909941 - DNA, 25 bp, Homo sapien
gttccagtcggacttgcacaccgca

SEQ ID NO: 909942 - DNA, 25 bp, Homo sapien
acttgcacaccgcagggaatcacca

SEQ ID NO: 909943 - DNA, 25 bp, Homo sapien
cagtcggacttgcacaccgcaggga

SEQ ID NO: 909944 - DNA, 25 bp, Homo sapien
ctggttattccattccgcacaagag

SEQ ID NO: 909945 - DNA, 25 bp, Homo sapien
gaggagactttgactccaccatagt

SEQ ID NO: 909946 - DNA, 25 bp, Homo sapien
tattccattccgcacaagagacggg

SEQ ID NO: 909947 - DNA, 25 bp, Homo sapien
gggagaggagactttgactccacca

SEQ ID NO: 909948 - DNA, 25 bp, Homo sapien
catggtgagaattaagagatggcgc

SEQ ID NO: 909949 - DNA, 25 bp, Homo sapien
caatagtgccttccgggcagggtca

SEQ ID NO: 909950 - DNA, 25 bp, Homo sapien
gagatggcgcgtgaggagctcagaa

SEQ ID NO: 909951 - DNA, 25 bp, Homo sapien
caggaccttggcctttaatctctct

SEQ ID NO: 909952 - DNA, 25 bp, Homo sapien
ctgatctcttcttatcctctttcct

SEQ ID NO: 909953 - DNA, 25 bp, Homo sapien
gatctcttcttatcctctttcctca

SEQ ID NO: 909954 - DNA, 25 bp, Homo sapien
atctcttcttatcctctttcctcac

SEQ ID NO: 909955 - DNA, 25 bp, Homo sapien
tgatctcttcttatcctctttcctc

SEQ ID NO: 909956 - DNA, 25 bp, Homo sapien
gagaacttcactcataaccagacag

SEQ ID NO: 909957 - DNA, 25 bp, Homo sapien
taaagtggcgaactcagtgacttcc

SEQ ID NO: 909958 - DNA, 25 bp, Homo sapien
ttcccagcctgtggaatgccagcag

SEQ ID NO: 909959 - DNA, 25 bp, Homo sapien
gggtcaccataaagccccgcagatg

SEQ ID NO: 909960 - DNA, 25 bp, Homo sapien
acaccactgaaggtgcacagcaccc

SEQ ID NO: 909961 - DNA, 25 bp, Homo sapien
tcccacaccactgaaggtgcacagc

SEQ ID NO: 909962 - DNA, 25 bp, Homo sapien
ccacaccactgaaggtgcacagcac

SEQ ID NO: 909963 - DNA, 25 bp, Homo sapien
ctcccacaccactgaaggtgcacag

SEQ ID NO: 909964 - DNA, 25 bp, Homo sapien
ttcttgtggcaggaatacttgcagg

SEQ ID NO: 909965 - DNA, 25 bp, Homo sapien
tcacatttcttgtggcaggaatact

SEQ ID NO: 909966 - DNA, 25 bp, Homo sapien
tggcttcacatttcttgtggcagga

SEQ ID NO: 909967 - DNA, 25 bp, Homo sapien
atttcttgtggcaggaatacttgca

SEQ ID NO: 909968 - DNA, 25 bp, Homo sapien
cggctcagctgcctccgttcctgag

SEQ ID NO: 909969 - DNA, 25 bp, Homo sapien
cagctgcctccgttcctgagttgac

SEQ ID NO: 909970 - DNA, 25 bp, Homo sapien
gtgccactgaaccatcatggcaggt

SEQ ID NO: 909971 - DNA, 25 bp, Homo sapien
gctcagctgcctccgttcctgagtt

SEQ ID NO: 909972 - DNA, 25 bp, Homo sapien
cctggagaacttgggttgcagaacc

SEQ ID NO: 909973 - DNA, 25 bp, Homo sapien
tgtaaacgaagcaagggaaaatgcc

SEQ ID NO: 909974 - DNA, 25 bp, Homo sapien
gagcaggttaagcagtgacaccagc

SEQ ID NO: 909975 - DNA, 25 bp, Homo sapien
tactttagacgccttgttccacctg

SEQ ID NO: 909976 - DNA, 25 bp, Homo sapien
cactaaagcaaacatctaccatgag

SEQ ID NO: 909977 - DNA, 25 bp, Homo sapien
ctggactggaacacccagtgagctg

SEQ ID NO: 909978 - DNA, 25 bp, Homo sapien
tccacatgcatgagcccactaaagc

SEQ ID NO: 909979 - DNA, 25 bp, Homo sapien
tgcctggtgcaagaactggggctcc

SEQ ID NO: 909980 - DNA, 25 bp, Homo sapien
gaacagggtgatagccaagattcct

SEQ ID NO: 909981 - DNA, 25 bp, Homo sapien
actttgtgaccgacagacatgcgcg

SEQ ID NO: 909982 - DNA, 25 bp, Homo sapien
caggtgtccagggacctcaggagtc

SEQ ID NO: 909983 - DNA, 25 bp, Homo sapien
tccaaggatccgtgccagtcatgtc

SEQ ID NO: 909984 - DNA, 25 bp, Homo sapien
gtcttgaactcccggtttcgatcga

SEQ ID NO: 909985 - DNA, 25 bp, Homo sapien
gaactcccggtttcgatcgattctc

SEQ ID NO: 909986 - DNA, 25 bp, Homo sapien
gaccattggcgcgtgccactgtgca

SEQ ID NO: 909987 - DNA, 25 bp, Homo sapien
ccattggcgcgtgccactgtgcagg

SEQ ID NO: 909988 - DNA, 25 bp, Homo sapien
tgtggcaggccccttctcgtggctt

SEQ ID NO: 909989 - DNA, 25 bp, Homo sapien
tgtcagacgaggtttccagactcat

SEQ ID NO: 909990 - DNA, 25 bp, Homo sapien
ccggcgtctgagctggtgtgtggca

SEQ ID NO: 909991 - DNA, 25 bp, Homo sapien
tgcaaaccacacatcagttcccttg

SEQ ID NO: 909992 - DNA, 25 bp, Homo sapien
ccctggcttcgaggatgtggaatca

SEQ ID NO: 909993 - DNA, 25 bp, Homo sapien
tttcttaacacttcaggcctgccag

SEQ ID NO: 909994 - DNA, 25 bp, Homo sapien
ggaatcagaagttgccacttggcct

SEQ ID NO: 909995 - DNA, 25 bp, Homo sapien
aggcagaccttgaacacccagagag

SEQ ID NO: 909996 - DNA, 25 bp, Homo sapien
ggcaccctactctaaagtggccatc

SEQ ID NO: 909997 - DNA, 25 bp, Homo sapien
caccctactctaaagtggccatcag

SEQ ID NO: 909998 - DNA, 25 bp, Homo sapien
caggcaccctactctaaagtggcca

SEQ ID NO: 909999 - DNA, 25 bp, Homo sapien
ccctactctaaagtggccatcaggg

SEQ ID NO: 910000 - DNA, 25 bp, Homo sapien
ggcatgaaataccttgaccgtcaat

SEQ ID NO: 910001 - DNA, 25 bp, Homo sapien
gcagactcgaggttaattcttccgg

SEQ ID NO: 910002 - DNA, 25 bp, Homo sapien
cttgttcttaaaagcgtgcagactc

SEQ ID NO: 910003 - DNA, 25 bp, Homo sapien
aataatttgtttgcaaactccacac

SEQ ID NO: 910004 - DNA, 25 bp, Homo sapien
caaagtaggctacagatcaaagaac

SEQ ID NO: 910005 - DNA, 25 bp, Homo sapien
gctagaaaaaagaggtaccttgctg

SEQ ID NO: 910006 - DNA, 25 bp, Homo sapien
ggagtggctatatcagacaaagtag

SEQ ID NO: 910007 - DNA, 25 bp, Homo sapien
taccttgctgatgttaatcaaaggg

SEQ ID NO: 910008 - DNA, 25 bp, Homo sapien
gtgcctttcacctttcgaaatgatt

SEQ ID NO: 910009 - DNA, 25 bp, Homo sapien
tgtgcctttcacctttcgaaatgat

SEQ ID NO: 910010 - DNA, 25 bp, Homo sapien
tgcctttcacctttcgaaatgattg

SEQ ID NO: 910011 - DNA, 25 bp, Homo sapien
tttcacctttcgaaatgattgtgag

SEQ ID NO: 910012 - DNA, 25 bp, Homo sapien
cccaggggtcagggcgcgcagcctc

SEQ ID NO: 910013 - DNA, 25 bp, Homo sapien
ccaggggtcagggcgcgcagcctca

SEQ ID NO: 910014 - DNA, 25 bp, Homo sapien
tccgcgcgcgaaccctcccggtggc

SEQ ID NO: 910015 - DNA, 25 bp, Homo sapien
caggggtcagggcgcgcagcctcat

SEQ ID NO: 910016 - DNA, 25 bp, Homo sapien
cctgccaggcttgcaatctaggctc

SEQ ID NO: 910017 - DNA, 25 bp, Homo sapien
tccttctgctctgcgcccttgggct

SEQ ID NO: 910018 - DNA, 25 bp, Homo sapien
ctcttacactccagggtccttctgc

SEQ ID NO: 910019 - DNA, 25 bp, Homo sapien
gctctgcgcccttgggctcacttgg

SEQ ID NO: 910020 - DNA, 25 bp, Homo sapien
ccatcgtccctctggcaaatgacaa

SEQ ID NO: 910021 - DNA, 25 bp, Homo sapien
ttccagagggctgcgtagaaggcct

SEQ ID NO: 910022 - DNA, 25 bp, Homo sapien
tgacaaatgacgagaacttctgcac

SEQ ID NO: 910023 - DNA, 25 bp, Homo sapien
aagtctccaaactggaaggatggcc

SEQ ID NO: 910024 - DNA, 25 bp, Homo sapien
aggcccaagctccaccatgcatctt

SEQ ID NO: 910025 - DNA, 25 bp, Homo sapien
ggcccaagctccaccatgcatcttc

SEQ ID NO: 910026 - DNA, 25 bp, Homo sapien
gcccaagctccaccatgcatcttca

SEQ ID NO: 910027 - DNA, 25 bp, Homo sapien
ccaagctccaccatgcatcttcatc

SEQ ID NO: 910028 - DNA, 25 bp, Homo sapien
ctggggaccaggacacgcagagaga

SEQ ID NO: 910029 - DNA, 25 bp, Homo sapien
gggaccaggacacgcagagagagct

SEQ ID NO: 910030 - DNA, 25 bp, Homo sapien
tggggaccaggacacgcagagagag

SEQ ID NO: 910031 - DNA, 25 bp, Homo sapien
ggaccaggacacgcagagagagctg

SEQ ID NO: 910032 - DNA, 25 bp, Homo sapien
aaagaacctcgggtacacagtgtcg

SEQ ID NO: 910033 - DNA, 25 bp, Homo sapien
caacgtggaggaacttgggccaatc

SEQ ID NO: 910034 - DNA, 25 bp, Homo sapien
actctggaagggacatagcctggga

SEQ ID NO: 910035 - DNA, 25 bp, Homo sapien
caaagagaacaagtggcagggacga

SEQ ID NO: 910036 - DNA, 25 bp, Homo sapien
aagccgggtctgtctggaaatcagc

SEQ ID NO: 910037 - DNA, 25 bp, Homo sapien
cattgaaaacggaagccgggtctgt

SEQ ID NO: 910038 - DNA, 25 bp, Homo sapien
gctcatcttggcattgaaaacggaa

SEQ ID NO: 910039 - DNA, 25 bp, Homo sapien
tggaaatcagctggaacctttttgg

SEQ ID NO: 910040 - DNA, 25 bp, Homo sapien
cagtgcgtgtctagccctgtcagca

SEQ ID NO: 910041 - DNA, 25 bp, Homo sapien
caaggtcggcattaagcggcccagt

SEQ ID NO: 910042 - DNA, 25 bp, Homo sapien
ccgtgcgtggtgtcccagggaacta

SEQ ID NO: 910043 - DNA, 25 bp, Homo sapien
acagctgtgcttgccccgtgcgtgg

SEQ ID NO: 910044 - DNA, 25 bp, Homo sapien
agggagaggaatgcaactccgcagg

SEQ ID NO: 910045 - DNA, 25 bp, Homo sapien
cagggagaggaatgcaactccgcag

SEQ ID NO: 910046 - DNA, 25 bp, Homo sapien
gggagaggaatgcaactccgcaggg

SEQ ID NO: 910047 - DNA, 25 bp, Homo sapien
ttttactcacaaatagcccggcagc

SEQ ID NO: 910048 - DNA, 25 bp, Homo sapien
tgggagaaccattcgcgcggtagtc

SEQ ID NO: 910049 - DNA, 25 bp, Homo sapien
gaccatttggagtaaggccatccct

SEQ ID NO: 910050 - DNA, 25 bp, Homo sapien
cactgctgcaaacaccttcgtggga

SEQ ID NO: 910051 - DNA, 25 bp, Homo sapien
gggcgatggccgcaacgaggctggg

SEQ ID NO: 910052 - DNA, 25 bp, Homo sapien
tgggctccgagtagcgcgcgggcgg

SEQ ID NO: 910053 - DNA, 25 bp, Homo sapien
ctgaggcgcggtccggcagggcgat

SEQ ID NO: 910054 - DNA, 25 bp, Homo sapien
ctgggggagcctgaggcgcggtccg

SEQ ID NO: 910055 - DNA, 25 bp, Homo sapien
acagccgctccggaaagcctagggt

SEQ ID NO: 910056 - DNA, 25 bp, Homo sapien
cctagtgggagtcgcgcatacataa

SEQ ID NO: 910057 - DNA, 25 bp, Homo sapien
tcctgtagctcatagcctagtggga

SEQ ID NO: 910058 - DNA, 25 bp, Homo sapien
gcatacataaaggagcacagccgct

SEQ ID NO: 910059 - DNA, 25 bp, Homo sapien
cctgctcactcccatacttgggcct

SEQ ID NO: 910060 - DNA, 25 bp, Homo sapien
gctcactcccatacttgggcctggg

SEQ ID NO: 910061 - DNA, 25 bp, Homo sapien
cactcccatacttgggcctgggacg

SEQ ID NO: 910062 - DNA, 25 bp, Homo sapien
tgctcactcccatacttgggcctgg

SEQ ID NO: 910063 - DNA, 25 bp, Homo sapien
gggagatggcaaaggaatttgaaca

SEQ ID NO: 910064 - DNA, 25 bp, Homo sapien
ccggagagcaagctgggagatggca

SEQ ID NO: 910065 - DNA, 25 bp, Homo sapien
gctccggagagcaagctgggagatg

SEQ ID NO: 910066 - DNA, 25 bp, Homo sapien
tccggagagcaagctgggagatggc

SEQ ID NO: 910067 - DNA, 25 bp, Homo sapien
aatgcttggtcccagccctagctca

SEQ ID NO: 910068 - DNA, 25 bp, Homo sapien
tctgtgaaatcgagataatcctacc

SEQ ID NO: 910069 - DNA, 25 bp, Homo sapien
cagtgtaaacttggacagggaatct

SEQ ID NO: 910070 - DNA, 25 bp, Homo sapien
tccatctggtacttgcagtgtaaac

SEQ ID NO: 910071 - DNA, 25 bp, Homo sapien
gctctgcgtgcaagtccaggctcat

SEQ ID NO: 910072 - DNA, 25 bp, Homo sapien
tctcgtggtgcgctggacgaacctg

SEQ ID NO: 910073 - DNA, 25 bp, Homo sapien
gaatgacttttgcttggaggctctc

SEQ ID NO: 910074 - DNA, 25 bp, Homo sapien
tggattctccatgggcgctgttgcc

SEQ ID NO: 910075 - DNA, 25 bp, Homo sapien
gacaccaggtattgttggcatttgc

SEQ ID NO: 910076 - DNA, 25 bp, Homo sapien
taccctaggaagaggtccgaggcac

SEQ ID NO: 910077 - DNA, 25 bp, Homo sapien
agggtaaggcctgacctcctcagct

SEQ ID NO: 910078 - DNA, 25 bp, Homo sapien
ttccctttaacagcagtctgagagt

SEQ ID NO: 910079 - DNA, 25 bp, Homo sapien
gttacacattgctccttgaagaagg

SEQ ID NO: 910080 - DNA, 25 bp, Homo sapien
ggaaccaggttcaccttccaagtgc

SEQ ID NO: 910081 - DNA, 25 bp, Homo sapien
gccaaattggcctagcctcaagagg

SEQ ID NO: 910082 - DNA, 25 bp, Homo sapien
tgacctcggaattgtggttgggaac

SEQ ID NO: 910083 - DNA, 25 bp, Homo sapien
aacaatggcaacacaagcaaaccac

SEQ ID NO: 910084 - DNA, 25 bp, Homo sapien
gaacaatggcaacacaagcaaacca

SEQ ID NO: 910085 - DNA, 25 bp, Homo sapien
agaacaatggcaacacaagcaaacc

SEQ ID NO: 910086 - DNA, 25 bp, Homo sapien
gagagcagagctcctataccctggc

SEQ ID NO: 910087 - DNA, 25 bp, Homo sapien
aaccaggggattcacccgtcatgag

SEQ ID NO: 910088 - DNA, 25 bp, Homo sapien
gattcacccgtcatgagagcagagc

SEQ ID NO: 910089 - DNA, 25 bp, Homo sapien
gagcagagctcctataccctggcat

SEQ ID NO: 910090 - DNA, 25 bp, Homo sapien
tctagtgtttgcgaggatgtctcat

SEQ ID NO: 910091 - DNA, 25 bp, Homo sapien
tttctagtgtttgcgaggatgtctc

SEQ ID NO: 910092 - DNA, 25 bp, Homo sapien
agtgtttgcgaggatgtctcattaa

SEQ ID NO: 910093 - DNA, 25 bp, Homo sapien
ctttttctagtgtttgcgaggatgt

SEQ ID NO: 910094 - DNA, 25 bp, Homo sapien
aggttctcctgctgaatgaaccctt

SEQ ID NO: 910095 - DNA, 25 bp, Homo sapien
tttggacaggctgctaggcctcagg

SEQ ID NO: 910096 - DNA, 25 bp, Homo sapien
tgaaccctttgtaccatctgtgcat

SEQ ID NO: 910097 - DNA, 25 bp, Homo sapien
ggtttggacaggctgctaggcctca

SEQ ID NO: 910098 - DNA, 25 bp, Homo sapien
tgcagagctgctgtgcgtgtagcct

SEQ ID NO: 910099 - DNA, 25 bp, Homo sapien
cgtgtagcctcgctctcttggttca

SEQ ID NO: 910100 - DNA, 25 bp, Homo sapien
ctgccctcaggagcattcagccctg

SEQ ID NO: 910101 - DNA, 25 bp, Homo sapien
gggcacagatcttcctaatacctga

SEQ ID NO: 910102 - DNA, 25 bp, Homo sapien
ggcacaaggcaggggaaaatgctta

SEQ ID NO: 910103 - DNA, 25 bp, Homo sapien
cagcccctgccagtaggaagggata

SEQ ID NO: 910104 - DNA, 25 bp, Homo sapien
atggtgctcaagtgccagcacagaa

SEQ ID NO: 910105 - DNA, 25 bp, Homo sapien
agaaactgcagtgtggtggccccag

SEQ ID NO: 910106 - DNA, 25 bp, Homo sapien
cccctgccagtaggaagggatagtc

SEQ ID NO: 910107 - DNA, 25 bp, Homo sapien
gaagcattgtgtcaacaggtatcca

SEQ ID NO: 910108 - DNA, 25 bp, Homo sapien
tctgagagtttctcatgatggtgca

SEQ ID NO: 910109 - DNA, 25 bp, Homo sapien
gatggtgcatgcagaaatagctgac

SEQ ID NO: 910110 - DNA, 25 bp, Homo sapien
tgtgcccggacttctcatgtgcagg

SEQ ID NO: 910111 - DNA, 25 bp, Homo sapien
tgactgatcatgcacagaaaagcta

SEQ ID NO: 910112 - DNA, 25 bp, Homo sapien
ggccagagtgtctccacggttgagt

SEQ ID NO: 910113 - DNA, 25 bp, Homo sapien
gcagcaaactctgactgaccatctt

SEQ ID NO: 910114 - DNA, 25 bp, Homo sapien
gcattcatctcctaatgcagcaaac

SEQ ID NO: 910115 - DNA, 25 bp, Homo sapien
ccacggtggctttcggtagggctga

SEQ ID NO: 910116 - DNA, 25 bp, Homo sapien
tcggtagggctgatacatgctttgg

SEQ ID NO: 910117 - DNA, 25 bp, Homo sapien
ccccatagcagatgagccacggtgg

SEQ ID NO: 910118 - DNA, 25 bp, Homo sapien
tctttctgcattggcgggagtctcc

SEQ ID NO: 910119 - DNA, 25 bp, Homo sapien
ctcaaggaacgtcccctgggagtgg

SEQ ID NO: 910120 - DNA, 25 bp, Homo sapien
gtcgcatgctgcaagggccacatag

SEQ ID NO: 910121 - DNA, 25 bp, Homo sapien
tctcggccactagagtttctgatcg

SEQ ID NO: 910122 - DNA, 25 bp, Homo sapien
ttatccttgggtcccatgcagtcgc

SEQ ID NO: 910123 - DNA, 25 bp, Homo sapien
gattgtattccaaagctcctacgag

SEQ ID NO: 910124 - DNA, 25 bp, Homo sapien
tagcatcgccctcaacctttggagt

SEQ ID NO: 910125 - DNA, 25 bp, Homo sapien
tgaagtttagagaacacatgcggct

SEQ ID NO: 910126 - DNA, 25 bp, Homo sapien
tccataatggcgaattccagcagtc

SEQ ID NO: 910127 - DNA, 25 bp, Homo sapien
gattttcatagctgccctcaaggcc

SEQ ID NO: 910128 - DNA, 25 bp, Homo sapien
aaacttctggagacgttcaggccac

SEQ ID NO: 910129 - DNA, 25 bp, Homo sapien
cagtgagcctcttagatcagacagg

SEQ ID NO: 910130 - DNA, 25 bp, Homo sapien
gaacttgctgcgaactttatggaga

SEQ ID NO: 910131 - DNA, 25 bp, Homo sapien
gaatcccaactcagtagggccaggg

SEQ ID NO: 910132 - DNA, 25 bp, Homo sapien
gagaaagcgaccttcaccttcatgg

SEQ ID NO: 910133 - DNA, 25 bp, Homo sapien
gaaatctttgctacggagcctgtcc

SEQ ID NO: 910134 - DNA, 25 bp, Homo sapien
tatggataaggtgcccaacgctctg

SEQ ID NO: 910135 - DNA, 25 bp, Homo sapien
ctgtgtgctgggctcctccggccat

SEQ ID NO: 910136 - DNA, 25 bp, Homo sapien
tggcctgtccccctctggaggcctg

SEQ ID NO: 910137 - DNA, 25 bp, Homo sapien
gcctgtgtgctgggctcctccggcc

SEQ ID NO: 910138 - DNA, 25 bp, Homo sapien
tgtccccctctggaggcctgtgtgc

SEQ ID NO: 910139 - DNA, 25 bp, Homo sapien
gaaagaagtagtatccagcccatgg

SEQ ID NO: 910140 - DNA, 25 bp, Homo sapien
gtccgtgacccctgaatatttgttg

SEQ ID NO: 910141 - DNA, 25 bp, Homo sapien
gatttagtgcttgaatagctccagc

SEQ ID NO: 910142 - DNA, 25 bp, Homo sapien
tgaatgtgtaactgggagaaactct

SEQ ID NO: 910143 - DNA, 25 bp, Homo sapien
aaagctttgtcacctgtcatctcag

SEQ ID NO: 910144 - DNA, 25 bp, Homo sapien
tgggcttctgaatggtgacgggggt

SEQ ID NO: 910145 - DNA, 25 bp, Homo sapien
agacagaaagctttgtcacctgtca

SEQ ID NO: 910146 - DNA, 25 bp, Homo sapien
tcagttctgggcttctgaatggtga

SEQ ID NO: 910147 - DNA, 25 bp, Homo sapien
ggcttccacccgaccttgctccctg

SEQ ID NO: 910148 - DNA, 25 bp, Homo sapien
gcaaaagaaacatccggctctgggc

SEQ ID NO: 910149 - DNA, 25 bp, Homo sapien
ggctctgggcttccacccgaccttg

SEQ ID NO: 910150 - DNA, 25 bp, Homo sapien
caaaagaaacatccggctctgggct

SEQ ID NO: 910151 - DNA, 25 bp, Homo sapien
gcatcagagtcaccctttctgagcg

SEQ ID NO: 910152 - DNA, 25 bp, Homo sapien
ctccttcctagggctctctctgcat

SEQ ID NO: 910153 - DNA, 25 bp, Homo sapien
atcagagtcaccctttctgagcggg

SEQ ID NO: 910154 - DNA, 25 bp, Homo sapien
ctctccttcctagggctctctctgc

SEQ ID NO: 910155 - DNA, 25 bp, Homo sapien
cactgtctcagaaccagggttcccc

SEQ ID NO: 910156 - DNA, 25 bp, Homo sapien
ccactgtctcagaaccagggttccc

SEQ ID NO: 910157 - DNA, 25 bp, Homo sapien
catgccggcagaagagaggctgcac

SEQ ID NO: 910158 - DNA, 25 bp, Homo sapien
ttctcatgccggcagaagagaggct

SEQ ID NO: 910159 - DNA, 25 bp, Homo sapien
agccgagccttctcatgccggcaga

SEQ ID NO: 910160 - DNA, 25 bp, Homo sapien
gagccttctcatgccggcagaagag

SEQ ID NO: 910161 - DNA, 25 bp, Homo sapien
ccaagtttccttcttgccaaatcag

SEQ ID NO: 910162 - DNA, 25 bp, Homo sapien
aacaaggaagatacatctatgggat

SEQ ID NO: 910163 - DNA, 25 bp, Homo sapien
gatattttgggtaggagatatgaaa

SEQ ID NO: 910164 - DNA, 25 bp, Homo sapien
gatatgaaatcaaggataacaccca

SEQ ID NO: 910165 - DNA, 25 bp, Homo sapien
ccactgtgccaggcgaataacagcc

SEQ ID NO: 910166 - DNA, 25 bp, Homo sapien
cagccattttaacagggctgggcag

SEQ ID NO: 910167 - DNA, 25 bp, Homo sapien
tgccaggcgaataacagccatttta

SEQ ID NO: 910168 - DNA, 25 bp, Homo sapien
tgctatttgagttgtttgtgctcct

SEQ ID NO: 910169 - DNA, 25 bp, Homo sapien
cagaagggcaaagatcagattacca

SEQ ID NO: 910170 - DNA, 25 bp, Homo sapien
caaaggtcccgcagaaagagatgga

SEQ ID NO: 910171 - DNA, 25 bp, Homo sapien
tgaaccccgagttcagagtcagtca

SEQ ID NO: 910172 - DNA, 25 bp, Homo sapien
aaaacacatatttgtccgggcatgg

SEQ ID NO: 910173 - DNA, 25 bp, Homo sapien
cgcctaggacctaaactcccgaatg

SEQ ID NO: 910174 - DNA, 25 bp, Homo sapien
ggaatgctgagctccgacctgtagg

SEQ ID NO: 910175 - DNA, 25 bp, Homo sapien
agaaccggatagctctcgcctagga

SEQ ID NO: 910176 - DNA, 25 bp, Homo sapien
ggcatttataacagggcaccaagca

SEQ ID NO: 910177 - DNA, 25 bp, Homo sapien
gttagtaaaagctgtgccccgaaga

SEQ ID NO: 910178 - DNA, 25 bp, Homo sapien
tgttcgtcagccaccttaagatgag

SEQ ID NO: 910179 - DNA, 25 bp, Homo sapien
aatttagctgtcactggttcgaggc

SEQ ID NO: 910180 - DNA, 25 bp, Homo sapien
gaaggactcaacctaccactgctgg

SEQ ID NO: 910181 - DNA, 25 bp, Homo sapien
taaccctgctaacctgcgttctgtg

SEQ ID NO: 910182 - DNA, 25 bp, Homo sapien
agctcctcgggcatgcttaaccctg

SEQ ID NO: 910183 - DNA, 25 bp, Homo sapien
gagcatgtgagaagagccactcttg

SEQ ID NO: 910184 - DNA, 25 bp, Homo sapien
tgtctgatctccatgatacatcacc

SEQ ID NO: 910185 - DNA, 25 bp, Homo sapien
aatggattccaaaacagccgcccag

SEQ ID NO: 910186 - DNA, 25 bp, Homo sapien
caaattctgatctgagcacgtaggt

SEQ ID NO: 910187 - DNA, 25 bp, Homo sapien
tacataaacgcacacagagaattcg

SEQ ID NO: 910188 - DNA, 25 bp, Homo sapien
cacaaactctttgaggcaggttcca

SEQ ID NO: 910189 - DNA, 25 bp, Homo sapien
tgagacctccaaagatcctactggt

SEQ ID NO: 910190 - DNA, 25 bp, Homo sapien
gatgcaccctgatttgctccagcag

SEQ ID NO: 910191 - DNA, 25 bp, Homo sapien
gaatgctaacgcaatactccgagag

SEQ ID NO: 910192 - DNA, 25 bp, Homo sapien
ttaaattgacaagcctctagccagg

SEQ ID NO: 910193 - DNA, 25 bp, Homo sapien
tcacagattgtgttggggaccccaa

SEQ ID NO: 910194 - DNA, 25 bp, Homo sapien
gaaagggaatgcagattttccacag

SEQ ID NO: 910195 - DNA, 25 bp, Homo sapien
tttccacagttataaaaaccatctc

SEQ ID NO: 910196 - DNA, 25 bp, Homo sapien
tgtggactgtggcacgccagtcttc

SEQ ID NO: 910197 - DNA, 25 bp, Homo sapien
ttttgataaatacctcataaagtga

SEQ ID NO: 910198 - DNA, 25 bp, Homo sapien
tgataaatacctcataaagtgatag

SEQ ID NO: 910199 - DNA, 25 bp, Homo sapien
ccttggcagcattaactttttgcca

SEQ ID NO: 910200 - DNA, 25 bp, Homo sapien
tacctcataaagtgatagtccagaa

SEQ ID NO: 910201 - DNA, 25 bp, Homo sapien
agcagcttggtaactagaaatgtcc

SEQ ID NO: 910202 - DNA, 25 bp, Homo sapien
gggagttgtaggctgtcggacaaac

SEQ ID NO: 910203 - DNA, 25 bp, Homo sapien
ctgtccttgcctcccctgtgttgtt

SEQ ID NO: 910204 - DNA, 25 bp, Homo sapien
cactaagggactctcttctgtcctt

SEQ ID NO: 910205 - DNA, 25 bp, Homo sapien
tcagaagttcgtctaacagatttgc

SEQ ID NO: 910206 - DNA, 25 bp, Homo sapien
tcttcatcagaagttcgtctaacag

SEQ ID NO: 910207 - DNA, 25 bp, Homo sapien
cattaatcttcatcagaagttcgtc

SEQ ID NO: 910208 - DNA, 25 bp, Homo sapien
gaagttcgtctaacagatttgcaaa

SEQ ID NO: 910209 - DNA, 25 bp, Homo sapien
aagtctcacaaaagatttactttga

SEQ ID NO: 910210 - DNA, 25 bp, Homo sapien
gacatctttaagtctcacaaaagat

SEQ ID NO: 910211 - DNA, 25 bp, Homo sapien
gtgacatctttaagtctcacaaaag

SEQ ID NO: 910212 - DNA, 25 bp, Homo sapien
acatataagcagtgacatctttaag

SEQ ID NO: 910213 - DNA, 25 bp, Homo sapien
tggcagagactattaaaaggatccc

SEQ ID NO: 910214 - DNA, 25 bp, Homo sapien
catggcccgctggtcagacttggaa

SEQ ID NO: 910215 - DNA, 25 bp, Homo sapien
ggccaaggaggcagtctttttggct

SEQ ID NO: 910216 - DNA, 25 bp, Homo sapien
tggtagaacccacatagagagcaga

SEQ ID NO: 910217 - DNA, 25 bp, Homo sapien
aataagaggattccccggagccatc

SEQ ID NO: 910218 - DNA, 25 bp, Homo sapien
ggaataagaggattccccggagcca

SEQ ID NO: 910219 - DNA, 25 bp, Homo sapien
caggatgccattgtgttttgaatgc

SEQ ID NO: 910220 - DNA, 25 bp, Homo sapien
gccaggaagatagacgcattttaat

SEQ ID NO: 910221 - DNA, 25 bp, Homo sapien
ctaagtttatgaagtccagtgagta

SEQ ID NO: 910222 - DNA, 25 bp, Homo sapien
acaacacggctataaacctcctgtg

SEQ ID NO: 910223 - DNA, 25 bp, Homo sapien
tggctagtggtgactattggacaac

SEQ ID NO: 910224 - DNA, 25 bp, Homo sapien
ggtgactattggacaacacggctat

SEQ ID NO: 910225 - DNA, 25 bp, Homo sapien
gcatcacagtgcatggcctctatct

SEQ ID NO: 910226 - DNA, 25 bp, Homo sapien
atcacagtgcatggcctctatctgc

SEQ ID NO: 910227 - DNA, 25 bp, Homo sapien
cacagtgcatggcctctatctgcat

SEQ ID NO: 910228 - DNA, 25 bp, Homo sapien
ggcatcacagtgcatggcctctatc

SEQ ID NO: 910229 - DNA, 25 bp, Homo sapien
taaatgctcggcaaagtcctctgtg

SEQ ID NO: 910230 - DNA, 25 bp, Homo sapien
catgatgccataagggtgaggtcca

SEQ ID NO: 910231 - DNA, 25 bp, Homo sapien
tggttagtgacatctccagcaagag

SEQ ID NO: 910232 - DNA, 25 bp, Homo sapien
caaggtggccggaaactgcatagta

SEQ ID NO: 910233 - DNA, 25 bp, Homo sapien
tacatgacggtaactgtaacaacac

SEQ ID NO: 910234 - DNA, 25 bp, Homo sapien
ttgagattaacactacagagggaga

SEQ ID NO: 910235 - DNA, 25 bp, Homo sapien
caaggtcagaatcaagatgtcatta

SEQ ID NO: 910236 - DNA, 25 bp, Homo sapien
gctgaaattcgtgtggtacatgacg

SEQ ID NO: 910237 - DNA, 25 bp, Homo sapien
aagaaaatgacacaagagaggctac

SEQ ID NO: 910238 - DNA, 25 bp, Homo sapien
ttcaaaagaaaatgacacaagagag

SEQ ID NO: 910239 - DNA, 25 bp, Homo sapien
ttttcaaaagaaaatgacacaagag

SEQ ID NO: 910240 - DNA, 25 bp, Homo sapien
aaaagaaaatgacacaagagaggct

SEQ ID NO: 910241 - DNA, 25 bp, Homo sapien
tagagttgaacacagaggtggatca

SEQ ID NO: 910242 - DNA, 25 bp, Homo sapien
ccagttccttggctttcgccagtag

SEQ ID NO: 910243 - DNA, 25 bp, Homo sapien
tttcgccagtagctgaggacgccct

SEQ ID NO: 910244 - DNA, 25 bp, Homo sapien
gacgcccttgtccatcatacggtag

SEQ ID NO: 910245 - DNA, 25 bp, Homo sapien
tctgcagaggtttaatcctaaactt

SEQ ID NO: 910246 - DNA, 25 bp, Homo sapien
tgttctgcagaggtttaatcctaaa

SEQ ID NO: 910247 - DNA, 25 bp, Homo sapien
gttctgcagaggtttaatcctaaac

SEQ ID NO: 910248 - DNA, 25 bp, Homo sapien
ttaatcctaaacttgctcttcagta

SEQ ID NO: 910249 - DNA, 25 bp, Homo sapien
cttccttggcactgctcaaaagagt

SEQ ID NO: 910250 - DNA, 25 bp, Homo sapien
caggcctcccgacctccatgctgat

SEQ ID NO: 910251 - DNA, 25 bp, Homo sapien
aggcctcccgacctccatgctgatc

SEQ ID NO: 910252 - DNA, 25 bp, Homo sapien
ggcctcccgacctccatgctgatcc

SEQ ID NO: 910253 - DNA, 25 bp, Homo sapien
gatgctgaatgactccaccagggat

SEQ ID NO: 910254 - DNA, 25 bp, Homo sapien
cctggtgctgcggtcaatccacatg

SEQ ID NO: 910255 - DNA, 25 bp, Homo sapien
tgagtcgctgcggaagatgctgaat

SEQ ID NO: 910256 - DNA, 25 bp, Homo sapien
tccccgtagggaggatctccactct

SEQ ID NO: 910257 - DNA, 25 bp, Homo sapien
ggacagggctgtgtgggcttcagtc

SEQ ID NO: 910258 - DNA, 25 bp, Homo sapien
tcgggacagggctgtgtgggcttca

SEQ ID NO: 910259 - DNA, 25 bp, Homo sapien
gtcgggacagggctgtgtgggcttc

SEQ ID NO: 910260 - DNA, 25 bp, Homo sapien
ctgagtcgggacagggctgtgtggg

SEQ ID NO: 910261 - DNA, 25 bp, Homo sapien
atgcgctgcgtccagcaggcaccag

SEQ ID NO: 910262 - DNA, 25 bp, Homo sapien
tgcgctgcgtccagcaggcaccaga

SEQ ID NO: 910263 - DNA, 25 bp, Homo sapien
agatgcgctgcgtccagcaggcacc

SEQ ID NO: 910264 - DNA, 25 bp, Homo sapien
cagatgcgctgcgtccagcaggcac

SEQ ID NO: 910265 - DNA, 25 bp, Homo sapien
tggttctctgggtctatcaggtagg

SEQ ID NO: 910266 - DNA, 25 bp, Homo sapien
ccaacttcgggactacatgtaggaa

SEQ ID NO: 910267 - DNA, 25 bp, Homo sapien
cattcagggtcacgttttggttctc

SEQ ID NO: 910268 - DNA, 25 bp, Homo sapien
tcgatgagtgctgaaaatggcctgg

SEQ ID NO: 910269 - DNA, 25 bp, Homo sapien
tgcataaatgcctaggaaaaacttt

SEQ ID NO: 910270 - DNA, 25 bp, Homo sapien
cttttagctgcctaattacggaact

SEQ ID NO: 910271 - DNA, 25 bp, Homo sapien
aattacggaactgcctattaggtag

SEQ ID NO: 910272 - DNA, 25 bp, Homo sapien
gaactgcctattaggtagcattttc

SEQ ID NO: 910273 - DNA, 25 bp, Homo sapien
ccagtcccaccagtcagcgatgttt

SEQ ID NO: 910274 - DNA, 25 bp, Homo sapien
gaagtgtggtcagactccagtccca

SEQ ID NO: 910275 - DNA, 25 bp, Homo sapien
agcgatgtttctcaggccacccaag

SEQ ID NO: 910276 - DNA, 25 bp, Homo sapien
caggccatccagaagtgtggtcaga

SEQ ID NO: 910277 - DNA, 25 bp, Homo sapien
tgcaagaacaaaaataaaaagttgc

SEQ ID NO: 910278 - DNA, 25 bp, Homo sapien
atgcaagaacaaaaataaaaagttg

SEQ ID NO: 910279 - DNA, 25 bp, Homo sapien
gcatgaggatgtccatggaaatgtc

SEQ ID NO: 910280 - DNA, 25 bp, Homo sapien
aaattctttccggatagcttgattg

SEQ ID NO: 910281 - DNA, 25 bp, Homo sapien
gcagcatgaggatgtccatggaaat

SEQ ID NO: 910282 - DNA, 25 bp, Homo sapien
gattgagggagtattcatcttggga

SEQ ID NO: 910283 - DNA, 25 bp, Homo sapien
agcccgtgtgcgactctctctcctc

SEQ ID NO: 910284 - DNA, 25 bp, Homo sapien
cccgtgtgcgactctctctcctcat

SEQ ID NO: 910285 - DNA, 25 bp, Homo sapien
cagggcagcccgtgtgcgactctct

SEQ ID NO: 910286 - DNA, 25 bp, Homo sapien
gggcagcccgtgtgcgactctctct

SEQ ID NO: 910287 - DNA, 25 bp, Homo sapien
gcccagcgcaggtggcgagcttgtt

SEQ ID NO: 910288 - DNA, 25 bp, Homo sapien
ggccttggatggtggatgcgcccag

SEQ ID NO: 910289 - DNA, 25 bp, Homo sapien
cgcaggtggcgagcttgttgtcggg

SEQ ID NO: 910290 - DNA, 25 bp, Homo sapien
tctgtctggtgcccctcagctgggc

SEQ ID NO: 910291 - DNA, 25 bp, Homo sapien
agtaaaaaagtggttgtcagctctt

SEQ ID NO: 910292 - DNA, 25 bp, Homo sapien
aattcagagtccagatccctggtag

SEQ ID NO: 910293 - DNA, 25 bp, Homo sapien
gtcaggaatactgcagcttgaagag

SEQ ID NO: 910294 - DNA, 25 bp, Homo sapien
gaggcgagtccaggaacgttctgcc

SEQ ID NO: 910295 - DNA, 25 bp, Homo sapien
gccactgcacacattgctcctggcc

SEQ ID NO: 910296 - DNA, 25 bp, Homo sapien
tgcagccactgcacacattgctcct

SEQ ID NO: 910297 - DNA, 25 bp, Homo sapien
ggtgcagccactgcacacattgctc

SEQ ID NO: 910298 - DNA, 25 bp, Homo sapien
actgcacacattgctcctggccaaa

SEQ ID NO: 910299 - DNA, 25 bp, Homo sapien
aagaagcggtcccacaaatggccca

SEQ ID NO: 910300 - DNA, 25 bp, Homo sapien
gggcattagtccctccaaaccactg

SEQ ID NO: 910301 - DNA, 25 bp, Homo sapien
ctgtaggctagaaatcctgtcccca

SEQ ID NO: 910302 - DNA, 25 bp, Homo sapien
ctgcaggccaaagaagcggtcccac

SEQ ID NO: 910303 - DNA, 25 bp, Homo sapien
aaccaaacatagctgcacgcacagg

SEQ ID NO: 910304 - DNA, 25 bp, Homo sapien
cagaaaggatcttttttgtgcccca

SEQ ID NO: 910305 - DNA, 25 bp, Homo sapien
gcctgaagcttgttcactcacagaa

SEQ ID NO: 910306 - DNA, 25 bp, Homo sapien
gcagcctgggcccaaccaaacatag

SEQ ID NO: 910307 - DNA, 25 bp, Homo sapien
gttaagtacctgccagaaagcacca

SEQ ID NO: 910308 - DNA, 25 bp, Homo sapien
aagtacctgccagaaagcaccaaga

SEQ ID NO: 910309 - DNA, 25 bp, Homo sapien
ttaagtacctgccagaaagcaccaa

SEQ ID NO: 910310 - DNA, 25 bp, Homo sapien
taagtacctgccagaaagcaccaag

SEQ ID NO: 910311 - DNA, 25 bp, Homo sapien
ccatgaacctgcagcttaggggctg

SEQ ID NO: 910312 - DNA, 25 bp, Homo sapien
tcacttgccgccttcctttgggccc

SEQ ID NO: 910313 - DNA, 25 bp, Homo sapien
ctgtggtcagccccatgaacctgca

SEQ ID NO: 910314 - DNA, 25 bp, Homo sapien
tggacaagctgtgccattgtcactt

SEQ ID NO: 910315 - DNA, 25 bp, Homo sapien
gccggtatttactgagtagacacac

SEQ ID NO: 910316 - DNA, 25 bp, Homo sapien
tctcccacggtcctgccggtattta

SEQ ID NO: 910317 - DNA, 25 bp, Homo sapien
acggtcctgccggtatttactgagt

SEQ ID NO: 910318 - DNA, 25 bp, Homo sapien
tttactgagtagacacacagggctt

SEQ ID NO: 910319 - DNA, 25 bp, Homo sapien
tgtgcgtctggtatccttccccagg

SEQ ID NO: 910320 - DNA, 25 bp, Homo sapien
tgcgtctggtatccttccccaggaa

SEQ ID NO: 910321 - DNA, 25 bp, Homo sapien
cttgcgtggctcctgtgcgtctggt

SEQ ID NO: 910322 - DNA, 25 bp, Homo sapien
ggctcctgtgcgtctggtatccttc

SEQ ID NO: 910323 - DNA, 25 bp, Homo sapien
tgtgtggctccactcgggcagaccc

SEQ ID NO: 910324 - DNA, 25 bp, Homo sapien
cctctaagtgggctgtgtggctcca

SEQ ID NO: 910325 - DNA, 25 bp, Homo sapien
gggtgcctcggtctgtgctcctcct

SEQ ID NO: 910326 - DNA, 25 bp, Homo sapien
tgctcctcctctaagtgggctgtgt

SEQ ID NO: 910327 - DNA, 25 bp, Homo sapien
ggtggttcgccaagcgtgttcccca

SEQ ID NO: 910328 - DNA, 25 bp, Homo sapien
gaaggaaagaggtggttcgccaagc

SEQ ID NO: 910329 - DNA, 25 bp, Homo sapien
acagggccatgaggacaagtcgcag

SEQ ID NO: 910330 - DNA, 25 bp, Homo sapien
tgttccccagcaatgaaggggctgc

SEQ ID NO: 910331 - DNA, 25 bp, Homo sapien
ccaagggtggggctgacgtccaagt

SEQ ID NO: 910332 - DNA, 25 bp, Homo sapien
gagacccaccctgaaggatccaagg

SEQ ID NO: 910333 - DNA, 25 bp, Homo sapien
tgaagagcagggacaagagctgggc

SEQ ID NO: 910334 - DNA, 25 bp, Homo sapien
gccaggagggtacacaggagaccca

SEQ ID NO: 910335 - DNA, 25 bp, Homo sapien
ttctcggagaactgtgagctttgtt

SEQ ID NO: 910336 - DNA, 25 bp, Homo sapien
aaacttttctcggagaactgtgagc

SEQ ID NO: 910337 - DNA, 25 bp, Homo sapien
ttttctcggagaactgtgagctttg

SEQ ID NO: 910338 - DNA, 25 bp, Homo sapien
cttttctcggagaactgtgagcttt

SEQ ID NO: 910339 - DNA, 25 bp, Homo sapien
tgctataaggaaaagcgatggctct

SEQ ID NO: 910340 - DNA, 25 bp, Homo sapien
ctataaggaaaagcgatggctctca

SEQ ID NO: 910341 - DNA, 25 bp, Homo sapien
ccacagtgtagtcggatctggaagc

SEQ ID NO: 910342 - DNA, 25 bp, Homo sapien
ggccacagtgtagtcggatctggaa

SEQ ID NO: 910343 - DNA, 25 bp, Homo sapien
ctgtacaccgacagccagacatgga

SEQ ID NO: 910344 - DNA, 25 bp, Homo sapien
accagggcagtgagacacgcgtaga

SEQ ID NO: 910345 - DNA, 25 bp, Homo sapien
acgcgtagacgcacagcagggagaa

SEQ ID NO: 910346 - DNA, 25 bp, Homo sapien
ccaggtactctgtgaacttgcaata

SEQ ID NO: 910347 - DNA, 25 bp, Homo sapien
ccgctccacgcgaccatcatgcctg

SEQ ID NO: 910348 - DNA, 25 bp, Homo sapien
aagccgagtcccccttgcagacagg

SEQ ID NO: 910349 - DNA, 25 bp, Homo sapien
gaccatcatgcctgccggcagacag

SEQ ID NO: 910350 - DNA, 25 bp, Homo sapien
tgcagacaggtgagctcccgctcca

SEQ ID NO: 910351 - DNA, 25 bp, Homo sapien
tcaccatcacgtggctgatgaacca

SEQ ID NO: 910352 - DNA, 25 bp, Homo sapien
gccagaggcggatcttcctcagcag

SEQ ID NO: 910353 - DNA, 25 bp, Homo sapien
aagaaccagccctgtcccgtgtgca

SEQ ID NO: 910354 - DNA, 25 bp, Homo sapien
gaaggcccacggctgtcgtgccaga

SEQ ID NO: 910355 - DNA, 25 bp, Homo sapien
ctcaggataaaggtgtgtctggaat

SEQ ID NO: 910356 - DNA, 25 bp, Homo sapien
tctggacaggagagctccttggttt

SEQ ID NO: 910357 - DNA, 25 bp, Homo sapien
aaggtgtgtctggaattcctttcaa

SEQ ID NO: 910358 - DNA, 25 bp, Homo sapien
tcctttcaaacaggggcttctctgg

SEQ ID NO: 910359 - DNA, 25 bp, Homo sapien
acagtccattgtcgccacataaaac

SEQ ID NO: 910360 - DNA, 25 bp, Homo sapien
ccattgtcgccacataaaacaatgt

SEQ ID NO: 910361 - DNA, 25 bp, Homo sapien
ctgacagtccattgtcgccacataa

SEQ ID NO: 910362 - DNA, 25 bp, Homo sapien
gtccattgtcgccacataaaacaat

SEQ ID NO: 910363 - DNA, 25 bp, Homo sapien
ccagtgtcaatgacgaccgcatata

SEQ ID NO: 910364 - DNA, 25 bp, Homo sapien
gccagtgtcaatgacgaccgcatat

SEQ ID NO: 910365 - DNA, 25 bp, Homo sapien
aagccagtgtcaatgacgaccgcat

SEQ ID NO: 910366 - DNA, 25 bp, Homo sapien
cagtgtcaatgacgaccgcatatag

SEQ ID NO: 910367 - DNA, 25 bp, Homo sapien
tgcagaaagatgtaaccagctttct

SEQ ID NO: 910368 - DNA, 25 bp, Homo sapien
aagaatcacagaacccataataaaa

SEQ ID NO: 910369 - DNA, 25 bp, Homo sapien
tactgggaagcaagttttctgggtg

SEQ ID NO: 910370 - DNA, 25 bp, Homo sapien
tagcgaccaaaaatccataaagaat

SEQ ID NO: 910371 - DNA, 25 bp, Homo sapien
acagaacccataataaaaatactgg

SEQ ID NO: 910372 - DNA, 25 bp, Homo sapien
gaaacctttcggattctggccagat

SEQ ID NO: 910373 - DNA, 25 bp, Homo sapien
agccccagtggtatcaatgccgcag

SEQ ID NO: 910374 - DNA, 25 bp, Homo sapien
ccaccaagatagagcctgttcagag

SEQ ID NO: 910375 - DNA, 25 bp, Homo sapien
gaatggccagtgacctgttctgcac

SEQ ID NO: 910376 - DNA, 25 bp, Homo sapien
tctgtagcttggaaatgtcactcac

SEQ ID NO: 910377 - DNA, 25 bp, Homo sapien
ctctgtagcttggaaatgtcactca

SEQ ID NO: 910378 - DNA, 25 bp, Homo sapien
cttaggagagcgaatgccgcgaggc

SEQ ID NO: 910379 - DNA, 25 bp, Homo sapien
ctccttaggagagcgaatgccgcga

SEQ ID NO: 910380 - DNA, 25 bp, Homo sapien
aggagagcgaatgccgcgaggcgat

SEQ ID NO: 910381 - DNA, 25 bp, Homo sapien
tctccttaggagagcgaatgccgcg

SEQ ID NO: 910382 - DNA, 25 bp, Homo sapien
tctcttgtcccaaaacaggcatcgg

SEQ ID NO: 910383 - DNA, 25 bp, Homo sapien
ccctggttgtggagagaaacgttca

SEQ ID NO: 910384 - DNA, 25 bp, Homo sapien
caggcatcggatccactggaaatgt

SEQ ID NO: 910385 - DNA, 25 bp, Homo sapien
tgtcatagtcagcatccaataagga

SEQ ID NO: 910386 - DNA, 25 bp, Homo sapien
gatctgcttcacaagaaaatcagag

SEQ ID NO: 910387 - DNA, 25 bp, Homo sapien
aatctgcacaattgactcatcccag

SEQ ID NO: 910388 - DNA, 25 bp, Homo sapien
ccagaagtagatctgcttcacaaga

SEQ ID NO: 910389 - DNA, 25 bp, Homo sapien
gaagcagcaggtatataaatctgca

SEQ ID NO: 910390 - DNA, 25 bp, Homo sapien
ctttatcccgaagtaatacaaatgt

SEQ ID NO: 910391 - DNA, 25 bp, Homo sapien
ggttttcggaaagctcagtgaactg

SEQ ID NO: 910392 - DNA, 25 bp, Homo sapien
gaaatgcccttgtaacaggtttgga

SEQ ID NO: 910393 - DNA, 25 bp, Homo sapien
atttctatctgtagagattcctggg

SEQ ID NO: 910394 - DNA, 25 bp, Homo sapien
caaactcgaccatcacgggtttcct

SEQ ID NO: 910395 - DNA, 25 bp, Homo sapien
tccttagccattgcctgttgatggg

SEQ ID NO: 910396 - DNA, 25 bp, Homo sapien
agcaggtatagaggttgaggcccac

SEQ ID NO: 910397 - DNA, 25 bp, Homo sapien
tgttgatgggtcttctgctggagca

SEQ ID NO: 910398 - DNA, 25 bp, Homo sapien
ggtaaatgcacctggacagatccca

SEQ ID NO: 910399 - DNA, 25 bp, Homo sapien
taatgaagaagggtccggaactcca

SEQ ID NO: 910400 - DNA, 25 bp, Homo sapien
tatgagctggctaatgtagcatggg

SEQ ID NO: 910401 - DNA, 25 bp, Homo sapien
cctggatatgggttcttcttgaaga

SEQ ID NO: 910402 - DNA, 25 bp, Homo sapien
gtgctaacatggttcaaagagagac

SEQ ID NO: 910403 - DNA, 25 bp, Homo sapien
taacatggttcaaagagagacaacc

SEQ ID NO: 910404 - DNA, 25 bp, Homo sapien
tgcccagtgctaacatggttcaaag

SEQ ID NO: 910405 - DNA, 25 bp, Homo sapien
ctgcccagtgctaacatggttcaaa

SEQ ID NO: 910406 - DNA, 25 bp, Homo sapien
ctttgtcaatcacaaatggccccga

SEQ ID NO: 910407 - DNA, 25 bp, Homo sapien
gagttttcttgctcagagacttccc

SEQ ID NO: 910408 - DNA, 25 bp, Homo sapien
tgagaaccgcactcataaagcctag

SEQ ID NO: 910409 - DNA, 25 bp, Homo sapien
tatgagaccgatgagctcaagcctc

SEQ ID NO: 910410 - DNA, 25 bp, Homo sapien
tagagaagctcacgaggtccctcaa

SEQ ID NO: 910411 - DNA, 25 bp, Homo sapien
cttattagagaagctcacgaggtcc

SEQ ID NO: 910412 - DNA, 25 bp, Homo sapien
acgaggtccctcaacataagaacag

SEQ ID NO: 910413 - DNA, 25 bp, Homo sapien
tattagagaagctcacgaggtccct

SEQ ID NO: 910414 - DNA, 25 bp, Homo sapien
taacaacgattgacttggtcattct

SEQ ID NO: 910415 - DNA, 25 bp, Homo sapien
tcagcagaattatctgtaacaacga

SEQ ID NO: 910416 - DNA, 25 bp, Homo sapien
gaattatctgtaacaacgattgact

SEQ ID NO: 910417 - DNA, 25 bp, Homo sapien
caaacttcagcagaattatctgtaa

SEQ ID NO: 910418 - DNA, 25 bp, Homo sapien
acaaaagccaatctgcatactgaag

SEQ ID NO: 910419 - DNA, 25 bp, Homo sapien
tgtgtaactccccatcagctggagg

SEQ ID NO: 910420 - DNA, 25 bp, Homo sapien
ttaatgcatcctgtattcgtgacca

SEQ ID NO: 910421 - DNA, 25 bp, Homo sapien
tattcgtgaccattggttgcaggag

SEQ ID NO: 910422 - DNA, 25 bp, Homo sapien
atttccatggtagcggggcagcaca

SEQ ID NO: 910423 - DNA, 25 bp, Homo sapien
cacggctggaccttggagcctttgc

SEQ ID NO: 910424 - DNA, 25 bp, Homo sapien
gagcctttgccatctgtgatttcag

SEQ ID NO: 910425 - DNA, 25 bp, Homo sapien
acagtcaccaccacagtgcacggct

SEQ ID NO: 910426 - DNA, 25 bp, Homo sapien
tgtttcctatctggtaactaaattc

SEQ ID NO: 910427 - DNA, 25 bp, Homo sapien
gctcaccagctggcaacacaaaata

SEQ ID NO: 910428 - DNA, 25 bp, Homo sapien
caaagtgtgtttggaggtgtttcct

SEQ ID NO: 910429 - DNA, 25 bp, Homo sapien
tggaggtgtttcctatctggtaact

SEQ ID NO: 910430 - DNA, 25 bp, Homo sapien
ggttgactgtcaagtacagctgagc

SEQ ID NO: 910431 - DNA, 25 bp, Homo sapien
catgtcccgaggagccgggttgact

SEQ ID NO: 910432 - DNA, 25 bp, Homo sapien
gctttacccagtaagccatgcttcg

SEQ ID NO: 910433 - DNA, 25 bp, Homo sapien
ggttttccagacatgcagaagacac

SEQ ID NO: 910434 - DNA, 25 bp, Homo sapien
aagatgaagcagcggtttcacccat

SEQ ID NO: 910435 - DNA, 25 bp, Homo sapien
gaaagatgaagcagcggtttcaccc

SEQ ID NO: 910436 - DNA, 25 bp, Homo sapien
agaaagatgaagcagcggtttcacc

SEQ ID NO: 910437 - DNA, 25 bp, Homo sapien
agagaaagatgaagcagcggtttca

SEQ ID NO: 910438 - DNA, 25 bp, Homo sapien
tttacgctgatgtagacctgcaccc

SEQ ID NO: 910439 - DNA, 25 bp, Homo sapien
tcctcatcctctgataaatgcaact

SEQ ID NO: 910440 - DNA, 25 bp, Homo sapien
gagacgcagcaggactcctcatcct

SEQ ID NO: 910441 - DNA, 25 bp, Homo sapien
ggaagagtaaactcacagagacgca

SEQ ID NO: 910442 - DNA, 25 bp, Homo sapien
ctcagagagtatggcttgattgtca

SEQ ID NO: 910443 - DNA, 25 bp, Homo sapien
cactgctcagagagtatggcttgat

SEQ ID NO: 910444 - DNA, 25 bp, Homo sapien
cacttgcaggacgtacgtctctcca

SEQ ID NO: 910445 - DNA, 25 bp, Homo sapien
cagacacttgcaggacgtacgtctc

SEQ ID NO: 910446 - DNA, 25 bp, Homo sapien
cagtcaatcatgaggacaggctcgg

SEQ ID NO: 910447 - DNA, 25 bp, Homo sapien
aatagccttggaaaactgctcgacc

SEQ ID NO: 910448 - DNA, 25 bp, Homo sapien
gccttgggccagtcaatcatgagga

SEQ ID NO: 910449 - DNA, 25 bp, Homo sapien
actgctcgacccagcagggccttgg

SEQ ID NO: 910450 - DNA, 25 bp, Homo sapien
gggctctcctcggcactcaagctag

SEQ ID NO: 910451 - DNA, 25 bp, Homo sapien
agggctctcctcggcactcaagcta

SEQ ID NO: 910452 - DNA, 25 bp, Homo sapien
gctctcctcggcactcaagctaggt

SEQ ID NO: 910453 - DNA, 25 bp, Homo sapien
ggctctcctcggcactcaagctagg

SEQ ID NO: 910454 - DNA, 25 bp, Homo sapien
ctgatcctggaaagctggtgtcctt

SEQ ID NO: 910455 - DNA, 25 bp, Homo sapien
gcttcttgaatgtcactgtaatagg

SEQ ID NO: 910456 - DNA, 25 bp, Homo sapien
tggctgtcttcctcccgatggtatt

SEQ ID NO: 910457 - DNA, 25 bp, Homo sapien
gaatgtcactgtaataggcttcaaa

SEQ ID NO: 910458 - DNA, 25 bp, Homo sapien
ccgatggtattgcttcttgaatgtc

SEQ ID NO: 910459 - DNA, 25 bp, Homo sapien
agattcactgcttccaaaggtaact

SEQ ID NO: 910460 - DNA, 25 bp, Homo sapien
cactgcttccaaaggtaactttggt

SEQ ID NO: 910461 - DNA, 25 bp, Homo sapien
ttcactgcttccaaaggtaactttg

SEQ ID NO: 910462 - DNA, 25 bp, Homo sapien
gattcactgcttccaaaggtaactt

SEQ ID NO: 910463 - DNA, 25 bp, Homo sapien
aggaatccagtagactccagtcatg

SEQ ID NO: 910464 - DNA, 25 bp, Homo sapien
cctggctctaggtctagtgaacctt

SEQ ID NO: 910465 - DNA, 25 bp, Homo sapien
atcagggatcccttgctctgtggcc

SEQ ID NO: 910466 - DNA, 25 bp, Homo sapien
gacttctctcagagcggccagtcat

SEQ ID NO: 910467 - DNA, 25 bp, Homo sapien
tggtgtggtcgttgcatcaggatct

SEQ ID NO: 910468 - DNA, 25 bp, Homo sapien
aaggttcccgtgagaatggtgtggt

SEQ ID NO: 910469 - DNA, 25 bp, Homo sapien
caggttggccaagggtcacgggtga

SEQ ID NO: 910470 - DNA, 25 bp, Homo sapien
tcacgggtgaaggttcccgtgagaa

SEQ ID NO: 910471 - DNA, 25 bp, Homo sapien
ccgagtcccagcgagccaagcagcc

SEQ ID NO: 910472 - DNA, 25 bp, Homo sapien
caccgagtcccagcgagccaagcag

SEQ ID NO: 910473 - DNA, 25 bp, Homo sapien
ggcaccgagtcccagcgagccaagc

SEQ ID NO: 910474 - DNA, 25 bp, Homo sapien
aatggcaccgagtcccagcgagcca

SEQ ID NO: 910475 - DNA, 25 bp, Homo sapien
ctacacaggtgttgggcgcagcctt

SEQ ID NO: 910476 - DNA, 25 bp, Homo sapien
cagtgtgtcacatcgcaggtccttc

SEQ ID NO: 910477 - DNA, 25 bp, Homo sapien
ggtgcctcacaagtgttcacacgga

SEQ ID NO: 910478 - DNA, 25 bp, Homo sapien
tgtggctttagctcaataaaactgc

SEQ ID NO: 910479 - DNA, 25 bp, Homo sapien
cagattcggtatttcactgcagtcc

SEQ ID NO: 910480 - DNA, 25 bp, Homo sapien
catagcttgaagagagagttcgtca

SEQ ID NO: 910481 - DNA, 25 bp, Homo sapien
tcattccagttgacgaaggtgtctt

SEQ ID NO: 910482 - DNA, 25 bp, Homo sapien
gcattgactaaaaagagatcccagg

SEQ ID NO: 910483 - DNA, 25 bp, Homo sapien
gggacaggaacacccgggtctcaga

SEQ ID NO: 910484 - DNA, 25 bp, Homo sapien
catcacaaggaactgatcatagctg

SEQ ID NO: 910485 - DNA, 25 bp, Homo sapien
cagcggtggcgcattcccagtgata

SEQ ID NO: 910486 - DNA, 25 bp, Homo sapien
gtctcagaagagttccggccaccac

SEQ ID NO: 910487 - DNA, 25 bp, Homo sapien
tggagaagaataggtgtgtgccctc

SEQ ID NO: 910488 - DNA, 25 bp, Homo sapien
agagtcgccccagggtcgtcagggt

SEQ ID NO: 910489 - DNA, 25 bp, Homo sapien
tagttgctgtacaccacactgcctt

SEQ ID NO: 910490 - DNA, 25 bp, Homo sapien
tgtgtgccctcggagatcacactga

SEQ ID NO: 910491 - DNA, 25 bp, Homo sapien
ggttttgttatacacattggaagga

SEQ ID NO: 910492 - DNA, 25 bp, Homo sapien
ccagcacagggcttattcaaattag

SEQ ID NO: 910493 - DNA, 25 bp, Homo sapien
tatacacattggaaggagcttttca

SEQ ID NO: 910494 - DNA, 25 bp, Homo sapien
gcttattcaaattaggtacacagga

SEQ ID NO: 910495 - DNA, 25 bp, Homo sapien
ggccagtagagcagtaagtcagcca

SEQ ID NO: 910496 - DNA, 25 bp, Homo sapien
cgaacaggtgttgaattccaaatgc

SEQ ID NO: 910497 - DNA, 25 bp, Homo sapien
tcccttttcctggatcgaacaggtg

SEQ ID NO: 910498 - DNA, 25 bp, Homo sapien
gagaagcatgggtttcattgggcca

SEQ ID NO: 910499 - DNA, 25 bp, Homo sapien
ccatactccaaggtgtggctcggga

SEQ ID NO: 910500 - DNA, 25 bp, Homo sapien
gaggatgagggtctgtctgtgagtg

SEQ ID NO: 910501 - DNA, 25 bp, Homo sapien
gcccttcagagtccatcaagttcca

SEQ ID NO: 910502 - DNA, 25 bp, Homo sapien
caagggcagtgtagttcccatactc

SEQ ID NO: 910503 - DNA, 25 bp, Homo sapien
actgacattattgaaggcaaggacc

SEQ ID NO: 910504 - DNA, 25 bp, Homo sapien
gctcgcacacgatgaaaagttgctg

SEQ ID NO: 910505 - DNA, 25 bp, Homo sapien
gaaggcaaggacctccactgtaaat

SEQ ID NO: 910506 - DNA, 25 bp, Homo sapien
aaagttgctgtcttagagtggaggc

SEQ ID NO: 910507 - DNA, 25 bp, Homo sapien
gaagttgatccagcactcaaaggcc

SEQ ID NO: 910508 - DNA, 25 bp, Homo sapien
gacgtgagccgattggccacaattt

SEQ ID NO: 910509 - DNA, 25 bp, Homo sapien
acaggtaggcaacatctgtgccgaa

SEQ ID NO: 910510 - DNA, 25 bp, Homo sapien
gctcatcctgttggaagccttaacc

SEQ ID NO: 910511 - DNA, 25 bp, Homo sapien
ccaaaataccactcaaattccaggg

SEQ ID NO: 910512 - DNA, 25 bp, Homo sapien
gttgtcctcactggtggatcctctc

SEQ ID NO: 910513 - DNA, 25 bp, Homo sapien
tctgtgtctgtggcaaacacagttc

SEQ ID NO: 910514 - DNA, 25 bp, Homo sapien
tcttgaagttgtcctcactggtgga

SEQ ID NO: 910515 - DNA, 25 bp, Homo sapien
tggtgaggaagctctgatatgcatg

SEQ ID NO: 910516 - DNA, 25 bp, Homo sapien
catgggcttgagtgatggtgaggaa

SEQ ID NO: 910517 - DNA, 25 bp, Homo sapien
tggtcatgggcttgagtgatggtga

SEQ ID NO: 910518 - DNA, 25 bp, Homo sapien
ggcttgagtgatggtgaggaagctc

SEQ ID NO: 910519 - DNA, 25 bp, Homo sapien
agatggaaagtgatgtataaccaca

SEQ ID NO: 910520 - DNA, 25 bp, Homo sapien
gatggaaagtgatgtataaccacag

SEQ ID NO: 910521 - DNA, 25 bp, Homo sapien
aaggacacgttatatgaaggaatag

SEQ ID NO: 910522 - DNA, 25 bp, Homo sapien
ctgagaaataaaggacacgttatat

SEQ ID NO: 910523 - DNA, 25 bp, Homo sapien
gattcacttgggagtcagcaaagac

SEQ ID NO: 910524 - DNA, 25 bp, Homo sapien
aataaggcccaagctccacttcggt

SEQ ID NO: 910525 - DNA, 25 bp, Homo sapien
taacagccttgagcatatagactcc

SEQ ID NO: 910526 - DNA, 25 bp, Homo sapien
gacactgctggagttcatgaacgca

SEQ ID NO: 910527 - DNA, 25 bp, Homo sapien
cagggctgcaactccctgtaacctc

SEQ ID NO: 910528 - DNA, 25 bp, Homo sapien
cacagggctgcaactccctgtaacc

SEQ ID NO: 910529 - DNA, 25 bp, Homo sapien
agggctgcaactccctgtaacctcc

SEQ ID NO: 910530 - DNA, 25 bp, Homo sapien
acagggctgcaactccctgtaacct

SEQ ID NO: 910531 - DNA, 25 bp, Homo sapien
aaaggcagaaataagctcatatcca

SEQ ID NO: 910532 - DNA, 25 bp, Homo sapien
tttgtaggtggacatatccaactga

SEQ ID NO: 910533 - DNA, 25 bp, Homo sapien
ctttgtaggtggacatatccaactg

SEQ ID NO: 910534 - DNA, 25 bp, Homo sapien
ggcagaaataagctcatatccaagg

SEQ ID NO: 910535 - DNA, 25 bp, Homo sapien
aaaagactaatgagaccagcaggag

SEQ ID NO: 910536 - DNA, 25 bp, Homo sapien
caatgtcgcagcctgatgggttctt

SEQ ID NO: 910537 - DNA, 25 bp, Homo sapien
gcaggagttgcaacaaagaatgtaa

SEQ ID NO: 910538 - DNA, 25 bp, Homo sapien
tatgtcaaaaatctagtatcaagtt

SEQ ID NO: 910539 - DNA, 25 bp, Homo sapien
aagatgagtgacaagggaagccagc

SEQ ID NO: 910540 - DNA, 25 bp, Homo sapien
gaagatgagtgacaagggaagccag

SEQ ID NO: 910541 - DNA, 25 bp, Homo sapien
agagaagatgagtgacaagggaagc

SEQ ID NO: 910542 - DNA, 25 bp, Homo sapien
agaagatgagtgacaagggaagcca

SEQ ID NO: 910543 - DNA, 25 bp, Homo sapien
tttcgagctaggatggccacaggag

SEQ ID NO: 910544 - DNA, 25 bp, Homo sapien
gcctcagacatgttgtgtagcctca

SEQ ID NO: 910545 - DNA, 25 bp, Homo sapien
aatcccagatttggaggtgcccgag

SEQ ID NO: 910546 - DNA, 25 bp, Homo sapien
ggtggtaggcagtcaccgccattgc

SEQ ID NO: 910547 - DNA, 25 bp, Homo sapien
ctgggggtgcgaggaatgccaggcg

SEQ ID NO: 910548 - DNA, 25 bp, Homo sapien
ctgggagaagtgggaaaatgtgaaa

SEQ ID NO: 910549 - DNA, 25 bp, Homo sapien
ggtctccatcgtgacagtcccagga

SEQ ID NO: 910550 - DNA, 25 bp, Homo sapien
caggggcactcgctgggagctggtc

SEQ ID NO: 910551 - DNA, 25 bp, Homo sapien
ggaaaatgtgaaatcggccacaggg

SEQ ID NO: 910552 - DNA, 25 bp, Homo sapien
gctgctgcagaagtggtgccctgga

SEQ ID NO: 910553 - DNA, 25 bp, Homo sapien
agggagctgctgcagaagtggtgcc

SEQ ID NO: 910554 - DNA, 25 bp, Homo sapien
ctgctgcagaagtggtgccctggag

SEQ ID NO: 910555 - DNA, 25 bp, Homo sapien
gagctgctgcagaagtggtgccctg

SEQ ID NO: 910556 - DNA, 25 bp, Homo sapien
aattcaattgcaggggttagatacc

SEQ ID NO: 910557 - DNA, 25 bp, Homo sapien
tgaaattcaattgcaggggttagat

SEQ ID NO: 910558 - DNA, 25 bp, Homo sapien
tcaattgcaggggttagataccaac

SEQ ID NO: 910559 - DNA, 25 bp, Homo sapien
aaattcaattgcaggggttagatac

SEQ ID NO: 910560 - DNA, 25 bp, Homo sapien
acagccgcctgtgatggaacctggg

SEQ ID NO: 910561 - DNA, 25 bp, Homo sapien
gctccaggcccttgcgattataatg

SEQ ID NO: 910562 - DNA, 25 bp, Homo sapien
caggcccttgcgattataatgaaag

SEQ ID NO: 910563 - DNA, 25 bp, Homo sapien
tgctgtctgcggtcccagtagcaca

SEQ ID NO: 910564 - DNA, 25 bp, Homo sapien
tgtccactctgtcagatgaagccca

SEQ ID NO: 910565 - DNA, 25 bp, Homo sapien
actactcatgacacttcggctctgg

SEQ ID NO: 910566 - DNA, 25 bp, Homo sapien
catgtcaacccggatcttctgtcct

SEQ ID NO: 910567 - DNA, 25 bp, Homo sapien
ttccaggtacttccaacggcatgtc

SEQ ID NO: 910568 - DNA, 25 bp, Homo sapien
tagcaaaatggagtccgaaaaacaa

SEQ ID NO: 910569 - DNA, 25 bp, Homo sapien
gcaaaatggagtccgaaaaacaaca

SEQ ID NO: 910570 - DNA, 25 bp, Homo sapien
caaaatggagtccgaaaaacaacag

SEQ ID NO: 910571 - DNA, 25 bp, Homo sapien
ttagcaaaatggagtccgaaaaaca

SEQ ID NO: 910572 - DNA, 25 bp, Homo sapien
gcatccaagtgtctgggtcacaaac

SEQ ID NO: 910573 - DNA, 25 bp, Homo sapien
ctgaagggtccaattctccccaata

SEQ ID NO: 910574 - DNA, 25 bp, Homo sapien
gggtccaattctccccaatactgct

SEQ ID NO: 910575 - DNA, 25 bp, Homo sapien
tgaagggtccaattctccccaatac

SEQ ID NO: 910576 - DNA, 25 bp, Homo sapien
aagggtccaattctccccaatactg

SEQ ID NO: 910577 - DNA, 25 bp, Homo sapien
tatcacaatccagaggcgcctgtgt

SEQ ID NO: 910578 - DNA, 25 bp, Homo sapien
taacaacacttaacgctgcttcact

SEQ ID NO: 910579 - DNA, 25 bp, Homo sapien
ctgttatcacaatccagaggcgcct

SEQ ID NO: 910580 - DNA, 25 bp, Homo sapien
tcattaacaacacttaacgctgctt

SEQ ID NO: 910581 - DNA, 25 bp, Homo sapien
ggctctgtgattcccggtcttctgc

SEQ ID NO: 910582 - DNA, 25 bp, Homo sapien
tgattcccggtcttctgcctttcca

SEQ ID NO: 910583 - DNA, 25 bp, Homo sapien
acaccaaggacagccacacttccca

SEQ ID NO: 910584 - DNA, 25 bp, Homo sapien
tcccatcactcataagaagcacatg

SEQ ID NO: 910585 - DNA, 25 bp, Homo sapien
gtcagtgctcacagacagctcacca

SEQ ID NO: 910586 - DNA, 25 bp, Homo sapien
gcacagatgaagaccccagctcttg

SEQ ID NO: 910587 - DNA, 25 bp, Homo sapien
aggagggctacagctgcacagatga

SEQ ID NO: 910588 - DNA, 25 bp, Homo sapien
tccacctccaggagggctacagctg

SEQ ID NO: 910589 - DNA, 25 bp, Homo sapien
ggtcatcagaaatgttctgggctgc

SEQ ID NO: 910590 - DNA, 25 bp, Homo sapien
tggtcatcagaaatgttctgggctg

SEQ ID NO: 910591 - DNA, 25 bp, Homo sapien
cctggtcatcagaaatgttctgggc

SEQ ID NO: 910592 - DNA, 25 bp, Homo sapien
ttcctggtcatcagaaatgttctgg

SEQ ID NO: 910593 - DNA, 25 bp, Homo sapien
agctggtcacaagtatgacagtcag

SEQ ID NO: 910594 - DNA, 25 bp, Homo sapien
atgacagtcagcagaccagcttctt

SEQ ID NO: 910595 - DNA, 25 bp, Homo sapien
tggtcacaagtatgacagtcagcag

SEQ ID NO: 910596 - DNA, 25 bp, Homo sapien
acaagtatgacagtcagcagaccag

SEQ ID NO: 910597 - DNA, 25 bp, Homo sapien
cctttgagctggttcccagagcagg

SEQ ID NO: 910598 - DNA, 25 bp, Homo sapien
caggggcaaggctgcgatcagcccc

SEQ ID NO: 910599 - DNA, 25 bp, Homo sapien
gcaaggctgcgatcagccccctcca

SEQ ID NO: 910600 - DNA, 25 bp, Homo sapien
agagcaggctgcaccaaggagagca

SEQ ID NO: 910601 - DNA, 25 bp, Homo sapien
tggtggcaaactcgcgagctcaagc

SEQ ID NO: 910602 - DNA, 25 bp, Homo sapien
tcagccaaacggagaagtgaagctt

SEQ ID NO: 910603 - DNA, 25 bp, Homo sapien
cagaattcgagagtgacatcagcca

SEQ ID NO: 910604 - DNA, 25 bp, Homo sapien
accatttggcactacacgggctgta

SEQ ID NO: 910605 - DNA, 25 bp, Homo sapien
aaatggtcaaaagccctctccctct

SEQ ID NO: 910606 - DNA, 25 bp, Homo sapien
acggtctcccactgatgccgagccg

SEQ ID NO: 910607 - DNA, 25 bp, Homo sapien
ggtctcccactgatgccgagccgaa

SEQ ID NO: 910608 - DNA, 25 bp, Homo sapien
tctctttccacggtctcccactgat

SEQ ID NO: 910609 - DNA, 25 bp, Homo sapien
tcactgcagctggaattaatttcgt

SEQ ID NO: 910610 - DNA, 25 bp, Homo sapien
tttcgttacaatgagaggaggaagg

SEQ ID NO: 910611 - DNA, 25 bp, Homo sapien
tatgtatttgataataaacatcaca

SEQ ID NO: 910612 - DNA, 25 bp, Homo sapien
cacatagagcaaatggttaagtcac

SEQ ID NO: 910613 - DNA, 25 bp, Homo sapien
tatggtctcatcacttaacacagat

SEQ ID NO: 910614 - DNA, 25 bp, Homo sapien
tctttccagaacgacagatccgata

SEQ ID NO: 910615 - DNA, 25 bp, Homo sapien
tgagcacatctaccagtactgaatc

SEQ ID NO: 910616 - DNA, 25 bp, Homo sapien
cacctccacaggacaatgagatgta

SEQ ID NO: 910617 - DNA, 25 bp, Homo sapien
ggcaacagctttacgaattctggct

SEQ ID NO: 910618 - DNA, 25 bp, Homo sapien
caagactgactgtgcgctacaggcc

SEQ ID NO: 910619 - DNA, 25 bp, Homo sapien
tgggccagctctctaggcatcaaga

SEQ ID NO: 910620 - DNA, 25 bp, Homo sapien
ctacaggccgtgctgagctagagcc

SEQ ID NO: 910621 - DNA, 25 bp, Homo sapien
tcgatgtgcggtgctgtgagggcac

SEQ ID NO: 910622 - DNA, 25 bp, Homo sapien
taagtacagtgtgtcgatgtgcggt

SEQ ID NO: 910623 - DNA, 25 bp, Homo sapien
ttaaaatgttagagagggacaaata

SEQ ID NO: 910624 - DNA, 25 bp, Homo sapien
gagggacaaataagtacagtgtgtc

SEQ ID NO: 910625 - DNA, 25 bp, Homo sapien
tctcccatcctgacaaagtctctgc

SEQ ID NO: 910626 - DNA, 25 bp, Homo sapien
ctcccatcctgacaaagtctctgca

SEQ ID NO: 910627 - DNA, 25 bp, Homo sapien
cctctcccatcctgacaaagtctct

SEQ ID NO: 910628 - DNA, 25 bp, Homo sapien
cctgacaaagtctctgcatgccaac

SEQ ID NO: 910629 - DNA, 25 bp, Homo sapien
tcatgaagcagatcaaaatgcacca

SEQ ID NO: 910630 - DNA, 25 bp, Homo sapien
gaagggacacgtcttcatgaagcag

SEQ ID NO: 910631 - DNA, 25 bp, Homo sapien
ggatgaaatactgaagggacacgtc

SEQ ID NO: 910632 - DNA, 25 bp, Homo sapien
ggacagcgcagggatgaaatactga

SEQ ID NO: 910633 - DNA, 25 bp, Homo sapien
tgcataaggcctttgtgggatttac

SEQ ID NO: 910634 - DNA, 25 bp, Homo sapien
tcctaatatctatgtgcacttcagc

SEQ ID NO: 910635 - DNA, 25 bp, Homo sapien
gcaagaaactgtaggagcttcctaa

SEQ ID NO: 910636 - DNA, 25 bp, Homo sapien
tgtgggatttacttgttgtccagca

SEQ ID NO: 910637 - DNA, 25 bp, Homo sapien
gttccacgtttctgtcctcatgggt

SEQ ID NO: 910638 - DNA, 25 bp, Homo sapien
ctgtcctcatgggtgctttcagagg

SEQ ID NO: 910639 - DNA, 25 bp, Homo sapien
gtgttccacgtttctgtcctcatgg

SEQ ID NO: 910640 - DNA, 25 bp, Homo sapien
ccacgtttctgtcctcatgggtgct

SEQ ID NO: 910641 - DNA, 25 bp, Homo sapien
ctcaggcagcccctgctactgtgca

SEQ ID NO: 910642 - DNA, 25 bp, Homo sapien
ggcagcccctgctactgtgcagctg

SEQ ID NO: 910643 - DNA, 25 bp, Homo sapien
caggcagcccctgctactgtgcagc

SEQ ID NO: 910644 - DNA, 25 bp, Homo sapien
gctcaggcagcccctgctactgtgc

SEQ ID NO: 910645 - DNA, 25 bp, Homo sapien
taaaatgagttgtaacacatactaa

SEQ ID NO: 910646 - DNA, 25 bp, Homo sapien
ctaatggaggatttccaagatcttt

SEQ ID NO: 910647 - DNA, 25 bp, Homo sapien
gtaacacatactaattcagtttcta

SEQ ID NO: 910648 - DNA, 25 bp, Homo sapien
caattctccatctaggtttgcttca

SEQ ID NO: 910649 - DNA, 25 bp, Homo sapien
ggatgtggtgaggatgcatgtttta

SEQ ID NO: 910650 - DNA, 25 bp, Homo sapien
gggacagatctcagaaagtcctggg

SEQ ID NO: 910651 - DNA, 25 bp, Homo sapien
tacaatgaaacttcctcctaaaaga

SEQ ID NO: 910652 - DNA, 25 bp, Homo sapien
tggtccactttcactcctacaatga

SEQ ID NO: 910653 - DNA, 25 bp, Homo sapien
gcagcatcgacatctcccaggagct

SEQ ID NO: 910654 - DNA, 25 bp, Homo sapien
ggtctcaggtaatatctttttagca

SEQ ID NO: 910655 - DNA, 25 bp, Homo sapien
aggcagcatcgacatctcccaggag

SEQ ID NO: 910656 - DNA, 25 bp, Homo sapien
agtactgctacatgatgtggtctga

SEQ ID NO: 910657 - DNA, 25 bp, Homo sapien
cttcatagtcttcaagactggtaaa

SEQ ID NO: 910658 - DNA, 25 bp, Homo sapien
atagtcttcaagactggtaaataaa

SEQ ID NO: 910659 - DNA, 25 bp, Homo sapien
catagtcttcaagactggtaaataa

SEQ ID NO: 910660 - DNA, 25 bp, Homo sapien
tcatagtcttcaagactggtaaata

SEQ ID NO: 910661 - DNA, 25 bp, Homo sapien
tttcgtgcacatccagatatcgctc

SEQ ID NO: 910662 - DNA, 25 bp, Homo sapien
cttggctttcgtgcacatccagata

SEQ ID NO: 910663 - DNA, 25 bp, Homo sapien
gtgcacatccagatatcgctcctga

SEQ ID NO: 910664 - DNA, 25 bp, Homo sapien
acatccagatatcgctcctgaccgg

SEQ ID NO: 910665 - DNA, 25 bp, Homo sapien
atttaatgtggggtgtacagcagga

SEQ ID NO: 910666 - DNA, 25 bp, Homo sapien
atgccatttaatgtggggtgtacag

SEQ ID NO: 910667 - DNA, 25 bp, Homo sapien
tggggtgtacagcaggactgcaggc

SEQ ID NO: 910668 - DNA, 25 bp, Homo sapien
tgtggggtgtacagcaggactgcag

SEQ ID NO: 910669 - DNA, 25 bp, Homo sapien
gatctgggaccaccggttcttgtaa

SEQ ID NO: 910670 - DNA, 25 bp, Homo sapien
atctgggaccaccggttcttgtaag

SEQ ID NO: 910671 - DNA, 25 bp, Homo sapien
tcacaatgcggctactgcttgacat

SEQ ID NO: 910672 - DNA, 25 bp, Homo sapien
ctttatggggatgtcatgggtcaca

SEQ ID NO: 910673 - DNA, 25 bp, Homo sapien
catgggtcacaatgcggctactgct

SEQ ID NO: 910674 - DNA, 25 bp, Homo sapien
ggatgtcatgggtcacaatgcggct

SEQ ID NO: 910675 - DNA, 25 bp, Homo sapien
gactgcaaagagttgagagttatga

SEQ ID NO: 910676 - DNA, 25 bp, Homo sapien
taccaaacttatactgtgacatgaa

SEQ ID NO: 910677 - DNA, 25 bp, Homo sapien
aaaaacataccaaacttatactgtg

SEQ ID NO: 910678 - DNA, 25 bp, Homo sapien
gaaatgccctaattagctctgagaa

SEQ ID NO: 910679 - DNA, 25 bp, Homo sapien
gagaccgtgaggcagggaaagtgtt

SEQ ID NO: 910680 - DNA, 25 bp, Homo sapien
ctgggcagtcttcaaggctcgagat

SEQ ID NO: 910681 - DNA, 25 bp, Homo sapien
cgagataagttttccgatgttagct

SEQ ID NO: 910682 - DNA, 25 bp, Homo sapien
agagacaccctccatttgaaattcg

SEQ ID NO: 910683 - DNA, 25 bp, Homo sapien
gcaagcttggctatcatgttactga

SEQ ID NO: 910684 - DNA, 25 bp, Homo sapien
gatgaagttaagcttatcagggctg

SEQ ID NO: 910685 - DNA, 25 bp, Homo sapien
cagcttgtcacaaaggatgaagtta

SEQ ID NO: 910686 - DNA, 25 bp, Homo sapien
tccattagccagcttgtcacaaagg

SEQ ID NO: 910687 - DNA, 25 bp, Homo sapien
cgcgctcactgcttccttccgttcc

SEQ ID NO: 910688 - DNA, 25 bp, Homo sapien
gcgcgctcactgcttccttccgttc

SEQ ID NO: 910689 - DNA, 25 bp, Homo sapien
cgcgcgctcactgcttccttccgtt

SEQ ID NO: 910690 - DNA, 25 bp, Homo sapien
gcgctcactgcttccttccgttcct

SEQ ID NO: 910691 - DNA, 25 bp, Homo sapien
agacaggccccgtccacgatcttgg

SEQ ID NO: 910692 - DNA, 25 bp, Homo sapien
gtggttcagacaggccccgtccacg

SEQ ID NO: 910693 - DNA, 25 bp, Homo sapien
cgtccacgatcttggcccgaaactt

SEQ ID NO: 910694 - DNA, 25 bp, Homo sapien
gtgtgaagtggttcagacaggcccc

SEQ ID NO: 910695 - DNA, 25 bp, Homo sapien
ccgcggatggcgcagccgcggcggg

SEQ ID NO: 910696 - DNA, 25 bp, Homo sapien
gccgcggatggcgcagccgcggcgg

SEQ ID NO: 910697 - DNA, 25 bp, Homo sapien
ccggctcgggctacgcgactcttac

SEQ ID NO: 910698 - DNA, 25 bp, Homo sapien
acacggcagcgcgaacagtggttcc

SEQ ID NO: 910699 - DNA, 25 bp, Homo sapien
acagaaaagcgtcgcgccctgagtg

SEQ ID NO: 910700 - DNA, 25 bp, Homo sapien
tgtccccgcccggaaacacggcagc

SEQ ID NO: 910701 - DNA, 25 bp, Homo sapien
tatctccgggccacgccccggagga

SEQ ID NO: 910702 - DNA, 25 bp, Homo sapien
cacgccccggaggaggtggggctag

SEQ ID NO: 910703 - DNA, 25 bp, Homo sapien
atctccgggccacgccccggaggag

SEQ ID NO: 910704 - DNA, 25 bp, Homo sapien
tgggtgcggtatcatctaagagaat

SEQ ID NO: 910705 - DNA, 25 bp, Homo sapien
caattctcaattcctatgggtgcgg

SEQ ID NO: 910706 - DNA, 25 bp, Homo sapien
caggcaagtatgaaccactttgagg

SEQ ID NO: 910707 - DNA, 25 bp, Homo sapien
tattctggacatgtggcatggcctt

SEQ ID NO: 910708 - DNA, 25 bp, Homo sapien
atgtgcttgcctggtgtgccatgga

SEQ ID NO: 910709 - DNA, 25 bp, Homo sapien
gtgcttgcctggtgtgccatggacc

SEQ ID NO: 910710 - DNA, 25 bp, Homo sapien
ctagatgtgcttgcctggtgtgcca

SEQ ID NO: 910711 - DNA, 25 bp, Homo sapien
agatgtgcttgcctggtgtgccatg

SEQ ID NO: 910712 - DNA, 25 bp, Homo sapien
tataaacaagtatacttcgggtgtc

SEQ ID NO: 910713 - DNA, 25 bp, Homo sapien
tatacttcgggtgtccccagttgct

SEQ ID NO: 910714 - DNA, 25 bp, Homo sapien
acaagtatacttcgggtgtccccag

SEQ ID NO: 910715 - DNA, 25 bp, Homo sapien
ggtgtccccagttgctaaagatatt

SEQ ID NO: 910716 - DNA, 25 bp, Homo sapien
tcaaatgtttgaacggtggttcctg

SEQ ID NO: 910717 - DNA, 25 bp, Homo sapien
caaatgtttgaacggtggttcctgt

SEQ ID NO: 910718 - DNA, 25 bp, Homo sapien
caacagatatagagattgtaatgaa

SEQ ID NO: 910719 - DNA, 25 bp, Homo sapien
agcaacagatatagagattgtaatg

SEQ ID NO: 910720 - DNA, 25 bp, Homo sapien
attgtaatgaatggatgcagttgtg

SEQ ID NO: 910721 - DNA, 25 bp, Homo sapien
agattgtaatgaatggatgcagttg

SEQ ID NO: 910722 - DNA, 25 bp, Homo sapien
acaaacctgcacatatacctctgaa

SEQ ID NO: 910723 - DNA, 25 bp, Homo sapien
caaacctgcacatatacctctgaac

SEQ ID NO: 910724 - DNA, 25 bp, Homo sapien
aacaaacctgcacatatacctctga

SEQ ID NO: 910725 - DNA, 25 bp, Homo sapien
gagcaaaatgctgagggcgccagag

SEQ ID NO: 910726 - DNA, 25 bp, Homo sapien
ctaacaaggctggagcaaaatgctg

SEQ ID NO: 910727 - DNA, 25 bp, Homo sapien
aatgctgagggcgccagagggatat

SEQ ID NO: 910728 - DNA, 25 bp, Homo sapien
taacaaggctggagcaaaatgctga

SEQ ID NO: 910729 - DNA, 25 bp, Homo sapien
ttattgagacaaagtagaccagtgg

SEQ ID NO: 910730 - DNA, 25 bp, Homo sapien
caagtagaagctttgggataatgag

SEQ ID NO: 910731 - DNA, 25 bp, Homo sapien
catggaggcaagtacccaaataaac

SEQ ID NO: 910732 - DNA, 25 bp, Homo sapien
tggagaagtgggacaaggaattact

SEQ ID NO: 910733 - DNA, 25 bp, Homo sapien
tcaggccaatctgaatgacaaattt

SEQ ID NO: 910734 - DNA, 25 bp, Homo sapien
ctgaatgacaaatttagatagcttc

SEQ ID NO: 910735 - DNA, 25 bp, Homo sapien
gaatgacaaatttagatagcttctt

SEQ ID NO: 910736 - DNA, 25 bp, Homo sapien
atgacaaatttagatagcttcttac

SEQ ID NO: 910737 - DNA, 25 bp, Homo sapien
catggtaacagcagttggtatgatc

SEQ ID NO: 910738 - DNA, 25 bp, Homo sapien
caagcttgattagggtatgaccctg

SEQ ID NO: 910739 - DNA, 25 bp, Homo sapien
gatctttgtagcaagcttgattagg

SEQ ID NO: 910740 - DNA, 25 bp, Homo sapien
agttggtatgatctttgtagcaagc

SEQ ID NO: 910741 - DNA, 25 bp, Homo sapien
aaaagcccagcactttccagggtag

SEQ ID NO: 910742 - DNA, 25 bp, Homo sapien
aaagcccagcactttccagggtaga

SEQ ID NO: 910743 - DNA, 25 bp, Homo sapien
agcccagcactttccagggtagaca

SEQ ID NO: 910744 - DNA, 25 bp, Homo sapien
ccagcactttccagggtagacatcc

SEQ ID NO: 910745 - DNA, 25 bp, Homo sapien
cccatgccagtacaattttgcttta

SEQ ID NO: 910746 - DNA, 25 bp, Homo sapien
tttcatgatttaggaaacctatccc

SEQ ID NO: 910747 - DNA, 25 bp, Homo sapien
gcatttcatgatttaggaaacctat

SEQ ID NO: 910748 - DNA, 25 bp, Homo sapien
ctatcccatgccagtacaattttgc

SEQ ID NO: 910749 - DNA, 25 bp, Homo sapien
catactcaggaattgataggaaaag

SEQ ID NO: 910750 - DNA, 25 bp, Homo sapien
ggattctgtatcacctaaaaacgta

SEQ ID NO: 910751 - DNA, 25 bp, Homo sapien
tgggcaaattataagcgaggtaaaa

SEQ ID NO: 910752 - DNA, 25 bp, Homo sapien
gaaaaccaacaatgctccaaatgtc

SEQ ID NO: 910753 - DNA, 25 bp, Homo sapien
gccgacttcagggcataatcagcca

SEQ ID NO: 910754 - DNA, 25 bp, Homo sapien
ggccgacttcagggcataatcagcc

SEQ ID NO: 910755 - DNA, 25 bp, Homo sapien
ccgacttcagggcataatcagccat

SEQ ID NO: 910756 - DNA, 25 bp, Homo sapien
ctttttaagtacataattgaccaag

SEQ ID NO: 910757 - DNA, 25 bp, Homo sapien
tacataattgaccaagtttgacact

SEQ ID NO: 910758 - DNA, 25 bp, Homo sapien
taagtacataattgaccaagtttga

SEQ ID NO: 910759 - DNA, 25 bp, Homo sapien
cataattgaccaagtttgacacttc

SEQ ID NO: 910760 - DNA, 25 bp, Homo sapien
tcactccccgtcaccctggacatcc

SEQ ID NO: 910761 - DNA, 25 bp, Homo sapien
ctccccgtcaccctggacatccgcg

SEQ ID NO: 910762 - DNA, 25 bp, Homo sapien
ccccgtcaccctggacatccgcgct

SEQ ID NO: 910763 - DNA, 25 bp, Homo sapien
cgtcaccctggacatccgcgctaac

SEQ ID NO: 910764 - DNA, 25 bp, Homo sapien
cctgcccaacccgcctagcctcatc

SEQ ID NO: 910765 - DNA, 25 bp, Homo sapien
ccaacccgcctagcctcatccagga

SEQ ID NO: 910766 - DNA, 25 bp, Homo sapien
cccaacccgcctagcctcatccagg

SEQ ID NO: 910767 - DNA, 25 bp, Homo sapien
tgcccaacccgcctagcctcatcca

SEQ ID NO: 910768 - DNA, 25 bp, Homo sapien
ccagttgtgattattgtccatacca

SEQ ID NO: 910769 - DNA, 25 bp, Homo sapien
ggtctccatgggtgttccagttgtg

SEQ ID NO: 910770 - DNA, 25 bp, Homo sapien
ggacatctatttgttcgatcaaaaa

SEQ ID NO: 910771 - DNA, 25 bp, Homo sapien
ttagcaatgccttcaggacatctat

SEQ ID NO: 910772 - DNA, 25 bp, Homo sapien
aattgtagcctgagttcagtggaag

SEQ ID NO: 910773 - DNA, 25 bp, Homo sapien
ctttccaattgggaacaccttgcat

SEQ ID NO: 910774 - DNA, 25 bp, Homo sapien
ggaacaccttgcatttccggtgtag

SEQ ID NO: 910775 - DNA, 25 bp, Homo sapien
agagcagtggctttcgaattgtagc

SEQ ID NO: 910776 - DNA, 25 bp, Homo sapien
ttgctctttaggcatacgaagtctg

SEQ ID NO: 910777 - DNA, 25 bp, Homo sapien
gctctttaggcatacgaagtctggc

SEQ ID NO: 910778 - DNA, 25 bp, Homo sapien
agttgctctttaggcatacgaagtc

SEQ ID NO: 910779 - DNA, 25 bp, Homo sapien
ccagttgctctttaggcatacgaag

SEQ ID NO: 910780 - DNA, 25 bp, Homo sapien
ctctgagaggcccgcctctttccta

SEQ ID NO: 910781 - DNA, 25 bp, Homo sapien
aataaatagcacattgactcctgat

SEQ ID NO: 910782 - DNA, 25 bp, Homo sapien
agcacattgactcctgatatacaga

SEQ ID NO: 910783 - DNA, 25 bp, Homo sapien
aatagcacattgactcctgatatac

SEQ ID NO: 910784 - DNA, 25 bp, Homo sapien
tcatgaatgtatttgaaggagatga

SEQ ID NO: 910785 - DNA, 25 bp, Homo sapien
gaatgtatttgaaggagatgaggta

SEQ ID NO: 910786 - DNA, 25 bp, Homo sapien
ttgaaggagatgaggtaatgcaaat

SEQ ID NO: 910787 - DNA, 25 bp, Homo sapien
ctgtacatcatgaatgtatttgaag

SEQ ID NO: 910788 - DNA, 25 bp, Homo sapien
gagcacatggcgacgttagaggacc

SEQ ID NO: 910789 - DNA, 25 bp, Homo sapien
gactttctgctatggaggtggtcag

SEQ ID NO: 910790 - DNA, 25 bp, Homo sapien
taaaggcctgaacacagtctgagag

SEQ ID NO: 910791 - DNA, 25 bp, Homo sapien
tatggacggtcttggtggtgcccaa

SEQ ID NO: 910792 - DNA, 25 bp, Homo sapien
ctatgtcccttagctcatcctgctg

SEQ ID NO: 910793 - DNA, 25 bp, Homo sapien
gaatggcctagctgcatcctcctgt

SEQ ID NO: 910794 - DNA, 25 bp, Homo sapien
tgtcactgagaagaacttgggtctg

SEQ ID NO: 910795 - DNA, 25 bp, Homo sapien
tgggtggccagcacctctatgtccc

SEQ ID NO: 910796 - DNA, 25 bp, Homo sapien
gcatataattgtctggatttctgag

SEQ ID NO: 910797 - DNA, 25 bp, Homo sapien
tatggcatataattgtctggatttc

SEQ ID NO: 910798 - DNA, 25 bp, Homo sapien
caattatggcatataattgtctgga

SEQ ID NO: 910799 - DNA, 25 bp, Homo sapien
tattctgcaattatggcatataatt

SEQ ID NO: 910800 - DNA, 25 bp, Homo sapien
caagaagaaaagtcagtgtaagcat

SEQ ID NO: 910801 - DNA, 25 bp, Homo sapien
tacaagaagaaaagtcagtgtaagc

SEQ ID NO: 910802 - DNA, 25 bp, Homo sapien
acaagaagaaaagtcagtgtaagca

SEQ ID NO: 910803 - DNA, 25 bp, Homo sapien
gaataatcttccatgatcgagttac

SEQ ID NO: 910804 - DNA, 25 bp, Homo sapien
ggcgtcttcagagcaacgtctaaaa

SEQ ID NO: 910805 - DNA, 25 bp, Homo sapien
tggcgctaccgctggcgtcttcaga

SEQ ID NO: 910806 - DNA, 25 bp, Homo sapien
acaaagcattgccactggcgctacc

SEQ ID NO: 910807 - DNA, 25 bp, Homo sapien
gattttcgtcctctgataacaaagc

SEQ ID NO: 910808 - DNA, 25 bp, Homo sapien
gcagcccttcttgcctttgtttttc

SEQ ID NO: 910809 - DNA, 25 bp, Homo sapien
cttcttgcctttgtttttccactca

SEQ ID NO: 910810 - DNA, 25 bp, Homo sapien
ttcttgcctttgtttttccactcat

SEQ ID NO: 910811 - DNA, 25 bp, Homo sapien
aacagctggtaggatgaagagcaac

SEQ ID NO: 910812 - DNA, 25 bp, Homo sapien
aagaacaaacagctggtaggatgaa

SEQ ID NO: 910813 - DNA, 25 bp, Homo sapien
gaacaaacagctggtaggatgaaga

SEQ ID NO: 910814 - DNA, 25 bp, Homo sapien
caaacagctggtaggatgaagagca

SEQ ID NO: 910815 - DNA, 25 bp, Homo sapien
cctccacgggtgtttcttcttgaag

SEQ ID NO: 910816 - DNA, 25 bp, Homo sapien
tgaagacggaattttgaaaagcttc

SEQ ID NO: 910817 - DNA, 25 bp, Homo sapien
tgtcttcttcctccacgggtgtttc

SEQ ID NO: 910818 - DNA, 25 bp, Homo sapien
gttttgtataatgtcttcttcctcc

SEQ ID NO: 910819 - DNA, 25 bp, Homo sapien
ttcattcccatgaagcaccattggt

SEQ ID NO: 910820 - DNA, 25 bp, Homo sapien
gaagcaccattggtaatatactcat

SEQ ID NO: 910821 - DNA, 25 bp, Homo sapien
ccagcgctaggcgatcgtaaggcgc

SEQ ID NO: 910822 - DNA, 25 bp, Homo sapien
tgtataccggcgtgatgtgctccct

SEQ ID NO: 910823 - DNA, 25 bp, Homo sapien
tgtataccctgcatggaagtgccag

SEQ ID NO: 910824 - DNA, 25 bp, Homo sapien
tgtttacctggcgtggacatgcccc

SEQ ID NO: 910825 - DNA, 25 bp, Homo sapien
ttttgtgccaccctagagtcttgtg

SEQ ID NO: 910826 - DNA, 25 bp, Homo sapien
tgggctccttctcggtaaattgcac

SEQ ID NO: 910827 - DNA, 25 bp, Homo sapien
tgcactgtagtgttaccggcgggtc

SEQ ID NO: 910828 - DNA, 25 bp, Homo sapien
cctgctctttgagggatgtagccta

SEQ ID NO: 910829 - DNA, 25 bp, Homo sapien
cacgtgctctgtattttaagtttgg

SEQ ID NO: 910830 - DNA, 25 bp, Homo sapien
tcttatgttgctcgtggcatcggcc

SEQ ID NO: 910831 - DNA, 25 bp, Homo sapien
gcatagcacttcttatcaggccaat

SEQ ID NO: 910832 - DNA, 25 bp, Homo sapien
tggatctactaaaaggcaagcaggc

SEQ ID NO: 910833 - DNA, 25 bp, Homo sapien
gttcagggaaggctatctgggagat

SEQ ID NO: 910834 - DNA, 25 bp, Homo sapien
tgggagatgacctttacgttgagac

SEQ ID NO: 910835 - DNA, 25 bp, Homo sapien
ggttcagggaaggctatctgggaga

SEQ ID NO: 910836 - DNA, 25 bp, Homo sapien
attgtttttgttaagccgcactaca

SEQ ID NO: 910837 - DNA, 25 bp, Homo sapien
atcagctcacgtgatgtgaaaaaac

SEQ ID NO: 910838 - DNA, 25 bp, Homo sapien
ttgcaatcagctcacgtgatgtgaa

SEQ ID NO: 910839 - DNA, 25 bp, Homo sapien
caatcagctcacgtgatgtgaaaaa

SEQ ID NO: 910840 - DNA, 25 bp, Homo sapien
tattattcccctgcgtagacgagga

SEQ ID NO: 910841 - DNA, 25 bp, Homo sapien
taacttgcccagtcatcagctaggg

SEQ ID NO: 910842 - DNA, 25 bp, Homo sapien
ctagggtgcggcatggccaatgacc

SEQ ID NO: 910843 - DNA, 25 bp, Homo sapien
caaaaccagtcaggtagaaggcttc

SEQ ID NO: 910844 - DNA, 25 bp, Homo sapien
gccgtccagagagatccagggtaca

SEQ ID NO: 910845 - DNA, 25 bp, Homo sapien
cggtttgaggcagttcggccactta

SEQ ID NO: 910846 - DNA, 25 bp, Homo sapien
tctcaccagagtgcgcgttcgggaa

SEQ ID NO: 910847 - DNA, 25 bp, Homo sapien
ccttgggttagtcctagagccgctt

SEQ ID NO: 910848 - DNA, 25 bp, Homo sapien
cttcgtccggccctggagcattgcg

SEQ ID NO: 910849 - DNA, 25 bp, Homo sapien
cattgcgtttgtcgccggtgtcgca

SEQ ID NO: 910850 - DNA, 25 bp, Homo sapien
tcattcgagtgctccggcgcacaga

SEQ ID NO: 910851 - DNA, 25 bp, Homo sapien
tcgcaggtggttccctcattcgagt

SEQ ID NO: 910852 - DNA, 25 bp, Homo sapien
tgttacgcgagctttcagagttcag

SEQ ID NO: 910853 - DNA, 25 bp, Homo sapien
tattgtcatcgagttatctggcagc

SEQ ID NO: 910854 - DNA, 25 bp, Homo sapien
cgtcaagtggccatcgagtcaacat

SEQ ID NO: 910855 - DNA, 25 bp, Homo sapien
gcagctccgcagagaaacttcacag

SEQ ID NO: 910856 - DNA, 25 bp, Homo sapien
gaaacacagtctgggatccggagta

SEQ ID NO: 910857 - DNA, 25 bp, Homo sapien
gcccagagaagcgaggaactccgca

SEQ ID NO: 910858 - DNA, 25 bp, Homo sapien
gtgactcgccggcaggacactgcct

SEQ ID NO: 910859 - DNA, 25 bp, Homo sapien
tctgacggtcagtttcaaagaaaca

SEQ ID NO: 910860 - DNA, 25 bp, Homo sapien
tcctgtgtgtaaggctccgtgaccg

SEQ ID NO: 910861 - DNA, 25 bp, Homo sapien
taggttactgataatctgcgcaagc

SEQ ID NO: 910862 - DNA, 25 bp, Homo sapien
cccttttgttgagatgtgcacccct

SEQ ID NO: 910863 - DNA, 25 bp, Homo sapien
gagaaggaggtatgcagagacccca

SEQ ID NO: 910864 - DNA, 25 bp, Homo sapien
gacacagcgggtcccctctttctag

SEQ ID NO: 910865 - DNA, 25 bp, Homo sapien
tgggctttggttcacgtgccccaca

SEQ ID NO: 910866 - DNA, 25 bp, Homo sapien
ggcctctggaaggtgagcttctcac

SEQ ID NO: 910867 - DNA, 25 bp, Homo sapien
tttctagtcccacgcaaggatcact

SEQ ID NO: 910868 - DNA, 25 bp, Homo sapien
cctggcccagtggtatggatgtctc

SEQ ID NO: 910869 - DNA, 25 bp, Homo sapien
aatcctggcccagtggtatggatgt

SEQ ID NO: 910870 - DNA, 25 bp, Homo sapien
tcctggcccagtggtatggatgtct

SEQ ID NO: 910871 - DNA, 25 bp, Homo sapien
ggcccagtggtatggatgtctccat

SEQ ID NO: 910872 - DNA, 25 bp, Homo sapien
gagatcctggcaggacgataaggtc

SEQ ID NO: 910873 - DNA, 25 bp, Homo sapien
tgagatcctggcaggacgataaggt

SEQ ID NO: 910874 - DNA, 25 bp, Homo sapien
tgtggtctggcagtaccctgtgttc

SEQ ID NO: 910875 - DNA, 25 bp, Homo sapien
tctccactattagagaaaacctcat

SEQ ID NO: 910876 - DNA, 25 bp, Homo sapien
accctgtgttctccactattagaga

SEQ ID NO: 910877 - DNA, 25 bp, Homo sapien
ggcagtaccctgtgttctccactat

SEQ ID NO: 910878 - DNA, 25 bp, Homo sapien
taagtgctcacgaatatgattgctg

SEQ ID NO: 910879 - DNA, 25 bp, Homo sapien
ggagacaggttgcttaatcattcac

SEQ ID NO: 910880 - DNA, 25 bp, Homo sapien
cattttcattggtatggagacaggt

SEQ ID NO: 910881 - DNA, 25 bp, Homo sapien
tcatgtacaggatcttgtgtgaaca

SEQ ID NO: 910882 - DNA, 25 bp, Homo sapien
tgattgtcatggctgcatatggact

SEQ ID NO: 910883 - DNA, 25 bp, Homo sapien
gaagatggcaagaagtgagtcagtc

SEQ ID NO: 910884 - DNA, 25 bp, Homo sapien
ttgctttcgtggctttctcctttga

SEQ ID NO: 910885 - DNA, 25 bp, Homo sapien
tccactgagtagagagttgtggaag

SEQ ID NO: 910886 - DNA, 25 bp, Homo sapien
cgctccttgaattaagtgttgtgga

SEQ ID NO: 910887 - DNA, 25 bp, Homo sapien
tggattttctgtggtcccaatcaaa

SEQ ID NO: 910888 - DNA, 25 bp, Homo sapien
atggcttcgctccttgaattaagtg

SEQ ID NO: 910889 - DNA, 25 bp, Homo sapien
caatcaaaacactaacgtgcagttt

SEQ ID NO: 910890 - DNA, 25 bp, Homo sapien
tgggcagtgccttctttcgacaacc

SEQ ID NO: 910891 - DNA, 25 bp, Homo sapien
tgccttctttcgacaaccgcctttg

SEQ ID NO: 910892 - DNA, 25 bp, Homo sapien
ttctttcgacaaccgcctttggaca

SEQ ID NO: 910893 - DNA, 25 bp, Homo sapien
ggcagtgccttctttcgacaaccgc

SEQ ID NO: 910894 - DNA, 25 bp, Homo sapien
gacagtattgagtcgttccttatcc

SEQ ID NO: 910895 - DNA, 25 bp, Homo sapien
gtgggacagtattgagtcgttcctt

SEQ ID NO: 910896 - DNA, 25 bp, Homo sapien
gggacagtattgagtcgttccttat

SEQ ID NO: 910897 - DNA, 25 bp, Homo sapien
ggacagtattgagtcgttccttatc

SEQ ID NO: 910898 - DNA, 25 bp, Homo sapien
tttggaactcacgtatattcgactg

SEQ ID NO: 910899 - DNA, 25 bp, Homo sapien
catgccacatttggaactcacgtat

SEQ ID NO: 910900 - DNA, 25 bp, Homo sapien
tatattcgactgaggaaaccgtgat

SEQ ID NO: 910901 - DNA, 25 bp, Homo sapien
cttggccatctgaaccatgccacat

SEQ ID NO: 910902 - DNA, 25 bp, Homo sapien
cagcgagttacagtgcctttgtaac

SEQ ID NO: 910903 - DNA, 25 bp, Homo sapien
ttagttcaggcctcactgtgcctga

SEQ ID NO: 910904 - DNA, 25 bp, Homo sapien
gtgcctgatctggacttacagcgag

SEQ ID NO: 910905 - DNA, 25 bp, Homo sapien
tctggacttacagcgagttacagtg

SEQ ID NO: 910906 - DNA, 25 bp, Homo sapien
ggtataatccggagaacagaagggc

SEQ ID NO: 910907 - DNA, 25 bp, Homo sapien
actggtgactcctgacattgttgca

SEQ ID NO: 910908 - DNA, 25 bp, Homo sapien
gattcattggcgtgtccctcgtacc

SEQ ID NO: 910909 - DNA, 25 bp, Homo sapien
aactgtgagccctgggagatgagcc

SEQ ID NO: 910910 - DNA, 25 bp, Homo sapien
cagtcaagcccagagttaaatcagt

SEQ ID NO: 910911 - DNA, 25 bp, Homo sapien
catatgattatcagccccatgtatg

SEQ ID NO: 910912 - DNA, 25 bp, Homo sapien
gtcagatgcatagttaagcattcct

SEQ ID NO: 910913 - DNA, 25 bp, Homo sapien
tatctaggaatacacctaacaaggt

SEQ ID NO: 910914 - DNA, 25 bp, Homo sapien
cagtatcagcaacgcgtattctcca

SEQ ID NO: 910915 - DNA, 25 bp, Homo sapien
aacgcgtattctccatgctgtctta

SEQ ID NO: 910916 - DNA, 25 bp, Homo sapien
tgtgtaaaaaccaggtcagcagaag

SEQ ID NO: 910917 - DNA, 25 bp, Homo sapien
ctgactggattgctgacgttcacag

SEQ ID NO: 910918 - DNA, 25 bp, Homo sapien
aggcgcctcagtggaccaagaagga

SEQ ID NO: 910919 - DNA, 25 bp, Homo sapien
ctgttggacaacctcaccgtccggg

SEQ ID NO: 910920 - DNA, 25 bp, Homo sapien
cttggtgtgtgtccgcagcaggaca

SEQ ID NO: 910921 - DNA, 25 bp, Homo sapien
gctctttgcttccataaaggcgcct

SEQ ID NO: 910922 - DNA, 25 bp, Homo sapien
caaactaattaaccacgtgcggaga

SEQ ID NO: 910923 - DNA, 25 bp, Homo sapien
gcagattttgctcagtaggattcca

SEQ ID NO: 910924 - DNA, 25 bp, Homo sapien
cctgaaggcttgcttgctcatggct

SEQ ID NO: 910925 - DNA, 25 bp, Homo sapien
agctgcatctgacctttcactagtg

SEQ ID NO: 910926 - DNA, 25 bp, Homo sapien
gtctgtgcctggcactttacagcca

SEQ ID NO: 910927 - DNA, 25 bp, Homo sapien
gagtctgtgcctggcactttacagc

SEQ ID NO: 910928 - DNA, 25 bp, Homo sapien
cagagtctgtgcctggcactttaca

SEQ ID NO: 910929 - DNA, 25 bp, Homo sapien
tgcatgcttccagagtctgtgcctg

SEQ ID NO: 910930 - DNA, 25 bp, Homo sapien
cagagggctgttccaaattttttgg

SEQ ID NO: 910931 - DNA, 25 bp, Homo sapien
gctaatcctagagtgctgtcttttc

SEQ ID NO: 910932 - DNA, 25 bp, Homo sapien
gctagtagaactctgcctcttcaga

SEQ ID NO: 910933 - DNA, 25 bp, Homo sapien
tatgaagggctagtagaactctgcc

SEQ ID NO: 910934 - DNA, 25 bp, Homo sapien
tgcaggccaaagaaagtttgtgttc

SEQ ID NO: 910935 - DNA, 25 bp, Homo sapien
attatgcaggccaaagaaagtttgt

SEQ ID NO: 910936 - DNA, 25 bp, Homo sapien
caggccaaagaaagtttgtgttcca

SEQ ID NO: 910937 - DNA, 25 bp, Homo sapien
tatgcaggccaaagaaagtttgtgt

SEQ ID NO: 910938 - DNA, 25 bp, Homo sapien
cgggagcctaggagagttgggtagg

SEQ ID NO: 910939 - DNA, 25 bp, Homo sapien
ctcctcacgggagcctaggagagtt

SEQ ID NO: 910940 - DNA, 25 bp, Homo sapien
gagcctaggagagttgggtagggca

SEQ ID NO: 910941 - DNA, 25 bp, Homo sapien
tcacgggagcctaggagagttgggt

SEQ ID NO: 910942 - DNA, 25 bp, Homo sapien
caaggattctacctgaacgtccggg

SEQ ID NO: 910943 - DNA, 25 bp, Homo sapien
tgtcaaaagctgctacgtaaaggct

SEQ ID NO: 910944 - DNA, 25 bp, Homo sapien
tgttctcaatgaacccaggccagtg

SEQ ID NO: 910945 - DNA, 25 bp, Homo sapien
tattcacagagaatgccaggcctat

SEQ ID NO: 910946 - DNA, 25 bp, Homo sapien
actgagattcgttggtagaggctcc

SEQ ID NO: 910947 - DNA, 25 bp, Homo sapien
caaaggatcactcttgagggagcgt

SEQ ID NO: 910948 - DNA, 25 bp, Homo sapien
cacagcttgtttggaacgtgcaacc

SEQ ID NO: 910949 - DNA, 25 bp, Homo sapien
taagactgcagtccatgggctacct

SEQ ID NO: 910950 - DNA, 25 bp, Homo sapien
tatttccgaggtctgaattcacgag

SEQ ID NO: 910951 - DNA, 25 bp, Homo sapien
tgtctcagggcaggcgcttaaggct

SEQ ID NO: 910952 - DNA, 25 bp, Homo sapien
cagcgggccgagacctactttttca

SEQ ID NO: 910953 - DNA, 25 bp, Homo sapien
caaacgaggcaaagcgctgtcacct

SEQ ID NO: 910954 - DNA, 25 bp, Homo sapien
tctctcaactttaccgcttatcttt

SEQ ID NO: 910955 - DNA, 25 bp, Homo sapien
gagaatttcccttcatggtgtttat

SEQ ID NO: 910956 - DNA, 25 bp, Homo sapien
cagttgactccagatagccattcac

SEQ ID NO: 910957 - DNA, 25 bp, Homo sapien
tcccctctctcaactttaccgctta

SEQ ID NO: 910958 - DNA, 25 bp, Homo sapien
tcagtctgcagtgttctccaactca

SEQ ID NO: 910959 - DNA, 25 bp, Homo sapien
cagtctgcagtgttctccaactcac

SEQ ID NO: 910960 - DNA, 25 bp, Homo sapien
ggtggccaggtagggagtgaacgca

SEQ ID NO: 910961 - DNA, 25 bp, Homo sapien
tgttttgtaaccagacctccacagc

SEQ ID NO: 910962 - DNA, 25 bp, Homo sapien
tgtaaccagacctccacagcacatt

SEQ ID NO: 910963 - DNA, 25 bp, Homo sapien
ggagtgaacgcatgacatccacagg

SEQ ID NO: 910964 - DNA, 25 bp, Homo sapien
tgttcctacccccaaactctctctc

SEQ ID NO: 910965 - DNA, 25 bp, Homo sapien
actgtctgctgagtttgttcctacc

SEQ ID NO: 910966 - DNA, 25 bp, Homo sapien
ccactgtctgctgagtttgttccta

SEQ ID NO: 910967 - DNA, 25 bp, Homo sapien
tgtctgctgagtttgttcctacccc

SEQ ID NO: 910968 - DNA, 25 bp, Homo sapien
accaggcttcgtccaggtcatagaa

SEQ ID NO: 910969 - DNA, 25 bp, Homo sapien
cttgtctgcaaggtccgccttcaca

SEQ ID NO: 910970 - DNA, 25 bp, Homo sapien
ggtcatagaacatccaaactctgga

SEQ ID NO: 910971 - DNA, 25 bp, Homo sapien
gaataacatacaaagtgctggctgc

SEQ ID NO: 910972 - DNA, 25 bp, Homo sapien
tttcttgtctgagaacaaaaaatta

SEQ ID NO: 910973 - DNA, 25 bp, Homo sapien
caattatttcttgtctgagaacaaa

SEQ ID NO: 910974 - DNA, 25 bp, Homo sapien
tcttgtctgagaacaaaaaattaat

SEQ ID NO: 910975 - DNA, 25 bp, Homo sapien
tatttcttgtctgagaacaaaaaat

SEQ ID NO: 910976 - DNA, 25 bp, Homo sapien
gctatcgaacactagtacctatttt

SEQ ID NO: 910977 - DNA, 25 bp, Homo sapien
gatacatgcgtacgatgtataataa

SEQ ID NO: 910978 - DNA, 25 bp, Homo sapien
tgtataataaccaaagcagggtatt

SEQ ID NO: 910979 - DNA, 25 bp, Homo sapien
tataatgtcttactttgggaacatt

SEQ ID NO: 910980 - DNA, 25 bp, Homo sapien
ccagtggaactggtgacaacctccc

SEQ ID NO: 910981 - DNA, 25 bp, Homo sapien
aagtttatcagggtcactgggtgac

SEQ ID NO: 910982 - DNA, 25 bp, Homo sapien
ccaaggaaagtttatcagggtcact

SEQ ID NO: 910983 - DNA, 25 bp, Homo sapien
gaaggtagctctttcttcattggag

SEQ ID NO: 910984 - DNA, 25 bp, Homo sapien
gaatcctgcttggtgtcttgggaaa

SEQ ID NO: 910985 - DNA, 25 bp, Homo sapien
gatgagattgcagaatcctgcttgg

SEQ ID NO: 910986 - DNA, 25 bp, Homo sapien
tatatttaccgctaaaagatgagat

SEQ ID NO: 910987 - DNA, 25 bp, Homo sapien
ttgggaaatccacaaagcatgggga

SEQ ID NO: 910988 - DNA, 25 bp, Homo sapien
tagagggcgttgcacacagggcatt

SEQ ID NO: 910989 - DNA, 25 bp, Homo sapien
gaagtccaagatccatgagaaagga

SEQ ID NO: 910990 - DNA, 25 bp, Homo sapien
ggcattgtcttaccagaggcaaaca

SEQ ID NO: 910991 - DNA, 25 bp, Homo sapien
caaatgggcacaaggatgggtagag

SEQ ID NO: 910992 - DNA, 25 bp, Homo sapien
cttctttggcataagtttgcatcct

SEQ ID NO: 910993 - DNA, 25 bp, Homo sapien
cctcttctttggcataagtttgcat

SEQ ID NO: 910994 - DNA, 25 bp, Homo sapien
cagacaccgaggatgattcttcctt

SEQ ID NO: 910995 - DNA, 25 bp, Homo sapien
cacagacaccgaggatgattcttcc

SEQ ID NO: 910996 - DNA, 25 bp, Homo sapien
cttacctcgttccaattcagtgttc

SEQ ID NO: 910997 - DNA, 25 bp, Homo sapien
tctgttcgtagagtgtttaatatcc

SEQ ID NO: 910998 - DNA, 25 bp, Homo sapien
tgccaaaagatctgttcgtagagtg

SEQ ID NO: 910999 - DNA, 25 bp, Homo sapien
tatccacaatcttacctcgttccaa

SEQ ID NO: 911000 - DNA, 25 bp, Homo sapien
ctgcctttcaactgcagccagtctg

SEQ ID NO: 911001 - DNA, 25 bp, Homo sapien
tgtggtggagctgcctttcaactgc

SEQ ID NO: 911002 - DNA, 25 bp, Homo sapien
agccagtctgactccaagcttgcag

SEQ ID NO: 911003 - DNA, 25 bp, Homo sapien
gactccaagcttgcaggcctggtca

SEQ ID NO: 911004 - DNA, 25 bp, Homo sapien
gccgtaagcatgaacatgcaaactc

SEQ ID NO: 911005 - DNA, 25 bp, Homo sapien
cttcccagagccgtaagcatgaaca

SEQ ID NO: 911006 - DNA, 25 bp, Homo sapien
gagccgtaagcatgaacatgcaaac

SEQ ID NO: 911007 - DNA, 25 bp, Homo sapien
ccagagccgtaagcatgaacatgca

SEQ ID NO: 911008 - DNA, 25 bp, Homo sapien
ctggatgagagcttaacgtgagacc

SEQ ID NO: 911009 - DNA, 25 bp, Homo sapien
cagcggggaccccatattccacagt

SEQ ID NO: 911010 - DNA, 25 bp, Homo sapien
ttaacgtgagaccacgggaggcctg

SEQ ID NO: 911011 - DNA, 25 bp, Homo sapien
agggaccaatgtagtctgaggcagc

SEQ ID NO: 911012 - DNA, 25 bp, Homo sapien
tattgatggatgacaactgttgttg

SEQ ID NO: 911013 - DNA, 25 bp, Homo sapien
gcttggtattgatggatgacaactg

SEQ ID NO: 911014 - DNA, 25 bp, Homo sapien
gaaattttatgagcatattcttctt

SEQ ID NO: 911015 - DNA, 25 bp, Homo sapien
cacatttatgttccatgggtgtggc

SEQ ID NO: 911016 - DNA, 25 bp, Homo sapien
cattgcagctttttctacccgcaca

SEQ ID NO: 911017 - DNA, 25 bp, Homo sapien
cataagtttaagtgaattagggtag

SEQ ID NO: 911018 - DNA, 25 bp, Homo sapien
cgcacataaccaagtaaaaactttg

SEQ ID NO: 911019 - DNA, 25 bp, Homo sapien
tgtttgcctcagcataagtttaagt

SEQ ID NO: 911020 - DNA, 25 bp, Homo sapien
tgtagtaggatcaagccttccttac

SEQ ID NO: 911021 - DNA, 25 bp, Homo sapien
ttacccttcacgttctctgcaccaa

SEQ ID NO: 911022 - DNA, 25 bp, Homo sapien
gatccttgtgtagtaggatcaagcc

SEQ ID NO: 911023 - DNA, 25 bp, Homo sapien
tggtccacactcgtctgatccttgt

SEQ ID NO: 911024 - DNA, 25 bp, Homo sapien
gataggagtagggacccatgctcct

SEQ ID NO: 911025 - DNA, 25 bp, Homo sapien
ggagtagggacccatgctccttgct

SEQ ID NO: 911026 - DNA, 25 bp, Homo sapien
tgagataggagtagggacccatgct

SEQ ID NO: 911027 - DNA, 25 bp, Homo sapien
agatgagataggagtagggacccat

SEQ ID NO: 911028 - DNA, 25 bp, Homo sapien
ttttggccatgccaataggctgagc

SEQ ID NO: 911029 - DNA, 25 bp, Homo sapien
caagttttgatgaccaaggcttggt

SEQ ID NO: 911030 - DNA, 25 bp, Homo sapien
ttgtggactttccaagaggatctgt

SEQ ID NO: 911031 - DNA, 25 bp, Homo sapien
cttggttccagtgaaagctagggca

SEQ ID NO: 911032 - DNA, 25 bp, Homo sapien
agaatggccttccagcaggtgatcc

SEQ ID NO: 911033 - DNA, 25 bp, Homo sapien
gagtgctccggaatgttccagaatg

SEQ ID NO: 911034 - DNA, 25 bp, Homo sapien
tccttacactggcaggtcatgcagc

SEQ ID NO: 911035 - DNA, 25 bp, Homo sapien
gcactgggctaaaaatgcagtaaag

SEQ ID NO: 911036 - DNA, 25 bp, Homo sapien
tcttctatatctcggtatgtaacca

SEQ ID NO: 911037 - DNA, 25 bp, Homo sapien
ggttcttctatatctcggtatgtaa

SEQ ID NO: 911038 - DNA, 25 bp, Homo sapien
ttcttctatatctcggtatgtaacc

SEQ ID NO: 911039 - DNA, 25 bp, Homo sapien
ctggttcttctatatctcggtatgt

SEQ ID NO: 911040 - DNA, 25 bp, Homo sapien
cgcttagggacataaactcattggg

SEQ ID NO: 911041 - DNA, 25 bp, Homo sapien
gaattcgctgtccatcacatgttag

SEQ ID NO: 911042 - DNA, 25 bp, Homo sapien
tggagttttactgcggctcagcact

SEQ ID NO: 911043 - DNA, 25 bp, Homo sapien
cattcaaaaattcatcgcttaggga

SEQ ID NO: 911044 - DNA, 25 bp, Homo sapien
ggagggctcccactgcgtggaaaac

SEQ ID NO: 911045 - DNA, 25 bp, Homo sapien
tgaagcagattcatggtgcgccagt

SEQ ID NO: 911046 - DNA, 25 bp, Homo sapien
gaacaggagtccaaacgctttcatc

SEQ ID NO: 911047 - DNA, 25 bp, Homo sapien
cctggcaggtgttatatgtgaagca

SEQ ID NO: 911048 - DNA, 25 bp, Homo sapien
tagcaggcaccattgttacgcagga

SEQ ID NO: 911049 - DNA, 25 bp, Homo sapien
gaacgctgtctctttacgaagataa

SEQ ID NO: 911050 - DNA, 25 bp, Homo sapien
tcagaactatctttaggtggtgtgg

SEQ ID NO: 911051 - DNA, 25 bp, Homo sapien
gagaaaatgcttacattgtactgtt

SEQ ID NO: 911052 - DNA, 25 bp, Homo sapien
tcttttcaccagactccctatccat

SEQ ID NO: 911053 - DNA, 25 bp, Homo sapien
attcttttcaccagactccctatcc

SEQ ID NO: 911054 - DNA, 25 bp, Homo sapien
ttcttttcaccagactccctatcca

SEQ ID NO: 911055 - DNA, 25 bp, Homo sapien
gaagaatcagtggagagtagagact

SEQ ID NO: 911056 - DNA, 25 bp, Homo sapien
tagagactccgagcagaagtatgag

SEQ ID NO: 911057 - DNA, 25 bp, Homo sapien
tatgagaacaggaataccccaggca

SEQ ID NO: 911058 - DNA, 25 bp, Homo sapien
cagaagtatgagaacaggaataccc

SEQ ID NO: 911059 - DNA, 25 bp, Homo sapien
caaaatagagctgccgtgttcctgc

SEQ ID NO: 911060 - DNA, 25 bp, Homo sapien
tgcaaaatagagctgccgtgttcct

SEQ ID NO: 911061 - DNA, 25 bp, Homo sapien
tgagaagacaatccaggtaggatga

SEQ ID NO: 911062 - DNA, 25 bp, Homo sapien
caatccaggtaggatgattcctgca

SEQ ID NO: 911063 - DNA, 25 bp, Homo sapien
aagtgcacgtctgcaagaatacttg

SEQ ID NO: 911064 - DNA, 25 bp, Homo sapien
tgcaagaatacttgtgcaggcagtc

SEQ ID NO: 911065 - DNA, 25 bp, Homo sapien
gcaagaatacttgtgcaggcagtcc

SEQ ID NO: 911066 - DNA, 25 bp, Homo sapien
tccctcaaaagtgcacgtctgcaag

SEQ ID NO: 911067 - DNA, 25 bp, Homo sapien
ctgctgttcatatcctagtagtgtc

SEQ ID NO: 911068 - DNA, 25 bp, Homo sapien
tacaggaagcatgcctccggaaaac

SEQ ID NO: 911069 - DNA, 25 bp, Homo sapien
agtgtctcactagccttaaatactg

SEQ ID NO: 911070 - DNA, 25 bp, Homo sapien
tccaatatgcctcactacaggaagc

SEQ ID NO: 911071 - DNA, 25 bp, Homo sapien
gcaagatggcattgaagcttaagcc

SEQ ID NO: 911072 - DNA, 25 bp, Homo sapien
tttgacagtgaaggcaaatgtgctc

SEQ ID NO: 911073 - DNA, 25 bp, Homo sapien
gaagcttaagccctcgatcttttct

SEQ ID NO: 911074 - DNA, 25 bp, Homo sapien
tctgcatttgacagtgaaggcaaat

SEQ ID NO: 911075 - DNA, 25 bp, Homo sapien
tttagccatggataaggacccagtg

SEQ ID NO: 911076 - DNA, 25 bp, Homo sapien
taagggctgaactgggaagacctct

SEQ ID NO: 911077 - DNA, 25 bp, Homo sapien
ttgtcattctgacctccaccactgt

SEQ ID NO: 911078 - DNA, 25 bp, Homo sapien
tgtctttaccaagcacacagtgaac

SEQ ID NO: 911079 - DNA, 25 bp, Homo sapien
agaaggtacagttgcaccccagtga

SEQ ID NO: 911080 - DNA, 25 bp, Homo sapien
cagtgataagcaaacctctcaggtt

SEQ ID NO: 911081 - DNA, 25 bp, Homo sapien
acagtcagtgagcaagcaggaagca

SEQ ID NO: 911082 - DNA, 25 bp, Homo sapien
caggtttcctcagccagagttgatc

SEQ ID NO: 911083 - DNA, 25 bp, Homo sapien
gcttcattttaaattcaggttcttc

SEQ ID NO: 911084 - DNA, 25 bp, Homo sapien
tttcaaatggcttcattttaaattc

SEQ ID NO: 911085 - DNA, 25 bp, Homo sapien
aatggcttcattttaaattcaggtt

SEQ ID NO: 911086 - DNA, 25 bp, Homo sapien
ttcaaatggcttcattttaaattca

SEQ ID NO: 911087 - DNA, 25 bp, Homo sapien
ggaatagatccattgccgtaatata

SEQ ID NO: 911088 - DNA, 25 bp, Homo sapien
gaggaatagatccattgccgtaata

SEQ ID NO: 911089 - DNA, 25 bp, Homo sapien
gaatagatccattgccgtaatataa

SEQ ID NO: 911090 - DNA, 25 bp, Homo sapien
aatagatccattgccgtaatataaa

SEQ ID NO: 911091 - DNA, 25 bp, Homo sapien
cggataacttggactgggacattct

SEQ ID NO: 911092 - DNA, 25 bp, Homo sapien
taacttggactgggacattcttgct

SEQ ID NO: 911093 - DNA, 25 bp, Homo sapien
ataacttggactgggacattcttgc

SEQ ID NO: 911094 - DNA, 25 bp, Homo sapien
gataacttggactgggacattcttg

SEQ ID NO: 911095 - DNA, 25 bp, Homo sapien
tgagtagataagtaggtgcatgctt

SEQ ID NO: 911096 - DNA, 25 bp, Homo sapien
tcctgtccacactcatagttttgtt

SEQ ID NO: 911097 - DNA, 25 bp, Homo sapien
caacatatttcagtatcctgtccac

SEQ ID NO: 911098 - DNA, 25 bp, Homo sapien
agtaggtgcatgcttcagccaatgc

SEQ ID NO: 911099 - DNA, 25 bp, Homo sapien
ttgctcctctgtgtggtaactgggg

SEQ ID NO: 911100 - DNA, 25 bp, Homo sapien
tctgtgtggtaactggggaaacctc

SEQ ID NO: 911101 - DNA, 25 bp, Homo sapien
ttcacatgaactgcctttcacgttg

SEQ ID NO: 911102 - DNA, 25 bp, Homo sapien
attttcacatgaactgcctttcacg

SEQ ID NO: 911103 - DNA, 25 bp, Homo sapien
caggaaatagcaggtgttttgtggc

SEQ ID NO: 911104 - DNA, 25 bp, Homo sapien
aaatagcaggtgttttgtggctgca

SEQ ID NO: 911105 - DNA, 25 bp, Homo sapien
catcatgttcatgcgttgctttcat

SEQ ID NO: 911106 - DNA, 25 bp, Homo sapien
acttctgccatcatgttcatgcgtt

SEQ ID NO: 911107 - DNA, 25 bp, Homo sapien
atcctcattaggacagttgatccgt

SEQ ID NO: 911108 - DNA, 25 bp, Homo sapien
gacagttgatccgtatcatctggta

SEQ ID NO: 911109 - DNA, 25 bp, Homo sapien
taggacagttgatccgtatcatctg

SEQ ID NO: 911110 - DNA, 25 bp, Homo sapien
ctcattaggacagttgatccgtatc

SEQ ID NO: 911111 - DNA, 25 bp, Homo sapien
gatccactgaattcgtgctctgtca

SEQ ID NO: 911112 - DNA, 25 bp, Homo sapien
gaattcgtgctctgtcagacgccat

SEQ ID NO: 911113 - DNA, 25 bp, Homo sapien
tgtttgcccatccacttgatccact

SEQ ID NO: 911114 - DNA, 25 bp, Homo sapien
gccatgcatgtttaaattgtgtttg

SEQ ID NO: 911115 - DNA, 25 bp, Homo sapien
tcagagtctgccacatagtagggat

SEQ ID NO: 911116 - DNA, 25 bp, Homo sapien
tagtaacctttgtctgagtcacacg

SEQ ID NO: 911117 - DNA, 25 bp, Homo sapien
cagtgtgattcttcatgaggcccaa

SEQ ID NO: 911118 - DNA, 25 bp, Homo sapien
taattagtgttaaccagtctgggac

SEQ ID NO: 911119 - DNA, 25 bp, Homo sapien
ccagttacaacccacaagattttca

SEQ ID NO: 911120 - DNA, 25 bp, Homo sapien
cagttacaacccacaagattttcaa

SEQ ID NO: 911121 - DNA, 25 bp, Homo sapien
gcacaagcccaggacatccggccca

SEQ ID NO: 911122 - DNA, 25 bp, Homo sapien
tgcacaagcccaggacatccggccc

SEQ ID NO: 911123 - DNA, 25 bp, Homo sapien
atgcacaagcccaggacatccggcc

SEQ ID NO: 911124 - DNA, 25 bp, Homo sapien
tctataacaaggactctaatcccag

SEQ ID NO: 911125 - DNA, 25 bp, Homo sapien
ggctcttaagggaatctatctgaca

SEQ ID NO: 911126 - DNA, 25 bp, Homo sapien
caagttctacaaaaagccacgtccg

SEQ ID NO: 911127 - DNA, 25 bp, Homo sapien
cctccagactgtcattgactcttga

SEQ ID NO: 911128 - DNA, 25 bp, Homo sapien
tttcagtgagccagttaaacagaag

SEQ ID NO: 911129 - DNA, 25 bp, Homo sapien
tttgattattacaaggaatgtttct

SEQ ID NO: 911130 - DNA, 25 bp, Homo sapien
tgagccagttaaacagaaggatttt

SEQ ID NO: 911131 - DNA, 25 bp, Homo sapien
tcatttgattattacaaggaatgtt

SEQ ID NO: 911132 - DNA, 25 bp, Homo sapien
gggcccgacttctatcaccttgtgt

SEQ ID NO: 911133 - DNA, 25 bp, Homo sapien
gccttttcagggcccgacttctatc

SEQ ID NO: 911134 - DNA, 25 bp, Homo sapien
ggagaagaatatcgtttgtttttga

SEQ ID NO: 911135 - DNA, 25 bp, Homo sapien
gagatgggagaagaatatcgtttgt

SEQ ID NO: 911136 - DNA, 25 bp, Homo sapien
tgatgtagcaggctatcagagtgcc

SEQ ID NO: 911137 - DNA, 25 bp, Homo sapien
cacgcaatggtctcggctgctgtca

SEQ ID NO: 911138 - DNA, 25 bp, Homo sapien
tcgaagccagcatccgtaaagcgtt

SEQ ID NO: 911139 - DNA, 25 bp, Homo sapien
gaggtccacagaaggcaataaatcg

SEQ ID NO: 911140 - DNA, 25 bp, Homo sapien
gacacaggaaggggaacgtcacact

SEQ ID NO: 911141 - DNA, 25 bp, Homo sapien
ctgcatgaaaacaggacacaggaag

SEQ ID NO: 911142 - DNA, 25 bp, Homo sapien
tgcatgaaaacaggacacaggaagg

SEQ ID NO: 911143 - DNA, 25 bp, Homo sapien
caggacacaggaaggggaacgtcac

SEQ ID NO: 911144 - DNA, 25 bp, Homo sapien
gttctccccaagtatataaccatgt

SEQ ID NO: 911145 - DNA, 25 bp, Homo sapien
atttatcttgcaacaatatctgtaa

SEQ ID NO: 911146 - DNA, 25 bp, Homo sapien
ttatttatcttgcaacaatatctgt

SEQ ID NO: 911147 - DNA, 25 bp, Homo sapien
ttatcttgcaacaatatctgtaaac

SEQ ID NO: 911148 - DNA, 25 bp, Homo sapien
tatttatcttgcaacaatatctgta

SEQ ID NO: 911149 - DNA, 25 bp, Homo sapien
gaagttctcatattcgagttcatta

SEQ ID NO: 911150 - DNA, 25 bp, Homo sapien
cctgcagcgtggagctgcgcatctt

SEQ ID NO: 911151 - DNA, 25 bp, Homo sapien
aatggcaaaacgaaggcgatcggtg

SEQ ID NO: 911152 - DNA, 25 bp, Homo sapien
gagtggtccaaagtcttcggagaag

SEQ ID NO: 911153 - DNA, 25 bp, Homo sapien
ggcgcggcggcccagctcgaccgcc

SEQ ID NO: 911154 - DNA, 25 bp, Homo sapien
cactgtcccaatgcttgccccccat

SEQ ID NO: 911155 - DNA, 25 bp, Homo sapien
tgtccagtgaatgcattgtattttc

SEQ ID NO: 911156 - DNA, 25 bp, Homo sapien
ccatccacaatatttctgtccagtg

SEQ ID NO: 911157 - DNA, 25 bp, Homo sapien
ccagtttctgttggaatacccgtat

SEQ ID NO: 911158 - DNA, 25 bp, Homo sapien
ttctttcacatacttatcacatttc

SEQ ID NO: 911159 - DNA, 25 bp, Homo sapien
tctttcacatacttatcacatttct

SEQ ID NO: 911160 - DNA, 25 bp, Homo sapien
tttcacatacttatcacatttcttt

SEQ ID NO: 911161 - DNA, 25 bp, Homo sapien
ctttcacatacttatcacatttctt

SEQ ID NO: 911162 - DNA, 25 bp, Homo sapien
tgtagccaagagtagccttcagaat

SEQ ID NO: 911163 - DNA, 25 bp, Homo sapien
tgaattgtagccaagagtagccttc

SEQ ID NO: 911164 - DNA, 25 bp, Homo sapien
catgaccttgagtagccatctctga

SEQ ID NO: 911165 - DNA, 25 bp, Homo sapien
tgtgtgtgagggtaaccatgacctt

SEQ ID NO: 911166 - DNA, 25 bp, Homo sapien
gactgtactgtgcaatcactaagaa

SEQ ID NO: 911167 - DNA, 25 bp, Homo sapien
ctaagaatgtgggagttcttgcaga

SEQ ID NO: 911168 - DNA, 25 bp, Homo sapien
cagactgtactgtgcaatcactaag

SEQ ID NO: 911169 - DNA, 25 bp, Homo sapien
gttcttgcagaatcatcccactcct

SEQ ID NO: 911170 - DNA, 25 bp, Homo sapien
gcaaaacataggtttccatgacaag

SEQ ID NO: 911171 - DNA, 25 bp, Homo sapien
cataggtttccatgacaagtatttg

SEQ ID NO: 911172 - DNA, 25 bp, Homo sapien
ataggtttccatgacaagtatttga

SEQ ID NO: 911173 - DNA, 25 bp, Homo sapien
aaacataggtttccatgacaagtat

SEQ ID NO: 911174 - DNA, 25 bp, Homo sapien
agcatttcggaaataaaacttgcaa

SEQ ID NO: 911175 - DNA, 25 bp, Homo sapien
gaagttgagaagcatttcggaaata

SEQ ID NO: 911176 - DNA, 25 bp, Homo sapien
gatggtgcaggtggtcttctgtacc

SEQ ID NO: 911177 - DNA, 25 bp, Homo sapien
gtcttctgtacctagaaagaagttg

SEQ ID NO: 911178 - DNA, 25 bp, Homo sapien
ttttgcctcagataaccaccatcat

SEQ ID NO: 911179 - DNA, 25 bp, Homo sapien
tcttttgcctcagataaccaccatc

SEQ ID NO: 911180 - DNA, 25 bp, Homo sapien
aattttctatatattcttccagtca

SEQ ID NO: 911181 - DNA, 25 bp, Homo sapien
tgcctcagataaccaccatcatcaa

SEQ ID NO: 911182 - DNA, 25 bp, Homo sapien
ctttcccatagatgtcatttttctt

SEQ ID NO: 911183 - DNA, 25 bp, Homo sapien
tcccatagatgtcatttttcttgcg

SEQ ID NO: 911184 - DNA, 25 bp, Homo sapien
gtctttcccatagatgtcatttttc

SEQ ID NO: 911185 - DNA, 25 bp, Homo sapien
ccatagatgtcatttttcttgcgct

SEQ ID NO: 911186 - DNA, 25 bp, Homo sapien
tgatcttttacatagctagggtcac

SEQ ID NO: 911187 - DNA, 25 bp, Homo sapien
cacaattgtctcaaagtgagtggta

SEQ ID NO: 911188 - DNA, 25 bp, Homo sapien
tgtgcgcagaggagatcgtgcaaac

SEQ ID NO: 911189 - DNA, 25 bp, Homo sapien
ccacagttgtggtaactatggcaat

SEQ ID NO: 911190 - DNA, 25 bp, Homo sapien
tagccttgcaaacagccttgtggca

SEQ ID NO: 911191 - DNA, 25 bp, Homo sapien
cttagccttgcaaacagccttgtgg

SEQ ID NO: 911192 - DNA, 25 bp, Homo sapien
gccttgcaaacagccttgtggcagt

SEQ ID NO: 911193 - DNA, 25 bp, Homo sapien
acttagccttgcaaacagccttgtg

SEQ ID NO: 911194 - DNA, 25 bp, Homo sapien
tggataaaggtatggacttttgacg

SEQ ID NO: 911195 - DNA, 25 bp, Homo sapien
taaaggtatggacttttgacgtatc

SEQ ID NO: 911196 - DNA, 25 bp, Homo sapien
gacttttgacgtatcttgccaaaga

SEQ ID NO: 911197 - DNA, 25 bp, Homo sapien
tatggacttttgacgtatcttgcca

SEQ ID NO: 911198 - DNA, 25 bp, Homo sapien
tcaattccctctaaagttctcggat

SEQ ID NO: 911199 - DNA, 25 bp, Homo sapien
agtcctattaagctagatgtcaggg

SEQ ID NO: 911200 - DNA, 25 bp, Homo sapien
caattccctctaaagttctcggatc

SEQ ID NO: 911201 - DNA, 25 bp, Homo sapien
cttaaacagtcctattaagctagat

SEQ ID NO: 911202 - DNA, 25 bp, Homo sapien
tcctccattgtaagggtttcaatcc

SEQ ID NO: 911203 - DNA, 25 bp, Homo sapien
actttcttgcccttcactgatgtta

SEQ ID NO: 911204 - DNA, 25 bp, Homo sapien
cattgatggttatggtggtcctggt

SEQ ID NO: 911205 - DNA, 25 bp, Homo sapien
gtagtgttatagaggcactctctcc

SEQ ID NO: 911206 - DNA, 25 bp, Homo sapien
aaggatacattccatcaggccaatg

SEQ ID NO: 911207 - DNA, 25 bp, Homo sapien
gaaaggatacattccatcaggccaa

SEQ ID NO: 911208 - DNA, 25 bp, Homo sapien
gatacattccatcaggccaatgccc

SEQ ID NO: 911209 - DNA, 25 bp, Homo sapien
tgaaaggatacattccatcaggcca

SEQ ID NO: 911210 - DNA, 25 bp, Homo sapien
ctgctctttgacctcgcagggtgtg

SEQ ID NO: 911211 - DNA, 25 bp, Homo sapien
gccccactgctcgccgcgctgctct

SEQ ID NO: 911212 - DNA, 25 bp, Homo sapien
tctttgacctcgcagggtgtgaaga

SEQ ID NO: 911213 - DNA, 25 bp, Homo sapien
actgctcgccgcgctgctctttgac

SEQ ID NO: 911214 - DNA, 25 bp, Homo sapien
tggatgctacatggttatatacttg

SEQ ID NO: 911215 - DNA, 25 bp, Homo sapien
gatgctacatggttatatacttggg

SEQ ID NO: 911216 - DNA, 25 bp, Homo sapien
ttggagatacaccctatattccttt

SEQ ID NO: 911217 - DNA, 25 bp, Homo sapien
ctttggagatacaccctatattcct

SEQ ID NO: 911218 - DNA, 25 bp, Homo sapien
gaatcgctgccaggcctataacaaa

SEQ ID NO: 911219 - DNA, 25 bp, Homo sapien
acaaagtgccttgaaataaatttca

SEQ ID NO: 911220 - DNA, 25 bp, Homo sapien
ggaatcacacccaaactctttatgt

SEQ ID NO: 911221 - DNA, 25 bp, Homo sapien
agcaaattctggaatcacacccaaa

SEQ ID NO: 911222 - DNA, 25 bp, Homo sapien
gaagctgaaggatctccattgtcac

SEQ ID NO: 911223 - DNA, 25 bp, Homo sapien
gggtagcagcctctcatgaattgga

SEQ ID NO: 911224 - DNA, 25 bp, Homo sapien
cttgactgggtacattatgactaca

SEQ ID NO: 911225 - DNA, 25 bp, Homo sapien
acttgagctgagaatcatcactggg

SEQ ID NO: 911226 - DNA, 25 bp, Homo sapien
taaaatcatggcagatgacagtgga

SEQ ID NO: 911227 - DNA, 25 bp, Homo sapien
gatgacagtggatggtaactccttc

SEQ ID NO: 911228 - DNA, 25 bp, Homo sapien
taactccttcatgcacccaacatgc

SEQ ID NO: 911229 - DNA, 25 bp, Homo sapien
aacatgcccgtcactctcatccacc

SEQ ID NO: 911230 - DNA, 25 bp, Homo sapien
gtgccttctgagaaacaatttctca

SEQ ID NO: 911231 - DNA, 25 bp, Homo sapien
tacatgtgccttctgagaaacaatt

SEQ ID NO: 911232 - DNA, 25 bp, Homo sapien
catgtgccttctgagaaacaatttc

SEQ ID NO: 911233 - DNA, 25 bp, Homo sapien
ctacatgtgccttctgagaaacaat

SEQ ID NO: 911234 - DNA, 25 bp, Homo sapien
tctggatgtaatatcacgggatggc

SEQ ID NO: 911235 - DNA, 25 bp, Homo sapien
gataggtctggatgtaatatcacgg

SEQ ID NO: 911236 - DNA, 25 bp, Homo sapien
gtaatatcacgggatggctgccttc

SEQ ID NO: 911237 - DNA, 25 bp, Homo sapien
tctggattctgataggtctggatgt

SEQ ID NO: 911238 - DNA, 25 bp, Homo sapien
tctggacaacctgatgatgtgcctg

SEQ ID NO: 911239 - DNA, 25 bp, Homo sapien
gagtcaccttgccttgatgccctgt

SEQ ID NO: 911240 - DNA, 25 bp, Homo sapien
gccttgatgccctgtctccctcatt

SEQ ID NO: 911241 - DNA, 25 bp, Homo sapien
attgttctggacaacctgatgatgt

SEQ ID NO: 911242 - DNA, 25 bp, Homo sapien
aaataagccaaattcttccatcact

SEQ ID NO: 911243 - DNA, 25 bp, Homo sapien
ataagccaaattcttccatcacttc

SEQ ID NO: 911244 - DNA, 25 bp, Homo sapien
aataagccaaattcttccatcactt

SEQ ID NO: 911245 - DNA, 25 bp, Homo sapien
caaataagccaaattcttccatcac

SEQ ID NO: 911246 - DNA, 25 bp, Homo sapien
ggtactatcccggtgttttgcatcc

SEQ ID NO: 911247 - DNA, 25 bp, Homo sapien
tcaagacaaagttgtggtactatcc

SEQ ID NO: 911248 - DNA, 25 bp, Homo sapien
cagaaggatatggaacacttggaag

SEQ ID NO: 911249 - DNA, 25 bp, Homo sapien
acttggaaggtgtttgagtagagac

SEQ ID NO: 911250 - DNA, 25 bp, Homo sapien
gaacgaaaacattctctaacaggac

SEQ ID NO: 911251 - DNA, 25 bp, Homo sapien
tgaacgaaaacattctctaacagga

SEQ ID NO: 911252 - DNA, 25 bp, Homo sapien
ccatgctggaacacttggacttcag

SEQ ID NO: 911253 - DNA, 25 bp, Homo sapien
atgtcgcaaacaggtccccatgctg

SEQ ID NO: 911254 - DNA, 25 bp, Homo sapien
cgatatgactgtgcccgagtcaccc

SEQ ID NO: 911255 - DNA, 25 bp, Homo sapien
ccctgaggtggtggccgatatgact

SEQ ID NO: 911256 - DNA, 25 bp, Homo sapien
ctgcaaaggattcatgagcatgctg

SEQ ID NO: 911257 - DNA, 25 bp, Homo sapien
tgcaaaggattcatgagcatgctgc

SEQ ID NO: 911258 - DNA, 25 bp, Homo sapien
tctctcccaccaggtggagatggcc

SEQ ID NO: 911259 - DNA, 25 bp, Homo sapien
tttcatccacattttgttgtctgct

SEQ ID NO: 911260 - DNA, 25 bp, Homo sapien
ggatgtagtcatggcaatgcagtca

SEQ ID NO: 911261 - DNA, 25 bp, Homo sapien
gggtcctgtctataacataagggca

SEQ ID NO: 911262 - DNA, 25 bp, Homo sapien
tagacggaatgcctcctcccctggg

SEQ ID NO: 911263 - DNA, 25 bp, Homo sapien
ctacacaggaacctgatagacggaa

SEQ ID NO: 911264 - DNA, 25 bp, Homo sapien
cagagccttcctggaccctcgcttc

SEQ ID NO: 911265 - DNA, 25 bp, Homo sapien
gaacctgatagacggaatgcctcct

SEQ ID NO: 911266 - DNA, 25 bp, Homo sapien
ctcaggtctgcagccattcttggca

SEQ ID NO: 911267 - DNA, 25 bp, Homo sapien
tggaagaaggcgagtgactcaggtc

SEQ ID NO: 911268 - DNA, 25 bp, Homo sapien
gactcaggtctgcagccattcttgg

SEQ ID NO: 911269 - DNA, 25 bp, Homo sapien
aggtctgcagccattcttggcaatc

SEQ ID NO: 911270 - DNA, 25 bp, Homo sapien
ctgtgcaataagtgagtctccttca

SEQ ID NO: 911271 - DNA, 25 bp, Homo sapien
gtctccttcattggtctggccagcc

SEQ ID NO: 911272 - DNA, 25 bp, Homo sapien
tccttcattggtctggccagccctg

SEQ ID NO: 911273 - DNA, 25 bp, Homo sapien
tgtgcaataagtgagtctccttcat

SEQ ID NO: 911274 - DNA, 25 bp, Homo sapien
tcagtaaaagaaagtagatactcag

SEQ ID NO: 911275 - DNA, 25 bp, Homo sapien
gtcagtaaaagaaagtagatactca

SEQ ID NO: 911276 - DNA, 25 bp, Homo sapien
cagtaaaagaaagtagatactcagc

SEQ ID NO: 911277 - DNA, 25 bp, Homo sapien
taggttttgagtcagaagtttgctt

SEQ ID NO: 911278 - DNA, 25 bp, Homo sapien
gttttgagtcagaagtttgctttca

SEQ ID NO: 911279 - DNA, 25 bp, Homo sapien
cagctgagatcttgttgtgttgtgg

SEQ ID NO: 911280 - DNA, 25 bp, Homo sapien
catttaggttttgagtcagaagttt

SEQ ID NO: 911281 - DNA, 25 bp, Homo sapien
tcttatacaagttatctgagataca

SEQ ID NO: 911282 - DNA, 25 bp, Homo sapien
acaagttatctgagatacaatctgg

SEQ ID NO: 911283 - DNA, 25 bp, Homo sapien
tgggatttttctgactgaagcatat

SEQ ID NO: 911284 - DNA, 25 bp, Homo sapien
tgactgaagcatataatttaaccat

SEQ ID NO: 911285 - DNA, 25 bp, Homo sapien
ggcttcagctctccaatgctgaaat

SEQ ID NO: 911286 - DNA, 25 bp, Homo sapien
aatggcttcagctctccaatgctga

SEQ ID NO: 911287 - DNA, 25 bp, Homo sapien
aagaatggcttcagctctccaatgc

SEQ ID NO: 911288 - DNA, 25 bp, Homo sapien
ttcagctctccaatgctgaaatcca

SEQ ID NO: 911289 - DNA, 25 bp, Homo sapien
gatagtatatcctgagtagctatgg

SEQ ID NO: 911290 - DNA, 25 bp, Homo sapien
ccatggtgatagtatatcctgagta

SEQ ID NO: 911291 - DNA, 25 bp, Homo sapien
gtatatcctgagtagctatggagta

SEQ ID NO: 911292 - DNA, 25 bp, Homo sapien
tatcctgagtagctatggagtaaga

SEQ ID NO: 911293 - DNA, 25 bp, Homo sapien
aggaaaccagttgagagcttcctgg

SEQ ID NO: 911294 - DNA, 25 bp, Homo sapien
tctgttctacccgagactgccaaga

SEQ ID NO: 911295 - DNA, 25 bp, Homo sapien
tgaggcaaaacgcttggcaggaaac

SEQ ID NO: 911296 - DNA, 25 bp, Homo sapien
tcctggaagttctgttctacccgag

SEQ ID NO: 911297 - DNA, 25 bp, Homo sapien
aggttcttgaattaaatgtgtgaca

SEQ ID NO: 911298 - DNA, 25 bp, Homo sapien
gttcttgaattaaatgtgtgacatt

SEQ ID NO: 911299 - DNA, 25 bp, Homo sapien
ggttcttgaattaaatgtgtgacat

SEQ ID NO: 911300 - DNA, 25 bp, Homo sapien
tttctgtggcactgatctccatttt

SEQ ID NO: 911301 - DNA, 25 bp, Homo sapien
gatctccattttagcaacgtctctt

SEQ ID NO: 911302 - DNA, 25 bp, Homo sapien
tgacccctcttctatcttcaagttt

SEQ ID NO: 911303 - DNA, 25 bp, Homo sapien
ctaatgccctacatctaaactctcc

SEQ ID NO: 911304 - DNA, 25 bp, Homo sapien
gtctgaagcctcctgacttaagcat

SEQ ID NO: 911305 - DNA, 25 bp, Homo sapien
ttcccttctgaactggcataaccat

SEQ ID NO: 911306 - DNA, 25 bp, Homo sapien
tgatcacaatggaaagtctgaagcc

SEQ ID NO: 911307 - DNA, 25 bp, Homo sapien
catagaatttactttgggtgtactt

SEQ ID NO: 911308 - DNA, 25 bp, Homo sapien
ttgatagaactatagcgacagagct

SEQ ID NO: 911309 - DNA, 25 bp, Homo sapien
tagcgacagagctccataacattca

SEQ ID NO: 911310 - DNA, 25 bp, Homo sapien
tgtcatccatgttgatagaactata

SEQ ID NO: 911311 - DNA, 25 bp, Homo sapien
gaactatagcgacagagctccataa

SEQ ID NO: 911312 - DNA, 25 bp, Homo sapien
tgagttactttgcaagtgaatagcc

SEQ ID NO: 911313 - DNA, 25 bp, Homo sapien
taatctctgcgttctgtggtaatgt

SEQ ID NO: 911314 - DNA, 25 bp, Homo sapien
gtaatgtggccatagccctggatac

SEQ ID NO: 911315 - DNA, 25 bp, Homo sapien
gtgaatagccacagaagcaaggcca

SEQ ID NO: 911316 - DNA, 25 bp, Homo sapien
gatgagaagaactggtctttcttct

SEQ ID NO: 911317 - DNA, 25 bp, Homo sapien
gagatgagaagaactggtctttctt

SEQ ID NO: 911318 - DNA, 25 bp, Homo sapien
atgagaagaactggtctttcttctt

SEQ ID NO: 911319 - DNA, 25 bp, Homo sapien
ctgagatgagaagaactggtctttc

SEQ ID NO: 911320 - DNA, 25 bp, Homo sapien
gacatatggaatatttgcactctct

SEQ ID NO: 911321 - DNA, 25 bp, Homo sapien
ctatccatgggacatatggaatatt

SEQ ID NO: 911322 - DNA, 25 bp, Homo sapien
gttctagttactgtctgctgaactg

SEQ ID NO: 911323 - DNA, 25 bp, Homo sapien
actgatgttcggcatttgtcaaaga

SEQ ID NO: 911324 - DNA, 25 bp, Homo sapien
ttctggaaagtgttcgtacactggc

SEQ ID NO: 911325 - DNA, 25 bp, Homo sapien
tctggaaagtgttcgtacactggca

SEQ ID NO: 911326 - DNA, 25 bp, Homo sapien
tggaaagtgttcgtacactggcagc

SEQ ID NO: 911327 - DNA, 25 bp, Homo sapien
gattggggacaggacattttcacca

SEQ ID NO: 911328 - DNA, 25 bp, Homo sapien
caccatcttccaagtcatcatgcat

SEQ ID NO: 911329 - DNA, 25 bp, Homo sapien
agggattggggacaggacattttca

SEQ ID NO: 911330 - DNA, 25 bp, Homo sapien
ctttaaactggcaagagggattggg

SEQ ID NO: 911331 - DNA, 25 bp, Homo sapien
tggatgttccgcttctaagccttac

SEQ ID NO: 911332 - DNA, 25 bp, Homo sapien
gtctctggatgttccgcttctaagc

SEQ ID NO: 911333 - DNA, 25 bp, Homo sapien
aaaaccaatatgcttgtctctggat

SEQ ID NO: 911334 - DNA, 25 bp, Homo sapien
accaatatgcttgtctctggatgtt

SEQ ID NO: 911335 - DNA, 25 bp, Homo sapien
ctaggagaccaacaaataaccagac

SEQ ID NO: 911336 - DNA, 25 bp, Homo sapien
gacatggttacacaaagtgcagttg

SEQ ID NO: 911337 - DNA, 25 bp, Homo sapien
caaataaccagacatggttacacaa

SEQ ID NO: 911338 - DNA, 25 bp, Homo sapien
aagtgcagttgttgccatggcaaac

SEQ ID NO: 911339 - DNA, 25 bp, Homo sapien
ttttccttagctactgtagctaagg

SEQ ID NO: 911340 - DNA, 25 bp, Homo sapien
gctactgtagctaaggatttgagaa

SEQ ID NO: 911341 - DNA, 25 bp, Homo sapien
ttagctactgtagctaaggatttga

SEQ ID NO: 911342 - DNA, 25 bp, Homo sapien
ctgtagctaaggatttgagaatttt

SEQ ID NO: 911343 - DNA, 25 bp, Homo sapien
gaagaaagtatactcagttgctgtt

SEQ ID NO: 911344 - DNA, 25 bp, Homo sapien
atctctcttgttgcttaatgtaggc

SEQ ID NO: 911345 - DNA, 25 bp, Homo sapien
tacagatgtctgttaaggccatttg

SEQ ID NO: 911346 - DNA, 25 bp, Homo sapien
cataaattttagtaggttgtggtct

SEQ ID NO: 911347 - DNA, 25 bp, Homo sapien
tgtatctatcttcccgtgccagcat

SEQ ID NO: 911348 - DNA, 25 bp, Homo sapien
ccgtgtatctatcttcccgtgccag

SEQ ID NO: 911349 - DNA, 25 bp, Homo sapien
ttcccgtgtatctatcttcccgtgc

SEQ ID NO: 911350 - DNA, 25 bp, Homo sapien
cttcccgtgtatctatcttcccgtg

SEQ ID NO: 911351 - DNA, 25 bp, Homo sapien
agaaagcacagcatcagcgctcagc

SEQ ID NO: 911352 - DNA, 25 bp, Homo sapien
gctcagccacgtgcatccgctgaaa

SEQ ID NO: 911353 - DNA, 25 bp, Homo sapien
tggagaggactcaacagcagcttga

SEQ ID NO: 911354 - DNA, 25 bp, Homo sapien
gctgaaatatactgcaccccttcct

SEQ ID NO: 911355 - DNA, 25 bp, Homo sapien
tccggagaaacatcccagctagctg

SEQ ID NO: 911356 - DNA, 25 bp, Homo sapien
ttgtctgactcatgcagaggctggt

SEQ ID NO: 911357 - DNA, 25 bp, Homo sapien
gcaaacaggtattgtggcttccgga

SEQ ID NO: 911358 - DNA, 25 bp, Homo sapien
tactgcagccaaattgtctgactca

SEQ ID NO: 911359 - DNA, 25 bp, Homo sapien
tccagaggatctgtcgtggcaagcc

SEQ ID NO: 911360 - DNA, 25 bp, Homo sapien
tttacgattgtagcaccagcccaca

SEQ ID NO: 911361 - DNA, 25 bp, Homo sapien
tctgtcgtggcaagccagtgaagct

SEQ ID NO: 911362 - DNA, 25 bp, Homo sapien
ccagtgaagctttacgattgtagca

SEQ ID NO: 911363 - DNA, 25 bp, Homo sapien
tcctgatttttctgtgcgctgatat

SEQ ID NO: 911364 - DNA, 25 bp, Homo sapien
gataacattaccaggatcatcctct

SEQ ID NO: 911365 - DNA, 25 bp, Homo sapien
ttttctgtgcgctgatatttgccat

SEQ ID NO: 911366 - DNA, 25 bp, Homo sapien
ttgttcttgccacaatcctgatttt

SEQ ID NO: 911367 - DNA, 25 bp, Homo sapien
tgattcccacaggttgttaaaaaga

SEQ ID NO: 911368 - DNA, 25 bp, Homo sapien
ctgattcccacaggttgttaaaaag

SEQ ID NO: 911369 - DNA, 25 bp, Homo sapien
tggaatgaaggacaattcgcactgt

SEQ ID NO: 911370 - DNA, 25 bp, Homo sapien
cttagggggctcgacccaagtggat

SEQ ID NO: 911371 - DNA, 25 bp, Homo sapien
tgaaggacaattcgcactgttgcca

SEQ ID NO: 911372 - DNA, 25 bp, Homo sapien
gctcgacccaagtggatgaaaagtg

SEQ ID NO: 911373 - DNA, 25 bp, Homo sapien
gactgtttgcaagtgatgacccagg

SEQ ID NO: 911374 - DNA, 25 bp, Homo sapien
agctctgcaccttgccgtggagttc

SEQ ID NO: 911375 - DNA, 25 bp, Homo sapien
tatgggcgaagttctccagaatggc

SEQ ID NO: 911376 - DNA, 25 bp, Homo sapien
aggatgcacctatgggcgaagttct

SEQ ID NO: 911377 - DNA, 25 bp, Homo sapien
taagactgcaactcttctccttttc

SEQ ID NO: 911378 - DNA, 25 bp, Homo sapien
ttcctactgatgcaacagatccaat

SEQ ID NO: 911379 - DNA, 25 bp, Homo sapien
tttcctactgatgcaacagatccaa

SEQ ID NO: 911380 - DNA, 25 bp, Homo sapien
ggaataagactgcaactcttctcct

SEQ ID NO: 911381 - DNA, 25 bp, Homo sapien
agtttctcagccacattctgaataa

SEQ ID NO: 911382 - DNA, 25 bp, Homo sapien
gtttctcagccacattctgaataac

SEQ ID NO: 911383 - DNA, 25 bp, Homo sapien
gcaaatacatgaaagatatgatagt

SEQ ID NO: 911384 - DNA, 25 bp, Homo sapien
tggctgcatctcgttgtctcctgga

SEQ ID NO: 911385 - DNA, 25 bp, Homo sapien
catctcgttgtctcctggaatagga

SEQ ID NO: 911386 - DNA, 25 bp, Homo sapien
gaataggagtcagtcttctctggtt

SEQ ID NO: 911387 - DNA, 25 bp, Homo sapien
gttgagtttattctcttgccagggt

SEQ ID NO: 911388 - DNA, 25 bp, Homo sapien
ttataacgggctttggattgttgtc

SEQ ID NO: 911389 - DNA, 25 bp, Homo sapien
tctgtgttgagtttattctcttgcc

SEQ ID NO: 911390 - DNA, 25 bp, Homo sapien
gttgattataacgggctttggattg

SEQ ID NO: 911391 - DNA, 25 bp, Homo sapien
ttcaaaatgtctgatgtaattgcct

SEQ ID NO: 911392 - DNA, 25 bp, Homo sapien
ctgtgatatgtcaggtcttcctttc

SEQ ID NO: 911393 - DNA, 25 bp, Homo sapien
gtgatatgtcaggtcttcctttcaa

SEQ ID NO: 911394 - DNA, 25 bp, Homo sapien
tctgatgtaattgccttttttgtcc

SEQ ID NO: 911395 - DNA, 25 bp, Homo sapien
tttaccaccgatgctgtcagaattc

SEQ ID NO: 911396 - DNA, 25 bp, Homo sapien
gaattgcaaaggactcagaacagcc

SEQ ID NO: 911397 - DNA, 25 bp, Homo sapien
agatttaccaccgatgctgtcagaa

SEQ ID NO: 911398 - DNA, 25 bp, Homo sapien
ctacagatttaccaccgatgctgtc

SEQ ID NO: 911399 - DNA, 25 bp, Homo sapien
taggattgtcttggcaatgccagct

SEQ ID NO: 911400 - DNA, 25 bp, Homo sapien
attgtcttggcaatgccagctcttt

SEQ ID NO: 911401 - DNA, 25 bp, Homo sapien
gattgtcttggcaatgccagctctt

SEQ ID NO: 911402 - DNA, 25 bp, Homo sapien
ggattgtcttggcaatgccagctct

SEQ ID NO: 911403 - DNA, 25 bp, Homo sapien
tgtgcaaatcccacgtgttcgctgt

SEQ ID NO: 911404 - DNA, 25 bp, Homo sapien
tggtagtagattcacctgctgcatt

SEQ ID NO: 911405 - DNA, 25 bp, Homo sapien
gctgttgttctcactgttaagcaca

SEQ ID NO: 911406 - DNA, 25 bp, Homo sapien
ggtgaaaacctctgctcaatgtgca

SEQ ID NO: 911407 - DNA, 25 bp, Homo sapien
ctgtgtagagtcttgtgggagaaga

SEQ ID NO: 911408 - DNA, 25 bp, Homo sapien
tgtagagtcttgtgggagaagatat

SEQ ID NO: 911409 - DNA, 25 bp, Homo sapien
gtagagtcttgtgggagaagatatt

SEQ ID NO: 911410 - DNA, 25 bp, Homo sapien
cttgtgggagaagatattgtaagga

SEQ ID NO: 911411 - DNA, 25 bp, Homo sapien
acagagggataaggcagatctccag

SEQ ID NO: 911412 - DNA, 25 bp, Homo sapien
tgagggatttactgtagttgggaat

SEQ ID NO: 911413 - DNA, 25 bp, Homo sapien
tttactgtagttgggaatgacagag

SEQ ID NO: 911414 - DNA, 25 bp, Homo sapien
gaatgacagagggataaggcagatc

SEQ ID NO: 911415 - DNA, 25 bp, Homo sapien
ggccagagaactccttgctgtttcc

SEQ ID NO: 911416 - DNA, 25 bp, Homo sapien
ctgatccaggagaccacggcagtct

SEQ ID NO: 911417 - DNA, 25 bp, Homo sapien
ctcacacagtggtttggggatcttt

SEQ ID NO: 911418 - DNA, 25 bp, Homo sapien
ttgggctctattccccgcaatccat

SEQ ID NO: 911419 - DNA, 25 bp, Homo sapien
ggctttcagagaccctagtgttgca

SEQ ID NO: 911420 - DNA, 25 bp, Homo sapien
cctgctggtgatttgtggagctacc

SEQ ID NO: 911421 - DNA, 25 bp, Homo sapien
cacaagctggctggtttaagcaata

SEQ ID NO: 911422 - DNA, 25 bp, Homo sapien
gcattgctttggagacgggactatt

SEQ ID NO: 911423 - DNA, 25 bp, Homo sapien
acacacactggcctgcgcccactgt

SEQ ID NO: 911424 - DNA, 25 bp, Homo sapien
tcttggctcctcccctccattttct

SEQ ID NO: 911425 - DNA, 25 bp, Homo sapien
tattctgatgctacatccttctcac

SEQ ID NO: 911426 - DNA, 25 bp, Homo sapien
tctgctgctagatgaccagtgactg

SEQ ID NO: 911427 - DNA, 25 bp, Homo sapien
cttctcactcagtgtcatcccagtg

SEQ ID NO: 911428 - DNA, 25 bp, Homo sapien
ggagaaagttccacggcaggtctgc

SEQ ID NO: 911429 - DNA, 25 bp, Homo sapien
tcaacactggttatcgtagccgatc

SEQ ID NO: 911430 - DNA, 25 bp, Homo sapien
tatcgtagccgatcaggagctctga

SEQ ID NO: 911431 - DNA, 25 bp, Homo sapien
gatcaggagctctgattggcaattg

SEQ ID NO: 911432 - DNA, 25 bp, Homo sapien
cactggttatcgtagccgatcagga

SEQ ID NO: 911433 - DNA, 25 bp, Homo sapien
cactgtggcattgttgacaactatg

SEQ ID NO: 911434 - DNA, 25 bp, Homo sapien
tggtgacactgtggcattgttgaca

SEQ ID NO: 911435 - DNA, 25 bp, Homo sapien
tgtggcattgttgacaactatgctc

SEQ ID NO: 911436 - DNA, 25 bp, Homo sapien
gcattgttgacaactatgctctggg

SEQ ID NO: 911437 - DNA, 25 bp, Homo sapien
caaatgtcatgagtgggtaggttga

SEQ ID NO: 911438 - DNA, 25 bp, Homo sapien
tgtgcttttgctgcgtcacacacac

SEQ ID NO: 911439 - DNA, 25 bp, Homo sapien
agaatatggcttttgacaaggctgc

SEQ ID NO: 911440 - DNA, 25 bp, Homo sapien
tctacctccactcgctgtgcttttg

SEQ ID NO: 911441 - DNA, 25 bp, Homo sapien
ctacggccccttggctccttgcaga

SEQ ID NO: 911442 - DNA, 25 bp, Homo sapien
agactgcccatcaggtctgaaccat

SEQ ID NO: 911443 - DNA, 25 bp, Homo sapien
tctgactgtgtatctgttaggcaag

SEQ ID NO: 911444 - DNA, 25 bp, Homo sapien
caggtctgaaccatcagcaaagaag

SEQ ID NO: 911445 - DNA, 25 bp, Homo sapien
tgagagcattcagagctaacttgtg

SEQ ID NO: 911446 - DNA, 25 bp, Homo sapien
acacagccggagtctacaaggatct

SEQ ID NO: 911447 - DNA, 25 bp, Homo sapien
tcgctgacaggagcgactgggcttt

SEQ ID NO: 911448 - DNA, 25 bp, Homo sapien
aaggatctgagtggcctcgctgaca

SEQ ID NO: 911449 - DNA, 25 bp, Homo sapien
acattgcgtttccatgacaggtcct

SEQ ID NO: 911450 - DNA, 25 bp, Homo sapien
ttcccaattcctctggtcagcaaga

SEQ ID NO: 911451 - DNA, 25 bp, Homo sapien
agttttaggtagtgggctgccttca

SEQ ID NO: 911452 - DNA, 25 bp, Homo sapien
ctctggtcagcaagatgagttttct

SEQ ID NO: 911453 - DNA, 25 bp, Homo sapien
aacacttacatggaacacattctgg

SEQ ID NO: 911454 - DNA, 25 bp, Homo sapien
cattaccagaggtaacttgaattgc

SEQ ID NO: 911455 - DNA, 25 bp, Homo sapien
cttacatggaacacattctggtaga

SEQ ID NO: 911456 - DNA, 25 bp, Homo sapien
cacatccacagcatgatcaatggca

SEQ ID NO: 911457 - DNA, 25 bp, Homo sapien
tccaatctgcatagaggctctgcag

SEQ ID NO: 911458 - DNA, 25 bp, Homo sapien
tgcaggaccccgagagagagtagac

SEQ ID NO: 911459 - DNA, 25 bp, Homo sapien
ttatgccagtctgatgtctttaagc

SEQ ID NO: 911460 - DNA, 25 bp, Homo sapien
tgtgttgcatgcacttcactttcct

SEQ ID NO: 911461 - DNA, 25 bp, Homo sapien
cagcttcctcgctggtctgcagttc

SEQ ID NO: 911462 - DNA, 25 bp, Homo sapien
aacagcttcctcgctggtctgcagt

SEQ ID NO: 911463 - DNA, 25 bp, Homo sapien
catccaacagcttcctcgctggtct

SEQ ID NO: 911464 - DNA, 25 bp, Homo sapien
gcatccaacagcttcctcgctggtc

SEQ ID NO: 911465 - DNA, 25 bp, Homo sapien
tgctctgctaatcccagctgtaagg

SEQ ID NO: 911466 - DNA, 25 bp, Homo sapien
gctgctctgctaatcccagctgtaa

SEQ ID NO: 911467 - DNA, 25 bp, Homo sapien
gctctgctaatcccagctgtaaggc

SEQ ID NO: 911468 - DNA, 25 bp, Homo sapien
agctgctctgctaatcccagctgta

SEQ ID NO: 911469 - DNA, 25 bp, Homo sapien
tgtctgcatctaaggtggtaatcac

SEQ ID NO: 911470 - DNA, 25 bp, Homo sapien
agcccaatacagtgccacgtgcttg

SEQ ID NO: 911471 - DNA, 25 bp, Homo sapien
agacatgactgttttagcaagccca

SEQ ID NO: 911472 - DNA, 25 bp, Homo sapien
ggtggtaatcactcttctttggctt

SEQ ID NO: 911473 - DNA, 25 bp, Homo sapien
gaaccagacaagagttgaccccaag

SEQ ID NO: 911474 - DNA, 25 bp, Homo sapien
gaatcaaccctgtccagttggaggg

SEQ ID NO: 911475 - DNA, 25 bp, Homo sapien
caaggtggtccaacgcattaggaaa

SEQ ID NO: 911476 - DNA, 25 bp, Homo sapien
gaacattgctgcagggaatcaaccc

SEQ ID NO: 911477 - DNA, 25 bp, Homo sapien
ctggcccacgggctgaccaggcttc

SEQ ID NO: 911478 - DNA, 25 bp, Homo sapien
caggagcgcctttacttggctctca

SEQ ID NO: 911479 - DNA, 25 bp, Homo sapien
gagcgcctttacttggctctcactt

SEQ ID NO: 911480 - DNA, 25 bp, Homo sapien
cggagcaggagcgcctttacttggc

SEQ ID NO: 911481 - DNA, 25 bp, Homo sapien
cctaaaatgctttggacgtggagct

SEQ ID NO: 911482 - DNA, 25 bp, Homo sapien
tcaggttcgcagtgagtcaagccac

SEQ ID NO: 911483 - DNA, 25 bp, Homo sapien
tgtggatccggcattcaagaaaact

SEQ ID NO: 911484 - DNA, 25 bp, Homo sapien
gatgggatgcaaagaacagactcag

SEQ ID NO: 911485 - DNA, 25 bp, Homo sapien
ttggtgcaaagagtcgcccccaaga

SEQ ID NO: 911486 - DNA, 25 bp, Homo sapien
caccccatttccaatacctttccat

SEQ ID NO: 911487 - DNA, 25 bp, Homo sapien
agagtcgcccccaagactgttgctc

SEQ ID NO: 911488 - DNA, 25 bp, Homo sapien
ggtgcaaagagtcgcccccaagact

SEQ ID NO: 911489 - DNA, 25 bp, Homo sapien
gaactatggaaggagtggtagctta

SEQ ID NO: 911490 - DNA, 25 bp, Homo sapien
agcttaggcacaaggagatggacag

SEQ ID NO: 911491 - DNA, 25 bp, Homo sapien
agtggtagcttaggcacaaggagat

SEQ ID NO: 911492 - DNA, 25 bp, Homo sapien
ccaagtattcctggaactatggaag

SEQ ID NO: 911493 - DNA, 25 bp, Homo sapien
caagtgtcaagttagatgtgccggg

SEQ ID NO: 911494 - DNA, 25 bp, Homo sapien
taaagaaatgatggtgcacacagct

SEQ ID NO: 911495 - DNA, 25 bp, Homo sapien
gaaagactccactagcaggccttga

SEQ ID NO: 911496 - DNA, 25 bp, Homo sapien
ttcagagagtatggccagaacctgc

SEQ ID NO: 911497 - DNA, 25 bp, Homo sapien
ccagagttttcaattaggaggagga

SEQ ID NO: 911498 - DNA, 25 bp, Homo sapien
cactttataatgttagcacatggca

SEQ ID NO: 911499 - DNA, 25 bp, Homo sapien
gcgccatctgccagcttaacagttg

SEQ ID NO: 911500 - DNA, 25 bp, Homo sapien
ttcacgtcaataaaccatccactgt

SEQ ID NO: 911501 - DNA, 25 bp, Homo sapien
gttgcaactctatcctaaaaacagg

SEQ ID NO: 911502 - DNA, 25 bp, Homo sapien
tggatccctcagaggtcacaggaca

SEQ ID NO: 911503 - DNA, 25 bp, Homo sapien
tggcttagtactcaaacactgatca

SEQ ID NO: 911504 - DNA, 25 bp, Homo sapien
tgtagaagcttggaagttgcaactc

SEQ ID NO: 911505 - DNA, 25 bp, Homo sapien
gttctaagtatctcaccaagctaag

SEQ ID NO: 911506 - DNA, 25 bp, Homo sapien
taattatacatcacaactacatggg

SEQ ID NO: 911507 - DNA, 25 bp, Homo sapien
gaagcaccgtggacccagataggat

SEQ ID NO: 911508 - DNA, 25 bp, Homo sapien
aagagaggacatcattacagatccc

SEQ ID NO: 911509 - DNA, 25 bp, Homo sapien
aacttgaagctttcccaccaggatt

SEQ ID NO: 911510 - DNA, 25 bp, Homo sapien
ttgaagctttcccaccaggattagg

SEQ ID NO: 911511 - DNA, 25 bp, Homo sapien
tcccaccaggattaggaacaaaata

SEQ ID NO: 911512 - DNA, 25 bp, Homo sapien
ccaggattaggaacaaaataaggct

SEQ ID NO: 911513 - DNA, 25 bp, Homo sapien
accaccaccacagaacataagctat

SEQ ID NO: 911514 - DNA, 25 bp, Homo sapien
tagaattattcaaaggccagttgtt

SEQ ID NO: 911515 - DNA, 25 bp, Homo sapien
ccaggagattgaagcagctacagtg

SEQ ID NO: 911516 - DNA, 25 bp, Homo sapien
tcctgggcgaactcgaaaaccacca

SEQ ID NO: 911517 - DNA, 25 bp, Homo sapien
taccagggctaataacaaagtagag

SEQ ID NO: 911518 - DNA, 25 bp, Homo sapien
tataggtgaactgtcctcctgccaa

SEQ ID NO: 911519 - DNA, 25 bp, Homo sapien
aagtctaacacatcctaggtatagg

SEQ ID NO: 911520 - DNA, 25 bp, Homo sapien
gaatagtaactcacccgaacagtgt

SEQ ID NO: 911521 - DNA, 25 bp, Homo sapien
tttgggctaacctgaaaacagtata

SEQ ID NO: 911522 - DNA, 25 bp, Homo sapien
tattatacaagaatatggtggcctg

SEQ ID NO: 911523 - DNA, 25 bp, Homo sapien
aaaaattgcaataagaccacaggct

SEQ ID NO: 911524 - DNA, 25 bp, Homo sapien
cacagggtggttggaactaggcctt

SEQ ID NO: 911525 - DNA, 25 bp, Homo sapien
accactgaataactgaagataatgg

SEQ ID NO: 911526 - DNA, 25 bp, Homo sapien
aatgaattccatcacgggggttata

SEQ ID NO: 911527 - DNA, 25 bp, Homo sapien
cacgggggttatatgatccagggct

SEQ ID NO: 911528 - DNA, 25 bp, Homo sapien
tttttgctccatacaccaggctgct

SEQ ID NO: 911529 - DNA, 25 bp, Homo sapien
caggctgctattgcattgaaggcaa

SEQ ID NO: 911530 - DNA, 25 bp, Homo sapien
tttaagttatatagcagaagccaca

SEQ ID NO: 911531 - DNA, 25 bp, Homo sapien
taatgccattgatgacctgacagga

SEQ ID NO: 911532 - DNA, 25 bp, Homo sapien
tttgcagtctggttcctaacaggac

SEQ ID NO: 911533 - DNA, 25 bp, Homo sapien
cagttgacaatagggttggtactcc

SEQ ID NO: 911534 - DNA, 25 bp, Homo sapien
cagccatgtatacagaggattcaga

SEQ ID NO: 911535 - DNA, 25 bp, Homo sapien
tgtgatgggtgcagttcctgaaaac

SEQ ID NO: 911536 - DNA, 25 bp, Homo sapien
gaagatatctaaaagcagccatgta

SEQ ID NO: 911537 - DNA, 25 bp, Homo sapien
cataacatgtaaagcccagagaagc

SEQ ID NO: 911538 - DNA, 25 bp, Homo sapien
tcatagtagtgcacacaaatttttt

SEQ ID NO: 911539 - DNA, 25 bp, Homo sapien
tttcatagtagtgcacacaaatttt

SEQ ID NO: 911540 - DNA, 25 bp, Homo sapien
tgtttcatagtagtgcacacaaatt

SEQ ID NO: 911541 - DNA, 25 bp, Homo sapien
tttgttcccgcttgtatttttcaca

SEQ ID NO: 911542 - DNA, 25 bp, Homo sapien
tagatgtaagcatcctgcaagtttt

SEQ ID NO: 911543 - DNA, 25 bp, Homo sapien
tcacttccattccttagatgtaagc

SEQ ID NO: 911544 - DNA, 25 bp, Homo sapien
ttccattccttagatgtaagcatcc

SEQ ID NO: 911545 - DNA, 25 bp, Homo sapien
tccttagatgtaagcatcctgcaag

SEQ ID NO: 911546 - DNA, 25 bp, Homo sapien
taatggctttggtgtgatttttcca

SEQ ID NO: 911547 - DNA, 25 bp, Homo sapien
cctcagattcctagtaagactcttc

SEQ ID NO: 911548 - DNA, 25 bp, Homo sapien
tctcatctagagctttaataatggc

SEQ ID NO: 911549 - DNA, 25 bp, Homo sapien
catatccacaggagcgaggtcatcc

SEQ ID NO: 911550 - DNA, 25 bp, Homo sapien
cccatgcacaagaattggttgcatc

SEQ ID NO: 911551 - DNA, 25 bp, Homo sapien
ccatgcacaagaattggttgcatct

SEQ ID NO: 911552 - DNA, 25 bp, Homo sapien
acccatgcacaagaattggttgcat

SEQ ID NO: 911553 - DNA, 25 bp, Homo sapien
aacccatgcacaagaattggttgca

SEQ ID NO: 911554 - DNA, 25 bp, Homo sapien
caacttccacggattaggagggtga

SEQ ID NO: 911555 - DNA, 25 bp, Homo sapien
cacaggtgactctccattaagcagc

SEQ ID NO: 911556 - DNA, 25 bp, Homo sapien
aaagaaaggaatccagccctctcag

SEQ ID NO: 911557 - DNA, 25 bp, Homo sapien
tatccacccacagtcagtaagtcag

SEQ ID NO: 911558 - DNA, 25 bp, Homo sapien
gtttcttgtcagtgtacaactttcc

SEQ ID NO: 911559 - DNA, 25 bp, Homo sapien
ttcttgtcagtgtacaactttccaa

SEQ ID NO: 911560 - DNA, 25 bp, Homo sapien
gaataaatgctcctttgcgaaaggg

SEQ ID NO: 911561 - DNA, 25 bp, Homo sapien
tgcgaaaggggtcagtaagacttgc

SEQ ID NO: 911562 - DNA, 25 bp, Homo sapien
tcaaggctcaatgtgacgggaacgg

SEQ ID NO: 911563 - DNA, 25 bp, Homo sapien
gaaactggtctagctctcagtggac

SEQ ID NO: 911564 - DNA, 25 bp, Homo sapien
ggatctctagccagcaaccagaact

SEQ ID NO: 911565 - DNA, 25 bp, Homo sapien
gaacgtgcacctttgagttgaggct

SEQ ID NO: 911566 - DNA, 25 bp, Homo sapien
tgattgatattccaggggcttaatg

SEQ ID NO: 911567 - DNA, 25 bp, Homo sapien
tattccaggggcttaatgatcttac

SEQ ID NO: 911568 - DNA, 25 bp, Homo sapien
ctttgattgatattccaggggctta

SEQ ID NO: 911569 - DNA, 25 bp, Homo sapien
atattccaggggcttaatgatctta

SEQ ID NO: 911570 - DNA, 25 bp, Homo sapien
tcttgtatttcttttgcctgtacat

SEQ ID NO: 911571 - DNA, 25 bp, Homo sapien
ttttgcctgtacatattcaggcctg

SEQ ID NO: 911572 - DNA, 25 bp, Homo sapien
tgtatttcttttgcctgtacatatt

SEQ ID NO: 911573 - DNA, 25 bp, Homo sapien
tattcaggcctgagactgtggcctg

SEQ ID NO: 911574 - DNA, 25 bp, Homo sapien
tgggtttgtgctggcatcgaagagg

SEQ ID NO: 911575 - DNA, 25 bp, Homo sapien
ttgtgctggcatcgaagaggttgat

SEQ ID NO: 911576 - DNA, 25 bp, Homo sapien
tcgaagaggttgatgatgcactgtc

SEQ ID NO: 911577 - DNA, 25 bp, Homo sapien
agaggttgatgatgcactgtccttt

SEQ ID NO: 911578 - DNA, 25 bp, Homo sapien
cattgtaaaataactacctgagtac

SEQ ID NO: 911579 - DNA, 25 bp, Homo sapien
attgtaaaataactacctgagtact

SEQ ID NO: 911580 - DNA, 25 bp, Homo sapien
ttacattgtaaaataactacctgag

SEQ ID NO: 911581 - DNA, 25 bp, Homo sapien
tacattgtaaaataactacctgagt

SEQ ID NO: 911582 - DNA, 25 bp, Homo sapien
gctggacattcattccatatcctgg

SEQ ID NO: 911583 - DNA, 25 bp, Homo sapien
tgaggtaattgttctgcacgtctgc

SEQ ID NO: 911584 - DNA, 25 bp, Homo sapien
ggaaagcagcgattaatccaaacca

SEQ ID NO: 911585 - DNA, 25 bp, Homo sapien
acagcactcaggacattttggatgt

SEQ ID NO: 911586 - DNA, 25 bp, Homo sapien
tacatcacacagagcctaattaggc

SEQ ID NO: 911587 - DNA, 25 bp, Homo sapien
cctgagaaaacctagtgatagatgc

SEQ ID NO: 911588 - DNA, 25 bp, Homo sapien
ggagacacattcctaatcactcaga

SEQ ID NO: 911589 - DNA, 25 bp, Homo sapien
tggtgacctggtatgcaatctgtga

SEQ ID NO: 911590 - DNA, 25 bp, Homo sapien
tccaacattttacagcggcggcctg

SEQ ID NO: 911591 - DNA, 25 bp, Homo sapien
gcacctgggagattacctttgataa

SEQ ID NO: 911592 - DNA, 25 bp, Homo sapien
tatagccaatctggagtggttcaca

SEQ ID NO: 911593 - DNA, 25 bp, Homo sapien
gtatcttaggatgggatatgggccc

SEQ ID NO: 911594 - DNA, 25 bp, Homo sapien
cagtaactttggactgaaagcaaaa

SEQ ID NO: 911595 - DNA, 25 bp, Homo sapien
tagcaaaccaaataagaaacttctg

SEQ ID NO: 911596 - DNA, 25 bp, Homo sapien
ttattttgctgtagcaaaccaaata

SEQ ID NO: 911597 - DNA, 25 bp, Homo sapien
attttgctgtagcaaaccaaataag

SEQ ID NO: 911598 - DNA, 25 bp, Homo sapien
gcaaaccaaataagaaacttctgtg

SEQ ID NO: 911599 - DNA, 25 bp, Homo sapien
aaggttcacagttatggtctgtaca

SEQ ID NO: 911600 - DNA, 25 bp, Homo sapien
tatggtctgtacatcgcttgggtcc

SEQ ID NO: 911601 - DNA, 25 bp, Homo sapien
catcgcttgggtcctttttcagtgt

SEQ ID NO: 911602 - DNA, 25 bp, Homo sapien
cagttatggtctgtacatcgcttgg

SEQ ID NO: 911603 - DNA, 25 bp, Homo sapien
cacatgaaaggtcaagaagcagttt

SEQ ID NO: 911604 - DNA, 25 bp, Homo sapien
agctctttgcattttaacgcgatgg

SEQ ID NO: 911605 - DNA, 25 bp, Homo sapien
cattttaacgcgatggcattcagac

SEQ ID NO: 911606 - DNA, 25 bp, Homo sapien
gcagggagctgcatgatatcgagct

SEQ ID NO: 911607 - DNA, 25 bp, Homo sapien
tctgaaagctttagggggaatccaa

SEQ ID NO: 911608 - DNA, 25 bp, Homo sapien
tgccttcattatttggcatgtggct

SEQ ID NO: 911609 - DNA, 25 bp, Homo sapien
gagtcttactaagcaaaaatcaagc

SEQ ID NO: 911610 - DNA, 25 bp, Homo sapien
ttctagctgtagtggctgccttcat

SEQ ID NO: 911611 - DNA, 25 bp, Homo sapien
gtaggtttatattcgaggaaacatg

SEQ ID NO: 911612 - DNA, 25 bp, Homo sapien
tatagcatattttagttgaagacgt

SEQ ID NO: 911613 - DNA, 25 bp, Homo sapien
ggaaacatgtataaattccactcat

SEQ ID NO: 911614 - DNA, 25 bp, Homo sapien
gcatattttagttgaagacgtttaa

SEQ ID NO: 911615 - DNA, 25 bp, Homo sapien
gatgttatttgtgcagtgcggtttt

SEQ ID NO: 911616 - DNA, 25 bp, Homo sapien
tggatgttatttgtgcagtgcggtt

SEQ ID NO: 911617 - DNA, 25 bp, Homo sapien
ggatgttatttgtgcagtgcggttt

SEQ ID NO: 911618 - DNA, 25 bp, Homo sapien
cgcccagctcgccagcggtcagagt

SEQ ID NO: 911619 - DNA, 25 bp, Homo sapien
ataaaatgataagtacagtgcagtt

SEQ ID NO: 911620 - DNA, 25 bp, Homo sapien
cagtgcagtttaaactacagtccaa

SEQ ID NO: 911621 - DNA, 25 bp, Homo sapien
tggctcaaatcaagggaaactatct

SEQ ID NO: 911622 - DNA, 25 bp, Homo sapien
gatttatttggctcaaatcaaggga

SEQ ID NO: 911623 - DNA, 25 bp, Homo sapien
gaatgatgggtctatcagttcagca

SEQ ID NO: 911624 - DNA, 25 bp, Homo sapien
agttcagcatttcgcagttgttgcg

SEQ ID NO: 911625 - DNA, 25 bp, Homo sapien
cacgtgtggactcttttgatggagc

SEQ ID NO: 911626 - DNA, 25 bp, Homo sapien
cctttaggcccataccattggaatg

SEQ ID NO: 911627 - DNA, 25 bp, Homo sapien
tttcactgaatctttggtcaagcga

SEQ ID NO: 911628 - DNA, 25 bp, Homo sapien
ctggaaaacttgttgatcccactat

SEQ ID NO: 911629 - DNA, 25 bp, Homo sapien
gaaaagctcttggtaatcgaaccaa

SEQ ID NO: 911630 - DNA, 25 bp, Homo sapien
tttggtcaagcgaaaagctcttggt

SEQ ID NO: 911631 - DNA, 25 bp, Homo sapien
cacccgcaccaggaaggcggagata

SEQ ID NO: 911632 - DNA, 25 bp, Homo sapien
ggaggatggcggcccgagagagcag

SEQ ID NO: 911633 - DNA, 25 bp, Homo sapien
ggatggcggcccgagagagcaggga

SEQ ID NO: 911634 - DNA, 25 bp, Homo sapien
acccgcaccaggaaggcggagataa

SEQ ID NO: 911635 - DNA, 25 bp, Homo sapien
ggaacaacggacctgatggacgtgc

SEQ ID NO: 911636 - DNA, 25 bp, Homo sapien
ggcctacacgcgccaactgtgctgt

SEQ ID NO: 911637 - DNA, 25 bp, Homo sapien
ctgcagccggaagttggcgggcgga

SEQ ID NO: 911638 - DNA, 25 bp, Homo sapien
tccgcgcggaaggtcgttaggcaac

SEQ ID NO: 911639 - DNA, 25 bp, Homo sapien
tctgagccgcttttaagacacgacc

SEQ ID NO: 911640 - DNA, 25 bp, Homo sapien
gattggactcagtagctaagccata

SEQ ID NO: 911641 - DNA, 25 bp, Homo sapien
catattatagcctgtgattggactc

SEQ ID NO: 911642 - DNA, 25 bp, Homo sapien
aaattggtagtttcatctgagccgc

SEQ ID NO: 911643 - DNA, 25 bp, Homo sapien
ggaatgaagataagttaatttccac

SEQ ID NO: 911644 - DNA, 25 bp, Homo sapien
gatggtgccagttgtatggaacttg

SEQ ID NO: 911645 - DNA, 25 bp, Homo sapien
agtttctaacgaggttcctggatgc

SEQ ID NO: 911646 - DNA, 25 bp, Homo sapien
ggatgctcactcttgttggtagatg

SEQ ID NO: 911647 - DNA, 25 bp, Homo sapien
gcgcccagccgagaggaatcacttt

SEQ ID NO: 911648 - DNA, 25 bp, Homo sapien
cgcggcagatcactaacagagagga

SEQ ID NO: 911649 - DNA, 25 bp, Homo sapien
tgtaaagtatctgagacgcggcaga

SEQ ID NO: 911650 - DNA, 25 bp, Homo sapien
tcgtgctgtgcttcgtcctgaggaa

SEQ ID NO: 911651 - DNA, 25 bp, Homo sapien
ttgggcactagagggcctccaaggt

SEQ ID NO: 911652 - DNA, 25 bp, Homo sapien
tcttttgattcgctttcaattttta

SEQ ID NO: 911653 - DNA, 25 bp, Homo sapien
actagagggcctccaaggttgcaaa

SEQ ID NO: 911654 - DNA, 25 bp, Homo sapien
ctgatttgggcactagagggcctcc

SEQ ID NO: 911655 - DNA, 25 bp, Homo sapien
tgtgtggccccaatctcattgccca

SEQ ID NO: 911656 - DNA, 25 bp, Homo sapien
aatctcattgcccatgccttctgct

SEQ ID NO: 911657 - DNA, 25 bp, Homo sapien
cccagctcagaagctatactcatta

SEQ ID NO: 911658 - DNA, 25 bp, Homo sapien
agctcagaagctatactcattagac

SEQ ID NO: 911659 - DNA, 25 bp, Homo sapien
gctagggccagatcttaaaggatcc

SEQ ID NO: 911660 - DNA, 25 bp, Homo sapien
ttctttgagaactgcaggtacaggg

SEQ ID NO: 911661 - DNA, 25 bp, Homo sapien
tatctgaaaggtacagggtatccca

SEQ ID NO: 911662 - DNA, 25 bp, Homo sapien
aaggatccttgaatgccaatatgcg

SEQ ID NO: 911663 - DNA, 25 bp, Homo sapien
ggcaaaagcacctgatatgatagca

SEQ ID NO: 911664 - DNA, 25 bp, Homo sapien
gcaaaagcacctgatatgatagcat

SEQ ID NO: 911665 - DNA, 25 bp, Homo sapien
ttaggcaaaagcacctgatatgata

SEQ ID NO: 911666 - DNA, 25 bp, Homo sapien
taggcaaaagcacctgatatgatag

SEQ ID NO: 911667 - DNA, 25 bp, Homo sapien
gcagggaccagatctctcatctctg

SEQ ID NO: 911668 - DNA, 25 bp, Homo sapien
ttcctaaacgtgaagtgaaacactc

SEQ ID NO: 911669 - DNA, 25 bp, Homo sapien
gaagtgaaacactcaacaggaaatt

SEQ ID NO: 911670 - DNA, 25 bp, Homo sapien
acactcaacaggaaatttctggaca

SEQ ID NO: 911671 - DNA, 25 bp, Homo sapien
tcaatcctttcctaaacgtgaagtg

SEQ ID NO: 911672 - DNA, 25 bp, Homo sapien
tgtaccgaacgatcagtgggctgac

SEQ ID NO: 911673 - DNA, 25 bp, Homo sapien
ctgacagttactgtgtaccgaacga

SEQ ID NO: 911674 - DNA, 25 bp, Homo sapien
gagaactaccgctgtggatgaactt

SEQ ID NO: 911675 - DNA, 25 bp, Homo sapien
tgcccagggagaactaccgctgtgg

SEQ ID NO: 911676 - DNA, 25 bp, Homo sapien
gatcattctacccattgagtaagtg

SEQ ID NO: 911677 - DNA, 25 bp, Homo sapien
cattctacccattgagtaagtgaac

SEQ ID NO: 911678 - DNA, 25 bp, Homo sapien
caagtcctgatcattctacccattg

SEQ ID NO: 911679 - DNA, 25 bp, Homo sapien
tcctgatcattctacccattgagta

SEQ ID NO: 911680 - DNA, 25 bp, Homo sapien
ggtatcttctttacagtccaccctg

SEQ ID NO: 911681 - DNA, 25 bp, Homo sapien
cccaggtatcttctttacagtccac

SEQ ID NO: 911682 - DNA, 25 bp, Homo sapien
ccacctgggccacggcagtagatgt

SEQ ID NO: 911683 - DNA, 25 bp, Homo sapien
caggtatcttctttacagtccaccc

SEQ ID NO: 911684 - DNA, 25 bp, Homo sapien
gatttggcacttcctatccgtggca

SEQ ID NO: 911685 - DNA, 25 bp, Homo sapien
tccgtggcactcttggttcccatga

SEQ ID NO: 911686 - DNA, 25 bp, Homo sapien
catgagcttgacagtgccagggtgc

SEQ ID NO: 911687 - DNA, 25 bp, Homo sapien
tctgaaatagttggctgtctccaaa

SEQ ID NO: 911688 - DNA, 25 bp, Homo sapien
agagtctccatccttgtccccgcat

SEQ ID NO: 911689 - DNA, 25 bp, Homo sapien
ttggccaaagagtctccatccttgt

SEQ ID NO: 911690 - DNA, 25 bp, Homo sapien
caaagagtctccatccttgtccccg

SEQ ID NO: 911691 - DNA, 25 bp, Homo sapien
tggccaaagagtctccatccttgtc

SEQ ID NO: 911692 - DNA, 25 bp, Homo sapien
cagccatttcaagaaggatggggcg

SEQ ID NO: 911693 - DNA, 25 bp, Homo sapien
ctttgccgatagacaaaaaggtcac

SEQ ID NO: 911694 - DNA, 25 bp, Homo sapien
gaacccatgccgaatttgtacagct

SEQ ID NO: 911695 - DNA, 25 bp, Homo sapien
aagaaccctggaacccatgccgaat

SEQ ID NO: 911696 - DNA, 25 bp, Homo sapien
ccaaggggtcagtctcgtttccagg

SEQ ID NO: 911697 - DNA, 25 bp, Homo sapien
gtccaaggggtcagtctcgtttcca

SEQ ID NO: 911698 - DNA, 25 bp, Homo sapien
ctggtccaaggggtcagtctcgttt

SEQ ID NO: 911699 - DNA, 25 bp, Homo sapien
tggtccaaggggtcagtctcgtttc

SEQ ID NO: 911700 - DNA, 25 bp, Homo sapien
catggggcagccagctaagcagctg

SEQ ID NO: 911701 - DNA, 25 bp, Homo sapien
tcatggggcagccagctaagcagct

SEQ ID NO: 911702 - DNA, 25 bp, Homo sapien
cttcagctctcatcatggggcagcc

SEQ ID NO: 911703 - DNA, 25 bp, Homo sapien
gatggcctcttaaggctatcaccgt

SEQ ID NO: 911704 - DNA, 25 bp, Homo sapien
tcttaaggctatcaccgttacctgg

SEQ ID NO: 911705 - DNA, 25 bp, Homo sapien
gctatcaccgttacctggacaggaa

SEQ ID NO: 911706 - DNA, 25 bp, Homo sapien
gaacagatggcctcttaaggctatc

SEQ ID NO: 911707 - DNA, 25 bp, Homo sapien
ttggtgtggcgcattcttagaaggc

SEQ ID NO: 911708 - DNA, 25 bp, Homo sapien
gcaatcgtggattctaggcaaagca

SEQ ID NO: 911709 - DNA, 25 bp, Homo sapien
tcacaggacatgtcacctcattggt

SEQ ID NO: 911710 - DNA, 25 bp, Homo sapien
cagcgatacagtgcctgcgtgggca

SEQ ID NO: 911711 - DNA, 25 bp, Homo sapien
caaagatcaacaagaatagacaggg

SEQ ID NO: 911712 - DNA, 25 bp, Homo sapien
aagatcaacaagaatagacagggtg

SEQ ID NO: 911713 - DNA, 25 bp, Homo sapien
agatcaacaagaatagacagggtgt

SEQ ID NO: 911714 - DNA, 25 bp, Homo sapien
ccaaagatcaacaagaatagacagg

SEQ ID NO: 911715 - DNA, 25 bp, Homo sapien
tctcttgatcccttttgatggcctt

SEQ ID NO: 911716 - DNA, 25 bp, Homo sapien
tgttgactcaatgaagtcaatagaa

SEQ ID NO: 911717 - DNA, 25 bp, Homo sapien
caatgaagtcaatagaagttcaagc

SEQ ID NO: 911718 - DNA, 25 bp, Homo sapien
gctcctgtgtcttctcttgatccct

SEQ ID NO: 911719 - DNA, 25 bp, Homo sapien
gccctcaaggcgtagcttctggaat

SEQ ID NO: 911720 - DNA, 25 bp, Homo sapien
ccacttcttgatgggagagccccaa

SEQ ID NO: 911721 - DNA, 25 bp, Homo sapien
gcaaaatctgcaagagccctcaagg

SEQ ID NO: 911722 - DNA, 25 bp, Homo sapien
tgttccctgaagagtgtggcctcag

SEQ ID NO: 911723 - DNA, 25 bp, Homo sapien
aagacgtcttcctaaaaggctcaga

SEQ ID NO: 911724 - DNA, 25 bp, Homo sapien
gaagacgtcttcctaaaaggctcag

SEQ ID NO: 911725 - DNA, 25 bp, Homo sapien
tgaagacgtcttcctaaaaggctca

SEQ ID NO: 911726 - DNA, 25 bp, Homo sapien
acgtcttcctaaaaggctcagatcc

SEQ ID NO: 911727 - DNA, 25 bp, Homo sapien
ccagagagtgccgtgggtttccacc

SEQ ID NO: 911728 - DNA, 25 bp, Homo sapien
ggcgatctctgctctcctcggagat

SEQ ID NO: 911729 - DNA, 25 bp, Homo sapien
cgggaggtctgataaggcgatctct

SEQ ID NO: 911730 - DNA, 25 bp, Homo sapien
tctcctcggagatgcataagtgcag

SEQ ID NO: 911731 - DNA, 25 bp, Homo sapien
gggctctccttgtggactgtgcagg

SEQ ID NO: 911732 - DNA, 25 bp, Homo sapien
ggctctccttgtggactgtgcaggt

SEQ ID NO: 911733 - DNA, 25 bp, Homo sapien
tgctgtgaagctgacgcgctctgtg

SEQ ID NO: 911734 - DNA, 25 bp, Homo sapien
ggatgctgtgaagctgacgcgctct

SEQ ID NO: 911735 - DNA, 25 bp, Homo sapien
ctgtgaagctgacgcgctctgtgga

SEQ ID NO: 911736 - DNA, 25 bp, Homo sapien
tgcagggcacgaagggggagcaggg

SEQ ID NO: 911737 - DNA, 25 bp, Homo sapien
ccagaaggtgggtgagggaggccat

SEQ ID NO: 911738 - DNA, 25 bp, Homo sapien
gccaccagaaggtgggtgagggagg

SEQ ID NO: 911739 - DNA, 25 bp, Homo sapien
ctggccaccagaaggtgggtgaggg

SEQ ID NO: 911740 - DNA, 25 bp, Homo sapien
accagaaggtgggtgagggaggcca

SEQ ID NO: 911741 - DNA, 25 bp, Homo sapien
gtcgtctgccattcttcaccttgtc

SEQ ID NO: 911742 - DNA, 25 bp, Homo sapien
ctttccgtggcactggggctcttgg

SEQ ID NO: 911743 - DNA, 25 bp, Homo sapien
ttgcttttccatgttgtcgtctgcc

SEQ ID NO: 911744 - DNA, 25 bp, Homo sapien
tgagtcatctgatacaagaagccct

SEQ ID NO: 911745 - DNA, 25 bp, Homo sapien
agacagaacttggtgcaaccaggag

SEQ ID NO: 911746 - DNA, 25 bp, Homo sapien
acagacagaacttggtgcaaccagg

SEQ ID NO: 911747 - DNA, 25 bp, Homo sapien
tccacagacagaacttggtgcaacc

SEQ ID NO: 911748 - DNA, 25 bp, Homo sapien
cacagacagaacttggtgcaaccag

SEQ ID NO: 911749 - DNA, 25 bp, Homo sapien
tggcatcgggaggcaggtatccaca

SEQ ID NO: 911750 - DNA, 25 bp, Homo sapien
ctggcatcgggaggcaggtatccac

SEQ ID NO: 911751 - DNA, 25 bp, Homo sapien
ggcatcgggaggcaggtatccacac

SEQ ID NO: 911752 - DNA, 25 bp, Homo sapien
atcgggaggtgtccacacattggca

SEQ ID NO: 911753 - DNA, 25 bp, Homo sapien
acattggcatcaggaggaggtgtcc

SEQ ID NO: 911754 - DNA, 25 bp, Homo sapien
ccacacattggcatcaggaggaggt

SEQ ID NO: 911755 - DNA, 25 bp, Homo sapien
ctggcatcgggaggtgtccacacat

SEQ ID NO: 911756 - DNA, 25 bp, Homo sapien
tgtccacacgctggtatcgggaagc

SEQ ID NO: 911757 - DNA, 25 bp, Homo sapien
gaagaggcaccctcacactggcatc

SEQ ID NO: 911758 - DNA, 25 bp, Homo sapien
aggaggtgctcacacgctggcatcg

SEQ ID NO: 911759 - DNA, 25 bp, Homo sapien
tgtccatatgttggcatcaggagga

SEQ ID NO: 911760 - DNA, 25 bp, Homo sapien
ccaccgaggggtgcactcaggagct

SEQ ID NO: 911761 - DNA, 25 bp, Homo sapien
tacaccaggggatgttggcagacaa

SEQ ID NO: 911762 - DNA, 25 bp, Homo sapien
tgcactcaggagctgacactcactt

SEQ ID NO: 911763 - DNA, 25 bp, Homo sapien
ttggcagacaatccgaagaccaccg

SEQ ID NO: 911764 - DNA, 25 bp, Homo sapien
cagagcagtgtggtggtgctttcca

SEQ ID NO: 911765 - DNA, 25 bp, Homo sapien
gaagctggggacacgagtgccccca

SEQ ID NO: 911766 - DNA, 25 bp, Homo sapien
gtgcccccagagcagtgtggtggtg

SEQ ID NO: 911767 - DNA, 25 bp, Homo sapien
gctttccagagagcacagggactct

SEQ ID NO: 911768 - DNA, 25 bp, Homo sapien
caagtgcggcgtgtgcctgagttct

SEQ ID NO: 911769 - DNA, 25 bp, Homo sapien
caaagattgaggtggagacaagtgc

SEQ ID NO: 911770 - DNA, 25 bp, Homo sapien
cctgagttctgctgcgctcttctga

SEQ ID NO: 911771 - DNA, 25 bp, Homo sapien
gccctggacacgtgaatcccattga

SEQ ID NO: 911772 - DNA, 25 bp, Homo sapien
cagagaggacgcctgtcactggagg

SEQ ID NO: 911773 - DNA, 25 bp, Homo sapien
agagaggacgcctgtcactggaggt

SEQ ID NO: 911774 - DNA, 25 bp, Homo sapien
caggattggagcatgtctgcagagg

SEQ ID NO: 911775 - DNA, 25 bp, Homo sapien
caagcttgctctgcactggctggca

SEQ ID NO: 911776 - DNA, 25 bp, Homo sapien
tccctgcagtcccaggattggagca

SEQ ID NO: 911777 - DNA, 25 bp, Homo sapien
cactggctggcatgctccctgcagt

SEQ ID NO: 911778 - DNA, 25 bp, Homo sapien
ggcaccaggtcgcacagggctttag

SEQ ID NO: 911779 - DNA, 25 bp, Homo sapien
aaaggcaccaggtcgcacagggctt

SEQ ID NO: 911780 - DNA, 25 bp, Homo sapien
ccaggtcgcacagggctttagagct

SEQ ID NO: 911781 - DNA, 25 bp, Homo sapien
gggctttagagctctgcttcaaact

SEQ ID NO: 911782 - DNA, 25 bp, Homo sapien
ttcttcctcgaatctcgcctgaggg

SEQ ID NO: 911783 - DNA, 25 bp, Homo sapien
gagcatcatggccattaatgcaggg

SEQ ID NO: 911784 - DNA, 25 bp, Homo sapien
ctggacagagggagcatcatggcca

SEQ ID NO: 911785 - DNA, 25 bp, Homo sapien
ggccattaatgcagggaaggcttct

SEQ ID NO: 911786 - DNA, 25 bp, Homo sapien
gcaatcgcaggtgagcatcagagac

SEQ ID NO: 911787 - DNA, 25 bp, Homo sapien
ctgcaatcgcaggtgagcatcagag

SEQ ID NO: 911788 - DNA, 25 bp, Homo sapien
tgcaatcgcaggtgagcatcagaga

SEQ ID NO: 911789 - DNA, 25 bp, Homo sapien
agaccagcaccttcaaactcggcat

SEQ ID NO: 911790 - DNA, 25 bp, Homo sapien
ctgtggagagctcggcgttctccat

SEQ ID NO: 911791 - DNA, 25 bp, Homo sapien
ggagagctcggcgttctccatcccg

SEQ ID NO: 911792 - DNA, 25 bp, Homo sapien
acttctgtggagagctcggcgttct

SEQ ID NO: 911793 - DNA, 25 bp, Homo sapien
ttctgtggagagctcggcgttctcc

SEQ ID NO: 911794 - DNA, 25 bp, Homo sapien
gaattttgcaaacgatccaaagcag

SEQ ID NO: 911795 - DNA, 25 bp, Homo sapien
attttgcaaacgatccaaagcagag

SEQ ID NO: 911796 - DNA, 25 bp, Homo sapien
ttttgcaaacgatccaaagcagagt

SEQ ID NO: 911797 - DNA, 25 bp, Homo sapien
tttgcaaacgatccaaagcagagtg

SEQ ID NO: 911798 - DNA, 25 bp, Homo sapien
caaatgtcacaagtaccaccagata

SEQ ID NO: 911799 - DNA, 25 bp, Homo sapien
cctcgctggtatggtcccaagacct

SEQ ID NO: 911800 - DNA, 25 bp, Homo sapien
tgcctggtgacatgccggcctgagg

SEQ ID NO: 911801 - DNA, 25 bp, Homo sapien
tatggagtggcattaaacatctgcc

SEQ ID NO: 911802 - DNA, 25 bp, Homo sapien
gcatgggaatggttgggcctacaca

SEQ ID NO: 911803 - DNA, 25 bp, Homo sapien
tatgtagcagccctgtctggcagag

SEQ ID NO: 911804 - DNA, 25 bp, Homo sapien
cctacacagttgtgaacagggccct

SEQ ID NO: 911805 - DNA, 25 bp, Homo sapien
tatgtgtccactaccttgcaagatg

SEQ ID NO: 911806 - DNA, 25 bp, Homo sapien
gactaactccatccgttagagtggg

SEQ ID NO: 911807 - DNA, 25 bp, Homo sapien
caaggcaggagttctcctctggcca

SEQ ID NO: 911808 - DNA, 25 bp, Homo sapien
gaaagggacatttagtccagccctc

SEQ ID NO: 911809 - DNA, 25 bp, Homo sapien
ggaatgggtcgtgtcttcaatgcag

SEQ ID NO: 911810 - DNA, 25 bp, Homo sapien
gatcctgctcttgaaatcgcacaca

SEQ ID NO: 911811 - DNA, 25 bp, Homo sapien
agtctagataccagaaggaagctcc

SEQ ID NO: 911812 - DNA, 25 bp, Homo sapien
cttgggcatgtacagcaaggatagg

SEQ ID NO: 911813 - DNA, 25 bp, Homo sapien
cagcaaggatagggaggagatctaa

SEQ ID NO: 911814 - DNA, 25 bp, Homo sapien
ggtagagaagcagcaaatgtcaggc

SEQ ID NO: 911815 - DNA, 25 bp, Homo sapien
aactccagtgccttatcccaggtag

SEQ ID NO: 911816 - DNA, 25 bp, Homo sapien
ggactccatgcttctaactccagtg

SEQ ID NO: 911817 - DNA, 25 bp, Homo sapien
tgtctgtttcagtaagaacccatcc

SEQ ID NO: 911818 - DNA, 25 bp, Homo sapien
ggatttcaagtcttagcttcacaaa

SEQ ID NO: 911819 - DNA, 25 bp, Homo sapien
gggatttcaagtcttagcttcacaa

SEQ ID NO: 911820 - DNA, 25 bp, Homo sapien
cgtgggatttcaagtcttagcttca

SEQ ID NO: 911821 - DNA, 25 bp, Homo sapien
tgggatttcaagtcttagcttcaca

SEQ ID NO: 911822 - DNA, 25 bp, Homo sapien
gatcttgtgatttccgccaggctca

SEQ ID NO: 911823 - DNA, 25 bp, Homo sapien
tgaggtcacccaggagtcagttggc

SEQ ID NO: 911824 - DNA, 25 bp, Homo sapien
cagatgtaagaaacgcagacgggca

SEQ ID NO: 911825 - DNA, 25 bp, Homo sapien
gaaactcctctgctaactggcttga

SEQ ID NO: 911826 - DNA, 25 bp, Homo sapien
cgacttgacagtctgctttcactaa

SEQ ID NO: 911827 - DNA, 25 bp, Homo sapien
gtctgctttcactaatccatatgca

SEQ ID NO: 911828 - DNA, 25 bp, Homo sapien
atgcatataaggtgtatattacccc

SEQ ID NO: 911829 - DNA, 25 bp, Homo sapien
cactaatccatatgcatataaggtg

SEQ ID NO: 911830 - DNA, 25 bp, Homo sapien
catatgcgctcagggagaatgtgga

SEQ ID NO: 911831 - DNA, 25 bp, Homo sapien
gatagacgctgtttgtgattcacgg

SEQ ID NO: 911832 - DNA, 25 bp, Homo sapien
tgattcacgggtaaagggccttctc

SEQ ID NO: 911833 - DNA, 25 bp, Homo sapien
cacactgagtactgtagtaagagct

SEQ ID NO: 911834 - DNA, 25 bp, Homo sapien
gccctcttcacagggcgctcctcct

SEQ ID NO: 911835 - DNA, 25 bp, Homo sapien
aggagcacgttctcggccctcttca

SEQ ID NO: 911836 - DNA, 25 bp, Homo sapien
ctatgggtcttcacgccttcccgaa

SEQ ID NO: 911837 - DNA, 25 bp, Homo sapien
gcgcccaagcaggagcacgttctcg

SEQ ID NO: 911838 - DNA, 25 bp, Homo sapien
cccaggccaacatggaaggcgccat

SEQ ID NO: 911839 - DNA, 25 bp, Homo sapien
gggattgcttcgctgtcacctccgc

SEQ ID NO: 911840 - DNA, 25 bp, Homo sapien
gtctgagacgcaaagagccgtcgag

SEQ ID NO: 911841 - DNA, 25 bp, Homo sapien
ttccgcacgcacttgtgtgtgcacc

SEQ ID NO: 911842 - DNA, 25 bp, Homo sapien
gtctccaggagaccacaagggctgc

SEQ ID NO: 911843 - DNA, 25 bp, Homo sapien
gagaagatcagctgtggccgtttgt

SEQ ID NO: 911844 - DNA, 25 bp, Homo sapien
gataaaagtctggatgtgttaggtt

SEQ ID NO: 911845 - DNA, 25 bp, Homo sapien
gagttttacacaggctcctaaagag

SEQ ID NO: 911846 - DNA, 25 bp, Homo sapien
tgtttctaagactgacaagcactct

SEQ ID NO: 911847 - DNA, 25 bp, Homo sapien
actgtgacgcctgcttctagcggca

SEQ ID NO: 911848 - DNA, 25 bp, Homo sapien
tgaaaacgcttgtcttccgatgcct

SEQ ID NO: 911849 - DNA, 25 bp, Homo sapien
cacgacctttttgcgttctctgaaa

SEQ ID NO: 911850 - DNA, 25 bp, Homo sapien
caggtctctgctgaaagcaggccac

SEQ ID NO: 911851 - DNA, 25 bp, Homo sapien
caggccacagctcagatccacacat

SEQ ID NO: 911852 - DNA, 25 bp, Homo sapien
aagcaggccacagctcagatccaca

SEQ ID NO: 911853 - DNA, 25 bp, Homo sapien
ctgaaagcaggccacagctcagatc

SEQ ID NO: 911854 - DNA, 25 bp, Homo sapien
tgtttgtggctcgtagtacactctg

SEQ ID NO: 911855 - DNA, 25 bp, Homo sapien
cactatggtcatcgaagggcagcat

SEQ ID NO: 911856 - DNA, 25 bp, Homo sapien
tacactctgtggaacattcactatg

SEQ ID NO: 911857 - DNA, 25 bp, Homo sapien
caggacccaagtgcgaaacacagaa

SEQ ID NO: 911858 - DNA, 25 bp, Homo sapien
tctcaagccaaaagccgggggaagc

SEQ ID NO: 911859 - DNA, 25 bp, Homo sapien
caccttgaccatgaccgcccgagac

SEQ ID NO: 911860 - DNA, 25 bp, Homo sapien
ggcaccttgaccatgaccgcccgag

SEQ ID NO: 911861 - DNA, 25 bp, Homo sapien
caccctctcaagccaaaagccgggg

SEQ ID NO: 911862 - DNA, 25 bp, Homo sapien
atgccgatccccgaggacctctcca

SEQ ID NO: 911863 - DNA, 25 bp, Homo sapien
cctgtaagcgatactccagatgagg

SEQ ID NO: 911864 - DNA, 25 bp, Homo sapien
gaaagcccccctgtaagcgatactc

SEQ ID NO: 911865 - DNA, 25 bp, Homo sapien
gatgagggcgatgagcccatgccga

SEQ ID NO: 911866 - DNA, 25 bp, Homo sapien
cttttgtgggatgcactgactgcag

SEQ ID NO: 911867 - DNA, 25 bp, Homo sapien
tgcttttgtgggatgcactgactgc

SEQ ID NO: 911868 - DNA, 25 bp, Homo sapien
tttgtgggatgcactgactgcagtc

SEQ ID NO: 911869 - DNA, 25 bp, Homo sapien
aaatccatcactgcttttgtgggat

SEQ ID NO: 911870 - DNA, 25 bp, Homo sapien
agaaacagtttacggtggttcatca

SEQ ID NO: 911871 - DNA, 25 bp, Homo sapien
gagaaacagtttacggtggttcatc

SEQ ID NO: 911872 - DNA, 25 bp, Homo sapien
tggtctgatctctgataaggatcag

SEQ ID NO: 911873 - DNA, 25 bp, Homo sapien
gataaggatcagatcctagagcctc

SEQ ID NO: 911874 - DNA, 25 bp, Homo sapien
tgccagccacactcttgccatgatg

SEQ ID NO: 911875 - DNA, 25 bp, Homo sapien
tggaagccacctgcgcctgctggcc

SEQ ID NO: 911876 - DNA, 25 bp, Homo sapien
ttccaaagcttccagggcacttgca

SEQ ID NO: 911877 - DNA, 25 bp, Homo sapien
tcttgtttctgcaatggatgttgtg

SEQ ID NO: 911878 - DNA, 25 bp, Homo sapien
gtgcctgcaaggtgcgtctttagca

SEQ ID NO: 911879 - DNA, 25 bp, Homo sapien
gcaaggtgcgtctttagcagttctc

SEQ ID NO: 911880 - DNA, 25 bp, Homo sapien
cagcaagcccaacacaggtgctgtg

SEQ ID NO: 911881 - DNA, 25 bp, Homo sapien
gatcagtggttcttgcagcctaggc

SEQ ID NO: 911882 - DNA, 25 bp, Homo sapien
tggattgcagagtggtcatcattat

SEQ ID NO: 911883 - DNA, 25 bp, Homo sapien
ggatgatcctgcctagccagctgga

SEQ ID NO: 911884 - DNA, 25 bp, Homo sapien
agttctggatttagtaccctgtgag

SEQ ID NO: 911885 - DNA, 25 bp, Homo sapien
gaatggccttctagaactatcagga

SEQ ID NO: 911886 - DNA, 25 bp, Homo sapien
gaaacccagttacaagatgacacac

SEQ ID NO: 911887 - DNA, 25 bp, Homo sapien
tcacaatcgctgtgcttgggcccta

SEQ ID NO: 911888 - DNA, 25 bp, Homo sapien
atttcggttgggctggtatctcgcg

SEQ ID NO: 911889 - DNA, 25 bp, Homo sapien
cttttacaatatagccaggaggatg

SEQ ID NO: 911890 - DNA, 25 bp, Homo sapien
gcttcggagggccatgggtgtgtga

SEQ ID NO: 911891 - DNA, 25 bp, Homo sapien
gagtaaccgagagcaggatgactgc

SEQ ID NO: 911892 - DNA, 25 bp, Homo sapien
ctagagtaaccgagagcaggatgac

SEQ ID NO: 911893 - DNA, 25 bp, Homo sapien
tgactgccgactcaccgggcttcgg

SEQ ID NO: 911894 - DNA, 25 bp, Homo sapien
aggacccccacaagcagggacctct

SEQ ID NO: 911895 - DNA, 25 bp, Homo sapien
acaggacccccacaagcagggacct

SEQ ID NO: 911896 - DNA, 25 bp, Homo sapien
acccccacaagcagggacctctcac

SEQ ID NO: 911897 - DNA, 25 bp, Homo sapien
cacaggacccccacaagcagggacc

SEQ ID NO: 911898 - DNA, 25 bp, Homo sapien
tgttgcctggggacttcatctcagc

SEQ ID NO: 911899 - DNA, 25 bp, Homo sapien
ttcctgttgcctggggacttcatct

SEQ ID NO: 911900 - DNA, 25 bp, Homo sapien
cctgttgcctggggacttcatctca

SEQ ID NO: 911901 - DNA, 25 bp, Homo sapien
agttcctgttgcctggggacttcat

SEQ ID NO: 911902 - DNA, 25 bp, Homo sapien
aatgctgatcactcacaagccaagg

SEQ ID NO: 911903 - DNA, 25 bp, Homo sapien
gggacctggcacctttgctctgtga

SEQ ID NO: 911904 - DNA, 25 bp, Homo sapien
caatctcgcgtgaaggctgtgggac

SEQ ID NO: 911905 - DNA, 25 bp, Homo sapien
gaggccgtctgtaaacaccttcagg

SEQ ID NO: 911906 - DNA, 25 bp, Homo sapien
gcgggattaagagggcaactgagtt

SEQ ID NO: 911907 - DNA, 25 bp, Homo sapien
cgagagcggcgggattaagagggca

SEQ ID NO: 911908 - DNA, 25 bp, Homo sapien
ccatggccgagagcggcgggattaa

SEQ ID NO: 911909 - DNA, 25 bp, Homo sapien
gattaagagggcaactgagttgttc

SEQ ID NO: 911910 - DNA, 25 bp, Homo sapien
ttggaattctgacagggacccgttg

SEQ ID NO: 911911 - DNA, 25 bp, Homo sapien
tggaattctgacagggacccgttgg

SEQ ID NO: 911912 - DNA, 25 bp, Homo sapien
attctgacagggacccgttgggctt

SEQ ID NO: 911913 - DNA, 25 bp, Homo sapien
gaattctgacagggacccgttgggc

SEQ ID NO: 911914 - DNA, 25 bp, Homo sapien
gtggcccacgctgcagacactctga

SEQ ID NO: 911915 - DNA, 25 bp, Homo sapien
agacactctgacgactgccgagctc

SEQ ID NO: 911916 - DNA, 25 bp, Homo sapien
tcagctagagcacatgctaaacagt

SEQ ID NO: 911917 - DNA, 25 bp, Homo sapien
gagcacatgctaaacagttgatcaa

SEQ ID NO: 911918 - DNA, 25 bp, Homo sapien
ggtagctccaacagctgggatttga

SEQ ID NO: 911919 - DNA, 25 bp, Homo sapien
gggatttgaagtaaagcatagtgac

SEQ ID NO: 911920 - DNA, 25 bp, Homo sapien
tttggccatcactgacatgtcccat

SEQ ID NO: 911921 - DNA, 25 bp, Homo sapien
tcatctgctctggaaggtagctcca

SEQ ID NO: 911922 - DNA, 25 bp, Homo sapien
tcagtggacttgcaaagcactagcc

SEQ ID NO: 911923 - DNA, 25 bp, Homo sapien
accttcagtggacttgcaaagcact

SEQ ID NO: 911924 - DNA, 25 bp, Homo sapien
gacttgcaaagcactagccctattg

SEQ ID NO: 911925 - DNA, 25 bp, Homo sapien
gcactagccctattgtttttcccat

SEQ ID NO: 911926 - DNA, 25 bp, Homo sapien
ttttctcatcgtaacagtgcagacc

SEQ ID NO: 911927 - DNA, 25 bp, Homo sapien
cagttgtagggagattttgacacag

SEQ ID NO: 911928 - DNA, 25 bp, Homo sapien
aaagcttggaagcagttgtgaccgg

SEQ ID NO: 911929 - DNA, 25 bp, Homo sapien
ttgtgaccggataagagcaggttga

SEQ ID NO: 911930 - DNA, 25 bp, Homo sapien
tgccagacggtggacaggaaacaca

SEQ ID NO: 911931 - DNA, 25 bp, Homo sapien
atgccagacggtggacaggaaacac

SEQ ID NO: 911932 - DNA, 25 bp, Homo sapien
cttagctgctggaccagtgaggtcc

SEQ ID NO: 911933 - DNA, 25 bp, Homo sapien
tggctcctagagtgcgaggagctct

SEQ ID NO: 911934 - DNA, 25 bp, Homo sapien
gctgtgcatactcacctgctctgtg

SEQ ID NO: 911935 - DNA, 25 bp, Homo sapien
tgactttgttcagtccctaccctgg

SEQ ID NO: 911936 - DNA, 25 bp, Homo sapien
caggaacaagggtgagcgcttatca

SEQ ID NO: 911937 - DNA, 25 bp, Homo sapien
ttggctcccaaaagatactgaactt

SEQ ID NO: 911938 - DNA, 25 bp, Homo sapien
tgaacacggatggtacaggaacaag

SEQ ID NO: 911939 - DNA, 25 bp, Homo sapien
tacctgtccagctagaatagtacac

SEQ ID NO: 911940 - DNA, 25 bp, Homo sapien
atattgactttatccattagatttg

SEQ ID NO: 911941 - DNA, 25 bp, Homo sapien
tttgatgggattcataatattgact

SEQ ID NO: 911942 - DNA, 25 bp, Homo sapien
gatgggattcataatattgacttta

SEQ ID NO: 911943 - DNA, 25 bp, Homo sapien
taatattgactttatccattagatt

SEQ ID NO: 911944 - DNA, 25 bp, Homo sapien
aaacgaaggtctaggcagttgtgcg

SEQ ID NO: 911945 - DNA, 25 bp, Homo sapien
gggttggagtcacagtagcactgat

SEQ ID NO: 911946 - DNA, 25 bp, Homo sapien
tataccataaagtgcaaaacgaagg

SEQ ID NO: 911947 - DNA, 25 bp, Homo sapien
gatgggattgttacttcgcagatgc

SEQ ID NO: 911948 - DNA, 25 bp, Homo sapien
ttggtgcccgcaggaccttctctga

SEQ ID NO: 911949 - DNA, 25 bp, Homo sapien
ttctctgatctgagctgttaaacca

SEQ ID NO: 911950 - DNA, 25 bp, Homo sapien
tgatctgagctgttaaaccaaaaac

SEQ ID NO: 911951 - DNA, 25 bp, Homo sapien
ggtgcccgcaggaccttctctgatc

SEQ ID NO: 911952 - DNA, 25 bp, Homo sapien
cctccgtcacaactgcatgtgttca

SEQ ID NO: 911953 - DNA, 25 bp, Homo sapien
aacaggccaacacccacttgttctt

SEQ ID NO: 911954 - DNA, 25 bp, Homo sapien
atcaacaggccaacacccacttgtt

SEQ ID NO: 911955 - DNA, 25 bp, Homo sapien
ttctcgcagagcctccgtcacaact

SEQ ID NO: 911956 - DNA, 25 bp, Homo sapien
gttacagctctcagtgacagtgtca

SEQ ID NO: 911957 - DNA, 25 bp, Homo sapien
cttttggttctgttacagctctcag

SEQ ID NO: 911958 - DNA, 25 bp, Homo sapien
tctgttacagctctcagtgacagtg

SEQ ID NO: 911959 - DNA, 25 bp, Homo sapien
ggttctgttacagctctcagtgaca

SEQ ID NO: 911960 - DNA, 25 bp, Homo sapien
tgtccaatgagtggctgatctccag

SEQ ID NO: 911961 - DNA, 25 bp, Homo sapien
gatatctaaggcagcatccattgtg

SEQ ID NO: 911962 - DNA, 25 bp, Homo sapien
ggtcgtgtccaatgcttccctgctg

SEQ ID NO: 911963 - DNA, 25 bp, Homo sapien
cctgctgtagcagaaccggtgttcc

SEQ ID NO: 911964 - DNA, 25 bp, Homo sapien
ccagagaactcaatggtcattaagc

SEQ ID NO: 911965 - DNA, 25 bp, Homo sapien
ttaagcaccattgcctcgacagcca

SEQ ID NO: 911966 - DNA, 25 bp, Homo sapien
ctgagagtaccaattccagagaact

SEQ ID NO: 911967 - DNA, 25 bp, Homo sapien
tggtcattaagcaccattgcctcga

SEQ ID NO: 911968 - DNA, 25 bp, Homo sapien
aatcctgcataatgccaggatctga

SEQ ID NO: 911969 - DNA, 25 bp, Homo sapien
aatccccattgctggatttctcagg

SEQ ID NO: 911970 - DNA, 25 bp, Homo sapien
tcaggacaatcctgcataatgccag

SEQ ID NO: 911971 - DNA, 25 bp, Homo sapien
cagctctgttaatcctctggtgcat

SEQ ID NO: 911972 - DNA, 25 bp, Homo sapien
cagttggtaaacctcacaaatgtgg

SEQ ID NO: 911973 - DNA, 25 bp, Homo sapien
caactacttggaaagcatgggcctt

SEQ ID NO: 911974 - DNA, 25 bp, Homo sapien
tagaggaacataaagagcgctgcca

SEQ ID NO: 911975 - DNA, 25 bp, Homo sapien
gcattccccttacacagaaggctgg

SEQ ID NO: 911976 - DNA, 25 bp, Homo sapien
cagcatctctgttgctaacacacag

SEQ ID NO: 911977 - DNA, 25 bp, Homo sapien
gaagaaatccaatcctagccctcat

SEQ ID NO: 911978 - DNA, 25 bp, Homo sapien
tccatctagtaccagaggcctcttt

SEQ ID NO: 911979 - DNA, 25 bp, Homo sapien
caatgaaatatgtgaagcccagcat

SEQ ID NO: 911980 - DNA, 25 bp, Homo sapien
tcccaaggtgaaatgaagcaacaga

SEQ ID NO: 911981 - DNA, 25 bp, Homo sapien
ggttcttagtctcagcactatgaca

SEQ ID NO: 911982 - DNA, 25 bp, Homo sapien
tacttatttgttaggcgggagctct

SEQ ID NO: 911983 - DNA, 25 bp, Homo sapien
tactctcaaccacctaggcaatgaa

SEQ ID NO: 911984 - DNA, 25 bp, Homo sapien
gacaaatcgtgatgccagtgtatcc

SEQ ID NO: 911985 - DNA, 25 bp, Homo sapien
cataatgcttttggtgcgatggcac

SEQ ID NO: 911986 - DNA, 25 bp, Homo sapien
gaacaagggatgtaccactggagga

SEQ ID NO: 911987 - DNA, 25 bp, Homo sapien
tcttgccaaaacaaacgcgagatga

SEQ ID NO: 911988 - DNA, 25 bp, Homo sapien
cctgtatgccgagacatgcttggga

SEQ ID NO: 911989 - DNA, 25 bp, Homo sapien
cctgagagggaaatgtcacttgcct

SEQ ID NO: 911990 - DNA, 25 bp, Homo sapien
tctgtctctcatgagtctgagccct

SEQ ID NO: 911991 - DNA, 25 bp, Homo sapien
tcacttcttctttttcgacctggcc

SEQ ID NO: 911992 - DNA, 25 bp, Homo sapien
ctaaggctgccaagctctcagggcc

SEQ ID NO: 911993 - DNA, 25 bp, Homo sapien
taaggctgccaagctctcagggcct

SEQ ID NO: 911994 - DNA, 25 bp, Homo sapien
ggctgccaagctctcagggcctcac

SEQ ID NO: 911995 - DNA, 25 bp, Homo sapien
aaggctgccaagctctcagggcctc

SEQ ID NO: 911996 - DNA, 25 bp, Homo sapien
ggccttgctggctcttttgctcggg

SEQ ID NO: 911997 - DNA, 25 bp, Homo sapien
tgccatctgtccactgatgatgacc

SEQ ID NO: 911998 - DNA, 25 bp, Homo sapien
ccactgatgatgacctctccttggt

SEQ ID NO: 911999 - DNA, 25 bp, Homo sapien
acagggctgggatccaagagtcccc

SEQ ID NO: 912000 - DNA, 25 bp, Homo sapien
agctgaggaacccttggtgaggtaa

SEQ ID NO: 912001 - DNA, 25 bp, Homo sapien
tgagctgaggaacccttggtgaggt

SEQ ID NO: 912002 - DNA, 25 bp, Homo sapien
gctgagctgaggaacccttggtgag

SEQ ID NO: 912003 - DNA, 25 bp, Homo sapien
gctgaggaacccttggtgaggtaaa

SEQ ID NO: 912004 - DNA, 25 bp, Homo sapien
gtactgcccagtatgaaagtcgcta

SEQ ID NO: 912005 - DNA, 25 bp, Homo sapien
gctagctacgtgtgctcctgaatgt

SEQ ID NO: 912006 - DNA, 25 bp, Homo sapien
tttatgttaaatagccatacgtgga

SEQ ID NO: 912007 - DNA, 25 bp, Homo sapien
gcatcctgcaagttgatgctgtcca

SEQ ID NO: 912008 - DNA, 25 bp, Homo sapien
cattttatgattgttgggcccgagg

SEQ ID NO: 912009 - DNA, 25 bp, Homo sapien
tagtcacagaagtgagaccctatca

SEQ ID NO: 912010 - DNA, 25 bp, Homo sapien
aagttccaaacaccctcaaggcgag

SEQ ID NO: 912011 - DNA, 25 bp, Homo sapien
caaggcgaggagattacacagaaac

SEQ ID NO: 912012 - DNA, 25 bp, Homo sapien
tctgtggtcacagatgtaatgttat

SEQ ID NO: 912013 - DNA, 25 bp, Homo sapien
ggtcacagatgtaatgttatgcata

SEQ ID NO: 912014 - DNA, 25 bp, Homo sapien
aatgttatgcatatatgttgcttgc

SEQ ID NO: 912015 - DNA, 25 bp, Homo sapien
tgcatatatgttgcttgctcaaaaa

SEQ ID NO: 912016 - DNA, 25 bp, Homo sapien
tccccagagactttaccaaggtatg

SEQ ID NO: 912017 - DNA, 25 bp, Homo sapien
gtgatcaaatatgggttaattcccc

SEQ ID NO: 912018 - DNA, 25 bp, Homo sapien
caaggtatgtctcagtccatcccca

SEQ ID NO: 912019 - DNA, 25 bp, Homo sapien
cactatttacctagagatggtgtca

SEQ ID NO: 912020 - DNA, 25 bp, Homo sapien
ggcagaacaccagaggcctacctga

SEQ ID NO: 912021 - DNA, 25 bp, Homo sapien
gagttatgagccaaagaaccctgga

SEQ ID NO: 912022 - DNA, 25 bp, Homo sapien
taacaagactgtgtaagggctgtgg

SEQ ID NO: 912023 - DNA, 25 bp, Homo sapien
tacagacgaagaaacgctagggcaa

SEQ ID NO: 912024 - DNA, 25 bp, Homo sapien
ggacctgtgtcttgctctcacccta

SEQ ID NO: 912025 - DNA, 25 bp, Homo sapien
cactggaatgcctacatggcaagga

SEQ ID NO: 912026 - DNA, 25 bp, Homo sapien
tgttgcccaaccaccatgtgagctg

SEQ ID NO: 912027 - DNA, 25 bp, Homo sapien
tctgtgctactggaaaggctctctc

SEQ ID NO: 912028 - DNA, 25 bp, Homo sapien
catcagaagtataggagtctctacc

SEQ ID NO: 912029 - DNA, 25 bp, Homo sapien
tggaggctatctccccagtggtcaa

SEQ ID NO: 912030 - DNA, 25 bp, Homo sapien
gcttagaaccacacacagttatgac

SEQ ID NO: 912031 - DNA, 25 bp, Homo sapien
taatatgatagtgatggcatgcacg

SEQ ID NO: 912032 - DNA, 25 bp, Homo sapien
gcttctgtctaacgtggcaaccaag

SEQ ID NO: 912033 - DNA, 25 bp, Homo sapien
taactgtggcgtgagcaagacctcc

SEQ ID NO: 912034 - DNA, 25 bp, Homo sapien
cacaagaacagttgggcatgagctc

SEQ ID NO: 912035 - DNA, 25 bp, Homo sapien
taccgagacaggagtgagttacatc

SEQ ID NO: 912036 - DNA, 25 bp, Homo sapien
gcagaaatggattgagagagctcta

SEQ ID NO: 912037 - DNA, 25 bp, Homo sapien
ttgagagagctctaatagctgtgtt

SEQ ID NO: 912038 - DNA, 25 bp, Homo sapien
aatggattgagagagctctaatagc

SEQ ID NO: 912039 - DNA, 25 bp, Homo sapien
gattgagagagctctaatagctgtg

SEQ ID NO: 912040 - DNA, 25 bp, Homo sapien
ctgcttgttgagatgcctgagccca

SEQ ID NO: 912041 - DNA, 25 bp, Homo sapien
tggtcagcaggcacaccgctgcttg

SEQ ID NO: 912042 - DNA, 25 bp, Homo sapien
caggcacaccgctgcttgttgagat

SEQ ID NO: 912043 - DNA, 25 bp, Homo sapien
ggccctgttggtcagcaggcacacc

SEQ ID NO: 912044 - DNA, 25 bp, Homo sapien
tgtcacaaaacaccaatggcccaag

SEQ ID NO: 912045 - DNA, 25 bp, Homo sapien
acaaaacaccaatggcccaagtgcc

SEQ ID NO: 912046 - DNA, 25 bp, Homo sapien
ctgtcacaaaacaccaatggcccaa

SEQ ID NO: 912047 - DNA, 25 bp, Homo sapien
tcacaaaacaccaatggcccaagtg

SEQ ID NO: 912048 - DNA, 25 bp, Homo sapien
tgcctttataaaacgccaccttatg

SEQ ID NO: 912049 - DNA, 25 bp, Homo sapien
cttaacaacagcatgttgcctttat

SEQ ID NO: 912050 - DNA, 25 bp, Homo sapien
gccaccttatgtggacttcctaatt

SEQ ID NO: 912051 - DNA, 25 bp, Homo sapien
taacaacagcatgttgcctttataa

SEQ ID NO: 912052 - DNA, 25 bp, Homo sapien
ggttattatatattaagtggtccat

SEQ ID NO: 912053 - DNA, 25 bp, Homo sapien
agtggttattatatattaagtggtc

SEQ ID NO: 912054 - DNA, 25 bp, Homo sapien
ttaagtggttattatatattaagtg

SEQ ID NO: 912055 - DNA, 25 bp, Homo sapien
gtggttattatatattaagtggtcc

SEQ ID NO: 912056 - DNA, 25 bp, Homo sapien
caaatcttacggagtctgtacaaac

SEQ ID NO: 912057 - DNA, 25 bp, Homo sapien
ccagcacctgatactgtgtaagcaa

SEQ ID NO: 912058 - DNA, 25 bp, Homo sapien
gctctttccattataagccgtgttg

SEQ ID NO: 912059 - DNA, 25 bp, Homo sapien
gaatgaccagtacaatttcccttta

SEQ ID NO: 912060 - DNA, 25 bp, Homo sapien
tgccatggaccttgatagaatcctt

SEQ ID NO: 912061 - DNA, 25 bp, Homo sapien
ggtcaagaactaggaatataagaag

SEQ ID NO: 912062 - DNA, 25 bp, Homo sapien
tcagatccctaaaggtgggctgtaa

SEQ ID NO: 912063 - DNA, 25 bp, Homo sapien
ccagctccccaactaaggtcaagaa

SEQ ID NO: 912064 - DNA, 25 bp, Homo sapien
tagtgtgtcccgcaaagtggtagga

SEQ ID NO: 912065 - DNA, 25 bp, Homo sapien
gataaacaacctagcgtcctgtcct

SEQ ID NO: 912066 - DNA, 25 bp, Homo sapien
tgtactacagagatgccttgattcc

SEQ ID NO: 912067 - DNA, 25 bp, Homo sapien
tatatgcgctctaccagatgactca

SEQ ID NO: 912068 - DNA, 25 bp, Homo sapien
taagctatgggtcgaacttgatccg

SEQ ID NO: 912069 - DNA, 25 bp, Homo sapien
caattagagttttaccagtcccagg

SEQ ID NO: 912070 - DNA, 25 bp, Homo sapien
cttttggagaaacactaggtcgcac

SEQ ID NO: 912071 - DNA, 25 bp, Homo sapien
gagatgctaaagaatgttgccccag

SEQ ID NO: 912072 - DNA, 25 bp, Homo sapien
gaagaccctgatgcacgctgaggtt

SEQ ID NO: 912073 - DNA, 25 bp, Homo sapien
caagtcctagcagtgttagtcacca

SEQ ID NO: 912074 - DNA, 25 bp, Homo sapien
ggaagatcaaagacagtggcctcct

SEQ ID NO: 912075 - DNA, 25 bp, Homo sapien
tcaaacgattgctctccgggaagtc

SEQ ID NO: 912076 - DNA, 25 bp, Homo sapien
tgtacactactcattttgaaaacat

SEQ ID NO: 912077 - DNA, 25 bp, Homo sapien
gactgccacttgtcactatctgttt

SEQ ID NO: 912078 - DNA, 25 bp, Homo sapien
gaattttttgccagcttgcatcatc

SEQ ID NO: 912079 - DNA, 25 bp, Homo sapien
tgcatcatcttctgtacactactca

SEQ ID NO: 912080 - DNA, 25 bp, Homo sapien
ttttgaacagtttggtagcacagac

SEQ ID NO: 912081 - DNA, 25 bp, Homo sapien
tattttttgaacagtttggtagcac

SEQ ID NO: 912082 - DNA, 25 bp, Homo sapien
ttcaacccagattcaacattgtcag

SEQ ID NO: 912083 - DNA, 25 bp, Homo sapien
gcataattattcaacccagattcaa

SEQ ID NO: 912084 - DNA, 25 bp, Homo sapien
cagagtttgcccatgcatactgaat

SEQ ID NO: 912085 - DNA, 25 bp, Homo sapien
tatctgtgcacggtatgcatctgcc

SEQ ID NO: 912086 - DNA, 25 bp, Homo sapien
ccttcggtccggtacatatgccaga

SEQ ID NO: 912087 - DNA, 25 bp, Homo sapien
tgcacagatctagagctggaggtct

SEQ ID NO: 912088 - DNA, 25 bp, Homo sapien
taaaaacaatggaactatagataca

SEQ ID NO: 912089 - DNA, 25 bp, Homo sapien
tgagctttttactatcactgatggt

SEQ ID NO: 912090 - DNA, 25 bp, Homo sapien
gagttaaattgttctagttacataa

SEQ ID NO: 912091 - DNA, 25 bp, Homo sapien
taagtctgatctataaaactaggtg

SEQ ID NO: 912092 - DNA, 25 bp, Homo sapien
ctaccgcgcccagctggttcttcag

SEQ ID NO: 912093 - DNA, 25 bp, Homo sapien
accgcgcccagctggttcttcagtt

SEQ ID NO: 912094 - DNA, 25 bp, Homo sapien
cgcgcccagctggttcttcagtttt

SEQ ID NO: 912095 - DNA, 25 bp, Homo sapien
gcgcccagctggttcttcagttttc

SEQ ID NO: 912096 - DNA, 25 bp, Homo sapien
acacaaatgtacaaaccgaggctga

SEQ ID NO: 912097 - DNA, 25 bp, Homo sapien
tgagaggaaccattggaagaatcaa

SEQ ID NO: 912098 - DNA, 25 bp, Homo sapien
taatctgaaaactatcattatcctt

SEQ ID NO: 912099 - DNA, 25 bp, Homo sapien
aatgtacaaaccgaggctgagagac

SEQ ID NO: 912100 - DNA, 25 bp, Homo sapien
gaatggtatcagaaatcgaacacaa

SEQ ID NO: 912101 - DNA, 25 bp, Homo sapien
agtttcactccaggtactgtgcact

SEQ ID NO: 912102 - DNA, 25 bp, Homo sapien
aatcgaacacaagcagtttcactcc

SEQ ID NO: 912103 - DNA, 25 bp, Homo sapien
ctccaggtactgtgcacttctgcat

SEQ ID NO: 912104 - DNA, 25 bp, Homo sapien
taagagaacaagctagcctactagg

SEQ ID NO: 912105 - DNA, 25 bp, Homo sapien
caagttattcgcataagcttcctca

SEQ ID NO: 912106 - DNA, 25 bp, Homo sapien
cacagattgaacagcatggatcaca

SEQ ID NO: 912107 - DNA, 25 bp, Homo sapien
tacttgtaagtacaacagccaggtt

SEQ ID NO: 912108 - DNA, 25 bp, Homo sapien
ctcagagttctagtcactgttctca

SEQ ID NO: 912109 - DNA, 25 bp, Homo sapien
tccatcttcacctttccttcaatat

SEQ ID NO: 912110 - DNA, 25 bp, Homo sapien
gagttctagtcactgttctcagaat

SEQ ID NO: 912111 - DNA, 25 bp, Homo sapien
cagagttctagtcactgttctcaga

SEQ ID NO: 912112 - DNA, 25 bp, Homo sapien
tcttcctagacagttggcttctgca

SEQ ID NO: 912113 - DNA, 25 bp, Homo sapien
tacagtgtcctttggaataatagct

SEQ ID NO: 912114 - DNA, 25 bp, Homo sapien
aaaactggccatcaccgatcagtga

SEQ ID NO: 912115 - DNA, 25 bp, Homo sapien
cattgtcttagtacctagaatacag

SEQ ID NO: 912116 - DNA, 25 bp, Homo sapien
tcataggattctgttcttgatgcaa

SEQ ID NO: 912117 - DNA, 25 bp, Homo sapien
ttaatgtctttctgccggttttcac

SEQ ID NO: 912118 - DNA, 25 bp, Homo sapien
aagcactgtgcaagcctttcatagg

SEQ ID NO: 912119 - DNA, 25 bp, Homo sapien
aacgggagttaagagcacagggtct

SEQ ID NO: 912120 - DNA, 25 bp, Homo sapien
tgagctgacaaggtattttaattct

SEQ ID NO: 912121 - DNA, 25 bp, Homo sapien
ctataaaagaagcgcagcaacatca

SEQ ID NO: 912122 - DNA, 25 bp, Homo sapien
gattcctcacgatgacccctgaaag

SEQ ID NO: 912123 - DNA, 25 bp, Homo sapien
cagaggactcagcacttagaaaata

SEQ ID NO: 912124 - DNA, 25 bp, Homo sapien
aaaagcgcggggactgacgtgcgcc

SEQ ID NO: 912125 - DNA, 25 bp, Homo sapien
tgcggctggtgtgggacgctggcag

SEQ ID NO: 912126 - DNA, 25 bp, Homo sapien
agcctccgaaaagcgcggggactga

SEQ ID NO: 912127 - DNA, 25 bp, Homo sapien
acgctggcagcctccgaaaagcgcg

SEQ ID NO: 912128 - DNA, 25 bp, Homo sapien
gcgcccactcgggaaagccagccgc

SEQ ID NO: 912129 - DNA, 25 bp, Homo sapien
gcccactcgggaaagccagccgcca

SEQ ID NO: 912130 - DNA, 25 bp, Homo sapien
ctgcgcccactcgggaaagccagcc

SEQ ID NO: 912131 - DNA, 25 bp, Homo sapien
cgcccactcgggaaagccagccgcc

SEQ ID NO: 912132 - DNA, 25 bp, Homo sapien
tgggcatgtggtcagcaacaatgag

SEQ ID NO: 912133 - DNA, 25 bp, Homo sapien
acacctgctcccctttttgtcttgg

SEQ ID NO: 912134 - DNA, 25 bp, Homo sapien
tccaggtttagggagtattgctgtt

SEQ ID NO: 912135 - DNA, 25 bp, Homo sapien
gtggtcagcaacaatgagattctcc

SEQ ID NO: 912136 - DNA, 25 bp, Homo sapien
gattgccctggaaaatatatcagtg

SEQ ID NO: 912137 - DNA, 25 bp, Homo sapien
caagttgcgtgaacattgattgccc

SEQ ID NO: 912138 - DNA, 25 bp, Homo sapien
tcctaccacttctgatgactgcaag

SEQ ID NO: 912139 - DNA, 25 bp, Homo sapien
cacaaccctctggataactttggag

SEQ ID NO: 912140 - DNA, 25 bp, Homo sapien
gaactgagactcctatcggaaacac

SEQ ID NO: 912141 - DNA, 25 bp, Homo sapien
tacagagcttacagcggtactttcc

SEQ ID NO: 912142 - DNA, 25 bp, Homo sapien
ccagagatgcttgagataccacttt

SEQ ID NO: 912143 - DNA, 25 bp, Homo sapien
tctgggcgtatgtcaataagatcct

SEQ ID NO: 912144 - DNA, 25 bp, Homo sapien
gcacgtcggccgccagctctttgat

SEQ ID NO: 912145 - DNA, 25 bp, Homo sapien
tccaccgtgcgagaacagatggcaa

SEQ ID NO: 912146 - DNA, 25 bp, Homo sapien
caggcccgctgcacatgggcagatt

SEQ ID NO: 912147 - DNA, 25 bp, Homo sapien
ggacaaacttgtccctgaggtgaca

SEQ ID NO: 912148 - DNA, 25 bp, Homo sapien
gagcttcattcactttgttggaacc

SEQ ID NO: 912149 - DNA, 25 bp, Homo sapien
gaagagcttcattcactttgttgga

SEQ ID NO: 912150 - DNA, 25 bp, Homo sapien
ttgcagaagagcttcattcactttg

SEQ ID NO: 912151 - DNA, 25 bp, Homo sapien
ctttgcagaagagcttcattcactt

SEQ ID NO: 912152 - DNA, 25 bp, Homo sapien
gggatcctggcgcaccagtgactca

SEQ ID NO: 912153 - DNA, 25 bp, Homo sapien
ctttagccgaaagcagacaagcccc

SEQ ID NO: 912154 - DNA, 25 bp, Homo sapien
cagaatgacttccacacagatttca

SEQ ID NO: 912155 - DNA, 25 bp, Homo sapien
tcaaactcatgggacagctggacat

SEQ ID NO: 912156 - DNA, 25 bp, Homo sapien
tgtcctcaccgaagctttgggagta

SEQ ID NO: 912157 - DNA, 25 bp, Homo sapien
tctatgaagcttgcagatggatgtg

SEQ ID NO: 912158 - DNA, 25 bp, Homo sapien
gagtaggcagttcatggcacatcct

SEQ ID NO: 912159 - DNA, 25 bp, Homo sapien
caaacaggtcctcatagtgctcggc

SEQ ID NO: 912160 - DNA, 25 bp, Homo sapien
gggacctctgtccatcaagatgagg

SEQ ID NO: 912161 - DNA, 25 bp, Homo sapien
tgtgcttgttcccatgaagcctggg

SEQ ID NO: 912162 - DNA, 25 bp, Homo sapien
ctctgtccatcaagatgaggccaca

SEQ ID NO: 912163 - DNA, 25 bp, Homo sapien
catcactaaggctgaatatcataag

SEQ ID NO: 912164 - DNA, 25 bp, Homo sapien
cttctgcccagtggtatctgccaat

SEQ ID NO: 912165 - DNA, 25 bp, Homo sapien
tcaaagagcgaaatcttctgcccag

SEQ ID NO: 912166 - DNA, 25 bp, Homo sapien
ttctgcccagtggtatctgccaatg

SEQ ID NO: 912167 - DNA, 25 bp, Homo sapien
ttttcaaagagcgaaatcttctgcc

SEQ ID NO: 912168 - DNA, 25 bp, Homo sapien
acatgaaacagaccatcagtgagga

SEQ ID NO: 912169 - DNA, 25 bp, Homo sapien
aacatgaaacagaccatcagtgagg

SEQ ID NO: 912170 - DNA, 25 bp, Homo sapien
gaaacatgaaacagaccatcagtga

SEQ ID NO: 912171 - DNA, 25 bp, Homo sapien
catgaaacagaccatcagtgaggaa

SEQ ID NO: 912172 - DNA, 25 bp, Homo sapien
ggcagccgattccctggtggccaac

SEQ ID NO: 912173 - DNA, 25 bp, Homo sapien
agccgattccctggtggccaacctg

SEQ ID NO: 912174 - DNA, 25 bp, Homo sapien
aggcagccgattccctggtggccaa

SEQ ID NO: 912175 - DNA, 25 bp, Homo sapien
cggctcgcctatttctcttggaggc

SEQ ID NO: 912176 - DNA, 25 bp, Homo sapien
gggccctcggtgatgtgggcagagg

SEQ ID NO: 912177 - DNA, 25 bp, Homo sapien
agggccctcggtgatgtgggcagag

SEQ ID NO: 912178 - DNA, 25 bp, Homo sapien
cagggccctcggtgatgtgggcaga

SEQ ID NO: 912179 - DNA, 25 bp, Homo sapien
gggactgttgacctgggagccagtg

SEQ ID NO: 912180 - DNA, 25 bp, Homo sapien
acacagatggggactgttgacctgg

SEQ ID NO: 912181 - DNA, 25 bp, Homo sapien
gactgttgacctgggagccagtgat

SEQ ID NO: 912182 - DNA, 25 bp, Homo sapien
aggaacacagatggggactgttgac

SEQ ID NO: 912183 - DNA, 25 bp, Homo sapien
actgcttagccggagtcctgagtcc

SEQ ID NO: 912184 - DNA, 25 bp, Homo sapien
tataaaggagacactgaggagagct

SEQ ID NO: 912185 - DNA, 25 bp, Homo sapien
tttcccagacccagtcagttgaccg

SEQ ID NO: 912186 - DNA, 25 bp, Homo sapien
ttctgaacacaagagaagtagctca

SEQ ID NO: 912187 - DNA, 25 bp, Homo sapien
tgggtttccagcctctttgaacaaa

SEQ ID NO: 912188 - DNA, 25 bp, Homo sapien
ttctccccagactgatggatcttct

SEQ ID NO: 912189 - DNA, 25 bp, Homo sapien
gacatttgcctggaattcacattca

SEQ ID NO: 912190 - DNA, 25 bp, Homo sapien
cacattcaaggtgggaatcatagag

SEQ ID NO: 912191 - DNA, 25 bp, Homo sapien
gagcagctcatagctcctggttgga

SEQ ID NO: 912192 - DNA, 25 bp, Homo sapien
tggaaagggagtgccagtcaagggg

SEQ ID NO: 912193 - DNA, 25 bp, Homo sapien
gcagctcatagctcctggttggaaa

SEQ ID NO: 912194 - DNA, 25 bp, Homo sapien
gttggaaagggagtgccagtcaagg

SEQ ID NO: 912195 - DNA, 25 bp, Homo sapien
cagcacgtggccctcatgcaacatg

SEQ ID NO: 912196 - DNA, 25 bp, Homo sapien
caatgtcgtttgtacagcacgtggc

SEQ ID NO: 912197 - DNA, 25 bp, Homo sapien
tttagtttcagtgccatgagaacca

SEQ ID NO: 912198 - DNA, 25 bp, Homo sapien
aaccagctgcaatgtcgtttgtaca

SEQ ID NO: 912199 - DNA, 25 bp, Homo sapien
gacgacataggtgaagtgcaaaagc

SEQ ID NO: 912200 - DNA, 25 bp, Homo sapien
ttgtgcattccgtgctgtggcccca

SEQ ID NO: 912201 - DNA, 25 bp, Homo sapien
actggcccaagtcaaatgagacgac

SEQ ID NO: 912202 - DNA, 25 bp, Homo sapien
tgatgccactcgataactgcccact

SEQ ID NO: 912203 - DNA, 25 bp, Homo sapien
agcctcttaaccaacccacagggag

SEQ ID NO: 912204 - DNA, 25 bp, Homo sapien
tggatatggatggtcttcccctaac

SEQ ID NO: 912205 - DNA, 25 bp, Homo sapien
gggctacaagggcaaatccaggaat

SEQ ID NO: 912206 - DNA, 25 bp, Homo sapien
tcagtgcttctagagcaggagcctc

SEQ ID NO: 912207 - DNA, 25 bp, Homo sapien
cagtctaaaggctcccgttaagtct

SEQ ID NO: 912208 - DNA, 25 bp, Homo sapien
aggctcccgttaagtctgttctctt

SEQ ID NO: 912209 - DNA, 25 bp, Homo sapien
ctgtgcttcaggtaagtggggtcca

SEQ ID NO: 912210 - DNA, 25 bp, Homo sapien
cttcaggtaagtggggtccagtcta

SEQ ID NO: 912211 - DNA, 25 bp, Homo sapien
ggctgataaccaagtaccctagact

SEQ ID NO: 912212 - DNA, 25 bp, Homo sapien
taaccaagtaccctagactggacca

SEQ ID NO: 912213 - DNA, 25 bp, Homo sapien
aagtaccctagactggaccacctct

SEQ ID NO: 912214 - DNA, 25 bp, Homo sapien
caaatgaaagggctgataaccaagt

SEQ ID NO: 912215 - DNA, 25 bp, Homo sapien
acggtaattgccattgctctgcttc

SEQ ID NO: 912216 - DNA, 25 bp, Homo sapien
tgtgctttacggtaattgccattgc

SEQ ID NO: 912217 - DNA, 25 bp, Homo sapien
agggcctgtgctttacggtaattgc

SEQ ID NO: 912218 - DNA, 25 bp, Homo sapien
tttacggtaattgccattgctctgc

SEQ ID NO: 912219 - DNA, 25 bp, Homo sapien
ggtgaggaaagcctctctctgtaac

SEQ ID NO: 912220 - DNA, 25 bp, Homo sapien
gaaagcctctctctgtaaccagaca

SEQ ID NO: 912221 - DNA, 25 bp, Homo sapien
ctgcatgagacttttggtgaggaaa

SEQ ID NO: 912222 - DNA, 25 bp, Homo sapien
gcctctctctgtaaccagacacatt

SEQ ID NO: 912223 - DNA, 25 bp, Homo sapien
tatccataagaagtgatcccagtgg

SEQ ID NO: 912224 - DNA, 25 bp, Homo sapien
agtggatcctgcctcttagatggga

SEQ ID NO: 912225 - DNA, 25 bp, Homo sapien
tacatcctgggctaaaattcgagac

SEQ ID NO: 912226 - DNA, 25 bp, Homo sapien
tacaaggcaccattcgcaaacaggc

SEQ ID NO: 912227 - DNA, 25 bp, Homo sapien
gctttcatgcaagaagatacccttc

SEQ ID NO: 912228 - DNA, 25 bp, Homo sapien
gacaaaaccccaagactagagacgc

SEQ ID NO: 912229 - DNA, 25 bp, Homo sapien
gaagctagacaacgtcaactttgga

SEQ ID NO: 912230 - DNA, 25 bp, Homo sapien
tactgggcgtgagacaaatatatca

SEQ ID NO: 912231 - DNA, 25 bp, Homo sapien
ctccactttgtcaaatttcccctca

SEQ ID NO: 912232 - DNA, 25 bp, Homo sapien
tccactttgtcaaatttcccctcac

SEQ ID NO: 912233 - DNA, 25 bp, Homo sapien
taacatacgcactggttgtctggac

SEQ ID NO: 912234 - DNA, 25 bp, Homo sapien
agatgagcgcacagccgccaacttg

SEQ ID NO: 912235 - DNA, 25 bp, Homo sapien
tctgcagcgtctgcggcagcctcgg

SEQ ID NO: 912236 - DNA, 25 bp, Homo sapien
caccgcactgactaagcaggttttc

SEQ ID NO: 912237 - DNA, 25 bp, Homo sapien
cagccaccttagaggattttcccca

SEQ ID NO: 912238 - DNA, 25 bp, Homo sapien
ctctgcctggtccttccgaactcca

SEQ ID NO: 912239 - DNA, 25 bp, Homo sapien
tgctcaagggtggttctagggcttc

SEQ ID NO: 912240 - DNA, 25 bp, Homo sapien
gagccacttgttcccgccagagcct

SEQ ID NO: 912241 - DNA, 25 bp, Homo sapien
gggattaaagttgaatgaatctgca

SEQ ID NO: 912242 - DNA, 25 bp, Homo sapien
tgtggggattaaagttgaatgaatc

SEQ ID NO: 912243 - DNA, 25 bp, Homo sapien
ggattaaagttgaatgaatctgcaa

SEQ ID NO: 912244 - DNA, 25 bp, Homo sapien
tggggattaaagttgaatgaatctg

SEQ ID NO: 912245 - DNA, 25 bp, Homo sapien
gaacagggtccaccttaatggccag

SEQ ID NO: 912246 - DNA, 25 bp, Homo sapien
aaaactgtgaacaaccggctctggc

SEQ ID NO: 912247 - DNA, 25 bp, Homo sapien
gaggtttaaaccaccaagagtggca

SEQ ID NO: 912248 - DNA, 25 bp, Homo sapien
tattcctaacagctacaggctcccg

SEQ ID NO: 912249 - DNA, 25 bp, Homo sapien
cttatctgccccactgagacgcaca

SEQ ID NO: 912250 - DNA, 25 bp, Homo sapien
ttcctcctgccaaccggagagaaag

SEQ ID NO: 912251 - DNA, 25 bp, Homo sapien
aaggctcttatctccaagggcaggg

SEQ ID NO: 912252 - DNA, 25 bp, Homo sapien
gagagaaaggctcttatctccaagg

SEQ ID NO: 912253 - DNA, 25 bp, Homo sapien
gactggacgtcagctcctcatgaag

SEQ ID NO: 912254 - DNA, 25 bp, Homo sapien
cctcatgaagggagaggtcaataac

SEQ ID NO: 912255 - DNA, 25 bp, Homo sapien
gcccctattctgaggaagtcggaat

SEQ ID NO: 912256 - DNA, 25 bp, Homo sapien
gaaatcccgcttgagtctgaaataa

SEQ ID NO: 912257 - DNA, 25 bp, Homo sapien
caacgtgcagccatatgtcttcctt

SEQ ID NO: 912258 - DNA, 25 bp, Homo sapien
cattcagaaggtgccggaactcagg

SEQ ID NO: 912259 - DNA, 25 bp, Homo sapien
gaatgcactgcctgcgtaggctgca

SEQ ID NO: 912260 - DNA, 25 bp, Homo sapien
tccactccattcagaaggtgccgga

SEQ ID NO: 912261 - DNA, 25 bp, Homo sapien
tcagaatcaacttgtgagtccccag

SEQ ID NO: 912262 - DNA, 25 bp, Homo sapien
cgctgatctgagctacaggcatgga

SEQ ID NO: 912263 - DNA, 25 bp, Homo sapien
catgattactgagtgactcctcagg

SEQ ID NO: 912264 - DNA, 25 bp, Homo sapien
gctacaggcatggacatcccatgat

SEQ ID NO: 912265 - DNA, 25 bp, Homo sapien
aatcctaaggccttgtgctcttcct

SEQ ID NO: 912266 - DNA, 25 bp, Homo sapien
agggggccccagatagcaggaaggc

SEQ ID NO: 912267 - DNA, 25 bp, Homo sapien
gagggggccccagatagcaggaagg

SEQ ID NO: 912268 - DNA, 25 bp, Homo sapien
gctggatccatccaggggactgtga

SEQ ID NO: 912269 - DNA, 25 bp, Homo sapien
ctctatccagcagaagacctcggcc

SEQ ID NO: 912270 - DNA, 25 bp, Homo sapien
gtcatctccatggtccagcgggcag

SEQ ID NO: 912271 - DNA, 25 bp, Homo sapien
gctgtcatctccatggtccagcggg

SEQ ID NO: 912272 - DNA, 25 bp, Homo sapien
cagcagaagacctcggccctttaaa

SEQ ID NO: 912273 - DNA, 25 bp, Homo sapien
ggagggtccactcctctgagtatgg

SEQ ID NO: 912274 - DNA, 25 bp, Homo sapien
cacagccgagcggtcagaacattcc

SEQ ID NO: 912275 - DNA, 25 bp, Homo sapien
ggtatgtgatctgaaggccccactt

SEQ ID NO: 912276 - DNA, 25 bp, Homo sapien
tatggactatgggtgactcttgggt

SEQ ID NO: 912277 - DNA, 25 bp, Homo sapien
gaccgacttctaagagattgtcaaa

SEQ ID NO: 912278 - DNA, 25 bp, Homo sapien
aggagcagcatgttgtggtccccag

SEQ ID NO: 912279 - DNA, 25 bp, Homo sapien
agcagcatgttgtggtccccagggt

SEQ ID NO: 912280 - DNA, 25 bp, Homo sapien
agataggaccgacttctaagagatt

SEQ ID NO: 912281 - DNA, 25 bp, Homo sapien
acatttggagcagtggctgtcccta

SEQ ID NO: 912282 - DNA, 25 bp, Homo sapien
gctctgtactgatgattttgcattt

SEQ ID NO: 912283 - DNA, 25 bp, Homo sapien
cctagcccttgagtggtcagggcag

SEQ ID NO: 912284 - DNA, 25 bp, Homo sapien
tagatgtctggtacctagcccttga

SEQ ID NO: 912285 - DNA, 25 bp, Homo sapien
gaaccatgccatgaggaaagggacc

SEQ ID NO: 912286 - DNA, 25 bp, Homo sapien
tctgatccgatacctacaattggcc

SEQ ID NO: 912287 - DNA, 25 bp, Homo sapien
tctacggcaaaaaagtgattctcct

SEQ ID NO: 912288 - DNA, 25 bp, Homo sapien
cacctccagggctggtacggtgccg

SEQ ID NO: 912289 - DNA, 25 bp, Homo sapien
attacttggcacttccagcaatttc

SEQ ID NO: 912290 - DNA, 25 bp, Homo sapien
tgagagtatgtatcaaagtcttggg

SEQ ID NO: 912291 - DNA, 25 bp, Homo sapien
tcagggctataaatcattcccaaga

SEQ ID NO: 912292 - DNA, 25 bp, Homo sapien
gaatgaatgagtcatttcttagtgc

SEQ ID NO: 912293 - DNA, 25 bp, Homo sapien
gatccactggcagactctttttgca

SEQ ID NO: 912294 - DNA, 25 bp, Homo sapien
taagatggcaggtacaccttgatcc

SEQ ID NO: 912295 - DNA, 25 bp, Homo sapien
tttgcatccttcaaaatgtcttggc

SEQ ID NO: 912296 - DNA, 25 bp, Homo sapien
cctgtggagatgaacgcaacggaga

SEQ ID NO: 912297 - DNA, 25 bp, Homo sapien
cctgcagggcagacgcacgcatggc

SEQ ID NO: 912298 - DNA, 25 bp, Homo sapien
cgcatggcgaagttgccatctgagg

SEQ ID NO: 912299 - DNA, 25 bp, Homo sapien
aaggaatcaggccagccgctttgtc

SEQ ID NO: 912300 - DNA, 25 bp, Homo sapien
tcactccaccaattaacccagctct

SEQ ID NO: 912301 - DNA, 25 bp, Homo sapien
gacgctgcctgcagccgatggatca

SEQ ID NO: 912302 - DNA, 25 bp, Homo sapien
cgatggatcactttggtccgagcgg

SEQ ID NO: 912303 - DNA, 25 bp, Homo sapien
ttctccatgatagcggcctgtgtga

SEQ ID NO: 912304 - DNA, 25 bp, Homo sapien
accagggtggcttcactggcacttc

SEQ ID NO: 912305 - DNA, 25 bp, Homo sapien
tgacatgtggtacagagcaggaacg

SEQ ID NO: 912306 - DNA, 25 bp, Homo sapien
tgatgtcaggtggagctctctgcac

SEQ ID NO: 912307 - DNA, 25 bp, Homo sapien
tggcagcagatcttcgcggagagaa

SEQ ID NO: 912308 - DNA, 25 bp, Homo sapien
aacgatggctctgtgcgatagcagc

SEQ ID NO: 912309 - DNA, 25 bp, Homo sapien
tggtaaggtctgacgcttctggctg

SEQ ID NO: 912310 - DNA, 25 bp, Homo sapien
ctggtaaggtctgacgcttctggct

SEQ ID NO: 912311 - DNA, 25 bp, Homo sapien
ggtaaggtctgacgcttctggctgc

SEQ ID NO: 912312 - DNA, 25 bp, Homo sapien
gcaaaaaattgtcttttcttccaca

SEQ ID NO: 912313 - DNA, 25 bp, Homo sapien
gcagcccatagtagcatgcacatct

SEQ ID NO: 912314 - DNA, 25 bp, Homo sapien
aaatgaggttgtctttaatgaaacg

SEQ ID NO: 912315 - DNA, 25 bp, Homo sapien
cttgtatggtctctcaaaaatgagg

SEQ ID NO: 912316 - DNA, 25 bp, Homo sapien
ccaaatgctaaagacttgtatggtc

SEQ ID NO: 912317 - DNA, 25 bp, Homo sapien
gaatggtatggttcacagcaacgta

SEQ ID NO: 912318 - DNA, 25 bp, Homo sapien
gagtcattgttgctgctacgtagaa

SEQ ID NO: 912319 - DNA, 25 bp, Homo sapien
tgcggacagtgtgcagtagctccct

SEQ ID NO: 912320 - DNA, 25 bp, Homo sapien
gatcttggccaaggaggcttctcca

SEQ ID NO: 912321 - DNA, 25 bp, Homo sapien
cttcccgagccagtccatcatcaca

SEQ ID NO: 912322 - DNA, 25 bp, Homo sapien
gcatcttcccgagccagtccatcat

SEQ ID NO: 912323 - DNA, 25 bp, Homo sapien
atcttcccgagccagtccatcatca

SEQ ID NO: 912324 - DNA, 25 bp, Homo sapien
gcctttggtagttccagcatcttcc

SEQ ID NO: 912325 - DNA, 25 bp, Homo sapien
gataggctggttggagcctctcccc

SEQ ID NO: 912326 - DNA, 25 bp, Homo sapien
tctgataggctggttggagcctctc

SEQ ID NO: 912327 - DNA, 25 bp, Homo sapien
acatctgataggctggttggagcct

SEQ ID NO: 912328 - DNA, 25 bp, Homo sapien
ctggacacatctgataggctggttg

SEQ ID NO: 912329 - DNA, 25 bp, Homo sapien
ccgcacagcatgtccgcaagcatgg

SEQ ID NO: 912330 - DNA, 25 bp, Homo sapien
gagaagccgatgcagccaatggccc

SEQ ID NO: 912331 - DNA, 25 bp, Homo sapien
atgtccgcaagcatggccgggtacg

SEQ ID NO: 912332 - DNA, 25 bp, Homo sapien
tggccgggtacgagctggcagtggg

SEQ ID NO: 912333 - DNA, 25 bp, Homo sapien
cagcccataaggtgaacacctgcca

SEQ ID NO: 912334 - DNA, 25 bp, Homo sapien
tccagcccataaggtgaacacctgc

SEQ ID NO: 912335 - DNA, 25 bp, Homo sapien
gcccataaggtgaacacctgccact

SEQ ID NO: 912336 - DNA, 25 bp, Homo sapien
ccataaggtgaacacctgccactcc

SEQ ID NO: 912337 - DNA, 25 bp, Homo sapien
ctgctggtgctccatgtccatcctg

SEQ ID NO: 912338 - DNA, 25 bp, Homo sapien
tgttccgcattgtcccctgctggtg

SEQ ID NO: 912339 - DNA, 25 bp, Homo sapien
tgctggtgctccatgtccatcctgc

SEQ ID NO: 912340 - DNA, 25 bp, Homo sapien
tctgagagacattgccctgttccgc

SEQ ID NO: 912341 - DNA, 25 bp, Homo sapien
gagggcccatgtgcctttgtctctc

SEQ ID NO: 912342 - DNA, 25 bp, Homo sapien
ctggagggcccatgtgcctttgtct

SEQ ID NO: 912343 - DNA, 25 bp, Homo sapien
tctctccccttcctgtggcctttgg

SEQ ID NO: 912344 - DNA, 25 bp, Homo sapien
ctctccccttcctgtggcctttggg

SEQ ID NO: 912345 - DNA, 25 bp, Homo sapien
gattcttgattagggacagatgtgt

SEQ ID NO: 912346 - DNA, 25 bp, Homo sapien
ggaaaaggacagaagcgattcttga

SEQ ID NO: 912347 - DNA, 25 bp, Homo sapien
gatgtgtgctcttttgcttcactct

SEQ ID NO: 912348 - DNA, 25 bp, Homo sapien
tcactctccgctgatattcacagca

SEQ ID NO: 912349 - DNA, 25 bp, Homo sapien
gaccttgcccaacgcctgtgcattt

SEQ ID NO: 912350 - DNA, 25 bp, Homo sapien
agggaccttgcccaacgcctgtgca

SEQ ID NO: 912351 - DNA, 25 bp, Homo sapien
ttgcccaacgcctgtgcatttccca

SEQ ID NO: 912352 - DNA, 25 bp, Homo sapien
tgcccaacgcctgtgcatttcccag

SEQ ID NO: 912353 - DNA, 25 bp, Homo sapien
ctgaatcctgttctttgctcaaagc

SEQ ID NO: 912354 - DNA, 25 bp, Homo sapien
tctttgctcaaagcataaatgccaa

SEQ ID NO: 912355 - DNA, 25 bp, Homo sapien
tgttctttgctcaaagcataaatgc

SEQ ID NO: 912356 - DNA, 25 bp, Homo sapien
tcctgttctttgctcaaagcataaa

SEQ ID NO: 912357 - DNA, 25 bp, Homo sapien
tgggtcttgatggtcccagacccct

SEQ ID NO: 912358 - DNA, 25 bp, Homo sapien
catgtcgttgctcataggccttaca

SEQ ID NO: 912359 - DNA, 25 bp, Homo sapien
tctgtctacattgagggagtgggtc

SEQ ID NO: 912360 - DNA, 25 bp, Homo sapien
gaaaatcacatgtcgttgctcatag

SEQ ID NO: 912361 - DNA, 25 bp, Homo sapien
ggcagtgatcaaccagtggagccca

SEQ ID NO: 912362 - DNA, 25 bp, Homo sapien
tgggtcgcggcagtgatcaaccagt

SEQ ID NO: 912363 - DNA, 25 bp, Homo sapien
gtcgcggcagtgatcaaccagtgga

SEQ ID NO: 912364 - DNA, 25 bp, Homo sapien
tgatcaaccagtggagcccacggag

SEQ ID NO: 912365 - DNA, 25 bp, Homo sapien
tacccgggctccacgtcagggtaga

SEQ ID NO: 912366 - DNA, 25 bp, Homo sapien
tgtcctcaaacgtgtctggctcctg

SEQ ID NO: 912367 - DNA, 25 bp, Homo sapien
tagacctggcgtccctcaatgcctt

SEQ ID NO: 912368 - DNA, 25 bp, Homo sapien
gccttccatgtagttggccatgtaa

SEQ ID NO: 912369 - DNA, 25 bp, Homo sapien
gtgtctgggctctgtcagaggtgaa

SEQ ID NO: 912370 - DNA, 25 bp, Homo sapien
gtctgggctctgtcagaggtgaaaa

SEQ ID NO: 912371 - DNA, 25 bp, Homo sapien
ggtgtctgggctctgtcagaggtga

SEQ ID NO: 912372 - DNA, 25 bp, Homo sapien
tgtctgggctctgtcagaggtgaaa

SEQ ID NO: 912373 - DNA, 25 bp, Homo sapien
aaccaagactccacacctgctgtag

SEQ ID NO: 912374 - DNA, 25 bp, Homo sapien
gaaccacgttaagctctttgcctgg

SEQ ID NO: 912375 - DNA, 25 bp, Homo sapien
gagaggctgcacaactgaaccaaga

SEQ ID NO: 912376 - DNA, 25 bp, Homo sapien
ttcataagaaccttgtcaggactac

SEQ ID NO: 912377 - DNA, 25 bp, Homo sapien
gctcaagctcctgataagctcgtgg

SEQ ID NO: 912378 - DNA, 25 bp, Homo sapien
agagtgtggtccagggctcctgcct

SEQ ID NO: 912379 - DNA, 25 bp, Homo sapien
cacaggactctaaacagggctctca

SEQ ID NO: 912380 - DNA, 25 bp, Homo sapien
tgggaatccacttacacctccactg

SEQ ID NO: 912381 - DNA, 25 bp, Homo sapien
gccgggagtgacttgctctctgtcc

SEQ ID NO: 912382 - DNA, 25 bp, Homo sapien
cgggagtgacttgctctctgtcctc

SEQ ID NO: 912383 - DNA, 25 bp, Homo sapien
aggcagccgggagtgacttgctctc

SEQ ID NO: 912384 - DNA, 25 bp, Homo sapien
cagccgggagtgacttgctctctgt

SEQ ID NO: 912385 - DNA, 25 bp, Homo sapien
gctgaatgctggagggacttacccc

SEQ ID NO: 912386 - DNA, 25 bp, Homo sapien
cagggtagagttctatagggtcatc

SEQ ID NO: 912387 - DNA, 25 bp, Homo sapien
accgcatccagataagcacagggag

SEQ ID NO: 912388 - DNA, 25 bp, Homo sapien
tccactttgccaggacttccagggt

SEQ ID NO: 912389 - DNA, 25 bp, Homo sapien
cttacagggctactctccttgatgg

SEQ ID NO: 912390 - DNA, 25 bp, Homo sapien
gctggaaattcgaattccttacagg

SEQ ID NO: 912391 - DNA, 25 bp, Homo sapien
tgaggcactcggcactgagacagtc

SEQ ID NO: 912392 - DNA, 25 bp, Homo sapien
tcttgaaactccaagccacacgttt

SEQ ID NO: 912393 - DNA, 25 bp, Homo sapien
ctccatgggccttttccagtgatgc

SEQ ID NO: 912394 - DNA, 25 bp, Homo sapien
ccatgggccttttccagtgatgccc

SEQ ID NO: 912395 - DNA, 25 bp, Homo sapien
tccatgggccttttccagtgatgcc

SEQ ID NO: 912396 - DNA, 25 bp, Homo sapien
catgggccttttccagtgatgccca

SEQ ID NO: 912397 - DNA, 25 bp, Homo sapien
tggcagagtggatccgcttgcccac

SEQ ID NO: 912398 - DNA, 25 bp, Homo sapien
tgtccacgtgtgagtatacagctat

SEQ ID NO: 912399 - DNA, 25 bp, Homo sapien
gtgtccacgtgtgagtatacagcta

SEQ ID NO: 912400 - DNA, 25 bp, Homo sapien
tccacgtgtgagtatacagctatgg

SEQ ID NO: 912401 - DNA, 25 bp, Homo sapien
tcaacaactgcagttggcccggtgg

SEQ ID NO: 912402 - DNA, 25 bp, Homo sapien
tgcattctcgcgttgtgccacaggg

SEQ ID NO: 912403 - DNA, 25 bp, Homo sapien
tagaccaggctagcttgtgacaaca

SEQ ID NO: 912404 - DNA, 25 bp, Homo sapien
tgtgaaaaccgatgaagaacgtgct

SEQ ID NO: 912405 - DNA, 25 bp, Homo sapien
gaaaacgtttatacacgccaggcca

SEQ ID NO: 912406 - DNA, 25 bp, Homo sapien
tcgtggtgtaactgcaatgtccgtc

SEQ ID NO: 912407 - DNA, 25 bp, Homo sapien
cacgtcaatctagaggcgaggccat

SEQ ID NO: 912408 - DNA, 25 bp, Homo sapien
tagtttgaaagactgactggctgcg

SEQ ID NO: 912409 - DNA, 25 bp, Homo sapien
tgggttcacagcagcaaatcgtcgt

SEQ ID NO: 912410 - DNA, 25 bp, Homo sapien
tcttcagccgagaggacatctgcgg

SEQ ID NO: 912411 - DNA, 25 bp, Homo sapien
tagtcaatcttggtcggctggcacc

SEQ ID NO: 912412 - DNA, 25 bp, Homo sapien
ggtccccaggtgcagaatcgatgtg

SEQ ID NO: 912413 - DNA, 25 bp, Homo sapien
aggactcctttgttcagctggtaaa

SEQ ID NO: 912414 - DNA, 25 bp, Homo sapien
cttgagtttgcaaggcaggactcct

SEQ ID NO: 912415 - DNA, 25 bp, Homo sapien
ggctgaagaacgtctgcccgtcgtc

SEQ ID NO: 912416 - DNA, 25 bp, Homo sapien
tttggtgttcccgtcatctaggctg

SEQ ID NO: 912417 - DNA, 25 bp, Homo sapien
gacacaagaacacttgccaggttag

SEQ ID NO: 912418 - DNA, 25 bp, Homo sapien
cacttgccaggttagaggctgccac

SEQ ID NO: 912419 - DNA, 25 bp, Homo sapien
acaagaacacttgccaggttagagg

SEQ ID NO: 912420 - DNA, 25 bp, Homo sapien
ctggagagacacaagaacacttgcc

SEQ ID NO: 912421 - DNA, 25 bp, Homo sapien
gtccctgagcgagggacagactttg

SEQ ID NO: 912422 - DNA, 25 bp, Homo sapien
gacacacagggcaaggtaggctaga

SEQ ID NO: 912423 - DNA, 25 bp, Homo sapien
ctgctgaggacagctagctcccctg

SEQ ID NO: 912424 - DNA, 25 bp, Homo sapien
caaggtaggctagaaaacaccaggg

SEQ ID NO: 912425 - DNA, 25 bp, Homo sapien
caaaaaggattgtctatgcagcact

SEQ ID NO: 912426 - DNA, 25 bp, Homo sapien
ggttccacaggatgcatttcacaaa

SEQ ID NO: 912427 - DNA, 25 bp, Homo sapien
taaactgaattcttgtaggcgctga

SEQ ID NO: 912428 - DNA, 25 bp, Homo sapien
cacagaaaagacagtgcgtggcaca

SEQ ID NO: 912429 - DNA, 25 bp, Homo sapien
gggaggccacttaacgcttcttgga

SEQ ID NO: 912430 - DNA, 25 bp, Homo sapien
aaattacaagactcctcagactcca

SEQ ID NO: 912431 - DNA, 25 bp, Homo sapien
gcttcttggatagccctggtgtaca

SEQ ID NO: 912432 - DNA, 25 bp, Homo sapien
ggtgtacaccaggacaaattacaag

SEQ ID NO: 912433 - DNA, 25 bp, Homo sapien
caaggactggtctgagaacatcaat

SEQ ID NO: 912434 - DNA, 25 bp, Homo sapien
cggtttataacttgaaaattgcatt

SEQ ID NO: 912435 - DNA, 25 bp, Homo sapien
tgtcggtttataacttgaaaattgc

SEQ ID NO: 912436 - DNA, 25 bp, Homo sapien
aggactggtctgagaacatcaatac

SEQ ID NO: 912437 - DNA, 25 bp, Homo sapien
tctggtgatgacacagtgtgagtac

SEQ ID NO: 912438 - DNA, 25 bp, Homo sapien
ttggattactctggctgtcacggag

SEQ ID NO: 912439 - DNA, 25 bp, Homo sapien
gtgtgagtacaaatgcctttggatt

SEQ ID NO: 912440 - DNA, 25 bp, Homo sapien
tttctggtgatgacacagtgtgagt

SEQ ID NO: 912441 - DNA, 25 bp, Homo sapien
caccaagacggtaattctgaattgt

SEQ ID NO: 912442 - DNA, 25 bp, Homo sapien
gccacaatgcttcagtgcagtgctt

SEQ ID NO: 912443 - DNA, 25 bp, Homo sapien
caccaggcaagcaccaagacggtaa

SEQ ID NO: 912444 - DNA, 25 bp, Homo sapien
ttaagtggcctctaggggcaacagc

SEQ ID NO: 912445 - DNA, 25 bp, Homo sapien
tcagaaagcgaagaaagatccaatg

SEQ ID NO: 912446 - DNA, 25 bp, Homo sapien
gattagacaatgaactgcgtcgtca

SEQ ID NO: 912447 - DNA, 25 bp, Homo sapien
taatcttaataagggtatctgggcg

SEQ ID NO: 912448 - DNA, 25 bp, Homo sapien
taataattcagactaaagggacatc

SEQ ID NO: 912449 - DNA, 25 bp, Homo sapien
caggcctgtttacccgagagggacg

SEQ ID NO: 912450 - DNA, 25 bp, Homo sapien
gaatggcatggcttaggcatcagca

SEQ ID NO: 912451 - DNA, 25 bp, Homo sapien
gttcttctcccaagcgctggtgcat

SEQ ID NO: 912452 - DNA, 25 bp, Homo sapien
gaagctacagacgagtgaatggcag

SEQ ID NO: 912453 - DNA, 25 bp, Homo sapien
gggcatgaagtgcagacagagggac

SEQ ID NO: 912454 - DNA, 25 bp, Homo sapien
gatgacacagggatcgatgcctggc

SEQ ID NO: 912455 - DNA, 25 bp, Homo sapien
gggctggaccatgagtgtgggcatg

SEQ ID NO: 912456 - DNA, 25 bp, Homo sapien
aagaattcaaattttgccgaagagg

SEQ ID NO: 912457 - DNA, 25 bp, Homo sapien
cctggagatcctcccgtgaaaccag

SEQ ID NO: 912458 - DNA, 25 bp, Homo sapien
ccgtgaaaccagtgctgtgtcctgt

SEQ ID NO: 912459 - DNA, 25 bp, Homo sapien
tgtttaatgatcctgtgggattcct

SEQ ID NO: 912460 - DNA, 25 bp, Homo sapien
tccacgagcccttgctgtttaatga

SEQ ID NO: 912461 - DNA, 25 bp, Homo sapien
acaaccaactctgatcaactcagag

SEQ ID NO: 912462 - DNA, 25 bp, Homo sapien
tctggccacaggcaaattcgtaagg

SEQ ID NO: 912463 - DNA, 25 bp, Homo sapien
tctgatcaactcagagcccctgact

SEQ ID NO: 912464 - DNA, 25 bp, Homo sapien
tacagcttgtgtggtgcactctggc

SEQ ID NO: 912465 - DNA, 25 bp, Homo sapien
ctgtacttagggtagaagggtggag

SEQ ID NO: 912466 - DNA, 25 bp, Homo sapien
tttggctacctaggatgttcatccg

SEQ ID NO: 912467 - DNA, 25 bp, Homo sapien
gggactttggctacctaggatgttc

SEQ ID NO: 912468 - DNA, 25 bp, Homo sapien
ggatgttcatccgtgtgcttcgctt

SEQ ID NO: 912469 - DNA, 25 bp, Homo sapien
acaagggaccttgccccatctgaag

SEQ ID NO: 912470 - DNA, 25 bp, Homo sapien
aagaaatcccacattagcaccgagg

SEQ ID NO: 912471 - DNA, 25 bp, Homo sapien
gactgggctcacaagggaccttgcc

SEQ ID NO: 912472 - DNA, 25 bp, Homo sapien
tatgtccaagctcatggcaggccac

SEQ ID NO: 912473 - DNA, 25 bp, Homo sapien
gattctctatcacgcgtcctgtttg

SEQ ID NO: 912474 - DNA, 25 bp, Homo sapien
ctctgggcctctgccggattctcta

SEQ ID NO: 912475 - DNA, 25 bp, Homo sapien
ccacgagggagttctcggagacact

SEQ ID NO: 912476 - DNA, 25 bp, Homo sapien
gcccagaaaaatccattgccacgag

SEQ ID NO: 912477 - DNA, 25 bp, Homo sapien
tgagggattcggtaattctggtaaa

SEQ ID NO: 912478 - DNA, 25 bp, Homo sapien
cactggcgtcgagaacggggacagc

SEQ ID NO: 912479 - DNA, 25 bp, Homo sapien
cctctgctgagggattcggtaattc

SEQ ID NO: 912480 - DNA, 25 bp, Homo sapien
tgctgagggattcggtaattctggt

SEQ ID NO: 912481 - DNA, 25 bp, Homo sapien
ggagaagccacagttagtcaccggc

SEQ ID NO: 912482 - DNA, 25 bp, Homo sapien
cacagttagtcaccggcccgggagc

SEQ ID NO: 912483 - DNA, 25 bp, Homo sapien
aagccacagttagtcaccggcccgg

SEQ ID NO: 912484 - DNA, 25 bp, Homo sapien
agaagccacagttagtcaccggccc

SEQ ID NO: 912485 - DNA, 25 bp, Homo sapien
tatgggctcaatatgtctaagacac

SEQ ID NO: 912486 - DNA, 25 bp, Homo sapien
aatatggtgcatgcctcagtgctgc

SEQ ID NO: 912487 - DNA, 25 bp, Homo sapien
catgttacagagcacagaactgaag

SEQ ID NO: 912488 - DNA, 25 bp, Homo sapien
tgactggttttggaataagcgggac

SEQ ID NO: 912489 - DNA, 25 bp, Homo sapien
cacaggagtggtctatgatctatga

SEQ ID NO: 912490 - DNA, 25 bp, Homo sapien
taaaaatggcactaggatgtatcct

SEQ ID NO: 912491 - DNA, 25 bp, Homo sapien
tgatgacccttacactgaaaaccgg

SEQ ID NO: 912492 - DNA, 25 bp, Homo sapien
cagaatactgccctcaatggatgtc

SEQ ID NO: 912493 - DNA, 25 bp, Homo sapien
cttgaggagtctgaacgctgtcatc

SEQ ID NO: 912494 - DNA, 25 bp, Homo sapien
gaacgctgtcatccagcacgtcctg

SEQ ID NO: 912495 - DNA, 25 bp, Homo sapien
tctgcacagagcaacctcagctctt

SEQ ID NO: 912496 - DNA, 25 bp, Homo sapien
tcctggtttgctcgtcctctgcaca

SEQ ID NO: 912497 - DNA, 25 bp, Homo sapien
tacagggcaaactccaagcacaact

SEQ ID NO: 912498 - DNA, 25 bp, Homo sapien
gcacaactattcactggctactgga

SEQ ID NO: 912499 - DNA, 25 bp, Homo sapien
tccctgagcaaggtatgaggtgata

SEQ ID NO: 912500 - DNA, 25 bp, Homo sapien
ggcttgggctatggctcataagtca

SEQ ID NO: 912501 - DNA, 25 bp, Homo sapien
gggcgttgtactgcttcctgccagc

SEQ ID NO: 912502 - DNA, 25 bp, Homo sapien
tatgcagagcccgtggtctgtaggg

SEQ ID NO: 912503 - DNA, 25 bp, Homo sapien
tgcttcctgccagcgatcagggaga

SEQ ID NO: 912504 - DNA, 25 bp, Homo sapien
tctgtaggggcgttgtactgcttcc

SEQ ID NO: 912505 - DNA, 25 bp, Homo sapien
gccagatctccgcaaacacacatac

SEQ ID NO: 912506 - DNA, 25 bp, Homo sapien
atctccgcaaacacacatacagctt

SEQ ID NO: 912507 - DNA, 25 bp, Homo sapien
agatctccgcaaacacacatacagc

SEQ ID NO: 912508 - DNA, 25 bp, Homo sapien
aaaggccagatctccgcaaacacac

SEQ ID NO: 912509 - DNA, 25 bp, Homo sapien
ggacaactactggagttcagaaaat

SEQ ID NO: 912510 - DNA, 25 bp, Homo sapien
gacaactactggagttcagaaaatt

SEQ ID NO: 912511 - DNA, 25 bp, Homo sapien
tccggcttaagagccaaggttataa

SEQ ID NO: 912512 - DNA, 25 bp, Homo sapien
ggttttttacaatgctgccattcag

SEQ ID NO: 912513 - DNA, 25 bp, Homo sapien
ccattcagttccaagaggatttcta

SEQ ID NO: 912514 - DNA, 25 bp, Homo sapien
tgaaagatgcgatctctttaggttt

SEQ ID NO: 912515 - DNA, 25 bp, Homo sapien
ggtttgactgccatttgactgctgg

SEQ ID NO: 912516 - DNA, 25 bp, Homo sapien
caagtaaccatctgttctgggaaga

SEQ ID NO: 912517 - DNA, 25 bp, Homo sapien
caccaagtaaccatctgttctggga

SEQ ID NO: 912518 - DNA, 25 bp, Homo sapien
tttgactgctggcaccaagtaacca

SEQ ID NO: 912519 - DNA, 25 bp, Homo sapien
aagaactcgtattttgcgtaattct

SEQ ID NO: 912520 - DNA, 25 bp, Homo sapien
tggccatggtactctccacctggac

SEQ ID NO: 912521 - DNA, 25 bp, Homo sapien
cgtattttgcgtaattcttcctgaa

SEQ ID NO: 912522 - DNA, 25 bp, Homo sapien
aatagaaatttactctcactggcca

SEQ ID NO: 912523 - DNA, 25 bp, Homo sapien
gaggccgtgatgcacagcaagactg

SEQ ID NO: 912524 - DNA, 25 bp, Homo sapien
caaccgaattacacgtgaaggcagg

SEQ ID NO: 912525 - DNA, 25 bp, Homo sapien
gatgacatcaaacttggttgccaga

SEQ ID NO: 912526 - DNA, 25 bp, Homo sapien
gcccgcacgcacatcatggaatagt

SEQ ID NO: 912527 - DNA, 25 bp, Homo sapien
tgtcagcatccaacagcgtggcagc

SEQ ID NO: 912528 - DNA, 25 bp, Homo sapien
gtcagcatccaacagcgtggcagcc

SEQ ID NO: 912529 - DNA, 25 bp, Homo sapien
gctgtcagcatccaacagcgtggca

SEQ ID NO: 912530 - DNA, 25 bp, Homo sapien
ctgtcagcatccaacagcgtggcag

SEQ ID NO: 912531 - DNA, 25 bp, Homo sapien
taaggtgaaccttccagagacttgc

SEQ ID NO: 912532 - DNA, 25 bp, Homo sapien
tgcatcctccatgtgtgaagctgcc

SEQ ID NO: 912533 - DNA, 25 bp, Homo sapien
gagacttgcagctcaccatgctcgg

SEQ ID NO: 912534 - DNA, 25 bp, Homo sapien
ttactgtcggctgttgagtggcctg

SEQ ID NO: 912535 - DNA, 25 bp, Homo sapien
agggtgaccagcatctcagaggagc

SEQ ID NO: 912536 - DNA, 25 bp, Homo sapien
gcgtccagtagtgaatgtccccagg

SEQ ID NO: 912537 - DNA, 25 bp, Homo sapien
tgttgctgccaatggagggtgacca

SEQ ID NO: 912538 - DNA, 25 bp, Homo sapien
gagtcgttctctgcttatccacaag

SEQ ID NO: 912539 - DNA, 25 bp, Homo sapien
catgtatcttcaaatcccggctgtg

SEQ ID NO: 912540 - DNA, 25 bp, Homo sapien
gataaagaagaagcccctgttggcc

SEQ ID NO: 912541 - DNA, 25 bp, Homo sapien
tacctgggcaagtgctctctacaag

SEQ ID NO: 912542 - DNA, 25 bp, Homo sapien
tataggctggtgaaactggtagctc

SEQ ID NO: 912543 - DNA, 25 bp, Homo sapien
tctctccaaagtacagggcgcatta

SEQ ID NO: 912544 - DNA, 25 bp, Homo sapien
aacagagacttaaggtggtgtcagc

SEQ ID NO: 912545 - DNA, 25 bp, Homo sapien
gacctagaggtttaaattcaatgta

SEQ ID NO: 912546 - DNA, 25 bp, Homo sapien
gaaggatgctactccagacctagag

SEQ ID NO: 912547 - DNA, 25 bp, Homo sapien
ctgttgatttagagaaaattttggt

SEQ ID NO: 912548 - DNA, 25 bp, Homo sapien
tatttattagataagaatttaagca

SEQ ID NO: 912549 - DNA, 25 bp, Homo sapien
tactatgactttgtaagaactatat

SEQ ID NO: 912550 - DNA, 25 bp, Homo sapien
tcaagacatggaacaaatatagctg

SEQ ID NO: 912551 - DNA, 25 bp, Homo sapien
gctgtcatgtctgctagaatctcca

SEQ ID NO: 912552 - DNA, 25 bp, Homo sapien
ctaatcctaggtgcgggtggtgctc

SEQ ID NO: 912553 - DNA, 25 bp, Homo sapien
ggtggtgctccactagtgtccagct

SEQ ID NO: 912554 - DNA, 25 bp, Homo sapien
taaaccagcaattggcacaggtctc

SEQ ID NO: 912555 - DNA, 25 bp, Homo sapien
gcagcaccagcctcatagtgttgct

SEQ ID NO: 912556 - DNA, 25 bp, Homo sapien
tagtgttgctatgacatggattaat

SEQ ID NO: 912557 - DNA, 25 bp, Homo sapien
tatgacatggattaatgagataccc

SEQ ID NO: 912558 - DNA, 25 bp, Homo sapien
aatctgtaagcagcaccagcctcat

SEQ ID NO: 912559 - DNA, 25 bp, Homo sapien
tccctgggacgtgcttggatccacc

SEQ ID NO: 912560 - DNA, 25 bp, Homo sapien
ggatccaccgtggatctgggaacaa

SEQ ID NO: 912561 - DNA, 25 bp, Homo sapien
tccaccgtggatctgggaacaaggc

SEQ ID NO: 912562 - DNA, 25 bp, Homo sapien
ggacgtgcttggatccaccgtggat

SEQ ID NO: 912563 - DNA, 25 bp, Homo sapien
cttcgaggtaatcttcagatgggtg

SEQ ID NO: 912564 - DNA, 25 bp, Homo sapien
aatggctgcccccttcgaggtaatc

SEQ ID NO: 912565 - DNA, 25 bp, Homo sapien
ttcagatgggtgacatcatggagga

SEQ ID NO: 912566 - DNA, 25 bp, Homo sapien
gcacagaaggacatgttggaggaat

SEQ ID NO: 912567 - DNA, 25 bp, Homo sapien
gatgtccctatctgaatggcttccc

SEQ ID NO: 912568 - DNA, 25 bp, Homo sapien
tgtgcttagggcatgcaagtttccc

SEQ ID NO: 912569 - DNA, 25 bp, Homo sapien
aaagccctggcactagtgtaacaag

SEQ ID NO: 912570 - DNA, 25 bp, Homo sapien
ttccctctactggagtgtgcttagg

SEQ ID NO: 912571 - DNA, 25 bp, Homo sapien
tcagctggtgacactggcgagagaa

SEQ ID NO: 912572 - DNA, 25 bp, Homo sapien
ggaagtctgcacgaactcactgctg

SEQ ID NO: 912573 - DNA, 25 bp, Homo sapien
tgaggatttaccgtgagcgagccca

SEQ ID NO: 912574 - DNA, 25 bp, Homo sapien
gagtgtgtctgcagactggcgccga

SEQ ID NO: 912575 - DNA, 25 bp, Homo sapien
accatcagtaagcaggacaggtcta

SEQ ID NO: 912576 - DNA, 25 bp, Homo sapien
gagaccatcagtaagcaggacaggt

SEQ ID NO: 912577 - DNA, 25 bp, Homo sapien
gaccatcagtaagcaggacaggtct

SEQ ID NO: 912578 - DNA, 25 bp, Homo sapien
tgagaccatcagtaagcaggacagg

SEQ ID NO: 912579 - DNA, 25 bp, Homo sapien
gcaagagcgggacatcagcctctac

SEQ ID NO: 912580 - DNA, 25 bp, Homo sapien
tcacagcaccgaactagcaagagcg

SEQ ID NO: 912581 - DNA, 25 bp, Homo sapien
tgtcctgtctgctaaggccccatga

SEQ ID NO: 912582 - DNA, 25 bp, Homo sapien
taaggcctgctgtgaaagcggtacc

SEQ ID NO: 912583 - DNA, 25 bp, Homo sapien
cccggagttctcagactccaagagg

SEQ ID NO: 912584 - DNA, 25 bp, Homo sapien
aatcgcccggagttctcagactcca

SEQ ID NO: 912585 - DNA, 25 bp, Homo sapien
ccatcctccaatcgcccggagttct

SEQ ID NO: 912586 - DNA, 25 bp, Homo sapien
tccaatcgcccggagttctcagact

SEQ ID NO: 912587 - DNA, 25 bp, Homo sapien
cctgctgctacgggcaccaatccca

SEQ ID NO: 912588 - DNA, 25 bp, Homo sapien
cagccctgctgctacgggcaccaat

SEQ ID NO: 912589 - DNA, 25 bp, Homo sapien
gccctgctgctacgggcaccaatcc

SEQ ID NO: 912590 - DNA, 25 bp, Homo sapien
ctgctgctacgggcaccaatcccac

SEQ ID NO: 912591 - DNA, 25 bp, Homo sapien
gcagagccaggctcaaggctcctcc

SEQ ID NO: 912592 - DNA, 25 bp, Homo sapien
ctggtaaggccggtggggccagata

SEQ ID NO: 912593 - DNA, 25 bp, Homo sapien
ggccagataggaaccctggtgcaga

SEQ ID NO: 912594 - DNA, 25 bp, Homo sapien
gataggaaccctggtgcagagccag

SEQ ID NO: 912595 - DNA, 25 bp, Homo sapien
cagccgtggtgcagatttgactgtc

SEQ ID NO: 912596 - DNA, 25 bp, Homo sapien
caccttccaagtgccgtgggcagga

SEQ ID NO: 912597 - DNA, 25 bp, Homo sapien
actgcggtgccgcattcaaatggga

SEQ ID NO: 912598 - DNA, 25 bp, Homo sapien
gagtggacgtcctgccacgttcaca

SEQ ID NO: 912599 - DNA, 25 bp, Homo sapien
gacaccaatgccacgttctcatggg

SEQ ID NO: 912600 - DNA, 25 bp, Homo sapien
tgagaaacatccttcctggtcgttt

SEQ ID NO: 912601 - DNA, 25 bp, Homo sapien
ctggtcgtttctgtgggcttgagga

SEQ ID NO: 912602 - DNA, 25 bp, Homo sapien
gaggacacgagtgacacagacacca

SEQ ID NO: 912603 - DNA, 25 bp, Homo sapien
agttttgatagtgccataatgcagc

SEQ ID NO: 912604 - DNA, 25 bp, Homo sapien
cttctaagttttgatagtgccataa

SEQ ID NO: 912605 - DNA, 25 bp, Homo sapien
aggtcagaacgggacccacacttgg

SEQ ID NO: 912606 - DNA, 25 bp, Homo sapien
cagcgggtattggaaaaaggtctct

SEQ ID NO: 912607 - DNA, 25 bp, Homo sapien
caagaatcatggtgcgggcatgtgc

SEQ ID NO: 912608 - DNA, 25 bp, Homo sapien
gcatgtgctcggcttctgatgagga

SEQ ID NO: 912609 - DNA, 25 bp, Homo sapien
gggaggagatgacacgcacttttaa

SEQ ID NO: 912610 - DNA, 25 bp, Homo sapien
aagccatgaggaatctacccctaag

SEQ ID NO: 912611 - DNA, 25 bp, Homo sapien
tgaggttctaaactgctggtcttcc

SEQ ID NO: 912612 - DNA, 25 bp, Homo sapien
taaagaacccggcgtgagcacaggg

SEQ ID NO: 912613 - DNA, 25 bp, Homo sapien
ggcggcctggctcggaggtaaagaa

SEQ ID NO: 912614 - DNA, 25 bp, Homo sapien
cagagatgaggttctaaactgctgg

SEQ ID NO: 912615 - DNA, 25 bp, Homo sapien
atctgttccctcctccgaaaaatgc

SEQ ID NO: 912616 - DNA, 25 bp, Homo sapien
gttccctcctccgaaaaatgcacaa

SEQ ID NO: 912617 - DNA, 25 bp, Homo sapien
aatgcacaacccacttgtcacacaa

SEQ ID NO: 912618 - DNA, 25 bp, Homo sapien
tctgttccctcctccgaaaaatgca

SEQ ID NO: 912619 - DNA, 25 bp, Homo sapien
cacacacagtatgacgaatcagaag

SEQ ID NO: 912620 - DNA, 25 bp, Homo sapien
acacacacagtatgacgaatcagaa

SEQ ID NO: 912621 - DNA, 25 bp, Homo sapien
cacacacacagtatgacgaatcaga

SEQ ID NO: 912622 - DNA, 25 bp, Homo sapien
acacacagtatgacgaatcagaagc

SEQ ID NO: 912623 - DNA, 25 bp, Homo sapien
ggagcaaacctcacattatcttcac

SEQ ID NO: 912624 - DNA, 25 bp, Homo sapien
gaggggagcaaacctcacattatct

SEQ ID NO: 912625 - DNA, 25 bp, Homo sapien
ggagaggggagcaaacctcacatta

SEQ ID NO: 912626 - DNA, 25 bp, Homo sapien
acctcacattatcttcactcggcat

SEQ ID NO: 912627 - DNA, 25 bp, Homo sapien
cctataatggtttgatgacatgcca

SEQ ID NO: 912628 - DNA, 25 bp, Homo sapien
tcttcccataacagcttcagccttg

SEQ ID NO: 912629 - DNA, 25 bp, Homo sapien
ttggcaaggcgtccaactgaaacgt

SEQ ID NO: 912630 - DNA, 25 bp, Homo sapien
catgaagggaatcagtgctgcgaaa

SEQ ID NO: 912631 - DNA, 25 bp, Homo sapien
agctcccttcgggttgcatggcagc

SEQ ID NO: 912632 - DNA, 25 bp, Homo sapien
atgctccgtgacctctggtacccag

SEQ ID NO: 912633 - DNA, 25 bp, Homo sapien
ggttgcatggcagcccccggtaagt

SEQ ID NO: 912634 - DNA, 25 bp, Homo sapien
tttcctatgtgcaaagccttcttgc

SEQ ID NO: 912635 - DNA, 25 bp, Homo sapien
tcaagtgctggcaaaacgcagctgc

SEQ ID NO: 912636 - DNA, 25 bp, Homo sapien
tgctcctcctcagcaacgtgctcaa

SEQ ID NO: 912637 - DNA, 25 bp, Homo sapien
tgagaccacttccaaaccggccatg

SEQ ID NO: 912638 - DNA, 25 bp, Homo sapien
atcctcaggcagcgcacaatcatct

SEQ ID NO: 912639 - DNA, 25 bp, Homo sapien
gggcaccgtgtctgactgcatgctg

SEQ ID NO: 912640 - DNA, 25 bp, Homo sapien
ctggatggaccgaggagggcctgaa

SEQ ID NO: 912641 - DNA, 25 bp, Homo sapien
atgctgcaggccgagtacaggctct

SEQ ID NO: 912642 - DNA, 25 bp, Homo sapien
gcatgctgcaggccgagtacaggct

SEQ ID NO: 912643 - DNA, 25 bp, Homo sapien
ggtttagccagatcacgctcaagat

SEQ ID NO: 912644 - DNA, 25 bp, Homo sapien
taggagcagggtttagccagatcac

SEQ ID NO: 912645 - DNA, 25 bp, Homo sapien
acagtaggagcagggtttagccaga

SEQ ID NO: 912646 - DNA, 25 bp, Homo sapien
cagggtttagccagatcacgctcaa

SEQ ID NO: 912647 - DNA, 25 bp, Homo sapien
gaaaaacaggggtcagatggatccg

SEQ ID NO: 912648 - DNA, 25 bp, Homo sapien
cagctgagacgcagcaagcagggcc

SEQ ID NO: 912649 - DNA, 25 bp, Homo sapien
ccctgtgtgcccaggatctgtgtgg

SEQ ID NO: 912650 - DNA, 25 bp, Homo sapien
tgcggactgggtgaaatcagcagct

SEQ ID NO: 912651 - DNA, 25 bp, Homo sapien
aaagtaaacatttgacatgctttct

SEQ ID NO: 912652 - DNA, 25 bp, Homo sapien
tgtgcacacggagcctgccatgaag

SEQ ID NO: 912653 - DNA, 25 bp, Homo sapien
tttatggggctccttcaaaatgcaa

SEQ ID NO: 912654 - DNA, 25 bp, Homo sapien
gaataatctggtttatgagcctctt

SEQ ID NO: 912655 - DNA, 25 bp, Homo sapien
gtaggagtttaatttcaccagccag

SEQ ID NO: 912656 - DNA, 25 bp, Homo sapien
agtcattttgccctagccttcctgc

SEQ ID NO: 912657 - DNA, 25 bp, Homo sapien
actctgggtgtgtcagtgctgagca

SEQ ID NO: 912658 - DNA, 25 bp, Homo sapien
gccagggctgccaacctaatagaat

SEQ ID NO: 912659 - DNA, 25 bp, Homo sapien
tattggcaggatacattccccagca

SEQ ID NO: 912660 - DNA, 25 bp, Homo sapien
tccaggcccaggaatctattggcag

SEQ ID NO: 912661 - DNA, 25 bp, Homo sapien
ttccaaaaatggatggcatgtgtcc

SEQ ID NO: 912662 - DNA, 25 bp, Homo sapien
tcagtttccgtcaatcaagcggtag

SEQ ID NO: 912663 - DNA, 25 bp, Homo sapien
caggagtgacactcaacaagccctc

SEQ ID NO: 912664 - DNA, 25 bp, Homo sapien
aggcctccctgcgactccgtaggct

SEQ ID NO: 912665 - DNA, 25 bp, Homo sapien
ctccgtaggctccaggagtgacact

SEQ ID NO: 912666 - DNA, 25 bp, Homo sapien
ggagtgacactcaacaagccctcct

SEQ ID NO: 912667 - DNA, 25 bp, Homo sapien
agaaaccccagccacctcttgcatg

SEQ ID NO: 912668 - DNA, 25 bp, Homo sapien
tgcagcgaattcaacgtctgccctg

SEQ ID NO: 912669 - DNA, 25 bp, Homo sapien
ggaagtgcagcgaattcaacgtctg

SEQ ID NO: 912670 - DNA, 25 bp, Homo sapien
cttgcatgcacgcttcccacataag

SEQ ID NO: 912671 - DNA, 25 bp, Homo sapien
tgcttccgcatggtgtctacaaaac

SEQ ID NO: 912672 - DNA, 25 bp, Homo sapien
tacaaaacaacaaatctgctgtcct

SEQ ID NO: 912673 - DNA, 25 bp, Homo sapien
ctgtccttctaaggcacagcagctg

SEQ ID NO: 912674 - DNA, 25 bp, Homo sapien
tctctgcttccgcatggtgtctaca

SEQ ID NO: 912675 - DNA, 25 bp, Homo sapien
gagtccaaccagacaatttgccttc

SEQ ID NO: 912676 - DNA, 25 bp, Homo sapien
tactcccaaccaaggagagctggcc

SEQ ID NO: 912677 - DNA, 25 bp, Homo sapien
ccaggaagagtccaaccagacaatt

SEQ ID NO: 912678 - DNA, 25 bp, Homo sapien
ctgtgagtctgtgacaggaagtact

SEQ ID NO: 912679 - DNA, 25 bp, Homo sapien
aagagcgaaactctgtctcaaacaa

SEQ ID NO: 912680 - DNA, 25 bp, Homo sapien
aggttgcgatgagtcaagatcgtgc

SEQ ID NO: 912681 - DNA, 25 bp, Homo sapien
gttgcgatgagtcaagatcgtgcca

SEQ ID NO: 912682 - DNA, 25 bp, Homo sapien
tgcgatgagtcaagatcgtgccact

SEQ ID NO: 912683 - DNA, 25 bp, Homo sapien
tgcacttccttggacggaaacggtc

SEQ ID NO: 912684 - DNA, 25 bp, Homo sapien
tgctacttcgaaaaaggatttgcac

SEQ ID NO: 912685 - DNA, 25 bp, Homo sapien
gacggaaacggtccatatgttgtgg

SEQ ID NO: 912686 - DNA, 25 bp, Homo sapien
tatttctttctaagttgtactctgc

SEQ ID NO: 912687 - DNA, 25 bp, Homo sapien
cccagtcaaagagcattgctggaag

SEQ ID NO: 912688 - DNA, 25 bp, Homo sapien
ccagtcaaagagcattgctggaaga

SEQ ID NO: 912689 - DNA, 25 bp, Homo sapien
ccccagtcaaagagcattgctggaa

SEQ ID NO: 912690 - DNA, 25 bp, Homo sapien
tactataccgctgccaaaaccaact

SEQ ID NO: 912691 - DNA, 25 bp, Homo sapien
tctctcttccaatactataccgctg

SEQ ID NO: 912692 - DNA, 25 bp, Homo sapien
gactccgtgagttctaatggctcct

SEQ ID NO: 912693 - DNA, 25 bp, Homo sapien
ctcttactgaggtgaacttacagga

SEQ ID NO: 912694 - DNA, 25 bp, Homo sapien
gcagggctgcatccactctgtctgg

SEQ ID NO: 912695 - DNA, 25 bp, Homo sapien
ggccatgagttcacatgcactacaa

SEQ ID NO: 912696 - DNA, 25 bp, Homo sapien
gctgcttgggttagctctggctgca

SEQ ID NO: 912697 - DNA, 25 bp, Homo sapien
ccactgagtggtcaagtcgggacag

SEQ ID NO: 912698 - DNA, 25 bp, Homo sapien
cagctctcggctggatacggtgggc

SEQ ID NO: 912699 - DNA, 25 bp, Homo sapien
tattccctaggacctaggccagcag

SEQ ID NO: 912700 - DNA, 25 bp, Homo sapien
cagtcactgccggagaagggaaagc

SEQ ID NO: 912701 - DNA, 25 bp, Homo sapien
cagcagcacccatgccgctttggga

SEQ ID NO: 912702 - DNA, 25 bp, Homo sapien
ttcgcaagtcggtcagactgtgcgg

SEQ ID NO: 912703 - DNA, 25 bp, Homo sapien
cctggtgattcgcaagtcggtcaga

SEQ ID NO: 912704 - DNA, 25 bp, Homo sapien
tgttgactgcgaggtgtctgctcca

SEQ ID NO: 912705 - DNA, 25 bp, Homo sapien
gagtcctggtcctgccgggtcttgt

SEQ ID NO: 912706 - DNA, 25 bp, Homo sapien
gagcaaacaggtttaggtctggtca

SEQ ID NO: 912707 - DNA, 25 bp, Homo sapien
gaaggaggatgtttgttccctggga

SEQ ID NO: 912708 - DNA, 25 bp, Homo sapien
tgcttcacggaccactcacaatggg

SEQ ID NO: 912709 - DNA, 25 bp, Homo sapien
taggtctggtcaacgctgtgcttca

SEQ ID NO: 912710 - DNA, 25 bp, Homo sapien
tactcagagcccttaatcactatgc

SEQ ID NO: 912711 - DNA, 25 bp, Homo sapien
gctgtgagtccgctttttactcaga

SEQ ID NO: 912712 - DNA, 25 bp, Homo sapien
atcactatgctctctacctctaggg

SEQ ID NO: 912713 - DNA, 25 bp, Homo sapien
gctttttactcagagcccttaatca

SEQ ID NO: 912714 - DNA, 25 bp, Homo sapien
tagcctgggcacaaaacagcgagga

SEQ ID NO: 912715 - DNA, 25 bp, Homo sapien
taaaactgcaacacacggatggagg

SEQ ID NO: 912716 - DNA, 25 bp, Homo sapien
aaaaagcatcacaaggtagcctggg

SEQ ID NO: 912717 - DNA, 25 bp, Homo sapien
tgttcattgggcgattcaggcagtt

SEQ ID NO: 912718 - DNA, 25 bp, Homo sapien
ggaacagagggccggcagcttgcat

SEQ ID NO: 912719 - DNA, 25 bp, Homo sapien
tactacggaacagagggccggcagc

SEQ ID NO: 912720 - DNA, 25 bp, Homo sapien
cttactacggaacagagggccggca

SEQ ID NO: 912721 - DNA, 25 bp, Homo sapien
ctacggaacagagggccggcagctt

SEQ ID NO: 912722 - DNA, 25 bp, Homo sapien
cctgccctgtgcacaatattttcag

SEQ ID NO: 912723 - DNA, 25 bp, Homo sapien
tctctacagtgggtatcacgtggct

SEQ ID NO: 912724 - DNA, 25 bp, Homo sapien
cctctctctacagtgggtatcacgt

SEQ ID NO: 912725 - DNA, 25 bp, Homo sapien
gtgggtatcacgtggctgtgtcctc

SEQ ID NO: 912726 - DNA, 25 bp, Homo sapien
gatttttggtgcaaaggagaagacg

SEQ ID NO: 912727 - DNA, 25 bp, Homo sapien
agaagacgcaatcctacacgaccca

SEQ ID NO: 912728 - DNA, 25 bp, Homo sapien
tctcctgcagctaccctcagatttt

SEQ ID NO: 912729 - DNA, 25 bp, Homo sapien
tcctacacgacccaccatccgggtc

SEQ ID NO: 912730 - DNA, 25 bp, Homo sapien
ccagcttcaacaaacagcaagggag

SEQ ID NO: 912731 - DNA, 25 bp, Homo sapien
ttataagcacaatagtctggttact

SEQ ID NO: 912732 - DNA, 25 bp, Homo sapien
tagtctggttactgctccagcttca

SEQ ID NO: 912733 - DNA, 25 bp, Homo sapien
gcacaatagtctggttactgctcca

SEQ ID NO: 912734 - DNA, 25 bp, Homo sapien
tcagatacacagatcggttcaccct

SEQ ID NO: 912735 - DNA, 25 bp, Homo sapien
ttttagcaccacttagccaaggcct

SEQ ID NO: 912736 - DNA, 25 bp, Homo sapien
ggttcaccctgtgctggtaccagct

SEQ ID NO: 912737 - DNA, 25 bp, Homo sapien
tctctggacccattgaggagcgatg

SEQ ID NO: 912738 - DNA, 25 bp, Homo sapien
cgttaagtcccgtgcatactgaaat

SEQ ID NO: 912739 - DNA, 25 bp, Homo sapien
caggagcccaacgttaagtcccgtg

SEQ ID NO: 912740 - DNA, 25 bp, Homo sapien
aagtcccgtgcatactgaaattgta

SEQ ID NO: 912741 - DNA, 25 bp, Homo sapien
ccaacgttaagtcccgtgcatactg

SEQ ID NO: 912742 - DNA, 25 bp, Homo sapien
taagtgaccccctttgtcgagactc

SEQ ID NO: 912743 - DNA, 25 bp, Homo sapien
ggtgatgaggcccatctgacaccag

SEQ ID NO: 912744 - DNA, 25 bp, Homo sapien
gagcagaggacaggcacatcccgga

SEQ ID NO: 912745 - DNA, 25 bp, Homo sapien
gactcataaccggtggcagcaaaca

SEQ ID NO: 912746 - DNA, 25 bp, Homo sapien
tctgcccctcgtagggctctgcagc

SEQ ID NO: 912747 - DNA, 25 bp, Homo sapien
tggcccaagccccggtctgttagct

SEQ ID NO: 912748 - DNA, 25 bp, Homo sapien
cctcgtagggctctgcagcttgaga

SEQ ID NO: 912749 - DNA, 25 bp, Homo sapien
gctggcccaagccccggtctgttag

SEQ ID NO: 912750 - DNA, 25 bp, Homo sapien
gttcaaggacttcctgcaagggtca

SEQ ID NO: 912751 - DNA, 25 bp, Homo sapien
catgtgttcgaagatttcaaagcca

SEQ ID NO: 912752 - DNA, 25 bp, Homo sapien
tccatgtgttcgaagatttcaaagc

SEQ ID NO: 912753 - DNA, 25 bp, Homo sapien
catctgtagtcccatgagcttgcag

SEQ ID NO: 912754 - DNA, 25 bp, Homo sapien
gagcttgcagcaaggtgggaaattc

SEQ ID NO: 912755 - DNA, 25 bp, Homo sapien
gagaacatagttgatgggggcacat

SEQ ID NO: 912756 - DNA, 25 bp, Homo sapien
cagaaccagtgatgcgagccagggt

SEQ ID NO: 912757 - DNA, 25 bp, Homo sapien
ccagagtgaccggatgatgggggat

SEQ ID NO: 912758 - DNA, 25 bp, Homo sapien
gtgacagaaccagtgatgcgagcca

SEQ ID NO: 912759 - DNA, 25 bp, Homo sapien
ctgggtttcagctgaggtctggaaa

SEQ ID NO: 912760 - DNA, 25 bp, Homo sapien
tcattgtccaaagaacgaaatgttc

SEQ ID NO: 912761 - DNA, 25 bp, Homo sapien
gtaccccagagcctgctaaaccaga

SEQ ID NO: 912762 - DNA, 25 bp, Homo sapien
gaaatgttctaatgttgtttggtcc

SEQ ID NO: 912763 - DNA, 25 bp, Homo sapien
acgcctgaagcggtactgggattca

SEQ ID NO: 912764 - DNA, 25 bp, Homo sapien
cctgaagcggtactgggattcaaac

SEQ ID NO: 912765 - DNA, 25 bp, Homo sapien
gcctgaagcggtactgggattcaaa

SEQ ID NO: 912766 - DNA, 25 bp, Homo sapien
cgcctgaagcggtactgggattcaa

SEQ ID NO: 912767 - DNA, 25 bp, Homo sapien
aacataaacacacttcacagagacg

SEQ ID NO: 912768 - DNA, 25 bp, Homo sapien
ttataataattctgaggaggagatt

SEQ ID NO: 912769 - DNA, 25 bp, Homo sapien
taaacacacttcacagagacgaatg

SEQ ID NO: 912770 - DNA, 25 bp, Homo sapien
tggcatttggacaaaaacttgttct

SEQ ID NO: 912771 - DNA, 25 bp, Homo sapien
tccaagtaaagtcctcagcatgatg

SEQ ID NO: 912772 - DNA, 25 bp, Homo sapien
caggcagggttgacatcttgttcac

SEQ ID NO: 912773 - DNA, 25 bp, Homo sapien
gaaggtacccaattcacagagtcgg

SEQ ID NO: 912774 - DNA, 25 bp, Homo sapien
cccaccgcgtagcattggcaggaga

SEQ ID NO: 912775 - DNA, 25 bp, Homo sapien
tcgacgattagaatgaacggtattc

SEQ ID NO: 912776 - DNA, 25 bp, Homo sapien
attcgacgattagaatgaacggtat

SEQ ID NO: 912777 - DNA, 25 bp, Homo sapien
gacgattagaatgaacggtattcct

SEQ ID NO: 912778 - DNA, 25 bp, Homo sapien
agaatgaacggtattcctaatcttc

SEQ ID NO: 912779 - DNA, 25 bp, Homo sapien
aatctgggcagccggctaaagccat

SEQ ID NO: 912780 - DNA, 25 bp, Homo sapien
ggaatctgggcagccggctaaagcc

SEQ ID NO: 912781 - DNA, 25 bp, Homo sapien
tagtacggatggtgcaaaaaggaat

SEQ ID NO: 912782 - DNA, 25 bp, Homo sapien
tggtagtacggatggtgcaaaaagg

SEQ ID NO: 912783 - DNA, 25 bp, Homo sapien
tgccttcttcaaattacatttactg

SEQ ID NO: 912784 - DNA, 25 bp, Homo sapien
ttctgccttcttcaaattacattta

SEQ ID NO: 912785 - DNA, 25 bp, Homo sapien
tctgccttcttcaaattacatttac

SEQ ID NO: 912786 - DNA, 25 bp, Homo sapien
aattacatttactgcgctgcagcac

SEQ ID NO: 912787 - DNA, 25 bp, Homo sapien
cctactgtcatttgtgggaagcatc

SEQ ID NO: 912788 - DNA, 25 bp, Homo sapien
tgcgaagcacagcaccactttacgg

SEQ ID NO: 912789 - DNA, 25 bp, Homo sapien
ggaagcatcaagtcccctcaagaaa

SEQ ID NO: 912790 - DNA, 25 bp, Homo sapien
gaaacgtaagcgtgggtcagatcac

SEQ ID NO: 912791 - DNA, 25 bp, Homo sapien
cagaggaaaacaccaattttctagc

SEQ ID NO: 912792 - DNA, 25 bp, Homo sapien
ctgagctaccagtcactgggcctgc

SEQ ID NO: 912793 - DNA, 25 bp, Homo sapien
ctaccagtcactgggcctgcagctg

SEQ ID NO: 912794 - DNA, 25 bp, Homo sapien
gaggacctggctgccggtcactggg

SEQ ID NO: 912795 - DNA, 25 bp, Homo sapien
tgtagcactgtctgctggggcggcc

SEQ ID NO: 912796 - DNA, 25 bp, Homo sapien
ggacaccccgggagcagcttctgaa

SEQ ID NO: 912797 - DNA, 25 bp, Homo sapien
gggcagagcgcggacaccccgggag

SEQ ID NO: 912798 - DNA, 25 bp, Homo sapien
acaccccgggagcagcttctgaact

SEQ ID NO: 912799 - DNA, 25 bp, Homo sapien
cagagcgcggacaccccgggagcag

SEQ ID NO: 912800 - DNA, 25 bp, Homo sapien
gcctcagaagccgagtagatgctgc

SEQ ID NO: 912801 - DNA, 25 bp, Homo sapien
ggacgcctcagaagccgagtagatg

SEQ ID NO: 912802 - DNA, 25 bp, Homo sapien
gtaggtttcctgaggacgcctcaga

SEQ ID NO: 912803 - DNA, 25 bp, Homo sapien
tcctgaggacgcctcagaagccgag

SEQ ID NO: 912804 - DNA, 25 bp, Homo sapien
gcttgtggcaagcatgaccgaccat

SEQ ID NO: 912805 - DNA, 25 bp, Homo sapien
ttagcattgtcacttacagagccac

SEQ ID NO: 912806 - DNA, 25 bp, Homo sapien
ctgcatgcaaggattctggaggagc

SEQ ID NO: 912807 - DNA, 25 bp, Homo sapien
tcacccattggtcaagatcgtagaa

SEQ ID NO: 912808 - DNA, 25 bp, Homo sapien
tttaacagtgtcaaggcgccctagg

SEQ ID NO: 912809 - DNA, 25 bp, Homo sapien
caatgtgccctgtggaacagtctga

SEQ ID NO: 912810 - DNA, 25 bp, Homo sapien
catcactggccagaaaccatgtgct

SEQ ID NO: 912811 - DNA, 25 bp, Homo sapien
cctagacatggaactgctgcccagt

SEQ ID NO: 912812 - DNA, 25 bp, Homo sapien
ctatttctgacctggcaacatgaga

SEQ ID NO: 912813 - DNA, 25 bp, Homo sapien
tacaaagccaacctcacttgaatgg

SEQ ID NO: 912814 - DNA, 25 bp, Homo sapien
gcggatgtggatctattcaggcgac

SEQ ID NO: 912815 - DNA, 25 bp, Homo sapien
gggcatgggccttcatcatatctat

SEQ ID NO: 912816 - DNA, 25 bp, Homo sapien
ggtaaagtgtcctcttcagagaatt

SEQ ID NO: 912817 - DNA, 25 bp, Homo sapien
gtaaagtgtcctcttcagagaattt

SEQ ID NO: 912818 - DNA, 25 bp, Homo sapien
aggtaaagtgtcctcttcagagaat

SEQ ID NO: 912819 - DNA, 25 bp, Homo sapien
caggtaaagtgtcctcttcagagaa

SEQ ID NO: 912820 - DNA, 25 bp, Homo sapien
tcagtcaacacaggccatccctcta

SEQ ID NO: 912821 - DNA, 25 bp, Homo sapien
gtcaacacaggccatccctctactc

SEQ ID NO: 912822 - DNA, 25 bp, Homo sapien
gttcagtcaacacaggccatccctc

SEQ ID NO: 912823 - DNA, 25 bp, Homo sapien
agtcaacacaggccatccctctact

SEQ ID NO: 912824 - DNA, 25 bp, Homo sapien
tccatctaagtaaggcaggaacaga

SEQ ID NO: 912825 - DNA, 25 bp, Homo sapien
ttccatctaagtaaggcaggaacag

SEQ ID NO: 912826 - DNA, 25 bp, Homo sapien
gacaacactcagaagctggctccca

SEQ ID NO: 912827 - DNA, 25 bp, Homo sapien
tgacaacactcagaagctggctccc

SEQ ID NO: 912828 - DNA, 25 bp, Homo sapien
ttgacaacactcagaagctggctcc

SEQ ID NO: 912829 - DNA, 25 bp, Homo sapien
ctgatgtaggtggttcagaggtcac

SEQ ID NO: 912830 - DNA, 25 bp, Homo sapien
tgtaggtggttcagaggtcacacct

SEQ ID NO: 912831 - DNA, 25 bp, Homo sapien
tggttcagaggtcacaccttaaaaa

SEQ ID NO: 912832 - DNA, 25 bp, Homo sapien
ggtctctcctatacattcttcctcc

SEQ ID NO: 912833 - DNA, 25 bp, Homo sapien
accccttcatgccaatcgtgcaatt

SEQ ID NO: 912834 - DNA, 25 bp, Homo sapien
ttaatcgaccaatctggaacttctc

SEQ ID NO: 912835 - DNA, 25 bp, Homo sapien
gcaattaccataactccattcacca

SEQ ID NO: 912836 - DNA, 25 bp, Homo sapien
cagcagttagtatgcaccattctca

SEQ ID NO: 912837 - DNA, 25 bp, Homo sapien
gcgtggctgccgagcacctcaaact

SEQ ID NO: 912838 - DNA, 25 bp, Homo sapien
taaaaaccgtccttcagcgcgtggc

SEQ ID NO: 912839 - DNA, 25 bp, Homo sapien
caattaaaaaccgtccttcagcgcg

SEQ ID NO: 912840 - DNA, 25 bp, Homo sapien
ggctgccgagcacctcaaactgaaa

SEQ ID NO: 912841 - DNA, 25 bp, Homo sapien
gacatcaaaggagcagagacacgca

SEQ ID NO: 912842 - DNA, 25 bp, Homo sapien
gggtcgctgcgtgtgcgccgccggc

SEQ ID NO: 912843 - DNA, 25 bp, Homo sapien
ccggcgcgtggacagcgctccgcat

SEQ ID NO: 912844 - DNA, 25 bp, Homo sapien
gcgtggacagcgctccgcatggaca

SEQ ID NO: 912845 - DNA, 25 bp, Homo sapien
gcatggacagcgctcggagccgggc

SEQ ID NO: 912846 - DNA, 25 bp, Homo sapien
gcgccaggcgaacgcgctagcacga

SEQ ID NO: 912847 - DNA, 25 bp, Homo sapien
atccgggcgagggtgggatgccgcg

SEQ ID NO: 912848 - DNA, 25 bp, Homo sapien
gaaaagcgggccaacgccgcctctg

SEQ ID NO: 912849 - DNA, 25 bp, Homo sapien
ctgcggcgcagaaaaccgacccggg

SEQ ID NO: 912850 - DNA, 25 bp, Homo sapien
aaggccacagtaagcagtaagcaga

SEQ ID NO: 912851 - DNA, 25 bp, Homo sapien
agattttctactcccctctagcaga

SEQ ID NO: 912852 - DNA, 25 bp, Homo sapien
agcagattttctactcccctctagc

SEQ ID NO: 912853 - DNA, 25 bp, Homo sapien
cagtaagcagtaagcagattttcta

SEQ ID NO: 912854 - DNA, 25 bp, Homo sapien
atcacatttccacggctggcgggcg

SEQ ID NO: 912855 - DNA, 25 bp, Homo sapien
taacgcacatgctccaaggcagtcg

SEQ ID NO: 912856 - DNA, 25 bp, Homo sapien
caagatggttcaagaatgcaccgct

SEQ ID NO: 912857 - DNA, 25 bp, Homo sapien
caggcgtttggagaggcaatcagca

SEQ ID NO: 912858 - DNA, 25 bp, Homo sapien
tgcgcggaaactttgggctccaccg

SEQ ID NO: 912859 - DNA, 25 bp, Homo sapien
gctccaccgggtctccgagcgccga

SEQ ID NO: 912860 - DNA, 25 bp, Homo sapien
tgcgggcgacactcggcgtggccgg

SEQ ID NO: 912861 - DNA, 25 bp, Homo sapien
ccggccgcagctcgcttccctctct

SEQ ID NO: 912862 - DNA, 25 bp, Homo sapien
ccattctgtaggtaggtgggccagt

SEQ ID NO: 912863 - DNA, 25 bp, Homo sapien
gaagcctgcacctgggattctgaac

SEQ ID NO: 912864 - DNA, 25 bp, Homo sapien
ggcggaagggtgacccaaccaatca

SEQ ID NO: 912865 - DNA, 25 bp, Homo sapien
cagggatgacgcttggcccagagat

SEQ ID NO: 912866 - DNA, 25 bp, Homo sapien
gtccaggatttctgtccacgtcatt

SEQ ID NO: 912867 - DNA, 25 bp, Homo sapien
ccaggatttctgtccacgtcattct

SEQ ID NO: 912868 - DNA, 25 bp, Homo sapien
tccaggatttctgtccacgtcattc

SEQ ID NO: 912869 - DNA, 25 bp, Homo sapien
gctttgcctaatgcttgccccggta

SEQ ID NO: 912870 - DNA, 25 bp, Homo sapien
ccctgataactgtgtccaagggcac

SEQ ID NO: 912871 - DNA, 25 bp, Homo sapien
tgccccggtagtgtcaagatcacaa

SEQ ID NO: 912872 - DNA, 25 bp, Homo sapien
agatgcagttccaggcgtcagttcc

SEQ ID NO: 912873 - DNA, 25 bp, Homo sapien
aaaatcatgtggaaagcgggcaccc

SEQ ID NO: 912874 - DNA, 25 bp, Homo sapien
ctttgggcttcagtaacctggtaag

SEQ ID NO: 912875 - DNA, 25 bp, Homo sapien
aagcgggcacccctatgcgtgtgct

SEQ ID NO: 912876 - DNA, 25 bp, Homo sapien
ggcttcagtaacctggtaaggtcca

SEQ ID NO: 912877 - DNA, 25 bp, Homo sapien
aactgtggtacgtgctccacgtgga

SEQ ID NO: 912878 - DNA, 25 bp, Homo sapien
tgtggtacgtgctccacgtggagaa

SEQ ID NO: 912879 - DNA, 25 bp, Homo sapien
tgacaaactgtggtacgtgctccac

SEQ ID NO: 912880 - DNA, 25 bp, Homo sapien
tacgtgctccacgtggagaatgtgg

SEQ ID NO: 912881 - DNA, 25 bp, Homo sapien
cactaaaaataacgtacatctgaga

SEQ ID NO: 912882 - DNA, 25 bp, Homo sapien
gagattcattggtcataactattga

SEQ ID NO: 912883 - DNA, 25 bp, Homo sapien
taaaagtccgccgtcataaccagtc

SEQ ID NO: 912884 - DNA, 25 bp, Homo sapien
gaatatttccacaggtttgaccact

SEQ ID NO: 912885 - DNA, 25 bp, Homo sapien
tgttgtttaaggcacacacagtctg

SEQ ID NO: 912886 - DNA, 25 bp, Homo sapien
atggaggctgcattactcgggacag

SEQ ID NO: 912887 - DNA, 25 bp, Homo sapien
tcgggacaggttaagttattatgac

SEQ ID NO: 912888 - DNA, 25 bp, Homo sapien
actcaagcaagataatgatatttat

SEQ ID NO: 912889 - DNA, 25 bp, Homo sapien
ggctctagagccctagtctcatgac

SEQ ID NO: 912890 - DNA, 25 bp, Homo sapien
taagtgacttccatggtaagcgtgg

SEQ ID NO: 912891 - DNA, 25 bp, Homo sapien
taagcgtgggtatgataaacacaca

SEQ ID NO: 912892 - DNA, 25 bp, Homo sapien
cacacacacgaaattggagaggagg

SEQ ID NO: 912893 - DNA, 25 bp, Homo sapien
gagttgcacctgacttatcaccagt

SEQ ID NO: 912894 - DNA, 25 bp, Homo sapien
tcctcttggagttgcacctgactta

SEQ ID NO: 912895 - DNA, 25 bp, Homo sapien
ccacccacaccatgatggcggagaa

SEQ ID NO: 912896 - DNA, 25 bp, Homo sapien
ccatgatggcggagaaagccagatc

SEQ ID NO: 912897 - DNA, 25 bp, Homo sapien
taaaactagccatgttatttttcac

SEQ ID NO: 912898 - DNA, 25 bp, Homo sapien
actagccatgttatttttcacagaa

SEQ ID NO: 912899 - DNA, 25 bp, Homo sapien
agcaatattgttgaagtggtcatat

SEQ ID NO: 912900 - DNA, 25 bp, Homo sapien
aaactagccatgttatttttcacag

SEQ ID NO: 912901 - DNA, 25 bp, Homo sapien
tatactaaggggtatagccctctgc

SEQ ID NO: 912902 - DNA, 25 bp, Homo sapien
aagctgcaaaatagtggtgaactat

SEQ ID NO: 912903 - DNA, 25 bp, Homo sapien
aaatagtggtgaactatactaaggg

SEQ ID NO: 912904 - DNA, 25 bp, Homo sapien
tgcaaaatagtggtgaactatacta

SEQ ID NO: 912905 - DNA, 25 bp, Homo sapien
gaagtgccatcttggtgagattcct

SEQ ID NO: 912906 - DNA, 25 bp, Homo sapien
tcttggtgagattcctggttgcagg

SEQ ID NO: 912907 - DNA, 25 bp, Homo sapien
tgtatggcaactgcccttccggtgg

SEQ ID NO: 912908 - DNA, 25 bp, Homo sapien
tcccagaagggtccctttgtatggc

SEQ ID NO: 912909 - DNA, 25 bp, Homo sapien
tcagcatgtcctcttgtcgcgtgag

SEQ ID NO: 912910 - DNA, 25 bp, Homo sapien
ttaaaccttgaccatgcacatttca

SEQ ID NO: 912911 - DNA, 25 bp, Homo sapien
gagggaacagtacgccacactcctc

SEQ ID NO: 912912 - DNA, 25 bp, Homo sapien
tcctcttgtcgcgtgagagggaaca

SEQ ID NO: 912913 - DNA, 25 bp, Homo sapien
tcagaggaacaagaattcatggcat

SEQ ID NO: 912914 - DNA, 25 bp, Homo sapien
ttgctcagacattcagaggaacaag

SEQ ID NO: 912915 - DNA, 25 bp, Homo sapien
aagaattcatggcatttggcttttc

SEQ ID NO: 912916 - DNA, 25 bp, Homo sapien
tctttctgtgcttcaatcatcatca

SEQ ID NO: 912917 - DNA, 25 bp, Homo sapien
gcctctggagttgccagagcaacac

SEQ ID NO: 912918 - DNA, 25 bp, Homo sapien
tagcaaattgatctctgaacagtcc

SEQ ID NO: 912919 - DNA, 25 bp, Homo sapien
ccaaagctgttacctgaaccaggaa

SEQ ID NO: 912920 - DNA, 25 bp, Homo sapien
tccccaggagtagaggatggactga

SEQ ID NO: 912921 - DNA, 25 bp, Homo sapien
tccatgacttgctttgcacgtttca

SEQ ID NO: 912922 - DNA, 25 bp, Homo sapien
cataagctattgtgctccatgactt

SEQ ID NO: 912923 - DNA, 25 bp, Homo sapien
ttgcacgtttcagctcatcatcttc

SEQ ID NO: 912924 - DNA, 25 bp, Homo sapien
cttgctttgcacgtttcagctcatc

SEQ ID NO: 912925 - DNA, 25 bp, Homo sapien
atccttttatgcgagccctcctcag

SEQ ID NO: 912926 - DNA, 25 bp, Homo sapien
tggatccttttatgcgagccctcct

SEQ ID NO: 912927 - DNA, 25 bp, Homo sapien
acttctcagtgtactgtgggtggat

SEQ ID NO: 912928 - DNA, 25 bp, Homo sapien
tgtactgtgggtggatccttttatg

SEQ ID NO: 912929 - DNA, 25 bp, Homo sapien
cagagaacagagctatgccgtgtgc

SEQ ID NO: 912930 - DNA, 25 bp, Homo sapien
ccgtgtgcccaagttccaggaggct

SEQ ID NO: 912931 - DNA, 25 bp, Homo sapien
ggaggctgggactgtgtttctcttc

SEQ ID NO: 912932 - DNA, 25 bp, Homo sapien
taaatggatgacataaagcataggc

SEQ ID NO: 912933 - DNA, 25 bp, Homo sapien
agcagctgccatccaacagtgtttg

SEQ ID NO: 912934 - DNA, 25 bp, Homo sapien
cacaagcaggatgagatcacccaca

SEQ ID NO: 912935 - DNA, 25 bp, Homo sapien
aagcaggatgagatcacccacagga

SEQ ID NO: 912936 - DNA, 25 bp, Homo sapien
aacacaagcaggatgagatcaccca

SEQ ID NO: 912937 - DNA, 25 bp, Homo sapien
agcaggatgagatcacccacaggac

SEQ ID NO: 912938 - DNA, 25 bp, Homo sapien
agcttctcccgcagtcccccgtaga

SEQ ID NO: 912939 - DNA, 25 bp, Homo sapien
ccgcagtcccccgtagaggcatggg

SEQ ID NO: 912940 - DNA, 25 bp, Homo sapien
ttctcccgcagtcccccgtagaggc

SEQ ID NO: 912941 - DNA, 25 bp, Homo sapien
agtcccccgtagaggcatgggagca

SEQ ID NO: 912942 - DNA, 25 bp, Homo sapien
gatgacaacctgtgccaggaaactc

SEQ ID NO: 912943 - DNA, 25 bp, Homo sapien
acaacctgtgccaggaaactccttt

SEQ ID NO: 912944 - DNA, 25 bp, Homo sapien
gacaacctgtgccaggaaactcctt

SEQ ID NO: 912945 - DNA, 25 bp, Homo sapien
aggaaactccttttcaagctgactt

SEQ ID NO: 912946 - DNA, 25 bp, Homo sapien
cgcgtgccttgctagccctttgctt

SEQ ID NO: 912947 - DNA, 25 bp, Homo sapien
ctttgctttcctgggcgggtctctc

SEQ ID NO: 912948 - DNA, 25 bp, Homo sapien
accacacagtctgcagtgtggggta

SEQ ID NO: 912949 - DNA, 25 bp, Homo sapien
gtgtggggtacccagatgccagggg

SEQ ID NO: 912950 - DNA, 25 bp, Homo sapien
ggctcccatttgtaggacctggtgc

SEQ ID NO: 912951 - DNA, 25 bp, Homo sapien
tgcctcctggcactggactacagag

SEQ ID NO: 912952 - DNA, 25 bp, Homo sapien
tgggacatccccatcaggtccacat

SEQ ID NO: 912953 - DNA, 25 bp, Homo sapien
catagatgtcccgtggagagctcca

SEQ ID NO: 912954 - DNA, 25 bp, Homo sapien
gccatcccggaggaagcttcccgat

SEQ ID NO: 912955 - DNA, 25 bp, Homo sapien
cgtgccgccatcccggaggaagctt

SEQ ID NO: 912956 - DNA, 25 bp, Homo sapien
cggaggaagcttcccgatttgttag

SEQ ID NO: 912957 - DNA, 25 bp, Homo sapien
aggaagcttcccgatttgttagatt

SEQ ID NO: 912958 - DNA, 25 bp, Homo sapien
ctgaaacaagtgagtgggagctgcc

SEQ ID NO: 912959 - DNA, 25 bp, Homo sapien
ggccaacttggcgtcatgcactcag

SEQ ID NO: 912960 - DNA, 25 bp, Homo sapien
ggatgataaaggtcagcttgcccca

SEQ ID NO: 912961 - DNA, 25 bp, Homo sapien
cgctgtgtgtcgaaaggctcctgaa

SEQ ID NO: 912962 - DNA, 25 bp, Homo sapien
aaaccaactgtagtatgaaattcac

SEQ ID NO: 912963 - DNA, 25 bp, Homo sapien
caaaccaactgtagtatgaaattca

SEQ ID NO: 912964 - DNA, 25 bp, Homo sapien
aaccaactgtagtatgaaattcaca

SEQ ID NO: 912965 - DNA, 25 bp, Homo sapien
caattggctggtagctcgtgcctca

SEQ ID NO: 912966 - DNA, 25 bp, Homo sapien
tacctgaggcctagatctgagatcg

SEQ ID NO: 912967 - DNA, 25 bp, Homo sapien
cgttaatcagtgaatgcagaacagc

SEQ ID NO: 912968 - DNA, 25 bp, Homo sapien
ttgtggcactaaaagacagatagct

SEQ ID NO: 912969 - DNA, 25 bp, Homo sapien
actactgctgtagttagacctcatt

SEQ ID NO: 912970 - DNA, 25 bp, Homo sapien
ttggtgactgggcaccatgtgagaa

SEQ ID NO: 912971 - DNA, 25 bp, Homo sapien
tcaacacatcttgatttctattact

SEQ ID NO: 912972 - DNA, 25 bp, Homo sapien
catgtgagaagaccacgatatcata

SEQ ID NO: 912973 - DNA, 25 bp, Homo sapien
agggagccaatgagctgttggacaa

SEQ ID NO: 912974 - DNA, 25 bp, Homo sapien
gacaaacgcgtcaaggctgaaccaa

SEQ ID NO: 912975 - DNA, 25 bp, Homo sapien
tgtgatgctctcagcgcaactttga

SEQ ID NO: 912976 - DNA, 25 bp, Homo sapien
gaactcttgacaggtgggcatccaa

SEQ ID NO: 912977 - DNA, 25 bp, Homo sapien
ccatctgtatgtggtaaaagtctca

SEQ ID NO: 912978 - DNA, 25 bp, Homo sapien
aaagcttagttggtcagatcatgga

SEQ ID NO: 912979 - DNA, 25 bp, Homo sapien
gcatcatggagcatatcacattcag

SEQ ID NO: 912980 - DNA, 25 bp, Homo sapien
agtcatcaggctccgtacacaggca

SEQ ID NO: 912981 - DNA, 25 bp, Homo sapien
actccttgagtgacgcctgtgggca

SEQ ID NO: 912982 - DNA, 25 bp, Homo sapien
tttcaagccgttatacaggaacaca

SEQ ID NO: 912983 - DNA, 25 bp, Homo sapien
atttccttggcacacgagctgcgca

SEQ ID NO: 912984 - DNA, 25 bp, Homo sapien
tgcgcatttggcctgtagacaagaa

SEQ ID NO: 912985 - DNA, 25 bp, Homo sapien
tcttctggtgctagagagctctgtg

SEQ ID NO: 912986 - DNA, 25 bp, Homo sapien
gccactcttgcaatagtactcctgg

SEQ ID NO: 912987 - DNA, 25 bp, Homo sapien
cccaggatgcagatcttctggtgct

SEQ ID NO: 912988 - DNA, 25 bp, Homo sapien
tgtgcacagccactcttgcaatagt

SEQ ID NO: 912989 - DNA, 25 bp, Homo sapien
acgctccagcttcctcgtaaaagct

SEQ ID NO: 912990 - DNA, 25 bp, Homo sapien
ggctgtcctcacagaccttctcacg

SEQ ID NO: 912991 - DNA, 25 bp, Homo sapien
gcttcctcgtaaaagctgccaggga

SEQ ID NO: 912992 - DNA, 25 bp, Homo sapien
tccagcttcctcgtaaaagctgcca

SEQ ID NO: 912993 - DNA, 25 bp, Homo sapien
cttctctaggttctctcgggccctc

SEQ ID NO: 912994 - DNA, 25 bp, Homo sapien
tcgggccctcttcctgaactcccat

SEQ ID NO: 912995 - DNA, 25 bp, Homo sapien
ctgatgctcctccatatccctctct

SEQ ID NO: 912996 - DNA, 25 bp, Homo sapien
gatgctcctccatatccctctcttc

SEQ ID NO: 912997 - DNA, 25 bp, Homo sapien
tccagagagccttccgatgatcagc

SEQ ID NO: 912998 - DNA, 25 bp, Homo sapien
ggatcccagtcggtgcaattcaaaa

SEQ ID NO: 912999 - DNA, 25 bp, Homo sapien
taccctgggatcagtagagtgacag

SEQ ID NO: 913000 - DNA, 25 bp, Homo sapien
gatgatcagcccttgaaatcggtgg

SEQ ID NO: 913001 - DNA, 25 bp, Homo sapien
tgaaatgcgcacacacagtcgccat

SEQ ID NO: 913002 - DNA, 25 bp, Homo sapien
ctctggccccattgaaatgcgcaca

SEQ ID NO: 913003 - DNA, 25 bp, Homo sapien
gtgtccctggatctacgctgcacct

SEQ ID NO: 913004 - DNA, 25 bp, Homo sapien
gcaagcgtgtccctggatctacgct

SEQ ID NO: 913005 - DNA, 25 bp, Homo sapien
tgccttgcgtctgcggtgttgctga

SEQ ID NO: 913006 - DNA, 25 bp, Homo sapien
gagcggatggcgtccatcaaggctt

SEQ ID NO: 913007 - DNA, 25 bp, Homo sapien
tgagggtgcccgtgctgaacctgga

SEQ ID NO: 913008 - DNA, 25 bp, Homo sapien
ctttctcagtctcgcagcccctgtg

SEQ ID NO: 913009 - DNA, 25 bp, Homo sapien
agagtgcggcatctcggaagctctg

SEQ ID NO: 913010 - DNA, 25 bp, Homo sapien
aggtcttctagcagaggactttccg

SEQ ID NO: 913011 - DNA, 25 bp, Homo sapien
gagagtgcggcatctcggaagctct

SEQ ID NO: 913012 - DNA, 25 bp, Homo sapien
agcagaggactttccgagccctgag

SEQ ID NO: 913013 - DNA, 25 bp, Homo sapien
gctgtgaaatcccaacgcccaaggt

SEQ ID NO: 913014 - DNA, 25 bp, Homo sapien
gagatgattaaatgactgctataga

SEQ ID NO: 913015 - DNA, 25 bp, Homo sapien
ctggcaatgagatgattaaatgact

SEQ ID NO: 913016 - DNA, 25 bp, Homo sapien
aacgcccaaggtagtggcatgagga

SEQ ID NO: 913017 - DNA, 25 bp, Homo sapien
cacaggaaggaactgtgcttcagca

SEQ ID NO: 913018 - DNA, 25 bp, Homo sapien
gatggttcaccatccaatcggaagg

SEQ ID NO: 913019 - DNA, 25 bp, Homo sapien
cctaggtgtccaagtgaatttggaa

SEQ ID NO: 913020 - DNA, 25 bp, Homo sapien
gagcagggtgtccaccccagtgtct

SEQ ID NO: 913021 - DNA, 25 bp, Homo sapien
tccgtgtaggacagtttcgctggcc

SEQ ID NO: 913022 - DNA, 25 bp, Homo sapien
tgtgcccgcggatagctgccagcag

SEQ ID NO: 913023 - DNA, 25 bp, Homo sapien
tgtaggacagtttcgctggcctgcc

SEQ ID NO: 913024 - DNA, 25 bp, Homo sapien
cagcagtgcagatcgttcgccctct

SEQ ID NO: 913025 - DNA, 25 bp, Homo sapien
ggatgtgtcttttgggactggtctc

SEQ ID NO: 913026 - DNA, 25 bp, Homo sapien
tgtccttccctcccgcagagtggat

SEQ ID NO: 913027 - DNA, 25 bp, Homo sapien
tcccgcagagtggatggcttccatc

SEQ ID NO: 913028 - DNA, 25 bp, Homo sapien
tgcagggatgtgtcttttgggactg

SEQ ID NO: 913029 - DNA, 25 bp, Homo sapien
agggtgggaaggctcgccgtggcct

SEQ ID NO: 913030 - DNA, 25 bp, Homo sapien
tgggtctgtaccatcaggtgcgcgt

SEQ ID NO: 913031 - DNA, 25 bp, Homo sapien
agagccattgaccagctccctgctg

SEQ ID NO: 913032 - DNA, 25 bp, Homo sapien
atcaggtgcgcgtctgggctcagat

SEQ ID NO: 913033 - DNA, 25 bp, Homo sapien
ttctcggcataaccgtgtggcctca

SEQ ID NO: 913034 - DNA, 25 bp, Homo sapien
tgaaccagtgagaaacaggagcttc

SEQ ID NO: 913035 - DNA, 25 bp, Homo sapien
gagtagacaacttcctgtgtgggcc

SEQ ID NO: 913036 - DNA, 25 bp, Homo sapien
gaaacacgatccctctgggaagact

SEQ ID NO: 913037 - DNA, 25 bp, Homo sapien
ccacatactggctggacgttcttct

SEQ ID NO: 913038 - DNA, 25 bp, Homo sapien
gacttttggggctcctatgcgcttg

SEQ ID NO: 913039 - DNA, 25 bp, Homo sapien
aatggcagaggccacatactggctg

SEQ ID NO: 913040 - DNA, 25 bp, Homo sapien
ctcctatgcgcttggcaatggcaga

SEQ ID NO: 913041 - DNA, 25 bp, Homo sapien
gggttccggccctcatggtgggcag

SEQ ID NO: 913042 - DNA, 25 bp, Homo sapien
gcgatattggcttggggtctgcttg

SEQ ID NO: 913043 - DNA, 25 bp, Homo sapien
ggcagacttctgctggggcgatatt

SEQ ID NO: 913044 - DNA, 25 bp, Homo sapien
gcaccctcacgtgacccatgcccat

SEQ ID NO: 913045 - DNA, 25 bp, Homo sapien
ctctctgagggtcggcccaggtgtt

SEQ ID NO: 913046 - DNA, 25 bp, Homo sapien
tctctgagggtcggcccaggtgttt

SEQ ID NO: 913047 - DNA, 25 bp, Homo sapien
ctctgagggtcggcccaggtgtttt

SEQ ID NO: 913048 - DNA, 25 bp, Homo sapien
aagacagggaaatgatcctgatgcc

SEQ ID NO: 913049 - DNA, 25 bp, Homo sapien
cagggaaatgatcctgatgccggtg

SEQ ID NO: 913050 - DNA, 25 bp, Homo sapien
gaaatgatcctgatgccggtggcgt

SEQ ID NO: 913051 - DNA, 25 bp, Homo sapien
aatgatcctgatgccggtggcgtga

SEQ ID NO: 913052 - DNA, 25 bp, Homo sapien
aatgattttatacgttgtgaggccg

SEQ ID NO: 913053 - DNA, 25 bp, Homo sapien
aatcttaatggctccggtggagagg

SEQ ID NO: 913054 - DNA, 25 bp, Homo sapien
gtaacatcgcatctctgactttgga

SEQ ID NO: 913055 - DNA, 25 bp, Homo sapien
ggacacatctctgtcgtaacatcgc

SEQ ID NO: 913056 - DNA, 25 bp, Homo sapien
tgtgctcagcttgaagtggcgccag

SEQ ID NO: 913057 - DNA, 25 bp, Homo sapien
tccgagtcgaaagacccagcattgt

SEQ ID NO: 913058 - DNA, 25 bp, Homo sapien
cattcaccggttgggaattcactct

SEQ ID NO: 913059 - DNA, 25 bp, Homo sapien
gttagataaggccacacggattcct

SEQ ID NO: 913060 - DNA, 25 bp, Homo sapien
tactgggattgcatctgtgtcgccg

SEQ ID NO: 913061 - DNA, 25 bp, Homo sapien
cccctatgaatgttactgggattgc

SEQ ID NO: 913062 - DNA, 25 bp, Homo sapien
tcatggcatcctgtgggcagtggtt

SEQ ID NO: 913063 - DNA, 25 bp, Homo sapien
tcgccgtgagggatcatggcatcct

SEQ ID NO: 913064 - DNA, 25 bp, Homo sapien
gagctggtgagggagctggtgtctg

SEQ ID NO: 913065 - DNA, 25 bp, Homo sapien
gctggtgagggagctggtgtctgtt

SEQ ID NO: 913066 - DNA, 25 bp, Homo sapien
agggagctggtgtctgtttcatagc

SEQ ID NO: 913067 - DNA, 25 bp, Homo sapien
ggtgtctgtttcatagctgtcttcc

SEQ ID NO: 913068 - DNA, 25 bp, Homo sapien
ctctccagcaattaataggtcttct

SEQ ID NO: 913069 - DNA, 25 bp, Homo sapien
tctgcaagggttttacggaactctc

SEQ ID NO: 913070 - DNA, 25 bp, Homo sapien
tgcaagggttttacggaactctcca

SEQ ID NO: 913071 - DNA, 25 bp, Homo sapien
ccagcaattaataggtcttcttcat

SEQ ID NO: 913072 - DNA, 25 bp, Homo sapien
tgttgtcctcagaactacggagacg

SEQ ID NO: 913073 - DNA, 25 bp, Homo sapien
caaaagacggttcacgtgatccagg

SEQ ID NO: 913074 - DNA, 25 bp, Homo sapien
tacggagacgcagattgttcatggg

SEQ ID NO: 913075 - DNA, 25 bp, Homo sapien
gcttgcatctgtgccttgcgctaca

SEQ ID NO: 913076 - DNA, 25 bp, Homo sapien
tgttccttggcacttgcggatttga

SEQ ID NO: 913077 - DNA, 25 bp, Homo sapien
cggatttgagtgcagcgtcgttcaa

SEQ ID NO: 913078 - DNA, 25 bp, Homo sapien
aaggctacatacctctggtgcagga

SEQ ID NO: 913079 - DNA, 25 bp, Homo sapien
ttcaaggtcccagtgataaaggcta

SEQ ID NO: 913080 - DNA, 25 bp, Homo sapien
ggaggtccgtggggagggttgtgca

SEQ ID NO: 913081 - DNA, 25 bp, Homo sapien
gaggtccgtggggagggttgtgcag

SEQ ID NO: 913082 - DNA, 25 bp, Homo sapien
aggtccgtggggagggttgtgcagg

SEQ ID NO: 913083 - DNA, 25 bp, Homo sapien
ccaacttcataagctcagcctccat

SEQ ID NO: 913084 - DNA, 25 bp, Homo sapien
caccaacttcataagctcagcctcc

SEQ ID NO: 913085 - DNA, 25 bp, Homo sapien
accaacttcataagctcagcctcca

SEQ ID NO: 913086 - DNA, 25 bp, Homo sapien
ctgtgtccaccctagcagtagccca

SEQ ID NO: 913087 - DNA, 25 bp, Homo sapien
cagactcagaaaacgagaaatttca

SEQ ID NO: 913088 - DNA, 25 bp, Homo sapien
ttacagactctatgtttactttggc

SEQ ID NO: 913089 - DNA, 25 bp, Homo sapien
ctagcagtagcccaccctgccagac

SEQ ID NO: 913090 - DNA, 25 bp, Homo sapien
tgccacttgaagagctgtactccct

SEQ ID NO: 913091 - DNA, 25 bp, Homo sapien
gataatgccacttgaagagctgtac

SEQ ID NO: 913092 - DNA, 25 bp, Homo sapien
gagctgtactccctagaatcttgaa

SEQ ID NO: 913093 - DNA, 25 bp, Homo sapien
tgaagagctgtactccctagaatct

SEQ ID NO: 913094 - DNA, 25 bp, Homo sapien
aaggatggccaaaaaacctcacagc

SEQ ID NO: 913095 - DNA, 25 bp, Homo sapien
ttgactccgcaagacccttcccaag

SEQ ID NO: 913096 - DNA, 25 bp, Homo sapien
ataaggacaataaggatggccaaaa

SEQ ID NO: 913097 - DNA, 25 bp, Homo sapien
gcaggagtaactgctccacccttga

SEQ ID NO: 913098 - DNA, 25 bp, Homo sapien
acataataatgtggcccctgtggca

SEQ ID NO: 913099 - DNA, 25 bp, Homo sapien
ggcttcatttgcgtcacagggacaa

SEQ ID NO: 913100 - DNA, 25 bp, Homo sapien
tgtacggagagactacagagctgcc

SEQ ID NO: 913101 - DNA, 25 bp, Homo sapien
gatgtcaacccgtctgctcagagag

SEQ ID NO: 913102 - DNA, 25 bp, Homo sapien
ccccaagctgatgaagatgtgatga

SEQ ID NO: 913103 - DNA, 25 bp, Homo sapien
gaatctgacagacccacacttgttg

SEQ ID NO: 913104 - DNA, 25 bp, Homo sapien
gacaaggcggagacagaaatctaac

SEQ ID NO: 913105 - DNA, 25 bp, Homo sapien
tagaaatgtccagcactaggcagtt

SEQ ID NO: 913106 - DNA, 25 bp, Homo sapien
ttccaggcaatgctggtacctctgc

SEQ ID NO: 913107 - DNA, 25 bp, Homo sapien
ttggcactctatagaggttgccccg

SEQ ID NO: 913108 - DNA, 25 bp, Homo sapien
tctatagaggttgccccggacgctg

SEQ ID NO: 913109 - DNA, 25 bp, Homo sapien
gcttggttccaggcaatgctggtac

SEQ ID NO: 913110 - DNA, 25 bp, Homo sapien
tcagagtcctagaacaatggtgccc

SEQ ID NO: 913111 - DNA, 25 bp, Homo sapien
tcagcaccggcaagtttcaaaccag

SEQ ID NO: 913112 - DNA, 25 bp, Homo sapien
caaattcagttagtgccaggagcca

SEQ ID NO: 913113 - DNA, 25 bp, Homo sapien
gatagtcgtatgtgcttaacctccc

SEQ ID NO: 913114 - DNA, 25 bp, Homo sapien
cagtcccataaggatcctcatagcc

SEQ ID NO: 913115 - DNA, 25 bp, Homo sapien
agtcccataaggatcctcatagcca

SEQ ID NO: 913116 - DNA, 25 bp, Homo sapien
gatcctcatagccacaagcctgcag

SEQ ID NO: 913117 - DNA, 25 bp, Homo sapien
caactggagaagctacactctctac

SEQ ID NO: 913118 - DNA, 25 bp, Homo sapien
ctgaaatgggacatcgggcactcca

SEQ ID NO: 913119 - DNA, 25 bp, Homo sapien
tcccttcaactggagaagctacact

SEQ ID NO: 913120 - DNA, 25 bp, Homo sapien
tccagggaggctcccttcaactgga

SEQ ID NO: 913121 - DNA, 25 bp, Homo sapien
cacagggcaccaggaacggtgatca

SEQ ID NO: 913122 - DNA, 25 bp, Homo sapien
cagctcaggatgagttgtggaaacc

SEQ ID NO: 913123 - DNA, 25 bp, Homo sapien
ccaggaggctcgactcagggaccag

SEQ ID NO: 913124 - DNA, 25 bp, Homo sapien
acaaacacgggttctgggagcacaa

SEQ ID NO: 913125 - DNA, 25 bp, Homo sapien
gcttttgctcacactgcctgtcaga

SEQ ID NO: 913126 - DNA, 25 bp, Homo sapien
caaggtggtgttgggtatatgtttc

SEQ ID NO: 913127 - DNA, 25 bp, Homo sapien
tgggcagcctcctcttgatcaaggt

SEQ ID NO: 913128 - DNA, 25 bp, Homo sapien
gaggtgccaactagggacgctctgc

SEQ ID NO: 913129 - DNA, 25 bp, Homo sapien
tcggtcgtgtcctccgacgcaaaac

SEQ ID NO: 913130 - DNA, 25 bp, Homo sapien
gcgagtccagagagacgatgtctga

SEQ ID NO: 913131 - DNA, 25 bp, Homo sapien
tgagttctcagagccattcttctcc

SEQ ID NO: 913132 - DNA, 25 bp, Homo sapien
gtcctggtcactgcagtcttcctgg

SEQ ID NO: 913133 - DNA, 25 bp, Homo sapien
caactgacacggtctcctccgcctc

SEQ ID NO: 913134 - DNA, 25 bp, Homo sapien
gcacctgcggggctccatccgggct

SEQ ID NO: 913135 - DNA, 25 bp, Homo sapien
tgccaactgacacggtctcctccgc

SEQ ID NO: 913136 - DNA, 25 bp, Homo sapien
ctgccaactgacacggtctcctccg

SEQ ID NO: 913137 - DNA, 25 bp, Homo sapien
ctgccagaccccaggggcaggctta

SEQ ID NO: 913138 - DNA, 25 bp, Homo sapien
aggtcagcccaaaccactctggcgt

SEQ ID NO: 913139 - DNA, 25 bp, Homo sapien
ggcaaggacaggtcagcccaaacca

SEQ ID NO: 913140 - DNA, 25 bp, Homo sapien
acacggcaaggacaggtcagcccaa

SEQ ID NO: 913141 - DNA, 25 bp, Homo sapien
gacaagacacggcaaggacaggtca

SEQ ID NO: 913142 - DNA, 25 bp, Homo sapien
tgaatgcagtgatgctggtctgctg

SEQ ID NO: 913143 - DNA, 25 bp, Homo sapien
gggctagactcttgttcaagacaaa

SEQ ID NO: 913144 - DNA, 25 bp, Homo sapien
tgatgctggtctgctgcgacctcgc

SEQ ID NO: 913145 - DNA, 25 bp, Homo sapien
tattgagaagaaacgtcgctgtagc

SEQ ID NO: 913146 - DNA, 25 bp, Homo sapien
gaagggacagacacgtacgcaaaga

SEQ ID NO: 913147 - DNA, 25 bp, Homo sapien
tctcggtgtgctcccataggcagag

SEQ ID NO: 913148 - DNA, 25 bp, Homo sapien
cctgaatgtgaacggccctgtgaca

SEQ ID NO: 913149 - DNA, 25 bp, Homo sapien
gacagtgctgtatggtcacaccaac

SEQ ID NO: 913150 - DNA, 25 bp, Homo sapien
ccctctccagggattatcgctgagg

SEQ ID NO: 913151 - DNA, 25 bp, Homo sapien
ggattatcgctgaggcgcaaagtga

SEQ ID NO: 913152 - DNA, 25 bp, Homo sapien
gcgcaaagtgaccttaacaaatgtg

SEQ ID NO: 913153 - DNA, 25 bp, Homo sapien
gctgaggcgcaaagtgaccttaaca

SEQ ID NO: 913154 - DNA, 25 bp, Homo sapien
ggccacagccctgcgacaccattca

SEQ ID NO: 913155 - DNA, 25 bp, Homo sapien
ctgctctcaggaggtttatctgcgt

SEQ ID NO: 913156 - DNA, 25 bp, Homo sapien
catgccattggtgcagaagcaggtg

SEQ ID NO: 913157 - DNA, 25 bp, Homo sapien
tccatgtggataatcttcccatggc

SEQ ID NO: 913158 - DNA, 25 bp, Homo sapien
gatccctcctttccgaggtctgctc

SEQ ID NO: 913159 - DNA, 25 bp, Homo sapien
ctcctttccgaggtctgctctgtcc

SEQ ID NO: 913160 - DNA, 25 bp, Homo sapien
ctggtgagctgtcagagagagcaca

SEQ ID NO: 913161 - DNA, 25 bp, Homo sapien
gaagccccaacctgtgttggtgtga

SEQ ID NO: 913162 - DNA, 25 bp, Homo sapien
gaagtgtggggcagtggatggccat

SEQ ID NO: 913163 - DNA, 25 bp, Homo sapien
gagggaagtgtggggcagtggatgg

SEQ ID NO: 913164 - DNA, 25 bp, Homo sapien
ctttgagggaagtgtggggcagtgg

SEQ ID NO: 913165 - DNA, 25 bp, Homo sapien
gggaagtgtggggcagtggatggcc

SEQ ID NO: 913166 - DNA, 25 bp, Homo sapien
agaacaaagctggtgtcttagtttt

SEQ ID NO: 913167 - DNA, 25 bp, Homo sapien
caaagctggtgtcttagttttcatt

SEQ ID NO: 913168 - DNA, 25 bp, Homo sapien
agctggtgtcttagttttcattgtc

SEQ ID NO: 913169 - DNA, 25 bp, Homo sapien
aacaaagctggtgtcttagttttca

SEQ ID NO: 913170 - DNA, 25 bp, Homo sapien
ggccaatcttagcttctcgtctttg

SEQ ID NO: 913171 - DNA, 25 bp, Homo sapien
tagcttctcgtctttgtgtctctgc

SEQ ID NO: 913172 - DNA, 25 bp, Homo sapien
gggcccggccaatcttagcttctcg

SEQ ID NO: 913173 - DNA, 25 bp, Homo sapien
aatcttagcttctcgtctttgtgtc

SEQ ID NO: 913174 - DNA, 25 bp, Homo sapien
gagatggccatgtttcaggtgaact

SEQ ID NO: 913175 - DNA, 25 bp, Homo sapien
gaaggtgaaggactcttcatgggcc

SEQ ID NO: 913176 - DNA, 25 bp, Homo sapien
cagttcccgttttgctgtgcaggcc

SEQ ID NO: 913177 - DNA, 25 bp, Homo sapien
tcatgggccttcctcgtatgtgtgc

SEQ ID NO: 913178 - DNA, 25 bp, Homo sapien
tccccagccggagttctcagaacaa

SEQ ID NO: 913179 - DNA, 25 bp, Homo sapien
atccttcctggactcgcaaagccca

SEQ ID NO: 913180 - DNA, 25 bp, Homo sapien
tgaaagtccttatcttcccgcaagg

SEQ ID NO: 913181 - DNA, 25 bp, Homo sapien
tcctccatgaggttggtgtctccag

SEQ ID NO: 913182 - DNA, 25 bp, Homo sapien
cagccttagggtttcagggtctgtc

SEQ ID NO: 913183 - DNA, 25 bp, Homo sapien
gcactttgtactcaacagattaaag

SEQ ID NO: 913184 - DNA, 25 bp, Homo sapien
gtttgaagaaaatcagatacattgc

SEQ ID NO: 913185 - DNA, 25 bp, Homo sapien
aacaattatgggtaccgtgactcgc

SEQ ID NO: 913186 - DNA, 25 bp, Homo sapien
atccaggcatggtagagcgttcttg

SEQ ID NO: 913187 - DNA, 25 bp, Homo sapien
cgtcatcttattatcccaggccggg

SEQ ID NO: 913188 - DNA, 25 bp, Homo sapien
actgtgcggattcaactgtggcctc

SEQ ID NO: 913189 - DNA, 25 bp, Homo sapien
cctacaggctgataatggcaggtcc

SEQ ID NO: 913190 - DNA, 25 bp, Homo sapien
cactcaggagcttcatggagaggcg

SEQ ID NO: 913191 - DNA, 25 bp, Homo sapien
cattagtggtcatgatctttagaaa

SEQ ID NO: 913192 - DNA, 25 bp, Homo sapien
ttcattagtggtcatgatctttaga

SEQ ID NO: 913193 - DNA, 25 bp, Homo sapien
cattcattagtggtcatgatcttta

SEQ ID NO: 913194 - DNA, 25 bp, Homo sapien
tcattcattagtggtcatgatcttt

SEQ ID NO: 913195 - DNA, 25 bp, Homo sapien
ggatgcctccatgagtcgatctgat

SEQ ID NO: 913196 - DNA, 25 bp, Homo sapien
gtctctgagcacatgaacaccagcc

SEQ ID NO: 913197 - DNA, 25 bp, Homo sapien
cctccatgcctgtgtaggattgaaa

SEQ ID NO: 913198 - DNA, 25 bp, Homo sapien
tcatcatgggtcctgccgtaagctc

SEQ ID NO: 913199 - DNA, 25 bp, Homo sapien
aggacagcagtgtcatgccagttgg

SEQ ID NO: 913200 - DNA, 25 bp, Homo sapien
tgcattttcggttgtatacaggaca

SEQ ID NO: 913201 - DNA, 25 bp, Homo sapien
cggttgtatacaggacagcagtgtc

SEQ ID NO: 913202 - DNA, 25 bp, Homo sapien
cagttggaattgtgaccttgttttg

SEQ ID NO: 913203 - DNA, 25 bp, Homo sapien
cgctgtgggcaggcatcctatctgc

SEQ ID NO: 913204 - DNA, 25 bp, Homo sapien
tgggcaggcatcctatctgctgagg

SEQ ID NO: 913205 - DNA, 25 bp, Homo sapien
tgtgggcaggcatcctatctgctga

SEQ ID NO: 913206 - DNA, 25 bp, Homo sapien
gctgtgggcaggcatcctatctgct

SEQ ID NO: 913207 - DNA, 25 bp, Homo sapien
cctgccatcccaggagtcgtgcctg

SEQ ID NO: 913208 - DNA, 25 bp, Homo sapien
tgccatcccaggagtcgtgcctgcc

SEQ ID NO: 913209 - DNA, 25 bp, Homo sapien
agcctgccatcccaggagtcgtgcc

SEQ ID NO: 913210 - DNA, 25 bp, Homo sapien
atcccaggagtcgtgcctgccagca

SEQ ID NO: 913211 - DNA, 25 bp, Homo sapien
tggcatgagcaaggctgctggtccc

SEQ ID NO: 913212 - DNA, 25 bp, Homo sapien
ggctgtgagacacccgtggagagcg

SEQ ID NO: 913213 - DNA, 25 bp, Homo sapien
ggaagaggctgtgagacacccgtgg

SEQ ID NO: 913214 - DNA, 25 bp, Homo sapien
gtggcatgagcaaggctgctggtcc

SEQ ID NO: 913215 - DNA, 25 bp, Homo sapien
cccggggctgtggtattcagaagca

SEQ ID NO: 913216 - DNA, 25 bp, Homo sapien
gggctgtggtattcagaagcaagct

SEQ ID NO: 913217 - DNA, 25 bp, Homo sapien
cagaagtcttatcacagcttcagct

SEQ ID NO: 913218 - DNA, 25 bp, Homo sapien
cagaagcaagctcagaagtcttatc

SEQ ID NO: 913219 - DNA, 25 bp, Homo sapien
tccttcctctgtggacacagggaat

SEQ ID NO: 913220 - DNA, 25 bp, Homo sapien
ttcctctgtggacacagggaatggc

SEQ ID NO: 913221 - DNA, 25 bp, Homo sapien
cctctgtggacacagggaatggctt

SEQ ID NO: 913222 - DNA, 25 bp, Homo sapien
ccttcctctgtggacacagggaatg

SEQ ID NO: 913223 - DNA, 25 bp, Homo sapien
ctgctgccaagctatgctcaaggct

SEQ ID NO: 913224 - DNA, 25 bp, Homo sapien
caagctatgctcaaggcttacttga

SEQ ID NO: 913225 - DNA, 25 bp, Homo sapien
ctgacttttaatattggcaacttta

SEQ ID NO: 913226 - DNA, 25 bp, Homo sapien
gatgtgagccctttgggaaggctct

SEQ ID NO: 913227 - DNA, 25 bp, Homo sapien
caacatggtctccagggtgaaacta

SEQ ID NO: 913228 - DNA, 25 bp, Homo sapien
gacctgtaacaagggatgggttcta

SEQ ID NO: 913229 - DNA, 25 bp, Homo sapien
tctagttagaaaacgtgagctacca

SEQ ID NO: 913230 - DNA, 25 bp, Homo sapien
cagcatgctcaattgtccactggca

SEQ ID NO: 913231 - DNA, 25 bp, Homo sapien
ccacaggtagtaaaatccaaggcca

SEQ ID NO: 913232 - DNA, 25 bp, Homo sapien
tttacctactctgcctgtcttggga

SEQ ID NO: 913233 - DNA, 25 bp, Homo sapien
gacaatgcagttgaggtgactagct

SEQ ID NO: 913234 - DNA, 25 bp, Homo sapien
tttcattgtgatcagccaggcaaca

SEQ ID NO: 913235 - DNA, 25 bp, Homo sapien
aggcccgtccatcagaagcgcttgg

SEQ ID NO: 913236 - DNA, 25 bp, Homo sapien
ggcacttagttttaccaggtagaca

SEQ ID NO: 913237 - DNA, 25 bp, Homo sapien
cctgagtagggaatgacgcacagca

SEQ ID NO: 913238 - DNA, 25 bp, Homo sapien
caatgagcccttttatcctgaaagg

SEQ ID NO: 913239 - DNA, 25 bp, Homo sapien
gactgacctgtggtgcaaagggcta

SEQ ID NO: 913240 - DNA, 25 bp, Homo sapien
tccaagtacctgtggagcaaactcc

SEQ ID NO: 913241 - DNA, 25 bp, Homo sapien
tgcctgagtgcacatcagcacccaa

SEQ ID NO: 913242 - DNA, 25 bp, Homo sapien
gctgttttctctagtgggagactga

SEQ ID NO: 913243 - DNA, 25 bp, Homo sapien
caagcagcacatggctgttcaccga

SEQ ID NO: 913244 - DNA, 25 bp, Homo sapien
caaatatttcaagctgtgccacaag

SEQ ID NO: 913245 - DNA, 25 bp, Homo sapien
tctggtccccaagtgtagagatagg

SEQ ID NO: 913246 - DNA, 25 bp, Homo sapien
tctagattcgcaattcgcagttcct

SEQ ID NO: 913247 - DNA, 25 bp, Homo sapien
taagtacagtcagcattcgtggcaa

SEQ ID NO: 913248 - DNA, 25 bp, Homo sapien
gtcagcattcgtggcaagaggctac

SEQ ID NO: 913249 - DNA, 25 bp, Homo sapien
tctattccttagataggagtcacta

SEQ ID NO: 913250 - DNA, 25 bp, Homo sapien
tccttagataggagtcactaagtac

SEQ ID NO: 913251 - DNA, 25 bp, Homo sapien
gtctggttttctctccgccacttcg

SEQ ID NO: 913252 - DNA, 25 bp, Homo sapien
aatgaactggtatggagttggcaag

SEQ ID NO: 913253 - DNA, 25 bp, Homo sapien
tctccttccggctcagacctgtcca

SEQ ID NO: 913254 - DNA, 25 bp, Homo sapien
cacaaggcaagacgaaggtgagtct

SEQ ID NO: 913255 - DNA, 25 bp, Homo sapien
aagggcagcaggtggggaggttcca

SEQ ID NO: 913256 - DNA, 25 bp, Homo sapien
cagcaggtggggaggttccactgct

SEQ ID NO: 913257 - DNA, 25 bp, Homo sapien
gggcagcaggtggggaggttccact

SEQ ID NO: 913258 - DNA, 25 bp, Homo sapien
gcagcaggtggggaggttccactgc

SEQ ID NO: 913259 - DNA, 25 bp, Homo sapien
tgccttggtaagtacccctcccaca

SEQ ID NO: 913260 - DNA, 25 bp, Homo sapien
cacatcttgtctgcccgttgcccca

SEQ ID NO: 913261 - DNA, 25 bp, Homo sapien
atgctgccttggtaagtacccctcc

SEQ ID NO: 913262 - DNA, 25 bp, Homo sapien
tggtaagtacccctcccacatcttg

SEQ ID NO: 913263 - DNA, 25 bp, Homo sapien
agtgcgatctctacaggtgtgccca

SEQ ID NO: 913264 - DNA, 25 bp, Homo sapien
catccagatcacacgacggctgtgc

SEQ ID NO: 913265 - DNA, 25 bp, Homo sapien
ggctgtgccggacagctgtctctct

SEQ ID NO: 913266 - DNA, 25 bp, Homo sapien
gaacactggctcctagctgacatct

SEQ ID NO: 913267 - DNA, 25 bp, Homo sapien
acagttaacacagtcggaatgaagc

SEQ ID NO: 913268 - DNA, 25 bp, Homo sapien
taacacagtcggaatgaagcaagag

SEQ ID NO: 913269 - DNA, 25 bp, Homo sapien
agttaacacagtcggaatgaagcaa

SEQ ID NO: 913270 - DNA, 25 bp, Homo sapien
ttaacacagtcggaatgaagcaaga

SEQ ID NO: 913271 - DNA, 25 bp, Homo sapien
gtatcgggtctgaggcctcggaacc

SEQ ID NO: 913272 - DNA, 25 bp, Homo sapien
ggtatcgggtctgaggcctcggaac

SEQ ID NO: 913273 - DNA, 25 bp, Homo sapien
tgggtatcgggtctgaggcctcgga

SEQ ID NO: 913274 - DNA, 25 bp, Homo sapien
tttgggtatcgggtctgaggcctcg

SEQ ID NO: 913275 - DNA, 25 bp, Homo sapien
tgggggaagcactaactggggtgga

SEQ ID NO: 913276 - DNA, 25 bp, Homo sapien
gcactaactggggtggaccccgagc

SEQ ID NO: 913277 - DNA, 25 bp, Homo sapien
accccgagcagtgcctctgggaggc

SEQ ID NO: 913278 - DNA, 25 bp, Homo sapien
aggcttttgtggcacctgccgtcca

SEQ ID NO: 913279 - DNA, 25 bp, Homo sapien
gggaaagacgctgacaaactgccac

SEQ ID NO: 913280 - DNA, 25 bp, Homo sapien
gagcactgacacacgccattcttgg

SEQ ID NO: 913281 - DNA, 25 bp, Homo sapien
tcttaaggtaactgactcccaggct

SEQ ID NO: 913282 - DNA, 25 bp, Homo sapien
caaggcagccacttatctcagaagg

SEQ ID NO: 913283 - DNA, 25 bp, Homo sapien
taatgcccaccaaatactgctagta

SEQ ID NO: 913284 - DNA, 25 bp, Homo sapien
ctgctagtaagatatgaagtgaact

SEQ ID NO: 913285 - DNA, 25 bp, Homo sapien
cagagcaagcatccccgcatgcaga

SEQ ID NO: 913286 - DNA, 25 bp, Homo sapien
cattatggatgaggccactgcagga

SEQ ID NO: 913287 - DNA, 25 bp, Homo sapien
tgttctcctccttatcctcagtgcg

SEQ ID NO: 913288 - DNA, 25 bp, Homo sapien
cctccttatcctcagtgcggttggg

SEQ ID NO: 913289 - DNA, 25 bp, Homo sapien
tctcctccttatcctcagtgcggtt

SEQ ID NO: 913290 - DNA, 25 bp, Homo sapien
gggagctggcgctcgccgcttcttc

SEQ ID NO: 913291 - DNA, 25 bp, Homo sapien
tggcaataacaaattaaacttctta

SEQ ID NO: 913292 - DNA, 25 bp, Homo sapien
cacactttgaatgcctgggagctac

SEQ ID NO: 913293 - DNA, 25 bp, Homo sapien
aacccagtatcgctcagtgtctgca

SEQ ID NO: 913294 - DNA, 25 bp, Homo sapien
gaaggcacaggaccataggcaagct

SEQ ID NO: 913295 - DNA, 25 bp, Homo sapien
gagcactgatgggaaactggcacac

SEQ ID NO: 913296 - DNA, 25 bp, Homo sapien
tgtaagaagccagtccgtaaaggct

SEQ ID NO: 913297 - DNA, 25 bp, Homo sapien
taagagagctcagaagctggccgca

SEQ ID NO: 913298 - DNA, 25 bp, Homo sapien
gctcactgcttatccctcgggagga

SEQ ID NO: 913299 - DNA, 25 bp, Homo sapien
tggccgcagtgccagaaaatctgca

SEQ ID NO: 913300 - DNA, 25 bp, Homo sapien
cttttagaagccctgactcgacctt

SEQ ID NO: 913301 - DNA, 25 bp, Homo sapien
tgtcatctggttagctcacattcgg

SEQ ID NO: 913302 - DNA, 25 bp, Homo sapien
tagcccactgttctaacttgtaaga

SEQ ID NO: 913303 - DNA, 25 bp, Homo sapien
tgtggtctatacacagagtggaaca

SEQ ID NO: 913304 - DNA, 25 bp, Homo sapien
taagctctagagatccgctgcacag

SEQ ID NO: 913305 - DNA, 25 bp, Homo sapien
gatctcatgttcagtgttcctacca

SEQ ID NO: 913306 - DNA, 25 bp, Homo sapien
tgtggtgtccatgtgctcttagcaa

SEQ ID NO: 913307 - DNA, 25 bp, Homo sapien
cactgatgcaggatgaataagctct

SEQ ID NO: 913308 - DNA, 25 bp, Homo sapien
tctgctgtttttcgtgtctccgagc

SEQ ID NO: 913309 - DNA, 25 bp, Homo sapien
gatcttccaagaccgccattaaaag

SEQ ID NO: 913310 - DNA, 25 bp, Homo sapien
gctgtttttcgtgtctccgagccca

SEQ ID NO: 913311 - DNA, 25 bp, Homo sapien
ccgggtgtgcctgcctacaagacgc

SEQ ID NO: 913312 - DNA, 25 bp, Homo sapien
aatactcacgtgcatggcttggtgc

SEQ ID NO: 913313 - DNA, 25 bp, Homo sapien
cactctcctggtggcatgagtggag

SEQ ID NO: 913314 - DNA, 25 bp, Homo sapien
gaatacaccacgctttatgtgctgg

SEQ ID NO: 913315 - DNA, 25 bp, Homo sapien
agtggcactcggtgtgaatacacca

SEQ ID NO: 913316 - DNA, 25 bp, Homo sapien
ctgcatctgcggacccttctggata

SEQ ID NO: 913317 - DNA, 25 bp, Homo sapien
gctccaactggttctgcatcatcat

SEQ ID NO: 913318 - DNA, 25 bp, Homo sapien
acaactgccagtgcggttcctgtag

SEQ ID NO: 913319 - DNA, 25 bp, Homo sapien
atcatctgcatctgcggacccttct

SEQ ID NO: 913320 - DNA, 25 bp, Homo sapien
cagggacatatggtaaagtgtgttc

SEQ ID NO: 913321 - DNA, 25 bp, Homo sapien
tcacagggacatatggtaaagtgtg

SEQ ID NO: 913322 - DNA, 25 bp, Homo sapien
cacagggacatatggtaaagtgtgt

SEQ ID NO: 913323 - DNA, 25 bp, Homo sapien
ttcacagggacatatggtaaagtgt

SEQ ID NO: 913324 - DNA, 25 bp, Homo sapien
tgctacccatctagtcactccagtt

SEQ ID NO: 913325 - DNA, 25 bp, Homo sapien
agttggtagtgttggtcagatcctc

SEQ ID NO: 913326 - DNA, 25 bp, Homo sapien
ggtaaacataccacattgtactaga

SEQ ID NO: 913327 - DNA, 25 bp, Homo sapien
tgctgttctccaatatgatggtgga

SEQ ID NO: 913328 - DNA, 25 bp, Homo sapien
tgttaccacagttacaagcagtcgt

SEQ ID NO: 913329 - DNA, 25 bp, Homo sapien
gtaaattactttgtcttcacgggca

SEQ ID NO: 913330 - DNA, 25 bp, Homo sapien
tcacgggcaataataagctgactgg

SEQ ID NO: 913331 - DNA, 25 bp, Homo sapien
ctctttagttcttagccaggctgct

SEQ ID NO: 913332 - DNA, 25 bp, Homo sapien
tcctgctggccagtgtacttccaca

SEQ ID NO: 913333 - DNA, 25 bp, Homo sapien
ctgcatcatgggaccagttggccga

SEQ ID NO: 913334 - DNA, 25 bp, Homo sapien
gccgacgactggatgacggtgcctt

SEQ ID NO: 913335 - DNA, 25 bp, Homo sapien
gatgacggtgcctttgctgtcttcc

SEQ ID NO: 913336 - DNA, 25 bp, Homo sapien
tgttttcagaacatccgcgtactca

SEQ ID NO: 913337 - DNA, 25 bp, Homo sapien
actgagacgtcaccccactgtcttg

SEQ ID NO: 913338 - DNA, 25 bp, Homo sapien
tctcttgccccaatatggcctgaga

SEQ ID NO: 913339 - DNA, 25 bp, Homo sapien
gatgtagcgattgtttcccagtgaa

SEQ ID NO: 913340 - DNA, 25 bp, Homo sapien
ttggacctggacgtgggactcctct

SEQ ID NO: 913341 - DNA, 25 bp, Homo sapien
tactcactgaaggaacagatgtggc

SEQ ID NO: 913342 - DNA, 25 bp, Homo sapien
gatgtggccagcaccgaatagagcg

SEQ ID NO: 913343 - DNA, 25 bp, Homo sapien
gatctggacgtcgtcagagaccctg

SEQ ID NO: 913344 - DNA, 25 bp, Homo sapien
aatgtctactgagggtccaccacac

SEQ ID NO: 913345 - DNA, 25 bp, Homo sapien
gagggccctggatctgtctcaacct

SEQ ID NO: 913346 - DNA, 25 bp, Homo sapien
gggaacaagtcacggtcccaagctg

SEQ ID NO: 913347 - DNA, 25 bp, Homo sapien
gaggccatgttcacccgctcataaa

SEQ ID NO: 913348 - DNA, 25 bp, Homo sapien
aacacagattagtaaacttccacaa

SEQ ID NO: 913349 - DNA, 25 bp, Homo sapien
gtcccaatgcaataatcttgagatc

SEQ ID NO: 913350 - DNA, 25 bp, Homo sapien
ttgagatcacagagaaacagacttc

SEQ ID NO: 913351 - DNA, 25 bp, Homo sapien
cacagattagtaaacttccacaagt

SEQ ID NO: 913352 - DNA, 25 bp, Homo sapien
tgcaacccccaccttccagtttcaa

SEQ ID NO: 913353 - DNA, 25 bp, Homo sapien
cccccaccttccagtttcaagtgat

SEQ ID NO: 913354 - DNA, 25 bp, Homo sapien
ccggagcggcagcacttaagatgca

SEQ ID NO: 913355 - DNA, 25 bp, Homo sapien
taacccaaatgcaagagcagcgagc

SEQ ID NO: 913356 - DNA, 25 bp, Homo sapien
ccagatgagggttccctgggtccca

SEQ ID NO: 913357 - DNA, 25 bp, Homo sapien
tacacagcacgatggtgagaggaca

SEQ ID NO: 913358 - DNA, 25 bp, Homo sapien
catgggatctgagaagagcattcgg

SEQ ID NO: 913359 - DNA, 25 bp, Homo sapien
gagccatgggatctgagaagagcat

SEQ ID NO: 913360 - DNA, 25 bp, Homo sapien
gaagagcattcggtcacctccaggc

SEQ ID NO: 913361 - DNA, 25 bp, Homo sapien
gccatgggatctgagaagagcattc

SEQ ID NO: 913362 - DNA, 25 bp, Homo sapien
acttcacggacacccctgagatgct

SEQ ID NO: 913363 - DNA, 25 bp, Homo sapien
gggctcggcgcttcttcatctccga

SEQ ID NO: 913364 - DNA, 25 bp, Homo sapien
gagatgctgcccagcgagagggatg

SEQ ID NO: 913365 - DNA, 25 bp, Homo sapien
ccagcgtaagagaacgtgagtgcat

SEQ ID NO: 913366 - DNA, 25 bp, Homo sapien
gcttgaacggcagctgtttctacag

SEQ ID NO: 913367 - DNA, 25 bp, Homo sapien
gtttctacagtcagcttgaatggtc

SEQ ID NO: 913368 - DNA, 25 bp, Homo sapien
gttccaatccgtccacctgagcttg

SEQ ID NO: 913369 - DNA, 25 bp, Homo sapien
atgaagacaaagttccaatccgtcc

SEQ ID NO: 913370 - DNA, 25 bp, Homo sapien
cactgatagccaattaactccttac

SEQ ID NO: 913371 - DNA, 25 bp, Homo sapien
aagacaatgcaaaactctctgtgtc

SEQ ID NO: 913372 - DNA, 25 bp, Homo sapien
tcagtgatttgactctcatacgcgc

SEQ ID NO: 913373 - DNA, 25 bp, Homo sapien
tgtgtccatgtcaccacaccactga

SEQ ID NO: 913374 - DNA, 25 bp, Homo sapien
cataaaccagatgaggcgaacgggc

SEQ ID NO: 913375 - DNA, 25 bp, Homo sapien
cactgattccgaggaagcggcaaag

SEQ ID NO: 913376 - DNA, 25 bp, Homo sapien
cagtcttgggtaagggcaaggccaa

SEQ ID NO: 913377 - DNA, 25 bp, Homo sapien
caggtgttgacaggactcaaggcag

SEQ ID NO: 913378 - DNA, 25 bp, Homo sapien
taggagggctgtgatccattgggaa

SEQ ID NO: 913379 - DNA, 25 bp, Homo sapien
aagttggagagcagatacggctgct

SEQ ID NO: 913380 - DNA, 25 bp, Homo sapien
ccccaggaggggtgtgacattctca

SEQ ID NO: 913381 - DNA, 25 bp, Homo sapien
ctgtgatccattgggaagttggaga

SEQ ID NO: 913382 - DNA, 25 bp, Homo sapien
cagcagggggttgctcattaacctg

SEQ ID NO: 913383 - DNA, 25 bp, Homo sapien
cagggggttgctcattaacctgcag

SEQ ID NO: 913384 - DNA, 25 bp, Homo sapien
gccagcagggggttgctcattaacc

SEQ ID NO: 913385 - DNA, 25 bp, Homo sapien
gagccagcagggggttgctcattaa

SEQ ID NO: 913386 - DNA, 25 bp, Homo sapien
catctcctgatgcttgccggagggc

SEQ ID NO: 913387 - DNA, 25 bp, Homo sapien
acttctcatgaacagagtcatctcc

SEQ ID NO: 913388 - DNA, 25 bp, Homo sapien
cacttctcatgaacagagtcatctc

SEQ ID NO: 913389 - DNA, 25 bp, Homo sapien
ctcctgatgcttgccggagggctgc

SEQ ID NO: 913390 - DNA, 25 bp, Homo sapien
tggtcaaagacaggtctgtccaggc

SEQ ID NO: 913391 - DNA, 25 bp, Homo sapien
tgtggtcaaagacaggtctgtccag

SEQ ID NO: 913392 - DNA, 25 bp, Homo sapien
ggtcaaagacaggtctgtccaggct

SEQ ID NO: 913393 - DNA, 25 bp, Homo sapien
tcaaagacaggtctgtccaggctcc

SEQ ID NO: 913394 - DNA, 25 bp, Homo sapien
gagaaatagctagtcatttgttcag

SEQ ID NO: 913395 - DNA, 25 bp, Homo sapien
catggagggtcaaatattgagaaat

SEQ ID NO: 913396 - DNA, 25 bp, Homo sapien
tctcggatggcaaacattcttagcc

SEQ ID NO: 913397 - DNA, 25 bp, Homo sapien
ttgttcaggctatttttaaacacac

SEQ ID NO: 913398 - DNA, 25 bp, Homo sapien
cacacacacacaatgaactgtagtt

SEQ ID NO: 913399 - DNA, 25 bp, Homo sapien
acacacacacaatgaactgtagtta

SEQ ID NO: 913400 - DNA, 25 bp, Homo sapien
cacacacacacacaatgaactgtag

SEQ ID NO: 913401 - DNA, 25 bp, Homo sapien
acacacacacacaatgaactgtagt

SEQ ID NO: 913402 - DNA, 25 bp, Homo sapien
agcctgtaaccatcgctcaacagga

SEQ ID NO: 913403 - DNA, 25 bp, Homo sapien
gtaaccatcgctcaacaggaagaaa

SEQ ID NO: 913404 - DNA, 25 bp, Homo sapien
cggatggcggaagggcagggtcggg

SEQ ID NO: 913405 - DNA, 25 bp, Homo sapien
ctcacacgcgtccacagcctgtaac

SEQ ID NO: 913406 - DNA, 25 bp, Homo sapien
attttcaacaaaggtgccaagaaca

SEQ ID NO: 913407 - DNA, 25 bp, Homo sapien
cgaagtcattttcaacaaaggtgcc

SEQ ID NO: 913408 - DNA, 25 bp, Homo sapien
tttcaacaaaggtgccaagaacata

SEQ ID NO: 913409 - DNA, 25 bp, Homo sapien
tcaacaaaggtgccaagaacataca

SEQ ID NO: 913410 - DNA, 25 bp, Homo sapien
aagttccaagcaattagcggaagca

SEQ ID NO: 913411 - DNA, 25 bp, Homo sapien
tctggaaggtcgcgcaaagcaagaa

SEQ ID NO: 913412 - DNA, 25 bp, Homo sapien
gaaggtcgcgcaaagcaagaagttc

SEQ ID NO: 913413 - DNA, 25 bp, Homo sapien
agaagttccaagcaattagcggaag

SEQ ID NO: 913414 - DNA, 25 bp, Homo sapien
tcatcgctgtctgcacccgacagca

SEQ ID NO: 913415 - DNA, 25 bp, Homo sapien
tgtctgcacccgacagcacgagctg

SEQ ID NO: 913416 - DNA, 25 bp, Homo sapien
gtgtcctcatcgctgtctgcacccg

SEQ ID NO: 913417 - DNA, 25 bp, Homo sapien
tcgctgtctgcacccgacagcacga

SEQ ID NO: 913418 - DNA, 25 bp, Homo sapien
attacaagtgtgtatcaccacaccc

SEQ ID NO: 913419 - DNA, 25 bp, Homo sapien
gattacaagtgtgtatcaccacacc

SEQ ID NO: 913420 - DNA, 25 bp, Homo sapien
ttacaagtgtgtatcaccacaccca

SEQ ID NO: 913421 - DNA, 25 bp, Homo sapien
tctttatctgtctcatcattgccaa

SEQ ID NO: 913422 - DNA, 25 bp, Homo sapien
tctctttatctgtctcatcattgcc

SEQ ID NO: 913423 - DNA, 25 bp, Homo sapien
cttctctttatctgtctcatcattg

SEQ ID NO: 913424 - DNA, 25 bp, Homo sapien
ctttatctgtctcatcattgccaag

SEQ ID NO: 913425 - DNA, 25 bp, Homo sapien
aggagcaaaggtgcacatcctagcc

SEQ ID NO: 913426 - DNA, 25 bp, Homo sapien
ggagcaaaggtgcacatcctagcca

SEQ ID NO: 913427 - DNA, 25 bp, Homo sapien
gagcaaaggtgcacatcctagccac

SEQ ID NO: 913428 - DNA, 25 bp, Homo sapien
taaagttagttgcagcaagccctct

SEQ ID NO: 913429 - DNA, 25 bp, Homo sapien
caatgcatgtgtgcaaacgcgctgt

SEQ ID NO: 913430 - DNA, 25 bp, Homo sapien
catcgcacagtacccaaatcagagg

SEQ ID NO: 913431 - DNA, 25 bp, Homo sapien
cacttggttacatgcaggaggctcc

SEQ ID NO: 913432 - DNA, 25 bp, Homo sapien
tttgggagcaaagtaggagaactca

SEQ ID NO: 913433 - DNA, 25 bp, Homo sapien
ctcagtgttcccatcagccaaaatt

SEQ ID NO: 913434 - DNA, 25 bp, Homo sapien
gaagaagaactggtttgggagcaaa

SEQ ID NO: 913435 - DNA, 25 bp, Homo sapien
ggagaactcagtgttcccatcagcc

SEQ ID NO: 913436 - DNA, 25 bp, Homo sapien
accccagagccatgcatagtgcagc

SEQ ID NO: 913437 - DNA, 25 bp, Homo sapien
gagccatgcatagtgcagcctcaca

SEQ ID NO: 913438 - DNA, 25 bp, Homo sapien
catagtgcagcctcacagcgggagc

SEQ ID NO: 913439 - DNA, 25 bp, Homo sapien
atgcatagtgcagcctcacagcggg

SEQ ID NO: 913440 - DNA, 25 bp, Homo sapien
aaggctcggactgagttttgctcag

SEQ ID NO: 913441 - DNA, 25 bp, Homo sapien
gaaggctcggactgagttttgctca

SEQ ID NO: 913442 - DNA, 25 bp, Homo sapien
gctcaggagtggacgtctgtcccct

SEQ ID NO: 913443 - DNA, 25 bp, Homo sapien
gctaagcaccgctgaggacgcaggt

SEQ ID NO: 913444 - DNA, 25 bp, Homo sapien
caatgagagagtgaggtccagcttt

SEQ ID NO: 913445 - DNA, 25 bp, Homo sapien
ctttgagatgtgtgggagtccctga

SEQ ID NO: 913446 - DNA, 25 bp, Homo sapien
gattgaaagtaagggctcctccagc

SEQ ID NO: 913447 - DNA, 25 bp, Homo sapien
agaggattgaaagtaagggctcctc

SEQ ID NO: 913448 - DNA, 25 bp, Homo sapien
aggattgaaagtaagggctcctcca

SEQ ID NO: 913449 - DNA, 25 bp, Homo sapien
caagaggattgaaagtaagggctcc

SEQ ID NO: 913450 - DNA, 25 bp, Homo sapien
aaagggagcctcggagatggcctct

SEQ ID NO: 913451 - DNA, 25 bp, Homo sapien
caggcatttggcagggacggtaatc

SEQ ID NO: 913452 - DNA, 25 bp, Homo sapien
tcttttcgaatatttgacagtgagc

SEQ ID NO: 913453 - DNA, 25 bp, Homo sapien
tggcacaggcatggtccagacgaaa

SEQ ID NO: 913454 - DNA, 25 bp, Homo sapien
cttttacttatgtcgtggaagtttg

SEQ ID NO: 913455 - DNA, 25 bp, Homo sapien
tttacttatgtcgtggaagtttgca

SEQ ID NO: 913456 - DNA, 25 bp, Homo sapien
ttttacttatgtcgtggaagtttgc

SEQ ID NO: 913457 - DNA, 25 bp, Homo sapien
tcaacttgacttgcctggaacttca

SEQ ID NO: 913458 - DNA, 25 bp, Homo sapien
gacttgcctggaacttcatgtaccc

SEQ ID NO: 913459 - DNA, 25 bp, Homo sapien
tcttttttgcctacttcaacttgac

SEQ ID NO: 913460 - DNA, 25 bp, Homo sapien
tggaacttcatgtacccatctctcc

SEQ ID NO: 913461 - DNA, 25 bp, Homo sapien
gggacatgtacacgccgcgcatccg

SEQ ID NO: 913462 - DNA, 25 bp, Homo sapien
gtacacgccgcgcatccgtgtgatt

SEQ ID NO: 913463 - DNA, 25 bp, Homo sapien
gagccaacaggggacatgtacacgc

SEQ ID NO: 913464 - DNA, 25 bp, Homo sapien
ccgcgcatccgtgtgattatgggca

SEQ ID NO: 913465 - DNA, 25 bp, Homo sapien
tctgttgtcccacgcgtagagctcc

SEQ ID NO: 913466 - DNA, 25 bp, Homo sapien
tgttgtcccacgcgtagagctcctt

SEQ ID NO: 913467 - DNA, 25 bp, Homo sapien
gttgtcccacgcgtagagctccttt

SEQ ID NO: 913468 - DNA, 25 bp, Homo sapien
tgtcccacgcgtagagctcctttat

SEQ ID NO: 913469 - DNA, 25 bp, Homo sapien
ggaccaggcttaaccttctcttcag

SEQ ID NO: 913470 - DNA, 25 bp, Homo sapien
gggaccaggcttaaccttctcttca

SEQ ID NO: 913471 - DNA, 25 bp, Homo sapien
tgcctgcgattgcaggcaagcgcca

SEQ ID NO: 913472 - DNA, 25 bp, Homo sapien
cgagtgcctgcgattgcaggcaagc

SEQ ID NO: 913473 - DNA, 25 bp, Homo sapien
cctgcgattgcaggcaagcgccacc

SEQ ID NO: 913474 - DNA, 25 bp, Homo sapien
agtgcctgcgattgcaggcaagcgc

SEQ ID NO: 913475 - DNA, 25 bp, Homo sapien
gcagacacgacagtccacagagaac

SEQ ID NO: 913476 - DNA, 25 bp, Homo sapien
tcctgtgtatctgtgatgagcctgt

SEQ ID NO: 913477 - DNA, 25 bp, Homo sapien
gagaaccctcagcatagcgaacaga

SEQ ID NO: 913478 - DNA, 25 bp, Homo sapien
ttaaaaatgcgaacaccacaggctc

SEQ ID NO: 913479 - DNA, 25 bp, Homo sapien
attttcaaatgccaaactccaaaca

SEQ ID NO: 913480 - DNA, 25 bp, Homo sapien
cacgtctttgcacagcaaggtgtga

SEQ ID NO: 913481 - DNA, 25 bp, Homo sapien
caaggtgtgagggaatgccgtttct

SEQ ID NO: 913482 - DNA, 25 bp, Homo sapien
gctactttgcaccacgccctttaag

SEQ ID NO: 913483 - DNA, 25 bp, Homo sapien
cctccttcatgcgaaccaagttctg

SEQ ID NO: 913484 - DNA, 25 bp, Homo sapien
tgcgaaccaagttctgctgcgaccc

SEQ ID NO: 913485 - DNA, 25 bp, Homo sapien
aagttctgctgcgacccgagggccc

SEQ ID NO: 913486 - DNA, 25 bp, Homo sapien
cagcccactaggcaggaccacggtg

SEQ ID NO: 913487 - DNA, 25 bp, Homo sapien
tccacacggccaccgtggacagatg

SEQ ID NO: 913488 - DNA, 25 bp, Homo sapien
gtccacacggccaccgtggacagat

SEQ ID NO: 913489 - DNA, 25 bp, Homo sapien
ccacacggccaccgtggacagatgc

SEQ ID NO: 913490 - DNA, 25 bp, Homo sapien
gtgcgtgtgggcggcccgtgcatgc

SEQ ID NO: 913491 - DNA, 25 bp, Homo sapien
cgtgtgggcggcccgtgcatgcggg

SEQ ID NO: 913492 - DNA, 25 bp, Homo sapien
gcggcccgtgcatgcgggggcggcc

SEQ ID NO: 913493 - DNA, 25 bp, Homo sapien
ggcggcccgtgcatgcgggggcggc

SEQ ID NO: 913494 - DNA, 25 bp, Homo sapien
aacgctgttccaggagctaacggac

SEQ ID NO: 913495 - DNA, 25 bp, Homo sapien
tccaggagctaacggacagaaaccg

SEQ ID NO: 913496 - DNA, 25 bp, Homo sapien
agctaacggacagaaaccgctcctt

SEQ ID NO: 913497 - DNA, 25 bp, Homo sapien
gcacagccaacgctgttccaggagc

SEQ ID NO: 913498 - DNA, 25 bp, Homo sapien
tccgatccaattcagctagtgactt

SEQ ID NO: 913499 - DNA, 25 bp, Homo sapien
ccctgagaactagcagaggcatccg

SEQ ID NO: 913500 - DNA, 25 bp, Homo sapien
cagagtgaagcagtgccctgagaac

SEQ ID NO: 913501 - DNA, 25 bp, Homo sapien
tattcataaatgtgccacccgatgc

SEQ ID NO: 913502 - DNA, 25 bp, Homo sapien
tgaatttaaccgtgtccctgactgg

SEQ ID NO: 913503 - DNA, 25 bp, Homo sapien
agcccctgctgccttatctgtgcag

SEQ ID NO: 913504 - DNA, 25 bp, Homo sapien
ctgtgcaggctgcagtatcacctga

SEQ ID NO: 913505 - DNA, 25 bp, Homo sapien
agaagcaaggagtgtgcccccagct

SEQ ID NO: 913506 - DNA, 25 bp, Homo sapien
ctacgtggacaccacacctgcagca

SEQ ID NO: 913507 - DNA, 25 bp, Homo sapien
gcacactgccacctcgctgccacaa

SEQ ID NO: 913508 - DNA, 25 bp, Homo sapien
gacaccacacctgcagcacactgcc

SEQ ID NO: 913509 - DNA, 25 bp, Homo sapien
cacactgccacctcgctgccacaac

SEQ ID NO: 913510 - DNA, 25 bp, Homo sapien
catatgcagggctgggtcaagggcc

SEQ ID NO: 913511 - DNA, 25 bp, Homo sapien
tcaagggccacagacatggagctgc

SEQ ID NO: 913512 - DNA, 25 bp, Homo sapien
gaagctgcccgggagcactgtgatg

SEQ ID NO: 913513 - DNA, 25 bp, Homo sapien
aagtgcaggagcttgaaacaaatgc

SEQ ID NO: 913514 - DNA, 25 bp, Homo sapien
ctaaggagcgccagagggtggctgg

SEQ ID NO: 913515 - DNA, 25 bp, Homo sapien
gcaaagaagagaccctgcccctcat

SEQ ID NO: 913516 - DNA, 25 bp, Homo sapien
gagcatgtggcaccagacctgtagc

SEQ ID NO: 913517 - DNA, 25 bp, Homo sapien
accagaaggtatgctgaccaccagc

SEQ ID NO: 913518 - DNA, 25 bp, Homo sapien
gacctgtagcaccagaaggtatgct

SEQ ID NO: 913519 - DNA, 25 bp, Homo sapien
gacaggtcagggatctgaagggact

SEQ ID NO: 913520 - DNA, 25 bp, Homo sapien
tcctacgtccaagaacctcttgggc

SEQ ID NO: 913521 - DNA, 25 bp, Homo sapien
tgtgctgtgacagctgacaggtcag

SEQ ID NO: 913522 - DNA, 25 bp, Homo sapien
tggctaagcaagtgcagctgccctg

SEQ ID NO: 913523 - DNA, 25 bp, Homo sapien
gaaaaggaagttccacctgagcctg

SEQ ID NO: 913524 - DNA, 25 bp, Homo sapien
ggcatgcccctcaggtaccaaaggg

SEQ ID NO: 913525 - DNA, 25 bp, Homo sapien
agcctgatctgaccaagatggccca

SEQ ID NO: 913526 - DNA, 25 bp, Homo sapien
tctgttgacatcctcacaacctgcc

SEQ ID NO: 913527 - DNA, 25 bp, Homo sapien
gcttgttaaactcgccttggtggca

SEQ ID NO: 913528 - DNA, 25 bp, Homo sapien
cagctggttcatccaacaaggtacc

SEQ ID NO: 913529 - DNA, 25 bp, Homo sapien
tgggaggccctgtcgaatgccaaca

SEQ ID NO: 913530 - DNA, 25 bp, Homo sapien
caaggtacctgacaccgaggaaagc

SEQ ID NO: 913531 - DNA, 25 bp, Homo sapien
cgttcaagccaacgtgctgaggtgg

SEQ ID NO: 913532 - DNA, 25 bp, Homo sapien
gatgtaagagaacacgttcaagcca

SEQ ID NO: 913533 - DNA, 25 bp, Homo sapien
gggctattctggacgctattccatg

SEQ ID NO: 913534 - DNA, 25 bp, Homo sapien
ctaaggacggatgggcaaaacatgg

SEQ ID NO: 913535 - DNA, 25 bp, Homo sapien
agtgcacaacctgccaatgagaact

SEQ ID NO: 913536 - DNA, 25 bp, Homo sapien
tgttccactgcaaaatgtaaacaca

SEQ ID NO: 913537 - DNA, 25 bp, Homo sapien
taggccgcactccaaggagaatgtc

SEQ ID NO: 913538 - DNA, 25 bp, Homo sapien
taaacacaagaataggccgcactcc

SEQ ID NO: 913539 - DNA, 25 bp, Homo sapien
tgacaccaaaattcccctggtgctc

SEQ ID NO: 913540 - DNA, 25 bp, Homo sapien
tctatttgtggtagcaagatgggcc

SEQ ID NO: 913541 - DNA, 25 bp, Homo sapien
ccctggtgctcctcatcactgtgtt

SEQ ID NO: 913542 - DNA, 25 bp, Homo sapien
aaaattcccctggtgctcctcatca

SEQ ID NO: 913543 - DNA, 25 bp, Homo sapien
ttaatcctttcaatgcgtacaataa

SEQ ID NO: 913544 - DNA, 25 bp, Homo sapien
cattaatcctttcaatgcgtacaat

SEQ ID NO: 913545 - DNA, 25 bp, Homo sapien
taatcctttcaatgcgtacaataaa

SEQ ID NO: 913546 - DNA, 25 bp, Homo sapien
gtcattaatcctttcaatgcgtaca

SEQ ID NO: 913547 - DNA, 25 bp, Homo sapien
agtcatctgagatgcatcttgtcac

SEQ ID NO: 913548 - DNA, 25 bp, Homo sapien
tagtcatctgagatgcatcttgtca

SEQ ID NO: 913549 - DNA, 25 bp, Homo sapien
ctagtcatctgagatgcatcttgtc

SEQ ID NO: 913550 - DNA, 25 bp, Homo sapien
attccagtcgtttaacttgagccct

SEQ ID NO: 913551 - DNA, 25 bp, Homo sapien
ttctagagttgtagctactgatcat

SEQ ID NO: 913552 - DNA, 25 bp, Homo sapien
ctagagttgtagctactgatcatgc

SEQ ID NO: 913553 - DNA, 25 bp, Homo sapien
tctagagttgtagctactgatcatg

SEQ ID NO: 913554 - DNA, 25 bp, Homo sapien
tacaaacagttccacagcgaggtgg

SEQ ID NO: 913555 - DNA, 25 bp, Homo sapien
taggacagcctagtaagagcgcaca

SEQ ID NO: 913556 - DNA, 25 bp, Homo sapien
cgaaaccgtgtcagagtcagaagct

SEQ ID NO: 913557 - DNA, 25 bp, Homo sapien
ggaaccccaatgtctcaggcaggga

SEQ ID NO: 913558 - DNA, 25 bp, Homo sapien
ggaatcacattacatagccttaaga

SEQ ID NO: 913559 - DNA, 25 bp, Homo sapien
tgtagacatagacaaactgatctga

SEQ ID NO: 913560 - DNA, 25 bp, Homo sapien
tataacaattggataccctatgcca

SEQ ID NO: 913561 - DNA, 25 bp, Homo sapien
ggcaattaaatagacgaaagacagt

SEQ ID NO: 913562 - DNA, 25 bp, Homo sapien
tcctttgaggaaacgcaacttgtcc

SEQ ID NO: 913563 - DNA, 25 bp, Homo sapien
gccaaaaacaatgacgcctcctttg

SEQ ID NO: 913564 - DNA, 25 bp, Homo sapien
cagaaacataaagaccgaactgatg

SEQ ID NO: 913565 - DNA, 25 bp, Homo sapien
gaactgatgttcaattgcaggacac

SEQ ID NO: 913566 - DNA, 25 bp, Homo sapien
ttgtactggaaaacgaccatgctgt

SEQ ID NO: 913567 - DNA, 25 bp, Homo sapien
tgctttcaatctgggctggaccgcc

SEQ ID NO: 913568 - DNA, 25 bp, Homo sapien
gactcggctgcacatccctggttaa

SEQ ID NO: 913569 - DNA, 25 bp, Homo sapien
tacgtaggtagactcagcatcaagg

SEQ ID NO: 913570 - DNA, 25 bp, Homo sapien
tggcctgggtctggacccttcttac

SEQ ID NO: 913571 - DNA, 25 bp, Homo sapien
ctggcctgggtctggacccttctta

SEQ ID NO: 913572 - DNA, 25 bp, Homo sapien
gggctcattgtactcgtgggtaaaa

SEQ ID NO: 913573 - DNA, 25 bp, Homo sapien
ttagaaggagccatgtggtatgtca

SEQ ID NO: 913574 - DNA, 25 bp, Homo sapien
ccagagtgtcacgtggtgtgttaga

SEQ ID NO: 913575 - DNA, 25 bp, Homo sapien
ccaagtgacgcaggaacgcggtctg

SEQ ID NO: 913576 - DNA, 25 bp, Homo sapien
caaggccaagcccttgtctctcagg

SEQ ID NO: 913577 - DNA, 25 bp, Homo sapien
aaggccaagcccttgtctctcaggc

SEQ ID NO: 913578 - DNA, 25 bp, Homo sapien
gcaaggccaagcccttgtctctcag

SEQ ID NO: 913579 - DNA, 25 bp, Homo sapien
attgcctgcccaccgctacgtggtt

SEQ ID NO: 913580 - DNA, 25 bp, Homo sapien
cctgagtgtcggtctaatattcgaa

SEQ ID NO: 913581 - DNA, 25 bp, Homo sapien
tccagcgcagatccaggcatctaag

SEQ ID NO: 913582 - DNA, 25 bp, Homo sapien
gctgctcctctgcttaaggcctctg

SEQ ID NO: 913583 - DNA, 25 bp, Homo sapien
gagaccagaatccagtcccatgttg

SEQ ID NO: 913584 - DNA, 25 bp, Homo sapien
ccatgttgtcgccagcaccaaggtc

SEQ ID NO: 913585 - DNA, 25 bp, Homo sapien
agtcccatgttgtcgccagcaccaa

SEQ ID NO: 913586 - DNA, 25 bp, Homo sapien
gtcaggagaccagaatccagtccca

SEQ ID NO: 913587 - DNA, 25 bp, Homo sapien
tgatggaggaatcgtggtctcgccc

SEQ ID NO: 913588 - DNA, 25 bp, Homo sapien
aggaatcgtggtctcgccctcacaa

SEQ ID NO: 913589 - DNA, 25 bp, Homo sapien
ctgcatgatggaggaatcgtggtct

SEQ ID NO: 913590 - DNA, 25 bp, Homo sapien
tcgccctcacaacatccaagaactg

SEQ ID NO: 913591 - DNA, 25 bp, Homo sapien
aacaaagggcaaaacacaatgacct

SEQ ID NO: 913592 - DNA, 25 bp, Homo sapien
taggagagcaaaacaaagggcaaaa

SEQ ID NO: 913593 - DNA, 25 bp, Homo sapien
agcaaaacaaagggcaaaacacaat

SEQ ID NO: 913594 - DNA, 25 bp, Homo sapien
ctaggagagcaaaacaaagggcaaa

SEQ ID NO: 913595 - DNA, 25 bp, Homo sapien
caagaagttaccagagagctgcaaa

SEQ ID NO: 913596 - DNA, 25 bp, Homo sapien
agaagttaccagagagctgcaaacc

SEQ ID NO: 913597 - DNA, 25 bp, Homo sapien
aagaagttaccagagagctgcaaac

SEQ ID NO: 913598 - DNA, 25 bp, Homo sapien
ggcacactggcttttcatggcaaaa

SEQ ID NO: 913599 - DNA, 25 bp, Homo sapien
tcctgcagggagctagagcagtagc

SEQ ID NO: 913600 - DNA, 25 bp, Homo sapien
tcagaaatagagcagagcaacatcc

SEQ ID NO: 913601 - DNA, 25 bp, Homo sapien
aatgagctccgtgcttcaatgtggc

SEQ ID NO: 913602 - DNA, 25 bp, Homo sapien
agagtggccaacgatgaggacgtgg

SEQ ID NO: 913603 - DNA, 25 bp, Homo sapien
gcagagtggccaacgatgaggacgt

SEQ ID NO: 913604 - DNA, 25 bp, Homo sapien
ctagcagagtggccaacgatgagga

SEQ ID NO: 913605 - DNA, 25 bp, Homo sapien
tagcagagtggccaacgatgaggac

SEQ ID NO: 913606 - DNA, 25 bp, Homo sapien
agccagacctcccacacacaaggag

SEQ ID NO: 913607 - DNA, 25 bp, Homo sapien
ccagacctcccacacacaaggagca

SEQ ID NO: 913608 - DNA, 25 bp, Homo sapien
gagagccagacctcccacacacaag

SEQ ID NO: 913609 - DNA, 25 bp, Homo sapien
atgggagagccagacctcccacaca

SEQ ID NO: 913610 - DNA, 25 bp, Homo sapien
gggggcttggccgccgaggcgcgcg

SEQ ID NO: 913611 - DNA, 25 bp, Homo sapien
cgggggcttggccgccgaggcgcgc

SEQ ID NO: 913612 - DNA, 25 bp, Homo sapien
ccctcattcactttttccgcgctga

SEQ ID NO: 913613 - DNA, 25 bp, Homo sapien
tgacccatcgtcctcccacgcgggc

SEQ ID NO: 913614 - DNA, 25 bp, Homo sapien
gggcccgccgagtcaggcgctggct

SEQ ID NO: 913615 - DNA, 25 bp, Homo sapien
gcggcggacggaaggggctggaatc

SEQ ID NO: 913616 - DNA, 25 bp, Homo sapien
cttttcatcccgtggtctccccaag

SEQ ID NO: 913617 - DNA, 25 bp, Homo sapien
tcccatgagtggagcgctttcccgg

SEQ ID NO: 913618 - DNA, 25 bp, Homo sapien
tgagtggagcgctttcccggctcag

SEQ ID NO: 913619 - DNA, 25 bp, Homo sapien
ccagcctcccatgagtggagcgctt

SEQ ID NO: 913620 - DNA, 25 bp, Homo sapien
aatgggccaggactgccgatcactt

SEQ ID NO: 913621 - DNA, 25 bp, Homo sapien
ctaaatgggccaggactgccgatca

SEQ ID NO: 913622 - DNA, 25 bp, Homo sapien
tgggccaggactgccgatcacttgt

SEQ ID NO: 913623 - DNA, 25 bp, Homo sapien
caggactgccgatcacttgtgtcaa

SEQ ID NO: 913624 - DNA, 25 bp, Homo sapien
ctccatgactcgaggtgggtgcctg

SEQ ID NO: 913625 - DNA, 25 bp, Homo sapien
cctgcagtcacaccagctgctcttt

SEQ ID NO: 913626 - DNA, 25 bp, Homo sapien
gcctgcagtcacaccagctgctctt

SEQ ID NO: 913627 - DNA, 25 bp, Homo sapien
ctctccatgactcgaggtgggtgcc

SEQ ID NO: 913628 - DNA, 25 bp, Homo sapien
aggattttctgacctgtgctgatga

SEQ ID NO: 913629 - DNA, 25 bp, Homo sapien
ccacgtagttttgacgaaagaggat

SEQ ID NO: 913630 - DNA, 25 bp, Homo sapien
gccctccacccacataaggattatg

SEQ ID NO: 913631 - DNA, 25 bp, Homo sapien
tatgcaattgcgtgtaggattcctt

SEQ ID NO: 913632 - DNA, 25 bp, Homo sapien
gggtcccagaaccatcagtttcttg

SEQ ID NO: 913633 - DNA, 25 bp, Homo sapien
tttgtgtagtccaggaagaacttcc

SEQ ID NO: 913634 - DNA, 25 bp, Homo sapien
tagtattgtagtatcgctggcagcg

SEQ ID NO: 913635 - DNA, 25 bp, Homo sapien
gaaaagggacctagggatgccacca

SEQ ID NO: 913636 - DNA, 25 bp, Homo sapien
gctgatactatggaggaatagctcc

SEQ ID NO: 913637 - DNA, 25 bp, Homo sapien
gaatagctccttcccacactctaga

SEQ ID NO: 913638 - DNA, 25 bp, Homo sapien
caccccagggaacagatctgtcaaa

SEQ ID NO: 913639 - DNA, 25 bp, Homo sapien
tctagattaaacattcaccccaggg

SEQ ID NO: 913640 - DNA, 25 bp, Homo sapien
gtgactgattgctgccgactgtgga

SEQ ID NO: 913641 - DNA, 25 bp, Homo sapien
ctgattgctgccgactgtggacaag

SEQ ID NO: 913642 - DNA, 25 bp, Homo sapien
tcggcaccaatctcagagggagctg

SEQ ID NO: 913643 - DNA, 25 bp, Homo sapien
gactgattgctgccgactgtggaca

SEQ ID NO: 913644 - DNA, 25 bp, Homo sapien
tgttttcctagcatggagagccccg

SEQ ID NO: 913645 - DNA, 25 bp, Homo sapien
gatccctggtgtcaagtatgccttg

SEQ ID NO: 913646 - DNA, 25 bp, Homo sapien
gccgttgcatgttccattagcgaat

SEQ ID NO: 913647 - DNA, 25 bp, Homo sapien
atacacagggcccatgcagccgttg

SEQ ID NO: 913648 - DNA, 25 bp, Homo sapien
tggaatgtatactgaactcttgttt

SEQ ID NO: 913649 - DNA, 25 bp, Homo sapien
cttgcttgctgtacgtatggaccat

SEQ ID NO: 913650 - DNA, 25 bp, Homo sapien
tgtttaaatcttgcttgctgtacgt

SEQ ID NO: 913651 - DNA, 25 bp, Homo sapien
ttttgtgtttaaatcttgcttgctg

SEQ ID NO: 913652 - DNA, 25 bp, Homo sapien
ggtgaccttgggatgaaggatccca

SEQ ID NO: 913653 - DNA, 25 bp, Homo sapien
gggagctctaacacttggaaaatgc

SEQ ID NO: 913654 - DNA, 25 bp, Homo sapien
tgctgcagttgagcacagcggttgt

SEQ ID NO: 913655 - DNA, 25 bp, Homo sapien
tgtggacaccaaacatactctgctg

SEQ ID NO: 913656 - DNA, 25 bp, Homo sapien
aaattgcagcgagcctgaagctggc

SEQ ID NO: 913657 - DNA, 25 bp, Homo sapien
gacaagtcctgcctgcattggctta

SEQ ID NO: 913658 - DNA, 25 bp, Homo sapien
cactgaatagttcctggtctgcaaa

SEQ ID NO: 913659 - DNA, 25 bp, Homo sapien
taaaatcaggctccacaaattgcag

SEQ ID NO: 913660 - DNA, 25 bp, Homo sapien
gacaagcaccttccaccgagataag

SEQ ID NO: 913661 - DNA, 25 bp, Homo sapien
caagcaccttccaccgagataagca

SEQ ID NO: 913662 - DNA, 25 bp, Homo sapien
tgcagacaccaggacaagcaccttc

SEQ ID NO: 913663 - DNA, 25 bp, Homo sapien
caggacaagcaccttccaccgagat

SEQ ID NO: 913664 - DNA, 25 bp, Homo sapien
gtacaacggatcgtgggagtggagc

SEQ ID NO: 913665 - DNA, 25 bp, Homo sapien
gtgtacaacggatcgtgggagtgga

SEQ ID NO: 913666 - DNA, 25 bp, Homo sapien
ggagtgtacaacggatcgtgggagt

SEQ ID NO: 913667 - DNA, 25 bp, Homo sapien
gagtgtacaacggatcgtgggagtg

SEQ ID NO: 913668 - DNA, 25 bp, Homo sapien
tcattcccagcacatggccggtgag

SEQ ID NO: 913669 - DNA, 25 bp, Homo sapien
gacatagcgagtgacgaggagcaca

SEQ ID NO: 913670 - DNA, 25 bp, Homo sapien
ggagccagaaagcaacaagggcttt

SEQ ID NO: 913671 - DNA, 25 bp, Homo sapien
ggaaggtatctgcacctgtcattcc

SEQ ID NO: 913672 - DNA, 25 bp, Homo sapien
tcaaatgcaagatgagaagatgctc

SEQ ID NO: 913673 - DNA, 25 bp, Homo sapien
tggaggaccccaccacgctcaaatg

SEQ ID NO: 913674 - DNA, 25 bp, Homo sapien
cacgctcaaatgcaagatgagaaga

SEQ ID NO: 913675 - DNA, 25 bp, Homo sapien
cccaccacgctcaaatgcaagatga

SEQ ID NO: 913676 - DNA, 25 bp, Homo sapien
gggactgatgactgcatgatcttct

SEQ ID NO: 913677 - DNA, 25 bp, Homo sapien
tgggactgatgactgcatgatcttc

SEQ ID NO: 913678 - DNA, 25 bp, Homo sapien
cactgcaggtgaaacggatgctggt

SEQ ID NO: 913679 - DNA, 25 bp, Homo sapien
tgctgggagccgctgcatgggtccc

SEQ ID NO: 913680 - DNA, 25 bp, Homo sapien
gggctgctgggagccgctgcatggg

SEQ ID NO: 913681 - DNA, 25 bp, Homo sapien
catgggcaggatgttctgcacacaa

SEQ ID NO: 913682 - DNA, 25 bp, Homo sapien
tgtgggaccttcagagcttttcact

SEQ ID NO: 913683 - DNA, 25 bp, Homo sapien
agagtccactgtgaagccgaggctg

SEQ ID NO: 913684 - DNA, 25 bp, Homo sapien
gagagtccactgtgaagccgaggct

SEQ ID NO: 913685 - DNA, 25 bp, Homo sapien
caggccgacttgaggacgacttagg

SEQ ID NO: 913686 - DNA, 25 bp, Homo sapien
ggaggccgacttgcagctcttccag

SEQ ID NO: 913687 - DNA, 25 bp, Homo sapien
cggggaggccgacttgcagctcttc

SEQ ID NO: 913688 - DNA, 25 bp, Homo sapien
cacttccaggccgacttgaggacga

SEQ ID NO: 913689 - DNA, 25 bp, Homo sapien
gtccaaagaccttattggaaggcca

SEQ ID NO: 913690 - DNA, 25 bp, Homo sapien
accttattggaaggccagagtctgg

SEQ ID NO: 913691 - DNA, 25 bp, Homo sapien
caaagaccttattggaaggccagag

SEQ ID NO: 913692 - DNA, 25 bp, Homo sapien
aagaccttattggaaggccagagtc

SEQ ID NO: 913693 - DNA, 25 bp, Homo sapien
cctgccttccggcagcctgcgtgcg

SEQ ID NO: 913694 - DNA, 25 bp, Homo sapien
gcctgccttccggcagcctgcgtgc

SEQ ID NO: 913695 - DNA, 25 bp, Homo sapien
tgccttccggcagcctgcgtgcggc

SEQ ID NO: 913696 - DNA, 25 bp, Homo sapien
ctgccttccggcagcctgcgtgcgg

SEQ ID NO: 913697 - DNA, 25 bp, Homo sapien
acgctgacctctgtcagcgtgggag

SEQ ID NO: 913698 - DNA, 25 bp, Homo sapien
ggggccggtgtgaggcaaggggctc

SEQ ID NO: 913699 - DNA, 25 bp, Homo sapien
ggcaaggggctcacgctgacctctg

SEQ ID NO: 913700 - DNA, 25 bp, Homo sapien
gctcacgctgacctctgtcagcgtg

SEQ ID NO: 913701 - DNA, 25 bp, Homo sapien
cctacaaaggcggttgggagctggg

SEQ ID NO: 913702 - DNA, 25 bp, Homo sapien
ccagagctgggcctgtacaggccac

SEQ ID NO: 913703 - DNA, 25 bp, Homo sapien
tacaaaggcggttgggagctgggca

SEQ ID NO: 913704 - DNA, 25 bp, Homo sapien
ggtgggcccgaagagcttggctgga

SEQ ID NO: 913705 - DNA, 25 bp, Homo sapien
cggagaccatttggggcctggagac

SEQ ID NO: 913706 - DNA, 25 bp, Homo sapien
accatttggggcctggagacgccat

SEQ ID NO: 913707 - DNA, 25 bp, Homo sapien
gcctggagacgccatcggagggcag

SEQ ID NO: 913708 - DNA, 25 bp, Homo sapien
cctggagacgccatcggagggcagg

SEQ ID NO: 913709 - DNA, 25 bp, Homo sapien
gagatgggcaggcactgagtccaaa

SEQ ID NO: 913710 - DNA, 25 bp, Homo sapien
ccgccaggagatgggcaggcactga

SEQ ID NO: 913711 - DNA, 25 bp, Homo sapien
caggagatgggcaggcactgagtcc

SEQ ID NO: 913712 - DNA, 25 bp, Homo sapien
cgaccaaggccgccaggagatgggc

SEQ ID NO: 913713 - DNA, 25 bp, Homo sapien
acgcagccgggaggaagagctgggc

SEQ ID NO: 913714 - DNA, 25 bp, Homo sapien
ggagacgcagccgggaggaagagct

SEQ ID NO: 913715 - DNA, 25 bp, Homo sapien
ctggagacgcagccgggaggaagag

SEQ ID NO: 913716 - DNA, 25 bp, Homo sapien
agacgcagccgggaggaagagctgg

SEQ ID NO: 913717 - DNA, 25 bp, Homo sapien
cccggagggtgcaagtgggcctgga

SEQ ID NO: 913718 - DNA, 25 bp, Homo sapien
cgcccggagggtgcaagtgggcctg

SEQ ID NO: 913719 - DNA, 25 bp, Homo sapien
gacgcccggagggtgcaagtgggcc

SEQ ID NO: 913720 - DNA, 25 bp, Homo sapien
ctggagaggacgcccggagggtgca

SEQ ID NO: 913721 - DNA, 25 bp, Homo sapien
ggaggccgacttgcagctcttccag

SEQ ID NO: 913722 - DNA, 25 bp, Homo sapien
ccggggaggccgacttgcagctctt

SEQ ID NO: 913723 - DNA, 25 bp, Homo sapien
ggcccggggaggccgacttgcagct

SEQ ID NO: 913724 - DNA, 25 bp, Homo sapien
ctgggcccggggaggccgacttgca

SEQ ID NO: 913725 - DNA, 25 bp, Homo sapien
gacgccgtcggagggcaggagctga

SEQ ID NO: 913726 - DNA, 25 bp, Homo sapien
tgcagaggccaccgggaggctggag

SEQ ID NO: 913727 - DNA, 25 bp, Homo sapien
tggagaggccgacttcaggacgatt

SEQ ID NO: 913728 - DNA, 25 bp, Homo sapien
cgtttggggcctggagacgccgtcg

SEQ ID NO: 913729 - DNA, 25 bp, Homo sapien
cagggccgctggaagctgggcggga

SEQ ID NO: 913730 - DNA, 25 bp, Homo sapien
ccgctggaagctgggcgggagctga

SEQ ID NO: 913731 - DNA, 25 bp, Homo sapien
gccgctggaagctgggcgggagctg

SEQ ID NO: 913732 - DNA, 25 bp, Homo sapien
gggccgctggaagctgggcgggagc

SEQ ID NO: 913733 - DNA, 25 bp, Homo sapien
acgccgggacgctgcaggtgggtcc

SEQ ID NO: 913734 - DNA, 25 bp, Homo sapien
ctgggcctggcgaggccgccggaag

SEQ ID NO: 913735 - DNA, 25 bp, Homo sapien
tgggcctggcgaggccgccggaagg

SEQ ID NO: 913736 - DNA, 25 bp, Homo sapien
gcctggcgaggccgccggaagggaa

SEQ ID NO: 913737 - DNA, 25 bp, Homo sapien
ggcctggcgaggccgccggaaggga

SEQ ID NO: 913738 - DNA, 25 bp, Homo sapien
ggccattgtgaggaatgagccccat

SEQ ID NO: 913739 - DNA, 25 bp, Homo sapien
ctggaaaggccattgtgaggaatga

SEQ ID NO: 913740 - DNA, 25 bp, Homo sapien
aaggccattgtgaggaatgagcccc

SEQ ID NO: 913741 - DNA, 25 bp, Homo sapien
gaaaggccattgtgaggaatgagcc

SEQ ID NO: 913742 - DNA, 25 bp, Homo sapien
agaggccactggcaggcaggagctg

SEQ ID NO: 913743 - DNA, 25 bp, Homo sapien
aagaggccactggcaggcaggagct

SEQ ID NO: 913744 - DNA, 25 bp, Homo sapien
ggccactggcaggcaggagctgggc

SEQ ID NO: 913745 - DNA, 25 bp, Homo sapien
ctgaagaggccactggcaggcagga

SEQ ID NO: 913746 - DNA, 25 bp, Homo sapien
tgggaggatgagctcgtcctggaga

SEQ ID NO: 913747 - DNA, 25 bp, Homo sapien
aggatgagctcgtcctggagatgcc

SEQ ID NO: 913748 - DNA, 25 bp, Homo sapien
cgtcctggagatgccgagttaagga

SEQ ID NO: 913749 - DNA, 25 bp, Homo sapien
gagctcgtcctggagatgccgagtt

SEQ ID NO: 913750 - DNA, 25 bp, Homo sapien
ctgtgcctggaaaagtcaccatggg

SEQ ID NO: 913751 - DNA, 25 bp, Homo sapien
gaaaagtcaccatggggcatgagct

SEQ ID NO: 913752 - DNA, 25 bp, Homo sapien
cctggaaaagtcaccatggggcatg

SEQ ID NO: 913753 - DNA, 25 bp, Homo sapien
gtgcctggaaaagtcaccatggggc

SEQ ID NO: 913754 - DNA, 25 bp, Homo sapien
gcctgtagagtccaacagtaggcag

SEQ ID NO: 913755 - DNA, 25 bp, Homo sapien
tagagtccaacagtaggcagaggtt

SEQ ID NO: 913756 - DNA, 25 bp, Homo sapien
cagaggttgggcaaaaggctgattc

SEQ ID NO: 913757 - DNA, 25 bp, Homo sapien
tgtagagtccaacagtaggcagagg

SEQ ID NO: 913758 - DNA, 25 bp, Homo sapien
tgacgtcctgggacaggaactgggc

SEQ ID NO: 913759 - DNA, 25 bp, Homo sapien
tagagaggctgatttgaggaagttt

SEQ ID NO: 913760 - DNA, 25 bp, Homo sapien
gagatgacgtcctgggacaggaact

SEQ ID NO: 913761 - DNA, 25 bp, Homo sapien
tggagatgacgtcctgggacaggaa

SEQ ID NO: 913762 - DNA, 25 bp, Homo sapien
tagggtatgggcctaaataggccat

SEQ ID NO: 913763 - DNA, 25 bp, Homo sapien
agggtatgggcctaaataggccatt

SEQ ID NO: 913764 - DNA, 25 bp, Homo sapien
gggtatgggcctaaataggccattg

SEQ ID NO: 913765 - DNA, 25 bp, Homo sapien
gtagggtatgggcctaaataggcca

SEQ ID NO: 913766 - DNA, 25 bp, Homo sapien
gaatcagtgggcgtgttaagcttgt

SEQ ID NO: 913767 - DNA, 25 bp, Homo sapien
tgtagaatcagtgggcgtgttaagc

SEQ ID NO: 913768 - DNA, 25 bp, Homo sapien
ttttcctgcaactggatggtcccac

SEQ ID NO: 913769 - DNA, 25 bp, Homo sapien
tagaatcagtgggcgtgttaagctt

SEQ ID NO: 913770 - DNA, 25 bp, Homo sapien
tcacccctctggaatccacgtatag

SEQ ID NO: 913771 - DNA, 25 bp, Homo sapien
cccctctggaatccacgtataggaa

SEQ ID NO: 913772 - DNA, 25 bp, Homo sapien
tctcagccacgtgggaggttgagat

SEQ ID NO: 913773 - DNA, 25 bp, Homo sapien
tcagctgtgatagcactactacact

SEQ ID NO: 913774 - DNA, 25 bp, Homo sapien
ttgagccatctgctctccctggttc

SEQ ID NO: 913775 - DNA, 25 bp, Homo sapien
ctctccctggttccttctctacaga

SEQ ID NO: 913776 - DNA, 25 bp, Homo sapien
attgagccatctgctctccctggtt

SEQ ID NO: 913777 - DNA, 25 bp, Homo sapien
tccctggttccttctctacagaagc

SEQ ID NO: 913778 - DNA, 25 bp, Homo sapien
taataaagtgtgtaacgtcctggga

SEQ ID NO: 913779 - DNA, 25 bp, Homo sapien
tcctgggagccgagaaacggtcatg

SEQ ID NO: 913780 - DNA, 25 bp, Homo sapien
agtaacccccggcataactgcagag

SEQ ID NO: 913781 - DNA, 25 bp, Homo sapien
cgagaaacggtcatgtcagtaaccc

SEQ ID NO: 913782 - DNA, 25 bp, Homo sapien
taagcatttcccacattgcaaggcc

SEQ ID NO: 913783 - DNA, 25 bp, Homo sapien
agcatttcccacattgcaaggccca

SEQ ID NO: 913784 - DNA, 25 bp, Homo sapien
gcatttcccacattgcaaggcccac

SEQ ID NO: 913785 - DNA, 25 bp, Homo sapien
ctaagcatttcccacattgcaaggc

SEQ ID NO: 913786 - DNA, 25 bp, Homo sapien
acgcacacaagccagtccttacaaa

SEQ ID NO: 913787 - DNA, 25 bp, Homo sapien
tgctccaagcttcacccatgatgtg

SEQ ID NO: 913788 - DNA, 25 bp, Homo sapien
cacacaagccagtccttacaaaagg

SEQ ID NO: 913789 - DNA, 25 bp, Homo sapien
cctggcgtcccccatatggagatgc

SEQ ID NO: 913790 - DNA, 25 bp, Homo sapien
ggccctccttatcagcccaactcct

SEQ ID NO: 913791 - DNA, 25 bp, Homo sapien
ttagaagtggccctccttatcagcc

SEQ ID NO: 913792 - DNA, 25 bp, Homo sapien
gaagtggccctccttatcagcccaa

SEQ ID NO: 913793 - DNA, 25 bp, Homo sapien
tggccctccttatcagcccaactcc

SEQ ID NO: 913794 - DNA, 25 bp, Homo sapien
gaggcaggctacattcggcctgtcc

SEQ ID NO: 913795 - DNA, 25 bp, Homo sapien
tatccagtcgtcaatgagcagaatg

SEQ ID NO: 913796 - DNA, 25 bp, Homo sapien
gggccgtcagggagccctgtatcca

SEQ ID NO: 913797 - DNA, 25 bp, Homo sapien
ttctgccttggcgaagcccaccaag

SEQ ID NO: 913798 - DNA, 25 bp, Homo sapien
cgagtttctaactcattttctccat

SEQ ID NO: 913799 - DNA, 25 bp, Homo sapien
cagcacttttttcgttctcaggtcc

SEQ ID NO: 913800 - DNA, 25 bp, Homo sapien
ttctcatgccatagaaatttgtcag

SEQ ID NO: 913801 - DNA, 25 bp, Homo sapien
ctcttttctcatgccatagaaattt

SEQ ID NO: 913802 - DNA, 25 bp, Homo sapien
ccagtctctaacaccctgggacagt

SEQ ID NO: 913803 - DNA, 25 bp, Homo sapien
ggagcgcgaggactgtgtgagctac

SEQ ID NO: 913804 - DNA, 25 bp, Homo sapien
aaaaggtctatgaagctctgaaggg

SEQ ID NO: 913805 - DNA, 25 bp, Homo sapien
tccagaaggcctcagacaaacagat

SEQ ID NO: 913806 - DNA, 25 bp, Homo sapien
gaaaagggccacaaattcagtataa

SEQ ID NO: 913807 - DNA, 25 bp, Homo sapien
gaaacactgaagcaggctgtaagcc

SEQ ID NO: 913808 - DNA, 25 bp, Homo sapien
tttaggacaagagtgcttcgcagcc

SEQ ID NO: 913809 - DNA, 25 bp, Homo sapien
cactaatgcagtgcggctgcacaga

SEQ ID NO: 913810 - DNA, 25 bp, Homo sapien
ggactgagagcctcgtatttaggac

SEQ ID NO: 913811 - DNA, 25 bp, Homo sapien
ggaggaacccttgctcccactaatg

SEQ ID NO: 913812 - DNA, 25 bp, Homo sapien
ttatacatcaaattgggaccaaaga

SEQ ID NO: 913813 - DNA, 25 bp, Homo sapien
gataaaagggccgtctgcattggtt

SEQ ID NO: 913814 - DNA, 25 bp, Homo sapien
gactagcagaggtaattccatcaca

SEQ ID NO: 913815 - DNA, 25 bp, Homo sapien
gctgcagggtcgtgctgctagaatt

SEQ ID NO: 913816 - DNA, 25 bp, Homo sapien
cctggactttggacaggtctcctct

SEQ ID NO: 913817 - DNA, 25 bp, Homo sapien
cttgcctggactttggacaggtctc

SEQ ID NO: 913818 - DNA, 25 bp, Homo sapien
gtctccctcattcgagccactctct

SEQ ID NO: 913819 - DNA, 25 bp, Homo sapien
ggactttggacaggtctcctctctc

SEQ ID NO: 913820 - DNA, 25 bp, Homo sapien
aagtggcctttgaacaacaccgcat

SEQ ID NO: 913821 - DNA, 25 bp, Homo sapien
gatggtgaggaaggcatcatttctg

SEQ ID NO: 913822 - DNA, 25 bp, Homo sapien
gtctgctgctaaggccactggtttt

SEQ ID NO: 913823 - DNA, 25 bp, Homo sapien
ccactggttttgttatatgctttaa

SEQ ID NO: 913824 - DNA, 25 bp, Homo sapien
actttgggcagtctctaacatcaga

SEQ ID NO: 913825 - DNA, 25 bp, Homo sapien
tcaataacatgacaatcaaatcttg

SEQ ID NO: 913826 - DNA, 25 bp, Homo sapien
tcttaaatggtaaagctcaataaca

SEQ ID NO: 913827 - DNA, 25 bp, Homo sapien
ggaacgcaaccccaggcgacatgga

SEQ ID NO: 913828 - DNA, 25 bp, Homo sapien
cctggatttgtaagccgggaacgca

SEQ ID NO: 913829 - DNA, 25 bp, Homo sapien
ccgagcgtggatgctggcagaggag

SEQ ID NO: 913830 - DNA, 25 bp, Homo sapien
gcaaccgagcgtggatgctggcaga

SEQ ID NO: 913831 - DNA, 25 bp, Homo sapien
tggcaaccgagcgtggatgctggca

SEQ ID NO: 913832 - DNA, 25 bp, Homo sapien
aaccgagcgtggatgctggcagagg

SEQ ID NO: 913833 - DNA, 25 bp, Homo sapien
gcctttctggtacagccttccgcgg

SEQ ID NO: 913834 - DNA, 25 bp, Homo sapien
gctgagggcctttctggtacagcct

SEQ ID NO: 913835 - DNA, 25 bp, Homo sapien
taggctgagggcctttctggtacag

SEQ ID NO: 913836 - DNA, 25 bp, Homo sapien
ctgcggttctgagcgggagctgtgc

SEQ ID NO: 913837 - DNA, 25 bp, Homo sapien
gtttgaggagaaccgcccagggctc

SEQ ID NO: 913838 - DNA, 25 bp, Homo sapien
tttgaggagaaccgcccagggctcc

SEQ ID NO: 913839 - DNA, 25 bp, Homo sapien
tgtttgaggagaaccgcccagggct

SEQ ID NO: 913840 - DNA, 25 bp, Homo sapien
ttccctgggcggtggggtctgtctc

SEQ ID NO: 913841 - DNA, 25 bp, Homo sapien
ccacagtgtcagtgagtcgccctgg

SEQ ID NO: 913842 - DNA, 25 bp, Homo sapien
tttccacagtgtcagtgagtcgccc

SEQ ID NO: 913843 - DNA, 25 bp, Homo sapien
gggtctgtctctcggggaacacaga

SEQ ID NO: 913844 - DNA, 25 bp, Homo sapien
cacgtgaattgtcttggacgcagca

SEQ ID NO: 913845 - DNA, 25 bp, Homo sapien
tctctttgcagcagcgttgaccacg

SEQ ID NO: 913846 - DNA, 25 bp, Homo sapien
gcgttgaattcactttgccgggcac

SEQ ID NO: 913847 - DNA, 25 bp, Homo sapien
cgtgtggtaagggagacacagctcc

SEQ ID NO: 913848 - DNA, 25 bp, Homo sapien
gggtctcactggcaggattatttct

SEQ ID NO: 913849 - DNA, 25 bp, Homo sapien
caccccctccaaacttgattgcaag

SEQ ID NO: 913850 - DNA, 25 bp, Homo sapien
accccctccaaacttgattgcaagc

SEQ ID NO: 913851 - DNA, 25 bp, Homo sapien
ccaccccctccaaacttgattgcaa

SEQ ID NO: 913852 - DNA, 25 bp, Homo sapien
tatgccaaggtttgtccaaagtggg

SEQ ID NO: 913853 - DNA, 25 bp, Homo sapien
gcccagttaaagtagcagtgacaga

SEQ ID NO: 913854 - DNA, 25 bp, Homo sapien
gggcattcttcatcgcagctgaggg

SEQ ID NO: 913855 - DNA, 25 bp, Homo sapien
cctcctcctggaatgatatatgcca

SEQ ID NO: 913856 - DNA, 25 bp, Homo sapien
tgtgatgatgcatccacttctggaa

SEQ ID NO: 913857 - DNA, 25 bp, Homo sapien
aactccggtgaaatgtgtatctctc

SEQ ID NO: 913858 - DNA, 25 bp, Homo sapien
aaaactccggtgaaatgtgtatctc

SEQ ID NO: 913859 - DNA, 25 bp, Homo sapien
aaactccggtgaaatgtgtatctct

SEQ ID NO: 913860 - DNA, 25 bp, Homo sapien
ttaaaactccggtgaaatgtgtatc

SEQ ID NO: 913861 - DNA, 25 bp, Homo sapien
ggtgggttaggatgtccacagcagg

SEQ ID NO: 913862 - DNA, 25 bp, Homo sapien
cctctctcgggattggatgctgggt

SEQ ID NO: 913863 - DNA, 25 bp, Homo sapien
ggcttgacgccaggtctgcaggcct

SEQ ID NO: 913864 - DNA, 25 bp, Homo sapien
ttgctggaggcttgacgccaggtct

SEQ ID NO: 913865 - DNA, 25 bp, Homo sapien
cccttcaatatttgaggtttgctgg

SEQ ID NO: 913866 - DNA, 25 bp, Homo sapien
tgtgccgcgctagacagccgaggct

SEQ ID NO: 913867 - DNA, 25 bp, Homo sapien
acatgagcagttggctgtcaggtgt

SEQ ID NO: 913868 - DNA, 25 bp, Homo sapien
ggaatacaaagataggtgcgtgcat

SEQ ID NO: 913869 - DNA, 25 bp, Homo sapien
gtggaagacatgtgaccatgctgac

SEQ ID NO: 913870 - DNA, 25 bp, Homo sapien
acggctgctagtattcgcagatagg

SEQ ID NO: 913871 - DNA, 25 bp, Homo sapien
gaagacatgtgaccatgctgaccct

SEQ ID NO: 913872 - DNA, 25 bp, Homo sapien
atgctgacccttccacggctgctag

SEQ ID NO: 913873 - DNA, 25 bp, Homo sapien
gttccctggcggctgtgccacatgt

SEQ ID NO: 913874 - DNA, 25 bp, Homo sapien
ggcggctgtgccacatgtaggaaat

SEQ ID NO: 913875 - DNA, 25 bp, Homo sapien
agtgggagctggttccctggcggct

SEQ ID NO: 913876 - DNA, 25 bp, Homo sapien
agctggttccctggcggctgtgcca

SEQ ID NO: 913877 - DNA, 25 bp, Homo sapien
cttgggatcacatcgaaaacatttt

SEQ ID NO: 913878 - DNA, 25 bp, Homo sapien
gggatcacatcgaaaacattttcac

SEQ ID NO: 913879 - DNA, 25 bp, Homo sapien
tgggatcacatcgaaaacattttca

SEQ ID NO: 913880 - DNA, 25 bp, Homo sapien
ttgggatcacatcgaaaacattttc

SEQ ID NO: 913881 - DNA, 25 bp, Homo sapien
agcaccccaatactcccttgggttg

SEQ ID NO: 913882 - DNA, 25 bp, Homo sapien
gtgacacaggcttcacatctgcaca

SEQ ID NO: 913883 - DNA, 25 bp, Homo sapien
aaaccctcagttcctgaccgctctg

SEQ ID NO: 913884 - DNA, 25 bp, Homo sapien
gcaacctctccagggcctgtgtgac

SEQ ID NO: 913885 - DNA, 25 bp, Homo sapien
ttggcgagagatttgtaactgcaat

SEQ ID NO: 913886 - DNA, 25 bp, Homo sapien
tgtaactgcaattcccgtgctccat

SEQ ID NO: 913887 - DNA, 25 bp, Homo sapien
cttggcgagagatttgtaactgcaa

SEQ ID NO: 913888 - DNA, 25 bp, Homo sapien
tcagagcaggcggattcccatgctt

SEQ ID NO: 913889 - DNA, 25 bp, Homo sapien
tgtaggtagctgaaacttcaccagg

SEQ ID NO: 913890 - DNA, 25 bp, Homo sapien
tgggccagacccctcagtcaaaggt

SEQ ID NO: 913891 - DNA, 25 bp, Homo sapien
tgtgaccattcctcggttatctggg

SEQ ID NO: 913892 - DNA, 25 bp, Homo sapien
ccttcagctaggtcactgcagttca

SEQ ID NO: 913893 - DNA, 25 bp, Homo sapien
gagtggacgtgctctgcctgagcca

SEQ ID NO: 913894 - DNA, 25 bp, Homo sapien
catgagcttgtatattcccttggag

SEQ ID NO: 913895 - DNA, 25 bp, Homo sapien
actgctgtgagtgaccctgctaacc

SEQ ID NO: 913896 - DNA, 25 bp, Homo sapien
gcctattgaaccaagctgccttttc

SEQ ID NO: 913897 - DNA, 25 bp, Homo sapien
tgggcaaacgttgctgcacagcagc

SEQ ID NO: 913898 - DNA, 25 bp, Homo sapien
cttccactgacactggcctattgaa

SEQ ID NO: 913899 - DNA, 25 bp, Homo sapien
aaagggcatgaacgtgatgggcaaa

SEQ ID NO: 913900 - DNA, 25 bp, Homo sapien
taagtgagtttgcaggtgtttccca

SEQ ID NO: 913901 - DNA, 25 bp, Homo sapien
ggtcttgggctagaaccctctccag

SEQ ID NO: 913902 - DNA, 25 bp, Homo sapien
tattaactggtatgtgatccaccct

SEQ ID NO: 913903 - DNA, 25 bp, Homo sapien
cctgctggtccggagttcacttggc

SEQ ID NO: 913904 - DNA, 25 bp, Homo sapien
tgtggttgttcagtgcatccctgga

SEQ ID NO: 913905 - DNA, 25 bp, Homo sapien
tggatatggccctgttgtggtcctg

SEQ ID NO: 913906 - DNA, 25 bp, Homo sapien
ttcagtgcatccctggatatggccc

SEQ ID NO: 913907 - DNA, 25 bp, Homo sapien
catccctggatatggccctgttgtg

SEQ ID NO: 913908 - DNA, 25 bp, Homo sapien
tcagatacaaccttttcgttgaatc

SEQ ID NO: 913909 - DNA, 25 bp, Homo sapien
agatatggtgtgggaatgacagcag

SEQ ID NO: 913910 - DNA, 25 bp, Homo sapien
ccttttcgttgaatccaagatatgg

SEQ ID NO: 913911 - DNA, 25 bp, Homo sapien
gatacaaccttttcgttgaatccaa

SEQ ID NO: 913912 - DNA, 25 bp, Homo sapien
cagcctttgggagcggtaccatttc

SEQ ID NO: 913913 - DNA, 25 bp, Homo sapien
ggaacagcctttgggagcggtacca

SEQ ID NO: 913914 - DNA, 25 bp, Homo sapien
tggaggctcagtggccctgtgggct

SEQ ID NO: 913915 - DNA, 25 bp, Homo sapien
ccttggtggaggctcagtggccctg

SEQ ID NO: 913916 - DNA, 25 bp, Homo sapien
tgccctgcttgtacagggtagttgc

SEQ ID NO: 913917 - DNA, 25 bp, Homo sapien
cctgcttgtacagggtagttgctta

SEQ ID NO: 913918 - DNA, 25 bp, Homo sapien
cagggtagttgcttaatgagagcat

SEQ ID NO: 913919 - DNA, 25 bp, Homo sapien
tgtacagggtagttgcttaatgaga

SEQ ID NO: 913920 - DNA, 25 bp, Homo sapien
ctttgtggacaacagatcccttctg

SEQ ID NO: 913921 - DNA, 25 bp, Homo sapien
ttctgagaacctacgtccatgatgg

SEQ ID NO: 913922 - DNA, 25 bp, Homo sapien
gagatgtctgaccttttttggacac

SEQ ID NO: 913923 - DNA, 25 bp, Homo sapien
tgatggtccttttgagatgtctgac

SEQ ID NO: 913924 - DNA, 25 bp, Homo sapien
gctggggtcggggtcaccagcctct

SEQ ID NO: 913925 - DNA, 25 bp, Homo sapien
tcacaaaggagttcgtctccagcct

SEQ ID NO: 913926 - DNA, 25 bp, Homo sapien
acaaaggagttcgtctccagcctct

SEQ ID NO: 913927 - DNA, 25 bp, Homo sapien
tggggtcggggtcaccagcctcttc

SEQ ID NO: 913928 - DNA, 25 bp, Homo sapien
gtgtccctgtactctccgtttcttc

SEQ ID NO: 913929 - DNA, 25 bp, Homo sapien
ttcaggcggccttgccagatgccca

SEQ ID NO: 913930 - DNA, 25 bp, Homo sapien
gtccctgtcccctccggatctgccc

SEQ ID NO: 913931 - DNA, 25 bp, Homo sapien
tgtactctccgtttcttcaggcggc

SEQ ID NO: 913932 - DNA, 25 bp, Homo sapien
gggcagcagtgatgctgaggatgtc

SEQ ID NO: 913933 - DNA, 25 bp, Homo sapien
gccaggccactactgcggcctctgg

SEQ ID NO: 913934 - DNA, 25 bp, Homo sapien
tgaggatgtcatggtaactggattt

SEQ ID NO: 913935 - DNA, 25 bp, Homo sapien
actgcggcctctgggtggatttctg

SEQ ID NO: 913936 - DNA, 25 bp, Homo sapien
tgtctgagtccttgaaatccaagga

SEQ ID NO: 913937 - DNA, 25 bp, Homo sapien
aacactgcaacagtggagtcctcat

SEQ ID NO: 913938 - DNA, 25 bp, Homo sapien
actgcaacagtggagtcctcatggg

SEQ ID NO: 913939 - DNA, 25 bp, Homo sapien
ccaaggacaggcttcaggcttacaa

SEQ ID NO: 913940 - DNA, 25 bp, Homo sapien
tgtccagagctgactaaagtttgta

SEQ ID NO: 913941 - DNA, 25 bp, Homo sapien
cagcggttggcattgcttgtccaga

SEQ ID NO: 913942 - DNA, 25 bp, Homo sapien
attgcttgtccagagctgactaaag

SEQ ID NO: 913943 - DNA, 25 bp, Homo sapien
tcaaagccagcggttggcattgctt

SEQ ID NO: 913944 - DNA, 25 bp, Homo sapien
aggggcctattaaacgcacaactgg

SEQ ID NO: 913945 - DNA, 25 bp, Homo sapien
gccaggggcctattaaacgcacaac

SEQ ID NO: 913946 - DNA, 25 bp, Homo sapien
acagccaggggcctattaaacgcac

SEQ ID NO: 913947 - DNA, 25 bp, Homo sapien
gcctattaaacgcacaactgggtac

SEQ ID NO: 913948 - DNA, 25 bp, Homo sapien
tcttgcctgccgctagctgcatgga

SEQ ID NO: 913949 - DNA, 25 bp, Homo sapien
gaccttccacttcccacgtgtgaag

SEQ ID NO: 913950 - DNA, 25 bp, Homo sapien
tgcctgccgctagctgcatggacat

SEQ ID NO: 913951 - DNA, 25 bp, Homo sapien
ttcccacgtgtgaagttggtcttgc

SEQ ID NO: 913952 - DNA, 25 bp, Homo sapien
ggttgctgttcttgtatagaagagc

SEQ ID NO: 913953 - DNA, 25 bp, Homo sapien
gattctctgcttggttgctgttctt

SEQ ID NO: 913954 - DNA, 25 bp, Homo sapien
tgctgttcttgtatagaagagctac

SEQ ID NO: 913955 - DNA, 25 bp, Homo sapien
ctgcttggttgctgttcttgtatag

SEQ ID NO: 913956 - DNA, 25 bp, Homo sapien
ccataagcgacagccaattgattga

SEQ ID NO: 913957 - DNA, 25 bp, Homo sapien
cagccttgggtatggactctgcatc

SEQ ID NO: 913958 - DNA, 25 bp, Homo sapien
catgagttcctgctacaaaaccaga

SEQ ID NO: 913959 - DNA, 25 bp, Homo sapien
tcggagatccggtctgctgttgcta

SEQ ID NO: 913960 - DNA, 25 bp, Homo sapien
tttccagaccgttgaataacagtga

SEQ ID NO: 913961 - DNA, 25 bp, Homo sapien
tgaaggtagccctttccctggctta

SEQ ID NO: 913962 - DNA, 25 bp, Homo sapien
gactcatcctggtgatcagctcgtg

SEQ ID NO: 913963 - DNA, 25 bp, Homo sapien
taggatgatgtgctgtccctggaaa

SEQ ID NO: 913964 - DNA, 25 bp, Homo sapien
tgtcccaatttgagatgcccagtgc

SEQ ID NO: 913965 - DNA, 25 bp, Homo sapien
tcagggatggtcagtctagatcagc

SEQ ID NO: 913966 - DNA, 25 bp, Homo sapien
caatgctggttgtgtactctaagtc

SEQ ID NO: 913967 - DNA, 25 bp, Homo sapien
aaatgcagctagtgagtaccatggc

SEQ ID NO: 913968 - DNA, 25 bp, Homo sapien
ggtgctgaaaactaattagatcatc

SEQ ID NO: 913969 - DNA, 25 bp, Homo sapien
agacaaaactgtctggcccgccatc

SEQ ID NO: 913970 - DNA, 25 bp, Homo sapien
ccattgtgaggtgataatgaggtgc

SEQ ID NO: 913971 - DNA, 25 bp, Homo sapien
tgtctggcccgccatctgctgagtc

SEQ ID NO: 913972 - DNA, 25 bp, Homo sapien
cgaaaacagtcaactctcctgggtc

SEQ ID NO: 913973 - DNA, 25 bp, Homo sapien
aaaacagtcaactctcctgggtcac

SEQ ID NO: 913974 - DNA, 25 bp, Homo sapien
tcctgggtcactgtccctttctccc

SEQ ID NO: 913975 - DNA, 25 bp, Homo sapien
ctgggtcactgtccctttctcccac

SEQ ID NO: 913976 - DNA, 25 bp, Homo sapien
agtatacatccctgcatcacttttc

SEQ ID NO: 913977 - DNA, 25 bp, Homo sapien
ggtattggagatcatccgttttcca

SEQ ID NO: 913978 - DNA, 25 bp, Homo sapien
gtattggagatcatccgttttccac

SEQ ID NO: 913979 - DNA, 25 bp, Homo sapien
ctggtattggagatcatccgttttc

SEQ ID NO: 913980 - DNA, 25 bp, Homo sapien
tggtattggagatcatccgttttcc

SEQ ID NO: 913981 - DNA, 25 bp, Homo sapien
tttttccagtagatggtgggttctg

SEQ ID NO: 913982 - DNA, 25 bp, Homo sapien
cacttgcatggggattgcctgacag

SEQ ID NO: 913983 - DNA, 25 bp, Homo sapien
tgcatggggattgcctgacagctgc

SEQ ID NO: 913984 - DNA, 25 bp, Homo sapien
ctgattctccctggctccatctcag

SEQ ID NO: 913985 - DNA, 25 bp, Homo sapien
ctctctttggctccaattcctgatt

SEQ ID NO: 913986 - DNA, 25 bp, Homo sapien
ctcgagggtgacacttggaccagtg

SEQ ID NO: 913987 - DNA, 25 bp, Homo sapien
cgcagctcctcgagggtgacacttg

SEQ ID NO: 913988 - DNA, 25 bp, Homo sapien
gctcctcgagggtgacacttggacc

SEQ ID NO: 913989 - DNA, 25 bp, Homo sapien
tcctcgagggtgacacttggaccag

SEQ ID NO: 913990 - DNA, 25 bp, Homo sapien
ggccatagacctttatccgtaaatc

SEQ ID NO: 913991 - DNA, 25 bp, Homo sapien
ctggtgaggattgggtgaatttgat

SEQ ID NO: 913992 - DNA, 25 bp, Homo sapien
tggccatagacctttatccgtaaat

SEQ ID NO: 913993 - DNA, 25 bp, Homo sapien
ctactttctggtgaggattgggtga

SEQ ID NO: 913994 - DNA, 25 bp, Homo sapien
ctctaatgcgtttgtggaggtgaga

SEQ ID NO: 913995 - DNA, 25 bp, Homo sapien
agaatgtacccatgaggagtgaact

SEQ ID NO: 913996 - DNA, 25 bp, Homo sapien
aggagtgaactcagagttgaatttg

SEQ ID NO: 913997 - DNA, 25 bp, Homo sapien
agttgaatttggaggtggacctctg

SEQ ID NO: 913998 - DNA, 25 bp, Homo sapien
tgggccagttgaagtgaaaccaagg

SEQ ID NO: 913999 - DNA, 25 bp, Homo sapien
ccagatctttgattcactgtggtca

SEQ ID NO: 914000 - DNA, 25 bp, Homo sapien
caaggattgtccacttatctcagta

SEQ ID NO: 914001 - DNA, 25 bp, Homo sapien
gacttttccaaatctgagggatgat

SEQ ID NO: 914002 - DNA, 25 bp, Homo sapien
gctctctccgtgtcctcaatctggg

SEQ ID NO: 914003 - DNA, 25 bp, Homo sapien
catatttgccttgccccgagtctct

SEQ ID NO: 914004 - DNA, 25 bp, Homo sapien
aaaggcattgaaggacatatttgcc

SEQ ID NO: 914005 - DNA, 25 bp, Homo sapien
gaaagatacagacagtccaaaggca

SEQ ID NO: 914006 - DNA, 25 bp, Homo sapien
ccatggtgtgagtgcttcaagagct

SEQ ID NO: 914007 - DNA, 25 bp, Homo sapien
gaaattgggtcaacatttccacatc

SEQ ID NO: 914008 - DNA, 25 bp, Homo sapien
tatggccatgttaggagggctccat

SEQ ID NO: 914009 - DNA, 25 bp, Homo sapien
atggtaaaggaaattgggtcaacat

SEQ ID NO: 914010 - DNA, 25 bp, Homo sapien
ttgtgttgggaatcaccaagtcacc

SEQ ID NO: 914011 - DNA, 25 bp, Homo sapien
acctacttcaatgcagtctctgcag

SEQ ID NO: 914012 - DNA, 25 bp, Homo sapien
aagtcacctacttcaatgcagtctc

SEQ ID NO: 914013 - DNA, 25 bp, Homo sapien
cctttgtgttgggaatcaccaagtc

SEQ ID NO: 914014 - DNA, 25 bp, Homo sapien
tccccgatccaagctgttgtccttt

SEQ ID NO: 914015 - DNA, 25 bp, Homo sapien
gttgtcctttcccagactccggctg

SEQ ID NO: 914016 - DNA, 25 bp, Homo sapien
ttcagagatgtctcacgtgtattcc

SEQ ID NO: 914017 - DNA, 25 bp, Homo sapien
cacgtgtattcctaagcaatgccaa

SEQ ID NO: 914018 - DNA, 25 bp, Homo sapien
tcagagctgtggaccttgcagctgc

SEQ ID NO: 914019 - DNA, 25 bp, Homo sapien
agcagaattgctgaccacttccaat

SEQ ID NO: 914020 - DNA, 25 bp, Homo sapien
gtggtcagagctgtggaccttgcag

SEQ ID NO: 914021 - DNA, 25 bp, Homo sapien
gaagcagaattgctgaccacttcca

SEQ ID NO: 914022 - DNA, 25 bp, Homo sapien
gcctttcccagcctgagggtgatgg

SEQ ID NO: 914023 - DNA, 25 bp, Homo sapien
tgagggtgatggcatccatgctgct

SEQ ID NO: 914024 - DNA, 25 bp, Homo sapien
gctgctggccctgtcattccccgcc

SEQ ID NO: 914025 - DNA, 25 bp, Homo sapien
cagcctgagggtgatggcatccatg

SEQ ID NO: 914026 - DNA, 25 bp, Homo sapien
tgttacaggagctatctaatgacct

SEQ ID NO: 914027 - DNA, 25 bp, Homo sapien
gtaaataaccttccttgaatcatcc

SEQ ID NO: 914028 - DNA, 25 bp, Homo sapien
taatgacctccgattgtaaaaagga

SEQ ID NO: 914029 - DNA, 25 bp, Homo sapien
agcatggagggcacataactaagaa

SEQ ID NO: 914030 - DNA, 25 bp, Homo sapien
caggtaggattaggatgaagggcag

SEQ ID NO: 914031 - DNA, 25 bp, Homo sapien
tttttggtgctaggtttcatagtgc

SEQ ID NO: 914032 - DNA, 25 bp, Homo sapien
ttggagcctcttccattagtgagga

SEQ ID NO: 914033 - DNA, 25 bp, Homo sapien
tagtgctcaacacatagacctgggc

SEQ ID NO: 914034 - DNA, 25 bp, Homo sapien
tcttggcactcggtcttctcatttg

SEQ ID NO: 914035 - DNA, 25 bp, Homo sapien
tgaccctcttggcactcggtcttct

SEQ ID NO: 914036 - DNA, 25 bp, Homo sapien
ggcactcggtcttctcatttggccc

SEQ ID NO: 914037 - DNA, 25 bp, Homo sapien
ttctcatttggccccgagaggcacg

SEQ ID NO: 914038 - DNA, 25 bp, Homo sapien
tgtgggctcggcgaatagacagaaa

SEQ ID NO: 914039 - DNA, 25 bp, Homo sapien
ggtcctgataaagtgattgagtgca

SEQ ID NO: 914040 - DNA, 25 bp, Homo sapien
tcaccgaaaactgttggaagcctag

SEQ ID NO: 914041 - DNA, 25 bp, Homo sapien
gcagaaccacccatgtcaagcattg

SEQ ID NO: 914042 - DNA, 25 bp, Homo sapien
tgggttcgattggtttcacggtcat

SEQ ID NO: 914043 - DNA, 25 bp, Homo sapien
caaagaagaacatctttagggcaaa

SEQ ID NO: 914044 - DNA, 25 bp, Homo sapien
aaagaagaacatctttagggcaaag

SEQ ID NO: 914045 - DNA, 25 bp, Homo sapien
agggcaaagttcttgggttcgattg

SEQ ID NO: 914046 - DNA, 25 bp, Homo sapien
tgatcactctgtttcagaaccacag

SEQ ID NO: 914047 - DNA, 25 bp, Homo sapien
tttgatcactctgtttcagaaccac

SEQ ID NO: 914048 - DNA, 25 bp, Homo sapien
tctgtttcagaaccacagaactttt

SEQ ID NO: 914049 - DNA, 25 bp, Homo sapien
tttcagaaccacagaacttttaggc

SEQ ID NO: 914050 - DNA, 25 bp, Homo sapien
ccatgtccatggctctgcattgtct

SEQ ID NO: 914051 - DNA, 25 bp, Homo sapien
ggctctcctgggacccggtcagtga

SEQ ID NO: 914052 - DNA, 25 bp, Homo sapien
ctagtgaaggatggacacgtgcccc

SEQ ID NO: 914053 - DNA, 25 bp, Homo sapien
gggccttgaggcctactccaatcct

SEQ ID NO: 914054 - DNA, 25 bp, Homo sapien
gatgattccaccatgcgactgagca

SEQ ID NO: 914055 - DNA, 25 bp, Homo sapien
tggtgcatggaacggcagcatcagc

SEQ ID NO: 914056 - DNA, 25 bp, Homo sapien
gaaaccctggcagcatggtcagtca

SEQ ID NO: 914057 - DNA, 25 bp, Homo sapien
gactgagcactatcgccagttgttg

SEQ ID NO: 914058 - DNA, 25 bp, Homo sapien
aaagggggttcccagagcagagtct

SEQ ID NO: 914059 - DNA, 25 bp, Homo sapien
gttggtgcggccaggcacgggaaag

SEQ ID NO: 914060 - DNA, 25 bp, Homo sapien
tgtgtgacagcagcctgttccgcgt

SEQ ID NO: 914061 - DNA, 25 bp, Homo sapien
ttctcctcaacccagatgccctgga

SEQ ID NO: 914062 - DNA, 25 bp, Homo sapien
gccaccgcgtgcatggaggtctgct

SEQ ID NO: 914063 - DNA, 25 bp, Homo sapien
accgcgtgcatggaggtctgcttga

SEQ ID NO: 914064 - DNA, 25 bp, Homo sapien
gcaggctgaagcttccaccttcccg

SEQ ID NO: 914065 - DNA, 25 bp, Homo sapien
caaggccaccgcgtgcatggaggtc

SEQ ID NO: 914066 - DNA, 25 bp, Homo sapien
gactgcctgcttactgtaccttggt

SEQ ID NO: 914067 - DNA, 25 bp, Homo sapien
gatttttgctatggagcttgtgccc

SEQ ID NO: 914068 - DNA, 25 bp, Homo sapien
atcttgctgggccagattcaccagg

SEQ ID NO: 914069 - DNA, 25 bp, Homo sapien
ccctgctttgaaggtggatcgccgc

SEQ ID NO: 914070 - DNA, 25 bp, Homo sapien
taagtgggcaaagcaggtgccagcc

SEQ ID NO: 914071 - DNA, 25 bp, Homo sapien
ctaagtgggcaaagcaggtgccagc

SEQ ID NO: 914072 - DNA, 25 bp, Homo sapien
gtgccagccccaccctgctcaggct

SEQ ID NO: 914073 - DNA, 25 bp, Homo sapien
cccaccctgctcaggctctctcagg

SEQ ID NO: 914074 - DNA, 25 bp, Homo sapien
gtgtgcgagttcactcctaacagct

SEQ ID NO: 914075 - DNA, 25 bp, Homo sapien
tcactcctaacagctctatgtctgg

SEQ ID NO: 914076 - DNA, 25 bp, Homo sapien
tcctaacagctctatgtctggccat

SEQ ID NO: 914077 - DNA, 25 bp, Homo sapien
gagttcactcctaacagctctatgt

SEQ ID NO: 914078 - DNA, 25 bp, Homo sapien
caggcagacacgaagttgtagtata

SEQ ID NO: 914079 - DNA, 25 bp, Homo sapien
ctctggcatttggaggttgttgaaa

SEQ ID NO: 914080 - DNA, 25 bp, Homo sapien
gaagttgtagtatagctgtcttggc

SEQ ID NO: 914081 - DNA, 25 bp, Homo sapien
ttttggcagcttccgacatctgcct

SEQ ID NO: 914082 - DNA, 25 bp, Homo sapien
tggccccttccatggcttccacagc

SEQ ID NO: 914083 - DNA, 25 bp, Homo sapien
tccacagccctttcttcaagacacc

SEQ ID NO: 914084 - DNA, 25 bp, Homo sapien
cttccacagccctttcttcaagaca

SEQ ID NO: 914085 - DNA, 25 bp, Homo sapien
cagccctttcttcaagacaccccat

SEQ ID NO: 914086 - DNA, 25 bp, Homo sapien
tagttgcaagctcgagataaataca

SEQ ID NO: 914087 - DNA, 25 bp, Homo sapien
tctgtcttattccatagtagttgca

SEQ ID NO: 914088 - DNA, 25 bp, Homo sapien
gcatattggaatccacagtgaatgt

SEQ ID NO: 914089 - DNA, 25 bp, Homo sapien
taaatacaagaagcatattggaatc

SEQ ID NO: 914090 - DNA, 25 bp, Homo sapien
cctctaacagcatatgcaggcctca

SEQ ID NO: 914091 - DNA, 25 bp, Homo sapien
ttggagacatactcttgaaccctgt

SEQ ID NO: 914092 - DNA, 25 bp, Homo sapien
ccttggcctgcggtgttattggaga

SEQ ID NO: 914093 - DNA, 25 bp, Homo sapien
aaatttgatggttaaccttggcctg

SEQ ID NO: 914094 - DNA, 25 bp, Homo sapien
ggttaaaatgagattacttgcctgc

SEQ ID NO: 914095 - DNA, 25 bp, Homo sapien
gcctgcagatacttgtaacaaagga

SEQ ID NO: 914096 - DNA, 25 bp, Homo sapien
tgtgtgccggttgtagggttcctca

SEQ ID NO: 914097 - DNA, 25 bp, Homo sapien
catgtcatccctaggtcttggccca

SEQ ID NO: 914098 - DNA, 25 bp, Homo sapien
catgaaaataaaggactcatagata

SEQ ID NO: 914099 - DNA, 25 bp, Homo sapien
ctgcatgtgataggaacatgaaaat

SEQ ID NO: 914100 - DNA, 25 bp, Homo sapien
aggactcatagatatttctggatgc

SEQ ID NO: 914101 - DNA, 25 bp, Homo sapien
tgtgataggaacatgaaaataaagg

SEQ ID NO: 914102 - DNA, 25 bp, Homo sapien
cctccttccatggtactgttgcagc

SEQ ID NO: 914103 - DNA, 25 bp, Homo sapien
ggccacatagatggcctccttccat

SEQ ID NO: 914104 - DNA, 25 bp, Homo sapien
cttccatggtactgttgcagctggg

SEQ ID NO: 914105 - DNA, 25 bp, Homo sapien
cttctctggccacatagatggcctc

SEQ ID NO: 914106 - DNA, 25 bp, Homo sapien
gactctgggtcccatgtaaggccat

SEQ ID NO: 914107 - DNA, 25 bp, Homo sapien
ggccttggggctcagccgaagtcag

SEQ ID NO: 914108 - DNA, 25 bp, Homo sapien
tgtgcatatgcgtgtcaggagcaga

SEQ ID NO: 914109 - DNA, 25 bp, Homo sapien
gaacaaacttgtcaaggagctctga

SEQ ID NO: 914110 - DNA, 25 bp, Homo sapien
tatagaggttaaggtctccctgtct

SEQ ID NO: 914111 - DNA, 25 bp, Homo sapien
tctgagagtgcgtctgagtttggct

SEQ ID NO: 914112 - DNA, 25 bp, Homo sapien
cagttccactgattctttcaggacc

SEQ ID NO: 914113 - DNA, 25 bp, Homo sapien
taagtacaaaagtgtggctctgtga

SEQ ID NO: 914114 - DNA, 25 bp, Homo sapien
tcaggaccatctgggttaagtacaa

SEQ ID NO: 914115 - DNA, 25 bp, Homo sapien
ttaagtacaaaagtgtggctctgtg

SEQ ID NO: 914116 - DNA, 25 bp, Homo sapien
tgtagactcctaggccctgtttagg

SEQ ID NO: 914117 - DNA, 25 bp, Homo sapien
gatgtggtgtaacctccagaggttc

SEQ ID NO: 914118 - DNA, 25 bp, Homo sapien
tagatccctactgcaggttccagtg

SEQ ID NO: 914119 - DNA, 25 bp, Homo sapien
tccagtgtccccctggtactttgag

SEQ ID NO: 914120 - DNA, 25 bp, Homo sapien
tgccctgccatggattccctagcag

SEQ ID NO: 914121 - DNA, 25 bp, Homo sapien
cctagcaggggttccgtgtgtaaca

SEQ ID NO: 914122 - DNA, 25 bp, Homo sapien
ctggagacggagcatccccaggttc

SEQ ID NO: 914123 - DNA, 25 bp, Homo sapien
catgtgcatgtacaagctggtattt

SEQ ID NO: 914124 - DNA, 25 bp, Homo sapien
acactgtggacgtccttgtgggctg

SEQ ID NO: 914125 - DNA, 25 bp, Homo sapien
cacccttgcagctgggcccaatgag

SEQ ID NO: 914126 - DNA, 25 bp, Homo sapien
cagcagggcatgtgcttggtgggac

SEQ ID NO: 914127 - DNA, 25 bp, Homo sapien
cccaatgagcgagcaatgggtggca

SEQ ID NO: 914128 - DNA, 25 bp, Homo sapien
gaatgagcgtcattagacacagatg

SEQ ID NO: 914129 - DNA, 25 bp, Homo sapien
gaaacagtagaacactacacaggtg

SEQ ID NO: 914130 - DNA, 25 bp, Homo sapien
tagactggcagtatccgaacttggg

SEQ ID NO: 914131 - DNA, 25 bp, Homo sapien
cctttgcccactgcatgctgttaga

SEQ ID NO: 914132 - DNA, 25 bp, Homo sapien
gcagatgagtgactgcttgtcatgg

SEQ ID NO: 914133 - DNA, 25 bp, Homo sapien
agatgagtgactgcttgtcatggtt

SEQ ID NO: 914134 - DNA, 25 bp, Homo sapien
cagatgagtgactgcttgtcatggt

SEQ ID NO: 914135 - DNA, 25 bp, Homo sapien
agaactgcagatgagtgactgcttg

SEQ ID NO: 914136 - DNA, 25 bp, Homo sapien
gttttattcagttctttaccatcca

SEQ ID NO: 914137 - DNA, 25 bp, Homo sapien
agcaatggatgcctcacggtctagt

SEQ ID NO: 914138 - DNA, 25 bp, Homo sapien
gatgcctcacggtctagttcccaag

SEQ ID NO: 914139 - DNA, 25 bp, Homo sapien
tctttaccatccattttggaaaagc

SEQ ID NO: 914140 - DNA, 25 bp, Homo sapien
gaaacgcagaagctttcctcacctt

SEQ ID NO: 914141 - DNA, 25 bp, Homo sapien
taaagcacaactccccatcaaattg

SEQ ID NO: 914142 - DNA, 25 bp, Homo sapien
tcaaattgcctcttgagaaacgcag

SEQ ID NO: 914143 - DNA, 25 bp, Homo sapien
ccagacctggacttgcataggagat

SEQ ID NO: 914144 - DNA, 25 bp, Homo sapien
ttagtcaccacccttgggcacagag

SEQ ID NO: 914145 - DNA, 25 bp, Homo sapien
tggccagtttgagtggtcctgacaa

SEQ ID NO: 914146 - DNA, 25 bp, Homo sapien
gactcagcattggagccctgcctga

SEQ ID NO: 914147 - DNA, 25 bp, Homo sapien
ttcccctgcaggactcagcattgga

SEQ ID NO: 914148 - DNA, 25 bp, Homo sapien
gggaagctgtgcctgacattctcaa

SEQ ID NO: 914149 - DNA, 25 bp, Homo sapien
cctgacattctcaatgaggtcctga

SEQ ID NO: 914150 - DNA, 25 bp, Homo sapien
tatgactctcaagttccagcagcct

SEQ ID NO: 914151 - DNA, 25 bp, Homo sapien
gcagcctttcttgtggacactcctg

SEQ ID NO: 914152 - DNA, 25 bp, Homo sapien
tacagttaagattcttgcagttccc

SEQ ID NO: 914153 - DNA, 25 bp, Homo sapien
cacccttttcatagaagtaggtgtt

SEQ ID NO: 914154 - DNA, 25 bp, Homo sapien
ctcatcatagatacagttaagattc

SEQ ID NO: 914155 - DNA, 25 bp, Homo sapien
caggtggcctatactcctcatcata

SEQ ID NO: 914156 - DNA, 25 bp, Homo sapien
tgaactccacctcgtctttctcagc

SEQ ID NO: 914157 - DNA, 25 bp, Homo sapien
catctgggtgatatcccttcagttt

SEQ ID NO: 914158 - DNA, 25 bp, Homo sapien
ccaacaccagaatctgagtggagag

SEQ ID NO: 914159 - DNA, 25 bp, Homo sapien
tctgagtggagagtttcatctgggt

SEQ ID NO: 914160 - DNA, 25 bp, Homo sapien
cccagtaaagtcgtatgaagtgatg

SEQ ID NO: 914161 - DNA, 25 bp, Homo sapien
tatgcccccaattctgcaacaggaa

SEQ ID NO: 914162 - DNA, 25 bp, Homo sapien
gcttcctgagtatccccagtaaagt

SEQ ID NO: 914163 - DNA, 25 bp, Homo sapien
gaaaaagtggacattccagaagaat

SEQ ID NO: 914164 - DNA, 25 bp, Homo sapien
ggtagactctgtgttcttggttcta

SEQ ID NO: 914165 - DNA, 25 bp, Homo sapien
tgggtagactctgtgttcttggttc

SEQ ID NO: 914166 - DNA, 25 bp, Homo sapien
ctcttttagctctcttgtatgaagc

SEQ ID NO: 914167 - DNA, 25 bp, Homo sapien
ttttagctctcttgtatgaagcttc

SEQ ID NO: 914168 - DNA, 25 bp, Homo sapien
ttccattaccccttgcactttggtg

SEQ ID NO: 914169 - DNA, 25 bp, Homo sapien
actttggtgtgcaggtttgcccctg

SEQ ID NO: 914170 - DNA, 25 bp, Homo sapien
ttaccccttgcactttggtgtgcag

SEQ ID NO: 914171 - DNA, 25 bp, Homo sapien
acttcaagttccattaccccttgca

SEQ ID NO: 914172 - DNA, 25 bp, Homo sapien
actgtagagtctgttcccacccttg

SEQ ID NO: 914173 - DNA, 25 bp, Homo sapien
taaggataggcaccagcagtttggc

SEQ ID NO: 914174 - DNA, 25 bp, Homo sapien
tataacctatgggtgtgtccagcaa

SEQ ID NO: 914175 - DNA, 25 bp, Homo sapien
tgagatatgccaccaggagttgctg

SEQ ID NO: 914176 - DNA, 25 bp, Homo sapien
cttccccagtaatacatctattgtc

SEQ ID NO: 914177 - DNA, 25 bp, Homo sapien
ggtcctctccccatgccacggacat

SEQ ID NO: 914178 - DNA, 25 bp, Homo sapien
taatacatctattgtcacaccacca

SEQ ID NO: 914179 - DNA, 25 bp, Homo sapien
cagtgctttactggcccggtcctct

SEQ ID NO: 914180 - DNA, 25 bp, Homo sapien
tttcaaaattgtcagtgcactgctg

SEQ ID NO: 914181 - DNA, 25 bp, Homo sapien
gcgtgacaaatacaaagcgacaaaa

SEQ ID NO: 914182 - DNA, 25 bp, Homo sapien
gattccagcagaaatcgaaattcca

SEQ ID NO: 914183 - DNA, 25 bp, Homo sapien
tgaatgtacggacaaacccacgtgg

SEQ ID NO: 914184 - DNA, 25 bp, Homo sapien
gcctgcaccgattcggtacgttcaa

SEQ ID NO: 914185 - DNA, 25 bp, Homo sapien
gggctgcctgcaccgattcggtacg

SEQ ID NO: 914186 - DNA, 25 bp, Homo sapien
gattcggtacgttcaaattggtctg

SEQ ID NO: 914187 - DNA, 25 bp, Homo sapien
acatccatctcttacatataatcat

SEQ ID NO: 914188 - DNA, 25 bp, Homo sapien
tggctcaaaggcttgacgagaatca

SEQ ID NO: 914189 - DNA, 25 bp, Homo sapien
tgtaactgctaagtgtggctcaaag

SEQ ID NO: 914190 - DNA, 25 bp, Homo sapien
agcatttgtagacactgagctcatc

SEQ ID NO: 914191 - DNA, 25 bp, Homo sapien
taagtgatacttcacagggaatgcc

SEQ ID NO: 914192 - DNA, 25 bp, Homo sapien
tgcttcttcccttgccgatactgtc

SEQ ID NO: 914193 - DNA, 25 bp, Homo sapien
tcccttgccgatactgtcttcactt

SEQ ID NO: 914194 - DNA, 25 bp, Homo sapien
cagggccttttcagcacagttgcat

SEQ ID NO: 914195 - DNA, 25 bp, Homo sapien
tccctagcttgaccatccagagcaa

SEQ ID NO: 914196 - DNA, 25 bp, Homo sapien
cactttctacctcactaaaacaggc

SEQ ID NO: 914197 - DNA, 25 bp, Homo sapien
tttctacctcactaaaacaggccac

SEQ ID NO: 914198 - DNA, 25 bp, Homo sapien
gtctgcttgccattgagcctcacct

SEQ ID NO: 914199 - DNA, 25 bp, Homo sapien
ctttgtcctctcgtctgcttgccat

SEQ ID NO: 914200 - DNA, 25 bp, Homo sapien
atagctacacctggactccgcatgg

SEQ ID NO: 914201 - DNA, 25 bp, Homo sapien
catggccgtctccaagtggtgatga

SEQ ID NO: 914202 - DNA, 25 bp, Homo sapien
gttggcatagctacacctggactcc

SEQ ID NO: 914203 - DNA, 25 bp, Homo sapien
tgcaggatcttgtccatcttcacat

SEQ ID NO: 914204 - DNA, 25 bp, Homo sapien
caatagcattgatggcatttttctg

SEQ ID NO: 914205 - DNA, 25 bp, Homo sapien
tacaatagcattgatggcatttttc

SEQ ID NO: 914206 - DNA, 25 bp, Homo sapien
ttacaatagcattgatggcattttt

SEQ ID NO: 914207 - DNA, 25 bp, Homo sapien
aatagcattgatggcatttttctga

SEQ ID NO: 914208 - DNA, 25 bp, Homo sapien
ggcagagggtacctgtggttgtatt

SEQ ID NO: 914209 - DNA, 25 bp, Homo sapien
gggctctcctggaattgagaactca

SEQ ID NO: 914210 - DNA, 25 bp, Homo sapien
ggctctcctggaattgagaactcac

SEQ ID NO: 914211 - DNA, 25 bp, Homo sapien
cacagcaatgtgacatggaactcgt

SEQ ID NO: 914212 - DNA, 25 bp, Homo sapien
gcaatgtgacatggaactcgtcttc

SEQ ID NO: 914213 - DNA, 25 bp, Homo sapien
aatgtgacatggaactcgtcttctc

SEQ ID NO: 914214 - DNA, 25 bp, Homo sapien
cagcaatgtgacatggaactcgtct

SEQ ID NO: 914215 - DNA, 25 bp, Homo sapien
tgtggctgcacagagtttgaatctt

SEQ ID NO: 914216 - DNA, 25 bp, Homo sapien
gagtttgaatcttggtgccacatgt

SEQ ID NO: 914217 - DNA, 25 bp, Homo sapien
agagtttgaatcttggtgccacatg

SEQ ID NO: 914218 - DNA, 25 bp, Homo sapien
tttgaatcttggtgccacatgtcac

SEQ ID NO: 914219 - DNA, 25 bp, Homo sapien
gcagggggacgagggcaatctgcat

SEQ ID NO: 914220 - DNA, 25 bp, Homo sapien
gtttttccatgctaccctgtgtagc

SEQ ID NO: 914221 - DNA, 25 bp, Homo sapien
ctgcaatggttgcattttagcatat

SEQ ID NO: 914222 - DNA, 25 bp, Homo sapien
ccagtcacaaatctgcaatggttgc

SEQ ID NO: 914223 - DNA, 25 bp, Homo sapien
tcagtcatccagctttgaatggttt

SEQ ID NO: 914224 - DNA, 25 bp, Homo sapien
ctaaggccatgcaggttttggccat

SEQ ID NO: 914225 - DNA, 25 bp, Homo sapien
ataactaaggccatgcaggttttgg

SEQ ID NO: 914226 - DNA, 25 bp, Homo sapien
tgcaataactaaggccatgcaggtt

SEQ ID NO: 914227 - DNA, 25 bp, Homo sapien
cactgctgcaataactaaggccatg

SEQ ID NO: 914228 - DNA, 25 bp, Homo sapien
tcaggcacgtgtgttgcagtaacac

SEQ ID NO: 914229 - DNA, 25 bp, Homo sapien
gcttttgagctgagcaccaagctga

SEQ ID NO: 914230 - DNA, 25 bp, Homo sapien
tgccctagggcaaaaatccatttta

SEQ ID NO: 914231 - DNA, 25 bp, Homo sapien
ccagtgagagttgagagatgaagca

SEQ ID NO: 914232 - DNA, 25 bp, Homo sapien
gctttctgctctaaggatgcttggc

SEQ ID NO: 914233 - DNA, 25 bp, Homo sapien
tagcatggcttcacattcttctgtg

SEQ ID NO: 914234 - DNA, 25 bp, Homo sapien
gatgcttggctccagaggaagtaac

SEQ ID NO: 914235 - DNA, 25 bp, Homo sapien
tctaaggatgcttggctccagagga

SEQ ID NO: 914236 - DNA, 25 bp, Homo sapien
tggactagatctgtgctctcctttc

SEQ ID NO: 914237 - DNA, 25 bp, Homo sapien
tcatctttaaaggtggaaacttctg

SEQ ID NO: 914238 - DNA, 25 bp, Homo sapien
tctttaaaggtggaaacttctgcca

SEQ ID NO: 914239 - DNA, 25 bp, Homo sapien
tcaaaccattgtgaagctgtattgc

SEQ ID NO: 914240 - DNA, 25 bp, Homo sapien
atactggagctgatgctttaggctt

SEQ ID NO: 914241 - DNA, 25 bp, Homo sapien
ctggagctgatgctttaggctttct

SEQ ID NO: 914242 - DNA, 25 bp, Homo sapien
ttctaattcccactatctgctgcca

SEQ ID NO: 914243 - DNA, 25 bp, Homo sapien
ctaacttgacagagaacacagaggt

SEQ ID NO: 914244 - DNA, 25 bp, Homo sapien
acacagaggtcttctaattcccact

SEQ ID NO: 914245 - DNA, 25 bp, Homo sapien
gagaacacagaggtcttctaattcc

SEQ ID NO: 914246 - DNA, 25 bp, Homo sapien
tgccccttcacagtcagaagagagc

SEQ ID NO: 914247 - DNA, 25 bp, Homo sapien
tgcaccaactgcttttaggcagccg

SEQ ID NO: 914248 - DNA, 25 bp, Homo sapien
taggcagccgctgcacgggtgtaac

SEQ ID NO: 914249 - DNA, 25 bp, Homo sapien
tcctcatctgctgactgtgcaccaa

SEQ ID NO: 914250 - DNA, 25 bp, Homo sapien
ctgccacggaagtctgaggttgtca

SEQ ID NO: 914251 - DNA, 25 bp, Homo sapien
cacggaagtctgaggttgtcagaga

SEQ ID NO: 914252 - DNA, 25 bp, Homo sapien
gaaagcattgcctgattggcactca

SEQ ID NO: 914253 - DNA, 25 bp, Homo sapien
tgtgcactgccacggaagtctgagg

SEQ ID NO: 914254 - DNA, 25 bp, Homo sapien
ccctccttcctgtgtgcggagccca

SEQ ID NO: 914255 - DNA, 25 bp, Homo sapien
tgggccctctgtcctctttgttctc

SEQ ID NO: 914256 - DNA, 25 bp, Homo sapien
cttcctgtgtgcggagcccaggcct

SEQ ID NO: 914257 - DNA, 25 bp, Homo sapien
cctctttgttctcatccacctcggc

SEQ ID NO: 914258 - DNA, 25 bp, Homo sapien
ccaagaggtatgagagagtgcacca

SEQ ID NO: 914259 - DNA, 25 bp, Homo sapien
cagcctttgttgcaggactagagga

SEQ ID NO: 914260 - DNA, 25 bp, Homo sapien
cctgcctgtgaatggctctgagatc

SEQ ID NO: 914261 - DNA, 25 bp, Homo sapien
gcagtagagagacgcttgccaaggt

SEQ ID NO: 914262 - DNA, 25 bp, Homo sapien
ttacaggtactggattgacgtcaca

SEQ ID NO: 914263 - DNA, 25 bp, Homo sapien
tgacgtcacagttgccggtgacttt

SEQ ID NO: 914264 - DNA, 25 bp, Homo sapien
tactggattgacgtcacagttgccg

SEQ ID NO: 914265 - DNA, 25 bp, Homo sapien
tcacagttgccggtgacttttttgg

SEQ ID NO: 914266 - DNA, 25 bp, Homo sapien
gcatgtgaggatgagcccctcaata

SEQ ID NO: 914267 - DNA, 25 bp, Homo sapien
tgatgagagctgacacccaaaatgc

SEQ ID NO: 914268 - DNA, 25 bp, Homo sapien
ctcaatatcacgaggtatctgtaaa

SEQ ID NO: 914269 - DNA, 25 bp, Homo sapien
tgagagctgacacccaaaatgcaat

SEQ ID NO: 914270 - DNA, 25 bp, Homo sapien
tgaaaccaacgagcagcactgagag

SEQ ID NO: 914271 - DNA, 25 bp, Homo sapien
aaagtctccatgaaaccaacgagca

SEQ ID NO: 914272 - DNA, 25 bp, Homo sapien
gagccaaggtcataatctgggaaga

SEQ ID NO: 914273 - DNA, 25 bp, Homo sapien
ccaaggtcataatctgggaagacat

SEQ ID NO: 914274 - DNA, 25 bp, Homo sapien
atccaagactctgcacagtcttggc

SEQ ID NO: 914275 - DNA, 25 bp, Homo sapien
tcttggctcaaatggattaagagtt

SEQ ID NO: 914276 - DNA, 25 bp, Homo sapien
gagatgcaagggttgccaaagtcat

SEQ ID NO: 914277 - DNA, 25 bp, Homo sapien
tcggtgcaataatcaagtgactcgg

SEQ ID NO: 914278 - DNA, 25 bp, Homo sapien
ctaaccataaccctctccattattt

SEQ ID NO: 914279 - DNA, 25 bp, Homo sapien
aatctgcaggaaaacttcagcagca

SEQ ID NO: 914280 - DNA, 25 bp, Homo sapien
caggaaaacttcagcagcaaaatcc

SEQ ID NO: 914281 - DNA, 25 bp, Homo sapien
ggaaaacttcagcagcaaaatccat

SEQ ID NO: 914282 - DNA, 25 bp, Homo sapien
tctgcaggaaaacttcagcagcaaa

SEQ ID NO: 914283 - DNA, 25 bp, Homo sapien
aatgggtaggtgggaatgcagaata

SEQ ID NO: 914284 - DNA, 25 bp, Homo sapien
ggcttccaggatactgggaatcttg

SEQ ID NO: 914285 - DNA, 25 bp, Homo sapien
gggaatcttggaaggtttgctctgt

SEQ ID NO: 914286 - DNA, 25 bp, Homo sapien
agaatatatactttctctcttctga

SEQ ID NO: 914287 - DNA, 25 bp, Homo sapien
atcaaggatatcaccctgaagtttt

SEQ ID NO: 914288 - DNA, 25 bp, Homo sapien
tcaataggattgatctttgtatgtc

SEQ ID NO: 914289 - DNA, 25 bp, Homo sapien
ccgtgtctggcaatttgtgtatgct

SEQ ID NO: 914290 - DNA, 25 bp, Homo sapien
ctggattcagtttacttgtgctttc

SEQ ID NO: 914291 - DNA, 25 bp, Homo sapien
tgcagtggaagcatatttggttgag

SEQ ID NO: 914292 - DNA, 25 bp, Homo sapien
aagtggaccatatgcctgatcaacc

SEQ ID NO: 914293 - DNA, 25 bp, Homo sapien
tcaatgatcaatgtgcagtggaagc

SEQ ID NO: 914294 - DNA, 25 bp, Homo sapien
tggttgagctgtagccagcgataac

SEQ ID NO: 914295 - DNA, 25 bp, Homo sapien
cagaaccagagtcttgtcagggact

SEQ ID NO: 914296 - DNA, 25 bp, Homo sapien
tgctgccccttcagatgagcccatg

SEQ ID NO: 914297 - DNA, 25 bp, Homo sapien
aacttcccagggaggagagccaaga

SEQ ID NO: 914298 - DNA, 25 bp, Homo sapien
acacgagggttccttcagaagacag

SEQ ID NO: 914299 - DNA, 25 bp, Homo sapien
cacgtgatcgcattgtaaaataaac

SEQ ID NO: 914300 - DNA, 25 bp, Homo sapien
tccgcgcccttgtagtttccacttg

SEQ ID NO: 914301 - DNA, 25 bp, Homo sapien
tagcactgtagtcaggttccgcgcc

SEQ ID NO: 914302 - DNA, 25 bp, Homo sapien
aagcccaaggccatcataacacgtg

SEQ ID NO: 914303 - DNA, 25 bp, Homo sapien
ctcaatcacacaaatatctgttgaa

SEQ ID NO: 914304 - DNA, 25 bp, Homo sapien
tttggaatatttaaagaagcattag

SEQ ID NO: 914305 - DNA, 25 bp, Homo sapien
tatctgttgaatttggaatatttaa

SEQ ID NO: 914306 - DNA, 25 bp, Homo sapien
gaatatttaaagaagcattaggaaa

SEQ ID NO: 914307 - DNA, 25 bp, Homo sapien
ggcactcatagaaggttccagccat

SEQ ID NO: 914308 - DNA, 25 bp, Homo sapien
tggcactcatagaaggttccagcca

SEQ ID NO: 914309 - DNA, 25 bp, Homo sapien
gtattccacttgagggcattcctgc

SEQ ID NO: 914310 - DNA, 25 bp, Homo sapien
agtgggcgggagtgagggtctgtat

SEQ ID NO: 914311 - DNA, 25 bp, Homo sapien
gtgagggtctgtattccacttgagg

SEQ ID NO: 914312 - DNA, 25 bp, Homo sapien
acttgagggcattcctgcccccgaa

SEQ ID NO: 914313 - DNA, 25 bp, Homo sapien
gctctgagcatggtgcttccttgaa

SEQ ID NO: 914314 - DNA, 25 bp, Homo sapien
ctctgagcatggtgcttccttgaag

SEQ ID NO: 914315 - DNA, 25 bp, Homo sapien
ccttctatataaggacgggcagcag

SEQ ID NO: 914316 - DNA, 25 bp, Homo sapien
cattatctgcgatgatagccttcta

SEQ ID NO: 914317 - DNA, 25 bp, Homo sapien
gatgatagccttctatataaggacg

SEQ ID NO: 914318 - DNA, 25 bp, Homo sapien
cttggtagtcattatctgcgatgat

SEQ ID NO: 914319 - DNA, 25 bp, Homo sapien
tagcaacaactaatccaagtaacat

SEQ ID NO: 914320 - DNA, 25 bp, Homo sapien
taatccaagtaacatttgtacacag

SEQ ID NO: 914321 - DNA, 25 bp, Homo sapien
catttgtacacagtattgggactct

SEQ ID NO: 914322 - DNA, 25 bp, Homo sapien
agtattgggactctatgttctcagc

SEQ ID NO: 914323 - DNA, 25 bp, Homo sapien
gttcttctacggaagtcgagggcat

SEQ ID NO: 914324 - DNA, 25 bp, Homo sapien
ctgttcttctacggaagtcgagggc

SEQ ID NO: 914325 - DNA, 25 bp, Homo sapien
tgttcttctacggaagtcgagggca

SEQ ID NO: 914326 - DNA, 25 bp, Homo sapien
ttcagtaaaagtactatataaaaga

SEQ ID NO: 914327 - DNA, 25 bp, Homo sapien
caattcagtaaaagtactatataaa

SEQ ID NO: 914328 - DNA, 25 bp, Homo sapien
ccccaattcagtaaaagtactatat

SEQ ID NO: 914329 - DNA, 25 bp, Homo sapien
tactatataaaagaagcaaaaactc

SEQ ID NO: 914330 - DNA, 25 bp, Homo sapien
gttttcagaccatgcagggctctca

SEQ ID NO: 914331 - DNA, 25 bp, Homo sapien
ctgaaggatgcggtaggaacagccc

SEQ ID NO: 914332 - DNA, 25 bp, Homo sapien
gagcctctaggaccatcgcctctgt

SEQ ID NO: 914333 - DNA, 25 bp, Homo sapien
gacggacgcccactcgtagtgaaat

SEQ ID NO: 914334 - DNA, 25 bp, Homo sapien
catttccagtgctgtaggcgattac

SEQ ID NO: 914335 - DNA, 25 bp, Homo sapien
aaagcgcctcgcaaacatcgctggg

SEQ ID NO: 914336 - DNA, 25 bp, Homo sapien
ggcattctgccacgcccgtgatggt

SEQ ID NO: 914337 - DNA, 25 bp, Homo sapien
ctgctgcagggaaagcgacgctctt

SEQ ID NO: 914338 - DNA, 25 bp, Homo sapien
cttgcattattgcaatgctactgtc

SEQ ID NO: 914339 - DNA, 25 bp, Homo sapien
tccctgaaagtcttgcattattgca

SEQ ID NO: 914340 - DNA, 25 bp, Homo sapien
aagtcttgcattattgcaatgctac

SEQ ID NO: 914341 - DNA, 25 bp, Homo sapien
tgaaagtcttgcattattgcaatgc

SEQ ID NO: 914342 - DNA, 25 bp, Homo sapien
caagagtactaggttctctgagaac

SEQ ID NO: 914343 - DNA, 25 bp, Homo sapien
attgaaagcattgttagatttctcc

SEQ ID NO: 914344 - DNA, 25 bp, Homo sapien
agatgcaggaacctggattgaaagc

SEQ ID NO: 914345 - DNA, 25 bp, Homo sapien
gcatccaagagtactaggttctctg

SEQ ID NO: 914346 - DNA, 25 bp, Homo sapien
cttagataaacttgctgatttctgg

SEQ ID NO: 914347 - DNA, 25 bp, Homo sapien
gatactgaaagcttagataaacttg

SEQ ID NO: 914348 - DNA, 25 bp, Homo sapien
aagcttagataaacttgctgatttc

SEQ ID NO: 914349 - DNA, 25 bp, Homo sapien
ctgaaagcttagataaacttgctga

SEQ ID NO: 914350 - DNA, 25 bp, Homo sapien
aggttggcgttgttgtttccattgt

SEQ ID NO: 914351 - DNA, 25 bp, Homo sapien
gaggttggcgttgttgtttccattg

SEQ ID NO: 914352 - DNA, 25 bp, Homo sapien
cattgtttctgttgtgctggtggag

SEQ ID NO: 914353 - DNA, 25 bp, Homo sapien
accaattgcaagttaagtgctgcaa

SEQ ID NO: 914354 - DNA, 25 bp, Homo sapien
agctgcctgctgacacttccaaaat

SEQ ID NO: 914355 - DNA, 25 bp, Homo sapien
gaataaccaattgcaagttaagtgc

SEQ ID NO: 914356 - DNA, 25 bp, Homo sapien
ctggaataaccaattgcaagttaag

SEQ ID NO: 914357 - DNA, 25 bp, Homo sapien
cagtggttctggtgttagttaatac

SEQ ID NO: 914358 - DNA, 25 bp, Homo sapien
cttctcctcagtggttctggtgtta

SEQ ID NO: 914359 - DNA, 25 bp, Homo sapien
cctcagtggttctggtgttagttaa

SEQ ID NO: 914360 - DNA, 25 bp, Homo sapien
tctggtgttagttaataccacagtg

SEQ ID NO: 914361 - DNA, 25 bp, Homo sapien
tcagagtgccgccaatgaggattct

SEQ ID NO: 914362 - DNA, 25 bp, Homo sapien
cagagtgccgccaatgaggattctt

SEQ ID NO: 914363 - DNA, 25 bp, Homo sapien
caacatctctcagagtgccgccaat

SEQ ID NO: 914364 - DNA, 25 bp, Homo sapien
atctctcagagtgccgccaatgagg

SEQ ID NO: 914365 - DNA, 25 bp, Homo sapien
acattgctgactgctttgtggttga

SEQ ID NO: 914366 - DNA, 25 bp, Homo sapien
tgctgactgctttgtggttgatact

SEQ ID NO: 914367 - DNA, 25 bp, Homo sapien
gtgtcaacattgctgactgctttgt

SEQ ID NO: 914368 - DNA, 25 bp, Homo sapien
gctttgtggttgatacttacaagca

SEQ ID NO: 914369 - DNA, 25 bp, Homo sapien
tccctttcctgtgataatgttactg

SEQ ID NO: 914370 - DNA, 25 bp, Homo sapien
ctccaaacctatgcagaaaggactg

SEQ ID NO: 914371 - DNA, 25 bp, Homo sapien
gccatgatggtcagctccaaaccta

SEQ ID NO: 914372 - DNA, 25 bp, Homo sapien
cctttcctgtgataatgttactgat

SEQ ID NO: 914373 - DNA, 25 bp, Homo sapien
cagcccgagagctctatatagtatt

SEQ ID NO: 914374 - DNA, 25 bp, Homo sapien
cttcataagaaggtgagaataacta

SEQ ID NO: 914375 - DNA, 25 bp, Homo sapien
tcccttaggaatgtccaactgatag

SEQ ID NO: 914376 - DNA, 25 bp, Homo sapien
tatttccatatcagcagaaggtccc

SEQ ID NO: 914377 - DNA, 25 bp, Homo sapien
tcttgtatgctggctatatttgttc

SEQ ID NO: 914378 - DNA, 25 bp, Homo sapien
cttgtatgctggctatatttgttcc

SEQ ID NO: 914379 - DNA, 25 bp, Homo sapien
tgtatgctggctatatttgttcctt

SEQ ID NO: 914380 - DNA, 25 bp, Homo sapien
aatttcttcagcacgggaacctcag

SEQ ID NO: 914381 - DNA, 25 bp, Homo sapien
cagcactgacatcttggaccccttg

SEQ ID NO: 914382 - DNA, 25 bp, Homo sapien
atctcccaatatctggcaaatgtgg

SEQ ID NO: 914383 - DNA, 25 bp, Homo sapien
gcttctgagtgagagcagtggtatc

SEQ ID NO: 914384 - DNA, 25 bp, Homo sapien
catcttggaccccttgagattcagg

SEQ ID NO: 914385 - DNA, 25 bp, Homo sapien
gtctgaagattttccacaagtagtt

SEQ ID NO: 914386 - DNA, 25 bp, Homo sapien
tctgaagattttccacaagtagttt

SEQ ID NO: 914387 - DNA, 25 bp, Homo sapien
tgaagattttccacaagtagtttaa

SEQ ID NO: 914388 - DNA, 25 bp, Homo sapien
ctgaagattttccacaagtagttta

SEQ ID NO: 914389 - DNA, 25 bp, Homo sapien
tggggagggcctgttcccatcccac

SEQ ID NO: 914390 - DNA, 25 bp, Homo sapien
agtgtggggagggcctgttcccatc

SEQ ID NO: 914391 - DNA, 25 bp, Homo sapien
ggagtgtggggagggcctgttccca

SEQ ID NO: 914392 - DNA, 25 bp, Homo sapien
ccaactgggcagttcagggagtgtg

SEQ ID NO: 914393 - DNA, 25 bp, Homo sapien
ctcctccatgttcaagacttttcat

SEQ ID NO: 914394 - DNA, 25 bp, Homo sapien
cttctacacccgctaaaggcgagaa

SEQ ID NO: 914395 - DNA, 25 bp, Homo sapien
cgagaaggtctgagatttcactgtt

SEQ ID NO: 914396 - DNA, 25 bp, Homo sapien
cccgctaaaggcgagaaggtctgag

SEQ ID NO: 914397 - DNA, 25 bp, Homo sapien
tccctgagatacagaagtctgaggc

SEQ ID NO: 914398 - DNA, 25 bp, Homo sapien
gctccatgctagagaagccacttgt

SEQ ID NO: 914399 - DNA, 25 bp, Homo sapien
ggtacttgtctcactaagaggtgga

SEQ ID NO: 914400 - DNA, 25 bp, Homo sapien
cataggaagggcttacaactttcac

SEQ ID NO: 914401 - DNA, 25 bp, Homo sapien
ggctgacggtcaagtgcttgtaaga

SEQ ID NO: 914402 - DNA, 25 bp, Homo sapien
gcaatttctacaacagcatctcttg

SEQ ID NO: 914403 - DNA, 25 bp, Homo sapien
tctcttgagtatgttctggacatct

SEQ ID NO: 914404 - DNA, 25 bp, Homo sapien
gacggtcaagtgcttgtaagaccat

SEQ ID NO: 914405 - DNA, 25 bp, Homo sapien
tttacgccaagtttgattttcacag

SEQ ID NO: 914406 - DNA, 25 bp, Homo sapien
agcaaaagggctcagatttacgcca

SEQ ID NO: 914407 - DNA, 25 bp, Homo sapien
caactaccggcctctcgactgacat

SEQ ID NO: 914408 - DNA, 25 bp, Homo sapien
tcacagttgacagttatagagccag

SEQ ID NO: 914409 - DNA, 25 bp, Homo sapien
tgtatctgtataggctctgtgtgag

SEQ ID NO: 914410 - DNA, 25 bp, Homo sapien
tacccgctgccgtagaattttctcc

SEQ ID NO: 914411 - DNA, 25 bp, Homo sapien
tgacccattacacagttacccgctg

SEQ ID NO: 914412 - DNA, 25 bp, Homo sapien
cccataggtttcctgttgtgaccca

SEQ ID NO: 914413 - DNA, 25 bp, Homo sapien
tcctgcttcttgtctgagattggcc

SEQ ID NO: 914414 - DNA, 25 bp, Homo sapien
tccagtcacccctccgctgggctcc

SEQ ID NO: 914415 - DNA, 25 bp, Homo sapien
agtcacccctccgctgggctcctgc

SEQ ID NO: 914416 - DNA, 25 bp, Homo sapien
gcttcttgtctgagattggcctcat

SEQ ID NO: 914417 - DNA, 25 bp, Homo sapien
tcccagggtattactaggctcagct

SEQ ID NO: 914418 - DNA, 25 bp, Homo sapien
cccagggtattactaggctcagctg

SEQ ID NO: 914419 - DNA, 25 bp, Homo sapien
agggtcatatggagcagctccctgc

SEQ ID NO: 914420 - DNA, 25 bp, Homo sapien
tcaagggtcatatggagcagctccc

SEQ ID NO: 914421 - DNA, 25 bp, Homo sapien
ttcaatcttggttgccactgagaca

SEQ ID NO: 914422 - DNA, 25 bp, Homo sapien
cattcaatcttggttgccactgaga

SEQ ID NO: 914423 - DNA, 25 bp, Homo sapien
ccccattcaatcttggttgccactg

SEQ ID NO: 914424 - DNA, 25 bp, Homo sapien
atcccccattcaatcttggttgcca

SEQ ID NO: 914425 - DNA, 25 bp, Homo sapien
caatcttgcttttccttttcctcac

SEQ ID NO: 914426 - DNA, 25 bp, Homo sapien
tcaatcttgcttttccttttcctca

SEQ ID NO: 914427 - DNA, 25 bp, Homo sapien
tgccctgcttgtcccaaataatagg

SEQ ID NO: 914428 - DNA, 25 bp, Homo sapien
ggcccaaagttactggcaagttgcc

SEQ ID NO: 914429 - DNA, 25 bp, Homo sapien
gaaattgtcgcagtgttgtgtcagc

SEQ ID NO: 914430 - DNA, 25 bp, Homo sapien
ctgggaaagcttcaattggtgtcat

SEQ ID NO: 914431 - DNA, 25 bp, Homo sapien
gcactagcgcgaaggtcagctccat

SEQ ID NO: 914432 - DNA, 25 bp, Homo sapien
caggccgcggctgatgctggggtcc

SEQ ID NO: 914433 - DNA, 25 bp, Homo sapien
cctgcactagcgcgaaggtcagctc

SEQ ID NO: 914434 - DNA, 25 bp, Homo sapien
ggtcctgcactagcgcgaaggtcag

SEQ ID NO: 914435 - DNA, 25 bp, Homo sapien
aacagttttagatccagctagctca

SEQ ID NO: 914436 - DNA, 25 bp, Homo sapien
caaaacagttttagatccagctagc

SEQ ID NO: 914437 - DNA, 25 bp, Homo sapien
agctagctcagcaaactcgaagctg

SEQ ID NO: 914438 - DNA, 25 bp, Homo sapien
aaacagttttagatccagctagctc

SEQ ID NO: 914439 - DNA, 25 bp, Homo sapien
gggtgtagatcctctctgactgatt

SEQ ID NO: 914440 - DNA, 25 bp, Homo sapien
gactgattagagaggctccaatgag

SEQ ID NO: 914441 - DNA, 25 bp, Homo sapien
aggctcctgcctcaagtttatttag

SEQ ID NO: 914442 - DNA, 25 bp, Homo sapien
gggtgctccatagatcctctctgat

SEQ ID NO: 914443 - DNA, 25 bp, Homo sapien
gcagttgttgggcactaaacttatc

SEQ ID NO: 914444 - DNA, 25 bp, Homo sapien
aattttaaaattgacacgtcagtca

SEQ ID NO: 914445 - DNA, 25 bp, Homo sapien
taagcacttgttgcaaattttaaaa

SEQ ID NO: 914446 - DNA, 25 bp, Homo sapien
aattgacacgtcagtcactaagcag

SEQ ID NO: 914447 - DNA, 25 bp, Homo sapien
gggctgggatgtctcacagcttgct

SEQ ID NO: 914448 - DNA, 25 bp, Homo sapien
ggctgggatgtctcacagcttgctt

SEQ ID NO: 914449 - DNA, 25 bp, Homo sapien
ggatagacatgagcaattttccctg

SEQ ID NO: 914450 - DNA, 25 bp, Homo sapien
agcagaaaatgattaggatagacat

SEQ ID NO: 914451 - DNA, 25 bp, Homo sapien
taacttttactcgtcccatgatagg

SEQ ID NO: 914452 - DNA, 25 bp, Homo sapien
gactggatgagtttgtgtggaaccc

SEQ ID NO: 914453 - DNA, 25 bp, Homo sapien
cacagcggtaaaactatggcatgtc

SEQ ID NO: 914454 - DNA, 25 bp, Homo sapien
ataatctgtagccagaggaccagcc

SEQ ID NO: 914455 - DNA, 25 bp, Homo sapien
tgacatttcatcaacgaggcgtttg

SEQ ID NO: 914456 - DNA, 25 bp, Homo sapien
caacgaggcgtttgaggaccaggta

SEQ ID NO: 914457 - DNA, 25 bp, Homo sapien
gctctcctccgctgatgaggacact

SEQ ID NO: 914458 - DNA, 25 bp, Homo sapien
ggacacttgacatttcatcaacgag

SEQ ID NO: 914459 - DNA, 25 bp, Homo sapien
ctgggatcaaggtcttcatcaatta

SEQ ID NO: 914460 - DNA, 25 bp, Homo sapien
tggcccttgggtatcatggcagctt

SEQ ID NO: 914461 - DNA, 25 bp, Homo sapien
caaaccttcactcaggattccgctc

SEQ ID NO: 914462 - DNA, 25 bp, Homo sapien
tcctgagagtggctggcccttgggt

SEQ ID NO: 914463 - DNA, 25 bp, Homo sapien
ggattccgctctggagcccagtgtc

SEQ ID NO: 914464 - DNA, 25 bp, Homo sapien
agtcaggcacctgtcttacccctgt

SEQ ID NO: 914465 - DNA, 25 bp, Homo sapien
acacagtcaggcacctgtcttaccc

SEQ ID NO: 914466 - DNA, 25 bp, Homo sapien
acagtcaggcacctgtcttacccct

SEQ ID NO: 914467 - DNA, 25 bp, Homo sapien
cctgtcttacccctgtccttctcct

SEQ ID NO: 914468 - DNA, 25 bp, Homo sapien
ttctggatttaacccgttcaggaca

SEQ ID NO: 914469 - DNA, 25 bp, Homo sapien
tggatttaacccgttcaggacagta

SEQ ID NO: 914470 - DNA, 25 bp, Homo sapien
cgttcaggacagtagtccacataaa

SEQ ID NO: 914471 - DNA, 25 bp, Homo sapien
ttaacccgttcaggacagtagtcca

SEQ ID NO: 914472 - DNA, 25 bp, Homo sapien
ttcgtatgtttgtttggcttgcagc

SEQ ID NO: 914473 - DNA, 25 bp, Homo sapien
tccctgccctccatacaaacaattc

SEQ ID NO: 914474 - DNA, 25 bp, Homo sapien
catacaaacaattctccgttcgtat

SEQ ID NO: 914475 - DNA, 25 bp, Homo sapien
tctccgttcgtatgtttgtttggct

SEQ ID NO: 914476 - DNA, 25 bp, Homo sapien
cgatctggactattttgctgaacat

SEQ ID NO: 914477 - DNA, 25 bp, Homo sapien
tgtgcacacttagcatgcagggaat

SEQ ID NO: 914478 - DNA, 25 bp, Homo sapien
ctgaagggatggcttggttggtaac

SEQ ID NO: 914479 - DNA, 25 bp, Homo sapien
tcattgtgcacacttagcatgcagg

SEQ ID NO: 914480 - DNA, 25 bp, Homo sapien
tttctcaaatcggtggcacctgcta

SEQ ID NO: 914481 - DNA, 25 bp, Homo sapien
tatctggaataccttgggtggcttg

SEQ ID NO: 914482 - DNA, 25 bp, Homo sapien
cacctgctatctggaataccttggg

SEQ ID NO: 914483 - DNA, 25 bp, Homo sapien
aatcggtggcacctgctatctggaa

SEQ ID NO: 914484 - DNA, 25 bp, Homo sapien
ctgcttcagctgcaatatagtctga

SEQ ID NO: 914485 - DNA, 25 bp, Homo sapien
gatcttttctttgatacctccccca

SEQ ID NO: 914486 - DNA, 25 bp, Homo sapien
taacatgaacttgtaggggatctac

SEQ ID NO: 914487 - DNA, 25 bp, Homo sapien
tctggggctttctacaaagatcttt

SEQ ID NO: 914488 - DNA, 25 bp, Homo sapien
tgagcatggccctgtatttggtaac

SEQ ID NO: 914489 - DNA, 25 bp, Homo sapien
aaatgctggcaattgataggggtct

SEQ ID NO: 914490 - DNA, 25 bp, Homo sapien
tgactgatgagcatggccctgtatt

SEQ ID NO: 914491 - DNA, 25 bp, Homo sapien
ctaaggaacagagatacataaataa

SEQ ID NO: 914492 - DNA, 25 bp, Homo sapien
aaatgcaatagctagctttccattt

SEQ ID NO: 914493 - DNA, 25 bp, Homo sapien
tagaaatgcaatagctagctttcca

SEQ ID NO: 914494 - DNA, 25 bp, Homo sapien
cttagaaatgcaatagctagctttc

SEQ ID NO: 914495 - DNA, 25 bp, Homo sapien
gaaatgcaatagctagctttccatt

SEQ ID NO: 914496 - DNA, 25 bp, Homo sapien
ccaaaaggagaaaagctatctgttt

SEQ ID NO: 914497 - DNA, 25 bp, Homo sapien
gaaatatgaataacacacttcttcc

SEQ ID NO: 914498 - DNA, 25 bp, Homo sapien
gaaaagctatctgtttgattagtca

SEQ ID NO: 914499 - DNA, 25 bp, Homo sapien
gaataacacacttcttccaaaagga

SEQ ID NO: 914500 - DNA, 25 bp, Homo sapien
cacacttatgtcatctggatcaggc

SEQ ID NO: 914501 - DNA, 25 bp, Homo sapien
ccatcatgcatcctggaaccagcat

SEQ ID NO: 914502 - DNA, 25 bp, Homo sapien
aaggaatttttcacacttatgtcat

SEQ ID NO: 914503 - DNA, 25 bp, Homo sapien
ggcaccatcatgcatcctggaacca

SEQ ID NO: 914504 - DNA, 25 bp, Homo sapien
gcgttactgattccgaggcagggct

SEQ ID NO: 914505 - DNA, 25 bp, Homo sapien
tagccagctctccatggcgttactg

SEQ ID NO: 914506 - DNA, 25 bp, Homo sapien
cattccattcggcagttgggcatct

SEQ ID NO: 914507 - DNA, 25 bp, Homo sapien
aagagttggagttgaggaccctagc

SEQ ID NO: 914508 - DNA, 25 bp, Homo sapien
tgtattccaatctgttccctgatca

SEQ ID NO: 914509 - DNA, 25 bp, Homo sapien
gaataatgctatcatctcttgctca

SEQ ID NO: 914510 - DNA, 25 bp, Homo sapien
gctatcatctcttgctcaactctgg

SEQ ID NO: 914511 - DNA, 25 bp, Homo sapien
gtattccaatctgttccctgatcat

SEQ ID NO: 914512 - DNA, 25 bp, Homo sapien
tgctgcacactcaatccttactgga

SEQ ID NO: 914513 - DNA, 25 bp, Homo sapien
gctgcacactcaatccttactggat

SEQ ID NO: 914514 - DNA, 25 bp, Homo sapien
ctgcacactcaatccttactggatt

SEQ ID NO: 914515 - DNA, 25 bp, Homo sapien
gctgctgcacactcaatccttactg

SEQ ID NO: 914516 - DNA, 25 bp, Homo sapien
gaaatgacactctgatatacatcat

SEQ ID NO: 914517 - DNA, 25 bp, Homo sapien
cttggaactcggaagaagaaatgac

SEQ ID NO: 914518 - DNA, 25 bp, Homo sapien
ttggaactcggaagaagaaatgaca

SEQ ID NO: 914519 - DNA, 25 bp, Homo sapien
aaaggaagtagtcattctaatcact

SEQ ID NO: 914520 - DNA, 25 bp, Homo sapien
tctaatcactactcctttgaagaca

SEQ ID NO: 914521 - DNA, 25 bp, Homo sapien
tagtatgtgtttgccagtggagaat

SEQ ID NO: 914522 - DNA, 25 bp, Homo sapien
tatctgtttcacattcatggaggac

SEQ ID NO: 914523 - DNA, 25 bp, Homo sapien
tcgtagcaggttaacaacaatagct

SEQ ID NO: 914524 - DNA, 25 bp, Homo sapien
tgcaagcactcggtaacaataacac

SEQ ID NO: 914525 - DNA, 25 bp, Homo sapien
gattgaaaattagcatcgtagcagg

SEQ ID NO: 914526 - DNA, 25 bp, Homo sapien
gatgtctgcaactgtagagagtaca

SEQ ID NO: 914527 - DNA, 25 bp, Homo sapien
tgcagagtgtgttccgtatggatag

SEQ ID NO: 914528 - DNA, 25 bp, Homo sapien
ctaggcacacgagcgtgcagagtgt

SEQ ID NO: 914529 - DNA, 25 bp, Homo sapien
ttaactaggcacacgagcgtgcaga

SEQ ID NO: 914530 - DNA, 25 bp, Homo sapien
tccgtatggatagaagggcacacat

SEQ ID NO: 914531 - DNA, 25 bp, Homo sapien
gcctagaggactagaatattcagtt

SEQ ID NO: 914532 - DNA, 25 bp, Homo sapien
tgcaggcattcatcaccatatgcag

SEQ ID NO: 914533 - DNA, 25 bp, Homo sapien
ccaccgaacagtacaagtgtgtgag

SEQ ID NO: 914534 - DNA, 25 bp, Homo sapien
gaggactagaatattcagttgtata

SEQ ID NO: 914535 - DNA, 25 bp, Homo sapien
aaagacatggagcattccacatcac

SEQ ID NO: 914536 - DNA, 25 bp, Homo sapien
aagacatggagcattccacatcaca

SEQ ID NO: 914537 - DNA, 25 bp, Homo sapien
aaaagacatggagcattccacatca

SEQ ID NO: 914538 - DNA, 25 bp, Homo sapien
tgtccgaaatctctgtcccatgcgt

SEQ ID NO: 914539 - DNA, 25 bp, Homo sapien
cctggtagataattgtccgaaatct

SEQ ID NO: 914540 - DNA, 25 bp, Homo sapien
tgtcccatgcgtgtgggattgggag

SEQ ID NO: 914541 - DNA, 25 bp, Homo sapien
tgctgctgtaggtttgttgtcctcc

SEQ ID NO: 914542 - DNA, 25 bp, Homo sapien
catgaacgctgaaggctgtcagagc

SEQ ID NO: 914543 - DNA, 25 bp, Homo sapien
aacgctgaaggctgtcagagcccat

SEQ ID NO: 914544 - DNA, 25 bp, Homo sapien
gaacgctgaaggctgtcagagccca

SEQ ID NO: 914545 - DNA, 25 bp, Homo sapien
aggcatgaacgctgaaggctgtcag

SEQ ID NO: 914546 - DNA, 25 bp, Homo sapien
ctctgcatcatcactggcagccaca

SEQ ID NO: 914547 - DNA, 25 bp, Homo sapien
ctgtcccaaacacagggtgacgggg

SEQ ID NO: 914548 - DNA, 25 bp, Homo sapien
ggtgacggggatatcagaaacagca

SEQ ID NO: 914549 - DNA, 25 bp, Homo sapien
ccaaacacagggtgacggggatatc

SEQ ID NO: 914550 - DNA, 25 bp, Homo sapien
tcccaaacacagggtgacggggata

SEQ ID NO: 914551 - DNA, 25 bp, Homo sapien
gattgacttgatgaaattccatcaa

SEQ ID NO: 914552 - DNA, 25 bp, Homo sapien
cagtttgtgtgattgacttgatgaa

SEQ ID NO: 914553 - DNA, 25 bp, Homo sapien
cagttcagtttgtgtgattgacttg

SEQ ID NO: 914554 - DNA, 25 bp, Homo sapien
tgtgtgattgacttgatgaaattcc

SEQ ID NO: 914555 - DNA, 25 bp, Homo sapien
ggcaatcttcacaggacggtacaga

SEQ ID NO: 914556 - DNA, 25 bp, Homo sapien
cctgataatggtggaagcctggcgt

SEQ ID NO: 914557 - DNA, 25 bp, Homo sapien
caaaggtatttagtgaccacgggat

SEQ ID NO: 914558 - DNA, 25 bp, Homo sapien
tgtctttgtcaaggcccacagtcgg

SEQ ID NO: 914559 - DNA, 25 bp, Homo sapien
aagtccagacctgggagtgccaccg

SEQ ID NO: 914560 - DNA, 25 bp, Homo sapien
ccgccacgcactgtggaattttgtc

SEQ ID NO: 914561 - DNA, 25 bp, Homo sapien
gagctgctgttctttatcagagtcc

SEQ ID NO: 914562 - DNA, 25 bp, Homo sapien
agtgccaccgccacgcactgtggaa

SEQ ID NO: 914563 - DNA, 25 bp, Homo sapien
atatgatctctcagattcaccagtc

SEQ ID NO: 914564 - DNA, 25 bp, Homo sapien
ggtggtcctggaatatgatctctca

SEQ ID NO: 914565 - DNA, 25 bp, Homo sapien
tggaatatgatctctcagattcacc

SEQ ID NO: 914566 - DNA, 25 bp, Homo sapien
ggtcctggaatatgatctctcagat

SEQ ID NO: 914567 - DNA, 25 bp, Homo sapien
caatgaattccgtgaaccaatgaac

SEQ ID NO: 914568 - DNA, 25 bp, Homo sapien
gcagcacggaactctggtgcccaca

SEQ ID NO: 914569 - DNA, 25 bp, Homo sapien
caaagatggcaagctggctgttgct

SEQ ID NO: 914570 - DNA, 25 bp, Homo sapien
tgctgtggtgccagaatccattgaa

SEQ ID NO: 914571 - DNA, 25 bp, Homo sapien
gaagtgtagttaggattggcatccg

SEQ ID NO: 914572 - DNA, 25 bp, Homo sapien
caatgtatggcatcaagtaagcatc

SEQ ID NO: 914573 - DNA, 25 bp, Homo sapien
tcccatgttctaggtggagatcact

SEQ ID NO: 914574 - DNA, 25 bp, Homo sapien
gcatccgaggctggtaaagacgtcc

SEQ ID NO: 914575 - DNA, 25 bp, Homo sapien
caccacagaaatgtgggtcttgtca

SEQ ID NO: 914576 - DNA, 25 bp, Homo sapien
ccacagaaatgtgggtcttgtcatt

SEQ ID NO: 914577 - DNA, 25 bp, Homo sapien
cagaaatgtgggtcttgtcattctg

SEQ ID NO: 914578 - DNA, 25 bp, Homo sapien
acagaaatgtgggtcttgtcattct

SEQ ID NO: 914579 - DNA, 25 bp, Homo sapien
agtagttacaagctagaagtttctt

SEQ ID NO: 914580 - DNA, 25 bp, Homo sapien
ttaagcttgagtaatatgcttccag

SEQ ID NO: 914581 - DNA, 25 bp, Homo sapien
taagcttgagtaatatgcttccagg

SEQ ID NO: 914582 - DNA, 25 bp, Homo sapien
tttaagcttgagtaatatgcttcca

SEQ ID NO: 914583 - DNA, 25 bp, Homo sapien
cagggctttggtttagtcattatgg

SEQ ID NO: 914584 - DNA, 25 bp, Homo sapien
cggagtaagtcatgagggcataaca

SEQ ID NO: 914585 - DNA, 25 bp, Homo sapien
aagtgggatgagcaaatagaggtac

SEQ ID NO: 914586 - DNA, 25 bp, Homo sapien
caagtgtgataaacactttgacgga

SEQ ID NO: 914587 - DNA, 25 bp, Homo sapien
ggtcctgtcacactgagtctctgag

SEQ ID NO: 914588 - DNA, 25 bp, Homo sapien
cttacaatggagacacatcaatggt

SEQ ID NO: 914589 - DNA, 25 bp, Homo sapien
atggagacacatcaatggtgcctgc

SEQ ID NO: 914590 - DNA, 25 bp, Homo sapien
gcttgggattgagactgaggactac

SEQ ID NO: 914591 - DNA, 25 bp, Homo sapien
tctcctgcatgagcttttccattcc

SEQ ID NO: 914592 - DNA, 25 bp, Homo sapien
ttttcagtttgtccaacagtccata

SEQ ID NO: 914593 - DNA, 25 bp, Homo sapien
tactgctttccaccatagggctgca

SEQ ID NO: 914594 - DNA, 25 bp, Homo sapien
tgtccaacagtccatactgctttcc

SEQ ID NO: 914595 - DNA, 25 bp, Homo sapien
catactgctttccaccatagggctg

SEQ ID NO: 914596 - DNA, 25 bp, Homo sapien
cagtgagaaaccctcatagcgggtg

SEQ ID NO: 914597 - DNA, 25 bp, Homo sapien
gattaggaacaagttgtattccatc

SEQ ID NO: 914598 - DNA, 25 bp, Homo sapien
cctcatagcgggtgttgactatagc

SEQ ID NO: 914599 - DNA, 25 bp, Homo sapien
aatcggaaggtcacccagtgttggg

SEQ ID NO: 914600 - DNA, 25 bp, Homo sapien
cccaccaaacaccttagctgtagtg

SEQ ID NO: 914601 - DNA, 25 bp, Homo sapien
ccaccaaacaccttagctgtagtgc

SEQ ID NO: 914602 - DNA, 25 bp, Homo sapien
caccaaacaccttagctgtagtgcc

SEQ ID NO: 914603 - DNA, 25 bp, Homo sapien
ccccaccaaacaccttagctgtagt

SEQ ID NO: 914604 - DNA, 25 bp, Homo sapien
aaagagccaccgcagctgatgccct

SEQ ID NO: 914605 - DNA, 25 bp, Homo sapien
tccaagggaaacgcgggatccagga

SEQ ID NO: 914606 - DNA, 25 bp, Homo sapien
agggaaacgcgggatccaggagctg

SEQ ID NO: 914607 - DNA, 25 bp, Homo sapien
gaggaaagagccaccgcagctgatg

SEQ ID NO: 914608 - DNA, 25 bp, Homo sapien
ctgtgacatcagagacttggtattt

SEQ ID NO: 914609 - DNA, 25 bp, Homo sapien
cagaagccctggaggtcacacatct

SEQ ID NO: 914610 - DNA, 25 bp, Homo sapien
tctgtgacatcagagacttggtatt

SEQ ID NO: 914611 - DNA, 25 bp, Homo sapien
tgtgacatcagagacttggtatttg

SEQ ID NO: 914612 - DNA, 25 bp, Homo sapien
cactaaatttaatgattcctttcat

SEQ ID NO: 914613 - DNA, 25 bp, Homo sapien
ttcactaaatttaatgattcctttc

SEQ ID NO: 914614 - DNA, 25 bp, Homo sapien
cttttcactaaatttaatgattcct

SEQ ID NO: 914615 - DNA, 25 bp, Homo sapien
cttcttttcactaaatttaatgatt

SEQ ID NO: 914616 - DNA, 25 bp, Homo sapien
gtcttattctctgtcgccatgctag

SEQ ID NO: 914617 - DNA, 25 bp, Homo sapien
tcactacagtagaaaggttggcatt

SEQ ID NO: 914618 - DNA, 25 bp, Homo sapien
tggttatacacctgttcttagggag

SEQ ID NO: 914619 - DNA, 25 bp, Homo sapien
gtttgtgttgtctgggcaccttcca

SEQ ID NO: 914620 - DNA, 25 bp, Homo sapien
catcattggagtccatgccagacga

SEQ ID NO: 914621 - DNA, 25 bp, Homo sapien
aaagagttccctaccaaatgattgg

SEQ ID NO: 914622 - DNA, 25 bp, Homo sapien
tcaaaggcattcgatgtagcacaat

SEQ ID NO: 914623 - DNA, 25 bp, Homo sapien
tcagagccacttgattcctggatgc

SEQ ID NO: 914624 - DNA, 25 bp, Homo sapien
tattggaaactctggccaagatcca

SEQ ID NO: 914625 - DNA, 25 bp, Homo sapien
cagccccagccacccgagtctgtgg

SEQ ID NO: 914626 - DNA, 25 bp, Homo sapien
gctccatctcccattacagtttcca

SEQ ID NO: 914627 - DNA, 25 bp, Homo sapien
ctctgctattggaaactctggccaa

SEQ ID NO: 914628 - DNA, 25 bp, Homo sapien
caggagtccacatctttgtgctggg

SEQ ID NO: 914629 - DNA, 25 bp, Homo sapien
ttgtgctgggcaggcacatccacac

SEQ ID NO: 914630 - DNA, 25 bp, Homo sapien
ctttgtgctgggcaggcacatccac

SEQ ID NO: 914631 - DNA, 25 bp, Homo sapien
ggagtccacatctttgtgctgggca

SEQ ID NO: 914632 - DNA, 25 bp, Homo sapien
ccctttctgaagtacagaactttcg

SEQ ID NO: 914633 - DNA, 25 bp, Homo sapien
agtgtcctcaccattcacttgtttg

SEQ ID NO: 914634 - DNA, 25 bp, Homo sapien
tttttcagctgataatcagcccctt

SEQ ID NO: 914635 - DNA, 25 bp, Homo sapien
tcgtgaagatttcttattaagcttt

SEQ ID NO: 914636 - DNA, 25 bp, Homo sapien
gcatttcgggaaggcttgctttttc

SEQ ID NO: 914637 - DNA, 25 bp, Homo sapien
caccccagcagctgttgatttcaga

SEQ ID NO: 914638 - DNA, 25 bp, Homo sapien
tcctgcccttcctctgaaaagaggc

SEQ ID NO: 914639 - DNA, 25 bp, Homo sapien
agaacccttgccttcgccctgctgg

SEQ ID NO: 914640 - DNA, 25 bp, Homo sapien
tttctatctcaggtctgatcgtttg

SEQ ID NO: 914641 - DNA, 25 bp, Homo sapien
gaggttttgagtccagattgttcca

SEQ ID NO: 914642 - DNA, 25 bp, Homo sapien
caggtctgatcgtttgttcttgagg

SEQ ID NO: 914643 - DNA, 25 bp, Homo sapien
ggtcattgcccgctcatggctctga

SEQ ID NO: 914644 - DNA, 25 bp, Homo sapien
taaaggagctgaaccatagattacc

SEQ ID NO: 914645 - DNA, 25 bp, Homo sapien
cttcctaaattacaggagactgtct

SEQ ID NO: 914646 - DNA, 25 bp, Homo sapien
tgtgggcagcaactagacctgtgtg

SEQ ID NO: 914647 - DNA, 25 bp, Homo sapien
tagattaccattgccttccaaatgt

SEQ ID NO: 914648 - DNA, 25 bp, Homo sapien
gcctcaaccaagctcagaacaagac

SEQ ID NO: 914649 - DNA, 25 bp, Homo sapien
tcaaccaagctcagaacaagacact

SEQ ID NO: 914650 - DNA, 25 bp, Homo sapien
caaccaagctcagaacaagacactg

SEQ ID NO: 914651 - DNA, 25 bp, Homo sapien
cagcctcaaccaagctcagaacaag

SEQ ID NO: 914652 - DNA, 25 bp, Homo sapien
ttgaggacattccattcaggtttgg

SEQ ID NO: 914653 - DNA, 25 bp, Homo sapien
tcaggtttgggtgaccgctactcat

SEQ ID NO: 914654 - DNA, 25 bp, Homo sapien
ctactcattaaagccgcatcccagt

SEQ ID NO: 914655 - DNA, 25 bp, Homo sapien
gaatgattagacttctttgaggaca

SEQ ID NO: 914656 - DNA, 25 bp, Homo sapien
gaagtgcactggaatcaccctgcct

SEQ ID NO: 914657 - DNA, 25 bp, Homo sapien
catgaagtgcactggaatcaccctg

SEQ ID NO: 914658 - DNA, 25 bp, Homo sapien
ctgtaaatcatgaagtgcactggaa

SEQ ID NO: 914659 - DNA, 25 bp, Homo sapien
taaatcatgaagtgcactggaatca

SEQ ID NO: 914660 - DNA, 25 bp, Homo sapien
gatagtaaagtgtgaacctgaaaca

SEQ ID NO: 914661 - DNA, 25 bp, Homo sapien
ctgtctttatcaagtatggtcctga

SEQ ID NO: 914662 - DNA, 25 bp, Homo sapien
tcctgatagtaaagtgtgaacctga

SEQ ID NO: 914663 - DNA, 25 bp, Homo sapien
caagtatggtcctgatagtaaagtg

SEQ ID NO: 914664 - DNA, 25 bp, Homo sapien
cataacaaccaggtgacaaccattt

SEQ ID NO: 914665 - DNA, 25 bp, Homo sapien
cagccattaaggtggaaggagtaag

SEQ ID NO: 914666 - DNA, 25 bp, Homo sapien
ctcataacaaccaggtgacaaccat

SEQ ID NO: 914667 - DNA, 25 bp, Homo sapien
tatttagcacgtttttatacatatt

SEQ ID NO: 914668 - DNA, 25 bp, Homo sapien
gaagcaatccgtaaagcttttacat

SEQ ID NO: 914669 - DNA, 25 bp, Homo sapien
agttagcagaagcaatccgtaaagc

SEQ ID NO: 914670 - DNA, 25 bp, Homo sapien
tacattgtttgttgtaaaacgcagg

SEQ ID NO: 914671 - DNA, 25 bp, Homo sapien
ttgtaaaacgcagggttggtgtctc

SEQ ID NO: 914672 - DNA, 25 bp, Homo sapien
gcactggttcccaggttcttggcat

SEQ ID NO: 914673 - DNA, 25 bp, Homo sapien
tgcactggttcccaggttcttggca

SEQ ID NO: 914674 - DNA, 25 bp, Homo sapien
aattgatctgagagcacagaaggac

SEQ ID NO: 914675 - DNA, 25 bp, Homo sapien
cctgggcaatggtggttgagggatc

SEQ ID NO: 914676 - DNA, 25 bp, Homo sapien
tggttgagggatcattttgtggcag

SEQ ID NO: 914677 - DNA, 25 bp, Homo sapien
ttggaaattgatctgagagcacaga

SEQ ID NO: 914678 - DNA, 25 bp, Homo sapien
tggttggagagaacacgtgtcccac

SEQ ID NO: 914679 - DNA, 25 bp, Homo sapien
ccgagtgtgagtacaacgtatgggt

SEQ ID NO: 914680 - DNA, 25 bp, Homo sapien
caacgtatgggtgtggttggagaga

SEQ ID NO: 914681 - DNA, 25 bp, Homo sapien
cttctggccgagtgtgagtacaacg

SEQ ID NO: 914682 - DNA, 25 bp, Homo sapien
tgtcaagaagggcaaactctaacat

SEQ ID NO: 914683 - DNA, 25 bp, Homo sapien
ttgtcaagaagggcaaactctaaca

SEQ ID NO: 914684 - DNA, 25 bp, Homo sapien
tcaagaagggcaaactctaacataa

SEQ ID NO: 914685 - DNA, 25 bp, Homo sapien
gtcaagaagggcaaactctaacata

SEQ ID NO: 914686 - DNA, 25 bp, Homo sapien
cacttgggctttctccgggtcttct

SEQ ID NO: 914687 - DNA, 25 bp, Homo sapien
aaccagtcctttaaactgatcttca

SEQ ID NO: 914688 - DNA, 25 bp, Homo sapien
cagcagccacttgggctttctccgg

SEQ ID NO: 914689 - DNA, 25 bp, Homo sapien
agccacttgggctttctccgggtct

SEQ ID NO: 914690 - DNA, 25 bp, Homo sapien
gacaaattattgtccagttcttcac

SEQ ID NO: 914691 - DNA, 25 bp, Homo sapien
caaattattgtccagttcttcacat

SEQ ID NO: 914692 - DNA, 25 bp, Homo sapien
tgacaaattattgtccagttcttca

SEQ ID NO: 914693 - DNA, 25 bp, Homo sapien
actgacaaattattgtccagttctt

SEQ ID NO: 914694 - DNA, 25 bp, Homo sapien
tgtgacctttggtccaacctgtgag

SEQ ID NO: 914695 - DNA, 25 bp, Homo sapien
tgacctttggtccaacctgtgagtt

SEQ ID NO: 914696 - DNA, 25 bp, Homo sapien
cctttggtccaacctgtgagttcat

SEQ ID NO: 914697 - DNA, 25 bp, Homo sapien
atgtgtgacctttggtccaacctgt

SEQ ID NO: 914698 - DNA, 25 bp, Homo sapien
cagagttccaacagctgagcgattt

SEQ ID NO: 914699 - DNA, 25 bp, Homo sapien
ggactctttcttgcagtgtagtcag

SEQ ID NO: 914700 - DNA, 25 bp, Homo sapien
cctgattttagtcgataagcttggg

SEQ ID NO: 914701 - DNA, 25 bp, Homo sapien
caggcaaaaagttttagccagcagt

SEQ ID NO: 914702 - DNA, 25 bp, Homo sapien
ctggatggcaggcactttgcttcag

SEQ ID NO: 914703 - DNA, 25 bp, Homo sapien
atggcaggcactttgcttcagtcat

SEQ ID NO: 914704 - DNA, 25 bp, Homo sapien
tggatggcaggcactttgcttcagt

SEQ ID NO: 914705 - DNA, 25 bp, Homo sapien
gatggcaggcactttgcttcagtca

SEQ ID NO: 914706 - DNA, 25 bp, Homo sapien
atggaggagccttcagttcttcttg

SEQ ID NO: 914707 - DNA, 25 bp, Homo sapien
ggccggaacgtactgattcttcagc

SEQ ID NO: 914708 - DNA, 25 bp, Homo sapien
tgtccaggccaagggctttcctgaa

SEQ ID NO: 914709 - DNA, 25 bp, Homo sapien
tctgtccacaaagtccaggccggaa

SEQ ID NO: 914710 - DNA, 25 bp, Homo sapien
tctcttgggtatggagaacaatttc

SEQ ID NO: 914711 - DNA, 25 bp, Homo sapien
aaatttaaatgtgcaagttttgcag

SEQ ID NO: 914712 - DNA, 25 bp, Homo sapien
ttctcttgggtatggagaacaattt

SEQ ID NO: 914713 - DNA, 25 bp, Homo sapien
aatgtgcaagttttgcagcatattc

SEQ ID NO: 914714 - DNA, 25 bp, Homo sapien
ctcctccaatttctggttatgcatc

SEQ ID NO: 914715 - DNA, 25 bp, Homo sapien
tcctccaatttctggttatgcatca

SEQ ID NO: 914716 - DNA, 25 bp, Homo sapien
cctccaatttctggttatgcatcat

SEQ ID NO: 914717 - DNA, 25 bp, Homo sapien
gtgtcttccatataggtttctcttc

SEQ ID NO: 914718 - DNA, 25 bp, Homo sapien
taagtgtcttccatataggtttctc

SEQ ID NO: 914719 - DNA, 25 bp, Homo sapien
tccatataggtttctcttcttgaat

SEQ ID NO: 914720 - DNA, 25 bp, Homo sapien
cttccatataggtttctcttcttga

SEQ ID NO: 914721 - DNA, 25 bp, Homo sapien
ctggatcttgactgtgtaattcttc

SEQ ID NO: 914722 - DNA, 25 bp, Homo sapien
tcctggatcttgactgtgtaattct

SEQ ID NO: 914723 - DNA, 25 bp, Homo sapien
cctggatcttgactgtgtaattctt

SEQ ID NO: 914724 - DNA, 25 bp, Homo sapien
aagaaaagaactacttcaatgcatg

SEQ ID NO: 914725 - DNA, 25 bp, Homo sapien
aaagaactacttcaatgcatgatcc

SEQ ID NO: 914726 - DNA, 25 bp, Homo sapien
aaaagaactacttcaatgcatgatc

SEQ ID NO: 914727 - DNA, 25 bp, Homo sapien
gaaaagaactacttcaatgcatgat

SEQ ID NO: 914728 - DNA, 25 bp, Homo sapien
gagttaaacattcatgactatattc

SEQ ID NO: 914729 - DNA, 25 bp, Homo sapien
tgtgagtatggatttcagtggcctt

SEQ ID NO: 914730 - DNA, 25 bp, Homo sapien
agtggccttgctacccttaatttgg

SEQ ID NO: 914731 - DNA, 25 bp, Homo sapien
gtccctggagttaaacattcatgac

SEQ ID NO: 914732 - DNA, 25 bp, Homo sapien
ttctaggtcagcattctcaagatga

SEQ ID NO: 914733 - DNA, 25 bp, Homo sapien
cttctaggtcagcattctcaagatg

SEQ ID NO: 914734 - DNA, 25 bp, Homo sapien
aagagccagcgttcaaatgcttctc

SEQ ID NO: 914735 - DNA, 25 bp, Homo sapien
caatgagcagcattgaagagccagc

SEQ ID NO: 914736 - DNA, 25 bp, Homo sapien
ggataattctcagaccaccacttag

SEQ ID NO: 914737 - DNA, 25 bp, Homo sapien
tggataattctcagaccaccactta

SEQ ID NO: 914738 - DNA, 25 bp, Homo sapien
ataattctcagaccaccacttagct

SEQ ID NO: 914739 - DNA, 25 bp, Homo sapien
gatggataattctcagaccaccact

SEQ ID NO: 914740 - DNA, 25 bp, Homo sapien
ctgattgtccatttctgcagcagaa

SEQ ID NO: 914741 - DNA, 25 bp, Homo sapien
ttgtccatttctgcagcagaaaatt

SEQ ID NO: 914742 - DNA, 25 bp, Homo sapien
ccatttctgcagcagaaaatttagt

SEQ ID NO: 914743 - DNA, 25 bp, Homo sapien
tgtccatttctgcagcagaaaattt

SEQ ID NO: 914744 - DNA, 25 bp, Homo sapien
tttcctacagtatccttggcttctg

SEQ ID NO: 914745 - DNA, 25 bp, Homo sapien
tgtttcctacagtatccttggcttc

SEQ ID NO: 914746 - DNA, 25 bp, Homo sapien
tttgtttcctacagtatccttggct

SEQ ID NO: 914747 - DNA, 25 bp, Homo sapien
ctgaaagacggtagtttcatcagtc

SEQ ID NO: 914748 - DNA, 25 bp, Homo sapien
ctagaaggtgaaagttgtaaaatga

SEQ ID NO: 914749 - DNA, 25 bp, Homo sapien
ctcctctagaaggtgaaagttgtaa

SEQ ID NO: 914750 - DNA, 25 bp, Homo sapien
ctctagaaggtgaaagttgtaaaat

SEQ ID NO: 914751 - DNA, 25 bp, Homo sapien
tgtaaaatgaaatccctgaagtaaa

SEQ ID NO: 914752 - DNA, 25 bp, Homo sapien
tccctctggcctgatttgataatcc

SEQ ID NO: 914753 - DNA, 25 bp, Homo sapien
tcttctcctgcaagccagtcagagg

SEQ ID NO: 914754 - DNA, 25 bp, Homo sapien
gagatgatggctgctcaccacagca

SEQ ID NO: 914755 - DNA, 25 bp, Homo sapien
ccagataacctgacttggtaagaca

SEQ ID NO: 914756 - DNA, 25 bp, Homo sapien
gatgagcagccaaacctaggtctgg

SEQ ID NO: 914757 - DNA, 25 bp, Homo sapien
gacctcgggagttgtgactacctaa

SEQ ID NO: 914758 - DNA, 25 bp, Homo sapien
tactgggaataagtagtccaccacc

SEQ ID NO: 914759 - DNA, 25 bp, Homo sapien
aaaataatgccaatcagacctcggg

SEQ ID NO: 914760 - DNA, 25 bp, Homo sapien
cacctatcctgatgaggaatgcagg

SEQ ID NO: 914761 - DNA, 25 bp, Homo sapien
aacaccgcacagctaatcaactgca

SEQ ID NO: 914762 - DNA, 25 bp, Homo sapien
tgttactccggaaaaaatgccactc

SEQ ID NO: 914763 - DNA, 25 bp, Homo sapien
cacagtgtgattgtaatgaacacct

SEQ ID NO: 914764 - DNA, 25 bp, Homo sapien
gagagaagatttcttgtcataatcc

SEQ ID NO: 914765 - DNA, 25 bp, Homo sapien
caggagacactgaaacgagagaaga

SEQ ID NO: 914766 - DNA, 25 bp, Homo sapien
tcttgtcataatccaactcctcttt

SEQ ID NO: 914767 - DNA, 25 bp, Homo sapien
cactgaaacgagagaagatttcttg

SEQ ID NO: 914768 - DNA, 25 bp, Homo sapien
gcgcagcacactgcagcggcattct

SEQ ID NO: 914769 - DNA, 25 bp, Homo sapien
taatgccaaggactgaaagaacaca

SEQ ID NO: 914770 - DNA, 25 bp, Homo sapien
taaagttccaaatgataatgccaag

SEQ ID NO: 914771 - DNA, 25 bp, Homo sapien
cattctctggtctgcggttgtgtag

SEQ ID NO: 914772 - DNA, 25 bp, Homo sapien
ggtgatcaacaaaaccaggttcgga

SEQ ID NO: 914773 - DNA, 25 bp, Homo sapien
ggttcggacagcttccctatttgca

SEQ ID NO: 914774 - DNA, 25 bp, Homo sapien
tcaacaaaaccaggttcggacagct

SEQ ID NO: 914775 - DNA, 25 bp, Homo sapien
gcagcccaggtgatcaacaaaacca

SEQ ID NO: 914776 - DNA, 25 bp, Homo sapien
cggcacgtgtgacagcagactctct

SEQ ID NO: 914777 - DNA, 25 bp, Homo sapien
agcagactctcttccgggatgcccc

SEQ ID NO: 914778 - DNA, 25 bp, Homo sapien
ctcaaaagtccatcaacgatagcct

SEQ ID NO: 914779 - DNA, 25 bp, Homo sapien
agtccatcaacgatagcctggatta

SEQ ID NO: 914780 - DNA, 25 bp, Homo sapien
aaggattagttcgtgtcctactttg

SEQ ID NO: 914781 - DNA, 25 bp, Homo sapien
gattagttcgtgtcctactttgtag

SEQ ID NO: 914782 - DNA, 25 bp, Homo sapien
tccgtaatatcactaatgaccccat

SEQ ID NO: 914783 - DNA, 25 bp, Homo sapien
aaggtttgttgaggttgtccttcag

SEQ ID NO: 914784 - DNA, 25 bp, Homo sapien
gaaataggcaccaatttatactagc

SEQ ID NO: 914785 - DNA, 25 bp, Homo sapien
atgaccccattaaggacattaaaag

SEQ ID NO: 914786 - DNA, 25 bp, Homo sapien
gacccatgaagagttactaggaaac

SEQ ID NO: 914787 - DNA, 25 bp, Homo sapien
taggaaacagatacctgccacagtg

SEQ ID NO: 914788 - DNA, 25 bp, Homo sapien
taaggtccgacccagcatttctctc

SEQ ID NO: 914789 - DNA, 25 bp, Homo sapien
gaactgacctcaatatctgacccat

SEQ ID NO: 914790 - DNA, 25 bp, Homo sapien
ggcacaaattactacaccattaact

SEQ ID NO: 914791 - DNA, 25 bp, Homo sapien
gcagccacgacctccagcttgaagg

SEQ ID NO: 914792 - DNA, 25 bp, Homo sapien
tgctttgtcgggtagaggcctctgc

SEQ ID NO: 914793 - DNA, 25 bp, Homo sapien
atgctttgtcgggtagaggcctctg

SEQ ID NO: 914794 - DNA, 25 bp, Homo sapien
ctaatgctttgtcgggtagaggcct

SEQ ID NO: 914795 - DNA, 25 bp, Homo sapien
cattggtcagaactcactgcaggtc

SEQ ID NO: 914796 - DNA, 25 bp, Homo sapien
gatctctttgctgttaagtgaccac

SEQ ID NO: 914797 - DNA, 25 bp, Homo sapien
tttataaagttgaccggcacctgtg

SEQ ID NO: 914798 - DNA, 25 bp, Homo sapien
taaaggatacccataacatctggtg

SEQ ID NO: 914799 - DNA, 25 bp, Homo sapien
gaatgaacataaattaattgtgaaa

SEQ ID NO: 914800 - DNA, 25 bp, Homo sapien
tctagaagtaaaaagctctcagagt

SEQ ID NO: 914801 - DNA, 25 bp, Homo sapien
cacagaaaactaagaccgtgtttct

SEQ ID NO: 914802 - DNA, 25 bp, Homo sapien
tcctatcagcaggaataagtactca

SEQ ID NO: 914803 - DNA, 25 bp, Homo sapien
tttcatagctatgtccctggaccag

SEQ ID NO: 914804 - DNA, 25 bp, Homo sapien
ttctctgtctggcagtaatcctggc

SEQ ID NO: 914805 - DNA, 25 bp, Homo sapien
ggtgcatttcatagctatgtccctg

SEQ ID NO: 914806 - DNA, 25 bp, Homo sapien
ctggaccagcagtccgaattctctg

SEQ ID NO: 914807 - DNA, 25 bp, Homo sapien
tggaggcaggtgcaatttagaacat

SEQ ID NO: 914808 - DNA, 25 bp, Homo sapien
ctagtggaggcaggtgcaatttaga

SEQ ID NO: 914809 - DNA, 25 bp, Homo sapien
gcaggtgcaatttagaacattgtca

SEQ ID NO: 914810 - DNA, 25 bp, Homo sapien
gcaatttagaacattgtcatcatga

SEQ ID NO: 914811 - DNA, 25 bp, Homo sapien
gttgaggttgaaataagccatgatc

SEQ ID NO: 914812 - DNA, 25 bp, Homo sapien
tgtgaccttttagttacagcaagag

SEQ ID NO: 914813 - DNA, 25 bp, Homo sapien
agcaagaggcaaattatggctgggt

SEQ ID NO: 914814 - DNA, 25 bp, Homo sapien
cttttagttacagcaagaggcaaat

SEQ ID NO: 914815 - DNA, 25 bp, Homo sapien
cacatggagcgtgctttgagtccag

SEQ ID NO: 914816 - DNA, 25 bp, Homo sapien
tgagtccaggcccacaggtttagct

SEQ ID NO: 914817 - DNA, 25 bp, Homo sapien
gagtccaggcccacaggtttagctt

SEQ ID NO: 914818 - DNA, 25 bp, Homo sapien
gcgtgctttgagtccaggcccacag

SEQ ID NO: 914819 - DNA, 25 bp, Homo sapien
cattcaccgagcctgtttcacatgg

SEQ ID NO: 914820 - DNA, 25 bp, Homo sapien
ccttgttctcattcaccgagcctgt

SEQ ID NO: 914821 - DNA, 25 bp, Homo sapien
cgagcctgtttcacatggcctcttt

SEQ ID NO: 914822 - DNA, 25 bp, Homo sapien
tgttctcattcaccgagcctgtttc

SEQ ID NO: 914823 - DNA, 25 bp, Homo sapien
tgttggactgtgaacaacgttttgt

SEQ ID NO: 914824 - DNA, 25 bp, Homo sapien
tgctcttccaatgagttgttggact

SEQ ID NO: 914825 - DNA, 25 bp, Homo sapien
ccaatgagttgttggactgtgaaca

SEQ ID NO: 914826 - DNA, 25 bp, Homo sapien
ttggactgtgaacaacgttttgtga

SEQ ID NO: 914827 - DNA, 25 bp, Homo sapien
ccacaggtcatccaatgtttgcagc

SEQ ID NO: 914828 - DNA, 25 bp, Homo sapien
tgcatgtagctgtcatccttgcctt

SEQ ID NO: 914829 - DNA, 25 bp, Homo sapien
aagtcatgaccctgaatatcactcg

SEQ ID NO: 914830 - DNA, 25 bp, Homo sapien
catctctgttattgtaggaggcacc

SEQ ID NO: 914831 - DNA, 25 bp, Homo sapien
gagcttctggcctatgtgtcacagc

SEQ ID NO: 914832 - DNA, 25 bp, Homo sapien
tgtcttcagcttcaattaccatcgg

SEQ ID NO: 914833 - DNA, 25 bp, Homo sapien
cacagctgcctagaagactttcata

SEQ ID NO: 914834 - DNA, 25 bp, Homo sapien
gattagcccaaattagcatcaggga

SEQ ID NO: 914835 - DNA, 25 bp, Homo sapien
aaactctaggcattcgtcccatggc

SEQ ID NO: 914836 - DNA, 25 bp, Homo sapien
gtcccatggcttccaaccatttctc

SEQ ID NO: 914837 - DNA, 25 bp, Homo sapien
tctgccacagttcaccatgcatcca

SEQ ID NO: 914838 - DNA, 25 bp, Homo sapien
ttccttcaaaactctaggcattcgt

SEQ ID NO: 914839 - DNA, 25 bp, Homo sapien
ggtggcccaataataggttcttctc

SEQ ID NO: 914840 - DNA, 25 bp, Homo sapien
tgcttgataggtggcccaataatag

SEQ ID NO: 914841 - DNA, 25 bp, Homo sapien
tgataggtggcccaataataggttc

SEQ ID NO: 914842 - DNA, 25 bp, Homo sapien
ctttttgcttgataggtggcccaat

SEQ ID NO: 914843 - DNA, 25 bp, Homo sapien
cctcctgattccgttagtggtttgc

SEQ ID NO: 914844 - DNA, 25 bp, Homo sapien
tgctgcattgcatcagccactttgc

SEQ ID NO: 914845 - DNA, 25 bp, Homo sapien
atcagccactttgcttcccctcctg

SEQ ID NO: 914846 - DNA, 25 bp, Homo sapien
cctgattccgttagtggtttgctgc

SEQ ID NO: 914847 - DNA, 25 bp, Homo sapien
ggcttcgcgagttccatgatggcac

SEQ ID NO: 914848 - DNA, 25 bp, Homo sapien
gctggtgccccactgttcctgcggt

SEQ ID NO: 914849 - DNA, 25 bp, Homo sapien
cactgactgcgatgttggcgagagc

SEQ ID NO: 914850 - DNA, 25 bp, Homo sapien
tggtccacatcacaagactgaatga

SEQ ID NO: 914851 - DNA, 25 bp, Homo sapien
ggtcctgtggatgtcttcattttaa

SEQ ID NO: 914852 - DNA, 25 bp, Homo sapien
tattgtgtgaatgcaattgtctacc

SEQ ID NO: 914853 - DNA, 25 bp, Homo sapien
caacaatgtaaaacaggtcctgtgg

SEQ ID NO: 914854 - DNA, 25 bp, Homo sapien
tagtttcttgatggaggacgacatc

SEQ ID NO: 914855 - DNA, 25 bp, Homo sapien
gaaaattgttcttcttcaaggtgta

SEQ ID NO: 914856 - DNA, 25 bp, Homo sapien
ccagtcgctggaaaattgttcttct

SEQ ID NO: 914857 - DNA, 25 bp, Homo sapien
gtcgctggaaaattgttcttcttca

SEQ ID NO: 914858 - DNA, 25 bp, Homo sapien
gctggaaaattgttcttcttcaagg

SEQ ID NO: 914859 - DNA, 25 bp, Homo sapien
tccttctacaactataattctactc

SEQ ID NO: 914860 - DNA, 25 bp, Homo sapien
taattctactcaaaatggccagatg

SEQ ID NO: 914861 - DNA, 25 bp, Homo sapien
tggccagatgtgaattgtatttctt

SEQ ID NO: 914862 - DNA, 25 bp, Homo sapien
aatggccagatgtgaattgtatttc

SEQ ID NO: 914863 - DNA, 25 bp, Homo sapien
atgcccgtcctgtagagagcaccgt

SEQ ID NO: 914864 - DNA, 25 bp, Homo sapien
gtcctgtagagagcaccgtccacat

SEQ ID NO: 914865 - DNA, 25 bp, Homo sapien
cttttcatccgtgatgcccgtcctg

SEQ ID NO: 914866 - DNA, 25 bp, Homo sapien
tttcatccgtgatgcccgtcctgta

SEQ ID NO: 914867 - DNA, 25 bp, Homo sapien
gcacgtcagagtttggcttcaacag

SEQ ID NO: 914868 - DNA, 25 bp, Homo sapien
ccatgagagttacagcccacagaag

SEQ ID NO: 914869 - DNA, 25 bp, Homo sapien
caaaatagagtccttggcagtgctc

SEQ ID NO: 914870 - DNA, 25 bp, Homo sapien
gccaggtgaagtgaaacccattaga

SEQ ID NO: 914871 - DNA, 25 bp, Homo sapien
ggcaaccaatgggatgacagctgtt

SEQ ID NO: 914872 - DNA, 25 bp, Homo sapien
tgacagctgttgaaaccagattgac

SEQ ID NO: 914873 - DNA, 25 bp, Homo sapien
gttgaaaccagattgactgcacacc

SEQ ID NO: 914874 - DNA, 25 bp, Homo sapien
ccaagtgctcggctttgggaagagt

SEQ ID NO: 914875 - DNA, 25 bp, Homo sapien
atgcttctgctgatcctgatgatcc

SEQ ID NO: 914876 - DNA, 25 bp, Homo sapien
ctgtgatgcttctgctgatcctgat

SEQ ID NO: 914877 - DNA, 25 bp, Homo sapien
gtgatgcttctgctgatcctgatga

SEQ ID NO: 914878 - DNA, 25 bp, Homo sapien
gatgcttctgctgatcctgatgatc

SEQ ID NO: 914879 - DNA, 25 bp, Homo sapien
aaatcaagaactcaagcccagggct

SEQ ID NO: 914880 - DNA, 25 bp, Homo sapien
gaattagggcattaactccactgag

SEQ ID NO: 914881 - DNA, 25 bp, Homo sapien
cctacaatgagattaccagagtgaa

SEQ ID NO: 914882 - DNA, 25 bp, Homo sapien
tacaaaccccttgcactagtgaaaa

SEQ ID NO: 914883 - DNA, 25 bp, Homo sapien
aaacttgcaaggaggcctgggtgac

SEQ ID NO: 914884 - DNA, 25 bp, Homo sapien
ttgtatggataagttaaaattagca

SEQ ID NO: 914885 - DNA, 25 bp, Homo sapien
cctgggtgacggctggcatgtgctt

SEQ ID NO: 914886 - DNA, 25 bp, Homo sapien
ccataaatagttataaaccattaca

SEQ ID NO: 914887 - DNA, 25 bp, Homo sapien
gagataacagagagcagtgattagg

SEQ ID NO: 914888 - DNA, 25 bp, Homo sapien
cagttgactgttgagataacagaga

SEQ ID NO: 914889 - DNA, 25 bp, Homo sapien
cagtgattagggtttgtcatctcag

SEQ ID NO: 914890 - DNA, 25 bp, Homo sapien
caaactcagttgactgttgagataa

SEQ ID NO: 914891 - DNA, 25 bp, Homo sapien
tttgagttgctgcatctttggaaga

SEQ ID NO: 914892 - DNA, 25 bp, Homo sapien
gctgcatctttggaagacacagagt

SEQ ID NO: 914893 - DNA, 25 bp, Homo sapien
catggcatgtcaatttttgagttgc

SEQ ID NO: 914894 - DNA, 25 bp, Homo sapien
tctatcagaacggacataagcccca

SEQ ID NO: 914895 - DNA, 25 bp, Homo sapien
ggagatgaattagaggtgacagacc

SEQ ID NO: 914896 - DNA, 25 bp, Homo sapien
tctctgattattccagttactagga

SEQ ID NO: 914897 - DNA, 25 bp, Homo sapien
tgtaaaaactaaaggctatgattac

SEQ ID NO: 914898 - DNA, 25 bp, Homo sapien
gtgacagacctagaagccatacttc

SEQ ID NO: 914899 - DNA, 25 bp, Homo sapien
ttgaagtattgagtcaggaagccaa

SEQ ID NO: 914900 - DNA, 25 bp, Homo sapien
ggtgagcaaaaaagtctcatttatc

SEQ ID NO: 914901 - DNA, 25 bp, Homo sapien
tttttgaagttccaggtgagcaaaa

SEQ ID NO: 914902 - DNA, 25 bp, Homo sapien
ggaagccaacaagaaatttgtgtat

SEQ ID NO: 914903 - DNA, 25 bp, Homo sapien
aaagttgccccatgtccatccagtc

SEQ ID NO: 914904 - DNA, 25 bp, Homo sapien
ttaaagttgccccatgtccatccag

SEQ ID NO: 914905 - DNA, 25 bp, Homo sapien
taaagttgccccatgtccatccagt

SEQ ID NO: 914906 - DNA, 25 bp, Homo sapien
atttaaagttgccccatgtccatcc

SEQ ID NO: 914907 - DNA, 25 bp, Homo sapien
tagctgaacagtaattctgccctgc

SEQ ID NO: 914908 - DNA, 25 bp, Homo sapien
gaatatgactgactgatgggaacac

SEQ ID NO: 914909 - DNA, 25 bp, Homo sapien
tcagagttaataccacatggaagac

SEQ ID NO: 914910 - DNA, 25 bp, Homo sapien
gacatgtgtccctagaagaaattga

SEQ ID NO: 914911 - DNA, 25 bp, Homo sapien
ttcattttgtccaatgtccctttca

SEQ ID NO: 914912 - DNA, 25 bp, Homo sapien
tttcatttctgtactggagttattt

SEQ ID NO: 914913 - DNA, 25 bp, Homo sapien
catttctgtactggagttatttttc

SEQ ID NO: 914914 - DNA, 25 bp, Homo sapien
atttcattttgtccaatgtcccttt

SEQ ID NO: 914915 - DNA, 25 bp, Homo sapien
ggttgttgagagaattcaatcttct

SEQ ID NO: 914916 - DNA, 25 bp, Homo sapien
tgtttgatgggcacagcttgtagcc

SEQ ID NO: 914917 - DNA, 25 bp, Homo sapien
gcttgtagccaagattttgtgggct

SEQ ID NO: 914918 - DNA, 25 bp, Homo sapien
aatttcccttggttgttgagagaat

SEQ ID NO: 914919 - DNA, 25 bp, Homo sapien
tatatttttgcatagtgggctgtct

SEQ ID NO: 914920 - DNA, 25 bp, Homo sapien
tatttttgcatagtgggctgtctgc

SEQ ID NO: 914921 - DNA, 25 bp, Homo sapien
atatttttgcatagtgggctgtctg

SEQ ID NO: 914922 - DNA, 25 bp, Homo sapien
tttttgcatagtgggctgtctgctc

SEQ ID NO: 914923 - DNA, 25 bp, Homo sapien
gatcttctagaaaatgtccccatgt

SEQ ID NO: 914924 - DNA, 25 bp, Homo sapien
ctccaagtagtgaggttccaggctc

SEQ ID NO: 914925 - DNA, 25 bp, Homo sapien
gaagaccaatgccagtgcttgagga

SEQ ID NO: 914926 - DNA, 25 bp, Homo sapien
caggctcaattggtggcagaagtgc

SEQ ID NO: 914927 - DNA, 25 bp, Homo sapien
tacttcggaagccagaggccgtgaa

SEQ ID NO: 914928 - DNA, 25 bp, Homo sapien
tatccaaactgggtacgaaaggctc

SEQ ID NO: 914929 - DNA, 25 bp, Homo sapien
tgtaacaaagagttccgattcttcc

SEQ ID NO: 914930 - DNA, 25 bp, Homo sapien
gctgagtttgttgttaaccatgaag

SEQ ID NO: 914931 - DNA, 25 bp, Homo sapien
tgatgagggcttcagtcgtgcagaa

SEQ ID NO: 914932 - DNA, 25 bp, Homo sapien
ggagcctgatgagggcttcagtcgt

SEQ ID NO: 914933 - DNA, 25 bp, Homo sapien
tgagggcttcagtcgtgcagaagtc

SEQ ID NO: 914934 - DNA, 25 bp, Homo sapien
cttcagtcgtgcagaagtcatagaa

SEQ ID NO: 914935 - DNA, 25 bp, Homo sapien
gtgaaaacctctcgaatgctgcagt

SEQ ID NO: 914936 - DNA, 25 bp, Homo sapien
gcagttttagcaagactccctcgcg

SEQ ID NO: 914937 - DNA, 25 bp, Homo sapien
tgaagagccgagaaagatgccctcc

SEQ ID NO: 914938 - DNA, 25 bp, Homo sapien
tgtgagccagcatgagtgaaaacct

SEQ ID NO: 914939 - DNA, 25 bp, Homo sapien
tacaacttctcctgtgcagttcacc

SEQ ID NO: 914940 - DNA, 25 bp, Homo sapien
acaacttctcctgtgcagttcacca

SEQ ID NO: 914941 - DNA, 25 bp, Homo sapien
cttacaacttctcctgtgcagttca

SEQ ID NO: 914942 - DNA, 25 bp, Homo sapien
caacttctcctgtgcagttcaccat

SEQ ID NO: 914943 - DNA, 25 bp, Homo sapien
tccaggtgttgctctagtgctcttg

SEQ ID NO: 914944 - DNA, 25 bp, Homo sapien
catgcaattgtaactggaggaaccc

SEQ ID NO: 914945 - DNA, 25 bp, Homo sapien
ggaggaaccccatgaggaaaatgag

SEQ ID NO: 914946 - DNA, 25 bp, Homo sapien
cccctgctaggttgccatgcaattg

SEQ ID NO: 914947 - DNA, 25 bp, Homo sapien
caactccttcccaggagaggtacat

SEQ ID NO: 914948 - DNA, 25 bp, Homo sapien
gcattgatgcgtcattatcatccaa

SEQ ID NO: 914949 - DNA, 25 bp, Homo sapien
cattatcaactccttcccaggagag

SEQ ID NO: 914950 - DNA, 25 bp, Homo sapien
tccaaatttatgacttgcattgatg

SEQ ID NO: 914951 - DNA, 25 bp, Homo sapien
tctgatgacatctgacgtgcagcat

SEQ ID NO: 914952 - DNA, 25 bp, Homo sapien
gaagtgagaatccaataagggctcg

SEQ ID NO: 914953 - DNA, 25 bp, Homo sapien
tctatattcttgtcttgggagtccg

SEQ ID NO: 914954 - DNA, 25 bp, Homo sapien
taaaacttctgtaagcgtccacgtg

SEQ ID NO: 914955 - DNA, 25 bp, Homo sapien
catcactcagctctggggcctctga

SEQ ID NO: 914956 - DNA, 25 bp, Homo sapien
agctctggggcctctgaggcatatt

SEQ ID NO: 914957 - DNA, 25 bp, Homo sapien
actcagctctggggcctctgaggca

SEQ ID NO: 914958 - DNA, 25 bp, Homo sapien
tcagctctggggcctctgaggcata

SEQ ID NO: 914959 - DNA, 25 bp, Homo sapien
ccttttgggagtatccagcgatggt

SEQ ID NO: 914960 - DNA, 25 bp, Homo sapien
aagtcaccgtgatccctaatcctgg

SEQ ID NO: 914961 - DNA, 25 bp, Homo sapien
tatccagcgatggtagaagtcaccg

SEQ ID NO: 914962 - DNA, 25 bp, Homo sapien
tgctgtctcgagaacccttttggga

SEQ ID NO: 914963 - DNA, 25 bp, Homo sapien
ggtcacacttgactgaggcccagag

SEQ ID NO: 914964 - DNA, 25 bp, Homo sapien
catgtattgaaccagcagcatcccc

SEQ ID NO: 914965 - DNA, 25 bp, Homo sapien
gaagtccgcacaaataggatgccca

SEQ ID NO: 914966 - DNA, 25 bp, Homo sapien
cttggctcgggatgtaaggctgcac

SEQ ID NO: 914967 - DNA, 25 bp, Homo sapien
cttgagtcttccatgatttgaaagt

SEQ ID NO: 914968 - DNA, 25 bp, Homo sapien
agtcttccatgatttgaaagtgtcc

SEQ ID NO: 914969 - DNA, 25 bp, Homo sapien
tcttccatgatttgaaagtgtccat

SEQ ID NO: 914970 - DNA, 25 bp, Homo sapien
tgagtcttccatgatttgaaagtgt

SEQ ID NO: 914971 - DNA, 25 bp, Homo sapien
cgcggtgttctgatgtgtcacaaca

SEQ ID NO: 914972 - DNA, 25 bp, Homo sapien
atgtgtcacaacatttcttcaacac

SEQ ID NO: 914973 - DNA, 25 bp, Homo sapien
catttcttcaacactcctgtaatcc

SEQ ID NO: 914974 - DNA, 25 bp, Homo sapien
gtatttcgcggtgttctgatgtgtc

SEQ ID NO: 914975 - DNA, 25 bp, Homo sapien
tttatctgagaatgaagaacatgca

SEQ ID NO: 914976 - DNA, 25 bp, Homo sapien
agattttatctgagaatgaagaaca

SEQ ID NO: 914977 - DNA, 25 bp, Homo sapien
attttatctgagaatgaagaacatg

SEQ ID NO: 914978 - DNA, 25 bp, Homo sapien
cttcagattttatctgagaatgaag

SEQ ID NO: 914979 - DNA, 25 bp, Homo sapien
tgagaatgttcttggagtggactgc

SEQ ID NO: 914980 - DNA, 25 bp, Homo sapien
gagtggtagtgaaaatcccgcagaa

SEQ ID NO: 914981 - DNA, 25 bp, Homo sapien
cagaaggacggaaccaacaggctat

SEQ ID NO: 914982 - DNA, 25 bp, Homo sapien
gaactggctggcgtttcaacgcgac

SEQ ID NO: 914983 - DNA, 25 bp, Homo sapien
gtgacacgtaatcccaggcatccaa

SEQ ID NO: 914984 - DNA, 25 bp, Homo sapien
ctatgcaggctcatcgtttctaatc

SEQ ID NO: 914985 - DNA, 25 bp, Homo sapien
ctaatcaggttgttgatttctacag

SEQ ID NO: 914986 - DNA, 25 bp, Homo sapien
cacagtgacacgtaatcccaggcat

SEQ ID NO: 914987 - DNA, 25 bp, Homo sapien
accctcatggattgttaggagcttc

SEQ ID NO: 914988 - DNA, 25 bp, Homo sapien
ttcaagaaatatctgaataccctca

SEQ ID NO: 914989 - DNA, 25 bp, Homo sapien
ctgagtgtgggtaattttcaagaaa

SEQ ID NO: 914990 - DNA, 25 bp, Homo sapien
tctgaataccctcatggattgttag

SEQ ID NO: 914991 - DNA, 25 bp, Homo sapien
tactgttgtgtatgacagcacatac

SEQ ID NO: 914992 - DNA, 25 bp, Homo sapien
ttactgttgtgtatgacagcacata

SEQ ID NO: 914993 - DNA, 25 bp, Homo sapien
gaacggtagagagcctgaaactcat

SEQ ID NO: 914994 - DNA, 25 bp, Homo sapien
gcagtgattaaccttgagctgggtt

SEQ ID NO: 914995 - DNA, 25 bp, Homo sapien
tggtgtcatgggcatgaacggtaga

SEQ ID NO: 914996 - DNA, 25 bp, Homo sapien
tcatgggcatgaacggtagagagcc

SEQ ID NO: 914997 - DNA, 25 bp, Homo sapien
cagaaggtctcagtcatagtgggag

SEQ ID NO: 914998 - DNA, 25 bp, Homo sapien
cagtcatagtgggagagttgacgat

SEQ ID NO: 914999 - DNA, 25 bp, Homo sapien
tctcagtcatagtgggagagttgac

SEQ ID NO: 915000 - DNA, 25 bp, Homo sapien
ggagagttgacgatggtggcagagg

SEQ ID NO: 915001 - DNA, 25 bp, Homo sapien
caagggttacagtcgtaagaggcat

SEQ ID NO: 915002 - DNA, 25 bp, Homo sapien
catatcatttggacggtgaccaagg

SEQ ID NO: 915003 - DNA, 25 bp, Homo sapien
ttggaaagcatatcatttggacggt

SEQ ID NO: 915004 - DNA, 25 bp, Homo sapien
gtgaccaagggttacagtcgtaaga

SEQ ID NO: 915005 - DNA, 25 bp, Homo sapien
ttgacttttccctcaaagctctgtt

SEQ ID NO: 915006 - DNA, 25 bp, Homo sapien
ttttgacttttccctcaaagctctg

SEQ ID NO: 915007 - DNA, 25 bp, Homo sapien
tgacttttccctcaaagctctgttt

SEQ ID NO: 915008 - DNA, 25 bp, Homo sapien
gacttttccctcaaagctctgtttc

SEQ ID NO: 915009 - DNA, 25 bp, Homo sapien
aaggtcagtacttcctgctgctgga

SEQ ID NO: 915010 - DNA, 25 bp, Homo sapien
gaaggtcagtacttcctgctgctgg

SEQ ID NO: 915011 - DNA, 25 bp, Homo sapien
gatgagtcagctcaacacttccgaa

SEQ ID NO: 915012 - DNA, 25 bp, Homo sapien
gttaggattaacttgactgtactgt

SEQ ID NO: 915013 - DNA, 25 bp, Homo sapien
tccgaacccactcttcttgttggca

SEQ ID NO: 915014 - DNA, 25 bp, Homo sapien
tgcaatcagctgaatgacaacatga

SEQ ID NO: 915015 - DNA, 25 bp, Homo sapien
tacttctcttaacgtcttatttgct

SEQ ID NO: 915016 - DNA, 25 bp, Homo sapien
tgtacttctcttaacgtcttatttg

SEQ ID NO: 915017 - DNA, 25 bp, Homo sapien
tgctgtacttctcttaacgtcttat

SEQ ID NO: 915018 - DNA, 25 bp, Homo sapien
ttctcttaacgtcttatttgctgca

SEQ ID NO: 915019 - DNA, 25 bp, Homo sapien
tctgtctctcaagtgcaaacttggc

SEQ ID NO: 915020 - DNA, 25 bp, Homo sapien
tgttccttccaagtattgccagtta

SEQ ID NO: 915021 - DNA, 25 bp, Homo sapien
caaacttggctgctagacagcggaa

SEQ ID NO: 915022 - DNA, 25 bp, Homo sapien
gccacatacaattagaggtacttga

SEQ ID NO: 915023 - DNA, 25 bp, Homo sapien
caaaatctccgaacaagaggcaacc

SEQ ID NO: 915024 - DNA, 25 bp, Homo sapien
gggtccccatatactcaatgaaacc

SEQ ID NO: 915025 - DNA, 25 bp, Homo sapien
gacctgtccttagtcaaaggagaaa

SEQ ID NO: 915026 - DNA, 25 bp, Homo sapien
caccatacacagttctacgttttga

SEQ ID NO: 915027 - DNA, 25 bp, Homo sapien
tagctatagtgtgctgctgcggcct

SEQ ID NO: 915028 - DNA, 25 bp, Homo sapien
cacggttgggtcgtttctggccata

SEQ ID NO: 915029 - DNA, 25 bp, Homo sapien
gcggccttcttattcggaagcagcc

SEQ ID NO: 915030 - DNA, 25 bp, Homo sapien
ggctcagtgtcaccccacggttggg

SEQ ID NO: 915031 - DNA, 25 bp, Homo sapien
cacccattggtgatactctcattgg

SEQ ID NO: 915032 - DNA, 25 bp, Homo sapien
cataaactggccacccattggtgat

SEQ ID NO: 915033 - DNA, 25 bp, Homo sapien
ctcaagacgagcatgtaaaagtgat

SEQ ID NO: 915034 - DNA, 25 bp, Homo sapien
tttggaggaggtaccgctgtagcca

SEQ ID NO: 915035 - DNA, 25 bp, Homo sapien
aaaaggcttgcctggtggtccgcct

SEQ ID NO: 915036 - DNA, 25 bp, Homo sapien
atgacacttcactggaatctgaagg

SEQ ID NO: 915037 - DNA, 25 bp, Homo sapien
gacacttcactggaatctgaagggt

SEQ ID NO: 915038 - DNA, 25 bp, Homo sapien
tgacacttcactggaatctgaaggg

SEQ ID NO: 915039 - DNA, 25 bp, Homo sapien
ggctttcacagggtaccatattttc

SEQ ID NO: 915040 - DNA, 25 bp, Homo sapien
gcatactgctctatactcttcacag

SEQ ID NO: 915041 - DNA, 25 bp, Homo sapien
ttcactgtgtgaatgtaccttggct

SEQ ID NO: 915042 - DNA, 25 bp, Homo sapien
ctcttcacagagtcacaacgttcac

SEQ ID NO: 915043 - DNA, 25 bp, Homo sapien
gagattctaccatacataagaagga

SEQ ID NO: 915044 - DNA, 25 bp, Homo sapien
gggtgtatgttccaggagactcaat

SEQ ID NO: 915045 - DNA, 25 bp, Homo sapien
aatgccagcagtgtgctcgcacagg

SEQ ID NO: 915046 - DNA, 25 bp, Homo sapien
cctgacacccagaaaaagacacggg

SEQ ID NO: 915047 - DNA, 25 bp, Homo sapien
actgagtccctggttctgttgacat

SEQ ID NO: 915048 - DNA, 25 bp, Homo sapien
cttcgtctaaaccaggtgcccacaa

SEQ ID NO: 915049 - DNA, 25 bp, Homo sapien
gtgcccacaattccaggtgttggga

SEQ ID NO: 915050 - DNA, 25 bp, Homo sapien
cccacaattccaggtgttgggaggg

SEQ ID NO: 915051 - DNA, 25 bp, Homo sapien
tcttatttcaaatgcggcagccaag

SEQ ID NO: 915052 - DNA, 25 bp, Homo sapien
tctactttggagtgggacctttgta

SEQ ID NO: 915053 - DNA, 25 bp, Homo sapien
tcagggcagtgacgatcagttgcac

SEQ ID NO: 915054 - DNA, 25 bp, Homo sapien
ccaagttcattcgaatcagggcagt

SEQ ID NO: 915055 - DNA, 25 bp, Homo sapien
gcttccatgcatggtttcctttgtg

SEQ ID NO: 915056 - DNA, 25 bp, Homo sapien
tcgcttccatgcatggtttcctttg

SEQ ID NO: 915057 - DNA, 25 bp, Homo sapien
ttccatgcatggtttcctttgtggt

SEQ ID NO: 915058 - DNA, 25 bp, Homo sapien
ctcgcttccatgcatggtttccttt

SEQ ID NO: 915059 - DNA, 25 bp, Homo sapien
cacgaagagaagtgtgcagatgcag

SEQ ID NO: 915060 - DNA, 25 bp, Homo sapien
ctctcctgttatagaacagccacga

SEQ ID NO: 915061 - DNA, 25 bp, Homo sapien
cagccacgaagagaagtgtgcagat

SEQ ID NO: 915062 - DNA, 25 bp, Homo sapien
tatagaacagccacgaagagaagtg

SEQ ID NO: 915063 - DNA, 25 bp, Homo sapien
ctttctgatcttgggggattttcct

SEQ ID NO: 915064 - DNA, 25 bp, Homo sapien
ttctttctgatcttgggggattttc

SEQ ID NO: 915065 - DNA, 25 bp, Homo sapien
tctttctgatcttgggggattttcc

SEQ ID NO: 915066 - DNA, 25 bp, Homo sapien
tccaatgacccatgtagatagcagt

SEQ ID NO: 915067 - DNA, 25 bp, Homo sapien
ctttgtgcaaataccaggagaatct

SEQ ID NO: 915068 - DNA, 25 bp, Homo sapien
tgaaggctgccgagttccaatgacc

SEQ ID NO: 915069 - DNA, 25 bp, Homo sapien
agtttccacattgaattctttctct

SEQ ID NO: 915070 - DNA, 25 bp, Homo sapien
ttgattgtagaggaattccttcccc

SEQ ID NO: 915071 - DNA, 25 bp, Homo sapien
cttgattgtagaggaattccttccc

SEQ ID NO: 915072 - DNA, 25 bp, Homo sapien
tgattgtagaggaattccttccccc

SEQ ID NO: 915073 - DNA, 25 bp, Homo sapien
gaagaccctattggtactgggcctc

SEQ ID NO: 915074 - DNA, 25 bp, Homo sapien
gaccccaactccatgtcagtgaaga

SEQ ID NO: 915075 - DNA, 25 bp, Homo sapien
cactaaagactgattcaggagcctg

SEQ ID NO: 915076 - DNA, 25 bp, Homo sapien
ccacacagcagtctcaaggagcaca

SEQ ID NO: 915077 - DNA, 25 bp, Homo sapien
ccagggtcagatgcaaagctgtatg

SEQ ID NO: 915078 - DNA, 25 bp, Homo sapien
ggcacaccggatagtcacctgcaga

SEQ ID NO: 915079 - DNA, 25 bp, Homo sapien
agagggacacttcgcccctgtgcct

SEQ ID NO: 915080 - DNA, 25 bp, Homo sapien
gatacactagtcattccagggtcag

SEQ ID NO: 915081 - DNA, 25 bp, Homo sapien
ctgagagctgccctagaccttagca

SEQ ID NO: 915082 - DNA, 25 bp, Homo sapien
cgttcttcttcataagtgcttgcaa

SEQ ID NO: 915083 - DNA, 25 bp, Homo sapien
catgaggcttatctcgttcttcttc

SEQ ID NO: 915084 - DNA, 25 bp, Homo sapien
gcaatatcgtggatcttttttgtca

SEQ ID NO: 915085 - DNA, 25 bp, Homo sapien
catagatgtgggacgctgaaccatg

SEQ ID NO: 915086 - DNA, 25 bp, Homo sapien
gctctgtccctgagcatgagttcct

SEQ ID NO: 915087 - DNA, 25 bp, Homo sapien
gagttcctcatagatgtgggacgct

SEQ ID NO: 915088 - DNA, 25 bp, Homo sapien
accatgatgggtaacactggactca

SEQ ID NO: 915089 - DNA, 25 bp, Homo sapien
tagcttgtagctgacttcctgccaa

SEQ ID NO: 915090 - DNA, 25 bp, Homo sapien
gagacagtctagctagcttgtagct

SEQ ID NO: 915091 - DNA, 25 bp, Homo sapien
gctcttcatttatggtgtctgctaa

SEQ ID NO: 915092 - DNA, 25 bp, Homo sapien
catttatggtgtctgctaacacatc

SEQ ID NO: 915093 - DNA, 25 bp, Homo sapien
taatattgcacttataaagctcttc

SEQ ID NO: 915094 - DNA, 25 bp, Homo sapien
agccactcttgccagaatttaatat

SEQ ID NO: 915095 - DNA, 25 bp, Homo sapien
ctacagtctgatgtgagttgcttta

SEQ ID NO: 915096 - DNA, 25 bp, Homo sapien
tgtctaggtttagcgggtccgccga

SEQ ID NO: 915097 - DNA, 25 bp, Homo sapien
gagttgctttattctcatcccgcaa

SEQ ID NO: 915098 - DNA, 25 bp, Homo sapien
ccagacacttgtactcaggaatgtg

SEQ ID NO: 915099 - DNA, 25 bp, Homo sapien
cacaatttaaagaaaacagcttcaa

SEQ ID NO: 915100 - DNA, 25 bp, Homo sapien
acacaatttaaagaaaacagcttca

SEQ ID NO: 915101 - DNA, 25 bp, Homo sapien
cttacacaatttaaagaaaacagct

SEQ ID NO: 915102 - DNA, 25 bp, Homo sapien
tacacaatttaaagaaaacagcttc

SEQ ID NO: 915103 - DNA, 25 bp, Homo sapien
agacctgatggccagactcgcctct

SEQ ID NO: 915104 - DNA, 25 bp, Homo sapien
gacttcctggagacctgatggccag

SEQ ID NO: 915105 - DNA, 25 bp, Homo sapien
ctgacctcaattgactgagcaggaa

SEQ ID NO: 915106 - DNA, 25 bp, Homo sapien
gactcgcctctgatggaaagcaact

SEQ ID NO: 915107 - DNA, 25 bp, Homo sapien
tagcccatgcactggtcacagaaat

SEQ ID NO: 915108 - DNA, 25 bp, Homo sapien
gtcacactagcccatgcactggtca

SEQ ID NO: 915109 - DNA, 25 bp, Homo sapien
acactagcccatgcactggtcacag

SEQ ID NO: 915110 - DNA, 25 bp, Homo sapien
ctgcctcctgtcacactagcccatg

SEQ ID NO: 915111 - DNA, 25 bp, Homo sapien
gtccccaccaggagatctctatgag

SEQ ID NO: 915112 - DNA, 25 bp, Homo sapien
aacaacgtgcaacacagtgtcccca

SEQ ID NO: 915113 - DNA, 25 bp, Homo sapien
ccaggagatctctatgagcaaggat

SEQ ID NO: 915114 - DNA, 25 bp, Homo sapien
caaacaacgtgcaacacagtgtccc

SEQ ID NO: 915115 - DNA, 25 bp, Homo sapien
gctgctgcataataactgtcatgga

SEQ ID NO: 915116 - DNA, 25 bp, Homo sapien
tgtggaaggaatggcccagcttgat

SEQ ID NO: 915117 - DNA, 25 bp, Homo sapien
tcatggagtcttgggctgccagttg

SEQ ID NO: 915118 - DNA, 25 bp, Homo sapien
tctcctcgtaggagggcctgagtgc

SEQ ID NO: 915119 - DNA, 25 bp, Homo sapien
aaatctgtagtattaatattaggaa

SEQ ID NO: 915120 - DNA, 25 bp, Homo sapien
aatctgtagtattaatattaggaat

SEQ ID NO: 915121 - DNA, 25 bp, Homo sapien
tctgtagtattaatattaggaataa

SEQ ID NO: 915122 - DNA, 25 bp, Homo sapien
taaatctgtagtattaatattagga

SEQ ID NO: 915123 - DNA, 25 bp, Homo sapien
gtgcctgccacatgctctgggtctg

SEQ ID NO: 915124 - DNA, 25 bp, Homo sapien
cagaggcaaagccagacaggagctc

SEQ ID NO: 915125 - DNA, 25 bp, Homo sapien
gctgaaatattcctgctggtaggag

SEQ ID NO: 915126 - DNA, 25 bp, Homo sapien
agctccaagccctgggcacagggta

SEQ ID NO: 915127 - DNA, 25 bp, Homo sapien
tatccatacaataggaggacactga

SEQ ID NO: 915128 - DNA, 25 bp, Homo sapien
aaccaccatggtccaaaaggaggca

SEQ ID NO: 915129 - DNA, 25 bp, Homo sapien
ggaggcacagccaaccgatatccat

SEQ ID NO: 915130 - DNA, 25 bp, Homo sapien
gagcaagtgactgtagtagaccctg

SEQ ID NO: 915131 - DNA, 25 bp, Homo sapien
cagctattgcgaagctcttgcttat

SEQ ID NO: 915132 - DNA, 25 bp, Homo sapien
tgcgaagctcttgcttatttttgca

SEQ ID NO: 915133 - DNA, 25 bp, Homo sapien
ctatcacagctattgcgaagctctt

SEQ ID NO: 915134 - DNA, 25 bp, Homo sapien
gaagctcttgcttatttttgcaatg

SEQ ID NO: 915135 - DNA, 25 bp, Homo sapien
tctggcctaaagctagttgtcttcc

SEQ ID NO: 915136 - DNA, 25 bp, Homo sapien
tcactctggcctaaagctagttgtc

SEQ ID NO: 915137 - DNA, 25 bp, Homo sapien
cactctggcctaaagctagttgtct

SEQ ID NO: 915138 - DNA, 25 bp, Homo sapien
tggcctaaagctagttgtcttccac

SEQ ID NO: 915139 - DNA, 25 bp, Homo sapien
aaatttgcctcctggtaacttagat

SEQ ID NO: 915140 - DNA, 25 bp, Homo sapien
ttgcctcctggtaacttagatctac

SEQ ID NO: 915141 - DNA, 25 bp, Homo sapien
tacaggaaggagaaatttgcctcct

SEQ ID NO: 915142 - DNA, 25 bp, Homo sapien
aatttgcctcctggtaacttagatc

SEQ ID NO: 915143 - DNA, 25 bp, Homo sapien
gatcctagtttgtggatgaggcttt

SEQ ID NO: 915144 - DNA, 25 bp, Homo sapien
ctgagtccagccgtccatgaggcac

SEQ ID NO: 915145 - DNA, 25 bp, Homo sapien
agaggctgtttcagatcctagtttg

SEQ ID NO: 915146 - DNA, 25 bp, Homo sapien
gagtccagccgtccatgaggcacca

SEQ ID NO: 915147 - DNA, 25 bp, Homo sapien
tgctcctcatgcaggagagctggcg

SEQ ID NO: 915148 - DNA, 25 bp, Homo sapien
cttgctcctcatgcaggagagctgg

SEQ ID NO: 915149 - DNA, 25 bp, Homo sapien
ttgctcctcatgcaggagagctggc

SEQ ID NO: 915150 - DNA, 25 bp, Homo sapien
gggtgggacaatgtcctctcaaaga

SEQ ID NO: 915151 - DNA, 25 bp, Homo sapien
tcatactggaacaaggcgcacagcc

SEQ ID NO: 915152 - DNA, 25 bp, Homo sapien
cagtgaattgtgttggtgtgcaaac

SEQ ID NO: 915153 - DNA, 25 bp, Homo sapien
gcatagacgaggtagtcatactgga

SEQ ID NO: 915154 - DNA, 25 bp, Homo sapien
tttggtgagcaacttttttgagaaa

SEQ ID NO: 915155 - DNA, 25 bp, Homo sapien
cgttttttggcttccttcttgtctg

SEQ ID NO: 915156 - DNA, 25 bp, Homo sapien
ttttggcttccttcttgtctgatct

SEQ ID NO: 915157 - DNA, 25 bp, Homo sapien
tggtgagcaacttttttgagaaacg

SEQ ID NO: 915158 - DNA, 25 bp, Homo sapien
tggccacccccgcaagtgtatctaa

SEQ ID NO: 915159 - DNA, 25 bp, Homo sapien
tgtatctaagttcagatcatgggcc

SEQ ID NO: 915160 - DNA, 25 bp, Homo sapien
gatcatgggccacggtctcagtcat

SEQ ID NO: 915161 - DNA, 25 bp, Homo sapien
ccccgcaagtgtatctaagttcaga

SEQ ID NO: 915162 - DNA, 25 bp, Homo sapien
tctcacacagcgattttcatttctg

SEQ ID NO: 915163 - DNA, 25 bp, Homo sapien
gaagctagctcagtttttctcacac

SEQ ID NO: 915164 - DNA, 25 bp, Homo sapien
gcaaacctgaataaaaattgcatta

SEQ ID NO: 915165 - DNA, 25 bp, Homo sapien
gcattagaagctagctcagtttttc

SEQ ID NO: 915166 - DNA, 25 bp, Homo sapien
tcacagacagagaagtatttgactg

SEQ ID NO: 915167 - DNA, 25 bp, Homo sapien
ttcttcacagacagagaagtatttg

SEQ ID NO: 915168 - DNA, 25 bp, Homo sapien
cagagaagtatttgactgttgctac

SEQ ID NO: 915169 - DNA, 25 bp, Homo sapien
gttgttatgagcctcactaatattc

SEQ ID NO: 915170 - DNA, 25 bp, Homo sapien
taataaggagcgttggaaatcttca

SEQ ID NO: 915171 - DNA, 25 bp, Homo sapien
tatcttataacttcttccgcaggtg

SEQ ID NO: 915172 - DNA, 25 bp, Homo sapien
tccgcaggtgcgaggatagctacaa

SEQ ID NO: 915173 - DNA, 25 bp, Homo sapien
ctgcttcttgtttgtggctttgtga

SEQ ID NO: 915174 - DNA, 25 bp, Homo sapien
attttgagttatcctcaacccctag

SEQ ID NO: 915175 - DNA, 25 bp, Homo sapien
ccctagtgacaagtcatgggctctt

SEQ ID NO: 915176 - DNA, 25 bp, Homo sapien
tcatgggctcttccagaagacattt

SEQ ID NO: 915177 - DNA, 25 bp, Homo sapien
tatcctcaacccctagtgacaagtc

SEQ ID NO: 915178 - DNA, 25 bp, Homo sapien
catcacaggcttgcttccgtgctga

SEQ ID NO: 915179 - DNA, 25 bp, Homo sapien
caggcttgcttccgtgctgagcaca

SEQ ID NO: 915180 - DNA, 25 bp, Homo sapien
tgggccatcacaggcttgcttccgt

SEQ ID NO: 915181 - DNA, 25 bp, Homo sapien
tgagcacagtggttgctgctggtcc

SEQ ID NO: 915182 - DNA, 25 bp, Homo sapien
cgttaccactacatgcaacaggagt

SEQ ID NO: 915183 - DNA, 25 bp, Homo sapien
ggcagaatgtgttatcaaactcgtt

SEQ ID NO: 915184 - DNA, 25 bp, Homo sapien
tgcaacaggagtttaatcccacggg

SEQ ID NO: 915185 - DNA, 25 bp, Homo sapien
cagtcactgttcgagggtgctggcc

SEQ ID NO: 915186 - DNA, 25 bp, Homo sapien
tacaggcatgtttccgttggaacca

SEQ ID NO: 915187 - DNA, 25 bp, Homo sapien
ggatatagctaagtcttcccaaggc

SEQ ID NO: 915188 - DNA, 25 bp, Homo sapien
gccggcaaaagcacgatcatagaga

SEQ ID NO: 915189 - DNA, 25 bp, Homo sapien
caatgttgggataatagtgccggca

SEQ ID NO: 915190 - DNA, 25 bp, Homo sapien
aattagaagccatgagatctgcggt

SEQ ID NO: 915191 - DNA, 25 bp, Homo sapien
aaatgcgtcataagttttgctgccc

SEQ ID NO: 915192 - DNA, 25 bp, Homo sapien
tctcaggaaggcagttatgaaatgc

SEQ ID NO: 915193 - DNA, 25 bp, Homo sapien
tttctgacaccgaaaaacaatgcgg

SEQ ID NO: 915194 - DNA, 25 bp, Homo sapien
aaagtaggctactaatgtttccctg

SEQ ID NO: 915195 - DNA, 25 bp, Homo sapien
gggacatctgccatgaccgtttaat

SEQ ID NO: 915196 - DNA, 25 bp, Homo sapien
tatttcctagcactaaatctgccca

SEQ ID NO: 915197 - DNA, 25 bp, Homo sapien
tgtttccctgagaagcatggcgggt

SEQ ID NO: 915198 - DNA, 25 bp, Homo sapien
agagggcagcttggttccagatccc

SEQ ID NO: 915199 - DNA, 25 bp, Homo sapien
cactccccagtacagcagtaatctg

SEQ ID NO: 915200 - DNA, 25 bp, Homo sapien
aacagtcacaggtttacagcaagcc

SEQ ID NO: 915201 - DNA, 25 bp, Homo sapien
gatgacaagctcacaggtgtctggg

SEQ ID NO: 915202 - DNA, 25 bp, Homo sapien
gcttcaagaagtgaggccctcgggc

SEQ ID NO: 915203 - DNA, 25 bp, Homo sapien
tcaacatatacaagtgcatgcatgg

SEQ ID NO: 915204 - DNA, 25 bp, Homo sapien
gatggcaagaagataagggccgttc

SEQ ID NO: 915205 - DNA, 25 bp, Homo sapien
taaaaagaagtatcacaatccctcg

SEQ ID NO: 915206 - DNA, 25 bp, Homo sapien
tgcgtgtggccagctattaggtaag

SEQ ID NO: 915207 - DNA, 25 bp, Homo sapien
tctgaggacaggtttggacatgcgt

SEQ ID NO: 915208 - DNA, 25 bp, Homo sapien
gagcatgggtgacaatgggtgagga

SEQ ID NO: 915209 - DNA, 25 bp, Homo sapien
tctggctctatatgggagcacaggc

SEQ ID NO: 915210 - DNA, 25 bp, Homo sapien
tctgtgcacagcttgggtcagagca

SEQ ID NO: 915211 - DNA, 25 bp, Homo sapien
tggcaggtggtggaccaccctctgc

SEQ ID NO: 915212 - DNA, 25 bp, Homo sapien
gccgaatggccaaccttaaggagct

SEQ ID NO: 915213 - DNA, 25 bp, Homo sapien
tgggcgcttgcatggacaaaggtac

SEQ ID NO: 915214 - DNA, 25 bp, Homo sapien
ttggcgttctagcctgtggaggagt

SEQ ID NO: 915215 - DNA, 25 bp, Homo sapien
cttggcgttctagcctgtggaggag

SEQ ID NO: 915216 - DNA, 25 bp, Homo sapien
tggcgttctagcctgtggaggagtc

SEQ ID NO: 915217 - DNA, 25 bp, Homo sapien
gcagatctgacaggccgcgcgcagt

SEQ ID NO: 915218 - DNA, 25 bp, Homo sapien
gcgcgcagttccacacagccgcgct

SEQ ID NO: 915219 - DNA, 25 bp, Homo sapien
gaagacgcagatctgacaggccgcg

SEQ ID NO: 915220 - DNA, 25 bp, Homo sapien
cattcacgagggaagacgcagatct

SEQ ID NO: 915221 - DNA, 25 bp, Homo sapien
tccgggatgagtgtggaaggcgctc

SEQ ID NO: 915222 - DNA, 25 bp, Homo sapien
cacacgagggggttccgtgcagccc

SEQ ID NO: 915223 - DNA, 25 bp, Homo sapien
tgcaccaggagcactcagctttccc

SEQ ID NO: 915224 - DNA, 25 bp, Homo sapien
acaggctccgggcacacgagggggt

SEQ ID NO: 915225 - DNA, 25 bp, Homo sapien
gcagagggaacggaggcgcagagag

SEQ ID NO: 915226 - DNA, 25 bp, Homo sapien
ttgcagagggaacggaggcgcagag

SEQ ID NO: 915227 - DNA, 25 bp, Homo sapien
cagagggaacggaggcgcagagagc

SEQ ID NO: 915228 - DNA, 25 bp, Homo sapien
ctttgcagagggaacggaggcgcag

SEQ ID NO: 915229 - DNA, 25 bp, Homo sapien
gcaattagacacaggacgtgctgga

SEQ ID NO: 915230 - DNA, 25 bp, Homo sapien
tagacacaggacgtgctggacctgc

SEQ ID NO: 915231 - DNA, 25 bp, Homo sapien
ggatgacgctgaccggccggtgatg

SEQ ID NO: 915232 - DNA, 25 bp, Homo sapien
gcagcgggcggatctgcgggtccgc

SEQ ID NO: 915233 - DNA, 25 bp, Homo sapien
tcattcatggggaaaactcccagaa

SEQ ID NO: 915234 - DNA, 25 bp, Homo sapien
aatgcatcattcatggggaaaactc

SEQ ID NO: 915235 - DNA, 25 bp, Homo sapien
catggggaaaactcccagaatccag

SEQ ID NO: 915236 - DNA, 25 bp, Homo sapien
ctcccagaatccagtcacctgccat

SEQ ID NO: 915237 - DNA, 25 bp, Homo sapien
agagccaacagaagattcccatgaa

SEQ ID NO: 915238 - DNA, 25 bp, Homo sapien
cctatttctaatactttgatcacca

SEQ ID NO: 915239 - DNA, 25 bp, Homo sapien
gatatgccctatttctaatactttg

SEQ ID NO: 915240 - DNA, 25 bp, Homo sapien
tcttcccacagcaggttagagatat

SEQ ID NO: 915241 - DNA, 25 bp, Homo sapien
tcgtgctgactcggatttcgaacat

SEQ ID NO: 915242 - DNA, 25 bp, Homo sapien
cagtcgtgctgactcggatttcgaa

SEQ ID NO: 915243 - DNA, 25 bp, Homo sapien
agtcgtgctgactcggatttcgaac

SEQ ID NO: 915244 - DNA, 25 bp, Homo sapien
gtcgtgctgactcggatttcgaaca

SEQ ID NO: 915245 - DNA, 25 bp, Homo sapien
aagtccttgcctaggggacgctgga

SEQ ID NO: 915246 - DNA, 25 bp, Homo sapien
aattcggccagtcgccacagaaacc

SEQ ID NO: 915247 - DNA, 25 bp, Homo sapien
cacagccaagtccttgcctagggga

SEQ ID NO: 915248 - DNA, 25 bp, Homo sapien
tggagctcttagaaccaacagaggg

SEQ ID NO: 915249 - DNA, 25 bp, Homo sapien
ggatccagagtagccccgcttcggg

SEQ ID NO: 915250 - DNA, 25 bp, Homo sapien
actgaacttgcggatccagagtagc

SEQ ID NO: 915251 - DNA, 25 bp, Homo sapien
tgcactgaacttgcggatccagagt

SEQ ID NO: 915252 - DNA, 25 bp, Homo sapien
aacttgcggatccagagtagccccg

SEQ ID NO: 915253 - DNA, 25 bp, Homo sapien
ggacccgtgtccttagtcccacaga

SEQ ID NO: 915254 - DNA, 25 bp, Homo sapien
gtgggtcgcctagcagctgaggagc

SEQ ID NO: 915255 - DNA, 25 bp, Homo sapien
ggagctggcggtaacctgcggcggt

SEQ ID NO: 915256 - DNA, 25 bp, Homo sapien
cctgcggcggtggtttacagcctgc

SEQ ID NO: 915257 - DNA, 25 bp, Homo sapien
aggggtgtgggcgagaaacagcctg

SEQ ID NO: 915258 - DNA, 25 bp, Homo sapien
ggggtgtgggcgagaaacagcctgg

SEQ ID NO: 915259 - DNA, 25 bp, Homo sapien
agtgtgccgccaaaaccaagggtgg

SEQ ID NO: 915260 - DNA, 25 bp, Homo sapien
gtgcctgtggtttccgtcctgatcc

SEQ ID NO: 915261 - DNA, 25 bp, Homo sapien
ctgtggtttccgtcctgatccgggt

SEQ ID NO: 915262 - DNA, 25 bp, Homo sapien
atatctacctttccagtgtgccgcc

SEQ ID NO: 915263 - DNA, 25 bp, Homo sapien
cttctgcagcgtgccccgggtggga

SEQ ID NO: 915264 - DNA, 25 bp, Homo sapien
ttctgcagcgtgccccgggtgggac

SEQ ID NO: 915265 - DNA, 25 bp, Homo sapien
tgagttaggacatttactgaggtga

SEQ ID NO: 915266 - DNA, 25 bp, Homo sapien
agagctgcaaacttcttgggttgga

SEQ ID NO: 915267 - DNA, 25 bp, Homo sapien
cagcagcaaccatgaaagagctgca

SEQ ID NO: 915268 - DNA, 25 bp, Homo sapien
tccaggtggatgttgccgtccgtct

SEQ ID NO: 915269 - DNA, 25 bp, Homo sapien
cagccgctgaatggcctctggtgcc

SEQ ID NO: 915270 - DNA, 25 bp, Homo sapien
aatctggctccaactggatgacttg

SEQ ID NO: 915271 - DNA, 25 bp, Homo sapien
actggatgacttggagagttgaaca

SEQ ID NO: 915272 - DNA, 25 bp, Homo sapien
gaagtggccagcttccaaatcccgc

SEQ ID NO: 915273 - DNA, 25 bp, Homo sapien
ctgcttcaacctcaggtagacactc

SEQ ID NO: 915274 - DNA, 25 bp, Homo sapien
ttctctttaccccacaggtgcccag

SEQ ID NO: 915275 - DNA, 25 bp, Homo sapien
ccctttgctatcaacattgttcctg

SEQ ID NO: 915276 - DNA, 25 bp, Homo sapien
tgtccttgctgagcccagagtccac

SEQ ID NO: 915277 - DNA, 25 bp, Homo sapien
ctcagcaagcctcatagctgtttcc

SEQ ID NO: 915278 - DNA, 25 bp, Homo sapien
tcagcaagcctcatagctgtttcct

SEQ ID NO: 915279 - DNA, 25 bp, Homo sapien
ggtccaaggttgaagtgctatgttc

SEQ ID NO: 915280 - DNA, 25 bp, Homo sapien
cctcagcaaccaggtccaaggttga

SEQ ID NO: 915281 - DNA, 25 bp, Homo sapien
gaagtgctatgttccaaggtccaaa

SEQ ID NO: 915282 - DNA, 25 bp, Homo sapien
tcagcaaccaggtccaaggttgaag

SEQ ID NO: 915283 - DNA, 25 bp, Homo sapien
gtatatgtccaaggcgaagtccagg

SEQ ID NO: 915284 - DNA, 25 bp, Homo sapien
cctgaaagcataaacctgaacagtt

SEQ ID NO: 915285 - DNA, 25 bp, Homo sapien
gtttgagttgagaggaccaggtcca

SEQ ID NO: 915286 - DNA, 25 bp, Homo sapien
tacaacatccaggttcaaagcccgg

SEQ ID NO: 915287 - DNA, 25 bp, Homo sapien
tccagtttatttgtgtggagatgtt

SEQ ID NO: 915288 - DNA, 25 bp, Homo sapien
tcctcctttctcttgtgaacattta

SEQ ID NO: 915289 - DNA, 25 bp, Homo sapien
ccagtttatttgtgtggagatgttt

SEQ ID NO: 915290 - DNA, 25 bp, Homo sapien
ttttccagtttatttgtgtggagat

SEQ ID NO: 915291 - DNA, 25 bp, Homo sapien
gcttacatttaagggctcagaaatc

SEQ ID NO: 915292 - DNA, 25 bp, Homo sapien
tatagagtttgagctgtcttccaac

SEQ ID NO: 915293 - DNA, 25 bp, Homo sapien
gcgatcacagttcgtttagcagcat

SEQ ID NO: 915294 - DNA, 25 bp, Homo sapien
aagagtcagctcaactaaaaggcta

SEQ ID NO: 915295 - DNA, 25 bp, Homo sapien
tacacgtggtacacaacctgaagaa

SEQ ID NO: 915296 - DNA, 25 bp, Homo sapien
gcttgcacagctataccagaagaca

SEQ ID NO: 915297 - DNA, 25 bp, Homo sapien
aagtcacaaacgaatacaaacagcg

SEQ ID NO: 915298 - DNA, 25 bp, Homo sapien
taaatggaccacagttactgcagct

SEQ ID NO: 915299 - DNA, 25 bp, Homo sapien
tcacacttgttcaccaatctctaag

SEQ ID NO: 915300 - DNA, 25 bp, Homo sapien
gaccaattatgtgaatcccacctaa

SEQ ID NO: 915301 - DNA, 25 bp, Homo sapien
tatgctataactttaacggctcaag

SEQ ID NO: 915302 - DNA, 25 bp, Homo sapien
tactggaagaggtctatgtgtaaac

SEQ ID NO: 915303 - DNA, 25 bp, Homo sapien
tggaatagtctagcataacgccttt

SEQ ID NO: 915304 - DNA, 25 bp, Homo sapien
catggaaagttctcaatgaatgtta

SEQ ID NO: 915305 - DNA, 25 bp, Homo sapien
gattacttagcctccccatgcctgt

SEQ ID NO: 915306 - DNA, 25 bp, Homo sapien
gtcatggaaagttctcaatgaatgt

SEQ ID NO: 915307 - DNA, 25 bp, Homo sapien
atggaaagttctcaatgaatgttaa

SEQ ID NO: 915308 - DNA, 25 bp, Homo sapien
aattgcctgaagctaggacagctac

SEQ ID NO: 915309 - DNA, 25 bp, Homo sapien
gctctaattgctcaatgccacaagg

SEQ ID NO: 915310 - DNA, 25 bp, Homo sapien
tgccacaaggtgtcccaatgacttg

SEQ ID NO: 915311 - DNA, 25 bp, Homo sapien
tggatctaggcaatctggtccagag

SEQ ID NO: 915312 - DNA, 25 bp, Homo sapien
taaatatcagtagactccaacagca

SEQ ID NO: 915313 - DNA, 25 bp, Homo sapien
gatctaaaagccctcaattatcagg

SEQ ID NO: 915314 - DNA, 25 bp, Homo sapien
tatattaacgaaataacagcctgtc

SEQ ID NO: 915315 - DNA, 25 bp, Homo sapien
tattaaagaaaatagtgcctagcac

SEQ ID NO: 915316 - DNA, 25 bp, Homo sapien
aagaagccaatgaatcccattatag

SEQ ID NO: 915317 - DNA, 25 bp, Homo sapien
ccattatagcaaatcctattgctgt

SEQ ID NO: 915318 - DNA, 25 bp, Homo sapien
tagcaaatcctattgctgttgccat

SEQ ID NO: 915319 - DNA, 25 bp, Homo sapien
gaagccaatgaatcccattatagca

SEQ ID NO: 915320 - DNA, 25 bp, Homo sapien
aaacaggaaattcacatattttttg

SEQ ID NO: 915321 - DNA, 25 bp, Homo sapien
gaaattcacatattttttgcactgt

SEQ ID NO: 915322 - DNA, 25 bp, Homo sapien
caggaaattcacatattttttgcac

SEQ ID NO: 915323 - DNA, 25 bp, Homo sapien
aattcacatattttttgcactgtca

SEQ ID NO: 915324 - DNA, 25 bp, Homo sapien
caaactgccgacttggctcaacaaa

SEQ ID NO: 915325 - DNA, 25 bp, Homo sapien
gaatggagtcctttacaaactgccg

SEQ ID NO: 915326 - DNA, 25 bp, Homo sapien
tagtgcatcttttaaccagccgaat

SEQ ID NO: 915327 - DNA, 25 bp, Homo sapien
caacaaactgcattacctgatccat

SEQ ID NO: 915328 - DNA, 25 bp, Homo sapien
tctcatacaataagcacttgctcat

SEQ ID NO: 915329 - DNA, 25 bp, Homo sapien
gaccagccactgaattcacgtctaa

SEQ ID NO: 915330 - DNA, 25 bp, Homo sapien
gttctcatacaataagcacttgctc

SEQ ID NO: 915331 - DNA, 25 bp, Homo sapien
gtaaatgagaccagccactgaattc

SEQ ID NO: 915332 - DNA, 25 bp, Homo sapien
gctgcccccaagagtcgcaaaggtg

SEQ ID NO: 915333 - DNA, 25 bp, Homo sapien
tcgcaaaggtgtggccgccccgttc

SEQ ID NO: 915334 - DNA, 25 bp, Homo sapien
ccccaagagtcgcaaaggtgtggcc

SEQ ID NO: 915335 - DNA, 25 bp, Homo sapien
aagagtcgcaaaggtgtggccgccc

SEQ ID NO: 915336 - DNA, 25 bp, Homo sapien
tacgcgaaacctcagtgcgcaagcg

SEQ ID NO: 915337 - DNA, 25 bp, Homo sapien
gacacgtagcactggagcttgctga

SEQ ID NO: 915338 - DNA, 25 bp, Homo sapien
tccgtcctattggttccttacgcga

SEQ ID NO: 915339 - DNA, 25 bp, Homo sapien
cacctaaaatgccagggacacgtag

SEQ ID NO: 915340 - DNA, 25 bp, Homo sapien
ccacaaggatgcattccaggaaccc

SEQ ID NO: 915341 - DNA, 25 bp, Homo sapien
tggctgaaaccgtcagtagagacgg

SEQ ID NO: 915342 - DNA, 25 bp, Homo sapien
cccgccggatggctgaaaccgtcag

SEQ ID NO: 915343 - DNA, 25 bp, Homo sapien
cacaaggatgcattccaggaacccc

SEQ ID NO: 915344 - DNA, 25 bp, Homo sapien
agatggctaggcctcgttccagccg

SEQ ID NO: 915345 - DNA, 25 bp, Homo sapien
tttctcctcagaagtgtgacccagg

SEQ ID NO: 915346 - DNA, 25 bp, Homo sapien
agctagcgtccctctggcccgtgct

SEQ ID NO: 915347 - DNA, 25 bp, Homo sapien
aagtgtgacccagggccctatccag

SEQ ID NO: 915348 - DNA, 25 bp, Homo sapien
ctagggtccatgatagggagctatg

SEQ ID NO: 915349 - DNA, 25 bp, Homo sapien
gggtccatgatagggagctatgcca

SEQ ID NO: 915350 - DNA, 25 bp, Homo sapien
catgatagggagctatgccaagtca

SEQ ID NO: 915351 - DNA, 25 bp, Homo sapien
tccatgatagggagctatgccaagt

SEQ ID NO: 915352 - DNA, 25 bp, Homo sapien
ctcatgtctactgcggtttgttact

SEQ ID NO: 915353 - DNA, 25 bp, Homo sapien
tggaagcccctgagaagtcgcctta

SEQ ID NO: 915354 - DNA, 25 bp, Homo sapien
actgcggtttgttactccataatgg

SEQ ID NO: 915355 - DNA, 25 bp, Homo sapien
atggaagcccctgagaagtcgcctt

SEQ ID NO: 915356 - DNA, 25 bp, Homo sapien
cagagaatctgattcgcatttcagg

SEQ ID NO: 915357 - DNA, 25 bp, Homo sapien
tgggaagagcgctttgcttcccaga

SEQ ID NO: 915358 - DNA, 25 bp, Homo sapien
agagcgctttgcttcccagagaatc

SEQ ID NO: 915359 - DNA, 25 bp, Homo sapien
aatctgattcgcatttcaggcagtc

SEQ ID NO: 915360 - DNA, 25 bp, Homo sapien
tcggaggcgggaaaccctgcagcaa

SEQ ID NO: 915361 - DNA, 25 bp, Homo sapien
agaagcgtgaatgccctcacctgct

SEQ ID NO: 915362 - DNA, 25 bp, Homo sapien
ggcagtgcagaagcgtgaatgccct

SEQ ID NO: 915363 - DNA, 25 bp, Homo sapien
cacctgctcggaggcgggaaaccct

SEQ ID NO: 915364 - DNA, 25 bp, Homo sapien
agcttcctggctaggttctctgcct

SEQ ID NO: 915365 - DNA, 25 bp, Homo sapien
gcttcctggctaggttctctgcctt

SEQ ID NO: 915366 - DNA, 25 bp, Homo sapien
cctggctaggttctctgccttcatt

SEQ ID NO: 915367 - DNA, 25 bp, Homo sapien
caaaagaacagccatgtgtcgggca

SEQ ID NO: 915368 - DNA, 25 bp, Homo sapien
tgtcgggcaacagaatcagggtcag

SEQ ID NO: 915369 - DNA, 25 bp, Homo sapien
tggctagcaagtactcatgtatgta

SEQ ID NO: 915370 - DNA, 25 bp, Homo sapien
aatatttggctagcaagtactcatg

SEQ ID NO: 915371 - DNA, 25 bp, Homo sapien
agttctcacctgaaaccacagccat

SEQ ID NO: 915372 - DNA, 25 bp, Homo sapien
cacagccatgggtggccccacagtg

SEQ ID NO: 915373 - DNA, 25 bp, Homo sapien
cagtgcttttcactgagtgacatga

SEQ ID NO: 915374 - DNA, 25 bp, Homo sapien
gctgaggcatctggtgtaccccctg

SEQ ID NO: 915375 - DNA, 25 bp, Homo sapien
gaagacaatacacgctgtaaacgat

SEQ ID NO: 915376 - DNA, 25 bp, Homo sapien
aaatgtgcatacacgaagacaatac

SEQ ID NO: 915377 - DNA, 25 bp, Homo sapien
gggcctctttgaaactgatcctctc

SEQ ID NO: 915378 - DNA, 25 bp, Homo sapien
ccatcgaatagagcacagtgctggt

SEQ ID NO: 915379 - DNA, 25 bp, Homo sapien
tccttgcctccatcagtgcactggg

SEQ ID NO: 915380 - DNA, 25 bp, Homo sapien
tgcccaagtcttgccattgctacgt

SEQ ID NO: 915381 - DNA, 25 bp, Homo sapien
tgtcctgaccgccaaggaggtagag

SEQ ID NO: 915382 - DNA, 25 bp, Homo sapien
gaggtagagctcacaatcacatagg

SEQ ID NO: 915383 - DNA, 25 bp, Homo sapien
ttctttgaaagcatggtaaccagtc

SEQ ID NO: 915384 - DNA, 25 bp, Homo sapien
ctaggacttccaacaaggttgctga

SEQ ID NO: 915385 - DNA, 25 bp, Homo sapien
catttggtgggtgcactcctgagcg

SEQ ID NO: 915386 - DNA, 25 bp, Homo sapien
ctgagcggcttgctgagtcagaact

SEQ ID NO: 915387 - DNA, 25 bp, Homo sapien
ataacctgggatgtctgttttttct

SEQ ID NO: 915388 - DNA, 25 bp, Homo sapien
tggcaatgcccgctgggagcttccc

SEQ ID NO: 915389 - DNA, 25 bp, Homo sapien
gccagtgcagacagacgtataacct

SEQ ID NO: 915390 - DNA, 25 bp, Homo sapien
ctaactggaggtcccctcgctggga

SEQ ID NO: 915391 - DNA, 25 bp, Homo sapien
tctgtaccccgtgcaattttccaca

SEQ ID NO: 915392 - DNA, 25 bp, Homo sapien
gagtgttctctgtaccccgtgcaat

SEQ ID NO: 915393 - DNA, 25 bp, Homo sapien
taccccgtgcaattttccacaggag

SEQ ID NO: 915394 - DNA, 25 bp, Homo sapien
ggccttgagtgttctctgtaccccg

SEQ ID NO: 915395 - DNA, 25 bp, Homo sapien
cagcagctgcccatgatgcattgcg

SEQ ID NO: 915396 - DNA, 25 bp, Homo sapien
gaaagtaccagtaactattctctgc

SEQ ID NO: 915397 - DNA, 25 bp, Homo sapien
tatttcatgtcgttgcttgttagaa

SEQ ID NO: 915398 - DNA, 25 bp, Homo sapien
gtggtgagccctcgccctcagtttt

SEQ ID NO: 915399 - DNA, 25 bp, Homo sapien
gagagtcaacagtgaagccgcatgg

SEQ ID NO: 915400 - DNA, 25 bp, Homo sapien
gctgctgctcgtgagaattccggct

SEQ ID NO: 915401 - DNA, 25 bp, Homo sapien
tggggagacttgtgccacatctgct

SEQ ID NO: 915402 - DNA, 25 bp, Homo sapien
agggccgctgctgctcgtgagaatt

SEQ ID NO: 915403 - DNA, 25 bp, Homo sapien
cgctcacggaatggaatcacggaag

SEQ ID NO: 915404 - DNA, 25 bp, Homo sapien
atggcactgcccctctccgtagtga

SEQ ID NO: 915405 - DNA, 25 bp, Homo sapien
tatgttgcaatgaaccgctcacgga

SEQ ID NO: 915406 - DNA, 25 bp, Homo sapien
caggaataggttgatttgcatcttc

SEQ ID NO: 915407 - DNA, 25 bp, Homo sapien
tacaaatttcaacctcagtgctttt

SEQ ID NO: 915408 - DNA, 25 bp, Homo sapien
cttcccatcctccaaatgcatttta

SEQ ID NO: 915409 - DNA, 25 bp, Homo sapien
acaaatttcaacctcagtgcttttg

SEQ ID NO: 915410 - DNA, 25 bp, Homo sapien
cccatcctccaaatgcattttacaa

SEQ ID NO: 915411 - DNA, 25 bp, Homo sapien
tgcaatgcggtttttcaatagaagc

SEQ ID NO: 915412 - DNA, 25 bp, Homo sapien
gatcctaaggattctcctcctaaga

SEQ ID NO: 915413 - DNA, 25 bp, Homo sapien
agctgtaatgccatttcaaacaaag

SEQ ID NO: 915414 - DNA, 25 bp, Homo sapien
caatagaagcgcagagtagaggaag

SEQ ID NO: 915415 - DNA, 25 bp, Homo sapien
gaagtgccgcttgtttccgagcctg

SEQ ID NO: 915416 - DNA, 25 bp, Homo sapien
gaatcttcgcgaagcctgcatccga

SEQ ID NO: 915417 - DNA, 25 bp, Homo sapien
gactcttccataatgcagggctgag

SEQ ID NO: 915418 - DNA, 25 bp, Homo sapien
tccgagcctggatgagtaatgacgc

SEQ ID NO: 915419 - DNA, 25 bp, Homo sapien
catgtggcctttgcggcacgtctgc

SEQ ID NO: 915420 - DNA, 25 bp, Homo sapien
ctctctgcctggaccgctcgggttt

SEQ ID NO: 915421 - DNA, 25 bp, Homo sapien
tggaccgctcgggtttgaaggccca

SEQ ID NO: 915422 - DNA, 25 bp, Homo sapien
gcctttgcggcacgtctgcttctct

SEQ ID NO: 915423 - DNA, 25 bp, Homo sapien
tgggtgccatgtggatgatctcagc

SEQ ID NO: 915424 - DNA, 25 bp, Homo sapien
tgatctcagcggattcgggctgcag

SEQ ID NO: 915425 - DNA, 25 bp, Homo sapien
tgcactgatgagtctggcgggacac

SEQ ID NO: 915426 - DNA, 25 bp, Homo sapien
ggctccaccagcattgtgcactgat

SEQ ID NO: 915427 - DNA, 25 bp, Homo sapien
ggccagttctactgaattctcctga

SEQ ID NO: 915428 - DNA, 25 bp, Homo sapien
gatgcgggagaattgcaggtcctca

SEQ ID NO: 915429 - DNA, 25 bp, Homo sapien
ggtgtggataacgtgtctccatctg

SEQ ID NO: 915430 - DNA, 25 bp, Homo sapien
cagcacacttgggataacagggtgt

SEQ ID NO: 915431 - DNA, 25 bp, Homo sapien
tgggtcgccagcaacatcggcttct

SEQ ID NO: 915432 - DNA, 25 bp, Homo sapien
ctgctccacggcataagctgcattg

SEQ ID NO: 915433 - DNA, 25 bp, Homo sapien
cataagctgcattgagtgtgggtcg

SEQ ID NO: 915434 - DNA, 25 bp, Homo sapien
cattgagtgtgggtcgccagcaaca

SEQ ID NO: 915435 - DNA, 25 bp, Homo sapien
ctgcagaaatatttgggaggacctt

SEQ ID NO: 915436 - DNA, 25 bp, Homo sapien
ggtcttggcaggagaagttctatag

SEQ ID NO: 915437 - DNA, 25 bp, Homo sapien
tttgggaggaccttcaaatgtgtct

SEQ ID NO: 915438 - DNA, 25 bp, Homo sapien
gcaggagaagttctatagtagctgc

SEQ ID NO: 915439 - DNA, 25 bp, Homo sapien
agcagttttggcagggtgttcatat

SEQ ID NO: 915440 - DNA, 25 bp, Homo sapien
tgccaaggatcatagactttgccag

SEQ ID NO: 915441 - DNA, 25 bp, Homo sapien
gaagccatgcgctaatctggaaatc

SEQ ID NO: 915442 - DNA, 25 bp, Homo sapien
tcccatgtatttatcaggaagtaag

SEQ ID NO: 915443 - DNA, 25 bp, Homo sapien
tctgagcaacgctgctcctctggag

SEQ ID NO: 915444 - DNA, 25 bp, Homo sapien
acactctgagcaacgctgctcctct

SEQ ID NO: 915445 - DNA, 25 bp, Homo sapien
cacactctgagcaacgctgctcctc

SEQ ID NO: 915446 - DNA, 25 bp, Homo sapien
ggcaaaggagatgggcgggactgcc

SEQ ID NO: 915447 - DNA, 25 bp, Homo sapien
gcctcagctgcaactcatatacctt

SEQ ID NO: 915448 - DNA, 25 bp, Homo sapien
gctttttgtccggtacttctctgat

SEQ ID NO: 915449 - DNA, 25 bp, Homo sapien
gggaacctgataggcacccacacat

SEQ ID NO: 915450 - DNA, 25 bp, Homo sapien
tactataataattgctgcagcaacc

SEQ ID NO: 915451 - DNA, 25 bp, Homo sapien
aataacacttcttaacttctttcat

SEQ ID NO: 915452 - DNA, 25 bp, Homo sapien
aggattatccagctctgcgtcaaca

SEQ ID NO: 915453 - DNA, 25 bp, Homo sapien
catttgtccaaacattccataagga

SEQ ID NO: 915454 - DNA, 25 bp, Homo sapien
cgatgactctgcttggtgcagaata

SEQ ID NO: 915455 - DNA, 25 bp, Homo sapien
ctctgcttggtgcagaatatcactt

SEQ ID NO: 915456 - DNA, 25 bp, Homo sapien
tttgccttgtgtgatcttgctctct

SEQ ID NO: 915457 - DNA, 25 bp, Homo sapien
ccattctaacatggttgaaaatgtg

SEQ ID NO: 915458 - DNA, 25 bp, Homo sapien
gccgcttcatacctctttgccttgt

SEQ ID NO: 915459 - DNA, 25 bp, Homo sapien
ttctaacagtagtgagcagcccgta

SEQ ID NO: 915460 - DNA, 25 bp, Homo sapien
taacataagaggtaagagtgcgtga

SEQ ID NO: 915461 - DNA, 25 bp, Homo sapien
caagttccaaataatggcagctgct

SEQ ID NO: 915462 - DNA, 25 bp, Homo sapien
gcccttgagaatcgcatcgagctct

SEQ ID NO: 915463 - DNA, 25 bp, Homo sapien
gagctctccaagcatcattgtattg

SEQ ID NO: 915464 - DNA, 25 bp, Homo sapien
cagctcacatcaggacagcgtccac

SEQ ID NO: 915465 - DNA, 25 bp, Homo sapien
gttcgggaagggctgcaactccaag

SEQ ID NO: 915466 - DNA, 25 bp, Homo sapien
ccgccagctcacatcaggacagcgt

SEQ ID NO: 915467 - DNA, 25 bp, Homo sapien
tagtgatgctggttcgggaagggct

SEQ ID NO: 915468 - DNA, 25 bp, Homo sapien
agcagcttatacatcaaattttcag

SEQ ID NO: 915469 - DNA, 25 bp, Homo sapien
tggttccatcatgccctttagatag

SEQ ID NO: 915470 - DNA, 25 bp, Homo sapien
gatagctccatctatcaatgaatgc

SEQ ID NO: 915471 - DNA, 25 bp, Homo sapien
aggacgactgcccttggttccatca

SEQ ID NO: 915472 - DNA, 25 bp, Homo sapien
ggacgacaggccacctcgtcggcgt

SEQ ID NO: 915473 - DNA, 25 bp, Homo sapien
agcagcgatgcgaccctccgggacg

SEQ ID NO: 915474 - DNA, 25 bp, Homo sapien
ccctgactccgtccagtattgatcg

SEQ ID NO: 915475 - DNA, 25 bp, Homo sapien
tccagtattgatcgggagagccgga

SEQ ID NO: 915476 - DNA, 25 bp, Homo sapien
gagtgcggcagtgagtagatctctc

SEQ ID NO: 915477 - DNA, 25 bp, Homo sapien
tcagtgacggtgatgtgcctctccc

SEQ ID NO: 915478 - DNA, 25 bp, Homo sapien
tgtaataagctattctggctgggat

SEQ ID NO: 915479 - DNA, 25 bp, Homo sapien
ctgggatttacttgcaagcattggc

SEQ ID NO: 915480 - DNA, 25 bp, Homo sapien
ctttccacctttagagattcttgtt

SEQ ID NO: 915481 - DNA, 25 bp, Homo sapien
gagattcttgtttagatgcagagta

SEQ ID NO: 915482 - DNA, 25 bp, Homo sapien
tcttgtttagatgcagagtagtgac

SEQ ID NO: 915483 - DNA, 25 bp, Homo sapien
gtttagatgcagagtagtgacgtgc

SEQ ID NO: 915484 - DNA, 25 bp, Homo sapien
gcttgaaaacttccactggttctca

SEQ ID NO: 915485 - DNA, 25 bp, Homo sapien
cttgaaaacttccactggttctcag

SEQ ID NO: 915486 - DNA, 25 bp, Homo sapien
tcatgtctatgaatgattttctcaa

SEQ ID NO: 915487 - DNA, 25 bp, Homo sapien
atgtctatgaatgattttctcaatc

SEQ ID NO: 915488 - DNA, 25 bp, Homo sapien
tgtgttctccatggctacatgactt

SEQ ID NO: 915489 - DNA, 25 bp, Homo sapien
gaccctgggaagtcgccaagagcca

SEQ ID NO: 915490 - DNA, 25 bp, Homo sapien
aggagaaaggctccacttggctctc

SEQ ID NO: 915491 - DNA, 25 bp, Homo sapien
cgtccttcccgtggtctggaccctg

SEQ ID NO: 915492 - DNA, 25 bp, Homo sapien
caagggctccgggtgggaatggagc

SEQ ID NO: 915493 - DNA, 25 bp, Homo sapien
gacacagtcaaggagcaagggcccc

SEQ ID NO: 915494 - DNA, 25 bp, Homo sapien
cagtcaaggagcaagggccccgtag

SEQ ID NO: 915495 - DNA, 25 bp, Homo sapien
gagtcaagggctccgggtgggaatg

SEQ ID NO: 915496 - DNA, 25 bp, Homo sapien
gaaaaacgccagttgcgtaagtgtg

SEQ ID NO: 915497 - DNA, 25 bp, Homo sapien
atatttgttgagtgactgacggaat

SEQ ID NO: 915498 - DNA, 25 bp, Homo sapien
cacgtgttttgttagtctatttgtc

SEQ ID NO: 915499 - DNA, 25 bp, Homo sapien
caaccataggtcagaagtacacgtg

SEQ ID NO: 915500 - DNA, 25 bp, Homo sapien
tgcagtgcagtatgtaacccagggc

SEQ ID NO: 915501 - DNA, 25 bp, Homo sapien
cagctcagacggtgtgtgcagtgca

SEQ ID NO: 915502 - DNA, 25 bp, Homo sapien
cagacttataggtggtgcgactgcc

SEQ ID NO: 915503 - DNA, 25 bp, Homo sapien
cagaatccccgcagagtggttgaag

SEQ ID NO: 915504 - DNA, 25 bp, Homo sapien
gacttttggccagagtaacaccgag

SEQ ID NO: 915505 - DNA, 25 bp, Homo sapien
cattctcggtacttgattttctaac

SEQ ID NO: 915506 - DNA, 25 bp, Homo sapien
aatgcagttttaccagcctctttcc

SEQ ID NO: 915507 - DNA, 25 bp, Homo sapien
gaagttcccatggtctgtcctctac

SEQ ID NO: 915508 - DNA, 25 bp, Homo sapien
cattctgggcctttaatgcataaac

SEQ ID NO: 915509 - DNA, 25 bp, Homo sapien
gatgattgctcgcttaatactggga

SEQ ID NO: 915510 - DNA, 25 bp, Homo sapien
cactgagatgttctaaggaaattac

SEQ ID NO: 915511 - DNA, 25 bp, Homo sapien
gggagagccagatgaagattcctcc

SEQ ID NO: 915512 - DNA, 25 bp, Homo sapien
gaggtagggcgcagtttcagaaaac

SEQ ID NO: 915513 - DNA, 25 bp, Homo sapien
ttgggctgcacctgcgtgagcacag

SEQ ID NO: 915514 - DNA, 25 bp, Homo sapien
aaccattgggctgcacctgcgtgag

SEQ ID NO: 915515 - DNA, 25 bp, Homo sapien
tcagaaaaccattgggctgcacctg

SEQ ID NO: 915516 - DNA, 25 bp, Homo sapien
tagtagcagctccagattaggcaat

SEQ ID NO: 915517 - DNA, 25 bp, Homo sapien
tcagagatagcttagagtgagcccc

SEQ ID NO: 915518 - DNA, 25 bp, Homo sapien
tgagccccagaacaaggtcaatgcg

SEQ ID NO: 915519 - DNA, 25 bp, Homo sapien
tatggttatttctggtagtagcagc

SEQ ID NO: 915520 - DNA, 25 bp, Homo sapien
tctgtatcttctctgcagcccttac

SEQ ID NO: 915521 - DNA, 25 bp, Homo sapien
ggatctgctcctggtcgtttctgtt

SEQ ID NO: 915522 - DNA, 25 bp, Homo sapien
ccggggggctccgtgaggatctgct

SEQ ID NO: 915523 - DNA, 25 bp, Homo sapien
ctcctggtcgtttctgttctgtatc

SEQ ID NO: 915524 - DNA, 25 bp, Homo sapien
tccagtgaccgggaggcaatagtct

SEQ ID NO: 915525 - DNA, 25 bp, Homo sapien
tgaagccgttaccaactggcacaat

SEQ ID NO: 915526 - DNA, 25 bp, Homo sapien
tgtacccatcatgcacagatggctg

SEQ ID NO: 915527 - DNA, 25 bp, Homo sapien
cagatggctgaagtattgagaacgc

SEQ ID NO: 915528 - DNA, 25 bp, Homo sapien
gacctggttcttgctcagtcctggg

SEQ ID NO: 915529 - DNA, 25 bp, Homo sapien
cctggtgaccaagcacatcagacct

SEQ ID NO: 915530 - DNA, 25 bp, Homo sapien
caagcacatcagacctggttcttgc

SEQ ID NO: 915531 - DNA, 25 bp, Homo sapien
catcagacctggttcttgctcagtc

SEQ ID NO: 915532 - DNA, 25 bp, Homo sapien
ccaagaccagactccagcttggctt

SEQ ID NO: 915533 - DNA, 25 bp, Homo sapien
cctctccaggattggtgacctccta

SEQ ID NO: 915534 - DNA, 25 bp, Homo sapien
gattggtgacctcctaggtcgtgaa

SEQ ID NO: 915535 - DNA, 25 bp, Homo sapien
caagaccagactccagcttggcttt

SEQ ID NO: 915536 - DNA, 25 bp, Homo sapien
atgagcaaagacacactcctctcca

SEQ ID NO: 915537 - DNA, 25 bp, Homo sapien
tgtgatgagcaaagacacactcctc

SEQ ID NO: 915538 - DNA, 25 bp, Homo sapien
tgatgagcaaagacacactcctctc

SEQ ID NO: 915539 - DNA, 25 bp, Homo sapien
ctgtgatgagcaaagacacactcct

SEQ ID NO: 915540 - DNA, 25 bp, Homo sapien
ttagacaggataagttctgagtccc

SEQ ID NO: 915541 - DNA, 25 bp, Homo sapien
gctgtatcccacctttctctgaatg

SEQ ID NO: 915542 - DNA, 25 bp, Homo sapien
gctgcatctaagaaaactcagaggg

SEQ ID NO: 915543 - DNA, 25 bp, Homo sapien
tgagtcccctggtatcatcagctta

SEQ ID NO: 915544 - DNA, 25 bp, Homo sapien
ccattgctgagctgttaaatttgtc

SEQ ID NO: 915545 - DNA, 25 bp, Homo sapien
aaatcacacatcctagagcttggat

SEQ ID NO: 915546 - DNA, 25 bp, Homo sapien
cttgctatttctatccgtagacaga

SEQ ID NO: 915547 - DNA, 25 bp, Homo sapien
cttggatttcctcgtttcttgctat

SEQ ID NO: 915548 - DNA, 25 bp, Homo sapien
tgtggctccggtgtctcaggacctc

SEQ ID NO: 915549 - DNA, 25 bp, Homo sapien
gcaggtaaggcctgtgccaaacgcc

SEQ ID NO: 915550 - DNA, 25 bp, Homo sapien
caggaggaacaacgtggagacagcc

SEQ ID NO: 915551 - DNA, 25 bp, Homo sapien
ccagaggtggaacgttggcccttct

SEQ ID NO: 915552 - DNA, 25 bp, Homo sapien
gaatccagctctcatttcgtatgtg

SEQ ID NO: 915553 - DNA, 25 bp, Homo sapien
atccagctctcatttcgtatgtgac

SEQ ID NO: 915554 - DNA, 25 bp, Homo sapien
ttggaatccagctctcatttcgtat

SEQ ID NO: 915555 - DNA, 25 bp, Homo sapien
ctagaaactccctggttaggccttg

SEQ ID NO: 915556 - DNA, 25 bp, Homo sapien
cattatatcacggacaaaagcacgt

SEQ ID NO: 915557 - DNA, 25 bp, Homo sapien
taataggaccaacagtggtagtccc

SEQ ID NO: 915558 - DNA, 25 bp, Homo sapien
tcagaggaatgtggtgcaaatccca

SEQ ID NO: 915559 - DNA, 25 bp, Homo sapien
aaaagcacgttcatcagagtcagag

SEQ ID NO: 915560 - DNA, 25 bp, Homo sapien
ctgactactttgtcgtttctcttcc

SEQ ID NO: 915561 - DNA, 25 bp, Homo sapien
gatactctattctgtggacggttgg

SEQ ID NO: 915562 - DNA, 25 bp, Homo sapien
tcatggacttttggcggcagaagga

SEQ ID NO: 915563 - DNA, 25 bp, Homo sapien
tgctgagcagggtaactgcatcttt

SEQ ID NO: 915564 - DNA, 25 bp, Homo sapien
gggccacacaccgtaacggagatac

SEQ ID NO: 915565 - DNA, 25 bp, Homo sapien
cgaaggagtcttgtttagactggac

SEQ ID NO: 915566 - DNA, 25 bp, Homo sapien
tgccacgaaggagtcttgtttagac

SEQ ID NO: 915567 - DNA, 25 bp, Homo sapien
ctgccacgaaggagtcttgtttaga

SEQ ID NO: 915568 - DNA, 25 bp, Homo sapien
ccacgaaggagtcttgtttagactg

SEQ ID NO: 915569 - DNA, 25 bp, Homo sapien
tggctttcttcttcgcaatgagtgt

SEQ ID NO: 915570 - DNA, 25 bp, Homo sapien
ttcgcaatgagtgttgcagactccc

SEQ ID NO: 915571 - DNA, 25 bp, Homo sapien
tctgtgagcgagagcctgagatgcc

SEQ ID NO: 915572 - DNA, 25 bp, Homo sapien
cagactcccgacaaaggccaggtgg

SEQ ID NO: 915573 - DNA, 25 bp, Homo sapien
tgtctcctacctgtgactttatagc

SEQ ID NO: 915574 - DNA, 25 bp, Homo sapien
ttggagactcacagcaatagttgta

SEQ ID NO: 915575 - DNA, 25 bp, Homo sapien
tatttaaactcagtgggtggcatcc

SEQ ID NO: 915576 - DNA, 25 bp, Homo sapien
tcataagcagctttggtgttttggc

SEQ ID NO: 915577 - DNA, 25 bp, Homo sapien
ccatccgtgatcttccatagtcagg

SEQ ID NO: 915578 - DNA, 25 bp, Homo sapien
tgtcacactcagtgagcggagagtc

SEQ ID NO: 915579 - DNA, 25 bp, Homo sapien
ttctcggtagcagggcagtacagcc

SEQ ID NO: 915580 - DNA, 25 bp, Homo sapien
catagtcaggcatattgtcacactc

SEQ ID NO: 915581 - DNA, 25 bp, Homo sapien
aatggtacgctcaaatgcaaattct

SEQ ID NO: 915582 - DNA, 25 bp, Homo sapien
ggtacgctcaaatgcaaattctcct

SEQ ID NO: 915583 - DNA, 25 bp, Homo sapien
cggaatggtacgctcaaatgcaaat

SEQ ID NO: 915584 - DNA, 25 bp, Homo sapien
ctacggaatggtacgctcaaatgca

SEQ ID NO: 915585 - DNA, 25 bp, Homo sapien
ggtggccacgcttaggtcgctcccg

SEQ ID NO: 915586 - DNA, 25 bp, Homo sapien
cagaggtggccacgcttaggtcgct

SEQ ID NO: 915587 - DNA, 25 bp, Homo sapien
aggtggccacgcttaggtcgctccc

SEQ ID NO: 915588 - DNA, 25 bp, Homo sapien
gaggtggccacgcttaggtcgctcc

SEQ ID NO: 915589 - DNA, 25 bp, Homo sapien
tccttttggagttgcaggccacaga

SEQ ID NO: 915590 - DNA, 25 bp, Homo sapien
agaaaggaagtgacatgagtcactt

SEQ ID NO: 915591 - DNA, 25 bp, Homo sapien
tccttcatcaaaggcagcacaggtg

SEQ ID NO: 915592 - DNA, 25 bp, Homo sapien
gagtcactttgggccttcttaattc

SEQ ID NO: 915593 - DNA, 25 bp, Homo sapien
gccccagtgcccatttctctcccac

SEQ ID NO: 915594 - DNA, 25 bp, Homo sapien
ctgccccagtgcccatttctctccc

SEQ ID NO: 915595 - DNA, 25 bp, Homo sapien
tgccccagtgcccatttctctccca

SEQ ID NO: 915596 - DNA, 25 bp, Homo sapien
tttcagaggctgtattccacttgga

SEQ ID NO: 915597 - DNA, 25 bp, Homo sapien
tggacttggccctacgctgaaggta

SEQ ID NO: 915598 - DNA, 25 bp, Homo sapien
ccttcgcacaaagagccccatgaaa

SEQ ID NO: 915599 - DNA, 25 bp, Homo sapien
ggtacatggaaaggagcagtggtct

SEQ ID NO: 915600 - DNA, 25 bp, Homo sapien
ctcacctttccctaacctgccggag

SEQ ID NO: 915601 - DNA, 25 bp, Homo sapien
tcacctttccctaacctgccggagc

SEQ ID NO: 915602 - DNA, 25 bp, Homo sapien
tctcacctttccctaacctgccgga

SEQ ID NO: 915603 - DNA, 25 bp, Homo sapien
ctctcacctttccctaacctgccgg

SEQ ID NO: 915604 - DNA, 25 bp, Homo sapien
gcctaatggcctggatgctctcaga

SEQ ID NO: 915605 - DNA, 25 bp, Homo sapien
tcaaggcagtactgcctggaacgca

SEQ ID NO: 915606 - DNA, 25 bp, Homo sapien
tatcctccttgcctaatggcctgga

SEQ ID NO: 915607 - DNA, 25 bp, Homo sapien
tgcctggaacgcagaatcccagcct

SEQ ID NO: 915608 - DNA, 25 bp, Homo sapien
caaaactgtttctcctcgtgctggc

SEQ ID NO: 915609 - DNA, 25 bp, Homo sapien
tgtttctcctcgtgctggccttggg

SEQ ID NO: 915610 - DNA, 25 bp, Homo sapien
tgctccttctgacaacctctgcaag

SEQ ID NO: 915611 - DNA, 25 bp, Homo sapien
ccctctgacaactctgctccttctg

SEQ ID NO: 915612 - DNA, 25 bp, Homo sapien
gagagcaagtgccatggaattccct

SEQ ID NO: 915613 - DNA, 25 bp, Homo sapien
ccgtcgctgctactgtgctggatga

SEQ ID NO: 915614 - DNA, 25 bp, Homo sapien
tgccaagctgggttgaaaccgtcct

SEQ ID NO: 915615 - DNA, 25 bp, Homo sapien
tgcaggcaattcagtgaggagaccg

SEQ ID NO: 915616 - DNA, 25 bp, Homo sapien
ttcggaactgtccatgttcacgcac

SEQ ID NO: 915617 - DNA, 25 bp, Homo sapien
tcatgttcggaactgtccatgttca

SEQ ID NO: 915618 - DNA, 25 bp, Homo sapien
tgttcggaactgtccatgttcacgc

SEQ ID NO: 915619 - DNA, 25 bp, Homo sapien
catgttcggaactgtccatgttcac

SEQ ID NO: 915620 - DNA, 25 bp, Homo sapien
tctgttgtcgaatgtgtgggttatc

SEQ ID NO: 915621 - DNA, 25 bp, Homo sapien
aggggccgtatcactccgccagagc

SEQ ID NO: 915622 - DNA, 25 bp, Homo sapien
cctctgttgtcgaatgtgtgggtta

SEQ ID NO: 915623 - DNA, 25 bp, Homo sapien
tcttcctctgttgtcgaatgtgtgg

SEQ ID NO: 915624 - DNA, 25 bp, Homo sapien
aaatgaaggggattcaagtgccttc

SEQ ID NO: 915625 - DNA, 25 bp, Homo sapien
tcagaaaagcttccttccagcgaat

SEQ ID NO: 915626 - DNA, 25 bp, Homo sapien
gattcaagtgccttcagaaaagctt

SEQ ID NO: 915627 - DNA, 25 bp, Homo sapien
tccttccagcgaatggagttttggg

SEQ ID NO: 915628 - DNA, 25 bp, Homo sapien
ggcttggacgctgccaggtgactct

SEQ ID NO: 915629 - DNA, 25 bp, Homo sapien
gcctgctgggggctttgagcagctg

SEQ ID NO: 915630 - DNA, 25 bp, Homo sapien
atgtaaaaagtaagacatgggcact

SEQ ID NO: 915631 - DNA, 25 bp, Homo sapien
aggcctcacccgacactctgatggg

SEQ ID NO: 915632 - DNA, 25 bp, Homo sapien
tcagccaatgccgtcatacagtagc

SEQ ID NO: 915633 - DNA, 25 bp, Homo sapien
ccaatgccgtcatacagtagcaggc

SEQ ID NO: 915634 - DNA, 25 bp, Homo sapien
tgctgggtagttggactggatgtcc

SEQ ID NO: 915635 - DNA, 25 bp, Homo sapien
tcaaactcagccaatgccgtcatac

SEQ ID NO: 915636 - DNA, 25 bp, Homo sapien
ccatacatagattgagggataaaac

SEQ ID NO: 915637 - DNA, 25 bp, Homo sapien
ttcccaggaaaaggcggctctcttc

SEQ ID NO: 915638 - DNA, 25 bp, Homo sapien
tctgaatgcttagctgcttacaacc

SEQ ID NO: 915639 - DNA, 25 bp, Homo sapien
gggataaaactctgatatggaagag

SEQ ID NO: 915640 - DNA, 25 bp, Homo sapien
cagggattgttgcagatcgtggaca

SEQ ID NO: 915641 - DNA, 25 bp, Homo sapien
tgcattagggttcaactgggcgtcc

SEQ ID NO: 915642 - DNA, 25 bp, Homo sapien
gagagtgttgaaccccgtgaggcat

SEQ ID NO: 915643 - DNA, 25 bp, Homo sapien
tgaggcatgagagcacagtgttcca

SEQ ID NO: 915644 - DNA, 25 bp, Homo sapien
agcatgtctgtgtcacccaaggtca

SEQ ID NO: 915645 - DNA, 25 bp, Homo sapien
tccagtcacggtcggcctctgggaa

SEQ ID NO: 915646 - DNA, 25 bp, Homo sapien
cagggaatgcgtggacaagtgcaac

SEQ ID NO: 915647 - DNA, 25 bp, Homo sapien
agggactgcgtctcttgccggaatg

SEQ ID NO: 915648 - DNA, 25 bp, Homo sapien
tgcacaggacgggtaagagcccctt

SEQ ID NO: 915649 - DNA, 25 bp, Homo sapien
tgctatccacgtccatttcatggga

SEQ ID NO: 915650 - DNA, 25 bp, Homo sapien
gccttcacagaagccgaacagtgat

SEQ ID NO: 915651 - DNA, 25 bp, Homo sapien
tcctgtgtgggcaggacggccatca

SEQ ID NO: 915652 - DNA, 25 bp, Homo sapien
gcagggtgtcggtgacattagcaca

SEQ ID NO: 915653 - DNA, 25 bp, Homo sapien
gcctgcgatgaacattcactctttc

SEQ ID NO: 915654 - DNA, 25 bp, Homo sapien
ggtgtcggtgacattagcacacaca

SEQ ID NO: 915655 - DNA, 25 bp, Homo sapien
ttagcacacacattagcctgcgatg

SEQ ID NO: 915656 - DNA, 25 bp, Homo sapien
caacaccctggtctggaagtacgca

SEQ ID NO: 915657 - DNA, 25 bp, Homo sapien
gggaccagacaactgtatccagtgt

SEQ ID NO: 915658 - DNA, 25 bp, Homo sapien
cagtgtgcccactacattgacggcc

SEQ ID NO: 915659 - DNA, 25 bp, Homo sapien
cctgcccggcaggagtcatgggaga

SEQ ID NO: 915660 - DNA, 25 bp, Homo sapien
tagctgcttgagttcatactcaata

SEQ ID NO: 915661 - DNA, 25 bp, Homo sapien
ctatagctgcttgagttcatactca

SEQ ID NO: 915662 - DNA, 25 bp, Homo sapien
tatagctgcttgagttcatactcaa

SEQ ID NO: 915663 - DNA, 25 bp, Homo sapien
agctgcttgagttcatactcaatag

SEQ ID NO: 915664 - DNA, 25 bp, Homo sapien
ggcctcatcagcgtcagcaggagcc

SEQ ID NO: 915665 - DNA, 25 bp, Homo sapien
ccctcgccttctgacgctctcacat

SEQ ID NO: 915666 - DNA, 25 bp, Homo sapien
ggagcccctcgccttctgacgctct

SEQ ID NO: 915667 - DNA, 25 bp, Homo sapien
tgcagagttaccgagggcctcatca

SEQ ID NO: 915668 - DNA, 25 bp, Homo sapien
ctgccactgtccttgtccagcttct

SEQ ID NO: 915669 - DNA, 25 bp, Homo sapien
ctgcagccccgtcctgccactgtcc

SEQ ID NO: 915670 - DNA, 25 bp, Homo sapien
cgtcctgccactgtccttgtccagc

SEQ ID NO: 915671 - DNA, 25 bp, Homo sapien
tcctgccactgtccttgtccagctt

SEQ ID NO: 915672 - DNA, 25 bp, Homo sapien
agccttctccgtaattagcatggcc

SEQ ID NO: 915673 - DNA, 25 bp, Homo sapien
acctgcagggactccatgctgccag

SEQ ID NO: 915674 - DNA, 25 bp, Homo sapien
gatgattgttcaaagcacagaattt

SEQ ID NO: 915675 - DNA, 25 bp, Homo sapien
cagaatttgtcagaaacctgcaggg

SEQ ID NO: 915676 - DNA, 25 bp, Homo sapien
gagggaaagttggacacacagtgct

SEQ ID NO: 915677 - DNA, 25 bp, Homo sapien
tgctccgccgttgctcgatgcatgg

SEQ ID NO: 915678 - DNA, 25 bp, Homo sapien
cagctggttccacgtggctccacgt

SEQ ID NO: 915679 - DNA, 25 bp, Homo sapien
cctctgaattccttggttccactgg

SEQ ID NO: 915680 - DNA, 25 bp, Homo sapien
cacaagcctgtgtgtgagtggcctt

SEQ ID NO: 915681 - DNA, 25 bp, Homo sapien
cccattggtcccatcacaagcctgt

SEQ ID NO: 915682 - DNA, 25 bp, Homo sapien
ttggtcccatcacaagcctgtgtgt

SEQ ID NO: 915683 - DNA, 25 bp, Homo sapien
cattggtcccatcacaagcctgtgt

SEQ ID NO: 915684 - DNA, 25 bp, Homo sapien
tctggccagtttgccagagcaaagc

SEQ ID NO: 915685 - DNA, 25 bp, Homo sapien
tgacaacctccagcataggggagtg

SEQ ID NO: 915686 - DNA, 25 bp, Homo sapien
tccagcataggggagtgtttctcct

SEQ ID NO: 915687 - DNA, 25 bp, Homo sapien
agctctggccagtttgccagagcaa

SEQ ID NO: 915688 - DNA, 25 bp, Homo sapien
cctccgcccccgagttgacagccat

SEQ ID NO: 915689 - DNA, 25 bp, Homo sapien
caaactcagagatcaggtgactccg

SEQ ID NO: 915690 - DNA, 25 bp, Homo sapien
gctcctgggatagcaagagtttgcc

SEQ ID NO: 915691 - DNA, 25 bp, Homo sapien
ttatggctctgtcaaaggaaggccc

SEQ ID NO: 915692 - DNA, 25 bp, Homo sapien
tcagacagaaaagagggccccattg

SEQ ID NO: 915693 - DNA, 25 bp, Homo sapien
cctggttagcagtggcagtcagtcc

SEQ ID NO: 915694 - DNA, 25 bp, Homo sapien
tgccgagtcattcgtgaggcgctca

SEQ ID NO: 915695 - DNA, 25 bp, Homo sapien
tgtctctgagaatacgccgttgccc

SEQ ID NO: 915696 - DNA, 25 bp, Homo sapien
tcattgcttgcatccgcctggttag

SEQ ID NO: 915697 - DNA, 25 bp, Homo sapien
tcaggcctattcctaggtgccaggt

SEQ ID NO: 915698 - DNA, 25 bp, Homo sapien
tcacggctctgctactgacaagaag

SEQ ID NO: 915699 - DNA, 25 bp, Homo sapien
tgcgtgtcatagcacacaagcagga

SEQ ID NO: 915700 - DNA, 25 bp, Homo sapien
tcacgaaaaccacgctgacagatcg

SEQ ID NO: 915701 - DNA, 25 bp, Homo sapien
cgttcacatcacacagctttgtgga

SEQ ID NO: 915702 - DNA, 25 bp, Homo sapien
ccagcacgttcacatcacacagctt

SEQ ID NO: 915703 - DNA, 25 bp, Homo sapien
cagcacgttcacatcacacagcttt

SEQ ID NO: 915704 - DNA, 25 bp, Homo sapien
tcacatcacacagctttgtggattc

SEQ ID NO: 915705 - DNA, 25 bp, Homo sapien
cagcaccccaagggctaaaaggttg

SEQ ID NO: 915706 - DNA, 25 bp, Homo sapien
tgccctttcccacgcctttggtgaa

SEQ ID NO: 915707 - DNA, 25 bp, Homo sapien
tgaagaccggtgttctgaggaaaca

SEQ ID NO: 915708 - DNA, 25 bp, Homo sapien
cccacgcctttggtgaagaccggtg

SEQ ID NO: 915709 - DNA, 25 bp, Homo sapien
tgaattccagaatatgtcctgtgct

SEQ ID NO: 915710 - DNA, 25 bp, Homo sapien
gagagtgtggcttaaaaaccctgaa

SEQ ID NO: 915711 - DNA, 25 bp, Homo sapien
tgtggcttaaaaaccctgaacgaca

SEQ ID NO: 915712 - DNA, 25 bp, Homo sapien
agcacaatgagagtgtggcttaaaa

SEQ ID NO: 915713 - DNA, 25 bp, Homo sapien
aaccctgaacgacattcctttgcac

SEQ ID NO: 915714 - DNA, 25 bp, Homo sapien
agatagtcgcccaaagttccgtgag

SEQ ID NO: 915715 - DNA, 25 bp, Homo sapien
tttggtgtcaggcagacgtggcttc

SEQ ID NO: 915716 - DNA, 25 bp, Homo sapien
tattaaaccctccagcgcattagag

SEQ ID NO: 915717 - DNA, 25 bp, Homo sapien
tgaactaagcagcatccgtgagtgg

SEQ ID NO: 915718 - DNA, 25 bp, Homo sapien
gcatttacagaaacgcatccagcaa

SEQ ID NO: 915719 - DNA, 25 bp, Homo sapien
tttacaccgactagccaggaagtac

SEQ ID NO: 915720 - DNA, 25 bp, Homo sapien
tccacctcgggcacattttgggaag

SEQ ID NO: 915721 - DNA, 25 bp, Homo sapien
tcaatgggctcttccaacaaggaag

SEQ ID NO: 915722 - DNA, 25 bp, Homo sapien
gatagcaccgcttttgttctcgcaa

SEQ ID NO: 915723 - DNA, 25 bp, Homo sapien
caggccggatcggtactgtatcaag

SEQ ID NO: 915724 - DNA, 25 bp, Homo sapien
tttggaccaatagcccacagctgag

SEQ ID NO: 915725 - DNA, 25 bp, Homo sapien
cagtggtttccagtcatgagcgtta

SEQ ID NO: 915726 - DNA, 25 bp, Homo sapien
ttggaagattcagctagttaggagc

SEQ ID NO: 915727 - DNA, 25 bp, Homo sapien
aagtgtctctgccttgagtcatcta

SEQ ID NO: 915728 - DNA, 25 bp, Homo sapien
tctattcaagcacttacagctctgg

SEQ ID NO: 915729 - DNA, 25 bp, Homo sapien
cacaacagggcattttacaggtgcg

SEQ ID NO: 915730 - DNA, 25 bp, Homo sapien
cactacctgcagtgtgtcctctgag

SEQ ID NO: 915731 - DNA, 25 bp, Homo sapien
tgaattcccagcagaagcactaaga

SEQ ID NO: 915732 - DNA, 25 bp, Homo sapien
gctgacattgttgccctccctaaag

SEQ ID NO: 915733 - DNA, 25 bp, Homo sapien
tgaaagaaaacgctggcctatcagt

SEQ ID NO: 915734 - DNA, 25 bp, Homo sapien
cctgggctacaacttgagcttctag

SEQ ID NO: 915735 - DNA, 25 bp, Homo sapien
tacaacttgagcttctaggtgtgca

SEQ ID NO: 915736 - DNA, 25 bp, Homo sapien
tgagcttctaggtgtgcacactgaa

SEQ ID NO: 915737 - DNA, 25 bp, Homo sapien
gctctgaacaggctcacagcccggg

SEQ ID NO: 915738 - DNA, 25 bp, Homo sapien
ctagctccagggaactttcattttt

SEQ ID NO: 915739 - DNA, 25 bp, Homo sapien
ttacaatcgcctattgctcccagca

SEQ ID NO: 915740 - DNA, 25 bp, Homo sapien
ccctgactttctagctctggcgaag

SEQ ID NO: 915741 - DNA, 25 bp, Homo sapien
gctcccagcatctcagcgtgtgatg

SEQ ID NO: 915742 - DNA, 25 bp, Homo sapien
ggtggatggaagcattcccagtgcc

SEQ ID NO: 915743 - DNA, 25 bp, Homo sapien
gcttatttgtgcatcatcgcctcca

SEQ ID NO: 915744 - DNA, 25 bp, Homo sapien
cattgtaccagacttgggcactctc

SEQ ID NO: 915745 - DNA, 25 bp, Homo sapien
tgcaggtaatgcagtcctcaggcct

SEQ ID NO: 915746 - DNA, 25 bp, Homo sapien
ttgcggttgcagttgcagctgacct

SEQ ID NO: 915747 - DNA, 25 bp, Homo sapien
tccgaggctctgattaagaatggct

SEQ ID NO: 915748 - DNA, 25 bp, Homo sapien
ctgattaagaatggcttcatctcac

SEQ ID NO: 915749 - DNA, 25 bp, Homo sapien
tcctcctgatccgaggctctgatta

SEQ ID NO: 915750 - DNA, 25 bp, Homo sapien
cctgatccgaggctctgattaagaa

SEQ ID NO: 915751 - DNA, 25 bp, Homo sapien
tggaagcacttcctggcactgcgag

SEQ ID NO: 915752 - DNA, 25 bp, Homo sapien
ggcactgcgagtttccaattcacca

SEQ ID NO: 915753 - DNA, 25 bp, Homo sapien
caccactggagcgatttttacacac

SEQ ID NO: 915754 - DNA, 25 bp, Homo sapien
gagatgcattaagcctgtggaagca

SEQ ID NO: 915755 - DNA, 25 bp, Homo sapien
ttcttcacccatgaaggcaaagaag

SEQ ID NO: 915756 - DNA, 25 bp, Homo sapien
tccttttcttcacccatgaaggcaa

SEQ ID NO: 915757 - DNA, 25 bp, Homo sapien
cgctgaaagccaccgccctgtcctt

SEQ ID NO: 915758 - DNA, 25 bp, Homo sapien
ccttgagcacgcagaagagaggtgt

SEQ ID NO: 915759 - DNA, 25 bp, Homo sapien
ctgggatgtctctcccacctgtcct

SEQ ID NO: 915760 - DNA, 25 bp, Homo sapien
tacagcagccagttgcccgctgaaa

SEQ ID NO: 915761 - DNA, 25 bp, Homo sapien
aggcccagccaccatatagccctgt

SEQ ID NO: 915762 - DNA, 25 bp, Homo sapien
ctcagcttttccaggccgggtacag

SEQ ID NO: 915763 - DNA, 25 bp, Homo sapien
ttcagagcctgatgcccagatagga

SEQ ID NO: 915764 - DNA, 25 bp, Homo sapien
ccgggtacagggagggcttgcggca

SEQ ID NO: 915765 - DNA, 25 bp, Homo sapien
ggcattgtgtctgggatttgtagca

SEQ ID NO: 915766 - DNA, 25 bp, Homo sapien
gagtacgagagattccagcaggaga

SEQ ID NO: 915767 - DNA, 25 bp, Homo sapien
tagcagccagtagccggaatgagca

SEQ ID NO: 915768 - DNA, 25 bp, Homo sapien
gaatgagcagaaattggatctgaag

SEQ ID NO: 915769 - DNA, 25 bp, Homo sapien
acagtgactctgaaagttcgtgttc

SEQ ID NO: 915770 - DNA, 25 bp, Homo sapien
agtgactctgaaagttcgtgttcca

SEQ ID NO: 915771 - DNA, 25 bp, Homo sapien
tggatgacggcccatagagcatagt

SEQ ID NO: 915772 - DNA, 25 bp, Homo sapien
catagagcatagtgccacaaacagt

SEQ ID NO: 915773 - DNA, 25 bp, Homo sapien
ttttctttgcggctcaggcacagag

SEQ ID NO: 915774 - DNA, 25 bp, Homo sapien
ggctgtcctgagtctaaccacagta

SEQ ID NO: 915775 - DNA, 25 bp, Homo sapien
tctgtgataggagaaaatcatggaa

SEQ ID NO: 915776 - DNA, 25 bp, Homo sapien
taaaaggtcgaatcatccatcaggg

SEQ ID NO: 915777 - DNA, 25 bp, Homo sapien
attggggtgtggttgtcttttgctt

SEQ ID NO: 915778 - DNA, 25 bp, Homo sapien
cttgacatcagtgaaagttttcctg

SEQ ID NO: 915779 - DNA, 25 bp, Homo sapien
acatcagtgaaagttttcctggaga

SEQ ID NO: 915780 - DNA, 25 bp, Homo sapien
ttcctggagattggggtgtggttgt

SEQ ID NO: 915781 - DNA, 25 bp, Homo sapien
gaggtctgaaaaggtactctcgacc

SEQ ID NO: 915782 - DNA, 25 bp, Homo sapien
tactctcgacctgaggagttgtcgg

SEQ ID NO: 915783 - DNA, 25 bp, Homo sapien
tgagggaagcatgagtttgtgccac

SEQ ID NO: 915784 - DNA, 25 bp, Homo sapien
gaaactgagggaagcatgagtttgt

SEQ ID NO: 915785 - DNA, 25 bp, Homo sapien
ccgtggtgactcgtgtgggtaactt

SEQ ID NO: 915786 - DNA, 25 bp, Homo sapien
tgctcaccgtcatcccgtggtgact

SEQ ID NO: 915787 - DNA, 25 bp, Homo sapien
ttccgtggcacctgctcaccgtcat

SEQ ID NO: 915788 - DNA, 25 bp, Homo sapien
catcccgtggtgactcgtgtgggta

SEQ ID NO: 915789 - DNA, 25 bp, Homo sapien
gtacagcccacgaagtaaggtggct

SEQ ID NO: 915790 - DNA, 25 bp, Homo sapien
tcaggtacagcccacgaagtaaggt

SEQ ID NO: 915791 - DNA, 25 bp, Homo sapien
aggtggctgcaagcgcagatcctgc

SEQ ID NO: 915792 - DNA, 25 bp, Homo sapien
acgaagtaaggtggctgcaagcgca

SEQ ID NO: 915793 - DNA, 25 bp, Homo sapien
ctgcccaaggtgaaacaaatcagct

SEQ ID NO: 915794 - DNA, 25 bp, Homo sapien
caaggtgaaacaaatcagctcccgg

SEQ ID NO: 915795 - DNA, 25 bp, Homo sapien
ggtgaaacaaatcagctcccggagc

SEQ ID NO: 915796 - DNA, 25 bp, Homo sapien
gcccaaggtgaaacaaatcagctcc

SEQ ID NO: 915797 - DNA, 25 bp, Homo sapien
caggaagctccctgcgcacccctgc

SEQ ID NO: 915798 - DNA, 25 bp, Homo sapien
ctcccactccgagcccctgccgtct

SEQ ID NO: 915799 - DNA, 25 bp, Homo sapien
cccactccgagcccctgccgtctgg

SEQ ID NO: 915800 - DNA, 25 bp, Homo sapien
ggaagctccctgcgcacccctgcgg

SEQ ID NO: 915801 - DNA, 25 bp, Homo sapien
gttcccagtcctgaggccgacgcat

SEQ ID NO: 915802 - DNA, 25 bp, Homo sapien
atccagcacagcgtccctcgccttt

SEQ ID NO: 915803 - DNA, 25 bp, Homo sapien
gcgcctcgggcttccacggtggacc

SEQ ID NO: 915804 - DNA, 25 bp, Homo sapien
ggggcatcctgtctccattcgcagc

SEQ ID NO: 915805 - DNA, 25 bp, Homo sapien
ttcggcgctcgcaaacgtccgggtg

SEQ ID NO: 915806 - DNA, 25 bp, Homo sapien
agggccgctccgtgtgacaatgcaa

SEQ ID NO: 915807 - DNA, 25 bp, Homo sapien
gggactccacgctgcacagggagag

SEQ ID NO: 915808 - DNA, 25 bp, Homo sapien
agttgcccgggtccacacagggaca

SEQ ID NO: 915809 - DNA, 25 bp, Homo sapien
cgggtgccctctgcgggtggcgcgt

SEQ ID NO: 915810 - DNA, 25 bp, Homo sapien
cgtggcctgcgcagcgatcaggtcc

SEQ ID NO: 915811 - DNA, 25 bp, Homo sapien
cgacgtcctgtaagtggaccccgct

SEQ ID NO: 915812 - DNA, 25 bp, Homo sapien
agcctccgaaaagctggcccggcag

SEQ ID NO: 915813 - DNA, 25 bp, Homo sapien
tgcccgtgaggatcttgacaagttg

SEQ ID NO: 915814 - DNA, 25 bp, Homo sapien
ggttgtacgcgatataaaacatgac

SEQ ID NO: 915815 - DNA, 25 bp, Homo sapien
tgcgccctgtgctgcaggttgtacg

SEQ ID NO: 915816 - DNA, 25 bp, Homo sapien
taaaacatgacactgactgcccgtg

SEQ ID NO: 915817 - DNA, 25 bp, Homo sapien
cataatcaacttgtctgtctccatc

SEQ ID NO: 915818 - DNA, 25 bp, Homo sapien
tcataatcaacttgtctgtctccat

SEQ ID NO: 915819 - DNA, 25 bp, Homo sapien
ctatcgtcaaagactggaatacctc

SEQ ID NO: 915820 - DNA, 25 bp, Homo sapien
tcgtcaaagactggaatacctcacg

SEQ ID NO: 915821 - DNA, 25 bp, Homo sapien
caaagactggaatacctcacgattt

SEQ ID NO: 915822 - DNA, 25 bp, Homo sapien
tggaatacctcacgatttcttcttc

SEQ ID NO: 915823 - DNA, 25 bp, Homo sapien
tgtcctgcaattcagattctgctgg

SEQ ID NO: 915824 - DNA, 25 bp, Homo sapien
tcatgtcctgcaattcagattctgc

SEQ ID NO: 915825 - DNA, 25 bp, Homo sapien
gtcctgcaattcagattctgctggg

SEQ ID NO: 915826 - DNA, 25 bp, Homo sapien
catgtcctgcaattcagattctgct

SEQ ID NO: 915827 - DNA, 25 bp, Homo sapien
agctgatcagccatggtgccagtga

SEQ ID NO: 915828 - DNA, 25 bp, Homo sapien
tcctttgttgtgatagtgccattac

SEQ ID NO: 915829 - DNA, 25 bp, Homo sapien
gcgagggggcagcatcggcactggg

SEQ ID NO: 915830 - DNA, 25 bp, Homo sapien
ttcctcgaattcagcaatctgttct

SEQ ID NO: 915831 - DNA, 25 bp, Homo sapien
tgcactgtgccaccacgtgtctcca

SEQ ID NO: 915832 - DNA, 25 bp, Homo sapien
gtgcactgtgccaccacgtgtctcc

SEQ ID NO: 915833 - DNA, 25 bp, Homo sapien
gcactgtgccaccacgtgtctccac

SEQ ID NO: 915834 - DNA, 25 bp, Homo sapien
tgtgcactgtgccaccacgtgtctc

SEQ ID NO: 915835 - DNA, 25 bp, Homo sapien
actggtggaagctagaggaccactc

SEQ ID NO: 915836 - DNA, 25 bp, Homo sapien
gagaagtttggtgaaattgttcttc

SEQ ID NO: 915837 - DNA, 25 bp, Homo sapien
catctgacacttggatcttggagaa

SEQ ID NO: 915838 - DNA, 25 bp, Homo sapien
gtggaagctagaggaccactctggc

SEQ ID NO: 915839 - DNA, 25 bp, Homo sapien
gacctcagatgcacgccgtggagag

SEQ ID NO: 915840 - DNA, 25 bp, Homo sapien
ttgtgtccacgtgcagcttcctcgt

SEQ ID NO: 915841 - DNA, 25 bp, Homo sapien
ctaagtgtgggcactgcggccaagc

SEQ ID NO: 915842 - DNA, 25 bp, Homo sapien
caggcaaacttgcacttgtgtccac

SEQ ID NO: 915843 - DNA, 25 bp, Homo sapien
ccccagcgtcagacaggatcggcat

SEQ ID NO: 915844 - DNA, 25 bp, Homo sapien
gcctgaactctatatgctaaaagaa

SEQ ID NO: 915845 - DNA, 25 bp, Homo sapien
ctgagagaacacatcagtagcctga

SEQ ID NO: 915846 - DNA, 25 bp, Homo sapien
tgtgcctgccgctgactgcctgtca

SEQ ID NO: 915847 - DNA, 25 bp, Homo sapien
tttggggacatcaagtgggcagagt

SEQ ID NO: 915848 - DNA, 25 bp, Homo sapien
ggtcctggttcaggacccactttga

SEQ ID NO: 915849 - DNA, 25 bp, Homo sapien
cactttgacaactgggccatggttt

SEQ ID NO: 915850 - DNA, 25 bp, Homo sapien
gatgtcagagactgggctgcagcca

SEQ ID NO: 915851 - DNA, 25 bp, Homo sapien
tctcggcaattccttctcgggaaag

SEQ ID NO: 915852 - DNA, 25 bp, Homo sapien
tcttctcggcaattccttctcggga

SEQ ID NO: 915853 - DNA, 25 bp, Homo sapien
tcggcaattccttctcgggaaagcc

SEQ ID NO: 915854 - DNA, 25 bp, Homo sapien
ctcttctcggcaattccttctcggg

SEQ ID NO: 915855 - DNA, 25 bp, Homo sapien
gctgatgagcttgcctggaggggat

SEQ ID NO: 915856 - DNA, 25 bp, Homo sapien
attggagtccaggagcaagcagttg

SEQ ID NO: 915857 - DNA, 25 bp, Homo sapien
ggaggacagggcagcgtggaattca

SEQ ID NO: 915858 - DNA, 25 bp, Homo sapien
ctgattggagtccaggagcaagcag

SEQ ID NO: 915859 - DNA, 25 bp, Homo sapien
tattcactctggttttctgccttga

SEQ ID NO: 915860 - DNA, 25 bp, Homo sapien
cacgaacatgatattcactctggtt

SEQ ID NO: 915861 - DNA, 25 bp, Homo sapien
attcactctggttttctgccttgac

SEQ ID NO: 915862 - DNA, 25 bp, Homo sapien
tgatattcactctggttttctgcct

SEQ ID NO: 915863 - DNA, 25 bp, Homo sapien
gcacatttgggcctcaaccttccag

SEQ ID NO: 915864 - DNA, 25 bp, Homo sapien
cagaagtcactccatctgtgacttg

SEQ ID NO: 915865 - DNA, 25 bp, Homo sapien
gttcctccagctcggttagagtccc

SEQ ID NO: 915866 - DNA, 25 bp, Homo sapien
actaagtcggggctcagaagtcact

SEQ ID NO: 915867 - DNA, 25 bp, Homo sapien
gttgtcaaaggtgcctgctgggcct

SEQ ID NO: 915868 - DNA, 25 bp, Homo sapien
tgggccttccaggggtgctgcaatt

SEQ ID NO: 915869 - DNA, 25 bp, Homo sapien
tgtcaaaggtgcctgctgggccttc

SEQ ID NO: 915870 - DNA, 25 bp, Homo sapien
gccttccaggggtgctgcaatttct

SEQ ID NO: 915871 - DNA, 25 bp, Homo sapien
tctcaccttgtagcttacccgcttg

SEQ ID NO: 915872 - DNA, 25 bp, Homo sapien
tttgtctcaccttgtagcttacccg

SEQ ID NO: 915873 - DNA, 25 bp, Homo sapien
cagggaggtttgtctcaccttgtag

SEQ ID NO: 915874 - DNA, 25 bp, Homo sapien
gcttacccgcttgccccgttcttga

SEQ ID NO: 915875 - DNA, 25 bp, Homo sapien
gctgcagatggctcagggctcttac

SEQ ID NO: 915876 - DNA, 25 bp, Homo sapien
ctgcagatggctcagggctcttaca

SEQ ID NO: 915877 - DNA, 25 bp, Homo sapien
gggagaggtgacacgtggcagagct

SEQ ID NO: 915878 - DNA, 25 bp, Homo sapien
gcagagctggagtttcagaacaatg

SEQ ID NO: 915879 - DNA, 25 bp, Homo sapien
gctggagtttcagaacaatggccat

SEQ ID NO: 915880 - DNA, 25 bp, Homo sapien
agcagggagaggtgacacgtggcag

SEQ ID NO: 915881 - DNA, 25 bp, Homo sapien
ctgttctgggtctgccaccgagtgt

SEQ ID NO: 915882 - DNA, 25 bp, Homo sapien
tctgggtctgccaccgagtgtgagc

SEQ ID NO: 915883 - DNA, 25 bp, Homo sapien
ccgagtgtgagccaagaaagtcaga

SEQ ID NO: 915884 - DNA, 25 bp, Homo sapien
gtgtgagccaagaaagtcagatctg

SEQ ID NO: 915885 - DNA, 25 bp, Homo sapien
tgacatttggctccgccacagttag

SEQ ID NO: 915886 - DNA, 25 bp, Homo sapien
gccacagttagagggaaggactcct

SEQ ID NO: 915887 - DNA, 25 bp, Homo sapien
tttggctccgccacagttagaggga

SEQ ID NO: 915888 - DNA, 25 bp, Homo sapien
agaggcccttgacatttggctccgc

SEQ ID NO: 915889 - DNA, 25 bp, Homo sapien
ctgcaggattcaagtgggtgtgcct

SEQ ID NO: 915890 - DNA, 25 bp, Homo sapien
tctggactgcaggattcaagtgggt

SEQ ID NO: 915891 - DNA, 25 bp, Homo sapien
ggactgcaggattcaagtgggtgtg

SEQ ID NO: 915892 - DNA, 25 bp, Homo sapien
ctctggactgcaggattcaagtggg

SEQ ID NO: 915893 - DNA, 25 bp, Homo sapien
gccagcatgatgagaagggcccgct

SEQ ID NO: 915894 - DNA, 25 bp, Homo sapien
caggccagcatgatgagaagggccc

SEQ ID NO: 915895 - DNA, 25 bp, Homo sapien
atgatcctttctgcaagcgggaagt

SEQ ID NO: 915896 - DNA, 25 bp, Homo sapien
gcgggaagttcactagaggaaccca

SEQ ID NO: 915897 - DNA, 25 bp, Homo sapien
taagccaccgcagtgtgaagagcag

SEQ ID NO: 915898 - DNA, 25 bp, Homo sapien
gccaccgcagtgtgaagagcagatg

SEQ ID NO: 915899 - DNA, 25 bp, Homo sapien
tcttggaagctctgagggcataagc

SEQ ID NO: 915900 - DNA, 25 bp, Homo sapien
tggaagctctgagggcataagccac

SEQ ID NO: 915901 - DNA, 25 bp, Homo sapien
tgtaaagagacccattatcccctaa

SEQ ID NO: 915902 - DNA, 25 bp, Homo sapien
gtgtaaagagacccattatccccta

SEQ ID NO: 915903 - DNA, 25 bp, Homo sapien
aagtgttccgttctgcgccaccagg

SEQ ID NO: 915904 - DNA, 25 bp, Homo sapien
ccaccaggaggctatggagaaggcg

SEQ ID NO: 915905 - DNA, 25 bp, Homo sapien
cgccaccaggaggctatggagaagg

SEQ ID NO: 915906 - DNA, 25 bp, Homo sapien
gtgttccgttctgcgccaccaggag

SEQ ID NO: 915907 - DNA, 25 bp, Homo sapien
aagaggaaacgatgacctgagaccg

SEQ ID NO: 915908 - DNA, 25 bp, Homo sapien
gaaacgatgacctgagaccggcaac

SEQ ID NO: 915909 - DNA, 25 bp, Homo sapien
gatgacctgagaccggcaaccccgg

SEQ ID NO: 915910 - DNA, 25 bp, Homo sapien
gaggaaacgatgacctgagaccggc

SEQ ID NO: 915911 - DNA, 25 bp, Homo sapien
gggaatccccgaggccacaggatgt

SEQ ID NO: 915912 - DNA, 25 bp, Homo sapien
tgaactgccacgaacaccctcccag

SEQ ID NO: 915913 - DNA, 25 bp, Homo sapien
tcccagagctcagccgcctgggaat

SEQ ID NO: 915914 - DNA, 25 bp, Homo sapien
aggctggccgccgggaccagcttct

SEQ ID NO: 915915 - DNA, 25 bp, Homo sapien
gtcctcgtcgagctctatgtccgca

SEQ ID NO: 915916 - DNA, 25 bp, Homo sapien
gagtcccacgtgtcctcgtcgagct

SEQ ID NO: 915917 - DNA, 25 bp, Homo sapien
tccgtcttcttcacggccaaggaga

SEQ ID NO: 915918 - DNA, 25 bp, Homo sapien
tccgcaacgaggagttgctgccact

SEQ ID NO: 915919 - DNA, 25 bp, Homo sapien
gctgaacgtgttccgcttggcacca

SEQ ID NO: 915920 - DNA, 25 bp, Homo sapien
ttgccgacattagcgtcagctgcag

SEQ ID NO: 915921 - DNA, 25 bp, Homo sapien
aagaccgacggctttcttgccgaca

SEQ ID NO: 915922 - DNA, 25 bp, Homo sapien
taacgcggccacaggaacgtggtgc

SEQ ID NO: 915923 - DNA, 25 bp, Homo sapien
cctataagtgctctctgcggagcct

SEQ ID NO: 915924 - DNA, 25 bp, Homo sapien
tgggcctcccctataagtgctctct

SEQ ID NO: 915925 - DNA, 25 bp, Homo sapien
ttagggtatccacagcacggaggtg

SEQ ID NO: 915926 - DNA, 25 bp, Homo sapien
ctggagagcggcctgtgacctctta

SEQ ID NO: 915927 - DNA, 25 bp, Homo sapien
gcatgttctcctcttcgctaggcaa

SEQ ID NO: 915928 - DNA, 25 bp, Homo sapien
aaacaccctgttgccaagctgccat

SEQ ID NO: 915929 - DNA, 25 bp, Homo sapien
tatctgccaattgactgcagcaagt

SEQ ID NO: 915930 - DNA, 25 bp, Homo sapien
ccatctctgagcagggagacttaca

SEQ ID NO: 915931 - DNA, 25 bp, Homo sapien
ccctgctgatggcagactgggcaca

SEQ ID NO: 915932 - DNA, 25 bp, Homo sapien
tgtatccttgaaataaccaggacag

SEQ ID NO: 915933 - DNA, 25 bp, Homo sapien
caggacagatcctccaaacttgaaa

SEQ ID NO: 915934 - DNA, 25 bp, Homo sapien
taactggatcgtgtgtctccaactc

SEQ ID NO: 915935 - DNA, 25 bp, Homo sapien
cttatggcacttgttaaggaaaaat

SEQ ID NO: 915936 - DNA, 25 bp, Homo sapien
gtgccaggtaaagcagatcccacta

SEQ ID NO: 915937 - DNA, 25 bp, Homo sapien
ttgtgccaggtaaagcagatcccac

SEQ ID NO: 915938 - DNA, 25 bp, Homo sapien
tttgtgccaggtaaagcagatccca

SEQ ID NO: 915939 - DNA, 25 bp, Homo sapien
ctctttgtgccaggtaaagcagatc

SEQ ID NO: 915940 - DNA, 25 bp, Homo sapien
gggtgccatactgtctctgtcatgc

SEQ ID NO: 915941 - DNA, 25 bp, Homo sapien
ggctcattgcctgcaaaccagtctc

SEQ ID NO: 915942 - DNA, 25 bp, Homo sapien
agtagcatagtaactcatattgcac

SEQ ID NO: 915943 - DNA, 25 bp, Homo sapien
tgtcctggtatgtgtcttatgttca

SEQ ID NO: 915944 - DNA, 25 bp, Homo sapien
tttggctttagaagggagctcaagc

SEQ ID NO: 915945 - DNA, 25 bp, Homo sapien
gagctcaagctcagcggcttttggg

SEQ ID NO: 915946 - DNA, 25 bp, Homo sapien
agctcaagctcagcggcttttgggg

SEQ ID NO: 915947 - DNA, 25 bp, Homo sapien
ggctttagaagggagctcaagctca

SEQ ID NO: 915948 - DNA, 25 bp, Homo sapien
taaaatagtgtcagtgagctgtcca

SEQ ID NO: 915949 - DNA, 25 bp, Homo sapien
aaaatagtgtcagtgagctgtccag

SEQ ID NO: 915950 - DNA, 25 bp, Homo sapien
agggcaggggatctgccgataagag

SEQ ID NO: 915951 - DNA, 25 bp, Homo sapien
gcaggggatctgccgataagagagc

SEQ ID NO: 915952 - DNA, 25 bp, Homo sapien
ctacactgtaccttcccatggtcat

SEQ ID NO: 915953 - DNA, 25 bp, Homo sapien
tctacactgtaccttcccatggtca

SEQ ID NO: 915954 - DNA, 25 bp, Homo sapien
ttctacactgtaccttcccatggtc

SEQ ID NO: 915955 - DNA, 25 bp, Homo sapien
tgctattcctttgggctggcgcagc

SEQ ID NO: 915956 - DNA, 25 bp, Homo sapien
gacgcgcacacaccttgagtgacag

SEQ ID NO: 915957 - DNA, 25 bp, Homo sapien
caaacaaagaactgctgctattcct

SEQ ID NO: 915958 - DNA, 25 bp, Homo sapien
cctctccgtcgggagcagggcaaag

SEQ ID NO: 915959 - DNA, 25 bp, Homo sapien
cagaaatggaggaacgggcgttcgt

SEQ ID NO: 915960 - DNA, 25 bp, Homo sapien
acgaggcagtgcacgctcagacgcc

SEQ ID NO: 915961 - DNA, 25 bp, Homo sapien
tcctagaggacgctctctgcgcggg

SEQ ID NO: 915962 - DNA, 25 bp, Homo sapien
tgcagcgccgggacaggaggtttgt

SEQ ID NO: 915963 - DNA, 25 bp, Homo sapien
ctggagtttatttcacctctgcaat

SEQ ID NO: 915964 - DNA, 25 bp, Homo sapien
agtttatttcacctctgcaatctcg

SEQ ID NO: 915965 - DNA, 25 bp, Homo sapien
ttatttcacctctgcaatctcgacc

SEQ ID NO: 915966 - DNA, 25 bp, Homo sapien
tggagtttatttcacctctgcaatc

SEQ ID NO: 915967 - DNA, 25 bp, Homo sapien
tcttattattttacccagtattcag

SEQ ID NO: 915968 - DNA, 25 bp, Homo sapien
gccttaactaatctttgcattctta

SEQ ID NO: 915969 - DNA, 25 bp, Homo sapien
tacccagtattcagaacattctaat

SEQ ID NO: 915970 - DNA, 25 bp, Homo sapien
tattcggggaatataaaggatataa

SEQ ID NO: 915971 - DNA, 25 bp, Homo sapien
gctgccaggtgtgcttttccactgt

SEQ ID NO: 915972 - DNA, 25 bp, Homo sapien
ggtgttcccggtggctgatctctgc

SEQ ID NO: 915973 - DNA, 25 bp, Homo sapien
ctgccaggtgtgcttttccactgtg

SEQ ID NO: 915974 - DNA, 25 bp, Homo sapien
ttgggagcaagccagcacggctctg

SEQ ID NO: 915975 - DNA, 25 bp, Homo sapien
ccacttgggagcaagccagcacggc

SEQ ID NO: 915976 - DNA, 25 bp, Homo sapien
tgctggccacttgggagcaagccag

SEQ ID NO: 915977 - DNA, 25 bp, Homo sapien
cactgctggccacttgggagcaagc

SEQ ID NO: 915978 - DNA, 25 bp, Homo sapien
tgcatagaataccattcagacacct

SEQ ID NO: 915979 - DNA, 25 bp, Homo sapien
tgccctgctggttccaaaacaaatt

SEQ ID NO: 915980 - DNA, 25 bp, Homo sapien
ccttgctttgccctgctggttccaa

SEQ ID NO: 915981 - DNA, 25 bp, Homo sapien
cagggcttctgcatagaataccatt

SEQ ID NO: 915982 - DNA, 25 bp, Homo sapien
cattggttaggagctatagtataat

SEQ ID NO: 915983 - DNA, 25 bp, Homo sapien
ctttatattctgtgctaaattcacg

SEQ ID NO: 915984 - DNA, 25 bp, Homo sapien
tctacaggtcttaacacatcttctg

SEQ ID NO: 915985 - DNA, 25 bp, Homo sapien
taaattcacgtatcagttctggtag

SEQ ID NO: 915986 - DNA, 25 bp, Homo sapien
gcgattacagacacgaggtaccacg

SEQ ID NO: 915987 - DNA, 25 bp, Homo sapien
ctgcagccttccatgtagtcgcgat

SEQ ID NO: 915988 - DNA, 25 bp, Homo sapien
acagacacgaggtaccacgcctgac

SEQ ID NO: 915989 - DNA, 25 bp, Homo sapien
catgtagtcgcgattacagacacga

SEQ ID NO: 915990 - DNA, 25 bp, Homo sapien
gcgaggtttgctgcggaagggctac

SEQ ID NO: 915991 - DNA, 25 bp, Homo sapien
gctacgggatatgccatgggactgc

SEQ ID NO: 915992 - DNA, 25 bp, Homo sapien
tggcaacggctattccttcctgtcc

SEQ ID NO: 915993 - DNA, 25 bp, Homo sapien
gccatggagtgtagcgatgtgattt

SEQ ID NO: 915994 - DNA, 25 bp, Homo sapien
gattctctgtagtgtttgcatgttt

SEQ ID NO: 915995 - DNA, 25 bp, Homo sapien
attctctgtagtgtttgcatgtttc

SEQ ID NO: 915996 - DNA, 25 bp, Homo sapien
agattctctgtagtgtttgcatgtt

SEQ ID NO: 915997 - DNA, 25 bp, Homo sapien
tgtttgctgcagacacccttgctcc

SEQ ID NO: 915998 - DNA, 25 bp, Homo sapien
gagcagtaatttgggttagcctacc

SEQ ID NO: 915999 - DNA, 25 bp, Homo sapien
cagcttctaaacgatgcctggagag

SEQ ID NO: 916000 - DNA, 25 bp, Homo sapien
tcatgaaagacaagaggcctctctt

SEQ ID NO: 916001 - DNA, 25 bp, Homo sapien
tccagggcctgttgatgggctttgc

SEQ ID NO: 916002 - DNA, 25 bp, Homo sapien
gctgaagacctcacacgatgtccaa

SEQ ID NO: 916003 - DNA, 25 bp, Homo sapien
ggtgagtccatccacacacgtttga

SEQ ID NO: 916004 - DNA, 25 bp, Homo sapien
cccatttctcaagggaagccagtag

SEQ ID NO: 916005 - DNA, 25 bp, Homo sapien
tagtctttctaacacactgagggaa

SEQ ID NO: 916006 - DNA, 25 bp, Homo sapien
gaaacgggacttacttcacaggaca

SEQ ID NO: 916007 - DNA, 25 bp, Homo sapien
ttgaatcagatttcagtacatctca

SEQ ID NO: 916008 - DNA, 25 bp, Homo sapien
cacaggacagaggattgacagaagt

SEQ ID NO: 916009 - DNA, 25 bp, Homo sapien
agctcggtccctccaggcaaaggag

SEQ ID NO: 916010 - DNA, 25 bp, Homo sapien
gagcccactacgttgcatgcagaat

SEQ ID NO: 916011 - DNA, 25 bp, Homo sapien
gcttcaaagcggtgtgtgacccgaa

SEQ ID NO: 916012 - DNA, 25 bp, Homo sapien
gccagccgggcttcaaagcatggag

SEQ ID NO: 916013 - DNA, 25 bp, Homo sapien
tcctcaggaggcattgagcccacta

SEQ ID NO: 916014 - DNA, 25 bp, Homo sapien
gtgccgtcgcatttaggaagacccc

SEQ ID NO: 916015 - DNA, 25 bp, Homo sapien
gcaggtcctgacttttccacatcag

SEQ ID NO: 916016 - DNA, 25 bp, Homo sapien
tccagcgtgaccaagtccctggtgc

SEQ ID NO: 916017 - DNA, 25 bp, Homo sapien
cagtgtcaaagtccagcgtgaccaa

SEQ ID NO: 916018 - DNA, 25 bp, Homo sapien
tgaataagtgtggacagggcgcctc

SEQ ID NO: 916019 - DNA, 25 bp, Homo sapien
gcttactcagcaccagacattacgg

SEQ ID NO: 916020 - DNA, 25 bp, Homo sapien
ggaacccggttgtacgcacattgag

SEQ ID NO: 916021 - DNA, 25 bp, Homo sapien
acattacggaggcacttggaatcca

SEQ ID NO: 916022 - DNA, 25 bp, Homo sapien
gggtacacatagtgacaagctgcag

SEQ ID NO: 916023 - DNA, 25 bp, Homo sapien
tcagccaccctcgagggtacacata

SEQ ID NO: 916024 - DNA, 25 bp, Homo sapien
tctggaggcaggttgcgtggtagcc

SEQ ID NO: 916025 - DNA, 25 bp, Homo sapien
gcaggtttgtgcgttccttgccagg

SEQ ID NO: 916026 - DNA, 25 bp, Homo sapien
tagcctgctgggttcgaggaccaga

SEQ ID NO: 916027 - DNA, 25 bp, Homo sapien
gtactgagtatacgccgctggcaca

SEQ ID NO: 916028 - DNA, 25 bp, Homo sapien
cacagtcgtcacacatggagcagaa

SEQ ID NO: 916029 - DNA, 25 bp, Homo sapien
gacaggccggatgtatttaagccca

SEQ ID NO: 916030 - DNA, 25 bp, Homo sapien
aagggctgccagcatcagaaggaca

SEQ ID NO: 916031 - DNA, 25 bp, Homo sapien
gggctgccagcatcagaaggacatg

SEQ ID NO: 916032 - DNA, 25 bp, Homo sapien
ggctgccagcatcagaaggacatgg

SEQ ID NO: 916033 - DNA, 25 bp, Homo sapien
tcaagggctgccagcatcagaagga

SEQ ID NO: 916034 - DNA, 25 bp, Homo sapien
atcccgcggcacaggggacggccgg

SEQ ID NO: 916035 - DNA, 25 bp, Homo sapien
aggcggtcccgatcccgcggcacag

SEQ ID NO: 916036 - DNA, 25 bp, Homo sapien
cctctccagggacgcgcaggtcagg

SEQ ID NO: 916037 - DNA, 25 bp, Homo sapien
cactgcggccctgcctcgtccgaac

SEQ ID NO: 916038 - DNA, 25 bp, Homo sapien
agctgagctccgaccaggttcctgc

SEQ ID NO: 916039 - DNA, 25 bp, Homo sapien
gaggcgttctggccaccgagcctgt

SEQ ID NO: 916040 - DNA, 25 bp, Homo sapien
gccggtctcggagaagggcgcggcc

SEQ ID NO: 916041 - DNA, 25 bp, Homo sapien
ctgaaggttggacgaaaagctgccc

SEQ ID NO: 916042 - DNA, 25 bp, Homo sapien
agcagacctttggaaatgcggttgg

SEQ ID NO: 916043 - DNA, 25 bp, Homo sapien
aaacatgtcacccttgaggcgtagc

SEQ ID NO: 916044 - DNA, 25 bp, Homo sapien
ttgaggcgtagcacccaggtggtca

SEQ ID NO: 916045 - DNA, 25 bp, Homo sapien
gacctttggaaatgcggttggatga

SEQ ID NO: 916046 - DNA, 25 bp, Homo sapien
acctacttccatttgctgagaacat

SEQ ID NO: 916047 - DNA, 25 bp, Homo sapien
gacgagcaacgattgcatttcacct

SEQ ID NO: 916048 - DNA, 25 bp, Homo sapien
cacactgacaaggatggtaataaag

SEQ ID NO: 916049 - DNA, 25 bp, Homo sapien
cccttgggagttggagtcaccgact

SEQ ID NO: 916050 - DNA, 25 bp, Homo sapien
cattatactcttgagacctgcacaa

SEQ ID NO: 916051 - DNA, 25 bp, Homo sapien
tctgttcccatgtgcactgaatact

SEQ ID NO: 916052 - DNA, 25 bp, Homo sapien
gctgcgcccaggcagttttcacagg

SEQ ID NO: 916053 - DNA, 25 bp, Homo sapien
gattgtcattggtaagggctgcgcc

SEQ ID NO: 916054 - DNA, 25 bp, Homo sapien
tgcgggtagggggtgtcttgacaat

SEQ ID NO: 916055 - DNA, 25 bp, Homo sapien
cttcttgcgggtagggggtgtcttg

SEQ ID NO: 916056 - DNA, 25 bp, Homo sapien
ttcttgcgggtagggggtgtcttga

SEQ ID NO: 916057 - DNA, 25 bp, Homo sapien
gggtagggggtgtcttgacaatcat

SEQ ID NO: 916058 - DNA, 25 bp, Homo sapien
acaggcacaggagtggaacgagatc

SEQ ID NO: 916059 - DNA, 25 bp, Homo sapien
cacaggagtggaacgagatcctttc

SEQ ID NO: 916060 - DNA, 25 bp, Homo sapien
tttctggacacttccgcacagccca

SEQ ID NO: 916061 - DNA, 25 bp, Homo sapien
ccaccacaccatttataggagggca

SEQ ID NO: 916062 - DNA, 25 bp, Homo sapien
gaaggggttcaagtcatccataagg

SEQ ID NO: 916063 - DNA, 25 bp, Homo sapien
gatatattctgaatcctgtgttgta

SEQ ID NO: 916064 - DNA, 25 bp, Homo sapien
cactcatccataggaagaaatacct

SEQ ID NO: 916065 - DNA, 25 bp, Homo sapien
ttcaggttccacttcgaattatatt

SEQ ID NO: 916066 - DNA, 25 bp, Homo sapien
ggatagctctcacctcagtcattta

SEQ ID NO: 916067 - DNA, 25 bp, Homo sapien
aaagcgaagtacaataaagtgtgcc

SEQ ID NO: 916068 - DNA, 25 bp, Homo sapien
taagtacaccatcttgtataggcag

SEQ ID NO: 916069 - DNA, 25 bp, Homo sapien
ggcagagttattggcaccctatagt

SEQ ID NO: 916070 - DNA, 25 bp, Homo sapien
cattgagaaaccaactcgtgccagt

SEQ ID NO: 916071 - DNA, 25 bp, Homo sapien
ttgagaaaccaactcgtgccagtta

SEQ ID NO: 916072 - DNA, 25 bp, Homo sapien
attgagaaaccaactcgtgccagtt

SEQ ID NO: 916073 - DNA, 25 bp, Homo sapien
acattgagaaaccaactcgtgccag

SEQ ID NO: 916074 - DNA, 25 bp, Homo sapien
accatagccctgtaatgttttgaag

SEQ ID NO: 916075 - DNA, 25 bp, Homo sapien
gagatcttagccacaaaatttttgc

SEQ ID NO: 916076 - DNA, 25 bp, Homo sapien
gatcatgctatctacagaaagagac

SEQ ID NO: 916077 - DNA, 25 bp, Homo sapien
ctcagtaccctttatcgaagagggt

SEQ ID NO: 916078 - DNA, 25 bp, Homo sapien
tatgttgattcttccgtctaggtga

SEQ ID NO: 916079 - DNA, 25 bp, Homo sapien
tcaatttcttcatcgacccagtggt

SEQ ID NO: 916080 - DNA, 25 bp, Homo sapien
tgctgagagcagattgttgaagtcc

SEQ ID NO: 916081 - DNA, 25 bp, Homo sapien
gtcaaatttgatctaaagtccagct

SEQ ID NO: 916082 - DNA, 25 bp, Homo sapien
ccgagtatagtgttcttgcgtgaca

SEQ ID NO: 916083 - DNA, 25 bp, Homo sapien
catttgtgttgtctcataggctctc

SEQ ID NO: 916084 - DNA, 25 bp, Homo sapien
ctggtatagtggtgatgaatgccct

SEQ ID NO: 916085 - DNA, 25 bp, Homo sapien
aagcatttctcgtagggctggtata

SEQ ID NO: 916086 - DNA, 25 bp, Homo sapien
aacctgttcctagagaattactgtg

SEQ ID NO: 916087 - DNA, 25 bp, Homo sapien
cttacactcatatttgtgcatctgg

SEQ ID NO: 916088 - DNA, 25 bp, Homo sapien
gaaaagacttttcctgatagatgta

SEQ ID NO: 916089 - DNA, 25 bp, Homo sapien
tatctattgtattggttgggtagga

SEQ ID NO: 916090 - DNA, 25 bp, Homo sapien
tgcctggcaaaccagtttccaggtc

SEQ ID NO: 916091 - DNA, 25 bp, Homo sapien
ctttatggcatgcttgggtgccggt

SEQ ID NO: 916092 - DNA, 25 bp, Homo sapien
ggtgccggtggtggtgataggtgca

SEQ ID NO: 916093 - DNA, 25 bp, Homo sapien
ctcaggtcccctttatggcatgctt

SEQ ID NO: 916094 - DNA, 25 bp, Homo sapien
cagaagtgccaggtgtcgctagtca

SEQ ID NO: 916095 - DNA, 25 bp, Homo sapien
gcaatgcacagttaggtccacaggg

SEQ ID NO: 916096 - DNA, 25 bp, Homo sapien
tctgattggctcaacatccactggg

SEQ ID NO: 916097 - DNA, 25 bp, Homo sapien
aagaatgttaggcactgagaaccgc

SEQ ID NO: 916098 - DNA, 25 bp, Homo sapien
gattagtggccccagagagagaacc

SEQ ID NO: 916099 - DNA, 25 bp, Homo sapien
tagaaaggctggcatagtgcaagtc

SEQ ID NO: 916100 - DNA, 25 bp, Homo sapien
tagcagcctgaacacattgtgacaa

SEQ ID NO: 916101 - DNA, 25 bp, Homo sapien
cttagacttccgaacagcctccaga

SEQ ID NO: 916102 - DNA, 25 bp, Homo sapien
aacccctctggaagtgcctgggcgg

SEQ ID NO: 916103 - DNA, 25 bp, Homo sapien
tctggatgagcgactggattgcaac

SEQ ID NO: 916104 - DNA, 25 bp, Homo sapien
gtggcccaggatggaacccctctgg

SEQ ID NO: 916105 - DNA, 25 bp, Homo sapien
gattgcaactatgggatgggctaga

SEQ ID NO: 916106 - DNA, 25 bp, Homo sapien
caggtaagcatgcatgggaccccac

SEQ ID NO: 916107 - DNA, 25 bp, Homo sapien
aggtaagcatgcatgggaccccaca

SEQ ID NO: 916108 - DNA, 25 bp, Homo sapien
gtaagcatgcatgggaccccacagg

SEQ ID NO: 916109 - DNA, 25 bp, Homo sapien
gcaggtaagcatgcatgggacccca

SEQ ID NO: 916110 - DNA, 25 bp, Homo sapien
gcacagatctgcttcaagtttactc

SEQ ID NO: 916111 - DNA, 25 bp, Homo sapien
agagaaacgagccaattgttgcaga

SEQ ID NO: 916112 - DNA, 25 bp, Homo sapien
ccgggaattctacacaccaggagct

SEQ ID NO: 916113 - DNA, 25 bp, Homo sapien
tttactctgaaccacggacgctccg

SEQ ID NO: 916114 - DNA, 25 bp, Homo sapien
gaagaggagtgtttggacccacgca

SEQ ID NO: 916115 - DNA, 25 bp, Homo sapien
taatctaggcgcctcagctaagctg

SEQ ID NO: 916116 - DNA, 25 bp, Homo sapien
caggatcagcgttcacagtagcaca

SEQ ID NO: 916117 - DNA, 25 bp, Homo sapien
ggacaggtcagcgttcacacatcaa

SEQ ID NO: 916118 - DNA, 25 bp, Homo sapien
gtagatctggtcacgccaccgtaag

SEQ ID NO: 916119 - DNA, 25 bp, Homo sapien
ctggcggtgcaggagaagtctatct

SEQ ID NO: 916120 - DNA, 25 bp, Homo sapien
taatacccgggcagaaggatgcttg

SEQ ID NO: 916121 - DNA, 25 bp, Homo sapien
tgtgaggatatcagaggaactgccc

SEQ ID NO: 916122 - DNA, 25 bp, Homo sapien
tgtctctcctcttgcacgtgggcac

SEQ ID NO: 916123 - DNA, 25 bp, Homo sapien
ctgtctctcctcttgcacgtgggca

SEQ ID NO: 916124 - DNA, 25 bp, Homo sapien
tcctggaagtgaacatcaacgaaga

SEQ ID NO: 916125 - DNA, 25 bp, Homo sapien
gaacatcaacgaagacagaaaggcc

SEQ ID NO: 916126 - DNA, 25 bp, Homo sapien
gccattgccatggaattcccgacag

SEQ ID NO: 916127 - DNA, 25 bp, Homo sapien
cgtacgggggcggaggcgtgttgca

SEQ ID NO: 916128 - DNA, 25 bp, Homo sapien
cggaggcgtgttgcagtaggctgga

SEQ ID NO: 916129 - DNA, 25 bp, Homo sapien
ggtgggacctggaaagccattgcca

SEQ ID NO: 916130 - DNA, 25 bp, Homo sapien
ctcctgggtcggtgtaatagggcgg

SEQ ID NO: 916131 - DNA, 25 bp, Homo sapien
gtgtaatagggcggccccggctgct

SEQ ID NO: 916132 - DNA, 25 bp, Homo sapien
tcctgggtcggtgtaatagggcggc

SEQ ID NO: 916133 - DNA, 25 bp, Homo sapien
cggtgtaatagggcggccccggctg

SEQ ID NO: 916134 - DNA, 25 bp, Homo sapien
cacaacccctctgggcacgccattg

SEQ ID NO: 916135 - DNA, 25 bp, Homo sapien
tccattctccctgccgggctagtgt

SEQ ID NO: 916136 - DNA, 25 bp, Homo sapien
cctgccgggctagtgtgccctcagg

SEQ ID NO: 916137 - DNA, 25 bp, Homo sapien
tggcattatcgcaggagctccacaa

SEQ ID NO: 916138 - DNA, 25 bp, Homo sapien
catgggtcaggagcggagccgcagg

SEQ ID NO: 916139 - DNA, 25 bp, Homo sapien
tgggcacacatagccaggctgcagc

SEQ ID NO: 916140 - DNA, 25 bp, Homo sapien
ctgcagctgattgacgctccatggg

SEQ ID NO: 916141 - DNA, 25 bp, Homo sapien
cgcaggctgactccctagtgacaag

SEQ ID NO: 916142 - DNA, 25 bp, Homo sapien
ggtacaggctggacacccgacccca

SEQ ID NO: 916143 - DNA, 25 bp, Homo sapien
cacccgaccccaaatctagccctca

SEQ ID NO: 916144 - DNA, 25 bp, Homo sapien
tacaggctggacacccgaccccaaa

SEQ ID NO: 916145 - DNA, 25 bp, Homo sapien
gagggtacaggctggacacccgacc

SEQ ID NO: 916146 - DNA, 25 bp, Homo sapien
acaagggcggggcagatgaaaaagt

SEQ ID NO: 916147 - DNA, 25 bp, Homo sapien
atgaaaaagtccctgctggactgga

SEQ ID NO: 916148 - DNA, 25 bp, Homo sapien
ggtcacactactgctacagcagcac

SEQ ID NO: 916149 - DNA, 25 bp, Homo sapien
caaggtcacactactgctacagcag

SEQ ID NO: 916150 - DNA, 25 bp, Homo sapien
agcacagcaagggactcggccacca

SEQ ID NO: 916151 - DNA, 25 bp, Homo sapien
gccaccacaggtttggcggagcggt

SEQ ID NO: 916152 - DNA, 25 bp, Homo sapien
gacagtgggccgagtgggcagagcc

SEQ ID NO: 916153 - DNA, 25 bp, Homo sapien
gtgggtgaacatggccggcagcctc

SEQ ID NO: 916154 - DNA, 25 bp, Homo sapien
tcccacaaagaagagcaaccgagag

SEQ ID NO: 916155 - DNA, 25 bp, Homo sapien
tggaatagaaccaggacctcagggt

SEQ ID NO: 916156 - DNA, 25 bp, Homo sapien
caagtacctctcagtgcaggaagca

SEQ ID NO: 916157 - DNA, 25 bp, Homo sapien
cagacttcagagagatcacggcaaa

SEQ ID NO: 916158 - DNA, 25 bp, Homo sapien
gtttggtttgaggttgtatctgttc

SEQ ID NO: 916159 - DNA, 25 bp, Homo sapien
cagaggtgttgccagctcagtactg

SEQ ID NO: 916160 - DNA, 25 bp, Homo sapien
cattttgctaaactgtctcaactct

SEQ ID NO: 916161 - DNA, 25 bp, Homo sapien
ttcacaaacaacagaggtgttgcca

SEQ ID NO: 916162 - DNA, 25 bp, Homo sapien
tacgcactttggtatcataaagtac

SEQ ID NO: 916163 - DNA, 25 bp, Homo sapien
ggaacaagcaatgtgatttgctcta

SEQ ID NO: 916164 - DNA, 25 bp, Homo sapien
tacgcactttgccatcttaccagat

SEQ ID NO: 916165 - DNA, 25 bp, Homo sapien
tacgtagcattcctatgatttgcag

SEQ ID NO: 916166 - DNA, 25 bp, Homo sapien
ctatgagaggaggtcggaagtcact

SEQ ID NO: 916167 - DNA, 25 bp, Homo sapien
ggaagtcactgtcgccctgtcctca

SEQ ID NO: 916168 - DNA, 25 bp, Homo sapien
cacacgggacgtgcacacagtacat

SEQ ID NO: 916169 - DNA, 25 bp, Homo sapien
acagctgcctcataaccccggctgt

SEQ ID NO: 916170 - DNA, 25 bp, Homo sapien
gcaggcacccatgagtggaccacga

SEQ ID NO: 916171 - DNA, 25 bp, Homo sapien
aatctgctgtaagtttctgttccca

SEQ ID NO: 916172 - DNA, 25 bp, Homo sapien
ccatcactggcgaagcagaggacag

SEQ ID NO: 916173 - DNA, 25 bp, Homo sapien
tcaaagatcatagatgtgcaagctt

SEQ ID NO: 916174 - DNA, 25 bp, Homo sapien
ggctagcctcatgaccatttcacaa

SEQ ID NO: 916175 - DNA, 25 bp, Homo sapien
aactatctgtcgatgggaaaactcc

SEQ ID NO: 916176 - DNA, 25 bp, Homo sapien
tgcaggctgacagacttattacagg

SEQ ID NO: 916177 - DNA, 25 bp, Homo sapien
ggtgtcatttagtcactgcaggctg

SEQ ID NO: 916178 - DNA, 25 bp, Homo sapien
gatggtcttgccgtaccagcaaatt

SEQ ID NO: 916179 - DNA, 25 bp, Homo sapien
aagaagatggaccataattcaatca

SEQ ID NO: 916180 - DNA, 25 bp, Homo sapien
cttgactatgaactttaatggccac

SEQ ID NO: 916181 - DNA, 25 bp, Homo sapien
catcgttttctttggagctccctta

SEQ ID NO: 916182 - DNA, 25 bp, Homo sapien
aggccacctcctgccagccagccag

SEQ ID NO: 916183 - DNA, 25 bp, Homo sapien
tgaggccacctcctgccagccagcc

SEQ ID NO: 916184 - DNA, 25 bp, Homo sapien
ctgaggccacctcctgccagccagc

SEQ ID NO: 916185 - DNA, 25 bp, Homo sapien
gccacctcctgccagccagccagcc

SEQ ID NO: 916186 - DNA, 25 bp, Homo sapien
gatggtcagtcactatagagttgtt

SEQ ID NO: 916187 - DNA, 25 bp, Homo sapien
tctccctcgcactcatgatggtcag

SEQ ID NO: 916188 - DNA, 25 bp, Homo sapien
tgtttgcgtgaaagctcacacgggt

SEQ ID NO: 916189 - DNA, 25 bp, Homo sapien
agagttgtttgcgtgaaagctcaca

SEQ ID NO: 916190 - DNA, 25 bp, Homo sapien
gccccagttcacatgagtggtagac

SEQ ID NO: 916191 - DNA, 25 bp, Homo sapien
ccagttcacatgagtggtagactct

SEQ ID NO: 916192 - DNA, 25 bp, Homo sapien
ggtagactctgagctcggccaggac

SEQ ID NO: 916193 - DNA, 25 bp, Homo sapien
caggaccacggaccagggacatgtg

SEQ ID NO: 916194 - DNA, 25 bp, Homo sapien
tgtaggtcctacactgtacaataga

SEQ ID NO: 916195 - DNA, 25 bp, Homo sapien
ttgtaaaagcgaaggcatccactgc

SEQ ID NO: 916196 - DNA, 25 bp, Homo sapien
ctgaaactttgtaaaagcgaaggca

SEQ ID NO: 916197 - DNA, 25 bp, Homo sapien
cagttgtattaattgtaggtcctac

SEQ ID NO: 916198 - DNA, 25 bp, Homo sapien
cagaaaagcacgcccatcatcagaa

SEQ ID NO: 916199 - DNA, 25 bp, Homo sapien
ccggctccgcagcagaaaagcacgc

SEQ ID NO: 916200 - DNA, 25 bp, Homo sapien
acattgaaggctggctcctcgatca

SEQ ID NO: 916201 - DNA, 25 bp, Homo sapien
ggtacatgcgcctccggatgaagaa

SEQ ID NO: 916202 - DNA, 25 bp, Homo sapien
ggagcacaccttaattacagagaaa

SEQ ID NO: 916203 - DNA, 25 bp, Homo sapien
ttcctggagcacaccttaattacag

SEQ ID NO: 916204 - DNA, 25 bp, Homo sapien
cctggagcacaccttaattacagag

SEQ ID NO: 916205 - DNA, 25 bp, Homo sapien
acccttcctggagcacaccttaatt

SEQ ID NO: 916206 - DNA, 25 bp, Homo sapien
cattcagtaaacgactgcagaatga

SEQ ID NO: 916207 - DNA, 25 bp, Homo sapien
cagcattcagtaaacgactgcagaa

SEQ ID NO: 916208 - DNA, 25 bp, Homo sapien
ctttgtccaacccatctgtgaattc

SEQ ID NO: 916209 - DNA, 25 bp, Homo sapien
tttgtccaacccatctgtgaattct

SEQ ID NO: 916210 - DNA, 25 bp, Homo sapien
ccacagcagtcctcgtaggagcggc

SEQ ID NO: 916211 - DNA, 25 bp, Homo sapien
cacagcagtcctcgtaggagcggca

SEQ ID NO: 916212 - DNA, 25 bp, Homo sapien
ctgctgggaggaggctccacaggag

SEQ ID NO: 916213 - DNA, 25 bp, Homo sapien
gctgctgggaggaggctccacagga

SEQ ID NO: 916214 - DNA, 25 bp, Homo sapien
agcccagcacccacgtggtgctcat

SEQ ID NO: 916215 - DNA, 25 bp, Homo sapien
aggagcccagcacccacgtggtgct

SEQ ID NO: 916216 - DNA, 25 bp, Homo sapien
caggcagacgctgccactccctgca

SEQ ID NO: 916217 - DNA, 25 bp, Homo sapien
aggccccagggcaagtgccttccat

SEQ ID NO: 916218 - DNA, 25 bp, Homo sapien
ctccaacctgcccaggcagacgctg

SEQ ID NO: 916219 - DNA, 25 bp, Homo sapien
ccactccctgcagcaaggccccagg

SEQ ID NO: 916220 - DNA, 25 bp, Homo sapien
cagacatgaccttgagagcaacccc

SEQ ID NO: 916221 - DNA, 25 bp, Homo sapien
ggtgctcccaggcaatgatagccta

SEQ ID NO: 916222 - DNA, 25 bp, Homo sapien
tctatgcatagtccaggtatccacc

SEQ ID NO: 916223 - DNA, 25 bp, Homo sapien
tggttaactgttagaggcctctgtc

SEQ ID NO: 916224 - DNA, 25 bp, Homo sapien
tggagcactcagctagggaagcgcc

SEQ ID NO: 916225 - DNA, 25 bp, Homo sapien
caggagagctcagcgaaggagtcca

SEQ ID NO: 916226 - DNA, 25 bp, Homo sapien
tctgcagcaggcgtatggagcactc

SEQ ID NO: 916227 - DNA, 25 bp, Homo sapien
tctcctgacggcaaaatagtgaggg

SEQ ID NO: 916228 - DNA, 25 bp, Homo sapien
agctcaggagatcagcccgactcgg

SEQ ID NO: 916229 - DNA, 25 bp, Homo sapien
gaaatgactagtcactctcacatga

SEQ ID NO: 916230 - DNA, 25 bp, Homo sapien
aacgcaccacaactgacacgtcgtg

SEQ ID NO: 916231 - DNA, 25 bp, Homo sapien
cactgctgcatgaggcataggtacc

SEQ ID NO: 916232 - DNA, 25 bp, Homo sapien
tgggctcctcaagaatgacaggtaa

SEQ ID NO: 916233 - DNA, 25 bp, Homo sapien
tctgtaattagagcccaagtcctta

SEQ ID NO: 916234 - DNA, 25 bp, Homo sapien
gaaataggcgtactgatgaaaattc

SEQ ID NO: 916235 - DNA, 25 bp, Homo sapien
ccaagatgacgaacatggccagctt

SEQ ID NO: 916236 - DNA, 25 bp, Homo sapien
gagtccttcgaaataccagcaatgc

SEQ ID NO: 916237 - DNA, 25 bp, Homo sapien
aataccagcaatgctttttggcttc

SEQ ID NO: 916238 - DNA, 25 bp, Homo sapien
ggttggatagagtccttcgaaatac

SEQ ID NO: 916239 - DNA, 25 bp, Homo sapien
atataataggttggatagagtcctt

SEQ ID NO: 916240 - DNA, 25 bp, Homo sapien
ggaaataaggacaggctctggcctc

SEQ ID NO: 916241 - DNA, 25 bp, Homo sapien
tctggcctccatagcgcccttttct

SEQ ID NO: 916242 - DNA, 25 bp, Homo sapien
catagcgcccttttctgcaattcct

SEQ ID NO: 916243 - DNA, 25 bp, Homo sapien
aggccacagccacgcagcgagagcc

SEQ ID NO: 916244 - DNA, 25 bp, Homo sapien
cagagtgcaagagtaacattatgaa

SEQ ID NO: 916245 - DNA, 25 bp, Homo sapien
tgtaattgcagagtgcaagagtaac

SEQ ID NO: 916246 - DNA, 25 bp, Homo sapien
ccatcgcgcccagaaaaagtcatct

SEQ ID NO: 916247 - DNA, 25 bp, Homo sapien
aaaaagtcaacagatcagctctgcc

SEQ ID NO: 916248 - DNA, 25 bp, Homo sapien
catggtcaggtcaccgaaggtctct

SEQ ID NO: 916249 - DNA, 25 bp, Homo sapien
gaaacagtgtatgcgaaccacctgg

SEQ ID NO: 916250 - DNA, 25 bp, Homo sapien
gaatcatggtcaagtaaagctcaac

SEQ ID NO: 916251 - DNA, 25 bp, Homo sapien
ggcgcatgcccactattctaagagc

SEQ ID NO: 916252 - DNA, 25 bp, Homo sapien
cactctgactggaggtaaacttaac

SEQ ID NO: 916253 - DNA, 25 bp, Homo sapien
taaaccctcgggtctcagctagtgc

SEQ ID NO: 916254 - DNA, 25 bp, Homo sapien
tagacagacattccttaggcctagt

SEQ ID NO: 916255 - DNA, 25 bp, Homo sapien
tgactcaattctctctgggcccagg

SEQ ID NO: 916256 - DNA, 25 bp, Homo sapien
gcaaggatcatgcactcagggccct

SEQ ID NO: 916257 - DNA, 25 bp, Homo sapien
tgggcaggcagacatcaacttaccg

SEQ ID NO: 916258 - DNA, 25 bp, Homo sapien
tgttctttccttgatgacgaccgac

SEQ ID NO: 916259 - DNA, 25 bp, Homo sapien
agctcctgaggagtaagggccctgc

SEQ ID NO: 916260 - DNA, 25 bp, Homo sapien
ctgagcatgtgagcccgtccttcgc

SEQ ID NO: 916261 - DNA, 25 bp, Homo sapien
tccttcgcattctgttaggcgcaag

SEQ ID NO: 916262 - DNA, 25 bp, Homo sapien
gcccacggtcctgtcactgctgggt

SEQ ID NO: 916263 - DNA, 25 bp, Homo sapien
tccaatacggagcacacataaataa

SEQ ID NO: 916264 - DNA, 25 bp, Homo sapien
tactttcatagttccaggtcttaca

SEQ ID NO: 916265 - DNA, 25 bp, Homo sapien
ggcgagagacagaagtctactttca

SEQ ID NO: 916266 - DNA, 25 bp, Homo sapien
tttgtacatggcgagagacagaagt

SEQ ID NO: 916267 - DNA, 25 bp, Homo sapien
cttcatatggatgtacagttttccc

SEQ ID NO: 916268 - DNA, 25 bp, Homo sapien
actaagctaatgaaaccacgaggcc

SEQ ID NO: 916269 - DNA, 25 bp, Homo sapien
caacagtcagcaaaacgtagtcaaa

SEQ ID NO: 916270 - DNA, 25 bp, Homo sapien
gtgttctacactggctcaacagtca

SEQ ID NO: 916271 - DNA, 25 bp, Homo sapien
tggagaccgtggaactcaagcaaac

SEQ ID NO: 916272 - DNA, 25 bp, Homo sapien
agaaacatcccaaggactgtacacg

SEQ ID NO: 916273 - DNA, 25 bp, Homo sapien
ctgagtcaggaatagagaaaacggg

SEQ ID NO: 916274 - DNA, 25 bp, Homo sapien
gactgtacacgaggaaaatggcctg

SEQ ID NO: 916275 - DNA, 25 bp, Homo sapien
gcctggactgagtcaggaatagaga

SEQ ID NO: 916276 - DNA, 25 bp, Homo sapien
cctgcttcgcttagaccaggtgaaa

SEQ ID NO: 916277 - DNA, 25 bp, Homo sapien
tgacccttgttgtagattaactccc

SEQ ID NO: 916278 - DNA, 25 bp, Homo sapien
agcctcccgccctctgaattaatga

SEQ ID NO: 916279 - DNA, 25 bp, Homo sapien
gaaaccatgtcagggtcaaaagcct

SEQ ID NO: 916280 - DNA, 25 bp, Homo sapien
cagcaagttcttctctagtaggcca

SEQ ID NO: 916281 - DNA, 25 bp, Homo sapien
gaaacacaggcagtccctagatgct

SEQ ID NO: 916282 - DNA, 25 bp, Homo sapien
ttcttgaattgagcccactgagagc

SEQ ID NO: 916283 - DNA, 25 bp, Homo sapien
caacaggtaatgaacacagaggtca

SEQ ID NO: 916284 - DNA, 25 bp, Homo sapien
tctgccacattcgtggcctgggtcc

SEQ ID NO: 916285 - DNA, 25 bp, Homo sapien
tgccacattcgtggcctgggtccct

SEQ ID NO: 916286 - DNA, 25 bp, Homo sapien
aatctgccacattcgtggcctgggt

SEQ ID NO: 916287 - DNA, 25 bp, Homo sapien
gaatctgccacattcgtggcctggg

SEQ ID NO: 916288 - DNA, 25 bp, Homo sapien
cactggctgtgcatgtaattcacag

SEQ ID NO: 916289 - DNA, 25 bp, Homo sapien
tcactggctgtgcatgtaattcaca

SEQ ID NO: 916290 - DNA, 25 bp, Homo sapien
actggctgtgcatgtaattcacagg

SEQ ID NO: 916291 - DNA, 25 bp, Homo sapien
ctgctcacctccacaactcccggca

SEQ ID NO: 916292 - DNA, 25 bp, Homo sapien
cacttcattttcacacgcgggaacg

SEQ ID NO: 916293 - DNA, 25 bp, Homo sapien
actcccgcgacacttccccacagtc

SEQ ID NO: 916294 - DNA, 25 bp, Homo sapien
ttcattttcacacgcgggaacgcct

SEQ ID NO: 916295 - DNA, 25 bp, Homo sapien
gtcgctccaccgtctgcgctcccag

SEQ ID NO: 916296 - DNA, 25 bp, Homo sapien
gcgcctccggcagcacccggtcccc

SEQ ID NO: 916297 - DNA, 25 bp, Homo sapien
tctgcgctcccaggcaaggtcctct

SEQ ID NO: 916298 - DNA, 25 bp, Homo sapien
agggctgtggctccccgtcgctcca

SEQ ID NO: 916299 - DNA, 25 bp, Homo sapien
gcgccgccaccttcgcaggctggcg

SEQ ID NO: 916300 - DNA, 25 bp, Homo sapien
ccgccaccttcgcaggctggcgcct

SEQ ID NO: 916301 - DNA, 25 bp, Homo sapien
cagcgccgccaccttcgcaggctgg

SEQ ID NO: 916302 - DNA, 25 bp, Homo sapien
gccaccttcgcaggctggcgcctca

SEQ ID NO: 916303 - DNA, 25 bp, Homo sapien
cgcccggacgccgggtcgcaggcgc

SEQ ID NO: 916304 - DNA, 25 bp, Homo sapien
cgggtcgcaggcgcgcttcgcgact

SEQ ID NO: 916305 - DNA, 25 bp, Homo sapien
gcgcttcgcgactcggcccccgcgc

SEQ ID NO: 916306 - DNA, 25 bp, Homo sapien
gacgccgggtcgcaggcgcgcttcg

SEQ ID NO: 916307 - DNA, 25 bp, Homo sapien
acaacacccggctaattgtttctat

SEQ ID NO: 916308 - DNA, 25 bp, Homo sapien
gccacaacacccggctaattgtttc

SEQ ID NO: 916309 - DNA, 25 bp, Homo sapien
gccactgctcctggcctaaattaaa

SEQ ID NO: 916310 - DNA, 25 bp, Homo sapien
ccactgctcctggcctaaattaaat

SEQ ID NO: 916311 - DNA, 25 bp, Homo sapien
tgtatcctattatataggcctggag

SEQ ID NO: 916312 - DNA, 25 bp, Homo sapien
tccctcttatcacttgcttgtgttg

SEQ ID NO: 916313 - DNA, 25 bp, Homo sapien
gctgatgagaattatatgtactctg

SEQ ID NO: 916314 - DNA, 25 bp, Homo sapien
gcaattgagtgacatgttctgtaaa

SEQ ID NO: 916315 - DNA, 25 bp, Homo sapien
ggaggctccagggcagccaatattg

SEQ ID NO: 916316 - DNA, 25 bp, Homo sapien
gaggctccagggcagccaatattgc

SEQ ID NO: 916317 - DNA, 25 bp, Homo sapien
ttctggaggctccagggcagccaat

SEQ ID NO: 916318 - DNA, 25 bp, Homo sapien
ctggaggctccagggcagccaatat

SEQ ID NO: 916319 - DNA, 25 bp, Homo sapien
aatacgttccttaggcctttctgcg

SEQ ID NO: 916320 - DNA, 25 bp, Homo sapien
gttccttaggcctttctgcgtgagt

SEQ ID NO: 916321 - DNA, 25 bp, Homo sapien
tgcgtgagtgcagaacactccacat

SEQ ID NO: 916322 - DNA, 25 bp, Homo sapien
acgttccttaggcctttctgcgtga

SEQ ID NO: 916323 - DNA, 25 bp, Homo sapien
aaaaacagtcagcatatgttctgat

SEQ ID NO: 916324 - DNA, 25 bp, Homo sapien
caaaaacagtcagcatatgttctga

SEQ ID NO: 916325 - DNA, 25 bp, Homo sapien
gagtaccctgattgcttcatgaata

SEQ ID NO: 916326 - DNA, 25 bp, Homo sapien
aggtatctgacaccgtggttgagcc

SEQ ID NO: 916327 - DNA, 25 bp, Homo sapien
gtaccctgattgcttcatgaatacc

SEQ ID NO: 916328 - DNA, 25 bp, Homo sapien
cacaaggtatctgacaccgtggttg

SEQ ID NO: 916329 - DNA, 25 bp, Homo sapien
accttcatcggaaacagcactggca

SEQ ID NO: 916330 - DNA, 25 bp, Homo sapien
ggctgtcaccttcatcggaaacagc

SEQ ID NO: 916331 - DNA, 25 bp, Homo sapien
ccttcatcggaaacagcactggcat

SEQ ID NO: 916332 - DNA, 25 bp, Homo sapien
gctgtcaccttcatcggaaacagca

SEQ ID NO: 916333 - DNA, 25 bp, Homo sapien
tttgaagatgtggtttcccatgctt

SEQ ID NO: 916334 - DNA, 25 bp, Homo sapien
actttcactcgttcccctacattgt

SEQ ID NO: 916335 - DNA, 25 bp, Homo sapien
ttcactcgttcccctacattgtcat

SEQ ID NO: 916336 - DNA, 25 bp, Homo sapien
aagactttcactcgttcccctacat

SEQ ID NO: 916337 - DNA, 25 bp, Homo sapien
tcactcgttcccctacattgtcatt

SEQ ID NO: 916338 - DNA, 25 bp, Homo sapien
caggtaaggctctgacataggttgt

SEQ ID NO: 916339 - DNA, 25 bp, Homo sapien
tgtttttagggtatcagccagttct

SEQ ID NO: 916340 - DNA, 25 bp, Homo sapien
gctctgacataggttgtgtttttag

SEQ ID NO: 916341 - DNA, 25 bp, Homo sapien
ggtgtagcctccaggtaaggctctg

SEQ ID NO: 916342 - DNA, 25 bp, Homo sapien
cagccagcctgcatcgatatgactg

SEQ ID NO: 916343 - DNA, 25 bp, Homo sapien
gcatcgatatgactgaatttccatt

SEQ ID NO: 916344 - DNA, 25 bp, Homo sapien
aactgagagtttcattctcagctgt

SEQ ID NO: 916345 - DNA, 25 bp, Homo sapien
agaactgagagtttcattctcagct

SEQ ID NO: 916346 - DNA, 25 bp, Homo sapien
tgcttgtgggtatcgcttcgcttct

SEQ ID NO: 916347 - DNA, 25 bp, Homo sapien
tcagaaagttgcttgtgggtatcgc

SEQ ID NO: 916348 - DNA, 25 bp, Homo sapien
aaagttgcttgtgggtatcgcttcg

SEQ ID NO: 916349 - DNA, 25 bp, Homo sapien
tgggtatcgcttcgcttctgcacaa

SEQ ID NO: 916350 - DNA, 25 bp, Homo sapien
tttcagagtctgagttgctgtttca

SEQ ID NO: 916351 - DNA, 25 bp, Homo sapien
tcagagtctgagttgctgtttcaac

SEQ ID NO: 916352 - DNA, 25 bp, Homo sapien
gagtctgagttgctgtttcaacttc

SEQ ID NO: 916353 - DNA, 25 bp, Homo sapien
tgatttcagagtctgagttgctgtt

SEQ ID NO: 916354 - DNA, 25 bp, Homo sapien
cagcatttcttcccttttcttcttc

SEQ ID NO: 916355 - DNA, 25 bp, Homo sapien
atcagcatttcttcccttttcttct

SEQ ID NO: 916356 - DNA, 25 bp, Homo sapien
agcatttcttcccttttcttcttct

SEQ ID NO: 916357 - DNA, 25 bp, Homo sapien
tcagcatttcttcccttttcttctt

SEQ ID NO: 916358 - DNA, 25 bp, Homo sapien
aatcaggccggcaggtggactgtca

SEQ ID NO: 916359 - DNA, 25 bp, Homo sapien
cacagttggcttggtgtcacgtact

SEQ ID NO: 916360 - DNA, 25 bp, Homo sapien
gatgacttcaggataagtgccacca

SEQ ID NO: 916361 - DNA, 25 bp, Homo sapien
gggtcatcatcagaatttgcacagg

SEQ ID NO: 916362 - DNA, 25 bp, Homo sapien
ccggtcctggttggtgaacatattc

SEQ ID NO: 916363 - DNA, 25 bp, Homo sapien
cctgggcgtgaatgtactctgagaa

SEQ ID NO: 916364 - DNA, 25 bp, Homo sapien
gagcgagtttccctttgccagatgc

SEQ ID NO: 916365 - DNA, 25 bp, Homo sapien
aaagccaggagcgagtttccctttg

SEQ ID NO: 916366 - DNA, 25 bp, Homo sapien
gaggacttctccgttgccatccttg

SEQ ID NO: 916367 - DNA, 25 bp, Homo sapien
caaacactaatacggcactgccggg

SEQ ID NO: 916368 - DNA, 25 bp, Homo sapien
ggttgggtgacacctcaccattcca

SEQ ID NO: 916369 - DNA, 25 bp, Homo sapien
ccattccatatgaacatgtacccct

SEQ ID NO: 916370 - DNA, 25 bp, Homo sapien
ccatagcccaggtgaggcggaatga

SEQ ID NO: 916371 - DNA, 25 bp, Homo sapien
tcgccaacgcacatctctctgagac

SEQ ID NO: 916372 - DNA, 25 bp, Homo sapien
gatcactgtccgtttctcgccaacg

SEQ ID NO: 916373 - DNA, 25 bp, Homo sapien
tgaggcggaatgatcactgtccgtt

SEQ ID NO: 916374 - DNA, 25 bp, Homo sapien
gcccagatcccagaacaatactgta

SEQ ID NO: 916375 - DNA, 25 bp, Homo sapien
caatactgtaagttttgcctaaatt

SEQ ID NO: 916376 - DNA, 25 bp, Homo sapien
cagatcccagaacaatactgtaagt

SEQ ID NO: 916377 - DNA, 25 bp, Homo sapien
acaatactgtaagttttgcctaaat

SEQ ID NO: 916378 - DNA, 25 bp, Homo sapien
cccaaaacaaagccaactcagggat

SEQ ID NO: 916379 - DNA, 25 bp, Homo sapien
tggggagggagccaactcccactgc

SEQ ID NO: 916380 - DNA, 25 bp, Homo sapien
aaaacaaagccaactcagggatggc

SEQ ID NO: 916381 - DNA, 25 bp, Homo sapien
gggagggagccaactcccactgcct

SEQ ID NO: 916382 - DNA, 25 bp, Homo sapien
cagtcatccaggaacgcatgtttct

SEQ ID NO: 916383 - DNA, 25 bp, Homo sapien
tgaggccagtttaaacacgcacgcg

SEQ ID NO: 916384 - DNA, 25 bp, Homo sapien
cattctttttcctcgggtcctgtga

SEQ ID NO: 916385 - DNA, 25 bp, Homo sapien
gctgctgccttagtcctgatgaatg

SEQ ID NO: 916386 - DNA, 25 bp, Homo sapien
gaggtaatctcccttcttactcagc

SEQ ID NO: 916387 - DNA, 25 bp, Homo sapien
cattgtagtgatatttgaggtaatc

SEQ ID NO: 916388 - DNA, 25 bp, Homo sapien
ggtcccatccagaagtgaggcattg

SEQ ID NO: 916389 - DNA, 25 bp, Homo sapien
tgtggaagtcgatcacatggatgtc

SEQ ID NO: 916390 - DNA, 25 bp, Homo sapien
gtgtgggaagctaacacacatggac

SEQ ID NO: 916391 - DNA, 25 bp, Homo sapien
gtgctttaatagcagaacacaggtg

SEQ ID NO: 916392 - DNA, 25 bp, Homo sapien
aggaagtacagcctgccattggcca

SEQ ID NO: 916393 - DNA, 25 bp, Homo sapien
ttattgagtaccaggcattcttcta

SEQ ID NO: 916394 - DNA, 25 bp, Homo sapien
cactcaaaggtacagaaggacattc

SEQ ID NO: 916395 - DNA, 25 bp, Homo sapien
tgcatcaactattcctaagcgaggg

SEQ ID NO: 916396 - DNA, 25 bp, Homo sapien
cagcagtttagcactttttccccgg

SEQ ID NO: 916397 - DNA, 25 bp, Homo sapien
aaagtaatacgcatagacaatcccg

SEQ ID NO: 916398 - DNA, 25 bp, Homo sapien
gccctgcccaatgtacgtgtcaaac

SEQ ID NO: 916399 - DNA, 25 bp, Homo sapien
ccaatgcaaacaccaagtagacctt

SEQ ID NO: 916400 - DNA, 25 bp, Homo sapien
catcccaggaatcacgtagccctgc

SEQ ID NO: 916401 - DNA, 25 bp, Homo sapien
aatgtacgtgtcaaacgtgcggttc

SEQ ID NO: 916402 - DNA, 25 bp, Homo sapien
ccgatgaggcagaaagcctgtcctg

SEQ ID NO: 916403 - DNA, 25 bp, Homo sapien
tgtcctgaaagagccaatcggtcct

SEQ ID NO: 916404 - DNA, 25 bp, Homo sapien
gaaagagccaatcggtcctgccctt

SEQ ID NO: 916405 - DNA, 25 bp, Homo sapien
agcctgtcctgaaagagccaatcgg

SEQ ID NO: 916406 - DNA, 25 bp, Homo sapien
tggaggtccaataatgcaacatcaa

SEQ ID NO: 916407 - DNA, 25 bp, Homo sapien
ccagaagcgtgccattgtaatgata

SEQ ID NO: 916408 - DNA, 25 bp, Homo sapien
ccagagatgcctgaccgggaatgtc

SEQ ID NO: 916409 - DNA, 25 bp, Homo sapien
atcaaagagggtgccatccagaagc

SEQ ID NO: 916410 - DNA, 25 bp, Homo sapien
gggtagtactgcttctcttggatgt

SEQ ID NO: 916411 - DNA, 25 bp, Homo sapien
ttctcttggatgttcctgccagtgg

SEQ ID NO: 916412 - DNA, 25 bp, Homo sapien
tctcttggatgttcctgccagtggg

SEQ ID NO: 916413 - DNA, 25 bp, Homo sapien
ggtagtactgcttctcttggatgtt

SEQ ID NO: 916414 - DNA, 25 bp, Homo sapien
gtgatgatgcgcttctcacccacac

SEQ ID NO: 916415 - DNA, 25 bp, Homo sapien
aatggtgatgatgcgcttctcaccc

SEQ ID NO: 916416 - DNA, 25 bp, Homo sapien
gaggaatggtgatgatgcgcttctc

SEQ ID NO: 916417 - DNA, 25 bp, Homo sapien
ggaatggtgatgatgcgcttctcac

SEQ ID NO: 916418 - DNA, 25 bp, Homo sapien
atcagccagccaattcccacatacg

SEQ ID NO: 916419 - DNA, 25 bp, Homo sapien
aggaatcagccagccaattcccaca

SEQ ID NO: 916420 - DNA, 25 bp, Homo sapien
tccaggaatcagccagccaattccc

SEQ ID NO: 916421 - DNA, 25 bp, Homo sapien
agccagccaattcccacatacgtgt

SEQ ID NO: 916422 - DNA, 25 bp, Homo sapien
agagaagatgcaacactgaccaaaa

SEQ ID NO: 916423 - DNA, 25 bp, Homo sapien
gagaagatgcaacactgaccaaaag

SEQ ID NO: 916424 - DNA, 25 bp, Homo sapien
agaagatgcaacactgaccaaaagt

SEQ ID NO: 916425 - DNA, 25 bp, Homo sapien
cagagaagatgcaacactgaccaaa

SEQ ID NO: 916426 - DNA, 25 bp, Homo sapien
cgtcccgttgtagtggtacctcaca

SEQ ID NO: 916427 - DNA, 25 bp, Homo sapien
cagaattccaaatatccatcagaag

SEQ ID NO: 916428 - DNA, 25 bp, Homo sapien
gtacctcacaaaatcagacacctgg

SEQ ID NO: 916429 - DNA, 25 bp, Homo sapien
gaatcaaacagagttccgtccagga

SEQ ID NO: 916430 - DNA, 25 bp, Homo sapien
caagctttgggggaatcttcacgaa

SEQ ID NO: 916431 - DNA, 25 bp, Homo sapien
tccgtaggcaagctttgggggaatc

SEQ ID NO: 916432 - DNA, 25 bp, Homo sapien
gtctctcgtttacgcacatcccaac

SEQ ID NO: 916433 - DNA, 25 bp, Homo sapien
acatcccaacaagagcctggtccat

SEQ ID NO: 916434 - DNA, 25 bp, Homo sapien
aaaaaaatacttacggccaggcatg

SEQ ID NO: 916435 - DNA, 25 bp, Homo sapien
aagaaaatagagagtgtactttcac

SEQ ID NO: 916436 - DNA, 25 bp, Homo sapien
aaagaaaatagagagtgtactttca

SEQ ID NO: 916437 - DNA, 25 bp, Homo sapien
ccaaagcccaacacccccaagtgtg

SEQ ID NO: 916438 - DNA, 25 bp, Homo sapien
caaagcccaacacccccaagtgtgc

SEQ ID NO: 916439 - DNA, 25 bp, Homo sapien
gggactgatgactgcatgatcttct

SEQ ID NO: 916440 - DNA, 25 bp, Homo sapien
tgggactgatgactgcatgatcttc

SEQ ID NO: 916441 - DNA, 25 bp, Homo sapien
agctgggactgccaaagcggccgaa

SEQ ID NO: 916442 - DNA, 25 bp, Homo sapien
gcaggagctgggactgccaaagcgg

SEQ ID NO: 916443 - DNA, 25 bp, Homo sapien
gggactgccaaagcggccgaaaggc

SEQ ID NO: 916444 - DNA, 25 bp, Homo sapien
aggagctgggactgccaaagcggcc

SEQ ID NO: 916445 - DNA, 25 bp, Homo sapien
gaggctgacttgaggaggcccggcc

SEQ ID NO: 916446 - DNA, 25 bp, Homo sapien
gacattgttgggaggccggagtcgg

SEQ ID NO: 916447 - DNA, 25 bp, Homo sapien
ccaaagacattgttgggaggccgga

SEQ ID NO: 916448 - DNA, 25 bp, Homo sapien
aggctgacttgaggaggcccggcct

SEQ ID NO: 916449 - DNA, 25 bp, Homo sapien
caggccaccgtgaggggggaactgg

SEQ ID NO: 916450 - DNA, 25 bp, Homo sapien
tgaggggggaactgggccgcacgcg

SEQ ID NO: 916451 - DNA, 25 bp, Homo sapien
cgtgaggggggaactgggccgcacg

SEQ ID NO: 916452 - DNA, 25 bp, Homo sapien
tcaacaggccaccgtgaggggggaa

SEQ ID NO: 916453 - DNA, 25 bp, Homo sapien
ggaggctgccgtgggggcgagagct

SEQ ID NO: 916454 - DNA, 25 bp, Homo sapien
gaggctgttctacagccagagctgg

SEQ ID NO: 916455 - DNA, 25 bp, Homo sapien
cccgggaggctgccgtgggggcgag

SEQ ID NO: 916456 - DNA, 25 bp, Homo sapien
gcagaggctgttctacagccagagc

SEQ ID NO: 916457 - DNA, 25 bp, Homo sapien
gaggcagggccgggagacgccgact

SEQ ID NO: 916458 - DNA, 25 bp, Homo sapien
agggccgggagacgccgacttcagg

SEQ ID NO: 916459 - DNA, 25 bp, Homo sapien
gcagggccgggagacgccgacttca

SEQ ID NO: 916460 - DNA, 25 bp, Homo sapien
aggcagggccgggagacgccgactt

SEQ ID NO: 916461 - DNA, 25 bp, Homo sapien
caggcgctgagtccaaaaaggttgt

SEQ ID NO: 916462 - DNA, 25 bp, Homo sapien
tccaaaaaggttgttgggaggcagc

SEQ ID NO: 916463 - DNA, 25 bp, Homo sapien
atgggcaggcgctgagtccaaaaag

SEQ ID NO: 916464 - DNA, 25 bp, Homo sapien
ggcaggcgctgagtccaaaaaggtt

SEQ ID NO: 916465 - DNA, 25 bp, Homo sapien
gaggctgttctacagccaaagctgg

SEQ ID NO: 916466 - DNA, 25 bp, Homo sapien
ggctgttctacagccaaagctgggc

SEQ ID NO: 916467 - DNA, 25 bp, Homo sapien
gaggcagtaggtgggcccgaagagc

SEQ ID NO: 916468 - DNA, 25 bp, Homo sapien
tgcagaggctgttctacagccaaag

SEQ ID NO: 916469 - DNA, 25 bp, Homo sapien
agggccgggagacgccgacttcagg

SEQ ID NO: 916470 - DNA, 25 bp, Homo sapien
gcagggccgggagacgccgacttca

SEQ ID NO: 916471 - DNA, 25 bp, Homo sapien
gaggcagggccgggagacgccgact

SEQ ID NO: 916472 - DNA, 25 bp, Homo sapien
aggcagggccgggagacgccgactt

SEQ ID NO: 916473 - DNA, 25 bp, Homo sapien
aaggccgccaggagatgggcaggcg

SEQ ID NO: 916474 - DNA, 25 bp, Homo sapien
gccaggagatgggcaggcgctgagt

SEQ ID NO: 916475 - DNA, 25 bp, Homo sapien
gccgccaggagatgggcaggcgctg

SEQ ID NO: 916476 - DNA, 25 bp, Homo sapien
caaagaggttgttgggaggcagcag

SEQ ID NO: 916477 - DNA, 25 bp, Homo sapien
gcccggagaggacgccgggaggctg

SEQ ID NO: 916478 - DNA, 25 bp, Homo sapien
agaggacgccgggaggctgcaagtg

SEQ ID NO: 916479 - DNA, 25 bp, Homo sapien
tggagacgcagccgggaggaagagc

SEQ ID NO: 916480 - DNA, 25 bp, Homo sapien
ccggagaggacgccgggaggctgca

SEQ ID NO: 916481 - DNA, 25 bp, Homo sapien
ggccctggacaggccgacttgacga

SEQ ID NO: 916482 - DNA, 25 bp, Homo sapien
gacaggccgacttgacgacagtctg

SEQ ID NO: 916483 - DNA, 25 bp, Homo sapien
aggccgacttgacgacagtctgggc

SEQ ID NO: 916484 - DNA, 25 bp, Homo sapien
cctggacaggccgacttgacgacag

SEQ ID NO: 916485 - DNA, 25 bp, Homo sapien
aggatgagctcgtcccggagatgcc

SEQ ID NO: 916486 - DNA, 25 bp, Homo sapien
cccggagatgccgagttaaggacat

SEQ ID NO: 916487 - DNA, 25 bp, Homo sapien
gagctcgtcccggagatgccgagtt

SEQ ID NO: 916488 - DNA, 25 bp, Homo sapien
tgggaggatgagctcgtcccggaga

SEQ ID NO: 916489 - DNA, 25 bp, Homo sapien
tgaggcaagagctggatgtagacag

SEQ ID NO: 916490 - DNA, 25 bp, Homo sapien
aggcaagagctggatgtagacaggc

SEQ ID NO: 916491 - DNA, 25 bp, Homo sapien
caagagctggatgtagacaggccag

SEQ ID NO: 916492 - DNA, 25 bp, Homo sapien
gcaagagctggatgtagacaggcca

SEQ ID NO: 916493 - DNA, 25 bp, Homo sapien
taaaggtccctcagcaatataactc

SEQ ID NO: 916494 - DNA, 25 bp, Homo sapien
taaaagtcattgtgggtcaggcaca

SEQ ID NO: 916495 - DNA, 25 bp, Homo sapien
tctgtgccctcaaaaaccctatgga

SEQ ID NO: 916496 - DNA, 25 bp, Homo sapien
tagtgtacgtcctaagtgccaagat

SEQ ID NO: 916497 - DNA, 25 bp, Homo sapien
agctgagtctgcagtgcttcggagg

SEQ ID NO: 916498 - DNA, 25 bp, Homo sapien
agtctgcagtgcttcggaggcagct

SEQ ID NO: 916499 - DNA, 25 bp, Homo sapien
ctgagtctgcagtgcttcggaggca

SEQ ID NO: 916500 - DNA, 25 bp, Homo sapien
tctgcagtgcttcggaggcagcttt

SEQ ID NO: 916501 - DNA, 25 bp, Homo sapien
ttgcattcagcaaggcctcccgtgg

SEQ ID NO: 916502 - DNA, 25 bp, Homo sapien
cacaggcccctgatgcttgcattca

SEQ ID NO: 916503 - DNA, 25 bp, Homo sapien
gcccctgatgcttgcattcagcaag

SEQ ID NO: 916504 - DNA, 25 bp, Homo sapien
aggcccctgatgcttgcattcagca

SEQ ID NO: 916505 - DNA, 25 bp, Homo sapien
gtactccatctccttcctgacccct

SEQ ID NO: 916506 - DNA, 25 bp, Homo sapien
actccatctccttcctgacccctcc

SEQ ID NO: 916507 - DNA, 25 bp, Homo sapien
tggtactccatctccttcctgaccc

SEQ ID NO: 916508 - DNA, 25 bp, Homo sapien
ctggtactccatctccttcctgacc

SEQ ID NO: 916509 - DNA, 25 bp, Homo sapien
cagccagatcctgggcgagtggtgg

SEQ ID NO: 916510 - DNA, 25 bp, Homo sapien
gtcagccagatcctgggcgagtggt

SEQ ID NO: 916511 - DNA, 25 bp, Homo sapien
cctgggcgagtggtggtacactctg

SEQ ID NO: 916512 - DNA, 25 bp, Homo sapien
tgggcgagtggtggtacactctggg

SEQ ID NO: 916513 - DNA, 25 bp, Homo sapien
ctttttcagcttctttaaatgttgc

SEQ ID NO: 916514 - DNA, 25 bp, Homo sapien
ttttcagcttctttaaatgttgctt

SEQ ID NO: 916515 - DNA, 25 bp, Homo sapien
tcagcttctttaaatgttgcttctt

SEQ ID NO: 916516 - DNA, 25 bp, Homo sapien
gcttctttaaatgttgcttctttct

SEQ ID NO: 916517 - DNA, 25 bp, Homo sapien
aactcttgtcttttggcttcaaaga

SEQ ID NO: 916518 - DNA, 25 bp, Homo sapien
ttccctctgacattgatcatagaac

SEQ ID NO: 916519 - DNA, 25 bp, Homo sapien
ccctctgacattgatcatagaactc

SEQ ID NO: 916520 - DNA, 25 bp, Homo sapien
ttcttccctctgacattgatcatag

SEQ ID NO: 916521 - DNA, 25 bp, Homo sapien
tggctggttgtttggacccacatct

SEQ ID NO: 916522 - DNA, 25 bp, Homo sapien
cttaacgaagtcacagtgattttca

SEQ ID NO: 916523 - DNA, 25 bp, Homo sapien
aagtcacagtgattttcattttcca

SEQ ID NO: 916524 - DNA, 25 bp, Homo sapien
gaagtcacagtgattttcattttcc

SEQ ID NO: 916525 - DNA, 25 bp, Homo sapien
aacgaagtcacagtgattttcattt

SEQ ID NO: 916526 - DNA, 25 bp, Homo sapien
cagggatcatgaagaccctcgagtc

SEQ ID NO: 916527 - DNA, 25 bp, Homo sapien
gatcatgaagaccctcgagtcaaac

SEQ ID NO: 916528 - DNA, 25 bp, Homo sapien
gggatcatgaagaccctcgagtcaa

SEQ ID NO: 916529 - DNA, 25 bp, Homo sapien
ggatcatgaagaccctcgagtcaaa

SEQ ID NO: 916530 - DNA, 25 bp, Homo sapien
ccaaaactagggtaacagtgatagc

SEQ ID NO: 916531 - DNA, 25 bp, Homo sapien
gacacatccaataagcccaaaacta

SEQ ID NO: 916532 - DNA, 25 bp, Homo sapien
cagtgatagcacagcttgacctttc

SEQ ID NO: 916533 - DNA, 25 bp, Homo sapien
tggagttggcttcactatggacaca

SEQ ID NO: 916534 - DNA, 25 bp, Homo sapien
gagaagtagttgagccattcatgcc

SEQ ID NO: 916535 - DNA, 25 bp, Homo sapien
ggtgtttgaatagctcccgcggtga

SEQ ID NO: 916536 - DNA, 25 bp, Homo sapien
ccactttgcagtcgaagtctttaag

SEQ ID NO: 916537 - DNA, 25 bp, Homo sapien
ccattcatctttgcgcagtgccttg

SEQ ID NO: 916538 - DNA, 25 bp, Homo sapien
caactactgccctttctaggagcca

SEQ ID NO: 916539 - DNA, 25 bp, Homo sapien
ccacccaactactgccctttctagg

SEQ ID NO: 916540 - DNA, 25 bp, Homo sapien
taaggagttggtcttggccacccaa

SEQ ID NO: 916541 - DNA, 25 bp, Homo sapien
ttggccacccaactactgccctttc

SEQ ID NO: 916542 - DNA, 25 bp, Homo sapien
aaagcctgccctctgtcatttttac

SEQ ID NO: 916543 - DNA, 25 bp, Homo sapien
attccaaagcctgccctctgtcatt

SEQ ID NO: 916544 - DNA, 25 bp, Homo sapien
tcattccaaagcctgccctctgtca

SEQ ID NO: 916545 - DNA, 25 bp, Homo sapien
ccaaagcctgccctctgtcattttt

SEQ ID NO: 916546 - DNA, 25 bp, Homo sapien
tagtgacggcctctgaccatccttt

SEQ ID NO: 916547 - DNA, 25 bp, Homo sapien
aagggtagtgacggcctctgaccat

SEQ ID NO: 916548 - DNA, 25 bp, Homo sapien
agggtagtgacggcctctgaccatc

SEQ ID NO: 916549 - DNA, 25 bp, Homo sapien
ggtagtgacggcctctgaccatcct

SEQ ID NO: 916550 - DNA, 25 bp, Homo sapien
cacttcatctgtactccctaccaca

SEQ ID NO: 916551 - DNA, 25 bp, Homo sapien
tactccctaccacagcaaagggtaa

SEQ ID NO: 916552 - DNA, 25 bp, Homo sapien
atctgtactccctaccacagcaaag

SEQ ID NO: 916553 - DNA, 25 bp, Homo sapien
tgtactccctaccacagcaaagggt

SEQ ID NO: 916554 - DNA, 25 bp, Homo sapien
aggagttcgcttgagcagcagtttc

SEQ ID NO: 916555 - DNA, 25 bp, Homo sapien
tgaggagttcgcttgagcagcagtt

SEQ ID NO: 916556 - DNA, 25 bp, Homo sapien
ggagttcgcttgagcagcagtttct

SEQ ID NO: 916557 - DNA, 25 bp, Homo sapien
gaggagttcgcttgagcagcagttt

SEQ ID NO: 916558 - DNA, 25 bp, Homo sapien
atcttattcttaaacgtctgtaaat

SEQ ID NO: 916559 - DNA, 25 bp, Homo sapien
tatcttattcttaaacgtctgtaaa

SEQ ID NO: 916560 - DNA, 25 bp, Homo sapien
tcatggtactcaaacaaggaacgtt

SEQ ID NO: 916561 - DNA, 25 bp, Homo sapien
cacgtggacgcgagaatcatggtac

SEQ ID NO: 916562 - DNA, 25 bp, Homo sapien
gtcctgtaggtgaaatgaagtaaag

SEQ ID NO: 916563 - DNA, 25 bp, Homo sapien
tgaagataggcctcaaattgggcat

SEQ ID NO: 916564 - DNA, 25 bp, Homo sapien
tatttgatcaccataccctactgtc

SEQ ID NO: 916565 - DNA, 25 bp, Homo sapien
cctactgtctccacaacagtcaatt

SEQ ID NO: 916566 - DNA, 25 bp, Homo sapien
cacaacagtcaatttcaactgaaca

SEQ ID NO: 916567 - DNA, 25 bp, Homo sapien
tctttgtctatttgatcaccatacc

SEQ ID NO: 916568 - DNA, 25 bp, Homo sapien
aaagtgaatccttgtcggatagatc

SEQ ID NO: 916569 - DNA, 25 bp, Homo sapien
aatgtccaatcgtagttaaacaacg

SEQ ID NO: 916570 - DNA, 25 bp, Homo sapien
gctcaccaactgattgggcaaacat

SEQ ID NO: 916571 - DNA, 25 bp, Homo sapien
caaaatgtccaatcgtagttaaaca

SEQ ID NO: 916572 - DNA, 25 bp, Homo sapien
ccagtctggccagcgtggtgaaacc

SEQ ID NO: 916573 - DNA, 25 bp, Homo sapien
gtctggccagcgtggtgaaacccgg

SEQ ID NO: 916574 - DNA, 25 bp, Homo sapien
gaccagtctggccagcgtggtgaaa

SEQ ID NO: 916575 - DNA, 25 bp, Homo sapien
agtctggccagcgtggtgaaacccg

SEQ ID NO: 916576 - DNA, 25 bp, Homo sapien
gcaggtatttgtgtgggcatagcca

SEQ ID NO: 916577 - DNA, 25 bp, Homo sapien
tttctgccatgctacactaaaagag

SEQ ID NO: 916578 - DNA, 25 bp, Homo sapien
ttgttctttctgccatgctacacta

SEQ ID NO: 916579 - DNA, 25 bp, Homo sapien
ttgtgtgggcatagccattgttctt

SEQ ID NO: 916580 - DNA, 25 bp, Homo sapien
tttcccagggattcagctgtgcagc

SEQ ID NO: 916581 - DNA, 25 bp, Homo sapien
attcagctgtgcagcagacacaggt

SEQ ID NO: 916582 - DNA, 25 bp, Homo sapien
tcccagggattcagctgtgcagcag

SEQ ID NO: 916583 - DNA, 25 bp, Homo sapien
ggattcagctgtgcagcagacacag

SEQ ID NO: 916584 - DNA, 25 bp, Homo sapien
gaaagaattgctggagagattgaca

SEQ ID NO: 916585 - DNA, 25 bp, Homo sapien
cacacagaaagaattgctggagaga

SEQ ID NO: 916586 - DNA, 25 bp, Homo sapien
agaattgctggagagattgacatac

SEQ ID NO: 916587 - DNA, 25 bp, Homo sapien
cacagaaagaattgctggagagatt

SEQ ID NO: 916588 - DNA, 25 bp, Homo sapien
tcagtatcagccacagagtaggtgt

SEQ ID NO: 916589 - DNA, 25 bp, Homo sapien
tcagccacagagtaggtgtcatcat

SEQ ID NO: 916590 - DNA, 25 bp, Homo sapien
ggatggcaaggaacaaagaagggca

SEQ ID NO: 916591 - DNA, 25 bp, Homo sapien
agaagggcagaagctatcagtatca

SEQ ID NO: 916592 - DNA, 25 bp, Homo sapien
tctgtggataactcagtggtagtaa

SEQ ID NO: 916593 - DNA, 25 bp, Homo sapien
aaacagtcggaacatattccgatgg

SEQ ID NO: 916594 - DNA, 25 bp, Homo sapien
tctgtctgtggataactcagtggta

SEQ ID NO: 916595 - DNA, 25 bp, Homo sapien
tgcataattgtcaaaaacagtcgga

SEQ ID NO: 916596 - DNA, 25 bp, Homo sapien
ttcaaatctgatgttgacctcagct

SEQ ID NO: 916597 - DNA, 25 bp, Homo sapien
tggagacatgttttaccaacagcac

SEQ ID NO: 916598 - DNA, 25 bp, Homo sapien
tgctgaaatagttttgtatccactt

SEQ ID NO: 916599 - DNA, 25 bp, Homo sapien
ccacaacaacacactaattgtctgc

SEQ ID NO: 916600 - DNA, 25 bp, Homo sapien
cctaaagaatgtatttgacgaagca

SEQ ID NO: 916601 - DNA, 25 bp, Homo sapien
cgcatagtcccgatgaaaaacagac

SEQ ID NO: 916602 - DNA, 25 bp, Homo sapien
ttctaattggcagggacgaagggac

SEQ ID NO: 916603 - DNA, 25 bp, Homo sapien
gggtccgcatagtcccgatgaaaaa

SEQ ID NO: 916604 - DNA, 25 bp, Homo sapien
catggagatggacagtccaacgctt

SEQ ID NO: 916605 - DNA, 25 bp, Homo sapien
tgaggattgcgatgaaggaagcagg

SEQ ID NO: 916606 - DNA, 25 bp, Homo sapien
tgaggccagcgtcttgcgccgccat

SEQ ID NO: 916607 - DNA, 25 bp, Homo sapien
aggagccccggcgatgaggattgcg

SEQ ID NO: 916608 - DNA, 25 bp, Homo sapien
ccagcgcatgcgtattggggatctg

SEQ ID NO: 916609 - DNA, 25 bp, Homo sapien
caaaatggcgttgatggtaatgaac

SEQ ID NO: 916610 - DNA, 25 bp, Homo sapien
tacacaatcaaaatggcgttgatgg

SEQ ID NO: 916611 - DNA, 25 bp, Homo sapien
aaatggcgttgatggtaatgaactc

SEQ ID NO: 916612 - DNA, 25 bp, Homo sapien
aatcaaaatggcgttgatggtaatg

SEQ ID NO: 916613 - DNA, 25 bp, Homo sapien
aggaagatgtaaatgagcaacctca

SEQ ID NO: 916614 - DNA, 25 bp, Homo sapien
ggaagatgtaaatgagcaacctcac

SEQ ID NO: 916615 - DNA, 25 bp, Homo sapien
gtgatgtcaaaatcttccctgagac

SEQ ID NO: 916616 - DNA, 25 bp, Homo sapien
tgtgatgtcaaaatcttccctgaga

SEQ ID NO: 916617 - DNA, 25 bp, Homo sapien
ctggtctgtgatgtcaaaatcttcc

SEQ ID NO: 916618 - DNA, 25 bp, Homo sapien
gtctgtgatgtcaaaatcttccctg

SEQ ID NO: 916619 - DNA, 25 bp, Homo sapien
ctaacagcaggtccgtgtgaatgaa

SEQ ID NO: 916620 - DNA, 25 bp, Homo sapien
aatgaagcctcgagcaaacaggaga

SEQ ID NO: 916621 - DNA, 25 bp, Homo sapien
caggtccgtgtgaatgaagcctcga

SEQ ID NO: 916622 - DNA, 25 bp, Homo sapien
tccgtgtgaatgaagcctcgagcaa

SEQ ID NO: 916623 - DNA, 25 bp, Homo sapien
ggagtgactgttgcccataaggtac

SEQ ID NO: 916624 - DNA, 25 bp, Homo sapien
taaggtactggacatcaactttcaa

SEQ ID NO: 916625 - DNA, 25 bp, Homo sapien
tcatgtagaagatagcagagctttg

SEQ ID NO: 916626 - DNA, 25 bp, Homo sapien
gtgcatctgctgactttcatgtaga

SEQ ID NO: 916627 - DNA, 25 bp, Homo sapien
ctctccaccgaaacatcacagtggt

SEQ ID NO: 916628 - DNA, 25 bp, Homo sapien
ccgaaacatcacagtggtgtaaaga

SEQ ID NO: 916629 - DNA, 25 bp, Homo sapien
ctccaccgaaacatcacagtggtgt

SEQ ID NO: 916630 - DNA, 25 bp, Homo sapien
ccaccgaaacatcacagtggtgtaa

SEQ ID NO: 916631 - DNA, 25 bp, Homo sapien
ctaaggagatgcacggcctacgaga

SEQ ID NO: 916632 - DNA, 25 bp, Homo sapien
tagtgtgggactgagccaatgcgta

SEQ ID NO: 916633 - DNA, 25 bp, Homo sapien
catagtcttggcggaggtgagtctc

SEQ ID NO: 916634 - DNA, 25 bp, Homo sapien
aatgcgtacggcgtgacgccatccc

SEQ ID NO: 916635 - DNA, 25 bp, Homo sapien
ctgagagcgaatcgcttcgtctgac

SEQ ID NO: 916636 - DNA, 25 bp, Homo sapien
tgagagccctgagagcgaatcgctt

SEQ ID NO: 916637 - DNA, 25 bp, Homo sapien
cctcgcgtgagagccctgagagcga

SEQ ID NO: 916638 - DNA, 25 bp, Homo sapien
ggacccaaggcaccctcgcgtgaga

SEQ ID NO: 916639 - DNA, 25 bp, Homo sapien
gggcgagggcacgaatcaccccaac

SEQ ID NO: 916640 - DNA, 25 bp, Homo sapien
caaaagcagcccaagtcatccgtcg

SEQ ID NO: 916641 - DNA, 25 bp, Homo sapien
caacctttccgaagcctggtggaat

SEQ ID NO: 916642 - DNA, 25 bp, Homo sapien
ccaagtcatccgtcgctgggccggg

SEQ ID NO: 916643 - DNA, 25 bp, Homo sapien
tgggaacacaggagcgtaccactac

SEQ ID NO: 916644 - DNA, 25 bp, Homo sapien
cacaggagcgtaccactacacttgg

SEQ ID NO: 916645 - DNA, 25 bp, Homo sapien
gggaacacaggagcgtaccactaca

SEQ ID NO: 916646 - DNA, 25 bp, Homo sapien
gaacacaggagcgtaccactacact

SEQ ID NO: 916647 - DNA, 25 bp, Homo sapien
tgcatgtaatgaccagccactggtc

SEQ ID NO: 916648 - DNA, 25 bp, Homo sapien
gagccactgcatgtaatgaccagcc

SEQ ID NO: 916649 - DNA, 25 bp, Homo sapien
gccactgcatgtaatgaccagccac

SEQ ID NO: 916650 - DNA, 25 bp, Homo sapien
actgcatgtaatgaccagccactgg

SEQ ID NO: 916651 - DNA, 25 bp, Homo sapien
aggctccggtgagcagcgccgccct

SEQ ID NO: 916652 - DNA, 25 bp, Homo sapien
agccgaggcgccgagcaagatggcg

SEQ ID NO: 916653 - DNA, 25 bp, Homo sapien
agatggcggcgcgagtgctgcgcgc

SEQ ID NO: 916654 - DNA, 25 bp, Homo sapien
tcgggctcaaggtcacggaggggac

SEQ ID NO: 916655 - DNA, 25 bp, Homo sapien
tcgccggaggctgttccaagcctga

SEQ ID NO: 916656 - DNA, 25 bp, Homo sapien
cgtctgccgaggacgttggtgaccc

SEQ ID NO: 916657 - DNA, 25 bp, Homo sapien
ccgaggacgttggtgaccctggtct

SEQ ID NO: 916658 - DNA, 25 bp, Homo sapien
ccggacgccgtctgctgggtcctcg

SEQ ID NO: 916659 - DNA, 25 bp, Homo sapien
agttgtgatcgtgtttgtctgtctg

SEQ ID NO: 916660 - DNA, 25 bp, Homo sapien
tgtttgagttgtgatcgtgtttgtc

SEQ ID NO: 916661 - DNA, 25 bp, Homo sapien
cttgtctgtttgagttgtgatcgtg

SEQ ID NO: 916662 - DNA, 25 bp, Homo sapien
aagagcttgtctgtttgagttgtga

SEQ ID NO: 916663 - DNA, 25 bp, Homo sapien
caggcccaagccagatcttatcatt

SEQ ID NO: 916664 - DNA, 25 bp, Homo sapien
tcactgtcagttaagaacccaggcc

SEQ ID NO: 916665 - DNA, 25 bp, Homo sapien
tgcgactcgaatgactagataggtt

SEQ ID NO: 916666 - DNA, 25 bp, Homo sapien
tatcatttgggcagccgttggcata

SEQ ID NO: 916667 - DNA, 25 bp, Homo sapien
agttcacaatgttaaaccggaatgc

SEQ ID NO: 916668 - DNA, 25 bp, Homo sapien
cagttcacaatgttaaaccggaatg

SEQ ID NO: 916669 - DNA, 25 bp, Homo sapien
tcagttcacaatgttaaaccggaat

SEQ ID NO: 916670 - DNA, 25 bp, Homo sapien
ggtgtgtataccaaactatccttta

SEQ ID NO: 916671 - DNA, 25 bp, Homo sapien
cacttgatagcatagagagagatct

SEQ ID NO: 916672 - DNA, 25 bp, Homo sapien
gaagctgaacattcagaggctctta

SEQ ID NO: 916673 - DNA, 25 bp, Homo sapien
tgactttatttgttagttaattcca

SEQ ID NO: 916674 - DNA, 25 bp, Homo sapien
actccgagtaagtacagaaatataa

SEQ ID NO: 916675 - DNA, 25 bp, Homo sapien
caactccgagtaagtacagaaatat

SEQ ID NO: 916676 - DNA, 25 bp, Homo sapien
tccgagtaagtacagaaatataagt

SEQ ID NO: 916677 - DNA, 25 bp, Homo sapien
ccgagtaagtacagaaatataagtt

SEQ ID NO: 916678 - DNA, 25 bp, Homo sapien
tgaggactagaaagaaagccccaca

SEQ ID NO: 916679 - DNA, 25 bp, Homo sapien
tgttgtggttaaaggagagcagcta

SEQ ID NO: 916680 - DNA, 25 bp, Homo sapien
cctaaagtgcaggataaggtacaat

SEQ ID NO: 916681 - DNA, 25 bp, Homo sapien
tagaaattttcctactgaggactag

SEQ ID NO: 916682 - DNA, 25 bp, Homo sapien
tttcggttatgaaatttcctgctgt

SEQ ID NO: 916683 - DNA, 25 bp, Homo sapien
ttcggttatgaaatttcctgctgtg

SEQ ID NO: 916684 - DNA, 25 bp, Homo sapien
cgcgctcggccccagtttttctctt

SEQ ID NO: 916685 - DNA, 25 bp, Homo sapien
ttttcggttatgaaatttcctgctg

SEQ ID NO: 916686 - DNA, 25 bp, Homo sapien
cgaagccgtcggaggattcttctct

SEQ ID NO: 916687 - DNA, 25 bp, Homo sapien
caatccgcttcagacaggatggtaa

SEQ ID NO: 916688 - DNA, 25 bp, Homo sapien
gggctcgtgcaatccgcttcagaca

SEQ ID NO: 916689 - DNA, 25 bp, Homo sapien
acaggatggtaacgaagccgtcgga

SEQ ID NO: 916690 - DNA, 25 bp, Homo sapien
ggggcttcaccgctggaacacgctc

SEQ ID NO: 916691 - DNA, 25 bp, Homo sapien
cagctctcccattgcttgccctgct

SEQ ID NO: 916692 - DNA, 25 bp, Homo sapien
tatacactgtgtccttgtatgggcc

SEQ ID NO: 916693 - DNA, 25 bp, Homo sapien
tgtatgggccacggcactctccaca

SEQ ID NO: 916694 - DNA, 25 bp, Homo sapien
cttcagaccagggaagacatacgga

SEQ ID NO: 916695 - DNA, 25 bp, Homo sapien
gaagacatacggaatgcagcatggc

SEQ ID NO: 916696 - DNA, 25 bp, Homo sapien
gaccagggaagacatacggaatgca

SEQ ID NO: 916697 - DNA, 25 bp, Homo sapien
gacatacggaatgcagcatggcaca

SEQ ID NO: 916698 - DNA, 25 bp, Homo sapien
gcagtaaccctgatcttgttttcag

SEQ ID NO: 916699 - DNA, 25 bp, Homo sapien
acattctcggcaatctgtctgttag

SEQ ID NO: 916700 - DNA, 25 bp, Homo sapien
aatctgtctgttagtgtcatttacc

SEQ ID NO: 916701 - DNA, 25 bp, Homo sapien
aagtaacaagtgcagtaaccctgat

SEQ ID NO: 916702 - DNA, 25 bp, Homo sapien
tatagcttgtgagaaacctcttttc

SEQ ID NO: 916703 - DNA, 25 bp, Homo sapien
cagttggactgattgtgacagtgcc

SEQ ID NO: 916704 - DNA, 25 bp, Homo sapien
ttacataatcacaagaaaggaaaga

SEQ ID NO: 916705 - DNA, 25 bp, Homo sapien
cactgaggttttaagctgctgtata

SEQ ID NO: 916706 - DNA, 25 bp, Homo sapien
tgtctgccccacaatcaagaatgta

SEQ ID NO: 916707 - DNA, 25 bp, Homo sapien
taaagtgtgaataaatctcatatca

SEQ ID NO: 916708 - DNA, 25 bp, Homo sapien
caagaatgtatgtgtaaagtgtgaa

SEQ ID NO: 916709 - DNA, 25 bp, Homo sapien
tgttaccatgtgaaagtcctgttga

SEQ ID NO: 916710 - DNA, 25 bp, Homo sapien
ctttatgtgattttcgaatatcttt

SEQ ID NO: 916711 - DNA, 25 bp, Homo sapien
tcctcttaacttgtcctcccacagt

SEQ ID NO: 916712 - DNA, 25 bp, Homo sapien
tataggctgttaggagttattaata

SEQ ID NO: 916713 - DNA, 25 bp, Homo sapien
acaggcctgagcccaaatatccatt

SEQ ID NO: 916714 - DNA, 25 bp, Homo sapien
caaagtagagtcttaagcctgtttc

SEQ ID NO: 916715 - DNA, 25 bp, Homo sapien
gggctatttatgcttcaacacggta

SEQ ID NO: 916716 - DNA, 25 bp, Homo sapien
tgaggacattgtacccagcactaag

SEQ ID NO: 916717 - DNA, 25 bp, Homo sapien
caacacggtacctgaaatattgggt

SEQ ID NO: 916718 - DNA, 25 bp, Homo sapien
gaaggctgccgaatccgtatttcta

SEQ ID NO: 916719 - DNA, 25 bp, Homo sapien
gccgaatccgtatttctaagagtaa

SEQ ID NO: 916720 - DNA, 25 bp, Homo sapien
atccgtatttctaagagtaaaggtg

SEQ ID NO: 916721 - DNA, 25 bp, Homo sapien
gctgccgaatccgtatttctaagag

SEQ ID NO: 916722 - DNA, 25 bp, Homo sapien
ctctctaggacattggctgggcgcg

SEQ ID NO: 916723 - DNA, 25 bp, Homo sapien
tctctaggacattggctgggcgcgg

SEQ ID NO: 916724 - DNA, 25 bp, Homo sapien
aaaaagcaatcttctaggattccta

SEQ ID NO: 916725 - DNA, 25 bp, Homo sapien
gcaatcttctaggattcctaactgt

SEQ ID NO: 916726 - DNA, 25 bp, Homo sapien
aaagcaatcttctaggattcctaac

SEQ ID NO: 916727 - DNA, 25 bp, Homo sapien
aaaaaagcaatcttctaggattcct

SEQ ID NO: 916728 - DNA, 25 bp, Homo sapien
cagcagctctacaaaatcagtgata

SEQ ID NO: 916729 - DNA, 25 bp, Homo sapien
ccatttggcgttatccttgacttgt

SEQ ID NO: 916730 - DNA, 25 bp, Homo sapien
catttcctccaaatccaatgaaagc

SEQ ID NO: 916731 - DNA, 25 bp, Homo sapien
gacttgttgcctgatcacatttcct

SEQ ID NO: 916732 - DNA, 25 bp, Homo sapien
agcaggaggacaggcttccatatct

SEQ ID NO: 916733 - DNA, 25 bp, Homo sapien
gctgcgtctcatcaaaacctgcata

SEQ ID NO: 916734 - DNA, 25 bp, Homo sapien
ttttccaccagattcagctgttggc

SEQ ID NO: 916735 - DNA, 25 bp, Homo sapien
ggaggacaggcttccatatctgtgg

SEQ ID NO: 916736 - DNA, 25 bp, Homo sapien
tgaacatttcgctcctgtaggcgac

SEQ ID NO: 916737 - DNA, 25 bp, Homo sapien
cctgaacatttcgctcctgtaggcg

SEQ ID NO: 916738 - DNA, 25 bp, Homo sapien
acctgaacatttcgctcctgtaggc

SEQ ID NO: 916739 - DNA, 25 bp, Homo sapien
ctgaacatttcgctcctgtaggcga

SEQ ID NO: 916740 - DNA, 25 bp, Homo sapien
tgaggtgggaaaattgatcatttga

SEQ ID NO: 916741 - DNA, 25 bp, Homo sapien
aattgatcatttgagcccacaagtt

SEQ ID NO: 916742 - DNA, 25 bp, Homo sapien
tattttaaaggctgggtatagtggc

SEQ ID NO: 916743 - DNA, 25 bp, Homo sapien
gtgggaaaattgatcatttgagccc

SEQ ID NO: 916744 - DNA, 25 bp, Homo sapien
gagcagctttgaaaggcactgcccc

SEQ ID NO: 916745 - DNA, 25 bp, Homo sapien
agcagctttgaaaggcactgccccg

SEQ ID NO: 916746 - DNA, 25 bp, Homo sapien
tctgacaccgcgtcctcaacgccac

SEQ ID NO: 916747 - DNA, 25 bp, Homo sapien
tttctgacaccgcgtcctcaacgcc

SEQ ID NO: 916748 - DNA, 25 bp, Homo sapien
atttctgacaccgcgtcctcaacgc

SEQ ID NO: 916749 - DNA, 25 bp, Homo sapien
ttctgacaccgcgtcctcaacgcca

SEQ ID NO: 916750 - DNA, 25 bp, Homo sapien
tctgatgaccgtgctgtcaacatca

SEQ ID NO: 916751 - DNA, 25 bp, Homo sapien
cttcttctctgatgaccgtgctgtc

SEQ ID NO: 916752 - DNA, 25 bp, Homo sapien
tcttctctgatgaccgtgctgtcaa

SEQ ID NO: 916753 - DNA, 25 bp, Homo sapien
gatgaccgtgctgtcaacatcaaaa

SEQ ID NO: 916754 - DNA, 25 bp, Homo sapien
tgtagtgcaagtccactaagaatgg

SEQ ID NO: 916755 - DNA, 25 bp, Homo sapien
atggagaatgaaccataggtgagtg

SEQ ID NO: 916756 - DNA, 25 bp, Homo sapien
gtgcaagtccactaagaatggagaa

SEQ ID NO: 916757 - DNA, 25 bp, Homo sapien
accataggtgagtgaagaggaagcc

SEQ ID NO: 916758 - DNA, 25 bp, Homo sapien
atttctaggagacgacactcttctg

SEQ ID NO: 916759 - DNA, 25 bp, Homo sapien
ttctaggagacgacactcttctgtt

SEQ ID NO: 916760 - DNA, 25 bp, Homo sapien
tttctaggagacgacactcttctgt

SEQ ID NO: 916761 - DNA, 25 bp, Homo sapien
aggagacgacactcttctgttcctt

SEQ ID NO: 916762 - DNA, 25 bp, Homo sapien
tagataaaaacgcagcacaaagttc

SEQ ID NO: 916763 - DNA, 25 bp, Homo sapien
gaaagacctgtggattctgcaagag

SEQ ID NO: 916764 - DNA, 25 bp, Homo sapien
aaagacctgtggattctgcaagagc

SEQ ID NO: 916765 - DNA, 25 bp, Homo sapien
aaacgcagcacaaagttctgtctac

SEQ ID NO: 916766 - DNA, 25 bp, Homo sapien
aagtgagccgagatcacaccactgc

SEQ ID NO: 916767 - DNA, 25 bp, Homo sapien
gaatcccttgaaccctgtaggcgga

SEQ ID NO: 916768 - DNA, 25 bp, Homo sapien
actccagcctgggcgacagaacgag

SEQ ID NO: 916769 - DNA, 25 bp, Homo sapien
accctgtaggcggaggttgaagtga

SEQ ID NO: 916770 - DNA, 25 bp, Homo sapien
agggcctccaccgaacgctctcttg

SEQ ID NO: 916771 - DNA, 25 bp, Homo sapien
cccagggcctccaccgaacgctctc

SEQ ID NO: 916772 - DNA, 25 bp, Homo sapien
ggcctccaccgaacgctctcttgag

SEQ ID NO: 916773 - DNA, 25 bp, Homo sapien
gcctccaccgaacgctctcttgaga

SEQ ID NO: 916774 - DNA, 25 bp, Homo sapien
tggcttctgatgagttctgcaagtg

SEQ ID NO: 916775 - DNA, 25 bp, Homo sapien
gataagcggggtggcttctgatgag

SEQ ID NO: 916776 - DNA, 25 bp, Homo sapien
tctgatgagttctgcaagtgcttct

SEQ ID NO: 916777 - DNA, 25 bp, Homo sapien
ctgataagcggggtggcttctgatg

SEQ ID NO: 916778 - DNA, 25 bp, Homo sapien
caaagccgggctgggaggacgattt

SEQ ID NO: 916779 - DNA, 25 bp, Homo sapien
gcaaagccgggctgggaggacgatt

SEQ ID NO: 916780 - DNA, 25 bp, Homo sapien
gccgggctgggaggacgatttggcc

SEQ ID NO: 916781 - DNA, 25 bp, Homo sapien
aagccgggctgggaggacgatttgg

SEQ ID NO: 916782 - DNA, 25 bp, Homo sapien
ccgccaccaccacttaggataagga

SEQ ID NO: 916783 - DNA, 25 bp, Homo sapien
cctcttttgaaatccacgtttggca

SEQ ID NO: 916784 - DNA, 25 bp, Homo sapien
gaggaaaagagctcccggaccttca

SEQ ID NO: 916785 - DNA, 25 bp, Homo sapien
gactgctgcactgatttagcaatta

SEQ ID NO: 916786 - DNA, 25 bp, Homo sapien
ggctagaagagttaacttatgctat

SEQ ID NO: 916787 - DNA, 25 bp, Homo sapien
caagtaagtaaatgtggaaggctag

SEQ ID NO: 916788 - DNA, 25 bp, Homo sapien
aagaaactcaagtaagtaaatgtgg

SEQ ID NO: 916789 - DNA, 25 bp, Homo sapien
aaggctagaagagttaacttatgct

SEQ ID NO: 916790 - DNA, 25 bp, Homo sapien
aacacgtgcaatttctatgacccag

SEQ ID NO: 916791 - DNA, 25 bp, Homo sapien
agctggacgtgcacacacctcgagg

SEQ ID NO: 916792 - DNA, 25 bp, Homo sapien
gaaacttgcatgagtaagctgggtg

SEQ ID NO: 916793 - DNA, 25 bp, Homo sapien
gttgaggctgtgctaagatcacgcc

SEQ ID NO: 916794 - DNA, 25 bp, Homo sapien
tcttatgggcagagttaaggtccca

SEQ ID NO: 916795 - DNA, 25 bp, Homo sapien
ttttggccagcacagaagctcacgc

SEQ ID NO: 916796 - DNA, 25 bp, Homo sapien
agaggcacatgcagatcccggaaaa

SEQ ID NO: 916797 - DNA, 25 bp, Homo sapien
ccaaagttacatgggaagaggcaca

SEQ ID NO: 916798 - DNA, 25 bp, Homo sapien
cgattatgttaaaatgaggtgttca

SEQ ID NO: 916799 - DNA, 25 bp, Homo sapien
tgaggtgttcagagtgagccctaat

SEQ ID NO: 916800 - DNA, 25 bp, Homo sapien
gaatgcaagaccagcttgattatca

SEQ ID NO: 916801 - DNA, 25 bp, Homo sapien
gagccctaatctaatgtgaccggtg

SEQ ID NO: 916802 - DNA, 25 bp, Homo sapien
aaaaaagatctggaccgggcgcagt

SEQ ID NO: 916803 - DNA, 25 bp, Homo sapien
cattagaaacgtgtgagtgcgccgg

SEQ ID NO: 916804 - DNA, 25 bp, Homo sapien
agacattagaaacgtgtgagtgcgc

SEQ ID NO: 916805 - DNA, 25 bp, Homo sapien
aaaaaaagatctggaccgggcgcag

SEQ ID NO: 916806 - DNA, 25 bp, Homo sapien
gacaaaactgacaaaatccaggaaa

SEQ ID NO: 916807 - DNA, 25 bp, Homo sapien
acaaaactgacaaaatccaggaaag

SEQ ID NO: 916808 - DNA, 25 bp, Homo sapien
tatccaggtgtggtgacgagtgctt

SEQ ID NO: 916809 - DNA, 25 bp, Homo sapien
caacaaactgaagcactgtctctac

SEQ ID NO: 916810 - DNA, 25 bp, Homo sapien
aggcaacaaactgaagcactgtctc

SEQ ID NO: 916811 - DNA, 25 bp, Homo sapien
gtggtgacgagtgcttgtggtccca

SEQ ID NO: 916812 - DNA, 25 bp, Homo sapien
cacataactatcacactgggcatgg

SEQ ID NO: 916813 - DNA, 25 bp, Homo sapien
aacctaggaaacatattgagacacc

SEQ ID NO: 916814 - DNA, 25 bp, Homo sapien
gagcctaggcgttcagatccaacct

SEQ ID NO: 916815 - DNA, 25 bp, Homo sapien
ccatcacagaagtgaatatgaagct

SEQ ID NO: 916816 - DNA, 25 bp, Homo sapien
ccagctaggaggctgcggcatgaaa

SEQ ID NO: 916817 - DNA, 25 bp, Homo sapien
attgcttgaacttgggaaggggagg

SEQ ID NO: 916818 - DNA, 25 bp, Homo sapien
atggcaccattgcactccagcctgg

SEQ ID NO: 916819 - DNA, 25 bp, Homo sapien
ttgcagtgagctgagatggcaccat

SEQ ID NO: 916820 - DNA, 25 bp, Homo sapien
ctctaagttttaaaccctgcttgca

SEQ ID NO: 916821 - DNA, 25 bp, Homo sapien
caaaggcaggaatgactctacaagg

SEQ ID NO: 916822 - DNA, 25 bp, Homo sapien
tgcttatcagactcgcgtgtggccc

SEQ ID NO: 916823 - DNA, 25 bp, Homo sapien
cacggtccgggaagctccaatgaaa

SEQ ID NO: 916824 - DNA, 25 bp, Homo sapien
ttaaaagggagtccgctcaaaggca

SEQ ID NO: 916825 - DNA, 25 bp, Homo sapien
aattgcactgaagtgtatacacata

SEQ ID NO: 916826 - DNA, 25 bp, Homo sapien
tgcactgaagtgtatacacataaag

SEQ ID NO: 916827 - DNA, 25 bp, Homo sapien
aaaattgcactgaagtgtatacaca

SEQ ID NO: 916828 - DNA, 25 bp, Homo sapien
ctgaagtgtatacacataaagcagg

SEQ ID NO: 916829 - DNA, 25 bp, Homo sapien
caggcaagatgggtaagccctaggc

SEQ ID NO: 916830 - DNA, 25 bp, Homo sapien
tctctactgagctgttgtcaactgc

SEQ ID NO: 916831 - DNA, 25 bp, Homo sapien
tctcattgcttgtggacaggttttc

SEQ ID NO: 916832 - DNA, 25 bp, Homo sapien
tgccaggctctagcgattcttccac

SEQ ID NO: 916833 - DNA, 25 bp, Homo sapien
cagttcagtcctaaaagggtctggg

SEQ ID NO: 916834 - DNA, 25 bp, Homo sapien
aacagcgcaattccaagctcgagag

SEQ ID NO: 916835 - DNA, 25 bp, Homo sapien
gaaaagccttctagggtcactgtca

SEQ ID NO: 916836 - DNA, 25 bp, Homo sapien
ccaggtgtttctgttagaggccaag

SEQ ID NO: 916837 - DNA, 25 bp, Homo sapien
aggcttcacccggcggtactggtag

SEQ ID NO: 916838 - DNA, 25 bp, Homo sapien
ggagggcataggggtctcggatgac

SEQ ID NO: 916839 - DNA, 25 bp, Homo sapien
gagggcataggggtctcggatgacg

SEQ ID NO: 916840 - DNA, 25 bp, Homo sapien
tcacaggcttcacccggcggtactg

SEQ ID NO: 916841 - DNA, 25 bp, Homo sapien
cctcttccgctgtgtagcggttctg

SEQ ID NO: 916842 - DNA, 25 bp, Homo sapien
cttccgctgtgtagcggttctgggg

SEQ ID NO: 916843 - DNA, 25 bp, Homo sapien
cggttctggggttgcaccaccagga

SEQ ID NO: 916844 - DNA, 25 bp, Homo sapien
ggttctggggttgcaccaccaggaa

SEQ ID NO: 916845 - DNA, 25 bp, Homo sapien
cgagtaatcatcccactcgggcgag

SEQ ID NO: 916846 - DNA, 25 bp, Homo sapien
gagtaatcatcccactcgggcgagc

SEQ ID NO: 916847 - DNA, 25 bp, Homo sapien
tggagcactcgataatctcaggggc

SEQ ID NO: 916848 - DNA, 25 bp, Homo sapien
atggagcactcgataatctcagggg

SEQ ID NO: 916849 - DNA, 25 bp, Homo sapien
ctgcaggaacagtcatcatcagggc

SEQ ID NO: 916850 - DNA, 25 bp, Homo sapien
gaacagtcatcatcagggcaggtca

SEQ ID NO: 916851 - DNA, 25 bp, Homo sapien
acagtcatcatcagggcaggtcagc

SEQ ID NO: 916852 - DNA, 25 bp, Homo sapien
atcatcagggcaggtcagcagggca

SEQ ID NO: 916853 - DNA, 25 bp, Homo sapien
cacccgaggcctggacgtgggccaa

SEQ ID NO: 916854 - DNA, 25 bp, Homo sapien
ctattctgcagatggttgattgagc

SEQ ID NO: 916855 - DNA, 25 bp, Homo sapien
tggttgattgagcacccgaggcctg

SEQ ID NO: 916856 - DNA, 25 bp, Homo sapien
ccatctctattctgcagatggttga

SEQ ID NO: 916857 - DNA, 25 bp, Homo sapien
tgagtttgtgcaaggtgcagatcac

SEQ ID NO: 916858 - DNA, 25 bp, Homo sapien
tcacctccagcagagctcgcatgat

SEQ ID NO: 916859 - DNA, 25 bp, Homo sapien
tgtgcaaggtgcagatcacctccag

SEQ ID NO: 916860 - DNA, 25 bp, Homo sapien
tcccggtgcacgatgttgagtttgt

SEQ ID NO: 916861 - DNA, 25 bp, Homo sapien
ttctcactcaaggtgaccttctcag

SEQ ID NO: 916862 - DNA, 25 bp, Homo sapien
ccttctcactcaaggtgaccttctc

SEQ ID NO: 916863 - DNA, 25 bp, Homo sapien
tctcactcaaggtgaccttctcagt

SEQ ID NO: 916864 - DNA, 25 bp, Homo sapien
tctcagtgaggtagtcaaagagctc

SEQ ID NO: 916865 - DNA, 25 bp, Homo sapien
gttccatctccattgtatcagtgtc

SEQ ID NO: 916866 - DNA, 25 bp, Homo sapien
ccctgggccctgaagttggtggact

SEQ ID NO: 916867 - DNA, 25 bp, Homo sapien
gtggacttgggagagtcccagccca

SEQ ID NO: 916868 - DNA, 25 bp, Homo sapien
ccagcccaagcaccatttctgttcc

SEQ ID NO: 916869 - DNA, 25 bp, Homo sapien
gttggtctcataagtgtccttcagc

SEQ ID NO: 916870 - DNA, 25 bp, Homo sapien
gtctcataagtgtccttcagctgta

SEQ ID NO: 916871 - DNA, 25 bp, Homo sapien
aggtcaaacaccaagaagaagaaag

SEQ ID NO: 916872 - DNA, 25 bp, Homo sapien
gaagaaagtgttggtctcataagtg

SEQ ID NO: 916873 - DNA, 25 bp, Homo sapien
gcatcgcctgaccacactgctaacg

SEQ ID NO: 916874 - DNA, 25 bp, Homo sapien
tgcatcgcctgaccacactgctaac

SEQ ID NO: 916875 - DNA, 25 bp, Homo sapien
cgatgaccttcacggcgtactcctg

SEQ ID NO: 916876 - DNA, 25 bp, Homo sapien
tcgcctgaccacactgctaacgccc

SEQ ID NO: 916877 - DNA, 25 bp, Homo sapien
gggtcccagattagaggctgcagca

SEQ ID NO: 916878 - DNA, 25 bp, Homo sapien
tggggggtcccagattagaggctgc

SEQ ID NO: 916879 - DNA, 25 bp, Homo sapien
attagaggctgcagcagagatgtcc

SEQ ID NO: 916880 - DNA, 25 bp, Homo sapien
agtgcagaggacagatggcctcggg

SEQ ID NO: 916881 - DNA, 25 bp, Homo sapien
ttggcctccctggtattgcaggaag

SEQ ID NO: 916882 - DNA, 25 bp, Homo sapien
tggcctccctggtattgcaggaagt

SEQ ID NO: 916883 - DNA, 25 bp, Homo sapien
gctggagcctaggacagcacttcgt

SEQ ID NO: 916884 - DNA, 25 bp, Homo sapien
gacagcacttcgtggggaaagcttg

SEQ ID NO: 916885 - DNA, 25 bp, Homo sapien
ctgctggagcctaggacagcacttc

SEQ ID NO: 916886 - DNA, 25 bp, Homo sapien
tggagcctaggacagcacttcgtgg

SEQ ID NO: 916887 - DNA, 25 bp, Homo sapien
taattctcatagaagtcctgtgcag

SEQ ID NO: 916888 - DNA, 25 bp, Homo sapien
tcataattctcatagaagtcctgtg

SEQ ID NO: 916889 - DNA, 25 bp, Homo sapien
tctcatagaagtcctgtgcagaatg

SEQ ID NO: 916890 - DNA, 25 bp, Homo sapien
gatctctttgggctcataattctca

SEQ ID NO: 916891 - DNA, 25 bp, Homo sapien
tcagatcttcagtgagggaactctg

SEQ ID NO: 916892 - DNA, 25 bp, Homo sapien
agatcttcagtgagggaactctggg

SEQ ID NO: 916893 - DNA, 25 bp, Homo sapien
gatcttcagtgagggaactctgggt

SEQ ID NO: 916894 - DNA, 25 bp, Homo sapien
gctcagatcttcagtgagggaactc

SEQ ID NO: 916895 - DNA, 25 bp, Homo sapien
gaccacagagggctgaagccgtgtc

SEQ ID NO: 916896 - DNA, 25 bp, Homo sapien
taagtgcttgcaggctcttgaagga

SEQ ID NO: 916897 - DNA, 25 bp, Homo sapien
gccgtgtcccgagcagacacttgga

SEQ ID NO: 916898 - DNA, 25 bp, Homo sapien
cttgaaggagcttgacaagaatccc

SEQ ID NO: 916899 - DNA, 25 bp, Homo sapien
gagactacaagtgtgtgccaccagg

SEQ ID NO: 916900 - DNA, 25 bp, Homo sapien
attctccttgcctcagcctgagtag

SEQ ID NO: 916901 - DNA, 25 bp, Homo sapien
tcctggctcactgcatccagggttc

SEQ ID NO: 916902 - DNA, 25 bp, Homo sapien
gctcactgcatccagggttcaagca

SEQ ID NO: 916903 - DNA, 25 bp, Homo sapien
gagacaaactataactccaggctgc

SEQ ID NO: 916904 - DNA, 25 bp, Homo sapien
tagttacagtttatggttaggccag

SEQ ID NO: 916905 - DNA, 25 bp, Homo sapien
ggaatagtgatacgcagtgctgacc

SEQ ID NO: 916906 - DNA, 25 bp, Homo sapien
agtgctgacctagccacagggaacc

SEQ ID NO: 916907 - DNA, 25 bp, Homo sapien
gggaggatgctaatttcataaccag

SEQ ID NO: 916908 - DNA, 25 bp, Homo sapien
tactgctcagcttacataactccag

SEQ ID NO: 916909 - DNA, 25 bp, Homo sapien
tagaacctttgaattgagcagcatg

SEQ ID NO: 916910 - DNA, 25 bp, Homo sapien
catgccagcacgcacagctttaaac

SEQ ID NO: 916911 - DNA, 25 bp, Homo sapien
aataaaatcataacataacagctag

SEQ ID NO: 916912 - DNA, 25 bp, Homo sapien
gactttattctaattaactcacaaa

SEQ ID NO: 916913 - DNA, 25 bp, Homo sapien
taaaatcataacataacagctagtt

SEQ ID NO: 916914 - DNA, 25 bp, Homo sapien
atcataacataacagctagtttaag

SEQ ID NO: 916915 - DNA, 25 bp, Homo sapien
cagagtagggacacccccacttcca

SEQ ID NO: 916916 - DNA, 25 bp, Homo sapien
agagtagggacacccccacttccat

SEQ ID NO: 916917 - DNA, 25 bp, Homo sapien
agcagcgacaaaaggccaaggctat

SEQ ID NO: 916918 - DNA, 25 bp, Homo sapien
aattatgaaagcagcgacaaaaggc

SEQ ID NO: 916919 - DNA, 25 bp, Homo sapien
ctgcaaacagaaaagattaagttag

SEQ ID NO: 916920 - DNA, 25 bp, Homo sapien
aagaatgctagcttcgtatactcaa

SEQ ID NO: 916921 - DNA, 25 bp, Homo sapien
gaaggcatcctacaactaacaagac

SEQ ID NO: 916922 - DNA, 25 bp, Homo sapien
tattcgcagccttaaggttagaagg

SEQ ID NO: 916923 - DNA, 25 bp, Homo sapien
aattaactcctttcactcaatgagg

SEQ ID NO: 916924 - DNA, 25 bp, Homo sapien
aacaagacaccctgaatctccggag

SEQ ID NO: 916925 - DNA, 25 bp, Homo sapien
atgactagaaacctccggcccagtt

SEQ ID NO: 916926 - DNA, 25 bp, Homo sapien
cctaagttctacaggatccaggaat

SEQ ID NO: 916927 - DNA, 25 bp, Homo sapien
gcccagttgttaggagttaattcta

SEQ ID NO: 916928 - DNA, 25 bp, Homo sapien
taaacacagattaccctaagttcta

SEQ ID NO: 916929 - DNA, 25 bp, Homo sapien
gcacactccagaaactgtttgatct

SEQ ID NO: 916930 - DNA, 25 bp, Homo sapien
ctgtttgatctcatagaggcaaggc

SEQ ID NO: 916931 - DNA, 25 bp, Homo sapien
gaaactgtttgatctcatagaggca

SEQ ID NO: 916932 - DNA, 25 bp, Homo sapien
aactgtttgatctcatagaggcaag

SEQ ID NO: 916933 - DNA, 25 bp, Homo sapien
gtaatggcgtgacccaatgtgtgcc

SEQ ID NO: 916934 - DNA, 25 bp, Homo sapien
cccagtaatggcgtgacccaatgtg

SEQ ID NO: 916935 - DNA, 25 bp, Homo sapien
aatggcgtgacccaatgtgtgcccc

SEQ ID NO: 916936 - DNA, 25 bp, Homo sapien
agtaatggcgtgacccaatgtgtgc

SEQ ID NO: 916937 - DNA, 25 bp, Homo sapien
tggtggctgagcgactggtgctggc

SEQ ID NO: 916938 - DNA, 25 bp, Homo sapien
ctgctggtggctgagcgactggtgc

SEQ ID NO: 916939 - DNA, 25 bp, Homo sapien
tgcagctctcatctgaggggcccgg

SEQ ID NO: 916940 - DNA, 25 bp, Homo sapien
ccggggcgcagcagcagaagagcca

SEQ ID NO: 916941 - DNA, 25 bp, Homo sapien
tacagcctgagttagactctgactc

SEQ ID NO: 916942 - DNA, 25 bp, Homo sapien
aaatttatgccttcctaccacctgg

SEQ ID NO: 916943 - DNA, 25 bp, Homo sapien
taccacctggccataacgttatgcc

SEQ ID NO: 916944 - DNA, 25 bp, Homo sapien
actggccaaagtgactcgtctgaac

SEQ ID NO: 916945 - DNA, 25 bp, Homo sapien
cctctgcgtcattgccccagtagag

SEQ ID NO: 916946 - DNA, 25 bp, Homo sapien
ggacggccgcgctttggtctcaaac

SEQ ID NO: 916947 - DNA, 25 bp, Homo sapien
ggtctcaaaccctgcgatggtctca

SEQ ID NO: 916948 - DNA, 25 bp, Homo sapien
ttgccccagtagagtccggacggcc

SEQ ID NO: 916949 - DNA, 25 bp, Homo sapien
cggaggggccatgcgggaggtgcgg

SEQ ID NO: 916950 - DNA, 25 bp, Homo sapien
tgcggcttcggcttccacgcggcat

SEQ ID NO: 916951 - DNA, 25 bp, Homo sapien
ggaggtgcggcttcggcttccacgc

SEQ ID NO: 916952 - DNA, 25 bp, Homo sapien
gccggaggggccatgcgggaggtgc

SEQ ID NO: 916953 - DNA, 25 bp, Homo sapien
aagagctaagcgacttctgaggaga

SEQ ID NO: 916954 - DNA, 25 bp, Homo sapien
caaccaccgaagagctaagcgactt

SEQ ID NO: 916955 - DNA, 25 bp, Homo sapien
cgacttctgaggagaccggaagatg

SEQ ID NO: 916956 - DNA, 25 bp, Homo sapien
gggacaaccaccgaagagctaagcg

SEQ ID NO: 916957 - DNA, 25 bp, Homo sapien
cgcgcaaccaaccagcacacaggca

SEQ ID NO: 916958 - DNA, 25 bp, Homo sapien
ggcctcaacgcgcaaccaaccagca

SEQ ID NO: 916959 - DNA, 25 bp, Homo sapien
tcaacgcgcaaccaaccagcacaca

SEQ ID NO: 916960 - DNA, 25 bp, Homo sapien
ggggctggcctcaacgcgcaaccaa

SEQ ID NO: 916961 - DNA, 25 bp, Homo sapien
atccacttgggcactacttaattaa

SEQ ID NO: 916962 - DNA, 25 bp, Homo sapien
tccacttgggcactacttaattaac

SEQ ID NO: 916963 - DNA, 25 bp, Homo sapien
aatccacttgggcactacttaatta

SEQ ID NO: 916964 - DNA, 25 bp, Homo sapien
ctgctcgcgccgagtccggcccttg

SEQ ID NO: 916965 - DNA, 25 bp, Homo sapien
gctcgtgcccgccaggtgcaggcca

SEQ ID NO: 916966 - DNA, 25 bp, Homo sapien
cgagtgcgcatcttgggatgcagct

SEQ ID NO: 916967 - DNA, 25 bp, Homo sapien
gtgcaggccagttggtgcgcagcgc

SEQ ID NO: 916968 - DNA, 25 bp, Homo sapien
tgcgggcgcttccatcctgcccagg

SEQ ID NO: 916969 - DNA, 25 bp, Homo sapien
gctctgcgggcgcttccatcctgcc

SEQ ID NO: 916970 - DNA, 25 bp, Homo sapien
tgcccgcgtctgggcgctcctggaa

SEQ ID NO: 916971 - DNA, 25 bp, Homo sapien
cagagcctgcagacgtggaagcgcc

SEQ ID NO: 916972 - DNA, 25 bp, Homo sapien
ttcaacttgtttacatagatcagcc

SEQ ID NO: 916973 - DNA, 25 bp, Homo sapien
acatagatcagccatacgattattc

SEQ ID NO: 916974 - DNA, 25 bp, Homo sapien
atagatcagccatacgattattcca

SEQ ID NO: 916975 - DNA, 25 bp, Homo sapien
cttgtttacatagatcagccatacg

SEQ ID NO: 916976 - DNA, 25 bp, Homo sapien
ctccctcactttcggttccccagca

SEQ ID NO: 916977 - DNA, 25 bp, Homo sapien
cagagttgaactccctcactttcgg

SEQ ID NO: 916978 - DNA, 25 bp, Homo sapien
cagcattggcgggttccgggactgg

SEQ ID NO: 916979 - DNA, 25 bp, Homo sapien
ctcactttcggttccccagcattgg

SEQ ID NO: 916980 - DNA, 25 bp, Homo sapien
tagaaggtggagaataatcatcatc

SEQ ID NO: 916981 - DNA, 25 bp, Homo sapien
ctttgtctcttagaaggtggagaat

SEQ ID NO: 916982 - DNA, 25 bp, Homo sapien
ttagaaggtggagaataatcatcat

SEQ ID NO: 916983 - DNA, 25 bp, Homo sapien
aaggtggagaataatcatcatcttg

SEQ ID NO: 916984 - DNA, 25 bp, Homo sapien
ttccagggtgttgggtaagcctcag

SEQ ID NO: 916985 - DNA, 25 bp, Homo sapien
ggtaactccataagacctgaactct

SEQ ID NO: 916986 - DNA, 25 bp, Homo sapien
tcattgttaccgaatcaaacttggg

SEQ ID NO: 916987 - DNA, 25 bp, Homo sapien
cgaagtggttattgcagggtgccaa

SEQ ID NO: 916988 - DNA, 25 bp, Homo sapien
tccttgcacatggctcctaaaaggc

SEQ ID NO: 916989 - DNA, 25 bp, Homo sapien
tctccttgcacatggctcctaaaag

SEQ ID NO: 916990 - DNA, 25 bp, Homo sapien
atctccttgcacatggctcctaaaa

SEQ ID NO: 916991 - DNA, 25 bp, Homo sapien
ctccttgcacatggctcctaaaagg

SEQ ID NO: 916992 - DNA, 25 bp, Homo sapien
tgtaaatggctatcccttactgaga

SEQ ID NO: 916993 - DNA, 25 bp, Homo sapien
ccctcctgggtgcaatgagcaaaaa

SEQ ID NO: 916994 - DNA, 25 bp, Homo sapien
tagcgcatgtcagagcctcaacaag

SEQ ID NO: 916995 - DNA, 25 bp, Homo sapien
cttatcgggaattttgtagagcaca

SEQ ID NO: 916996 - DNA, 25 bp, Homo sapien
gacaatacatgggactatggcccga

SEQ ID NO: 916997 - DNA, 25 bp, Homo sapien
caagcgcctgcgtgataaccatgag

SEQ ID NO: 916998 - DNA, 25 bp, Homo sapien
ttgaaaacgactgtagagaccctcc

SEQ ID NO: 916999 - DNA, 25 bp, Homo sapien
tactttagcagaagccgggaactct

SEQ ID NO: 917000 - DNA, 25 bp, Homo sapien
gtacagacaattggtcagacagaac

SEQ ID NO: 917001 - DNA, 25 bp, Homo sapien
gccagtagctgcaaaactgcaccga

SEQ ID NO: 917002 - DNA, 25 bp, Homo sapien
aagtacagacaattggtcagacaga

SEQ ID NO: 917003 - DNA, 25 bp, Homo sapien
ggccagtagctgcaaaactgcaccg

SEQ ID NO: 917004 - DNA, 25 bp, Homo sapien
aacaagcattgatgcccaagtttgg

SEQ ID NO: 917005 - DNA, 25 bp, Homo sapien
cattgatgcccaagtttgggaaata

SEQ ID NO: 917006 - DNA, 25 bp, Homo sapien
agatggcccagtcttttatccccca

SEQ ID NO: 917007 - DNA, 25 bp, Homo sapien
caagtaggaagtttggctggcggat

SEQ ID NO: 917008 - DNA, 25 bp, Homo sapien
tggttggttgtggtccaactgtagg

SEQ ID NO: 917009 - DNA, 25 bp, Homo sapien
taactggttggttgtggtccaactg

SEQ ID NO: 917010 - DNA, 25 bp, Homo sapien
aactggttggttgtggtccaactgt

SEQ ID NO: 917011 - DNA, 25 bp, Homo sapien
actggttggttgtggtccaactgta

SEQ ID NO: 917012 - DNA, 25 bp, Homo sapien
agcaagacctggacctccaagaggg

SEQ ID NO: 917013 - DNA, 25 bp, Homo sapien
gcagcaagacctggacctccaagag

SEQ ID NO: 917014 - DNA, 25 bp, Homo sapien
caagacctggacctccaagagggag

SEQ ID NO: 917015 - DNA, 25 bp, Homo sapien
agacctggacctccaagagggagat

SEQ ID NO: 917016 - DNA, 25 bp, Homo sapien
gtggcctgtgcagagctgaaagggc

SEQ ID NO: 917017 - DNA, 25 bp, Homo sapien
tcaatggtggcctgtgcagagctga

SEQ ID NO: 917018 - DNA, 25 bp, Homo sapien
aatggtggcctgtgcagagctgaaa

SEQ ID NO: 917019 - DNA, 25 bp, Homo sapien
cctgtgcagagctgaaagggcaaaa

SEQ ID NO: 917020 - DNA, 25 bp, Homo sapien
cagaggcttgtgtagctcagcaact

SEQ ID NO: 917021 - DNA, 25 bp, Homo sapien
ccagaggcttgtgtagctcagcaac

SEQ ID NO: 917022 - DNA, 25 bp, Homo sapien
gaggcttgtgtagctcagcaactta

SEQ ID NO: 917023 - DNA, 25 bp, Homo sapien
cccagaggcttgtgtagctcagcaa

SEQ ID NO: 917024 - DNA, 25 bp, Homo sapien
gaagttattcgtgcgaagagtaagg

SEQ ID NO: 917025 - DNA, 25 bp, Homo sapien
cattttggtgaagttattcgtgcga

SEQ ID NO: 917026 - DNA, 25 bp, Homo sapien
tgcgaagagtaagggtccccactct

SEQ ID NO: 917027 - DNA, 25 bp, Homo sapien
taattcatccttgatgctgatagaa

SEQ ID NO: 917028 - DNA, 25 bp, Homo sapien
tgacattccaatactagtctgcatg

SEQ ID NO: 917029 - DNA, 25 bp, Homo sapien
attccaatactagtctgcatgtgcc

SEQ ID NO: 917030 - DNA, 25 bp, Homo sapien
agtgacattccaatactagtctgca

SEQ ID NO: 917031 - DNA, 25 bp, Homo sapien
cattccaatactagtctgcatgtgc

SEQ ID NO: 917032 - DNA, 25 bp, Homo sapien
gatgaagtgtgtgtggtcgatacaa

SEQ ID NO: 917033 - DNA, 25 bp, Homo sapien
aagtgtgtgtggtcgatacaatatg

SEQ ID NO: 917034 - DNA, 25 bp, Homo sapien
taagatgaagtgtgtgtggtcgata

SEQ ID NO: 917035 - DNA, 25 bp, Homo sapien
ctgtagtgtgtaagatgaagtgtgt

SEQ ID NO: 917036 - DNA, 25 bp, Homo sapien
gtctgaggtgtctaatggagatatt

SEQ ID NO: 917037 - DNA, 25 bp, Homo sapien
ctgaggtgtctaatggagatattga

SEQ ID NO: 917038 - DNA, 25 bp, Homo sapien
tctgaggtgtctaatggagatattg

SEQ ID NO: 917039 - DNA, 25 bp, Homo sapien
ggtctgaggtgtctaatggagatat

SEQ ID NO: 917040 - DNA, 25 bp, Homo sapien
tgagggctgggaggctttctggaac

SEQ ID NO: 917041 - DNA, 25 bp, Homo sapien
agccgtgagggctgggaggctttct

SEQ ID NO: 917042 - DNA, 25 bp, Homo sapien
ggctgggaggctttctggaacacac

SEQ ID NO: 917043 - DNA, 25 bp, Homo sapien
tagccgtgagggctgggaggctttc

SEQ ID NO: 917044 - DNA, 25 bp, Homo sapien
gatcaatagctgttcaatacactgc

SEQ ID NO: 917045 - DNA, 25 bp, Homo sapien
tgagcgatcaatagctgttcaatac

SEQ ID NO: 917046 - DNA, 25 bp, Homo sapien
catgagcgatcaatagctgttcaat

SEQ ID NO: 917047 - DNA, 25 bp, Homo sapien
ctcgcagaagccacatacgcagcag

SEQ ID NO: 917048 - DNA, 25 bp, Homo sapien
ctaaaggtgcatactttagaaaggc

SEQ ID NO: 917049 - DNA, 25 bp, Homo sapien
acatttggccatttagaatttagtc

SEQ ID NO: 917050 - DNA, 25 bp, Homo sapien
aaaggtgcatactttagaaaggcgt

SEQ ID NO: 917051 - DNA, 25 bp, Homo sapien
catactttagaaaggcgtaatctta

SEQ ID NO: 917052 - DNA, 25 bp, Homo sapien
gataatactcaatgaaatgggcggc

SEQ ID NO: 917053 - DNA, 25 bp, Homo sapien
tactcaatgaaatgggcggctgttg

SEQ ID NO: 917054 - DNA, 25 bp, Homo sapien
ctgcttcagagagataatactcaat

SEQ ID NO: 917055 - DNA, 25 bp, Homo sapien
aataataatagttccatatgtagca

SEQ ID NO: 917056 - DNA, 25 bp, Homo sapien
tattagtcatacaacccaggctgtt

SEQ ID NO: 917057 - DNA, 25 bp, Homo sapien
ttcatattagtcatacaacccaggc

SEQ ID NO: 917058 - DNA, 25 bp, Homo sapien
tcatacaacccaggctgttgagctg

SEQ ID NO: 917059 - DNA, 25 bp, Homo sapien
tagattcatattagtcatacaaccc

SEQ ID NO: 917060 - DNA, 25 bp, Homo sapien
gctgctggatagagatgtcatagcg

SEQ ID NO: 917061 - DNA, 25 bp, Homo sapien
ggatagagatgtcatagcggtccat

SEQ ID NO: 917062 - DNA, 25 bp, Homo sapien
ctggatagagatgtcatagcggtcc

SEQ ID NO: 917063 - DNA, 25 bp, Homo sapien
cagctgctggatagagatgtcatag

SEQ ID NO: 917064 - DNA, 25 bp, Homo sapien
tagacagcaagatggcgggcagaag

SEQ ID NO: 917065 - DNA, 25 bp, Homo sapien
agacagcaagatggcgggcagaagg

SEQ ID NO: 917066 - DNA, 25 bp, Homo sapien
gtggcaaatcaagtcagcaaaatac

SEQ ID NO: 917067 - DNA, 25 bp, Homo sapien
agtggcaaatcaagtcagcaaaata

SEQ ID NO: 917068 - DNA, 25 bp, Homo sapien
tgagacttaattgaggggactggcc

SEQ ID NO: 917069 - DNA, 25 bp, Homo sapien
tctgagacttaattgaggggactgg

SEQ ID NO: 917070 - DNA, 25 bp, Homo sapien
gagacttaattgaggggactggcct

SEQ ID NO: 917071 - DNA, 25 bp, Homo sapien
cgtctgagacttaattgaggggact

SEQ ID NO: 917072 - DNA, 25 bp, Homo sapien
gggcaacttcagctccctgtagcga

SEQ ID NO: 917073 - DNA, 25 bp, Homo sapien
cttggtgaatgtcggcggccagctg

SEQ ID NO: 917074 - DNA, 25 bp, Homo sapien
cctgtagcgaagtgcttggtgaatg

SEQ ID NO: 917075 - DNA, 25 bp, Homo sapien
tcagctccctgtagcgaagtgcttg

SEQ ID NO: 917076 - DNA, 25 bp, Homo sapien
agtcattcaaatcgctgactcctcc

SEQ ID NO: 917077 - DNA, 25 bp, Homo sapien
ctaagtcattcaaatcgctgactcc

SEQ ID NO: 917078 - DNA, 25 bp, Homo sapien
attcaaatcgctgactcctccttct

SEQ ID NO: 917079 - DNA, 25 bp, Homo sapien
tcattcaaatcgctgactcctcctt

SEQ ID NO: 917080 - DNA, 25 bp, Homo sapien
ttcaaggccagcaaactcaattagc

SEQ ID NO: 917081 - DNA, 25 bp, Homo sapien
tcaaggccagcaaactcaattagct

SEQ ID NO: 917082 - DNA, 25 bp, Homo sapien
cagaggtggaagattgttttgtggc

SEQ ID NO: 917083 - DNA, 25 bp, Homo sapien
cacccacagtacagaacctctcaca

SEQ ID NO: 917084 - DNA, 25 bp, Homo sapien
ttctttattatgatgcacccacagt

SEQ ID NO: 917085 - DNA, 25 bp, Homo sapien
aagtagcatgttttagccagaggtg

SEQ ID NO: 917086 - DNA, 25 bp, Homo sapien
actgtaaagctgcacaatatggaaa

SEQ ID NO: 917087 - DNA, 25 bp, Homo sapien
tgggaaggatgacgttagagttttc

SEQ ID NO: 917088 - DNA, 25 bp, Homo sapien
atgggaaggatgacgttagagtttt

SEQ ID NO: 917089 - DNA, 25 bp, Homo sapien
gaaggatgacgttagagttttcttc

SEQ ID NO: 917090 - DNA, 25 bp, Homo sapien
cagttccccaagaaacgtgacctct

SEQ ID NO: 917091 - DNA, 25 bp, Homo sapien
cctaatactcgttctgtgagtgaag

SEQ ID NO: 917092 - DNA, 25 bp, Homo sapien
cattaaccccctaatactcgttctg

SEQ ID NO: 917093 - DNA, 25 bp, Homo sapien
ctacatgttttaggccaaaatttca

SEQ ID NO: 917094 - DNA, 25 bp, Homo sapien
cgttctgtgagtgaaggatctttct

SEQ ID NO: 917095 - DNA, 25 bp, Homo sapien
agtgataagctcctgacagtgtgta

SEQ ID NO: 917096 - DNA, 25 bp, Homo sapien
gtgataagctcctgacagtgtgtaa

SEQ ID NO: 917097 - DNA, 25 bp, Homo sapien
tgccttaagaggtaaagcaaagcca

SEQ ID NO: 917098 - DNA, 25 bp, Homo sapien
cccgagggtcttcgctgtcaaatag

SEQ ID NO: 917099 - DNA, 25 bp, Homo sapien
tgccataaattctgtgtaagactgt

SEQ ID NO: 917100 - DNA, 25 bp, Homo sapien
ccgttcccgagggtcttcgctgtca

SEQ ID NO: 917101 - DNA, 25 bp, Homo sapien
aacttgccataaattctgtgtaaga

SEQ ID NO: 917102 - DNA, 25 bp, Homo sapien
agaagtcaggtagctcagtccttca

SEQ ID NO: 917103 - DNA, 25 bp, Homo sapien
aaagaatgttccaaaaggccggctg

SEQ ID NO: 917104 - DNA, 25 bp, Homo sapien
tgagctagattactcaaagggtccc

SEQ ID NO: 917105 - DNA, 25 bp, Homo sapien
cagtccttcatgaagaggaatgcct

SEQ ID NO: 917106 - DNA, 25 bp, Homo sapien
ggaacgcaacacaaatttgcacgtc

SEQ ID NO: 917107 - DNA, 25 bp, Homo sapien
tttagtatacgtgctaccaaagcgt

SEQ ID NO: 917108 - DNA, 25 bp, Homo sapien
gtatacgtgctaccaaagcgtgcac

SEQ ID NO: 917109 - DNA, 25 bp, Homo sapien
tagtatacgtgctaccaaagcgtgc

SEQ ID NO: 917110 - DNA, 25 bp, Homo sapien
cccttatctcctcctgttgaatcat

SEQ ID NO: 917111 - DNA, 25 bp, Homo sapien
ctgtctttctttgtatcagtgctca

SEQ ID NO: 917112 - DNA, 25 bp, Homo sapien
tcctcgagctcccttatctcctcct

SEQ ID NO: 917113 - DNA, 25 bp, Homo sapien
gcagtgcttcagaggcagatttcat

SEQ ID NO: 917114 - DNA, 25 bp, Homo sapien
gggactgatgactgcatgatcttct

SEQ ID NO: 917115 - DNA, 25 bp, Homo sapien
tgggactgatgactgcatgatcttc

SEQ ID NO: 917116 - DNA, 25 bp, Homo sapien
gaggcgcaagatgggcctagaggaa

SEQ ID NO: 917117 - DNA, 25 bp, Homo sapien
ggcgcaagatgggcctagaggaacc

SEQ ID NO: 917118 - DNA, 25 bp, Homo sapien
cgcaagatgggcctagaggaaccca

SEQ ID NO: 917119 - DNA, 25 bp, Homo sapien
gcaagatgggcctagaggaacccac

SEQ ID NO: 917120 - DNA, 25 bp, Homo sapien
ggcagggccgggagaagctgacttc

SEQ ID NO: 917121 - DNA, 25 bp, Homo sapien
gcagggccgggagaagctgacttca

SEQ ID NO: 917122 - DNA, 25 bp, Homo sapien
gggagaagctgacttcaggacgact

SEQ ID NO: 917123 - DNA, 25 bp, Homo sapien
gccgggagaagctgacttcaggacg

SEQ ID NO: 917124 - DNA, 25 bp, Homo sapien
tgggcggaccaaggccgccaggaga

SEQ ID NO: 917125 - DNA, 25 bp, Homo sapien
aagctgtgggcggaccaaggccgcc

SEQ ID NO: 917126 - DNA, 25 bp, Homo sapien
gccaggagatgggcaggcgctgagt

SEQ ID NO: 917127 - DNA, 25 bp, Homo sapien
caaagaggttgttgggaggcagcag

SEQ ID NO: 917128 - DNA, 25 bp, Homo sapien
cgggcgcgaagagcttggctcgaga

SEQ ID NO: 917129 - DNA, 25 bp, Homo sapien
gcgggcgcgaagagcttggctcgag

SEQ ID NO: 917130 - DNA, 25 bp, Homo sapien
agggccgggagacgccgacttcagg

SEQ ID NO: 917131 - DNA, 25 bp, Homo sapien
ccaagctgggcgcggaggagcccac

SEQ ID NO: 917132 - DNA, 25 bp, Homo sapien
ggcagggccgggagacgccgacttc

SEQ ID NO: 917133 - DNA, 25 bp, Homo sapien
aggcccaagctgggcgcggaggagc

SEQ ID NO: 917134 - DNA, 25 bp, Homo sapien
ggagctgatcctggagaggccaccg

SEQ ID NO: 917135 - DNA, 25 bp, Homo sapien
gagctgatcctggagaggccaccgt

SEQ ID NO: 917136 - DNA, 25 bp, Homo sapien
ctggagacgccatcggagggcagga

SEQ ID NO: 917137 - DNA, 25 bp, Homo sapien
gagacgccatcggagggcaggagct

SEQ ID NO: 917138 - DNA, 25 bp, Homo sapien
caaagaggttgttgggaggcagcag

SEQ ID NO: 917139 - DNA, 25 bp, Homo sapien
aaggccgccaggagatgggcaggcg

SEQ ID NO: 917140 - DNA, 25 bp, Homo sapien
gccaggagatgggcaggcgctgagt

SEQ ID NO: 917141 - DNA, 25 bp, Homo sapien
gccgccaggagatgggcaggcgctg

SEQ ID NO: 917142 - DNA, 25 bp, Homo sapien
tgctcccggcagcctgcgtacggcc

SEQ ID NO: 917143 - DNA, 25 bp, Homo sapien
gcagaagagcgtcagcaggccccgc

SEQ ID NO: 917144 - DNA, 25 bp, Homo sapien
tctggcagcagaagagcgtcagcag

SEQ ID NO: 917145 - DNA, 25 bp, Homo sapien
gctcccggcagcctgcgtacggccc

SEQ ID NO: 917146 - DNA, 25 bp, Homo sapien
gcgggcgcgaagagcttggctcgag

SEQ ID NO: 917147 - DNA, 25 bp, Homo sapien
cgggcgcgaagagcttggctcgaga

SEQ ID NO: 917148 - DNA, 25 bp, Homo sapien
agggccgggagacgccgacttcagg

SEQ ID NO: 917149 - DNA, 25 bp, Homo sapien
ccaagctgggcgcggaggagcccac

SEQ ID NO: 917150 - DNA, 25 bp, Homo sapien
ggcagggccgggagacgccgacttc

SEQ ID NO: 917151 - DNA, 25 bp, Homo sapien
aggcccaagctgggcgcggaggagc

SEQ ID NO: 917152 - DNA, 25 bp, Homo sapien
ctggagacgccatcggagggcagga

SEQ ID NO: 917153 - DNA, 25 bp, Homo sapien
gagacgccatcggagggcaggagct

SEQ ID NO: 917154 - DNA, 25 bp, Homo sapien
ggagctgatcctggagaggccaccg

SEQ ID NO: 917155 - DNA, 25 bp, Homo sapien
gagctgatcctggagaggccaccgt

SEQ ID NO: 917156 - DNA, 25 bp, Homo sapien
caaagaggttgttgggaggcagcag

SEQ ID NO: 917157 - DNA, 25 bp, Homo sapien
aaggccgccaggagatgggcaggcg

SEQ ID NO: 917158 - DNA, 25 bp, Homo sapien
gccgccaggagatgggcaggcgctg

SEQ ID NO: 917159 - DNA, 25 bp, Homo sapien
gccaggagatgggcaggcgctgagt

SEQ ID NO: 917160 - DNA, 25 bp, Homo sapien
tctggcagcagaagagcgtcagcag

SEQ ID NO: 917161 - DNA, 25 bp, Homo sapien
tgctcccggcagcctgcgtacggcc

SEQ ID NO: 917162 - DNA, 25 bp, Homo sapien
gctcccggcagcctgcgtacggccc

SEQ ID NO: 917163 - DNA, 25 bp, Homo sapien
gcagaagagcgtcagcaggccccgc

SEQ ID NO: 917164 - DNA, 25 bp, Homo sapien
cagcggcatgcttgggcatcaacag

SEQ ID NO: 917165 - DNA, 25 bp, Homo sapien
gcatcaacaggcccccgtgagggag

SEQ ID NO: 917166 - DNA, 25 bp, Homo sapien
ggaggaactggtccgcacgcgggct

SEQ ID NO: 917167 - DNA, 25 bp, Homo sapien
cctctgcgcagggtgccagcggcat

SEQ ID NO: 917168 - DNA, 25 bp, Homo sapien
gcgggcgcgaagagcttggctcgag

SEQ ID NO: 917169 - DNA, 25 bp, Homo sapien
cgggcgcgaagagcttggctcgaga

SEQ ID NO: 917170 - DNA, 25 bp, Homo sapien
ggcagggccgggagacgctgacttc

SEQ ID NO: 917171 - DNA, 25 bp, Homo sapien
gggagacgctgacttcaggacgact

SEQ ID NO: 917172 - DNA, 25 bp, Homo sapien
gccgggagacgctgacttcaggacg

SEQ ID NO: 917173 - DNA, 25 bp, Homo sapien
ccaagctgggcgcggaggagcccac

SEQ ID NO: 917174 - DNA, 25 bp, Homo sapien
gagacgccatcggagggcaggagct

SEQ ID NO: 917175 - DNA, 25 bp, Homo sapien
ctggagacgccatcggagggcagga

SEQ ID NO: 917176 - DNA, 25 bp, Homo sapien
ggagctgatcctggagaggccaccg

SEQ ID NO: 917177 - DNA, 25 bp, Homo sapien
gagctgatcctggagaggccaccgt

SEQ ID NO: 917178 - DNA, 25 bp, Homo sapien
aaggccgccaggagatgggcaggcg

SEQ ID NO: 917179 - DNA, 25 bp, Homo sapien
gccaggagatgggcaggcgctgagt

SEQ ID NO: 917180 - DNA, 25 bp, Homo sapien
gccgccaggagatgggcaggcgctg

SEQ ID NO: 917181 - DNA, 25 bp, Homo sapien
caaagaggttgttgggaggcagcag

SEQ ID NO: 917182 - DNA, 25 bp, Homo sapien
ccggagaggacgccgggaggctgca

SEQ ID NO: 917183 - DNA, 25 bp, Homo sapien
gagaggacgccgggaggctgcatgt

SEQ ID NO: 917184 - DNA, 25 bp, Homo sapien
agaggacgccgggaggctgcatgtg

SEQ ID NO: 917185 - DNA, 25 bp, Homo sapien
gggaggctgcatgtgggtctggaga

SEQ ID NO: 917186 - DNA, 25 bp, Homo sapien
ggtgtgaggcaagggctcacgctga

SEQ ID NO: 917187 - DNA, 25 bp, Homo sapien
ctcacgctgacctctctcggcgtgg

SEQ ID NO: 917188 - DNA, 25 bp, Homo sapien
ggggccggtgtgaggcaagggctca

SEQ ID NO: 917189 - DNA, 25 bp, Homo sapien
aggggctcacgctgacctctctcgg

SEQ ID NO: 917190 - DNA, 25 bp, Homo sapien
cgtgggaggagccagtgtgaggcag

SEQ ID NO: 917191 - DNA, 25 bp, Homo sapien
gggccggtgtgagccaaggggtcag

SEQ ID NO: 917192 - DNA, 25 bp, Homo sapien
cacgctgacctctctcggcgtgaga

SEQ ID NO: 917193 - DNA, 25 bp, Homo sapien
cgctgacctctctcggcgtgagagg

SEQ ID NO: 917194 - DNA, 25 bp, Homo sapien
gcgggcgcgaagagcttggctcgag

SEQ ID NO: 917195 - DNA, 25 bp, Homo sapien
cgggcgcgaagagcttggctcgaga

SEQ ID NO: 917196 - DNA, 25 bp, Homo sapien
agggccgggcgacgccgacttcagg

SEQ ID NO: 917197 - DNA, 25 bp, Homo sapien
gccgggcgacgccgacttcaggacg

SEQ ID NO: 917198 - DNA, 25 bp, Homo sapien
gcagggccgggcgacgccgacttca

SEQ ID NO: 917199 - DNA, 25 bp, Homo sapien
aggcagggccgggcgacgccgactt

SEQ ID NO: 917200 - DNA, 25 bp, Homo sapien
gagggcaggaggtgatcctggaggc

SEQ ID NO: 917201 - DNA, 25 bp, Homo sapien
gcaggaggtgatcctggaggccacc

SEQ ID NO: 917202 - DNA, 25 bp, Homo sapien
caggaggtgatcctggaggccaccg

SEQ ID NO: 917203 - DNA, 25 bp, Homo sapien
gggcaggaggtgatcctggaggcca

SEQ ID NO: 917204 - DNA, 25 bp, Homo sapien
caaagaggttgttgggaggcagcag

SEQ ID NO: 917205 - DNA, 25 bp, Homo sapien
aaggccgccaggagatgggcaggcg

SEQ ID NO: 917206 - DNA, 25 bp, Homo sapien
gccaggagatgggcaggcgctgagt

SEQ ID NO: 917207 - DNA, 25 bp, Homo sapien
gccgccaggagatgggcaggcgctg

SEQ ID NO: 917208 - DNA, 25 bp, Homo sapien
ggccgttttgaggaatgagccccat

SEQ ID NO: 917209 - DNA, 25 bp, Homo sapien
ctggaaaggccgttttgaggaatga

SEQ ID NO: 917210 - DNA, 25 bp, Homo sapien
agaggccactggcagttgggagctg

SEQ ID NO: 917211 - DNA, 25 bp, Homo sapien
tttgaggaatgagccccatgggcct

SEQ ID NO: 917212 - DNA, 25 bp, Homo sapien
tgggaggatgagctcgtcctggaga

SEQ ID NO: 917213 - DNA, 25 bp, Homo sapien
cgtcctggagatgccgagttaagga

SEQ ID NO: 917214 - DNA, 25 bp, Homo sapien
aggatgagctcgtcctggagatgcc

SEQ ID NO: 917215 - DNA, 25 bp, Homo sapien
gagctcgtcctggagatgccgagtt

SEQ ID NO: 917216 - DNA, 25 bp, Homo sapien
aggcaagagctggatgtagacaggc

SEQ ID NO: 917217 - DNA, 25 bp, Homo sapien
tgaggcaagagctggatgtagacag

SEQ ID NO: 917218 - DNA, 25 bp, Homo sapien
aaaggcccttgtgaggcatgagctt

SEQ ID NO: 917219 - DNA, 25 bp, Homo sapien
caagagctggatgtagacaggccag

SEQ ID NO: 917220 - DNA, 25 bp, Homo sapien
gggtatgggcctaaataggccattg

SEQ ID NO: 917221 - DNA, 25 bp, Homo sapien
gtagggtatgggcctaaataggcca

SEQ ID NO: 917222 - DNA, 25 bp, Homo sapien
tagggtatgggcctaaataggccat

SEQ ID NO: 917223 - DNA, 25 bp, Homo sapien
agggtatgggcctaaataggccatt

SEQ ID NO: 917224 - DNA, 25 bp, Homo sapien
tgtagaatcagtgggcgtgttaagc

SEQ ID NO: 917225 - DNA, 25 bp, Homo sapien
gaatcagtgggcgtgttaagcttgt

SEQ ID NO: 917226 - DNA, 25 bp, Homo sapien
tagaatcagtgggcgtgttaagctt

SEQ ID NO: 917227 - DNA, 25 bp, Homo sapien
ttttcctgcaactggatggtcccac

SEQ ID NO: 917228 - DNA, 25 bp, Homo sapien
tcaagtgcatccaaaacgacccttc

SEQ ID NO: 917229 - DNA, 25 bp, Homo sapien
ttcacagtggtcaagtgcagcaacc

SEQ ID NO: 917230 - DNA, 25 bp, Homo sapien
tgctgtgtggctccttacggctcca

SEQ ID NO: 917231 - DNA, 25 bp, Homo sapien
agtgcagcaaccacttagctcccaa

SEQ ID NO: 917232 - DNA, 25 bp, Homo sapien
tccatgtataggaaaattccaaata

SEQ ID NO: 917233 - DNA, 25 bp, Homo sapien
ctggaatccatgtataggaaaattc

SEQ ID NO: 917234 - DNA, 25 bp, Homo sapien
tcacccctctggaatccatgtatag

SEQ ID NO: 917235 - DNA, 25 bp, Homo sapien
cccctctggaatccatgtataggaa

SEQ ID NO: 917236 - DNA, 25 bp, Homo sapien
agtctcttttcctggattcagaagt

SEQ ID NO: 917237 - DNA, 25 bp, Homo sapien
taacatgttacccagtcagtctctt

SEQ ID NO: 917238 - DNA, 25 bp, Homo sapien
tgaataacatgttacccagtcagtc

SEQ ID NO: 917239 - DNA, 25 bp, Homo sapien
catgttacccagtcagtctcttttc

SEQ ID NO: 917240 - DNA, 25 bp, Homo sapien
ccaacttaagtatgtgtgctactgg

SEQ ID NO: 917241 - DNA, 25 bp, Homo sapien
caacttaagtatgtgtgctactgga

SEQ ID NO: 917242 - DNA, 25 bp, Homo sapien
cttaagtatgtgtgctactggagca

SEQ ID NO: 917243 - DNA, 25 bp, Homo sapien
aagtatgtgtgctactggagcaagc

SEQ ID NO: 917244 - DNA, 25 bp, Homo sapien
cctttgaaagtaatatcctcttaag

SEQ ID NO: 917245 - DNA, 25 bp, Homo sapien
tttgaaagtaatatcctcttaaggc

SEQ ID NO: 917246 - DNA, 25 bp, Homo sapien
tgaaagtaatatcctcttaaggcca

SEQ ID NO: 917247 - DNA, 25 bp, Homo sapien
tcctttgaaagtaatatcctcttaa

SEQ ID NO: 917248 - DNA, 25 bp, Homo sapien
agggtatgggaccatccctggacct

SEQ ID NO: 917249 - DNA, 25 bp, Homo sapien
gactgagtcagcagatcctctaacc

SEQ ID NO: 917250 - DNA, 25 bp, Homo sapien
taaaattagattcggtactggcatg

SEQ ID NO: 917251 - DNA, 25 bp, Homo sapien
taagctggccacatgttccttcagg

SEQ ID NO: 917252 - DNA, 25 bp, Homo sapien
gaaattaaaggcatcctactacctg

SEQ ID NO: 917253 - DNA, 25 bp, Homo sapien
catttttagggtatcagccagttct

SEQ ID NO: 917254 - DNA, 25 bp, Homo sapien
ctctaggtaaggctctgacataggt

SEQ ID NO: 917255 - DNA, 25 bp, Homo sapien
taaggctctgacataggttgcattt

SEQ ID NO: 917256 - DNA, 25 bp, Homo sapien
tctgacataggttgcatttttaggg

SEQ ID NO: 917257 - DNA, 25 bp, Homo sapien
ttctcttctagcagaagactctgca

SEQ ID NO: 917258 - DNA, 25 bp, Homo sapien
catacattgattaagtctttgtttt

SEQ ID NO: 917259 - DNA, 25 bp, Homo sapien
tctagcagaagactctgcatttcac

SEQ ID NO: 917260 - DNA, 25 bp, Homo sapien
gaagactctgcatttcactcccagc

SEQ ID NO: 917261 - DNA, 25 bp, Homo sapien
gttgagcacatctgtcctctataga

SEQ ID NO: 917262 - DNA, 25 bp, Homo sapien
tgtagttgagcacatctgtcctcta

SEQ ID NO: 917263 - DNA, 25 bp, Homo sapien
agttgagcacatctgtcctctatag

SEQ ID NO: 917264 - DNA, 25 bp, Homo sapien
tgagcacatctgtcctctatagatt

SEQ ID NO: 917265 - DNA, 25 bp, Homo sapien
tctctgagtgtttctcttgcatgat

SEQ ID NO: 917266 - DNA, 25 bp, Homo sapien
gtgtttggccaaggtctctttggaa

SEQ ID NO: 917267 - DNA, 25 bp, Homo sapien
cagcattagagagttttttcagaaa

SEQ ID NO: 917268 - DNA, 25 bp, Homo sapien
acattctaaaactgacgtcttttct

SEQ ID NO: 917269 - DNA, 25 bp, Homo sapien
taggttagacatatcagaattcatt

SEQ ID NO: 917270 - DNA, 25 bp, Homo sapien
ggttagacatatcagaattcatttt

SEQ ID NO: 917271 - DNA, 25 bp, Homo sapien
tttaggttagacatatcagaattca

SEQ ID NO: 917272 - DNA, 25 bp, Homo sapien
cttttaggttagacatatcagaatt

SEQ ID NO: 917273 - DNA, 25 bp, Homo sapien
gtaaatgaacccattcatgtcctgt

SEQ ID NO: 917274 - DNA, 25 bp, Homo sapien
cagccagcctgcatcgatatgactg

SEQ ID NO: 917275 - DNA, 25 bp, Homo sapien
ctaggttttcttatgctgtctgact

SEQ ID NO: 917276 - DNA, 25 bp, Homo sapien
tgagaactgagttttattcttagct

SEQ ID NO: 917277 - DNA, 25 bp, Homo sapien
cttctttctcatggctttgagaaat

SEQ ID NO: 917278 - DNA, 25 bp, Homo sapien
tatgcaacaggtcttcttctttctc

SEQ ID NO: 917279 - DNA, 25 bp, Homo sapien
catactatttttatgcaacaggtct

SEQ ID NO: 917280 - DNA, 25 bp, Homo sapien
tatttttatgcaacaggtcttcttc

SEQ ID NO: 917281 - DNA, 25 bp, Homo sapien
actgaactcatttaaggtcgcaatt

SEQ ID NO: 917282 - DNA, 25 bp, Homo sapien
gcctctaaactggctatacatttcc

SEQ ID NO: 917283 - DNA, 25 bp, Homo sapien
tgaaattagatactacttggagaaa

SEQ ID NO: 917284 - DNA, 25 bp, Homo sapien
cctctaaactggctatacatttcct

SEQ ID NO: 917285 - DNA, 25 bp, Homo sapien
attagatactacttggagaaaactt

SEQ ID NO: 917286 - DNA, 25 bp, Homo sapien
tgcttgtgggtatcgcttcgcttct

SEQ ID NO: 917287 - DNA, 25 bp, Homo sapien
tcagaaagttgcttgtgggtatcgc

SEQ ID NO: 917288 - DNA, 25 bp, Homo sapien
tgggtatcgcttcgcttctgcacaa

SEQ ID NO: 917289 - DNA, 25 bp, Homo sapien
aaagttgcttgtgggtatcgcttcg

SEQ ID NO: 917290 - DNA, 25 bp, Homo sapien
tttcagagtctgtttgagttgttgt

SEQ ID NO: 917291 - DNA, 25 bp, Homo sapien
gcaatatatcagcatttcttccctt

SEQ ID NO: 917292 - DNA, 25 bp, Homo sapien
tcctaatgtcctcaattctgtgacc

SEQ ID NO: 917293 - DNA, 25 bp, Homo sapien
gtcttttttaggcaatatatcagca

SEQ ID NO: 917294 - DNA, 25 bp, Homo sapien
ttttccttcaactagacagctccat

SEQ ID NO: 917295 - DNA, 25 bp, Homo sapien
tgttttccttcaactagacagctcc

SEQ ID NO: 917296 - DNA, 25 bp, Homo sapien
atgatgtagaatcagtgaaagtcct

SEQ ID NO: 917297 - DNA, 25 bp, Homo sapien
cttgttttccttcaactagacagct

SEQ ID NO: 917298 - DNA, 25 bp, Homo sapien
gacctttttcatgctctaactgtaa

SEQ ID NO: 917299 - DNA, 25 bp, Homo sapien
agtgttcccatgaaagaactgcatc

SEQ ID NO: 917300 - DNA, 25 bp, Homo sapien
gtgttcccatgaaagaactgcatct

SEQ ID NO: 917301 - DNA, 25 bp, Homo sapien
ttcttgttcccattgacctttttca

SEQ ID NO: 917302 - DNA, 25 bp, Homo sapien
caatggaccttccagtacctgcagg

SEQ ID NO: 917303 - DNA, 25 bp, Homo sapien
gtcttctgtggtgtcccgacatctt

SEQ ID NO: 917304 - DNA, 25 bp, Homo sapien
gtgtcccgacatcttcccaatggac

SEQ ID NO: 917305 - DNA, 25 bp, Homo sapien
ttcccaatggaccttccagtacctg

SEQ ID NO: 917306 - DNA, 25 bp, Homo sapien
ggctgttttcgtgtagacagcaggc

SEQ ID NO: 917307 - DNA, 25 bp, Homo sapien
tgcagcagtggctgttttcgtgtag

SEQ ID NO: 917308 - DNA, 25 bp, Homo sapien
agcagtggctgttttcgtgtagaca

SEQ ID NO: 917309 - DNA, 25 bp, Homo sapien
agtggctgttttcgtgtagacagca

SEQ ID NO: 917310 - DNA, 25 bp, Homo sapien
tttctttcaatgtttggccattgaa

SEQ ID NO: 917311 - DNA, 25 bp, Homo sapien
ttctttcaatgtttggccattgaag

SEQ ID NO: 917312 - DNA, 25 bp, Homo sapien
atgacaggacggccaatatttcttt

SEQ ID NO: 917313 - DNA, 25 bp, Homo sapien
catgacaggacggccaatatttctt

SEQ ID NO: 917314 - DNA, 25 bp, Homo sapien
catcgtagcctgtagtttgtatgat

SEQ ID NO: 917315 - DNA, 25 bp, Homo sapien
aagggtaaatatgcactataggaat

SEQ ID NO: 917316 - DNA, 25 bp, Homo sapien
aagaaaatgaggtgctcatcgtagc

SEQ ID NO: 917317 - DNA, 25 bp, Homo sapien
gggtaaatatgcactataggaatgt

SEQ ID NO: 917318 - DNA, 25 bp, Homo sapien
caacatgtcaacaaacccgtccaaa

SEQ ID NO: 917319 - DNA, 25 bp, Homo sapien
cccaacatgtcaacaaacccgtcca

SEQ ID NO: 917320 - DNA, 25 bp, Homo sapien
tatacccaacatgtcaacaaacccg

SEQ ID NO: 917321 - DNA, 25 bp, Homo sapien
tacccaacatgtcaacaaacccgtc

SEQ ID NO: 917322 - DNA, 25 bp, Homo sapien
tattgtgatttaggagactggcaag

SEQ ID NO: 917323 - DNA, 25 bp, Homo sapien
taaaggcagatgagtttccagcttc

SEQ ID NO: 917324 - DNA, 25 bp, Homo sapien
agtgaaaaataggttctccttagag

SEQ ID NO: 917325 - DNA, 25 bp, Homo sapien
gagactggcaaggcagagctttcta

SEQ ID NO: 917326 - DNA, 25 bp, Homo sapien
aaggcgtcccatggagattctgctc

SEQ ID NO: 917327 - DNA, 25 bp, Homo sapien
atgctccagaaaggcgtcccatgga

SEQ ID NO: 917328 - DNA, 25 bp, Homo sapien
tgatgctccagaaaggcgtcccatg

SEQ ID NO: 917329 - DNA, 25 bp, Homo sapien
agaaaggcgtcccatggagattctg

SEQ ID NO: 917330 - DNA, 25 bp, Homo sapien
taattacttccaggaggtccacgct

SEQ ID NO: 917331 - DNA, 25 bp, Homo sapien
aaagcgtcctacgtggaatgcccag

SEQ ID NO: 917332 - DNA, 25 bp, Homo sapien
cagagaagtggtgaacgtggctcca

SEQ ID NO: 917333 - DNA, 25 bp, Homo sapien
ttcagacactcatgagaaagcgtcc

SEQ ID NO: 917334 - DNA, 25 bp, Homo sapien
ttgccatgggaagtgagtcgggagg

SEQ ID NO: 917335 - DNA, 25 bp, Homo sapien
ggctactgatcgcaggcacctcctt

SEQ ID NO: 917336 - DNA, 25 bp, Homo sapien
gccatgggaagtgagtcgggagggg

SEQ ID NO: 917337 - DNA, 25 bp, Homo sapien
ctggctactgatcgcaggcacctcc

SEQ ID NO: 917338 - DNA, 25 bp, Homo sapien
cctggttcttgaccttctcacttaa

SEQ ID NO: 917339 - DNA, 25 bp, Homo sapien
ctggttcttgaccttctcacttaag

SEQ ID NO: 917340 - DNA, 25 bp, Homo sapien
cttgaccttctcacttaaggttttg

SEQ ID NO: 917341 - DNA, 25 bp, Homo sapien
tggttcttgaccttctcacttaagg

SEQ ID NO: 917342 - DNA, 25 bp, Homo sapien
caaggtgcgttcacgtttctctgtc

SEQ ID NO: 917343 - DNA, 25 bp, Homo sapien
gccaagagtttcctccaagaatgga

SEQ ID NO: 917344 - DNA, 25 bp, Homo sapien
aatcatcgagtatacactgtatttc

SEQ ID NO: 917345 - DNA, 25 bp, Homo sapien
gagggagggtctttgaaaatcatcg

SEQ ID NO: 917346 - DNA, 25 bp, Homo sapien
tggtcactgttgtgcagagacagca

SEQ ID NO: 917347 - DNA, 25 bp, Homo sapien
gactcaccgtcaaatgggggaagat

SEQ ID NO: 917348 - DNA, 25 bp, Homo sapien
agatccggatggtcactgttgtgca

SEQ ID NO: 917349 - DNA, 25 bp, Homo sapien
ctgttggcgagatccggatggtcac

SEQ ID NO: 917350 - DNA, 25 bp, Homo sapien
tttctgactttttctgaccatagac

SEQ ID NO: 917351 - DNA, 25 bp, Homo sapien
ttctgactttttctgaccatagaca

SEQ ID NO: 917352 - DNA, 25 bp, Homo sapien
ctttctgactttttctgaccataga

SEQ ID NO: 917353 - DNA, 25 bp, Homo sapien
tctgactttttctgaccatagacac

SEQ ID NO: 917354 - DNA, 25 bp, Homo sapien
tcctttggacctgccgaggacagca

SEQ ID NO: 917355 - DNA, 25 bp, Homo sapien
tgtgccccactgatggttggatggt

SEQ ID NO: 917356 - DNA, 25 bp, Homo sapien
accagcttctacttgatcgtgcaat

SEQ ID NO: 917357 - DNA, 25 bp, Homo sapien
caggacaacccgatagatcaatggt

SEQ ID NO: 917358 - DNA, 25 bp, Homo sapien
tgtgattaaaagtgaccaccaacta

SEQ ID NO: 917359 - DNA, 25 bp, Homo sapien
taaaagtcaaactgcgtaacatgaa

SEQ ID NO: 917360 - DNA, 25 bp, Homo sapien
atgaaggtgagagcaaagtctccac

SEQ ID NO: 917361 - DNA, 25 bp, Homo sapien
gataggaacccttgaatgctgaagt

SEQ ID NO: 917362 - DNA, 25 bp, Homo sapien
agactcaaatccatccagtacgtga

SEQ ID NO: 917363 - DNA, 25 bp, Homo sapien
tcaaatccatccagtacgtgaccac

SEQ ID NO: 917364 - DNA, 25 bp, Homo sapien
cataggttgatatcgggatcgagta

SEQ ID NO: 917365 - DNA, 25 bp, Homo sapien
atccatccagtacgtgaccacaaag

SEQ ID NO: 917366 - DNA, 25 bp, Homo sapien
cagtttctacatcactgatgtttgg

SEQ ID NO: 917367 - DNA, 25 bp, Homo sapien
cacagggatggttgactctctgtaa

SEQ ID NO: 917368 - DNA, 25 bp, Homo sapien
tccacagggatggttgactctctgt

SEQ ID NO: 917369 - DNA, 25 bp, Homo sapien
tcactgatgtttggtccagtcttag

SEQ ID NO: 917370 - DNA, 25 bp, Homo sapien
ttggaggccattggtcatgaaaagc

SEQ ID NO: 917371 - DNA, 25 bp, Homo sapien
tttggaggccattggtcatgaaaag

SEQ ID NO: 917372 - DNA, 25 bp, Homo sapien
ttttggaggccattggtcatgaaaa

SEQ ID NO: 917373 - DNA, 25 bp, Homo sapien
tgtcaaaaggcctttccttctcatc

SEQ ID NO: 917374 - DNA, 25 bp, Homo sapien
tctgtcaaaaggcctttccttctca

SEQ ID NO: 917375 - DNA, 25 bp, Homo sapien
tgtttcttctgtcaaaaggcctttc

SEQ ID NO: 917376 - DNA, 25 bp, Homo sapien
tcttctgtcaaaaggcctttccttc

SEQ ID NO: 917377 - DNA, 25 bp, Homo sapien
tatgtttcaatcgttcctctccaat

SEQ ID NO: 917378 - DNA, 25 bp, Homo sapien
tgagtaacagtgaaaggctttggca

SEQ ID NO: 917379 - DNA, 25 bp, Homo sapien
tgtatgcgattttttccaacatgac

SEQ ID NO: 917380 - DNA, 25 bp, Homo sapien
ttcccacatattttgcatctgtatg

SEQ ID NO: 917381 - DNA, 25 bp, Homo sapien
tatggccccattctgagctgctagc

SEQ ID NO: 917382 - DNA, 25 bp, Homo sapien
ggaagcagctcctatggccgatccc

SEQ ID NO: 917383 - DNA, 25 bp, Homo sapien
tccccaagtgcaggggtctctgggc

SEQ ID NO: 917384 - DNA, 25 bp, Homo sapien
ccaggaagcagctcctatggccgat

SEQ ID NO: 917385 - DNA, 25 bp, Homo sapien
catgagaatcaccaagcgcagtggc

SEQ ID NO: 917386 - DNA, 25 bp, Homo sapien
tgatttaggaaactgccagggcagc

SEQ ID NO: 917387 - DNA, 25 bp, Homo sapien
tagttcaggcgtagatgactttcca

SEQ ID NO: 917388 - DNA, 25 bp, Homo sapien
tattggtgggcaagtacaatgtcgc

SEQ ID NO: 917389 - DNA, 25 bp, Homo sapien
gcgggaaatcgagctttcaaaacaa

SEQ ID NO: 917390 - DNA, 25 bp, Homo sapien
gctggtctgcgggaaatcgagcttt

SEQ ID NO: 917391 - DNA, 25 bp, Homo sapien
tagactgaatagaggcgaccacttg

SEQ ID NO: 917392 - DNA, 25 bp, Homo sapien
ctactgaatagactgaatagaggcg

SEQ ID NO: 917393 - DNA, 25 bp, Homo sapien
gaggcggtgcgtgtcccaggagaga

SEQ ID NO: 917394 - DNA, 25 bp, Homo sapien
ggaggcggtgcgtgtcccaggagag

SEQ ID NO: 917395 - DNA, 25 bp, Homo sapien
tggaggcggtgcgtgtcccaggaga

SEQ ID NO: 917396 - DNA, 25 bp, Homo sapien
tgtgctgatggatgcccgcagagtc

SEQ ID NO: 917397 - DNA, 25 bp, Homo sapien
ctttgtgctgatggatgcccgcaga

SEQ ID NO: 917398 - DNA, 25 bp, Homo sapien
tgctgatggatgcccgcagagtcct

SEQ ID NO: 917399 - DNA, 25 bp, Homo sapien
tttgtgctgatggatgcccgcagag

SEQ ID NO: 917400 - DNA, 25 bp, Homo sapien
ttttccccgaggacatctttctctg

SEQ ID NO: 917401 - DNA, 25 bp, Homo sapien
ttccccgaggacatctttctctgca

SEQ ID NO: 917402 - DNA, 25 bp, Homo sapien
tagttcattttccccgaggacatct

SEQ ID NO: 917403 - DNA, 25 bp, Homo sapien
tttccccgaggacatctttctctgc

SEQ ID NO: 917404 - DNA, 25 bp, Homo sapien
tttgcctctagagcactgagaggcg

SEQ ID NO: 917405 - DNA, 25 bp, Homo sapien
catttctaatggtaatcttgccaca

SEQ ID NO: 917406 - DNA, 25 bp, Homo sapien
catctggcacggagacaatacagta

SEQ ID NO: 917407 - DNA, 25 bp, Homo sapien
agcctctgcggtcctgttagtgtct

SEQ ID NO: 917408 - DNA, 25 bp, Homo sapien
caatacagtaatgctgaaaaagcct

SEQ ID NO: 917409 - DNA, 25 bp, Homo sapien
ccacgtcctgcagcgcttctttatt

SEQ ID NO: 917410 - DNA, 25 bp, Homo sapien
ttccacgtcctgcagcgcttcttta

SEQ ID NO: 917411 - DNA, 25 bp, Homo sapien
tgattttcatcttccacgtcctgca

SEQ ID NO: 917412 - DNA, 25 bp, Homo sapien
gtcctgcagcgcttctttattctgt

SEQ ID NO: 917413 - DNA, 25 bp, Homo sapien
aagtccatagtgtcattatagcttc

SEQ ID NO: 917414 - DNA, 25 bp, Homo sapien
tgtcattatagcttccttcactcag

SEQ ID NO: 917415 - DNA, 25 bp, Homo sapien
cgtatccagttctgcaattgcatca

SEQ ID NO: 917416 - DNA, 25 bp, Homo sapien
ccttcactcagcgtatccagttctg

SEQ ID NO: 917417 - DNA, 25 bp, Homo sapien
gtagtagaataaggaaaaattgaga

SEQ ID NO: 917418 - DNA, 25 bp, Homo sapien
tcgtagtagaataaggaaaaattga

SEQ ID NO: 917419 - DNA, 25 bp, Homo sapien
cgtagtagaataaggaaaaattgag

SEQ ID NO: 917420 - DNA, 25 bp, Homo sapien
gtggcaaattctgccagatacctgt

SEQ ID NO: 917421 - DNA, 25 bp, Homo sapien
ctgtggcaaattctgccagatacct

SEQ ID NO: 917422 - DNA, 25 bp, Homo sapien
tgtggcaaattctgccagatacctg

SEQ ID NO: 917423 - DNA, 25 bp, Homo sapien
tggaatgaggttttgtccagtacat

SEQ ID NO: 917424 - DNA, 25 bp, Homo sapien
ggaatgaggttttgtccagtacata

SEQ ID NO: 917425 - DNA, 25 bp, Homo sapien
ctggaatgaggttttgtccagtaca

SEQ ID NO: 917426 - DNA, 25 bp, Homo sapien
gaatgaggttttgtccagtacatac

SEQ ID NO: 917427 - DNA, 25 bp, Homo sapien
tctcaaccatttgctgatattccca

SEQ ID NO: 917428 - DNA, 25 bp, Homo sapien
gaaggctcttctagcttcaatcaca

SEQ ID NO: 917429 - DNA, 25 bp, Homo sapien
tagcttcaatcacattgttatatga

SEQ ID NO: 917430 - DNA, 25 bp, Homo sapien
gaaagtgacaacagattaaatttag

SEQ ID NO: 917431 - DNA, 25 bp, Homo sapien
tctttatttagcaggtcattgtttc

SEQ ID NO: 917432 - DNA, 25 bp, Homo sapien
cagtttcatctttatttagcaggtc

SEQ ID NO: 917433 - DNA, 25 bp, Homo sapien
gtcacagtttcatctttatttagca

SEQ ID NO: 917434 - DNA, 25 bp, Homo sapien
ttctcaagatgaaggtgagatttgt

SEQ ID NO: 917435 - DNA, 25 bp, Homo sapien
cagtattccctgtgttgacagatca

SEQ ID NO: 917436 - DNA, 25 bp, Homo sapien
attgacagtattccctgtgttgaca

SEQ ID NO: 917437 - DNA, 25 bp, Homo sapien
tattccctgtgttgacagatcagtc

SEQ ID NO: 917438 - DNA, 25 bp, Homo sapien
tccctgtgttgacagatcagtctgg

SEQ ID NO: 917439 - DNA, 25 bp, Homo sapien
gaagactggctatgcgttcatggac

SEQ ID NO: 917440 - DNA, 25 bp, Homo sapien
tatatcggaaacctccacgagaacg

SEQ ID NO: 917441 - DNA, 25 bp, Homo sapien
gaaagtatcttcaaggacgccaaga

SEQ ID NO: 917442 - DNA, 25 bp, Homo sapien
cagtgttgggatccttcctggtgaa

SEQ ID NO: 917443 - DNA, 25 bp, Homo sapien
tgtttcccacttctaccttccagta

SEQ ID NO: 917444 - DNA, 25 bp, Homo sapien
ttctgagagcccaggatagcagggc

SEQ ID NO: 917445 - DNA, 25 bp, Homo sapien
agtaatgtctgccagaactacactt

SEQ ID NO: 917446 - DNA, 25 bp, Homo sapien
ccagaactacacttctgagagccca

SEQ ID NO: 917447 - DNA, 25 bp, Homo sapien
caagatacacgtaaaagcctttcca

SEQ ID NO: 917448 - DNA, 25 bp, Homo sapien
gaacgagctcgatgcttttccacat

SEQ ID NO: 917449 - DNA, 25 bp, Homo sapien
ttatgttgactaagggccaagatac

SEQ ID NO: 917450 - DNA, 25 bp, Homo sapien
tcctcttatgtctaatgaagtgtga

SEQ ID NO: 917451 - DNA, 25 bp, Homo sapien
cttatgtcaagcaaggtttgagaac

SEQ ID NO: 917452 - DNA, 25 bp, Homo sapien
ttatcttatgtcaagcaaggtttga

SEQ ID NO: 917453 - DNA, 25 bp, Homo sapien
atgcattatcttatgtcaagcaagg

SEQ ID NO: 917454 - DNA, 25 bp, Homo sapien
agtatgcattatcttatgtcaagca

SEQ ID NO: 917455 - DNA, 25 bp, Homo sapien
gccacatccttcacagatgtagggt

SEQ ID NO: 917456 - DNA, 25 bp, Homo sapien
atgaattctcttgtggctaatcagg

SEQ ID NO: 917457 - DNA, 25 bp, Homo sapien
tcttgtggctaatcagggttgagga

SEQ ID NO: 917458 - DNA, 25 bp, Homo sapien
tgccacatccttcacagatgtaggg

SEQ ID NO: 917459 - DNA, 25 bp, Homo sapien
aaggaccgagatccatgtaaaagct

SEQ ID NO: 917460 - DNA, 25 bp, Homo sapien
taaggaccgagatccatgtaaaagc

SEQ ID NO: 917461 - DNA, 25 bp, Homo sapien
ggaccgagatccatgtaaaagcttt

SEQ ID NO: 917462 - DNA, 25 bp, Homo sapien
ctaaggaccgagatccatgtaaaag

SEQ ID NO: 917463 - DNA, 25 bp, Homo sapien
tatgtttagcaaggtgtgagaacca

SEQ ID NO: 917464 - DNA, 25 bp, Homo sapien
atgtttagcaaggtgtgagaaccac

SEQ ID NO: 917465 - DNA, 25 bp, Homo sapien
cttatgtttagcaaggtgtgagaac

SEQ ID NO: 917466 - DNA, 25 bp, Homo sapien
ctcttatgtttagcaaggtgtgaga

SEQ ID NO: 917467 - DNA, 25 bp, Homo sapien
cacatttgccgggtctgtctccaga

SEQ ID NO: 917468 - DNA, 25 bp, Homo sapien
atttgccgggtctgtctccagaatg

SEQ ID NO: 917469 - DNA, 25 bp, Homo sapien
attcttcacatttgccgggtctgtc

SEQ ID NO: 917470 - DNA, 25 bp, Homo sapien
ttcttcacatttgccgggtctgtct

SEQ ID NO: 917471 - DNA, 25 bp, Homo sapien
gattgagcacaacccaaaagcttta

SEQ ID NO: 917472 - DNA, 25 bp, Homo sapien
tatggattctcttctgtagagtaaa

SEQ ID NO: 917473 - DNA, 25 bp, Homo sapien
ttccttatgttcagtgaagattgag

SEQ ID NO: 917474 - DNA, 25 bp, Homo sapien
cacatttattacattgactggtttt

SEQ ID NO: 917475 - DNA, 25 bp, Homo sapien
taaagtattaaggtcactgcttcca

SEQ ID NO: 917476 - DNA, 25 bp, Homo sapien
atgaaggccattgtatctgcttttc

SEQ ID NO: 917477 - DNA, 25 bp, Homo sapien
ctaagaatcaccttttgaaatgaat

SEQ ID NO: 917478 - DNA, 25 bp, Homo sapien
ttgatgaaggccattgtatctgctt

SEQ ID NO: 917479 - DNA, 25 bp, Homo sapien
tccgcagtaaaatgaaaacagcaag

SEQ ID NO: 917480 - DNA, 25 bp, Homo sapien
ctccgcagtaaaatgaaaacagcaa

SEQ ID NO: 917481 - DNA, 25 bp, Homo sapien
caagcatccgtttaacaaaattctt

SEQ ID NO: 917482 - DNA, 25 bp, Homo sapien
tcaagcatccgtttaacaaaattct

SEQ ID NO: 917483 - DNA, 25 bp, Homo sapien
ttcaagcatccgtttaacaaaattc

SEQ ID NO: 917484 - DNA, 25 bp, Homo sapien
cttcaagcatccgtttaacaaaatt

SEQ ID NO: 917485 - DNA, 25 bp, Homo sapien
ggtgtttggctactgcctcctgtct

SEQ ID NO: 917486 - DNA, 25 bp, Homo sapien
ctgggtgtttggctactgcctcctg

SEQ ID NO: 917487 - DNA, 25 bp, Homo sapien
tgtttggctactgcctcctgtctct

SEQ ID NO: 917488 - DNA, 25 bp, Homo sapien
tgggtgtttggctactgcctcctgt

SEQ ID NO: 917489 - DNA, 25 bp, Homo sapien
atgtagaatatgagttgtatattga

SEQ ID NO: 917490 - DNA, 25 bp, Homo sapien
tagaatatgagttgtatattgaagt

SEQ ID NO: 917491 - DNA, 25 bp, Homo sapien
tttaatgtagaatatgagttgtata

SEQ ID NO: 917492 - DNA, 25 bp, Homo sapien
atttaatgtagaatatgagttgtat

SEQ ID NO: 917493 - DNA, 25 bp, Homo sapien
atcacatccctatacaaacgctgct

SEQ ID NO: 917494 - DNA, 25 bp, Homo sapien
cactcttctggggagaattctacag

SEQ ID NO: 917495 - DNA, 25 bp, Homo sapien
atccctatacaaacgctgctgagca

SEQ ID NO: 917496 - DNA, 25 bp, Homo sapien
ctcttctggggagaattctacagcc

SEQ ID NO: 917497 - DNA, 25 bp, Homo sapien
tagcctcacatgtggcacttaattc

SEQ ID NO: 917498 - DNA, 25 bp, Homo sapien
cttagcctcacatgtggcacttaat

SEQ ID NO: 917499 - DNA, 25 bp, Homo sapien
ctcacatgtggcacttaattcaaac

SEQ ID NO: 917500 - DNA, 25 bp, Homo sapien
catgtggcacttaattcaaacaaca

SEQ ID NO: 917501 - DNA, 25 bp, Homo sapien
cttgaggtattcaggaaaatttggt

SEQ ID NO: 917502 - DNA, 25 bp, Homo sapien
ttgaggtattcaggaaaatttggta

SEQ ID NO: 917503 - DNA, 25 bp, Homo sapien
tctctagcataaatgctttctggtg

SEQ ID NO: 917504 - DNA, 25 bp, Homo sapien
taatggcttttcacattcttgtatt

SEQ ID NO: 917505 - DNA, 25 bp, Homo sapien
ataaggtgtgagaatttgttaaatg

SEQ ID NO: 917506 - DNA, 25 bp, Homo sapien
tgtacaatttttctctagcataaat

SEQ ID NO: 917507 - DNA, 25 bp, Homo sapien
aaacatgtgactaccatttaaaggc

SEQ ID NO: 917508 - DNA, 25 bp, Homo sapien
ctaccataaacatgtgactaccatt

SEQ ID NO: 917509 - DNA, 25 bp, Homo sapien
ccataaacatgtgactaccatttaa

SEQ ID NO: 917510 - DNA, 25 bp, Homo sapien
taaacatgtgactaccatttaaagg

SEQ ID NO: 917511 - DNA, 25 bp, Homo sapien
atgaatgatcagatattgtgtaagg

SEQ ID NO: 917512 - DNA, 25 bp, Homo sapien
ctagaatgaatgatcagatattgtg

SEQ ID NO: 917513 - DNA, 25 bp, Homo sapien
ggtttctctctagaatgaatgatca

SEQ ID NO: 917514 - DNA, 25 bp, Homo sapien
tctctctagaatgaatgatcagata

SEQ ID NO: 917515 - DNA, 25 bp, Homo sapien
gccacattctccacacgtgtagtga

SEQ ID NO: 917516 - DNA, 25 bp, Homo sapien
tgtccaatatcaattctctcatgta

SEQ ID NO: 917517 - DNA, 25 bp, Homo sapien
tataagaaaggtttggaactggtca

SEQ ID NO: 917518 - DNA, 25 bp, Homo sapien
acacgtgtagtgattttttccagca

SEQ ID NO: 917519 - DNA, 25 bp, Homo sapien
actggtcaaagacttacgacattct

SEQ ID NO: 917520 - DNA, 25 bp, Homo sapien
ttgagcactggtcaaagacttacga

SEQ ID NO: 917521 - DNA, 25 bp, Homo sapien
gagcactggtcaaagacttacgaca

SEQ ID NO: 917522 - DNA, 25 bp, Homo sapien
gcactggtcaaagacttacgacatt

SEQ ID NO: 917523 - DNA, 25 bp, Homo sapien
tgtccggtgagatgtaagccctggt

SEQ ID NO: 917524 - DNA, 25 bp, Homo sapien
tcttatgtccaatcaggtgtgagca

SEQ ID NO: 917525 - DNA, 25 bp, Homo sapien
ctcttgtgtccggtgagatgtaagc

SEQ ID NO: 917526 - DNA, 25 bp, Homo sapien
ttgtgtccggtgagatgtaagccct

SEQ ID NO: 917527 - DNA, 25 bp, Homo sapien
cagttaaaggctctcttgtatggtt

SEQ ID NO: 917528 - DNA, 25 bp, Homo sapien
accagttaaaggctctcttgtatgg

SEQ ID NO: 917529 - DNA, 25 bp, Homo sapien
gaaccagttaaaggctctcttgtat

SEQ ID NO: 917530 - DNA, 25 bp, Homo sapien
agaaccagttaaaggctctcttgta

SEQ ID NO: 917531 - DNA, 25 bp, Homo sapien
gtcatgttgaataaggattgagcac

SEQ ID NO: 917532 - DNA, 25 bp, Homo sapien
catgttgaataaggattgagcacca

SEQ ID NO: 917533 - DNA, 25 bp, Homo sapien
acattcatcgcattgaaagattttg

SEQ ID NO: 917534 - DNA, 25 bp, Homo sapien
ctgtcatgttgaataaggattgagc

SEQ ID NO: 917535 - DNA, 25 bp, Homo sapien
tctgtcccttacagtaacccacact

SEQ ID NO: 917536 - DNA, 25 bp, Homo sapien
aaatgttttatgctctgctcaggca

SEQ ID NO: 917537 - DNA, 25 bp, Homo sapien
aagtttaaattttcaatgctatagc

SEQ ID NO: 917538 - DNA, 25 bp, Homo sapien
gctaagggtagttgataaatattgg

SEQ ID NO: 917539 - DNA, 25 bp, Homo sapien
aaaatgtttctctcacaccaagatc

SEQ ID NO: 917540 - DNA, 25 bp, Homo sapien
tttctctcacaccaagatcatacat

SEQ ID NO: 917541 - DNA, 25 bp, Homo sapien
aatgtttctctcacaccaagatcat

SEQ ID NO: 917542 - DNA, 25 bp, Homo sapien
tgtttctctcacaccaagatcatac

SEQ ID NO: 917543 - DNA, 25 bp, Homo sapien
tggctagtagaaattcaaataaaaa

SEQ ID NO: 917544 - DNA, 25 bp, Homo sapien
ctagtagaaattcaaataaaaactg

SEQ ID NO: 917545 - DNA, 25 bp, Homo sapien
ttggctagtagaaattcaaataaaa

SEQ ID NO: 917546 - DNA, 25 bp, Homo sapien
gtagaaattcaaataaaaactgaga

SEQ ID NO: 917547 - DNA, 25 bp, Homo sapien
gggccacttccccacggccttcatg

SEQ ID NO: 917548 - DNA, 25 bp, Homo sapien
ttccccacggccttcatgtttagct

SEQ ID NO: 917549 - DNA, 25 bp, Homo sapien
gccacttccccacggccttcatgtt

SEQ ID NO: 917550 - DNA, 25 bp, Homo sapien
acttccccacggccttcatgtttag

SEQ ID NO: 917551 - DNA, 25 bp, Homo sapien
ttcttcttgccacctttgctgccag

SEQ ID NO: 917552 - DNA, 25 bp, Homo sapien
cttcttgccacctttgctgccagac

SEQ ID NO: 917553 - DNA, 25 bp, Homo sapien
tcttcttgccacctttgctgccaga

SEQ ID NO: 917554 - DNA, 25 bp, Homo sapien
ttcttgccacctttgctgccagaca

SEQ ID NO: 917555 - DNA, 25 bp, Homo sapien
gtgcctgccatccattccccaccca

SEQ ID NO: 917556 - DNA, 25 bp, Homo sapien
ggtgcctgccatccattccccaccc

SEQ ID NO: 917557 - DNA, 25 bp, Homo sapien
tgcctgccatccattccccacccat

SEQ ID NO: 917558 - DNA, 25 bp, Homo sapien
gaaggaaccttgctaattgtctacg

SEQ ID NO: 917559 - DNA, 25 bp, Homo sapien
attgtctacgaggaaacagagcccc

SEQ ID NO: 917560 - DNA, 25 bp, Homo sapien
aaaaacactgtgctttgctgtagga

SEQ ID NO: 917561 - DNA, 25 bp, Homo sapien
ggacagtgggtaaagcctgacataa

SEQ ID NO: 917562 - DNA, 25 bp, Homo sapien
ttctaggcaagtttaggcaagtttc

SEQ ID NO: 917563 - DNA, 25 bp, Homo sapien
gatctcaccctgtataatttcaaca

SEQ ID NO: 917564 - DNA, 25 bp, Homo sapien
gtgtaggatctcaccctgtataatt

SEQ ID NO: 917565 - DNA, 25 bp, Homo sapien
tccatctgtgtaggatctcaccctg

SEQ ID NO: 917566 - DNA, 25 bp, Homo sapien
taagtgccggtatcttcttccaaag

SEQ ID NO: 917567 - DNA, 25 bp, Homo sapien
aatgtcaccgtcctagtaagtctgc

SEQ ID NO: 917568 - DNA, 25 bp, Homo sapien
gcaaattctcactagcgctggagta

SEQ ID NO: 917569 - DNA, 25 bp, Homo sapien
cgctggagtacaaagaggcctgacc

SEQ ID NO: 917570 - DNA, 25 bp, Homo sapien
tttggccctacaaaggctggaagga

SEQ ID NO: 917571 - DNA, 25 bp, Homo sapien
ggaggtgggcctaaagagcttgact

SEQ ID NO: 917572 - DNA, 25 bp, Homo sapien
gagcttgactggagaaagttttggc

SEQ ID NO: 917573 - DNA, 25 bp, Homo sapien
tctgtgcaggccaccgcgaggcagg

SEQ ID NO: 917574 - DNA, 25 bp, Homo sapien
gctgggcctctagtggctgtcaaca

SEQ ID NO: 917575 - DNA, 25 bp, Homo sapien
gaggccgccagactggcctctagag

SEQ ID NO: 917576 - DNA, 25 bp, Homo sapien
ctgcggaggccgtcccgaggtggga

SEQ ID NO: 917577 - DNA, 25 bp, Homo sapien
aggctgggcctctagtggctgtcaa

SEQ ID NO: 917578 - DNA, 25 bp, Homo sapien
agttcagggtctacaaaagccggcg

SEQ ID NO: 917579 - DNA, 25 bp, Homo sapien
cgctggagaaagttcagggtctaca

SEQ ID NO: 917580 - DNA, 25 bp, Homo sapien
tcgctggagaaagttcagggtctac

SEQ ID NO: 917581 - DNA, 25 bp, Homo sapien
acttgacgacagtctggtcccgcag

SEQ ID NO: 917582 - DNA, 25 bp, Homo sapien
ctacttgacgacagtctggtcccgc

SEQ ID NO: 917583 - DNA, 25 bp, Homo sapien
ttgacgacagtctggtcccgcagag

SEQ ID NO: 917584 - DNA, 25 bp, Homo sapien
tgacgacagtctggtcccgcagagg

SEQ ID NO: 917585 - DNA, 25 bp, Homo sapien
cgacccgaggccatttgggacctgg

SEQ ID NO: 917586 - DNA, 25 bp, Homo sapien
gtgggcccggtgagcttggcttcag

SEQ ID NO: 917587 - DNA, 25 bp, Homo sapien
gcctgaggtgggcccggtgagcttg

SEQ ID NO: 917588 - DNA, 25 bp, Homo sapien
gacccgaggccatttgggacctgga

SEQ ID NO: 917589 - DNA, 25 bp, Homo sapien
ctacttgacgacagtctggtcccgc

SEQ ID NO: 917590 - DNA, 25 bp, Homo sapien
tgacgacagtctggtcccgcagagg

SEQ ID NO: 917591 - DNA, 25 bp, Homo sapien
ttgacgacagtctggtcccgcagag

SEQ ID NO: 917592 - DNA, 25 bp, Homo sapien
acttgacgacagtctggtcccgcag

SEQ ID NO: 917593 - DNA, 25 bp, Homo sapien
gcgtggagggcccacggttgaggta

SEQ ID NO: 917594 - DNA, 25 bp, Homo sapien
cccaaggcgggagcctggtccgagg

SEQ ID NO: 917595 - DNA, 25 bp, Homo sapien
ttggcctccggagggccgtgaggca

SEQ ID NO: 917596 - DNA, 25 bp, Homo sapien
ggcccacggttgaggtagaggctgg

SEQ ID NO: 917597 - DNA, 25 bp, Homo sapien
tggagacgccgtcggagggcaggag

SEQ ID NO: 917598 - DNA, 25 bp, Homo sapien
cgaccaaggccaccaggagctgggc

SEQ ID NO: 917599 - DNA, 25 bp, Homo sapien
gacccgaggccatttggggcctgga

SEQ ID NO: 917600 - DNA, 25 bp, Homo sapien
ccatttggggcctggagacgccgtc

SEQ ID NO: 917601 - DNA, 25 bp, Homo sapien
tccaaagaggttgttgggaggcagg

SEQ ID NO: 917602 - DNA, 25 bp, Homo sapien
agtccaaagaggttgttgggaggca

SEQ ID NO: 917603 - DNA, 25 bp, Homo sapien
ccaaagaggttgttgggaggcagga

SEQ ID NO: 917604 - DNA, 25 bp, Homo sapien
tgagtccaaagaggttgttgggagg

SEQ ID NO: 917605 - DNA, 25 bp, Homo sapien
gagcccatgcaaaggagcaaacgcc

SEQ ID NO: 917606 - DNA, 25 bp, Homo sapien
caaaggagcaaacgccaggccggga

SEQ ID NO: 917607 - DNA, 25 bp, Homo sapien
cccatgcaaaggagcaaacgccagg

SEQ ID NO: 917608 - DNA, 25 bp, Homo sapien
tgagcttggcctccggagggccgtg

SEQ ID NO: 917609 - DNA, 25 bp, Homo sapien
tggagacgccgtcggagggcaggag

SEQ ID NO: 917610 - DNA, 25 bp, Homo sapien
ccatttggggcctggagacgccgtc

SEQ ID NO: 917611 - DNA, 25 bp, Homo sapien
cctggagacgccgtcggagggcagg

SEQ ID NO: 917612 - DNA, 25 bp, Homo sapien
gacccgaggccatttggggcctgga

SEQ ID NO: 917613 - DNA, 25 bp, Homo sapien
ccaaagaggttgttgggaggcagga

SEQ ID NO: 917614 - DNA, 25 bp, Homo sapien
tgagtccaaagaggttgttgggagg

SEQ ID NO: 917615 - DNA, 25 bp, Homo sapien
tccaaagaggttgttgggaggcagg

SEQ ID NO: 917616 - DNA, 25 bp, Homo sapien
agtccaaagaggttgttgggaggca

SEQ ID NO: 917617 - DNA, 25 bp, Homo sapien
ccggagaggacgccgggaggctgca

SEQ ID NO: 917618 - DNA, 25 bp, Homo sapien
ctgtagacgcagccgggaggaagag

SEQ ID NO: 917619 - DNA, 25 bp, Homo sapien
agaggacgccgggaggctgcaagtg

SEQ ID NO: 917620 - DNA, 25 bp, Homo sapien
gcccggagaggacgccgggaggctg

SEQ ID NO: 917621 - DNA, 25 bp, Homo sapien
ttgacgacaatctggtcccgcagag

SEQ ID NO: 917622 - DNA, 25 bp, Homo sapien
gaggccgactgcaggaagtgcagga

SEQ ID NO: 917623 - DNA, 25 bp, Homo sapien
tgacgacaatctggtcccgcagagg

SEQ ID NO: 917624 - DNA, 25 bp, Homo sapien
cgacaatctggtcccgcagaggctg

SEQ ID NO: 917625 - DNA, 25 bp, Homo sapien
tgagcttggcctccggagggccgtg

SEQ ID NO: 917626 - DNA, 25 bp, Homo sapien
cccatgcaaaggagcaaacgccagg

SEQ ID NO: 917627 - DNA, 25 bp, Homo sapien
gagcccatgcaaaggagcaaacgcc

SEQ ID NO: 917628 - DNA, 25 bp, Homo sapien
caaaggagcaaacgccaggccggga

SEQ ID NO: 917629 - DNA, 25 bp, Homo sapien
agttcagggtctacaaaagccggcg

SEQ ID NO: 917630 - DNA, 25 bp, Homo sapien
aggagctgggccgcacacaggctgc

SEQ ID NO: 917631 - DNA, 25 bp, Homo sapien
tcgctggagaaagttcagggtctac

SEQ ID NO: 917632 - DNA, 25 bp, Homo sapien
gagaaagttcagggtctacaaaagc

SEQ ID NO: 917633 - DNA, 25 bp, Homo sapien
tggagacgccgtcggagggcaggag

SEQ ID NO: 917634 - DNA, 25 bp, Homo sapien
cgaccaaggccaccaggagctgggc

SEQ ID NO: 917635 - DNA, 25 bp, Homo sapien
ccatttggggcctggagacgccgtc

SEQ ID NO: 917636 - DNA, 25 bp, Homo sapien
gacccgaggccatttggggcctgga

SEQ ID NO: 917637 - DNA, 25 bp, Homo sapien
cccatgcaaaggagcaaacgccagg

SEQ ID NO: 917638 - DNA, 25 bp, Homo sapien
tgagcttggcctccggagggccgtg

SEQ ID NO: 917639 - DNA, 25 bp, Homo sapien
gagcccatgcaaaggagcaaacgcc

SEQ ID NO: 917640 - DNA, 25 bp, Homo sapien
caaaggagcaaacgccaggccggga

SEQ ID NO: 917641 - DNA, 25 bp, Homo sapien
agctgtggcacgaccaaggccacca

SEQ ID NO: 917642 - DNA, 25 bp, Homo sapien
tggcacgaccaaggccaccaggagc

SEQ ID NO: 917643 - DNA, 25 bp, Homo sapien
gcttcaggaagctgtggcacgacca

SEQ ID NO: 917644 - DNA, 25 bp, Homo sapien
tgtggcacgaccaaggccaccagga

SEQ ID NO: 917645 - DNA, 25 bp, Homo sapien
ccaaagaggttgttgggaggcagga

SEQ ID NO: 917646 - DNA, 25 bp, Homo sapien
agtccaaagaggttgttgggaggca

SEQ ID NO: 917647 - DNA, 25 bp, Homo sapien
tgagtccaaagaggttgttgggagg

SEQ ID NO: 917648 - DNA, 25 bp, Homo sapien
tccaaagaggttgttgggaggcagg

SEQ ID NO: 917649 - DNA, 25 bp, Homo sapien
cccatgcaaaggagcaaacgccagg

SEQ ID NO: 917650 - DNA, 25 bp, Homo sapien
tgagcttggcctccggagggccgtg

SEQ ID NO: 917651 - DNA, 25 bp, Homo sapien
gagcccatgcaaaggagcaaacgcc

SEQ ID NO: 917652 - DNA, 25 bp, Homo sapien
caaaggagcaaacgccaggccggga

SEQ ID NO: 917653 - DNA, 25 bp, Homo sapien
gagcccatgcaaaggagcaaacgcc

SEQ ID NO: 917654 - DNA, 25 bp, Homo sapien
cccatgcaaaggagcaaacgccagg

SEQ ID NO: 917655 - DNA, 25 bp, Homo sapien
caaaggagcaaacgccaggccggga

SEQ ID NO: 917656 - DNA, 25 bp, Homo sapien
atgcaaaggagcaaacgccaggccg

SEQ ID NO: 917657 - DNA, 25 bp, Homo sapien
cgacagtctggtcccgcagaggctg

SEQ ID NO: 917658 - DNA, 25 bp, Homo sapien
gaggccgactggaggaagtgcagga

SEQ ID NO: 917659 - DNA, 25 bp, Homo sapien
ttgacgacagtctggtcccgcagag

SEQ ID NO: 917660 - DNA, 25 bp, Homo sapien
agaggccgactggaggaagtgcagg

SEQ ID NO: 917661 - DNA, 25 bp, Homo sapien
cctgacgcatgagcttggcctccgg

SEQ ID NO: 917662 - DNA, 25 bp, Homo sapien
gagcccatgcaaaggagcaaacgcc

SEQ ID NO: 917663 - DNA, 25 bp, Homo sapien
caaaggagcaaacgccaggccggga

SEQ ID NO: 917664 - DNA, 25 bp, Homo sapien
tgacgcatgagcttggcctccggag

SEQ ID NO: 917665 - DNA, 25 bp, Homo sapien
agacgccgtcggagggcaggaggtg

SEQ ID NO: 917666 - DNA, 25 bp, Homo sapien
ggagacgccgtcggagggcaggagg

SEQ ID NO: 917667 - DNA, 25 bp, Homo sapien
caggaggtgagcctggagaggccac

SEQ ID NO: 917668 - DNA, 25 bp, Homo sapien
gctgggcccggggagcttggcttca

SEQ ID NO: 917669 - DNA, 25 bp, Homo sapien
caggagtcgggcctgtagatgtagc

SEQ ID NO: 917670 - DNA, 25 bp, Homo sapien
ggagtcgggcctgtagatgtagcca

SEQ ID NO: 917671 - DNA, 25 bp, Homo sapien
agtcgggcctgtagatgtagccagg

SEQ ID NO: 917672 - DNA, 25 bp, Homo sapien
tcgggcctgtagatgtagccaggag

SEQ ID NO: 917673 - DNA, 25 bp, Homo sapien
tgtcctggcgatgccgagttaagca

SEQ ID NO: 917674 - DNA, 25 bp, Homo sapien
ttgtcctggcgatgccgagttaagc

SEQ ID NO: 917675 - DNA, 25 bp, Homo sapien
cctggacaggctgcaaaaggcaaaa

SEQ ID NO: 917676 - DNA, 25 bp, Homo sapien
aaagctgtgcctggaaaagtcgcca

SEQ ID NO: 917677 - DNA, 25 bp, Homo sapien
caaaagctgtgcctggaaaagtcgc

SEQ ID NO: 917678 - DNA, 25 bp, Homo sapien
tctgggcctggacaggctgcaaaag

SEQ ID NO: 917679 - DNA, 25 bp, Homo sapien
aagacctgggcctgtataggctgct

SEQ ID NO: 917680 - DNA, 25 bp, Homo sapien
cgtgaggcatgagttggatgtagag

SEQ ID NO: 917681 - DNA, 25 bp, Homo sapien
agacctgggcctgtataggctgctg

SEQ ID NO: 917682 - DNA, 25 bp, Homo sapien
catgagttggatgtagagaggccag

SEQ ID NO: 917683 - DNA, 25 bp, Homo sapien
agcagctgggcctagagatgccaac

SEQ ID NO: 917684 - DNA, 25 bp, Homo sapien
agcacagcctgtagaggccacctgg

SEQ ID NO: 917685 - DNA, 25 bp, Homo sapien
ttggacctccagacacagtcagaag

SEQ ID NO: 917686 - DNA, 25 bp, Homo sapien
gacttgaggaagtttccggcacgga

SEQ ID NO: 917687 - DNA, 25 bp, Homo sapien
atgcccaccatgctcatgtcttctt

SEQ ID NO: 917688 - DNA, 25 bp, Homo sapien
gtctttgctcaattttcacttagga

SEQ ID NO: 917689 - DNA, 25 bp, Homo sapien
cccctgaccattctatttaacattg

SEQ ID NO: 917690 - DNA, 25 bp, Homo sapien
ccattctatttaacattgccatctg

SEQ ID NO: 917691 - DNA, 25 bp, Homo sapien
tgcttaggtggtcatgcaagtgatg

SEQ ID NO: 917692 - DNA, 25 bp, Homo sapien
tgacaggacatcatgcttaggtggt

SEQ ID NO: 917693 - DNA, 25 bp, Homo sapien
cacatgcacataacagggttcgtgc

SEQ ID NO: 917694 - DNA, 25 bp, Homo sapien
tcaccccaggcattagatcatcagg

SEQ ID NO: 917695 - DNA, 25 bp, Homo sapien
caggccttcatggtctttttgggga

SEQ ID NO: 917696 - DNA, 25 bp, Homo sapien
tttcaggaagattttcattactctc

SEQ ID NO: 917697 - DNA, 25 bp, Homo sapien
gattttcattactctcaggccttca

SEQ ID NO: 917698 - DNA, 25 bp, Homo sapien
ctcaggccttcatggtctttttggg

SEQ ID NO: 917699 - DNA, 25 bp, Homo sapien
attcttgcactgatgaagatggctg

SEQ ID NO: 917700 - DNA, 25 bp, Homo sapien
atggtgcctctaaacaccatggagg

SEQ ID NO: 917701 - DNA, 25 bp, Homo sapien
atggaggcagtggtcactattcttg

SEQ ID NO: 917702 - DNA, 25 bp, Homo sapien
caccatggtgcctctaaacaccatg

SEQ ID NO: 917703 - DNA, 25 bp, Homo sapien
aaaaaagctgatccatcattttcca

SEQ ID NO: 917704 - DNA, 25 bp, Homo sapien
tgcaaaaaagctgatccatcatttt

SEQ ID NO: 917705 - DNA, 25 bp, Homo sapien
aaagctgatccatcattttccacaa

SEQ ID NO: 917706 - DNA, 25 bp, Homo sapien
ttttccacaattcagtgattctggc

SEQ ID NO: 917707 - DNA, 25 bp, Homo sapien
taagtcttcacatgttgaattcgca

SEQ ID NO: 917708 - DNA, 25 bp, Homo sapien
gtcttcacatgttgaattcgcaagt

SEQ ID NO: 917709 - DNA, 25 bp, Homo sapien
gtaagtcttcacatgttgaattcgc

SEQ ID NO: 917710 - DNA, 25 bp, Homo sapien
aagtcttcacatgttgaattcgcaa

SEQ ID NO: 917711 - DNA, 25 bp, Homo sapien
gtctcataagtgtccctcagctgta

SEQ ID NO: 917712 - DNA, 25 bp, Homo sapien
gaagaaactgttggtctcataagtg

SEQ ID NO: 917713 - DNA, 25 bp, Homo sapien
gttggtctcataagtgtccctcagc

SEQ ID NO: 917714 - DNA, 25 bp, Homo sapien
ggaagaagaaactgttggtctcata

SEQ ID NO: 917715 - DNA, 25 bp, Homo sapien
agcacctgaccatactgctaatgcc

SEQ ID NO: 917716 - DNA, 25 bp, Homo sapien
gatgcagcacctgaccatactgcta

SEQ ID NO: 917717 - DNA, 25 bp, Homo sapien
tggatgcagcacctgaccatactgc

SEQ ID NO: 917718 - DNA, 25 bp, Homo sapien
ttgtggatgcagcacctgaccatac

SEQ ID NO: 917719 - DNA, 25 bp, Homo sapien
agtcccagattcaaggctgcagcag

SEQ ID NO: 917720 - DNA, 25 bp, Homo sapien
tcccagattcaaggctgcagcagac

SEQ ID NO: 917721 - DNA, 25 bp, Homo sapien
ccagattcaaggctgcagcagacat

SEQ ID NO: 917722 - DNA, 25 bp, Homo sapien
ggggagtcccagattcaaggctgca

SEQ ID NO: 917723 - DNA, 25 bp, Homo sapien
gacgttgtcgaaggcgcgcctctga

SEQ ID NO: 917724 - DNA, 25 bp, Homo sapien
gcgccctaaggcgtcaccgaagtcg

SEQ ID NO: 917725 - DNA, 25 bp, Homo sapien
acgtcaccgaagtcgcgccctaagg

SEQ ID NO: 917726 - DNA, 25 bp, Homo sapien
gcctctgagacgtcaccgaagtcgc

SEQ ID NO: 917727 - DNA, 25 bp, Homo sapien
gtcttcctggagcgcgcatgcgccg

SEQ ID NO: 917728 - DNA, 25 bp, Homo sapien
tggagcgcgcatgcgccggcgagct

SEQ ID NO: 917729 - DNA, 25 bp, Homo sapien
cacgcgcagccaattggaactcgag

SEQ ID NO: 917730 - DNA, 25 bp, Homo sapien
cgcagccaattggaactcgaggcgg

SEQ ID NO: 917731 - DNA, 25 bp, Homo sapien
acatggcttgactccggagagactc

SEQ ID NO: 917732 - DNA, 25 bp, Homo sapien
catggcttgactccggagagactcc

SEQ ID NO: 917733 - DNA, 25 bp, Homo sapien
agacatggcttgactccggagagac

SEQ ID NO: 917734 - DNA, 25 bp, Homo sapien
gacatggcttgactccggagagact

SEQ ID NO: 917735 - DNA, 25 bp, Homo sapien
ttccagtattcctgcgcaccgtggc

SEQ ID NO: 917736 - DNA, 25 bp, Homo sapien
cctgtgtctgcccatagaaatctcg

SEQ ID NO: 917737 - DNA, 25 bp, Homo sapien
ccgtggcctctgttaggagattcct

SEQ ID NO: 917738 - DNA, 25 bp, Homo sapien
gaaatctcgcatcccttccagtatt

SEQ ID NO: 917739 - DNA, 25 bp, Homo sapien
gcattgtctcatgtggacatccata

SEQ ID NO: 917740 - DNA, 25 bp, Homo sapien
ggtgcattgtctcatgtggacatcc

SEQ ID NO: 917741 - DNA, 25 bp, Homo sapien
ttggtgcattgtctcatgtggacat

SEQ ID NO: 917742 - DNA, 25 bp, Homo sapien
cattgtctcatgtggacatccataa

SEQ ID NO: 917743 - DNA, 25 bp, Homo sapien
ttacatgcagtgtgctgggccacat

SEQ ID NO: 917744 - DNA, 25 bp, Homo sapien
tgtctcccttacatgcagtgtgctg

SEQ ID NO: 917745 - DNA, 25 bp, Homo sapien
ctgaatgtctcccttacatgcagtg

SEQ ID NO: 917746 - DNA, 25 bp, Homo sapien
ggagggaccaaggaatgatctgaaa

SEQ ID NO: 917747 - DNA, 25 bp, Homo sapien
agcctgccgcacacccccaccagga

SEQ ID NO: 917748 - DNA, 25 bp, Homo sapien
ggaagcctgccgcacacccccacca

SEQ ID NO: 917749 - DNA, 25 bp, Homo sapien
ctaggaagcctgccgcacaccccca

SEQ ID NO: 917750 - DNA, 25 bp, Homo sapien
aagcctgccgcacacccccaccagg

SEQ ID NO: 917751 - DNA, 25 bp, Homo sapien
gcagagagatttgacacagagcagt

SEQ ID NO: 917752 - DNA, 25 bp, Homo sapien
tgacacagagcagtaggaacaccag

SEQ ID NO: 917753 - DNA, 25 bp, Homo sapien
cagtaggaacaccagccagtgtgcc

SEQ ID NO: 917754 - DNA, 25 bp, Homo sapien
catcattaatggcagagagatttga

SEQ ID NO: 917755 - DNA, 25 bp, Homo sapien
gagtctctgtggctacacgctgtgc

SEQ ID NO: 917756 - DNA, 25 bp, Homo sapien
agtctctgtggctacacgctgtgca

SEQ ID NO: 917757 - DNA, 25 bp, Homo sapien
tctctgtggctacacgctgtgcata

SEQ ID NO: 917758 - DNA, 25 bp, Homo sapien
tctgtggctacacgctgtgcataca

SEQ ID NO: 917759 - DNA, 25 bp, Homo sapien
tgtgcagccgaaggccacggtgccc

SEQ ID NO: 917760 - DNA, 25 bp, Homo sapien
gagagggcccaaggctaagaggtag

SEQ ID NO: 917761 - DNA, 25 bp, Homo sapien
ggcctggtcccgagagaagagctgc

SEQ ID NO: 917762 - DNA, 25 bp, Homo sapien
caggttgatggcgtaggcctggtcc

SEQ ID NO: 917763 - DNA, 25 bp, Homo sapien
cggtgatcctggtgtgcagggtcag

SEQ ID NO: 917764 - DNA, 25 bp, Homo sapien
gatcctggtgtgcagggtcagtctc

SEQ ID NO: 917765 - DNA, 25 bp, Homo sapien
ttgcggtgatcctggtgtgcagggt

SEQ ID NO: 917766 - DNA, 25 bp, Homo sapien
atcctggtgtgcagggtcagtctct

SEQ ID NO: 917767 - DNA, 25 bp, Homo sapien
gccaccaagatgtaggtgaggctca

SEQ ID NO: 917768 - DNA, 25 bp, Homo sapien
tgtaggtgaggctcatgtcaaacac

SEQ ID NO: 917769 - DNA, 25 bp, Homo sapien
agatgtaggtgaggctcatgtcaaa

SEQ ID NO: 917770 - DNA, 25 bp, Homo sapien
ccaagatgtaggtgaggctcatgtc

SEQ ID NO: 917771 - DNA, 25 bp, Homo sapien
tccacgtccgtgatgaagctgttgt

SEQ ID NO: 917772 - DNA, 25 bp, Homo sapien
tgatgaagctgttgtatggcagcag

SEQ ID NO: 917773 - DNA, 25 bp, Homo sapien
gcatcgcaaagtagatggcgtgata

SEQ ID NO: 917774 - DNA, 25 bp, Homo sapien
ggtacttgtgatgcaggtagtccac

SEQ ID NO: 917775 - DNA, 25 bp, Homo sapien
aagcaagagacgccaggtgagacag

SEQ ID NO: 917776 - DNA, 25 bp, Homo sapien
agcaagagacgccaggtgagacagg

SEQ ID NO: 917777 - DNA, 25 bp, Homo sapien
aaagcaagagacgccaggtgagaca

SEQ ID NO: 917778 - DNA, 25 bp, Homo sapien
tcaaggcactggctcccgacagagc

SEQ ID NO: 917779 - DNA, 25 bp, Homo sapien
tcctcaaggcactggctcccgacag

SEQ ID NO: 917780 - DNA, 25 bp, Homo sapien
ctcctcaaggcactggctcccgaca

SEQ ID NO: 917781 - DNA, 25 bp, Homo sapien
ctcaaggcactggctcccgacagag

SEQ ID NO: 917782 - DNA, 25 bp, Homo sapien
taaccggggctaacgatgtctctgc

SEQ ID NO: 917783 - DNA, 25 bp, Homo sapien
agcccagcggtctaagctgctccaa

SEQ ID NO: 917784 - DNA, 25 bp, Homo sapien
cagccctggttagttgatgcctggt

SEQ ID NO: 917785 - DNA, 25 bp, Homo sapien
tgccctttccgcagcccagcggtct

SEQ ID NO: 917786 - DNA, 25 bp, Homo sapien
gcccggcctggggtcctcggcgcgc

SEQ ID NO: 917787 - DNA, 25 bp, Homo sapien
cggcctggggtcctcggcgcgcccg

SEQ ID NO: 917788 - DNA, 25 bp, Homo sapien
ggcctggggtcctcggcgcgcccgc

SEQ ID NO: 917789 - DNA, 25 bp, Homo sapien
gcgcgcccggcgtcctccgccggtc

SEQ ID NO: 917790 - DNA, 25 bp, Homo sapien
cccagcctcgggccgggcgcgcccg

SEQ ID NO: 917791 - DNA, 25 bp, Homo sapien
cgctcccccagcctcgggccgggcg

SEQ ID NO: 917792 - DNA, 25 bp, Homo sapien
gccgggcgcgcccggcgtcctccgc

SEQ ID NO: 917793 - DNA, 25 bp, Homo sapien
agggggcccaggcatagaacatcag

SEQ ID NO: 917794 - DNA, 25 bp, Homo sapien
gcccaggcatagaacatcagccagc

SEQ ID NO: 917795 - DNA, 25 bp, Homo sapien
ccctggggggctgcgagtgttactg

SEQ ID NO: 917796 - DNA, 25 bp, Homo sapien
gggcccaggcatagaacatcagcca

SEQ ID NO: 917797 - DNA, 25 bp, Homo sapien
tcccaggtgaatggaatcacctggt

SEQ ID NO: 917798 - DNA, 25 bp, Homo sapien
caggtgaatggaatcacctggtggc

SEQ ID NO: 917799 - DNA, 25 bp, Homo sapien
tctcccaggtgaatggaatcacctg

SEQ ID NO: 917800 - DNA, 25 bp, Homo sapien
ttctcccaggtgaatggaatcacct

SEQ ID NO: 917801 - DNA, 25 bp, Homo sapien
ccatcaggagcggagggcgctttgg

SEQ ID NO: 917802 - DNA, 25 bp, Homo sapien
gccatcaggagcggagggcgctttg

SEQ ID NO: 917803 - DNA, 25 bp, Homo sapien
agccatcaggagcggagggcgcttt

SEQ ID NO: 917804 - DNA, 25 bp, Homo sapien
gaaccctgtgactgatccatttgtc

SEQ ID NO: 917805 - DNA, 25 bp, Homo sapien
gattagaatgagtggggtcgtttca

SEQ ID NO: 917806 - DNA, 25 bp, Homo sapien
gggaaccctgtgactgatccatttg

SEQ ID NO: 917807 - DNA, 25 bp, Homo sapien
agtgggaaccctgtgactgatccat

SEQ ID NO: 917808 - DNA, 25 bp, Homo sapien
ctggttcccggaaggatgtcaccca

SEQ ID NO: 917809 - DNA, 25 bp, Homo sapien
tggttcccggaaggatgtcacccag

SEQ ID NO: 917810 - DNA, 25 bp, Homo sapien
agagggttgagttcctcttgcccac

SEQ ID NO: 917811 - DNA, 25 bp, Homo sapien
gctcccaagagggttgagttcctct

SEQ ID NO: 917812 - DNA, 25 bp, Homo sapien
ataaactcggggttcctggtgcctg

SEQ ID NO: 917813 - DNA, 25 bp, Homo sapien
taggagcggccctcgcccatgatgg

SEQ ID NO: 917814 - DNA, 25 bp, Homo sapien
gggatgaaccacctcgcctgacctg

SEQ ID NO: 917815 - DNA, 25 bp, Homo sapien
gaaccacctcgcctgacctgcaatt

SEQ ID NO: 917816 - DNA, 25 bp, Homo sapien
accacctcgcctgacctgcaatttt

SEQ ID NO: 917817 - DNA, 25 bp, Homo sapien
cagggatgaaccacctcgcctgacc

SEQ ID NO: 917818 - DNA, 25 bp, Homo sapien
tcgttcgtggctcttttgcagccaa

SEQ ID NO: 917819 - DNA, 25 bp, Homo sapien
tgcttttgtgatccttcgttcgttc

SEQ ID NO: 917820 - DNA, 25 bp, Homo sapien
cctcccctggcttatgcaaatatga

SEQ ID NO: 917821 - DNA, 25 bp, Homo sapien
tgcaaatatgagtcccccagaaggc

SEQ ID NO: 917822 - DNA, 25 bp, Homo sapien
ctgggcacacttcctcgacggtgac

SEQ ID NO: 917823 - DNA, 25 bp, Homo sapien
ctcgacggtgacaaggcagccgcgt

SEQ ID NO: 917824 - DNA, 25 bp, Homo sapien
acttcctcgacggtgacaaggcagc

SEQ ID NO: 917825 - DNA, 25 bp, Homo sapien
ccctggccgctccttctgggcacac

SEQ ID NO: 917826 - DNA, 25 bp, Homo sapien
tgctttcgctattgtcactttgcca

SEQ ID NO: 917827 - DNA, 25 bp, Homo sapien
tactgcttgatgtccagaaatggcc

SEQ ID NO: 917828 - DNA, 25 bp, Homo sapien
cattctcagtattggtgctttcgct

SEQ ID NO: 917829 - DNA, 25 bp, Homo sapien
tttgaactgtttactgcttgatgtc

SEQ ID NO: 917830 - DNA, 25 bp, Homo sapien
ggccgtaactgcagcgctgccagct

SEQ ID NO: 917831 - DNA, 25 bp, Homo sapien
gggggccgtaactgcagcgctgcca

SEQ ID NO: 917832 - DNA, 25 bp, Homo sapien
gggccgtaactgcagcgctgccagc

SEQ ID NO: 917833 - DNA, 25 bp, Homo sapien
ccgggggccgtaactgcagcgctgc

SEQ ID NO: 917834 - DNA, 25 bp, Homo sapien
gggcgcttctaaggaaccaaactga

SEQ ID NO: 917835 - DNA, 25 bp, Homo sapien
tgcccagcacgttgcaagcacttgg

SEQ ID NO: 917836 - DNA, 25 bp, Homo sapien
caaactgacgctcactctgggcttc

SEQ ID NO: 917837 - DNA, 25 bp, Homo sapien
tcaggatggcctagacttggggaac

SEQ ID NO: 917838 - DNA, 25 bp, Homo sapien
cattggcggtggaggcgtgcaggca

SEQ ID NO: 917839 - DNA, 25 bp, Homo sapien
tgcagtaggccacggcggaccccag

SEQ ID NO: 917840 - DNA, 25 bp, Homo sapien
ccattggcggtggaggcgtgcaggc

SEQ ID NO: 917841 - DNA, 25 bp, Homo sapien
ctgacacgtaggacacagtcatggt

SEQ ID NO: 917842 - DNA, 25 bp, Homo sapien
cacgtaggacacagtcatggtgttc

SEQ ID NO: 917843 - DNA, 25 bp, Homo sapien
gacacgtaggacacagtcatggtgt

SEQ ID NO: 917844 - DNA, 25 bp, Homo sapien
acgtaggacacagtcatggtgttcc

SEQ ID NO: 917845 - DNA, 25 bp, Homo sapien
gaaggagccgttgctgatgcccatg

SEQ ID NO: 917846 - DNA, 25 bp, Homo sapien
gaagaccacacgcaggcaggagcag

SEQ ID NO: 917847 - DNA, 25 bp, Homo sapien
agatcatgggcacgctgccgaagga

SEQ ID NO: 917848 - DNA, 25 bp, Homo sapien
gcccatgagcagtgagaaaatgcag

SEQ ID NO: 917849 - DNA, 25 bp, Homo sapien
taggtcacggcgatggagagcatgt

SEQ ID NO: 917850 - DNA, 25 bp, Homo sapien
aagtctgacaggttgaacacagcca

SEQ ID NO: 917851 - DNA, 25 bp, Homo sapien
ggcacagcgtgatgaagtaggtcac

SEQ ID NO: 917852 - DNA, 25 bp, Homo sapien
tggagagcatgtcggcccagatcac

SEQ ID NO: 917853 - DNA, 25 bp, Homo sapien
accacgtagcggtgcagtaacacgg

SEQ ID NO: 917854 - DNA, 25 bp, Homo sapien
gccaccacgtagcggtgcagtaaca

SEQ ID NO: 917855 - DNA, 25 bp, Homo sapien
caccacgtagcggtgcagtaacacg

SEQ ID NO: 917856 - DNA, 25 bp, Homo sapien
ctgccaccacgtagcggtgcagtaa

SEQ ID NO: 917857 - DNA, 25 bp, Homo sapien
cacagtacgtcaaagcacatgtagg

SEQ ID NO: 917858 - DNA, 25 bp, Homo sapien
tacgtcaaagcacatgtaggccccg

SEQ ID NO: 917859 - DNA, 25 bp, Homo sapien
tggccacagtacgtcaaagcacatg

SEQ ID NO: 917860 - DNA, 25 bp, Homo sapien
ggacccttggccacagtacgtcaaa

SEQ ID NO: 917861 - DNA, 25 bp, Homo sapien
tcaagaccgttctggttctggaccc

SEQ ID NO: 917862 - DNA, 25 bp, Homo sapien
accaatggctccctcgacccgcctc

SEQ ID NO: 917863 - DNA, 25 bp, Homo sapien
ccctcgacccgcctctgcatggcct

SEQ ID NO: 917864 - DNA, 25 bp, Homo sapien
ggcctgtacagctgccggccctgac

SEQ ID NO: 917865 - DNA, 25 bp, Homo sapien
tgctggggaccccgtaggggcagtg

SEQ ID NO: 917866 - DNA, 25 bp, Homo sapien
ggccgtgtggtatagaagagcacga

SEQ ID NO: 917867 - DNA, 25 bp, Homo sapien
gcggccgtgtggtatagaagagcac

SEQ ID NO: 917868 - DNA, 25 bp, Homo sapien
cgcggccgtgtggtatagaagagca

SEQ ID NO: 917869 - DNA, 25 bp, Homo sapien
gccgtgtggtatagaagagcacgaa

SEQ ID NO: 917870 - DNA, 25 bp, Homo sapien
gatgcggctcagagagatcatcacg

SEQ ID NO: 917871 - DNA, 25 bp, Homo sapien
tgctggcgcgctcgtcgggcagcag

SEQ ID NO: 917872 - DNA, 25 bp, Homo sapien
ggctcagagagatcatcacgcccgc

SEQ ID NO: 917873 - DNA, 25 bp, Homo sapien
gaggatgcggctcagagagatcatc

SEQ ID NO: 917874 - DNA, 25 bp, Homo sapien
agctggtcttcaattcctgggctca

SEQ ID NO: 917875 - DNA, 25 bp, Homo sapien
gatagggtctcgctatgctgcccaa

SEQ ID NO: 917876 - DNA, 25 bp, Homo sapien
tcaagtcctcctcccacctcagttt

SEQ ID NO: 917877 - DNA, 25 bp, Homo sapien
tcctcctcccacctcagtttcccaa

SEQ ID NO: 917878 - DNA, 25 bp, Homo sapien
tgaaaggccctgtaattaaaccaca

SEQ ID NO: 917879 - DNA, 25 bp, Homo sapien
aaggccctgtaattaaaccacatct

SEQ ID NO: 917880 - DNA, 25 bp, Homo sapien
tcccttggatgagagcaatgactcc

SEQ ID NO: 917881 - DNA, 25 bp, Homo sapien
atctggaatcctgggcatcgtcctc

SEQ ID NO: 917882 - DNA, 25 bp, Homo sapien
caatgactccagagtgatctcttcc

SEQ ID NO: 917883 - DNA, 25 bp, Homo sapien
tgggcatcgtcctcgattcgccttg

SEQ ID NO: 917884 - DNA, 25 bp, Homo sapien
tgccttcgtaaaagcagagactgaa

SEQ ID NO: 917885 - DNA, 25 bp, Homo sapien
ggatgccttcgtaaaagcagagact

SEQ ID NO: 917886 - DNA, 25 bp, Homo sapien
tctggggctacagcataaaacgctg

SEQ ID NO: 917887 - DNA, 25 bp, Homo sapien
gctacagcataaaacgctgcacgtc

SEQ ID NO: 917888 - DNA, 25 bp, Homo sapien
ttaccaagaaacatagcgctttgct

SEQ ID NO: 917889 - DNA, 25 bp, Homo sapien
gattgtcccagtccatttgctcaag

SEQ ID NO: 917890 - DNA, 25 bp, Homo sapien
aatcccttggattgcatgagactgc

SEQ ID NO: 917891 - DNA, 25 bp, Homo sapien
tttgctgaacccatgattgtcccag

SEQ ID NO: 917892 - DNA, 25 bp, Homo sapien
cacacatagacaaagacgttcttct

SEQ ID NO: 917893 - DNA, 25 bp, Homo sapien
ttttcaccaacttgagggatgccac

SEQ ID NO: 917894 - DNA, 25 bp, Homo sapien
tgagggatgccacgcagatcccatg

SEQ ID NO: 917895 - DNA, 25 bp, Homo sapien
cgcagatcccatggggttgacacac

SEQ ID NO: 917896 - DNA, 25 bp, Homo sapien
ggtggggcaccgcttgctttctcac

SEQ ID NO: 917897 - DNA, 25 bp, Homo sapien
caggtggggcaccgcttgctttctc

SEQ ID NO: 917898 - DNA, 25 bp, Homo sapien
tggggcaccgcttgctttctcacca

SEQ ID NO: 917899 - DNA, 25 bp, Homo sapien
ggggcaccgcttgctttctcaccag

SEQ ID NO: 917900 - DNA, 25 bp, Homo sapien
ttgttcactatttattcgatgagtc

SEQ ID NO: 917901 - DNA, 25 bp, Homo sapien
cactatttattcgatgagtcaggat

SEQ ID NO: 917902 - DNA, 25 bp, Homo sapien
gttcactatttattcgatgagtcag

SEQ ID NO: 917903 - DNA, 25 bp, Homo sapien
tcactatttattcgatgagtcagga

SEQ ID NO: 917904 - DNA, 25 bp, Homo sapien
ctgatgtatgacatgttgacatggc

SEQ ID NO: 917905 - DNA, 25 bp, Homo sapien
acatttctgatgtatgacatgttga

SEQ ID NO: 917906 - DNA, 25 bp, Homo sapien
catgttaagggcaaaccagcaaagc

SEQ ID NO: 917907 - DNA, 25 bp, Homo sapien
atgttaagggcaaaccagcaaagca

SEQ ID NO: 917908 - DNA, 25 bp, Homo sapien
gtctcttaatctggttcggagacag

SEQ ID NO: 917909 - DNA, 25 bp, Homo sapien
cagagtaataagcatgagaccaggc

SEQ ID NO: 917910 - DNA, 25 bp, Homo sapien
tgcagcccttagctaccctttgctg

SEQ ID NO: 917911 - DNA, 25 bp, Homo sapien
agcccttagctaccctttgctggaa

SEQ ID NO: 917912 - DNA, 25 bp, Homo sapien
ccttagctaccctttgctggaatgc

SEQ ID NO: 917913 - DNA, 25 bp, Homo sapien
tgctagagacacttcgtggaagacc

SEQ ID NO: 917914 - DNA, 25 bp, Homo sapien
tcagacatttctgtgtctttcatcc

SEQ ID NO: 917915 - DNA, 25 bp, Homo sapien
cagacatttctgtgtctttcatcct

SEQ ID NO: 917916 - DNA, 25 bp, Homo sapien
tgtgtctttcatcctcaccctggga

SEQ ID NO: 917917 - DNA, 25 bp, Homo sapien
ttctgtgtctttcatcctcaccctg

SEQ ID NO: 917918 - DNA, 25 bp, Homo sapien
acttgtatttccatggcttcccctc

SEQ ID NO: 917919 - DNA, 25 bp, Homo sapien
tacccctttgacttgtatttccatg

SEQ ID NO: 917920 - DNA, 25 bp, Homo sapien
tgtatttccatggcttcccctcccc

SEQ ID NO: 917921 - DNA, 25 bp, Homo sapien
gacttgtatttccatggcttcccct

SEQ ID NO: 917922 - DNA, 25 bp, Homo sapien
tcttgaaaagggctgcccagttctg

SEQ ID NO: 917923 - DNA, 25 bp, Homo sapien
cggccagggagaggagcacggcctt

SEQ ID NO: 917924 - DNA, 25 bp, Homo sapien
cacggccttgggtgtgttcttgaaa

SEQ ID NO: 917925 - DNA, 25 bp, Homo sapien
gtgtgttcttgaaaagggctgccca

SEQ ID NO: 917926 - DNA, 25 bp, Homo sapien
aggcgtcgatgagccggcgcagagg

SEQ ID NO: 917927 - DNA, 25 bp, Homo sapien
taggcgtcgatgagccggcgcagag

SEQ ID NO: 917928 - DNA, 25 bp, Homo sapien
ctggagggtgtaggggtgggtctcg

SEQ ID NO: 917929 - DNA, 25 bp, Homo sapien
ggtgtaggggtgggtctcggatgac

SEQ ID NO: 917930 - DNA, 25 bp, Homo sapien
agggtgtaggggtgggtctcggatg

SEQ ID NO: 917931 - DNA, 25 bp, Homo sapien
gggtgtaggggtgggtctcggatga

SEQ ID NO: 917932 - DNA, 25 bp, Homo sapien
ggtggtactggcagtagatcagcac

SEQ ID NO: 917933 - DNA, 25 bp, Homo sapien
aagccagcacagtcagagcgatcac

SEQ ID NO: 917934 - DNA, 25 bp, Homo sapien
tggtactggcagtagatcagcactg

SEQ ID NO: 917935 - DNA, 25 bp, Homo sapien
ccggtggtactggcagtagatcagc

SEQ ID NO: 917936 - DNA, 25 bp, Homo sapien
gcggcaactgccgtagggtctgggt

SEQ ID NO: 917937 - DNA, 25 bp, Homo sapien
ggcaactgccgtagggtctgggtca

SEQ ID NO: 917938 - DNA, 25 bp, Homo sapien
ctggcggcaactgccgtagggtctg

SEQ ID NO: 917939 - DNA, 25 bp, Homo sapien
gggagctggcggcaactgccgtagg

SEQ ID NO: 917940 - DNA, 25 bp, Homo sapien
agctctggggttgcaccaacaggaa

SEQ ID NO: 917941 - DNA, 25 bp, Homo sapien
cagctctggggttgcaccaacagga

SEQ ID NO: 917942 - DNA, 25 bp, Homo sapien
agttaaggcaggtcccctccagcat

SEQ ID NO: 917943 - DNA, 25 bp, Homo sapien
aagttaaggcaggtcccctccagca

SEQ ID NO: 917944 - DNA, 25 bp, Homo sapien
tgtgtttgccagtattcttctggtg

SEQ ID NO: 917945 - DNA, 25 bp, Homo sapien
gattttcaaggagtctataattccc

SEQ ID NO: 917946 - DNA, 25 bp, Homo sapien
gagtctataattcccactgtcccct

SEQ ID NO: 917947 - DNA, 25 bp, Homo sapien
gtttgtgtttgccagtattcttctg

SEQ ID NO: 917948 - DNA, 25 bp, Homo sapien
ccacacacatatagtagtaaagctc

SEQ ID NO: 917949 - DNA, 25 bp, Homo sapien
acatatagtagtaaagctcacaaac

SEQ ID NO: 917950 - DNA, 25 bp, Homo sapien
cacacacatatagtagtaaagctca

SEQ ID NO: 917951 - DNA, 25 bp, Homo sapien
cacacatatagtagtaaagctcaca

SEQ ID NO: 917952 - DNA, 25 bp, Homo sapien
aattaaaaatccagacaaagtaatg

SEQ ID NO: 917953 - DNA, 25 bp, Homo sapien
taaaaatccagacaaagtaatggaa

SEQ ID NO: 917954 - DNA, 25 bp, Homo sapien
aatccagacaaagtaatggaaaaag

SEQ ID NO: 917955 - DNA, 25 bp, Homo sapien
cagcgaaattaaaaatccagacaaa

SEQ ID NO: 917956 - DNA, 25 bp, Homo sapien
tcagcaatctgggtatgaccaactc

SEQ ID NO: 917957 - DNA, 25 bp, Homo sapien
caatctgggtatgaccaactcttct

SEQ ID NO: 917958 - DNA, 25 bp, Homo sapien
ttaagagatcagcaatctgggtatg

SEQ ID NO: 917959 - DNA, 25 bp, Homo sapien
tgggtatgaccaactcttctgccct

SEQ ID NO: 917960 - DNA, 25 bp, Homo sapien
gatttcagaggttaccgtttctgtg

SEQ ID NO: 917961 - DNA, 25 bp, Homo sapien
tgatttcagaggttaccgtttctgt

SEQ ID NO: 917962 - DNA, 25 bp, Homo sapien
tttcagaggttaccgtttctgtggc

SEQ ID NO: 917963 - DNA, 25 bp, Homo sapien
ttgatttcagaggttaccgtttctg

SEQ ID NO: 917964 - DNA, 25 bp, Homo sapien
ttttctgcttccatagttctcgtag

SEQ ID NO: 917965 - DNA, 25 bp, Homo sapien
gcttccatagttctcgtagtggaca

SEQ ID NO: 917966 - DNA, 25 bp, Homo sapien
ctgcttccatagttctcgtagtgga

SEQ ID NO: 917967 - DNA, 25 bp, Homo sapien
catagttctcgtagtggacattgtt

SEQ ID NO: 917968 - DNA, 25 bp, Homo sapien
aacagcaagagtttgcttctgttaa

SEQ ID NO: 917969 - DNA, 25 bp, Homo sapien
tcataaataaacagcaagagtttgc

SEQ ID NO: 917970 - DNA, 25 bp, Homo sapien
ctgtcataaataaacagcaagagtt

SEQ ID NO: 917971 - DNA, 25 bp, Homo sapien
cataaataaacagcaagagtttgct

SEQ ID NO: 917972 - DNA, 25 bp, Homo sapien
tgtacagtctttttaattctatgag

SEQ ID NO: 917973 - DNA, 25 bp, Homo sapien
tgtcgactttcccaatccagattcc

SEQ ID NO: 917974 - DNA, 25 bp, Homo sapien
atgagaaggacctgggtactctgga

SEQ ID NO: 917975 - DNA, 25 bp, Homo sapien
aattctatgagaaggacctgggtac

SEQ ID NO: 917976 - DNA, 25 bp, Homo sapien
ttttctaccgcttctactcgaggta

SEQ ID NO: 917977 - DNA, 25 bp, Homo sapien
catgaaggaagctacggcatgattt

SEQ ID NO: 917978 - DNA, 25 bp, Homo sapien
tccactctgatcacatacacttttt

SEQ ID NO: 917979 - DNA, 25 bp, Homo sapien
ggtagacatgaaggaagctacggca

SEQ ID NO: 917980 - DNA, 25 bp, Homo sapien
gggcccctctaatgatggactgaaa

SEQ ID NO: 917981 - DNA, 25 bp, Homo sapien
ggagaatatccttaaagaagagaaa

SEQ ID NO: 917982 - DNA, 25 bp, Homo sapien
gtacacttatatttttcaacacaca

SEQ ID NO: 917983 - DNA, 25 bp, Homo sapien
ttcagcacagtaatcactataaatg

SEQ ID NO: 917984 - DNA, 25 bp, Homo sapien
ttcctgtaccataaggtgtgagaat

SEQ ID NO: 917985 - DNA, 25 bp, Homo sapien
taaatgctttcctgtaccataaggt

SEQ ID NO: 917986 - DNA, 25 bp, Homo sapien
ctgatattaatggtttttcacattc

SEQ ID NO: 917987 - DNA, 25 bp, Homo sapien
tcatatttgtaggagtcttcttcag

SEQ ID NO: 917988 - DNA, 25 bp, Homo sapien
acattcaattaaggtttggaactgg

SEQ ID NO: 917989 - DNA, 25 bp, Homo sapien
ctcttacattcaattaaggtttgga

SEQ ID NO: 917990 - DNA, 25 bp, Homo sapien
tatgtattataaggcctgagggtgg

SEQ ID NO: 917991 - DNA, 25 bp, Homo sapien
aggcctgagggtggactttgccata

SEQ ID NO: 917992 - DNA, 25 bp, Homo sapien
tatcttatgtttagcaagacttgaa

SEQ ID NO: 917993 - DNA, 25 bp, Homo sapien
atgtttagcaagacttgaatgccac

SEQ ID NO: 917994 - DNA, 25 bp, Homo sapien
ttatcttatgtttagcaagacttga

SEQ ID NO: 917995 - DNA, 25 bp, Homo sapien
cttatgtttagcaagacttgaatgc

SEQ ID NO: 917996 - DNA, 25 bp, Homo sapien
cctatgtctcataaggttcgaggat

SEQ ID NO: 917997 - DNA, 25 bp, Homo sapien
ctcctatgtctcataaggttcgagg

SEQ ID NO: 917998 - DNA, 25 bp, Homo sapien
tcctatgtctcataaggttcgagga

SEQ ID NO: 917999 - DNA, 25 bp, Homo sapien
ctatgtctcataaggttcgaggata

SEQ ID NO: 918000 - DNA, 25 bp, Homo sapien
tccagtatatcttgttttatctcta

SEQ ID NO: 918001 - DNA, 25 bp, Homo sapien
tgtttatttccagtatatcttgttt

SEQ ID NO: 918002 - DNA, 25 bp, Homo sapien
tgtagtatggtttgaggagcagtta

SEQ ID NO: 918003 - DNA, 25 bp, Homo sapien
tttgaggagcagttaaaggatttgc

SEQ ID NO: 918004 - DNA, 25 bp, Homo sapien
tcccttgtgcacctcatattcaccc

SEQ ID NO: 918005 - DNA, 25 bp, Homo sapien
cccttgtgcacctcatattcaccca

SEQ ID NO: 918006 - DNA, 25 bp, Homo sapien
cctcccttgtgcacctcatattcac

SEQ ID NO: 918007 - DNA, 25 bp, Homo sapien
aacctcccttgtgcacctcatattc

SEQ ID NO: 918008 - DNA, 25 bp, Homo sapien
gtcttgggtgaaatgggaacgcgta

SEQ ID NO: 918009 - DNA, 25 bp, Homo sapien
ctttttggagtgaatctttgatgcc

SEQ ID NO: 918010 - DNA, 25 bp, Homo sapien
tcttgggtgaaatgggaacgcgtaa

SEQ ID NO: 918011 - DNA, 25 bp, Homo sapien
ggagtgaatctttgatgccctgctc

SEQ ID NO: 918012 - DNA, 25 bp, Homo sapien
agacatgatagaacaaaatagaaag

SEQ ID NO: 918013 - DNA, 25 bp, Homo sapien
taaaaagctgcaataacaataacta

SEQ ID NO: 918014 - DNA, 25 bp, Homo sapien
ggagaaaatataatcccttcaacag

SEQ ID NO: 918015 - DNA, 25 bp, Homo sapien
gtatgaccaaataatctgcctcaag

SEQ ID NO: 918016 - DNA, 25 bp, Homo sapien
tctctttatattctgggactcttta

SEQ ID NO: 918017 - DNA, 25 bp, Homo sapien
atattctgggactctttattttgct

SEQ ID NO: 918018 - DNA, 25 bp, Homo sapien
attctgggactctttattttgctcc

SEQ ID NO: 918019 - DNA, 25 bp, Homo sapien
atttctctttatattctgggactct

SEQ ID NO: 918020 - DNA, 25 bp, Homo sapien
ataaattccgctgagcacaatccag

SEQ ID NO: 918021 - DNA, 25 bp, Homo sapien
aattccgctgagcacaatccaggca

SEQ ID NO: 918022 - DNA, 25 bp, Homo sapien
taaattccgctgagcacaatccagg

SEQ ID NO: 918023 - DNA, 25 bp, Homo sapien
atataaattccgctgagcacaatcc

SEQ ID NO: 918024 - DNA, 25 bp, Homo sapien
acaaacaaaaccactcatgaacaca

SEQ ID NO: 918025 - DNA, 25 bp, Homo sapien
aacaaaaccactcatgaacacacaa

SEQ ID NO: 918026 - DNA, 25 bp, Homo sapien
caaaaccactcatgaacacacaagc

SEQ ID NO: 918027 - DNA, 25 bp, Homo sapien
aaaaccactcatgaacacacaagca

SEQ ID NO: 918028 - DNA, 25 bp, Homo sapien
ccacggcagaaagaccgagacttgc

SEQ ID NO: 918029 - DNA, 25 bp, Homo sapien
ggcagaaagaccgagacttgcagaa

SEQ ID NO: 918030 - DNA, 25 bp, Homo sapien
gaaagaccgagacttgcagaaaaca

SEQ ID NO: 918031 - DNA, 25 bp, Homo sapien
cagaaagaccgagacttgcagaaaa

SEQ ID NO: 918032 - DNA, 25 bp, Homo sapien
cagggggtcctggtcttttagccat

SEQ ID NO: 918033 - DNA, 25 bp, Homo sapien
gaatgggatcgggttagtagcccaa

SEQ ID NO: 918034 - DNA, 25 bp, Homo sapien
gatgataccaaggaaacccacaact

SEQ ID NO: 918035 - DNA, 25 bp, Homo sapien
aatttagtggcgttagagtgtctcc

SEQ ID NO: 918036 - DNA, 25 bp, Homo sapien
cagtaaagtccctctcggctaaaat

SEQ ID NO: 918037 - DNA, 25 bp, Homo sapien
ctcttctgcatgagagctgtcctca

SEQ ID NO: 918038 - DNA, 25 bp, Homo sapien
gggaaattgtaatgtatctctggac

SEQ ID NO: 918039 - DNA, 25 bp, Homo sapien
tctgggttctaattacagaaggcat

SEQ ID NO: 918040 - DNA, 25 bp, Homo sapien
cctgcccttagttgggattgtgaca

SEQ ID NO: 918041 - DNA, 25 bp, Homo sapien
ttgcttcaggcattccagttgctcc

SEQ ID NO: 918042 - DNA, 25 bp, Homo sapien
gcatccacatgggtatcaggctcct

SEQ ID NO: 918043 - DNA, 25 bp, Homo sapien
gttgctccacttggttgttcaggca

SEQ ID NO: 918044 - DNA, 25 bp, Homo sapien
gcccttacactctggcaattcttgc

SEQ ID NO: 918045 - DNA, 25 bp, Homo sapien
ttcttctcttttcaggatcactgct

SEQ ID NO: 918046 - DNA, 25 bp, Homo sapien
tcttttcaggatcactgctttcatc

SEQ ID NO: 918047 - DNA, 25 bp, Homo sapien
tcttctcttttcaggatcactgctt

SEQ ID NO: 918048 - DNA, 25 bp, Homo sapien
ctgaggtccatgagttcaggataaa

SEQ ID NO: 918049 - DNA, 25 bp, Homo sapien
tatttcaatgttaaaccctacatct

SEQ ID NO: 918050 - DNA, 25 bp, Homo sapien
atttcaatgttaaaccctacatctt

SEQ ID NO: 918051 - DNA, 25 bp, Homo sapien
cttacgagaaggaaatgcctgattt

SEQ ID NO: 918052 - DNA, 25 bp, Homo sapien
gaaatgcctgattttctgaaaagga

SEQ ID NO: 918053 - DNA, 25 bp, Homo sapien
cctggaccacagattctttccaatc

SEQ ID NO: 918054 - DNA, 25 bp, Homo sapien
tttcctcctggaccacagattcttt

SEQ ID NO: 918055 - DNA, 25 bp, Homo sapien
tgcagtcacatgagtgagctttaac

SEQ ID NO: 918056 - DNA, 25 bp, Homo sapien
agtgcagtcacatgagtgagcttta

SEQ ID NO: 918057 - DNA, 25 bp, Homo sapien
cagtcacatgagtgagctttaacaa

SEQ ID NO: 918058 - DNA, 25 bp, Homo sapien
gatttcagtgcagtcacatgagtga

SEQ ID NO: 918059 - DNA, 25 bp, Homo sapien
ctttttcatagtcaaacaacaggta

SEQ ID NO: 918060 - DNA, 25 bp, Homo sapien
aacaacaggtaagatcatgatatac

SEQ ID NO: 918061 - DNA, 25 bp, Homo sapien
aataattcaactggatcagcatcaa

SEQ ID NO: 918062 - DNA, 25 bp, Homo sapien
tttcaaataattcaactggatcagc

SEQ ID NO: 918063 - DNA, 25 bp, Homo sapien
tgggcagttgtagcgtttcccacac

SEQ ID NO: 918064 - DNA, 25 bp, Homo sapien
gctgggcagttgtagcgtttcccac

SEQ ID NO: 918065 - DNA, 25 bp, Homo sapien
ctgggcagttgtagcgtttcccaca

SEQ ID NO: 918066 - DNA, 25 bp, Homo sapien
cgatggccaacatccaatggtattc

SEQ ID NO: 918067 - DNA, 25 bp, Homo sapien
catccaatggtattcttggcttcca

SEQ ID NO: 918068 - DNA, 25 bp, Homo sapien
ctcgatggccaacatccaatggtat

SEQ ID NO: 918069 - DNA, 25 bp, Homo sapien
tccaatggtattcttggcttccaat

SEQ ID NO: 918070 - DNA, 25 bp, Homo sapien
ctggaaaatgaagatttcatgtcac

SEQ ID NO: 918071 - DNA, 25 bp, Homo sapien
actgtatcctggcaatggcttaata

SEQ ID NO: 918072 - DNA, 25 bp, Homo sapien
cctggcaatggcttaataattatat

SEQ ID NO: 918073 - DNA, 25 bp, Homo sapien
taataattatatagtcaactctcac

SEQ ID NO: 918074 - DNA, 25 bp, Homo sapien
ggcttaataattatatagtcaactc

SEQ ID NO: 918075 - DNA, 25 bp, Homo sapien
cacatccagggagggcatcaccttg

SEQ ID NO: 918076 - DNA, 25 bp, Homo sapien
cagggagggcatcaccttgaactat

SEQ ID NO: 918077 - DNA, 25 bp, Homo sapien
ctggaactcattgtcacatattaag

SEQ ID NO: 918078 - DNA, 25 bp, Homo sapien
cactggaactcattgtcacatatta

SEQ ID NO: 918079 - DNA, 25 bp, Homo sapien
ttttttcttggttattgacacagga

SEQ ID NO: 918080 - DNA, 25 bp, Homo sapien
cttggttattgacacaggaggtttt

SEQ ID NO: 918081 - DNA, 25 bp, Homo sapien
aattttttcttggttattgacacag

SEQ ID NO: 918082 - DNA, 25 bp, Homo sapien
ggttattgacacaggaggtttttca

SEQ ID NO: 918083 - DNA, 25 bp, Homo sapien
tgtgaactatcacttgacatggacc

SEQ ID NO: 918084 - DNA, 25 bp, Homo sapien
tgtagatgagtctcccacttgtgaa

SEQ ID NO: 918085 - DNA, 25 bp, Homo sapien
tattgatcgtggttgtagatgagtc

SEQ ID NO: 918086 - DNA, 25 bp, Homo sapien
tcacttgacatggaccaccgatagt

SEQ ID NO: 918087 - DNA, 25 bp, Homo sapien
tctactgagtacaatggttgctttc

SEQ ID NO: 918088 - DNA, 25 bp, Homo sapien
tcctctactgagtacaatggttgct

SEQ ID NO: 918089 - DNA, 25 bp, Homo sapien
actcctctactgagtacaatggttg

SEQ ID NO: 918090 - DNA, 25 bp, Homo sapien
tactgagtacaatggttgctttcca

SEQ ID NO: 918091 - DNA, 25 bp, Homo sapien
cacagcattttgaggattccagttt

SEQ ID NO: 918092 - DNA, 25 bp, Homo sapien
gccacagcattttgaggattccagt

SEQ ID NO: 918093 - DNA, 25 bp, Homo sapien
ccaaagcatcacagcttccacatat

SEQ ID NO: 918094 - DNA, 25 bp, Homo sapien
agtttcccaaagcatcacagcttcc

SEQ ID NO: 918095 - DNA, 25 bp, Homo sapien
gacttctgcctgaatacaaatttga

SEQ ID NO: 918096 - DNA, 25 bp, Homo sapien
gtatagtggccttctcacaactcca

SEQ ID NO: 918097 - DNA, 25 bp, Homo sapien
cacaactccagttggcagcttcagt

SEQ ID NO: 918098 - DNA, 25 bp, Homo sapien
aactccagttggcagcttcagtggg

SEQ ID NO: 918099 - DNA, 25 bp, Homo sapien
gggcttctccgtagaaagaatgatc

SEQ ID NO: 918100 - DNA, 25 bp, Homo sapien
tctcttcgtattaattctcatgtat

SEQ ID NO: 918101 - DNA, 25 bp, Homo sapien
gaggtgtggttaaatgctccatcac

SEQ ID NO: 918102 - DNA, 25 bp, Homo sapien
tcttcatagttgtagttttcttcgg

SEQ ID NO: 918103 - DNA, 25 bp, Homo sapien
tatgtacaataaaggtttggaactg

SEQ ID NO: 918104 - DNA, 25 bp, Homo sapien
gttctcttgcgttcagtgagatgtg

SEQ ID NO: 918105 - DNA, 25 bp, Homo sapien
cattcatcacattgaaagattaaca

SEQ ID NO: 918106 - DNA, 25 bp, Homo sapien
cacattcatcacattgaaagattaa

SEQ ID NO: 918107 - DNA, 25 bp, Homo sapien
tatgttgaataaagattaagcacca

SEQ ID NO: 918108 - DNA, 25 bp, Homo sapien
cttatgttgaataaagattaagcac

SEQ ID NO: 918109 - DNA, 25 bp, Homo sapien
ctggagtaaaatgagaggacacagc

SEQ ID NO: 918110 - DNA, 25 bp, Homo sapien
tctgcccaggcaaaaggtctggagt

SEQ ID NO: 918111 - DNA, 25 bp, Homo sapien
ttttcaatgccatagctttcatatc

SEQ ID NO: 918112 - DNA, 25 bp, Homo sapien
gaataaatgttttatgctctgccca

SEQ ID NO: 918113 - DNA, 25 bp, Homo sapien
acaatcctcggtttacccgcagcag

SEQ ID NO: 918114 - DNA, 25 bp, Homo sapien
ccgacaatcctcggtttacccgcag

SEQ ID NO: 918115 - DNA, 25 bp, Homo sapien
caatcctcggtttacccgcagcagc

SEQ ID NO: 918116 - DNA, 25 bp, Homo sapien
gacaatcctcggtttacccgcagca

SEQ ID NO: 918117 - DNA, 25 bp, Homo sapien
atccataacctcaacaataaacaag

SEQ ID NO: 918118 - DNA, 25 bp, Homo sapien
atcatccataacctcaacaataaac

SEQ ID NO: 918119 - DNA, 25 bp, Homo sapien
ataacctcaacaataaacaagatac

SEQ ID NO: 918120 - DNA, 25 bp, Homo sapien
ccataacctcaacaataaacaagat

SEQ ID NO: 918121 - DNA, 25 bp, Homo sapien
cacatgggttatagccatgactaat

SEQ ID NO: 918122 - DNA, 25 bp, Homo sapien
ttattcccacatgggttatagccat

SEQ ID NO: 918123 - DNA, 25 bp, Homo sapien
catcactgtacttcaagaacactaa

SEQ ID NO: 918124 - DNA, 25 bp, Homo sapien
accatcactgtacttcaagaacact

SEQ ID NO: 918125 - DNA, 25 bp, Homo sapien
accataatagccctgacaattctcc

SEQ ID NO: 918126 - DNA, 25 bp, Homo sapien
gccctgacaattctccaccttttat

SEQ ID NO: 918127 - DNA, 25 bp, Homo sapien
taatagccctgacaattctccacct

SEQ ID NO: 918128 - DNA, 25 bp, Homo sapien
ttcaccataatagccctgacaattc

SEQ ID NO: 918129 - DNA, 25 bp, Homo sapien
ttagtcaccgacgtattcacactca

SEQ ID NO: 918130 - DNA, 25 bp, Homo sapien
tcagaggacagccagttgaacatcc

SEQ ID NO: 918131 - DNA, 25 bp, Homo sapien
ttcacactcacatgaatcagaggac

SEQ ID NO: 918132 - DNA, 25 bp, Homo sapien
catcctttcattaccatcggacaga

SEQ ID NO: 918133 - DNA, 25 bp, Homo sapien
ctcagagaaaaagcattcccacttc

SEQ ID NO: 918134 - DNA, 25 bp, Homo sapien
gagaaaaagcattcccacttcacca

SEQ ID NO: 918135 - DNA, 25 bp, Homo sapien
gctgagattctaattaaactattct

SEQ ID NO: 918136 - DNA, 25 bp, Homo sapien
gaaaaagcattcccacttcaccatc

SEQ ID NO: 918137 - DNA, 25 bp, Homo sapien
cactgcagtcccgcgtagttgaaga

SEQ ID NO: 918138 - DNA, 25 bp, Homo sapien
actgtcatgctccacaccggtggtg

SEQ ID NO: 918139 - DNA, 25 bp, Homo sapien
tgctccacaccggtggtgatggtga

SEQ ID NO: 918140 - DNA, 25 bp, Homo sapien
cgcgtagttgaagaagtcagtctgt

SEQ ID NO: 918141 - DNA, 25 bp, Homo sapien
gtagcagatggtccctggtggcagg

SEQ ID NO: 918142 - DNA, 25 bp, Homo sapien
tcatgtagcagatggtccctggtgg

SEQ ID NO: 918143 - DNA, 25 bp, Homo sapien
gcagatggtccctggtggcagggac

SEQ ID NO: 918144 - DNA, 25 bp, Homo sapien
tgtagcagatggtccctggtggcag

SEQ ID NO: 918145 - DNA, 25 bp, Homo sapien
gggttgagcatattactgatgttga

SEQ ID NO: 918146 - DNA, 25 bp, Homo sapien
tactgatgttgattagtgacgcaga

SEQ ID NO: 918147 - DNA, 25 bp, Homo sapien
gatgttgattagtgacgcagaggca

SEQ ID NO: 918148 - DNA, 25 bp, Homo sapien
catattactgatgttgattagtgac

SEQ ID NO: 918149 - DNA, 25 bp, Homo sapien
gaccaagctgctgatgtcagcccct

SEQ ID NO: 918150 - DNA, 25 bp, Homo sapien
tgctctagcgtgttgacaccattca

SEQ ID NO: 918151 - DNA, 25 bp, Homo sapien
cctcatgctctagcgtgttgacacc

SEQ ID NO: 918152 - DNA, 25 bp, Homo sapien
ctggaccaagctgctgatgtcagcc

SEQ ID NO: 918153 - DNA, 25 bp, Homo sapien
tgctgggggtcccatgctggtcggc

SEQ ID NO: 918154 - DNA, 25 bp, Homo sapien
gctgggggtcccatgctggtcggca

SEQ ID NO: 918155 - DNA, 25 bp, Homo sapien
tgggggtcccatgctggtcggcagc

SEQ ID NO: 918156 - DNA, 25 bp, Homo sapien
ggtcccatgctggtcggcagccatg

SEQ ID NO: 918157 - DNA, 25 bp, Homo sapien
ccctgcctgctcctggctgcactga

SEQ ID NO: 918158 - DNA, 25 bp, Homo sapien
cctgcctgctcctggctgcactgac

SEQ ID NO: 918159 - DNA, 25 bp, Homo sapien
ccaccctgcctgctcctggctgcac

SEQ ID NO: 918160 - DNA, 25 bp, Homo sapien
accctgcctgctcctggctgcactg

SEQ ID NO: 918161 - DNA, 25 bp, Homo sapien
tcccattcgtacaacatccagctaa

SEQ ID NO: 918162 - DNA, 25 bp, Homo sapien
acctcccattcgtacaacatccagc

SEQ ID NO: 918163 - DNA, 25 bp, Homo sapien
ccattcgtacaacatccagctaaca

SEQ ID NO: 918164 - DNA, 25 bp, Homo sapien
cattcgtacaacatccagctaacaa

SEQ ID NO: 918165 - DNA, 25 bp, Homo sapien
ggaaccagcacgtccagggtggggc

SEQ ID NO: 918166 - DNA, 25 bp, Homo sapien
ctgaagggaaccagcacgtccaggg

SEQ ID NO: 918167 - DNA, 25 bp, Homo sapien
aaccagcacgtccagggtggggcct

SEQ ID NO: 918168 - DNA, 25 bp, Homo sapien
ccagcacgtccagggtggggcctga

SEQ ID NO: 918169 - DNA, 25 bp, Homo sapien
tctgcaggagcacttcctcctcttc

SEQ ID NO: 918170 - DNA, 25 bp, Homo sapien
gggctctgcaggagcacttcctcct

SEQ ID NO: 918171 - DNA, 25 bp, Homo sapien
gctctgcaggagcacttcctcctct

SEQ ID NO: 918172 - DNA, 25 bp, Homo sapien
agggggctctgcaggagcacttcct

SEQ ID NO: 918173 - DNA, 25 bp, Homo sapien
cccatccactagtcccgctccaagc

SEQ ID NO: 918174 - DNA, 25 bp, Homo sapien
ctcctctgccttggtcttcccggtt

SEQ ID NO: 918175 - DNA, 25 bp, Homo sapien
cgggtccccatccactagtcccgct

SEQ ID NO: 918176 - DNA, 25 bp, Homo sapien
ggtccccatccactagtcccgctcc

SEQ ID NO: 918177 - DNA, 25 bp, Homo sapien
gccctggcgtcggttgtccaaatcg

SEQ ID NO: 918178 - DNA, 25 bp, Homo sapien
gtccaaatcggcagggaagctccag

SEQ ID NO: 918179 - DNA, 25 bp, Homo sapien
gctcccgcgacggactctccttggg

SEQ ID NO: 918180 - DNA, 25 bp, Homo sapien
cgtcggttgtccaaatcggcaggga

SEQ ID NO: 918181 - DNA, 25 bp, Homo sapien
cttgcagtgccagcacacagcaaca

SEQ ID NO: 918182 - DNA, 25 bp, Homo sapien
gccacctcgccgggatgtttcctcc

SEQ ID NO: 918183 - DNA, 25 bp, Homo sapien
ccacctcgccgggatgtttcctcct

SEQ ID NO: 918184 - DNA, 25 bp, Homo sapien
agccacctcgccgggatgtttcctc

SEQ ID NO: 918185 - DNA, 25 bp, Homo sapien
cagccatcggccacaactggctgtt

SEQ ID NO: 918186 - DNA, 25 bp, Homo sapien
ttttacacacgtgagctgctgtttc

SEQ ID NO: 918187 - DNA, 25 bp, Homo sapien
tcctcctcttttacacacgtgagct

SEQ ID NO: 918188 - DNA, 25 bp, Homo sapien
gagccaccacgactgttttctcctc

SEQ ID NO: 918189 - DNA, 25 bp, Homo sapien
ctcctcctcctttacaggcctgagc

SEQ ID NO: 918190 - DNA, 25 bp, Homo sapien
ctcctcctcttttacaggcatgagc

SEQ ID NO: 918191 - DNA, 25 bp, Homo sapien
caccaagcctggctatttcctccac

SEQ ID NO: 918192 - DNA, 25 bp, Homo sapien
agcctggctatttcctccacctcct

SEQ ID NO: 918193 - DNA, 25 bp, Homo sapien
agaatccaaaattccccatgctacc

SEQ ID NO: 918194 - DNA, 25 bp, Homo sapien
aaaattccccatgctacctatcaca

SEQ ID NO: 918195 - DNA, 25 bp, Homo sapien
gagaatccaaaattccccatgctac

SEQ ID NO: 918196 - DNA, 25 bp, Homo sapien
atccaaaattccccatgctacctat

SEQ ID NO: 918197 - DNA, 25 bp, Homo sapien
aatcactttaattaagctaagccat

SEQ ID NO: 918198 - DNA, 25 bp, Homo sapien
tgtattctgcatcaattgaatgcaa

SEQ ID NO: 918199 - DNA, 25 bp, Homo sapien
tgaatgcaaatcaatcactttaatt

SEQ ID NO: 918200 - DNA, 25 bp, Homo sapien
ctaaagactgcaaaactgtattctg

SEQ ID NO: 918201 - DNA, 25 bp, Homo sapien
ctagactgttgggacttaaacccat

SEQ ID NO: 918202 - DNA, 25 bp, Homo sapien
gctagactgttgggacttaaaccca

SEQ ID NO: 918203 - DNA, 25 bp, Homo sapien
agactgttgggacttaaacccatga

SEQ ID NO: 918204 - DNA, 25 bp, Homo sapien
tagactgttgggacttaaacccatg

SEQ ID NO: 918205 - DNA, 25 bp, Homo sapien
agccccagcaggattgaaggtgctc

SEQ ID NO: 918206 - DNA, 25 bp, Homo sapien
gaagccccagcaggattgaaggtgc

SEQ ID NO: 918207 - DNA, 25 bp, Homo sapien
tttgcaatgcaacatgaaaatcacc

SEQ ID NO: 918208 - DNA, 25 bp, Homo sapien
gcaatgcaacatgaaaatcacctca

SEQ ID NO: 918209 - DNA, 25 bp, Homo sapien
tacagtctaatgcttacccggcctt

SEQ ID NO: 918210 - DNA, 25 bp, Homo sapien
gatttacagtctaatgcttacccgg

SEQ ID NO: 918211 - DNA, 25 bp, Homo sapien
ctgctaaaaagaggccttgacctct

SEQ ID NO: 918212 - DNA, 25 bp, Homo sapien
tttacagtctaatgcttacccggcc

SEQ ID NO: 918213 - DNA, 25 bp, Homo sapien
gtctaatgcttactcggccttttta

SEQ ID NO: 918214 - DNA, 25 bp, Homo sapien
tctaatgcttactcggcctttttac

SEQ ID NO: 918215 - DNA, 25 bp, Homo sapien
tacagtctaatgcttactcggcctt

SEQ ID NO: 918216 - DNA, 25 bp, Homo sapien
cagtctaatgcttactcggcctttt

SEQ ID NO: 918217 - DNA, 25 bp, Homo sapien
cgacatagcattttcccggataaat

SEQ ID NO: 918218 - DNA, 25 bp, Homo sapien
tttcggcaactggttaatccctctg

SEQ ID NO: 918219 - DNA, 25 bp, Homo sapien
tctgataactggcgcccccgacata

SEQ ID NO: 918220 - DNA, 25 bp, Homo sapien
caactggttaatccctctgataact

SEQ ID NO: 918221 - DNA, 25 bp, Homo sapien
ccatctaccaacttagaatgactgt

SEQ ID NO: 918222 - DNA, 25 bp, Homo sapien
tgcacaaccatctaccaacttagaa

SEQ ID NO: 918223 - DNA, 25 bp, Homo sapien
cttagaatgactgtatggctgtcca

SEQ ID NO: 918224 - DNA, 25 bp, Homo sapien
aaagttctaacaattgcacaaccat

SEQ ID NO: 918225 - DNA, 25 bp, Homo sapien
aggaatagaacctccacagactgtt

SEQ ID NO: 918226 - DNA, 25 bp, Homo sapien
ggaaggaatagaacctccacagact

SEQ ID NO: 918227 - DNA, 25 bp, Homo sapien
cccataacctctacaagtttctcga

SEQ ID NO: 918228 - DNA, 25 bp, Homo sapien
atcccataacctctacaagtttctc

SEQ ID NO: 918229 - DNA, 25 bp, Homo sapien
ccgacaatcctcggtttacccacag

SEQ ID NO: 918230 - DNA, 25 bp, Homo sapien
caatcctcggtttacccacagcagc

SEQ ID NO: 918231 - DNA, 25 bp, Homo sapien
gacaatcctcggtttacccacagca

SEQ ID NO: 918232 - DNA, 25 bp, Homo sapien
acaatcctcggtttacccacagcag

SEQ ID NO: 918233 - DNA, 25 bp, Homo sapien
caggggtttcaattacctgagccca

SEQ ID NO: 918234 - DNA, 25 bp, Homo sapien
tggaagtactcctcccgaatacatc

SEQ ID NO: 918235 - DNA, 25 bp, Homo sapien
tacatctgtattacttgcatcaggg

SEQ ID NO: 918236 - DNA, 25 bp, Homo sapien
ctctagaactaggaggacaccgacc

SEQ ID NO: 918237 - DNA, 25 bp, Homo sapien
accatcactgtacttcaagaacact

SEQ ID NO: 918238 - DNA, 25 bp, Homo sapien
cacatgggttatagccatgactaat

SEQ ID NO: 918239 - DNA, 25 bp, Homo sapien
gattcccacatgggttatagccatg

SEQ ID NO: 918240 - DNA, 25 bp, Homo sapien
catcactgtacttcaagaacactaa

SEQ ID NO: 918241 - DNA, 25 bp, Homo sapien
ttctgaggcgctaccgtaaccacaa

SEQ ID NO: 918242 - DNA, 25 bp, Homo sapien
gtaaccacaaacctactatcagcca

SEQ ID NO: 918243 - DNA, 25 bp, Homo sapien
cggaggtggatttccagttgacaaa

SEQ ID NO: 918244 - DNA, 25 bp, Homo sapien
aaagccactcttacacgattcttcg

SEQ ID NO: 918245 - DNA, 25 bp, Homo sapien
tatttgcatacgcaatcttatgatc

SEQ ID NO: 918246 - DNA, 25 bp, Homo sapien
cccaataaactatgaggcgtactgg

SEQ ID NO: 918247 - DNA, 25 bp, Homo sapien
ggcgtactggcccttcgattatcca

SEQ ID NO: 918248 - DNA, 25 bp, Homo sapien
ttttatttgcatacgcaatcttatg

SEQ ID NO: 918249 - DNA, 25 bp, Homo sapien
agccgagattctaattaaactattc

SEQ ID NO: 918250 - DNA, 25 bp, Homo sapien
atcaacacccaaagccgagattcta

SEQ ID NO: 918251 - DNA, 25 bp, Homo sapien
caaagccgagattctaattaaacta

SEQ ID NO: 918252 - DNA, 25 bp, Homo sapien
accatcaacacccaaagccgagatt

SEQ ID NO: 918253 - DNA, 25 bp, Homo sapien
caccaaaccaattgtagaagtcaca

SEQ ID NO: 918254 - DNA, 25 bp, Homo sapien
ccatcggctgtagtagtacttggat

SEQ ID NO: 918255 - DNA, 25 bp, Homo sapien
tggtcccctgtccatcggctgtagt

SEQ ID NO: 918256 - DNA, 25 bp, Homo sapien
cttggatttgatttccaccaaacca

SEQ ID NO: 918257 - DNA, 25 bp, Homo sapien
ccagacaaagtaacccctgagatat

SEQ ID NO: 918258 - DNA, 25 bp, Homo sapien
tgtgttccagacaaagtaacccctg

SEQ ID NO: 918259 - DNA, 25 bp, Homo sapien
gttccagacaaagtaacccctgaga

SEQ ID NO: 918260 - DNA, 25 bp, Homo sapien
tgttccagacaaagtaacccctgag

SEQ ID NO: 918261 - DNA, 25 bp, Homo sapien
gggcctccattctgcgaaggccacc

SEQ ID NO: 918262 - DNA, 25 bp, Homo sapien
ctcagttcacaggcctccccagtct

SEQ ID NO: 918263 - DNA, 25 bp, Homo sapien
tgtggttgaggcaggatggtaccca

SEQ ID NO: 918264 - DNA, 25 bp, Homo sapien
tgtccctagcaggaagaccacaggg

SEQ ID NO: 918265 - DNA, 25 bp, Homo sapien
aggtgttggtcatatcgtggttggt

SEQ ID NO: 918266 - DNA, 25 bp, Homo sapien
gtgttggtcatatcgtggttggtcc

SEQ ID NO: 918267 - DNA, 25 bp, Homo sapien
ggtgttggtcatatcgtggttggtc

SEQ ID NO: 918268 - DNA, 25 bp, Homo sapien
accaggaccaggctgctgatgttgg

SEQ ID NO: 918269 - DNA, 25 bp, Homo sapien
tgatggtgacagtgatgtggaggtg

SEQ ID NO: 918270 - DNA, 25 bp, Homo sapien
ctgatgttggcctggaaggggagac

SEQ ID NO: 918271 - DNA, 25 bp, Homo sapien
gagtgagtgtgttgttgatggtgac

SEQ ID NO: 918272 - DNA, 25 bp, Homo sapien
ctccagcgcttcgatcccattcacc

SEQ ID NO: 918273 - DNA, 25 bp, Homo sapien
cctccagcgcttcgatcccattcac

SEQ ID NO: 918274 - DNA, 25 bp, Homo sapien
tccagcgcttcgatcccattcaccc

SEQ ID NO: 918275 - DNA, 25 bp, Homo sapien
ccagcgcttcgatcccattcaccca

SEQ ID NO: 918276 - DNA, 25 bp, Homo sapien
cctgcctcctcctggccacactgac

SEQ ID NO: 918277 - DNA, 25 bp, Homo sapien
aaaggctgcggccaccagtcctggc

SEQ ID NO: 918278 - DNA, 25 bp, Homo sapien
gccaatgtcgttgaaggtggaagaa

SEQ ID NO: 918279 - DNA, 25 bp, Homo sapien
gggtcacttcctgttcgtaccacat

SEQ ID NO: 918280 - DNA, 25 bp, Homo sapien
cacatctggccgaaaaaaggctgcg

SEQ ID NO: 918281 - DNA, 25 bp, Homo sapien
tttgtgcacctgggctagtggagcc

SEQ ID NO: 918282 - DNA, 25 bp, Homo sapien
gtcaactgccagagtggtttgtgca

SEQ ID NO: 918283 - DNA, 25 bp, Homo sapien
ccagtccgaggcaagaaagttcaga

SEQ ID NO: 918284 - DNA, 25 bp, Homo sapien
gaggcaagaaagttcagacgcataa

SEQ ID NO: 918285 - DNA, 25 bp, Homo sapien
tctcgcagccgaggaccgtaacact

SEQ ID NO: 918286 - DNA, 25 bp, Homo sapien
gccgaggaccgtaacactgctccta

SEQ ID NO: 918287 - DNA, 25 bp, Homo sapien
cgcagccgaggaccgtaacactgct

SEQ ID NO: 918288 - DNA, 25 bp, Homo sapien
gaccgtaacactgctcctagaagcc

SEQ ID NO: 918289 - DNA, 25 bp, Homo sapien
gcttcttgagctcccgcgacgggct

SEQ ID NO: 918290 - DNA, 25 bp, Homo sapien
tgtagcgccaagcatcctcttatgc

SEQ ID NO: 918291 - DNA, 25 bp, Homo sapien
cagggaggatgtagcgccaagcatc

SEQ ID NO: 918292 - DNA, 25 bp, Homo sapien
tcttctggccttattaaatgatggt

SEQ ID NO: 918293 - DNA, 25 bp, Homo sapien
tttaacacatgtctgccccgtgggc

SEQ ID NO: 918294 - DNA, 25 bp, Homo sapien
tgtgagatgcggggtgtccagtgtc

SEQ ID NO: 918295 - DNA, 25 bp, Homo sapien
ctgtgagatgcggggtgtccagtgt

SEQ ID NO: 918296 - DNA, 25 bp, Homo sapien
aatcctcaaggggactgcccgctgc

SEQ ID NO: 918297 - DNA, 25 bp, Homo sapien
aggctgatgacatggaatcctcaag

SEQ ID NO: 918298 - DNA, 25 bp, Homo sapien
aggcactgggaagccctcgggccag

SEQ ID NO: 918299 - DNA, 25 bp, Homo sapien
ctcaaggggactgcccgctgctcag

SEQ ID NO: 918300 - DNA, 25 bp, Homo sapien
ggagggaagccacatgtgagaccca

SEQ ID NO: 918301 - DNA, 25 bp, Homo sapien
atgtgagacccacacgacgcaccaa

SEQ ID NO: 918302 - DNA, 25 bp, Homo sapien
gacgcaccaacccccactgtgcaga

SEQ ID NO: 918303 - DNA, 25 bp, Homo sapien
agccacatgtgagacccacacgacg

SEQ ID NO: 918304 - DNA, 25 bp, Homo sapien
gagatggggagagccttcctctcat

SEQ ID NO: 918305 - DNA, 25 bp, Homo sapien
ttcctctcattctgcctcaggagga

SEQ ID NO: 918306 - DNA, 25 bp, Homo sapien
ctcattctgcctcaggaggagctcc

SEQ ID NO: 918307 - DNA, 25 bp, Homo sapien
aggagatggggagagccttcctctc

SEQ ID NO: 918308 - DNA, 25 bp, Homo sapien
catcagctctggcaagctcttgggc

SEQ ID NO: 918309 - DNA, 25 bp, Homo sapien
gaggcttttgctggcacattaaatg

SEQ ID NO: 918310 - DNA, 25 bp, Homo sapien
tctgctggctgtaacactgctccct

SEQ ID NO: 918311 - DNA, 25 bp, Homo sapien
ttaaatgtatcactcagactctgaa

SEQ ID NO: 918312 - DNA, 25 bp, Homo sapien
taaggtgccatattgaaactttagt

SEQ ID NO: 918313 - DNA, 25 bp, Homo sapien
tctcttcgttaaggaattaaggtgc

SEQ ID NO: 918314 - DNA, 25 bp, Homo sapien
aggaattaaggtgccatattgaaac

SEQ ID NO: 918315 - DNA, 25 bp, Homo sapien
gaaagctttgattcatggagctgct

SEQ ID NO: 918316 - DNA, 25 bp, Homo sapien
ttccacccatcttccgtagatcctg

SEQ ID NO: 918317 - DNA, 25 bp, Homo sapien
cttccgtagatcctgtttcccttga

SEQ ID NO: 918318 - DNA, 25 bp, Homo sapien
ggtgcccagtgaggggtcatccttg

SEQ ID NO: 918319 - DNA, 25 bp, Homo sapien
cacccatcttccgtagatcctgttt

SEQ ID NO: 918320 - DNA, 25 bp, Homo sapien
agggtgtgcatggcttcaaccgtct

SEQ ID NO: 918321 - DNA, 25 bp, Homo sapien
ggtgtgcatggcttcaaccgtctga

SEQ ID NO: 918322 - DNA, 25 bp, Homo sapien
ccccctgcagggccctagagggtgt

SEQ ID NO: 918323 - DNA, 25 bp, Homo sapien
gtgtgcatggcttcaaccgtctgac

SEQ ID NO: 918324 - DNA, 25 bp, Homo sapien
taatgtaaggggcacagagaaccga

SEQ ID NO: 918325 - DNA, 25 bp, Homo sapien
gcagctggtggttcattcagcccca

SEQ ID NO: 918326 - DNA, 25 bp, Homo sapien
gggcacagagaaccgaggattgggt

SEQ ID NO: 918327 - DNA, 25 bp, Homo sapien
cagcatctcaatgggtgtaatgtaa

SEQ ID NO: 918328 - DNA, 25 bp, Homo sapien
gagttgctggcttggactggacttc

SEQ ID NO: 918329 - DNA, 25 bp, Homo sapien
tctcggaggagatgtcattccctgc

SEQ ID NO: 918330 - DNA, 25 bp, Homo sapien
gaaagggacaaagcaggctgtgact

SEQ ID NO: 918331 - DNA, 25 bp, Homo sapien
gatttcatggccctcacttctcgga

SEQ ID NO: 918332 - DNA, 25 bp, Homo sapien
cccaaggacgtgctctctggtttgg

SEQ ID NO: 918333 - DNA, 25 bp, Homo sapien
tggaatcaatgaccccaccatgcca

SEQ ID NO: 918334 - DNA, 25 bp, Homo sapien
tggtttggctggaatcaatgacccc

SEQ ID NO: 918335 - DNA, 25 bp, Homo sapien
ctgcccaaggacgtgctctctggtt

SEQ ID NO: 918336 - DNA, 25 bp, Homo sapien
ctcgagctacggtcagtgtccacga

SEQ ID NO: 918337 - DNA, 25 bp, Homo sapien
tcgagctacggtcagtgtccacgat

SEQ ID NO: 918338 - DNA, 25 bp, Homo sapien
cgagctacggtcagtgtccacgatg

SEQ ID NO: 918339 - DNA, 25 bp, Homo sapien
gagtggccagagagggcgtctgaga

SEQ ID NO: 918340 - DNA, 25 bp, Homo sapien
tgtgtgagtggccagagagggcgtc

SEQ ID NO: 918341 - DNA, 25 bp, Homo sapien
cagagagggcgtctgagatgcccca

SEQ ID NO: 918342 - DNA, 25 bp, Homo sapien
ggcgtctgagatgccccaggtgtct

SEQ ID NO: 918343 - DNA, 25 bp, Homo sapien
cctctttcctcagggacgcgaatct

SEQ ID NO: 918344 - DNA, 25 bp, Homo sapien
tgcccattgggcagaggtcctcaca

SEQ ID NO: 918345 - DNA, 25 bp, Homo sapien
ggtcctcacacaaaggctggtccag

SEQ ID NO: 918346 - DNA, 25 bp, Homo sapien
gggacgcgaatctgcccattgggca

SEQ ID NO: 918347 - DNA, 25 bp, Homo sapien
tgacaggctaaaggtcttcggcttt

SEQ ID NO: 918348 - DNA, 25 bp, Homo sapien
tgcgttcagaggtagtgacaggcta

SEQ ID NO: 918349 - DNA, 25 bp, Homo sapien
cagaggtagtgacaggctaaaggtc

SEQ ID NO: 918350 - DNA, 25 bp, Homo sapien
ggtagtgacaggctaaaggtcttcg

SEQ ID NO: 918351 - DNA, 25 bp, Homo sapien
gaggccaattgaggcttctctgtct

SEQ ID NO: 918352 - DNA, 25 bp, Homo sapien
tcagaggccaattgaggcttctctg

SEQ ID NO: 918353 - DNA, 25 bp, Homo sapien
agaggccaattgaggcttctctgtc

SEQ ID NO: 918354 - DNA, 25 bp, Homo sapien
gtcagaggccaattgaggcttctct

SEQ ID NO: 918355 - DNA, 25 bp, Homo sapien
agaagggattgtttatgagggtcaa

SEQ ID NO: 918356 - DNA, 25 bp, Homo sapien
taagaagggattgtttatgagggtc

SEQ ID NO: 918357 - DNA, 25 bp, Homo sapien
gattgtttatgagggtcaaggagct

SEQ ID NO: 918358 - DNA, 25 bp, Homo sapien
tcataagaagggattgtttatgagg

SEQ ID NO: 918359 - DNA, 25 bp, Homo sapien
ctaatctgaggggtgtgaatctgga

SEQ ID NO: 918360 - DNA, 25 bp, Homo sapien
gaggggtgtgaatctggagacccag

SEQ ID NO: 918361 - DNA, 25 bp, Homo sapien
tgctgttctaatctgaggggtgtga

SEQ ID NO: 918362 - DNA, 25 bp, Homo sapien
tgttctaatctgaggggtgtgaatc

SEQ ID NO: 918363 - DNA, 25 bp, Homo sapien
gctggaaatctagggaggagccact

SEQ ID NO: 918364 - DNA, 25 bp, Homo sapien
gaagagccggtgctgtgtagtttga

SEQ ID NO: 918365 - DNA, 25 bp, Homo sapien
cagccagtgctaccaccatttaagt

SEQ ID NO: 918366 - DNA, 25 bp, Homo sapien
tgagggtcgtgtagctggagagcgg

SEQ ID NO: 918367 - DNA, 25 bp, Homo sapien
gtactgctgttgaagtttgacggtc

SEQ ID NO: 918368 - DNA, 25 bp, Homo sapien
tgttgaagtttgacggtcgtggaac

SEQ ID NO: 918369 - DNA, 25 bp, Homo sapien
tttgacggtcgtggaaccggagaca

SEQ ID NO: 918370 - DNA, 25 bp, Homo sapien
ctgctgttgaagtttgacggtcgtg

SEQ ID NO: 918371 - DNA, 25 bp, Homo sapien
tgctaccgccacttaagtcagaggt

SEQ ID NO: 918372 - DNA, 25 bp, Homo sapien
gccacttaagtcagaggttcgtgga

SEQ ID NO: 918373 - DNA, 25 bp, Homo sapien
agctggtgctggtgtatagtttgag

SEQ ID NO: 918374 - DNA, 25 bp, Homo sapien
ggaggagccggtgctaccgccactt

SEQ ID NO: 918375 - DNA, 25 bp, Homo sapien
tcctgattaatacccttaggaattg

SEQ ID NO: 918376 - DNA, 25 bp, Homo sapien
tacaggatgaccctggaaacggtga

SEQ ID NO: 918377 - DNA, 25 bp, Homo sapien
tctcataagacagaaagttcctgat

SEQ ID NO: 918378 - DNA, 25 bp, Homo sapien
caagctaagcttgggaacttctcaa

SEQ ID NO: 918379 - DNA, 25 bp, Homo sapien
agtcacttcacacagcccggtgatg

SEQ ID NO: 918380 - DNA, 25 bp, Homo sapien
gagtcacttcacacagcccggtgat

SEQ ID NO: 918381 - DNA, 25 bp, Homo sapien
tcacttcacacagcccggtgatgca

SEQ ID NO: 918382 - DNA, 25 bp, Homo sapien
gtcacttcacacagcccggtgatgc

SEQ ID NO: 918383 - DNA, 25 bp, Homo sapien
cactgtggatgttcctaatgttctt

SEQ ID NO: 918384 - DNA, 25 bp, Homo sapien
tgaaggttcctggatggaacactgt

SEQ ID NO: 918385 - DNA, 25 bp, Homo sapien
tctttcctgatgttcatctgccatc

SEQ ID NO: 918386 - DNA, 25 bp, Homo sapien
gccatcttgctatttaatgcaatgt

SEQ ID NO: 918387 - DNA, 25 bp, Homo sapien
cacatgggttaaagacgtaggcttg

SEQ ID NO: 918388 - DNA, 25 bp, Homo sapien
gaaccctggtactgtggttgtcaca

SEQ ID NO: 918389 - DNA, 25 bp, Homo sapien
caccgaacctgcttatgtatgaggc

SEQ ID NO: 918390 - DNA, 25 bp, Homo sapien
tagaaaagatttgatggcagaaccc

SEQ ID NO: 918391 - DNA, 25 bp, Homo sapien
tcatcccatcatgcaaaccccgtga

SEQ ID NO: 918392 - DNA, 25 bp, Homo sapien
ggatcgagtgtgctggcgggtaacg

SEQ ID NO: 918393 - DNA, 25 bp, Homo sapien
atcccatcatgcaaaccccgtgagc

SEQ ID NO: 918394 - DNA, 25 bp, Homo sapien
gctggcgggtaacgtcagtaaagta

SEQ ID NO: 918395 - DNA, 25 bp, Homo sapien
ggcagcacccttgacagtggctgcc

SEQ ID NO: 918396 - DNA, 25 bp, Homo sapien
gagcccggcagcacccttgacagtg

SEQ ID NO: 918397 - DNA, 25 bp, Homo sapien
tttcgagcccggcagcacccttgac

SEQ ID NO: 918398 - DNA, 25 bp, Homo sapien
ctcatgccccagctttcgagcccgg

SEQ ID NO: 918399 - DNA, 25 bp, Homo sapien
tataaaacaggtattggcaagctgc

SEQ ID NO: 918400 - DNA, 25 bp, Homo sapien
ttggcaagctgcctaaactgcagtg

SEQ ID NO: 918401 - DNA, 25 bp, Homo sapien
taaaacaggtattggcaagctgcct

SEQ ID NO: 918402 - DNA, 25 bp, Homo sapien
gctgcctaaactgcagtgaaggcct

SEQ ID NO: 918403 - DNA, 25 bp, Homo sapien
ggcgattgtcagacactgaagtttg

SEQ ID NO: 918404 - DNA, 25 bp, Homo sapien
tcaatagaggcgattgtcagacact

SEQ ID NO: 918405 - DNA, 25 bp, Homo sapien
tccagctggatgactaatgaatgaa

SEQ ID NO: 918406 - DNA, 25 bp, Homo sapien
tggtggtcactgctacataacatag

SEQ ID NO: 918407 - DNA, 25 bp, Homo sapien
ccattgtcttggagactggggtccc

SEQ ID NO: 918408 - DNA, 25 bp, Homo sapien
gttgatacgcgtgcttacgcagtga

SEQ ID NO: 918409 - DNA, 25 bp, Homo sapien
cagtgaattctggtgatcttagtcc

SEQ ID NO: 918410 - DNA, 25 bp, Homo sapien
acacagctttgttgatacgcgtgct

SEQ ID NO: 918411 - DNA, 25 bp, Homo sapien
cgcgtgcttacgcagtgaattctgg

SEQ ID NO: 918412 - DNA, 25 bp, Homo sapien
aggtgagggaccatggctgctcatg

SEQ ID NO: 918413 - DNA, 25 bp, Homo sapien
tggaggtgagggaccatggctgctc

SEQ ID NO: 918414 - DNA, 25 bp, Homo sapien
ggaggtgagggaccatggctgctca

SEQ ID NO: 918415 - DNA, 25 bp, Homo sapien
ctggaggtgagggaccatggctgct

SEQ ID NO: 918416 - DNA, 25 bp, Homo sapien
tgctgtctgccacggccttgaaggc

SEQ ID NO: 918417 - DNA, 25 bp, Homo sapien
agtgctgtctgccacggccttgaag

SEQ ID NO: 918418 - DNA, 25 bp, Homo sapien
tgccacggccttgaaggcagggccc

SEQ ID NO: 918419 - DNA, 25 bp, Homo sapien
tttgtgtggagatggtgccagtgct

SEQ ID NO: 918420 - DNA, 25 bp, Homo sapien
gagaggccccagtaaatactgaacc

SEQ ID NO: 918421 - DNA, 25 bp, Homo sapien
gaggccccagtaaatactgaaccca

SEQ ID NO: 918422 - DNA, 25 bp, Homo sapien
ggagaggccccagtaaatactgaac

SEQ ID NO: 918423 - DNA, 25 bp, Homo sapien
tatccactgttacaggatgaggagg

SEQ ID NO: 918424 - DNA, 25 bp, Homo sapien
atccactgttacaggatgaggaggg

SEQ ID NO: 918425 - DNA, 25 bp, Homo sapien
ttatccactgttacaggatgaggag

SEQ ID NO: 918426 - DNA, 25 bp, Homo sapien
ggggatgccgggcactccctcatac

SEQ ID NO: 918427 - DNA, 25 bp, Homo sapien
gctgagttgtagactccaggagaag

SEQ ID NO: 918428 - DNA, 25 bp, Homo sapien
cagctgccagggaattccgcacaga

SEQ ID NO: 918429 - DNA, 25 bp, Homo sapien
tgccagggaattccgcacagaagct

SEQ ID NO: 918430 - DNA, 25 bp, Homo sapien
ggctgagttgtagactccaggagaa

SEQ ID NO: 918431 - DNA, 25 bp, Homo sapien
ctgggcagaggaagggcgaatcaag

SEQ ID NO: 918432 - DNA, 25 bp, Homo sapien
tcaagagtggctcactctgccctgt

SEQ ID NO: 918433 - DNA, 25 bp, Homo sapien
actctgccctgtggaaagtgcacag

SEQ ID NO: 918434 - DNA, 25 bp, Homo sapien
tcgataggcagccgcccacagcagg

SEQ ID NO: 918435 - DNA, 25 bp, Homo sapien
ctgcaggcgacactttcaccctgtt

SEQ ID NO: 918436 - DNA, 25 bp, Homo sapien
tgcaggcgacactttcaccctgttc

SEQ ID NO: 918437 - DNA, 25 bp, Homo sapien
tttcacttaatgtattggggatatc

SEQ ID NO: 918438 - DNA, 25 bp, Homo sapien
tcacttaatgtattggggatatctt

SEQ ID NO: 918439 - DNA, 25 bp, Homo sapien
gtattggggatatctttccacatct

SEQ ID NO: 918440 - DNA, 25 bp, Homo sapien
taatgtattggggatatctttccac

SEQ ID NO: 918441 - DNA, 25 bp, Homo sapien
aacccgataacctggccaaactctg

SEQ ID NO: 918442 - DNA, 25 bp, Homo sapien
tgagcacccgtgtcccatcaataaa

SEQ ID NO: 918443 - DNA, 25 bp, Homo sapien
aacgtgcccaaaaatagcttgctgg

SEQ ID NO: 918444 - DNA, 25 bp, Homo sapien
tagcagatggttgctgttccaaagc

SEQ ID NO: 918445 - DNA, 25 bp, Homo sapien
gaatcaggagtccagctgagcaccc

SEQ ID NO: 918446 - DNA, 25 bp, Homo sapien
acatggagggcgaacaccaggcaga

SEQ ID NO: 918447 - DNA, 25 bp, Homo sapien
tggatgccggtctggattccggatc

SEQ ID NO: 918448 - DNA, 25 bp, Homo sapien
ctaagctgccggaagctgggaaccc

SEQ ID NO: 918449 - DNA, 25 bp, Homo sapien
gaaatttcttgggaagacatccctc

SEQ ID NO: 918450 - DNA, 25 bp, Homo sapien
cgcataggtcatccccatgaacttg

SEQ ID NO: 918451 - DNA, 25 bp, Homo sapien
tggtctcgcataggtcatccccatg

SEQ ID NO: 918452 - DNA, 25 bp, Homo sapien
cccatgaacttgtgggagctccatg

SEQ ID NO: 918453 - DNA, 25 bp, Homo sapien
cttgtgggagctccatggcttctac

SEQ ID NO: 918454 - DNA, 25 bp, Homo sapien
ggagccacgaccctcagatctttgg

SEQ ID NO: 918455 - DNA, 25 bp, Homo sapien
ggaggagccacgaccctcagatctt

SEQ ID NO: 918456 - DNA, 25 bp, Homo sapien
gagccacgaccctcagatctttggg

SEQ ID NO: 918457 - DNA, 25 bp, Homo sapien
gaccctcagatctttggggtccagg

SEQ ID NO: 918458 - DNA, 25 bp, Homo sapien
gtgtggagggcaggccatgatcact

SEQ ID NO: 918459 - DNA, 25 bp, Homo sapien
tgatcactgagtctctggccactcc

SEQ ID NO: 918460 - DNA, 25 bp, Homo sapien
catgatcactgagtctctggccact

SEQ ID NO: 918461 - DNA, 25 bp, Homo sapien
gccatgatcactgagtctctggcca

SEQ ID NO: 918462 - DNA, 25 bp, Homo sapien
cacacagtgcgggtcacacagaacc

SEQ ID NO: 918463 - DNA, 25 bp, Homo sapien
acacagtgcgggtcacacagaacca

SEQ ID NO: 918464 - DNA, 25 bp, Homo sapien
acagtgcgggtcacacagaaccaca

SEQ ID NO: 918465 - DNA, 25 bp, Homo sapien
cagtgcgggtcacacagaaccacac

SEQ ID NO: 918466 - DNA, 25 bp, Homo sapien
caggcagcaagctggtggccgtcag

SEQ ID NO: 918467 - DNA, 25 bp, Homo sapien
tcatacgaaactcgtctgaagccag

SEQ ID NO: 918468 - DNA, 25 bp, Homo sapien
gaaactcgtctgaagccagacgagg

SEQ ID NO: 918469 - DNA, 25 bp, Homo sapien
gaagccagacgaggcctgcaggcag

SEQ ID NO: 918470 - DNA, 25 bp, Homo sapien
tgtagcttctctccaccaaccactg

SEQ ID NO: 918471 - DNA, 25 bp, Homo sapien
tggttctgctctgcaccaagaactt

SEQ ID NO: 918472 - DNA, 25 bp, Homo sapien
ctctccaccaaccactgggggatgg

SEQ ID NO: 918473 - DNA, 25 bp, Homo sapien
ttctgctctgcaccaagaacttcac

SEQ ID NO: 918474 - DNA, 25 bp, Homo sapien
caaacccacccgattgttttgcgtg

SEQ ID NO: 918475 - DNA, 25 bp, Homo sapien
taatgtattcggaaaacgctttcca

SEQ ID NO: 918476 - DNA, 25 bp, Homo sapien
taattcattgccaggaaaaatccct

SEQ ID NO: 918477 - DNA, 25 bp, Homo sapien
aattaacagtgtgcgctgacagcgg

SEQ ID NO: 918478 - DNA, 25 bp, Homo sapien
tccacactcgctgaagatgctgcag

SEQ ID NO: 918479 - DNA, 25 bp, Homo sapien
acagtgtccacactcgctgaagatg

SEQ ID NO: 918480 - DNA, 25 bp, Homo sapien
tgtccacactcgctgaagatgctgc

SEQ ID NO: 918481 - DNA, 25 bp, Homo sapien
agtgtccacactcgctgaagatgct

SEQ ID NO: 918482 - DNA, 25 bp, Homo sapien
aagagatgaagctgtcattctgggg

SEQ ID NO: 918483 - DNA, 25 bp, Homo sapien
gaggaagagatgaagctgtcattct

SEQ ID NO: 918484 - DNA, 25 bp, Homo sapien
ggaggaagagatgaagctgtcattc

SEQ ID NO: 918485 - DNA, 25 bp, Homo sapien
ggaagagatgaagctgtcattctgg

SEQ ID NO: 918486 - DNA, 25 bp, Homo sapien
tgggaacagaagttggggtgaccag

SEQ ID NO: 918487 - DNA, 25 bp, Homo sapien
tggcttgggtatttgcagctgacac

SEQ ID NO: 918488 - DNA, 25 bp, Homo sapien
gctggcttgggtatttgcagctgac

SEQ ID NO: 918489 - DNA, 25 bp, Homo sapien
gcttgggtatttgcagctgacacct

SEQ ID NO: 918490 - DNA, 25 bp, Homo sapien
tagggtgatattctcaacatccatc

SEQ ID NO: 918491 - DNA, 25 bp, Homo sapien
gggtgatattctcaacatccatcag

SEQ ID NO: 918492 - DNA, 25 bp, Homo sapien
ggtgatattctcaacatccatcagc

SEQ ID NO: 918493 - DNA, 25 bp, Homo sapien
tttagggtgatattctcaacatcca

SEQ ID NO: 918494 - DNA, 25 bp, Homo sapien
ttggcctgacataaagggagtgtcc

SEQ ID NO: 918495 - DNA, 25 bp, Homo sapien
ggctttggcctgacataaagggagt

SEQ ID NO: 918496 - DNA, 25 bp, Homo sapien
ccatccggtgatgacaggtggcatt

SEQ ID NO: 918497 - DNA, 25 bp, Homo sapien
gatgacaggtggcattcctctcctt

SEQ ID NO: 918498 - DNA, 25 bp, Homo sapien
ccttgtggcgcctcttgttctgact

SEQ ID NO: 918499 - DNA, 25 bp, Homo sapien
ggcccttgtggcgcctcttgttctg

SEQ ID NO: 918500 - DNA, 25 bp, Homo sapien
tgcaggcccttgtggcgcctcttgt

SEQ ID NO: 918501 - DNA, 25 bp, Homo sapien
tgactgtggattctgctctgtttct

SEQ ID NO: 918502 - DNA, 25 bp, Homo sapien
ccaggcaccgggactgagccgaggg

SEQ ID NO: 918503 - DNA, 25 bp, Homo sapien
tgccccccaggcaccgggactgagc

SEQ ID NO: 918504 - DNA, 25 bp, Homo sapien
caggcaccgggactgagccgagggt

SEQ ID NO: 918505 - DNA, 25 bp, Homo sapien
ttcagctttagccactggttcaagg

SEQ ID NO: 918506 - DNA, 25 bp, Homo sapien
tttagccactggttcaaggacggac

SEQ ID NO: 918507 - DNA, 25 bp, Homo sapien
tagccactggttcaaggacggacat

SEQ ID NO: 918508 - DNA, 25 bp, Homo sapien
gctttagccactggttcaaggacgg

SEQ ID NO: 918509 - DNA, 25 bp, Homo sapien
tcacaggaagggtcatggtgtcccc

SEQ ID NO: 918510 - DNA, 25 bp, Homo sapien
atggtgtcccctgagaaatgagaag

SEQ ID NO: 918511 - DNA, 25 bp, Homo sapien
gagttcacaggaagggtcatggtgt

SEQ ID NO: 918512 - DNA, 25 bp, Homo sapien
tggagagttcacaggaagggtcatg

SEQ ID NO: 918513 - DNA, 25 bp, Homo sapien
gatccccgcagcctagagctggagg

SEQ ID NO: 918514 - DNA, 25 bp, Homo sapien
tagcatgagcatgcacactcggttg

SEQ ID NO: 918515 - DNA, 25 bp, Homo sapien
gactgaatgttggttagcatgagca

SEQ ID NO: 918516 - DNA, 25 bp, Homo sapien
ctcaatggcagaggggatccccgca

SEQ ID NO: 918517 - DNA, 25 bp, Homo sapien
gtctcagacacgtcatgcgacccat

SEQ ID NO: 918518 - DNA, 25 bp, Homo sapien
cctcagcaaagatagtgaggatggt

SEQ ID NO: 918519 - DNA, 25 bp, Homo sapien
acactgctcttagccccacagatgg

SEQ ID NO: 918520 - DNA, 25 bp, Homo sapien
cggaaagtatgacccagtggacagg

SEQ ID NO: 918521 - DNA, 25 bp, Homo sapien
ggccaaggtgatgtgccttctctgt

SEQ ID NO: 918522 - DNA, 25 bp, Homo sapien
ccaatggccaaggtgatgtgccttc

SEQ ID NO: 918523 - DNA, 25 bp, Homo sapien
cccaatggccaaggtgatgtgcctt

SEQ ID NO: 918524 - DNA, 25 bp, Homo sapien
gttccttactgaactggtgaacctg

SEQ ID NO: 918525 - DNA, 25 bp, Homo sapien
ctgtgtggatgggagtgagcctggg

SEQ ID NO: 918526 - DNA, 25 bp, Homo sapien
ctggggcaggcaggttggggaccgg

SEQ ID NO: 918527 - DNA, 25 bp, Homo sapien
ggcaggcaggttggggaccgggatc

SEQ ID NO: 918528 - DNA, 25 bp, Homo sapien
agcctggggcaggcaggttggggac

SEQ ID NO: 918529 - DNA, 25 bp, Homo sapien
agctgccagtccctgttccctgagt

SEQ ID NO: 918530 - DNA, 25 bp, Homo sapien
ctctgaatggtggaggctccagagc

SEQ ID NO: 918531 - DNA, 25 bp, Homo sapien
tccctgttccctgagtggtgaagct

SEQ ID NO: 918532 - DNA, 25 bp, Homo sapien
ctgttccctgagtggtgaagctgca

SEQ ID NO: 918533 - DNA, 25 bp, Homo sapien
ggcagctcctaagtggccgagcatt

SEQ ID NO: 918534 - DNA, 25 bp, Homo sapien
tgggcctccgtttgtctgtctgttg

SEQ ID NO: 918535 - DNA, 25 bp, Homo sapien
tctttgtatactgggcctccgtttg

SEQ ID NO: 918536 - DNA, 25 bp, Homo sapien
gaaggagagggaaattatgcccctc

SEQ ID NO: 918537 - DNA, 25 bp, Homo sapien
gaaatgcagctgcttccgtgacaag

SEQ ID NO: 918538 - DNA, 25 bp, Homo sapien
ttggtttcaagtccgtggagccgca

SEQ ID NO: 918539 - DNA, 25 bp, Homo sapien
agccctagagatcagccccagttta

SEQ ID NO: 918540 - DNA, 25 bp, Homo sapien
aattatcatcttcggactcaggagg

SEQ ID NO: 918541 - DNA, 25 bp, Homo sapien
agacctgtggagtgattgagtccaa

SEQ ID NO: 918542 - DNA, 25 bp, Homo sapien
taaatgaggtaccaagtaaatcacc

SEQ ID NO: 918543 - DNA, 25 bp, Homo sapien
aaaagcaggcagtagaagtgatcct

SEQ ID NO: 918544 - DNA, 25 bp, Homo sapien
tgtgatttagaagactagcagggca

SEQ ID NO: 918545 - DNA, 25 bp, Homo sapien
tcttgtgcgtccctcctgcacggag

SEQ ID NO: 918546 - DNA, 25 bp, Homo sapien
gcacggagctgaggctgtgcctcct

SEQ ID NO: 918547 - DNA, 25 bp, Homo sapien
ctgctcttgtgcgtccctcctgcac

SEQ ID NO: 918548 - DNA, 25 bp, Homo sapien
gaggctgtgcctcctctagtttcat

SEQ ID NO: 918549 - DNA, 25 bp, Homo sapien
taattacacgataagacaagccgcc

SEQ ID NO: 918550 - DNA, 25 bp, Homo sapien
tgagcccagatcgagtcagtcactg

SEQ ID NO: 918551 - DNA, 25 bp, Homo sapien
ctttgtcagagtggcaggagcgtcc

SEQ ID NO: 918552 - DNA, 25 bp, Homo sapien
gaacaggaggatttgcgacagccta

SEQ ID NO: 918553 - DNA, 25 bp, Homo sapien
ggctactgatttcggacacctcctt

SEQ ID NO: 918554 - DNA, 25 bp, Homo sapien
tgatttcggacacctccttgccatg

SEQ ID NO: 918555 - DNA, 25 bp, Homo sapien
tagcaggcgatatgcgagaaggcgg

SEQ ID NO: 918556 - DNA, 25 bp, Homo sapien
ctagcaggcgatatgcgagaaggcg

SEQ ID NO: 918557 - DNA, 25 bp, Homo sapien
acttctggtttcgtgtagcttccta

SEQ ID NO: 918558 - DNA, 25 bp, Homo sapien
aattgatgtcccttaattccaggtg

SEQ ID NO: 918559 - DNA, 25 bp, Homo sapien
ggaaacttctgggagcacttctggt

SEQ ID NO: 918560 - DNA, 25 bp, Homo sapien
aaagttcctttgattctggaatggc

SEQ ID NO: 918561 - DNA, 25 bp, Homo sapien
aatatacaatacttctgtctcatca

SEQ ID NO: 918562 - DNA, 25 bp, Homo sapien
tatccttttttcagaacttattagc

SEQ ID NO: 918563 - DNA, 25 bp, Homo sapien
aaagggctcacagtggcataggccc

SEQ ID NO: 918564 - DNA, 25 bp, Homo sapien
gaacttattagcaccaaagggctca

SEQ ID NO: 918565 - DNA, 25 bp, Homo sapien
tatatcagaatcaagtaggatgaca

SEQ ID NO: 918566 - DNA, 25 bp, Homo sapien
tatcagaatcaagtaggatgacaga

SEQ ID NO: 918567 - DNA, 25 bp, Homo sapien
agaatcaagtaggatgacagaatca

SEQ ID NO: 918568 - DNA, 25 bp, Homo sapien
atcagaatcaagtaggatgacagaa

SEQ ID NO: 918569 - DNA, 25 bp, Homo sapien
cctgctcaggtagaaaagcgtctta

SEQ ID NO: 918570 - DNA, 25 bp, Homo sapien
cagaaggagcatcgtggtaccagag

SEQ ID NO: 918571 - DNA, 25 bp, Homo sapien
gactccagtaacagcttgggcaaag

SEQ ID NO: 918572 - DNA, 25 bp, Homo sapien
gaagatgttggccaagactccagta

SEQ ID NO: 918573 - DNA, 25 bp, Homo sapien
agccgcggatggtcccggagaggaa

SEQ ID NO: 918574 - DNA, 25 bp, Homo sapien
tcccagagcgcggtcctggaacaga

SEQ ID NO: 918575 - DNA, 25 bp, Homo sapien
cgtggaaccggagcggtcccagagc

SEQ ID NO: 918576 - DNA, 25 bp, Homo sapien
gagcgcgcttctctggcttgtccca

SEQ ID NO: 918577 - DNA, 25 bp, Homo sapien
tctggtcgcccggtttccagcggtg

SEQ ID NO: 918578 - DNA, 25 bp, Homo sapien
ttgagtccgcatagtccgcagctac

SEQ ID NO: 918579 - DNA, 25 bp, Homo sapien
gcagctactactgccgctgtcagtg

SEQ ID NO: 918580 - DNA, 25 bp, Homo sapien
tgactcggttttggcttccggtgct

SEQ ID NO: 918581 - DNA, 25 bp, Homo sapien
taaagtgtgaacagttgttaaaggc

SEQ ID NO: 918582 - DNA, 25 bp, Homo sapien
caaagtagatggacatcatagcagg

SEQ ID NO: 918583 - DNA, 25 bp, Homo sapien
tccacggaatgtgagatgagatgcc

SEQ ID NO: 918584 - DNA, 25 bp, Homo sapien
ttctaggtagggagccatccgctta

SEQ ID NO: 918585 - DNA, 25 bp, Homo sapien
gatggacatcatagcaggtcatgtc

SEQ ID NO: 918586 - DNA, 25 bp, Homo sapien
tcagacccctactaagaagagagga

SEQ ID NO: 918587 - DNA, 25 bp, Homo sapien
acccctactaagaagagaggaggct

SEQ ID NO: 918588 - DNA, 25 bp, Homo sapien
gacccctactaagaagagaggaggc

SEQ ID NO: 918589 - DNA, 25 bp, Homo sapien
gagctcccagccagcccttgacaga

SEQ ID NO: 918590 - DNA, 25 bp, Homo sapien
actggagttatgatgagcagcctgc

SEQ ID NO: 918591 - DNA, 25 bp, Homo sapien
tgaagacgctaaggtcccctctcca

SEQ ID NO: 918592 - DNA, 25 bp, Homo sapien
ttctgcaggtgccatagacgggcct

SEQ ID NO: 918593 - DNA, 25 bp, Homo sapien
gcctgcaccgttgtgctctgcctgg

SEQ ID NO: 918594 - DNA, 25 bp, Homo sapien
aaggagccggcacggagacatctgt

SEQ ID NO: 918595 - DNA, 25 bp, Homo sapien
ccaactgcgaggacgctgcaaggag

SEQ ID NO: 918596 - DNA, 25 bp, Homo sapien
cacctgcagcggcagaagtgacacc

SEQ ID NO: 918597 - DNA, 25 bp, Homo sapien
gacaaggtgacaccctctagcgtca

SEQ ID NO: 918598 - DNA, 25 bp, Homo sapien
tttcccaaggtatgcagaatgcaaa

SEQ ID NO: 918599 - DNA, 25 bp, Homo sapien
ctttcccaaggtatgcagaatgcaa

SEQ ID NO: 918600 - DNA, 25 bp, Homo sapien
cccaaggtatgcagaatgcaaagag

SEQ ID NO: 918601 - DNA, 25 bp, Homo sapien
aaggtatgcagaatgcaaagaggag

SEQ ID NO: 918602 - DNA, 25 bp, Homo sapien
cagccaattcctagggggaccgagg

SEQ ID NO: 918603 - DNA, 25 bp, Homo sapien
acagccaattcctagggggaccgag

SEQ ID NO: 918604 - DNA, 25 bp, Homo sapien
cctagggggaccgaggcatcctcat

SEQ ID NO: 918605 - DNA, 25 bp, Homo sapien
caattcctagggggaccgaggcatc

SEQ ID NO: 918606 - DNA, 25 bp, Homo sapien
ccaggccatgtgctcttagtgccga

SEQ ID NO: 918607 - DNA, 25 bp, Homo sapien
agctcagctccttttgggtctcctg

SEQ ID NO: 918608 - DNA, 25 bp, Homo sapien
tgtgctcttagtgccgactcacgcc

SEQ ID NO: 918609 - DNA, 25 bp, Homo sapien
gctcagctccttttgggtctcctga

SEQ ID NO: 918610 - DNA, 25 bp, Homo sapien
ctggtgactctgatggcttcctcac

SEQ ID NO: 918611 - DNA, 25 bp, Homo sapien
cctcctctgttagatgggagtccca

SEQ ID NO: 918612 - DNA, 25 bp, Homo sapien
caggcttcccgcagacacaagccaa

SEQ ID NO: 918613 - DNA, 25 bp, Homo sapien
ttggacctctttactccagtgacca

SEQ ID NO: 918614 - DNA, 25 bp, Homo sapien
gccacaccttgtgggcccacttgga

SEQ ID NO: 918615 - DNA, 25 bp, Homo sapien
agcctcggacactacagctgctgaa

SEQ ID NO: 918616 - DNA, 25 bp, Homo sapien
gcctcggacactacagctgctgaat

SEQ ID NO: 918617 - DNA, 25 bp, Homo sapien
cctcggacactacagctgctgaatg

SEQ ID NO: 918618 - DNA, 25 bp, Homo sapien
ctcggacactacagctgctgaatga

SEQ ID NO: 918619 - DNA, 25 bp, Homo sapien
ggcctttctcttaagaggctccctc

SEQ ID NO: 918620 - DNA, 25 bp, Homo sapien
tggggcctttctcttaagaggctcc

SEQ ID NO: 918621 - DNA, 25 bp, Homo sapien
cttggggcctttctcttaagaggct

SEQ ID NO: 918622 - DNA, 25 bp, Homo sapien
ctcttggggcctttctcttaagagg

SEQ ID NO: 918623 - DNA, 25 bp, Homo sapien
cttaggtacaacaaaggacaacttg

SEQ ID NO: 918624 - DNA, 25 bp, Homo sapien
cctgctatgtgaacacttgcaagtg

SEQ ID NO: 918625 - DNA, 25 bp, Homo sapien
gacaacttgatttattcctccctct

SEQ ID NO: 918626 - DNA, 25 bp, Homo sapien
tcttcctgctcaacctactttggag

SEQ ID NO: 918627 - DNA, 25 bp, Homo sapien
ggttacttggtacactggtcgacaa

SEQ ID NO: 918628 - DNA, 25 bp, Homo sapien
tacactggtcgacaaaaccttgaaa

SEQ ID NO: 918629 - DNA, 25 bp, Homo sapien
tggtacactggtcgacaaaaccttg

SEQ ID NO: 918630 - DNA, 25 bp, Homo sapien
tagaggttacttggtacactggtcg

SEQ ID NO: 918631 - DNA, 25 bp, Homo sapien
cagcctgaacagatgttgagtacga

SEQ ID NO: 918632 - DNA, 25 bp, Homo sapien
tacgagctgatccacctatgttcaa

SEQ ID NO: 918633 - DNA, 25 bp, Homo sapien
tgagtacgagctgatccacctatgt

SEQ ID NO: 918634 - DNA, 25 bp, Homo sapien
cagatgttgagtacgagctgatcca

SEQ ID NO: 918635 - DNA, 25 bp, Homo sapien
ataagtcagaggagtgtcattttct

SEQ ID NO: 918636 - DNA, 25 bp, Homo sapien
atatcatagttccataagtcagagg

SEQ ID NO: 918637 - DNA, 25 bp, Homo sapien
ccataagtcagaggagtgtcatttt

SEQ ID NO: 918638 - DNA, 25 bp, Homo sapien
ctatatcatagttccataagtcaga

SEQ ID NO: 918639 - DNA, 25 bp, Homo sapien
agggatagcaaatgctcctccaggt
